United States Patent Application Publication US 2013/0267429 A1 - sequence listing, part 20

SEQ ID NO: 455066 - DNA, 59 bp, Artificial
  Synthetic oligonucleotide
tatgtctgatcgacaagcgtatgcaacgtcacaacgaagcaacgctagggtcttatact

SEQ ID NO: 455067 - DNA, 57 bp, Artificial
  Synthetic oligonucleotide
tatgtctttattaagtacgagggttgtttgattacatggacaggtttatacggcgca

SEQ ID NO: 455068 - DNA, 58 bp, Artificial
  Synthetic oligonucleotide
tatgtgaacagaacgcttaagattctagattcgaccttaaagtcgtacgctaggagta

SEQ ID NO: 455069 - DNA, 55 bp, Artificial
  Synthetic oligonucleotide
tatgtgaacttttcactgatggctgtgactgctcaagctggagctctattcggac

SEQ ID NO: 455070 - DNA, 60 bp, Artificial
  Synthetic oligonucleotide
tatgtgaagctagaaggaagggtcaccgatcttgggtgtggacgtggaggctggtgctac

SEQ ID NO: 455071 - DNA, 53 bp, Artificial
  Synthetic oligonucleotide
tatgtgacgaatgccactcaaccgaccctactaccatcttggggatcggtaca

SEQ ID NO: 455072 - DNA, 60 bp, Artificial
  Synthetic oligonucleotide
tatgtgacgagggacacgcagtaggaatgctggtgtcagtgcttcattcagggggtaggg

SEQ ID NO: 455073 - DNA, 60 bp, Artificial
  Synthetic oligonucleotide
tatgtgactatcgctgataaaggagagcttaacgtactagtgcccggcgaagtgatatca

SEQ ID NO: 455074 - DNA, 55 bp, Artificial
  Synthetic oligonucleotide
tatgtgagcatggagttctcccttactgacccgagactggagccacgtaagtggg

SEQ ID NO: 455075 - DNA, 58 bp, Artificial
  Synthetic oligonucleotide
tatgtgaggaaatagttcttggcatttaaacgaaatcgtttaggcagtggcatatttg

SEQ ID NO: 455076 - DNA, 54 bp, Artificial
  Synthetic oligonucleotide
tatgtgaggagtgtagtccgggaaatcgtgtgttgcgccaagggctcgtgcata

SEQ ID NO: 455077 - DNA, 55 bp, Artificial
  Synthetic oligonucleotide
tatgtgattacacgtaccaactcgctaggcgggttaaatgctacaagatcgcacg

SEQ ID NO: 455078 - DNA, 60 bp, Artificial
  Synthetic oligonucleotide
tatgtgcaacaattattcgggaaggttccatctggcgaattcccactgcatcagatgatg

SEQ ID NO: 455079 - DNA, 58 bp, Artificial
  Synthetic oligonucleotide
tatgtgcagggctgcccagtgatactccaagaggggaagatgcccaatttactggtta

SEQ ID NO: 455080 - DNA, 55 bp, Artificial
  Synthetic oligonucleotide
tatgtgcagggtattggtgatagtcagagatctactaatgtgacgttgaccaaac

SEQ ID NO: 455081 - DNA, 60 bp, Artificial
  Synthetic oligonucleotide
tatgtgcagtaccagtgacgaagtatccgctactcagattgttagaccactacaacacgc

SEQ ID NO: 455082 - DNA, 60 bp, Artificial
  Synthetic oligonucleotide
tatgtgcagtaccagtgacgacacggtatccgctactcagattgttagacagctacaaca

SEQ ID NO: 455083 - DNA, 60 bp, Artificial
  Synthetic oligonucleotide
tatgtgcataagaagaatgatggcactactgttgatttgacagtggatcaagcttggaga

SEQ ID NO: 455084 - DNA, 59 bp, Artificial
  Synthetic oligonucleotide
tatgtgcccgtgcacacacccctgtatgccttctgtgttattatgtggggtcatagttc

SEQ ID NO: 455085 - DNA, 55 bp, Artificial
  Synthetic oligonucleotide
tatgtgcctacgctagtggaaaattcggcataatcaagtccacaattgacgccga

SEQ ID NO: 455086 - DNA, 60 bp, Artificial
  Synthetic oligonucleotide
tatgtgcgaaataatacctaaacactcacttgacatatccatggcaacacataaatccaa

SEQ ID NO: 455087 - DNA, 60 bp, Artificial
  Synthetic oligonucleotide
tatgtgcgcgccgcgagaaatgttgaagcgaatatttcattacgccaaatgggctagagt

SEQ ID NO: 455088 - DNA, 60 bp, Artificial
  Synthetic oligonucleotide
tatgtgcgggagggcatgtgccgacatcgatgcacgtaggtgacgacatactgatgtctt

SEQ ID NO: 455089 - DNA, 60 bp, Artificial
  Synthetic oligonucleotide
tatgtgctaactcaagatatccatgataagctgcttgagaattataatctaacggttgaa

SEQ ID NO: 455090 - DNA, 60 bp, Artificial
  Synthetic oligonucleotide
tatgtgctaatttgtatcataggcattctcataaaagaataggacgacttttcttcgtct

SEQ ID NO: 455091 - DNA, 60 bp, Artificial
  Synthetic oligonucleotide
tatgtgctagctttaaggttgacccaggtagagatggtccatggcaatccacgctggtcg

SEQ ID NO: 455092 - DNA, 52 bp, Artificial
  Synthetic oligonucleotide
tatgtgctccaagcttcgctcttgcgagtcccttactttgtgagggcacacg

SEQ ID NO: 455093 - DNA, 52 bp, Artificial
  Synthetic oligonucleotide
tatgtgctccacaacaatcgttataggacgtcatatgtcacctacccagcca

SEQ ID NO: 455094 - DNA, 60 bp, Artificial
  Synthetic oligonucleotide
tatgtgcttggtaagatctggatggatgagaatatcaagacgaagaatcacacaaatact

SEQ ID NO: 455095 - DNA, 57 bp, Artificial
  Synthetic oligonucleotide
tatgtggacaaaatacgtaggaaaagtgtccaatgaaggagcctattactctgccgg

SEQ ID NO: 455096 - DNA, 55 bp, Artificial
  Synthetic oligonucleotide
tatgtggacccaacgacctggcccacattgtcttccccgtcctactatcaccctc

SEQ ID NO: 455097 - DNA, 53 bp, Artificial
  Synthetic oligonucleotide
tatgtggacgagtggtccatctgccacccgcgcatatctgaggagaccgttta

SEQ ID NO: 455098 - DNA, 60 bp, Artificial
  Synthetic oligonucleotide
tatgtggatgaggtcctgccaggcgatacgtttcagatgaacgcaaccggatttggcaga

SEQ ID NO: 455099 - DNA, 60 bp, Artificial
  Synthetic oligonucleotide
tatgtggatgcaggaaactacacttatgctcagttgccacctacaacatggggatctggg

SEQ ID NO: 455100 - DNA, 54 bp, Artificial
  Synthetic oligonucleotide
tatgtggcagagagtaggacaagcaatatttgcccctcccatccaaggagtaat

SEQ ID NO: 455101 - DNA, 52 bp, Artificial
  Synthetic oligonucleotide
tatgtggcaggaagtgggacgagcaatgtatgccgctcccattgaagggaac

SEQ ID NO: 455102 - DNA, 60 bp, Artificial
  Synthetic oligonucleotide
tatgtggccgggatgccggaactgggtgcattttttgctattctccaggatatgaggaac

SEQ ID NO: 455103 - DNA, 60 bp, Artificial
  Synthetic oligonucleotide
tatgtggcctaagccacagttcaagagactgaccgcgacaacctcaactgaccccactct

SEQ ID NO: 455104 - DNA, 60 bp, Artificial
  Synthetic oligonucleotide
tatgtgggaaatctggatctaggcagaaatactcaaatgattattggctgcaacttcata

SEQ ID NO: 455105 - DNA, 58 bp, Artificial
  Synthetic oligonucleotide
tatgtgggataatcctatggtgtcacaaatgcaagaagatatcattagcctatgggag

SEQ ID NO: 455106 - DNA, 55 bp, Artificial
  Synthetic oligonucleotide
tatgtgggcgctttcggatcagggaccgatttatcacctggaagtaccagtggac

SEQ ID NO: 455107 - DNA, 59 bp, Artificial
  Synthetic oligonucleotide
tatgtgggggatacatcaccctgtttctgaagacgaggcgaggaaactatatattaaca

SEQ ID NO: 455108 - DNA, 58 bp, Artificial
  Synthetic oligonucleotide
tatgtggtcccttcggttaatggcaacgagctacaactaagagtggtagccgctggga

SEQ ID NO: 455109 - DNA, 58 bp, Artificial
  Synthetic oligonucleotide
tatgtggtgggttctcggagggattagtttggtatcttccaatcacgcatcctacaaa

SEQ ID NO: 455110 - DNA, 53 bp, Artificial
  Synthetic oligonucleotide
tatgtgtaaaagcaagacttgctccctcattttctcaataggaggagctatct

SEQ ID NO: 455111 - DNA, 56 bp, Artificial
  Synthetic oligonucleotide
tatgtgtcaagctacaatgaagtggaccaactgtcaaaattgttgactgacaaaaa

SEQ ID NO: 455112 - DNA, 55 bp, Artificial
  Synthetic oligonucleotide
tatgtgtcatgcagccccgataaatgttatcaattcgcacttgggcagggaacca

SEQ ID NO: 455113 - DNA, 55 bp, Artificial
  Synthetic oligonucleotide
tatgtgtcatgcgatcctggtaaatgttatcaatttgcacttggacaggggacca

SEQ ID NO: 455114 - DNA, 55 bp, Artificial
  Synthetic oligonucleotide
tatgtgtcatgcggcctcggtaaatgttatcagtttgcacttgggcaggggacca

SEQ ID NO: 455115 - DNA, 56 bp, Artificial
  Synthetic oligonucleotide
tatgtgtctacggtgcctctacctggtattaagcctccgcctaatttcctggtatg

SEQ ID NO: 455116 - DNA, 55 bp, Artificial
  Synthetic oligonucleotide
tatgtgtctatccagtaatcctgcagttctaaacttgttgcacacacccaggtcg

SEQ ID NO: 455117 - DNA, 50 bp, Artificial
  Synthetic oligonucleotide
tatgtgtgacacttataaacccaatggtgaacctcttcccactaatcaca

SEQ ID NO: 455118 - DNA, 59 bp, Artificial
  Synthetic oligonucleotide
tatgtgtgacgaattccttaaggtgccagagtggtcttacatagtagaaaaggacaatc

SEQ ID NO: 455119 - DNA, 60 bp, Artificial
  Synthetic oligonucleotide
tatgtgtgacgcattcatccatgtgccggaatggtctcacatagtggagaaggccagtcc

SEQ ID NO: 455120 - DNA, 60 bp, Artificial
  Synthetic oligonucleotide
tatgtgtgagggcagttatggcacggcataacgctcacacatgcacgtgtcgttgtcatg

SEQ ID NO: 455121 - DNA, 60 bp, Artificial
  Synthetic oligonucleotide
tatgtgtgcaacagtttggaactggtgcactcgtcttaatcttaagcactttcggctcgc

SEQ ID NO: 455122 - DNA, 60 bp, Artificial
  Synthetic oligonucleotide
tatgtgtgcaacgtgagatgtgtcgttaacatctagtgctttaaagttcacttaaatcga

SEQ ID NO: 455123 - DNA, 58 bp, Artificial
  Synthetic oligonucleotide
tatgtgtgcaagaaaggttatactgacagaggttggggtaatggttgtggactgttcg

SEQ ID NO: 455124 - DNA, 55 bp, Artificial
  Synthetic oligonucleotide
tatgtgtgcgagcagtgcgggaaggagactcctcaagctaacgttgagattgacc

SEQ ID NO: 455125 - DNA, 52 bp, Artificial
  Synthetic oligonucleotide
tatgtgtgctgaattctctggtgctagagctaggaatgttactcaaggtctg

SEQ ID NO: 455126 - DNA, 60 bp, Artificial
  Synthetic oligonucleotide
tatgtgtggcgaacaaagtgttcccatagaacaagctacagctaagtttcaagcaccagt

SEQ ID NO: 455127 - DNA, 55 bp, Artificial
  Synthetic oligonucleotide
tatgtgttaatgtactacgtatgcttcatacttactcgttgggtaatgcttatat

SEQ ID NO: 455128 - DNA, 60 bp, Artificial
  Synthetic oligonucleotide
tatgtgttagagtcaatgcagacaagtctagtatttatctggctagacaggacaataatg

SEQ ID NO: 455129 - DNA, 55 bp, Artificial
  Synthetic oligonucleotide
tatgtgttcttaacttagcacttgtctaactgctctcatcctgtgctcgtgcagt

SEQ ID NO: 455130 - DNA, 58 bp, Artificial
  Synthetic oligonucleotide
tatgtgttgttcactacgagactcaccgttgcggtaggtccgtgttcttcgaggtatc

SEQ ID NO: 455131 - DNA, 60 bp, Artificial
  Synthetic oligonucleotide
tatgttaaagcatagaatggttgaagaatcctacagaaataggagatcagtaatctgtta

SEQ ID NO: 455132 - DNA, 60 bp, Artificial
  Synthetic oligonucleotide
tatgttaaatcagcttatggaggtgcactcctgccctttgctatatacagcttttcttct

SEQ ID NO: 455133 - DNA, 55 bp, Artificial
  Synthetic oligonucleotide
tatgttaacatacgcattatttaatgcggcgcagtgtattaccacatttacccca

SEQ ID NO: 455134 - DNA, 60 bp, Artificial
  Synthetic oligonucleotide
tatgttaatgcagtgcccatggactcaatgcttagacacaacaattggagcctagtcatt

SEQ ID NO: 455135 - DNA, 52 bp, Artificial
  Synthetic oligonucleotide
tatgttaattgctcaggttgtaaagaaggggtggtacatagactttaaggtg

SEQ ID NO: 455136 - DNA, 60 bp, Artificial
  Synthetic oligonucleotide
tatgttacaatgtttgaattgacacgcgactgggcacttgtcaaacttggatgtggttac

SEQ ID NO: 455137 - DNA, 57 bp, Artificial
  Synthetic oligonucleotide
tatgttacaccaggctcgggtcagtttatgacaactgatgacatgcagtccccttgt

SEQ ID NO: 455138 - DNA, 60 bp, Artificial
  Synthetic oligonucleotide
tatgttacattgatgtctggcgcttatgtcacggatttgttctggtggtttaagatgatt

SEQ ID NO: 455139 - DNA, 54 bp, Artificial
  Synthetic oligonucleotide
tatgttaccaactgacttcgttccgtatgacacagctataaaagtcgacatagc

SEQ ID NO: 455140 - DNA, 60 bp, Artificial
  Synthetic oligonucleotide
tatgttacccaggagatttcgccgactatgaggaactgagggagcaattgagctcagtat

SEQ ID NO: 455141 - DNA, 51 bp, Artificial
  Synthetic oligonucleotide
tatgttagagagcacttgatcaaaactgaggagagagctgcactagaagcc

SEQ ID NO: 455142 - DNA, 59 bp, Artificial
  Synthetic oligonucleotide
tatgttagctattaaatactgtcagcttgtagcaaatacatacgacccggatacggtgg

SEQ ID NO: 455143 - DNA, 58 bp, Artificial
  Synthetic oligonucleotide
tatgttagctattaaatatttgcaggccgttgaagaaacgtatgagcccaatactttg

SEQ ID NO: 455144 - DNA, 51 bp, Artificial
  Synthetic oligonucleotide
tatgttatacaactaggatttggacaacgtaggcggccatcctataatatt

SEQ ID NO: 455145 - DNA, 59 bp, Artificial
  Synthetic oligonucleotide
tatgttcaagtaggaagaagaaagactcagttgtatgggtggaagatagtacgatggag

SEQ ID NO: 455146 - DNA, 55 bp, Artificial
  Synthetic oligonucleotide
tatgttcatgacttctgtccaaaatgtcttacaagtgttgggcccctgggataag

SEQ ID NO: 455147 - DNA, 60 bp, Artificial
  Synthetic oligonucleotide
tatgttcatggcattgtcagagggagctattccctatgatattaataccatgctaaatgc

SEQ ID NO: 455148 - DNA, 55 bp, Artificial
  Synthetic oligonucleotide
tatgttccagaacttgcggatgttgaagtttcaaaagtttacttgtaccttggac

SEQ ID NO: 455149 - DNA, 58 bp, Artificial
  Synthetic oligonucleotide
tatgttcccccatataattgtagatgttaggcaattggaacctgtgttgatcccccta

SEQ ID NO: 455150 - DNA, 55 bp, Artificial
  Synthetic oligonucleotide
tatgttcgtcacttgctcaagggcagagactacgttcactgttgcaaccccactc

SEQ ID NO: 455151 - DNA, 60 bp, Artificial
  Synthetic oligonucleotide
tatgttctgcgctctgcaagggccatattctcaggagaggaagctacaaatggttattga

SEQ ID NO: 455152 - DNA, 55 bp, Artificial
  Synthetic oligonucleotide
tatgttgaatgggcgcataatcagcttaattggtgaagacaagctacaacttgta

SEQ ID NO: 455153 - DNA, 53 bp, Artificial
  Synthetic oligonucleotide
tatgttgactttagccttgaccctacgttttctattgagacccacacagtccc

SEQ ID NO: 455154 - DNA, 58 bp, Artificial
  Synthetic oligonucleotide
tatgttgaggaggtttagagttattcatgttcccgacaacgtagagttcttgcagtac

SEQ ID NO: 455155 - DNA, 60 bp, Artificial
  Synthetic oligonucleotide
tatgttgattactgggatgattcacaagccttcaggaacatggtttatgtaaggtcatta

SEQ ID NO: 455156 - DNA, 60 bp, Artificial
  Synthetic oligonucleotide
tatgttgattgggcatggctttgcttcgcccggcgattgtggtggtatcctcaggtgtca

SEQ ID NO: 455157 - DNA, 60 bp, Artificial
  Synthetic oligonucleotide
tatgttgccatcgacggtacttgacacgtatccaccgccggactctgccgtcgcacgaaa

SEQ ID NO: 455158 - DNA, 55 bp, Artificial
  Synthetic oligonucleotide
tatgttgcctgtatcaaaagttgacttacacttaagagtgcgggatattaggcag

SEQ ID NO: 455159 - DNA, 53 bp, Artificial
  Synthetic oligonucleotide
tatgttgctcacgacgtgatccgccaacaagacccctactacgtgggcccaaa

SEQ ID NO: 455160 - DNA, 58 bp, Artificial
  Synthetic oligonucleotide
tatgttggactgtctatcatggcgccggctcaaagaccctagccggccccaaaggccc

SEQ ID NO: 455161 - DNA, 57 bp, Artificial
  Synthetic oligonucleotide
tatgttggcatagcaaacgcgtactcgcacttttacgacgggttcgcgcgtgttcct

SEQ ID NO: 455162 - DNA, 60 bp, Artificial
  Synthetic oligonucleotide
tatgttgggtataccggcaccacagctagcgtgtgtagtaactggcaagcacggttctct

SEQ ID NO: 455163 - DNA, 59 bp, Artificial
  Synthetic oligonucleotide
tatgttgggtgtgctattctccagtccctagaggctaaaaacatccctgtcacttggaa

SEQ ID NO: 455164 - DNA, 58 bp, Artificial
  Synthetic oligonucleotide
tatgttggtacacacagtctactcggatacggtcgagttaccctcacaatagggatta

SEQ ID NO: 455165 - DNA, 59 bp, Artificial
  Synthetic oligonucleotide
tatgttggtcgcatcgttgtcaacgaacccgtatggttctatgggagggtggctggctc

SEQ ID NO: 455166 - DNA, 60 bp, Artificial
  Synthetic oligonucleotide
tatgtttaatatgttaagcactgtattgggtgtttccatcctgaatcttgggcagaagaa

SEQ ID NO: 455167 - DNA, 60 bp, Artificial
  Synthetic oligonucleotide
tatgtttagctgtggtagagcgactgaatgccttagcttcggttgacccccgccagcaca

SEQ ID NO: 455168 - DNA, 58 bp, Artificial
  Synthetic oligonucleotide
tatgtttccactggtgaacgagcctcaggaatgtttgacagtgtagtgctttgtgagt

SEQ ID NO: 455169 - DNA, 59 bp, Artificial
  Synthetic oligonucleotide
tatgtttgactggccgcgcagcggagttgaagtcagataaatcggcgaacaaagaaaaa

SEQ ID NO: 455170 - DNA, 60 bp, Artificial
  Synthetic oligonucleotide
tatgtttgataaccagcccgatatggccaccgttaagaacatgcatagggatcggtacca

SEQ ID NO: 455171 - DNA, 60 bp, Artificial
  Synthetic oligonucleotide
tatgtttgataatgagcccagtacagctactgtgaagaacatgcatcgtgatcgctatca

SEQ ID NO: 455172 - DNA, 60 bp, Artificial
  Synthetic oligonucleotide
tatgtttgataatgagccgagtacggccaccgttaagaacatgcatagggatcggtacca

SEQ ID NO: 455173 - DNA, 52 bp, Artificial
  Synthetic oligonucleotide
tatgtttgatggatgttacattcaggcgtcaatcaaagatacgatcgaaggg

SEQ ID NO: 455174 - DNA, 57 bp, Artificial
  Synthetic oligonucleotide
tatgtttggactacctagaatagttgcaaatgaaattctacaaaggtgtaccatttg

SEQ ID NO: 455175 - DNA, 60 bp, Artificial
  Synthetic oligonucleotide
tatgtttgtgcctttgattatactaattgggatgctagcttgtcacccttatggtttgat

SEQ ID NO: 455176 - DNA, 60 bp, Artificial
  Synthetic oligonucleotide
tatgttttaacatctgttgagcttttagctccctgaatgttcggatggaaatgtgctgac

SEQ ID NO: 455177 - DNA, 60 bp, Artificial
  Synthetic oligonucleotide
tatgttttatgatggttatgacatagtgagtcatgaaaatgggatatacgggataagcac

SEQ ID NO: 455178 - DNA, 57 bp, Artificial
  Synthetic oligonucleotide
tatgttttgcaagtgaacacgttttatgagaggatgtcggaaattggagggccggtg

SEQ ID NO: 455179 - DNA, 57 bp, Artificial
  Synthetic oligonucleotide
tatgttttgcatagtgattactgtattgtaccaaataaggggggaactagtattgga

SEQ ID NO: 455180 - DNA, 60 bp, Artificial
  Synthetic oligonucleotide
tatgtttttgggtgatcctcagtccattctcaagcagactacgcccgtattacgcgatcc

SEQ ID NO: 455181 - DNA, 56 bp, Artificial
  Synthetic oligonucleotide
tattaaaaacagccagatggaatctgacggaagcccaatgttgggcctgcatgggc

SEQ ID NO: 455182 - DNA, 59 bp, Artificial
  Synthetic oligonucleotide
tattaaacgatacgatcagacacagattacgattagttgagggcgttggaattgttaca

SEQ ID NO: 455183 - DNA, 58 bp, Artificial
  Synthetic oligonucleotide
tattaaacgcaaaatggagagcattaaaattgtcggaaaaattttcacgaatcatgca

SEQ ID NO: 455184 - DNA, 53 bp, Artificial
  Synthetic oligonucleotide
tattaaagggcgtaagcgtgataaagttacaggggaatttgttgacggttatc

SEQ ID NO: 455185 - DNA, 54 bp, Artificial
  Synthetic oligonucleotide
tattaaatctcgctccaggttagagaaagtttcttctacgaaggcacaatttgt

SEQ ID NO: 455186 - DNA, 58 bp, Artificial
  Synthetic oligonucleotide
tattaaatgcttcaattgtggtagagaggggcacctagccagaaattgcagggcccct

SEQ ID NO: 455187 - DNA, 55 bp, Artificial
  Synthetic oligonucleotide
tattaaatgtgttgggagcgggggactcaattccagatcctttaagcccgggaga

SEQ ID NO: 455188 - DNA, 56 bp, Artificial
  Synthetic oligonucleotide
tattaacaagtcaggccgctcggggatagctcttgtcgcaacaggtcttgccaagc

SEQ ID NO: 455189 - DNA, 60 bp, Artificial
  Synthetic oligonucleotide
tattaacacctactctctgatgggggccgaccaagtgtacccgtcgatgagcatggtgac

SEQ ID NO: 455190 - DNA, 60 bp, Artificial
  Synthetic oligonucleotide
tattaacacttgcaatagagctaccaatgatgagctgaagttcgattgttttggcgagga

SEQ ID NO: 455191 - DNA, 60 bp, Artificial
  Synthetic oligonucleotide
tattaaccagtttgatggcgttgcttggagagatgcggtactcagttcatttgtcacggt

SEQ ID NO: 455192 - DNA, 60 bp, Artificial
  Synthetic oligonucleotide
tattaaccatgaagactatcattgctttgagctacattttatgcctggttttcgctcaaa

SEQ ID NO: 455193 - DNA, 52 bp, Artificial
  Synthetic oligonucleotide
tattaacgaccgtgtatggttcccagtttacggagggctaaaacccaattca

SEQ ID NO: 455194 - DNA, 58 bp, Artificial
  Synthetic oligonucleotide
tattaacggatgagttgggtaatacattctccgtccccgatcctttacgcgagctgca

SEQ ID NO: 455195 - DNA, 60 bp, Artificial
  Synthetic oligonucleotide
tattaactctatttgtaaatggccagattttgtgcagatgacaaaggacacatatggtga

SEQ ID NO: 455196 - DNA, 56 bp, Artificial
  Synthetic oligonucleotide
tattaacttctagcaataaagcactaaaactattgttgattcaagggtacaaccca

SEQ ID NO: 455197 - DNA, 60 bp, Artificial
  Synthetic oligonucleotide
tattaagaaaggatgtcgttatgcgaggctttatcactgccaatacaattctgaacgtaa

SEQ ID NO: 455198 - DNA, 60 bp, Artificial
  Synthetic oligonucleotide
tattaagaacacaagagtctgaatgtgcatgcgtgaatggttcttgctttacagtaatga

SEQ ID NO: 455199 - DNA, 60 bp, Artificial
  Synthetic oligonucleotide
tattaagagacaacatgaaactaggtacacaagacttagatgatgaatgcacaatgttaa

SEQ ID NO: 455200 - DNA, 59 bp, Artificial
  Synthetic oligonucleotide
tattaagccgaaagacttcttgtttgcagtatttggactaataccaatgtatcaattga

SEQ ID NO: 455201 - DNA, 50 bp, Artificial
  Synthetic oligonucleotide
tattaaggacttaactggcttacctaagaaggtaactcaaagacttcatt

SEQ ID NO: 455202 - DNA, 56 bp, Artificial
  Synthetic oligonucleotide
tattaaggcttgttgtgttggacaaggtgccctatttagggtgaggagccttactg

SEQ ID NO: 455203 - DNA, 54 bp, Artificial
  Synthetic oligonucleotide
tattaaggtggaagtttgatagtcacctggcactgagacacagagcccgagagc

SEQ ID NO: 455204 - DNA, 55 bp, Artificial
  Synthetic oligonucleotide
tattaagtaatctaagtacgttaagaggtgctttcatttatagaatcataaaggg

SEQ ID NO: 455205 - DNA, 57 bp, Artificial
  Synthetic oligonucleotide
tattaagtgagtttccaggaccaagatatttatatccaggaacagttaatccacgtc

SEQ ID NO: 455206 - DNA, 59 bp, Artificial
  Synthetic oligonucleotide
tattaataatactgggaatggtgctaaagggtcagataacactgacactatcaaactcc

SEQ ID NO: 455207 - DNA, 55 bp, Artificial
  Synthetic oligonucleotide
tattaatacatataatccctaatctatcgaggtattttaatacttgggtcttaaa

SEQ ID NO: 455208 - DNA, 60 bp, Artificial
  Synthetic oligonucleotide
tattaatacattcccggactgtagttctgactatctcattcaactggcccattgacattg

SEQ ID NO: 455209 - DNA, 53 bp, Artificial
  Synthetic oligonucleotide
tattaatcaccgtaattccggggaggagttaacaaactatataactaactaca

SEQ ID NO: 455210 - DNA, 60 bp, Artificial
  Synthetic oligonucleotide
tattaatgccgagaccagtcatggaattgcttgactatacgctggtctatagatcaccac

SEQ ID NO: 455211 - DNA, 58 bp, Artificial
  Synthetic oligonucleotide
tattacaaaactgctgaaatgagagaaatgtctatgggaaagtggataaaaagggcat

SEQ ID NO: 455212 - DNA, 53 bp, Artificial
  Synthetic oligonucleotide
tattacaaactccccggccttaccaatcagcggtggaaaggtccgttacaatc

SEQ ID NO: 455213 - DNA, 52 bp, Artificial
  Synthetic oligonucleotide
tattacaaagactgctgacatagaagggactttccactgctgacacagaagg

SEQ ID NO: 455214 - DNA, 54 bp, Artificial
  Synthetic oligonucleotide
tattacaacgaagggattaaattatcgttcgttactgcagattgttttgtcccc

SEQ ID NO: 455215 - DNA, 60 bp, Artificial
  Synthetic oligonucleotide
tattacaagaacatatatttgttacttgatgctccccttatttgcccccattgcatatct

SEQ ID NO: 455216 - DNA, 60 bp, Artificial
  Synthetic oligonucleotide
tattacaagagctatatcgccctgtgcatatggtggcttcagtatttcctgaccagagta

SEQ ID NO: 455217 - DNA, 60 bp, Artificial
  Synthetic oligonucleotide
tattacaagcgctatatcagctggtgcttatggtggcttcagtactttctgaccagagca

SEQ ID NO: 455218 - DNA, 56 bp, Artificial
  Synthetic oligonucleotide
tattacaagggagtaacagcaaagttagactacaacaatgggaaagtactgttagc

SEQ ID NO: 455219 - DNA, 55 bp, Artificial
  Synthetic oligonucleotide
tattacacaaatctagagacgtatgggtacaattcgttacacagacgcttgatgc

SEQ ID NO: 455220 - DNA, 60 bp, Artificial
  Synthetic oligonucleotide
tattacagtggaagtttgacagcggcctagcacgcagacacattgcccgtgagctacatc

SEQ ID NO: 455221 - DNA, 55 bp, Artificial
  Synthetic oligonucleotide
tattacataggatatgtcagagaaatggtggcaggatccactacatcactaagtc

SEQ ID NO: 455222 - DNA, 60 bp, Artificial
  Synthetic oligonucleotide
tattacatcgacacaagtattgcacttgaccgagaacaggtttgagcctccactacagta

SEQ ID NO: 455223 - DNA, 59 bp, Artificial
  Synthetic oligonucleotide
tattacatctaacccaaggaacctgctgggagcagatgtatactccaggtggggaagta

SEQ ID NO: 455224 - DNA, 54 bp, Artificial
  Synthetic oligonucleotide
tattacattatccccgtaggtcaagggtggtgtttcggtggcgtccctattgcc

SEQ ID NO: 455225 - DNA, 55 bp, Artificial
  Synthetic oligonucleotide
tattaccaatggacatgtcgagaaagagcaacgtgtcaatggatgccgtgactcg

SEQ ID NO: 455226 - DNA, 57 bp, Artificial
  Synthetic oligonucleotide
tattaccacaagcataaacactaaggtgaaagaccatgcactcttttatacacttga

SEQ ID NO: 455227 - DNA, 60 bp, Artificial
  Synthetic oligonucleotide
tattaccacgtatcaggtatgtgactatggcgataaactacacaccggactcggatcgca

SEQ ID NO: 455228 - DNA, 54 bp, Artificial
  Synthetic oligonucleotide
tattaccatgttctccctgacccgacaggtccttaatgtggggccccgagtccc

SEQ ID NO: 455229 - DNA, 56 bp, Artificial
  Synthetic oligonucleotide
tattacccaatggttctctgatacctggaacaacattaaaaatggagctaaagggc

SEQ ID NO: 455230 - DNA, 50 bp, Artificial
  Synthetic oligonucleotide
tattacccattggaaaatggagcgaaaagatgtaatcatacgaacctgga

SEQ ID NO: 455231 - DNA, 50 bp, Artificial
  Synthetic oligonucleotide
tattacccccgccacgaatgatgccacaacccggtctatcgactcgcggg

SEQ ID NO: 455232 - DNA, 56 bp, Artificial
  Synthetic oligonucleotide
tattacctcaccagagacccaaccgtacctctttcacgggctgcttgggaaacagc

SEQ ID NO: 455233 - DNA, 60 bp, Artificial
  Synthetic oligonucleotide
tattacctgacatgactccaagcaccgagatgtcactaagaggagtgagggtcagtaaaa

SEQ ID NO: 455234 - DNA, 59 bp, Artificial
  Synthetic oligonucleotide
tattacgattgggacgatgatgtctatgaatgtccaacgtgtgaagctatataccattc

SEQ ID NO: 455235 - DNA, 60 bp, Artificial
  Synthetic oligonucleotide
tattacgcagcatagtccacttctatcggacactaaattgtatggtgtaatgaagtatgg

SEQ ID NO: 455236 - DNA, 50 bp, Artificial
  Synthetic oligonucleotide
tattacggacaatatagttgtactcctttgtatacaaatttcgatatacc

SEQ ID NO: 455237 - DNA, 50 bp, Artificial
  Synthetic oligonucleotide
tattacggctttagagttaagtgaagcgaacaattatgcggctatagcca

SEQ ID NO: 455238 - DNA, 55 bp, Artificial
  Synthetic oligonucleotide
tattacgggcgacactacgacaacatccaccgagcccgcctcttctggctgcccc

SEQ ID NO: 455239 - DNA, 55 bp, Artificial
  Synthetic oligonucleotide
tattacgggcgacattacgacaacgtcctctgagcccgccccttctgactgcccc

SEQ ID NO: 455240 - DNA, 52 bp, Artificial
  Synthetic oligonucleotide
tattacgtaactcaacctttaccattcccaagttaaatactatgacaaaagt

SEQ ID NO: 455241 - DNA, 53 bp, Artificial
  Synthetic oligonucleotide
tattacgtgtggaggggcggcggatttggaacgcgtcatgtgcaaggagtgtg

SEQ ID NO: 455242 - DNA, 60 bp, Artificial
  Synthetic oligonucleotide
tattacgttgattacaatcgtagccatcgggtggtgctgtcatccgagctgccgcagtta

SEQ ID NO: 455243 - DNA, 60 bp, Artificial
  Synthetic oligonucleotide
tattactaaaatctctggatcgttctcattatcggatgaagtagttttgcaagaagatac

SEQ ID NO: 455244 - DNA, 55 bp, Artificial
  Synthetic oligonucleotide
tattactaattatatgtttttggtttgtggttgccacatcacctttaactacatt

SEQ ID NO: 455245 - DNA, 59 bp, Artificial
  Synthetic oligonucleotide
tattactatctggtgactaaaactccaatagtcgtacatatttcagactggttacacat

SEQ ID NO: 455246 - DNA, 60 bp, Artificial
  Synthetic oligonucleotide
tattactgcggttgggtctttatatccgattgaatatgagcagggtggactagatatgtc

SEQ ID NO: 455247 - DNA, 58 bp, Artificial
  Synthetic oligonucleotide
tattactggacactagtagagccgggagacaaaataacattcgaagcaactggaaatc

SEQ ID NO: 455248 - DNA, 60 bp, Artificial
  Synthetic oligonucleotide
tattactggggcaacaattgatgttagcgctggagcattaattccacttttgatagctgc

SEQ ID NO: 455249 - DNA, 60 bp, Artificial
  Synthetic oligonucleotide
tattactggtgttcagtcaactttgagatttcgtgtgccctggatttcagatactcctta

SEQ ID NO: 455250 - DNA, 58 bp, Artificial
  Synthetic oligonucleotide
tattactgtacctaaatgtagtggaaatcagtttagagttatgcgactactatttcca

SEQ ID NO: 455251 - DNA, 59 bp, Artificial
  Synthetic oligonucleotide
tattacttaaccaagtgtacaccatgacccaacttcttttcgatgagcattattcgata

SEQ ID NO: 455252 - DNA, 59 bp, Artificial
  Synthetic oligonucleotide
tattacttcaaactgtctgaagtcattaaacagagttattctctgatgaacgggttgtc

SEQ ID NO: 455253 - DNA, 52 bp, Artificial
  Synthetic oligonucleotide
tattacttgactataaacaatgataacagcagtgtttcaagcgacgctgaat

SEQ ID NO: 455254 - DNA, 58 bp, Artificial
  Synthetic oligonucleotide
tattagaaacaggagatggatgtcaacaaataatggaacagttacacccagctcttaa

SEQ ID NO: 455255 - DNA, 60 bp, Artificial
  Synthetic oligonucleotide
tattagaacaagttgctaaggtgagatatgaggcgactactagtagagcatcaatacatt

SEQ ID NO: 455256 - DNA, 60 bp, Artificial
  Synthetic oligonucleotide
tattagaactgttggcctaaggatagaaaatggtgaggtcacaatttataagatcatgac

SEQ ID NO: 455257 - DNA, 55 bp, Artificial
  Synthetic oligonucleotide
tattagacaggaacccgggcatcaaattgatccgatcatacaagccgtttctggg

SEQ ID NO: 455258 - DNA, 55 bp, Artificial
  Synthetic oligonucleotide
tattagacccagataggttccatcaagctagttttataaggtatagaacgtggga

SEQ ID NO: 455259 - DNA, 55 bp, Artificial
  Synthetic oligonucleotide
tattagacgcttaccaaacacaggagactttcagcgacaaagattgtgtttcgag

SEQ ID NO: 455260 - DNA, 55 bp, Artificial
  Synthetic oligonucleotide
tattagaggtttaggagtacctagagaaagacagatggagcctgcttttgatcag

SEQ ID NO: 455261 - DNA, 54 bp, Artificial
  Synthetic oligonucleotide
tattagatattgcagatgcatattttactataccattagacccagactatgcac

SEQ ID NO: 455262 - DNA, 58 bp, Artificial
  Synthetic oligonucleotide
tattagcacgaatcgatactctctgccgtttaaaagtgaaacaaccaagctctcaccc

SEQ ID NO: 455263 - DNA, 60 bp, Artificial
  Synthetic oligonucleotide
tattagctgaccaacttaacctgaggttgaagtgctgacacactcgctaacacatggggc

SEQ ID NO: 455264 - DNA, 59 bp, Artificial
  Synthetic oligonucleotide
tattaggaggaatagttagtcctaagtgtgaatatccagcaggacattctaaggtagga

SEQ ID NO: 455265 - DNA, 60 bp, Artificial
  Synthetic oligonucleotide
tattaggcaagatggctatctacatttgtagaatgtcaaatcatcctaaaacgactatgg

SEQ ID NO: 455266 - DNA, 60 bp, Artificial
  Synthetic oligonucleotide
tattaggctccagtaagtcattgtggtttgattactgtcagagagcagattgcatgatgc

SEQ ID NO: 455267 - DNA, 55 bp, Artificial
  Synthetic oligonucleotide
tattagtaaacagcaagcattcaatttactacgatctgacccaagagtactacgc

SEQ ID NO: 455268 - DNA, 51 bp, Artificial
  Synthetic oligonucleotide
tattagtacagaatttacagtataataccccagatagaaaacctttcgagc

SEQ ID NO: 455269 - DNA, 60 bp, Artificial
  Synthetic oligonucleotide
tattagtatggaggtttgacagtagcctagcacgcagacatatggcccgcgagctacatc

SEQ ID NO: 455270 - DNA, 60 bp, Artificial
  Synthetic oligonucleotide
tattagtcacaagcggattcaccactcctacttggagaggtgatccgaggggtatgcttg

SEQ ID NO: 455271 - DNA, 59 bp, Artificial
  Synthetic oligonucleotide
tattagtgaaaagagaaaatgtgtcagtgatttgcatttttccactaacgtgatagaaa

SEQ ID NO: 455272 - DNA, 60 bp, Artificial
  Synthetic oligonucleotide
tattagtgactatgagatattgacaaccacagatgtatttgaggacttgtccacagttaa

SEQ ID NO: 455273 - DNA, 53 bp, Artificial
  Synthetic oligonucleotide
tattagtttgatgagaggaaagttcctctcgtttaaattgcaaacctaccgag

SEQ ID NO: 455274 - DNA, 60 bp, Artificial
  Synthetic oligonucleotide
tattataagcatgatgtaattggaaaaagagtaaaacctacttgacgcattgctccatac

SEQ ID NO: 455275 - DNA, 51 bp, Artificial
  Synthetic oligonucleotide
tattataccacgatctcaagaatctaagtgtaccgaatatattaacactag

SEQ ID NO: 455276 - DNA, 60 bp, Artificial
  Synthetic oligonucleotide
tattatactgttgtattcgatgcagttacaagtataatagcggatgtggaaaaggtcgat

SEQ ID NO: 455277 - DNA, 53 bp, Artificial
  Synthetic oligonucleotide
tattatagagcactccgctactatactgtcgcaggttagtaggttaggggaag

SEQ ID NO: 455278 - DNA, 60 bp, Artificial
  Synthetic oligonucleotide
tattatagctacaagaggcaagatgaaccatttacaggcatttgagatgattccaccaaa

SEQ ID NO: 455279 - DNA, 59 bp, Artificial
  Synthetic oligonucleotide
tattatataagagagaaacaacacgtagcgcctcattttgtgggtcaccatattcttgg

SEQ ID NO: 455280 - DNA, 59 bp, Artificial
  Synthetic oligonucleotide
tattatatccacgagtgataaggtgaagtatgtggggagtcacaaatacgtcgtcgaag

SEQ ID NO: 455281 - DNA, 59 bp, Artificial
  Synthetic oligonucleotide
tattatatgaagggaggtgtgaacaccttcctgattcgggtctctagtgtatctgtcct

SEQ ID NO: 455282 - DNA, 60 bp, Artificial
  Synthetic oligonucleotide
tattatatgttttatgatggatataatggagattcctcagatgcacgctatgggacaaca

SEQ ID NO: 455283 - DNA, 60 bp, Artificial
  Synthetic oligonucleotide
tattatcatacggtgatgtcacacgatttctatctaacaatgccatggtgttatatacag

SEQ ID NO: 455284 - DNA, 60 bp, Artificial
  Synthetic oligonucleotide
tattatcatactgacaatggtaatatgcgagagcgatagcaagcactagaaacgagttac

SEQ ID NO: 455285 - DNA, 52 bp, Artificial
  Synthetic oligonucleotide
tattatccagccagataccaatcacacatgctaatcggctacgggtttgcgt

SEQ ID NO: 455286 - DNA, 57 bp, Artificial
  Synthetic oligonucleotide
tattatccttcttatgtctaagacagttacctatagttgcttctagcagccacgaac

SEQ ID NO: 455287 - DNA, 60 bp, Artificial
  Synthetic oligonucleotide
tattatctaacaataaacaacgataacagtaatgtgtcatgcgacgctgagttttattta

SEQ ID NO: 455288 - DNA, 60 bp, Artificial
  Synthetic oligonucleotide
tattatgaacatgcgccaatcgaattgatatatgcatgtcgatcagctaaagaatttgct

SEQ ID NO: 455289 - DNA, 60 bp, Artificial
  Synthetic oligonucleotide
tattatgacgtacaagattatcggtgtacctgggatgtgcccacccgaactcattcgaca

SEQ ID NO: 455290 - DNA, 60 bp, Artificial
  Synthetic oligonucleotide
tattatgatactggatactctgttgcaagcgctactgagtggtctaagtacgtagatact

SEQ ID NO: 455291 - DNA, 60 bp, Artificial
  Synthetic oligonucleotide
tattatgcaagtgttgacgttcctaaagatactcttgaaggcactaggcttgcgcgtatt

SEQ ID NO: 455292 - DNA, 56 bp, Artificial
  Synthetic oligonucleotide
tattatgccccagccttggtcgtgaacaccggagctgtttggtggattccccctcc

SEQ ID NO: 455293 - DNA, 60 bp, Artificial
  Synthetic oligonucleotide
tattatgctaccattccccgcgctgattctactggatggtgtgtgtatcgtcgaaagggt

SEQ ID NO: 455294 - DNA, 56 bp, Artificial
  Synthetic oligonucleotide
tattatgggtttaggtataaagtaccttctgtgcactcgtgcggggtcccatgttc

SEQ ID NO: 455295 - DNA, 57 bp, Artificial
  Synthetic oligonucleotide
tattatgttactctgtaacagaattcgtggttggggtactatcgggggaatatcaga

SEQ ID NO: 455296 - DNA, 53 bp, Artificial
  Synthetic oligonucleotide
tattattaattgtggttttatgggttattgcaacctcaccattacgttgtttt

SEQ ID NO: 455297 - DNA, 60 bp, Artificial
  Synthetic oligonucleotide
tattattcagatcgtcgtcagtgcgaattgatcaattcgtttagttgtgtagagttaagg

SEQ ID NO: 455298 - DNA, 55 bp, Artificial
  Synthetic oligonucleotide
tattattcgttgaagaggggaaaattgtacatatcagcccactatcaggaagtgc

SEQ ID NO: 455299 - DNA, 55 bp, Artificial
  Synthetic oligonucleotide
tattattctagtataattcagtattaatctagtataattcagtattaatctagta

SEQ ID NO: 455300 - DNA, 60 bp, Artificial
  Synthetic oligonucleotide
tattattgatgctgagcgaagagaatatgaacaacgctacaaaatggaccacccagaggc

SEQ ID NO: 455301 - DNA, 60 bp, Artificial
  Synthetic oligonucleotide
tattattgcacaagccatagcacaggcagttggtaatgttggttgctataatgcagctaa

SEQ ID NO: 455302 - DNA, 58 bp, Artificial
  Synthetic oligonucleotide
tattattggtcggtattaaaaccaggtcagacactgcgagtaagatccaatgggaatc

SEQ ID NO: 455303 - DNA, 55 bp, Artificial
  Synthetic oligonucleotide
tattatttcaagcttcctggtcttaatagccgccagtggaaaggaccacaggagg

SEQ ID NO: 455304 - DNA, 52 bp, Artificial
  Synthetic oligonucleotide
tattcaacacttggggttgcctgccacagtagttcgaaaccacacctgtcct

SEQ ID NO: 455305 - DNA, 55 bp, Artificial
  Synthetic oligonucleotide
tattcaacggtcaagaagtatccgtgacaagcggagaactggtgacgggagccca

SEQ ID NO: 455306 - DNA, 55 bp, Artificial
  Synthetic oligonucleotide
tattcaacgtaactggttctacagttgcttttactcccactcttctatgtgtggc

SEQ ID NO: 455307 - DNA, 59 bp, Artificial
  Synthetic oligonucleotide
tattcaactgagacattgacggaaaaccttgaccttagaatcaaactcgcactagcaaa

SEQ ID NO: 455308 - DNA, 58 bp, Artificial
  Synthetic oligonucleotide
tattcaagatgccttactgtcccgtgaggctgtgttgattccacccccgcggcgtttg

SEQ ID NO: 455309 - DNA, 55 bp, Artificial
  Synthetic oligonucleotide
tattcaaggaatgtttgtttactctgactaagtataactctaccaagggaaccga

SEQ ID NO: 455310 - DNA, 58 bp, Artificial
  Synthetic oligonucleotide
tattcaaggctcctagtaaagtacctatactcttttcgcaatactctttgctgagcac

SEQ ID NO: 455311 - DNA, 50 bp, Artificial
  Synthetic oligonucleotide
tattcaagggagaggtgactgctcacttgcacgataatgaccacctttac

SEQ ID NO: 455312 - DNA, 56 bp, Artificial
  Synthetic oligonucleotide
tattcaatctaaacaggctttcactttttcgccaacttacaaggcctttctgtgta

SEQ ID NO: 455313 - DNA, 51 bp, Artificial
  Synthetic oligonucleotide
tattcaattcagagatcgcagaactaatgcaagatccaccattgatatgct

SEQ ID NO: 455314 - DNA, 50 bp, Artificial
  Synthetic oligonucleotide
tattcacaccatgaaccctgacatcattgagagctggcacctcaatgtca

SEQ ID NO: 455315 - DNA, 58 bp, Artificial
  Synthetic oligonucleotide
tattcacacccggcgatccaagactacaaccgcactaccgacagcgccaataagacgg

SEQ ID NO: 455316 - DNA, 60 bp, Artificial
  Synthetic oligonucleotide
tattcacagtggcttccattagaagcatgcttgtcaaatgaggaccaagctaaccacttg

SEQ ID NO: 455317 - DNA, 58 bp, Artificial
  Synthetic oligonucleotide
tattcaccacatcaggtaactgataacagtcgagacgggacatagagaccttacccga

SEQ ID NO: 455318 - DNA, 60 bp, Artificial
  Synthetic oligonucleotide
tattcaccacgatagaggagccattgtatattatgatccgcttaagttgatatctaaatt

SEQ ID NO: 455319 - DNA, 57 bp, Artificial
  Synthetic oligonucleotide
tattcacgagagtggggccatatttactctcgcctccgttctaaaaattctgtggcc

SEQ ID NO: 455320 - DNA, 60 bp, Artificial
  Synthetic oligonucleotide
tattcacgcagtcgggccgaatttcaacaaagtggcggagatggaaggtgataagcagct

SEQ ID NO: 455321 - DNA, 60 bp, Artificial
  Synthetic oligonucleotide
tattcacggcgtacagctgttaagcgtctttatacttcatcacgtctcgatgataaacgt

SEQ ID NO: 455322 - DNA, 53 bp, Artificial
  Synthetic oligonucleotide
tattcactcgcaaccacatttcaaaacgaagtggaaccttaaaagttcgaccc

SEQ ID NO: 455323 - DNA, 57 bp, Artificial
  Synthetic oligonucleotide
tattcagaaaatagcccactaaatagttatagagcattccaccaaaataaggacacc

SEQ ID NO: 455324 - DNA, 59 bp, Artificial
  Synthetic oligonucleotide
tattcagaagtggaaggggatttgatcgtgcatgtaaagaaagttccactgaaaggcaa

SEQ ID NO: 455325 - DNA, 60 bp, Artificial
  Synthetic oligonucleotide
tattcagaattgaaccgtattgtagacaacacgacgattaaagacagagctgacgctatg

SEQ ID NO: 455326 - DNA, 56 bp, Artificial
  Synthetic oligonucleotide
tattcagagatttgtcgggcatttaaactttgtgttgccatttaccaaaggtaaca

SEQ ID NO: 455327 - DNA, 60 bp, Artificial
  Synthetic oligonucleotide
tattcagaggtgacttgaatgtcatggccaaagcctttgagtatgagaaaaaatggtcta

SEQ ID NO: 455328 - DNA, 60 bp, Artificial
  Synthetic oligonucleotide
tattcagagtcaccacttcttttccagctgttcgtactgctgcaccttctattgctcgga

SEQ ID NO: 455329 - DNA, 59 bp, Artificial
  Synthetic oligonucleotide
tattcagcacgcgcaaaatacgcgcaaaacgaaggtaggacggcgcttgaagcaaataa

SEQ ID NO: 455330 - DNA, 52 bp, Artificial
  Synthetic oligonucleotide
tattcagcctaggtcgccgaggtacaatgtggaggtcggacggttcctcaga

SEQ ID NO: 455331 - DNA, 60 bp, Artificial
  Synthetic oligonucleotide
tattcagcgtgttcaagagaaccagtttggtccagaatttgtcttgagtcaaaactcagc

SEQ ID NO: 455332 - DNA, 60 bp, Artificial
  Synthetic oligonucleotide
tattcaggagacgctacgcaataaaagagaaacgcttgagcacaccaccatcgtaacacc

SEQ ID NO: 455333 - DNA, 51 bp, Artificial
  Synthetic oligonucleotide
tattcaggcgttctgtaaccatggcgtgccttctagctgcattagactccc

SEQ ID NO: 455334 - DNA, 58 bp, Artificial
  Synthetic oligonucleotide
tattcagtcacaatggtggtgttttactgtcttcttcctttctgcgaccgctcccgac

SEQ ID NO: 455335 - DNA, 60 bp, Artificial
  Synthetic oligonucleotide
tattcagttatgctatgggagtcggtacagtcctggatgtccaaatgcgaaattacactt

SEQ ID NO: 455336 - DNA, 60 bp, Artificial
  Synthetic oligonucleotide
tattcatacagggcctgatgtggtattgcccacatctcctacagtatggccttatgttcc

SEQ ID NO: 455337 - DNA, 54 bp, Artificial
  Synthetic oligonucleotide
tattcatagatactggcctaacccttcacagattcgttatggtgcaccgaacgt

SEQ ID NO: 455338 - DNA, 58 bp, Artificial
  Synthetic oligonucleotide
tattcatagctgggtcctagctagggtctaccgtggaaacccagagctcggtgaacta

SEQ ID NO: 455339 - DNA, 52 bp, Artificial
  Synthetic oligonucleotide
tattcatcacgctgtgactcaatgtacttgaatgcgttggggggatttacta

SEQ ID NO: 455340 - DNA, 60 bp, Artificial
  Synthetic oligonucleotide
tattcatcctcaatgatgtgggagatcaacggacctgagtcagtgctcgttaacacatat

SEQ ID NO: 455341 - DNA, 60 bp, Artificial
  Synthetic oligonucleotide
tattcatctcgatgagattcaagataattaaaggcgctaggagcactcgccaaccccgct

SEQ ID NO: 455342 - DNA, 60 bp, Artificial
  Synthetic oligonucleotide
tattcatgactgaagaaacacccgaatctaccaggtgttcacacatcaaggtaaacgcat

SEQ ID NO: 455343 - DNA, 60 bp, Artificial
  Synthetic oligonucleotide
tattcatgagtctggttctcttaaataatgctaggaattgtgatacatggacttgaatta

SEQ ID NO: 455344 - DNA, 57 bp, Artificial
  Synthetic oligonucleotide
tattcatgattgattcaatggataagttttctacctcgcatgcaacgctgctatcga

SEQ ID NO: 455345 - DNA, 56 bp, Artificial
  Synthetic oligonucleotide
tattcatggacggaaggacttgaagttggtggatgtgaagctcacatccgatcagg

SEQ ID NO: 455346 - DNA, 60 bp, Artificial
  Synthetic oligonucleotide
tattcatggtcgtttcatgtgggttttagaaagcagaaaatgttggatgccgcacttgat

SEQ ID NO: 455347 - DNA, 54 bp, Artificial
  Synthetic oligonucleotide
tattcattcacatcgagtgctacgacagttacggttaccccctttaacgttaac

SEQ ID NO: 455348 - DNA, 60 bp, Artificial
  Synthetic oligonucleotide
tattcattcgcgactaagataataagagttgacggagatgacaattatgcagtattgcag

SEQ ID NO: 455349 - DNA, 60 bp, Artificial
  Synthetic oligonucleotide
tattcatttggcagtgtgttcaacatgttcgacaatgaacccacgacagcgacagttaaa

SEQ ID NO: 455350 - DNA, 60 bp, Artificial
  Synthetic oligonucleotide
tattccaagcataagtaccattgcatctgtccgatgaaatgtgcagaagatccggacaga

SEQ ID NO: 455351 - DNA, 55 bp, Artificial
  Synthetic oligonucleotide
tattccaataactcttttacaactgctactcgggttagagagagttgggaccaga

SEQ ID NO: 455352 - DNA, 60 bp, Artificial
  Synthetic oligonucleotide
tattccagcaccgatgcacaaatgcagtatgatccaggattgtttgctcaaattcaagcg

SEQ ID NO: 455353 - DNA, 56 bp, Artificial
  Synthetic oligonucleotide
tattccagtactgagagagtggtcgtgagcattgaccgtttcttgagggtccgaga

SEQ ID NO: 455354 - DNA, 60 bp, Artificial
  Synthetic oligonucleotide
tattccatccgccgtaatttggggatgtccaaatgatgatcctgcaaaatctcctagatc

SEQ ID NO: 455355 - DNA, 60 bp, Artificial
  Synthetic oligonucleotide
tattccattgattgtcaggcgtgatgatcaattgtactatactggccaagataaggagaa

SEQ ID NO: 455356 - DNA, 60 bp, Artificial
  Synthetic oligonucleotide
tattcccaaatgcgcagccatttgaacatcatgccacagtaggacttacactgagaattg

SEQ ID NO: 455357 - DNA, 55 bp, Artificial
  Synthetic oligonucleotide
tattcccaacactaacttggccacaaccatcattgttcactcccatgggagcgtg

SEQ ID NO: 455358 - DNA, 55 bp, Artificial
  Synthetic oligonucleotide
tattccccaagacaagttcatggcccaatcatgactcgaacaaaggtgtaacggc

SEQ ID NO: 455359 - DNA, 54 bp, Artificial
  Synthetic oligonucleotide
tattccccatagactatcgacgattatactctgtattagttctgtcggaggatg

SEQ ID NO: 455360 - DNA, 53 bp, Artificial
  Synthetic oligonucleotide
tattccccccgtggtggtcctaaattagacaaggccgctgcgtgggttaatag

SEQ ID NO: 455361 - DNA, 60 bp, Artificial
  Synthetic oligonucleotide
tattcccgatgagatgctcgcggtaagtgttttatcaaagaatagagccatcgaagagaa

SEQ ID NO: 455362 - DNA, 56 bp, Artificial
  Synthetic oligonucleotide
tattcccggcggagctggtgtctccggtattcccggcggagctggtgtctccggta

SEQ ID NO: 455363 - DNA, 56 bp, Artificial
  Synthetic oligonucleotide
tattcccgtcccatcatcttgggctttcccaaaatacctatgggagtgggcctcag

SEQ ID NO: 455364 - DNA, 57 bp, Artificial
  Synthetic oligonucleotide
tattcccgtcccgttgtctcagccaatggcgagccgactgttaagttgtatagatct

SEQ ID NO: 455365 - DNA, 57 bp, Artificial
  Synthetic oligonucleotide
tattccctaaacttcatgggctacataattggatgttggggagcattgccacaggat

SEQ ID NO: 455366 - DNA, 57 bp, Artificial
  Synthetic oligonucleotide
tattccctagggaaggattctccaaaccccggcgcatcttccatgtctgtggaatgg

SEQ ID NO: 455367 - DNA, 56 bp, Artificial
  Synthetic oligonucleotide
tattccctccagttcatgggttatgtaattggaagttgggggtcattaccacagga

SEQ ID NO: 455368 - DNA, 57 bp, Artificial
  Synthetic oligonucleotide
tattcccttaatttcatgggatatgtaattgggagttggggctccttgccacaagaa

SEQ ID NO: 455369 - DNA, 54 bp, Artificial
  Synthetic oligonucleotide
tattccgacgtagttaccgcctttccgaccatttgggacaacaactgccgcgga

SEQ ID NO: 455370 - DNA, 56 bp, Artificial
  Synthetic oligonucleotide
tattccgagatgatttagatttcggtttaactgacttatttaatgagtcgtattag

SEQ ID NO: 455371 - DNA, 60 bp, Artificial
  Synthetic oligonucleotide
tattccgatagagatagttattatccgtatagatcctgtaagcagggacctgcatattag

SEQ ID NO: 455372 - DNA, 58 bp, Artificial
  Synthetic oligonucleotide
tattccgcggagaggaagttccatatgtttcgggcgactattctgccgccacggacaa

SEQ ID NO: 455373 - DNA, 56 bp, Artificial
  Synthetic oligonucleotide
tattccgctatagcactcttgagaaggcgctactgagcaatgcaagtgttccattg

SEQ ID NO: 455374 - DNA, 57 bp, Artificial
  Synthetic oligonucleotide
tattccgggaaaatgcccgatgctggtccttcacacaatttagttggtttgtcacga

SEQ ID NO: 455375 - DNA, 59 bp, Artificial
  Synthetic oligonucleotide
tattccgtcagaaatgcccgcaccattactggatgagttggggatgttaccagaggaag

SEQ ID NO: 455376 - DNA, 56 bp, Artificial
  Synthetic oligonucleotide
tattccgtgtctgctacctaggaaagtgaactttcacgatagctggttacccggtc

SEQ ID NO: 455377 - DNA, 52 bp, Artificial
  Synthetic oligonucleotide
tattccgtgttgctgcccagcagataggtactgtatatgtaggcgtagctgc

SEQ ID NO: 455378 - DNA, 53 bp, Artificial
  Synthetic oligonucleotide
tattcctaacgagtacaaaagacgaaacttaggaccctatcaattatttttca

SEQ ID NO: 455379 - DNA, 60 bp, Artificial
  Synthetic oligonucleotide
tattcctaactaattcgttcaactggcccattgacattgttatgttcgattctgctctcc

SEQ ID NO: 455380 - DNA, 60 bp, Artificial
  Synthetic oligonucleotide
tattcctaagggttgtgaaggcccatgtaaagttcagtccttcgagcagaggcatgatat

SEQ ID NO: 455381 - DNA, 59 bp, Artificial
  Synthetic oligonucleotide
tattcctacatttgacggagtcgttacaaccgcaacatatgtaagcgctccttcgatac

SEQ ID NO: 455382 - DNA, 56 bp, Artificial
  Synthetic oligonucleotide
tattcctacccaggagttccctcccattacggccactcgcgctctaaccatgagcg

SEQ ID NO: 455383 - DNA, 55 bp, Artificial
  Synthetic oligonucleotide
tattcctcacgggttttttacgctggtttgactcaatgcgagtttatggacgtcc

SEQ ID NO: 455384 - DNA, 55 bp, Artificial
  Synthetic oligonucleotide
tattcctcgaaccgttgggtggactcttcgcggtagtacccggcgctcgagctgc

SEQ ID NO: 455385 - DNA, 57 bp, Artificial
  Synthetic oligonucleotide
tattcctggtgccacccacagttgaatcaagaactaaaccatttactgtcccaatct

SEQ ID NO: 455386 - DNA, 60 bp, Artificial
  Synthetic oligonucleotide
tattcctgtccatacaatggcattaacacagccaggacatacttatgacataatgacagt

SEQ ID NO: 455387 - DNA, 60 bp, Artificial
  Synthetic oligonucleotide
tattccttagcagtatcttctggagtattaagagatacaccgaatgtgccatagatgtat

SEQ ID NO: 455388 - DNA, 52 bp, Artificial
  Synthetic oligonucleotide
tattccttagctaagtcgcgagtagaagacctattattagcggttttcgact

SEQ ID NO: 455389 - DNA, 60 bp, Artificial
  Synthetic oligonucleotide
tattccttgagttccctctttggaggagaccaatgagtaagatctacatacagggccagc

SEQ ID NO: 455390 - DNA, 60 bp, Artificial
  Synthetic oligonucleotide
tattcctttgatgcagattactcagcctgggacagcactcaacagagagagatcatgcgc

SEQ ID NO: 455391 - DNA, 60 bp, Artificial
  Synthetic oligonucleotide
tattcgaacctggcaagacggatataaggccctctttggtacatggtcagattagtgaca

SEQ ID NO: 455392 - DNA, 60 bp, Artificial
  Synthetic oligonucleotide
tattcgaactttgtacatgaattgtttgtgctaatacattccataatacatggttgacag

SEQ ID NO: 455393 - DNA, 55 bp, Artificial
  Synthetic oligonucleotide
tattcgaagttgcttcactacagtgtgttagacttcttaatgctgtccctgcaga

SEQ ID NO: 455394 - DNA, 60 bp, Artificial
  Synthetic oligonucleotide
tattcgacacacctgtcatagtgaggcccaatggttactttgaccgagaagtctatgtga

SEQ ID NO: 455395 - DNA, 53 bp, Artificial
  Synthetic oligonucleotide
tattcgacacttcagtgatctgtgagtgctacgatgctgggtgcgcctggtac

SEQ ID NO: 455396 - DNA, 55 bp, Artificial
  Synthetic oligonucleotide
tattcgacggtatgtttataccaaaggtcaaccattcctagacttactgttaaca

SEQ ID NO: 455397 - DNA, 58 bp, Artificial
  Synthetic oligonucleotide
tattcgactacctacagacgtggccgtgcgacgacccaacgcggttgctatgtacgac

SEQ ID NO: 455398 - DNA, 55 bp, Artificial
  Synthetic oligonucleotide
tattcgagcacctgggatcaaccccacatgtgacgtggcctcctctcatggacca

SEQ ID NO: 455399 - DNA, 60 bp, Artificial
  Synthetic oligonucleotide
tattcgatagtttgtgattactcgaatgtgaagaagctcattggatcacagaattataga

SEQ ID NO: 455400 - DNA, 55 bp, Artificial
  Synthetic oligonucleotide
tattcgatttactgaccctaaaacctctagatggtgttttaccagatggggtgtc

SEQ ID NO: 455401 - DNA, 55 bp, Artificial
  Synthetic oligonucleotide
tattcgcaactctttgtctcgacatatttgttattaacaactgcccctgaataat

SEQ ID NO: 455402 - DNA, 60 bp, Artificial
  Synthetic oligonucleotide
tattcgcaagacaaatatagaatacttgagtcatatgtatataacctgttatctataaat

SEQ ID NO: 455403 - DNA, 59 bp, Artificial
  Synthetic oligonucleotide
tattcgcacagaatatgatgtaccactacctgggtaggaccgggtacacaatacacgta

SEQ ID NO: 455404 - DNA, 60 bp, Artificial
  Synthetic oligonucleotide
tattcgcactctctggagtggccatagcactgagtatcttcaacctactgataggaatat

SEQ ID NO: 455405 - DNA, 55 bp, Artificial
  Synthetic oligonucleotide
tattcgccaccatgattatgaccagtgtttccagtccgttcagttgttgcagtgg

SEQ ID NO: 455406 - DNA, 59 bp, Artificial
  Synthetic oligonucleotide
tattcgccatttaaggcgttccaaaataccagtccagctgtgaatagcaccaattagcc

SEQ ID NO: 455407 - DNA, 59 bp, Artificial
  Synthetic oligonucleotide
tattcgccgcaccttcttcgatgactcgtcgtcggagtctgaggacggtgaaccagaag

SEQ ID NO: 455408 - DNA, 58 bp, Artificial
  Synthetic oligonucleotide
tattcgcgcaacgcctggacaattaccgtttggagttacaacgcatttgctgagtgta

SEQ ID NO: 455409 - DNA, 60 bp, Artificial
  Synthetic oligonucleotide
tattcgcgcgcgtatacacgcagagcgaatagcgcagcgctgtattccaaatagtatgac

SEQ ID NO: 455410 - DNA, 60 bp, Artificial
  Synthetic oligonucleotide
tattcgcgcttgaaatatggaactcgcgcttttgtagttaccaggcatgagactggagtg

SEQ ID NO: 455411 - DNA, 52 bp, Artificial
  Synthetic oligonucleotide
tattcggacgttgaccaagtagttgatggacacgacgatttgagtatatcat

SEQ ID NO: 455412 - DNA, 51 bp, Artificial
  Synthetic oligonucleotide
tattcggaggcggaaaaggaggaaataatcaaacacagacacaaactacgc

SEQ ID NO: 455413 - DNA, 53 bp, Artificial
  Synthetic oligonucleotide
tattcggaggtttgtcatattactgggcgatagcaatgtattcattcctcgct

SEQ ID NO: 455414 - DNA, 60 bp, Artificial
  Synthetic oligonucleotide
tattcggatctgttaatgcttgcaggggaagtctgaaagtggcagaacgccaccatgaac

SEQ ID NO: 455415 - DNA, 55 bp, Artificial
  Synthetic oligonucleotide
tattcggcacatgtggcaactagatcttggtgtgatttaacatggcgtctaatcg

SEQ ID NO: 455416 - DNA, 55 bp, Artificial
  Synthetic oligonucleotide
tattcggctttagcttactcggactagaagtaatacatagaagaaataggcgcac

SEQ ID NO: 455417 - DNA, 58 bp, Artificial
  Synthetic oligonucleotide
tattcggggctatgctaaccagcacggcccccaaataggcgtactgcataggcggcga

SEQ ID NO: 455418 - DNA, 55 bp, Artificial
  Synthetic oligonucleotide
tattcggtctaagtcagcatggcagtcacatacagaacgccaatggaagatattg

SEQ ID NO: 455419 - DNA, 54 bp, Artificial
  Synthetic oligonucleotide
tattcggtgcgtttgctgtgtatgtaagtattgtcggtgacggtgaattggttg

SEQ ID NO: 455420 - DNA, 60 bp, Artificial
  Synthetic oligonucleotide
tattcgtggttcacctccagctacaacattgccacgcccttccctcaggctgctgtcgtc

SEQ ID NO: 455421 - DNA, 55 bp, Artificial
  Synthetic oligonucleotide
tattcgttacacggtttcgggtgttggacacgttgtgtacgctgtgatgctagat

SEQ ID NO: 455422 - DNA, 59 bp, Artificial
  Synthetic oligonucleotide
tattcgttgacgttagccctatgattctgcataagactcgatggggaaacaccttattg

SEQ ID NO: 455423 - DNA, 54 bp, Artificial
  Synthetic oligonucleotide
tattctacaacaagacccctttatccctcctgacaccctggaaaaaggtcctga

SEQ ID NO: 455424 - DNA, 60 bp, Artificial
  Synthetic oligonucleotide
tattctacactatagtggattacgtaaatcaaatcgtgcaagcaatgtctaagaggtcca

SEQ ID NO: 455425 - DNA, 55 bp, Artificial
  Synthetic oligonucleotide
tattctaccaacccagacacaacagtccccatctatggtaagaccatagccactc

SEQ ID NO: 455426 - DNA, 52 bp, Artificial
  Synthetic oligonucleotide
tattctactgcagacggtcctttacttaatgccgttatgggtcatagctaca

SEQ ID NO: 455427 - DNA, 55 bp, Artificial
  Synthetic oligonucleotide
tattctagttcgcgtgtatttaccatcactttcccgactggtggtgacggtcccg

SEQ ID NO: 455428 - DNA, 58 bp, Artificial
  Synthetic oligonucleotide
tattctatattgatgaagccaactctcgtttgttgccggtgtcggataccaagtacga

SEQ ID NO: 455429 - DNA, 55 bp, Artificial
  Synthetic oligonucleotide
tattctattttgccaggaaacatggagttatgcgtttagatatcagcctgtaccc

SEQ ID NO: 455430 - DNA, 52 bp, Artificial
  Synthetic oligonucleotide
tattctcaacgaccgagctcgcaatccttccctgctctttcaccactatgcc

SEQ ID NO: 455431 - DNA, 60 bp, Artificial
  Synthetic oligonucleotide
tattctcaccagggattataccagaatccaaccatagtgcgtgtgataagaagaccatcc

SEQ ID NO: 455432 - DNA, 55 bp, Artificial
  Synthetic oligonucleotide
tattctccaaaatggggaacttatatacccttctagtacagtagcagcaggtgct

SEQ ID NO: 455433 - DNA, 58 bp, Artificial
  Synthetic oligonucleotide
tattctccaagttttcggggtaaggggaactctggacgctctgcacagcgcacttgac

SEQ ID NO: 455434 - DNA, 54 bp, Artificial
  Synthetic oligonucleotide
tattctcggggagcttcgctttgtgggggaccaggtcccccacaccacctacta

SEQ ID NO: 455435 - DNA, 60 bp, Artificial
  Synthetic oligonucleotide
tattctctcgttggaatagatcctttccgcctactccaaaacagccaagtattcagcata

SEQ ID NO: 455436 - DNA, 57 bp, Artificial
  Synthetic oligonucleotide
tattctgagcttatgaaagtgaatgttagagttccagctaataccgatttaactcgt

SEQ ID NO: 455437 - DNA, 57 bp, Artificial
  Synthetic oligonucleotide
tattctgccacccaagacaattgggagccttcctcaccaaggtgcctctaaaacgac

SEQ ID NO: 455438 - DNA, 60 bp, Artificial
  Synthetic oligonucleotide
tattctgcttcctactcagacccttgtgctatacagtgcccttacctaggatgccagtca

SEQ ID NO: 455439 - DNA, 60 bp, Artificial
  Synthetic oligonucleotide
tattctgtcctggccgattgaatatagtcgctggatatgacaggtacagatgtatccatg

SEQ ID NO: 455440 - DNA, 60 bp, Artificial
  Synthetic oligonucleotide
tattctgtcgaaagacaacgcaataaggataggtgaggatgctcatatactagtcacaag

SEQ ID NO: 455441 - DNA, 51 bp, Artificial
  Synthetic oligonucleotide
tattcttaaagccttgtacatgttatctactaggggccgtcaaacaatcaa

SEQ ID NO: 455442 - DNA, 60 bp, Artificial
  Synthetic oligonucleotide
tattcttaatgtttaagggattgatgaggcaatgcaactatgaatatacgtatgaataat

SEQ ID NO: 455443 - DNA, 60 bp, Artificial
  Synthetic oligonucleotide
tattcttatggatgacaaactgccctcagcaggtcgtgctcgtatggctctacgaacgct

SEQ ID NO: 455444 - DNA, 51 bp, Artificial
  Synthetic oligonucleotide
tattcttccaaaaacggcgatgagatttaaagtaccaactacgcagcagcc

SEQ ID NO: 455445 - DNA, 55 bp, Artificial
  Synthetic oligonucleotide
tattcttctaccagtatcttagcagcatcagaggatggtaggtttgtcttcagcc

SEQ ID NO: 455446 - DNA, 55 bp, Artificial
  Synthetic oligonucleotide
tattcttgccgggaaccgtgcacgagacgtacaaagcccgaaacattgccattgc

SEQ ID NO: 455447 - DNA, 55 bp, Artificial
  Synthetic oligonucleotide
tattctttataactactgtttggtcctttattgcagaggaagatggggggaattc

SEQ ID NO: 455448 - DNA, 58 bp, Artificial
  Synthetic oligonucleotide
tattctttcacatggcgaggcttagactggactaaagaacggatctgagaccaagggg

SEQ ID NO: 455449 - DNA, 59 bp, Artificial
  Synthetic oligonucleotide
tattcttttcgaaactatatccgatccactagatccggtgatgttattaccagatttga

SEQ ID NO: 455450 - DNA, 57 bp, Artificial
  Synthetic oligonucleotide
tattgaaacaccgatttgaaataattgaagggagagatcgaacgatggcttggacgg

SEQ ID NO: 455451 - DNA, 58 bp, Artificial
  Synthetic oligonucleotide
tattgaaacgagtggagagattgttaatctgggatgtttcaagcgatcgtggtgatat

SEQ ID NO: 455452 - DNA, 60 bp, Artificial
  Synthetic oligonucleotide
tattgaacacattgcaagcatgagaaggaattatttcacagcggaggtgtcccactgcag

SEQ ID NO: 455453 - DNA, 50 bp, Artificial
  Synthetic oligonucleotide
tattgaacactcctggtagcaaccagtacctgacctcagacaatcatcag

SEQ ID NO: 455454 - DNA, 58 bp, Artificial
  Synthetic oligonucleotide
tattgaaccgccgtccgaaatagtaatcgaaggcaatgcacacgaatgtcacaaaact

SEQ ID NO: 455455 - DNA, 60 bp, Artificial
  Synthetic oligonucleotide
tattgaacctgttggtccttctgagccatctattgtgcaattggtggaggactcaagtgt

SEQ ID NO: 455456 - DNA, 56 bp, Artificial
  Synthetic oligonucleotide
tattgaacgatgattgactaaatggagggacccatggttccggtggtttctgaaaa

SEQ ID NO: 455457 - DNA, 60 bp, Artificial
  Synthetic oligonucleotide
tattgaacgtgactatgccaaacaatgacaattttgacaaactatacatctggggagttc

SEQ ID NO: 455458 - DNA, 60 bp, Artificial
  Synthetic oligonucleotide
tattgaagcatccagcttgaatgattctgttgcaatgaggcaaactttcggcaacctata

SEQ ID NO: 455459 - DNA, 57 bp, Artificial
  Synthetic oligonucleotide
tattgaagtcggccggtggtgaccaaaacgttggtagtgctgtgtatagccccactc

SEQ ID NO: 455460 - DNA, 50 bp, Artificial
  Synthetic oligonucleotide
tattgaagttaatggaaggggatagagcgctgcagagtgagaggaaaata

SEQ ID NO: 455461 - DNA, 60 bp, Artificial
  Synthetic oligonucleotide
tattgaatcaggtactgaatgataacattagaaacggacatgtcattaatcaactaatgg

SEQ ID NO: 455462 - DNA, 55 bp, Artificial
  Synthetic oligonucleotide
tattgaattacagcccctaggacattctactgttaatgttcctgatgccactgac

SEQ ID NO: 455463 - DNA, 52 bp, Artificial
  Synthetic oligonucleotide
tattgaattagtggcagatggttttgcctcggttaattcagatgtgactatg

SEQ ID NO: 455464 - DNA, 55 bp, Artificial
  Synthetic oligonucleotide
tattgacaagagatggtggtcttaatgagactaatcagactgaaaccttcagacc

SEQ ID NO: 455465 - DNA, 55 bp, Artificial
  Synthetic oligonucleotide
tattgacaagttcccataagcaataccaattgaagggtcatagttagttgcagcc

SEQ ID NO: 455466 - DNA, 55 bp, Artificial
  Synthetic oligonucleotide
tattgacaatagccattttacgagtatcgtctagcatcgaatataccgggccgac

SEQ ID NO: 455467 - DNA, 60 bp, Artificial
  Synthetic oligonucleotide
tattgacaatgagcctgatcaatcttggggcatccctgaggaatgtgtatgacctcagaa

SEQ ID NO: 455468 - DNA, 52 bp, Artificial
  Synthetic oligonucleotide
tattgacacatgtacctctgaatgcatcactcctaatggtagcatccccaat

SEQ ID NO: 455469 - DNA, 60 bp, Artificial
  Synthetic oligonucleotide
tattgacacctgggatagactaggggatcttctgctctgcacaaccagccacacggcaca

SEQ ID NO: 455470 - DNA, 60 bp, Artificial
  Synthetic oligonucleotide
tattgacatggccgcctctttagaacctgcgtttaacgcctctgcacatgcgtcgttagc

SEQ ID NO: 455471 - DNA, 53 bp, Artificial
  Synthetic oligonucleotide
tattgacattaacgattctgctgtatatagccaattccctggatactggacgc

SEQ ID NO: 455472 - DNA, 57 bp, Artificial
  Synthetic oligonucleotide
tattgaccttggtcaatgtggattactagggaccactattggtcccccccaatgcga

SEQ ID NO: 455473 - DNA, 59 bp, Artificial
  Synthetic oligonucleotide
tattgacgccagggaaagaccggagtggtctctgcttttcctccaagggtctgcgagca

SEQ ID NO: 455474 - DNA, 59 bp, Artificial
  Synthetic oligonucleotide
tattgacgctctggtgcggaaaaccaattatcagggcgctcgctttcgtgcgagaataa

SEQ ID NO: 455475 - DNA, 59 bp, Artificial
  Synthetic oligonucleotide
tattgactacagtgccagcaattcctcccactgcctccaccaatcggcagtcgggaagg

SEQ ID NO: 455476 - DNA, 60 bp, Artificial
  Synthetic oligonucleotide
tattgactgaagaatctcgagcatttgctctttgggtattgggcattttggataagtgag

SEQ ID NO: 455477 - DNA, 55 bp, Artificial
  Synthetic oligonucleotide
tattgactgggttctggagaacggctcaaggggcccaaaccccgcacaagccaag

SEQ ID NO: 455478 - DNA, 53 bp, Artificial
  Synthetic oligonucleotide
tattgagaaatcgctcccgaatccgggtggaaaaggtccctttggacttatct

SEQ ID NO: 455479 - DNA, 60 bp, Artificial
  Synthetic oligonucleotide
tattgagaatttgtgtatactgcaacatcacctaattgaggtttaaagctcgatgtattt

SEQ ID NO: 455480 - DNA, 55 bp, Artificial
  Synthetic oligonucleotide
tattgagatgtgttatctctacgactatgctgacacagtcccaaatgacacgggt

SEQ ID NO: 455481 - DNA, 58 bp, Artificial
  Synthetic oligonucleotide
tattgagccgtgagaaagctgagctggcgtggaacaaaatagtcgcccgtatgcgtct

SEQ ID NO: 455482 - DNA, 60 bp, Artificial
  Synthetic oligonucleotide
tattgaggaatgctcctgttatggacacaatcagaagataacttgtgtatgcagggataa

SEQ ID NO: 455483 - DNA, 59 bp, Artificial
  Synthetic oligonucleotide
tattgaggagtcgatttaccaatgttgtgacttggcccccgaagccaggcaggtcataa

SEQ ID NO: 455484 - DNA, 60 bp, Artificial
  Synthetic oligonucleotide
tattgagtctgcagtttgtgaatcagtgcttgcggatgcaaatgaaactttattggcgaa

SEQ ID NO: 455485 - DNA, 54 bp, Artificial
  Synthetic oligonucleotide
tattgagtctggtgcccctgttgttacaccaagggtcccacctacaacaggttt

SEQ ID NO: 455486 - DNA, 56 bp, Artificial
  Synthetic oligonucleotide
tattgagttactacgcttaatagggttattggtaccatcacgtacgttatcaagac

SEQ ID NO: 455487 - DNA, 50 bp, Artificial
  Synthetic oligonucleotide
tattgatcctacgttccagaagtggcgcgatccgagcttgcctaatgaca

SEQ ID NO: 455488 - DNA, 60 bp, Artificial
  Synthetic oligonucleotide
tattgatcgcttcttgagagttcgagaccaacgggggaatgtactactatctcctgagga

SEQ ID NO: 455489 - DNA, 60 bp, Artificial
  Synthetic oligonucleotide
tattgatgattccacagatatttgtgtacaggcagagcgtgagacagcacaggtactttt

SEQ ID NO: 455490 - DNA, 53 bp, Artificial
  Synthetic oligonucleotide
tattgatgcgcgcctcaagaccagtaatcaagagacaaacttccgagaattct

SEQ ID NO: 455491 - DNA, 59 bp, Artificial
  Synthetic oligonucleotide
tattgcaacagtatgtttcctcatgcagattgccatcctagcaaccactatgacactgc

SEQ ID NO: 455492 - DNA, 55 bp, Artificial
  Synthetic oligonucleotide
tattgcaatggatctgggagagttatgtgatgacacgatgacctacaaatgcccc

SEQ ID NO: 455493 - DNA, 55 bp, Artificial
  Synthetic oligonucleotide
tattgcacatctacccaatacatgctaagataggtcttgtaaggacaacacagga

SEQ ID NO: 455494 - DNA, 60 bp, Artificial
  Synthetic oligonucleotide
tattgcaccaatggtggcgacagggtacagaagagcaagtactcttgactgggtaatggg

SEQ ID NO: 455495 - DNA, 60 bp, Artificial
  Synthetic oligonucleotide
tattgcaccaggccaaatgaaggaacctagaggaagtgacatagcaggaactactagtac

SEQ ID NO: 455496 - DNA, 55 bp, Artificial
  Synthetic oligonucleotide
tattgcagagctattcatgaatatggaaatccacaggacagcatagaggagaggg

SEQ ID NO: 455497 - DNA, 58 bp, Artificial
  Synthetic oligonucleotide
tattgcaggagtcctaaggaccaataaaacgtttcagaatgtgagccctctgtggata

SEQ ID NO: 455498 - DNA, 59 bp, Artificial
  Synthetic oligonucleotide
tattgcaggtactcggaccttgggaacgtgacgtacgcgaattgttgactatactgcca

SEQ ID NO: 455499 - DNA, 56 bp, Artificial
  Synthetic oligonucleotide
tattgcagtaaagagggggacgttatacttaccctgggcattgtggcgagagacgg

SEQ ID NO: 455500 - DNA, 60 bp, Artificial
  Synthetic oligonucleotide
tattgcattacaccgtcctgtgctatctgctaggcagggcactgtccgtgtcagtcgtat

SEQ ID NO: 455501 - DNA, 60 bp, Artificial
  Synthetic oligonucleotide
tattgccacaatatgcttccttatgcaaatagccatcctggtaactactgtaacattgca

SEQ ID NO: 455502 - DNA, 57 bp, Artificial
  Synthetic oligonucleotide
tattgcccatcagatatcgcatgacctccacacagatattatgcttaggggtgcagt

SEQ ID NO: 455503 - DNA, 60 bp, Artificial
  Synthetic oligonucleotide
tattgccccaatgaattcggagtttgcaggcttgcgtaatgctgtgacccagggaatccc

SEQ ID NO: 455504 - DNA, 55 bp, Artificial
  Synthetic oligonucleotide
tattgcccgaccgactgtttcaggaaacacccggacacaacctacgccaagtgcg

SEQ ID NO: 455505 - DNA, 59 bp, Artificial
  Synthetic oligonucleotide
tattgccgcctcaaccatgggtgcacttgcgaatactacgccgttagcagagaagtcga

SEQ ID NO: 455506 - DNA, 54 bp, Artificial
  Synthetic oligonucleotide
tattgccggtcggtgtttaggcgcttgtgaccgcatggttagggggggatttta

SEQ ID NO: 455507 - DNA, 55 bp, Artificial
  Synthetic oligonucleotide
tattgccgtccctgctccactttcgtagccatggcttgatcttttcatctacgag

SEQ ID NO: 455508 - DNA, 60 bp, Artificial
  Synthetic oligonucleotide
tattgccgtgtatagctcggttgaccatttccacgaacgtggaatgtcgatgacgattag

SEQ ID NO: 455509 - DNA, 59 bp, Artificial
  Synthetic oligonucleotide
tattgcctatatgctttaagttaagagacacccttagaaagcatgaagatgcatataag

SEQ ID NO: 455510 - DNA, 60 bp, Artificial
  Synthetic oligonucleotide
tattgcgacaatatgtttcctcatgcagattgccatattaacaatgactatgacactaca

SEQ ID NO: 455511 - DNA, 56 bp, Artificial
  Synthetic oligonucleotide
tattgcgagctatacctcgggggcggtagggtcgggtctatggcaaccacacgtaa

SEQ ID NO: 455512 - DNA, 58 bp, Artificial
  Synthetic oligonucleotide
tattgcgaggaatattcgtatgtaccctgggggggctgtggcgcacggtggtgtgaaa

SEQ ID NO: 455513 - DNA, 55 bp, Artificial
  Synthetic oligonucleotide
tattgcgcaccgaagggaaagatgcagctacccaggcacgtgtggggaatgggtc

SEQ ID NO: 455514 - DNA, 60 bp, Artificial
  Synthetic oligonucleotide
tattgcggcgatatgaggacgagcatatatggtgtatgttatgggccgtacatactcaca

SEQ ID NO: 455515 - DNA, 60 bp, Artificial
  Synthetic oligonucleotide
tattgcgtcaactgcagtcttcggcaccattgaatcggtaacccaaggatggatggccga

SEQ ID NO: 455516 - DNA, 60 bp, Artificial
  Synthetic oligonucleotide
tattgctacctcagtcttttcataccactaagctttcgcattacccccgagaatgctcga

SEQ ID NO: 455517 - DNA, 57 bp, Artificial
  Synthetic oligonucleotide
tattgctcatactggtaaagttatttgtatttcggatgttacccgtggcaatggtat

SEQ ID NO: 455518 - DNA, 55 bp, Artificial
  Synthetic oligonucleotide
tattgctcgagatgtctaaagcagtacttgtgaaagtaggacgaaagggatctac

SEQ ID NO: 455519 - DNA, 60 bp, Artificial
  Synthetic oligonucleotide
tattgctgcgcacaccaacattaggtgggctgctaacatagctacacaacatgaaaggac

SEQ ID NO: 455520 - DNA, 58 bp, Artificial
  Synthetic oligonucleotide
tattgctggcactaccccccaaaaccttgtggtatcgtgtccgcgttgagcgtgtgtg

SEQ ID NO: 455521 - DNA, 60 bp, Artificial
  Synthetic oligonucleotide
tattgctgttgacggccgagccattgaaccagaaaaggccatcattggtggtcacattca

SEQ ID NO: 455522 - DNA, 60 bp, Artificial
  Synthetic oligonucleotide
tattgcttaatgcatcttggttcaactccttccagacatatgcactgagatagttgtggc

SEQ ID NO: 455523 - DNA, 58 bp, Artificial
  Synthetic oligonucleotide
tattgcttcaatatgcttcctcatgcagattgccctcttagcaatgactatgacacta

SEQ ID NO: 455524 - DNA, 58 bp, Artificial
  Synthetic oligonucleotide
tattgctttcacgcgaacacagctagcgaagctaccatcgattaaagttcggattgtc

SEQ ID NO: 455525 - DNA, 60 bp, Artificial
  Synthetic oligonucleotide
tattggaaactggtgcgatatgaatgtgcaatattttataaagctcgtgaagggaatatg

SEQ ID NO: 455526 - DNA, 60 bp, Artificial
  Synthetic oligonucleotide
tattggaatttaattcgcttcgattcaagaatgagatacgaagcaagaatagaaagcgct

SEQ ID NO: 455527 - DNA, 55 bp, Artificial
  Synthetic oligonucleotide
tattggacaatagtcaaacctggggacgtactggtaatcaatagtaatggaaacc

SEQ ID NO: 455528 - DNA, 60 bp, Artificial
  Synthetic oligonucleotide
tattggagaaatcagatccaacaacgtcttccttttagcaggatctgctgatactgacga

SEQ ID NO: 455529 - DNA, 60 bp, Artificial
  Synthetic oligonucleotide
tattggagcttagatgagatgcaaaggtttctagggtcgctcgagcatgcaaagagggtg

SEQ ID NO: 455530 - DNA, 57 bp, Artificial
  Synthetic oligonucleotide
tattggagtgctaatctacgcccgaagccgaataactataaaatgcgaaaggctaac

SEQ ID NO: 455531 - DNA, 60 bp, Artificial
  Synthetic oligonucleotide
tattggatagactgatcattcccctatatgatggactaagattacagaaggatgtgatag

SEQ ID NO: 455532 - DNA, 60 bp, Artificial
  Synthetic oligonucleotide
tattggatcatggcatataagaaaacgtactgagggtgatgcgaaagcttctgctatgta

SEQ ID NO: 455533 - DNA, 60 bp, Artificial
  Synthetic oligonucleotide
tattggatgctgattgcgcctactcaaacaggtagagtggcggagggtacaaatacgact

SEQ ID NO: 455534 - DNA, 57 bp, Artificial
  Synthetic oligonucleotide
tattggatgtctaataactaacccagacacgtttgaaacagttgcaacaacggagaa

SEQ ID NO: 455535 - DNA, 60 bp, Artificial
  Synthetic oligonucleotide
tattggatgtttgacttcaagatgtattcagaagataaaccatacggaataccagtgtat

SEQ ID NO: 455536 - DNA, 52 bp, Artificial
  Synthetic oligonucleotide
tattggcagagccaatacatggggtctattatgacccccagaaggaattaat

SEQ ID NO: 455537 - DNA, 53 bp, Artificial
  Synthetic oligonucleotide
tattggcagtcaaacggcatcgaggtaattccgacagcgtgttgggcgacccc

SEQ ID NO: 455538 - DNA, 52 bp, Artificial
  Synthetic oligonucleotide
tattggcagtggtgtccgtttccccactgttcttaacatcctcacagcaaaa

SEQ ID NO: 455539 - DNA, 60 bp, Artificial
  Synthetic oligonucleotide
tattggccaagcgagcatgtgtagctgtgaatgatgggacgaatttctatatattcgtat

SEQ ID NO: 455540 - DNA, 60 bp, Artificial
  Synthetic oligonucleotide
tattggccacattgccaacagttcctcctcctgcctcgaccaatcggcagtcaggaaggc

SEQ ID NO: 455541 - DNA, 58 bp, Artificial
  Synthetic oligonucleotide
tattggcccataattcagccatatctacgtttatcagttatccaagtttaggtaagac

SEQ ID NO: 455542 - DNA, 60 bp, Artificial
  Synthetic oligonucleotide
tattggccttcacgtactcatgtgttcaaatgttatagtagagataaacagatataattt

SEQ ID NO: 455543 - DNA, 59 bp, Artificial
  Synthetic oligonucleotide
tattggcgaatgttaccgcggtacgtcaagagtatgctataccagttggaccagtattc

SEQ ID NO: 455544 - DNA, 60 bp, Artificial
  Synthetic oligonucleotide
tattggctacagcgtgcacaaggtcataacaatggcatttgctggggcaatcagttattt

SEQ ID NO: 455545 - DNA, 54 bp, Artificial
  Synthetic oligonucleotide
tattggctctgccccgcagggcttatgcttacaatggagaggaggcagcctcac

SEQ ID NO: 455546 - DNA, 60 bp, Artificial
  Synthetic oligonucleotide
tattggctgcttttatcaccaactaatgcaggtgtagttatgcaaggaacgaataataca

SEQ ID NO: 455547 - DNA, 59 bp, Artificial
  Synthetic oligonucleotide
tattggctgtgcacccgctataggtgaacactggacaaagggtacggcctgtcgttcca

SEQ ID NO: 455548 - DNA, 55 bp, Artificial
  Synthetic oligonucleotide
tattgggaaaccgagaggaaacgaaggggaatggaatcatcttctaatcttgatt

SEQ ID NO: 455549 - DNA, 55 bp, Artificial
  Synthetic oligonucleotide
tattgggaacgctataagtggttatcagctgtagcccgttacgtcccagcggtgc

SEQ ID NO: 455550 - DNA, 60 bp, Artificial
  Synthetic oligonucleotide
tattgggacatctggtgatccaaaatacattgacctcccagccacagagacagaccgcat

SEQ ID NO: 455551 - DNA, 55 bp, Artificial
  Synthetic oligonucleotide
tattgggacgtcgaaattatatataacgaccgatgaagatcatatccagaagcct

SEQ ID NO: 455552 - DNA, 60 bp, Artificial
  Synthetic oligonucleotide
tattgggaggagccattgactggtcaatcggtgtctctcaaacttggctatgcaattggt

SEQ ID NO: 455553 - DNA, 60 bp, Artificial
  Synthetic oligonucleotide
tattgggataaaaaggaaagtgagcatatgttatgcgccgtgtcgttaaatgatatgcta

SEQ ID NO: 455554 - DNA, 59 bp, Artificial
  Synthetic oligonucleotide
tattgggatcagttgaggttaaggtattgtgctccagcaggttatgctttgctaaaatg

SEQ ID NO: 455555 - DNA, 60 bp, Artificial
  Synthetic oligonucleotide
tattgggcaataaggaccaggagtggaggaaacaccaaccagcaaagagcatcggcagga

SEQ ID NO: 455556 - DNA, 60 bp, Artificial
  Synthetic oligonucleotide
tattgggcatttattcttctcactccttcatcgtgaattatacatagttgcatttttcat

SEQ ID NO: 455557 - DNA, 60 bp, Artificial
  Synthetic oligonucleotide
tattgggcctggtagtccaatccttgacatggatgcgcatcttatgggtttcctttccca

SEQ ID NO: 455558 - DNA, 60 bp, Artificial
  Synthetic oligonucleotide
tattgggcgcgctcaaattcggagtgaaagtgcttggcgacaagatagatgtgccactct

SEQ ID NO: 455559 - DNA, 56 bp, Artificial
  Synthetic oligonucleotide
tattggggaatctcccaagggggtggaggaaggatccattggaaaggtctgcagga

SEQ ID NO: 455560 - DNA, 60 bp, Artificial
  Synthetic oligonucleotide
tattggggactcacaacaggagaaagagcctggcatctaggccatggggtaagtatagaa

SEQ ID NO: 455561 - DNA, 57 bp, Artificial
  Synthetic oligonucleotide
tattggggtttcgccatttctactgcctttcataatttgatggggcaaagagtgctt

SEQ ID NO: 455562 - DNA, 60 bp, Artificial
  Synthetic oligonucleotide
tattgggtaaagcggcaactattgatcaggcactgaatggaaaatttggttcagcaacaa

SEQ ID NO: 455563 - DNA, 60 bp, Artificial
  Synthetic oligonucleotide
tattgggtaagatctggatggatgagaatattaaggttaagaatcatacaaatacagcca

SEQ ID NO: 455564 - DNA, 57 bp, Artificial
  Synthetic oligonucleotide
tattgggttgcttaagtgcaatactggatggtatgtaagaaataaggatcgatgcca

SEQ ID NO: 455565 - DNA, 55 bp, Artificial
  Synthetic oligonucleotide
tattggtacgtgatggaggcaaggataatacaggtacaaatgagacattcagacc

SEQ ID NO: 455566 - DNA, 55 bp, Artificial
  Synthetic oligonucleotide
tattggtatagaatatcgcaaattgaagtgacaaaggcgcgtaatgaggttccgg

SEQ ID NO: 455567 - DNA, 55 bp, Artificial
  Synthetic oligonucleotide
tattggtatcggctacctcgggttgcgcgttggtgccgcttggtgtcgtcgctcc

SEQ ID NO: 455568 - DNA, 56 bp, Artificial
  Synthetic oligonucleotide
tattggtcacaccaggagttacgccggcgtacctggcaagaagtccgaggggctaa

SEQ ID NO: 455569 - DNA, 60 bp, Artificial
  Synthetic oligonucleotide
tattggtcatggaaagacaattgaaacatatcaggccagagaggggtatacaagcttctg

SEQ ID NO: 455570 - DNA, 60 bp, Artificial
  Synthetic oligonucleotide
tattggtcgcaccagcatacagctttaactgtctggggatgagcagtagagactttctag

SEQ ID NO: 455571 - DNA, 59 bp, Artificial
  Synthetic oligonucleotide
tattggtgaaggattagggatgttacgtgataaatgaaatcgtgattttcaagagcgta

SEQ ID NO: 455572 - DNA, 58 bp, Artificial
  Synthetic oligonucleotide
tattggtgacattggagacaattaaagtggattaccgaaaatgcccttatctttgtgc

SEQ ID NO: 455573 - DNA, 60 bp, Artificial
  Synthetic oligonucleotide
tattggtgactggtgtacaatatatactagagggctctatagaacttattatcctcttcg

SEQ ID NO: 455574 - DNA, 57 bp, Artificial
  Synthetic oligonucleotide
tattggtgaggaaattgtggttggtacgataggtattggtatacacacaaacgtcaa

SEQ ID NO: 455575 - DNA, 51 bp, Artificial
  Synthetic oligonucleotide
tattggtgcctcttgttcccctccagtacagcgcgggggctaccacgcgta

SEQ ID NO: 455576 - DNA, 56 bp, Artificial
  Synthetic oligonucleotide
tattggtggcccctgacaaaggtaccgcacgatttgtggaggccgtgattaacact

SEQ ID NO: 455577 - DNA, 53 bp, Artificial
  Synthetic oligonucleotide
tattggtgggcttggtaaaataacggagtcggcctttaataagtagcacttta

SEQ ID NO: 455578 - DNA, 60 bp, Artificial
  Synthetic oligonucleotide
tattggtggggtcgagtttccctactgcctctctgatgacagcttcttgtatctctgtca

SEQ ID NO: 455579 - DNA, 60 bp, Artificial
  Synthetic oligonucleotide
tattggtgggtgcacctaacgatgtgaagcgagctccacaagccctctatataaggaggc

SEQ ID NO: 455580 - DNA, 55 bp, Artificial
  Synthetic oligonucleotide
tattggtggtaattgggcgacacatgtgaagcggaatgatggtaggaaggtacac

SEQ ID NO: 455581 - DNA, 55 bp, Artificial
  Synthetic oligonucleotide
tattggtggtagtgagagcggtggaacttctgggacgcagcagtctcaagggact

SEQ ID NO: 455582 - DNA, 52 bp, Artificial
  Synthetic oligonucleotide
tattggtgttgttcgtgcgaagaattatgtcgaagcgacctgcagatatagg

SEQ ID NO: 455583 - DNA, 60 bp, Artificial
  Synthetic oligonucleotide
tattggttcacatcgcccggtgtcgaatactgaactggtgtagtcttcacccatcataac

SEQ ID NO: 455584 - DNA, 55 bp, Artificial
  Synthetic oligonucleotide
tattggttgcttcgtgatagaaggcccaataaggatccgcttaactttggtcagg

SEQ ID NO: 455585 - DNA, 60 bp, Artificial
  Synthetic oligonucleotide
tattggttgtcgataagcgtcctgacatggctccatgcaacagcatgggggggtccagag

SEQ ID NO: 455586 - DNA, 59 bp, Artificial
  Synthetic oligonucleotide
tattgtaagacatcgagactgtttaatagcacttggcagtttaatagcacttggaagag

SEQ ID NO: 455587 - DNA, 59 bp, Artificial
  Synthetic oligonucleotide
tattgtacaaaggaggatactcgagttgctccacccgtcgaattcggtcagttcacaga

SEQ ID NO: 455588 - DNA, 55 bp, Artificial
  Synthetic oligonucleotide
tattgtaccccagctggttttgcgcttctaaagtgtaataataaaacgttcatgg

SEQ ID NO: 455589 - DNA, 57 bp, Artificial
  Synthetic oligonucleotide
tattgtacccgcgtcgcaggtgtgtggtccggtatactgcttcaccccaagccctgt

SEQ ID NO: 455590 - DNA, 60 bp, Artificial
  Synthetic oligonucleotide
tattgtacttctagaagcccatgactctccaggccttatttcaattgggcctctgagccc

SEQ ID NO: 455591 - DNA, 54 bp, Artificial
  Synthetic oligonucleotide
tattgtaggaagtttgcacctttgtatgccgctgaagccaagagagtataccac

SEQ ID NO: 455592 - DNA, 51 bp, Artificial
  Synthetic oligonucleotide
tattgtaggagtactaaggaccaacaaaacattccagaatgtgagcccgct

SEQ ID NO: 455593 - DNA, 56 bp, Artificial
  Synthetic oligonucleotide
tattgtaggtggcgttaatgtcgtacgtggtgaagtccactcctccgttgaagtag

SEQ ID NO: 455594 - DNA, 59 bp, Artificial
  Synthetic oligonucleotide
tattgtatattgaccaattggagaaagggttagagaacgaagacaatcgtgcaatagaa

SEQ ID NO: 455595 - DNA, 50 bp, Artificial
  Synthetic oligonucleotide
tattgtattcctgatatactgcacatgatcaacactctaatagttgtgag

SEQ ID NO: 455596 - DNA, 55 bp, Artificial
  Synthetic oligonucleotide
tattgtattggtaggacttatacttgcattcatcatgtgggcatgcagcagtggc

SEQ ID NO: 455597 - DNA, 60 bp, Artificial
  Synthetic oligonucleotide
tattgtcaaaaagttctcccattatgatgaagcatccatctctgcatcatcatacaccat

SEQ ID NO: 455598 - DNA, 57 bp, Artificial
  Synthetic oligonucleotide
tattgtcaaattaagattggaagagtaatagctttcaaacctgtcaagaatccggaa

SEQ ID NO: 455599 - DNA, 59 bp, Artificial
  Synthetic oligonucleotide
tattgtcaatggaaatcgactgaacttttagcaccccatgcgaaggtctcgaaacgtga

SEQ ID NO: 455600 - DNA, 52 bp, Artificial
  Synthetic oligonucleotide
tattgtcacccctacctacggctgggaatctccaacatagattggacgatgg

SEQ ID NO: 455601 - DNA, 60 bp, Artificial
  Synthetic oligonucleotide
tattgtcccatatgttaatgcagtacctatggattccatgcttagacacaataactggag

SEQ ID NO: 455602 - DNA, 60 bp, Artificial
  Synthetic oligonucleotide
tattgtccgtggttggggggaatgtgtaattgatcagtttgagagtcttgatagagaggc

SEQ ID NO: 455603 - DNA, 60 bp, Artificial
  Synthetic oligonucleotide
tattgtctccatatgctagggggtatgctttctgggagagtatgtgctaagcaagagttt

SEQ ID NO: 455604 - DNA, 58 bp, Artificial
  Synthetic oligonucleotide
tattgtctgaaactgtcttagctacaggtggcatttatgttaagcctggtggcactag

SEQ ID NO: 455605 - DNA, 56 bp, Artificial
  Synthetic oligonucleotide
tattgtgagccaccccgttcggcttggttgccaatctacttggttgcgcctaagcg

SEQ ID NO: 455606 - DNA, 52 bp, Artificial
  Synthetic oligonucleotide
tattgtgatgcggttctctcttcttcattgccagaggccgaagctgcaggtg

SEQ ID NO: 455607 - DNA, 60 bp, Artificial
  Synthetic oligonucleotide
tattgtgcagagcctctgagcggtagttggaacgtgctcattgccgaccccttacaacat

SEQ ID NO: 455608 - DNA, 57 bp, Artificial
  Synthetic oligonucleotide
tattgtgccatttccggagttatttggcctggagaagatggcatgctcctctttacg

SEQ ID NO: 455609 - DNA, 60 bp, Artificial
  Synthetic oligonucleotide
tattgtggaagacagacgggatcaacaaccggctgtcataccacaggcatctcaggttat

SEQ ID NO: 455610 - DNA, 51 bp, Artificial
  Synthetic oligonucleotide
tattgtggacaaaagaccatttgtccccgaaggtgtcaacacgttgcctac

SEQ ID NO: 455611 - DNA, 60 bp, Artificial
  Synthetic oligonucleotide
tattgtgggggatgataagcttgaaccacaaatacgctcagagcaaatcgtaaataagta

SEQ ID NO: 455612 - DNA, 60 bp, Artificial
  Synthetic oligonucleotide
tattgtgtaagacataagcattatagactatgtagttatgaagtataaatataagctaag

SEQ ID NO: 455613 - DNA, 55 bp, Artificial
  Synthetic oligonucleotide
tattgtgtacgaggcggccgatgctatcctgcacactccggggtgtgtcccctgc

SEQ ID NO: 455614 - DNA, 59 bp, Artificial
  Synthetic oligonucleotide
tattgtgttctgcgtatcagtggagtcctacgcaaacgacagaagcgttcctacggttg

SEQ ID NO: 455615 - DNA, 55 bp, Artificial
  Synthetic oligonucleotide
tattgttaagccggttgaggataactcgttaaaatacgagagacctctttgtgcc

SEQ ID NO: 455616 - DNA, 55 bp, Artificial
  Synthetic oligonucleotide
tattgttaagcggtttttccgcctcaaccaccacgtgacttacaaccatcaggaa

SEQ ID NO: 455617 - DNA, 56 bp, Artificial
  Synthetic oligonucleotide
tattgttatagttgtggatcgtaaaccccatttgggttcgagtggtagtcttcata

SEQ ID NO: 455618 - DNA, 60 bp, Artificial
  Synthetic oligonucleotide
tattgttcaaccgcagattctacagtgcaagcagattgccacatctactggcgactcaaa

SEQ ID NO: 455619 - DNA, 60 bp, Artificial
  Synthetic oligonucleotide
tattgttcaatggctacacagtggagagtcggagctaacggagctacaggcctagattac

SEQ ID NO: 455620 - DNA, 53 bp, Artificial
  Synthetic oligonucleotide
tattgttcagtacttgcgaactattccgaggaagccacaatggttaacttcga

SEQ ID NO: 455621 - DNA, 60 bp, Artificial
  Synthetic oligonucleotide
tattgttcagtatcatagggcaaactgccaatccctcgcaagccaagatatcactgagat

SEQ ID NO: 455622 - DNA, 57 bp, Artificial
  Synthetic oligonucleotide
tattgttgataacctaaactggtcaggatatagtggttcttttacattgccggttga

SEQ ID NO: 455623 - DNA, 60 bp, Artificial
  Synthetic oligonucleotide
tattgttggatgtcggatattacgtctaaggcatccacatttgtatcttttgatcttgat

SEQ ID NO: 455624 - DNA, 59 bp, Artificial
  Synthetic oligonucleotide
tattgttggatgtcggatgctgtgtctaaggcatcttcatttgtatcatttgatctcga

SEQ ID NO: 455625 - DNA, 55 bp, Artificial
  Synthetic oligonucleotide
tattgttggatgtctgatacagtgtccaaggcatctacatttgtgtcatttgacc

SEQ ID NO: 455626 - DNA, 54 bp, Artificial
  Synthetic oligonucleotide
tattgttggcactaccccccaaaaccttgcggtatcgtgtccgcaaagaccgtg

SEQ ID NO: 455627 - DNA, 59 bp, Artificial
  Synthetic oligonucleotide
tattgtttactcaaggagtatgagtatcgaggaaagatcataaaagtttcagcaacgcc

SEQ ID NO: 455628 - DNA, 55 bp, Artificial
  Synthetic oligonucleotide
tattgtttagattatatgcttagaataaaaggagtctctcggtctcgtttggccc

SEQ ID NO: 455629 - DNA, 58 bp, Artificial
  Synthetic oligonucleotide
tattgttttaatcgttgtaggagacgataaactggacccgcaagtgcgctcggagcag

SEQ ID NO: 455630 - DNA, 60 bp, Artificial
  Synthetic oligonucleotide
tatttaaagtataagcataagctgaggtgggattggaattggccgccacacctgccacac

SEQ ID NO: 455631 - DNA, 60 bp, Artificial
  Synthetic oligonucleotide
tatttaaataggtctgcccagaagctgtcaccgagactgtccagacttggaagttgagaa

SEQ ID NO: 455632 - DNA, 60 bp, Artificial
  Synthetic oligonucleotide
tatttaacacaccagagtggttggataacggcacaattgtatcacaagccctgctgttcc

SEQ ID NO: 455633 - DNA, 52 bp, Artificial
  Synthetic oligonucleotide
tatttaagactttgtctacttgtggtaacgggtaaccggataagtgacctgt

SEQ ID NO: 455634 - DNA, 54 bp, Artificial
  Synthetic oligonucleotide
tatttaaggacaacctttccgcggcctccattggctgggacctttaacgacaca

SEQ ID NO: 455635 - DNA, 60 bp, Artificial
  Synthetic oligonucleotide
tatttaaggattggtgcactagcacatgccaatttggtgatccaggagacattatgagtc

SEQ ID NO: 455636 - DNA, 60 bp, Artificial
  Synthetic oligonucleotide
tatttaagggaaccgttaagattgagcgtgtgcacgctgatgtgaacatggacggagtaa

SEQ ID NO: 455637 - DNA, 60 bp, Artificial
  Synthetic oligonucleotide
tatttaagtcgcggctacaatatctcatctatgatcacaatcacaggaaaaggcatgtac

SEQ ID NO: 455638 - DNA, 57 bp, Artificial
  Synthetic oligonucleotide
tatttaatacagtagcaaccctctattgtgtgcatcagaacatagaggtaaaagaca

SEQ ID NO: 455639 - DNA, 51 bp, Artificial
  Synthetic oligonucleotide
tatttacattctatagataaagttgatatagaaggaggaaagtattatgaa

SEQ ID NO: 455640 - DNA, 57 bp, Artificial
  Synthetic oligonucleotide
tatttacccacgtaatagtttgataagacggcaatcacttttcaagcgtaatgataa

SEQ ID NO: 455641 - DNA, 52 bp, Artificial
  Synthetic oligonucleotide
tatttacccgtatggttttaaatccgagaggtgaagatcatgaccctgatca

SEQ ID NO: 455642 - DNA, 60 bp, Artificial
  Synthetic oligonucleotide
tatttaccggactcgtgtctgcctgtaccgctatgctcaacttgtgacgtcactaagtat

SEQ ID NO: 455643 - DNA, 51 bp, Artificial
  Synthetic oligonucleotide
tatttacgaggcgacgaggtgcgcactgattcgggtcctctcctgtccgta

SEQ ID NO: 455644 - DNA, 56 bp, Artificial
  Synthetic oligonucleotide
tatttacgcgtgaaagcctaaatatttgttgttgtcgttatatacttcgtcgcgaa

SEQ ID NO: 455645 - DNA, 60 bp, Artificial
  Synthetic oligonucleotide
tatttagaaatagaacatcataccctagaatgcatttggcacaaccacaaattccagacg

SEQ ID NO: 455646 - DNA, 58 bp, Artificial
  Synthetic oligonucleotide
tatttagagaaacttcgacaagctgagttggttcgtcaaagtttgcgcaaggtgcgag

SEQ ID NO: 455647 - DNA, 56 bp, Artificial
  Synthetic oligonucleotide
tatttagtaagaccgctaccaatggagcccatacggtccaaagcatagtgacaaac

SEQ ID NO: 455648 - DNA, 60 bp, Artificial
  Synthetic oligonucleotide
tatttatcaaggactacagatacacatatcggtgccacaggggtgatacacaaatccaaa

SEQ ID NO: 455649 - DNA, 58 bp, Artificial
  Synthetic oligonucleotide
tatttatcagcacgttcccaccggtattcaacctaacaataagatcaccttcgacatg

SEQ ID NO: 455650 - DNA, 60 bp, Artificial
  Synthetic oligonucleotide
tatttatgctgtagatccggagatcacacaacagtggatttccgatatgaaagcgaagac

SEQ ID NO: 455651 - DNA, 60 bp, Artificial
  Synthetic oligonucleotide
tatttatgttttgggtaagatctggatggatgagaacatcaagaccaagaatcatacgaa

SEQ ID NO: 455652 - DNA, 58 bp, Artificial
  Synthetic oligonucleotide
tatttattagccccattggctacccatctttgtaaggctcgtatatttccagacgata

SEQ ID NO: 455653 - DNA, 60 bp, Artificial
  Synthetic oligonucleotide
tatttattatcagtactatctaactgacactactaatgagattgaaagctatccggttta

SEQ ID NO: 455654 - DNA, 60 bp, Artificial
  Synthetic oligonucleotide
tatttcaacgcagactgctactattagtagaaggcttaggctaaaagaaatgacaacgca

SEQ ID NO: 455655 - DNA, 60 bp, Artificial
  Synthetic oligonucleotide
tatttcaagcagcctcacagaatgccatggaggcactaatggtcacaactgtagacaaat

SEQ ID NO: 455656 - DNA, 60 bp, Artificial
  Synthetic oligonucleotide
tatttcacatgttgtacttacatcttccagaagaaaccttagtatgactatgcctacaat

SEQ ID NO: 455657 - DNA, 55 bp, Artificial
  Synthetic oligonucleotide
tatttcagtcctaaagcagtgcaacaacttagtccacggttgcagtctttgtcta

SEQ ID NO: 455658 - DNA, 56 bp, Artificial
  Synthetic oligonucleotide
tatttcatatggtgaacggatccaaagactcggaagagttggacgaacaaaaccag

SEQ ID NO: 455659 - DNA, 57 bp, Artificial
  Synthetic oligonucleotide
tatttcatctccataatccgctacagaaacaattttgcctagctttactccgtaaaa

SEQ ID NO: 455660 - DNA, 60 bp, Artificial
  Synthetic oligonucleotide
tatttcattgccagtcgaggaacgatggcatatgacatcagcacagggagatcagccgac

SEQ ID NO: 455661 - DNA, 60 bp, Artificial
  Synthetic oligonucleotide
tatttcccctcgaactggatgaggacgtggagatgagggctcccattttgatgtagctct

SEQ ID NO: 455662 - DNA, 55 bp, Artificial
  Synthetic oligonucleotide
tatttcccctgaaagaaggagcacatctagaagtccaaggatactggaacctgac

SEQ ID NO: 455663 - DNA, 55 bp, Artificial
  Synthetic oligonucleotide
tatttcctaacatagaagacctacagtctttggacagtttggtatacaacagggg

SEQ ID NO: 455664 - DNA, 60 bp, Artificial
  Synthetic oligonucleotide
tatttcctcctcagagccgttaaagtcgaatgggatgaagacatcagcgaagttgtatgg

SEQ ID NO: 455665 - DNA, 57 bp, Artificial
  Synthetic oligonucleotide
tatttccttcaaagccgttgaagtcgaatggaacgtgcatggcttcgtacgtgtact

SEQ ID NO: 455666 - DNA, 51 bp, Artificial
  Synthetic oligonucleotide
tatttcgacagtgaaatagggctctttgcagagagggttggtgtaaaggtg

SEQ ID NO: 455667 - DNA, 50 bp, Artificial
  Synthetic oligonucleotide
tatttcgagaatattaggataatagtatggcaagaaactcgaatcgaccc

SEQ ID NO: 455668 - DNA, 53 bp, Artificial
  Synthetic oligonucleotide
tatttcggcacttacgtcacttacaaaagcctaaaatccctatcgtcagtcag

SEQ ID NO: 455669 - DNA, 59 bp, Artificial
  Synthetic oligonucleotide
tatttcgggagtgagtgccaatgcttgacattcggtgaaagtacaggcttgacgtttca

SEQ ID NO: 455670 - DNA, 54 bp, Artificial
  Synthetic oligonucleotide
tatttcgggggtcctctggacggtatatcacggagctggcaataagaccttggc

SEQ ID NO: 455671 - DNA, 55 bp, Artificial
  Synthetic oligonucleotide
tatttcgtggacaaccccactcagctcgccagcgaccaatacggatttatcggcg

SEQ ID NO: 455672 - DNA, 60 bp, Artificial
  Synthetic oligonucleotide
tatttcgtgttgatgatcaacacgaaacacaataaaaaatgacgatcacattcaggagca

SEQ ID NO: 455673 - DNA, 59 bp, Artificial
  Synthetic oligonucleotide
tatttctaagatggggagagcctcagttaggaaagttctagagacaggtcggtgctcca

SEQ ID NO: 455674 - DNA, 55 bp, Artificial
  Synthetic oligonucleotide
tatttctcagccaccgcgtgaaccccagtaccctgctgaagccaggccgctggac

SEQ ID NO: 455675 - DNA, 60 bp, Artificial
  Synthetic oligonucleotide
tatttctcatttcgtgagaaatatgttatgcagtccagatatgtcagagcacatatgtct

SEQ ID NO: 455676 - DNA, 60 bp, Artificial
  Synthetic oligonucleotide
tatttctggatccatcagacgactatatttccaaccaatactcagagctcctactccact

SEQ ID NO: 455677 - DNA, 60 bp, Artificial
  Synthetic oligonucleotide
tatttctggggtgtgcaccatcctcctaacaccgacgagcaagatactctgtatggctct

SEQ ID NO: 455678 - DNA, 60 bp, Artificial
  Synthetic oligonucleotide
tatttctggggtgttcaccatcctcctgacaccacagtgcaggataacttgtatgggtct

SEQ ID NO: 455679 - DNA, 60 bp, Artificial
  Synthetic oligonucleotide
tatttcttgcagcacctgggttgctgtacggtcggtgtaggctgctggtctgtcgcaacc

SEQ ID NO: 455680 - DNA, 60 bp, Artificial
  Synthetic oligonucleotide
tatttcttggaatattggagaacaataaggcagcaatacagaatgggagttgcactcttc

SEQ ID NO: 455681 - DNA, 59 bp, Artificial
  Synthetic oligonucleotide
tatttgaaagaagtcgcgaagtacgcatatagaaaaatatctggtggaaattctgcgag

SEQ ID NO: 455682 - DNA, 60 bp, Artificial
  Synthetic oligonucleotide
tatttgaatcggggcaaaaatggatgtatctgtcacaatgtaactcactgtcaaatttgt

SEQ ID NO: 455683 - DNA, 52 bp, Artificial
  Synthetic oligonucleotide
tatttgaatgaggtatattccagtcccgtgtgtactactagtcctgtcgtac

SEQ ID NO: 455684 - DNA, 55 bp, Artificial
  Synthetic oligonucleotide
tatttgaattggggcatcattgtcagcctaactatatagcatctaaccatccagg

SEQ ID NO: 455685 - DNA, 60 bp, Artificial
  Synthetic oligonucleotide
tatttgacaggagccactccatttctgcatagaatgaagaccctgatcttctacatgcac

SEQ ID NO: 455686 - DNA, 50 bp, Artificial
  Synthetic oligonucleotide
tatttgacgattcgggctttattcccgaattgaagtgtcactggagaaaa

SEQ ID NO: 455687 - DNA, 60 bp, Artificial
  Synthetic oligonucleotide
tatttgactgtgttcgtgttagacccacttgtgatgctgaatcacctgggtctagaacac

SEQ ID NO: 455688 - DNA, 60 bp, Artificial
  Synthetic oligonucleotide
tatttgagaggcatgatcaattgcgcgatatgagagaggcgaggaggattttatatttag

SEQ ID NO: 455689 - DNA, 56 bp, Artificial
  Synthetic oligonucleotide
tatttgagatttagtggtccaagtttcacctggttgtaataatatgggcctgttaa

SEQ ID NO: 455690 - DNA, 55 bp, Artificial
  Synthetic oligonucleotide
tatttgagggaaacaaggaaccagcggtgttaagaaatggagatcccagattgaa

SEQ ID NO: 455691 - DNA, 55 bp, Artificial
  Synthetic oligonucleotide
tatttgatgtatggctgactctttagtaacagggcattttggccacgtgaggaaa

SEQ ID NO: 455692 - DNA, 50 bp, Artificial
  Synthetic oligonucleotide
tatttgcaagcatcagctcccaattcgtaaatgtaaagctccttttggat

SEQ ID NO: 455693 - DNA, 60 bp, Artificial
  Synthetic oligonucleotide
tatttgccaccaccaacagctgtcacacaatatctagacacggatgactttgtcacacgc

SEQ ID NO: 455694 - DNA, 50 bp, Artificial
  Synthetic oligonucleotide
tatttgcgaagtaatgcaacccgctgtcatttacctgacgaaaatgagga

SEQ ID NO: 455695 - DNA, 55 bp, Artificial
  Synthetic oligonucleotide
tatttgctccacaaatggctagttctggttatcaaagggctaatggcactctagc

SEQ ID NO: 455696 - DNA, 58 bp, Artificial
  Synthetic oligonucleotide
tatttgctcggcagtcccgtcacattgggttccaacaagtcgaacaacctggtctata

SEQ ID NO: 455697 - DNA, 60 bp, Artificial
  Synthetic oligonucleotide
tatttgctgtaaatccatttcttggtgagactttagctgaggacacatttaacatactcg

SEQ ID NO: 455698 - DNA, 57 bp, Artificial
  Synthetic oligonucleotide
tatttggacctcaagtagttccactgtgttctgtggtgtttccagtgaggtcccagg

SEQ ID NO: 455699 - DNA, 58 bp, Artificial
  Synthetic oligonucleotide
tatttggatccctgtgatggaattgtcgggaagattctcgacgattgcaccgggttag

SEQ ID NO: 455700 - DNA, 55 bp, Artificial
  Synthetic oligonucleotide
tatttggccatactgattggattcagtagtatctaccagcttcagacaggcaata

SEQ ID NO: 455701 - DNA, 55 bp, Artificial
  Synthetic oligonucleotide
tatttggctgctgccagtgaggacagtcgtgacaatatttcagttgattataagc

SEQ ID NO: 455702 - DNA, 58 bp, Artificial
  Synthetic oligonucleotide
tatttgggcaaaggctgtgccgtcgttgacgtttgagtcttctaccttgtatacaagc

SEQ ID NO: 455703 - DNA, 55 bp, Artificial
  Synthetic oligonucleotide
tatttgggcgacaagatagccaaattccttagcactcaattcattgagacaatgg

SEQ ID NO: 455704 - DNA, 60 bp, Artificial
  Synthetic oligonucleotide
tatttgggtacttaactgtgtacaagagcccaagtgctgacaaaccctgcacaacatcat

SEQ ID NO: 455705 - DNA, 52 bp, Artificial
  Synthetic oligonucleotide
tatttgggtctacggcccaaatggtaacgaaggaaaatcacagtttggtaaa

SEQ ID NO: 455706 - DNA, 55 bp, Artificial
  Synthetic oligonucleotide
tatttgggtgaaaatccaaactcttatgaccgtcaattaaacatagaaaagtatc

SEQ ID NO: 455707 - DNA, 60 bp, Artificial
  Synthetic oligonucleotide
tatttgggttatgctgtcttctccagtcacaactgacaatacctccacaccacctttcac

SEQ ID NO: 455708 - DNA, 60 bp, Artificial
  Synthetic oligonucleotide
tatttggtcggaaatgcatcgtagcattcagccaaatgtgcaacatacctaccgaacgct

SEQ ID NO: 455709 - DNA, 60 bp, Artificial
  Synthetic oligonucleotide
tatttggtgacagagcgcaaggcaactcccgtactgcggatagtccagagtggttgcaga

SEQ ID NO: 455710 - DNA, 55 bp, Artificial
  Synthetic oligonucleotide
tatttggtgatcgcgctcaaggtagcagtgcatacttaggcagtccagagtgggt

SEQ ID NO: 455711 - DNA, 60 bp, Artificial
  Synthetic oligonucleotide
tatttgtagcgttaggtatagactacattgatataccgataactaacagcaacatctttg

SEQ ID NO: 455712 - DNA, 60 bp, Artificial
  Synthetic oligonucleotide
tatttgtatgtgctcagtaagtatctcacaacccagagtccacgaggatggttcatggag

SEQ ID NO: 455713 - DNA, 59 bp, Artificial
  Synthetic oligonucleotide
tatttgtcaaggtgattctcagcagataccatttattaaccgcgttgaatccataactt

SEQ ID NO: 455714 - DNA, 55 bp, Artificial
  Synthetic oligonucleotide
tatttgtcagctgttgatgtttgtggcatgtttactaacagatctgggtcccagc

SEQ ID NO: 455715 - DNA, 52 bp, Artificial
  Synthetic oligonucleotide
tatttgtcccgtacgatcaagagccactcaacggcggatggaaagccaacgt

SEQ ID NO: 455716 - DNA, 54 bp, Artificial
  Synthetic oligonucleotide
tatttgtgaggctcaagggtgtcaatataaaggatagtttttctccattgactc

SEQ ID NO: 455717 - DNA, 57 bp, Artificial
  Synthetic oligonucleotide
tatttgttctcagaacaagattggttactcggggacgctgtagcgtcgtcgtaccaa

SEQ ID NO: 455718 - DNA, 58 bp, Artificial
  Synthetic oligonucleotide
tatttgttcttgtttcgtggtagcatcgaggacgtgaaaatgtctagggtgctacgac

SEQ ID NO: 455719 - DNA, 60 bp, Artificial
  Synthetic oligonucleotide
tattttaactatcttacatccgtgtcacagaggtatggagcatcgcttccgtggtattcc

SEQ ID NO: 455720 - DNA, 60 bp, Artificial
  Synthetic oligonucleotide
tattttacagcggaagtgtcccattgcagggctactgaatacataatgaagggagtatac

SEQ ID NO: 455721 - DNA, 60 bp, Artificial
  Synthetic oligonucleotide
tattttagagagtacgcagatatagcagcattttcagttgatccacaactgtactgtgac

SEQ ID NO: 455722 - DNA, 60 bp, Artificial
  Synthetic oligonucleotide
tattttaggtgttctatctgcgaaatcatctaccattgttatcaatggtatgtccatgca

SEQ ID NO: 455723 - DNA, 60 bp, Artificial
  Synthetic oligonucleotide
tattttatacaatagtcgactatgtgaatcagattgtgcaagcgatgtccaaaagatcga

SEQ ID NO: 455724 - DNA, 58 bp, Artificial
  Synthetic oligonucleotide
tattttatacggttgtagattacgttaaccagataattcaagcgatgtccaagagatc

SEQ ID NO: 455725 - DNA, 60 bp, Artificial
  Synthetic oligonucleotide
tattttatactattgtagactatatagatactatagttaatgcgatgtctaaacgtgcaa

SEQ ID NO: 455726 - DNA, 54 bp, Artificial
  Synthetic oligonucleotide
tattttcaaatgtccaatactttgcacactactgcaggaaatacgcgcccctgt

SEQ ID NO: 455727 - DNA, 55 bp, Artificial
  Synthetic oligonucleotide
tattttcacagggtactacaaagagggctcttcatgcaccttacccaagggtgtc

SEQ ID NO: 455728 - DNA, 60 bp, Artificial
  Synthetic oligonucleotide
tattttcatacttcagatgcctcaagatttcgagtctttgatgctgctaaattcgacgtc

SEQ ID NO: 455729 - DNA, 60 bp, Artificial
  Synthetic oligonucleotide
tattttcatcatctgagggatccaatgtctcatgacaatgcaggtcctcctcagtacccc

SEQ ID NO: 455730 - DNA, 55 bp, Artificial
  Synthetic oligonucleotide
tattttccatatgagatttaaaggagcgcattatgagccgctactcgaagattca

SEQ ID NO: 455731 - DNA, 60 bp, Artificial
  Synthetic oligonucleotide
tattttcgacgtggctagagttccagatgatcaaatgtatcggctaagggacagactacg

SEQ ID NO: 455732 - DNA, 58 bp, Artificial
  Synthetic oligonucleotide
tattttcgagaagcgtatacaaatacgcggggtcggagaagctaggcgcatcatttac

SEQ ID NO: 455733 - DNA, 60 bp, Artificial
  Synthetic oligonucleotide
tattttctgagatggacacggcagattacgctgacatgctgcacctgacgatctttgaag

SEQ ID NO: 455734 - DNA, 58 bp, Artificial
  Synthetic oligonucleotide
tattttgacaaccacagtcaaaaccaagcatcccattacaattgaattcttcccaggc

SEQ ID NO: 455735 - DNA, 55 bp, Artificial
  Synthetic oligonucleotide
tattttgacgtatgcagtcacatcgtttacgcaatagtcagactgtagttcgatc

SEQ ID NO: 455736 - DNA, 52 bp, Artificial
  Synthetic oligonucleotide
tattttgagagtcgaaagagcttatgggattgtatcaccaatcgaattagaa

SEQ ID NO: 455737 - DNA, 50 bp, Artificial
  Synthetic oligonucleotide
tattttgattgttttgcagaaactgccataaggaaagccttattaggaca

SEQ ID NO: 455738 - DNA, 55 bp, Artificial
  Synthetic oligonucleotide
tattttgcgtctccggagtcttctcgacacaatccaggtcgtgtgcgtgacctgt

SEQ ID NO: 455739 - DNA, 60 bp, Artificial
  Synthetic oligonucleotide
tattttgctacctctatagtcgatgctggaataaccatacctcatgtaggtgtggtcatt

SEQ ID NO: 455740 - DNA, 56 bp, Artificial
  Synthetic oligonucleotide
tattttggaagaatgctacagaacaatccacggaggaagggggccagttcgtcacc

SEQ ID NO: 455741 - DNA, 60 bp, Artificial
  Synthetic oligonucleotide
tattttggaggttgctgatcccagtcctcctgcacgaacaagagtgtctcgcacacaata

SEQ ID NO: 455742 - DNA, 57 bp, Artificial
  Synthetic oligonucleotide
tattttggataccaaggagtgccgaataacatcgtgaaaacaagaggtaactctgaa

SEQ ID NO: 455743 - DNA, 55 bp, Artificial
  Synthetic oligonucleotide
tattttgggcgccggcatatcgttgcttggaccagggccccacgccggttggtac

SEQ ID NO: 455744 - DNA, 57 bp, Artificial
  Synthetic oligonucleotide
tattttgtccctgtcagggtgctcgaggataggctccctagcggtgtgaggtatact

SEQ ID NO: 455745 - DNA, 60 bp, Artificial
  Synthetic oligonucleotide
tattttgtcgaaacactagcaaggagcatttgtgagaagcttgagcaatctggactccca

SEQ ID NO: 455746 - DNA, 54 bp, Artificial
  Synthetic oligonucleotide
tattttgtttgatatatctcattatttgtaagcctcgtacttacagtacagacc

SEQ ID NO: 455747 - DNA, 60 bp, Artificial
  Synthetic oligonucleotide
tatttttatcatgctaacagcgacaggctgctcacggtgggcaatccattttatgccatc

SEQ ID NO: 455748 - DNA, 60 bp, Artificial
  Synthetic oligonucleotide
tatttttccagaactcgcgcgagtggtgggtccagaacgcacgactatgcagactcaaag

SEQ ID NO: 455749 - DNA, 55 bp, Artificial
  Synthetic oligonucleotide
tatttttgaccatagaatcgggaataatggcgcttcgacaagtataaaaaccctg

SEQ ID NO: 455750 - DNA, 55 bp, Artificial
  Synthetic oligonucleotide
tatttttgcgcatcaagaaacaggcactacccagttacatttgaaggcccgggtt

SEQ ID NO: 455751 - DNA, 60 bp, Artificial
  Synthetic oligonucleotide
tatttttgtgtgcctgagtatggcacccagcacggccgtttacattttcacgcagtgcac

SEQ ID NO: 455752 - DNA, 49 bp, Artificial
  Synthetic oligonucleotide
tcaaaaaacgtgaaacccccccaaaaccatcagggggggaagagtacca

SEQ ID NO: 455753 - DNA, 60 bp, Artificial
  Synthetic oligonucleotide
tcaaaaacacaatacctaatgacataattaaagctcaagattcattatattttatcgcag

SEQ ID NO: 455754 - DNA, 57 bp, Artificial
  Synthetic oligonucleotide
tcaaaaacagaagaaactacggacatcttaacgagttctggtggagccacgcgagac

SEQ ID NO: 455755 - DNA, 55 bp, Artificial
  Synthetic oligonucleotide
tcaaaaacgattcgtcctttgccgggtggctgggaaaatctgcatttagacttaa

SEQ ID NO: 455756 - DNA, 53 bp, Artificial
  Synthetic oligonucleotide
tcaaaaactgtggaccattgaagccatatcattattagatctaatatctctca

SEQ ID NO: 455757 - DNA, 57 bp, Artificial
  Synthetic oligonucleotide
tcaaaaacttatacgataaggtccgacaccagctgagggacaatgcaaaggaattag

SEQ ID NO: 455758 - DNA, 58 bp, Artificial
  Synthetic oligonucleotide
tcaaaaagaacaatgcatacccaacaataacaaggagttacaataacaccaatcaaga

SEQ ID NO: 455759 - DNA, 58 bp, Artificial
  Synthetic oligonucleotide
tcaaaaatccctttcgaatcttggactgtcgcttctcagattactggtatcgcccaag

SEQ ID NO: 455760 - DNA, 56 bp, Artificial
  Synthetic oligonucleotide
tcaaaaatgaccgaggggggagctaggagcgtaggggggccagcggagccatggga

SEQ ID NO: 455761 - DNA, 60 bp, Artificial
  Synthetic oligonucleotide
tcaaaaattgagaactgttcactcaatggcacaggttgattcaggtttgactgttcattt

SEQ ID NO: 455762 - DNA, 60 bp, Artificial
  Synthetic oligonucleotide
tcaaaacagcatactaggatccagatatagatccttgctggaggctatacagaattctga

SEQ ID NO: 455763 - DNA, 60 bp, Artificial
  Synthetic oligonucleotide
tcaaaacagccaggtctttagtctcattagaccaaatgagaatccagcacataagagtca

SEQ ID NO: 455764 - DNA, 57 bp, Artificial
  Synthetic oligonucleotide
tcaaaacaggaatttgtcacctttcatgaggggggcccacaatatatcgtttgtcac

SEQ ID NO: 455765 - DNA, 60 bp, Artificial
  Synthetic oligonucleotide
tcaaaacagtagagtcatatacactacctagaatcgttgcagtaaaaaatcacgaggtga

SEQ ID NO: 455766 - DNA, 60 bp, Artificial
  Synthetic oligonucleotide
tcaaaacatgagaggagccttagatggcaatacaatgtgtgtagatgcaaaacatagagt

SEQ ID NO: 455767 - DNA, 55 bp, Artificial
  Synthetic oligonucleotide
tcaaaaccacccgtggacatcaacccagatacgacgtttcgtgagttatttggag

SEQ ID NO: 455768 - DNA, 55 bp, Artificial
  Synthetic oligonucleotide
tcaaaaccagttcgtgcttgaacttggcactggatcaaaagccgatgccactaag

SEQ ID NO: 455769 - DNA, 55 bp, Artificial
  Synthetic oligonucleotide
tcaaaaccctgagtatgctaggcgtctcaaaccttttcaggcccgctcctggact

SEQ ID NO: 455770 - DNA, 56 bp, Artificial
  Synthetic oligonucleotide
tcaaaacctcattactacctacccacgaaacatccctgtttacaagtgacacttgc

SEQ ID NO: 455771 - DNA, 60 bp, Artificial
  Synthetic oligonucleotide
tcaaaacgcaccacgaagagagtgtcatgcggaatgtcgatgttaaccttacccacgaca

SEQ ID NO: 455772 - DNA, 56 bp, Artificial
  Synthetic oligonucleotide
tcaaaacggtccgcgactatcaaatgagggtggcaaaagaacaggtcgcagggggc

SEQ ID NO: 455773 - DNA, 59 bp, Artificial
  Synthetic oligonucleotide
tcaaaacgtaaacaagatcacatatggagcctgccccaaatacgttaagcagaacagcc

SEQ ID NO: 455774 - DNA, 57 bp, Artificial
  Synthetic oligonucleotide
tcaaaacgtaaataaaatcacatatggagcctgccccaagtatgttaagcaaaacac

SEQ ID NO: 455775 - DNA, 57 bp, Artificial
  Synthetic oligonucleotide
tcaaaacgtaatcgctggtgccagtctccggatttcgggtcattgctaacccgagtg

SEQ ID NO: 455776 - DNA, 57 bp, Artificial
  Synthetic oligonucleotide
tcaaaacgtgctctcttggactcccattctccgtcccccgttatacctgtggatgaa

SEQ ID NO: 455777 - DNA, 57 bp, Artificial
  Synthetic oligonucleotide
tcaaaactctctcagtcgtatttatataatatccttgacaatagtaaattaccgtta

SEQ ID NO: 455778 - DNA, 60 bp, Artificial
  Synthetic oligonucleotide
tcaaaactctgattgcagcgatgttgagtcagcgaactatgtcactagactttgtgacta

SEQ ID NO: 455779 - DNA, 51 bp, Artificial
  Synthetic oligonucleotide
tcaaaactgataaagggttcgtgaaagcgaaaactaactggtacgtaaacc

SEQ ID NO: 455780 - DNA, 55 bp, Artificial
  Synthetic oligonucleotide
tcaaaactgcattagataaatatggggtagatttacctatggtaacctttctaaa

SEQ ID NO: 455781 - DNA, 60 bp, Artificial
  Synthetic oligonucleotide
tcaaaactggggagttgaacccattgacaatgtcatggggatgattgggatattgcctga

SEQ ID NO: 455782 - DNA, 51 bp, Artificial
  Synthetic oligonucleotide
tcaaaactgtaccagattttgaaagacccagcagttgatgctctttgcgag

SEQ ID NO: 455783 - DNA, 60 bp, Artificial
  Synthetic oligonucleotide
tcaaaagaaggaggtactttccgctactgaggctctaatcaaacatacatatgaagagca

SEQ ID NO: 455784 - DNA, 60 bp, Artificial
  Synthetic oligonucleotide
tcaaaagacaatgcactcgagacggatgaactagtacttcatgtcgacatcgagcaccaa

SEQ ID NO: 455785 - DNA, 55 bp, Artificial
  Synthetic oligonucleotide
tcaaaagacattggacgagcatgatgcgaatgtcaggaatctccatgaccgagtc

SEQ ID NO: 455786 - DNA, 60 bp, Artificial
  Synthetic oligonucleotide
tcaaaagatcagagcagttggcgttgcactcattggaatggggatccccgagcatcaact

SEQ ID NO: 455787 - DNA, 60 bp, Artificial
  Synthetic oligonucleotide
tcaaaagcatgccatgtgagtatttgctctgatccttgaagcttttcacatcgtgaggct

SEQ ID NO: 455788 - DNA, 54 bp, Artificial
  Synthetic oligonucleotide
tcaaaagcccatttaaatttggtgccaggaactgaggcaattgcaggagttgct

SEQ ID NO: 455789 - DNA, 55 bp, Artificial
  Synthetic oligonucleotide
tcaaaagcttacgggcagatgtggctgctgagttacttccaccggcgcgacttgc

SEQ ID NO: 455790 - DNA, 57 bp, Artificial
  Synthetic oligonucleotide
tcaaaaggagaaactggagctacgaaaaagggtagagatccttgagacgatgatccc

SEQ ID NO: 455791 - DNA, 59 bp, Artificial
  Synthetic oligonucleotide
tcaaaaggcaagttgtggtcgataacttgaattggtcaggatacagtggttccttcaca

SEQ ID NO: 455792 - DNA, 60 bp, Artificial
  Synthetic oligonucleotide
tcaaaaggtgacctgtgtgtgcagagacaactggcagggggcaaacaggcctattataga

SEQ ID NO: 455793 - DNA, 60 bp, Artificial
  Synthetic oligonucleotide
tcaaaagtgtactcaaatccacttgcatagaaccaatatagatcatgaccttcatccata

SEQ ID NO: 455794 - DNA, 60 bp, Artificial
  Synthetic oligonucleotide
tcaaaataactacattgtgcacctgcctgacattccagccaggggaggtggattcggagg

SEQ ID NO: 455795 - DNA, 58 bp, Artificial
  Synthetic oligonucleotide
tcaaaataatcttctattagtcttgtaaacatctttgtcctcaaatctccaatataaa

SEQ ID NO: 455796 - DNA, 57 bp, Artificial
  Synthetic oligonucleotide
tcaaaatacagttgctaatgggtctagcttgaactattttaacatcaactattttaa

SEQ ID NO: 455797 - DNA, 50 bp, Artificial
  Synthetic oligonucleotide
tcaaaatacgccgccgagttgatgtgaacccaggccatgcagacctaagt

SEQ ID NO: 455798 - DNA, 58 bp, Artificial
  Synthetic oligonucleotide
tcaaaatagaatgggaaatccagaaggagcggtccaagagatggaacccagaggtcca

SEQ ID NO: 455799 - DNA, 60 bp, Artificial
  Synthetic oligonucleotide
tcaaaatagaatggtgacgttatgagtcagagaggcatatcaaaagggttgctagtttgt

SEQ ID NO: 455800 - DNA, 58 bp, Artificial
  Synthetic oligonucleotide
tcaaaatagacataggtttttcaccctctatgggttctgcaattgacagattccttaa

SEQ ID NO: 455801 - DNA, 51 bp, Artificial
  Synthetic oligonucleotide
tcaaaatatcaaagcttgtgtcggatctctttggaaacacagtgacagttc

SEQ ID NO: 455802 - DNA, 58 bp, Artificial
  Synthetic oligonucleotide
tcaaaatatcgaaaagaggtagttcagggatcatgaaaacagaaggaacacttgagaa

SEQ ID NO: 455803 - DNA, 51 bp, Artificial
  Synthetic oligonucleotide
tcaaaatctgcccaacttgggacagcagaaagcagtacatgatggtttcga

SEQ ID NO: 455804 - DNA, 58 bp, Artificial
  Synthetic oligonucleotide
tcaaaatctgtcacccagaacagtaggtcaatgccccaaatacgtaaatcagaggagt

SEQ ID NO: 455805 - DNA, 60 bp, Artificial
  Synthetic oligonucleotide
tcaaaatgaatccaaatcagaagataataaccattggatcaatctgtatggtaattggaa

SEQ ID NO: 455806 - DNA, 55 bp, Artificial
  Synthetic oligonucleotide
tcaaaatgagcagggatctggttacgcagcagatcagaaaagtacacaaatcgca

SEQ ID NO: 455807 - DNA, 60 bp, Artificial
  Synthetic oligonucleotide
tcaaaatgatatgccgctgcgtaatcaagcaggaggaatgcggctctacaaaaatagatg

SEQ ID NO: 455808 - DNA, 55 bp, Artificial
  Synthetic oligonucleotide
tcaaaatgcctaagcgtgatgctccttggcgattaacggcggggaccgccaagat

SEQ ID NO: 455809 - DNA, 55 bp, Artificial
  Synthetic oligonucleotide
tcaaaatggagggcataacaacgtggattggatcaaactgcggtggggttcagga

SEQ ID NO: 455810 - DNA, 56 bp, Artificial
  Synthetic oligonucleotide
tcaaaatggccgcgccaagtgcccatttggcgatgtggcgggtgtggcgggttttt

SEQ ID NO: 455811 - DNA, 50 bp, Artificial
  Synthetic oligonucleotide
tcaaaatgggccaatccaatgcagtcaaatcaggctctcagtgcacctgg

SEQ ID NO: 455812 - DNA, 60 bp, Artificial
  Synthetic oligonucleotide
tcaaaatgggtgaacaccgtaacattgtgtcgattgtcccattcgcaacttgccgctcga

SEQ ID NO: 455813 - DNA, 56 bp, Artificial
  Synthetic oligonucleotide
tcaaaatggtaaagagagatgccccatggcgtttaatggcggggacctcaaaggtc

SEQ ID NO: 455814 - DNA, 60 bp, Artificial
  Synthetic oligonucleotide
tcaaaatgtagacactagtttagcttacatgtctgacacactacatttcatgaactttaa

SEQ ID NO: 455815 - DNA, 60 bp, Artificial
  Synthetic oligonucleotide
tcaaaattaccccatagtgcaaaatgcacaagggcaaatggtacatcagtccatgtcacc

SEQ ID NO: 455816 - DNA, 60 bp, Artificial
  Synthetic oligonucleotide
tcaaaattcttgctgatggatgccctgaaactaagcattgaagacccgagtcatgaggga

SEQ ID NO: 455817 - DNA, 59 bp, Artificial
  Synthetic oligonucleotide
tcaaacaaagattggcgttcctaaggtgtccgctaatcaatacagagtattcagaataa

SEQ ID NO: 455818 - DNA, 57 bp, Artificial
  Synthetic oligonucleotide
tcaaacaacttggctatttaatccggtacaattaatgaatggaacatttaccattga

SEQ ID NO: 455819 - DNA, 55 bp, Artificial
  Synthetic oligonucleotide
tcaaacaagtttattagaaggtgggtgctggtttttcaaccggtcagactgccac

SEQ ID NO: 455820 - DNA, 60 bp, Artificial
  Synthetic oligonucleotide
tcaaacaatccagattgggacttcaacccacacaaggacagctggcccgatgccacaaag

SEQ ID NO: 455821 - DNA, 58 bp, Artificial
  Synthetic oligonucleotide
tcaaacaatccagattgggacttcaaccccaacaaagacaattggccagaagccacca

SEQ ID NO: 455822 - DNA, 55 bp, Artificial
  Synthetic oligonucleotide
tcaaacacacataaccatcggaagtggatttgccgcccctggcgactgcggtggt

SEQ ID NO: 455823 - DNA, 60 bp, Artificial
  Synthetic oligonucleotide
tcaaacacatatagtagcgctatacatacgagacgcatgatcaggtcgcgagcagtacac

SEQ ID NO: 455824 - DNA, 52 bp, Artificial
  Synthetic oligonucleotide
tcaaacagaccaatcaggaccttctacgtgcacttcctggggcgtgtctacg

SEQ ID NO: 455825 - DNA, 54 bp, Artificial
  Synthetic oligonucleotide
tcaaacagactgtgtgttggaggcaatggcttttcttgaggagtcccaccccgg

SEQ ID NO: 455826 - DNA, 60 bp, Artificial
  Synthetic oligonucleotide
tcaaacagatggtgagaccagacttggtgcgggtccagctggatgagcaagaacagggtc

SEQ ID NO: 455827 - DNA, 60 bp, Artificial
  Synthetic oligonucleotide
tcaaacagcaacctaagggggctgttcagttaaggccatgttcgtatgagcaagcaaaga

SEQ ID NO: 455828 - DNA, 55 bp, Artificial
  Synthetic oligonucleotide
tcaaacaggcagtactgttgaatgtactaggagcaggagatgagattccggaccc

SEQ ID NO: 455829 - DNA, 60 bp, Artificial
  Synthetic oligonucleotide
tcaaacagggatctttgaaacttgctacgggaatgaggagcatccttgagaaggcaacca

SEQ ID NO: 455830 - DNA, 57 bp, Artificial
  Synthetic oligonucleotide
tcaaacagggcatagacagtcgcaggacccgtagaccaggcataaacgttagccggg

SEQ ID NO: 455831 - DNA, 59 bp, Artificial
  Synthetic oligonucleotide
tcaaacattacaggattactgttaacaagagatggtgggaataaaagcagtacaagtga

SEQ ID NO: 455832 - DNA, 55 bp, Artificial
  Synthetic oligonucleotide
tcaaaccaggaccgatctactaccaggactatgtggggcccgtctatcatagagc

SEQ ID NO: 455833 - DNA, 55 bp, Artificial
  Synthetic oligonucleotide
tcaaaccaggccgtatgacttactatgcagagccgttctttaactggtcaagacg

SEQ ID NO: 455834 - DNA, 59 bp, Artificial
  Synthetic oligonucleotide
tcaaaccatcaggacaccccgagaaacagcgtcagttgttacgctatagtggaattggc

SEQ ID NO: 455835 - DNA, 55 bp, Artificial
  Synthetic oligonucleotide
tcaaacccagcttggctcaatcagccggctttgatagtcaccgcccaccacctga

SEQ ID NO: 455836 - DNA, 60 bp, Artificial
  Synthetic oligonucleotide
tcaaacccatctgtcaaccgagtctacgacgtgcagtcccgcacacgcgggtggagcttc

SEQ ID NO: 455837 - DNA, 55 bp, Artificial
  Synthetic oligonucleotide
tcaaaccccagtgggtgctataaattcaagtatgcctttccacaatgttcacccc

SEQ ID NO: 455838 - DNA, 56 bp, Artificial
  Synthetic oligonucleotide
tcaaacccgggtagccttcttctacgacagagctgtcccaataggtatgttggggc

SEQ ID NO: 455839 - DNA, 55 bp, Artificial
  Synthetic oligonucleotide
tcaaaccgcttccgaaagaacgacctgatcttgtcaagattgctactatggggga

SEQ ID NO: 455840 - DNA, 60 bp, Artificial
  Synthetic oligonucleotide
tcaaaccgttgataacatctacccacaattacacagcggctccagagcctctgaacagct

SEQ ID NO: 455841 - DNA, 55 bp, Artificial
  Synthetic oligonucleotide
tcaaacctatggcggcaaccgatttacagtcggcggtcccataacttccaaccaa

SEQ ID NO: 455842 - DNA, 60 bp, Artificial
  Synthetic oligonucleotide
tcaaacctgactgcttctttatccatgatgaagtgcatttttggagtccttccaatctgt

SEQ ID NO: 455843 - DNA, 58 bp, Artificial
  Synthetic oligonucleotide
tcaaaccttctgcctactcggatttttcccgtgtgagggataattgggatgcgattgc

SEQ ID NO: 455844 - DNA, 53 bp, Artificial
  Synthetic oligonucleotide
tcaaacgacaatgtagtgcctttcctctgttgtgttactggttagcgaatcgg

SEQ ID NO: 455845 - DNA, 59 bp, Artificial
  Synthetic oligonucleotide
tcaaacgagagcacacttgttgacgaattagctcagtccacttttataaatccctttga

SEQ ID NO: 455846 - DNA, 55 bp, Artificial
  Synthetic oligonucleotide
tcaaacgaggcctcataaggaaagatcagtttgctcgctatcttgacacatgcgg

SEQ ID NO: 455847 - DNA, 57 bp, Artificial
  Synthetic oligonucleotide
tcaaacgaggctttccgtatttgcagtttgtctgccatttctgttgggcccctatta

SEQ ID NO: 455848 - DNA, 60 bp, Artificial
  Synthetic oligonucleotide
tcaaacgcaagtttgtgcattatcaagggcatgttgtggcacctctcaatcctgtaaata

SEQ ID NO: 455849 - DNA, 55 bp, Artificial
  Synthetic oligonucleotide
tcaaacggtggggtatttgggggtcgtggattggggtgccgcgatccgatgcgtc

SEQ ID NO: 455850 - DNA, 58 bp, Artificial
  Synthetic oligonucleotide
tcaaacgtgtgttgaatactcctggtgtttcggatgctgtaccccggatactgtccca

SEQ ID NO: 455851 - DNA, 55 bp, Artificial
  Synthetic oligonucleotide
tcaaacgttagcatgaacatgcaaattccgtacatcaagttcggctcttttggcg

SEQ ID NO: 455852 - DNA, 58 bp, Artificial
  Synthetic oligonucleotide
tcaaactagtaccagtaccagcagaggaggtagaaaaggccaatgaaggagagaacaa

SEQ ID NO: 455853 - DNA, 60 bp, Artificial
  Synthetic oligonucleotide
tcaaactcaacagtttaagagggataaacttgaggcatgggctagggaagatgatcagta

SEQ ID NO: 455854 - DNA, 60 bp, Artificial
  Synthetic oligonucleotide
tcaaactcaatgaccacgaaggaagactgattcaaaatagcattacaatagagagaatgg

SEQ ID NO: 455855 - DNA, 60 bp, Artificial
  Synthetic oligonucleotide
tcaaactcagcgactatgaaggaaggctgatccagaacagcataacaatagagagaatgg

SEQ ID NO: 455856 - DNA, 60 bp, Artificial
  Synthetic oligonucleotide
tcaaactcagtgactacgaagggagactgatccaaaacagcataaccatagagagaatgg

SEQ ID NO: 455857 - DNA, 60 bp, Artificial
  Synthetic oligonucleotide
tcaaactcattctacagaagtatgagatggctgacacacaagaacaattcttaccctatt

SEQ ID NO: 455858 - DNA, 59 bp, Artificial
  Synthetic oligonucleotide
tcaaactccataattgcctcaaatagatcctccaacccccgctcacattcctcccatag

SEQ ID NO: 455859 - DNA, 60 bp, Artificial
  Synthetic oligonucleotide
tcaaactgctagaattttgcagagagctgtagaacaaggaattagacaattcgtgataac

SEQ ID NO: 455860 - DNA, 60 bp, Artificial
  Synthetic oligonucleotide
tcaaacttgatgtctctggtgtgataaacattaagtcttcgaatggagaccagaacatgg

SEQ ID NO: 455861 - DNA, 55 bp, Artificial
  Synthetic oligonucleotide
tcaaacttggagaggagaattgacaacctaaacaaaagaatggaggatgggtttc

SEQ ID NO: 455862 - DNA, 60 bp, Artificial
  Synthetic oligonucleotide
tcaaactttctcctacaacggctacacctatggcattgaacgctgtgtgatctacgctgg

SEQ ID NO: 455863 - DNA, 60 bp, Artificial
  Synthetic oligonucleotide
tcaaactttgatctagacctcagcagatacctctacactataataaagctatacagacac

SEQ ID NO: 455864 - DNA, 58 bp, Artificial
  Synthetic oligonucleotide
tcaaagaaagccaaaggatgggtttatagacatcactttgaaagcaggaatccaagag

SEQ ID NO: 455865 - DNA, 51 bp, Artificial
  Synthetic oligonucleotide
tcaaagaaaggcatgtgcggtggactcctagttactagagtgaatggaaca

SEQ ID NO: 455866 - DNA, 60 bp, Artificial
  Synthetic oligonucleotide
tcaaagaaccctgtctgatttacgagaggctgcaagtcgctatcgagaacagaaggctga

SEQ ID NO: 455867 - DNA, 60 bp, Artificial
  Synthetic oligonucleotide
tcaaagaagctgaagcgaccatcgctcagctacaccgcgaaccagaactgctcaacgacg

SEQ ID NO: 455868 - DNA, 57 bp, Artificial
  Synthetic oligonucleotide
tcaaagaataatatggcaaaattggtatgcgtttacgtcctcgatgaaacaaggtaa

SEQ ID NO: 455869 - DNA, 60 bp, Artificial
  Synthetic oligonucleotide
tcaaagaatggcatccaagattggaagatggtactcccgaacgatgtctaaaactgagag

SEQ ID NO: 455870 - DNA, 59 bp, Artificial
  Synthetic oligonucleotide
tcaaagacagaacaccgtatagatcgctaatccggttcccaatagggacagctccagta

SEQ ID NO: 455871 - DNA, 60 bp, Artificial
  Synthetic oligonucleotide
tcaaagacgtgcaataatgggtgcgattaaagtgggcctaagcttaattggagagattga

SEQ ID NO: 455872 - DNA, 60 bp, Artificial
  Synthetic oligonucleotide
tcaaagactaagcggtgccatggatgaactccacaacgaaatactcgagctggatgagaa

SEQ ID NO: 455873 - DNA, 53 bp, Artificial
  Synthetic oligonucleotide
tcaaagagaaataattaaccggcaaaaacaaaagtggcggaccccagcactgt

SEQ ID NO: 455874 - DNA, 60 bp, Artificial
  Synthetic oligonucleotide
tcaaagagagatcaagcctcagatatggaaatgtccttgatgtgaatgccattgatattg

SEQ ID NO: 455875 - DNA, 50 bp, Artificial
  Synthetic oligonucleotide
tcaaagagcaccaacgaacggagttccagagctggtttagcaaagtcttc

SEQ ID NO: 455876 - DNA, 52 bp, Artificial
  Synthetic oligonucleotide
tcaaagaggaagaatcgattattactggtctgttttgaaaccgggggaaacc

SEQ ID NO: 455877 - DNA, 60 bp, Artificial
  Synthetic oligonucleotide
tcaaagagggaaaaattagtcacattagcccattgtcaggaagtgctcagcatatagagg

SEQ ID NO: 455878 - DNA, 51 bp, Artificial
  Synthetic oligonucleotide
tcaaagatactcggtgggaggtaagatagatagtggaatactagctcactt

SEQ ID NO: 455879 - DNA, 60 bp, Artificial
  Synthetic oligonucleotide
tcaaagatatgcaatttcgtcgcatcttgtgtgagaaatagggttgggcgattcgatcga

SEQ ID NO: 455880 - DNA, 60 bp, Artificial
  Synthetic oligonucleotide
tcaaagatcatagctaagcagcagactattgctaagtctcctggacgtctcgatgaggaa

SEQ ID NO: 455881 - DNA, 60 bp, Artificial
  Synthetic oligonucleotide
tcaaagatgtcttagagaaaggaatccccaccttacaatctcctacagtggaagcatgtg

SEQ ID NO: 455882 - DNA, 51 bp, Artificial
  Synthetic oligonucleotide
tcaaagattcaaaagggtagcagatcaaactaaagacgttgaattgaatgc

SEQ ID NO: 455883 - DNA, 58 bp, Artificial
  Synthetic oligonucleotide
tcaaagcaagtagtaattttgatgagaaatggtacaattacaacgagtgctcaaaaaa

SEQ ID NO: 455884 - DNA, 60 bp, Artificial
  Synthetic oligonucleotide
tcaaagcaccagaatatccctgcgcccagggccagtgtctcagccataccatcactggga

SEQ ID NO: 455885 - DNA, 60 bp, Artificial
  Synthetic oligonucleotide
tcaaagcacgacagatgatcagcccagtaatgagtgtgataggattcatggcacttgcta

SEQ ID NO: 455886 - DNA, 55 bp, Artificial
  Synthetic oligonucleotide
tcaaagcaggatgggaattttgtatacccgtgctgttgtgtcacgcaggatgatg

SEQ ID NO: 455887 - DNA, 60 bp, Artificial
  Synthetic oligonucleotide
tcaaagcatcagttgcagaaccatcattcagaattattaggactagagtgaacagtttat

SEQ ID NO: 455888 - DNA, 60 bp, Artificial
  Synthetic oligonucleotide
tcaaagcatggtcttgcattgagtacagacccaatcctaacgctatgctgtatcatttcg

SEQ ID NO: 455889 - DNA, 57 bp, Artificial
  Synthetic oligonucleotide
tcaaagccagtgttctccagcatgttccgtggtacatgccaacgcacacaccagctc

SEQ ID NO: 455890 - DNA, 60 bp, Artificial
  Synthetic oligonucleotide
tcaaagccggggctgaagtcacatcgcgagtcattaatggttgcggaacgttcattcgaa

SEQ ID NO: 455891 - DNA, 60 bp, Artificial
  Synthetic oligonucleotide
tcaaagcgtggcgccaagggaagagtcgcgctggatggatgatgatgaagcaaaggtgga

SEQ ID NO: 455892 - DNA, 50 bp, Artificial
  Synthetic oligonucleotide
tcaaagctaggaatatcatcagtcctgttatgggtgttattgggttcaac

SEQ ID NO: 455893 - DNA, 52 bp, Artificial
  Synthetic oligonucleotide
tcaaagcttaaataactctcccgccgttataaatacttcgggcctaagtatt

SEQ ID NO: 455894 - DNA, 54 bp, Artificial
  Synthetic oligonucleotide
tcaaagcttaattatttaatggtccactataaaacttagcccccaagtattcac

SEQ ID NO: 455895 - DNA, 60 bp, Artificial
  Synthetic oligonucleotide
tcaaagcttgagatgaacgtatcctatggaagcgtactctacaagtacgatgctccacgc

SEQ ID NO: 455896 - DNA, 60 bp, Artificial
  Synthetic oligonucleotide
tcaaaggaaccgttaagatcgagcgtgttcatgctgatgtgaatatggatggtttatcac

SEQ ID NO: 455897 - DNA, 56 bp, Artificial
  Synthetic oligonucleotide
tcaaaggagttgggacaatggtgatggagttgataaggatgatcaaacgtgggatc

SEQ ID NO: 455898 - DNA, 60 bp, Artificial
  Synthetic oligonucleotide
tcaaaggatcttctggcggacccgtactctgctctaggggacatgtcgtgggcttgttca

SEQ ID NO: 455899 - DNA, 58 bp, Artificial
  Synthetic oligonucleotide
tcaaaggattcggtttcctagatagtagcaatacatggttaggccgcacaataagtcc

SEQ ID NO: 455900 - DNA, 57 bp, Artificial
  Synthetic oligonucleotide
tcaaaggcaagtacataatggctttcaacccaccttggggggacatcaacaagtcag

SEQ ID NO: 455901 - DNA, 53 bp, Artificial
  Synthetic oligonucleotide
tcaaaggcgtgtctaataaatttttattcagcccctctagcgccgtggtcttt

SEQ ID NO: 455902 - DNA, 50 bp, Artificial
  Synthetic oligonucleotide
tcaaagggaatatcatgcaaggcggttcttctcaaacttctttgaggaaa

SEQ ID NO: 455903 - DNA, 55 bp, Artificial
  Synthetic oligonucleotide
tcaaagggacttacaacaacactggaaaccagccaatcctctatttctggggtgt

SEQ ID NO: 455904 - DNA, 55 bp, Artificial
  Synthetic oligonucleotide
tcaaagggagcccgagccccttttatatgtatactcagagacccagttcatggag

SEQ ID NO: 455905 - DNA, 59 bp, Artificial
  Synthetic oligonucleotide
tcaaagggcccaattgtccagatgtacaccaatgtagaccaggacctcgttggttggca

SEQ ID NO: 455906 - DNA, 54 bp, Artificial
  Synthetic oligonucleotide
tcaaaggtcactgctacgtcataggtgacgtggggggggacctacttaaacacg

SEQ ID NO: 455907 - DNA, 60 bp, Artificial
  Synthetic oligonucleotide
tcaaaggtggcacatataagatccttgagcaggttaagaagtcatttgagctaacatgca

SEQ ID NO: 455908 - DNA, 52 bp, Artificial
  Synthetic oligonucleotide
tcaaaggtttaggttaaacccgagtaacccggcactatttcccaccatagca

SEQ ID NO: 455909 - DNA, 54 bp, Artificial
  Synthetic oligonucleotide
tcaaagtagcatgacaaagatcttagagccttttcgaaaacaaaatccagacat

SEQ ID NO: 455910 - DNA, 60 bp, Artificial
  Synthetic oligonucleotide
tcaaagtatcgatcgagactaatcctgtttgtcttgggtgctcgccacagctgccaacta

SEQ ID NO: 455911 - DNA, 60 bp, Artificial
  Synthetic oligonucleotide
tcaaagtcagagggacatgagttctctgaatttttatgcggtagcagggcctatagctcc

SEQ ID NO: 455912 - DNA, 59 bp, Artificial
  Synthetic oligonucleotide
tcaaagtcagcgatatctcggcttatatcaaagtactcagtttataaaccgtcaatcga

SEQ ID NO: 455913 - DNA, 60 bp, Artificial
  Synthetic oligonucleotide
tcaaagtcagttggcactgctgaggaaaaactcaagaagaaatctgcattctatcaatct

SEQ ID NO: 455914 - DNA, 60 bp, Artificial
  Synthetic oligonucleotide
tcaaagtcgtcgcaactttggatagtgacaacaggtgtgtacgatacacgaagaagccag

SEQ ID NO: 455915 - DNA, 59 bp, Artificial
  Synthetic oligonucleotide
tcaaagtctagtgcgtaattcactcactaccggcgtaatttgtggttatgctattgcgt

SEQ ID NO: 455916 - DNA, 60 bp, Artificial
  Synthetic oligonucleotide
tcaaagtctctcaacttcgtcctcgccgcttggatacgcatactcgaggagatactccgt

SEQ ID NO: 455917 - DNA, 60 bp, Artificial
  Synthetic oligonucleotide
tcaaagtgaagtgccagttgacgccaattgtgaaggggaatgctatcacagtggaggtac

SEQ ID NO: 455918 - DNA, 60 bp, Artificial
  Synthetic oligonucleotide
tcaaagtgccacgatcgcagcagcctcagatccatatctatagcgcaccttgggattcag

SEQ ID NO: 455919 - DNA, 59 bp, Artificial
  Synthetic oligonucleotide
tcaaagtggacgatacgacaactacgaggtcatgggttcattttcataagtacacacaa

SEQ ID NO: 455920 - DNA, 55 bp, Artificial
  Synthetic oligonucleotide
tcaaataaacgtgtagtaccagtgagattgtcgttttttttactccttaatcgca

SEQ ID NO: 455921 - DNA, 60 bp, Artificial
  Synthetic oligonucleotide
tcaaataaatatgtacgagccatagtgccagatcaaacattcgacgaactaaaacaaatg

SEQ ID NO: 455922 - DNA, 60 bp, Artificial
  Synthetic oligonucleotide
tcaaatacaaatgaatgtatgtaaaagttgtccgcattgttaactaagcacaagagacat

SEQ ID NO: 455923 - DNA, 60 bp, Artificial
  Synthetic oligonucleotide
tcaaatactcctccttagttgttgcagtctggataatagttcgccatcgttcatcatgtt

SEQ ID NO: 455924 - DNA, 60 bp, Artificial
  Synthetic oligonucleotide
tcaaatagggaggcctagtacgtctacctggggttgtgacacagatcaatcgagatatcc

SEQ ID NO: 455925 - DNA, 59 bp, Artificial
  Synthetic oligonucleotide
tcaaatagtaccacacacgacagaacagccttccgagggctcatttctactccattagg

SEQ ID NO: 455926 - DNA, 60 bp, Artificial
  Synthetic oligonucleotide
tcaaatatatctgccactcatatggctattccttgctaagggaggtgagctaccttggcc

SEQ ID NO: 455927 - DNA, 59 bp, Artificial
  Synthetic oligonucleotide
tcaaatatcacaggactactattggtacgtgatggaggaaaaaggaataacacgaatga

SEQ ID NO: 455928 - DNA, 55 bp, Artificial
  Synthetic oligonucleotide
tcaaatatcgcaggactactattggtacgtgatggaggactaaatagaacagata

SEQ ID NO: 455929 - DNA, 55 bp, Artificial
  Synthetic oligonucleotide
tcaaatatgctgacggggcatcccctacagtgcaaatgactcttaccataacccc

SEQ ID NO: 455930 - DNA, 60 bp, Artificial
  Synthetic oligonucleotide
tcaaatattacaggtctgctattgacaagagatggtggtcagagtaataatagtgattct

SEQ ID NO: 455931 - DNA, 60 bp, Artificial
  Synthetic oligonucleotide
tcaaatattacaggtctgctattgacaagagatggtggtctgaatagtactaatgagacc

SEQ ID NO: 455932 - DNA, 59 bp, Artificial
  Synthetic oligonucleotide
tcaaatattacaggtttactattgacaagagatggtggtcagactaatgaaactaatac

SEQ ID NO: 455933 - DNA, 56 bp, Artificial
  Synthetic oligonucleotide
tcaaatattactgtttgttgctacgttgacggtgtcagttggggttaagtttgcaa

SEQ ID NO: 455934 - DNA, 55 bp, Artificial
  Synthetic oligonucleotide
tcaaatcaaaccttccaattgaaaattgtgatgctgcatgtcaaacggttgctgg

SEQ ID NO: 455935 - DNA, 60 bp, Artificial
  Synthetic oligonucleotide
tcaaatcaagagcctgcaaaaagttgcagaaaagctagcattggaagccgaagatgaagg

SEQ ID NO: 455936 - DNA, 54 bp, Artificial
  Synthetic oligonucleotide
tcaaatcactaagccgtttcggcaagaaggttgggaacgcgttaacgtctaaca

SEQ ID NO: 455937 - DNA, 60 bp, Artificial
  Synthetic oligonucleotide
tcaaatcagttgagttgaatgccccaaattaccactatgaggagtgttcctgttatcctg

SEQ ID NO: 455938 - DNA, 60 bp, Artificial
  Synthetic oligonucleotide
tcaaatcatgagacatgcgcactgaatgttcataattgcaaatggtgtcagattactagc

SEQ ID NO: 455939 - DNA, 59 bp, Artificial
  Synthetic oligonucleotide
tcaaatcattcctgactgtagtatgccacagtaactatcccacgtattagctgttcctc

SEQ ID NO: 455940 - DNA, 56 bp, Artificial
  Synthetic oligonucleotide
tcaaatctaatgatatagctggtgagtactgcaacataattgcaatttatgcagtt

SEQ ID NO: 455941 - DNA, 60 bp, Artificial
  Synthetic oligonucleotide
tcaaatctcattacacaaggctgtgctgacatagggaagtcatatcaggtcctgcagcta

SEQ ID NO: 455942 - DNA, 50 bp, Artificial
  Synthetic oligonucleotide
tcaaatgaccctaccattaaattgatagcaatgttgtacacaccacttag

SEQ ID NO: 455943 - DNA, 60 bp, Artificial
  Synthetic oligonucleotide
tcaaatgacctcataagctaccaatcagtgtcacatgcagatctgagacggcacggagca

SEQ ID NO: 455944 - DNA, 60 bp, Artificial
  Synthetic oligonucleotide
tcaaatgagaatcccatccctctaccagttgagaccattggttcatcccgagtatcattc

SEQ ID NO: 455945 - DNA, 57 bp, Artificial
  Synthetic oligonucleotide
tcaaatgagattcccacaaacatggggggctggttaacttctcctatagagccgttg

SEQ ID NO: 455946 - DNA, 58 bp, Artificial
  Synthetic oligonucleotide
tcaaatgagttgccttctaagtggcactctccagattccgttccgtcctaaccaccga

SEQ ID NO: 455947 - DNA, 59 bp, Artificial
  Synthetic oligonucleotide
tcaaatgatagtaactatgaatggaaatgactttcaaactggaggaattggtaatttgc

SEQ ID NO: 455948 - DNA, 59 bp, Artificial
  Synthetic oligonucleotide
tcaaatgcccggagtgtaccaaggtgaccgacagatcgcttcaagcgtgttggatgaac

SEQ ID NO: 455949 - DNA, 60 bp, Artificial
  Synthetic oligonucleotide
tcaaatgcctcaatacagttgcgcaagggttcaactacctatgctgaacacagacatgac

SEQ ID NO: 455950 - DNA, 50 bp, Artificial
  Synthetic oligonucleotide
tcaaatgctggtcttacatatccagctccgttcttagcgatgccaagcac

SEQ ID NO: 455951 - DNA, 57 bp, Artificial
  Synthetic oligonucleotide
tcaaatggacgcggaatgggcctgggatcagcttctttccggtcaccgggtacagcc

SEQ ID NO: 455952 - DNA, 57 bp, Artificial
  Synthetic oligonucleotide
tcaaatgggacaaaccatcccttggaaaccttgtctacccagcggaacatcatacca

SEQ ID NO: 455953 - DNA, 60 bp, Artificial
  Synthetic oligonucleotide
tcaaatgggcatgttactcacagggtccaatgccaaaaacatggatcttggcactatccc

SEQ ID NO: 455954 - DNA, 52 bp, Artificial
  Synthetic oligonucleotide
tcaaatgggtgcgtgacgctttgctaccaactgcacccataaccagtgtggg

SEQ ID NO: 455955 - DNA, 60 bp, Artificial
  Synthetic oligonucleotide
tcaaatgtggcagccacttcattagcctgttttgttctcagagatggatttatggtcttt

SEQ ID NO: 455956 - DNA, 60 bp, Artificial
  Synthetic oligonucleotide
tcaaatgtggccgcaatctcattaggctgcttggttctcaaggatggattgatggtttta

SEQ ID NO: 455957 - DNA, 52 bp, Artificial
  Synthetic oligonucleotide
tcaaatgttgctacctggtatagaatagcgcaaagcttcacataactgtcat

SEQ ID NO: 455958 - DNA, 54 bp, Artificial
  Synthetic oligonucleotide
tcaaattacgctccataccctacggtatcatcaaagtttgtatctcttcattcg

SEQ ID NO: 455959 - DNA, 60 bp, Artificial
  Synthetic oligonucleotide
tcaaattatgagagagattagcacaatcactcttgagaagctggcaacattaaaggctag

SEQ ID NO: 455960 - DNA, 50 bp, Artificial
  Synthetic oligonucleotide
tcaaattccgtcgaccgttaaaaacgtcactcgccccgcccctaacggtc

SEQ ID NO: 455961 - DNA, 60 bp, Artificial
  Synthetic oligonucleotide
tcaaattcttgccatttatagtacggtatcgagcagtctggtcttggtggggctgatcat

SEQ ID NO: 455962 - DNA, 60 bp, Artificial
  Synthetic oligonucleotide
tcaaattgagtgtcaagtgaataagcatagtgaccccatcgtttcagggtagttgacggc

SEQ ID NO: 455963 - DNA, 58 bp, Artificial
  Synthetic oligonucleotide
tcaaatttatacccagtcgcgacgtgcgagcgctttctcgacgcctcatacttggccg

SEQ ID NO: 455964 - DNA, 58 bp, Artificial
  Synthetic oligonucleotide
tcaaattttcttgcaaaatgtgagtcgcaacgcgccaaaaccgcgttgatatttgact

SEQ ID NO: 455965 - DNA, 56 bp, Artificial
  Synthetic oligonucleotide
tcaacaaaattaatgacacgaacgaacgttttggttcactggcgaacggcactcat

SEQ ID NO: 455966 - DNA, 60 bp, Artificial
  Synthetic oligonucleotide
tcaacaaagagtactccactctagtcgaagcatatagaactgataaccaacagaagcacc

SEQ ID NO: 455967 - DNA, 55 bp, Artificial
  Synthetic oligonucleotide
tcaacaaagcgaggagtacctccgttgtgatctagtcatcttatactgtcggaga

SEQ ID NO: 455968 - DNA, 52 bp, Artificial
  Synthetic oligonucleotide
tcaacaaaggaggtaaggccatgaccgtggagagagcgactgtgctgctcgt

SEQ ID NO: 455969 - DNA, 60 bp, Artificial
  Synthetic oligonucleotide
tcaacaaagtgtggtcatcatggatgacgtgatgcaaaatccaagtggagatgatatgac

SEQ ID NO: 455970 - DNA, 60 bp, Artificial
  Synthetic oligonucleotide
tcaacaacaagcgcgtttagagataaatgtgaatccgtgtaagagtgcctggagttatca

SEQ ID NO: 455971 - DNA, 57 bp, Artificial
  Synthetic oligonucleotide
tcaacaacataatagagcaactaataaataaggaaagggtctacctggcatgggtac

SEQ ID NO: 455972 - DNA, 60 bp, Artificial
  Synthetic oligonucleotide
tcaacaacggagattacgcaagactttacatatggggagttcaccatccctcaactgaca

SEQ ID NO: 455973 - DNA, 59 bp, Artificial
  Synthetic oligonucleotide
tcaacaagaatcacaccgagatgcccggcacggaacgcgttctcagtgctgtttgcgcc

SEQ ID NO: 455974 - DNA, 60 bp, Artificial
  Synthetic oligonucleotide
tcaacaagatgtgtccagttatgctaggtctaagggactgacttgcgttatagatgaaga

SEQ ID NO: 455975 - DNA, 52 bp, Artificial
  Synthetic oligonucleotide
tcaacaaggaaacaacgggattcacatacagtgggataagaaccaatggagt

SEQ ID NO: 455976 - DNA, 57 bp, Artificial
  Synthetic oligonucleotide
tcaacaagggatgttccatgcttaccccgtattggtaagtagcaggcaacgagaact

SEQ ID NO: 455977 - DNA, 55 bp, Artificial
  Synthetic oligonucleotide
tcaacaagttgtattagagggtaccaataaaactgacatttgggttgctttatta

SEQ ID NO: 455978 - DNA, 60 bp, Artificial
  Synthetic oligonucleotide
tcaacaataaggatcacgcattcgcaaagcaccctagcgatttttcgcttcacagattgg

SEQ ID NO: 455979 - DNA, 58 bp, Artificial
  Synthetic oligonucleotide
tcaacaatcatcgcttacttggacttctggagtgtacttcttcttggtggaccatttt

SEQ ID NO: 455980 - DNA, 60 bp, Artificial
  Synthetic oligonucleotide
tcaacaatcatgtggtgtacaaccaccaggaagctggcaagtatgagaatcacacggaga

SEQ ID NO: 455981 - DNA, 55 bp, Artificial
  Synthetic oligonucleotide
tcaacaatgaggtaatggctttggagcccgttgtaggtgccgctattgcggcgcc

SEQ ID NO: 455982 - DNA, 60 bp, Artificial
  Synthetic oligonucleotide
tcaacaatgattcagtttgcggaattgtcatcgttttagagctgcttctcattgcaggtg

SEQ ID NO: 455983 - DNA, 60 bp, Artificial
  Synthetic oligonucleotide
tcaacaatggaatgggtccggcaacagcacaaacagccatacagttattcatagctgatt

SEQ ID NO: 455984 - DNA, 55 bp, Artificial
  Synthetic oligonucleotide
tcaacaatttgcaatccatgatgaattgggttagttgccctaaatcatgatcagc

SEQ ID NO: 455985 - DNA, 55 bp, Artificial
  Synthetic oligonucleotide
tcaacacaaatacccttaaatgaacggcacatatttttccacgaaaaatgaattg

SEQ ID NO: 455986 - DNA, 59 bp, Artificial
  Synthetic oligonucleotide
tcaacacaactacctcatttgattgctccttgattgtctctttagggagcctactacta

SEQ ID NO: 455987 - DNA, 50 bp, Artificial
  Synthetic oligonucleotide
tcaacacaacttctgtcgttagattcgtcaacgtttacttctgatgaaca

SEQ ID NO: 455988 - DNA, 60 bp, Artificial
  Synthetic oligonucleotide
tcaacacaagccaaaggggaatccttgaggatgaacagatgtatcaaaagtgctgcaatc

SEQ ID NO: 455989 - DNA, 59 bp, Artificial
  Synthetic oligonucleotide
tcaacacaagccagaggggaatacttgaagatgagcagatgtatcagaagtgctgcaac

SEQ ID NO: 455990 - DNA, 60 bp, Artificial
  Synthetic oligonucleotide
tcaacacaatacgcagccatttaggaaagggataataatgggattggacatgttagctaa

SEQ ID NO: 455991 - DNA, 60 bp, Artificial
  Synthetic oligonucleotide
tcaacacaccaccattggaagcggcgttctagagtctcttaaacgcgatcttgagaatgg

SEQ ID NO: 455992 - DNA, 55 bp, Artificial
  Synthetic oligonucleotide
tcaacacagcagctcgcacttgcggtacgccctacggtgcgacgcttcaacatcc

SEQ ID NO: 455993 - DNA, 58 bp, Artificial
  Synthetic oligonucleotide
tcaacaccccgcggtgtagtgttgaggtatcaacagcacgacgggataggagcccaaa

SEQ ID NO: 455994 - DNA, 59 bp, Artificial
  Synthetic oligonucleotide
tcaacacctctagtttgccatgaggaaaactcataggcgtcctggtaagatgacgtagt

SEQ ID NO: 455995 - DNA, 60 bp, Artificial
  Synthetic oligonucleotide
tcaacactaggcccagagtcaatggacaggccggacggatgacattctactggaagatag

SEQ ID NO: 455996 - DNA, 60 bp, Artificial
  Synthetic oligonucleotide
tcaacactatgtatatactatccaacagaagctaaaaacgaaatctcagataccgagtgg

SEQ ID NO: 455997 - DNA, 51 bp, Artificial
  Synthetic oligonucleotide
tcaacactctatgcgccaaccaagaagcatcttgtgatagggaactctggc

SEQ ID NO: 455998 - DNA, 59 bp, Artificial
  Synthetic oligonucleotide
tcaacactgagattagatattggtagctttagactcaagttgttgttgaaacctgtatt

SEQ ID NO: 455999 - DNA, 57 bp, Artificial
  Synthetic oligonucleotide
tcaacactgttcccgttcagacccaggataacgcggaggctcaccaagccaaacagg

SEQ ID NO: 456000 - DNA, 52 bp, Artificial
  Synthetic oligonucleotide
tcaacacttccggaaactactgttgttagacgaagggacccaggccggtccc

SEQ ID NO: 456001 - DNA, 59 bp, Artificial
  Synthetic oligonucleotide
tcaacactttcaatgcatcttccttggttcctgtatttattgcccttgcgtacgccgtc

SEQ ID NO: 456002 - DNA, 55 bp, Artificial
  Synthetic oligonucleotide
tcaacagacaagagtggacaaattgacccaaggccgtcaaacctacgattggaca

SEQ ID NO: 456003 - DNA, 60 bp, Artificial
  Synthetic oligonucleotide
tcaacagaccccaccacagttttgggcatagggacagtcttagaccaggcggagactgca

SEQ ID NO: 456004 - DNA, 55 bp, Artificial
  Synthetic oligonucleotide
tcaacagagagagtggacacaataattgagagtaatgtcacggttactagctcgg

SEQ ID NO: 456005 - DNA, 60 bp, Artificial
  Synthetic oligonucleotide
tcaacagagtgtggtcataatggatgacatcatgcaaaatccagatggagaggatatgtc

SEQ ID NO: 456006 - DNA, 55 bp, Artificial
  Synthetic oligonucleotide
tcaacagccgcttaagatatcgattgatgaggaacatagccgggttgtacattcc

SEQ ID NO: 456007 - DNA, 60 bp, Artificial
  Synthetic oligonucleotide
tcaacagctcctagggatttggggttgctctggaagactcatctgcaccactgctgtgcc

SEQ ID NO: 456008 - DNA, 55 bp, Artificial
  Synthetic oligonucleotide
tcaacaggcatcgcaagctaatatggatcaggcaagacagctttgcttgcagtgg

SEQ ID NO: 456009 - DNA, 57 bp, Artificial
  Synthetic oligonucleotide
tcaacaggctactaagaaaaggagtgctgttaaacgcaatgattttaagcgtggtta

SEQ ID NO: 456010 - DNA, 60 bp, Artificial
  Synthetic oligonucleotide
tcaacagggaaaatatgcaacaaccctcataggatccttgatggaagggactgcacacta

SEQ ID NO: 456011 - DNA, 60 bp, Artificial
  Synthetic oligonucleotide
tcaacagggatgacgctagggtgtccacttttatcaaggcagagaagatcaacttcacag

SEQ ID NO: 456012 - DNA, 55 bp, Artificial
  Synthetic oligonucleotide
tcaacaggtaaagctagcattgaaggtggtaaatattatgagcatgctccaatag

SEQ ID NO: 456013 - DNA, 60 bp, Artificial
  Synthetic oligonucleotide
tcaacaggtataatatgcgacagtcctcaccaaatccttgatggagaaaactgcacacta

SEQ ID NO: 456014 - DNA, 60 bp, Artificial
  Synthetic oligonucleotide
tcaacagtccggtgctatctatgtctgcaattatagaattgtcaacaggcatttagccac

SEQ ID NO: 456015 - DNA, 57 bp, Artificial
  Synthetic oligonucleotide
tcaacagtttggcatctaatccggttcaccggagagattcctttctgaagactttcg

SEQ ID NO: 456016 - DNA, 60 bp, Artificial
  Synthetic oligonucleotide
tcaacatactatagatgtgacagactccgaaatgaacaaactcttcgaaagagttaggcg

SEQ ID NO: 456017 - DNA, 60 bp, Artificial
  Synthetic oligonucleotide
tcaacatagaagcagaacctccattcggagacagctacatcattataggagtagaaccgg

SEQ ID NO: 456018 - DNA, 60 bp, Artificial
  Synthetic oligonucleotide
tcaacatagaagcctcggtttttgatgatgtgttcaaatcaattggtgagaagcaaacaa

SEQ ID NO: 456019 - DNA, 59 bp, Artificial
  Synthetic oligonucleotide
tcaacatatacgaaattgtatacgacaggaccaaccattggtattaatacaaaacatga

SEQ ID NO: 456020 - DNA, 60 bp, Artificial
  Synthetic oligonucleotide
tcaacatctacacggatagccgttatgcattcgccactctacacgtccatgggatgatct

SEQ ID NO: 456021 - DNA, 60 bp, Artificial
  Synthetic oligonucleotide
tcaacatctcagatgcataaatggatgggaagttggttaatgtctgataatcatgatgcc

SEQ ID NO: 456022 - DNA, 50 bp, Artificial
  Synthetic oligonucleotide
tcaacatgaaagagggcatcaacctatatatactagcatacatactgaag

SEQ ID NO: 456023 - DNA, 59 bp, Artificial
  Synthetic oligonucleotide
tcaacatgaacgcgggtttgggaagaagcaagtcatcatagactgctggcattgttagg

SEQ ID NO: 456024 - DNA, 55 bp, Artificial
  Synthetic oligonucleotide
tcaacatgtgcacactcatagccatggacttgggagagatgtgtgatgacacggt

SEQ ID NO: 456025 - DNA, 60 bp, Artificial
  Synthetic oligonucleotide
tcaacatgtttgacaatgagcctagtactgccactgtgaagaacgatcttagagatcgtt

SEQ ID NO: 456026 - DNA, 60 bp, Artificial
  Synthetic oligonucleotide
tcaacattaagtgccatcctgacttcctttctattaattctcttcatatacactgtcttt

SEQ ID NO: 456027 - DNA, 51 bp, Artificial
  Synthetic oligonucleotide
tcaacattcaatttaatgggatacactacaccttggaacatgttcaatttc

SEQ ID NO: 456028 - DNA, 60 bp, Artificial
  Synthetic oligonucleotide
tcaaccaaactccagatatggtaatatagttaccaatgatatgggcactctgtgttatag

SEQ ID NO: 456029 - DNA, 57 bp, Artificial
  Synthetic oligonucleotide
tcaaccaaagagaaaaagcgctgtagggaaagagaacctggatattaaccatactga

SEQ ID NO: 456030 - DNA, 58 bp, Artificial
  Synthetic oligonucleotide
tcaaccaacgctagatggaccatatcaacctactacgttcaatttaccaattgactat

SEQ ID NO: 456031 - DNA, 53 bp, Artificial
  Synthetic oligonucleotide
tcaaccaactctgtacgacagctagtacagtaccgcgcagctatgtcattctc

SEQ ID NO: 456032 - DNA, 60 bp, Artificial
  Synthetic oligonucleotide
tcaaccaacttctttcaagcgagatggcgggctcttggactcacgtgacatacaagtggc

SEQ ID NO: 456033 - DNA, 59 bp, Artificial
  Synthetic oligonucleotide
tcaaccaagatggaagcaaaactgtttgtattattctgtacattcactgcgctgaaagc

SEQ ID NO: 456034 - DNA, 57 bp, Artificial
  Synthetic oligonucleotide
tcaaccaccacgatgaagaccctgacgcgtacactaagatgtacggccctttggttg

SEQ ID NO: 456035 - DNA, 57 bp, Artificial
  Synthetic oligonucleotide
tcaaccaccctcccatgtttgtaggtatctcattgggcatcaaactaactcccaact

SEQ ID NO: 456036 - DNA, 57 bp, Artificial
  Synthetic oligonucleotide
tcaaccacgtacgtgggacccactatttcaagcgattatgagatctcaatacgtgac

SEQ ID NO: 456037 - DNA, 55 bp, Artificial
  Synthetic oligonucleotide
tcaaccactggggcttcgtgcatcatcaggatatcaatagtctcaaccatatcct

SEQ ID NO: 456038 - DNA, 58 bp, Artificial
  Synthetic oligonucleotide
tcaaccacttgccccgagaactcattttccaggtctggcaaaggtgttgggcatactg

SEQ ID NO: 456039 - DNA, 55 bp, Artificial
  Synthetic oligonucleotide
tcaaccagagccagaaatgcacgtcagccggatgacatcgagtatacatccctga

SEQ ID NO: 456040 - DNA, 52 bp, Artificial
  Synthetic oligonucleotide
tcaaccaggtttgcaatgatttgggaccgtggccaaaattctctgaagttct

SEQ ID NO: 456041 - DNA, 59 bp, Artificial
  Synthetic oligonucleotide
tcaaccataacacaagcctgtccaaagatctcttttgacccaattcctatacattattg

SEQ ID NO: 456042 - DNA, 60 bp, Artificial
  Synthetic oligonucleotide
tcaaccatctcatgcaatacctcatcggagaatattggcaggaaaaacctttttggatct

SEQ ID NO: 456043 - DNA, 60 bp, Artificial
  Synthetic oligonucleotide
tcaaccatgcacgatacatcagtgatattaacaacattcatgtacaaagcgccgaaactc

SEQ ID NO: 456044 - DNA, 60 bp, Artificial
  Synthetic oligonucleotide
tcaaccatgggttcgtgtgatctgctatgggatagcctcaattcagatgataacactatg

SEQ ID NO: 456045 - DNA, 58 bp, Artificial
  Synthetic oligonucleotide
tcaacccagttacggaggaacatttacaagatgatcgtatattgaagcgtggtaattc

SEQ ID NO: 456046 - DNA, 49 bp, Artificial
  Synthetic oligonucleotide
tcaaccccgaaaacccccggggaaccttcttggtccgggagagcgagac

SEQ ID NO: 456047 - DNA, 60 bp, Artificial
  Synthetic oligonucleotide
tcaacccgacgagccttatgaaaaccttggagatgccaagattctcattaagtcagcata

SEQ ID NO: 456048 - DNA, 55 bp, Artificial
  Synthetic oligonucleotide
tcaaccctagtgaccctcgcatttggtcaaaggtgcgcgtgaaattggacaccgt

SEQ ID NO: 456049 - DNA, 55 bp, Artificial
  Synthetic oligonucleotide
tcaaccctcacaaactccgcatctctctgtgatagagtgcctgacttagctctag

SEQ ID NO: 456050 - DNA, 57 bp, Artificial
  Synthetic oligonucleotide
tcaaccctctagtcgtcgtactgaaatgggtatgccggctggtcgtggtgagtaccg

SEQ ID NO: 456051 - DNA, 54 bp, Artificial
  Synthetic oligonucleotide
tcaaccctggcactgctatggcctcacacaaagacgacaaagacaagttctttc

SEQ ID NO: 456052 - DNA, 58 bp, Artificial
  Synthetic oligonucleotide
tcaaccctggcggcagctactataagcagtaccaccccaccgcgtgcgaggttgaacc

SEQ ID NO: 456053 - DNA, 53 bp, Artificial
  Synthetic oligonucleotide
tcaaccctgtacacacgtcttgagccccacgtgggcgccattgtcgtgattca

SEQ ID NO: 456054 - DNA, 54 bp, Artificial
  Synthetic oligonucleotide
tcaaccgaaagccccgattgtagaggaagttaaggacgaagatgaaccgacagg

SEQ ID NO: 456055 - DNA, 55 bp, Artificial
  Synthetic oligonucleotide
tcaaccgcacggccttgaactgtaatgcgagcctcgacaccggttgggtagcggg

SEQ ID NO: 456056 - DNA, 56 bp, Artificial
  Synthetic oligonucleotide
tcaaccgcgcggccaagtgttacggactggaactcaaagtagagaagtacaaccca

SEQ ID NO: 456057 - DNA, 60 bp, Artificial
  Synthetic oligonucleotide
tcaaccgctgcccaaactttcctggcgacatgcatcaatggggtgtgctggactgtctac

SEQ ID NO: 456058 - DNA, 55 bp, Artificial
  Synthetic oligonucleotide
tcaaccggccgcaactgcattagccaacactatagaagttttcagatcgaatggt

SEQ ID NO: 456059 - DNA, 60 bp, Artificial
  Synthetic oligonucleotide
tcaaccggtgcacttgccagttgtatgggtctcatatacaacaggatgggaacggtgacc

SEQ ID NO: 456060 - DNA, 54 bp, Artificial
  Synthetic oligonucleotide
tcaaccgtccaggtacaaaaagctttcgccctgcctgaagacgcccgaccaccc

SEQ ID NO: 456061 - DNA, 55 bp, Artificial
  Synthetic oligonucleotide
tcaaccgtgtgcggttgctataaaacccttcagtgtcagcagattcttgcattgc

SEQ ID NO: 456062 - DNA, 51 bp, Artificial
  Synthetic oligonucleotide
tcaaccgttctgtggcctttgagatagatgtgctacgtcggagattctctc

SEQ ID NO: 456063 - DNA, 55 bp, Artificial
  Synthetic oligonucleotide
tcaaccgttgtgttcagcggcactcccttattgggggtttgtggtattaccctga

SEQ ID NO: 456064 - DNA, 52 bp, Artificial
  Synthetic oligonucleotide
tcaaccgtttctttgcggttaaccaatccgcgcgttggttgaaaagtgttgg

SEQ ID NO: 456065 - DNA, 58 bp, Artificial
  Synthetic oligonucleotide
tcaacctaccgccgtatcgtattgtgtttggccgatggaggatcttcacgttatcgcc

SEQ ID NO: 456066 - DNA, 58 bp, Artificial
  Synthetic oligonucleotide
tcaacctagaacatgtgggtaacacgctttctgtgctgtgtaaacacgcgaaaatgag

SEQ ID NO: 456067 - DNA, 52 bp, Artificial
  Synthetic oligonucleotide
tcaacctatcagatgtattctttttcgatcagaagattataatctcacagat

SEQ ID NO: 456068 - DNA, 56 bp, Artificial
  Synthetic oligonucleotide
tcaacctcagtgtacaccccaaagtatccagaggttaagaacccacagaccgcctc

SEQ ID NO: 456069 - DNA, 57 bp, Artificial
  Synthetic oligonucleotide
tcaacctcccgaaccccaccgagattcagaacgacatgtcccacacgctccagaacc

SEQ ID NO: 456070 - DNA, 56 bp, Artificial
  Synthetic oligonucleotide
tcaacctcgaagggacgacattcctatctaacaggcgtgttagctgttgggccggt

SEQ ID NO: 456071 - DNA, 60 bp, Artificial
  Synthetic oligonucleotide
tcaacctctcaagctgccacgtactgatcaaatcgcatgtctgtgactactctttggaca

SEQ ID NO: 456072 - DNA, 59 bp, Artificial
  Synthetic oligonucleotide
tcaacctgcctacataaggagtggccgcactcgaggaactggcgctgtaaccccacttg

SEQ ID NO: 456073 - DNA, 59 bp, Artificial
  Synthetic oligonucleotide
tcaacctttgaagtaacacacctgataagaggttcattgggattgccttgccaagacga

SEQ ID NO: 456074 - DNA, 59 bp, Artificial
  Synthetic oligonucleotide
tcaacgaacaaatcgcagtggcgcgcgagtgcttaacctgtatgacgtgatctcggcaa

SEQ ID NO: 456075 - DNA, 55 bp, Artificial
  Synthetic oligonucleotide
tcaacgaagttaacgagacactgggagctggttcttcagttcatatggtacctga

SEQ ID NO: 456076 - DNA, 51 bp, Artificial
  Synthetic oligonucleotide
tcaacgacataacttgccaggttgcgcttccactccaaactaacctggatt

SEQ ID NO: 456077 - DNA, 50 bp, Artificial
  Synthetic oligonucleotide
tcaacgacatagaggatgatttaagtgagaggaacctctttgtcgatttt

SEQ ID NO: 456078 - DNA, 56 bp, Artificial
  Synthetic oligonucleotide
tcaacgacgagctcttttgaatatgatagggatgagtggcgggaatcaaggggctc

SEQ ID NO: 456079 - DNA, 57 bp, Artificial
  Synthetic oligonucleotide
tcaacgacggaaccggtcgagttaccgctgcgacttattgtctacatggcccgatgg

SEQ ID NO: 456080 - DNA, 55 bp, Artificial
  Synthetic oligonucleotide
tcaacgactaggaagagttgggcgcattaagaaagggcacgcattgcgaattgga

SEQ ID NO: 456081 - DNA, 58 bp, Artificial
  Synthetic oligonucleotide
tcaacgagattgatattacccgactaaggcgggtaagtctataggctccgaccagtca

SEQ ID NO: 456082 - DNA, 60 bp, Artificial
  Synthetic oligonucleotide
tcaacgagttcaggcggcaaggattcttccatacgaatatgatcgatggagcgccaccaa

SEQ ID NO: 456083 - DNA, 58 bp, Artificial
  Synthetic oligonucleotide
tcaacgatatttcgtcacattttcgctatcgtttcgtccaggtttgaggcggtcgcta

SEQ ID NO: 456084 - DNA, 53 bp, Artificial
  Synthetic oligonucleotide
tcaacgatctctacatcaattaaaaacgtctcaaaacaattctctaaatcaaa

SEQ ID NO: 456085 - DNA, 50 bp, Artificial
  Synthetic oligonucleotide
tcaacgatgcgaggtatctcgaaggctctgtggttcagaagatcttacaa

SEQ ID NO: 456086 - DNA, 55 bp, Artificial
  Synthetic oligonucleotide
tcaacgatgttagccatgagcgctacaaggcccctcctagtgacactttgaaaag

SEQ ID NO: 456087 - DNA, 55 bp, Artificial
  Synthetic oligonucleotide
tcaacgcaaccgagacgatcactcacggatcactgtgggacaccgccgggccaac

SEQ ID NO: 456088 - DNA, 55 bp, Artificial
  Synthetic oligonucleotide
tcaacgcaattagcaaaattgtccaatatggatctatgtccaccgcgctccgaat

SEQ ID NO: 456089 - DNA, 60 bp, Artificial
  Synthetic oligonucleotide
tcaacgcaggactatcttaccgcacgccaactgcttagcccgattgctaacgcgatctcc

SEQ ID NO: 456090 - DNA, 60 bp, Artificial
  Synthetic oligonucleotide
tcaacgcatttccctgcgccaaaacctgattgtccgactagcggagatagtagtgaatcg

SEQ ID NO: 456091 - DNA, 59 bp, Artificial
  Synthetic oligonucleotide
tcaacgccgactgcacaacagttaaatgatgttaggaaagtttatctagcattaatgtt

SEQ ID NO: 456092 - DNA, 60 bp, Artificial
  Synthetic oligonucleotide
tcaacgcctagtggtctcatttccaccttcactaacgcaatctgatagtcctcaaatggg

SEQ ID NO: 456093 - DNA, 51 bp, Artificial
  Synthetic oligonucleotide
tcaacgctaggctgtgtgggtcggctagaccggacccaactgattggacta

SEQ ID NO: 456094 - DNA, 60 bp, Artificial
  Synthetic oligonucleotide
tcaacgctcgctgatgcttacacggtgttgagacccgaatttgtcatccacggtgtcgct

SEQ ID NO: 456095 - DNA, 58 bp, Artificial
  Synthetic oligonucleotide
tcaacgctggacagacaattgccgcattttaccaaccaaccgttatgctgtttggaac

SEQ ID NO: 456096 - DNA, 60 bp, Artificial
  Synthetic oligonucleotide
tcaacgctggctcaagcgtgtttgctgatagaccatacgaatagtctatccctgatttca

SEQ ID NO: 456097 - DNA, 55 bp, Artificial
  Synthetic oligonucleotide
tcaacggaactcaaagctacaagaaccttaagagatcatatctctagacgatctg

SEQ ID NO: 456098 - DNA, 57 bp, Artificial
  Synthetic oligonucleotide
tcaacggaggagctgcgctttggccctaccgttcaagcccctcccgtcgcgccagtg

SEQ ID NO: 456099 - DNA, 60 bp, Artificial
  Synthetic oligonucleotide
tcaacggatctatttccgcttaaaatgagagtatcagttcaagtctcaattaagcgacta

SEQ ID NO: 456100 - DNA, 51 bp, Artificial
  Synthetic oligonucleotide
tcaacggcccgaagctgacgatgtggtacgagctcgaccgcccgcacaagg

SEQ ID NO: 456101 - DNA, 57 bp, Artificial
  Synthetic oligonucleotide
tcaacggcgtgtgttggaccgtctaccatggcgccggctcaaagaccttagccggcc

SEQ ID NO: 456102 - DNA, 58 bp, Artificial
  Synthetic oligonucleotide
tcaacggggtatgctggaccatctaccacggggccggaacgcggactctcgcatcacc

SEQ ID NO: 456103 - DNA, 60 bp, Artificial
  Synthetic oligonucleotide
tcaacgggtacacgttgcatctatccatcagcacaacggatctacaattcgttgatggtg

SEQ ID NO: 456104 - DNA, 54 bp, Artificial
  Synthetic oligonucleotide
tcaacggtggctgggtgtgtgttgcagcagttgtgtgtcatgaaggcctatttt

SEQ ID NO: 456105 - DNA, 55 bp, Artificial
  Synthetic oligonucleotide
tcaacggttacgcaggctactgtaagaacttttagtttctaacatgtacgactac

SEQ ID NO: 456106 - DNA, 55 bp, Artificial
  Synthetic oligonucleotide
tcaacgtagaggccttaaggtctacatccgtaatgttttggatgtaaaggactcc

SEQ ID NO: 456107 - DNA, 51 bp, Artificial
  Synthetic oligonucleotide
tcaacgtatatcgccacttcagatagatccgactatcatttcaaacacgat

SEQ ID NO: 456108 - DNA, 55 bp, Artificial
  Synthetic oligonucleotide
tcaacgtccccggtttgccgtatcccatcgagcgtctcgcttcgaatctcgactc

SEQ ID NO: 456109 - DNA, 60 bp, Artificial
  Synthetic oligonucleotide
tcaacgtccgaggggggcgcgacgctatcatcctactcatgtgtgttgtgcacccgacct

SEQ ID NO: 456110 - DNA, 58 bp, Artificial
  Synthetic oligonucleotide
tcaacgtcggggtaggactggcagggggaagcctggcatctacagatttgtggcaccg

SEQ ID NO: 456111 - DNA, 59 bp, Artificial
  Synthetic oligonucleotide
tcaacgtgcttctacctcaggttgccgttaatctctcaaactgtcatgtttccattaag

SEQ ID NO: 456112 - DNA, 56 bp, Artificial
  Synthetic oligonucleotide
tcaacgtggaatattactgttatctaacagacttggtcagttagttgatttaacta

SEQ ID NO: 456113 - DNA, 60 bp, Artificial
  Synthetic oligonucleotide
tcaacgttatgaaaaggctagctgatgcagaggcaagatatattgcatatctgttcgcta

SEQ ID NO: 456114 - DNA, 55 bp, Artificial
  Synthetic oligonucleotide
tcaacgttgggctggacaagttaaacaggcgcttgcagctaacggcttgagcaca

SEQ ID NO: 456115 - DNA, 54 bp, Artificial
  Synthetic oligonucleotide
tcaacgtttcctgatcgttgcttatgtcaagtttccatcgtcgcccaaattgct

SEQ ID NO: 456116 - DNA, 60 bp, Artificial
  Synthetic oligonucleotide
tcaactaaatgcgaccgatgcgcgagagttataatcctaggtacaccaacacttgtcctg

SEQ ID NO: 456117 - DNA, 60 bp, Artificial
  Synthetic oligonucleotide
tcaactaatatcagatgttcaagctatttctagcactatacaagatctccaagatcaggt

SEQ ID NO: 456118 - DNA, 60 bp, Artificial
  Synthetic oligonucleotide
tcaactacaacaaggcaaccaagaggcttacagtacttggaaaggatgcaggtgcattga

SEQ ID NO: 456119 - DNA, 60 bp, Artificial
  Synthetic oligonucleotide
tcaactacaagcagctggtcgatggttggtctgctgggtaagtgatagcgccatcccttc

SEQ ID NO: 456120 - DNA, 57 bp, Artificial
  Synthetic oligonucleotide
tcaactacatttgcgaagcttcgcaatctcccaacgtcgttccgtaaataaacacga

SEQ ID NO: 456121 - DNA, 60 bp, Artificial
  Synthetic oligonucleotide
tcaactacgagctagacgagagcggaacattatgcccagcgttagatagctctgttcacg

SEQ ID NO: 456122 - DNA, 56 bp, Artificial
  Synthetic oligonucleotide
tcaactactatcatatggggacgttactcgttttttgtcaaataacgctatggtat

SEQ ID NO: 456123 - DNA, 59 bp, Artificial
  Synthetic oligonucleotide
tcaactagctttgagtcaacgacagccgagagagaataaccaaacttactaggtgatag

SEQ ID NO: 456124 - DNA, 51 bp, Artificial
  Synthetic oligonucleotide
tcaactaggcctttctctaggttacggtttccatgcgcacaggggtgtatt

SEQ ID NO: 456125 - DNA, 60 bp, Artificial
  Synthetic oligonucleotide
tcaactataaaaacagctctggtatataccatcttaccaatgactgccctaattcgagta

SEQ ID NO: 456126 - DNA, 59 bp, Artificial
  Synthetic oligonucleotide
tcaactatgaaggcagaagaactcacaccaggtagattccgtacaatagtatgtggtct

SEQ ID NO: 456127 - DNA, 60 bp, Artificial
  Synthetic oligonucleotide
tcaactatggatgtcaattattgctgattctcatgacagtatctgcaactgctggcatcc

SEQ ID NO: 456128 - DNA, 53 bp, Artificial
  Synthetic oligonucleotide
tcaactattgagagacctccagctgaaacctattgacaaagagtctagctcgg

SEQ ID NO: 456129 - DNA, 60 bp, Artificial
  Synthetic oligonucleotide
tcaactcaaagagtcttagccgcgtgctaagtgtgatatatgggtgatcgtttagtcaca

SEQ ID NO: 456130 - DNA, 60 bp, Artificial
  Synthetic oligonucleotide
tcaactcacgtgtggattcacagacctgcccagactttgacacaatgctcaaagacatga

SEQ ID NO: 456131 - DNA, 55 bp, Artificial
  Synthetic oligonucleotide
tcaactcagaggactggctcgcatgaaaacgccaatatggcaatggatggttcta

SEQ ID NO: 456132 - DNA, 59 bp, Artificial
  Synthetic oligonucleotide
tcaactccagacaataatagatctattaagacaaagcactgcggaaacgcataacaggc

SEQ ID NO: 456133 - DNA, 55 bp, Artificial
  Synthetic oligonucleotide
tcaactccagtcagggcctgggctcctccgggtctggcgatttctccatcgccaa

SEQ ID NO: 456134 - DNA, 55 bp, Artificial
  Synthetic oligonucleotide
tcaactccgtactgtcgttacggtcacgtttgactcttccgacatacaggtaccc

SEQ ID NO: 456135 - DNA, 57 bp, Artificial
  Synthetic oligonucleotide
tcaactcggatcacgagccttttagggtgcgtatcactaattccggaatacctacca

SEQ ID NO: 456136 - DNA, 59 bp, Artificial
  Synthetic oligonucleotide
tcaactctagatctgcttctgccaattttaaattttggccagttatactgaatccatgg

SEQ ID NO: 456137 - DNA, 60 bp, Artificial
  Synthetic oligonucleotide
tcaactcttgagcggacggcagtaacgagcacgtcggcgccactatcgattcgcaataat

SEQ ID NO: 456138 - DNA, 59 bp, Artificial
  Synthetic oligonucleotide
tcaactgacacagagcaaaccaacttgtataagaacaaccccggaagagtgactgtctc

SEQ ID NO: 456139 - DNA, 59 bp, Artificial
  Synthetic oligonucleotide
tcaactgacgagatcttatctcctgttcgagagcgtttatccaaattttggactacgag

SEQ ID NO: 456140 - DNA, 54 bp, Artificial
  Synthetic oligonucleotide
tcaactgactcgacttctatcttgggcattggtacggtcttggaccaagcggag

SEQ ID NO: 456141 - DNA, 51 bp, Artificial
  Synthetic oligonucleotide
tcaactgactggactccggctgttgaagatactgaacacgatctagaaagt

SEQ ID NO: 456142 - DNA, 58 bp, Artificial
  Synthetic oligonucleotide
tcaactgacttaatcctcggttttgcaatcatatagtgagttctacccctggacgtgt

SEQ ID NO: 456143 - DNA, 60 bp, Artificial
  Synthetic oligonucleotide
tcaactgagccatcgagtacgactgacccattgtctacgacgttcgcggcaattcaattc

SEQ ID NO: 456144 - DNA, 60 bp, Artificial
  Synthetic oligonucleotide
tcaactgcaagggctaggagctgggttgaggatcaaaacaggaatttgtcacctttcatg

SEQ ID NO: 456145 - DNA, 60 bp, Artificial
  Synthetic oligonucleotide
tcaactgcagaaaacctgagcttacaaacgtcaatggaaattgtgaggttgacacagaat

SEQ ID NO: 456146 - DNA, 60 bp, Artificial
  Synthetic oligonucleotide
tcaactgcagataggggtacttgatatcagccaccccttgactatcaactggacgcctca

SEQ ID NO: 456147 - DNA, 60 bp, Artificial
  Synthetic oligonucleotide
tcaactgctgcccaaaccttcttggcaacatgtatcaacggggtatgctggactgtctac

SEQ ID NO: 456148 - DNA, 60 bp, Artificial
  Synthetic oligonucleotide
tcaactgctggccagtccttcttgggaacctgcatcaatggggtgtgttggactgtctac

SEQ ID NO: 456149 - DNA, 55 bp, Artificial
  Synthetic oligonucleotide
tcaactggaccagaagatcatcatcctgtatatgttgtcttggggtaaggaggct

SEQ ID NO: 456150 - DNA, 59 bp, Artificial
  Synthetic oligonucleotide
tcaactggccccacacaccaatggaccgcaaccctaccatggacctactcactggagtc

SEQ ID NO: 456151 - DNA, 55 bp, Artificial
  Synthetic oligonucleotide
tcaactgtacaaagtccggatgccaggagatcaaagggagcaatgagaccaataa

SEQ ID NO: 456152 - DNA, 55 bp, Artificial
  Synthetic oligonucleotide
tcaactgtacaacgcaatcgggaaactgttagagcgccataagttccaagtctcc

SEQ ID NO: 456153 - DNA, 53 bp, Artificial
  Synthetic oligonucleotide
tcaactgtcgcagaaggcgcgtgttttgtcgctccggggttcacattcacgtt

SEQ ID NO: 456154 - DNA, 57 bp, Artificial
  Synthetic oligonucleotide
tcaactgtggcaaagagggacacctagccagaaattgcagggcccctagaaagaagg

SEQ ID NO: 456155 - DNA, 60 bp, Artificial
  Synthetic oligonucleotide
tcaactgtggtattatcccaagctctccccttgatctgtgatcttgatccaatatatggc

SEQ ID NO: 456156 - DNA, 60 bp, Artificial
  Synthetic oligonucleotide
tcaactgtgtcatatgcgcggatcgatattgcgcttgacggtgagtgtctggaggagtcg

SEQ ID NO: 456157 - DNA, 55 bp, Artificial
  Synthetic oligonucleotide
tcaactgtttacgcagttgataatcggaattcatgcgaagaatacgaagtacgac

SEQ ID NO: 456158 - DNA, 60 bp, Artificial
  Synthetic oligonucleotide
tcaacttagtagaaagacctttgacacagaatatcagaagactaaactgaatgattggga

SEQ ID NO: 456159 - DNA, 60 bp, Artificial
  Synthetic oligonucleotide
tcaacttatagatttagcactactaccattagatatgttctcgatgttctcaggaatcaa

SEQ ID NO: 456160 - DNA, 58 bp, Artificial
  Synthetic oligonucleotide
tcaacttcacttactccaaaaagccgctcccaatcaaacaagtgcacaactacgttgc

SEQ ID NO: 456161 - DNA, 55 bp, Artificial
  Synthetic oligonucleotide
tcaacttcgcccttatttgggcaaaggttgttccgtcgatcacattggagtcctc

SEQ ID NO: 456162 - DNA, 50 bp, Artificial
  Synthetic oligonucleotide
tcaacttctaggcaatggccggtactgtcattttcacatccaagttccgc

SEQ ID NO: 456163 - DNA, 55 bp, Artificial
  Synthetic oligonucleotide
tcaacttctcgtatgacatcatgactactgatggtgtaactagactgaaagagga

SEQ ID NO: 456164 - DNA, 50 bp, Artificial
  Synthetic oligonucleotide
tcaacttggccttccggtcgaatcggcttcatgtgttcaagacgctcaag

SEQ ID NO: 456165 - DNA, 54 bp, Artificial
  Synthetic oligonucleotide
tcaacttgggtacattatgatagataactacggggttgggggtaaaagattgga

SEQ ID NO: 456166 - DNA, 56 bp, Artificial
  Synthetic oligonucleotide
tcaacttggtaaatgaatcggtgtctggggtcttatttatagttggacaccgtatg

SEQ ID NO: 456167 - DNA, 50 bp, Artificial
  Synthetic oligonucleotide
tcaactttagcgaaacttacttcctcaccaatgacaactctaacatcgaa

SEQ ID NO: 456168 - DNA, 55 bp, Artificial
  Synthetic oligonucleotide
tcaactttcttgcagagcttttagtgatacgaccaggtgttggttgctattaaga

SEQ ID NO: 456169 - DNA, 60 bp, Artificial
  Synthetic oligonucleotide
tcaactttgaatgcgtgattcacactggacacacaaccctcccttacagctgtgttggtg

SEQ ID NO: 456170 - DNA, 60 bp, Artificial
  Synthetic oligonucleotide
tcaactttgggaagcgagagctcaaatgtggagatggcatctttgtgttcagagactcag

SEQ ID NO: 456171 - DNA, 60 bp, Artificial
  Synthetic oligonucleotide
tcaactttgtgtgccagcgagttgaccaagatattgtcatctactgtaatggacaaaaga

SEQ ID NO: 456172 - DNA, 57 bp, Artificial
  Synthetic oligonucleotide
tcaagaaagttgcttctcattgttcaggcacttagggacaacctggaacctgggacc

SEQ ID NO: 456173 - DNA, 60 bp, Artificial
  Synthetic oligonucleotide
tcaagaaccaccattaatcccagagttgggtgtctacattggcatacataagaaagcatt

SEQ ID NO: 456174 - DNA, 59 bp, Artificial
  Synthetic oligonucleotide
tcaagaaccagataaaagatatgtgtggaaatgtttaccacaaggattcgtgttgagcc

SEQ ID NO: 456175 - DNA, 60 bp, Artificial
  Synthetic oligonucleotide
tcaagaacccaactgacactggtcatggcactgttgtgatgcaggtgaaagtgccaaaag

SEQ ID NO: 456176 - DNA, 55 bp, Artificial
  Synthetic oligonucleotide
tcaagaactgctgacaccgctctcgcaacaagggactttccgctggggactttcc

SEQ ID NO: 456177 - DNA, 60 bp, Artificial
  Synthetic oligonucleotide
tcaagaactggtccgatgcggacgagagcattggatagaacggcgctcgccagggttaga

SEQ ID NO: 456178 - DNA, 55 bp, Artificial
  Synthetic oligonucleotide
tcaagaaggaggactcaaaagatgagagagcttataatcccactctccctgtggt

SEQ ID NO: 456179 - DNA, 60 bp, Artificial
  Synthetic oligonucleotide
tcaagaaggcgtgtcccatgtggcacaaggacgtgcttcccgacgactggactcgagtct

SEQ ID NO: 456180 - DNA, 60 bp, Artificial
  Synthetic oligonucleotide
tcaagaagggctttgtgatcctatcagactatttgtcaaaggagagcctcacaaacagag

SEQ ID NO: 456181 - DNA, 60 bp, Artificial
  Synthetic oligonucleotide
tcaagaatcgggaatgaatccccatatcactgcgttatactcagtgtaaggcacacgcac

SEQ ID NO: 456182 - DNA, 57 bp, Artificial
  Synthetic oligonucleotide
tcaagaatgtcatgggagttgttgataatgacgcagttaatcatcagagcattgata

SEQ ID NO: 456183 - DNA, 58 bp, Artificial
  Synthetic oligonucleotide
tcaagaatgttcattccgcatataacattaagttttagtaataataagacggtgagaa

SEQ ID NO: 456184 - DNA, 55 bp, Artificial
  Synthetic oligonucleotide
tcaagaattacaagacagactttgtagcctcacttgaccctgcgttttgccctgc

SEQ ID NO: 456185 - DNA, 51 bp, Artificial
  Synthetic oligonucleotide
tcaagaattgcgttatatgaatgctaatggcttacgtccacctcgtaatag

SEQ ID NO: 456186 - DNA, 55 bp, Artificial
  Synthetic oligonucleotide
tcaagacaaacctatgcccaacgaggtggctgatctgcttagggccttgcgtggt

SEQ ID NO: 456187 - DNA, 60 bp, Artificial
  Synthetic oligonucleotide
tcaagacaatgtctagtgaaattgtgtgcagagaaggaaatagtttttggacaagccatt

SEQ ID NO: 456188 - DNA, 60 bp, Artificial
  Synthetic oligonucleotide
tcaagacacgagcccaggtcgttctattccatggttgacagaatagcaccacatactgga

SEQ ID NO: 456189 - DNA, 60 bp, Artificial
  Synthetic oligonucleotide
tcaagacacgatgtagttcatatagggaaggtcatgtgtattagtgatgtgactcgtggt

SEQ ID NO: 456190 - DNA, 60 bp, Artificial
  Synthetic oligonucleotide
tcaagacagattcaatctgcacaactttctctttcgacgaaatggagaagttcttccgag

SEQ ID NO: 456191 - DNA, 55 bp, Artificial
  Synthetic oligonucleotide
tcaagacaggttcaacccaccttattcagaccgtggtgagcctgttgaggacggt

SEQ ID NO: 456192 - DNA, 51 bp, Artificial
  Synthetic oligonucleotide
tcaagacatccaagcttgttgaagatttggacataagtgtcgaagaacagt

SEQ ID NO: 456193 - DNA, 52 bp, Artificial
  Synthetic oligonucleotide
tcaagaccagaaatgcattttatacacctggcgggaaatcactggatatatg

SEQ ID NO: 456194 - DNA, 60 bp, Artificial
  Synthetic oligonucleotide
tcaagacccgaacaaaatcaaggtgtacaccgatggctatgatggccactcgatgcgtac

SEQ ID NO: 456195 - DNA, 60 bp, Artificial
  Synthetic oligonucleotide
tcaagacccgacacttacagacttattcccagacgcatttaaatagtgcaattgtctgac

SEQ ID NO: 456196 - DNA, 58 bp, Artificial
  Synthetic oligonucleotide
tcaagacctcgtaggctgggccgcccccccaggtagccgctcgctgacaccctgcact

SEQ ID NO: 456197 - DNA, 55 bp, Artificial
  Synthetic oligonucleotide
tcaagacgaattggcagcactggtggtggaaatggggcatcatgctccttgggat

SEQ ID NO: 456198 - DNA, 60 bp, Artificial
  Synthetic oligonucleotide
tcaagacgggtgatttggaagcagtcaagtttggcggacaatggcgtatcactgaaacag

SEQ ID NO: 456199 - DNA, 58 bp, Artificial
  Synthetic oligonucleotide
tcaagacgtaactccttggacaccagcgtttggactctttcaatgtaagtagtccgca

SEQ ID NO: 456200 - DNA, 55 bp, Artificial
  Synthetic oligonucleotide
tcaagacgtccgggcccgctgaatgctccagaggtcgacgatactttcctcccga

SEQ ID NO: 456201 - DNA, 59 bp, Artificial
  Synthetic oligonucleotide
tcaagacgttaacggcatgttgcagagatggtgagcctccggaacctacggccaaagtg

SEQ ID NO: 456202 - DNA, 60 bp, Artificial
  Synthetic oligonucleotide
tcaagactatctatcaaagcagtaagtagtacatgtaatgtatcctttacacatagtagc

SEQ ID NO: 456203 - DNA, 55 bp, Artificial
  Synthetic oligonucleotide
tcaagactcactttgtgccattgttccatgggctgaccatggctgatgatatgac

SEQ ID NO: 456204 - DNA, 58 bp, Artificial
  Synthetic oligonucleotide
tcaagactctggcgtgcgtgacgttcaggaggttctttggaaccccgtcagtcaccaa

SEQ ID NO: 456205 - DNA, 55 bp, Artificial
  Synthetic oligonucleotide
tcaagagaccaactggagaactcatgcccttggcagccagaatgggaacccatgc

SEQ ID NO: 456206 - DNA, 59 bp, Artificial
  Synthetic oligonucleotide
tcaagagagaagaagaagtgcttaccggcaaccttcaaacactgaaaatacgagtgcac

SEQ ID NO: 456207 - DNA, 60 bp, Artificial
  Synthetic oligonucleotide
tcaagagattactatacttatgcctgacaggcagccaccatttgattctgttatatctaa

SEQ ID NO: 456208 - DNA, 58 bp, Artificial
  Synthetic oligonucleotide
tcaagagcaaacaccgtattgaaccagtatgtttgttagtacatggcagtcccgggac

SEQ ID NO: 456209 - DNA, 60 bp, Artificial
  Synthetic oligonucleotide
tcaagagcaagcaccgtattgagccagtatgtatgttgatacacggaagccctggcacag

SEQ ID NO: 456210 - DNA, 54 bp, Artificial
  Synthetic oligonucleotide
tcaagagcattgatgaacacgtacgctacaagggccgctgtacggggcatggag

SEQ ID NO: 456211 - DNA, 58 bp, Artificial
  Synthetic oligonucleotide
tcaagagccactcaaaatatagacactaatacactataatgcattacacacactcaca

SEQ ID NO: 456212 - DNA, 53 bp, Artificial
  Synthetic oligonucleotide
tcaagaggttgtcgatataactgctagcgaggaggacaaggaatcactaacat

SEQ ID NO: 456213 - DNA, 60 bp, Artificial
  Synthetic oligonucleotide
tcaagagtggtaatagtacagggaaatatagagggtactgcagagtcaatttgcagttat

SEQ ID NO: 456214 - DNA, 55 bp, Artificial
  Synthetic oligonucleotide
tcaagagttcaccatcccactaaaggatggggcattaatacatgtaacccactat

SEQ ID NO: 456215 - DNA, 57 bp, Artificial
  Synthetic oligonucleotide
tcaagatacggaaaacacgagaattcagatacatgcatcgtgaagtgacatttatac

SEQ ID NO: 456216 - DNA, 58 bp, Artificial
  Synthetic oligonucleotide
tcaagatcagttgttgcaccggctgaactagggttttgaggatcggtactttgtgaat

SEQ ID NO: 456217 - DNA, 60 bp, Artificial
  Synthetic oligonucleotide
tcaagatccggatacgagatgctaaaggtgccaaatgcattgacagacgataggtcaaag

SEQ ID NO: 456218 - DNA, 55 bp, Artificial
  Synthetic oligonucleotide
tcaagatcggggcctcggcctctacgctggccgaggctatgctactgcgaacctt

SEQ ID NO: 456219 - DNA, 60 bp, Artificial
  Synthetic oligonucleotide
tcaagatctacctacgagcattactcgacgaaggctattatgtgagaattggttctggag

SEQ ID NO: 456220 - DNA, 60 bp, Artificial
  Synthetic oligonucleotide
tcaagatgctatttccttgattgagggaatcaatcactcccatcacatttacagaaatca

SEQ ID NO: 456221 - DNA, 60 bp, Artificial
  Synthetic oligonucleotide
tcaagatgtaactgtaaatccaggtccattcgcacaaacaaggtatgctccagttaattg

SEQ ID NO: 456222 - DNA, 55 bp, Artificial
  Synthetic oligonucleotide
tcaagatgtaccagcggctgaaggagcggtgcttggagcaagcgcgctcggagct

SEQ ID NO: 456223 - DNA, 54 bp, Artificial
  Synthetic oligonucleotide
tcaagatgtcactaacgtcatcaaaatgcatgagctccaaaaaattctaggtaa

SEQ ID NO: 456224 - DNA, 60 bp, Artificial
  Synthetic oligonucleotide
tcaagatgtggctcgattgcaagactttctcgagagaggctacgactctttccgatcggt

SEQ ID NO: 456225 - DNA, 56 bp, Artificial
  Synthetic oligonucleotide
tcaagattaatacgattggctgatagcgggagagttgatgtccgtaaggtctggaa

SEQ ID NO: 456226 - DNA, 57 bp, Artificial
  Synthetic oligonucleotide
tcaagattatcaaatgggggagtcaagataattggaagattcaagatatctgacttc

SEQ ID NO: 456227 - DNA, 60 bp, Artificial
  Synthetic oligonucleotide
tcaagattgttctggcagtcattattaagtgaagggagacgccaaatagggcatgcctcg

SEQ ID NO: 456228 - DNA, 52 bp, Artificial
  Synthetic oligonucleotide
tcaagatttgagtcagtcgcttggtcagcaagtgcttgtcatgatggcatca

SEQ ID NO: 456229 - DNA, 53 bp, Artificial
  Synthetic oligonucleotide
tcaagcaaataatacaaacgtaatgatgcagaaaggcaactttaagggcccca

SEQ ID NO: 456230 - DNA, 56 bp, Artificial
  Synthetic oligonucleotide
tcaagcaaccgcctggtatgaaggttatcccttcaatcttaacctaactgttaaca

SEQ ID NO: 456231 - DNA, 55 bp, Artificial
  Synthetic oligonucleotide
tcaagcaagccaaaaggcagctcaaacactacagacacacctaaacagtctgacg

SEQ ID NO: 456232 - DNA, 57 bp, Artificial
  Synthetic oligonucleotide
tcaagcacaccggtattgttcgttgtgttagtgatgttacgcgtggttcgggtatta

SEQ ID NO: 456233 - DNA, 60 bp, Artificial
  Synthetic oligonucleotide
tcaagcacatcacgcggacattttgaatcgcatatgtgctcgttggattcgtttcgacga

SEQ ID NO: 456234 - DNA, 56 bp, Artificial
  Synthetic oligonucleotide
tcaagcacctaagggtgtaggtatggtaggctgaaggatgccctggaggtacccgc

SEQ ID NO: 456235 - DNA, 60 bp, Artificial
  Synthetic oligonucleotide
tcaagcacttcatgctagattcagtgctggaaaagggcacttatacttatgcggtgatgg

SEQ ID NO: 456236 - DNA, 60 bp, Artificial
  Synthetic oligonucleotide
tcaagcacttctgtttccccggtcaatgttgatatgctccaacagggcaaaaacaactgc

SEQ ID NO: 456237 - DNA, 57 bp, Artificial
  Synthetic oligonucleotide
tcaagcacttctgtttccccggttagatttgatacgctccaacagggcgaaaacaga

SEQ ID NO: 456238 - DNA, 60 bp, Artificial
  Synthetic oligonucleotide
tcaagcagaatgaatgcagcaacccctcgaataatcaagtagtgccatgtgaaccaatca

SEQ ID NO: 456239 - DNA, 50 bp, Artificial
  Synthetic oligonucleotide
tcaagcagaggagaatactagagaactgcctaattttcccttccccttgt

SEQ ID NO: 456240 - DNA, 60 bp, Artificial
  Synthetic oligonucleotide
tcaagcagcccgagaggcagccatgaaggcagttctagaaacctctacactcctcataga

SEQ ID NO: 456241 - DNA, 51 bp, Artificial
  Synthetic oligonucleotide
tcaagcagcgtttgagtactagtttcacgtccgccttctctgccctcagag

SEQ ID NO: 456242 - DNA, 55 bp, Artificial
  Synthetic oligonucleotide
tcaagcaggacataataaggtaggatcgctacaatacctggcactgacagcattg

SEQ ID NO: 456243 - DNA, 52 bp, Artificial
  Synthetic oligonucleotide
tcaagcaggctctggggtgcgtggcaatcagtcacaaactcccagaccagct

SEQ ID NO: 456244 - DNA, 60 bp, Artificial
  Synthetic oligonucleotide
tcaagcaggtacaactgcattcaggagacttccagtctctcagaagtctatatgctaggc

SEQ ID NO: 456245 - DNA, 60 bp, Artificial
  Synthetic oligonucleotide
tcaagcatcagggagagtcatagtctctaccaggaggagccagcaaactataatctcgaa

SEQ ID NO: 456246 - DNA, 60 bp, Artificial
  Synthetic oligonucleotide
tcaagcatgaaggcagaagagatcacaccaggtaggtacagaacagcaatctgtggactt

SEQ ID NO: 456247 - DNA, 55 bp, Artificial
  Synthetic oligonucleotide
tcaagcatgcatgcaagataaaagttcgactcagaggggagcacttgacagaagg

SEQ ID NO: 456248 - DNA, 56 bp, Artificial
  Synthetic oligonucleotide
tcaagcatggagatcattctaaatggtttcatggtatggtgcattgagaatggaac

SEQ ID NO: 456249 - DNA, 60 bp, Artificial
  Synthetic oligonucleotide
tcaagcattatcacttgataatgtacccagttcgttttaagcgtggtgtctcatttgctg

SEQ ID NO: 456250 - DNA, 60 bp, Artificial
  Synthetic oligonucleotide
tcaagccagaaggactttagtgacagccgttcgtgagaacaaagctgttgctgggttcaa

SEQ ID NO: 456251 - DNA, 54 bp, Artificial
  Synthetic oligonucleotide
tcaagccatctgaagtggtagtaccaatggagccaaccaggatgattacaaggg

SEQ ID NO: 456252 - DNA, 60 bp, Artificial
  Synthetic oligonucleotide
tcaagcccagtgaaggctgctgccaaagttttcagaggtatgaaataatctgcctcagtg

SEQ ID NO: 456253 - DNA, 56 bp, Artificial
  Synthetic oligonucleotide
tcaagcccgtccaaactcatttgccgagtttctaaacaagacatactctagtgact

SEQ ID NO: 456254 - DNA, 55 bp, Artificial
  Synthetic oligonucleotide
tcaagccgatgcaagtcttctatgagagaaagcatcaactccgggttgtcatcta

SEQ ID NO: 456255 - DNA, 55 bp, Artificial
  Synthetic oligonucleotide
tcaagccgtctactcgcagctcattcgccagtcaaccgcgcttacacacgtgttt

SEQ ID NO: 456256 - DNA, 58 bp, Artificial
  Synthetic oligonucleotide
tcaagccgtttggcgcgtaatcttaactcaggcgactcggttgctctcgttcttcgtc

SEQ ID NO: 456257 - DNA, 58 bp, Artificial
  Synthetic oligonucleotide
tcaagcctgtccctgccccgcgtaggaaggttagatccgactgtggcggcctgatttc

SEQ ID NO: 456258 - DNA, 54 bp, Artificial
  Synthetic oligonucleotide
tcaagccttggacaattaaggagaatttcgatgttaattacgttcaaacgggta

SEQ ID NO: 456259 - DNA, 55 bp, Artificial
  Synthetic oligonucleotide
tcaagcgacacccacaattacgcgagatgttacgtcgtgacgaacagacgcgtct

SEQ ID NO: 456260 - DNA, 60 bp, Artificial
  Synthetic oligonucleotide
tcaagcgacctacggtcaagcaccataatgtcacggatggctatgcatcctaggggtgag

SEQ ID NO: 456261 - DNA, 60 bp, Artificial
  Synthetic oligonucleotide
tcaagcgagacattcgttttctcgaaggacaatctcgcgggaagttccagtggatcaatc

SEQ ID NO: 456262 - DNA, 53 bp, Artificial
  Synthetic oligonucleotide
tcaagcgagatggcgggctcttggactcacgtgacatacaagtggcaaccaga

SEQ ID NO: 456263 - DNA, 55 bp, Artificial
  Synthetic oligonucleotide
tcaagcgagtcttcaatcactgtcgtgactgtgaccatttcaactgcaagatctc

SEQ ID NO: 456264 - DNA, 59 bp, Artificial
  Synthetic oligonucleotide
tcaagcggttctggaaggtcaacaatcatgtcgtctataaccatcaagaagccggaaag

SEQ ID NO: 456265 - DNA, 60 bp, Artificial
  Synthetic oligonucleotide
tcaagctacggtgacaggtggtcaatatgcatgcaaggagcaggctctagttaggaagtt

SEQ ID NO: 456266 - DNA, 55 bp, Artificial
  Synthetic oligonucleotide
tcaagctagacacatacatcgtgcatgttggcaggctctcgacagaagttttcag

SEQ ID NO: 456267 - DNA, 60 bp, Artificial
  Synthetic oligonucleotide
tcaagctagccactggactcagaaatgtgccagctatatcgaatagaggactgctcggag

SEQ ID NO: 456268 - DNA, 60 bp, Artificial
  Synthetic oligonucleotide
tcaagctagtaccagttgatccagataaggtagaagaggccactgcaggagagaacaact

SEQ ID NO: 456269 - DNA, 55 bp, Artificial
  Synthetic oligonucleotide
tcaagctcaaaatcgcccaggttattccagtcccaatggagtcccagtgcgtgag

SEQ ID NO: 456270 - DNA, 58 bp, Artificial
  Synthetic oligonucleotide
tcaagctcaagaaccacacaaacagcgttattttttggttggtgcgtgatcgtcgtcc

SEQ ID NO: 456271 - DNA, 60 bp, Artificial
  Synthetic oligonucleotide
tcaagctcaagaaccacactaatagtgtcatgttttggttggttcgagacaggagaccat

SEQ ID NO: 456272 - DNA, 58 bp, Artificial
  Synthetic oligonucleotide
tcaagctcgccgcccccacgacctactactctggctatctatcctcccagcaactatc

SEQ ID NO: 456273 - DNA, 60 bp, Artificial
  Synthetic oligonucleotide
tcaagctctccaccttcgttacttttaatgaagagtgctcattcgatggtggagaggaat

SEQ ID NO: 456274 - DNA, 60 bp, Artificial
  Synthetic oligonucleotide
tcaagctgccatgatgggaaggcatggttacatatttgtgtcactggggatgatagaaat

SEQ ID NO: 456275 - DNA, 55 bp, Artificial
  Synthetic oligonucleotide
tcaagctgctcagactctataagtaagggtgtgatttcatactcactacatagag

SEQ ID NO: 456276 - DNA, 60 bp, Artificial
  Synthetic oligonucleotide
tcaagctggctctaaggagagggatataggcacagccttcacctcggatcgcgttgtggt

SEQ ID NO: 456277 - DNA, 60 bp, Artificial
  Synthetic oligonucleotide
tcaagcttcatcagaggggcaagagtagtcccaagaggacaactgtccaccagaggagtt

SEQ ID NO: 456278 - DNA, 55 bp, Artificial
  Synthetic oligonucleotide
tcaagcttggaatggggtgtgatggtctacgattattctgaactggagcatgatc

SEQ ID NO: 456279 - DNA, 54 bp, Artificial
  Synthetic oligonucleotide
tcaagcttggtgccctaaccggcacctacatttacgaccacctaacaccgatgt

SEQ ID NO: 456280 - DNA, 59 bp, Artificial
  Synthetic oligonucleotide
tcaagctttacaggccgtcgggaacatatggttcaaaatgactcaacataagttattca

SEQ ID NO: 456281 - DNA, 55 bp, Artificial
  Synthetic oligonucleotide
tcaagctttgctgcgaatgataaggatcatcaagagtttataccagagcagtaag

SEQ ID NO: 456282 - DNA, 60 bp, Artificial
  Synthetic oligonucleotide
tcaagcttttggcttgagttggagctcaccaacatatgcctgtgtcacatgggaacccat

SEQ ID NO: 456283 - DNA, 60 bp, Artificial
  Synthetic oligonucleotide
tcaagcttttgtcaaagcttccactgattctcatttcaagctgagcctctggctaagggt

SEQ ID NO: 456284 - DNA, 60 bp, Artificial
  Synthetic oligonucleotide
tcaaggaaattccttgctacagcatggctaagataaaccttcccctactgaatgaggaca

SEQ ID NO: 456285 - DNA, 59 bp, Artificial
  Synthetic oligonucleotide
tcaaggaaatttgaaaatgctgtgtgggatcagttcaaggacttatgccacatgcatac

SEQ ID NO: 456286 - DNA, 60 bp, Artificial
  Synthetic oligonucleotide
tcaaggaacctgaactgcccaagacactcgtcaactgtgtcaggaggatcaaagaagccc

SEQ ID NO: 456287 - DNA, 59 bp, Artificial
  Synthetic oligonucleotide
tcaaggaacgcttgctagagtgggacgcggcgcttgaacccctgtcattcaccaggacg

SEQ ID NO: 456288 - DNA, 60 bp, Artificial
  Synthetic oligonucleotide
tcaaggaagataaagaattagctcaacttaggggaatggctgagacagtgggattagcca

SEQ ID NO: 456289 - DNA, 60 bp, Artificial
  Synthetic oligonucleotide
tcaaggaagcaacgcagctgtgcgccagtgactccactgtagagccgtgcagcgcttaac

SEQ ID NO: 456290 - DNA, 58 bp, Artificial
  Synthetic oligonucleotide
tcaaggaagcgttcattcgattatcacgggggaatcctacggtgaatcagttaagcaa

SEQ ID NO: 456291 - DNA, 54 bp, Artificial
  Synthetic oligonucleotide
tcaaggaattctagttagagacacacaagaggctcttaagaagatcaaggtgga

SEQ ID NO: 456292 - DNA, 58 bp, Artificial
  Synthetic oligonucleotide
tcaaggaattggtgatagccagaggtcaaacaacttgaccgttacgaggcatttgaag

SEQ ID NO: 456293 - DNA, 60 bp, Artificial
  Synthetic oligonucleotide
tcaaggacgcactgttggaggccagatgggcatgcttctgacaggatccaacgccaaaag

SEQ ID NO: 456294 - DNA, 60 bp, Artificial
  Synthetic oligonucleotide
tcaaggactataggtacacataccgatgccacagaggtgatacacaaattcaaacgagga

SEQ ID NO: 456295 - DNA, 57 bp, Artificial
  Synthetic oligonucleotide
tcaaggagaaagcattacccggtcagtttctcaaaacccagcttgatctttgtagag

SEQ ID NO: 456296 - DNA, 60 bp, Artificial
  Synthetic oligonucleotide
tcaaggagcacgtccctttcgatgacgtgcattgcagttggcatggttacactgtaccta

SEQ ID NO: 456297 - DNA, 60 bp, Artificial
  Synthetic oligonucleotide
tcaaggagcactcctagtcgctgtcctaccagagtatgtcattgggacagtggcgggcgg

SEQ ID NO: 456298 - DNA, 60 bp, Artificial
  Synthetic oligonucleotide
tcaaggagcgatcaagccttaggtatggaaatgtccttgatgtaaatgccattgatatag

SEQ ID NO: 456299 - DNA, 57 bp, Artificial
  Synthetic oligonucleotide
tcaaggatacaacccattacaagtagggcatgccatctgttgtgtacttaacaaaca

SEQ ID NO: 456300 - DNA, 60 bp, Artificial
  Synthetic oligonucleotide
tcaaggatcagggatacttaatcatggcaatattgtacgagggatttgcgaattcacaaa

SEQ ID NO: 456301 - DNA, 60 bp, Artificial
  Synthetic oligonucleotide
tcaaggatgcaattgtatgcggcttcacaatggctggtggcgcaatgctattgtatcaac

SEQ ID NO: 456302 - DNA, 55 bp, Artificial
  Synthetic oligonucleotide
tcaaggcaaatatgttgatgaaagcgaaatcggatctgggaccattaagggtttc

SEQ ID NO: 456303 - DNA, 60 bp, Artificial
  Synthetic oligonucleotide
tcaaggcatccatggcatatattgcacagctgttgtacgtgacaagcgaccctgtcagtt

SEQ ID NO: 456304 - DNA, 54 bp, Artificial
  Synthetic oligonucleotide
tcaaggccagcttgctctgcaagcttcattgacagatgaacaattgctacctgt

SEQ ID NO: 456305 - DNA, 57 bp, Artificial
  Synthetic oligonucleotide
tcaaggcccatactctggtaatccagcacactccaagcttaaagccccgaccctacg

SEQ ID NO: 456306 - DNA, 55 bp, Artificial
  Synthetic oligonucleotide
tcaaggcctaccatgaatataagatcacaaattgtgtcttacagttcgtcagcga

SEQ ID NO: 456307 - DNA, 60 bp, Artificial
  Synthetic oligonucleotide
tcaaggctaacatgggccggaatgttgatgtgtacacctttggtgagagcacaggtatga

SEQ ID NO: 456308 - DNA, 51 bp, Artificial
  Synthetic oligonucleotide
tcaaggctgacaatgtgtatttgcaagcgacgcagaagattccgcaggcgt

SEQ ID NO: 456309 - DNA, 58 bp, Artificial
  Synthetic oligonucleotide
tcaaggctgacgcgattatctctgatttctacgataaccgacccagttgcgttaaagg

SEQ ID NO: 456310 - DNA, 57 bp, Artificial
  Synthetic oligonucleotide
tcaaggctggctccgggcaactgagaagcggcggaatgaagcttattccaagttcca

SEQ ID NO: 456311 - DNA, 59 bp, Artificial
  Synthetic oligonucleotide
tcaagggactgagactggggtgggaagccctcaaatatctgtggaaccttctagcatac

SEQ ID NO: 456312 - DNA, 56 bp, Artificial
  Synthetic oligonucleotide
tcaagggagaaggccaaaggatctgggacactgtggacttctaggaaccctagtag

SEQ ID NO: 456313 - DNA, 55 bp, Artificial
  Synthetic oligonucleotide
tcaagggatgactaactttattgtgtatgaatggatgaggcgcgttctcttaact

SEQ ID NO: 456314 - DNA, 60 bp, Artificial
  Synthetic oligonucleotide
tcaagggcaatgccaccagtgccaacattatctaaaatgcagaatgctctgtatccaacc

SEQ ID NO: 456315 - DNA, 60 bp, Artificial
  Synthetic oligonucleotide
tcaagggccacagagggagccatacaatgaatggatgctagagcttttagaggagcttaa

SEQ ID NO: 456316 - DNA, 60 bp, Artificial
  Synthetic oligonucleotide
tcaagggccaccgaggccgccataccaggaatggacactagagcttctagaggagcttaa

SEQ ID NO: 456317 - DNA, 50 bp, Artificial
  Synthetic oligonucleotide
tcaagggcctccacgcgtttcatacgcccctgccgaagcgcgatttgctt

SEQ ID NO: 456318 - DNA, 55 bp, Artificial
  Synthetic oligonucleotide
tcaagggcgaggcaatccgcagtgttgctcagatcgccgaaggtaccccggtctg

SEQ ID NO: 456319 - DNA, 60 bp, Artificial
  Synthetic oligonucleotide
tcaaggggaatacaacaagccaatgaatcctgggcttgcaatcatttttcaatgatgtca

SEQ ID NO: 456320 - DNA, 56 bp, Artificial
  Synthetic oligonucleotide
tcaaggggcttttcgggcgatgcgaccggctgacgggtgggcctgtctcgttccag

SEQ ID NO: 456321 - DNA, 55 bp, Artificial
  Synthetic oligonucleotide
tcaaggggggagtcctcgaagatgcagagacggagtatcgtcccggtacgataac

SEQ ID NO: 456322 - DNA, 51 bp, Artificial
  Synthetic oligonucleotide
tcaagggggggtcaggtttgctggccttggcgcccggaatgtaccttggag

SEQ ID NO: 456323 - DNA, 58 bp, Artificial
  Synthetic oligonucleotide
tcaagggttgaagccacaagtgtcgttacccgcattggtactacacagagcctagtac

SEQ ID NO: 456324 - DNA, 57 bp, Artificial
  Synthetic oligonucleotide
tcaaggtaaaatgtatctagacaacctaatcttgaagaatatagaggttattactaa

SEQ ID NO: 456325 - DNA, 57 bp, Artificial
  Synthetic oligonucleotide
tcaaggtaggagacacaccggaaacaggaacccctagcaccaatgagacaaactcca

SEQ ID NO: 456326 - DNA, 60 bp, Artificial
  Synthetic oligonucleotide
tcaaggtatagcatgaagaagataatggtgtccgcaacattaacgatggctcctggagag

SEQ ID NO: 456327 - DNA, 60 bp, Artificial
  Synthetic oligonucleotide
tcaaggtcagcttgccatctcgcaactcgaaacgggatatggtgtgcgaatattcaaccc

SEQ ID NO: 456328 - DNA, 60 bp, Artificial
  Synthetic oligonucleotide
tcaaggtcattggtggttggaccactgctaattccaagtcacaggtcaatagacaagtca

SEQ ID NO: 456329 - DNA, 60 bp, Artificial
  Synthetic oligonucleotide
tcaaggtccactacagtgttttcccaagcccttcctactattgatgtcctagatgcaatg

SEQ ID NO: 456330 - DNA, 58 bp, Artificial
  Synthetic oligonucleotide
tcaaggtccctaagtcgctctgcggcttaggtattggctccacctactgaacgggcca

SEQ ID NO: 456331 - DNA, 54 bp, Artificial
  Synthetic oligonucleotide
tcaaggtccggatttgggtgatttcaccaagcatcccgggtttggcgccctgtt

SEQ ID NO: 456332 - DNA, 60 bp, Artificial
  Synthetic oligonucleotide
tcaaggtgaaagaagccagggagcatcgcattgactctattgtaaccgagcagtttgcag

SEQ ID NO: 456333 - DNA, 60 bp, Artificial
  Synthetic oligonucleotide
tcaaggtgactctcagcagatcccgtttattaatagagtggagtctattacgcttcgata

SEQ ID NO: 456334 - DNA, 59 bp, Artificial
  Synthetic oligonucleotide
tcaaggtgggtgaagactgctgctggaatggaggctatttccaagattactacccaaag

SEQ ID NO: 456335 - DNA, 60 bp, Artificial
  Synthetic oligonucleotide
tcaaggtggttgaacatcacacattgatgaccactcacaagatgtgtgcaaattggagca

SEQ ID NO: 456336 - DNA, 56 bp, Artificial
  Synthetic oligonucleotide
tcaaggttgagcaaggaactaaagactactgtcaaattttacactttaactcacca

SEQ ID NO: 456337 - DNA, 60 bp, Artificial
  Synthetic oligonucleotide
tcaaggttttagatctgtgtaggttgttgtctacgataggtaggaagatgtgcaatactg

SEQ ID NO: 456338 - DNA, 60 bp, Artificial
  Synthetic oligonucleotide
tcaagtaaacataacctccccatacttggcacaggtatctgtaattatgaggtccatgcg

SEQ ID NO: 456339 - DNA, 50 bp, Artificial
  Synthetic oligonucleotide
tcaagtacatcaagccaacataatggtgcagagaggcaattttaggggcc

SEQ ID NO: 456340 - DNA, 60 bp, Artificial
  Synthetic oligonucleotide
tcaagtagctccattgtgatgtgtggagtagaccatgaaattgccgattggtcatggcac

SEQ ID NO: 456341 - DNA, 59 bp, Artificial
  Synthetic oligonucleotide
tcaagtaggagacacaagagatttgcgggagtagtcctggcaggtgcggccctaggcgt

SEQ ID NO: 456342 - DNA, 53 bp, Artificial
  Synthetic oligonucleotide
tcaagtaggtcgtcgacctagggttattcaaatggtgggaaccgaagggcaat

SEQ ID NO: 456343 - DNA, 51 bp, Artificial
  Synthetic oligonucleotide
tcaagtagtgcattggaagtacgaaattgatggcccagctgagacaacgta

SEQ ID NO: 456344 - DNA, 52 bp, Artificial
  Synthetic oligonucleotide
tcaagtatctggggaatctcacgcagtattggagtcgggaactaaggaatag

SEQ ID NO: 456345 - DNA, 56 bp, Artificial
  Synthetic oligonucleotide
tcaagtattacaggactactattgacacgtgatggaggaacgagtgcaaacaatga

SEQ ID NO: 456346 - DNA, 52 bp, Artificial
  Synthetic oligonucleotide
tcaagtattccaattggagaagtggatcactcgacctttgagctagcagttg

SEQ ID NO: 456347 - DNA, 55 bp, Artificial
  Synthetic oligonucleotide
tcaagtcaagatgtgagtctcagaccgcaggctttaagtccacgagtaacccgac

SEQ ID NO: 456348 - DNA, 55 bp, Artificial
  Synthetic oligonucleotide
tcaagtcaagcatggtgatacacctattcctctaggtggaagtggtgccatgtca

SEQ ID NO: 456349 - DNA, 60 bp, Artificial
  Synthetic oligonucleotide
tcaagtcaattgcgagataagcagagcaataagtccagtccgtctactatggagcctggt

SEQ ID NO: 456350 - DNA, 55 bp, Artificial
  Synthetic oligonucleotide
tcaagtcactcaatttccatcggtttaacacccggacctaaggattactcaatat

SEQ ID NO: 456351 - DNA, 60 bp, Artificial
  Synthetic oligonucleotide
tcaagtcagcactaaaagtagcactatcttcggagcctattcagtaccaacgtattgagt

SEQ ID NO: 456352 - DNA, 54 bp, Artificial
  Synthetic oligonucleotide
tcaagtcatgcataagttctacgccaaggtaaccggtgggcagtatgcgagtaa

SEQ ID NO: 456353 - DNA, 52 bp, Artificial
  Synthetic oligonucleotide
tcaagtcatgcatcggttttattctaaggtgaccgggggacaatatgcgagc

SEQ ID NO: 456354 - DNA, 60 bp, Artificial
  Synthetic oligonucleotide
tcaagtcattcaaactgcgagccttcaagagaatggaattgttgccctcctcaaccatgc

SEQ ID NO: 456355 - DNA, 52 bp, Artificial
  Synthetic oligonucleotide
tcaagtcccggaaaagccgcgaaagcattgtgcacactgacagatgtgtacc

SEQ ID NO: 456356 - DNA, 60 bp, Artificial
  Synthetic oligonucleotide
tcaagtcggaacaactacctcacaagatgctgcctataagacactgaagagtctggtctg

SEQ ID NO: 456357 - DNA, 53 bp, Artificial
  Synthetic oligonucleotide
tcaagtctttgataagagaaaaccaaatgctacagcacaagatatcaaatcta

SEQ ID NO: 456358 - DNA, 60 bp, Artificial
  Synthetic oligonucleotide
tcaagtgacgatggctgctgattggcagtgtattgttactatgcatgtggacatggggcc

SEQ ID NO: 456359 - DNA, 60 bp, Artificial
  Synthetic oligonucleotide
tcaagtgagaaataccatgagccccgtaatgggagtgatcggattctccttctttgcaaa

SEQ ID NO: 456360 - DNA, 60 bp, Artificial
  Synthetic oligonucleotide
tcaagtgatatcagatggtataaatgagacgcctttatggcctcaggagcgatatgttca

SEQ ID NO: 456361 - DNA, 59 bp, Artificial
  Synthetic oligonucleotide
tcaagtgcagttggcttacgactgcccccccttcaagacgttgcaggattattcctcgc

SEQ ID NO: 456362 - DNA, 60 bp, Artificial
  Synthetic oligonucleotide
tcaagtgcatggctgggagagtttgacgatgctgagctcgattcgtttgtaattaaaaca

SEQ ID NO: 456363 - DNA, 60 bp, Artificial
  Synthetic oligonucleotide
tcaagtgccagacctttattgcattgagtgtgtgaaagatgaacgtctgccaattagaaa

SEQ ID NO: 456364 - DNA, 60 bp, Artificial
  Synthetic oligonucleotide
tcaagtgcgtttagttcaccaatacatgcaaagcgcatgattagatcacgaaccgtacac

SEQ ID NO: 456365 - DNA, 60 bp, Artificial
  Synthetic oligonucleotide
tcaagtgctcagacccgggaccactgtggtctttacacctggcgagcgttccagcactac

SEQ ID NO: 456366 - DNA, 54 bp, Artificial
  Synthetic oligonucleotide
tcaagtggaaagcctagcccacaactatttaatgaggccgcccagaatgcagaa

SEQ ID NO: 456367 - DNA, 60 bp, Artificial
  Synthetic oligonucleotide
tcaagtggaggaaggacataggcttccgtgtcaatgcaaatacggcaaccctgagccata

SEQ ID NO: 456368 - DNA, 55 bp, Artificial
  Synthetic oligonucleotide
tcaagtggcccacggcgcttagggctcagattgcaaccttcgggtaagcccaacc

SEQ ID NO: 456369 - DNA, 55 bp, Artificial
  Synthetic oligonucleotide
tcaagtggggtacctgcacgctccgactggcagtgggaagagcacgaaagtgccg

SEQ ID NO: 456370 - DNA, 60 bp, Artificial
  Synthetic oligonucleotide
tcaagtgggtgaaaatgtgagtgagaactatactgggatttctaaggaagcagctaagca

SEQ ID NO: 456371 - DNA, 60 bp, Artificial
  Synthetic oligonucleotide
tcaagtggtcgtccacaactgcaccacagtctgtagtgcataggaatattgtttacttaa

SEQ ID NO: 456372 - DNA, 55 bp, Artificial
  Synthetic oligonucleotide
tcaagtgtctaattgaccaccctttaatgcgttgttggtggatggaatacaaccc

SEQ ID NO: 456373 - DNA, 51 bp, Artificial
  Synthetic oligonucleotide
tcaagtgtgacatacgaagtaaagcgtggtactcacgaattgattaaggta

SEQ ID NO: 456374 - DNA, 58 bp, Artificial
  Synthetic oligonucleotide
tcaagtgttcagcctggtcagaccaaatgaaaacccagcccacaaaagtcaattggtg

SEQ ID NO: 456375 - DNA, 53 bp, Artificial
  Synthetic oligonucleotide
tcaagtgtttgttcaatccgcacacgacaccccagttatctcgctcgcagcta

SEQ ID NO: 456376 - DNA, 55 bp, Artificial
  Synthetic oligonucleotide
tcaagttacgtcggtgcgcaaattttggtaccgattaacgtcgtagacactcgag

SEQ ID NO: 456377 - DNA, 60 bp, Artificial
  Synthetic oligonucleotide
tcaagttagctaattgatttatatgattatcacaattgaatgtaatcataagcacaatca

SEQ ID NO: 456378 - DNA, 55 bp, Artificial
  Synthetic oligonucleotide
tcaagttaggggcccttactggcacctatgtctataaccatctcactccccttag

SEQ ID NO: 456379 - DNA, 56 bp, Artificial
  Synthetic oligonucleotide
tcaagttatcgagatgggagaaggtactaaacctgatgccctgatcagcactcatg

SEQ ID NO: 456380 - DNA, 55 bp, Artificial
  Synthetic oligonucleotide
tcaagttccagctgcgaatgaaacaggagtagcacatgagtcaaaatcaatgatg

SEQ ID NO: 456381 - DNA, 60 bp, Artificial
  Synthetic oligonucleotide
tcaagttctgtgcgccgtcacccgtaccgtaacatccagtgctgaaggttctcttgagat

SEQ ID NO: 456382 - DNA, 59 bp, Artificial
  Synthetic oligonucleotide
tcaagttgaagaatcacacgaacagtgtcatgttctggttggttagggatcggagacct

SEQ ID NO: 456383 - DNA, 53 bp, Artificial
  Synthetic oligonucleotide
tcaagttgacagggcctttattcagcctgaaagtttagaacaacttcagagga

SEQ ID NO: 456384 - DNA, 55 bp, Artificial
  Synthetic oligonucleotide
tcaagttgacagttggcctggcgtgcactctactgctagtggtcggcacggcatg

SEQ ID NO: 456385 - DNA, 54 bp, Artificial
  Synthetic oligonucleotide
tcaagttgcaggattcgattactcttgtgctattaatgctcccgctaacactca

SEQ ID NO: 456386 - DNA, 60 bp, Artificial
  Synthetic oligonucleotide
tcaagttgccacgatggaagagcatggttgcatgtttgtgttactggagatgataagaat

SEQ ID NO: 456387 - DNA, 59 bp, Artificial
  Synthetic oligonucleotide
tcaagttggaactacaacgtctgaagttatcacaaactggaaagatcacttgacgccta

SEQ ID NO: 456388 - DNA, 56 bp, Artificial
  Synthetic oligonucleotide
tcaagttggctggtcccggtgcatttgacgtgaacaccgggtccaactgggcgacg

SEQ ID NO: 456389 - DNA, 59 bp, Artificial
  Synthetic oligonucleotide
tcaagttgggggcgcttactggcacctatgtctatgaccacctcactcctcttcgggac

SEQ ID NO: 456390 - DNA, 51 bp, Artificial
  Synthetic oligonucleotide
tcaagttgttgtgcagttaggttgcccatatagattccggaagcctgtggc

SEQ ID NO: 456391 - DNA, 54 bp, Artificial
  Synthetic oligonucleotide
tcaagtttcgggggttgtgcacccgacccctaattcttgaggagtctcgcggag

SEQ ID NO: 456392 - DNA, 56 bp, Artificial
  Synthetic oligonucleotide
tcaagtttctgttaaagagcgctctggcgtttctcaaaagtccggtaagccttata

SEQ ID NO: 456393 - DNA, 60 bp, Artificial
  Synthetic oligonucleotide
tcaagttttaatcgatattagacaggaacccgggcatcaaattgatccgatcatacaagc

SEQ ID NO: 456394 - DNA, 60 bp, Artificial
  Synthetic oligonucleotide
tcaataaaccatggaacgagctatacaaggaagcgacgctagggaacaagcttacagtga

SEQ ID NO: 456395 - DNA, 53 bp, Artificial
  Synthetic oligonucleotide
tcaataaaccgtttaattcgtttcagttgaactttggtctctgcgtatttctt

SEQ ID NO: 456396 - DNA, 60 bp, Artificial
  Synthetic oligonucleotide
tcaataaacgtagcaaattgctttctcgcacaatcgcattccgagtggttactattccat

SEQ ID NO: 456397 - DNA, 52 bp, Artificial
  Synthetic oligonucleotide
tcaataacctcacacttcggcccacttgccattatgcgcttctctggcgagg

SEQ ID NO: 456398 - DNA, 60 bp, Artificial
  Synthetic oligonucleotide
tcaataacggtgagatccacccttgggtcctggcaggaatgctgtccatgggagtaggaa

SEQ ID NO: 456399 - DNA, 59 bp, Artificial
  Synthetic oligonucleotide
tcaataataaagagtgggtgagtgaagctatacagatcgccattagtcacatggcaagg

SEQ ID NO: 456400 - DNA, 60 bp, Artificial
  Synthetic oligonucleotide
tcaataattgatgcgatcgataaaagactatctgacgcacaaaacatgttcgatgaatca

SEQ ID NO: 456401 - DNA, 60 bp, Artificial
  Synthetic oligonucleotide
tcaatacaaatcgcagacccagccaccgcccctagagacgtcatacacccctgggatgtg

SEQ ID NO: 456402 - DNA, 60 bp, Artificial
  Synthetic oligonucleotide
tcaatacaattctatagaaaagtgggatctgagcaaattatcacagatcgacattctaag

SEQ ID NO: 456403 - DNA, 60 bp, Artificial
  Synthetic oligonucleotide
tcaatacagaagtaactaagcagatggttcaagatgtatcaaacgacgtgagagaaacgt

SEQ ID NO: 456404 - DNA, 60 bp, Artificial
  Synthetic oligonucleotide
tcaatacagactgcctttaatcaaggcgctggtacttgcaccctgtccgattcagggagg

SEQ ID NO: 456405 - DNA, 60 bp, Artificial
  Synthetic oligonucleotide
tcaatacagtggatttgtgaggacactattccaacagatgcgtgatgtgttggggacatt

SEQ ID NO: 456406 - DNA, 55 bp, Artificial
  Synthetic oligonucleotide
tcaataccaggacaagtgaggaatttaattgagatgtgtcaagtagacacgctta

SEQ ID NO: 456407 - DNA, 56 bp, Artificial
  Synthetic oligonucleotide
tcaatacccagaaatttgggcgtgcccccgcgagaccactagccgagtagtgttgg

SEQ ID NO: 456408 - DNA, 60 bp, Artificial
  Synthetic oligonucleotide
tcaataccccgccttgactgcagagatatttaacgtctatagcttcagagatcatacttg

SEQ ID NO: 456409 - DNA, 56 bp, Artificial
  Synthetic oligonucleotide
tcaatacccttggatcatggaaatcccacccctagtcttaaaccggtcactttgca

SEQ ID NO: 456410 - DNA, 55 bp, Artificial
  Synthetic oligonucleotide
tcaataccgataaagatggtcttgtctccggtaatcttgagttcggtgggcttcc

SEQ ID NO: 456411 - DNA, 60 bp, Artificial
  Synthetic oligonucleotide
tcaatacgagttatgaaaatatgacgatgcatttgtgatgcatttttgcatcgaactgac

SEQ ID NO: 456412 - DNA, 54 bp, Artificial
  Synthetic oligonucleotide
tcaatacgcacaccgtctgttttcctcatcacttgctaataagcgcaacagggt

SEQ ID NO: 456413 - DNA, 55 bp, Artificial
  Synthetic oligonucleotide
tcaatacgtggacgcgtccaagttgaccgcgtttcaatcggtgctcgtgtacagg

SEQ ID NO: 456414 - DNA, 60 bp, Artificial
  Synthetic oligonucleotide
tcaatactactgatacctatgttggtaatgtcaatattagcagcagggaaccgataaaca

SEQ ID NO: 456415 - DNA, 57 bp, Artificial
  Synthetic oligonucleotide
tcaatactcccagacagccctgctacggttcctatgccgcccccacaaatgtaaacg

SEQ ID NO: 456416 - DNA, 59 bp, Artificial
  Synthetic oligonucleotide
tcaatactcttaccactctccgcctatttggtcgttagcgctgtattgggcactcctgt

SEQ ID NO: 456417 - DNA, 60 bp, Artificial
  Synthetic oligonucleotide
tcaatactgggatggcttccaacaggatgtctatccaattacagtatttgaagaaatctg

SEQ ID NO: 456418 - DNA, 58 bp, Artificial
  Synthetic oligonucleotide
tcaatagacaattcgggttcgacatacagatttgtggattacattaaaactagttcca

SEQ ID NO: 456419 - DNA, 59 bp, Artificial
  Synthetic oligonucleotide
tcaatagacctaacgacaggtgaagtaacctatgtaagaccggaatatgcaactatgtc

SEQ ID NO: 456420 - DNA, 60 bp, Artificial
  Synthetic oligonucleotide
tcaatagacttggactacatactgtaccctcccaggtgggtgcagagcataaagctaagt

SEQ ID NO: 456421 - DNA, 60 bp, Artificial
  Synthetic oligonucleotide
tcaatagataccctctgtgggtatcattcaaggacacaacggatgtagaacctagtggtc

SEQ ID NO: 456422 - DNA, 56 bp, Artificial
  Synthetic oligonucleotide
tcaatagcaaatttggcactgattaaaacggttttgtcacgtatttctaacaaaca

SEQ ID NO: 456423 - DNA, 60 bp, Artificial
  Synthetic oligonucleotide
tcaatagcctgtatgcatctccacaattagaagggttttcagcggagtcaagaaaactgc

SEQ ID NO: 456424 - DNA, 60 bp, Artificial
  Synthetic oligonucleotide
tcaataggaaagctgcatcaaatgtgcatgttcttgacaattaaggatatactagttgca

SEQ ID NO: 456425 - DNA, 60 bp, Artificial
  Synthetic oligonucleotide
tcaataggcacgctaaagggtacttcctcaaagaggccgtcactgcatgtcggcttcagt

SEQ ID NO: 456426 - DNA, 60 bp, Artificial
  Synthetic oligonucleotide
tcaatagggaaagtctgcaggaccttgttggcaaaatccgtgttcaacagcctatacgca

SEQ ID NO: 456427 - DNA, 57 bp, Artificial
  Synthetic oligonucleotide
tcaatagggagaacccttctgggtttttcatttgttacagaccctgataacacagca

SEQ ID NO: 456428 - DNA, 60 bp, Artificial
  Synthetic oligonucleotide
tcaatagggtaaatgcctcagggtcacatgtagccatggtcaccagccctccagggtacc

SEQ ID NO: 456429 - DNA, 55 bp, Artificial
  Synthetic oligonucleotide
tcaataggtggagcgcaaaccagcgctctcatgagcaagcactcctgtctccccg

SEQ ID NO: 456430 - DNA, 60 bp, Artificial
  Synthetic oligonucleotide
tcaatagtctccgaaagaattgcgccgagatgactattgctcatgattatccgattgaag

SEQ ID NO: 456431 - DNA, 60 bp, Artificial
  Synthetic oligonucleotide
tcaatagttatagaatctggcgatccgaatgcattgttgaaacaccgatttgaaataatt

SEQ ID NO: 456432 - DNA, 60 bp, Artificial
  Synthetic oligonucleotide
tcaatatatagtataccttcttactagcatctgctgacacgtggaggccatccgttataa

SEQ ID NO: 456433 - DNA, 55 bp, Artificial
  Synthetic oligonucleotide
tcaatatcaagaccgcctgaacaatctgtattgcagttaggcatttcacggtgtc

SEQ ID NO: 456434 - DNA, 60 bp, Artificial
  Synthetic oligonucleotide
tcaatatcatgcaacagttggacttacgttacgtattgagtctgcagtttgtgaatcagt

SEQ ID NO: 456435 - DNA, 55 bp, Artificial
  Synthetic oligonucleotide
tcaatatcattgggttattgtggatcgtgatgttggttctacgtttccgactcag

SEQ ID NO: 456436 - DNA, 56 bp, Artificial
  Synthetic oligonucleotide
tcaatatcctggggtcagtgttaaggtagccactaagatttaccaagcggctcaaa

SEQ ID NO: 456437 - DNA, 60 bp, Artificial
  Synthetic oligonucleotide
tcaatatcctgttcgatccggttatcgttagctctatccagcacttgtgaagattcaacg

SEQ ID NO: 456438 - DNA, 55 bp, Artificial
  Synthetic oligonucleotide
tcaatatcgacggccgttcaagaattcatccagtcatgggcccaatcctcctcag

SEQ ID NO: 456439 - DNA, 50 bp, Artificial
  Synthetic oligonucleotide
tcaatatcgatttattcaagtttatctttcgaaactctcgtggttgtgca

SEQ ID NO: 456440 - DNA, 60 bp, Artificial
  Synthetic oligonucleotide
tcaatatctaggagaactgtgctatgtttagaagattaggtagtctctaaacagaacaat

SEQ ID NO: 456441 - DNA, 58 bp, Artificial
  Synthetic oligonucleotide
tcaatatgctaaaacgcggtatgccccgcggattgtccttgatcggactaaagagggc

SEQ ID NO: 456442 - DNA, 55 bp, Artificial
  Synthetic oligonucleotide
tcaatatgctaaaacgcggtgtatcccgcgtgaaccccttgacggggttgaagag

SEQ ID NO: 456443 - DNA, 55 bp, Artificial
  Synthetic oligonucleotide
tcaatatgtcagcatccccgtatttccagttacctgggataccggtggctcaacg

SEQ ID NO: 456444 - DNA, 60 bp, Artificial
  Synthetic oligonucleotide
tcaatatgttcgacaacgagcccagtacggcaacaatcaagaacgatctacgtgatcgtt

SEQ ID NO: 456445 - DNA, 53 bp, Artificial
  Synthetic oligonucleotide
tcaatattaagaggcggaaaattagatacctgggaaagaattaagttaaagcc

SEQ ID NO: 456446 - DNA, 55 bp, Artificial
  Synthetic oligonucleotide
tcaatattcttgcggcattgatagcaaagaactacacatcacgggtacccttgtg

SEQ ID NO: 456447 - DNA, 56 bp, Artificial
  Synthetic oligonucleotide
tcaatattggagtgggatcgatcaactgagatttcacatcgtgcagaggcaatatg

SEQ ID NO: 456448 - DNA, 60 bp, Artificial
  Synthetic oligonucleotide
tcaatatttcagtcaagcatgataaaaatcttagagccctttagagcaaaaaatccagag

SEQ ID NO: 456449 - DNA, 60 bp, Artificial
  Synthetic oligonucleotide
tcaatatttgtgagggtaaacaaactaacagtgctgctcgctataatggaaaaacatggc

SEQ ID NO: 456450 - DNA, 59 bp, Artificial
  Synthetic oligonucleotide
tcaatcaaacatatccttgaagataaacaatctcaacaaggctttccccacgaatatta

SEQ ID NO: 456451 - DNA, 55 bp, Artificial
  Synthetic oligonucleotide
tcaatcaacgagggtcttccctctggggtgccctgcacctcgcaatggaactcca

SEQ ID NO: 456452 - DNA, 60 bp, Artificial
  Synthetic oligonucleotide
tcaatcagaacgtatcacccaactatatcgcgctttacagacagaggaggatctgagaac

SEQ ID NO: 456453 - DNA, 60 bp, Artificial
  Synthetic oligonucleotide
tcaatcagccttggcttgccgtacttgcagtttgtctgccatttctgttgggcccctatt

SEQ ID NO: 456454 - DNA, 55 bp, Artificial
  Synthetic oligonucleotide
tcaatcagtggctttagtaggtgaaagagctttctatgatcctagaactgcaggc

SEQ ID NO: 456455 - DNA, 60 bp, Artificial
  Synthetic oligonucleotide
tcaatcagtgtggtgaccccagttcctttgactactgtggcgtgaatcatctttccaaat

SEQ ID NO: 456456 - DNA, 60 bp, Artificial
  Synthetic oligonucleotide
tcaatcatgcgtttggccagggattatatgagtacgcaactcgtgtcagtgacgcaatag

SEQ ID NO: 456457 - DNA, 60 bp, Artificial
  Synthetic oligonucleotide
tcaatcatttatcataggaccacacatcgatgctacgactagacagcgtagggataggcc

SEQ ID NO: 456458 - DNA, 60 bp, Artificial
  Synthetic oligonucleotide
tcaatcattttcatcttggagatgatatggacccagaactccggacacttgcacagagtc

SEQ ID NO: 456459 - DNA, 50 bp, Artificial
  Synthetic oligonucleotide
tcaatccaacgcggaatattactattatctaacagacttggtcagttagt

SEQ ID NO: 456460 - DNA, 54 bp, Artificial
  Synthetic oligonucleotide
tcaatccaccaaccgtgtcgcacttaccctaggggctattgtcacccttctgtg

SEQ ID NO: 456461 - DNA, 55 bp, Artificial
  Synthetic oligonucleotide
tcaatccagtgattctcagaccgaataacgttgaagtggaatttctattgaatgg

SEQ ID NO: 456462 - DNA, 57 bp, Artificial
  Synthetic oligonucleotide
tcaatccatgttgtgtgggaaggattaattttgctcatcgcctctctaacaactgac

SEQ ID NO: 456463 - DNA, 59 bp, Artificial
  Synthetic oligonucleotide
tcaatcccaccaccactcaggagctactatacgcctacacaggaccggcgcccgttgct

SEQ ID NO: 456464 - DNA, 60 bp, Artificial
  Synthetic oligonucleotide
tcaatccccattgttgaggcaggaccacaacattttgtactccgactgcgtcgcattcaa

SEQ ID NO: 456465 - DNA, 60 bp, Artificial
  Synthetic oligonucleotide
tcaatcccgccttagcttatatttatacttcataactacatagtctataatgcttatgtc

SEQ ID NO: 456466 - DNA, 60 bp, Artificial
  Synthetic oligonucleotide
tcaatccgagacgttgtggcaccagatgtatcgggtcaacgatatcgctggcgatcaagt

SEQ ID NO: 456467 - DNA, 60 bp, Artificial
  Synthetic oligonucleotide
tcaatccgcttacgaagctaagtcggataaagcagagaatggatcagtttgaaactagcc

SEQ ID NO: 456468 - DNA, 56 bp, Artificial
  Synthetic oligonucleotide
tcaatcctagaagcaacttttggtaagctcaaatgggcctccaacgcggtttactc

SEQ ID NO: 456469 - DNA, 52 bp, Artificial
  Synthetic oligonucleotide
tcaatcctcacttcaagcatcttctcaattaccgccttcacgccaaggacac

SEQ ID NO: 456470 - DNA, 59 bp, Artificial
  Synthetic oligonucleotide
tcaatcctcccacgtggcctgtcacgtgacgcatacgtcacggcggtcattttgtttta

SEQ ID NO: 456471 - DNA, 57 bp, Artificial
  Synthetic oligonucleotide
tcaatcctggcacattgttagacgtcgtatagtgcagatggtttgcgactatttcga

SEQ ID NO: 456472 - DNA, 59 bp, Artificial
  Synthetic oligonucleotide
tcaatccttgaatctactcctgacactaaactgtttggtgtagagactaatcgaaccac

SEQ ID NO: 456473 - DNA, 58 bp, Artificial
  Synthetic oligonucleotide
tcaatccttggtacctaaagctgcccgaggccaatacagtgggtttgtgagaacacta

SEQ ID NO: 456474 - DNA, 60 bp, Artificial
  Synthetic oligonucleotide
tcaatcctttgaatctcgacatgatattgctcacaccggtaaggttatgtgtgtgacgga

SEQ ID NO: 456475 - DNA, 60 bp, Artificial
  Synthetic oligonucleotide
tcaatcgacggctgttgctaaactttctcggagatgacaaattcgacccgaatgtggagc

SEQ ID NO: 456476 - DNA, 60 bp, Artificial
  Synthetic oligonucleotide
tcaatcgctgaggcaatcattgtagcaatggtgttctcacaagaggattgcatgataaag

SEQ ID NO: 456477 - DNA, 51 bp, Artificial
  Synthetic oligonucleotide
tcaatcggcaccaatttctcaatcccgggatcacgctcccatcgagcgaac

SEQ ID NO: 456478 - DNA, 60 bp, Artificial
  Synthetic oligonucleotide
tcaatcgggtctcaacaaacttgcgttagcaatcggggaatgggtctcaatatatagtga

SEQ ID NO: 456479 - DNA, 60 bp, Artificial
  Synthetic oligonucleotide
tcaatcgggtctcagcaaactggctcatgcaatcggggaatgggtctcaatatatacttg

SEQ ID NO: 456480 - DNA, 60 bp, Artificial
  Synthetic oligonucleotide
tcaatcggtacccagatctaatcctatgtcaattggtgaacggtgccctatatatagtgg

SEQ ID NO: 456481 - DNA, 60 bp, Artificial
  Synthetic oligonucleotide
tcaatcgtatcctcgactttagctcaggtttcaatgaatgctggggcacggggtgatatc

SEQ ID NO: 456482 - DNA, 60 bp, Artificial
  Synthetic oligonucleotide
tcaatcgtcaacacacctgatgatctcaatgataacctggcccgtgatgtccaatagccc

SEQ ID NO: 456483 - DNA, 60 bp, Artificial
  Synthetic oligonucleotide
tcaatcgtgcgacctttccaaacctctagaagaatctgagaagtattacaacgcattatc

SEQ ID NO: 456484 - DNA, 60 bp, Artificial
  Synthetic oligonucleotide
tcaatctaactgattatgccataagctgtcttcaccgcttcaactgatagttcagagaag

SEQ ID NO: 456485 - DNA, 55 bp, Artificial
  Synthetic oligonucleotide
tcaatctacggaggagagtaagggatggatccggtagatcctaacctagagccct

SEQ ID NO: 456486 - DNA, 60 bp, Artificial
  Synthetic oligonucleotide
tcaatctatctgtcgggctcagtgatgtgctcggaccttctgtgcttgtgaaggcgagag

SEQ ID NO: 456487 - DNA, 60 bp, Artificial
  Synthetic oligonucleotide
tcaatctcaatagtggatgtcccctctctcaatagtctacagcatactccaccaagtctc

SEQ ID NO: 456488 - DNA, 60 bp, Artificial
  Synthetic oligonucleotide
tcaatctgaacatgtgaaatgggcaaacctctagagcagcctgacgctacgccggagtgc

SEQ ID NO: 456489 - DNA, 52 bp, Artificial
  Synthetic oligonucleotide
tcaatctggaaatatacatctggtgttaggatactgttgatctcaggatata

SEQ ID NO: 456490 - DNA, 52 bp, Artificial
  Synthetic oligonucleotide
tcaatctggatatgaactcagcgttgaatcagtccgaccttaatcaagggtg

SEQ ID NO: 456491 - DNA, 55 bp, Artificial
  Synthetic oligonucleotide
tcaatcttcctgtgtcaggaccaatagatgtgtatgactgtggagactcttgact

SEQ ID NO: 456492 - DNA, 60 bp, Artificial
  Synthetic oligonucleotide
tcaatcttctcaacgtgtccgtaacattgtcaataagcaactcaggaaacagggtgtcac

SEQ ID NO: 456493 - DNA, 53 bp, Artificial
  Synthetic oligonucleotide
tcaatgaaacaggatgtcgtggcaatgaatgattggtcagggtacagcggaag

SEQ ID NO: 456494 - DNA, 60 bp, Artificial
  Synthetic oligonucleotide
tcaatgaaatttgcctgaatactggctgcaaagatggacgttacccattaaatccaataa

SEQ ID NO: 456495 - DNA, 60 bp, Artificial
  Synthetic oligonucleotide
tcaatgaacgtggtaacattgaatggagccacccctacataaaccagaacctcctgcaga

SEQ ID NO: 456496 - DNA, 60 bp, Artificial
  Synthetic oligonucleotide
tcaatgaagaagctgcagaatgggatagattgcatccaatgcaagcagggcctcttgcac

SEQ ID NO: 456497 - DNA, 60 bp, Artificial
  Synthetic oligonucleotide
tcaatgaagcagcaccagcagtccctggagtacagtcatttagaatctttatggtctctt

SEQ ID NO: 456498 - DNA, 59 bp, Artificial
  Synthetic oligonucleotide
tcaatgaataccataacgatttggactccccgacgtcagatatcttgactaaggtggta

SEQ ID NO: 456499 - DNA, 55 bp, Artificial
  Synthetic oligonucleotide
tcaatgacagttaacaggcctaaagatgcttacccttttcaagaaagggaagccc

SEQ ID NO: 456500 - DNA, 57 bp, Artificial
  Synthetic oligonucleotide
tcaatgacatacagaagttagtgggaaaactaaactgggcaagtcagatttacccag

SEQ ID NO: 456501 - DNA, 55 bp, Artificial
  Synthetic oligonucleotide
tcaatgacatgtgtattcgaacatgtaccaggatacatacgagtacgtgcagctg

SEQ ID NO: 456502 - DNA, 58 bp, Artificial
  Synthetic oligonucleotide
tcaatgacatgtgtttaatggacggacttaaatctggaagagtcacttttataccaac

SEQ ID NO: 456503 - DNA, 60 bp, Artificial
  Synthetic oligonucleotide
tcaatgacgttgtaccacgcatcattgctgtacacctttgggctgaggtcaagatggccg

SEQ ID NO: 456504 - DNA, 57 bp, Artificial
  Synthetic oligonucleotide
tcaatgactaaaattcaaggccgtgggtgtttcacttcatcggtgtctacctctaaa

SEQ ID NO: 456505 - DNA, 55 bp, Artificial
  Synthetic oligonucleotide
tcaatgacttctgaagtttcacagaatgaacctgctacagaaagccaggaacaac

SEQ ID NO: 456506 - DNA, 60 bp, Artificial
  Synthetic oligonucleotide
tcaatgagaccagcaaagcttggatgcatcatctgcctaggatacgtttgtccacacatg

SEQ ID NO: 456507 - DNA, 55 bp, Artificial
  Synthetic oligonucleotide
tcaatgagatgataccacacattgaagaccatgaatgcaccatagactatgacaa

SEQ ID NO: 456508 - DNA, 60 bp, Artificial
  Synthetic oligonucleotide
tcaatgaggaagctgcagactgggatagggcacacccagtacatgcagggcctattccac

SEQ ID NO: 456509 - DNA, 56 bp, Artificial
  Synthetic oligonucleotide
tcaatgaggaagctgccgaatgggatagattgcacccagcacaggcagggcctatt

SEQ ID NO: 456510 - DNA, 60 bp, Artificial
  Synthetic oligonucleotide
tcaatgaggaggctgcagaatgggacagattgcacccagtgcatgcagggcctattgcac

SEQ ID NO: 456511 - DNA, 60 bp, Artificial
  Synthetic oligonucleotide
tcaatgaggtgatagcgtgataacttctaaaaaaggtagagaaatgcttctaacattatc

SEQ ID NO: 456512 - DNA, 60 bp, Artificial
  Synthetic oligonucleotide
tcaatgaggttctagttgtgccaaatatacaacctagtaatggacatacctcaaactcag

SEQ ID NO: 456513 - DNA, 60 bp, Artificial
  Synthetic oligonucleotide
tcaatgataaggcagcagactaagatagaactcatccaccagtagtaggaccattaccac

SEQ ID NO: 456514 - DNA, 59 bp, Artificial
  Synthetic oligonucleotide
tcaatgatatacagaagttagtggggaaattaaactgggcaagccagatttatccagga

SEQ ID NO: 456515 - DNA, 60 bp, Artificial
  Synthetic oligonucleotide
tcaatgatattttcgtggacccgtcgctggcatcacataatcaagtctggattccaagac

SEQ ID NO: 456516 - DNA, 59 bp, Artificial
  Synthetic oligonucleotide
tcaatgatcaacaacttaatcattaggacacttttactgaaaacctacaagggcataga

SEQ ID NO: 456517 - DNA, 59 bp, Artificial
  Synthetic oligonucleotide
tcaatgatccagtttggagctacgttagacgttgattcttggaatgtaggaattgtttg

SEQ ID NO: 456518 - DNA, 51 bp, Artificial
  Synthetic oligonucleotide
tcaatgattacatcaaaatgaaaaccgaattgggatgcaagcttgggaatt

SEQ ID NO: 456519 - DNA, 60 bp, Artificial
  Synthetic oligonucleotide
tcaatgattaggaacagggaatacagagaattcatcggagatggatcaatgagtgagcag

SEQ ID NO: 456520 - DNA, 55 bp, Artificial
  Synthetic oligonucleotide
tcaatgattcgttttgttcctcgtcaaggaactctttataggacgaacgtggtcc

SEQ ID NO: 456521 - DNA, 55 bp, Artificial
  Synthetic oligonucleotide
tcaatgcaaatttctgatttctagtactcgagtggcgatgtggcgagtgtggcgg

SEQ ID NO: 456522 - DNA, 54 bp, Artificial
  Synthetic oligonucleotide
tcaatgcaagatgaacacaaacaaggcaaccgcaacttacctgaaatccattat

SEQ ID NO: 456523 - DNA, 60 bp, Artificial
  Synthetic oligonucleotide
tcaatgcaagcctgggatgcctttcaccctgagcaccttccgctccctcggtcagtgggg

SEQ ID NO: 456524 - DNA, 51 bp, Artificial
  Synthetic oligonucleotide
tcaatgcactcgatgaccatggttgtgacaacttggtcgcatgaggcagag

SEQ ID NO: 456525 - DNA, 60 bp, Artificial
  Synthetic oligonucleotide
tcaatgcagtcgttaatgtcaagaagtccgaattcggcaactcactcaatggtcgtgaag

SEQ ID NO: 456526 - DNA, 52 bp, Artificial
  Synthetic oligonucleotide
tcaatgcatcagagtggaataacactttacaacaggtgagggaagaattacg

SEQ ID NO: 456527 - DNA, 51 bp, Artificial
  Synthetic oligonucleotide
tcaatgccgaatcaaaacatacgggaatgtgtgagtttgacgatagcggca

SEQ ID NO: 456528 - DNA, 60 bp, Artificial
  Synthetic oligonucleotide
tcaatgcctaagttgcaatttgggctatagcgcatagatgcgcttcttgatatttgagat

SEQ ID NO: 456529 - DNA, 60 bp, Artificial
  Synthetic oligonucleotide
tcaatgctaacggagtgaaacatcaaggtcatttgaaggttttgtctcctgcccagctcc

SEQ ID NO: 456530 - DNA, 60 bp, Artificial
  Synthetic oligonucleotide
tcaatgctattactaccactgatcttccggccaattagtatacactatgatcgatagcat

SEQ ID NO: 456531 - DNA, 60 bp, Artificial
  Synthetic oligonucleotide
tcaatggaattgcctgatgaaattaagacagatattgaacaacaactaaattccattgac

SEQ ID NO: 456532 - DNA, 56 bp, Artificial
  Synthetic oligonucleotide
tcaatggactcccgcaactaaatatcttaactgggctaaccaaagaaacttatctc

SEQ ID NO: 456533 - DNA, 59 bp, Artificial
  Synthetic oligonucleotide
tcaatggacttggctgttctactatatcatcggtagtgaaagttggaactacaaacgtg

SEQ ID NO: 456534 - DNA, 60 bp, Artificial
  Synthetic oligonucleotide
tcaatggagttgaaggtgttgaatatgctgagccacttgtgatgggaacatctgaggggt

SEQ ID NO: 456535 - DNA, 60 bp, Artificial
  Synthetic oligonucleotide
tcaatggatgctagacacttcgcgtttagacaattattcattgaacaacggagagcctag

SEQ ID NO: 456536 - DNA, 57 bp, Artificial
  Synthetic oligonucleotide
tcaatggccgcgagcgggggttttgatccggtggagcgcctctcttctctttcgggc

SEQ ID NO: 456537 - DNA, 60 bp, Artificial
  Synthetic oligonucleotide
tcaatggccgcgcagcggaacccctcccaaaataatcatcggcccactcttgcatctcgt

SEQ ID NO: 456538 - DNA, 60 bp, Artificial
  Synthetic oligonucleotide
tcaatggcctgtgctatccaggagacttcaatgattacgaagaactgaagcatttaatga

SEQ ID NO: 456539 - DNA, 60 bp, Artificial
  Synthetic oligonucleotide
tcaatggctctgttaacacgattgattgtttattggttaacagatgtgactgagagaagc

SEQ ID NO: 456540 - DNA, 59 bp, Artificial
  Synthetic oligonucleotide
tcaatggctggtatggtttccaacacagaaatgaagaaggtacagggattgctgcagac

SEQ ID NO: 456541 - DNA, 52 bp, Artificial
  Synthetic oligonucleotide
tcaatgggaacctgaaagcgatagcacactgccccagccagctcgtgacgaa

SEQ ID NO: 456542 - DNA, 55 bp, Artificial
  Synthetic oligonucleotide
tcaatggggtgatgtggaccgtcttccacggggccggctctaagacccttgctgg

SEQ ID NO: 456543 - DNA, 60 bp, Artificial
  Synthetic oligonucleotide
tcaatgggtcatcagaaattgggaaactgtcaaaattcaatggtcccagaatcctgcaat

SEQ ID NO: 456544 - DNA, 56 bp, Artificial
  Synthetic oligonucleotide
tcaatgggttctctactaatgtcaaagataaatggaagttagttgatccagacaac

SEQ ID NO: 456545 - DNA, 59 bp, Artificial
  Synthetic oligonucleotide
tcaatggtccacttcgtgtgattcgcgtcccgcctggtaggattttattgaccgccatg

SEQ ID NO: 456546 - DNA, 60 bp, Artificial
  Synthetic oligonucleotide
tcaatggtcgctcagtgtttactgaaggacgcattgatgcaatcaaggttaatatgcgag

SEQ ID NO: 456547 - DNA, 59 bp, Artificial
  Synthetic oligonucleotide
tcaatggtctgcagggaagaattgattattattggtcggtattgaaaccaggtcaaaca

SEQ ID NO: 456548 - DNA, 54 bp, Artificial
  Synthetic oligonucleotide
tcaatgtaacggttgaaacaaaatctacaagtccgttagcacgtttgtttttca

SEQ ID NO: 456549 - DNA, 60 bp, Artificial
  Synthetic oligonucleotide
tcaatgtattataactatccagctggttatgtattatcagcttcacttaaattggaacat

SEQ ID NO: 456550 - DNA, 60 bp, Artificial
  Synthetic oligonucleotide
tcaatgtattgacgggacctgtgttgtcgctgttacagatggacctgctgctaatagtgc

SEQ ID NO: 456551 - DNA, 60 bp, Artificial
  Synthetic oligonucleotide
tcaatgtcacaccccaattggggtgtgacatcgaggctccgtcaaggagttctagagctc

SEQ ID NO: 456552 - DNA, 54 bp, Artificial
  Synthetic oligonucleotide
tcaatgtcagcctccgcggtgcgcagaggagagacattgaggaatcattctctc

SEQ ID NO: 456553 - DNA, 60 bp, Artificial
  Synthetic oligonucleotide
tcaatgtcgacgggttcattgatttctatcacaggagggcgtcttggctcacgaagggtg

SEQ ID NO: 456554 - DNA, 59 bp, Artificial
  Synthetic oligonucleotide
tcaatgtcttattcctggacaggcgcacttatcaccccgtgtgccgcggaagaacaaaa

SEQ ID NO: 456555 - DNA, 55 bp, Artificial
  Synthetic oligonucleotide
tcaatgtgcgcgctaatggctatggttgctaccctaccaagagaaccccagggtg

SEQ ID NO: 456556 - DNA, 55 bp, Artificial
  Synthetic oligonucleotide
tcaatgtggcgttacttcaaggctgatcttgagtttgaactcatcaagatgtcct

SEQ ID NO: 456557 - DNA, 54 bp, Artificial
  Synthetic oligonucleotide
tcaatgtggctaccggtgcccagggggtttcgcgttccctggactggtctaagg

SEQ ID NO: 456558 - DNA, 60 bp, Artificial
  Synthetic oligonucleotide
tcaatgtgggagagagttaaagctatcatcaagtcctccttagctgttgcaagcaacatt

SEQ ID NO: 456559 - DNA, 60 bp, Artificial
  Synthetic oligonucleotide
tcaatgtggttatcctgctctcatgcctatccatgcctgtataactgctaaacaggcttt

SEQ ID NO: 456560 - DNA, 57 bp, Artificial
  Synthetic oligonucleotide
tcaatgttacacatgctgggtttcaactttatcacacgtatacaacagcacttacct

SEQ ID NO: 456561 - DNA, 56 bp, Artificial
  Synthetic oligonucleotide
tcaatgtttaattgctttcatagatccgtcttccgggagacgttaagaagacaccc

SEQ ID NO: 456562 - DNA, 60 bp, Artificial
  Synthetic oligonucleotide
tcaatgtttcaggccgatgccacggaacgatacaatacaacggaacagacgatgttgagt

SEQ ID NO: 456563 - DNA, 54 bp, Artificial
  Synthetic oligonucleotide
tcaattaacgcttttacagtgtaattcgtacttttcgtaagtatgtttctgtaa

SEQ ID NO: 456564 - DNA, 60 bp, Artificial
  Synthetic oligonucleotide
tcaattacgcgcaccacgtgaattcatcctcgcttactacttctcagggtgttgaggcag

SEQ ID NO: 456565 - DNA, 60 bp, Artificial
  Synthetic oligonucleotide
tcaattatacttggaattgcatgaggatgcaaaacttttcttcacacctctaatgggaaa

SEQ ID NO: 456566 - DNA, 60 bp, Artificial
  Synthetic oligonucleotide
tcaattatcatagccattgtgatagtgtattctaacagggtgttcaacgtgtctaagccg

SEQ ID NO: 456567 - DNA, 60 bp, Artificial
  Synthetic oligonucleotide
tcaattatgccagcaaagcttggatgcatcatgcacctaggataagttgtaccagcaatg

SEQ ID NO: 456568 - DNA, 60 bp, Artificial
  Synthetic oligonucleotide
tcaattatgtgcaccattcctctgttcttcgaaaatgtggagctccagttcaagtgtatc

SEQ ID NO: 456569 - DNA, 59 bp, Artificial
  Synthetic oligonucleotide
tcaattattaatagagccacctcggttacaaagtgtggctgccgccatatactggttta

SEQ ID NO: 456570 - DNA, 58 bp, Artificial
  Synthetic oligonucleotide
tcaattccagatcctttaagtccaggagaacgaggtatgcaagttaagatccaagagt

SEQ ID NO: 456571 - DNA, 58 bp, Artificial
  Synthetic oligonucleotide
tcaattccagtataatttgtcaaaagaacattagattccatagactctatagcatctt

SEQ ID NO: 456572 - DNA, 52 bp, Artificial
  Synthetic oligonucleotide
tcaattccgggtatcggacccgcgatgtaagtcccttttggctgtttgctcg

SEQ ID NO: 456573 - DNA, 59 bp, Artificial
  Synthetic oligonucleotide
tcaattcgatgctgcccgtacttattggcgcgcctgctttggcactggttttacccgtg

SEQ ID NO: 456574 - DNA, 53 bp, Artificial
  Synthetic oligonucleotide
tcaattcgattagtggatggattcttaccactcatctgggacgatctacggag

SEQ ID NO: 456575 - DNA, 53 bp, Artificial
  Synthetic oligonucleotide
tcaattcggcatgcactactctggcaggacttggcggtacagttgtttattgt

SEQ ID NO: 456576 - DNA, 55 bp, Artificial
  Synthetic oligonucleotide
tcaattcgttcgtagtgggatcacaactcccatgcgagccagagccggacgtggc

SEQ ID NO: 456577 - DNA, 60 bp, Artificial
  Synthetic oligonucleotide
tcaattctcggatgtactggcgcacagtggactcagcgagatccttggtctcagcgtggg

SEQ ID NO: 456578 - DNA, 55 bp, Artificial
  Synthetic oligonucleotide
tcaattctgcggaggatgtcactgtcaaggtgggttatgactctggttgacaagc

SEQ ID NO: 456579 - DNA, 55 bp, Artificial
  Synthetic oligonucleotide
tcaattgaagtgggcttgggtcatagttgacaattagcgttgttatcgatagagt

SEQ ID NO: 456580 - DNA, 58 bp, Artificial
  Synthetic oligonucleotide
tcaattgacacgtggcattacaattccccactatcgcacagaaggtcgcttaataact

SEQ ID NO: 456581 - DNA, 54 bp, Artificial
  Synthetic oligonucleotide
tcaattgatacgttcaattgtgacgaggtagacatatctaaatacgacaaatcc

SEQ ID NO: 456582 - DNA, 55 bp, Artificial
  Synthetic oligonucleotide
tcaattgatgtatggagtggattgtaatcttcccttccaggatctaagtacattg

SEQ ID NO: 456583 - DNA, 57 bp, Artificial
  Synthetic oligonucleotide
tcaattgattgggttgcaagtaaagttggcggactattcaaaggttctatggtagta

SEQ ID NO: 456584 - DNA, 60 bp, Artificial
  Synthetic oligonucleotide
tcaattgccattgctaacattacggaaacggtaaaggctgattataaccagcctgatatg

SEQ ID NO: 456585 - DNA, 55 bp, Artificial
  Synthetic oligonucleotide
tcaattgctagagttttcgaacctagcaaaggatcaagatgtcacgggtatcatc

SEQ ID NO: 456586 - DNA, 57 bp, Artificial
  Synthetic oligonucleotide
tcaattggggactgtcccaagtatgttaaacagggatccttgaaactagccacagga

SEQ ID NO: 456587 - DNA, 50 bp, Artificial
  Synthetic oligonucleotide
tcaattggtggcgcaaactattcggacgtggctcactataagaggggtgc

SEQ ID NO: 456588 - DNA, 56 bp, Artificial
  Synthetic oligonucleotide
tcaattggtgtattggggtaacttatatactagaaccctctatagaactattaatc

SEQ ID NO: 456589 - DNA, 60 bp, Artificial
  Synthetic oligonucleotide
tcaattgtagttacaatatatgtccttattgtgcatctaggttaacttcagatggtcttg

SEQ ID NO: 456590 - DNA, 60 bp, Artificial
  Synthetic oligonucleotide
tcaattgtatatactagggctcaggcaaatgaagatattgttgtatcgaaaacttcgtta

SEQ ID NO: 456591 - DNA, 56 bp, Artificial
  Synthetic oligonucleotide
tcaattgtgggaaagtaggacatatagcaaaaaattgtagggcacccagaagaaag

SEQ ID NO: 456592 - DNA, 55 bp, Artificial
  Synthetic oligonucleotide
tcaattgtttggtccagctcaggtttgggggtgaagtacctggagtggtaggtaa

SEQ ID NO: 456593 - DNA, 54 bp, Artificial
  Synthetic oligonucleotide
tcaattgtttttaacagttgtagataccacccgcagtactaacctaactttatg

SEQ ID NO: 456594 - DNA, 50 bp, Artificial
  Synthetic oligonucleotide
tcaatttagaagcagtggtgtagaagtagtatatactccgccacggtatt

SEQ ID NO: 456595 - DNA, 59 bp, Artificial
  Synthetic oligonucleotide
tcaatttaggaaagttgaaaaccagatctacgtcatcacagcctggagcgaccgaccca

SEQ ID NO: 456596 - DNA, 58 bp, Artificial
  Synthetic oligonucleotide
tcaatttatgctttacttcgaaatgcctaagcgggatgccccgtggcgttctatggcg

SEQ ID NO: 456597 - DNA, 60 bp, Artificial
  Synthetic oligonucleotide
tcaatttcacttatgacattatgactactgatggtgtaacgagattgaaggaagacatac

SEQ ID NO: 456598 - DNA, 59 bp, Artificial
  Synthetic oligonucleotide
tcaatttcagtacctctatagtagattagtgatattctattttaagcagccgtttccat

SEQ ID NO: 456599 - DNA, 60 bp, Artificial
  Synthetic oligonucleotide
tcaatttccattcacttttgaagatggtactgccctcggaaatgcactcatctatcccca

SEQ ID NO: 456600 - DNA, 51 bp, Artificial
  Synthetic oligonucleotide
tcaatttcgagttaggtattcaccgatcatgtctgatggagaacctggtct

SEQ ID NO: 456601 - DNA, 55 bp, Artificial
  Synthetic oligonucleotide
tcaatttcgctacctacaaccaaaatgcacttgcaggctagcagtgaagcgtttt

SEQ ID NO: 456602 - DNA, 58 bp, Artificial
  Synthetic oligonucleotide
tcaatttgagaggggggactcgtgtagtgaatctggaccaaatcgctccgatgaggtt

SEQ ID NO: 456603 - DNA, 60 bp, Artificial
  Synthetic oligonucleotide
tcaatttgaggtgctctaaagaggaccactatttaaactctcttgatgccatctggctca

SEQ ID NO: 456604 - DNA, 57 bp, Artificial
  Synthetic oligonucleotide
tcaatttgctaattctgcttaatacaggggggctgtgcggcaacgatctctttgaga

SEQ ID NO: 456605 - DNA, 50 bp, Artificial
  Synthetic oligonucleotide
tcaattttaaatgctaggcatacaatgttcacttagtaaagcatgtttat

SEQ ID NO: 456606 - DNA, 60 bp, Artificial
  Synthetic oligonucleotide
tcaattttatggacagcaggtcataagtgggaacaaggctcaatcgctactccttggatg

SEQ ID NO: 456607 - DNA, 50 bp, Artificial
  Synthetic oligonucleotide
tcaattttcctgtgcttggtaaaacatctcctaaccgaagcaggtcgtat

SEQ ID NO: 456608 - DNA, 60 bp, Artificial
  Synthetic oligonucleotide
tcaattttcgtaagaggctttgactcacagtttgttgatatgagtccagctagtaatgct

SEQ ID NO: 456609 - DNA, 59 bp, Artificial
  Synthetic oligonucleotide
tcacaaaaaatggcagttacttgaatgtgtctgactttaggaatcaatggcttttagaa

SEQ ID NO: 456610 - DNA, 59 bp, Artificial
  Synthetic oligonucleotide
tcacaaaactaaacagggaattactgagaattggagcaaattcagtgtggattccagtc

SEQ ID NO: 456611 - DNA, 59 bp, Artificial
  Synthetic oligonucleotide
tcacaaacaaaaagagttcatgggtgaatcggccattgttcagaaagcccaagatgtac

SEQ ID NO: 456612 - DNA, 57 bp, Artificial
  Synthetic oligonucleotide
tcacaaacaaccgcagcagacggggttgggcccaaaggcccatgtatcggaagccca

SEQ ID NO: 456613 - DNA, 60 bp, Artificial
  Synthetic oligonucleotide
tcacaaacagctcacgccgtgttcgacgcatcaagattgcgacatatgccgagagggtct

SEQ ID NO: 456614 - DNA, 57 bp, Artificial
  Synthetic oligonucleotide
tcacaaacccctcagatcgaagagcccatcccccccgactggtggactggagccgta

SEQ ID NO: 456615 - DNA, 55 bp, Artificial
  Synthetic oligonucleotide
tcacaaacttatcgatctaggacagttgggcgtggctacatatggtggcgctgga

SEQ ID NO: 456616 - DNA, 55 bp, Artificial
  Synthetic oligonucleotide
tcacaaagagaaggcttagtcagggtgagccgtttgggacagcgcggcaccattc

SEQ ID NO: 456617 - DNA, 60 bp, Artificial
  Synthetic oligonucleotide
tcacaaagagtgcgctgttccataaacagcccctggcgcattcactggcccaaacgtggg

SEQ ID NO: 456618 - DNA, 55 bp, Artificial
  Synthetic oligonucleotide
tcacaaagcccgggaggagggcgtttacagcgtcttacatcaacgggacggattg

SEQ ID NO: 456619 - DNA, 52 bp, Artificial
  Synthetic oligonucleotide
tcacaaagctaagcacaccaaagcttggtgtccaagaccacccagggctgtt

SEQ ID NO: 456620 - DNA, 55 bp, Artificial
  Synthetic oligonucleotide
tcacaaagttgacatagaaacacttcctctcttgagcccgaagcaatgggcagac

SEQ ID NO: 456621 - DNA, 55 bp, Artificial
  Synthetic oligonucleotide
tcacaaatctaggcgtgaactttcaaatgacctgctgggccccagcgattgtctg

SEQ ID NO: 456622 - DNA, 58 bp, Artificial
  Synthetic oligonucleotide
tcacaaatgacaacacagtggcagtttcaaaaagaccttgcagactaccccctcttta

SEQ ID NO: 456623 - DNA, 57 bp, Artificial
  Synthetic oligonucleotide
tcacaacaaacactattacattgaatgttggaactaacaatggtaacttaacaggta

SEQ ID NO: 456624 - DNA, 56 bp, Artificial
  Synthetic oligonucleotide
tcacaacaaaggtggtacgaaatgtggttgagtatcaaattcgtacgggcggattc

SEQ ID NO: 456625 - DNA, 58 bp, Artificial
  Synthetic oligonucleotide
tcacaacagggcacgtggaaccattcgatggagtcataagtaagggcggtcttaagga

SEQ ID NO: 456626 - DNA, 60 bp, Artificial
  Synthetic oligonucleotide
tcacaacatgggaagaagatggaatcaattgataggtcgaccctacaatcagaccttgga

SEQ ID NO: 456627 - DNA, 55 bp, Artificial
  Synthetic oligonucleotide
tcacaaccatcccctcgaagggacccgtcaaggtcccgccgctcgatttcgagga

SEQ ID NO: 456628 - DNA, 55 bp, Artificial
  Synthetic oligonucleotide
tcacaaccatctacttcggccgagcaatatgtctacgagacatatgagcaagaga

SEQ ID NO: 456629 - DNA, 60 bp, Artificial
  Synthetic oligonucleotide
tcacaaccccatctctgttgcctgtgggtctagcattagcgaaccccattgagcgaagga

SEQ ID NO: 456630 - DNA, 59 bp, Artificial
  Synthetic oligonucleotide
tcacaacccccgagtggatcaagcgtacgcccatcgactgtttcttgttctgtcttcgc

SEQ ID NO: 456631 - DNA, 55 bp, Artificial
  Synthetic oligonucleotide
tcacaaccctgggacgaaagtcaaatttcgaaaacctgtgagagacctgattttg

SEQ ID NO: 456632 - DNA, 59 bp, Artificial
  Synthetic oligonucleotide
tcacaacgccactgaacaccccgagcccctgacacagtcagcaaccccaggcctaatga

SEQ ID NO: 456633 - DNA, 54 bp, Artificial
  Synthetic oligonucleotide
tcacaactcattgagaaaggcagacttatatgcacaggagtgttgaggacaggc

SEQ ID NO: 456634 - DNA, 60 bp, Artificial
  Synthetic oligonucleotide
tcacaactgtttaatagtacatacaatcctgcatacagtcataatgagacagaaagtaat

SEQ ID NO: 456635 - DNA, 56 bp, Artificial
  Synthetic oligonucleotide
tcacaacttcaagagtcagcaacggcggatttagtgcccaaagtcctgccaaattg

SEQ ID NO: 456636 - DNA, 55 bp, Artificial
  Synthetic oligonucleotide
tcacaagaagccagactggggatcaagccccacatacagaggctgttggaccagg

SEQ ID NO: 456637 - DNA, 51 bp, Artificial
  Synthetic oligonucleotide
tcacaagaatattatgagatagcaggaagattttcactaatatcacttgtg

SEQ ID NO: 456638 - DNA, 60 bp, Artificial
  Synthetic oligonucleotide
tcacaagacaaagattattcacgttgtcgactcgtatgggtcgctgtcaactggatacca

SEQ ID NO: 456639 - DNA, 51 bp, Artificial
  Synthetic oligonucleotide
tcacaagacgacttctcgacaagtaaatcggaataggtcactcatgattat

SEQ ID NO: 456640 - DNA, 60 bp, Artificial
  Synthetic oligonucleotide
tcacaagagaaccatacctctcatgtggaccacatgagtgcagaatgtttgccctcagcc

SEQ ID NO: 456641 - DNA, 60 bp, Artificial
  Synthetic oligonucleotide
tcacaagaggattatttaatagcgagagaattgataatcttatcatattctaataggtct

SEQ ID NO: 456642 - DNA, 55 bp, Artificial
  Synthetic oligonucleotide
tcacaagagtggatgcaatccttcaaccttcattgcccggtgagttcagatatta

SEQ ID NO: 456643 - DNA, 57 bp, Artificial
  Synthetic oligonucleotide
tcacaagattcgaagtacaaacgcaacgtttgtaagactactggattgttggtttgc

SEQ ID NO: 456644 - DNA, 53 bp, Artificial
  Synthetic oligonucleotide
tcacaagcacctccttctgcacaggtggctagtcctagaccagcgaatggcga

SEQ ID NO: 456645 - DNA, 60 bp, Artificial
  Synthetic oligonucleotide
tcacaagctaggaaggcctaactgtagagcctgtggcggctcacacacatgatagtgtat

SEQ ID NO: 456646 - DNA, 60 bp, Artificial
  Synthetic oligonucleotide
tcacaagctttttctaccgctatggatttgtagccaatttcagcatggagttgcccagtt

SEQ ID NO: 456647 - DNA, 60 bp, Artificial
  Synthetic oligonucleotide
tcacaaggaccataggaatggtgtctggttcttggtacaagatctcaggattgttagcga

SEQ ID NO: 456648 - DNA, 58 bp, Artificial
  Synthetic oligonucleotide
tcacaaggatggttttaaaccctaaaggtgaagatcatgaccctgatcaaaatgggca

SEQ ID NO: 456649 - DNA, 60 bp, Artificial
  Synthetic oligonucleotide
tcacaagggcagacattatgcgtatagctgaaatagcagcctcgaatcaacatattaact

SEQ ID NO: 456650 - DNA, 56 bp, Artificial
  Synthetic oligonucleotide
tcacaagggtaccatagcgaggaaccccggttcgaaaccggcaggatccgctatga

SEQ ID NO: 456651 - DNA, 60 bp, Artificial
  Synthetic oligonucleotide
tcacaaggtcgctggtgctcgggtgcgtctcttcgggcctgctaaattgtacattctgtc

SEQ ID NO: 456652 - DNA, 51 bp, Artificial
  Synthetic oligonucleotide
tcacaagttcaaactttgactactaaaatttcaagggggttttctcacaaa

SEQ ID NO: 456653 - DNA, 56 bp, Artificial
  Synthetic oligonucleotide
tcacaagttgtacccggggacaccatgcaaaccagacatgttaaaaactttcacac

SEQ ID NO: 456654 - DNA, 58 bp, Artificial
  Synthetic oligonucleotide
tcacaataaaaggatcctagctcacttaattcaccgttttcagagatataaagagaat

SEQ ID NO: 456655 - DNA, 55 bp, Artificial
  Synthetic oligonucleotide
tcacaatactattcggtctccatggccgcgcagcggcattcctaacattctcgga

SEQ ID NO: 456656 - DNA, 60 bp, Artificial
  Synthetic oligonucleotide
tcacaataggagagtgcccaaaatacgtcaggagtaccaaattgaggatggctacaggac

SEQ ID NO: 456657 - DNA, 54 bp, Artificial
  Synthetic oligonucleotide
tcacaatatgcatgactttctcctggcaaggtcgaaaggtcccttggatgctgt

SEQ ID NO: 456658 - DNA, 51 bp, Artificial
  Synthetic oligonucleotide
tcacaatggatgtgctgttctccattgcgaaaacggtttcagagcttaaaa

SEQ ID NO: 456659 - DNA, 60 bp, Artificial
  Synthetic oligonucleotide
tcacaatggattgcacatagggggcgcaaggtggctgacacaggcgactggagacatata

SEQ ID NO: 456660 - DNA, 60 bp, Artificial
  Synthetic oligonucleotide
tcacaatggctatgattgcttataccgttgatctgtcggaagcaactgccatattctctg

SEQ ID NO: 456661 - DNA, 60 bp, Artificial
  Synthetic oligonucleotide
tcacaattaaatgtaatcataagcacaatcactgccatgtataatcacgggtatacgggt

SEQ ID NO: 456662 - DNA, 60 bp, Artificial
  Synthetic oligonucleotide
tcacaattaggtttgtcagatactcaagacgacgtggaatctctcttgtcacctgaatcc

SEQ ID NO: 456663 - DNA, 51 bp, Artificial
  Synthetic oligonucleotide
tcacaattcaagacaagccccttaagcacgtcacaccgcaaatggaggccc

SEQ ID NO: 456664 - DNA, 60 bp, Artificial
  Synthetic oligonucleotide
tcacaattcaagacgtgtacgcatggatgcgactggaaggcgatagccccagatgcaaga

SEQ ID NO: 456665 - DNA, 60 bp, Artificial
  Synthetic oligonucleotide
tcacaattccttctgatgttagaaactcagatggtccgcagtttacacgcgctgattcag

SEQ ID NO: 456666 - DNA, 55 bp, Artificial
  Synthetic oligonucleotide
tcacaattgtttggctctcgtgatatacccttcagacctgatttgtatgacacgg

SEQ ID NO: 456667 - DNA, 50 bp, Artificial
  Synthetic oligonucleotide
tcacacaaaacggagggagtggtgcttgcaaaagagggcccgctaatggt

SEQ ID NO: 456668 - DNA, 56 bp, Artificial
  Synthetic oligonucleotide
tcacacaaacgccggcaaagggaatcggtaattagaagtccggtgagaatggcgga

SEQ ID NO: 456669 - DNA, 50 bp, Artificial
  Synthetic oligonucleotide
tcacacaacacccaatgaagatagccaacactccgggccctaaaacatcc

SEQ ID NO: 456670 - DNA, 53 bp, Artificial
  Synthetic oligonucleotide
tcacacaattagagacattagataccaggcagttgatgcagtaagtaatgtct

SEQ ID NO: 456671 - DNA, 51 bp, Artificial
  Synthetic oligonucleotide
tcacacacgctacgctttgtggaggccaagatgtcctcgtgtcgcgtacgc

SEQ ID NO: 456672 - DNA, 60 bp, Artificial
  Synthetic oligonucleotide
tcacacacgctggatggaagctatacccaagattgttgcgacaacgttttgcgatcggag

SEQ ID NO: 456673 - DNA, 57 bp, Artificial
  Synthetic oligonucleotide
tcacacactctggaaggaagggtagatacgcagttgagccttaccacggaaaagtag

SEQ ID NO: 456674 - DNA, 55 bp, Artificial
  Synthetic oligonucleotide
tcacacactgaatccaataatgcaatcatacaacccaatactaaggaacctgatg

SEQ ID NO: 456675 - DNA, 50 bp, Artificial
  Synthetic oligonucleotide
tcacacagccatcaacaaattcattcggctcgagtatccgcacgggggtg

SEQ ID NO: 456676 - DNA, 60 bp, Artificial
  Synthetic oligonucleotide
tcacacataatcttgacaacacccgtattaacagtatatatataaccagtgtatagcgtt

SEQ ID NO: 456677 - DNA, 60 bp, Artificial
  Synthetic oligonucleotide
tcacacatcgcgtagggaagcgattctgtgtgaaatccgtctatgtgctggggaagatat

SEQ ID NO: 456678 - DNA, 59 bp, Artificial
  Synthetic oligonucleotide
tcacaccaaattaggttttcggaatctgctacttcatattcaggttatatatttagaga

SEQ ID NO: 456679 - DNA, 60 bp, Artificial
  Synthetic oligonucleotide
tcacaccaatgttgagacatagcattgaaaattcctcagtgaacgtgtccctaacagcta

SEQ ID NO: 456680 - DNA, 54 bp, Artificial
  Synthetic oligonucleotide
tcacaccaccagtgacccctggcacccaccgggccccttggggctgaagtttaa

SEQ ID NO: 456681 - DNA, 50 bp, Artificial
  Synthetic oligonucleotide
tcacaccatatctatcgcaataagacatactgcgtagttggtggcatgcc

SEQ ID NO: 456682 - DNA, 58 bp, Artificial
  Synthetic oligonucleotide
tcacacccatcaatctaattcggcccctgtgttgagccccttgttgaagtgcctcccc

SEQ ID NO: 456683 - DNA, 57 bp, Artificial
  Synthetic oligonucleotide
tcacacccgccgagaccacagttaggctacgagcgtacatgaacaccccggggctcc

SEQ ID NO: 456684 - DNA, 53 bp, Artificial
  Synthetic oligonucleotide
tcacaccgacctggtgaccctcgtaggcgggatccccaccccggtcgagtacg

SEQ ID NO: 456685 - DNA, 54 bp, Artificial
  Synthetic oligonucleotide
tcacaccgcactgaggcaatttgtgcagcaatgatagaagcatggggctaccca

SEQ ID NO: 456686 - DNA, 59 bp, Artificial
  Synthetic oligonucleotide
tcacaccgttaagatgcgacatgaccgtcctttaaaaacgatagtgaatatatatgaag

SEQ ID NO: 456687 - DNA, 54 bp, Artificial
  Synthetic oligonucleotide
tcacacctgacccaaccgacaccaacccaccgggactcctgcctgacaccccta

SEQ ID NO: 456688 - DNA, 60 bp, Artificial
  Synthetic oligonucleotide
tcacacctgtttccgagagggatagtcatttgactaccttcgtgaaagcagagaagatat

SEQ ID NO: 456689 - DNA, 58 bp, Artificial
  Synthetic oligonucleotide
tcacacgaacacggtcatgttctggttagttagggataggcgtcctgtcactacgccc

SEQ ID NO: 456690 - DNA, 57 bp, Artificial
  Synthetic oligonucleotide
tcacacgaatactgtaatgtttttccttgttagagatcgacgtcctagtggtacacc

SEQ ID NO: 456691 - DNA, 60 bp, Artificial
  Synthetic oligonucleotide
tcacacgaatagtgttatgttctttttggtccgtgatcgtcgacctactggtgcgcctca

SEQ ID NO: 456692 - DNA, 60 bp, Artificial
  Synthetic oligonucleotide
tcacacggagaacgccctcttattgtatatggcatgtactcatgcatctaaccctgtgta

SEQ ID NO: 456693 - DNA, 60 bp, Artificial
  Synthetic oligonucleotide
tcacacgggcatggcaacgggatccgacttcccatctcctactaccctgatctactcagg

SEQ ID NO: 456694 - DNA, 50 bp, Artificial
  Synthetic oligonucleotide
tcacacgggcttgatccgtttcaccgggtcgagagtgtatcgtggtgcgc

SEQ ID NO: 456695 - DNA, 57 bp, Artificial
  Synthetic oligonucleotide
tcacacggtattgacggacaccctggggcatgtcggacatggaccttacgttaggcg

SEQ ID NO: 456696 - DNA, 55 bp, Artificial
  Synthetic oligonucleotide
tcacacgtcttccatcgccacgcgaaagcgaccgtctaccccgagctcgtggttg

SEQ ID NO: 456697 - DNA, 55 bp, Artificial
  Synthetic oligonucleotide
tcacacgtgtgtagggtgcatttgcacgagtgtcttcgggtaatgtcgggtgcgc

SEQ ID NO: 456698 - DNA, 57 bp, Artificial
  Synthetic oligonucleotide
tcacacgttaatctcaaaactgggattaaggctcggattgtggattccatgggttcg

SEQ ID NO: 456699 - DNA, 59 bp, Artificial
  Synthetic oligonucleotide
tcacacgttggagacgcaattatgtgtcgttgcttagcttataaggaagtcccgcttag

SEQ ID NO: 456700 - DNA, 57 bp, Artificial
  Synthetic oligonucleotide
tcacactaacaacgtgttattctggttagttagagatagacgacctggtacaactcc

SEQ ID NO: 456701 - DNA, 53 bp, Artificial
  Synthetic oligonucleotide
tcacactaagtatcccatggatttcaaacacatgtatgagaaacgtggctagt

SEQ ID NO: 456702 - DNA, 60 bp, Artificial
  Synthetic oligonucleotide
tcacactaggtaactccaccataacgactcaggaatgcgctaacgtggtggtaggctatg

SEQ ID NO: 456703 - DNA, 60 bp, Artificial
  Synthetic oligonucleotide
tcacactcacgctgccatgtccctccgcctagcgatgcagttcgtagagtccccgctata

SEQ ID NO: 456704 - DNA, 60 bp, Artificial
  Synthetic oligonucleotide
tcacactgcctattatcttgaaagcactgtatatgttgtcaacgaggggtcgccagacag

SEQ ID NO: 456705 - DNA, 60 bp, Artificial
  Synthetic oligonucleotide
tcacactgctagatatttacctcagttgctaatgcaggataggatagcaattcatgaaat

SEQ ID NO: 456706 - DNA, 60 bp, Artificial
  Synthetic oligonucleotide
tcacactgttgctatggtgcatgcttactggaaggctatgttccgaactaaaccgggtaa

SEQ ID NO: 456707 - DNA, 60 bp, Artificial
  Synthetic oligonucleotide
tcacacttacctctactctggcaagttgctgaaaccatagggcactatactgataatcaa

SEQ ID NO: 456708 - DNA, 56 bp, Artificial
  Synthetic oligonucleotide
tcacacttagatagcccgcttgtagctgcaaagttggtccaggctatagagtatgc

SEQ ID NO: 456709 - DNA, 54 bp, Artificial
  Synthetic oligonucleotide
tcacacttgcggttcttagtgcaatgaaacttgggtttcataggtcccatggac

SEQ ID NO: 456710 - DNA, 51 bp, Artificial
  Synthetic oligonucleotide
tcacagaaaattgtgggacaagaggcccgtcactgaggacaacaacagtgt

SEQ ID NO: 456711 - DNA, 60 bp, Artificial
  Synthetic oligonucleotide
tcacagacaatgaccatgctaatgctagagcgttttcgcatctagcttccaaactgatcg

SEQ ID NO: 456712 - DNA, 60 bp, Artificial
  Synthetic oligonucleotide
tcacagacaatgccaaaaccataatagtacagcttgctaagcctgtaaacattacttgta

SEQ ID NO: 456713 - DNA, 60 bp, Artificial
  Synthetic oligonucleotide
tcacagacacatcaaaggcggctcatgcccaaaaccacatcgcctgaccaacaaaggaat

SEQ ID NO: 456714 - DNA, 60 bp, Artificial
  Synthetic oligonucleotide
tcacagacaccaccgtacgcacgacactacaggaggaggcttgcagacaaatccgtaccg

SEQ ID NO: 456715 - DNA, 60 bp, Artificial
  Synthetic oligonucleotide
tcacagacagcccaaacgtttagcaaatcccattaaagtgcatgctgagagactgattgg

SEQ ID NO: 456716 - DNA, 57 bp, Artificial
  Synthetic oligonucleotide
tcacagacagccggcgctcaggtagtatggagacttccaccattagtagtcccagta

SEQ ID NO: 456717 - DNA, 57 bp, Artificial
  Synthetic oligonucleotide
tcacagacatgttaagaaaggactacataaaaaggcaagggagcacccctttagcac

SEQ ID NO: 456718 - DNA, 60 bp, Artificial
  Synthetic oligonucleotide
tcacagacgaagaagtctgtagcatactagatagtgaagaaggctgggacggggacaact

SEQ ID NO: 456719 - DNA, 55 bp, Artificial
  Synthetic oligonucleotide
tcacagactcagttgtcaagtgggtattaatccatattcaatggaatggagtcgc

SEQ ID NO: 456720 - DNA, 60 bp, Artificial
  Synthetic oligonucleotide
tcacagagacccctgcaacgttaagtaatgcggtatatgtcctagccagattgcagaatc

SEQ ID NO: 456721 - DNA, 60 bp, Artificial
  Synthetic oligonucleotide
tcacagagatgagtctgtccccatttattgttcatgctcgaatgaatggtggactccgaa

SEQ ID NO: 456722 - DNA, 60 bp, Artificial
  Synthetic oligonucleotide
tcacagagccttcgctagcattactggccgctacatcaccaactccccagagttccccac

SEQ ID NO: 456723 - DNA, 60 bp, Artificial
  Synthetic oligonucleotide
tcacagagttcaggactgagcgtgtaaattccaataaacagcgaaagaaacatggaattg

SEQ ID NO: 456724 - DNA, 60 bp, Artificial
  Synthetic oligonucleotide
tcacagagttgctcctggtgacaatccaaacgatactcttgaattatcagcagttagtag

SEQ ID NO: 456725 - DNA, 60 bp, Artificial
  Synthetic oligonucleotide
tcacagatccctctgggttcatccgcacgcaaaactcgaagccagaatatgcatgggtca

SEQ ID NO: 456726 - DNA, 60 bp, Artificial
  Synthetic oligonucleotide
tcacagatgatatgaggtcaactacattctctaaggaggcgtgggagcgtttcatcgcaa

SEQ ID NO: 456727 - DNA, 60 bp, Artificial
  Synthetic oligonucleotide
tcacagatgccctactaatcacccctgtcctgcagctctctcctgcagacctacacagtt

SEQ ID NO: 456728 - DNA, 58 bp, Artificial
  Synthetic oligonucleotide
tcacagatgggtccgccactggacctgcagaaacaagagtatactattttaaggaagg

SEQ ID NO: 456729 - DNA, 55 bp, Artificial
  Synthetic oligonucleotide
tcacagattcatagggtggtacctcgtcatttcgtcagcagtcgccttaatcgta

SEQ ID NO: 456730 - DNA, 59 bp, Artificial
  Synthetic oligonucleotide
tcacagattcgttatggtgcaccgaacgttttcggatcagcaaatttgttcactccacc

SEQ ID NO: 456731 - DNA, 60 bp, Artificial
  Synthetic oligonucleotide
tcacagattctcttgatgcggaccacatgggccttgtgcgaatccatcacactggctact

SEQ ID NO: 456732 - DNA, 59 bp, Artificial
  Synthetic oligonucleotide
tcacagatttgttctggtggtttaagatgattttagagtggtcatcgcaagggaaagaa

SEQ ID NO: 456733 - DNA, 56 bp, Artificial
  Synthetic oligonucleotide
tcacagcaaagtgtgattttctttccctggttacgcgtaccgaaccttacacagtg

SEQ ID NO: 456734 - DNA, 55 bp, Artificial
  Synthetic oligonucleotide
tcacagcaaatacagagaagaagcaatgcaaaataggatacagattgatccagtc

SEQ ID NO: 456735 - DNA, 58 bp, Artificial
  Synthetic oligonucleotide
tcacagcaaattgtagaagaactactcgacttccaaatgcataatgatcaactagagt

SEQ ID NO: 456736 - DNA, 55 bp, Artificial
  Synthetic oligonucleotide
tcacagcaactcgacaccatgaacacggcgctatcagggcgctgtagtaaccctg

SEQ ID NO: 456737 - DNA, 55 bp, Artificial
  Synthetic oligonucleotide
tcacagcacacagattggtggagtaagaatggtagacatcctcagacaaaacccg

SEQ ID NO: 456738 - DNA, 60 bp, Artificial
  Synthetic oligonucleotide
tcacagcagtagacaggtcactccgttgtccctgagatctaggagctccacactccatca

SEQ ID NO: 456739 - DNA, 60 bp, Artificial
  Synthetic oligonucleotide
tcacagcatcatatcgtacgctttgcctatctcaatcagattataaaccgcgatttactc

SEQ ID NO: 456740 - DNA, 60 bp, Artificial
  Synthetic oligonucleotide
tcacagcctggagcgaccgacccatcagagtcacaacggaaaactacatgaactggacga

SEQ ID NO: 456741 - DNA, 58 bp, Artificial
  Synthetic oligonucleotide
tcacagccttcagctcccaaactcactattctgaagagtccatctggcacactcttca

SEQ ID NO: 456742 - DNA, 55 bp, Artificial
  Synthetic oligonucleotide
tcacagcgagggttagtcctggtctgtgcattgctggtgatagaggtatagctcc

SEQ ID NO: 456743 - DNA, 60 bp, Artificial
  Synthetic oligonucleotide
tcacagctcacaaaagctgtattgtagcacctgacattatccggtacaaaccaatgactg

SEQ ID NO: 456744 - DNA, 60 bp, Artificial
  Synthetic oligonucleotide
tcacagctgtcgcagtctataggcctgaacatcggcggtcgtgtgccatcgctcatggac

SEQ ID NO: 456745 - DNA, 60 bp, Artificial
  Synthetic oligonucleotide
tcacaggaatactattggaacgtgatggagggtcagggtcaaatggcacagagacattca

SEQ ID NO: 456746 - DNA, 55 bp, Artificial
  Synthetic oligonucleotide
tcacaggacaactattccagttatgaatgtaccaattgacgaagtgcccttacag

SEQ ID NO: 456747 - DNA, 56 bp, Artificial
  Synthetic oligonucleotide
tcacaggacaaggcaaatgtaggaatgtaaccgctacgcattgcacgcatggcata

SEQ ID NO: 456748 - DNA, 51 bp, Artificial
  Synthetic oligonucleotide
tcacaggaccccacgatgttatataacaagacggaattcgagccatttcag

SEQ ID NO: 456749 - DNA, 60 bp, Artificial
  Synthetic oligonucleotide
tcacaggactactactgacatgggatggtccgtataacaaaagcagtacgaatgagacat

SEQ ID NO: 456750 - DNA, 60 bp, Artificial
  Synthetic oligonucleotide
tcacaggactactattaacacgtgatggagggacaaatgacacagagacaccagagacat

SEQ ID NO: 456751 - DNA, 60 bp, Artificial
  Synthetic oligonucleotide
tcacaggactactattagtacgtgatggaggcaacaacaataccacagaaacattcagac

SEQ ID NO: 456752 - DNA, 60 bp, Artificial
  Synthetic oligonucleotide
tcacaggactactattgacaagggatggaggagtaagcaatggcacaaacaataacgaga

SEQ ID NO: 456753 - DNA, 60 bp, Artificial
  Synthetic oligonucleotide
tcacaggactactattgacacgtgatggaggaggtagaaataataatataacagagacat

SEQ ID NO: 456754 - DNA, 60 bp, Artificial
  Synthetic oligonucleotide
tcacaggactactattggtacgggatggaggaccaacaaatgagagtacagagatattca

SEQ ID NO: 456755 - DNA, 50 bp, Artificial
  Synthetic oligonucleotide
tcacaggactactattggtacgtgatggagggaaagtagagaataacaca

SEQ ID NO: 456756 - DNA, 50 bp, Artificial
  Synthetic oligonucleotide
tcacaggactactattggtacgtgatggagggaatgacacagggagtact

SEQ ID NO: 456757 - DNA, 60 bp, Artificial
  Synthetic oligonucleotide
tcacaggactattgttgacacgtgatggaggaaacgcagaaaacacaacggagacattca

SEQ ID NO: 456758 - DNA, 60 bp, Artificial
  Synthetic oligonucleotide
tcacaggatcacagagcccttctaccgagattacactcaagtatccagggatatcccagt

SEQ ID NO: 456759 - DNA, 53 bp, Artificial
  Synthetic oligonucleotide
tcacaggatctatgtccctcgcttcaggacgaagcctattacatgaggtagac

SEQ ID NO: 456760 - DNA, 60 bp, Artificial
  Synthetic oligonucleotide
tcacaggcattcagaaatgtggtctatgtgcgatcattggcagcgaatttgaatgacgta

SEQ ID NO: 456761 - DNA, 54 bp, Artificial
  Synthetic oligonucleotide
tcacaggcgaaggagtttaccaaggtcgttagagacaaactggtcggcgagcta

SEQ ID NO: 456762 - DNA, 60 bp, Artificial
  Synthetic oligonucleotide
tcacagggaacatgtcctttcgagacttggggagagtgatggttatggtgggcgctacta

SEQ ID NO: 456763 - DNA, 60 bp, Artificial
  Synthetic oligonucleotide
tcacagggatactattggtacgtgatggaggcaacacatctgaaaacatagagacattca

SEQ ID NO: 456764 - DNA, 55 bp, Artificial
  Synthetic oligonucleotide
tcacagggcagggatgcgtcattagccgcgctcccgattgtgcccagttgcgtgt

SEQ ID NO: 456765 - DNA, 60 bp, Artificial
  Synthetic oligonucleotide
tcacagggctactattggtacgtgatggaggagagacaaatgatacagatggaacagaga

SEQ ID NO: 456766 - DNA, 56 bp, Artificial
  Synthetic oligonucleotide
tcacaggggatatggatgtgtccgtgggccgggaagagtgggagttggacattttt

SEQ ID NO: 456767 - DNA, 60 bp, Artificial
  Synthetic oligonucleotide
tcacaggtgcaccgagagtgcaattatcggacgatttacccgagacgcttgattttacac

SEQ ID NO: 456768 - DNA, 60 bp, Artificial
  Synthetic oligonucleotide
tcacaggtgtccacgcaacgctccggctcgcatgaaaactctaactcagctactgagggc

SEQ ID NO: 456769 - DNA, 57 bp, Artificial
  Synthetic oligonucleotide
tcacagtaaaggttatgagtactatagtcaacgccagaacccaaatggcactcgaaa

SEQ ID NO: 456770 - DNA, 55 bp, Artificial
  Synthetic oligonucleotide
tcacagtaagaataggggtgttgagctgaccaatgctgctgaaaggtatgaggct

SEQ ID NO: 456771 - DNA, 60 bp, Artificial
  Synthetic oligonucleotide
tcacagtaagcaacaatctaacctcagaccaggcaaccccagtatgcaaaggtaatgagt

SEQ ID NO: 456772 - DNA, 60 bp, Artificial
  Synthetic oligonucleotide
tcacagtagggagtctcacccactagagagggattcaaccttgagccagagagtatgtgc

SEQ ID NO: 456773 - DNA, 53 bp, Artificial
  Synthetic oligonucleotide
tcacagtcaaatcaattactatcatatggtgatgttacaagattcttatccag

SEQ ID NO: 456774 - DNA, 51 bp, Artificial
  Synthetic oligonucleotide
tcacagtcagggcaagtgtatctgatagtcgtgggcgttggtctgatacta

SEQ ID NO: 456775 - DNA, 60 bp, Artificial
  Synthetic oligonucleotide
tcacagtcatatggtcattacatattgcagacaaagtcaatatttcctcagaacacctta

SEQ ID NO: 456776 - DNA, 60 bp, Artificial
  Synthetic oligonucleotide
tcacagtcattcaccaaggattggactcaaccgctcagtgcttacagcttaaaggaagat

SEQ ID NO: 456777 - DNA, 59 bp, Artificial
  Synthetic oligonucleotide
tcacagtcgaccgggtggagtctaaagcggccaatcacctactactcatacgtcgcgga

SEQ ID NO: 456778 - DNA, 60 bp, Artificial
  Synthetic oligonucleotide
tcacagtcgccacttcagtggcgcgacctaaattgtacacagtgcaatttggaagtcttg

SEQ ID NO: 456779 - DNA, 60 bp, Artificial
  Synthetic oligonucleotide
tcacagtctccgatacacaacctagcgggcctagtaattcggtcagcataccaatgctaa

SEQ ID NO: 456780 - DNA, 60 bp, Artificial
  Synthetic oligonucleotide
tcacagtctggggcattaaacagctccaggcaagaatcctggctgtggaaagatacctac

SEQ ID NO: 456781 - DNA, 60 bp, Artificial
  Synthetic oligonucleotide
tcacagtctggggcattaagcagcttcaggcaagagtcttggctatggaaagatacctaa

SEQ ID NO: 456782 - DNA, 60 bp, Artificial
  Synthetic oligonucleotide
tcacagtgcagttgaagtgccttgaaaatcttactttgggtggcacagtatctgtgaaac

SEQ ID NO: 456783 - DNA, 58 bp, Artificial
  Synthetic oligonucleotide
tcacagtgggattcatcccaacataatacccaaccatttaggaaaggaataatcatgg

SEQ ID NO: 456784 - DNA, 60 bp, Artificial
  Synthetic oligonucleotide
tcacagtgttcacagaaacactatcggagactgtcccaaatatgtgaatgtcaagtctct

SEQ ID NO: 456785 - DNA, 55 bp, Artificial
  Synthetic oligonucleotide
tcacagtgttggacatgcacccaggctctgggaagacccacagagtcctcccgga

SEQ ID NO: 456786 - DNA, 60 bp, Artificial
  Synthetic oligonucleotide
tcacagttaacgtcggctgtgtcacgacggtcagctcctagtaaattgcataggagttca

SEQ ID NO: 456787 - DNA, 60 bp, Artificial
  Synthetic oligonucleotide
tcacagttgaaatcattaatactgttttatgttttgtcaaaagtggcattttgctatatg

SEQ ID NO: 456788 - DNA, 49 bp, Artificial
  Synthetic oligonucleotide
tcacataaaaattattaaacggactccccgtttaataaatttcccgtaa

SEQ ID NO: 456789 - DNA, 55 bp, Artificial
  Synthetic oligonucleotide
tcacataacatactttcccttcctcacatgggtcgtagaagcccctaaagaggtg

SEQ ID NO: 456790 - DNA, 57 bp, Artificial
  Synthetic oligonucleotide
tcacataagaataatgcccaggttgaagagtctagaaatcgtagtaaattagggttc

SEQ ID NO: 456791 - DNA, 59 bp, Artificial
  Synthetic oligonucleotide
tcacataagacttatctataatgcggagggtagtaattccactggctctaccctttatc

SEQ ID NO: 456792 - DNA, 60 bp, Artificial
  Synthetic oligonucleotide
tcacataatgcaaacgcagataaagcgctgtatatggcctacgagatgcgggtgaccgct

SEQ ID NO: 456793 - DNA, 50 bp, Artificial
  Synthetic oligonucleotide
tcacatacaaggaaggttgtagcgagtcagtctcgttacagtcaggatca

SEQ ID NO: 456794 - DNA, 56 bp, Artificial
  Synthetic oligonucleotide
tcacatactttgcacatctacaactgactacggaatacagggactcgtgccacaga

SEQ ID NO: 456795 - DNA, 60 bp, Artificial
  Synthetic oligonucleotide
tcacatagtatcgtcttcgtggattttatcacgttcacataaagatacagtaactgcatt

SEQ ID NO: 456796 - DNA, 60 bp, Artificial
  Synthetic oligonucleotide
tcacatagtcatacagtagagagtggaactcagattcgtaatagtcataaggaagggctg

SEQ ID NO: 456797 - DNA, 60 bp, Artificial
  Synthetic oligonucleotide
tcacatatacaatcggctccagggatatattgaggcggtacagttagaggagttacgggc

SEQ ID NO: 456798 - DNA, 59 bp, Artificial
  Synthetic oligonucleotide
tcacatatacactgattgggttgggtgggtcaaatcaaacacatataagctggggtagg

SEQ ID NO: 456799 - DNA, 60 bp, Artificial
  Synthetic oligonucleotide
tcacatatgtactcgcaggacatcttaatggaagcctgtagtttgacgatacaagattac

SEQ ID NO: 456800 - DNA, 58 bp, Artificial
  Synthetic oligonucleotide
tcacatatttagtcttatcagaacaaagggcctccggcacccagtgtggcgcagggga

SEQ ID NO: 456801 - DNA, 60 bp, Artificial
  Synthetic oligonucleotide
tcacatcaactctggagaactccaatgggaacttatgaccctaaactcgaccgctatgat

SEQ ID NO: 456802 - DNA, 60 bp, Artificial
  Synthetic oligonucleotide
tcacatcaccgtttgtgttggcttcaaccaatgctagctccatccatgccccaactgttt

SEQ ID NO: 456803 - DNA, 58 bp, Artificial
  Synthetic oligonucleotide
tcacatcagtgggcccttgataatccctttccgtttgaattaaaggagtggcaggagc

SEQ ID NO: 456804 - DNA, 60 bp, Artificial
  Synthetic oligonucleotide
tcacatcatggcgtctcaaggcaccaaacgatcttatgaacaaatggaaactagtggaga

SEQ ID NO: 456805 - DNA, 54 bp, Artificial
  Synthetic oligonucleotide
tcacatccatggaccctcaaccattcgagaattgcgagagctgggcatgtttaa

SEQ ID NO: 456806 - DNA, 60 bp, Artificial
  Synthetic oligonucleotide
tcacatcccccgccctaactcagctgactatccaggcgctttacaatttagctggtggca

SEQ ID NO: 456807 - DNA, 57 bp, Artificial
  Synthetic oligonucleotide
tcacatcgacacctggaataggtcacagatacctaaaagaacacctagatcagatac

SEQ ID NO: 456808 - DNA, 60 bp, Artificial
  Synthetic oligonucleotide
tcacatcgtaacaattatatctttatgacttcattcactcaattgccgtatgctcgtggg

SEQ ID NO: 456809 - DNA, 60 bp, Artificial
  Synthetic oligonucleotide
tcacatctaggggatttgccaatcggcatgtcttccaacaagcactagatgagatcttac

SEQ ID NO: 456810 - DNA, 54 bp, Artificial
  Synthetic oligonucleotide
tcacatgaactgagggctgagttacgtaagcattggtattctatgacacgcagt

SEQ ID NO: 456811 - DNA, 54 bp, Artificial
  Synthetic oligonucleotide
tcacatgatcctcatattaagcaattccttgatttctttccagatggtcatcac

SEQ ID NO: 456812 - DNA, 60 bp, Artificial
  Synthetic oligonucleotide
tcacatggcccagccaaaaccatggaatacgacgctgttgccacaacgcactcctgggtt

SEQ ID NO: 456813 - DNA, 60 bp, Artificial
  Synthetic oligonucleotide
tcacatggtctcaatacacaaaccctgcttttgagattgcccccgatagcagccatgatt

SEQ ID NO: 456814 - DNA, 56 bp, Artificial
  Synthetic oligonucleotide
tcacatgtcggcaaggtaatgtgtatctccgatgtgacacgtggtaatggcattac

SEQ ID NO: 456815 - DNA, 60 bp, Artificial
  Synthetic oligonucleotide
tcacatgtcgggaaggtcatgtgcatatctgatgtcacacgtggcaacggtataacccac

SEQ ID NO: 456816 - DNA, 60 bp, Artificial
  Synthetic oligonucleotide
tcacatgtgggtaaggtcatgtgtatatctgatgtgacacgtggaaatggtatcacccac

SEQ ID NO: 456817 - DNA, 60 bp, Artificial
  Synthetic oligonucleotide
tcacatgtgtagtgtgcaaggtgctcttctatttgctaattgtcatcgggacactaggaa

SEQ ID NO: 456818 - DNA, 60 bp, Artificial
  Synthetic oligonucleotide
tcacatgtttagtatcattgacagagtgccctacctttttaacatcaattaaggcttgcg

SEQ ID NO: 456819 - DNA, 60 bp, Artificial
  Synthetic oligonucleotide
tcacattcacacagggctcatagcagagcagcgagatcttcagtgcctggagtgaggcga

SEQ ID NO: 456820 - DNA, 51 bp, Artificial
  Synthetic oligonucleotide
tcacattccaggtcgggcttaaccagtatctggttgggtcgcagctcccat

SEQ ID NO: 456821 - DNA, 55 bp, Artificial
  Synthetic oligonucleotide
tcacattcccggccgtgtgacaaacctcctcgaggttatgcaagtagacactttt

SEQ ID NO: 456822 - DNA, 55 bp, Artificial
  Synthetic oligonucleotide
tcacattccgagaaattcttacacttaaccgtggctcattatatggacgagacgt

SEQ ID NO: 456823 - DNA, 55 bp, Artificial
  Synthetic oligonucleotide
tcacattgacaggcagccgatcactcactatctcagaaaggctctctatgaccgg

SEQ ID NO: 456824 - DNA, 60 bp, Artificial
  Synthetic oligonucleotide
tcacattgagagctaggatgggggctgactggttaggccgatgagtctagtactctttgg

SEQ ID NO: 456825 - DNA, 60 bp, Artificial
  Synthetic oligonucleotide
tcacattgcctaacttgcatatgtcaggacaagagtatccatcgagcttccaataattgc

SEQ ID NO: 456826 - DNA, 58 bp, Artificial
  Synthetic oligonucleotide
tcacattgctggtggtttagtgaaagtcgtaattgagtttccaaacttacatttgata

SEQ ID NO: 456827 - DNA, 60 bp, Artificial
  Synthetic oligonucleotide
tcacatttctcgctgacacctgggctaagctgtccgcagcttactcccagttcttcgagc

SEQ ID NO: 456828 - DNA, 55 bp, Artificial
  Synthetic oligonucleotide
tcaccaaaccgttcatacaacgcacatacaacccgctcgatatggccatgaggac

SEQ ID NO: 456829 - DNA, 60 bp, Artificial
  Synthetic oligonucleotide
tcaccaaacgaacagtgatgactgttccttatggtgtgtctcgggattcggctcgtgcct

SEQ ID NO: 456830 - DNA, 60 bp, Artificial
  Synthetic oligonucleotide
tcaccaaagggtgtcaccgattcggctctctcaaacttgctcattcaatcggtgaaagag

SEQ ID NO: 456831 - DNA, 57 bp, Artificial
  Synthetic oligonucleotide
tcaccaacaagagtgttacgcgaagttctgagcgtggtacgtaacaacggcgtgacc

SEQ ID NO: 456832 - DNA, 58 bp, Artificial
  Synthetic oligonucleotide
tcaccaacgaccagacaataccacgagttatctggttagactgagagtctcaagtagt

SEQ ID NO: 456833 - DNA, 55 bp, Artificial
  Synthetic oligonucleotide
tcaccaactaatgcaggtgtagttatgcaaggaacgaataatacaaataggtggc

SEQ ID NO: 456834 - DNA, 60 bp, Artificial
  Synthetic oligonucleotide
tcaccaaggcaaaagcttgcttactctacacaggcacgttaaaagagcagcagatgaaga

SEQ ID NO: 456835 - DNA, 50 bp, Artificial
  Synthetic oligonucleotide
tcaccaagtcttttgatcaccaccactcatgtcgtgcccagagacacgac

SEQ ID NO: 456836 - DNA, 60 bp, Artificial
  Synthetic oligonucleotide
tcaccaagtgctcagcagtggacagcacaacaaagtgtgtggtctctggatcagtagtaa

SEQ ID NO: 456837 - DNA, 60 bp, Artificial
  Synthetic oligonucleotide
tcaccaatcctatgatccagcgcctaaacggtatcgtcaccagatacaacacgaccaatt

SEQ ID NO: 456838 - DNA, 60 bp, Artificial
  Synthetic oligonucleotide
tcaccaatgactgcccgaattcaagcatagtgtatgaggccgaccatcacatcttgcacc

SEQ ID NO: 456839 - DNA, 60 bp, Artificial
  Synthetic oligonucleotide
tcaccaattctctcacttcgactctaatgaagcatcgtgctgagatggagagtcatcctc

SEQ ID NO: 456840 - DNA, 60 bp, Artificial
  Synthetic oligonucleotide
tcaccacaaagacggagaacaaggaagatctctggttcatgtctcataaaggcatcatgt

SEQ ID NO: 456841 - DNA, 60 bp, Artificial
  Synthetic oligonucleotide
tcaccacaacgtcctccaacacgcactctatagagtacgtgcctgcgagttacgtcaact

SEQ ID NO: 456842 - DNA, 60 bp, Artificial
  Synthetic oligonucleotide
tcaccacaagcggtccttaacagcgagaagctcgcttgtattcacccgttagctgagcaa

SEQ ID NO: 456843 - DNA, 55 bp, Artificial
  Synthetic oligonucleotide
tcaccacacccttaccaccatgtgagtaggatggctgtcactaacactctggttg

SEQ ID NO: 456844 - DNA, 53 bp, Artificial
  Synthetic oligonucleotide
tcaccacagatggcacagtgattagacccaacattgttgtagaaccagtaggt

SEQ ID NO: 456845 - DNA, 58 bp, Artificial
  Synthetic oligonucleotide
tcaccaccacgaaagagtcactcctgataatagggccaagtgtggcggacatggacgc

SEQ ID NO: 456846 - DNA, 60 bp, Artificial
  Synthetic oligonucleotide
tcaccaccaggacaagcagacacagacaccgccgccaagacccccaccacctccgctgac

SEQ ID NO: 456847 - DNA, 60 bp, Artificial
  Synthetic oligonucleotide
tcaccaccatacttagcagtctcaccgtgacccagctcctgaggcgactccaccagtgga

SEQ ID NO: 456848 - DNA, 53 bp, Artificial
  Synthetic oligonucleotide
tcaccacccacagtgtacaataccagagtagagtgcattggatggtccagtac

SEQ ID NO: 456849 - DNA, 55 bp, Artificial
  Synthetic oligonucleotide
tcaccaccccgctcagggtataaagcggctggtgatccggggcagaggcacacag

SEQ ID NO: 456850 - DNA, 52 bp, Artificial
  Synthetic oligonucleotide
tcaccacggacgtttccgaacacggaggcgtttccagaaccacccgtcgggc

SEQ ID NO: 456851 - DNA, 60 bp, Artificial
  Synthetic oligonucleotide
tcaccacgtgaagaagcaactcgcttctcaattttaaagcacgctattctcaagcacggt

SEQ ID NO: 456852 - DNA, 57 bp, Artificial
  Synthetic oligonucleotide
tcaccactaactgacaacccttgcgtcaacttccagatcctggggccccagtacaaa

SEQ ID NO: 456853 - DNA, 55 bp, Artificial
  Synthetic oligonucleotide
tcaccactactacaaggggccggagaacacaacttggggaatcgagctcactctc

SEQ ID NO: 456854 - DNA, 58 bp, Artificial
  Synthetic oligonucleotide
tcaccactatatggtaaagctataagtggtaaagctatttgttatagagttaaatcca

SEQ ID NO: 456855 - DNA, 60 bp, Artificial
  Synthetic oligonucleotide
tcaccagacgtgtttggagcattagtgtcacgttttctaacggttttcactgatgagtca

SEQ ID NO: 456856 - DNA, 58 bp, Artificial
  Synthetic oligonucleotide
tcaccaggaagctggcaagtacgagaatcacacggagaacgcattgctactttatatg

SEQ ID NO: 456857 - DNA, 60 bp, Artificial
  Synthetic oligonucleotide
tcaccaggacgtttatcaagaacaatgatgcacagcgcattgttaaaagagtctaaagcg

SEQ ID NO: 456858 - DNA, 57 bp, Artificial
  Synthetic oligonucleotide
tcaccagggcccgatacatggggtagcgagcgttccactccagcgaagccacgtaac

SEQ ID NO: 456859 - DNA, 59 bp, Artificial
  Synthetic oligonucleotide
tcaccaggtggcaatggacccggaatccatcccgtggacggcattttgggcaatcgatg

SEQ ID NO: 456860 - DNA, 60 bp, Artificial
  Synthetic oligonucleotide
tcaccagtactacagcgcaaggcacgcaagtccgctgcatgaatagcacacaagcttggt

SEQ ID NO: 456861 - DNA, 55 bp, Artificial
  Synthetic oligonucleotide
tcaccagtctgaccgccgggattggaggaccgtttgccggtctcgtcgtcggact

SEQ ID NO: 456862 - DNA, 60 bp, Artificial
  Synthetic oligonucleotide
tcaccagtgccactgtaaaagcagcctgttggtgggcaaatatccaacaggagtttggaa

SEQ ID NO: 456863 - DNA, 60 bp, Artificial
  Synthetic oligonucleotide
tcaccagttacttatagatcgaataatcgattaatgagagtgaattggaagaagtggtgg

SEQ ID NO: 456864 - DNA, 56 bp, Artificial
  Synthetic oligonucleotide
tcaccagtttaggaacagcaatctcggggaaggtctcgctccacatgcgccggctc

SEQ ID NO: 456865 - DNA, 55 bp, Artificial
  Synthetic oligonucleotide
tcaccataatccgggcgtggttataacacagctggtaccaagtaccgacacaggg

SEQ ID NO: 456866 - DNA, 53 bp, Artificial
  Synthetic oligonucleotide
tcaccatacagcactcaggcaagccattgtatgctggggggaattaatgactc

SEQ ID NO: 456867 - DNA, 50 bp, Artificial
  Synthetic oligonucleotide
tcaccatccgagcacggacagtgaacaaaccagcctatatgttcaagcaa

SEQ ID NO: 456868 - DNA, 58 bp, Artificial
  Synthetic oligonucleotide
tcaccatccggtggtgttaactgttgtgaccacgctgtggaacaagactggacccgtg

SEQ ID NO: 456869 - DNA, 55 bp, Artificial
  Synthetic oligonucleotide
tcaccatcctatttcgcaagtatttgggatacgctttggcgcagattcaaagcca

SEQ ID NO: 456870 - DNA, 55 bp, Artificial
  Synthetic oligonucleotide
tcaccatccttcaaccgacacagaacaaaccaacctatataagaacaaccccgga

SEQ ID NO: 456871 - DNA, 60 bp, Artificial
  Synthetic oligonucleotide
tcaccatctgaggctgtggtgaataagtatgcttcggaaatacaggaagccattacttat

SEQ ID NO: 456872 - DNA, 56 bp, Artificial
  Synthetic oligonucleotide
tcaccatctggtaccaaacgaacatggttataccaccaggctttcccaacaccgca

SEQ ID NO: 456873 - DNA, 60 bp, Artificial
  Synthetic oligonucleotide
tcaccatgctcggagttcacgataatgttgctgtgttgcctacacacgcatcaccagggg

SEQ ID NO: 456874 - DNA, 56 bp, Artificial
  Synthetic oligonucleotide
tcaccatggacgatttcctctatctctaccatctaggaagaaagttcgacggagaa

SEQ ID NO: 456875 - DNA, 60 bp, Artificial
  Synthetic oligonucleotide
tcaccattaaagtctgcaatactagaattgaagcttcaatggcccttgttgatgcaaagc

SEQ ID NO: 456876 - DNA, 60 bp, Artificial
  Synthetic oligonucleotide
tcaccattacaacttcgtttccgtatgcaagcaaagcaacatatgaaagtatgccggtat

SEQ ID NO: 456877 - DNA, 59 bp, Artificial
  Synthetic oligonucleotide
tcaccattactacgcttcaagattctgtgtccactctctcaacgactgtaactgattta

SEQ ID NO: 456878 - DNA, 60 bp, Artificial
  Synthetic oligonucleotide
tcaccatttattcgactgtcgcctcatctcttgtgcttgcgatggggtttgctgcctttc

SEQ ID NO: 456879 - DNA, 55 bp, Artificial
  Synthetic oligonucleotide
tcacccaaacagtcgacttcagcttggatcctaccttcaccattgaaacgacgac

SEQ ID NO: 456880 - DNA, 55 bp, Artificial
  Synthetic oligonucleotide
tcacccaactatatcgcgctttacagacagaggaggatctgagaacttcagacga

SEQ ID NO: 456881 - DNA, 55 bp, Artificial
  Synthetic oligonucleotide
tcacccacataaagttctctatttgatccaacctgctctttgtagctcaaaccaa

SEQ ID NO: 456882 - DNA, 60 bp, Artificial
  Synthetic oligonucleotide
tcacccagctccagtgaagaaccaacaccacaaaatgcacaccatctctccagaagtctt

SEQ ID NO: 456883 - DNA, 60 bp, Artificial
  Synthetic oligonucleotide
tcacccaggatctgagtcagatttttggctgcctcctgtaacgcctgacagcacacctgc

SEQ ID NO: 456884 - DNA, 50 bp, Artificial
  Synthetic oligonucleotide
tcacccatcacaaacaattgcaaatgagtgtacggcccatgtttacacaa

SEQ ID NO: 456885 - DNA, 58 bp, Artificial
  Synthetic oligonucleotide
tcacccatcagatggcatcgtcgagaacttaggcacaccggggtgtataatgaggtcc

SEQ ID NO: 456886 - DNA, 55 bp, Artificial
  Synthetic oligonucleotide
tcacccatgttgctaaggtaacaaacccagagctcttcctcaaagactgaacctg

SEQ ID NO: 456887 - DNA, 52 bp, Artificial
  Synthetic oligonucleotide
tcaccccaaccctttgcaaactaaacaagacttacttccttgtgaggggacc

SEQ ID NO: 456888 - DNA, 60 bp, Artificial
  Synthetic oligonucleotide
tcaccccaggagcttgctagcataatacaggcaacgagtgagcgtggggcctgcggcctg

SEQ ID NO: 456889 - DNA, 57 bp, Artificial
  Synthetic oligonucleotide
tcaccccatttatttaggctcgatgcattacgatattacttatgaaacgttaaagac

SEQ ID NO: 456890 - DNA, 56 bp, Artificial
  Synthetic oligonucleotide
tcaccccccgctaccccctctggggaggccaccgcgcctgagtcgcgcgggtgcca

SEQ ID NO: 456891 - DNA, 55 bp, Artificial
  Synthetic oligonucleotide
tcacccccggcacgtcgtgggcggacctcaagtggtccaacgtcaccgacgtgta

SEQ ID NO: 456892 - DNA, 55 bp, Artificial
  Synthetic oligonucleotide
tcaccccgaaaccaggaatgccgagctcccacgcattttggttgaccatgcgtat

SEQ ID NO: 456893 - DNA, 54 bp, Artificial
  Synthetic oligonucleotide
tcaccccgagaacaatggtgtgccctgatgcactgaaccgaaggttccactttg

SEQ ID NO: 456894 - DNA, 60 bp, Artificial
  Synthetic oligonucleotide
tcaccccgagacaattctgcatgtacttcgcaaaagtcgtgtggaacatcctactcacta

SEQ ID NO: 456895 - DNA, 50 bp, Artificial
  Synthetic oligonucleotide
tcaccccgggtgggatgtaccttctcactacggacagcgcccgccacacg

SEQ ID NO: 456896 - DNA, 58 bp, Artificial
  Synthetic oligonucleotide
tcaccccgtgaggttggataccacgggtcacgtcagttctatagtctggcagattttc

SEQ ID NO: 456897 - DNA, 59 bp, Artificial
  Synthetic oligonucleotide
tcaccccgtgtgccgcggaagaacaaaaactgcccatcaacgcactgagcaactcgtta

SEQ ID NO: 456898 - DNA, 50 bp, Artificial
  Synthetic oligonucleotide
tcacccgattaggtaacccatcaacaccacacttcacaacagtacctgca

SEQ ID NO: 456899 - DNA, 52 bp, Artificial
  Synthetic oligonucleotide
tcacccgcgtgcgtcactatcagcaaaaggttggcactaaggagcacaagga

SEQ ID NO: 456900 - DNA, 54 bp, Artificial
  Synthetic oligonucleotide
tcacccgtaaagtgtcaccgccaaacgtggaggggactcggtgaagggtcgcga

SEQ ID NO: 456901 - DNA, 55 bp, Artificial
  Synthetic oligonucleotide
tcacccgtgttgactcggaaaactaaccgggtcatccggatccctagtgcgtatc

SEQ ID NO: 456902 - DNA, 56 bp, Artificial
  Synthetic oligonucleotide
tcaccctagtgtaccgctgtgcgaccactttaacgtactgccgcctcttgatgcga

SEQ ID NO: 456903 - DNA, 60 bp, Artificial
  Synthetic oligonucleotide
tcaccctatcttctcacacagtcccacattgcttgaccctagcaaccgcgtataccaaca

SEQ ID NO: 456904 - DNA, 60 bp, Artificial
  Synthetic oligonucleotide
tcaccctatgagcccgcagttctttccattaatgaccagcgacttggggtgaagattgaa

SEQ ID NO: 456905 - DNA, 55 bp, Artificial
  Synthetic oligonucleotide
tcaccctcactgctatcacaccggctgagtgccgggcggaagctaggcgcagatt

SEQ ID NO: 456906 - DNA, 55 bp, Artificial
  Synthetic oligonucleotide
tcaccctcatggacattcggcctcttcacgggtggcaccccgaaaactgcgagac

SEQ ID NO: 456907 - DNA, 55 bp, Artificial
  Synthetic oligonucleotide
tcaccctcctcatcatcctttgaacacttgcaaccttagcaaagtccaacccgga

SEQ ID NO: 456908 - DNA, 50 bp, Artificial
  Synthetic oligonucleotide
tcaccctctagtgaacaatgtagcatggtggcaactacatctagaaaacg

SEQ ID NO: 456909 - DNA, 55 bp, Artificial
  Synthetic oligonucleotide
tcaccctctcagcggaagtgggtgattattgggcagcagaattggggagatataa

SEQ ID NO: 456910 - DNA, 50 bp, Artificial
  Synthetic oligonucleotide
tcaccctctggtgcgtacaccaaagaatagagataaaagacaccaaggaa

SEQ ID NO: 456911 - DNA, 55 bp, Artificial
  Synthetic oligonucleotide
tcaccctggttgcaaaactctggagaaccaccttttatttaatgtcgtagctagt

SEQ ID NO: 456912 - DNA, 59 bp, Artificial
  Synthetic oligonucleotide
tcacccttaacaacccaaccagagccgagatagactacgtatgtagtctgaagcctgag

SEQ ID NO: 456913 - DNA, 60 bp, Artificial
  Synthetic oligonucleotide
tcacccttacttgtcaaatctcactgacagaatgttctcgctttctgacatccattaaag

SEQ ID NO: 456914 - DNA, 55 bp, Artificial
  Synthetic oligonucleotide
tcacccttcctaaatggtggccaatcatcattaggggctgctctatgtttaccaa

SEQ ID NO: 456915 - DNA, 55 bp, Artificial
  Synthetic oligonucleotide
tcaccctttcacatcgtttatacgcttccgagagggaagggaaagcgccactttc

SEQ ID NO: 456916 - DNA, 60 bp, Artificial
  Synthetic oligonucleotide
tcaccgacagtatgaagtccgccggcgtgcgcatcatgcgcacttcggagtggctaacgc

SEQ ID NO: 456917 - DNA, 60 bp, Artificial
  Synthetic oligonucleotide
tcaccgacccagtcgcgttgatcggtacttgctgcctgtactcaatgacgcagtgatcga

SEQ ID NO: 456918 - DNA, 59 bp, Artificial
  Synthetic oligonucleotide
tcaccgaccgactgaaggtacgtcacgcgtcatgaaataaccagatggatacgtacgta

SEQ ID NO: 456919 - DNA, 53 bp, Artificial
  Synthetic oligonucleotide
tcaccgaggacagtagcgtaggctgctttacggtcttgcaccgcccatgcagg

SEQ ID NO: 456920 - DNA, 60 bp, Artificial
  Synthetic oligonucleotide
tcaccgatgaactctggttctagtggacacttgctgtaggtcaggaaggtgttcgcgttc

SEQ ID NO: 456921 - DNA, 55 bp, Artificial
  Synthetic oligonucleotide
tcaccgcaaacggtgctcgctagcctccgggtacgcttgtagatgaagtctaggc

SEQ ID NO: 456922 - DNA, 59 bp, Artificial
  Synthetic oligonucleotide
tcaccgcacctttgttaataacaagcatgatgtaatgaagaacgtaaatctattgaaac

SEQ ID NO: 456923 - DNA, 60 bp, Artificial
  Synthetic oligonucleotide
tcaccgcactacaagcgctatatcacctggtgcttatggtggcttcagtatttcctgact

SEQ ID NO: 456924 - DNA, 60 bp, Artificial
  Synthetic oligonucleotide
tcaccgcatatgtagctagactgaaaggccctaaggccgccgcactatttgcaaagacgt

SEQ ID NO: 456925 - DNA, 54 bp, Artificial
  Synthetic oligonucleotide
tcaccgcccctctgtgataccccgtggcaaccctgataagaaccttgacaccct

SEQ ID NO: 456926 - DNA, 56 bp, Artificial
  Synthetic oligonucleotide
tcaccgcggtgggttcttgtggttctggcactaacgatccgtggtgcactaacccg

SEQ ID NO: 456927 - DNA, 60 bp, Artificial
  Synthetic oligonucleotide
tcaccgcgtcgcagacgctctcaatctccatctaccaactgctgatcttcaatgggtaca

SEQ ID NO: 456928 - DNA, 55 bp, Artificial
  Synthetic oligonucleotide
tcaccgctaggaacagccacgtatcgttctcggaaaccgccaccactgcgcgatt

SEQ ID NO: 456929 - DNA, 50 bp, Artificial
  Synthetic oligonucleotide
tcaccggaacttaacggggatgtggatattgacgtcttgtcgtctagtgt

SEQ ID NO: 456930 - DNA, 59 bp, Artificial
  Synthetic oligonucleotide
tcaccggggcggtttagaagagtattatggcacgtatatgatccaatagcaccggaatc

SEQ ID NO: 456931 - DNA, 55 bp, Artificial
  Synthetic oligonucleotide
tcaccggggtatccgcagtgggaacagtaaccaccgccacaggtctcagcgcatc

SEQ ID NO: 456932 - DNA, 55 bp, Artificial
  Synthetic oligonucleotide
tcaccgggtctataacatcacctgggagataaccaatggagatcgggaggtggta

SEQ ID NO: 456933 - DNA, 55 bp, Artificial
  Synthetic oligonucleotide
tcaccggtctccaaggccgcgcagcgacatccatgacgttctcggaaacccagtg

SEQ ID NO: 456934 - DNA, 58 bp, Artificial
  Synthetic oligonucleotide
tcaccggtgcttaacgtgactgccaacgctgactgggttagatcagaaacgacggtga

SEQ ID NO: 456935 - DNA, 60 bp, Artificial
  Synthetic oligonucleotide
tcaccggtgggcatactggagacgtcgcgcgtagccgtgagcaaggtcgtagctggaacg

SEQ ID NO: 456936 - DNA, 60 bp, Artificial
  Synthetic oligonucleotide
tcaccgtatgtcatatattaaagataaaagggctggagtcagcatgcccataagtttcca

SEQ ID NO: 456937 - DNA, 55 bp, Artificial
  Synthetic oligonucleotide
tcaccgtgctttacacggtttttgaaccccacaccggctgtttggcgcttgcagg

SEQ ID NO: 456938 - DNA, 60 bp, Artificial
  Synthetic oligonucleotide
tcaccgtgttggggattttcctgttacttctgatctgaaatgctctcacaacaccagcta

SEQ ID NO: 456939 - DNA, 56 bp, Artificial
  Synthetic oligonucleotide
tcaccgttcagtacttaaaagaatgtactagaatcgtccaacattttgtgtcgggc

SEQ ID NO: 456940 - DNA, 55 bp, Artificial
  Synthetic oligonucleotide
tcaccgttccataattgtgtcttggtagtaaatttggcttgacgaatggtccagg

SEQ ID NO: 456941 - DNA, 58 bp, Artificial
  Synthetic oligonucleotide
tcaccgttctgcatacggtagttaagggaatccccataactgtccatagcattcttta

SEQ ID NO: 456942 - DNA, 60 bp, Artificial
  Synthetic oligonucleotide
tcacctaaaagtgacaatggcataggaggcccatactgctcatactcagacacatggtac

SEQ ID NO: 456943 - DNA, 55 bp, Artificial
  Synthetic oligonucleotide
tcacctaaaccagccaacataatgaagtttatcactggcaccactaagcaaaacg

SEQ ID NO: 456944 - DNA, 60 bp, Artificial
  Synthetic oligonucleotide
tcacctaaccatacagcacttaggcaagctatactgtgctggggtgagttaatgactctg

SEQ ID NO: 456945 - DNA, 59 bp, Artificial
  Synthetic oligonucleotide
tcacctacacgcctgtgatgatatatgccctaaaggtaagtcgcggccgactgctaggg

SEQ ID NO: 456946 - DNA, 60 bp, Artificial
  Synthetic oligonucleotide
tcacctacgagtgatatagttggaggcatgattttggtagatacttgtcacaagagtgtc

SEQ ID NO: 456947 - DNA, 55 bp, Artificial
  Synthetic oligonucleotide
tcacctacggggcatgccccaagtatgtcaaacagagcactttgaaattagcaac

SEQ ID NO: 456948 - DNA, 60 bp, Artificial
  Synthetic oligonucleotide
tcacctatctggttttgttcctatgaatatctcttctgaaacatctatgatctctgcatt

SEQ ID NO: 456949 - DNA, 60 bp, Artificial
  Synthetic oligonucleotide
tcacctcaaagatcgtagctaagcagcagactattgctaaatctcctggacgtctcgatg

SEQ ID NO: 456950 - DNA, 51 bp, Artificial
  Synthetic oligonucleotide
tcacctcaactatgcacctactcaaccaatctggctacaggtatttcccac

SEQ ID NO: 456951 - DNA, 55 bp, Artificial
  Synthetic oligonucleotide
tcacctcgagtcagtgctgcctcaattgacatccttaggtacttctctgataagt

SEQ ID NO: 456952 - DNA, 58 bp, Artificial
  Synthetic oligonucleotide
tcacctctcaatgtgacattgatagtaaatactaaacccttttgattaacgtatttga

SEQ ID NO: 456953 - DNA, 58 bp, Artificial
  Synthetic oligonucleotide
tcacctctcggtgctttggtagcttgctacaagggggttagctgctcgattggcagta

SEQ ID NO: 456954 - DNA, 57 bp, Artificial
  Synthetic oligonucleotide
tcacctctctgtatagagttaggcgtgttttttagaacctccaggatccttattgtc

SEQ ID NO: 456955 - DNA, 55 bp, Artificial
  Synthetic oligonucleotide
tcacctctggattctattagtcaagtcgatacggctagtcaggattccactaatg

SEQ ID NO: 456956 - DNA, 60 bp, Artificial
  Synthetic oligonucleotide
tcacctgaatggtgcggagtgggatgtattcatagagcgacccaccgctgtagacacttg

SEQ ID NO: 456957 - DNA, 55 bp, Artificial
  Synthetic oligonucleotide
tcacctgacatcgtcagtgccagtgtaatcacacctgtatctaaagtagcagcgc

SEQ ID NO: 456958 - DNA, 60 bp, Artificial
  Synthetic oligonucleotide
tcacctgacgcgggcaattgtaaagaaccatgacaatatccttcgggtcgctcagtatgc

SEQ ID NO: 456959 - DNA, 60 bp, Artificial
  Synthetic oligonucleotide
tcacctgccttattggaatcacttgtcgggtaagttccagtctgtgcgaatgacgcactg

SEQ ID NO: 456960 - DNA, 57 bp, Artificial
  Synthetic oligonucleotide
tcacctggagtataaacagggttcgttggtcacagaacaaggagtgactcgtttgga

SEQ ID NO: 456961 - DNA, 60 bp, Artificial
  Synthetic oligonucleotide
tcacctggctgtagcataatgggcctgtggccacaaatcggataaggaccctgattgggt

SEQ ID NO: 456962 - DNA, 60 bp, Artificial
  Synthetic oligonucleotide
tcacctgggtctaacatgctggtacccagtctgtgtagtcctcgatacgggtgtgctgcg

SEQ ID NO: 456963 - DNA, 55 bp, Artificial
  Synthetic oligonucleotide
tcacctgggtctagcacgcttggtcccagacgattgagctctctatatgggtgta

SEQ ID NO: 456964 - DNA, 60 bp, Artificial
  Synthetic oligonucleotide
tcacctggtatcagctcgctagttatgcctcgtacgtccgtgttcctgtcaactccacgg

SEQ ID NO: 456965 - DNA, 59 bp, Artificial
  Synthetic oligonucleotide
tcaccttactgcaatgtaacaagaaaaatagggtacatatggtacacaaacaattgcac

SEQ ID NO: 456966 - DNA, 59 bp, Artificial
  Synthetic oligonucleotide
tcaccttcgccgacccatgatttccgaatttgattataacatcccatcagttaataaca

SEQ ID NO: 456967 - DNA, 60 bp, Artificial
  Synthetic oligonucleotide
tcaccttctagaacaatactgatcggtctccatggccgcgcagcgggactgcatatattt

SEQ ID NO: 456968 - DNA, 60 bp, Artificial
  Synthetic oligonucleotide
tcaccttctcgcctcgtcagcataagacagtacaggactgcaattgttcaatctatcccg

SEQ ID NO: 456969 - DNA, 59 bp, Artificial
  Synthetic oligonucleotide
tcaccttgaagaacatgtcctttgaagctgaggatggttgtagtgaccatcgttacgga

SEQ ID NO: 456970 - DNA, 54 bp, Artificial
  Synthetic oligonucleotide
tcaccttgcccccgtctgtcaagagtttgaaatcgggccaacaaattcgtgtaa

SEQ ID NO: 456971 - DNA, 55 bp, Artificial
  Synthetic oligonucleotide
tcaccttgggacaaacctgtactctggtttacataattactatagacagctcccc

SEQ ID NO: 456972 - DNA, 59 bp, Artificial
  Synthetic oligonucleotide
tcaccttgtatgatgtgcccaagaaacatcagcgtatagacacagtgactaatgtgcac

SEQ ID NO: 456973 - DNA, 57 bp, Artificial
  Synthetic oligonucleotide
tcacctttccacgtcgcatggaaaccaccgtgaacgctcaccaactcttgcccaagg

SEQ ID NO: 456974 - DNA, 55 bp, Artificial
  Synthetic oligonucleotide
tcaccttttcatagtgcagaaagccaaactcctaacgccacagatgcgcactttc

SEQ ID NO: 456975 - DNA, 60 bp, Artificial
  Synthetic oligonucleotide
tcacgaaaatcgttgagaacgctgagcgtgttcgttttatcggatctacatacgtcatag

SEQ ID NO: 456976 - DNA, 60 bp, Artificial
  Synthetic oligonucleotide
tcacgaaatggcattacacagaagtgcagcctgacgggggtagagttcaacgtgacatcc

SEQ ID NO: 456977 - DNA, 54 bp, Artificial
  Synthetic oligonucleotide
tcacgaacatcgtcagcggcctcccaataagccaaattcaggggcacgaactgg

SEQ ID NO: 456978 - DNA, 60 bp, Artificial
  Synthetic oligonucleotide
tcacgaactacagcataccgatcaacgatgttggaagagcggtgaacttggctttccaaa

SEQ ID NO: 456979 - DNA, 55 bp, Artificial
  Synthetic oligonucleotide
tcacgaacttttcagccactcccttgcctcgatgtcatccagatggcgagattgc

SEQ ID NO: 456980 - DNA, 54 bp, Artificial
  Synthetic oligonucleotide
tcacgaatccgtcaagcgttcctttcggtaacgggcagattgtttgcattctag

SEQ ID NO: 456981 - DNA, 60 bp, Artificial
  Synthetic oligonucleotide
tcacgaatgatcagattccaacattggcaggagtaatgtcttctgtgtcaacaaatgcac

SEQ ID NO: 456982 - DNA, 57 bp, Artificial
  Synthetic oligonucleotide
tcacgaattaaggcgttagtgatctttacaaaaggacacataatatttaccgatgag

SEQ ID NO: 456983 - DNA, 50 bp, Artificial
  Synthetic oligonucleotide
tcacgaattgcgtgaagatgttgtgtacacacactggtactggacaggca

SEQ ID NO: 456984 - DNA, 58 bp, Artificial
  Synthetic oligonucleotide
tcacgacaattcgataagaaactgttggggcgttacgagtacgtgatagaattagcta

SEQ ID NO: 456985 - DNA, 58 bp, Artificial
  Synthetic oligonucleotide
tcacgacaccccgccgggtccataccgatgtggcgtttctccttgaccgcagcacaca

SEQ ID NO: 456986 - DNA, 54 bp, Artificial
  Synthetic oligonucleotide
tcacgacacgcgcggcggtgtgtacccctgggagggtaggtaccggtaccacta

SEQ ID NO: 456987 - DNA, 56 bp, Artificial
  Synthetic oligonucleotide
tcacgacacgcgcggcggtgtgtacccctgggagggtaggttagctacgccggagc

SEQ ID NO: 456988 - DNA, 57 bp, Artificial
  Synthetic oligonucleotide
tcacgacacgcgcggcggtgtgtacccctgggagggtcgaaaccactacgctacgca

SEQ ID NO: 456989 - DNA, 55 bp, Artificial
  Synthetic oligonucleotide
tcacgaccaatcaattgacaatacacagtagaatacaagaactcaactgctctga

SEQ ID NO: 456990 - DNA, 60 bp, Artificial
  Synthetic oligonucleotide
tcacgacccgagtacatgcgaagagcattcgcgatgcaggcgtgcgcaaactaaatgagg

SEQ ID NO: 456991 - DNA, 60 bp, Artificial
  Synthetic oligonucleotide
tcacgacgcgctgggttgcagcaaaacgcgatagtgctctgagactaacgccacgttcta

SEQ ID NO: 456992 - DNA, 56 bp, Artificial
  Synthetic oligonucleotide
tcacgacgggtttgcacgtgttcccattaaggacgaatcaaccgacagcggggata

SEQ ID NO: 456993 - DNA, 55 bp, Artificial
  Synthetic oligonucleotide
tcacgacgtaaagggttgctggttcacgcccctggcgaacgtttcgaggatctaa

SEQ ID NO: 456994 - DNA, 60 bp, Artificial
  Synthetic oligonucleotide
tcacgactgaagcgaatggcacgcaaacagcaacggttcttatgcgtttaaagcacgaac

SEQ ID NO: 456995 - DNA, 55 bp, Artificial
  Synthetic oligonucleotide
tcacgagaacgtaatcgttgcactcgtcattaaaccccggaacgaggtcccagcc

SEQ ID NO: 456996 - DNA, 55 bp, Artificial
  Synthetic oligonucleotide
tcacgagcagtgtttcagagtcgacaatggtaatgccagtcaatgacagtggtta

SEQ ID NO: 456997 - DNA, 51 bp, Artificial
  Synthetic oligonucleotide
tcacgagcatcaaggctgtgtacaactttgccacttgcggggtatttgcac

SEQ ID NO: 456998 - DNA, 59 bp, Artificial
  Synthetic oligonucleotide
tcacgagccgcgtgattaattgggtttgtcactgggatccagtctatcagtaaggggta

SEQ ID NO: 456999 - DNA, 58 bp, Artificial
  Synthetic oligonucleotide
tcacgagccttggaaaacaggccacctcctgggtcacaggccattggtggggattgcg

SEQ ID NO: 457000 - DNA, 51 bp, Artificial
  Synthetic oligonucleotide
tcacgaggctggcatacgcgcatacactgtgcgcgaggcccagggtatgag

SEQ ID NO: 457001 - DNA, 57 bp, Artificial
  Synthetic oligonucleotide
tcacgagggtgtacaagcaggagtggatagattctatagaacctgcaagctggtcgg

SEQ ID NO: 457002 - DNA, 55 bp, Artificial
  Synthetic oligonucleotide
tcacgagtgtataattaaaaacgtcgaaattgtgcaccatcttgcccgattcaca

SEQ ID NO: 457003 - DNA, 56 bp, Artificial
  Synthetic oligonucleotide
tcacgatagcatagttgccaccgaccctgtggatatgtcccttgtctcccgtgcga

SEQ ID NO: 457004 - DNA, 59 bp, Artificial
  Synthetic oligonucleotide
tcacgatagccccaatgtgtgccgagtacaatgggttacgtttagcagggcaccagggc

SEQ ID NO: 457005 - DNA, 59 bp, Artificial
  Synthetic oligonucleotide
tcacgataggcaccttgaagtgatacccgaagagctgttgtgtgggcgggttctccatt

SEQ ID NO: 457006 - DNA, 55 bp, Artificial
  Synthetic oligonucleotide
tcacgatatccagcgtgaacattgtagagatcgagttcaaaatagcagccagggt

SEQ ID NO: 457007 - DNA, 51 bp, Artificial
  Synthetic oligonucleotide
tcacgatggacagcaggctcgtcgattcgggttcgccttcgaactcgatcg

SEQ ID NO: 457008 - DNA, 60 bp, Artificial
  Synthetic oligonucleotide
tcacgatttcgtcacttgcatcggatgttagaacgacgctggattcgaagcaggattatt

SEQ ID NO: 457009 - DNA, 60 bp, Artificial
  Synthetic oligonucleotide
tcacgcaaaatgtgcctgtgcgaccgattccgtcatcgcaatgtacgacaactggagcag

SEQ ID NO: 457010 - DNA, 57 bp, Artificial
  Synthetic oligonucleotide
tcacgcacgtaagtctatgcggcgccccgtctgagcagggtttttgggccgtgtacc

SEQ ID NO: 457011 - DNA, 57 bp, Artificial
  Synthetic oligonucleotide
tcacgcacttttccggtggtccggacccagaccaccgtcactccattcagcttcttc

SEQ ID NO: 457012 - DNA, 60 bp, Artificial
  Synthetic oligonucleotide
tcacgcagatgcgtgaactgccaacactggactcagcgacattcaatgtcgaatgctttc

SEQ ID NO: 457013 - DNA, 60 bp, Artificial
  Synthetic oligonucleotide
tcacgcagggatcggctatcacctttcctctccaaaccgtcttctattacactatctgcc

SEQ ID NO: 457014 - DNA, 60 bp, Artificial
  Synthetic oligonucleotide
tcacgcatctctaacaaatattcattcacgacaaaaataataagggttgatggggatgac

SEQ ID NO: 457015 - DNA, 55 bp, Artificial
  Synthetic oligonucleotide
tcacgcatgatgacgggaaggccttctattctgagcttaaaagtcctacaaagcg

SEQ ID NO: 457016 - DNA, 60 bp, Artificial
  Synthetic oligonucleotide
tcacgccgggtatgccagctgcgtacggttatatgacggcactttagctctcatgacctg

SEQ ID NO: 457017 - DNA, 57 bp, Artificial
  Synthetic oligonucleotide
tcacgcctgattgacctgtaaacggcttaaccttacgcgcactttcatagatagctc

SEQ ID NO: 457018 - DNA, 57 bp, Artificial
  Synthetic oligonucleotide
tcacgccttaaggaagtttgcgacattgggaaacctggaccgtcagtcaacatcaag

SEQ ID NO: 457019 - DNA, 56 bp, Artificial
  Synthetic oligonucleotide
tcacgccttctagaccgtcttgttaaaatggtgggggacccagacatcagtggtcc

SEQ ID NO: 457020 - DNA, 55 bp, Artificial
  Synthetic oligonucleotide
tcacgcggatgctgcgcacaccgatgtacgtcaagaggacgaacccgttcctcga

SEQ ID NO: 457021 - DNA, 55 bp, Artificial
  Synthetic oligonucleotide
tcacgcgggtgccaagggtgcgaactctgtcggtacacacgcgtcaccaatgacc

SEQ ID NO: 457022 - DNA, 55 bp, Artificial
  Synthetic oligonucleotide
tcacgcggtgctattctgcgccggcagtacaacctgtccacgtctccgcttacgt

SEQ ID NO: 457023 - DNA, 59 bp, Artificial
  Synthetic oligonucleotide
tcacgcgttgtgtcaagaagcgggaaacccagatctgggggagagaacactagagagct

SEQ ID NO: 457024 - DNA, 55 bp, Artificial
  Synthetic oligonucleotide
tcacgctaaccggctacgcaaaagatcaagttgtatgccctcattccggcggtgc

SEQ ID NO: 457025 - DNA, 55 bp, Artificial
  Synthetic oligonucleotide
tcacgctcagacggtggatcctcttcgcttcttcaaaaactaccttttacctaaa

SEQ ID NO: 457026 - DNA, 60 bp, Artificial
  Synthetic oligonucleotide
tcacgctcctggcgaacgctttgaggatctgaccatatttgccactaacaccgcccttcc

SEQ ID NO: 457027 - DNA, 56 bp, Artificial
  Synthetic oligonucleotide
tcacgctcgcaacggcgtggtaggactggtaggggtaggagaggcatctacaggtt

SEQ ID NO: 457028 - DNA, 59 bp, Artificial
  Synthetic oligonucleotide
tcacgctgagattctatataattaaaggcattgggtggattaactaactgagaacccat

SEQ ID NO: 457029 - DNA, 60 bp, Artificial
  Synthetic oligonucleotide
tcacgctgatacagattcgaaatcccttggcactatatgtccctataggttggaatgggt

SEQ ID NO: 457030 - DNA, 60 bp, Artificial
  Synthetic oligonucleotide
tcacgctggcattttcctaaagggacaggaacacgctgtgtttgcatgtgtcacacacaa

SEQ ID NO: 457031 - DNA, 52 bp, Artificial
  Synthetic oligonucleotide
tcacgctgttggattatgaagatactcgttcatatgaggtgactctagataa

SEQ ID NO: 457032 - DNA, 58 bp, Artificial
  Synthetic oligonucleotide
tcacgcttaatggagaccaagtttaaggaacaaggaaatgagcaacgcaacatttgga

SEQ ID NO: 457033 - DNA, 54 bp, Artificial
  Synthetic oligonucleotide
tcacggaaccacgtttctaaaggggacgatgatgtttgacggggcaatgttatt

SEQ ID NO: 457034 - DNA, 53 bp, Artificial
  Synthetic oligonucleotide
tcacggacgtgttcaagtggggcacccatacggacgttggtccagggttcccg

SEQ ID NO: 457035 - DNA, 55 bp, Artificial
  Synthetic oligonucleotide
tcacggatctcgttaattcatatcttcgtgcagtgaagacacccgaggatttaac

SEQ ID NO: 457036 - DNA, 55 bp, Artificial
  Synthetic oligonucleotide
tcacggatttgtcggacacatcatccgaaagcaccacgccttccacggaacacga

SEQ ID NO: 457037 - DNA, 59 bp, Artificial
  Synthetic oligonucleotide
tcacggcatacaccttcctcgtaactattggtgccgtgaaagaacctgagacatctaac

SEQ ID NO: 457038 - DNA, 55 bp, Artificial
  Synthetic oligonucleotide
tcacggccccacctggtcccgctaacattgtcgacgagtacccccttgttgattg

SEQ ID NO: 457039 - DNA, 60 bp, Artificial
  Synthetic oligonucleotide
tcacggccctcgttacggcgtcttgcaagggtggtggagtgttgtgtgatggctggtgaa

SEQ ID NO: 457040 - DNA, 53 bp, Artificial
  Synthetic oligonucleotide
tcacggcctctgtgcgcctccagggcgcgagaacccgccgccagcggggagtt

SEQ ID NO: 457041 - DNA, 54 bp, Artificial
  Synthetic oligonucleotide
tcacggcgagcgtgtctgagaggttaaatagttaatgggggtgacggggaaaaa

SEQ ID NO: 457042 - DNA, 56 bp, Artificial
  Synthetic oligonucleotide
tcacggcggcgaaagtgtcctttgtggactacgttcaaggaccctgatcagggtaa

SEQ ID NO: 457043 - DNA, 57 bp, Artificial
  Synthetic oligonucleotide
tcacggcgggtcttcacgtcctctgcgacggggaacacgcctttccttggacgcagc

SEQ ID NO: 457044 - DNA, 57 bp, Artificial
  Synthetic oligonucleotide
tcacggctaagaaagacccggctccacgggtcatccagccgagggacccacgatata

SEQ ID NO: 457045 - DNA, 60 bp, Artificial
  Synthetic oligonucleotide
tcacggctatcgtctcgaccctacactatcagggtaagatgagaaccacgaacttatgta

SEQ ID NO: 457046 - DNA, 55 bp, Artificial
  Synthetic oligonucleotide
tcacggctatctatcgtacccgccggccagacagcagctgtgctatgcggacggt

SEQ ID NO: 457047 - DNA, 56 bp, Artificial
  Synthetic oligonucleotide
tcacggctgccccggagccatcacctatgccttatgtcccttacccccggtctacc

SEQ ID NO: 457048 - DNA, 60 bp, Artificial
  Synthetic oligonucleotide
tcacggcttcttgttggcgctatatgatacgtcgcccgtggctgctttggccccactgtt

SEQ ID NO: 457049 - DNA, 59 bp, Artificial
  Synthetic oligonucleotide
tcacgggagattcctgctggctacacgtggaacctacgctgttctgtaaatatgcgtac

SEQ ID NO: 457050 - DNA, 59 bp, Artificial
  Synthetic oligonucleotide
tcacgggatgaactacaactgctctctgcctctggcgttcgatggtagctgctctggta

SEQ ID NO: 457051 - DNA, 60 bp, Artificial
  Synthetic oligonucleotide
tcacgggctcagggtcatcgaatatctcgagatcattatcatgtgcaccatcttcactat

SEQ ID NO: 457052 - DNA, 59 bp, Artificial
  Synthetic oligonucleotide
tcacggggtgggggcacgatggtcgtttgacccagctacagttgcgaaagtgattcaga

SEQ ID NO: 457053 - DNA, 60 bp, Artificial
  Synthetic oligonucleotide
tcacgggtgccagtagaggggttgtcaccctagatcacaatgttagagtcagaggcatta

SEQ ID NO: 457054 - DNA, 60 bp, Artificial
  Synthetic oligonucleotide
tcacgggtggtcaatatgcgagtaatgaacatgctttggtcaagaagtttgtcagagtta

SEQ ID NO: 457055 - DNA, 58 bp, Artificial
  Synthetic oligonucleotide
tcacgggttctgtggtgcagaagatcttacaaatgtgagaaatccgttgagggtttcc

SEQ ID NO: 457056 - DNA, 59 bp, Artificial
  Synthetic oligonucleotide
tcacggtaacttggccataacatcttcattgaaagaccgttattatattcgccatgtgt

SEQ ID NO: 457057 - DNA, 55 bp, Artificial
  Synthetic oligonucleotide
tcacggtattttggtcgtagagttggcacccgtgtatacgggatgcctttcggtg

SEQ ID NO: 457058 - DNA, 52 bp, Artificial
  Synthetic oligonucleotide
tcacggtcatactacgcagaattagcggataaacattgccgtgtttaccagc

SEQ ID NO: 457059 - DNA, 60 bp, Artificial
  Synthetic oligonucleotide
tcacggtctggggcattaagcaactccagacaagagtcctggcgatggaaagatacctaa

SEQ ID NO: 457060 - DNA, 59 bp, Artificial
  Synthetic oligonucleotide
tcacggtgagattctatgtaattaaatgcgtttggtggattaactaactgtgattccat

SEQ ID NO: 457061 - DNA, 53 bp, Artificial
  Synthetic oligonucleotide
tcacggttcggagtccgtgtaaaactagtaggtcccgagtctgccgaatcccg

SEQ ID NO: 457062 - DNA, 54 bp, Artificial
  Synthetic oligonucleotide
tcacggtttgtgaccctcagagctaaaccatggtccgcatctcaagatgtgtac

SEQ ID NO: 457063 - DNA, 50 bp, Artificial
  Synthetic oligonucleotide
tcacgtaagcctggcaatccagctagaaagagctatttaggcttgtcgcc

SEQ ID NO: 457064 - DNA, 55 bp, Artificial
  Synthetic oligonucleotide
tcacgtaatcattcttctaagcgtggaactttggttagacgcactgatgggaaac

SEQ ID NO: 457065 - DNA, 55 bp, Artificial
  Synthetic oligonucleotide
tcacgtacataaggttcgacttagagctcacttttgttatcacgagcacacagca

SEQ ID NO: 457066 - DNA, 52 bp, Artificial
  Synthetic oligonucleotide
tcacgtacccgcatggtgactgactacatcgagaatgtgatgtggcgggtta

SEQ ID NO: 457067 - DNA, 52 bp, Artificial
  Synthetic oligonucleotide
tcacgtagaagggggaggtatgggttccaccgcctgaggtattaccggccac

SEQ ID NO: 457068 - DNA, 55 bp, Artificial
  Synthetic oligonucleotide
tcacgtaggcacgcaggaggagcgcgaagtttacttctggggcaagctgcagggg

SEQ ID NO: 457069 - DNA, 60 bp, Artificial
  Synthetic oligonucleotide
tcacgtcaaccccttcagatagtcgataaaagtatgactgatacatatttcgatgagtat

SEQ ID NO: 457070 - DNA, 60 bp, Artificial
  Synthetic oligonucleotide
tcacgtcacaggaaggaaacgtcgccatgactaagtggaagatgtacatcgccggcgtcg

SEQ ID NO: 457071 - DNA, 58 bp, Artificial
  Synthetic oligonucleotide
tcacgtcacttctttggaatttgatcctttagatccagaagtcaatttaattagccaa

SEQ ID NO: 457072 - DNA, 55 bp, Artificial
  Synthetic oligonucleotide
tcacgtccagcccctccccagttctggtgaaccgggactccgggatgccttgcat

SEQ ID NO: 457073 - DNA, 58 bp, Artificial
  Synthetic oligonucleotide
tcacgtcctggcttaatccacgccttgtgaagcatcgaacttcaggagaggttacggg

SEQ ID NO: 457074 - DNA, 60 bp, Artificial
  Synthetic oligonucleotide
tcacgtctaatctcgctggacgaacatccactctggagacagatgttggaggaatccgcg

SEQ ID NO: 457075 - DNA, 55 bp, Artificial
  Synthetic oligonucleotide
tcacgtgaaataactggtgtaacgtcaatagaatgggcaatatacgttgacgacg

SEQ ID NO: 457076 - DNA, 60 bp, Artificial
  Synthetic oligonucleotide
tcacgtgaagataacctacaacgtgtgtttacagtggcctccattagaagcatgcttgtt

SEQ ID NO: 457077 - DNA, 55 bp, Artificial
  Synthetic oligonucleotide
tcacgtgacactgctgaaaccgataagagaggcgctcgctctactcgcatatctg

SEQ ID NO: 457078 - DNA, 60 bp, Artificial
  Synthetic oligonucleotide
tcacgtgacaggagacacgtcaccggaagtcacatgaccggaagtcacatgaccggaagc

SEQ ID NO: 457079 - DNA, 56 bp, Artificial
  Synthetic oligonucleotide
tcacgtgacgtacaaatggcaaccaaacatcaacaacgaacgtgacgtaaggaagg

SEQ ID NO: 457080 - DNA, 60 bp, Artificial
  Synthetic oligonucleotide
tcacgtgatataccagcgtacgatgttacctgaaccgaggctagatgatatcaacgagtt

SEQ ID NO: 457081 - DNA, 51 bp, Artificial
  Synthetic oligonucleotide
tcacgtgatctgtgggccctataaaagtgggcgtttcttgcgtgtttgctt

SEQ ID NO: 457082 - DNA, 51 bp, Artificial
  Synthetic oligonucleotide
tcacgtgcaaatttacgatttgagcacacccgcgcgcaccgagcgactgtt

SEQ ID NO: 457083 - DNA, 55 bp, Artificial
  Synthetic oligonucleotide
tcacgtgccagattcactggggcaatctatccaagatcgggattgtaggaacagg

SEQ ID NO: 457084 - DNA, 60 bp, Artificial
  Synthetic oligonucleotide
tcacgtgccgtcatcccccgtggcactagtgattggagcatgcccgaacccacaatgcga

SEQ ID NO: 457085 - DNA, 60 bp, Artificial
  Synthetic oligonucleotide
tcacgtgctgtgcgatgcctatcgcctcttgccgctcactgtgctgatagaacccttcgc

SEQ ID NO: 457086 - DNA, 60 bp, Artificial
  Synthetic oligonucleotide
tcacgtggcgctatcttgcgccggcagtataatctgtctacgtccccgctcacgtcatct

SEQ ID NO: 457087 - DNA, 55 bp, Artificial
  Synthetic oligonucleotide
tcacgtggcttagaatcgaatacttggactgacgtatttatgactacacctttag

SEQ ID NO: 457088 - DNA, 57 bp, Artificial
  Synthetic oligonucleotide
tcacgtggggcaacaacgagccgtataagtattggccgcagttatccacaaacggta

SEQ ID NO: 457089 - DNA, 60 bp, Artificial
  Synthetic oligonucleotide
tcacgtgtgcaaacgctttacgagtcgctctaattctgactgtttgagtgtcatccatca

SEQ ID NO: 457090 - DNA, 56 bp, Artificial
  Synthetic oligonucleotide
tcacgttacctgctggtaaagtggtgtgccagtattcgtactgaggatacggaacc

SEQ ID NO: 457091 - DNA, 60 bp, Artificial
  Synthetic oligonucleotide
tcacgttatgtcccacgtcatgaagaaaatggctattactccttatctgccactccactt

SEQ ID NO: 457092 - DNA, 59 bp, Artificial
  Synthetic oligonucleotide
tcacgttcaatcacatttcagtaatggtaattggggaagagtgccatttatagcgttta

SEQ ID NO: 457093 - DNA, 59 bp, Artificial
  Synthetic oligonucleotide
tcacgttccctaaattccgctgctttctataatcgagtctagatttgtcttagattaga

SEQ ID NO: 457094 - DNA, 55 bp, Artificial
  Synthetic oligonucleotide
tcacgttcctgtgtgagaactgacggttggatgaggaggaggccatatccgacga

SEQ ID NO: 457095 - DNA, 55 bp, Artificial
  Synthetic oligonucleotide
tcacgttcgaatgtgataacgcagtaccacaacgacttctcgtctgccccgactg

SEQ ID NO: 457096 - DNA, 60 bp, Artificial
  Synthetic oligonucleotide
tcacgttctccaactgaactgtttggcgatccaatctccagacaatatacgcgtaaggaa

SEQ ID NO: 457097 - DNA, 53 bp, Artificial
  Synthetic oligonucleotide
tcacgttctcggaaacccagacttcaagttcctcaggaacgttagtaaaagag

SEQ ID NO: 457098 - DNA, 55 bp, Artificial
  Synthetic oligonucleotide
tcacgttctgaaaatgcccaaaggtgatttaaattacgattttttcgaggtgata

SEQ ID NO: 457099 - DNA, 60 bp, Artificial
  Synthetic oligonucleotide
tcacgttgcagcaaaagagatttacaatactcaaggatgtaactctcaattgttcgctga

SEQ ID NO: 457100 - DNA, 60 bp, Artificial
  Synthetic oligonucleotide
tcacgttgctatgcttggccatcttgacacacaccgccagaaacacaaggacaatttgga

SEQ ID NO: 457101 - DNA, 54 bp, Artificial
  Synthetic oligonucleotide
tcacgttgggcaaggaacccctttgctggctatgtgcgggataatggattcccg

SEQ ID NO: 457102 - DNA, 56 bp, Artificial
  Synthetic oligonucleotide
tcacgtttacacttttcgtaaagatgtagggccgaaggccctaatgacgcgtgtca

SEQ ID NO: 457103 - DNA, 60 bp, Artificial
  Synthetic oligonucleotide
tcacgtttggtccatttacacaccggacagtggtctccacagcatggtgtcactacatgc

SEQ ID NO: 457104 - DNA, 59 bp, Artificial
  Synthetic oligonucleotide
tcacgtttgttgcacataattaattatacctacgtgtcactaacctcaaagtacagctg

SEQ ID NO: 457105 - DNA, 60 bp, Artificial
  Synthetic oligonucleotide
tcactaaaaaggtcagagacatctgtgtgccaaaacttgggaaatggccatcagtgatgg

SEQ ID NO: 457106 - DNA, 55 bp, Artificial
  Synthetic oligonucleotide
tcactaaagctgagatggcgcttgaattcaatcgtgagttccttgacaagttgcg

SEQ ID NO: 457107 - DNA, 60 bp, Artificial
  Synthetic oligonucleotide
tcactaaaggtcaagcacttctgtctccccggtcaaagttgatatgctccaacagggcaa

SEQ ID NO: 457108 - DNA, 59 bp, Artificial
  Synthetic oligonucleotide
tcactaagcacacgtagtggggcgcgtgttggtgctagggtacatttttatactgatct

SEQ ID NO: 457109 - DNA, 58 bp, Artificial
  Synthetic oligonucleotide
tcactaagctcgtgagagatgtagttgcagacaaacttggaatgtggcccacaatgcg

SEQ ID NO: 457110 - DNA, 57 bp, Artificial
  Synthetic oligonucleotide
tcactaatgaaacagtatattgcttgctctaacgggggtgttaagttataccaacga

SEQ ID NO: 457111 - DNA, 60 bp, Artificial
  Synthetic oligonucleotide
tcactaatgtccaagacttacaagatttcgttaccaaccagctcaagtctgatgttgatg

SEQ ID NO: 457112 - DNA, 56 bp, Artificial
  Synthetic oligonucleotide
tcactaatgtgaaaagggagtgaccgaaaacggtgcaaccgaaaacggtgcatata

SEQ ID NO: 457113 - DNA, 59 bp, Artificial
  Synthetic oligonucleotide
tcactaattaagcacaactcatgtgtggtcaccacgcaaaatggaaagttcacaggtct

SEQ ID NO: 457114 - DNA, 60 bp, Artificial
  Synthetic oligonucleotide
tcactacacgagaatgaaatacaactatatctgatctcactaggcataccgaaaatagac

SEQ ID NO: 457115 - DNA, 60 bp, Artificial
  Synthetic oligonucleotide
tcactacagcacaagccatggaggtggatggctctggtgagtccaccacactccccgctg

SEQ ID NO: 457116 - DNA, 54 bp, Artificial
  Synthetic oligonucleotide
tcactacatcccggaaaaccactacgccgggtcttacaaccagcccctatcggc

SEQ ID NO: 457117 - DNA, 51 bp, Artificial
  Synthetic oligonucleotide
tcactacattcagcaggtgttacattgtccacacagttcaccgattttgtg

SEQ ID NO: 457118 - DNA, 51 bp, Artificial
  Synthetic oligonucleotide
tcactaccacggttgagaactacggaggagagactcagacagcccgacggc

SEQ ID NO: 457119 - DNA, 56 bp, Artificial
  Synthetic oligonucleotide
tcactaccaggacagctgttcctggaaaaactgtggcccattactttttaaggcgc

SEQ ID NO: 457120 - DNA, 52 bp, Artificial
  Synthetic oligonucleotide
tcactacccaaaggtctataaaacctacttcgaaaaggttgaaagattgaaa

SEQ ID NO: 457121 - DNA, 60 bp, Artificial
  Synthetic oligonucleotide
tcactacccccagatccagatcactttgatggctataaacagcaggccgtagtgattatg

SEQ ID NO: 457122 - DNA, 60 bp, Artificial
  Synthetic oligonucleotide
tcactacccctcacttccagggatacatggagttttctacgctcgtcagattgtctgccc

SEQ ID NO: 457123 - DNA, 58 bp, Artificial
  Synthetic oligonucleotide
tcactacctggaactccccactgaacacaaaggcgtgtacggcagtcttatggattcg

SEQ ID NO: 457124 - DNA, 55 bp, Artificial
  Synthetic oligonucleotide
tcactacggtcgcgtctgactcttccaacatacaggtaccctttagagcttgaca

SEQ ID NO: 457125 - DNA, 51 bp, Artificial
  Synthetic oligonucleotide
tcactacgttcgaagaactaggaggagtctgcagtacatctgactatctaa

SEQ ID NO: 457126 - DNA, 53 bp, Artificial
  Synthetic oligonucleotide
tcactagagccgaagcgtgtttgcaagtgtgggtcccccccctcaaagttcgg

SEQ ID NO: 457127 - DNA, 60 bp, Artificial
  Synthetic oligonucleotide
tcactagaggacagcatatcacaaaaaacgtttgatttcagatccttgttcttgaacact

SEQ ID NO: 457128 - DNA, 60 bp, Artificial
  Synthetic oligonucleotide
tcactagagttgctgaaagggctactgctatgttagagtatgccgcttatgagaaacagt

SEQ ID NO: 457129 - DNA, 60 bp, Artificial
  Synthetic oligonucleotide
tcactagcaagttggattcaaagtgagttcaacaaagcttgtgaattgactgactcaagt

SEQ ID NO: 457130 - DNA, 54 bp, Artificial
  Synthetic oligonucleotide
tcactaggaccactggtttctttaggccctaccaagactggaacaccaaacctg

SEQ ID NO: 457131 - DNA, 60 bp, Artificial
  Synthetic oligonucleotide
tcactagggctgcaggatgagcacttcaacggatatgacctgtttagagagatctctact

SEQ ID NO: 457132 - DNA, 59 bp, Artificial
  Synthetic oligonucleotide
tcactagtgtgacacactttgagaaagttaagattctgcccagagatcaatggactcag

SEQ ID NO: 457133 - DNA, 51 bp, Artificial
  Synthetic oligonucleotide
tcactataaacgctgtagaattcacagaagtggcagacctagcctcagcct

SEQ ID NO: 457134 - DNA, 60 bp, Artificial
  Synthetic oligonucleotide
tcactatacttatgagtattttcacccagacatagttctcatgaaaggctgtgcagtgga

SEQ ID NO: 457135 - DNA, 60 bp, Artificial
  Synthetic oligonucleotide
tcactataggaggtgtttcgtgcattcagacgagttataagtacctcatcattcaaaata

SEQ ID NO: 457136 - DNA, 60 bp, Artificial
  Synthetic oligonucleotide
tcactatagggcgtccaaggttttcagagacagatgctggtcaaattagagttagcaggc

SEQ ID NO: 457137 - DNA, 56 bp, Artificial
  Synthetic oligonucleotide
tcactatcatggtcccctccactaaatcatttccaccaatcatatgtcacgctgaa

SEQ ID NO: 457138 - DNA, 59 bp, Artificial
  Synthetic oligonucleotide
tcactatcccggaacctgagtgcccttttaaagctaagtatgctataatggtgcattcc

SEQ ID NO: 457139 - DNA, 60 bp, Artificial
  Synthetic oligonucleotide
tcactatctggttctctcctcctatctcactccatagaaccgattactcttcccacctgg

SEQ ID NO: 457140 - DNA, 55 bp, Artificial
  Synthetic oligonucleotide
tcactatctgtacggcaaggctggtgaagtatactctcatgatatacaaccactg

SEQ ID NO: 457141 - DNA, 60 bp, Artificial
  Synthetic oligonucleotide
tcactatgacagcaaccacccgaaaataagctcagaagtacacatcccactaagggatgc

SEQ ID NO: 457142 - DNA, 60 bp, Artificial
  Synthetic oligonucleotide
tcactatgcagaggcttttggctaaccattcaaacgagctcccatctctctgtatgctaa

SEQ ID NO: 457143 - DNA, 58 bp, Artificial
  Synthetic oligonucleotide
tcactattcctgtgtgcatcttacacagccaaccatacttgtcccaaaccttgtcttc

SEQ ID NO: 457144 - DNA, 53 bp, Artificial
  Synthetic oligonucleotide
tcactattggagaatgtcccaaatatgtcaagagcaccaagttaagaatggct

SEQ ID NO: 457145 - DNA, 59 bp, Artificial
  Synthetic oligonucleotide
tcactatttctggctactgctgctgactctgacgaatgttcagaaatcatcgcctggcc

SEQ ID NO: 457146 - DNA, 55 bp, Artificial
  Synthetic oligonucleotide
tcactcaaacagtgcacaagacagatcctagaggtcacaatactgggtctcagag

SEQ ID NO: 457147 - DNA, 57 bp, Artificial
  Synthetic oligonucleotide
tcactcaaatatacacggaaggtgtgtattcaattaggaacagaacaaacttgtaaa

SEQ ID NO: 457148 - DNA, 60 bp, Artificial
  Synthetic oligonucleotide
tcactcacattgacctcacatgcagaattgatgtaatacagcacaccatctgtgcaagag

SEQ ID NO: 457149 - DNA, 60 bp, Artificial
  Synthetic oligonucleotide
tcactcaccgagtgacatcaacgttatggcgtctcaaggcaccaaacgatcttatgaaca

SEQ ID NO: 457150 - DNA, 58 bp, Artificial
  Synthetic oligonucleotide
tcactcaccgagttggcaagcgtttttgcattaagtctatctatgtttcaggtaaagt

SEQ ID NO: 457151 - DNA, 60 bp, Artificial
  Synthetic oligonucleotide
tcactcagaagcagtgtttgtgaaaatttgtgcgtgagccttgtgccgcacttgcgtgag

SEQ ID NO: 457152 - DNA, 60 bp, Artificial
  Synthetic oligonucleotide
tcactcagatccataaccaagcagtcatccacgactgtttgactcagttcgtccagtact

SEQ ID NO: 457153 - DNA, 51 bp, Artificial
  Synthetic oligonucleotide
tcactcagatgataaccacacttcaataacaatgattcaagacaaattccc

SEQ ID NO: 457154 - DNA, 53 bp, Artificial
  Synthetic oligonucleotide
tcactccaagaaaggtacccaaaagtcccccctaggcgttgcctcagggacga

SEQ ID NO: 457155 - DNA, 60 bp, Artificial
  Synthetic oligonucleotide
tcactccaatcccggctgcgtctcagttggacttgtccggctggttcgttgctggataca

SEQ ID NO: 457156 - DNA, 60 bp, Artificial
  Synthetic oligonucleotide
tcactccacaagatactcaaggattacacacaccgcaacaccgatctgataggaacaaaa

SEQ ID NO: 457157 - DNA, 55 bp, Artificial
  Synthetic oligonucleotide
tcactccattgcgggactgggcccacgtaagcctacgagaccttgcggtggcagt

SEQ ID NO: 457158 - DNA, 55 bp, Artificial
  Synthetic oligonucleotide
tcactccgctggatctcccagcaatcattcaacgactccatggcttgagcgcgtt

SEQ ID NO: 457159 - DNA, 56 bp, Artificial
  Synthetic oligonucleotide
tcactcctctacgaggcctggtgtcgagcctatcaccgttcccctcgggacgttga

SEQ ID NO: 457160 - DNA, 59 bp, Artificial
  Synthetic oligonucleotide
tcactcctggcgctaaaatagtctccactcggaatggctctaaaatcccagcctccgag

SEQ ID NO: 457161 - DNA, 60 bp, Artificial
  Synthetic oligonucleotide
tcactcctgtgcgtcccttactttgtgagagcgcacgcgctagtcaaactatgcagccta

SEQ ID NO: 457162 - DNA, 55 bp, Artificial
  Synthetic oligonucleotide
tcactccttcgggtaatggggtgcaggttagcagcagtagctttgtgaatcctct

SEQ ID NO: 457163 - DNA, 60 bp, Artificial
  Synthetic oligonucleotide
tcactcgacgcacgttcctgctatagcctcttccctgttagtcagaatctgacttacatc

SEQ ID NO: 457164 - DNA, 60 bp, Artificial
  Synthetic oligonucleotide
tcactcgagagcgctccagggacttttgtcaccgttgatggagtaaatgttgcggctgga

SEQ ID NO: 457165 - DNA, 60 bp, Artificial
  Synthetic oligonucleotide
tcactcgattatgacgggcgaatcctatggtgagtcggtcaaacaagcggtgctgctgaa

SEQ ID NO: 457166 - DNA, 60 bp, Artificial
  Synthetic oligonucleotide
tcactcgcaacctggcagcaggaggggctttgtggtgcctgggtatcggtatcttgggcc

SEQ ID NO: 457167 - DNA, 53 bp, Artificial
  Synthetic oligonucleotide
tcactcgctgaatcaattaatcatgatcttgggctcgcacgcgttggcggtaa

SEQ ID NO: 457168 - DNA, 60 bp, Artificial
  Synthetic oligonucleotide
tcactcggaatgtcaataggatctccgtcgctatacccatccttatgatttcttgcgaat

SEQ ID NO: 457169 - DNA, 60 bp, Artificial
  Synthetic oligonucleotide
tcactcggacacccccagaccagctgacccttcaacagtatcatgtgattccccaagtaa

SEQ ID NO: 457170 - DNA, 57 bp, Artificial
  Synthetic oligonucleotide
tcactcggaggagagtacgtggacactgcagacagaacacgcacgcctgaccctgaa

SEQ ID NO: 457171 - DNA, 60 bp, Artificial
  Synthetic oligonucleotide
tcactcgggacagctttccgttcatgaaagacttgctcaaggacatcagtgacatgcatg

SEQ ID NO: 457172 - DNA, 55 bp, Artificial
  Synthetic oligonucleotide
tcactcgggttgaacttcatcgggttgtcgcaggacggcaggtggatcctgcgcc

SEQ ID NO: 457173 - DNA, 60 bp, Artificial
  Synthetic oligonucleotide
tcactctaaccacggctctatgcacttccgtaaggcaagcgccaaaggcatccctgtgca

SEQ ID NO: 457174 - DNA, 55 bp, Artificial
  Synthetic oligonucleotide
tcactctaagaaaagacaagacatccttgatctgtgggtctacaacacacagggc

SEQ ID NO: 457175 - DNA, 59 bp, Artificial
  Synthetic oligonucleotide
tcactctatttctagcggtcttgggtttgtggaggcacttctgcacttcctacccttga

SEQ ID NO: 457176 - DNA, 60 bp, Artificial
  Synthetic oligonucleotide
tcactctgaacttcgtcgctacaagaactggcgtcgcattctctgagatcgcaacgtaat

SEQ ID NO: 457177 - DNA, 59 bp, Artificial
  Synthetic oligonucleotide
tcactctgcccgttccaagtttggatacggtgcgaaggacgtccgaggccgcactagca

SEQ ID NO: 457178 - DNA, 59 bp, Artificial
  Synthetic oligonucleotide
tcactctgtacccatctggaccattcctagtagcttaccaagttggcggtaacacaggc

SEQ ID NO: 457179 - DNA, 54 bp, Artificial
  Synthetic oligonucleotide
tcactcttgaagcccagttataaagtcgaactatcactcttcggtagctccgat

SEQ ID NO: 457180 - DNA, 55 bp, Artificial
  Synthetic oligonucleotide
tcactgaaaacgaaacttcaacgccgcccttctggcaggcttggcccggggccaa

SEQ ID NO: 457181 - DNA, 60 bp, Artificial
  Synthetic oligonucleotide
tcactgaacacattaagatatttgttgctcgagggttcattatgcaagacgtcttcctag

SEQ ID NO: 457182 - DNA, 55 bp, Artificial
  Synthetic oligonucleotide
tcactgaactacagactgtactaggagagattcaatgggtctcaaaaggaacccc

SEQ ID NO: 457183 - DNA, 60 bp, Artificial
  Synthetic oligonucleotide
tcactgaaggcaacatgcaccactcaccacgactctccagacgctgacctcatagaagcc

SEQ ID NO: 457184 - DNA, 60 bp, Artificial
  Synthetic oligonucleotide
tcactgacactctggaaagaatactatctatccaggctcaggtatgggtcacagtagcaa

SEQ ID NO: 457185 - DNA, 60 bp, Artificial
  Synthetic oligonucleotide
tcactgagaaatgcttatgcacctcgtggtttatggaggggaccttccaccagagccaat

SEQ ID NO: 457186 - DNA, 60 bp, Artificial
  Synthetic oligonucleotide
tcactgagagcgacatccgtgttgaggagtcaatctaccaatgttgtgacttggcccccg

SEQ ID NO: 457187 - DNA, 55 bp, Artificial
  Synthetic oligonucleotide
tcactgagagtggtgccccaccgaccgacttgcaaaagatggtcatgggcaacac

SEQ ID NO: 457188 - DNA, 60 bp, Artificial
  Synthetic oligonucleotide
tcactgataatggtttaagatcagaggttcctattaatgcaaactcttctaacacagctg

SEQ ID NO: 457189 - DNA, 59 bp, Artificial
  Synthetic oligonucleotide
tcactgatacaatggactactttggtaagtccataatcgacgaggtgggatactgtaaa

SEQ ID NO: 457190 - DNA, 55 bp, Artificial
  Synthetic oligonucleotide
tcactgatgagaacgacatattcgaagctcttaacatgaaatccgcagttggagc

SEQ ID NO: 457191 - DNA, 60 bp, Artificial
  Synthetic oligonucleotide
tcactgattccttcagcaatactaactgaacagttattgtccaacgaacatatcggtaag

SEQ ID NO: 457192 - DNA, 57 bp, Artificial
  Synthetic oligonucleotide
tcactgattcgccattatttgcactggctaccgcctcatggtgctatatctccctgt

SEQ ID NO: 457193 - DNA, 59 bp, Artificial
  Synthetic oligonucleotide
tcactgattgattggctatcaatgttaatcattgtaggatatagttttaagttaaggtt

SEQ ID NO: 457194 - DNA, 60 bp, Artificial
  Synthetic oligonucleotide
tcactgcatttcatgagcacaatgatgcctcacctgccacaattcaatcactgcgaacgc

SEQ ID NO: 457195 - DNA, 60 bp, Artificial
  Synthetic oligonucleotide
tcactgcccaagaattagtagaatcgcaacatctaccggagttgtgtcctagcccgttga

SEQ ID NO: 457196 - DNA, 54 bp, Artificial
  Synthetic oligonucleotide
tcactgccgggctccccctgtcgtggtgtgtgaatcttccggaaaaggcgcatt

SEQ ID NO: 457197 - DNA, 60 bp, Artificial
  Synthetic oligonucleotide
tcactgcgcaaccagcagatatgcaggctggaattaaaaaatgctcagctgatgaaattg

SEQ ID NO: 457198 - DNA, 55 bp, Artificial
  Synthetic oligonucleotide
tcactgcgtcgtataactttcactgagatgtcgatgtcgaatcgaaaacttgact

SEQ ID NO: 457199 - DNA, 56 bp, Artificial
  Synthetic oligonucleotide
tcactgcgtgtcgcatttccacgccaacgagtcattctttctagggttcgatttgg

SEQ ID NO: 457200 - DNA, 55 bp, Artificial
  Synthetic oligonucleotide
tcactgctaaccaccagtatggacccgtccaggttggaataaacatagacggtcc

SEQ ID NO: 457201 - DNA, 58 bp, Artificial
  Synthetic oligonucleotide
tcactgctagctgtccaccggagcctagacctttctgtgtctaggcgggccatcagct

SEQ ID NO: 457202 - DNA, 60 bp, Artificial
  Synthetic oligonucleotide
tcactggagacaacaccaaatggaatgaaaatcagaaccctaggatgttcctggcaatga

SEQ ID NO: 457203 - DNA, 60 bp, Artificial
  Synthetic oligonucleotide
tcactggagcgtaatcgctgatcgagcacggttgtgtcactatcatgacgatgtactcaa

SEQ ID NO: 457204 - DNA, 60 bp, Artificial
  Synthetic oligonucleotide
tcactggattaacccctctgaaagacctgctctggcgcgagctaaagcgcaattgtcacc

SEQ ID NO: 457205 - DNA, 60 bp, Artificial
  Synthetic oligonucleotide
tcactggcactcttacgacctcctatcggcgaaagggcttgcttgcgtttaggctggcga

SEQ ID NO: 457206 - DNA, 58 bp, Artificial
  Synthetic oligonucleotide
tcactggcagaaccgactctgtttggtactgtccacctgaccctgaccacttcgacgg

SEQ ID NO: 457207 - DNA, 55 bp, Artificial
  Synthetic oligonucleotide
tcactggggaagaaatggccactaaggcagattacactcttgacgaggagagcag

SEQ ID NO: 457208 - DNA, 51 bp, Artificial
  Synthetic oligonucleotide
tcactgggtgccgcctttgggtccgggttcaccagtcagataggggaaaag

SEQ ID NO: 457209 - DNA, 52 bp, Artificial
  Synthetic oligonucleotide
tcactggtctcgaaagcgcacttaaggttggtgacgaaaattacagcgagtc

SEQ ID NO: 457210 - DNA, 55 bp, Artificial
  Synthetic oligonucleotide
tcactggtggttcctcctgcggtggttgtgtattcggccgggacaggccgtgcat

SEQ ID NO: 457211 - DNA, 59 bp, Artificial
  Synthetic oligonucleotide
tcactgtaagtaatccgtgtgctttcaaagttcaagatcgtgaaacgacaactcacttc

SEQ ID NO: 457212 - DNA, 59 bp, Artificial
  Synthetic oligonucleotide
tcactgtagtaggtgtgtctcccatgtgaccactgtccccgaacacctcagcaaagccc

SEQ ID NO: 457213 - DNA, 60 bp, Artificial
  Synthetic oligonucleotide
tcactgtagttactcaccaatgtctactatcagaatggcactaaacaaagttgcttacag

SEQ ID NO: 457214 - DNA, 54 bp, Artificial
  Synthetic oligonucleotide
tcactgtcaatcttcattacggcttagacaaattttcggcgtcttttccgggtt

SEQ ID NO: 457215 - DNA, 59 bp, Artificial
  Synthetic oligonucleotide
tcactgtccaatagttttgtccatgtttccctggattcttaagatttgggatcgtgtca

SEQ ID NO: 457216 - DNA, 59 bp, Artificial
  Synthetic oligonucleotide
tcactgtgccatctagtcgtatgaaaactgcttataacttcacaaacggagctgtgcct

SEQ ID NO: 457217 - DNA, 58 bp, Artificial
  Synthetic oligonucleotide
tcactgtggactttcaggttccgggattggcgggaggttacgcgatgattcaggttca

SEQ ID NO: 457218 - DNA, 60 bp, Artificial
  Synthetic oligonucleotide
tcactgtgggatacaataacgacttcaaactacattttggcaaggtcagtagtgccagac

SEQ ID NO: 457219 - DNA, 55 bp, Artificial
  Synthetic oligonucleotide
tcactgttgcctggtgtagcccactcattggcagtagagatgtgtgttccaggta

SEQ ID NO: 457220 - DNA, 58 bp, Artificial
  Synthetic oligonucleotide
tcactgttgcttaggttactttgataagaatgaagatcctaaggatgttcaaaaatcc

SEQ ID NO: 457221 - DNA, 56 bp, Artificial
  Synthetic oligonucleotide
tcacttaaaaattacagacaactgtaaaaacacgcaaacagatataactaacacaa

SEQ ID NO: 457222 - DNA, 54 bp, Artificial
  Synthetic oligonucleotide
tcacttaaatcgaaccattggagtaatccaacgttaatactacgttaagtattg

SEQ ID NO: 457223 - DNA, 55 bp, Artificial
  Synthetic oligonucleotide
tcacttaacgttctagctaggtttacagatttggagttgcatgggttaactcctc

SEQ ID NO: 457224 - DNA, 50 bp, Artificial
  Synthetic oligonucleotide
tcacttaccacccttcgcgactcgcgccgacttgaaagacagcgtgcgag

SEQ ID NO: 457225 - DNA, 60 bp, Artificial
  Synthetic oligonucleotide
tcacttaccagttaagttaatttcacgatttgcatgtttcacattgacggcgaagtatga

SEQ ID NO: 457226 - DNA, 53 bp, Artificial
  Synthetic oligonucleotide
tcacttacgacgacgaacacctcaaatcagacagactccaatggatagacttt

SEQ ID NO: 457227 - DNA, 51 bp, Artificial
  Synthetic oligonucleotide
tcacttacgagaagtaggtggatttagctatctgcttcgcatactcgaccg

SEQ ID NO: 457228 - DNA, 60 bp, Artificial
  Synthetic oligonucleotide
tcacttacggagcatgccctaagtatgtcaaacagagcactctgaaactggcaacaggga

SEQ ID NO: 457229 - DNA, 55 bp, Artificial
  Synthetic oligonucleotide
tcacttacggataagtaatagccatctaatgtacaatcgcgaacccgaagtgttt

SEQ ID NO: 457230 - DNA, 55 bp, Artificial
  Synthetic oligonucleotide
tcacttagtcttgagtctagtggaaagtttgagttttctcagcctaccctgacga

SEQ ID NO: 457231 - DNA, 54 bp, Artificial
  Synthetic oligonucleotide
tcacttatcgaagcctcaagaggattagtccaaatggatatacttccaattatg

SEQ ID NO: 457232 - DNA, 52 bp, Artificial
  Synthetic oligonucleotide
tcacttatgggtggtcgactgtaccctttgacactccaaacctccacgtggg

SEQ ID NO: 457233 - DNA, 60 bp, Artificial
  Synthetic oligonucleotide
tcacttatgtgaatggcaatttgcacatcaagatcacggtccagtctaagtcagaagtag

SEQ ID NO: 457234 - DNA, 60 bp, Artificial
  Synthetic oligonucleotide
tcacttatttaaacttgctcgccaagtagtgcactccgcactatgtgggatccattagta

SEQ ID NO: 457235 - DNA, 58 bp, Artificial
  Synthetic oligonucleotide
tcacttcagtgactccagactgaacttgggcgggagccgaaggtgagtgaaaccaccg

SEQ ID NO: 457236 - DNA, 60 bp, Artificial
  Synthetic oligonucleotide
tcacttcatcgatgagcgaggagaatcgataatcgtagaatctggggacccgaatgccct

SEQ ID NO: 457237 - DNA, 56 bp, Artificial
  Synthetic oligonucleotide
tcacttccgattgaaagaccatttggtgtccgctgacgaaaaggtaatgtcgaatt

SEQ ID NO: 457238 - DNA, 58 bp, Artificial
  Synthetic oligonucleotide
tcacttcgcacaatctcgagtgaacaagaacaacccgtatataacggtccaggtatcc

SEQ ID NO: 457239 - DNA, 60 bp, Artificial
  Synthetic oligonucleotide
tcacttctcctacgagtttcttcatgcttgatgtcgtgttgatatcagatggcctatcga

SEQ ID NO: 457240 - DNA, 58 bp, Artificial
  Synthetic oligonucleotide
tcacttgaaagcgctccaggggctccagggacttttgtcaccgttgatggagtaaatg

SEQ ID NO: 457241 - DNA, 57 bp, Artificial
  Synthetic oligonucleotide
tcacttgaagaactgacgacccctggtccgggagtgggaggacctagccataaggca

SEQ ID NO: 457242 - DNA, 54 bp, Artificial
  Synthetic oligonucleotide
tcacttgacgaacgtcttccgagcccgcaaaatccatcatgtgccgctccaaga

SEQ ID NO: 457243 - DNA, 60 bp, Artificial
  Synthetic oligonucleotide
tcacttgagggtgttggcacactagatccaaatccatacgtggtattaagtgaattacta

SEQ ID NO: 457244 - DNA, 60 bp, Artificial
  Synthetic oligonucleotide
tcacttgatgaggggtcctatctccgttcaaagaactgctatattgaatgctctacaaca

SEQ ID NO: 457245 - DNA, 60 bp, Artificial
  Synthetic oligonucleotide
tcacttgatttactagttatggatgctgagactattggaaatagtatcaggattccgctc

SEQ ID NO: 457246 - DNA, 60 bp, Artificial
  Synthetic oligonucleotide
tcacttgccgctcttcacacccatcaatctaattcggcccctgtgttgagccccttgttg

SEQ ID NO: 457247 - DNA, 58 bp, Artificial
  Synthetic oligonucleotide
tcacttgcctggacaatcagcaagtggatctaccactcattacccctcaaagccatgc

SEQ ID NO: 457248 - DNA, 58 bp, Artificial
  Synthetic oligonucleotide
tcacttggtagcgcaatcttgtaatgctgtccgtgtttgctcatgtgtttaccttgcg

SEQ ID NO: 457249 - DNA, 60 bp, Artificial
  Synthetic oligonucleotide
tcacttgtggccgtatataatgagcgacttacctcgatgaggcacacttgagtccaagca

SEQ ID NO: 457250 - DNA, 60 bp, Artificial
  Synthetic oligonucleotide
tcacttgtggtttgtcggagctggcaacagtcagacttcctttgtagtgccttacaactc

SEQ ID NO: 457251 - DNA, 60 bp, Artificial
  Synthetic oligonucleotide
tcacttgtgttttaaatactcttaagaaacgccatgtctgaggatgtaagcgagtccaga

SEQ ID NO: 457252 - DNA, 60 bp, Artificial
  Synthetic oligonucleotide
tcactttatcgatgagagaggagaatcaataattgtagaatccggagacccgaatgctct

SEQ ID NO: 457253 - DNA, 60 bp, Artificial
  Synthetic oligonucleotide
tcactttcaacgtgacacctaacgaaacatccactgcaatggttgcgaggtaacatatgg

SEQ ID NO: 457254 - DNA, 60 bp, Artificial
  Synthetic oligonucleotide
tcactttcaggccgagattcattccgacaatgaaatatatagattcggcatacaaactgc

SEQ ID NO: 457255 - DNA, 54 bp, Artificial
  Synthetic oligonucleotide
tcactttcccaaaatacccctgtctctgtgtctgttaggcgcgtgcaattgctc

SEQ ID NO: 457256 - DNA, 51 bp, Artificial
  Synthetic oligonucleotide
tcactttcccgcccgggtatttgccttcatgaaccatttgttgcatgttgg

SEQ ID NO: 457257 - DNA, 59 bp, Artificial
  Synthetic oligonucleotide
tcactttcgtgtaacgaaatgactgttacacgatctgtctgtagtttatgaaatggtta

SEQ ID NO: 457258 - DNA, 50 bp, Artificial
  Synthetic oligonucleotide
tcactttgtggtaatgacacataagcgtttctgtttgcagtcatgccagt

SEQ ID NO: 457259 - DNA, 60 bp, Artificial
  Synthetic oligonucleotide
tcactttgttcattcttactgtgaattagcgttcgtacctcattcgctggcatatattac

SEQ ID NO: 457260 - DNA, 59 bp, Artificial
  Synthetic oligonucleotide
tcacttttcgtccttgctattggtataactgtggtctccgcattattcgtgctaaagtc

SEQ ID NO: 457261 - DNA, 60 bp, Artificial
  Synthetic oligonucleotide
tcacttttgacccaattcctatacattattgtgctccagctggttatgcgattctaaagt

SEQ ID NO: 457262 - DNA, 54 bp, Artificial
  Synthetic oligonucleotide
tcacttttgggagagaaacggttttggagtatttggtgtctttcggagtgtgga

SEQ ID NO: 457263 - DNA, 55 bp, Artificial
  Synthetic oligonucleotide
tcagaaaagggaaagtggacgacaaacacagagactggtgcaccccagctcaacc

SEQ ID NO: 457264 - DNA, 60 bp, Artificial
  Synthetic oligonucleotide
tcagaaaagtggccgcccccgtgctgtcaacgctcttcccaatggcagctcccctcatag

SEQ ID NO: 457265 - DNA, 55 bp, Artificial
  Synthetic oligonucleotide
tcagaaaatacatacctgaaagagaagatgattaccctgaatgtaatttagccct

SEQ ID NO: 457266 - DNA, 57 bp, Artificial
  Synthetic oligonucleotide
tcagaaaattgcagtcagtacccaataagttgttgtttacttgtaaattgttgtgtg

SEQ ID NO: 457267 - DNA, 60 bp, Artificial
  Synthetic oligonucleotide
tcagaaacaagcgctctagcaaggctatgataaatcctagtcttttatgtgataaccaat

SEQ ID NO: 457268 - DNA, 59 bp, Artificial
  Synthetic oligonucleotide
tcagaaaccataatctaccatggctgatcctgcaggtaccaatggggaagagggtacgg

SEQ ID NO: 457269 - DNA, 55 bp, Artificial
  Synthetic oligonucleotide
tcagaaacccaaagtgcccactctgagacaagctaaagtgcagggcccagcattc

SEQ ID NO: 457270 - DNA, 60 bp, Artificial
  Synthetic oligonucleotide
tcagaaagctttctataaccctaggatagctagtaaggcaccacggcttatgcttactga

SEQ ID NO: 457271 - DNA, 59 bp, Artificial
  Synthetic oligonucleotide
tcagaaaggatctctgccttgataaaagaaaggggtacttcagttacacaaatgcatgt

SEQ ID NO: 457272 - DNA, 60 bp, Artificial
  Synthetic oligonucleotide
tcagaaaggcctaaacaagcctgagcttattcagtatgacgactcaattgttgatgttga

SEQ ID NO: 457273 - DNA, 58 bp, Artificial
  Synthetic oligonucleotide
tcagaaagggctgttaccgtactctaggagtttttagatacaagagcaggtgctatgt

SEQ ID NO: 457274 - DNA, 51 bp, Artificial
  Synthetic oligonucleotide
tcagaaagtcttggtaaggttgttgttgattatgacttttcccttgatagt

SEQ ID NO: 457275 - DNA, 60 bp, Artificial
  Synthetic oligonucleotide
tcagaaatagcgtcgtcgatggaataacagttgggttgaagaagcaggtacgcttgtgga

SEQ ID NO: 457276 - DNA, 60 bp, Artificial
  Synthetic oligonucleotide
tcagaaatatgcattacagcctgaactgagaagacaaattcaagcctgtatcaggggaag

SEQ ID NO: 457277 - DNA, 52 bp, Artificial
  Synthetic oligonucleotide
tcagaaatcgactccatcgatttcgattatcttgctgatgccgtggaacatg

SEQ ID NO: 457278 - DNA, 60 bp, Artificial
  Synthetic oligonucleotide
tcagaaatgctgcaatctattcgaaaaattcttccctagcagttcatacaggaggccagt

SEQ ID NO: 457279 - DNA, 59 bp, Artificial
  Synthetic oligonucleotide
tcagaacaagccagagccaacagccccgccggcagagactttcgggtttggagaggaga

SEQ ID NO: 457280 - DNA, 60 bp, Artificial
  Synthetic oligonucleotide
tcagaacaatcacgtgtggtttatttcctgcacaagtcaaagcaaggaatatcatcagcc

SEQ ID NO: 457281 - DNA, 60 bp, Artificial
  Synthetic oligonucleotide
tcagaacaggaagtcatgtagtgtgagcgcaacgcccctagggtgtgatatgttatgctc

SEQ ID NO: 457282 - DNA, 60 bp, Artificial
  Synthetic oligonucleotide
tcagaacagtggaatataatgagctggcagtggagggtccatgtcctgagttagtgcgcc

SEQ ID NO: 457283 - DNA, 59 bp, Artificial
  Synthetic oligonucleotide
tcagaacatgtactaccattacttagggcgctcagggtacactctacacgtgcaatgca

SEQ ID NO: 457284 - DNA, 58 bp, Artificial
  Synthetic oligonucleotide
tcagaaccaatggaacttccaaaatcaagatgaagtggggtatggagatgaggcgctg

SEQ ID NO: 457285 - DNA, 60 bp, Artificial
  Synthetic oligonucleotide
tcagaaccggagctatcggcaggtcgtttgctacccgatccgctagagcttgccatggat

SEQ ID NO: 457286 - DNA, 52 bp, Artificial
  Synthetic oligonucleotide
tcagaaccgtctcggaaagaggaccccacatgttgtagcttcaaggcccaat

SEQ ID NO: 457287 - DNA, 60 bp, Artificial
  Synthetic oligonucleotide
tcagaacctttgcatgttccgagcttagaagacatccgttcagttgaagtgttcagtaga

SEQ ID NO: 457288 - DNA, 52 bp, Artificial
  Synthetic oligonucleotide
tcagaacgcgtattaacgacaaattccacatttaaagtttttgattcagagg

SEQ ID NO: 457289 - DNA, 51 bp, Artificial
  Synthetic oligonucleotide
tcagaacgtctcgtctttaattcaaattggtaaagtggtcacatcgtcttt

SEQ ID NO: 457290 - DNA, 58 bp, Artificial
  Synthetic oligonucleotide
tcagaactgtgttgttctgaacacttctcatgctcatcagtctatcaacttccttatt

SEQ ID NO: 457291 - DNA, 60 bp, Artificial
  Synthetic oligonucleotide
tcagaagaaaagtttgtcaccatgacagacttggttcctggcatcctcgaaaagcagcgg

SEQ ID NO: 457292 - DNA, 59 bp, Artificial
  Synthetic oligonucleotide
tcagaagaaatctgtcttctgaatatagttcacgcgccagaacctataaaaccaagttg

SEQ ID NO: 457293 - DNA, 60 bp, Artificial
  Synthetic oligonucleotide
tcagaagaagcaacatgtacagaatacattaacaatggtctacctccaatccagaacacg

SEQ ID NO: 457294 - DNA, 60 bp, Artificial
  Synthetic oligonucleotide
tcagaagacctgaagtcactctggaacgcaatagcagtactctggtgcgttcataacaga

SEQ ID NO: 457295 - DNA, 60 bp, Artificial
  Synthetic oligonucleotide
tcagaagaggttctgaaggtaaccgaggctatatcaacagggcttaagctgtcaggcgca

SEQ ID NO: 457296 - DNA, 55 bp, Artificial
  Synthetic oligonucleotide
tcagaagatcaatagtcgcatcaaacccattggagctggctgtagaaattgcaaa

SEQ ID NO: 457297 - DNA, 59 bp, Artificial
  Synthetic oligonucleotide
tcagaagcaaggagaagggcaatggacctaccaggtttatcagactgaacataagaacc

SEQ ID NO: 457298 - DNA, 60 bp, Artificial
  Synthetic oligonucleotide
tcagaagccaatgtctactagaatagctgaagcaacatccgctatagtatcaaaacaccc

SEQ ID NO: 457299 - DNA, 58 bp, Artificial
  Synthetic oligonucleotide
tcagaagccctgatgtccctcgtggttgtgagggtccgtgtaaggttcagtcgtacga

SEQ ID NO: 457300 - DNA, 60 bp, Artificial
  Synthetic oligonucleotide
tcagaagcggagacattaaatgatgcgaacccacgactacatagagtttatggattacct

SEQ ID NO: 457301 - DNA, 59 bp, Artificial
  Synthetic oligonucleotide
tcagaagctaggaggtgtggggggctagaatccctatactgtaaagaatggagttgtga

SEQ ID NO: 457302 - DNA, 56 bp, Artificial
  Synthetic oligonucleotide
tcagaagctatcgtggatagcttcaacgcccttagatcttctttgagatccgaggt

SEQ ID NO: 457303 - DNA, 60 bp, Artificial
  Synthetic oligonucleotide
tcagaaggccaccctagtgactggattgaccgagcgcacttattgtgccaatttggtggg

SEQ ID NO: 457304 - DNA, 57 bp, Artificial
  Synthetic oligonucleotide
tcagaaggcttgtccggtcgtctgagttgcgggaccgtctctttcctccaaagcgtc

SEQ ID NO: 457305 - DNA, 57 bp, Artificial
  Synthetic oligonucleotide
tcagaaggttatagtaagtatagaattaggagaaatcctaacgggcagagagagttg

SEQ ID NO: 457306 - DNA, 57 bp, Artificial
  Synthetic oligonucleotide
tcagaagtagaagggagaatccaagacttggagaagtacgtagaagacaccaaaata

SEQ ID NO: 457307 - DNA, 60 bp, Artificial
  Synthetic oligonucleotide
tcagaagtcccgctccatgcgatttaaatcgccgtctgatttatggagtaggccctctgt

SEQ ID NO: 457308 - DNA, 54 bp, Artificial
  Synthetic oligonucleotide
tcagaagtgggacctggttctacactcgtggaggatctgcagacaacgtcagct

SEQ ID NO: 457309 - DNA, 55 bp, Artificial
  Synthetic oligonucleotide
tcagaataacagtgatatagcaacaaaacaggcatacgaatccgccacatcaatc

SEQ ID NO: 457310 - DNA, 58 bp, Artificial
  Synthetic oligonucleotide
tcagaataattttggacagtgggaacagactgtgcccctagagggagagagctacggg

SEQ ID NO: 457311 - DNA, 60 bp, Artificial
  Synthetic oligonucleotide
tcagaatacatcgtgtgtccccccggaacagaccaagaggccatctcttggatacactct

SEQ ID NO: 457312 - DNA, 60 bp, Artificial
  Synthetic oligonucleotide
tcagaatacgtcaccccatcgttagcttcaatcagttcacaagcgggttcgctgtttgtc

SEQ ID NO: 457313 - DNA, 51 bp, Artificial
  Synthetic oligonucleotide
tcagaatccatcaaccagtaagtgtcatggacatcaaacaaggacccaaag

SEQ ID NO: 457314 - DNA, 59 bp, Artificial
  Synthetic oligonucleotide
tcagaatcgacacagacctggttagctgagtgaacgcgtccgagtccgcagagaagtac

SEQ ID NO: 457315 - DNA, 56 bp, Artificial
  Synthetic oligonucleotide
tcagaatcgcgattattgctgtaaagaaaccctaatttctgaaattgggattccgg

SEQ ID NO: 457316 - DNA, 60 bp, Artificial
  Synthetic oligonucleotide
tcagaatctagggaatgcaaacacccctcagaatttcacggatgctgaaagcgtgacata

SEQ ID NO: 457317 - DNA, 59 bp, Artificial
  Synthetic oligonucleotide
tcagaatgcaactgtacaagacccggatacaacggaaccaatggaaatgagactatacc

SEQ ID NO: 457318 - DNA, 60 bp, Artificial
  Synthetic oligonucleotide
tcagaatgccaatgtctatacggaacttgcgttgtggcagtaacagatgggccagcagac

SEQ ID NO: 457319 - DNA, 55 bp, Artificial
  Synthetic oligonucleotide
tcagaatgccaatgtttgtacggaacctgtgctgtggcagtaacagatggaccag

SEQ ID NO: 457320 - DNA, 60 bp, Artificial
  Synthetic oligonucleotide
tcagaatgtgtatgtcataatggaatatgccctgtggtgatgacggatggcccagctaat

SEQ ID NO: 457321 - DNA, 56 bp, Artificial
  Synthetic oligonucleotide
tcagaatgttggtgaccttcacccagtgtcagaaccgtgtatattggataaaacgg

SEQ ID NO: 457322 - DNA, 60 bp, Artificial
  Synthetic oligonucleotide
tcagaattggggaattgaacacatcgacagtgtgatgggaatggttggagtgttaccaga

SEQ ID NO: 457323 - DNA, 51 bp, Artificial
  Synthetic oligonucleotide
tcagaattttatgccatattggacgtatgggatgtcaacactattaaaaga

SEQ ID NO: 457324 - DNA, 59 bp, Artificial
  Synthetic oligonucleotide
tcagacaaacaaatgtaatgatgcagaagggcaattttaagggccagagaagaattaag

SEQ ID NO: 457325 - DNA, 58 bp, Artificial
  Synthetic oligonucleotide
tcagacaaaggggacgtgataataggcggggctgctcaagttttagacagtggtgaaa

SEQ ID NO: 457326 - DNA, 55 bp, Artificial
  Synthetic oligonucleotide
tcagacaagaaccgacagaccgatttcggtctctgcactcaaaggtaagtggctg

SEQ ID NO: 457327 - DNA, 58 bp, Artificial
  Synthetic oligonucleotide
tcagacacatggtatggttaacacatcaatcagggacatatcctgttgtacagaggac

SEQ ID NO: 457328 - DNA, 59 bp, Artificial
  Synthetic oligonucleotide
tcagacacgtattgttgatggatgtgtacaattctgtacacatttgcaatgactccgtg

SEQ ID NO: 457329 - DNA, 54 bp, Artificial
  Synthetic oligonucleotide
tcagacacgttaattcgaaaggtgaagtaactcgtaccaaagaccgagaaacac

SEQ ID NO: 457330 - DNA, 60 bp, Artificial
  Synthetic oligonucleotide
tcagacacgttcgaagacgtcctctatgcagaagctaaggccagctctaagacaccatac

SEQ ID NO: 457331 - DNA, 52 bp, Artificial
  Synthetic oligonucleotide
tcagacactcttgcatgcgggggccacaatgataacagtcccctccggaggt

SEQ ID NO: 457332 - DNA, 60 bp, Artificial
  Synthetic oligonucleotide
tcagacagagtgatggtgtcaactctggctgtgacgtggtggaacaggaatgggccaacg

SEQ ID NO: 457333 - DNA, 60 bp, Artificial
  Synthetic oligonucleotide
tcagacagcagccgctcattcatatttacacctcggcttttggaagcgactacgttattc

SEQ ID NO: 457334 - DNA, 60 bp, Artificial
  Synthetic oligonucleotide
tcagacagcgagttggccagaatattactacatcaatcgtatcctcgactttagctcagg

SEQ ID NO: 457335 - DNA, 55 bp, Artificial
  Synthetic oligonucleotide
tcagacaggctaatacaaataacccgaggagattccactataacgtctcaggata

SEQ ID NO: 457336 - DNA, 60 bp, Artificial
  Synthetic oligonucleotide
tcagacaggtgccctctctgcaagtatccactgccaacaagactcaaagtgtcaaccgct

SEQ ID NO: 457337 - DNA, 60 bp, Artificial
  Synthetic oligonucleotide
tcagacatagatctttttggtccagcacattttaaggagctgtctgatctttcaaccatc

SEQ ID NO: 457338 - DNA, 56 bp, Artificial
  Synthetic oligonucleotide
tcagacatatccttctttgttcagagggcaggggatagaattttccccggggaaga

SEQ ID NO: 457339 - DNA, 58 bp, Artificial
  Synthetic oligonucleotide
tcagacattatataacgtatggaattccaagaaaagtttattacattggcgcctatcc

SEQ ID NO: 457340 - DNA, 56 bp, Artificial
  Synthetic oligonucleotide
tcagaccacaaggggttccttggtatctaggttggtctagacaggaggccacgcgg

SEQ ID NO: 457341 - DNA, 59 bp, Artificial
  Synthetic oligonucleotide
tcagaccacagcccttacaaggttgtcgtccattgcggctgttgtgacaataagttaaa

SEQ ID NO: 457342 - DNA, 60 bp, Artificial
  Synthetic oligonucleotide
tcagaccaggagggatcccctggtatctaggatggactagacaggaagccacgcggatcc

SEQ ID NO: 457343 - DNA, 55 bp, Artificial
  Synthetic oligonucleotide
tcagaccatcctctacaagtttaacctacaggggacctgttacgtgtcggactct

SEQ ID NO: 457344 - DNA, 60 bp, Artificial
  Synthetic oligonucleotide
tcagaccccgttggaatggtactcctcaactgctgtcccagctgtagaagctctctatcg

SEQ ID NO: 457345 - DNA, 60 bp, Artificial
  Synthetic oligonucleotide
tcagaccctgcttttaggcggcctgattagctctaaccagttcgacagcgatcgttctgt

SEQ ID NO: 457346 - DNA, 60 bp, Artificial
  Synthetic oligonucleotide
tcagaccgagtaatggtatcacctctagctgtaacatggtggaataggaatggaccaaca

SEQ ID NO: 457347 - DNA, 50 bp, Artificial
  Synthetic oligonucleotide
tcagaccgagtgactctgcggtgtatctctggaggtcgtacgggggcgat

SEQ ID NO: 457348 - DNA, 52 bp, Artificial
  Synthetic oligonucleotide
tcagacctaacagggaatcacgagtaccccgtcgctgctgtacaggggaaag

SEQ ID NO: 457349 - DNA, 59 bp, Artificial
  Synthetic oligonucleotide
tcagacctggaatgcaaaattacggagtgtacttatgcctccgatttcggtggtatagc

SEQ ID NO: 457350 - DNA, 55 bp, Artificial
  Synthetic oligonucleotide
tcagacctggaggttgcgattgctcacacaggctcggtcacatgggtgcctaacg

SEQ ID NO: 457351 - DNA, 57 bp, Artificial
  Synthetic oligonucleotide
tcagaccttactccctttccagtaccagtcaaagggcacttccacgtcttacatgcc

SEQ ID NO: 457352 - DNA, 57 bp, Artificial
  Synthetic oligonucleotide
tcagacgaatcactaggtgatccacctttaccgtctaatttaccaccccaagctaga

SEQ ID NO: 457353 - DNA, 53 bp, Artificial
  Synthetic oligonucleotide
tcagacgcaacgctactgccaaaataagctgcaagtgtctgattatggattgc

SEQ ID NO: 457354 - DNA, 55 bp, Artificial
  Synthetic oligonucleotide
tcagacgccaatagctaattcggttacagtcagacaagatctggaacggcaatta

SEQ ID NO: 457355 - DNA, 60 bp, Artificial
  Synthetic oligonucleotide
tcagacgcgtacgctatgggaataagccaagaccgtctactggacattctaattgacacg

SEQ ID NO: 457356 - DNA, 57 bp, Artificial
  Synthetic oligonucleotide
tcagacgctaggtccaacactccatgcataactgaccaggccagcgtcaacatccct

SEQ ID NO: 457357 - DNA, 57 bp, Artificial
  Synthetic oligonucleotide
tcagacgtctataactacattcccgatcacgtaccaccgaacgccgaattcgatacc

SEQ ID NO: 457358 - DNA, 50 bp, Artificial
  Synthetic oligonucleotide
tcagacgtgagaggcgttaaaggggcctatctccttaacatggataagta

SEQ ID NO: 457359 - DNA, 56 bp, Artificial
  Synthetic oligonucleotide
tcagacgtgggccaccgtcggcggatcgaagacggacgacccgtaccagcaggccg

SEQ ID NO: 457360 - DNA, 55 bp, Artificial
  Synthetic oligonucleotide
tcagacgtgtaagttatattgcaatcaatacctacagcacactgcgaacagcctg

SEQ ID NO: 457361 - DNA, 60 bp, Artificial
  Synthetic oligonucleotide
tcagactacttctgagggtgttttatctgcacagactttcactgtgttaaatcgcccgca

SEQ ID NO: 457362 - DNA, 59 bp, Artificial
  Synthetic oligonucleotide
tcagactatgcgaaggcgttttatagtgacacgtttgagactctagaccgatttttctg

SEQ ID NO: 457363 - DNA, 53 bp, Artificial
  Synthetic oligonucleotide
tcagactcaccccggaaaaaaagaagacgcggagacccaccgtgcccggaaga

SEQ ID NO: 457364 - DNA, 55 bp, Artificial
  Synthetic oligonucleotide
tcagactctgccataaggaaagccattttaggacacatagttagacctaggtgtg

SEQ ID NO: 457365 - DNA, 58 bp, Artificial
  Synthetic oligonucleotide
tcagactctgtgtatggagacacattagaaaaactaactaacactgggttatacaatt

SEQ ID NO: 457366 - DNA, 51 bp, Artificial
  Synthetic oligonucleotide
tcagactgagtacatccaccacacacatctaaccgggcctcagcgtatggc

SEQ ID NO: 457367 - DNA, 59 bp, Artificial
  Synthetic oligonucleotide
tcagactggatacgcacccgtgaattggggacccggagagacgaatgactcaacaacag

SEQ ID NO: 457368 - DNA, 53 bp, Artificial
  Synthetic oligonucleotide
tcagacttgtcaagtatctctatcaaagcagtaagtagtatatgtaatgcaac

SEQ ID NO: 457369 - DNA, 60 bp, Artificial
  Synthetic oligonucleotide
tcagagaacagaggtcgttgctgcggctaacgcggtagtcgcgcagaataagctgtacac

SEQ ID NO: 457370 - DNA, 54 bp, Artificial
  Synthetic oligonucleotide
tcagagaacgactaccctgaaaaggacgttgtgcgtttccgaacgcgggcctaa

SEQ ID NO: 457371 - DNA, 55 bp, Artificial
  Synthetic oligonucleotide
tcagagaagtgcgttagcagacggaacggtgattttgtgtacccttgctcgtgtg

SEQ ID NO: 457372 - DNA, 57 bp, Artificial
  Synthetic oligonucleotide
tcagagaatggggaaacaaaattctggatccattccccacattcaagaaggacatgt

SEQ ID NO: 457373 - DNA, 60 bp, Artificial
  Synthetic oligonucleotide
tcagagacccacaagtacagtccagcatttgcgaagccgcatatcaacatgttcgacccg

SEQ ID NO: 457374 - DNA, 59 bp, Artificial
  Synthetic oligonucleotide
tcagagactggctgaggcttagaacagccttcctgcaatatgggtgcgagtggatccaa

SEQ ID NO: 457375 - DNA, 60 bp, Artificial
  Synthetic oligonucleotide
tcagagagaacggctacaaggttttgcagccacggtctctgcccgagaatgaggagtatg

SEQ ID NO: 457376 - DNA, 60 bp, Artificial
  Synthetic oligonucleotide
tcagagagcaccactgtcactgcccaacggctagaaacaaagggcgccaaccacctcttc

SEQ ID NO: 457377 - DNA, 60 bp, Artificial
  Synthetic oligonucleotide
tcagagagcccagcattcagctctggaatactcaaggcctaccatgaatataagatcatc

SEQ ID NO: 457378 - DNA, 50 bp, Artificial
  Synthetic oligonucleotide
tcagagagctgcgttcaacaactactcggagaatccgcatttcgttcatt

SEQ ID NO: 457379 - DNA, 60 bp, Artificial
  Synthetic oligonucleotide
tcagagagtgatcatttcatgaacaatacggaagcattgtgtgatgccaagggttttgca

SEQ ID NO: 457380 - DNA, 55 bp, Artificial
  Synthetic oligonucleotide
tcagagagtggtcatatttaattgaagacccatctgcacctcatggactgtgcta

SEQ ID NO: 457381 - DNA, 55 bp, Artificial
  Synthetic oligonucleotide
tcagagatcgcctggctattctcccacggcactcacagcccgggaagactatttg

SEQ ID NO: 457382 - DNA, 60 bp, Artificial
  Synthetic oligonucleotide
tcagagatgtcctacttcagctctagcgacagcacagacgcagacataacttaccctaac

SEQ ID NO: 457383 - DNA, 60 bp, Artificial
  Synthetic oligonucleotide
tcagagcaaattccagcagtcccgattgggacttcaacacagacaaggacaattggccaa

SEQ ID NO: 457384 - DNA, 60 bp, Artificial
  Synthetic oligonucleotide
tcagagcaattccaaaggtgtgctccctgcgcactttacctgtaacttcagtaggcgctt

SEQ ID NO: 457385 - DNA, 58 bp, Artificial
  Synthetic oligonucleotide
tcagagcactccgttaaccagctgatcatggtgtctatcatttcttgcaacacagagt

SEQ ID NO: 457386 - DNA, 55 bp, Artificial
  Synthetic oligonucleotide
tcagagcagaagcttaagccctactcagatcatgtaaggaagacaatcacaagtt

SEQ ID NO: 457387 - DNA, 55 bp, Artificial
  Synthetic oligonucleotide
tcagagcagttaatggcatatggtgttgatattttggcctattgccatgaagagc

SEQ ID NO: 457388 - DNA, 55 bp, Artificial
  Synthetic oligonucleotide
tcagagcatgtacgattgtcatcttcgtcgacttggttgcgtggcattgtaactg

SEQ ID NO: 457389 - DNA, 58 bp, Artificial
  Synthetic oligonucleotide
tcagagcccttataagctgggaaatgggtcaagcacccagtccatataatactagggt

SEQ ID NO: 457390 - DNA, 53 bp, Artificial
  Synthetic oligonucleotide
tcagagcgggctctgatatacagtctattcgaccggtcgcgtgtgcataacct

SEQ ID NO: 457391 - DNA, 55 bp, Artificial
  Synthetic oligonucleotide
tcagagcggtgggcccgcttccgatggccatagacgcgtcgagtatattcaacta

SEQ ID NO: 457392 - DNA, 57 bp, Artificial
  Synthetic oligonucleotide
tcagagcgtctacgtgtggaacacacaactaaatgacttagcagtagcggttaagat

SEQ ID NO: 457393 - DNA, 58 bp, Artificial
  Synthetic oligonucleotide
tcagagctaattctgggcgtttccttggaagcgactcgtcctagtcccgcacgggtca

SEQ ID NO: 457394 - DNA, 58 bp, Artificial
  Synthetic oligonucleotide
tcagagctaggcttatcgcccagggggggaaggccgctatatgcggcaggtacctctt

SEQ ID NO: 457395 - DNA, 55 bp, Artificial
  Synthetic oligonucleotide
tcagagctcaaaatttggacgagcgagtttgaatcgaatacgatgcgtgtcgttc

SEQ ID NO: 457396 - DNA, 60 bp, Artificial
  Synthetic oligonucleotide
tcagagctgcggtgtaaagagaagatacttgcaaataaaacgaggacatttactgctgcg

SEQ ID NO: 457397 - DNA, 50 bp, Artificial
  Synthetic oligonucleotide
tcagagctgctaaggcatacagtaaggcaggtaaactgaatgttagccag

SEQ ID NO: 457398 - DNA, 60 bp, Artificial
  Synthetic oligonucleotide
tcagaggcctcttggaaagagctagagatttcctattcttattatcaactctcttttgag

SEQ ID NO: 457399 - DNA, 52 bp, Artificial
  Synthetic oligonucleotide
tcagagggaaacactcaaacggaacaatacacgataggtcccagtatcgcgc

SEQ ID NO: 457400 - DNA, 60 bp, Artificial
  Synthetic oligonucleotide
tcagagggagagaccacacggagtagagcagagaaatcacctccagaggaccccttcagc

SEQ ID NO: 457401 - DNA, 60 bp, Artificial
  Synthetic oligonucleotide
tcagagggcaggatgtatttttgtattccatgtaaacagttgcatacacctttagtgccg

SEQ ID NO: 457402 - DNA, 58 bp, Artificial
  Synthetic oligonucleotide
tcagaggggaacaagtagggggacaattaaagattggacctggcatatggcaaatgga

SEQ ID NO: 457403 - DNA, 58 bp, Artificial
  Synthetic oligonucleotide
tcagagggtattgagtgcttgaagttagttagatcaatacagtcagtcattaggggcg

SEQ ID NO: 457404 - DNA, 55 bp, Artificial
  Synthetic oligonucleotide
tcagagggtgggtcagttaatccgttgtgggtgggtttagttcctggctgcctta

SEQ ID NO: 457405 - DNA, 60 bp, Artificial
  Synthetic oligonucleotide
tcagaggtgatctgaatttcgtcaatagggcgaatcagcgattgaatcctatgcaccaac

SEQ ID NO: 457406 - DNA, 55 bp, Artificial
  Synthetic oligonucleotide
tcagaggtgtacctggtggctagttttgttgaaaagaattttgtcaaggcgcact

SEQ ID NO: 457407 - DNA, 55 bp, Artificial
  Synthetic oligonucleotide
tcagaggttcctattaatgcaaactcttctaacacagctgctcctactgagttgc

SEQ ID NO: 457408 - DNA, 56 bp, Artificial
  Synthetic oligonucleotide
tcagagtattcaggctaaagtttccagacccaaataagttcagttttcccgatcca

SEQ ID NO: 457409 - DNA, 60 bp, Artificial
  Synthetic oligonucleotide
tcagagtcaagaccaagttctaactcctctgactccggacgtagtggaccttgcactgga

SEQ ID NO: 457410 - DNA, 60 bp, Artificial
  Synthetic oligonucleotide
tcagagtcaccaggatcatcaaaatcctgtaccaaagcagtgagtagtaatagttagtat

SEQ ID NO: 457411 - DNA, 60 bp, Artificial
  Synthetic oligonucleotide
tcagagtcatgcgtgaggcgtgtgatgcgactaagctcggggatcctgccacgcaagaat

SEQ ID NO: 457412 - DNA, 60 bp, Artificial
  Synthetic oligonucleotide
tcagagtgctccactaaagagaagcctgactatcaatgcaaggtttacacaggcgtgtac

SEQ ID NO: 457413 - DNA, 55 bp, Artificial
  Synthetic oligonucleotide
tcagagttaccaatgtagctctttgcacccatacatcaacaatagtctctggacc

SEQ ID NO: 457414 - DNA, 60 bp, Artificial
  Synthetic oligonucleotide
tcagagttggatatgtcggaattggcggacctgatacttaatgaatggttatgcaatcca

SEQ ID NO: 457415 - DNA, 60 bp, Artificial
  Synthetic oligonucleotide
tcagagtttgaggtccataggaactcacccaagaaactgacagtggatgtatgcggttac

SEQ ID NO: 457416 - DNA, 59 bp, Artificial
  Synthetic oligonucleotide
tcagataaccactaccaagtctactagtgagtgtaatttacctagtattcacacgccaa

SEQ ID NO: 457417 - DNA, 60 bp, Artificial
  Synthetic oligonucleotide
tcagataagaataattggattgcattggcacaaggagttaagactagtttgcgtactaaa

SEQ ID NO: 457418 - DNA, 59 bp, Artificial
  Synthetic oligonucleotide
tcagataagcaataatagaacagtcccacactatcgtctcggtggtaagtttgtagaat

SEQ ID NO: 457419 - DNA, 60 bp, Artificial
  Synthetic oligonucleotide
tcagatacaaaactgcaagctgcaatgaaatatggggcaagactatttacgttcactgga

SEQ ID NO: 457420 - DNA, 55 bp, Artificial
  Synthetic oligonucleotide
tcagatacaccagtccatgattgtaatacgacttgtcagacacccaaaggtgcta

SEQ ID NO: 457421 - DNA, 60 bp, Artificial
  Synthetic oligonucleotide
tcagatacagggatcttcaatataagctcaccaacatgtctagttaaccgtgtacaacgg

SEQ ID NO: 457422 - DNA, 60 bp, Artificial
  Synthetic oligonucleotide
tcagatacatttgaaagtgactccccaaataaggacatgcttccttgttacagtgtggcc

SEQ ID NO: 457423 - DNA, 59 bp, Artificial
  Synthetic oligonucleotide
tcagatagattggtccttgcaaccggactcaggaacgtccctcaaagagagacaagagg

SEQ ID NO: 457424 - DNA, 60 bp, Artificial
  Synthetic oligonucleotide
tcagatatcagtgagtggctcaacgtcgcgagacgggagttcagagatcttaactgtagc

SEQ ID NO: 457425 - DNA, 54 bp, Artificial
  Synthetic oligonucleotide
tcagatatcctcccgcacgtttgacacacgggcaccgaatacttgtcgctggtg

SEQ ID NO: 457426 - DNA, 50 bp, Artificial
  Synthetic oligonucleotide
tcagatatcgacaggactgtattcaaaatcattgcaccgtgtggctgcag

SEQ ID NO: 457427 - DNA, 55 bp, Artificial
  Synthetic oligonucleotide
tcagatatctgacgccagcagtgattcaacaacacacagggaaagagatcgtgga

SEQ ID NO: 457428 - DNA, 60 bp, Artificial
  Synthetic oligonucleotide
tcagatatgttggcatttgcactatcctatgtattgatgactgaaagttacgaagagccc

SEQ ID NO: 457429 - DNA, 55 bp, Artificial
  Synthetic oligonucleotide
tcagatatttcctaggagctcttggcccaaccataatgcctcatcaggagtgagc

SEQ ID NO: 457430 - DNA, 60 bp, Artificial
  Synthetic oligonucleotide
tcagatcaaacgtgaggttgagaggcaaattaatacatgtccctacactggatacaaagg

SEQ ID NO: 457431 - DNA, 55 bp, Artificial
  Synthetic oligonucleotide
tcagatccacagactataatagctactttaacattgattggctgctcaggttccc

SEQ ID NO: 457432 - DNA, 60 bp, Artificial
  Synthetic oligonucleotide
tcagatccatatctacagcgcgccgtgggattcagatgatgtgtttttctttcattgcgt

SEQ ID NO: 457433 - DNA, 60 bp, Artificial
  Synthetic oligonucleotide
tcagatccgagggtaagggctctgtatcttcctgctggtggctccagttcagggacacag

SEQ ID NO: 457434 - DNA, 59 bp, Artificial
  Synthetic oligonucleotide
tcagatcctaatggcgctaccgttgctcgtcgtgacatttctactgtcgcagacgggga

SEQ ID NO: 457435 - DNA, 55 bp, Artificial
  Synthetic oligonucleotide
tcagatcctctaggtgttcgttccatcgatagctataaacacatgattaaatccg

SEQ ID NO: 457436 - DNA, 53 bp, Artificial
  Synthetic oligonucleotide
tcagatcggatcgcagcaattcatagatagagcaattgggcctgataagttcg

SEQ ID NO: 457437 - DNA, 52 bp, Artificial
  Synthetic oligonucleotide
tcagatctacgcgggtgacgactgtgcaattgctcaggtatgcccggagaaa

SEQ ID NO: 457438 - DNA, 60 bp, Artificial
  Synthetic oligonucleotide
tcagatctcaaaatttctcagataatgcaaaaatcataatagtacaccttaatgactctg

SEQ ID NO: 457439 - DNA, 60 bp, Artificial
  Synthetic oligonucleotide
tcagatctcacgataggtgctggatctcctcaagcgtcgcgattgaggtgaatttacgtc

SEQ ID NO: 457440 - DNA, 60 bp, Artificial
  Synthetic oligonucleotide
tcagatcttcttgcattcgtatcagctgatacagtagaacctataaacgcggttgcattt

SEQ ID NO: 457441 - DNA, 56 bp, Artificial
  Synthetic oligonucleotide
tcagatgaagccaccaacgttggtagattcctcggtgaggttgctttgagagaatt

SEQ ID NO: 457442 - DNA, 60 bp, Artificial
  Synthetic oligonucleotide
tcagatgaatatttgtcttttagctgttacttgtctgtgactgaacagtctgagttttat

SEQ ID NO: 457443 - DNA, 55 bp, Artificial
  Synthetic oligonucleotide
tcagatgagacataccattgcaggaaacaaggaatggcagacgtggttgctgcca

SEQ ID NO: 457444 - DNA, 60 bp, Artificial
  Synthetic oligonucleotide
tcagatgagcatcttaggggttttagtaagtcaatttctatatcagatacatttgaaagt

SEQ ID NO: 457445 - DNA, 60 bp, Artificial
  Synthetic oligonucleotide
tcagatgagtctgagagtgttctcagatttggttcaagtgacggaaggcagagcccaggg

SEQ ID NO: 457446 - DNA, 60 bp, Artificial
  Synthetic oligonucleotide
tcagatgatgttaatgagacgtgatttcccaacgcgcgaccgtaacatcgtggaagcgcg

SEQ ID NO: 457447 - DNA, 52 bp, Artificial
  Synthetic oligonucleotide
tcagatgccaaagctgggcaaacaatagcatgtttctctcacgctgtgttgt

SEQ ID NO: 457448 - DNA, 60 bp, Artificial
  Synthetic oligonucleotide
tcagatgccataagctcaagatttgatgggaattttcttgtgagttttatggagggatta

SEQ ID NO: 457449 - DNA, 55 bp, Artificial
  Synthetic oligonucleotide
tcagatgcccgttatccaggaactccacccatgagatgtattgggtgtcaggtgc

SEQ ID NO: 457450 - DNA, 58 bp, Artificial
  Synthetic oligonucleotide
tcagatgcccttaaagaatgggaaactgaatacatgaaacaattccgcaacaaaacca

SEQ ID NO: 457451 - DNA, 60 bp, Artificial
  Synthetic oligonucleotide
tcagatgcgctgagaggaagactgccgcgcggaatcttggttccgacccatctctcgggt

SEQ ID NO: 457452 - DNA, 58 bp, Artificial
  Synthetic oligonucleotide
tcagatgcggaaggggagtctgagtcggggtcgcctgaggacactgattttccccacc

SEQ ID NO: 457453 - DNA, 59 bp, Artificial
  Synthetic oligonucleotide
tcagatgctacacgtgccacaaaccgcttgtaaaggaagaaaaggacagacatcgtaac

SEQ ID NO: 457454 - DNA, 55 bp, Artificial
  Synthetic oligonucleotide
tcagatggagttaaggaaaagcgtaaatggaaattggatcggtacgttacacaaa

SEQ ID NO: 457455 - DNA, 58 bp, Artificial
  Synthetic oligonucleotide
tcagatggccccacttgttggaacggtcaagatgggggcttagaagggttgagacaga

SEQ ID NO: 457456 - DNA, 60 bp, Artificial
  Synthetic oligonucleotide
tcagatggctgctcaaccaaacagaggcttcgactcattcttcgcagattactacgatca

SEQ ID NO: 457457 - DNA, 55 bp, Artificial
  Synthetic oligonucleotide
tcagatgggactgttatgcctaatgtcttgtcttacgcagcccagacctcgcggg

SEQ ID NO: 457458 - DNA, 60 bp, Artificial
  Synthetic oligonucleotide
tcagatggtgaacatgattgtggacgcccaaactacaagaattcaagatcatcccaaaag

SEQ ID NO: 457459 - DNA, 60 bp, Artificial
  Synthetic oligonucleotide
tcagatggtttcatcagttgacttcataccacctatggccagtttagataacaaaggtat

SEQ ID NO: 457460 - DNA, 60 bp, Artificial
  Synthetic oligonucleotide
tcagatgtagcgttaactattattgtatcaccaaatcgcgggtttgtccgagaatcagcg

SEQ ID NO: 457461 - DNA, 59 bp, Artificial
  Synthetic oligonucleotide
tcagatgtgtctagaggatgcaatgtatggcacagatgggttagaggcattggaccttt

SEQ ID NO: 457462 - DNA, 50 bp, Artificial
  Synthetic oligonucleotide
tcagatgttggtcagctgaactataaggttcgtaccgtatctggtcagac

SEQ ID NO: 457463 - DNA, 58 bp, Artificial
  Synthetic oligonucleotide
tcagattaatagcggcctcctgtgtccaatctctataaaaacaccccttcaaaattgc

SEQ ID NO: 457464 - DNA, 55 bp, Artificial
  Synthetic oligonucleotide
tcagattagttaaagtctccaagatagccttgcgttgaattgatgcagcagtggg

SEQ ID NO: 457465 - DNA, 60 bp, Artificial
  Synthetic oligonucleotide
tcagattatgagggagattagtaccatcactcttgaaaaacttgcaacattgaaagctag

SEQ ID NO: 457466 - DNA, 60 bp, Artificial
  Synthetic oligonucleotide
tcagattcattctacaggagcatgagatggttgactcaaaaggacaacgcttaccctatt

SEQ ID NO: 457467 - DNA, 56 bp, Artificial
  Synthetic oligonucleotide
tcagattccttttcgtccaaaccatcgatggggggatattagatttttgcgcctgg

SEQ ID NO: 457468 - DNA, 51 bp, Artificial
  Synthetic oligonucleotide
tcagattgcgtgggctctgactcggtggagctgtgtcccgtgtcctcctcg

SEQ ID NO: 457469 - DNA, 53 bp, Artificial
  Synthetic oligonucleotide
tcagattggaatacgaactctcgaggctatagagtgggtgagactgatctcgt

SEQ ID NO: 457470 - DNA, 57 bp, Artificial
  Synthetic oligonucleotide
tcagatttcgaattctacaagatagtctccgacaatctccctccaaaccgagttccc

SEQ ID NO: 457471 - DNA, 54 bp, Artificial
  Synthetic oligonucleotide
tcagattttcctttgtcccagtgaagtgacgtcaacgtgactccgcttgttccg

SEQ ID NO: 457472 - DNA, 55 bp, Artificial
  Synthetic oligonucleotide
tcagattttgaaagcggtcagtgaattttatccgggtagattccagccggatgac

SEQ ID NO: 457473 - DNA, 55 bp, Artificial
  Synthetic oligonucleotide
tcagcaaaagagattctccatccgcatctgacaatcctaagcagtaatgaatcag

SEQ ID NO: 457474 - DNA, 60 bp, Artificial
  Synthetic oligonucleotide
tcagcaaaagcttcaatactccacgaagtcaaacctgttacatctgggtgctttcctata

SEQ ID NO: 457475 - DNA, 55 bp, Artificial
  Synthetic oligonucleotide
tcagcaaacacggatggacaaactaacacaaggccgacagacctatgattggacc

SEQ ID NO: 457476 - DNA, 56 bp, Artificial
  Synthetic oligonucleotide
tcagcaaacacgggtggacaaactaacgcaaggccggcaaactttcgattggactc

SEQ ID NO: 457477 - DNA, 60 bp, Artificial
  Synthetic oligonucleotide
tcagcaaattggatatacttctagagctttggctgtaaggggtactaatgaatttcaaca

SEQ ID NO: 457478 - DNA, 60 bp, Artificial
  Synthetic oligonucleotide
tcagcaacattaaaccagatattgagatgttacttgaagataaggagtacaaatataact

SEQ ID NO: 457479 - DNA, 57 bp, Artificial
  Synthetic oligonucleotide
tcagcaacgccctaaagaccggccgctacagaaacgaagccggactgagtggcctcg

SEQ ID NO: 457480 - DNA, 52 bp, Artificial
  Synthetic oligonucleotide
tcagcaactcgctagccgagatgtacctacgtgaggccgaggcgagagcgct

SEQ ID NO: 457481 - DNA, 60 bp, Artificial
  Synthetic oligonucleotide
tcagcaactgcctgccatgatgggaagaagtggatgacaattggtgtaacagggccagat

SEQ ID NO: 457482 - DNA, 60 bp, Artificial
  Synthetic oligonucleotide
tcagcaagaagggaggcggtttgtcgcaagcctgttcatctccgcattggcaacttacac

SEQ ID NO: 457483 - DNA, 50 bp, Artificial
  Synthetic oligonucleotide
tcagcaagaattgctgagactctctgtttggggcataagacagctccgag

SEQ ID NO: 457484 - DNA, 60 bp, Artificial
  Synthetic oligonucleotide
tcagcaagttaagaagggtatgagtggtttcgtaataccactagcatggttcacagcgga

SEQ ID NO: 457485 - DNA, 60 bp, Artificial
  Synthetic oligonucleotide
tcagcaatcatgaaaagtgaattggagtatggtaactgcaacaccaagtgccaaactcca

SEQ ID NO: 457486 - DNA, 56 bp, Artificial
  Synthetic oligonucleotide
tcagcacaaaagagctccaacacttccagccagacgaggccacactactggtgaac

SEQ ID NO: 457487 - DNA, 52 bp, Artificial
  Synthetic oligonucleotide
tcagcacaagcgccgtaatgtgctgatgtggagcccgactgacccagacgcc

SEQ ID NO: 457488 - DNA, 60 bp, Artificial
  Synthetic oligonucleotide
tcagcacagatctagccatagccacagtgtcggcagctttgctaacctggacttatatca

SEQ ID NO: 457489 - DNA, 55 bp, Artificial
  Synthetic oligonucleotide
tcagcacagccagatatgatggtatgtggtggtgccgtcgtttgcatgcattgtc

SEQ ID NO: 457490 - DNA, 60 bp, Artificial
  Synthetic oligonucleotide
tcagcacatcagaaaggtgagtacactgccattgggaagcttattgtgtactgttataac

SEQ ID NO: 457491 - DNA, 51 bp, Artificial
  Synthetic oligonucleotide
tcagcacatcgaagaatgttcatgctatggagcagtaggggtgatcaaatg

SEQ ID NO: 457492 - DNA, 55 bp, Artificial
  Synthetic oligonucleotide
tcagcacattgagcttgagaactcgattggccataatggtgctattaactacggt

SEQ ID NO: 457493 - DNA, 57 bp, Artificial
  Synthetic oligonucleotide
tcagcaccaactttggtttccgatatagttgaaaatggacctcttaaaggcatacac

SEQ ID NO: 457494 - DNA, 55 bp, Artificial
  Synthetic oligonucleotide
tcagcaccgcggcggctaccgtgtggactcgttcgagttctcatcggacactacg

SEQ ID NO: 457495 - DNA, 60 bp, Artificial
  Synthetic oligonucleotide
tcagcacgaaggaggaaaacacagagcggcacactgcaacagatgtcaatcgtaacatgc

SEQ ID NO: 457496 - DNA, 57 bp, Artificial
  Synthetic oligonucleotide
tcagcacggccaagtcgcagtgcagccttcggacccaggatagcttcagctacggtg

SEQ ID NO: 457497 - DNA, 56 bp, Artificial
  Synthetic oligonucleotide
tcagcacgtactctttatgttcgtgcaaaaggacctgaaaaggtaactgaaacaag

SEQ ID NO: 457498 - DNA, 60 bp, Artificial
  Synthetic oligonucleotide
tcagcacgtctctgtagatgccctaagatttgagcattctgtttacaattcgattttcca

SEQ ID NO: 457499 - DNA, 60 bp, Artificial
  Synthetic oligonucleotide
tcagcactcctaagttggagcaagagtggtatactctagccacagaaccagtgccaggag

SEQ ID NO: 457500 - DNA, 50 bp, Artificial
  Synthetic oligonucleotide
tcagcacttccctcgtgtagatcaggtcgatgagtcactgtgaaccccac

SEQ ID NO: 457501 - DNA, 60 bp, Artificial
  Synthetic oligonucleotide
tcagcagaatcagtaaatatacacatgacagaccgtgatggtttgcttaatctttaggtg

SEQ ID NO: 457502 - DNA, 55 bp, Artificial
  Synthetic oligonucleotide
tcagcagatgagctcaccaacctggcggctcacttgcgaaaggctttcgagactg

SEQ ID NO: 457503 - DNA, 54 bp, Artificial
  Synthetic oligonucleotide
tcagcagccgagaaagcattaacgtcgttagctacctatataccggttatcatg

SEQ ID NO: 457504 - DNA, 55 bp, Artificial
  Synthetic oligonucleotide
tcagcagcgcgctctcaagggctgtatccgcatggatggacacgccgacgtctac

SEQ ID NO: 457505 - DNA, 60 bp, Artificial
  Synthetic oligonucleotide
tcagcagcgtctgactttgtgcctcctattcgtgagggatttgaaataagcacctctgaa

SEQ ID NO: 457506 - DNA, 57 bp, Artificial
  Synthetic oligonucleotide
tcagcaggttgcagtctccacctcggctaacccagcccctgtttcagagcttgacat

SEQ ID NO: 457507 - DNA, 51 bp, Artificial
  Synthetic oligonucleotide
tcagcagtacagtgtactgacccaatgcctgctactatatcaactatgttt

SEQ ID NO: 457508 - DNA, 60 bp, Artificial
  Synthetic oligonucleotide
tcagcagtggggagcgggggtcgcgtgatgaacgatggagtaccagtgctcaaatcgttt

SEQ ID NO: 457509 - DNA, 59 bp, Artificial
  Synthetic oligonucleotide
tcagcagtggtgtggtatgggggtaggccagtaacagaaattccatcatgggcgggaaa

SEQ ID NO: 457510 - DNA, 54 bp, Artificial
  Synthetic oligonucleotide
tcagcagtgtgaagatcacgctattaagctgagcatgctgactaagaaagcatg

SEQ ID NO: 457511 - DNA, 52 bp, Artificial
  Synthetic oligonucleotide
tcagcataaaacttaaggtcagccccgtttctaaaggacgttaaagccttgg

SEQ ID NO: 457512 - DNA, 60 bp, Artificial
  Synthetic oligonucleotide
tcagcataatctgggtgagctctacaggtttattggatgtgaatacctcgattcctgcta

SEQ ID NO: 457513 - DNA, 60 bp, Artificial
  Synthetic oligonucleotide
tcagcatcatagcaattctgaaagggattacaaatgtctggagaagcgggatcctacagc

SEQ ID NO: 457514 - DNA, 58 bp, Artificial
  Synthetic oligonucleotide
tcagcatcgggggagaactcgtgtttcaaacaagcgtccaaggccttatactgggtgc

SEQ ID NO: 457515 - DNA, 60 bp, Artificial
  Synthetic oligonucleotide
tcagcatcgttcgtggcttaagcggtacgttgataattatcacatggttagagtaattct

SEQ ID NO: 457516 - DNA, 60 bp, Artificial
  Synthetic oligonucleotide
tcagcatgacgcaacgcttcggtcgtgcacgattgaatgagaaggcgcaaaaagacttcc

SEQ ID NO: 457517 - DNA, 55 bp, Artificial
  Synthetic oligonucleotide
tcagcatgacgggtgaacggtcgttctctgtggtggtccggcagagcagtggcca

SEQ ID NO: 457518 - DNA, 60 bp, Artificial
  Synthetic oligonucleotide
tcagcatggacagaagtatcaacgacaacttccggtattagtggactaacaaattcgata

SEQ ID NO: 457519 - DNA, 50 bp, Artificial
  Synthetic oligonucleotide
tcagcatgtccagcaacaattccgttcctgccaacaatataagaagataa

SEQ ID NO: 457520 - DNA, 55 bp, Artificial
  Synthetic oligonucleotide
tcagcatgtgaatgtaccgaaagttgatcgtaaagttgttagcctggtagtgcga

SEQ ID NO: 457521 - DNA, 55 bp, Artificial
  Synthetic oligonucleotide
tcagcattccaatggaaggaacaaaagccattcttcctacttgggttccacggta

SEQ ID NO: 457522 - DNA, 55 bp, Artificial
  Synthetic oligonucleotide
tcagccaagagcctattgtgctgggacggtttcctccggggccgtgaatgctgct

SEQ ID NO: 457523 - DNA, 54 bp, Artificial
  Synthetic oligonucleotide
tcagccaataggggtactggtttaggtagtggagtgaccgttcctataccgagg

SEQ ID NO: 457524 - DNA, 60 bp, Artificial
  Synthetic oligonucleotide
tcagccaatggcgagccggctgtcaagttgtatacaccagttgagaacgcgcagcaagat

SEQ ID NO: 457525 - DNA, 60 bp, Artificial
  Synthetic oligonucleotide
tcagccacctatcgtcttgcactgcttcgaagacctcagaccaagtgatgaagacgaggg

SEQ ID NO: 457526 - DNA, 56 bp, Artificial
  Synthetic oligonucleotide
tcagccactggtgccggattaaggatggggaagattggttatcgctgcctgctgag

SEQ ID NO: 457527 - DNA, 60 bp, Artificial
  Synthetic oligonucleotide
tcagccagaagacgaggagatgatacgtaaaaaggtagagacttcgaaagatgctccacc

SEQ ID NO: 457528 - DNA, 53 bp, Artificial
  Synthetic oligonucleotide
tcagccagaggactgcatgggctacgaaccgggggaccggaagctggaacgta

SEQ ID NO: 457529 - DNA, 60 bp, Artificial
  Synthetic oligonucleotide
tcagccagatctaaatttggctatggggcgaaggacgtccgttgccatgccagaaaggcc

SEQ ID NO: 457530 - DNA, 60 bp, Artificial
  Synthetic oligonucleotide
tcagccagcgctgacgctagacaaagcagtcaaaccgaagttatgttcaacgattacacc

SEQ ID NO: 457531 - DNA, 60 bp, Artificial
  Synthetic oligonucleotide
tcagccagtaaggcctgtctttaatggcctccggcacgagacactttctagacagtcgcc

SEQ ID NO: 457532 - DNA, 58 bp, Artificial
  Synthetic oligonucleotide
tcagccagtatggtctcaccacagtctgcttggggttattcccaaaccccttaattca

SEQ ID NO: 457533 - DNA, 54 bp, Artificial
  Synthetic oligonucleotide
tcagccataaggagccttgcatatggaaacataaccaactgtgataagactaat

SEQ ID NO: 457534 - DNA, 55 bp, Artificial
  Synthetic oligonucleotide
tcagccatatctacgtttatcagttatccaagtttaggtaagactcaaccgaacc

SEQ ID NO: 457535 - DNA, 60 bp, Artificial
  Synthetic oligonucleotide
tcagccatcaacccagtcagccagtcgtcgcaggacttacccttgagtctgaacctgccc

SEQ ID NO: 457536 - DNA, 55 bp, Artificial
  Synthetic oligonucleotide
tcagcccaagccggaaaaggtgaattatgtgcagtgttcagagctgaccccgggc

SEQ ID NO: 457537 - DNA, 60 bp, Artificial
  Synthetic oligonucleotide
tcagcccaataaagtgtgttaactacaagtaacgagtgctctcatctgttctgccggcgt

SEQ ID NO: 457538 - DNA, 60 bp, Artificial
  Synthetic oligonucleotide
tcagcccattaacatagacgaggtgccaagagctaataatggactcgtcccagtggacca

SEQ ID NO: 457539 - DNA, 59 bp, Artificial
  Synthetic oligonucleotide
tcagccccaaattgaggagtggatttgaaatgctgaagatacctaatgctgggactgac

SEQ ID NO: 457540 - DNA, 57 bp, Artificial
  Synthetic oligonucleotide
tcagccccagaccattttgcaagactcccctataggtttactggaaacactcgcgga

SEQ ID NO: 457541 - DNA, 57 bp, Artificial
  Synthetic oligonucleotide
tcagcccctttatacttacaaacaggggtgtcctgatacccattaactgcagaatac

SEQ ID NO: 457542 - DNA, 55 bp, Artificial
  Synthetic oligonucleotide
tcagcccttcgaggaatcggtcgagtgccgcctgatcctcgtcagtgacgatcgg

SEQ ID NO: 457543 - DNA, 60 bp, Artificial
  Synthetic oligonucleotide
tcagccgaattaatctgtttgattcaaatctggatgtgggcgatcaagtagtacattgga

SEQ ID NO: 457544 - DNA, 55 bp, Artificial
  Synthetic oligonucleotide
tcagccgaccgactttgtgccggccaatctcgctgcgtggaatatgccgcgtcac

SEQ ID NO: 457545 - DNA, 50 bp, Artificial
  Synthetic oligonucleotide
tcagccggccaatcgttagagtcccaacgtacctgactccacgactgcgc

SEQ ID NO: 457546 - DNA, 57 bp, Artificial
  Synthetic oligonucleotide
tcagccgtcgtgtaccgatacagcaaccgaagcaccacatcttgaggatccattgag

SEQ ID NO: 457547 - DNA, 58 bp, Artificial
  Synthetic oligonucleotide
tcagccgtgtttcagacctattaccaacatcaagtcgacggcggcaattggtttcacc

SEQ ID NO: 457548 - DNA, 51 bp, Artificial
  Synthetic oligonucleotide
tcagccgttaacaaactgacaatgcgcgcggtaccccaacagaagccacgc

SEQ ID NO: 457549 - DNA, 60 bp, Artificial
  Synthetic oligonucleotide
tcagcctcattagaccgaatgagaatccagcacataagagtcaattggtatggatggcat

SEQ ID NO: 457550 - DNA, 60 bp, Artificial
  Synthetic oligonucleotide
tcagcctgaatggtttagaaacgtcttgagcatagcacctataatgttctcaaacaaaat

SEQ ID NO: 457551 - DNA, 51 bp, Artificial
  Synthetic oligonucleotide
tcagcctgatcgttggtgcggtgctatctttggtcgtgggtgcgtgactct

SEQ ID NO: 457552 - DNA, 54 bp, Artificial
  Synthetic oligonucleotide
tcagcctgggttggcgtttctcaagtgtgccttcgcaccacctgacttcaacac

SEQ ID NO: 457553 - DNA, 60 bp, Artificial
  Synthetic oligonucleotide
tcagccttattgaccactggcagcgctgtattgctataggcggtaacgagggagaccgtg

SEQ ID NO: 457554 - DNA, 60 bp, Artificial
  Synthetic oligonucleotide
tcagccttcatggtggtcctgcaacaaatagagactacttacggcaacgtcaggtagcat

SEQ ID NO: 457555 - DNA, 60 bp, Artificial
  Synthetic oligonucleotide
tcagccttgtaccgttcacgtttcattgattcggagattcgctctctgtgcaaccttatc

SEQ ID NO: 457556 - DNA, 58 bp, Artificial
  Synthetic oligonucleotide
tcagcctttgggagtggatgtggaatcccaccccataaggaagggagtggatgtggaa

SEQ ID NO: 457557 - DNA, 60 bp, Artificial
  Synthetic oligonucleotide
tcagcgaacagagagccctgacgcgcgaggagtaagaccatagcgatagggagagatgct

SEQ ID NO: 457558 - DNA, 54 bp, Artificial
  Synthetic oligonucleotide
tcagcgaagataagcaaacatatagcttaccaagagaagcccgtacagaggctt

SEQ ID NO: 457559 - DNA, 56 bp, Artificial
  Synthetic oligonucleotide
tcagcgacggaggcactcgagccccacaagatggatcgaatggaccgcagagacta

SEQ ID NO: 457560 - DNA, 59 bp, Artificial
  Synthetic oligonucleotide
tcagcgagaagttacgcttaggatatgaaaccttcaaagtcattgaaggctggtccaaa

SEQ ID NO: 457561 - DNA, 55 bp, Artificial
  Synthetic oligonucleotide
tcagcgagcgcccattcgcccaacgccttcgtgagaacccagtcgtcgggtaagc

SEQ ID NO: 457562 - DNA, 60 bp, Artificial
  Synthetic oligonucleotide
tcagcgagcgtcgacgtacagggtctctcctacacccacgcctcgcgttctgagagcctc

SEQ ID NO: 457563 - DNA, 50 bp, Artificial
  Synthetic oligonucleotide
tcagcgagctccacgcgtcttccacctcccggtacgtgagacacgctacg

SEQ ID NO: 457564 - DNA, 60 bp, Artificial
  Synthetic oligonucleotide
tcagcgaggtcgtgcataaacctggcgatcttgctcgtcattaccaagcagttggtaatg

SEQ ID NO: 457565 - DNA, 60 bp, Artificial
  Synthetic oligonucleotide
tcagcgatatgattcgacgcaggaacaggatcatcaacggtggctccgatgatgcgccaa

SEQ ID NO: 457566 - DNA, 60 bp, Artificial
  Synthetic oligonucleotide
tcagcgattgtgtctattgtttcacaaagttgatgcggctctttacacttcacattgtgt

SEQ ID NO: 457567 - DNA, 60 bp, Artificial
  Synthetic oligonucleotide
tcagcgcaaggcagttctgtcgactttagtcggcagatatggccgccgtacaaagttgta

SEQ ID NO: 457568 - DNA, 54 bp, Artificial
  Synthetic oligonucleotide
tcagcgcgatacccgaaaatgaatctgccgggtacgcaagtctgcgtcgactcg

SEQ ID NO: 457569 - DNA, 55 bp, Artificial
  Synthetic oligonucleotide
tcagcgctcctctgcagctacaggataaagtcgtctccttgcagctggaccctta

SEQ ID NO: 457570 - DNA, 55 bp, Artificial
  Synthetic oligonucleotide
tcagcgctggtatactgctcccactcgcggaccggctgctaattgccggcgttct

SEQ ID NO: 457571 - DNA, 55 bp, Artificial
  Synthetic oligonucleotide
tcagcgctgtccacttttataacttacccgactcttggtaaaactgagcccaacc

SEQ ID NO: 457572 - DNA, 60 bp, Artificial
  Synthetic oligonucleotide
tcagcgcttttttgtatgcaatcaagcaattcaccaatgagacatatgtggtaagcatca

SEQ ID NO: 457573 - DNA, 60 bp, Artificial
  Synthetic oligonucleotide
tcagcggaattgatctttcacatatgcgaagccctaagattgagcctaccattatcgcca

SEQ ID NO: 457574 - DNA, 55 bp, Artificial
  Synthetic oligonucleotide
tcagcggcaatttcagaggtatctgcaccgagtctgattatgaagcattcgacgc

SEQ ID NO: 457575 - DNA, 59 bp, Artificial
  Synthetic oligonucleotide
tcagcggctattgatgggttagttcaggggagcgtacattcgttaatgactggggagtc

SEQ ID NO: 457576 - DNA, 60 bp, Artificial
  Synthetic oligonucleotide
tcagcgggatacaatacttagctggcttgtccaccctacctggcaaccctgcaatagcat

SEQ ID NO: 457577 - DNA, 60 bp, Artificial
  Synthetic oligonucleotide
tcagcgggatacaatacttggcaggcttgtccaccttgcctgggaaccccgcaatagcat

SEQ ID NO: 457578 - DNA, 53 bp, Artificial
  Synthetic oligonucleotide
tcagcgggatacagtacctagcaggcttgtctactttgcctgggaatcctgca

SEQ ID NO: 457579 - DNA, 53 bp, Artificial
  Synthetic oligonucleotide
tcagcgggatacagtacttagcaggcctgtccactctgcctgggaaccccgct

SEQ ID NO: 457580 - DNA, 55 bp, Artificial
  Synthetic oligonucleotide
tcagcgggctacattaaaaacccgaagtggcaaacgtataggtgcacgggttcat

SEQ ID NO: 457581 - DNA, 60 bp, Artificial
  Synthetic oligonucleotide
tcagcggggtacaatacctagcaggcttatccactctgcctgggaaccccgcaatagcat

SEQ ID NO: 457582 - DNA, 60 bp, Artificial
  Synthetic oligonucleotide
tcagcggtcaaaattcttgctgatggatgctctgaaactaagtattgaagacccgagtca

SEQ ID NO: 457583 - DNA, 50 bp, Artificial
  Synthetic oligonucleotide
tcagcggtggagctcaggaatgccgcctatgaagctgtcgtggtgagcat

SEQ ID NO: 457584 - DNA, 60 bp, Artificial
  Synthetic oligonucleotide
tcagcggttgttgatcgatgaagcgggactacttcatttcggtcaagtcctggcagtggc

SEQ ID NO: 457585 - DNA, 60 bp, Artificial
  Synthetic oligonucleotide
tcagcgtacaacccactttctctgtgcagaggaatctcccattcgagagagcgaccatca

SEQ ID NO: 457586 - DNA, 53 bp, Artificial
  Synthetic oligonucleotide
tcagcgtacaccctcgcaattacaatcaacggggagcagcaaatgttcactgc

SEQ ID NO: 457587 - DNA, 58 bp, Artificial
  Synthetic oligonucleotide
tcagcgtaggggtaggcatattcctgctgcctgctcggtaggcagcataacactccgg

SEQ ID NO: 457588 - DNA, 52 bp, Artificial
  Synthetic oligonucleotide
tcagcgtatgagtgaacgacagtgtggctacccagctatgaccacactccgc

SEQ ID NO: 457589 - DNA, 60 bp, Artificial
  Synthetic oligonucleotide
tcagcgtcattcacactgaacagatcacaaccagctcacgataacttgatgggtacaatg

SEQ ID NO: 457590 - DNA, 51 bp, Artificial
  Synthetic oligonucleotide
tcagcgtcgcaccaacctcagcgcataagcgagccggtagcagcagactga

SEQ ID NO: 457591 - DNA, 55 bp, Artificial
  Synthetic oligonucleotide
tcagcgtggttttaccacctttgtgtaactattgtgatagtgtggttgggccacc

SEQ ID NO: 457592 - DNA, 60 bp, Artificial
  Synthetic oligonucleotide
tcagcgtttcaccgctaacatatcagcgttggtaagtgagcaataagaattgccgtacaa

SEQ ID NO: 457593 - DNA, 60 bp, Artificial
  Synthetic oligonucleotide
tcagctaaagattacaccaaattcattagggatgagctaatcgagagacttggcaaatgg

SEQ ID NO: 457594 - DNA, 53 bp, Artificial
  Synthetic oligonucleotide
tcagctaccgtgcaggggccaagtttggacttcgccctgtccctacttagaag

SEQ ID NO: 457595 - DNA, 54 bp, Artificial
  Synthetic oligonucleotide
tcagctacgcatctaatatcagatttagtgcagagaagtcgcgatcaagtcagc

SEQ ID NO: 457596 - DNA, 54 bp, Artificial
  Synthetic oligonucleotide
tcagctacttgcttagtgcttaacttcttacttgatgggtttaagaggccacca

SEQ ID NO: 457597 - DNA, 55 bp, Artificial
  Synthetic oligonucleotide
tcagctagaactttgaatgcgtgggtaaaggtagtagaggagaaggctttcagcc

SEQ ID NO: 457598 - DNA, 59 bp, Artificial
  Synthetic oligonucleotide
tcagctagaagaaagtctaggttgcgatatttgccattaatagaccctaggtcgttaga

SEQ ID NO: 457599 - DNA, 50 bp, Artificial
  Synthetic oligonucleotide
tcagctagatgcaggagctaattcaaacaagaaggataaacaaacaaccg

SEQ ID NO: 457600 - DNA, 60 bp, Artificial
  Synthetic oligonucleotide
tcagctagattggacaatgcagtggataaactaactagatggacaaatagcttgtcaaca

SEQ ID NO: 457601 - DNA, 55 bp, Artificial
  Synthetic oligonucleotide
tcagctattaggcgaagttgcgagtgcagtggcaacgcatacgcatagaggatcg

SEQ ID NO: 457602 - DNA, 60 bp, Artificial
  Synthetic oligonucleotide
tcagctcaacctcgacttttcgggttggatggtggcatcagtacacaagaggagaacaca

SEQ ID NO: 457603 - DNA, 60 bp, Artificial
  Synthetic oligonucleotide
tcagctcccaccgagctcccattgattgtacctccatttcctcctgcctcagtccaaact

SEQ ID NO: 457604 - DNA, 58 bp, Artificial
  Synthetic oligonucleotide
tcagctcccagagcggtcctaacgccgttggtgattccgccccctcctcatccgtgaa

SEQ ID NO: 457605 - DNA, 54 bp, Artificial
  Synthetic oligonucleotide
tcagctcccctccctcgccttccctgaacctggcctccgtccccaaaacgtcta

SEQ ID NO: 457606 - DNA, 55 bp, Artificial
  Synthetic oligonucleotide
tcagctccgtgatcaatgtttggacgtcctgcgtgagtacggaagaagtagacga

SEQ ID NO: 457607 - DNA, 60 bp, Artificial
  Synthetic oligonucleotide
tcagctcctttgtatctacatatgggagtcccccagtagccattataagctgaatactcc

SEQ ID NO: 457608 - DNA, 58 bp, Artificial
  Synthetic oligonucleotide
tcagctcgaaacaggaaatgtgatcccgcactacagaactgaaggacactttctcgaa

SEQ ID NO: 457609 - DNA, 60 bp, Artificial
  Synthetic oligonucleotide
tcagctctagaattggaagacttggcgaggtggctaactttggtgatgacgcagagtagt

SEQ ID NO: 457610 - DNA, 55 bp, Artificial
  Synthetic oligonucleotide
tcagctctagccagatatgaggttaactttctcgggtttgtaatttcagaaacag

SEQ ID NO: 457611 - DNA, 60 bp, Artificial
  Synthetic oligonucleotide
tcagctctcggtcctgagctctcttgctcccgagaccttctggtcggctatccggcagcg

SEQ ID NO: 457612 - DNA, 60 bp, Artificial
  Synthetic oligonucleotide
tcagctctggtggaaatggggcatcatgctccttgggatgttaatgatctgtagtaccat

SEQ ID NO: 457613 - DNA, 60 bp, Artificial
  Synthetic oligonucleotide
tcagctctgtcaagcctatggtctacactttccaagggatggctagtgacttgtctcggt

SEQ ID NO: 457614 - DNA, 60 bp, Artificial
  Synthetic oligonucleotide
tcagctcttaaaagaatgcaagaaaacctcgaaactgatacatctctcgaatctgatgat

SEQ ID NO: 457615 - DNA, 60 bp, Artificial
  Synthetic oligonucleotide
tcagctgaggagtgcggattcagtgatagagttaggtcaatcaccatcgggaattctacg

SEQ ID NO: 457616 - DNA, 60 bp, Artificial
  Synthetic oligonucleotide
tcagctgatcaacgtcacccaacattcaactagaataacagacacacctggacccaaggt

SEQ ID NO: 457617 - DNA, 60 bp, Artificial
  Synthetic oligonucleotide
tcagctgcaataagtcatcaagatattattatcccacatcgcacgcaggtacatccatta

SEQ ID NO: 457618 - DNA, 60 bp, Artificial
  Synthetic oligonucleotide
tcagctgcagttattaaaatgcgcatatggaatgttgagtctccaaaaacattaagacat

SEQ ID NO: 457619 - DNA, 51 bp, Artificial
  Synthetic oligonucleotide
tcagctgccaagcacgagcctttcaacttcaaatttaataccctctgaagg

SEQ ID NO: 457620 - DNA, 60 bp, Artificial
  Synthetic oligonucleotide
tcagctgccgttactgccatgtttggagcgcccaacgttgcagtgctacaaggcccagtt

SEQ ID NO: 457621 - DNA, 60 bp, Artificial
  Synthetic oligonucleotide
tcagctgctgaatacactgtacgacctacaagtcaaccagtgtcataaccaggcagtgat

SEQ ID NO: 457622 - DNA, 60 bp, Artificial
  Synthetic oligonucleotide
tcagctggagacaccacttgtcgagattatcaaggatatcgcccgactgtcatcccctac

SEQ ID NO: 457623 - DNA, 57 bp, Artificial
  Synthetic oligonucleotide
tcagctggcgatttgttttggaaagggtacaatcggacgttcatcgacaaccggcca

SEQ ID NO: 457624 - DNA, 60 bp, Artificial
  Synthetic oligonucleotide
tcagctggtcatttgctagatgtacttaaagagtgtcctaggacaatgcattcatatgta

SEQ ID NO: 457625 - DNA, 60 bp, Artificial
  Synthetic oligonucleotide
tcagctggttggacagaattacgtttcgatcgggagaaatcatcgattggtattaggaga

SEQ ID NO: 457626 - DNA, 55 bp, Artificial
  Synthetic oligonucleotide
tcagctgtctcgtcgttcatcacttatcccagcttgggcaagtcggactccagcc

SEQ ID NO: 457627 - DNA, 60 bp, Artificial
  Synthetic oligonucleotide
tcagctgtggctgagactacaaactgctggaaatgtagaccacgtaggcctcggcactgc

SEQ ID NO: 457628 - DNA, 60 bp, Artificial
  Synthetic oligonucleotide
tcagctgtttatcaaggattacagatacacgtatcggtgtcacagaggggacacacaaat

SEQ ID NO: 457629 - DNA, 60 bp, Artificial
  Synthetic oligonucleotide
tcagcttagcaagacaaagggcagttaaccctgctatatcaggagtcagtaactacacag

SEQ ID NO: 457630 - DNA, 55 bp, Artificial
  Synthetic oligonucleotide
tcagcttggcccacagctaaattcatctcagcaatgcagatggtgacgctagggg

SEQ ID NO: 457631 - DNA, 54 bp, Artificial
  Synthetic oligonucleotide
tcagctttatgcgctgtactgcgtggattttgttaccgagtgggttagcatcgt

SEQ ID NO: 457632 - DNA, 60 bp, Artificial
  Synthetic oligonucleotide
tcagctttgtaccgggaatccttagagtcctctgatcattgttcgcctcaccatacagca

SEQ ID NO: 457633 - DNA, 54 bp, Artificial
  Synthetic oligonucleotide
tcagctttgtctgccaaagggtcgatatggatattatagtgtactgtaatggtc

SEQ ID NO: 457634 - DNA, 55 bp, Artificial
  Synthetic oligonucleotide
tcaggaaacagctactctctgcacccatctttgctgagtaagaggaaacgcaaac

SEQ ID NO: 457635 - DNA, 55 bp, Artificial
  Synthetic oligonucleotide
tcaggaaaccatgtccctggtgggtactgtttggagcagtgggccgttgtttggg

SEQ ID NO: 457636 - DNA, 59 bp, Artificial
  Synthetic oligonucleotide
tcaggaaacgtggataacgagggtggtagtaatcagaagccaatgtctactaggatagc

SEQ ID NO: 457637 - DNA, 55 bp, Artificial
  Synthetic oligonucleotide
tcaggaaacttggggcccctcccttgcgggcctggagacatcgggctagggcagt

SEQ ID NO: 457638 - DNA, 60 bp, Artificial
  Synthetic oligonucleotide
tcaggaacaaataggatggatgacacataatccacctatcccagtaggagaaatctataa

SEQ ID NO: 457639 - DNA, 60 bp, Artificial
  Synthetic oligonucleotide
tcaggaacaagcattcaaatgggacaatccatgataggacagcttttcgaggtctcatat

SEQ ID NO: 457640 - DNA, 60 bp, Artificial
  Synthetic oligonucleotide
tcaggaacatggtatggttgatccaccaatcagggacatatcctgttataaggaggacat

SEQ ID NO: 457641 - DNA, 52 bp, Artificial
  Synthetic oligonucleotide
tcaggaacgtcccgttaagacacgcaaactgttttgtttagggggagtagga

SEQ ID NO: 457642 - DNA, 59 bp, Artificial
  Synthetic oligonucleotide
tcaggaactattattttggagtagacccccgtgatctcgtcgacacgtatcgctctgta

SEQ ID NO: 457643 - DNA, 53 bp, Artificial
  Synthetic oligonucleotide
tcaggaagcaaagggacgtactctaaacgaggcgtacaaggaatttcttaacc

SEQ ID NO: 457644 - DNA, 60 bp, Artificial
  Synthetic oligonucleotide
tcaggaagcagctaactcggtggtggcttatggagtgtggcctagttacttgagtgataa

SEQ ID NO: 457645 - DNA, 60 bp, Artificial
  Synthetic oligonucleotide
tcaggaagcaggaaaatacgagaatcacacggagaatgctctgttattgtatatggcatc

SEQ ID NO: 457646 - DNA, 60 bp, Artificial
  Synthetic oligonucleotide
tcaggaaggaaagtgcatgacagacatgttttgcgagcctaggaatcttggccttgtccc

SEQ ID NO: 457647 - DNA, 60 bp, Artificial
  Synthetic oligonucleotide
tcaggaagtctttatagctagcaccctcaccaggattgcacagcacgattgatgggattc

SEQ ID NO: 457648 - DNA, 55 bp, Artificial
  Synthetic oligonucleotide
tcaggaagtggaccccaggttggacctaatcatttaggaagtggacccccagcca

SEQ ID NO: 457649 - DNA, 60 bp, Artificial
  Synthetic oligonucleotide
tcaggaagttttacctgtggctactcgaaagagatgagctaagggagattgctgctagcg

SEQ ID NO: 457650 - DNA, 60 bp, Artificial
  Synthetic oligonucleotide
tcaggaatcactaagatacagaccacttcagtgggacgtagagaaaagctggagaataaa

SEQ ID NO: 457651 - DNA, 59 bp, Artificial
  Synthetic oligonucleotide
tcaggaatcagaatgcgtttgtatcgatggtacttgcacagtggtaatgactgatggga

SEQ ID NO: 457652 - DNA, 59 bp, Artificial
  Synthetic oligonucleotide
tcaggaattggacaaggttgattcttataccccctacatgattgatttaggaatctcta

SEQ ID NO: 457653 - DNA, 55 bp, Artificial
  Synthetic oligonucleotide
tcaggacactatgacgagagaccacgccggtacgcgtgttgtgcgtgctgggatg

SEQ ID NO: 457654 - DNA, 60 bp, Artificial
  Synthetic oligonucleotide
tcaggacagtagtttcactggttcctgcactaatgctgttggagggagtgggacgaataa

SEQ ID NO: 457655 - DNA, 60 bp, Artificial
  Synthetic oligonucleotide
tcaggacatctgtatgtgacactgttgagtggatcatacgtcacggatctattgtggtgg

SEQ ID NO: 457656 - DNA, 57 bp, Artificial
  Synthetic oligonucleotide
tcaggacctcagcatggacaacacacaaggtactgaccctttggaaggggggagtgg

SEQ ID NO: 457657 - DNA, 60 bp, Artificial
  Synthetic oligonucleotide
tcaggacgcagaacacaaccggagagcagtggggagagcgatcaggagggggagctgttt

SEQ ID NO: 457658 - DNA, 55 bp, Artificial
  Synthetic oligonucleotide
tcaggacgggtcagccgtcttagagctagatctctgcaatcgtgatgtctcgcgc

SEQ ID NO: 457659 - DNA, 54 bp, Artificial
  Synthetic oligonucleotide
tcaggacggttccgctgtcctggagcttgatctgtgtaaccgtgatgtctcgcg

SEQ ID NO: 457660 - DNA, 60 bp, Artificial
  Synthetic oligonucleotide
tcaggagaagttgacaaagaaagacttgatctggttggatgagaatgggctgctgttagg

SEQ ID NO: 457661 - DNA, 60 bp, Artificial
  Synthetic oligonucleotide
tcaggagaatgtgtggtgaatggcaccgattgacactgtgcctctaagtcacctattcaa

SEQ ID NO: 457662 - DNA, 60 bp, Artificial
  Synthetic oligonucleotide
tcaggagacgtgggcgcaatcaatggtagtctatccacattgggtaacagaatcgatgtt

SEQ ID NO: 457663 - DNA, 55 bp, Artificial
  Synthetic oligonucleotide
tcaggagacttccagtctctcagaagtctatatgctaggcttaacgggcttcggt

SEQ ID NO: 457664 - DNA, 60 bp, Artificial
  Synthetic oligonucleotide
tcaggagcagagatcttgaaatcacagttggggccggcattctggacacgggagttgcga

SEQ ID NO: 457665 - DNA, 54 bp, Artificial
  Synthetic oligonucleotide
tcaggagcgtcccagtcgggcgttgcttgaccctccccgcgttttcgaccctac

SEQ ID NO: 457666 - DNA, 60 bp, Artificial
  Synthetic oligonucleotide
tcaggagctaaaaactagtgccatttctttgcttgatgctatagcaataacagtaggggg

SEQ ID NO: 457667 - DNA, 55 bp, Artificial
  Synthetic oligonucleotide
tcaggaggactgacgttggccgtaggctgtatcttccaccatacagtctgctgca

SEQ ID NO: 457668 - DNA, 59 bp, Artificial
  Synthetic oligonucleotide
tcaggaggcgccgtatcgttgcatccttctggagtaacactatcaacccagtttacgga

SEQ ID NO: 457669 - DNA, 55 bp, Artificial
  Synthetic oligonucleotide
tcaggaggcgctgtgtcgttacatccttctggagtaacgttgtcaactcaattta

SEQ ID NO: 457670 - DNA, 54 bp, Artificial
  Synthetic oligonucleotide
tcaggaggggatccagaaattacaacacacagttttaattgtggaggggaattt

SEQ ID NO: 457671 - DNA, 60 bp, Artificial
  Synthetic oligonucleotide
tcaggagtatgtcgcatctcacatgtacccaacatttttacggcttgtcaatgagttgct

SEQ ID NO: 457672 - DNA, 60 bp, Artificial
  Synthetic oligonucleotide
tcaggagtgaaagatccgcgtcctgataacgttgaagcaacacgctctttgggtagagcg

SEQ ID NO: 457673 - DNA, 60 bp, Artificial
  Synthetic oligonucleotide
tcaggagtggcgcatgacgtacttgcgggaacggatcgacctcactgatgtctacacgca

SEQ ID NO: 457674 - DNA, 57 bp, Artificial
  Synthetic oligonucleotide
tcaggagttaactattactgccgaaggtggggatatagtctttcagaacgcaggatt

SEQ ID NO: 457675 - DNA, 55 bp, Artificial
  Synthetic oligonucleotide
tcaggagtttatcttgatccctggccattaactccatacagacaccaatcaggca

SEQ ID NO: 457676 - DNA, 51 bp, Artificial
  Synthetic oligonucleotide
tcaggataacggttcctggaatacgttgtatgaaaacattaagatgtctgc

SEQ ID NO: 457677 - DNA, 60 bp, Artificial
  Synthetic oligonucleotide
tcaggatacatgtcaactgtttcacagggaggggcacccgcacctattgtctggtcagga

SEQ ID NO: 457678 - DNA, 60 bp, Artificial
  Synthetic oligonucleotide
tcaggatctaagtgataacccatgtaaggttgatctacacacacaagctatagaaggagc

SEQ ID NO: 457679 - DNA, 56 bp, Artificial
  Synthetic oligonucleotide
tcaggatctcatccccacccaggaatcacgttactccttttggcttgcgttcgggt

SEQ ID NO: 457680 - DNA, 57 bp, Artificial
  Synthetic oligonucleotide
tcaggatctccatggaggtttattaaagataaagtctgtaagtggttacagttgact

SEQ ID NO: 457681 - DNA, 52 bp, Artificial
  Synthetic oligonucleotide
tcaggatggacctctgcatccggaggccgtctgtctgctgtgagatgaagcc

SEQ ID NO: 457682 - DNA, 60 bp, Artificial
  Synthetic oligonucleotide
tcaggatgtaaggatttctgccttcgcatggcaagggataccaacttgcataaacaaagt

SEQ ID NO: 457683 - DNA, 58 bp, Artificial
  Synthetic oligonucleotide
tcaggatgtacgtggggggggtcgaacacaggctggaagttgcttgcaactggacgcg

SEQ ID NO: 457684 - DNA, 53 bp, Artificial
  Synthetic oligonucleotide
tcaggatgtctcctgagaagctagtttctgacaagtggtttgcaacccaaaag

SEQ ID NO: 457685 - DNA, 55 bp, Artificial
  Synthetic oligonucleotide
tcaggattcctaggacccctgctcgtgttacaggcggggtttttctcgttgacaa

SEQ ID NO: 457686 - DNA, 57 bp, Artificial
  Synthetic oligonucleotide
tcaggatttaagtgacaacccgtgtaaggttgatttacatacacaggcaatagaagg

SEQ ID NO: 457687 - DNA, 55 bp, Artificial
  Synthetic oligonucleotide
tcaggatttgcctcgctgcgtgttcactgccggctttgtccgcgtgtggaacgcc

SEQ ID NO: 457688 - DNA, 57 bp, Artificial
  Synthetic oligonucleotide
tcaggcaagccatactatgttggggggaattaatgactctagctacctgggtggggg

SEQ ID NO: 457689 - DNA, 55 bp, Artificial
  Synthetic oligonucleotide
tcaggcaagccattgtctgctggggagaattgatgaatctagctacctgggtggg

SEQ ID NO: 457690 - DNA, 60 bp, Artificial
  Synthetic oligonucleotide
tcaggcaagccgttctgtgttggggtgagttgatgaatcttgcaacctgggtgggaagta

SEQ ID NO: 457691 - DNA, 60 bp, Artificial
  Synthetic oligonucleotide
tcaggcaagctgtgctatgttggggtgagttgatgaatctcgcaacctgggtgggaagta

SEQ ID NO: 457692 - DNA, 57 bp, Artificial
  Synthetic oligonucleotide
tcaggcatacaacacgccatgtatctcagaggggtgaacaggagcttacacggaata

SEQ ID NO: 457693 - DNA, 60 bp, Artificial
  Synthetic oligonucleotide
tcaggccaacaatggtgaagacgctactgctggtcttactcatatgatgatctggcactc

SEQ ID NO: 457694 - DNA, 60 bp, Artificial
  Synthetic oligonucleotide
tcaggccagaaatagcagcaagacccaaggtgagaggtcaagcagggagaatgaactact

SEQ ID NO: 457695 - DNA, 60 bp, Artificial
  Synthetic oligonucleotide
tcaggccccggggcatcctgtgaagcattctctgaaggtgggatcttcaacataacatcc

SEQ ID NO: 457696 - DNA, 60 bp, Artificial
  Synthetic oligonucleotide
tcaggcctcggtctcaatgctgtagcgtattaccggggtctagacgtgtccatcataccg

SEQ ID NO: 457697 - DNA, 60 bp, Artificial
  Synthetic oligonucleotide
tcaggcctgtttaatagcacttgggataacactaacatcacgcagccaaatagcacaggg

SEQ ID NO: 457698 - DNA, 55 bp, Artificial
  Synthetic oligonucleotide
tcaggccttgctgttggaataaacccatacaaagattggcacttcatgatcaatg

SEQ ID NO: 457699 - DNA, 60 bp, Artificial
  Synthetic oligonucleotide
tcaggccttggactcaatgctgtggcgtattaccggggccttgatgtgtccgtcataccg

SEQ ID NO: 457700 - DNA, 60 bp, Artificial
  Synthetic oligonucleotide
tcaggcgaaattaatgcataaaatcggtggaaaccggaagttcaatctagatgcactcca

SEQ ID NO: 457701 - DNA, 56 bp, Artificial
  Synthetic oligonucleotide
tcaggcgctatcggattctgggcatcttacgccttggggattgagcgtaatacaag

SEQ ID NO: 457702 - DNA, 60 bp, Artificial
  Synthetic oligonucleotide
tcaggcgctctgcacacctttgacgagcttttcggtgctaggatccacagccatggtaac

SEQ ID NO: 457703 - DNA, 52 bp, Artificial
  Synthetic oligonucleotide
tcaggcggcatttcactaggactagacatcggcgaagctattcgtcgcgcaa

SEQ ID NO: 457704 - DNA, 55 bp, Artificial
  Synthetic oligonucleotide
tcaggcggggtggacatgatctcttggacctcggcggccacgggagtggacacca

SEQ ID NO: 457705 - DNA, 55 bp, Artificial
  Synthetic oligonucleotide
tcaggcgggtaacgctcttgttgcgactggactagcgattactctacccccagga

SEQ ID NO: 457706 - DNA, 53 bp, Artificial
  Synthetic oligonucleotide
tcaggcggtgaggttaaacccccaatacctgacgtcccggatgttccgagcgt

SEQ ID NO: 457707 - DNA, 55 bp, Artificial
  Synthetic oligonucleotide
tcaggcgtaagtatgttgctgggcatactagaccctgtgttaggcgacgattgtc

SEQ ID NO: 457708 - DNA, 59 bp, Artificial
  Synthetic oligonucleotide
tcaggcgtatatgcaaaacaagctacgtcagtctgactttgttaacactacgagtaaac

SEQ ID NO: 457709 - DNA, 60 bp, Artificial
  Synthetic oligonucleotide
tcaggcgttaaatggaaagtttggctcagctattagaaatagaaattggatgactgattc

SEQ ID NO: 457710 - DNA, 53 bp, Artificial
  Synthetic oligonucleotide
tcaggcgttttcggactcgttcgggaccggtgcccgggatgtcgacaaagagg

SEQ ID NO: 457711 - DNA, 54 bp, Artificial
  Synthetic oligonucleotide
tcaggctacctacggtgtcgtgggggattggggctaaatttgtcttagtcccgc

SEQ ID NO: 457712 - DNA, 54 bp, Artificial
  Synthetic oligonucleotide
tcaggctactgttactggtggccagtatgcatgtaaagagcaagccttagtcag

SEQ ID NO: 457713 - DNA, 60 bp, Artificial
  Synthetic oligonucleotide
tcaggctagatttggtactattatcgcaagaaattttgatacaattcggttgtcatttca

SEQ ID NO: 457714 - DNA, 51 bp, Artificial
  Synthetic oligonucleotide
tcaggctatgcgtgatcagaagtacgatattcgcgaaggcaagaaacccgg

SEQ ID NO: 457715 - DNA, 60 bp, Artificial
  Synthetic oligonucleotide
tcaggctatgtctctgcaagaccccctgtctcgagaagcaaagagtaagggatggtccta

SEQ ID NO: 457716 - DNA, 55 bp, Artificial
  Synthetic oligonucleotide
tcaggctcctcctcaactctacccctagacagctgcgaaataatccgcccacccc

SEQ ID NO: 457717 - DNA, 60 bp, Artificial
  Synthetic oligonucleotide
tcaggctggtcaattgcgagctcacaaaagatctagtggaggccgtgctactaaggccgt

SEQ ID NO: 457718 - DNA, 56 bp, Artificial
  Synthetic oligonucleotide
tcaggctttctccccgaggaaattgcctccttctcgagttgagagggatcccctta

SEQ ID NO: 457719 - DNA, 58 bp, Artificial
  Synthetic oligonucleotide
tcagggaaagtgatgtgcgtttgtagggataattggcacggttcgaatcgaccatggg

SEQ ID NO: 457720 - DNA, 60 bp, Artificial
  Synthetic oligonucleotide
tcagggaatagctacagctgtgcagcttactggtcttccaggaactattattgaagcaca

SEQ ID NO: 457721 - DNA, 59 bp, Artificial
  Synthetic oligonucleotide
tcagggaatcaggtttcactgatcctaacggcttacgagtttgctaggttgccctcata

SEQ ID NO: 457722 - DNA, 55 bp, Artificial
  Synthetic oligonucleotide
tcagggacatatcctgtgatacggaggacattcaacaacaccaaagggagagatg

SEQ ID NO: 457723 - DNA, 60 bp, Artificial
  Synthetic oligonucleotide
tcagggaccgcgttgagatggcattgccatggactgattacctctggactcggggtcagt

SEQ ID NO: 457724 - DNA, 55 bp, Artificial
  Synthetic oligonucleotide
tcagggactgatacccccactaccataagtcccaaacgggcaggaaccggagaca

SEQ ID NO: 457725 - DNA, 58 bp, Artificial
  Synthetic oligonucleotide
tcagggaggcgagaaattttgagcttagccgacaggatgcggtagtgggtattcgtat

SEQ ID NO: 457726 - DNA, 55 bp, Artificial
  Synthetic oligonucleotide
tcagggatatattgaggcggtacaattggaggagttacgggcggcgatcacgtgg

SEQ ID NO: 457727 - DNA, 51 bp, Artificial
  Synthetic oligonucleotide
tcagggatcaagctgaacaccttaagacagcagtacagatggcagtataca

SEQ ID NO: 457728 - DNA, 55 bp, Artificial
  Synthetic oligonucleotide
tcagggatgccacagaccaaacccaaagtgcctacaattagacaagcaaaggtac

SEQ ID NO: 457729 - DNA, 56 bp, Artificial
  Synthetic oligonucleotide
tcagggcagcaacccacgagggccgttgactggtcgggaacgcggtattataccgc

SEQ ID NO: 457730 - DNA, 55 bp, Artificial
  Synthetic oligonucleotide
tcagggcgattctgaagaggatattcgcgcagacattgaggaccttctagacggt

SEQ ID NO: 457731 - DNA, 57 bp, Artificial
  Synthetic oligonucleotide
tcagggcgctgtgccctgaaattataagacgttctcctggccttgtactaggttctg

SEQ ID NO: 457732 - DNA, 60 bp, Artificial
  Synthetic oligonucleotide
tcagggcgtgaaaggcaagacgaaacgtggtcgtggtgcaagagtgaacttgggcaatga

SEQ ID NO: 457733 - DNA, 50 bp, Artificial
  Synthetic oligonucleotide
tcagggctgcactgagaggtgcaagcgtatacatctgggcatatggcgat

SEQ ID NO: 457734 - DNA, 56 bp, Artificial
  Synthetic oligonucleotide
tcagggctggggctaaaattgcatcgcgagtcattaatggttgcggaactttcatt

SEQ ID NO: 457735 - DNA, 59 bp, Artificial
  Synthetic oligonucleotide
tcagggcttcagctgatcaatgtcactcgacattcaactagaatagccgacacacccgg

SEQ ID NO: 457736 - DNA, 60 bp, Artificial
  Synthetic oligonucleotide
tcagggcttcagttgatcaatgtcactcggcattcaactaaaatagctgatacacctggg

SEQ ID NO: 457737 - DNA, 54 bp, Artificial
  Synthetic oligonucleotide
tcaggggaacaagagtggtcccaagaggacaattgtccaccagaggagtccaaa

SEQ ID NO: 457738 - DNA, 60 bp, Artificial
  Synthetic oligonucleotide
tcaggggaattgacttatcacatatgcgaagccccaagatcgaacctactattatcgcca

SEQ ID NO: 457739 - DNA, 57 bp, Artificial
  Synthetic oligonucleotide
tcaggggaggctctcaagctcttatttgaaaaagtggctaccttatttaagctccga

SEQ ID NO: 457740 - DNA, 55 bp, Artificial
  Synthetic oligonucleotide
tcaggggattacagagggggtgggaagcccttaaatatctgggaagccttgggca

SEQ ID NO: 457741 - DNA, 60 bp, Artificial
  Synthetic oligonucleotide
tcaggggcagtctctgtgtcctgccggcgcaaggagacaggctcagactgtgttgcctcg

SEQ ID NO: 457742 - DNA, 58 bp, Artificial
  Synthetic oligonucleotide
tcaggggccgcatacgtagcgttctgccggatgcaccaaggacgggtagggataccta

SEQ ID NO: 457743 - DNA, 56 bp, Artificial
  Synthetic oligonucleotide
tcaggggcggaatatataaccttagtgtccgatccctatggatttaagcccatacg

SEQ ID NO: 457744 - DNA, 58 bp, Artificial
  Synthetic oligonucleotide
tcaggggcggtttacgtgggcaattacaggctggtaaacagacacctggctacgcaca

SEQ ID NO: 457745 - DNA, 60 bp, Artificial
  Synthetic oligonucleotide
tcagggggattcatatactatatgttgcctgtatcaaaagttgacttacacttaagagtg

SEQ ID NO: 457746 - DNA, 55 bp, Artificial
  Synthetic oligonucleotide
tcagggggtgggaacccctgggtaatgtatgtcccacggacagtgccagggccaa

SEQ ID NO: 457747 - DNA, 58 bp, Artificial
  Synthetic oligonucleotide
tcaggggttagtaagatagctatggttatccgtgacaatttctcccggatgggccatc

SEQ ID NO: 457748 - DNA, 60 bp, Artificial
  Synthetic oligonucleotide
tcagggtactgctgtcatccctatcactgctactgataaggagaccaactctactccagc

SEQ ID NO: 457749 - DNA, 59 bp, Artificial
  Synthetic oligonucleotide
tcagggtcatgggcactaatcagggattattgcactagggtgggtttgagggccaatta

SEQ ID NO: 457750 - DNA, 55 bp, Artificial
  Synthetic oligonucleotide
tcagggtccctgtttgagtcagactgcgattggctggttaatgcatctaaccccg

SEQ ID NO: 457751 - DNA, 54 bp, Artificial
  Synthetic oligonucleotide
tcagggtcgaggagacaacccccgctccgaaacaggagtcgaaagacagggaac

SEQ ID NO: 457752 - DNA, 58 bp, Artificial
  Synthetic oligonucleotide
tcagggtcttgtgcaaaactatacagctacctatcctgaaggagttatagctcccaag

SEQ ID NO: 457753 - DNA, 59 bp, Artificial
  Synthetic oligonucleotide
tcagggtgcctatggtatcgccttcgtcttgccgttactctatcgcaacgactggcggt

SEQ ID NO: 457754 - DNA, 51 bp, Artificial
  Synthetic oligonucleotide
tcagggttgatatgttggttagtatctccaccactaccccttcgcagtgag

SEQ ID NO: 457755 - DNA, 53 bp, Artificial
  Synthetic oligonucleotide
tcagggttggttcgatctaggtcttgttgaaattgtcgaagatgtcattcaat

SEQ ID NO: 457756 - DNA, 60 bp, Artificial
  Synthetic oligonucleotide
tcaggtatgagagtcgctacgccgcgactatgacggatgttgggactagttgggttccga

SEQ ID NO: 457757 - DNA, 60 bp, Artificial
  Synthetic oligonucleotide
tcaggtattgcgaatgctcactgctttgccatatgattactatgaatcggactttcactc

SEQ ID NO: 457758 - DNA, 57 bp, Artificial
  Synthetic oligonucleotide
tcaggtcacgccccgaccactgttcaggtcgctactacgtattcctccgaggagaaa

SEQ ID NO: 457759 - DNA, 58 bp, Artificial
  Synthetic oligonucleotide
tcaggtcagagaatgatcccagctttagaagctgccttgaaactggtcccaaccttta

SEQ ID NO: 457760 - DNA, 60 bp, Artificial
  Synthetic oligonucleotide
tcaggtcatctgttggatctggggtacctgcaaatattgtaaactactctctagaggtgc

SEQ ID NO: 457761 - DNA, 55 bp, Artificial
  Synthetic oligonucleotide
tcaggtcatgcaccggttctatggcaaggttacgggtggacagtatgccagcaac

SEQ ID NO: 457762 - DNA, 51 bp, Artificial
  Synthetic oligonucleotide
tcaggtccaaattgatgttgacaatcacataggtgctcccactaacattgt

SEQ ID NO: 457763 - DNA, 50 bp, Artificial
  Synthetic oligonucleotide
tcaggtcgaggaagaggtctatcagtgttgtgacctagacccggaagctc

SEQ ID NO: 457764 - DNA, 55 bp, Artificial
  Synthetic oligonucleotide
tcaggtctcgtggcgcatcacccgagcgaaggcgaccgcatgagcttcacccgtt

SEQ ID NO: 457765 - DNA, 56 bp, Artificial
  Synthetic oligonucleotide
tcaggtgaaagctttatcgaacttagtaaccacaaatttattaggatgaagcgtaa

SEQ ID NO: 457766 - DNA, 60 bp, Artificial
  Synthetic oligonucleotide
tcaggtgagagagtctattcttcctgacattgaagacttaattgatacagctgagtctga

SEQ ID NO: 457767 - DNA, 56 bp, Artificial
  Synthetic oligonucleotide
tcaggtgggggtttgataagtactctaaatggtatcttgattcgcgacttcttacc

SEQ ID NO: 457768 - DNA, 60 bp, Artificial
  Synthetic oligonucleotide
tcaggtggttgcagactgagaaatggatacctgttgttgaaggctctccgggactagtag

SEQ ID NO: 457769 - DNA, 53 bp, Artificial
  Synthetic oligonucleotide
tcaggtgtaggaccaaataaattcacaccaggcaatacatcagtacactacaa

SEQ ID NO: 457770 - DNA, 58 bp, Artificial
  Synthetic oligonucleotide
tcaggtgtatgctagcggttaaatacctccttcttgtagaggctacgtattctccgga

SEQ ID NO: 457771 - DNA, 60 bp, Artificial
  Synthetic oligonucleotide
tcaggtgtatgttagccatcaagtatttgcagctggtagaaaatacatactcccctgata

SEQ ID NO: 457772 - DNA, 60 bp, Artificial
  Synthetic oligonucleotide
tcaggtgtcactctttggtgggctccaccaggagcaaaatacctcatgatatttgcccct

SEQ ID NO: 457773 - DNA, 57 bp, Artificial
  Synthetic oligonucleotide
tcaggttaggtttgaggatactgacgctactcctgggtttctggatttgagaaacgc

SEQ ID NO: 457774 - DNA, 55 bp, Artificial
  Synthetic oligonucleotide
tcaggttatcaacccacaacgttatcaacgcagaaacggcaccaggaggacccta

SEQ ID NO: 457775 - DNA, 58 bp, Artificial
  Synthetic oligonucleotide
tcaggttatcgggcgcagagtgacgcatgtccaacgcgggagtctttttggccctggt

SEQ ID NO: 457776 - DNA, 60 bp, Artificial
  Synthetic oligonucleotide
tcaggttccttctgcgagtgccacctacggtcctcactgccgtgcgctctttggggcgac

SEQ ID NO: 457777 - DNA, 55 bp, Artificial
  Synthetic oligonucleotide
tcaggttcgaggagacaaccccagctccgaggaaggaaccgaaagacagagaacc

SEQ ID NO: 457778 - DNA, 55 bp, Artificial
  Synthetic oligonucleotide
tcaggttctggcctgtttgctggtagggctatcaccgccgtcctacctcctgggg

SEQ ID NO: 457779 - DNA, 54 bp, Artificial
  Synthetic oligonucleotide
tcaggttgaatgcatgccctagtctcaacagcatacactattcccaagtaacca

SEQ ID NO: 457780 - DNA, 60 bp, Artificial
  Synthetic oligonucleotide
tcaggttgacagttttactgaatgcgacacttgtatttatgaatgtgggtccaatggtgt

SEQ ID NO: 457781 - DNA, 55 bp, Artificial
  Synthetic oligonucleotide
tcaggttgccatggcaaaagagtccatcccttggactgctttctgggtaccgcag

SEQ ID NO: 457782 - DNA, 54 bp, Artificial
  Synthetic oligonucleotide
tcaggttgtccacttctctattgaggtctcttagcttgtccaaatctccatcgg

SEQ ID NO: 457783 - DNA, 60 bp, Artificial
  Synthetic oligonucleotide
tcaggtttgccagccgagccctgtattgtctcttgccgtcctcagttcgccgggctctca

SEQ ID NO: 457784 - DNA, 59 bp, Artificial
  Synthetic oligonucleotide
tcaggtttggacaacagggctcaagggagagccatcgcccacaagtggcgtaaatacca

SEQ ID NO: 457785 - DNA, 60 bp, Artificial
  Synthetic oligonucleotide
tcagtaaaacatgacgaccatttgttacaagattctgaattagctggattgctatcaatg

SEQ ID NO: 457786 - DNA, 51 bp, Artificial
  Synthetic oligonucleotide
tcagtaaactcgttttagaagtactgtaggtcaaatccgtggtatatcaga

SEQ ID NO: 457787 - DNA, 59 bp, Artificial
  Synthetic oligonucleotide
tcagtaacaatggccgcaacaggagtaaatcaagggcccgatcacaatctaggggccga

SEQ ID NO: 457788 - DNA, 51 bp, Artificial
  Synthetic oligonucleotide
tcagtaacactgaatatagaggcactcttgaaagcaagtcaactattcaaa

SEQ ID NO: 457789 - DNA, 57 bp, Artificial
  Synthetic oligonucleotide
tcagtaagtgctctatcataacagatctcagcaaattcaatcaagcatttcggtatg

SEQ ID NO: 457790 - DNA, 59 bp, Artificial
  Synthetic oligonucleotide
tcagtaatagactgtaacacgtctgtcatccagaccgtggacttcagcttggaccccac

SEQ ID NO: 457791 - DNA, 57 bp, Artificial
  Synthetic oligonucleotide
tcagtaatatgttatgacttgtcttgcaattcaacacattgcaagccaacgatgcat

SEQ ID NO: 457792 - DNA, 55 bp, Artificial
  Synthetic oligonucleotide
tcagtaatggagtcaggaaaatactattcctagatggaatagataaagctcaaga

SEQ ID NO: 457793 - DNA, 55 bp, Artificial
  Synthetic oligonucleotide
tcagtaattgacacaattgctagtaatcctagtaatagcacggctgtcccagccc

SEQ ID NO: 457794 - DNA, 51 bp, Artificial
  Synthetic oligonucleotide
tcagtacatggtgaccgaggatccttttcgtggacccggtaagaacgtacg

SEQ ID NO: 457795 - DNA, 57 bp, Artificial
  Synthetic oligonucleotide
tcagtaccagtcggcaagtgcttgaatttgccagctttcaaggcacttgagcgggag

SEQ ID NO: 457796 - DNA, 59 bp, Artificial
  Synthetic oligonucleotide
tcagtaccccaatccttattgaaggcatcccaccattggtcccactcaggtgttccata

SEQ ID NO: 457797 - DNA, 54 bp, Artificial
  Synthetic oligonucleotide
tcagtacccccttagaggtacatcacttaaccaggtattagtgcccccttagag

SEQ ID NO: 457798 - DNA, 56 bp, Artificial
  Synthetic oligonucleotide
tcagtacctcacttttactcaaagtgagaaggaagacatggtccgttacctaggta

SEQ ID NO: 457799 - DNA, 59 bp, Artificial
  Synthetic oligonucleotide
tcagtacgtaagtgttaactttgagtgtgcattaagggcaacttgtaggcaacacgatg

SEQ ID NO: 457800 - DNA, 53 bp, Artificial
  Synthetic oligonucleotide
tcagtacgtaagtgttaactttgagtgtgtgtgaaaagcgatttgtgaggaac

SEQ ID NO: 457801 - DNA, 55 bp, Artificial
  Synthetic oligonucleotide
tcagtactcatcaaaatgtcaaactcgcaagaagtgaaccaacaacaattcaacg

SEQ ID NO: 457802 - DNA, 51 bp, Artificial
  Synthetic oligonucleotide
tcagtactggaatcaggagaatcttatttttagatgggatagataaggcac

SEQ ID NO: 457803 - DNA, 56 bp, Artificial
  Synthetic oligonucleotide
tcagtacttggcacttggcgtgcttcggacatctgcaacagggagggtattctttt

SEQ ID NO: 457804 - DNA, 60 bp, Artificial
  Synthetic oligonucleotide
tcagtagaaacaggaaatgtcttaagacactactcaggacggctaatcaatgcttgggtc

SEQ ID NO: 457805 - DNA, 55 bp, Artificial
  Synthetic oligonucleotide
tcagtagactgaactggttgactaagtcagggagcgcatacccagtgttgaacgt

SEQ ID NO: 457806 - DNA, 60 bp, Artificial
  Synthetic oligonucleotide
tcagtagactgaattggctgactaaatctggtaatgcttatccattactgaacgtgacta

SEQ ID NO: 457807 - DNA, 53 bp, Artificial
  Synthetic oligonucleotide
tcagtagccggtattgtaggtgctttttaataatcgtgcttctgccgctggta

SEQ ID NO: 457808 - DNA, 55 bp, Artificial
  Synthetic oligonucleotide
tcagtaggtagtaacacaacaatgcgaattagtactgctatacaagctggagaag

SEQ ID NO: 457809 - DNA, 59 bp, Artificial
  Synthetic oligonucleotide
tcagtaggttggcggtcgctgaaacgtcgtcaattcgctccaggtccggcaatccacgc

SEQ ID NO: 457810 - DNA, 56 bp, Artificial
  Synthetic oligonucleotide
tcagtagtaagattaaatcaatgttgagttttgtagagaaaaacaaggcttggtta

SEQ ID NO: 457811 - DNA, 60 bp, Artificial
  Synthetic oligonucleotide
tcagtagtcacaaatgctatggggacactatgtgttcgtgtggtcacagagcaacaaaaa

SEQ ID NO: 457812 - DNA, 56 bp, Artificial
  Synthetic oligonucleotide
tcagtagtgtactctgtaagctcattatcgttacttaagttagcaagttctcctgc

SEQ ID NO: 457813 - DNA, 60 bp, Artificial
  Synthetic oligonucleotide
tcagtataatcaacgtgagtcgcaggcacgcgttgcgtccatcctcgccaacactgacct

SEQ ID NO: 457814 - DNA, 60 bp, Artificial
  Synthetic oligonucleotide
tcagtataggtcactgtgagctgctcacgaaagagaagagcagtggctccgtgcagaaac

SEQ ID NO: 457815 - DNA, 59 bp, Artificial
  Synthetic oligonucleotide
tcagtatgacagggcgaatgcgcgttacgcggagatttcatccgtatggggggactccg

SEQ ID NO: 457816 - DNA, 52 bp, Artificial
  Synthetic oligonucleotide
tcagtatgctgaccgccatctcagacggagtgtatggtaaaacttacttgtt

SEQ ID NO: 457817 - DNA, 60 bp, Artificial
  Synthetic oligonucleotide
tcagtatggcgcctgtattattctttattatggtgggccatatgtcccgagttagtgcgt

SEQ ID NO: 457818 - DNA, 60 bp, Artificial
  Synthetic oligonucleotide
tcagtatgggtatttgcatgtgcaccagatagatgcccgcctacagccctgtatgttgca

SEQ ID NO: 457819 - DNA, 60 bp, Artificial
  Synthetic oligonucleotide
tcagtattctagatggcaatggcgcaatcctatacctaatgtggaggtacccagatatcg

SEQ ID NO: 457820 - DNA, 58 bp, Artificial
  Synthetic oligonucleotide
tcagtatttcctgaccagagtggaagcgcaactgcacgagtgggttccccccctcaac

SEQ ID NO: 457821 - DNA, 60 bp, Artificial
  Synthetic oligonucleotide
tcagtcaaaattatcctatagtgcagaatctccaagggcaaatggtacatcaacccatat

SEQ ID NO: 457822 - DNA, 60 bp, Artificial
  Synthetic oligonucleotide
tcagtcaaacaagttactgagagagacatatacagcaaactgagacagctcatcaaaact

SEQ ID NO: 457823 - DNA, 60 bp, Artificial
  Synthetic oligonucleotide
tcagtcaacactgatgagatcaataggagcttcaagcctaatattgggccaaggccactc

SEQ ID NO: 457824 - DNA, 60 bp, Artificial
  Synthetic oligonucleotide
tcagtcaatctatctggagtctcttttgtgatcagatggcacaagtaagacacattcaac

SEQ ID NO: 457825 - DNA, 60 bp, Artificial
  Synthetic oligonucleotide
tcagtcaatcttatatttctggggtgtacatcatcctccagatgatgttgagcaagctaa

SEQ ID NO: 457826 - DNA, 60 bp, Artificial
  Synthetic oligonucleotide
tcagtcacatcactgtgcatgctcattgggaacgcaaccgtcataccaagtccgcaaaca

SEQ ID NO: 457827 - DNA, 60 bp, Artificial
  Synthetic oligonucleotide
tcagtcagaaacacaattcttaacaggcataaattcgcaagcagctaacgattgctttaa

SEQ ID NO: 457828 - DNA, 59 bp, Artificial
  Synthetic oligonucleotide
tcagtcagaaagctcgcctcaaaatacccagccacaacagtctacagagtcctccgggg

SEQ ID NO: 457829 - DNA, 52 bp, Artificial
  Synthetic oligonucleotide
tcagtcatcatcctgctatacaagagtactatgttcttcatcaccttatact

SEQ ID NO: 457830 - DNA, 55 bp, Artificial
  Synthetic oligonucleotide
tcagtcattacaaccaggtaacccaaacaaacggacaaccatgttcgaacgacac

SEQ ID NO: 457831 - DNA, 60 bp, Artificial
  Synthetic oligonucleotide
tcagtccacctatggctcttctactggcccagtctatgtctccgactctgtgaccttggt

SEQ ID NO: 457832 - DNA, 52 bp, Artificial
  Synthetic oligonucleotide
tcagtccagcgacccttcatgaaatcacccactgcaacccccctgcactgtg

SEQ ID NO: 457833 - DNA, 55 bp, Artificial
  Synthetic oligonucleotide
tcagtccagggatccaaatgataatcggatgttcattcataaggtccttagaagg

SEQ ID NO: 457834 - DNA, 59 bp, Artificial
  Synthetic oligonucleotide
tcagtccagtgcatttgggagactgtagcttcgagggttggattgtagggaaccctgcc

SEQ ID NO: 457835 - DNA, 55 bp, Artificial
  Synthetic oligonucleotide
tcagtcccagaaatagccactaggcccaaagtaaatgggcaaagtggaaggatgg

SEQ ID NO: 457836 - DNA, 57 bp, Artificial
  Synthetic oligonucleotide
tcagtcccaggaggactgggttaacaaatctgacaacggaaagtgagaaagccctca

SEQ ID NO: 457837 - DNA, 60 bp, Artificial
  Synthetic oligonucleotide
tcagtcccagtgctgaccctcaatgagctgaccaactctcgctttcccgtcccgattgat

SEQ ID NO: 457838 - DNA, 60 bp, Artificial
  Synthetic oligonucleotide
tcagtcccgtccttggattgcccattgtactattgcacaactcactgatgcggctctagt

SEQ ID NO: 457839 - DNA, 59 bp, Artificial
  Synthetic oligonucleotide
tcagtcctacctaaggcgcactcaatcaatgggaatccaactggaccaaaggattatct

SEQ ID NO: 457840 - DNA, 59 bp, Artificial
  Synthetic oligonucleotide
tcagtcctagacattaggcagggacctaaagagcccttcaaggattatgtggacagatt

SEQ ID NO: 457841 - DNA, 59 bp, Artificial
  Synthetic oligonucleotide
tcagtcctgggatcctacctgagtcaaatcagagccagtgtgacaagaaaacccttccc

SEQ ID NO: 457842 - DNA, 60 bp, Artificial
  Synthetic oligonucleotide
tcagtccttcaagtatgcgcgtcacgttgtcacgtagtgatttaggtgtattcacgatgc

SEQ ID NO: 457843 - DNA, 55 bp, Artificial
  Synthetic oligonucleotide
tcagtcgaaaacactaaagattgcctaggcatgaggttctcaggagggacatcgt

SEQ ID NO: 457844 - DNA, 50 bp, Artificial
  Synthetic oligonucleotide
tcagtcgaccaccaggtcttgtagagccaatacatatggcaatcgtgttc

SEQ ID NO: 457845 - DNA, 55 bp, Artificial
  Synthetic oligonucleotide
tcagtcgacctccgtgtacactcctaagtacccagaggtcaaaaacccacagacc

SEQ ID NO: 457846 - DNA, 51 bp, Artificial
  Synthetic oligonucleotide
tcagtcgagttagccggtcccggaaggggtcaacccccacctgaaagggcg

SEQ ID NO: 457847 - DNA, 60 bp, Artificial
  Synthetic oligonucleotide
tcagtcgattattcgatagttgccaatacgagaagggattcagcgatgccagctggaacg

SEQ ID NO: 457848 - DNA, 60 bp, Artificial
  Synthetic oligonucleotide
tcagtcgcagcagactacgttaaatgcgcagatgtattcctttggtcgtcctacggtggt

SEQ ID NO: 457849 - DNA, 55 bp, Artificial
  Synthetic oligonucleotide
tcagtcggaaacatatcaagggcagaaactgcccctacacgttgatagctcggaa

SEQ ID NO: 457850 - DNA, 60 bp, Artificial
  Synthetic oligonucleotide
tcagtcggacattcacttggtgactctttctgggatctcctccccagcgagattcatccg

SEQ ID NO: 457851 - DNA, 57 bp, Artificial
  Synthetic oligonucleotide
tcagtcggcgaaagccgctctgatgacgagggccaaggatttccaattaccaaaaag

SEQ ID NO: 457852 - DNA, 59 bp, Artificial
  Synthetic oligonucleotide
tcagtcggttcaggatactcaatgattttagatacatataccggaaatgaaagtacaac

SEQ ID NO: 457853 - DNA, 55 bp, Artificial
  Synthetic oligonucleotide
tcagtcgtcccgggctcatgccatcgttgctctgacgcgccacactgggaagtgc

SEQ ID NO: 457854 - DNA, 60 bp, Artificial
  Synthetic oligonucleotide
tcagtcgtcgttcgcgctggtaactgggtgctgatgaaaggtgaggacgcagccctaact

SEQ ID NO: 457855 - DNA, 55 bp, Artificial
  Synthetic oligonucleotide
tcagtctaactgttgctgcgaacgcgtgtttgttaaattggcgggatgggcagct

SEQ ID NO: 457856 - DNA, 60 bp, Artificial
  Synthetic oligonucleotide
tcagtctatgatagcataagaggaacgaagtgatttaggatttcagtggcatattttgta

SEQ ID NO: 457857 - DNA, 60 bp, Artificial
  Synthetic oligonucleotide
tcagtctattagtccttttggagatctcttttacaatctcaattgagacaccattagcca

SEQ ID NO: 457858 - DNA, 60 bp, Artificial
  Synthetic oligonucleotide
tcagtctcagtggtggtgtttcactgtcttctttctctccgctactgctcccgacctggt

SEQ ID NO: 457859 - DNA, 60 bp, Artificial
  Synthetic oligonucleotide
tcagtctcattagaccaaatgagaacccagcacataagagccaattagtgtggatggcat

SEQ ID NO: 457860 - DNA, 60 bp, Artificial
  Synthetic oligonucleotide
tcagtctcctgggtacgacattacaatctgtccacgcacggataccatctaggttatcgt

SEQ ID NO: 457861 - DNA, 59 bp, Artificial
  Synthetic oligonucleotide
tcagtctctgattcctaaggcagccagaggccaatacagcgggttcgtaaggaccctgt

SEQ ID NO: 457862 - DNA, 60 bp, Artificial
  Synthetic oligonucleotide
tcagtctctggtccctaaagcagcaagaggtcaatacagcggattcgtgaggacactgtt

SEQ ID NO: 457863 - DNA, 60 bp, Artificial
  Synthetic oligonucleotide
tcagtctgggacaaagacagtcagctgtattcgaacatatggctcaacaagatgattttt

SEQ ID NO: 457864 - DNA, 60 bp, Artificial
  Synthetic oligonucleotide
tcagtctgggtttttgcatgtgcaccagatcgttgtccacccacagcattatatgtggca

SEQ ID NO: 457865 - DNA, 50 bp, Artificial
  Synthetic oligonucleotide
tcagtcttcttatttaagtatcattttgggcttactaaaggattgaatgt

SEQ ID NO: 457866 - DNA, 53 bp, Artificial
  Synthetic oligonucleotide
tcagtcttgcgaagcgcttcatggcgcataagcgagaccggactttggtggac

SEQ ID NO: 457867 - DNA, 53 bp, Artificial
  Synthetic oligonucleotide
tcagtctttgggacttacggaaaaacagagtgccggtgcggacggtaaaaatg

SEQ ID NO: 457868 - DNA, 60 bp, Artificial
  Synthetic oligonucleotide
tcagtgaaacagacacagttgacatcaagcaggatcaacctcgtccaactcacccagccc

SEQ ID NO: 457869 - DNA, 53 bp, Artificial
  Synthetic oligonucleotide
tcagtgaaatgggtgtctgctttggaacaatccctgtggccaatcctgatgat

SEQ ID NO: 457870 - DNA, 50 bp, Artificial
  Synthetic oligonucleotide
tcagtgaagccccaggctacattgaaagaagtttaattggtaatgtaaga

SEQ ID NO: 457871 - DNA, 60 bp, Artificial
  Synthetic oligonucleotide
tcagtgaatatgctgtgaggataacttggtataccagaaatttctggtcagatgtaacac

SEQ ID NO: 457872 - DNA, 53 bp, Artificial
  Synthetic oligonucleotide
tcagtgaatgggggtggcaaccccctactctgggctaccaagaggggggtccc

SEQ ID NO: 457873 - DNA, 60 bp, Artificial
  Synthetic oligonucleotide
tcagtgaccaaattgagcaggaggcagacaacatgatcacggagatgttgagaaaggact

SEQ ID NO: 457874 - DNA, 60 bp, Artificial
  Synthetic oligonucleotide
tcagtgacgatgagattttatacatgagcgagcacagtttaatctctcaaaattcataag

SEQ ID NO: 457875 - DNA, 55 bp, Artificial
  Synthetic oligonucleotide
tcagtgacgtcatataccgattcaacagtaagttgaagatgagtggagcattcac

SEQ ID NO: 457876 - DNA, 57 bp, Artificial
  Synthetic oligonucleotide
tcagtgactgagtccaccgaaagctggggatttccttggagtgagccatagtggcta

SEQ ID NO: 457877 - DNA, 57 bp, Artificial
  Synthetic oligonucleotide
tcagtgaggggggggttcccggaattgtagcactgtttgtggtcctcgaatatgtca

SEQ ID NO: 457878 - DNA, 57 bp, Artificial
  Synthetic oligonucleotide
tcagtgatagactgcaacacatctgtaatacagaccgttgacttcagcttggacccc

SEQ ID NO: 457879 - DNA, 52 bp, Artificial
  Synthetic oligonucleotide
tcagtgatctatatcctcgtccgatcgttggccccgctactcatgctgccgt

SEQ ID NO: 457880 - DNA, 60 bp, Artificial
  Synthetic oligonucleotide
tcagtgcaagaaagagatataagaggccatgcaacttgtggaggttgcacagattgtttt

SEQ ID NO: 457881 - DNA, 55 bp, Artificial
  Synthetic oligonucleotide
tcagtgcacaaaagtgaagaaggccctcgagagcaagacacttacactgcctcag

SEQ ID NO: 457882 - DNA, 60 bp, Artificial
  Synthetic oligonucleotide
tcagtgcactctgcactaccagcttgttggtatgggtgtgtcatctgtattccctcacta

SEQ ID NO: 457883 - DNA, 60 bp, Artificial
  Synthetic oligonucleotide
tcagtgccaaagaggcacaggatgtaatcatggaagtcgttttcccaaatgaagtgggag

SEQ ID NO: 457884 - DNA, 59 bp, Artificial
  Synthetic oligonucleotide
tcagtgcgacgtgacatcgtatgtgacgtaccctattcttggtctagagggcaacgggg

SEQ ID NO: 457885 - DNA, 60 bp, Artificial
  Synthetic oligonucleotide
tcagtgctcttactctttcctataaagaggagactgctggactcgccgccccagcccgag

SEQ ID NO: 457886 - DNA, 60 bp, Artificial
  Synthetic oligonucleotide
tcagtgctgacatgaaaggggaaataaaaaactgctctttcaatatgaccacagaattaa

SEQ ID NO: 457887 - DNA, 55 bp, Artificial
  Synthetic oligonucleotide
tcagtgctggaaaagggcacttatacttatgcggtgatggtcatgctccaagaac

SEQ ID NO: 457888 - DNA, 60 bp, Artificial
  Synthetic oligonucleotide
tcagtgctggaatcagaaaagtactgtttttagatggaatagataaggcacaggaggacc

SEQ ID NO: 457889 - DNA, 60 bp, Artificial
  Synthetic oligonucleotide
tcagtggaagacaattgttcatgtcgctgattacctcgtccagctttgtggtgaacaatg

SEQ ID NO: 457890 - DNA, 60 bp, Artificial
  Synthetic oligonucleotide
tcagtggactctcatcagactgttccaataagtgttcaaccatgacggtgtccgaagttt

SEQ ID NO: 457891 - DNA, 54 bp, Artificial
  Synthetic oligonucleotide
tcagtggacttgcatcgccgaagaccctcgctattacgccggtccgcaaaacat

SEQ ID NO: 457892 - DNA, 55 bp, Artificial
  Synthetic oligonucleotide
tcagtggagtgaactcctttagcagaacggagctaataagtcccagtaaatgggg

SEQ ID NO: 457893 - DNA, 51 bp, Artificial
  Synthetic oligonucleotide
tcagtggcaatcactagtgttcgtactgagtataacgagcgtgagtatctt

SEQ ID NO: 457894 - DNA, 60 bp, Artificial
  Synthetic oligonucleotide
tcagtggcaccctagtaccatgagacgctgcttaatcaagggcatagtccccctggtaat

SEQ ID NO: 457895 - DNA, 58 bp, Artificial
  Synthetic oligonucleotide
tcagtggcagaaaatggacctcgccggtatggtcgaacgactggcgaagggcgtggca

SEQ ID NO: 457896 - DNA, 52 bp, Artificial
  Synthetic oligonucleotide
tcagtggcccacaaatcctgcctacctgcttgtgtgtatgggttggctgtag

SEQ ID NO: 457897 - DNA, 60 bp, Artificial
  Synthetic oligonucleotide
tcagtggctagcggaagagttggcacgccagtgtcgagtgagtgcaccaggatggacttt

SEQ ID NO: 457898 - DNA, 60 bp, Artificial
  Synthetic oligonucleotide
tcagtggctcagcattgacaactgacggtaacagcattgctaacgcattcgtttcatatt

SEQ ID NO: 457899 - DNA, 60 bp, Artificial
  Synthetic oligonucleotide
tcagtggctcataagtcctgcctgcctgcttgtgtgtacggacttgctgtggccagtgga

SEQ ID NO: 457900 - DNA, 60 bp, Artificial
  Synthetic oligonucleotide
tcagtggcttgttcgaggtgagggagggtcgtctgactcattcgatatgaatgtgacagc

SEQ ID NO: 457901 - DNA, 55 bp, Artificial
  Synthetic oligonucleotide
tcagtgggatacaatacctggcgggcctgtcaacattgcctggcaaccccgccat

SEQ ID NO: 457902 - DNA, 60 bp, Artificial
  Synthetic oligonucleotide
tcagtgggcgacaggggcccactataagctcaaacctattctagacgatctcaatgtatt

SEQ ID NO: 457903 - DNA, 55 bp, Artificial
  Synthetic oligonucleotide
tcagtgggctctctaatctgccattctccgtcttggccgatccatccttccctca

SEQ ID NO: 457904 - DNA, 60 bp, Artificial
  Synthetic oligonucleotide
tcagtggggccctattgcgtggttcgcacgagcagcttgattacgtccagtgacaaggtc

SEQ ID NO: 457905 - DNA, 58 bp, Artificial
  Synthetic oligonucleotide
tcagtggtacgaatactcggacgggttgcggctgacggactcaacagttgaggtctgg

SEQ ID NO: 457906 - DNA, 50 bp, Artificial
  Synthetic oligonucleotide
tcagtggtatgaatactcggatgggatgcggctgcaggactcaacagttg

SEQ ID NO: 457907 - DNA, 60 bp, Artificial
  Synthetic oligonucleotide
tcagtggtcatttgtgatgagtgccacagtcatgactcaaccgtgtttctcgggattaga

SEQ ID NO: 457908 - DNA, 53 bp, Artificial
  Synthetic oligonucleotide
tcagtggtcgtctatacatcacattcaactccaatctctatatatcgtgttaa

SEQ ID NO: 457909 - DNA, 53 bp, Artificial
  Synthetic oligonucleotide
tcagtggtgacttttcagaattcgtgggggtcacagatggacctaactgaccc

SEQ ID NO: 457910 - DNA, 60 bp, Artificial
  Synthetic oligonucleotide
tcagtggtgcacttgctcgctatccactcagcttggttcgtaatgcaagttaccgtcgtt

SEQ ID NO: 457911 - DNA, 54 bp, Artificial
  Synthetic oligonucleotide
tcagtgtacaccccaaaatacccagaggttaagaacccacagaccgcctccaac

SEQ ID NO: 457912 - DNA, 58 bp, Artificial
  Synthetic oligonucleotide
tcagtgtcacatgcagatctgagacggcacggagcagggctcgatgaacctgcgttac

SEQ ID NO: 457913 - DNA, 54 bp, Artificial
  Synthetic oligonucleotide
tcagtgtcagccggtccagtttgttccaagaccgaagccggttacaaggttttg

SEQ ID NO: 457914 - DNA, 60 bp, Artificial
  Synthetic oligonucleotide
tcagtgtcaggcttgtgccatgactaatacggtcaccacctacagagagaccggaaaaag

SEQ ID NO: 457915 - DNA, 50 bp, Artificial
  Synthetic oligonucleotide
tcagtgtctgaaaggacgtgtattgtcttacgtgaattcacgtagtcagt

SEQ ID NO: 457916 - DNA, 55 bp, Artificial
  Synthetic oligonucleotide
tcagtgtgggtgctttgtataggagctgtggtgtattgttcagaaacatcatact

SEQ ID NO: 457917 - DNA, 55 bp, Artificial
  Synthetic oligonucleotide
tcagtgtgttatcttgagtggccgcgaaatactggaggttccttggttctgattg

SEQ ID NO: 457918 - DNA, 60 bp, Artificial
  Synthetic oligonucleotide
tcagtgttaatatcacattcatctgatttagtcatataccgcacaaacacaacaggtgat

SEQ ID NO: 457919 - DNA, 60 bp, Artificial
  Synthetic oligonucleotide
tcagtgttacatcttcacagatcaacagcagcatctctatcatggtccagcatataatgt

SEQ ID NO: 457920 - DNA, 60 bp, Artificial
  Synthetic oligonucleotide
tcagtgttgaggctttacagtttgaacacaagatgtggcttgagatgttcccagtatcgc

SEQ ID NO: 457921 - DNA, 60 bp, Artificial
  Synthetic oligonucleotide
tcagttaagcaggaagtcactagctgaccgcagctgagtcactagctgaccgcagctggc

SEQ ID NO: 457922 - DNA, 56 bp, Artificial
  Synthetic oligonucleotide
tcagttaccgaaggcaaggtatactcgtatttggaaggaacacgcttccaccagac

SEQ ID NO: 457923 - DNA, 52 bp, Artificial
  Synthetic oligonucleotide
tcagttactaactacgggtaagggttcattactattttttgcactagggtta

SEQ ID NO: 457924 - DNA, 55 bp, Artificial
  Synthetic oligonucleotide
tcagttagtaggaccctttattggaggatatgagtatttgcatgatgtcgagtca

SEQ ID NO: 457925 - DNA, 59 bp, Artificial
  Synthetic oligonucleotide
tcagttatatggatgatgtggttttgggggccaagtctgtacaacatcttgagtccctt

SEQ ID NO: 457926 - DNA, 60 bp, Artificial
  Synthetic oligonucleotide
tcagttatattcaagaatatagggctatattcagcatccaatgactctaagctctctatc

SEQ ID NO: 457927 - DNA, 60 bp, Artificial
  Synthetic oligonucleotide
tcagttattcgtgctaaggactatgccgaagcgtcccgcagatatagtcattcccactcc

SEQ ID NO: 457928 - DNA, 59 bp, Artificial
  Synthetic oligonucleotide
tcagttcaagcaacccttcatatacggggtggccggtgtggctaagcagccggcagttc

SEQ ID NO: 457929 - DNA, 54 bp, Artificial
  Synthetic oligonucleotide
tcagttcagtgacaactctggttatagtcaaacaacctggagagtttaccttag

SEQ ID NO: 457930 - DNA, 60 bp, Artificial
  Synthetic oligonucleotide
tcagttcattggacatctcagaagcccactgtggacgtttttgacaatcgcgcactgttc

SEQ ID NO: 457931 - DNA, 53 bp, Artificial
  Synthetic oligonucleotide
tcagttcgatggcgtctagggttcgtagtggtgttgtgcgcgggtttaatggg

SEQ ID NO: 457932 - DNA, 53 bp, Artificial
  Synthetic oligonucleotide
tcagttcgattagtgagcggattcttagcactgttctgggaagacatccggag

SEQ ID NO: 457933 - DNA, 50 bp, Artificial
  Synthetic oligonucleotide
tcagttcgccaggtctttccagcactcgaccggtttacctggccctattg

SEQ ID NO: 457934 - DNA, 55 bp, Artificial
  Synthetic oligonucleotide
tcagttcgctgggttaaagacatggcaaccgctatgactaagcaaatgaacggcg

SEQ ID NO: 457935 - DNA, 60 bp, Artificial
  Synthetic oligonucleotide
tcagttctagttaacacataccaatggatcattaggaattgggagactgtaaagatccaa

SEQ ID NO: 457936 - DNA, 59 bp, Artificial
  Synthetic oligonucleotide
tcagttctggaatcaggaaagtgctatttttagatgggatagataaagctcaagaagaa

SEQ ID NO: 457937 - DNA, 54 bp, Artificial
  Synthetic oligonucleotide
tcagttgacaaagcatgcagggacagtgagcagaaggtttagtagcacacaggg

SEQ ID NO: 457938 - DNA, 60 bp, Artificial
  Synthetic oligonucleotide
tcagttgacactatatccgcaccaaataattaacttgaggacaaccaatgcagccacgat

SEQ ID NO: 457939 - DNA, 60 bp, Artificial
  Synthetic oligonucleotide
tcagttgagcggttcgattcaatcgtggatacgatttttgaagtcattaagaagagtggc

SEQ ID NO: 457940 - DNA, 60 bp, Artificial
  Synthetic oligonucleotide
tcagttgagctgaatgctcccaattaccactacgaggaatgttcttgttatcctgatgct

SEQ ID NO: 457941 - DNA, 60 bp, Artificial
  Synthetic oligonucleotide
tcagttgatagtgagtgggagagacgaacaatcaatcgctgaggccatcattgtagcaat

SEQ ID NO: 457942 - DNA, 60 bp, Artificial
  Synthetic oligonucleotide
tcagttgatggagcactaccgatgcgatgcagctaatcgatacggatatcccaccgttcc

SEQ ID NO: 457943 - DNA, 51 bp, Artificial
  Synthetic oligonucleotide
tcagttgcaaggtaccaccccagtatccctcagccaattatgtaagatcag

SEQ ID NO: 457944 - DNA, 59 bp, Artificial
  Synthetic oligonucleotide
tcagttgcgattgaattccccataatccacccaaccaaccttcaattgcacctaattga

SEQ ID NO: 457945 - DNA, 60 bp, Artificial
  Synthetic oligonucleotide
tcagttgcggcactatcccaatagttagccattcgttgagcgtctttgctatgacgaata

SEQ ID NO: 457946 - DNA, 55 bp, Artificial
  Synthetic oligonucleotide
tcagttgcttatctctaaccttggtattgatatgttagacgttctctgccatggc

SEQ ID NO: 457947 - DNA, 57 bp, Artificial
  Synthetic oligonucleotide
tcagttggctctagggaaccctgcccctattcctcgtcatgccccaattccacgtta

SEQ ID NO: 457948 - DNA, 55 bp, Artificial
  Synthetic oligonucleotide
tcagttggctgaggagctcggccacagacctgcccctgttgcagccgttctacca

SEQ ID NO: 457949 - DNA, 58 bp, Artificial
  Synthetic oligonucleotide
tcagttggtttggatagacaacctgaaggcccttggagacaacttgtgagaagcgcgg

SEQ ID NO: 457950 - DNA, 60 bp, Artificial
  Synthetic oligonucleotide
tcagttgtccctgtaaacaatactgaggagcatgtaaactcaatagaggcgtacagaata

SEQ ID NO: 457951 - DNA, 58 bp, Artificial
  Synthetic oligonucleotide
tcagttgtgagtactgccgtaaacattgactattcaaacgaccaagttacgcaaatta

SEQ ID NO: 457952 - DNA, 53 bp, Artificial
  Synthetic oligonucleotide
tcagttgttagaccattcattagttgagccattgacaggggctctcggtctaa

SEQ ID NO: 457953 - DNA, 60 bp, Artificial
  Synthetic oligonucleotide
tcagtttacgcactgagactggcttgcagctctggatgagggttactgatcgcgtctagg

SEQ ID NO: 457954 - DNA, 60 bp, Artificial
  Synthetic oligonucleotide
tcagtttagcttcttccacacccataaccaaactggcctccctctatcgtcatgctcagc

SEQ ID NO: 457955 - DNA, 60 bp, Artificial
  Synthetic oligonucleotide
tcagtttatgggatcaaagcctcaaaccatgtgtaaagttgaccccactctgtgtcacgc

SEQ ID NO: 457956 - DNA, 59 bp, Artificial
  Synthetic oligonucleotide
tcagtttatgtgttgggtaagatttggatggatgaaaatatcaagagcaagaatcacac

SEQ ID NO: 457957 - DNA, 59 bp, Artificial
  Synthetic oligonucleotide
tcagtttattgaagacgcttgctttacgagagaaaagtttgagcatgaagttggtttgc

SEQ ID NO: 457958 - DNA, 55 bp, Artificial
  Synthetic oligonucleotide
tcagtttcattggatctctcacgcctatacattcacttgctgatcatctcacgac

SEQ ID NO: 457959 - DNA, 60 bp, Artificial
  Synthetic oligonucleotide
tcagtttccagactggagcatcaaatgtgggaatcagtgaaggacgagctgaacactctt

SEQ ID NO: 457960 - DNA, 56 bp, Artificial
  Synthetic oligonucleotide
tcagtttccgatatccatactctaagaagccaatggcggtagcctgcgcatcaggc

SEQ ID NO: 457961 - DNA, 56 bp, Artificial
  Synthetic oligonucleotide
tcagtttcgccttgtaactggtgatacctgcgtttataacggttcgcctagtgaaa

SEQ ID NO: 457962 - DNA, 55 bp, Artificial
  Synthetic oligonucleotide
tcagtttgaggctgttggaagggaatttaataacttagaaaggagaatagagaat

SEQ ID NO: 457963 - DNA, 60 bp, Artificial
  Synthetic oligonucleotide
tcagtttgagtacgaaagtctgttgcgtcgtagtgcgctagcggctactaacgaccgatg

SEQ ID NO: 457964 - DNA, 56 bp, Artificial
  Synthetic oligonucleotide
tcagtttgagtctcaagttagaaagcatctaagtgaggagctcggtgacaacatca

SEQ ID NO: 457965 - DNA, 53 bp, Artificial
  Synthetic oligonucleotide
tcagtttggggatcctggagatattatgagcacacctacaggaatgaaatgtc

SEQ ID NO: 457966 - DNA, 52 bp, Artificial
  Synthetic oligonucleotide
tcagtttgtaacacaacaacaaacggttcttgagaacgttacaatccccgtt

SEQ ID NO: 457967 - DNA, 60 bp, Artificial
  Synthetic oligonucleotide
tcagtttgttccgggctgatcgctctgtgagcgacgtgtgagtagcgagcagacgtgttc

SEQ ID NO: 457968 - DNA, 57 bp, Artificial
  Synthetic oligonucleotide
tcagttttaccaggctgatgggccgtatagcacggcttacttcgaacttaggtcaat

SEQ ID NO: 457969 - DNA, 52 bp, Artificial
  Synthetic oligonucleotide
tcagttttacctccattaactgtacgcgaaacggggggcgtacgtaccctga

SEQ ID NO: 457970 - DNA, 57 bp, Artificial
  Synthetic oligonucleotide
tcagttttccggaatgttgacttttcggtgaagaaaatgttcacgttcgatcatgaa

SEQ ID NO: 457971 - DNA, 60 bp, Artificial
  Synthetic oligonucleotide
tcagttttgtagcccagtcatacgggaggctgctctgcactagagaaaggtactcttccc

SEQ ID NO: 457972 - DNA, 53 bp, Artificial
  Synthetic oligonucleotide
tcagttttttggcaggaaggtcaaccttaccccagattcacaatcccttttat

SEQ ID NO: 457973 - DNA, 55 bp, Artificial
  Synthetic oligonucleotide
tcataaaatagaaccctggaatcagccaggaagtcggcctaagactccgtgtacc

SEQ ID NO: 457974 - DNA, 60 bp, Artificial
  Synthetic oligonucleotide
tcataaacatttctgcagaaaccacatgttgcaccttcattaatggcaaagcaccatgct

SEQ ID NO: 457975 - DNA, 55 bp, Artificial
  Synthetic oligonucleotide
tcataaaccctgccttaacactgtaagcgttgtgggctcctccctcggttccgga

SEQ ID NO: 457976 - DNA, 55 bp, Artificial
  Synthetic oligonucleotide
tcataaactctgttctcgacagggcatacattatatgtgcaggcggccacgtacc

SEQ ID NO: 457977 - DNA, 52 bp, Artificial
  Synthetic oligonucleotide
tcataaagccgcagtgcgtgctagctacggtggtgttccctaacccggagct

SEQ ID NO: 457978 - DNA, 55 bp, Artificial
  Synthetic oligonucleotide
tcataaatatttcgacagaatccgcatgtagcaccctcattaattgcaaaacacc

SEQ ID NO: 457979 - DNA, 55 bp, Artificial
  Synthetic oligonucleotide
tcataaatgggccaaaatgtgtaactgggtatgcaattgggccttcttgttgggc

SEQ ID NO: 457980 - DNA, 59 bp, Artificial
  Synthetic oligonucleotide
tcataacatcctgctcctccaacgtgtcggtcgcccatgacggagctggaaaacgggtc

SEQ ID NO: 457981 - DNA, 60 bp, Artificial
  Synthetic oligonucleotide
tcataacatcgtgctcctctaacgtgtcagtcgcccacgacggcactggaaagagggtct

SEQ ID NO: 457982 - DNA, 55 bp, Artificial
  Synthetic oligonucleotide
tcataaccacaggattttatggtgaccgacttcttacctatcgctgcacaatccc

SEQ ID NO: 457983 - DNA, 60 bp, Artificial
  Synthetic oligonucleotide
tcataacgagcaacacgcacccggaaagttggtactgtcccgataagtgctatctgcctg

SEQ ID NO: 457984 - DNA, 53 bp, Artificial
  Synthetic oligonucleotide
tcataacgtggcatacttgacaactaggtcacaacgtgacgaggaggccaaag

SEQ ID NO: 457985 - DNA, 50 bp, Artificial
  Synthetic oligonucleotide
tcataactgaaccccaccagtaatctggtcgtgttaatgactggtggggg

SEQ ID NO: 457986 - DNA, 59 bp, Artificial
  Synthetic oligonucleotide
tcataacttattgcacccacccacaataacctgcaccactgctatgaacaggaggtttt

SEQ ID NO: 457987 - DNA, 55 bp, Artificial
  Synthetic oligonucleotide
tcataacttgttagcaccacctacaatcacttcattaccggctatgaacagaagg

SEQ ID NO: 457988 - DNA, 60 bp, Artificial
  Synthetic oligonucleotide
tcataagcacaatcactgccatgtataatcacgggcatacgggtggttttcatatgggga

SEQ ID NO: 457989 - DNA, 57 bp, Artificial
  Synthetic oligonucleotide
tcataagtacaataatggattcaccgaagtaatagagttcactggaactgcagaaat

SEQ ID NO: 457990 - DNA, 55 bp, Artificial
  Synthetic oligonucleotide
tcataagttgggagtttggctgattcacaagaagggatagagaatgtttggtcac

SEQ ID NO: 457991 - DNA, 60 bp, Artificial
  Synthetic oligonucleotide
tcataataagaggtccttttgaggctgagtggggaatcctactaagaatcactggtatca

SEQ ID NO: 457992 - DNA, 59 bp, Artificial
  Synthetic oligonucleotide
tcataatagtacagctagaagtctgtacacgaccacatgagcccctcccacaaatacaa

SEQ ID NO: 457993 - DNA, 60 bp, Artificial
  Synthetic oligonucleotide
tcataatatgtgacgaatgtcactcagtggacgccacctcgattctgggcatagggaccg

SEQ ID NO: 457994 - DNA, 55 bp, Artificial
  Synthetic oligonucleotide
tcataatggaaggaaaccattctatttgtgaaaagaagaccttaccccttacatg

SEQ ID NO: 457995 - DNA, 55 bp, Artificial
  Synthetic oligonucleotide
tcataatggaatatgccctgtggtgatgacggatggcccagctaataacagagcc

SEQ ID NO: 457996 - DNA, 55 bp, Artificial
  Synthetic oligonucleotide
tcatacaacaagtgagggaccaagcagagcacttaagaacagcagtacagatggc

SEQ ID NO: 457997 - DNA, 60 bp, Artificial
  Synthetic oligonucleotide
tcatacaaccaacatctcgggatcttaaatgcatcccagaaagtcataagtgacttgcac

SEQ ID NO: 457998 - DNA, 60 bp, Artificial
  Synthetic oligonucleotide
tcatacaatggcaccctcctagccggagaacatgcactataactgggttctggccgttga

SEQ ID NO: 457999 - DNA, 60 bp, Artificial
  Synthetic oligonucleotide
tcatacacacacagtgtaacgctaccaaattccacagtggtgcactactggttgttctca

SEQ ID NO: 458000 - DNA, 60 bp, Artificial
  Synthetic oligonucleotide
tcatacacaggatctaattgttttcgagagtggtctatgcggatcgtgcgggggctatta

SEQ ID NO: 458001 - DNA, 53 bp, Artificial
  Synthetic oligonucleotide
tcatacagaatatgtgaggcgccctttaatatattgcctatgctaatgacgcc

SEQ ID NO: 458002 - DNA, 60 bp, Artificial
  Synthetic oligonucleotide
tcatacagcaacttatggcaccacagtggttaaccggatggggacgctttgtgtcagaat

SEQ ID NO: 458003 - DNA, 51 bp, Artificial
  Synthetic oligonucleotide
tcatacaggacaattcatatcatacggtatcattcgcagcgcatggtcaaa

SEQ ID NO: 458004 - DNA, 58 bp, Artificial
  Synthetic oligonucleotide
tcatacaggagaccagtcgggatttccagtatggtggaggccatggtttctagggccc

SEQ ID NO: 458005 - DNA, 58 bp, Artificial
  Synthetic oligonucleotide
tcatacataggtacacagggtgtgctccagggacaggagcgagatcgagtggcgtcta

SEQ ID NO: 458006 - DNA, 57 bp, Artificial
  Synthetic oligonucleotide
tcatacatgagaaaataggggaccactcgactgtagtgtacccaacgataacaaccc

SEQ ID NO: 458007 - DNA, 50 bp, Artificial
  Synthetic oligonucleotide
tcatacattaatgccaatccaggtgagaaggggggggtgtttagcagtac

SEQ ID NO: 458008 - DNA, 55 bp, Artificial
  Synthetic oligonucleotide
tcatacattgtagaaaaagacaacccatccaatggcctgtgttaccctggaaact

SEQ ID NO: 458009 - DNA, 56 bp, Artificial
  Synthetic oligonucleotide
tcataccacagataccaactaacatagaaagggccatgaatcaagctagtatgatt

SEQ ID NO: 458010 - DNA, 58 bp, Artificial
  Synthetic oligonucleotide
tcataccagtttctgaccacagacgaggattgctccccttgcatcctacccgactttc

SEQ ID NO: 458011 - DNA, 55 bp, Artificial
  Synthetic oligonucleotide
tcataccctgaggagttgttactagacgagatcgaatccgttgccaatgatctgc

SEQ ID NO: 458012 - DNA, 55 bp, Artificial
  Synthetic oligonucleotide
tcataccgaaaagagactcctgattccatatgggaatgctctagtacccaagcag

SEQ ID NO: 458013 - DNA, 60 bp, Artificial
  Synthetic oligonucleotide
tcatacctaaacatatacggtgctgactgcctctttgaatctttcaatataatggctaag

SEQ ID NO: 458014 - DNA, 55 bp, Artificial
  Synthetic oligonucleotide
tcatacctctaaacagagctattagagctagatctcaagcattcattgaggcttg

SEQ ID NO: 458015 - DNA, 60 bp, Artificial
  Synthetic oligonucleotide
tcatacctgggaccaagattacggtggcctacttgaatgaattgtccaaacatagtgcag

SEQ ID NO: 458016 - DNA, 55 bp, Artificial
  Synthetic oligonucleotide
tcatacgaatcgaattccctgaattcgggcgagaaacgacgtcgaccatcgtttg

SEQ ID NO: 458017 - DNA, 59 bp, Artificial
  Synthetic oligonucleotide
tcatacgagcaaagtatccagcattcacacacgtcttacagttcttacacaattacaga

SEQ ID NO: 458018 - DNA, 60 bp, Artificial
  Synthetic oligonucleotide
tcatacgaggagcgccgagcctttcgtgaactcgcatcacagtcgcacctatactggaca

SEQ ID NO: 458019 - DNA, 60 bp, Artificial
  Synthetic oligonucleotide
tcatacgatatggtaccggagtaccaagctattccatgaacattgcgtgttatccatgaa

SEQ ID NO: 458020 - DNA, 57 bp, Artificial
  Synthetic oligonucleotide
tcatacgcagccgctgtagttcttagagcccccttacccctgtacccccttcatgcc

SEQ ID NO: 458021 - DNA, 59 bp, Artificial
  Synthetic oligonucleotide
tcatacgccctgaatccgggggtagagatagacagtagcctgatggttgtggatttccc

SEQ ID NO: 458022 - DNA, 57 bp, Artificial
  Synthetic oligonucleotide
tcatacgctgggaaggaccatgtcgtcataccaaaatcagcagtttacggggggcct

SEQ ID NO: 458023 - DNA, 55 bp, Artificial
  Synthetic oligonucleotide
tcatacggagaatgcgttgatgttgtatatggcctgtacacatgccagtaatcct

SEQ ID NO: 458024 - DNA, 55 bp, Artificial
  Synthetic oligonucleotide
tcatacggaggttagaatgaataacatgttgtgtgcatcgcccatgggaacgcca

SEQ ID NO: 458025 - DNA, 57 bp, Artificial
  Synthetic oligonucleotide
tcatacggatgtccgtggctccttaaaccactttatccctgagcttagccctattag

SEQ ID NO: 458026 - DNA, 57 bp, Artificial
  Synthetic oligonucleotide
tcatacgggaattacacggagaaatattgcgagtggggggcaatttcggtatcaatc

SEQ ID NO: 458027 - DNA, 55 bp, Artificial
  Synthetic oligonucleotide
tcatacgggcgattcacaggctgtggagattgtctcggtcgagaccggtatcaac

SEQ ID NO: 458028 - DNA, 60 bp, Artificial
  Synthetic oligonucleotide
tcatacggtgtggcaacaaatacgttctcattcactgtgcaagatgatgagtttttccca

SEQ ID NO: 458029 - DNA, 55 bp, Artificial
  Synthetic oligonucleotide
tcatacggttgtgaggtcgacgccaataatcggtcagctggagatcagagtatgg

SEQ ID NO: 458030 - DNA, 58 bp, Artificial
  Synthetic oligonucleotide
tcatacgtaacgaacatttctgatgaggttagtgaaattggagctaggaaaacaacaa

SEQ ID NO: 458031 - DNA, 60 bp, Artificial
  Synthetic oligonucleotide
tcatacgtcatgcaccattcaaatcacatcacggaggaatttttagcaaatcagaccatg

SEQ ID NO: 458032 - DNA, 54 bp, Artificial
  Synthetic oligonucleotide
tcatactaatttcctcactgctggaagtgcagaagctgttaatcgtcaaactac

SEQ ID NO: 458033 - DNA, 60 bp, Artificial
  Synthetic oligonucleotide
tcatactactggctctacaaggcaggcgtgactccagaaaccttcccaactgtttcacag

SEQ ID NO: 458034 - DNA, 54 bp, Artificial
  Synthetic oligonucleotide
tcatactgaattccttaacgaggtacgacgaccgaccaaagcaggcatgcgata

SEQ ID NO: 458035 - DNA, 60 bp, Artificial
  Synthetic oligonucleotide
tcatactgagaatgcgttgatgttgtatatggcgtgtacgcacgcctctaaccctgtgta

SEQ ID NO: 458036 - DNA, 60 bp, Artificial
  Synthetic oligonucleotide
tcatactggctaatagttgatgcaatgtagatgtcgttcgctccactatctgtagagttt

SEQ ID NO: 458037 - DNA, 51 bp, Artificial
  Synthetic oligonucleotide
tcatacttaagcacacaacctagtagacacctaatgaaccacaaagcattt

SEQ ID NO: 458038 - DNA, 52 bp, Artificial
  Synthetic oligonucleotide
tcatacttatcgtcagactccagtagttggaaggcattacacacatatttga

SEQ ID NO: 458039 - DNA, 60 bp, Artificial
  Synthetic oligonucleotide
tcatacttgatcgtcatgattaattctgtgagttaaaacatgagtgctttccattatata

SEQ ID NO: 458040 - DNA, 55 bp, Artificial
  Synthetic oligonucleotide
tcatagaaaatatgtgcgcatatggacttaatcctggtatttcaggctcccgtct

SEQ ID NO: 458041 - DNA, 60 bp, Artificial
  Synthetic oligonucleotide
tcatagaaacacaataggagactgccccaagtatgtgaatgttaaatccctaaagcttgc

SEQ ID NO: 458042 - DNA, 57 bp, Artificial
  Synthetic oligonucleotide
tcatagaccacacaagggaccgagagcgcgttgaatcggggtcgtatctttacgacc

SEQ ID NO: 458043 - DNA, 55 bp, Artificial
  Synthetic oligonucleotide
tcatagacgaagttgccaaagtctatgaaatcaaccatggacgtgtcccaaacca

SEQ ID NO: 458044 - DNA, 55 bp, Artificial
  Synthetic oligonucleotide
tcatagactgctggcattgttaggttgacaatgtttatgtacacaggaacgtgac

SEQ ID NO: 458045 - DNA, 60 bp, Artificial
  Synthetic oligonucleotide
tcatagagaggcccactgcggtagatacttgctacccattcgatgtgccagattaccaga

SEQ ID NO: 458046 - DNA, 60 bp, Artificial
  Synthetic oligonucleotide
tcatagagtagtgaggaatggtgtagccattttccaggcggtatatctttttgtctccaa

SEQ ID NO: 458047 - DNA, 59 bp, Artificial
  Synthetic oligonucleotide
tcatagagtattgcctactaaggtagttcctgattatagtactattgttgatcccttta

SEQ ID NO: 458048 - DNA, 60 bp, Artificial
  Synthetic oligonucleotide
tcatagatcgcaccgaggggaacgaaagccccaaccattgctacattgtgactggcagca

SEQ ID NO: 458049 - DNA, 60 bp, Artificial
  Synthetic oligonucleotide
tcatagatctgagccaaacctatcagatcctcgtctcaggaaccatgtcttctagtgaca

SEQ ID NO: 458050 - DNA, 60 bp, Artificial
  Synthetic oligonucleotide
tcatagattacggccacgaccgtgtgctttactccactctcgcttggccctccacgctta

SEQ ID NO: 458051 - DNA, 60 bp, Artificial
  Synthetic oligonucleotide
tcatagcaaacccagatgcttctaatcctatcaatccatggccacattcaaaaaatagac

SEQ ID NO: 458052 - DNA, 59 bp, Artificial
  Synthetic oligonucleotide
tcatagcattcgcatctcgaggtaaccatgtatcaccaacacattacgttcccgagagc

SEQ ID NO: 458053 - DNA, 60 bp, Artificial
  Synthetic oligonucleotide
tcatagccttcaagctccgttaagaagaccctcatgtctttagtctccaacttcacaaga

SEQ ID NO: 458054 - DNA, 60 bp, Artificial
  Synthetic oligonucleotide
tcatagcgttggaggttgtttgtgataccgagtctcctgggtcaagagacgactctggta

SEQ ID NO: 458055 - DNA, 53 bp, Artificial
  Synthetic oligonucleotide
tcatagcgtttgatcactttgcagttcgctcgatacagatgaattggacattg

SEQ ID NO: 458056 - DNA, 60 bp, Artificial
  Synthetic oligonucleotide
tcatagggaaccttatgaagagttggtttcgcagctcgcagtaatttatagacttcatgt

SEQ ID NO: 458057 - DNA, 59 bp, Artificial
  Synthetic oligonucleotide
tcatagggatcactcccgatgtggtagttattgtcgactatggtactttgaagttcacg

SEQ ID NO: 458058 - DNA, 53 bp, Artificial
  Synthetic oligonucleotide
tcataggtaccatctatgctatatacaagttactatgtgtgtcacaaggggcc

SEQ ID NO: 458059 - DNA, 60 bp, Artificial
  Synthetic oligonucleotide
tcataggtctgatactcttgaccttgtcaccacactacaaagcattcctcgctaagctca

SEQ ID NO: 458060 - DNA, 60 bp, Artificial
  Synthetic oligonucleotide
tcataggtctggcactcttgaccttgtcaccacactataaagtgttcctcgctaagctca

SEQ ID NO: 458061 - DNA, 58 bp, Artificial
  Synthetic oligonucleotide
tcataggtgaaccgtgccacgggcctgcctaccgaaaggaaaagcagtatccaacaca

SEQ ID NO: 458062 - DNA, 58 bp, Artificial
  Synthetic oligonucleotide
tcataggtggcactgcagaggtcaatcctactcggttcgaatattcaactgcaaacct

SEQ ID NO: 458063 - DNA, 57 bp, Artificial
  Synthetic oligonucleotide
tcatagtaacaggccttaaaagaatggctgttaccgtgggtgaacaggctcagcgga

SEQ ID NO: 458064 - DNA, 55 bp, Artificial
  Synthetic oligonucleotide
tcatagtagaggagattacaggctaatacattgtgatacctcaaccattacacag

SEQ ID NO: 458065 - DNA, 59 bp, Artificial
  Synthetic oligonucleotide
tcatagtattcccagacctgggggtacgggtgtgcgagaagagagctttatatgacgta

SEQ ID NO: 458066 - DNA, 60 bp, Artificial
  Synthetic oligonucleotide
tcatagtccttggtgagtctgaacagatgctcaccgatgaactctggttctagtggacac

SEQ ID NO: 458067 - DNA, 55 bp, Artificial
  Synthetic oligonucleotide
tcatagtcgcaactaacatcattgagaacggtgtcaccttagatatcgatgtagt

SEQ ID NO: 458068 - DNA, 60 bp, Artificial
  Synthetic oligonucleotide
tcatagtgaatgcacctaatcatgagggaatacaagcaggagtggataggttctatagga

SEQ ID NO: 458069 - DNA, 56 bp, Artificial
  Synthetic oligonucleotide
tcatagtgctatagatggtgcttctaaaaatgcgagttttcaagcgttagaatggt

SEQ ID NO: 458070 - DNA, 57 bp, Artificial
  Synthetic oligonucleotide
tcatagtgtcccccagggggggaattgaagggctctgtcaaaaattgtggactatga

SEQ ID NO: 458071 - DNA, 55 bp, Artificial
  Synthetic oligonucleotide
tcatagtgttctctaaccaactcacataggtttcgggacccgagactggttttaa

SEQ ID NO: 458072 - DNA, 58 bp, Artificial
  Synthetic oligonucleotide
tcatagtgttgtgtggaccccccggtcacggcaaatctgtcgcggcccataagcttgc

SEQ ID NO: 458073 - DNA, 60 bp, Artificial
  Synthetic oligonucleotide
tcatagttgacaataataactggtctggttattctggcattttctctgttgaaggcaaaa

SEQ ID NO: 458074 - DNA, 60 bp, Artificial
  Synthetic oligonucleotide
tcatagtttgtgtctgagtgaagtatttttagttcagcgcagtgcgcattgtgggaaacc

SEQ ID NO: 458075 - DNA, 51 bp, Artificial
  Synthetic oligonucleotide
tcatataaggcgaattaggatgaagcatggtactaagtatcagcgtcaagc

SEQ ID NO: 458076 - DNA, 59 bp, Artificial
  Synthetic oligonucleotide
tcatataagtaccaattggacatggaagcaattgctaaggaaggtaccaagtatggtct

SEQ ID NO: 458077 - DNA, 60 bp, Artificial
  Synthetic oligonucleotide
tcatataataatatagcaactcaactaaaagggctagatgccatatcggttttagatatc

SEQ ID NO: 458078 - DNA, 59 bp, Artificial
  Synthetic oligonucleotide
tcatataatgcacaactcctcgttttgcttgaaaatgaaaagaccctggacctccacga

SEQ ID NO: 458079 - DNA, 60 bp, Artificial
  Synthetic oligonucleotide
tcatatacgtggtgcattaattatcatatgaatctgagtggagatagatatggttgatag

SEQ ID NO: 458080 - DNA, 53 bp, Artificial
  Synthetic oligonucleotide
tcatatagatctggtgataaaacacaagttcccctcagattcaccccttttga

SEQ ID NO: 458081 - DNA, 58 bp, Artificial
  Synthetic oligonucleotide
tcatatagcagtgggtacacctgtgcgagttattatttcgctcgtagatggtgcttgt

SEQ ID NO: 458082 - DNA, 55 bp, Artificial
  Synthetic oligonucleotide
tcatatagtagtcaaacgggtaatggtaactgtttcctgttccaggtgacctgtc

SEQ ID NO: 458083 - DNA, 60 bp, Artificial
  Synthetic oligonucleotide
tcatatatcccgcatggtcgagtttgtagactctgaaacggtattccctatcagagtcgc

SEQ ID NO: 458084 - DNA, 59 bp, Artificial
  Synthetic oligonucleotide
tcatatatgtggacatacctagcaagtaatagacatccccgaaagccctaccaaataag

SEQ ID NO: 458085 - DNA, 60 bp, Artificial
  Synthetic oligonucleotide
tcatatcaaggtgccaatcgaggatttgcttttgccatgtgtgttttgcgggcgtttcct

SEQ ID NO: 458086 - DNA, 60 bp, Artificial
  Synthetic oligonucleotide
tcatatcaagtatgggacctgaaatttcatacttagttatggtcatcggaccaccaagtg

SEQ ID NO: 458087 - DNA, 54 bp, Artificial
  Synthetic oligonucleotide
tcatatcagaatcaaaatctaccgactaatcaaagtaactttgaacaagactta

SEQ ID NO: 458088 - DNA, 60 bp, Artificial
  Synthetic oligonucleotide
tcatatcaggaattctttatgcagtgtctggaagagcggcgcattgtaatcaaactgccc

SEQ ID NO: 458089 - DNA, 60 bp, Artificial
  Synthetic oligonucleotide
tcatatcattaatagcgaagcttgacgctacggttttcgcccaaatagttaagctgagaa

SEQ ID NO: 458090 - DNA, 57 bp, Artificial
  Synthetic oligonucleotide
tcatatccgccccacacttcacgcgccccaaacggtcgtgcgtcgttcgggttgtga

SEQ ID NO: 458091 - DNA, 50 bp, Artificial
  Synthetic oligonucleotide
tcatatcctcttctcgattataagatctcatctcatatgcgtcatgagag

SEQ ID NO: 458092 - DNA, 55 bp, Artificial
  Synthetic oligonucleotide
tcatatcgagagcatcacctcatgttttggtggcgttgacaaggcacacaacacg

SEQ ID NO: 458093 - DNA, 55 bp, Artificial
  Synthetic oligonucleotide
tcatatctcaattacggaacatatcagcacacaattgcccattatacgcgcgtat

SEQ ID NO: 458094 - DNA, 55 bp, Artificial
  Synthetic oligonucleotide
tcatatgaaaacctactcgtcacagagaatgagcagatgcgtacgttagcgcgcg

SEQ ID NO: 458095 - DNA, 60 bp, Artificial
  Synthetic oligonucleotide
tcatatgaaagctccattaatcaccataccgcaagttgtgcacagtgttgtatcaaaatg

SEQ ID NO: 458096 - DNA, 60 bp, Artificial
  Synthetic oligonucleotide
tcatatgacacccgctgtttcgactcaacggtcaccgagaatgatatccgtgtcgaggag

SEQ ID NO: 458097 - DNA, 50 bp, Artificial
  Synthetic oligonucleotide
tcatatgagcagagagtgcactgtagtcatcaaatgcgagcacgactgcc

SEQ ID NO: 458098 - DNA, 60 bp, Artificial
  Synthetic oligonucleotide
tcatatgataaaatctgatgtcaagcctgttgttagcgacacactgaacattgacagacc

SEQ ID NO: 458099 - DNA, 60 bp, Artificial
  Synthetic oligonucleotide
tcatatgatagaactcggattagggcgctggagctgtgtaatatattatccgccattggg

SEQ ID NO: 458100 - DNA, 58 bp, Artificial
  Synthetic oligonucleotide
tcatatgatctgcgctggaccaagctagctctgctcgagtcgaccacgctgagtagcg

SEQ ID NO: 458101 - DNA, 52 bp, Artificial
  Synthetic oligonucleotide
tcatatgcatgtccaacccgtgacgggatgtctggagcaccacttctagaca

SEQ ID NO: 458102 - DNA, 60 bp, Artificial
  Synthetic oligonucleotide
tcatatgcgatattaattcatatgaggaccagagttttgaatctatgtttagtgagacat

SEQ ID NO: 458103 - DNA, 60 bp, Artificial
  Synthetic oligonucleotide
tcatatggaggctctatatctgggaacagtttattggcgctatattcaagccattgtagt

SEQ ID NO: 458104 - DNA, 51 bp, Artificial
  Synthetic oligonucleotide
tcatatggcgcttagcaacaaccatgattccacgtcttttgttggatttcc

SEQ ID NO: 458105 - DNA, 60 bp, Artificial
  Synthetic oligonucleotide
tcatatggtgatgttacaagattcttatccagtaattctatggtattatatacagacgtt

SEQ ID NO: 458106 - DNA, 60 bp, Artificial
  Synthetic oligonucleotide
tcatatgtagagataccatcacatctgcttgttcagaatggtatgccattaaaagatgga

SEQ ID NO: 458107 - DNA, 53 bp, Artificial
  Synthetic oligonucleotide
tcatatgtatatacattgattcaaatcacagccccatgtacacagcccaacac

SEQ ID NO: 458108 - DNA, 55 bp, Artificial
  Synthetic oligonucleotide
tcatatgtcacgtggggaggccctactgcgcaaacgcggaagtaggccccgtcac

SEQ ID NO: 458109 - DNA, 60 bp, Artificial
  Synthetic oligonucleotide
tcatatgtctcagtacatggatttgagagtatcactgcaaggaacgagtttgagcattaa

SEQ ID NO: 458110 - DNA, 56 bp, Artificial
  Synthetic oligonucleotide
tcatatgtctgtagaagacgttcggtcatataacttccgacacatcggtcaccatg

SEQ ID NO: 458111 - DNA, 57 bp, Artificial
  Synthetic oligonucleotide
tcatatgtgaatgctactaaagatgagccatttttaacgtcaacattatgtttatac

SEQ ID NO: 458112 - DNA, 60 bp, Artificial
  Synthetic oligonucleotide
tcatatgtgtacattgattattgggacgattcacaagcatttagaaatatggtgtatgtc

SEQ ID NO: 458113 - DNA, 53 bp, Artificial
  Synthetic oligonucleotide
tcatattaagaggatcagttgcacacaagtcttgtctgcctacctgtgtgtat

SEQ ID NO: 458114 - DNA, 60 bp, Artificial
  Synthetic oligonucleotide
tcatattaccaccttactctcagctgcgtagatcttggttggatatgttttaggcggcgt

SEQ ID NO: 458115 - DNA, 55 bp, Artificial
  Synthetic oligonucleotide
tcatattagtggtagtgagggtggtggaacttctgggacagagcagtctcagggg

SEQ ID NO: 458116 - DNA, 53 bp, Artificial
  Synthetic oligonucleotide
tcatattatctgggaagccggctatcattcccgacagggaggtcctctaccaa

SEQ ID NO: 458117 - DNA, 57 bp, Artificial
  Synthetic oligonucleotide
tcatattatggctaccgaggcatctaattacgcccagtaccgggtggttcgagctac

SEQ ID NO: 458118 - DNA, 56 bp, Artificial
  Synthetic oligonucleotide
tcatattcccacgaatgatccccggatccgactgtagaacgagcaaagtcgccatc

SEQ ID NO: 458119 - DNA, 60 bp, Artificial
  Synthetic oligonucleotide
tcatattcttttacagatgtggcgacctactgatgcaaaggtatacctgccccctgtgtc

SEQ ID NO: 458120 - DNA, 53 bp, Artificial
  Synthetic oligonucleotide
tcatattgcggactgtgggatctagaaataagtgagatgagagctagggaaaa

SEQ ID NO: 458121 - DNA, 52 bp, Artificial
  Synthetic oligonucleotide
tcatatttagacagaatggtactttctttgtcacttctacacagttatatga

SEQ ID NO: 458122 - DNA, 60 bp, Artificial
  Synthetic oligonucleotide
tcatatttagtcctggtctatttcctaacctaaatcagtcagtctgtgacaacaatgcac

SEQ ID NO: 458123 - DNA, 60 bp, Artificial
  Synthetic oligonucleotide
tcatatttggagatgacctggagccggctgttcgtgaaagagctaacctctatcatcgat

SEQ ID NO: 458124 - DNA, 60 bp, Artificial
  Synthetic oligonucleotide
tcatatttggcatcctcagtcagaggaatggtgatgggcaaaccagggcacatgaggcca

SEQ ID NO: 458125 - DNA, 57 bp, Artificial
  Synthetic oligonucleotide
tcatcaaactgaacgttagctgtcgtgtaaaggctcttgtcgctagagaatgtcctg

SEQ ID NO: 458126 - DNA, 55 bp, Artificial
  Synthetic oligonucleotide
tcatcaaatattgcaagctttatcctgaccgggcatagagtactcgacacccgct

SEQ ID NO: 458127 - DNA, 59 bp, Artificial
  Synthetic oligonucleotide
tcatcaacctgtttgcataaagaatggccccattcaagaaactggaggtgtaatccaac

SEQ ID NO: 458128 - DNA, 60 bp, Artificial
  Synthetic oligonucleotide
tcatcaagacagacgcccaaaaatgaacttttctcgtgtggtcagcacagagcacaccag

SEQ ID NO: 458129 - DNA, 59 bp, Artificial
  Synthetic oligonucleotide
tcatcaagacgtactttttcattcgaaagaactactcttaaaatctgtgttgatagcta

SEQ ID NO: 458130 - DNA, 60 bp, Artificial
  Synthetic oligonucleotide
tcatcaagaggctgcgaagtatgagaaccatacggagaatgcgttgttgttgtatatggc

SEQ ID NO: 458131 - DNA, 60 bp, Artificial
  Synthetic oligonucleotide
tcatcaagaggctggcaagtacgagaatcatacagagaacgccctgttattgtatatggc

SEQ ID NO: 458132 - DNA, 55 bp, Artificial
  Synthetic oligonucleotide
tcatcaaggcacactggtggttgcaatgatacctgaacatcaaatcgctagtctt

SEQ ID NO: 458133 - DNA, 54 bp, Artificial
  Synthetic oligonucleotide
tcatcaagtagcaatggacccagagtctattccctggacggcattttgggctat

SEQ ID NO: 458134 - DNA, 56 bp, Artificial
  Synthetic oligonucleotide
tcatcaagtccctcactgagaggctttacgttgggggccctcttaccaattcaagg

SEQ ID NO: 458135 - DNA, 60 bp, Artificial
  Synthetic oligonucleotide
tcatcaatgacgttataccaagcactgttgctgtacacttttgggctcaagtccaaatga

SEQ ID NO: 458136 - DNA, 60 bp, Artificial
  Synthetic oligonucleotide
tcatcaatgacgttatactccacatcgtttgaatagacctttgaattgaaatcaaggtga

SEQ ID NO: 458137 - DNA, 60 bp, Artificial
  Synthetic oligonucleotide
tcatcaatgacgttataggcaacattattcgagtacactcgatgattgaagtctaggtgt

SEQ ID NO: 458138 - DNA, 60 bp, Artificial
  Synthetic oligonucleotide
tcatcaatgacgttgtaccaggcgtcattactgtagaccttagggctaaggtctagatga

SEQ ID NO: 458139 - DNA, 60 bp, Artificial
  Synthetic oligonucleotide
tcatcaatgcgtgtccgtccatttctcgcaatttgtgcggtccaatagtaatgttatgag

SEQ ID NO: 458140 - DNA, 55 bp, Artificial
  Synthetic oligonucleotide
tcatcacacgaaacgcatgttggaagttgtgcgcgagttatcttcagaggtgtca

SEQ ID NO: 458141 - DNA, 57 bp, Artificial
  Synthetic oligonucleotide
tcatcacacttctttgtctactccaaggggatttattacgacggactactagtctcc

SEQ ID NO: 458142 - DNA, 53 bp, Artificial
  Synthetic oligonucleotide
tcatcacaggccccctgttcccagagttggaagtccgcccgctttttgtaggc

SEQ ID NO: 458143 - DNA, 55 bp, Artificial
  Synthetic oligonucleotide
tcatcacatggcccgcgaaccgcatccggagttttacaaagactgctgacatccg

SEQ ID NO: 458144 - DNA, 59 bp, Artificial
  Synthetic oligonucleotide
tcatcacccagtttaaggttttgaaggagcatcaggaacaaaaatgggcacatcattgg

SEQ ID NO: 458145 - DNA, 55 bp, Artificial
  Synthetic oligonucleotide
tcatcaccgaaggctttacatggacaggagtcacacaaaacggagggagtggtgc

SEQ ID NO: 458146 - DNA, 60 bp, Artificial
  Synthetic oligonucleotide
tcatcacgtggggggctgacacggccgcatgtggggacatacttgccggccttcctgtat

SEQ ID NO: 458147 - DNA, 57 bp, Artificial
  Synthetic oligonucleotide
tcatcactagcctcacaggccgggacaagaaccaagtcgagggggaggttcaagtgg

SEQ ID NO: 458148 - DNA, 60 bp, Artificial
  Synthetic oligonucleotide
tcatcactatgaaagcatcagtgatttaagcccatcattgtctattagagatagaatcat

SEQ ID NO: 458149 - DNA, 55 bp, Artificial
  Synthetic oligonucleotide
tcatcactcagtatggttatgagacgaaaggattccagcgccaggatggacccac

SEQ ID NO: 458150 - DNA, 60 bp, Artificial
  Synthetic oligonucleotide
tcatcactccacagctgctagggaatagaaaatgggtcccattgcacacaatgagcccca

SEQ ID NO: 458151 - DNA, 60 bp, Artificial
  Synthetic oligonucleotide
tcatcactcctgttgggacatgtatgtcaatcagaagttgtatggctaaccttttaagca

SEQ ID NO: 458152 - DNA, 60 bp, Artificial
  Synthetic oligonucleotide
tcatcactctatgttatgcagagaaggttcacttcgctgggttcgcggcacctgcgtgtg

SEQ ID NO: 458153 - DNA, 52 bp, Artificial
  Synthetic oligonucleotide
tcatcagaaggggcctggaaacacgcccagagaattgaaacttggatcttga

SEQ ID NO: 458154 - DNA, 60 bp, Artificial
  Synthetic oligonucleotide
tcatcagacccaatgaaaatccagctcacaagagtcaactagtgtggatggcatgccact

SEQ ID NO: 458155 - DNA, 59 bp, Artificial
  Synthetic oligonucleotide
tcatcagagggaagggtggattcatcacagaaaaggtctgggtcttggaggtcttcaaa

SEQ ID NO: 458156 - DNA, 60 bp, Artificial
  Synthetic oligonucleotide
tcatcaggaacatatactcaacactctccactattatcagagccaaaactctatggtata

SEQ ID NO: 458157 - DNA, 53 bp, Artificial
  Synthetic oligonucleotide
tcatcaggccctaaagtcaatatagtaacagactctcaatatgctatgggtat

SEQ ID NO: 458158 - DNA, 55 bp, Artificial
  Synthetic oligonucleotide
tcatcaggcgctcgcaatagtgagatgtttggtttagggtttggaggactagtta

SEQ ID NO: 458159 - DNA, 60 bp, Artificial
  Synthetic oligonucleotide
tcatcagtgaatgcagtcaagcacgtgaaagcgccagagaagattcccgggagtggaacc

SEQ ID NO: 458160 - DNA, 57 bp, Artificial
  Synthetic oligonucleotide
tcatcagtgtaattcgtgcgaagaactatgtcgaagcgtccagcagatataatcatt

SEQ ID NO: 458161 - DNA, 50 bp, Artificial
  Synthetic oligonucleotide
tcatcagttaacttgcggcagtaacacacatgtgtttcaccagtcccaaa

SEQ ID NO: 458162 - DNA, 53 bp, Artificial
  Synthetic oligonucleotide
tcatcagttatcccagcctcggtaagtccgagcctaaccgaagcaggtcctat

SEQ ID NO: 458163 - DNA, 55 bp, Artificial
  Synthetic oligonucleotide
tcatcagttgatcaggataagatattttcccttagaacggatattgcttcacagc

SEQ ID NO: 458164 - DNA, 55 bp, Artificial
  Synthetic oligonucleotide
tcatcatagttgctagtgtcaccagcacagggcctgtcataattccgccctcaca

SEQ ID NO: 458165 - DNA, 55 bp, Artificial
  Synthetic oligonucleotide
tcatcatatgtgacgagtgccactccacggatccgaccacggtcctaggaatcgg

SEQ ID NO: 458166 - DNA, 55 bp, Artificial
  Synthetic oligonucleotide
tcatcatccccactggagaggcgaagcccggagtcaacatcaaccggaactcgcg

SEQ ID NO: 458167 - DNA, 60 bp, Artificial
  Synthetic oligonucleotide
tcatcatggtctcaatagtcctgagaataacatcatgcgaaaatatggcagggaagaatc

SEQ ID NO: 458168 - DNA, 60 bp, Artificial
  Synthetic oligonucleotide
tcatcattcgaaagattcgaaatattccccaaggaaagctcatggcccaaacacaacaca

SEQ ID NO: 458169 - DNA, 60 bp, Artificial
  Synthetic oligonucleotide
tcatcattcgagagattcgaaatattccccaaggaaagctcatggcccaaccacacagta

SEQ ID NO: 458170 - DNA, 60 bp, Artificial
  Synthetic oligonucleotide
tcatcattgtataataccaacccaagatctggattcaatacaaccatttcacaaggaggc

SEQ ID NO: 458171 - DNA, 55 bp, Artificial
  Synthetic oligonucleotide
tcatcattttaacgtctttcttccagtctctccccttggcggtccctctctcctt

SEQ ID NO: 458172 - DNA, 60 bp, Artificial
  Synthetic oligonucleotide
tcatccaaaacctcaggtggagccgtgctagaggcagacatgattccagacgacgccacc

SEQ ID NO: 458173 - DNA, 58 bp, Artificial
  Synthetic oligonucleotide
tcatccaacctcgagatcccaggttcaatgtggtattcgcgaaatacattaaaccact

SEQ ID NO: 458174 - DNA, 56 bp, Artificial
  Synthetic oligonucleotide
tcatccaacctttgtttctagcaggaagtgtgcgaaagggtacacgtacacttcgt

SEQ ID NO: 458175 - DNA, 57 bp, Artificial
  Synthetic oligonucleotide
tcatccaatagcactgttgttaaagtgttactaaactgcagcatagtaggagtttgg

SEQ ID NO: 458176 - DNA, 57 bp, Artificial
  Synthetic oligonucleotide
tcatccacactccgccctggcgagggcggtatgcgtcaaatcgaatacattttcgac

SEQ ID NO: 458177 - DNA, 55 bp, Artificial
  Synthetic oligonucleotide
tcatccacagggcctgagtacagcacttctaattgcttaggtacgaaagtacacg

SEQ ID NO: 458178 - DNA, 57 bp, Artificial
  Synthetic oligonucleotide
tcatccagacacttcatcaaataggttttacactcttgaaagtaaaaattgggatag

SEQ ID NO: 458179 - DNA, 59 bp, Artificial
  Synthetic oligonucleotide
tcatccagagttctataaagactaagactgctgacaaagaagtttctaactagaacttc

SEQ ID NO: 458180 - DNA, 52 bp, Artificial
  Synthetic oligonucleotide
tcatccataacccttccccttttctacctcacaacatactacctcacattcg

SEQ ID NO: 458181 - DNA, 55 bp, Artificial
  Synthetic oligonucleotide
tcatccatttcagtgtggacggatgtttccgaacagatagcgagttcttcagact

SEQ ID NO: 458182 - DNA, 60 bp, Artificial
  Synthetic oligonucleotide
tcatcccaaccccaaagatcatatgtgcttatggtacgcctgaaatatgcctaagagcgc

SEQ ID NO: 458183 - DNA, 54 bp, Artificial
  Synthetic oligonucleotide
tcatcccacgtgcgaagcatcgttaatgaatacggtcgtgggtaggagaacaat

SEQ ID NO: 458184 - DNA, 55 bp, Artificial
  Synthetic oligonucleotide
tcatcccagaaatcagcactaggcccaaggttaatggacaggctggacgaatgac

SEQ ID NO: 458185 - DNA, 56 bp, Artificial
  Synthetic oligonucleotide
tcatcccagacagggtcaatcatagtcaagttactcccaaatatgcccaaggacaa

SEQ ID NO: 458186 - DNA, 60 bp, Artificial
  Synthetic oligonucleotide
tcatcccaggtggcaactgatggcgaatcttccgtggatcaggctccaaacaacgatgtt

SEQ ID NO: 458187 - DNA, 58 bp, Artificial
  Synthetic oligonucleotide
tcatcccgttgtcaaagcaattcaattagcttatgaccatcaatatcgtgtcaccgct

SEQ ID NO: 458188 - DNA, 60 bp, Artificial
  Synthetic oligonucleotide
tcatccctcccaaagcagagacaggttcaatcagaggtatcgccccgcctctcagtgttg

SEQ ID NO: 458189 - DNA, 58 bp, Artificial
  Synthetic oligonucleotide
tcatccctcccagatagtgcacctctttctccagtccccccaactggttcacctctac

SEQ ID NO: 458190 - DNA, 55 bp, Artificial
  Synthetic oligonucleotide
tcatccctctatctatagctgctctcccaatcgtgccgctgttgagttatgccac

SEQ ID NO: 458191 - DNA, 55 bp, Artificial
  Synthetic oligonucleotide
tcatccctctcatgttaaggctgtaaatactggactctacgaaagtgaagcttac

SEQ ID NO: 458192 - DNA, 51 bp, Artificial
  Synthetic oligonucleotide
tcatccctctttggggacgacccatcagaacagtaatggtccatggtcagc

SEQ ID NO: 458193 - DNA, 54 bp, Artificial
  Synthetic oligonucleotide
tcatcccttcacttttagaggagatgaaccttcccaagacttcagtgtattcca

SEQ ID NO: 458194 - DNA, 55 bp, Artificial
  Synthetic oligonucleotide
tcatcccttgagatggcgggattcgatgttaagaataaacattgtctcgagattg

SEQ ID NO: 458195 - DNA, 55 bp, Artificial
  Synthetic oligonucleotide
tcatccgcaccagagctaggcaggcaccaaaggggcgcaagacccttgatgacgg

SEQ ID NO: 458196 - DNA, 55 bp, Artificial
  Synthetic oligonucleotide
tcatccgccgtgtagggataaaagttcaggaggcgcagtctgactttgaaagggg

SEQ ID NO: 458197 - DNA, 60 bp, Artificial
  Synthetic oligonucleotide
tcatccgtatatgcggcgctcaaggcgtgagatatacggcaacgtgtggcaagagcgcag

SEQ ID NO: 458198 - DNA, 55 bp, Artificial
  Synthetic oligonucleotide
tcatccgtgttcatatgttaggtagtggagatatttgtttcagatgtgacgttgt

SEQ ID NO: 458199 - DNA, 60 bp, Artificial
  Synthetic oligonucleotide
tcatcctaaacaacataagcgttgatgttaggaagttatgcgctgagagagcgtgcaata

SEQ ID NO: 458200 - DNA, 52 bp, Artificial
  Synthetic oligonucleotide
tcatcctacacgtagtaggtccgtaccacaccgggcaggctttcgtgttctg

SEQ ID NO: 458201 - DNA, 60 bp, Artificial
  Synthetic oligonucleotide
tcatcctagacacctgcaccatcgaagggttggtgtacggcaacccttcctgtgatttgc

SEQ ID NO: 458202 - DNA, 58 bp, Artificial
  Synthetic oligonucleotide
tcatcctattaacataatcattagaggaaattaaatggtgaacttcttattgaatacg

SEQ ID NO: 458203 - DNA, 57 bp, Artificial
  Synthetic oligonucleotide
tcatcctcaaccataggcggggtccatcatgtctactgtgacgtggggtaggaagcg

SEQ ID NO: 458204 - DNA, 60 bp, Artificial
  Synthetic oligonucleotide
tcatcctcgagttcagctgcaacaggacatgtctgagagttttgtaccagcacagaacgt

SEQ ID NO: 458205 - DNA, 56 bp, Artificial
  Synthetic oligonucleotide
tcatcctcgccggaagctacccaaaatggtggacaacatcttccgggtcaaaggtc

SEQ ID NO: 458206 - DNA, 51 bp, Artificial
  Synthetic oligonucleotide
tcatcctgacagaggcgatgccagtactccagggaacatccttcgcgcaaa

SEQ ID NO: 458207 - DNA, 58 bp, Artificial
  Synthetic oligonucleotide
tcatcctgactctattgaattgcgtcctataggtcagcattctggagagtcagggatt

SEQ ID NO: 458208 - DNA, 60 bp, Artificial
  Synthetic oligonucleotide
tcatcctgaggggatcagtggctcataagtcctgcctgcctgcttgtgtgtacggacttg

SEQ ID NO: 458209 - DNA, 53 bp, Artificial
  Synthetic oligonucleotide
tcatcctgctcagagttagtatacagcgtcccaatgtagtagccggcgcctga

SEQ ID NO: 458210 - DNA, 60 bp, Artificial
  Synthetic oligonucleotide
tcatcctgtccaggtgcactctaacaataccttgcataactttggtggcgcccttgttaa

SEQ ID NO: 458211 - DNA, 51 bp, Artificial
  Synthetic oligonucleotide
tcatcctgtcgggacagcctgccatcataccggaccgcgaggcattatacc

SEQ ID NO: 458212 - DNA, 55 bp, Artificial
  Synthetic oligonucleotide
tcatccttatcacggaatccaatctactccaagtgaactcatccacgcctggtga

SEQ ID NO: 458213 - DNA, 58 bp, Artificial
  Synthetic oligonucleotide
tcatccttgaaactaatacacaaggccaatgctcttcaggagaggttacgtctctctc

SEQ ID NO: 458214 - DNA, 60 bp, Artificial
  Synthetic oligonucleotide
tcatcctttgaggcgcgagtgttagagctctcaccgatctgaggaacgaagggcttcttc

SEQ ID NO: 458215 - DNA, 60 bp, Artificial
  Synthetic oligonucleotide
tcatcgaactgatgatcttgtcaacgtacatttccccagtggtcgatggatgtatcctca

SEQ ID NO: 458216 - DNA, 55 bp, Artificial
  Synthetic oligonucleotide
tcatcgaactttcatccttcgagacttaaccacgctattccctgaggacatagtg

SEQ ID NO: 458217 - DNA, 60 bp, Artificial
  Synthetic oligonucleotide
tcatcgaagaataacaactataagtcagcagctgccggtaagactctagttctaccttac

SEQ ID NO: 458218 - DNA, 59 bp, Artificial
  Synthetic oligonucleotide
tcatcgaaggactcccttggaaacactggattcctcaactaaatgctgttggattcaag

SEQ ID NO: 458219 - DNA, 60 bp, Artificial
  Synthetic oligonucleotide
tcatcgaaggcacctcgtggaatttgtaacatggtctacatcccagttgtaccacatcct

SEQ ID NO: 458220 - DNA, 56 bp, Artificial
  Synthetic oligonucleotide
tcatcgaatgggaagtggtacgtgcccatcgaatggaaaaaatacccctcgtcgtg

SEQ ID NO: 458221 - DNA, 59 bp, Artificial
  Synthetic oligonucleotide
tcatcgacacccttacgtgcggcttcgccgacctcatggggtatataccgctcgtcggc

SEQ ID NO: 458222 - DNA, 55 bp, Artificial
  Synthetic oligonucleotide
tcatcgacgaccgtgtatggttcccagtctacggagggcttaaacccaattcgcc

SEQ ID NO: 458223 - DNA, 60 bp, Artificial
  Synthetic oligonucleotide
tcatcgagacgtgcaagatgattcgtgagttcttctacgggattgcgtctttcgatatgc

SEQ ID NO: 458224 - DNA, 55 bp, Artificial
  Synthetic oligonucleotide
tcatcgagcgtgtttagtgcggtgagtctttgagcctgagaaactcaaggactta

SEQ ID NO: 458225 - DNA, 53 bp, Artificial
  Synthetic oligonucleotide
tcatcgaggtagggcaaaacggttctcctgacatctatgccaggggagacgag

SEQ ID NO: 458226 - DNA, 60 bp, Artificial
  Synthetic oligonucleotide
tcatcgataccctcacatgcggcttcgccgacctcatggggtacattccgcttgtcggcg

SEQ ID NO: 458227 - DNA, 60 bp, Artificial
  Synthetic oligonucleotide
tcatcgatatgggtatttgctggggcacctgaccgttgtccacctacatgtctgtttata

SEQ ID NO: 458228 - DNA, 56 bp, Artificial
  Synthetic oligonucleotide
tcatcgatcttgactagaacaaactacaatggtgagcaatgcacccatatcctcgt

SEQ ID NO: 458229 - DNA, 59 bp, Artificial
  Synthetic oligonucleotide
tcatcgatggcaatcaacgaaagtacgaggaaaaccacttgggtactcagtaacatgag

SEQ ID NO: 458230 - DNA, 57 bp, Artificial
  Synthetic oligonucleotide
tcatcgattcgcggttcggcgtagaaactagcggcatcgctaccttctgggaactgc

SEQ ID NO: 458231 - DNA, 58 bp, Artificial
  Synthetic oligonucleotide
tcatcgcaataggattgggcttgggttctgggggggttgtggtggtatatattgagaa

SEQ ID NO: 458232 - DNA, 60 bp, Artificial
  Synthetic oligonucleotide
tcatcgcaattagtgaacttggtcaataggtctgaacctatagtactcgcaaagcaagtc

SEQ ID NO: 458233 - DNA, 60 bp, Artificial
  Synthetic oligonucleotide
tcatcgcagccagaaatattgttaggagagcaacggtatcagcggatccactggcatcat

SEQ ID NO: 458234 - DNA, 55 bp, Artificial
  Synthetic oligonucleotide
tcatcgcggagaaaaggggagtcgtcgagtttagggacggcgccacgcgaaggtc

SEQ ID NO: 458235 - DNA, 55 bp, Artificial
  Synthetic oligonucleotide
tcatcgctagaagtgaaactcttcagctcacctctgaacaaaagcttcagtgtgt

SEQ ID NO: 458236 - DNA, 60 bp, Artificial
  Synthetic oligonucleotide
tcatcgctgccagaaacattgttcgaagagcgacagtgtcagcggacccgctgctgtcac

SEQ ID NO: 458237 - DNA, 60 bp, Artificial
  Synthetic oligonucleotide
tcatcgctggctgctcaggttaattcattggagtctagattgaatgacacgacgcagact

SEQ ID NO: 458238 - DNA, 60 bp, Artificial
  Synthetic oligonucleotide
tcatcgcttaatcttgtgtcacgtatagtgacgatgacacttccagttgcattgtaaggt

SEQ ID NO: 458239 - DNA, 59 bp, Artificial
  Synthetic oligonucleotide
tcatcgcttacctctatggtgctttacttgcacttggagatcgcctcaacatccactac

SEQ ID NO: 458240 - DNA, 52 bp, Artificial
  Synthetic oligonucleotide
tcatcggaatacatagagaactggaatttgcagaatagaagacaaagaacag

SEQ ID NO: 458241 - DNA, 50 bp, Artificial
  Synthetic oligonucleotide
tcatcggaggggtgggcaataacaccttgcactgccccactgattgtttc

SEQ ID NO: 458242 - DNA, 59 bp, Artificial
  Synthetic oligonucleotide
tcatcggagtgggaaacttggttttcaacacagtcatacatgagaaaataggagcccac

SEQ ID NO: 458243 - DNA, 60 bp, Artificial
  Synthetic oligonucleotide
tcatcgggtgcatctacagcaggatacataacatgctggtatcaaaccagattagtaatt

SEQ ID NO: 458244 - DNA, 57 bp, Artificial
  Synthetic oligonucleotide
tcatcgggttcctggattcacacccaaagtggaaagcaaccgttgctcgccacttag

SEQ ID NO: 458245 - DNA, 60 bp, Artificial
  Synthetic oligonucleotide
tcatcggtcacgggttcgcatcccccggtgactgtgggggcatcttgaggtgccaacatg

SEQ ID NO: 458246 - DNA, 51 bp, Artificial
  Synthetic oligonucleotide
tcatcggtcgcctggaccagtggccgcagctactacggtggcagcaaccgc

SEQ ID NO: 458247 - DNA, 60 bp, Artificial
  Synthetic oligonucleotide
tcatcgtacaataggtgctgtcacatccagtgacggctagtacaagcacttctgtttccc

SEQ ID NO: 458248 - DNA, 56 bp, Artificial
  Synthetic oligonucleotide
tcatcgtagcacggtgggttttttagcgtaaccagacggcgtatactcgacggcat

SEQ ID NO: 458249 - DNA, 60 bp, Artificial
  Synthetic oligonucleotide
tcatcgtcaatgatgtgggaggttaatggacctgaatcagtattggtgaatacctaccag

SEQ ID NO: 458250 - DNA, 60 bp, Artificial
  Synthetic oligonucleotide
tcatcgtctatgatgtgggagattaacggaccagaatcagtgctagttaacacatatcag

SEQ ID NO: 458251 - DNA, 60 bp, Artificial
  Synthetic oligonucleotide
tcatcgtggggaaatctgtaacaatgtatgtagttgcccgtgtcaggctggtagatggcc

SEQ ID NO: 458252 - DNA, 55 bp, Artificial
  Synthetic oligonucleotide
tcatcgttactagggagccatatgtgtcatgcgatccatcaggatgcaagatgta

SEQ ID NO: 458253 - DNA, 55 bp, Artificial
  Synthetic oligonucleotide
tcatcgttcatggcgtaccattaagcgttgggaactgtgccgtggacgaaagcgt

SEQ ID NO: 458254 - DNA, 55 bp, Artificial
  Synthetic oligonucleotide
tcatcgttggggtgacgttcgtttccttcgcctagtatggtcttcacccacacta

SEQ ID NO: 458255 - DNA, 60 bp, Artificial
  Synthetic oligonucleotide
tcatctaaatctgtctatgcctttccctttcgtgagcagaaaagcgggaggtaccatagc

SEQ ID NO: 458256 - DNA, 55 bp, Artificial
  Synthetic oligonucleotide
tcatctacactcccaggtgtgcgactaccactacgggatcggttgtcttggcgca

SEQ ID NO: 458257 - DNA, 60 bp, Artificial
  Synthetic oligonucleotide
tcatctacatgggcatgttcacggataattatggaaactttgacttcttcccgaacacat

SEQ ID NO: 458258 - DNA, 59 bp, Artificial
  Synthetic oligonucleotide
tcatctaccccttttgctgagaataccaacagtgtgaccaatatagaattggaacctcc

SEQ ID NO: 458259 - DNA, 60 bp, Artificial
  Synthetic oligonucleotide
tcatctagctttacaggattcgggatcagaggtaaacatagtaacagactcacaatatgc

SEQ ID NO: 458260 - DNA, 60 bp, Artificial
  Synthetic oligonucleotide
tcatctaggaccggggaggacagtatatgcaacaggaggcataataggaaatataagaca

SEQ ID NO: 458261 - DNA, 54 bp, Artificial
  Synthetic oligonucleotide
tcatctatagattatgaattacgctgtgactccctagaaattctgatgatggat

SEQ ID NO: 458262 - DNA, 60 bp, Artificial
  Synthetic oligonucleotide
tcatctcatagttgtttgttgtgctctcgtaggttgcgaggagcttggcgctgccctact

SEQ ID NO: 458263 - DNA, 60 bp, Artificial
  Synthetic oligonucleotide
tcatctccgccatcttgacggacccgccttcccgggagccttcatagacgagtatcagct

SEQ ID NO: 458264 - DNA, 50 bp, Artificial
  Synthetic oligonucleotide
tcatctcgatagcgcagagtagtatacacccacgtcgctagatcttttaa

SEQ ID NO: 458265 - DNA, 60 bp, Artificial
  Synthetic oligonucleotide
tcatctcgcctgatctctcttacagagttgggtacttatgtgcagggattcctagtgata

SEQ ID NO: 458266 - DNA, 54 bp, Artificial
  Synthetic oligonucleotide
tcatctctaaagttaagccagtcctggataccgatatgtttacgtctctcttca

SEQ ID NO: 458267 - DNA, 59 bp, Artificial
  Synthetic oligonucleotide
tcatctctttaattctgagatgcatgaatctatcttggtgtcttactcttcagatctaa

SEQ ID NO: 458268 - DNA, 60 bp, Artificial
  Synthetic oligonucleotide
tcatctctttgttctatcagtggatgggctatatacacaaaagacaacagcatacgaatt

SEQ ID NO: 458269 - DNA, 51 bp, Artificial
  Synthetic oligonucleotide
tcatctgatgtactggtgtttgtactttgggctggcggtttagagttgacc

SEQ ID NO: 458270 - DNA, 55 bp, Artificial
  Synthetic oligonucleotide
tcatctgattaccaagatcttcacgagatatcgaggcgaaagaacttcgtttgtc

SEQ ID NO: 458271 - DNA, 51 bp, Artificial
  Synthetic oligonucleotide
tcatctgattcctttcggtggatgtcaagtcggtgcgcgttgttgatcacc

SEQ ID NO: 458272 - DNA, 57 bp, Artificial
  Synthetic oligonucleotide
tcatctgcaccactgctgtgccctggaattccacttggagtaataaatcttatgaag

SEQ ID NO: 458273 - DNA, 53 bp, Artificial
  Synthetic oligonucleotide
tcatctgcagggttacctgcaattgaagggtaaacgtacccttaaccaggtta

SEQ ID NO: 458274 - DNA, 60 bp, Artificial
  Synthetic oligonucleotide
tcatctgggatttcgggctacaatcgtctgttactcttgtaataccatggattagcaaca

SEQ ID NO: 458275 - DNA, 60 bp, Artificial
  Synthetic oligonucleotide
tcatctgggtggctgtcattctacatccacgccttgtgtttgaggtcacgaaatggttgt

SEQ ID NO: 458276 - DNA, 60 bp, Artificial
  Synthetic oligonucleotide
tcatctgtctcgggtaggtctgaccactgattctatccatcgcagacccaggaactggca

SEQ ID NO: 458277 - DNA, 58 bp, Artificial
  Synthetic oligonucleotide
tcatctgttgcaacaaccaggaaacgtatgggtcacctgggcaaataagacgggccaa

SEQ ID NO: 458278 - DNA, 60 bp, Artificial
  Synthetic oligonucleotide
tcatcttagcgtcattacacttgtaagcgagatggtatggagtctgctgagcgtagttta

SEQ ID NO: 458279 - DNA, 60 bp, Artificial
  Synthetic oligonucleotide
tcatcttaggctgatggacactacaatgtttgtaggggatcctttcaatggtccaagtga

SEQ ID NO: 458280 - DNA, 51 bp, Artificial
  Synthetic oligonucleotide
tcatcttccagatctgcctttctacaattgatattagacgagttcagttat

SEQ ID NO: 458281 - DNA, 60 bp, Artificial
  Synthetic oligonucleotide
tcatcttcctagcacggtcagcacttattctaaggggatcagttgcacataaatcttgtc

SEQ ID NO: 458282 - DNA, 59 bp, Artificial
  Synthetic oligonucleotide
tcatcttcgtgggacccgcaggggcacggttcccgatgcgcgatgcagttctttcaccc

SEQ ID NO: 458283 - DNA, 59 bp, Artificial
  Synthetic oligonucleotide
tcatcttgattgcagcgaggactgtgaacctactgggacagagcagtctcagggggcta

SEQ ID NO: 458284 - DNA, 60 bp, Artificial
  Synthetic oligonucleotide
tcatcttgcctatgactttgcagcattaacatatcaccctgagtgtttcaataaggctaa

SEQ ID NO: 458285 - DNA, 60 bp, Artificial
  Synthetic oligonucleotide
tcatcttgctcgatgtagtttaaacacaggcttctgagctctgttatgatttcttccatt

SEQ ID NO: 458286 - DNA, 60 bp, Artificial
  Synthetic oligonucleotide
tcatcttggcagagggcggcggtcctcagtgctcttactctttcctataaagaggagact

SEQ ID NO: 458287 - DNA, 60 bp, Artificial
  Synthetic oligonucleotide
tcatcttgggagtcctataaagggcttccaggtacatgaaaccttcatcagattgcctaa

SEQ ID NO: 458288 - DNA, 57 bp, Artificial
  Synthetic oligonucleotide
tcatcttgtaccataaaggtaggtccactaaatacgcaaacattaggaattgggtgc

SEQ ID NO: 458289 - DNA, 60 bp, Artificial
  Synthetic oligonucleotide
tcatctttctggcacggtctgcactcatactgagaggatcagtggcccacaagtcctgct

SEQ ID NO: 458290 - DNA, 60 bp, Artificial
  Synthetic oligonucleotide
tcatctttcttgcacggtctgctctcattctgaggggatcagtagctcataagtcttgcc

SEQ ID NO: 458291 - DNA, 60 bp, Artificial
  Synthetic oligonucleotide
tcatctttgcaaccctaggcaagtccaagcttaaataaactgccatctgctaaaaggaga

SEQ ID NO: 458292 - DNA, 60 bp, Artificial
  Synthetic oligonucleotide
tcatgaaaacagaaaattggatcatacggaatccaggctatgctctcgtggcagtggcac

SEQ ID NO: 458293 - DNA, 60 bp, Artificial
  Synthetic oligonucleotide
tcatgaaaagtgaactggattatggtgactgtaataccaaatgccagaccccagtgggtg

SEQ ID NO: 458294 - DNA, 57 bp, Artificial
  Synthetic oligonucleotide
tcatgaaaatagccttagttccaaccaattctatagtggagttttgacgagtccaag

SEQ ID NO: 458295 - DNA, 60 bp, Artificial
  Synthetic oligonucleotide
tcatgaaacgaacagaggtgtgacatcagcgtgtccttatgctggagcaaacagcttcta

SEQ ID NO: 458296 - DNA, 57 bp, Artificial
  Synthetic oligonucleotide
tcatgaaagaacttacctaggttacagacatgacagtaagggaaaagtagactataa

SEQ ID NO: 458297 - DNA, 59 bp, Artificial
  Synthetic oligonucleotide
tcatgaaaggtgttagttgggtagttaaagcagctaaaggtgtagcagaacgtgcagta

SEQ ID NO: 458298 - DNA, 60 bp, Artificial
  Synthetic oligonucleotide
tcatgaacataccatggacatctggtgtgcaattcaggtatacagatcctgacacataca

SEQ ID NO: 458299 - DNA, 50 bp, Artificial
  Synthetic oligonucleotide
tcatgaacattgtcctaattgccctcagtctcctggcgatactaaagggg

SEQ ID NO: 458300 - DNA, 50 bp, Artificial
  Synthetic oligonucleotide
tcatgaacgcatacttgcggctgtcgttgtacgcaatcgcgtcccacatc

SEQ ID NO: 458301 - DNA, 60 bp, Artificial
  Synthetic oligonucleotide
tcatgaagcgcgagtatccatcatttaaattagtggtatgacgtcacatattaagttacc

SEQ ID NO: 458302 - DNA, 55 bp, Artificial
  Synthetic oligonucleotide
tcatgaatagcccatgagcatcagcaatggtggccccagccccattcggaagatc

SEQ ID NO: 458303 - DNA, 55 bp, Artificial
  Synthetic oligonucleotide
tcatgaatattgttaatgaacatatacgagtgtgagcaatcctttggccagcttc

SEQ ID NO: 458304 - DNA, 57 bp, Artificial
  Synthetic oligonucleotide
tcatgaatgcaccattgacttcacaaatgaacaatgtggtgaattggcagcggcaat

SEQ ID NO: 458305 - DNA, 59 bp, Artificial
  Synthetic oligonucleotide
tcatgaatttccactattactgacccagttgcgtttatggggacctgttgtctatactc

SEQ ID NO: 458306 - DNA, 59 bp, Artificial
  Synthetic oligonucleotide
tcatgaccatctttaaagggtgatgagttgtcaaattaagccaacacaccgataaatcc

SEQ ID NO: 458307 - DNA, 55 bp, Artificial
  Synthetic oligonucleotide
tcatgacgcttaatgatccgaaattagatactttaaggtttttgccaaaaagtag

SEQ ID NO: 458308 - DNA, 60 bp, Artificial
  Synthetic oligonucleotide
tcatgacggggttcaccggcgactttgactcagtgatagactgcaatacatctgtaatac

SEQ ID NO: 458309 - DNA, 60 bp, Artificial
  Synthetic oligonucleotide
tcatgactggctatacaggtgactttgactctgttatagactgcaacgtcgcagtcactc

SEQ ID NO: 458310 - DNA, 55 bp, Artificial
  Synthetic oligonucleotide
tcatgactggggagtcatacggcgaatcagtgaaacaagccgtgctactgaacgt

SEQ ID NO: 458311 - DNA, 60 bp, Artificial
  Synthetic oligonucleotide
tcatgagacagctggtactcgtccctttgcgactctatataattgaaggcgttcggagga

SEQ ID NO: 458312 - DNA, 55 bp, Artificial
  Synthetic oligonucleotide
tcatgagacatgcgggtttcgtttacgctgcggccactctggctgagtgtgaaga

SEQ ID NO: 458313 - DNA, 56 bp, Artificial
  Synthetic oligonucleotide
tcatgagagcaagtcaatgcatgtcatcgattcatatggctcacttagtgttggat

SEQ ID NO: 458314 - DNA, 51 bp, Artificial
  Synthetic oligonucleotide
tcatgagagggaaattcccgtactgctccataggtaagcctagaagctcca

SEQ ID NO: 458315 - DNA, 60 bp, Artificial
  Synthetic oligonucleotide
tcatgagagtattcccagacaaaatcatcacggtagttgactattcttatcttaacacat

SEQ ID NO: 458316 - DNA, 58 bp, Artificial
  Synthetic oligonucleotide
tcatgagatacatgtttaaatttcagtggggcggacacgggacagaacaattcaaaac

SEQ ID NO: 458317 - DNA, 60 bp, Artificial
  Synthetic oligonucleotide
tcatgagatagctgatactcatcacgacgagattcgatataattaaaaacgtttgggggt

SEQ ID NO: 458318 - DNA, 55 bp, Artificial
  Synthetic oligonucleotide
tcatgagatctcaatacgtaacagctaggggtggatctggcgcagcactccgcga

SEQ ID NO: 458319 - DNA, 56 bp, Artificial
  Synthetic oligonucleotide
tcatgagattaaagttggacaaatcaatgacttaggtgtctactcaaaaggatgtg

SEQ ID NO: 458320 - DNA, 60 bp, Artificial
  Synthetic oligonucleotide
tcatgagattaattgggaagttagaggtgtaatttcacagtgcatgaatggaagcatccc

SEQ ID NO: 458321 - DNA, 59 bp, Artificial
  Synthetic oligonucleotide
tcatgagcggtgaggtcccctccacggaggacctggttaatctactgcccgccatcctc

SEQ ID NO: 458322 - DNA, 60 bp, Artificial
  Synthetic oligonucleotide
tcatgaggctagccgcgctgacaggtacgtacgtttatgaccatcttgctccgctgcggg

SEQ ID NO: 458323 - DNA, 60 bp, Artificial
  Synthetic oligonucleotide
tcatgagggaatacaagcaggggtagacagattctataggacctgcaaactggttggaat

SEQ ID NO: 458324 - DNA, 56 bp, Artificial
  Synthetic oligonucleotide
tcatgagggaattcaagccggagtcgacaggttttatcgaacctgtaagttacttg

SEQ ID NO: 458325 - DNA, 60 bp, Artificial
  Synthetic oligonucleotide
tcatgagggcattttagcacctaagacatatgcttgcagagctacctgctcaataagctt

SEQ ID NO: 458326 - DNA, 57 bp, Artificial
  Synthetic oligonucleotide
tcatgaggggatacgagcaggagtagatagattctataggacctgcgagctggtcgg

SEQ ID NO: 458327 - DNA, 60 bp, Artificial
  Synthetic oligonucleotide
tcatgagtccatccgctggaccaaggatgctaaatctacccaggatcatgttaggtccct

SEQ ID NO: 458328 - DNA, 60 bp, Artificial
  Synthetic oligonucleotide
tcatgagtctaagtttaacggctaaacagcgcaagtgtctagtcattaaacactgcttgt

SEQ ID NO: 458329 - DNA, 60 bp, Artificial
  Synthetic oligonucleotide
tcatgagtgtcaaagcctacacaattggtggaaaaggacatgagactccaaagatggtga

SEQ ID NO: 458330 - DNA, 60 bp, Artificial
  Synthetic oligonucleotide
tcatgagtgttgcagttccattggtgttaagtcccgacatgtacgacatttccagtaaag

SEQ ID NO: 458331 - DNA, 57 bp, Artificial
  Synthetic oligonucleotide
tcatgatagggcacggttcactcactgcagatgccggaggactcacgtacaccgtta

SEQ ID NO: 458332 - DNA, 59 bp, Artificial
  Synthetic oligonucleotide
tcatgatataagtcctatacctactaatgatattgaaatgcaacctttagttacaccac

SEQ ID NO: 458333 - DNA, 60 bp, Artificial
  Synthetic oligonucleotide
tcatgatcagaatatccactagttccgtcatgtcctcatgcttgaactcatcgaacgtgg

SEQ ID NO: 458334 - DNA, 60 bp, Artificial
  Synthetic oligonucleotide
tcatgatcatgactcttgtaatggtgtttatgacaatattagcaagaacgccatattagt

SEQ ID NO: 458335 - DNA, 60 bp, Artificial
  Synthetic oligonucleotide
tcatgatgaagagttctgtgacatgttacgattaattgattacaacaaagctgccttgac

SEQ ID NO: 458336 - DNA, 60 bp, Artificial
  Synthetic oligonucleotide
tcatgatgacttagttaccgtcacagcaaccttagctctattgggttgtgacggttcacc

SEQ ID NO: 458337 - DNA, 60 bp, Artificial
  Synthetic oligonucleotide
tcatgatgattggtgctagcatcggtctttgcaagaccggccactacgacgtacgttatc

SEQ ID NO: 458338 - DNA, 60 bp, Artificial
  Synthetic oligonucleotide
tcatgatgggaaggcatggttacatatttgtgtcactggggatgatagaaatgcgactgc

SEQ ID NO: 458339 - DNA, 60 bp, Artificial
  Synthetic oligonucleotide
tcatgatgggttcttagaatgcattggcattaagcctactaagcacacacccataatata

SEQ ID NO: 458340 - DNA, 54 bp, Artificial
  Synthetic oligonucleotide
tcatgatgttcatcccacacattatggacaggtgtgtgagtaataggggttgct

SEQ ID NO: 458341 - DNA, 59 bp, Artificial
  Synthetic oligonucleotide
tcatgatgtttcccatgtcgggaaggtgatttgtgtgtctgacgttacacgtggtaacg

SEQ ID NO: 458342 - DNA, 59 bp, Artificial
  Synthetic oligonucleotide
tcatgattccgagcttctaagcttacttctttcagagtagttagggaccgttgacgaca

SEQ ID NO: 458343 - DNA, 51 bp, Artificial
  Synthetic oligonucleotide
tcatgattttgagttacatcctgcattgtggcctagaaagcgcagacgctt

SEQ ID NO: 458344 - DNA, 60 bp, Artificial
  Synthetic oligonucleotide
tcatgcaaaccacctgctcttgtggagcacaaatctctggacatgtcaaaaacggttcca

SEQ ID NO: 458345 - DNA, 60 bp, Artificial
  Synthetic oligonucleotide
tcatgcaaataattcaactgacactgttgatacagtactagaaaagaatgtaacggtaac

SEQ ID NO: 458346 - DNA, 60 bp, Artificial
  Synthetic oligonucleotide
tcatgcaacatttacaccttatgtagtaataggagatgcaggagattatccacatagaca

SEQ ID NO: 458347 - DNA, 60 bp, Artificial
  Synthetic oligonucleotide
tcatgcaagcactgttcggtgtccataagtcattgcaacgaccaaattgactatcgacgc

SEQ ID NO: 458348 - DNA, 55 bp, Artificial
  Synthetic oligonucleotide
tcatgcaatagtacattctgtaagcctaccctttatctaattgtgcctgtgcatg

SEQ ID NO: 458349 - DNA, 60 bp, Artificial
  Synthetic oligonucleotide
tcatgcacaagttcggcacgagtccactggctggtctaatccgaacatatgtgtccgagc

SEQ ID NO: 458350 - DNA, 60 bp, Artificial
  Synthetic oligonucleotide
tcatgcacactcgctgccactgtggagctgagatcactggacatgtcaagaacgggacga

SEQ ID NO: 458351 - DNA, 60 bp, Artificial
  Synthetic oligonucleotide
tcatgcaccgatcggtgtatgttagttaatgccgcaacgatggagaagaagcccgttggt

SEQ ID NO: 458352 - DNA, 50 bp, Artificial
  Synthetic oligonucleotide
tcatgcacgagtgtaggtgcatcgccgggcagaattgtacggccacgttt

SEQ ID NO: 458353 - DNA, 52 bp, Artificial
  Synthetic oligonucleotide
tcatgcactttgccactcatattgcaatgggaatgaaggtcaacaagagact

SEQ ID NO: 458354 - DNA, 60 bp, Artificial
  Synthetic oligonucleotide
tcatgcagccctgataaatgttaccaatttgcacttgggcagggaaccacactagacaac

SEQ ID NO: 458355 - DNA, 60 bp, Artificial
  Synthetic oligonucleotide
tcatgcagctccaataaatgttatcaatttgcacttgggcagggaaccacgctagataac

SEQ ID NO: 458356 - DNA, 60 bp, Artificial
  Synthetic oligonucleotide
tcatgcatacttcatcaaacatggaacccgaagtgctctaagattggacctaacgcagca

SEQ ID NO: 458357 - DNA, 58 bp, Artificial
  Synthetic oligonucleotide
tcatgcatttgcccatgatacgtacccttgttctttcaagggtcgaaggaaattgaag

SEQ ID NO: 458358 - DNA, 60 bp, Artificial
  Synthetic oligonucleotide
tcatgccatgacggcatatcaagaatgtcaatatgcatgtcaggaccaaacaataatgca

SEQ ID NO: 458359 - DNA, 60 bp, Artificial
  Synthetic oligonucleotide
tcatgcccaactccgctctctcaatgctgagttagatgctttggaggctagggaagagtc

SEQ ID NO: 458360 - DNA, 60 bp, Artificial
  Synthetic oligonucleotide
tcatgcccagaatgaatggggaattataccaggctggctacagtacacaaagggacctgg

SEQ ID NO: 458361 - DNA, 52 bp, Artificial
  Synthetic oligonucleotide
tcatgcccatacatggaagcataatgcaacgccgtccaatcacatatattgg

SEQ ID NO: 458362 - DNA, 60 bp, Artificial
  Synthetic oligonucleotide
tcatgccgatatttcaaggtcaagcgaagagtaacgcgcccgtgttgtttgtgtgtgcta

SEQ ID NO: 458363 - DNA, 56 bp, Artificial
  Synthetic oligonucleotide
tcatgccggaggacatagcaggtgatggcttcagactagcttcgattccagtcata

SEQ ID NO: 458364 - DNA, 58 bp, Artificial
  Synthetic oligonucleotide
tcatgccggtgttccttcaggaatacttatgacccagtttattgattcctttgtcaat

SEQ ID NO: 458365 - DNA, 60 bp, Artificial
  Synthetic oligonucleotide
tcatgccgtaagtcgcaatgcgctataagtcatgccgtaagtcgcgtcgcctggatttgc

SEQ ID NO: 458366 - DNA, 53 bp, Artificial
  Synthetic oligonucleotide
tcatgccgttgataagaggtaataccgccactacgactttctgttagcagagg

SEQ ID NO: 458367 - DNA, 60 bp, Artificial
  Synthetic oligonucleotide
tcatgcctgcctgcctgtgtgtatgggcttgctgtggcaagcggatacgactttggaagg

SEQ ID NO: 458368 - DNA, 59 bp, Artificial
  Synthetic oligonucleotide
tcatgcgaccctgacaagtgttatcagtttgcactaggacaggggaccacactagacaa

SEQ ID NO: 458369 - DNA, 55 bp, Artificial
  Synthetic oligonucleotide
tcatgcgacttcgagagataacgcttggatcgccttcggacacgtcgcaggacat

SEQ ID NO: 458370 - DNA, 60 bp, Artificial
  Synthetic oligonucleotide
tcatgcgctataaatgcaccagcgaacatacagcaatttgagcacattgtccagcttaga

SEQ ID NO: 458371 - DNA, 60 bp, Artificial
  Synthetic oligonucleotide
tcatgcggaggcgcggttttcataggtctggcactcttgaccttgtcaccacactataaa

SEQ ID NO: 458372 - DNA, 59 bp, Artificial
  Synthetic oligonucleotide
tcatgcggccccggtaaatgttatcagtttgcacttgggcaggggaccacgctgaacaa

SEQ ID NO: 458373 - DNA, 58 bp, Artificial
  Synthetic oligonucleotide
tcatgcgtattgcaactagcgcaccacgaatcgctagtgctatgagtagtgcagctgg

SEQ ID NO: 458374 - DNA, 60 bp, Artificial
  Synthetic oligonucleotide
tcatgcgtcaagtgcgtatggtcatttcaagggtccgggcactctgtcccgtggtgtcgc

SEQ ID NO: 458375 - DNA, 60 bp, Artificial
  Synthetic oligonucleotide
tcatgcgtcggcatagctatggcctccatgggctgttccaaagtggtctattccatttgt

SEQ ID NO: 458376 - DNA, 55 bp, Artificial
  Synthetic oligonucleotide
tcatgcgtgagggtcttgctgcatacactctgagcccacgcccgatcattcatgc

SEQ ID NO: 458377 - DNA, 60 bp, Artificial
  Synthetic oligonucleotide
tcatgcgtggggcagatgacacaccaaacttcgtgcaagtgcaaaacagcgttgcagtga

SEQ ID NO: 458378 - DNA, 60 bp, Artificial
  Synthetic oligonucleotide
tcatgcgtgtaacatgatgaaaagttgcctaattgcactggggccttacagagtgcaagt

SEQ ID NO: 458379 - DNA, 60 bp, Artificial
  Synthetic oligonucleotide
tcatgctagaaggagactatatgagaccaacacaagctgaaatcgataagggttgggagc

SEQ ID NO: 458380 - DNA, 60 bp, Artificial
  Synthetic oligonucleotide
tcatgctagtgcaattgacaagccaacacacccagatatatcctcaaacaggttttatac

SEQ ID NO: 458381 - DNA, 60 bp, Artificial
  Synthetic oligonucleotide
tcatgctccattagtgaatgcaggacttttttcttaactcagggagccctcctcaatgac

SEQ ID NO: 458382 - DNA, 55 bp, Artificial
  Synthetic oligonucleotide
tcatgctctgagacattggtctctaattctaagcaagttaagtgcactcagtcta

SEQ ID NO: 458383 - DNA, 55 bp, Artificial
  Synthetic oligonucleotide
tcatgctgccagctggtcctgctaattggtctatgccgatagcagaccgcatttt

SEQ ID NO: 458384 - DNA, 60 bp, Artificial
  Synthetic oligonucleotide
tcatgctggctgtctgcaagcgcatgtgctttagggccaccatggaagtaagcaacagag

SEQ ID NO: 458385 - DNA, 60 bp, Artificial
  Synthetic oligonucleotide
tcatgctgttagattgcgcttgtatagtgtttgtgtttccgaggttttgtacgacatgtg

SEQ ID NO: 458386 - DNA, 60 bp, Artificial
  Synthetic oligonucleotide
tcatgcttacagggcatctataacgccttagttgattacggcatgagtcatcgacacgcg

SEQ ID NO: 458387 - DNA, 60 bp, Artificial
  Synthetic oligonucleotide
tcatgcttgtggatgatgctactcatatcccaagcggaggcggctctagagaacctcgta

SEQ ID NO: 458388 - DNA, 56 bp, Artificial
  Synthetic oligonucleotide
tcatggaaaggatgcttgatatcaatctaacatttcttgacgacagggataatgtg

SEQ ID NO: 458389 - DNA, 58 bp, Artificial
  Synthetic oligonucleotide
tcatggaaccatctgttccgtatatatgttccaagttcttgttgactgatgaattcgg

SEQ ID NO: 458390 - DNA, 55 bp, Artificial
  Synthetic oligonucleotide
tcatggaagaagcgtctgaattcacactaaatgattacacgcaattaacgttgcg

SEQ ID NO: 458391 - DNA, 57 bp, Artificial
  Synthetic oligonucleotide
tcatggaatctgaaaagagggatctcgtgcttttagctggaccccccaactgggagg

SEQ ID NO: 458392 - DNA, 60 bp, Artificial
  Synthetic oligonucleotide
tcatggacacattgaatgcggacgacactaattaaagctgcagtcttatgtcacggacac

SEQ ID NO: 458393 - DNA, 53 bp, Artificial
  Synthetic oligonucleotide
tcatggacaccagcacaatctgtttatgcctttcaagcagcacatttgcccta

SEQ ID NO: 458394 - DNA, 60 bp, Artificial
  Synthetic oligonucleotide
tcatggacaggaattcgtttgctcaatttgggagttgcgatattccaaagcatgtagccg

SEQ ID NO: 458395 - DNA, 60 bp, Artificial
  Synthetic oligonucleotide
tcatggacgggagcactcattacaccgtgtgctgcggaagaggagaagttgcctatcagt

SEQ ID NO: 458396 - DNA, 51 bp, Artificial
  Synthetic oligonucleotide
tcatggacggtctactgaccattacgcctatcctcctacgcgacaccacat

SEQ ID NO: 458397 - DNA, 55 bp, Artificial
  Synthetic oligonucleotide
tcatggagaaattgggtcgtctaaaacggccgatccgtggaataggcgcgtagtt

SEQ ID NO: 458398 - DNA, 55 bp, Artificial
  Synthetic oligonucleotide
tcatggagaggtggaggtgccatggcttgagaagggaaggacgtacttacagaca

SEQ ID NO: 458399 - DNA, 56 bp, Artificial
  Synthetic oligonucleotide
tcatggagcgatgaagagaatccggggggcgagggcgcccccctggtccccccgca

SEQ ID NO: 458400 - DNA, 59 bp, Artificial
  Synthetic oligonucleotide
tcatggaggttgcgttctctgggaccaaaccctgtaggatcccggtgagggctgtggca

SEQ ID NO: 458401 - DNA, 60 bp, Artificial
  Synthetic oligonucleotide
tcatggatcgtgaccaggataatgtccaacgacgggacgtatttcgcttctcagccagcg

SEQ ID NO: 458402 - DNA, 60 bp, Artificial
  Synthetic oligonucleotide
tcatggatgcaaacccgtactagtgtgatggagcatgtaaattttgtgttgggtagtgcg

SEQ ID NO: 458403 - DNA, 60 bp, Artificial
  Synthetic oligonucleotide
tcatggatgctcattggctcacgtttgtcaatggtgcattcaaaacaaacgttgcttctt

SEQ ID NO: 458404 - DNA, 60 bp, Artificial
  Synthetic oligonucleotide
tcatggattgtcaccaaggcagcccgtcagtttaacaacaggttctttggtgcacctgag

SEQ ID NO: 458405 - DNA, 60 bp, Artificial
  Synthetic oligonucleotide
tcatggcaattacgaaattatggagtcggggtagcaagcaatggcatccttaggtacaaa

SEQ ID NO: 458406 - DNA, 60 bp, Artificial
  Synthetic oligonucleotide
tcatggcacactttagcaacttggctgaagcatatatagagaagcgtaatgcagagaaac

SEQ ID NO: 458407 - DNA, 60 bp, Artificial
  Synthetic oligonucleotide
tcatggcacatatatgggaaagacaatgcagtaagaattggagagaactcagatgtttta

SEQ ID NO: 458408 - DNA, 60 bp, Artificial
  Synthetic oligonucleotide
tcatggcagagggattcacatggacaggtgtcactcaaaacggaggaagtagcgcctgca

SEQ ID NO: 458409 - DNA, 60 bp, Artificial
  Synthetic oligonucleotide
tcatggcatccaccttcgtcgtgatagttgttgccgtgaaagaacgtgagacatctaact

SEQ ID NO: 458410 - DNA, 59 bp, Artificial
  Synthetic oligonucleotide
tcatggcccaaccacaccgtaaccaaaggagtaacgagatcatgctcccataatgggaa

SEQ ID NO: 458411 - DNA, 57 bp, Artificial
  Synthetic oligonucleotide
tcatggcccacattaccgccatggagattgccaatccaatcgccaacggtcgtatcg

SEQ ID NO: 458412 - DNA, 60 bp, Artificial
  Synthetic oligonucleotide
tcatggcccagctaagagcatggaatatgatgctgttgctactacacactcctggatccc

SEQ ID NO: 458413 - DNA, 57 bp, Artificial
  Synthetic oligonucleotide
tcatggccccaccctcgatccgagtcatccggactgcatccggttacggccggacgg

SEQ ID NO: 458414 - DNA, 52 bp, Artificial
  Synthetic oligonucleotide
tcatggccgtcgccctagtggccgagccccactacatggagcaactgcgcac

SEQ ID NO: 458415 - DNA, 60 bp, Artificial
  Synthetic oligonucleotide
tcatggcctcagctgtatacttcttatcagcaacaatttttgaggacactggacgtcctg

SEQ ID NO: 458416 - DNA, 55 bp, Artificial
  Synthetic oligonucleotide
tcatggcgctatgcctgttcgtgggtgccgccctaccccacgacgtgcaggctat

SEQ ID NO: 458417 - DNA, 60 bp, Artificial
  Synthetic oligonucleotide
tcatggcgtcgcttcaggtgaaaaaacgacaaagattggcaattcgtttgccaatgtagc

SEQ ID NO: 458418 - DNA, 55 bp, Artificial
  Synthetic oligonucleotide
tcatggctaagaatgaagtcttctgcgtagatccgtcgaaaggtggacgcaagcc

SEQ ID NO: 458419 - DNA, 58 bp, Artificial
  Synthetic oligonucleotide
tcatggctatcaacctacatacgattacccctcataccccgacctcactcccgacaaa

SEQ ID NO: 458420 - DNA, 60 bp, Artificial
  Synthetic oligonucleotide
tcatggctatccatgcgacgagtgatttatcgctggagaagttatgcaaggctttggcca

SEQ ID NO: 458421 - DNA, 60 bp, Artificial
  Synthetic oligonucleotide
tcatggctcatgcctcgtgtttaagagcacccaatctaattaagtataagcctatgacag

SEQ ID NO: 458422 - DNA, 60 bp, Artificial
  Synthetic oligonucleotide
tcatggctttgaggaaatacccatgcaaacctttggcacctcctatggtacaggccagga

SEQ ID NO: 458423 - DNA, 60 bp, Artificial
  Synthetic oligonucleotide
tcatgggaaagctgatactcgtcccggtgagattctatgtaattgaaggcacttggagga

SEQ ID NO: 458424 - DNA, 51 bp, Artificial
  Synthetic oligonucleotide
tcatgggaacatgtactggacacggagcgggaacaggatcttcacatcatc

SEQ ID NO: 458425 - DNA, 55 bp, Artificial
  Synthetic oligonucleotide
tcatgggaatctatctatagcaccagcaatgaaagagcgttattacatacgacac

SEQ ID NO: 458426 - DNA, 56 bp, Artificial
  Synthetic oligonucleotide
tcatgggaccgacaccacgatcggtgggtatcgacttggttagtgagtgtgccgcg

SEQ ID NO: 458427 - DNA, 55 bp, Artificial
  Synthetic oligonucleotide
tcatgggagatacgctccacttcctaagcccatccttcctcaccgctctcttcgc

SEQ ID NO: 458428 - DNA, 60 bp, Artificial
  Synthetic oligonucleotide
tcatgggagccaggtaagaccaggcctccattgaatagaaattatgtcttcacaggctac

SEQ ID NO: 458429 - DNA, 50 bp, Artificial
  Synthetic oligonucleotide
tcatgggatgcttcaatactgacatggtgcgaagagtctattgagctagt

SEQ ID NO: 458430 - DNA, 60 bp, Artificial
  Synthetic oligonucleotide
tcatgggcaacacaaagcctgttgagctcatcctcgacgggaagacagtagccatctgct

SEQ ID NO: 458431 - DNA, 60 bp, Artificial
  Synthetic oligonucleotide
tcatggggatgatcggaatattacctgacatgacccccagcacagagatgtcactaagag

SEQ ID NO: 458432 - DNA, 55 bp, Artificial
  Synthetic oligonucleotide
tcatggggtacattccgctcgtcggcgcccctctcggaggcgctgccagggcctt

SEQ ID NO: 458433 - DNA, 55 bp, Artificial
  Synthetic oligonucleotide
tcatgggttatgtaattggcagttggggagcattaccccaagatcatattgtaca

SEQ ID NO: 458434 - DNA, 58 bp, Artificial
  Synthetic oligonucleotide
tcatggtaatttggccataacaccgtctttgaaggaccgattctacattcgacacgtg

SEQ ID NO: 458435 - DNA, 60 bp, Artificial
  Synthetic oligonucleotide
tcatggtatttccctgagatagacatgctggagggctcaaaggagcagttgcgcaaaatg

SEQ ID NO: 458436 - DNA, 60 bp, Artificial
  Synthetic oligonucleotide
tcatggtccagccaagaacatggaatatgatgctgttgcaacgacgcactcctggatccc

SEQ ID NO: 458437 - DNA, 60 bp, Artificial
  Synthetic oligonucleotide
tcatggtcctacattgtggaaacatcgagttcagacaatggaacgtgttacccaggacat

SEQ ID NO: 458438 - DNA, 60 bp, Artificial
  Synthetic oligonucleotide
tcatggtcctatattgtagaaacatcggactcagataatgggacatgttacccaggagat

SEQ ID NO: 458439 - DNA, 59 bp, Artificial
  Synthetic oligonucleotide
tcatggtgaggaccatgatttatctggagaagaggttgcaacttattcaattgccgggc

SEQ ID NO: 458440 - DNA, 55 bp, Artificial
  Synthetic oligonucleotide
tcatggtgcacccgcaccgcactgccgaggtaatcgccgccgcagtgaaactcgt

SEQ ID NO: 458441 - DNA, 60 bp, Artificial
  Synthetic oligonucleotide
tcatggtgcagaaaccataccacattgcaactgtacctccggagtttactactccaccta

SEQ ID NO: 458442 - DNA, 55 bp, Artificial
  Synthetic oligonucleotide
tcatggtgcatttatctcaacagttttccctaaccgcgcgttgcgcggcagggtt

SEQ ID NO: 458443 - DNA, 54 bp, Artificial
  Synthetic oligonucleotide
tcatggtggcggcatagcaaaggccattgatgtttataccaagggcatgttgca

SEQ ID NO: 458444 - DNA, 51 bp, Artificial
  Synthetic oligonucleotide
tcatggttaggtatgctggaggatgggtcctgccagtatgctttggttacg

SEQ ID NO: 458445 - DNA, 55 bp, Artificial
  Synthetic oligonucleotide
tcatggttccctgagcgtcaaccgaggcctgtcacgtcacagacgggctggtggg

SEQ ID NO: 458446 - DNA, 55 bp, Artificial
  Synthetic oligonucleotide
tcatggttctcgacgggccggacagccggattctcaacttgcccacccgcaagct

SEQ ID NO: 458447 - DNA, 60 bp, Artificial
  Synthetic oligonucleotide
tcatggttgacacgagaccacccgtctatcctatgaattgctggcgtgctcagactgaat

SEQ ID NO: 458448 - DNA, 60 bp, Artificial
  Synthetic oligonucleotide
tcatgtaaagtctgtctcaactgctctcgcatcttgagtcactccttaccggtcaactgt

SEQ ID NO: 458449 - DNA, 56 bp, Artificial
  Synthetic oligonucleotide
tcatgtaactcaggttacacgcacatagaatggagtcaactacctttagtggcgcc

SEQ ID NO: 458450 - DNA, 55 bp, Artificial
  Synthetic oligonucleotide
tcatgtaacttttagggtgttcgatcaggtgagtgtacccctcactagtctggtc

SEQ ID NO: 458451 - DNA, 60 bp, Artificial
  Synthetic oligonucleotide
tcatgtaatgaggaacacatcggtgacctacgcgccatcgttcgtagtgctggaatcgca

SEQ ID NO: 458452 - DNA, 58 bp, Artificial
  Synthetic oligonucleotide
tcatgtacaacccttgcgggcccgagccgcccgctcacgtcgtccgcgcgtacaacca

SEQ ID NO: 458453 - DNA, 60 bp, Artificial
  Synthetic oligonucleotide
tcatgtacactggtccagcactatctagtgctaagttactcattgcttatacacctccag

SEQ ID NO: 458454 - DNA, 60 bp, Artificial
  Synthetic oligonucleotide
tcatgtacatagtggggaggggcgtgtcaaaataagtttgtgttcgagcaatgatcccat

SEQ ID NO: 458455 - DNA, 60 bp, Artificial
  Synthetic oligonucleotide
tcatgtacgtggtgcaataatcatcatccgaatgtgagtggagatagatatggttgatag

SEQ ID NO: 458456 - DNA, 60 bp, Artificial
  Synthetic oligonucleotide
tcatgtacttcgagaagcctagtacctccttggaatcttcgatgcgttgcgctcagcact

SEQ ID NO: 458457 - DNA, 55 bp, Artificial
  Synthetic oligonucleotide
tcatgtagtagttaacgaccttaagatcggacccatttcattcaacttgagaggc

SEQ ID NO: 458458 - DNA, 60 bp, Artificial
  Synthetic oligonucleotide
tcatgtatatgttaacttttgagccgggtctttgtgtggcaggtatcatacgccaagtgc

SEQ ID NO: 458459 - DNA, 60 bp, Artificial
  Synthetic oligonucleotide
tcatgtatattatctcacatcataagttaaagtaactaaaggcgtgtaggacgacttgcc

SEQ ID NO: 458460 - DNA, 60 bp, Artificial
  Synthetic oligonucleotide
tcatgtatgaggattatgagatcgtcgggtgtaggcccagtttgttcatgcgcgcgactt

SEQ ID NO: 458461 - DNA, 60 bp, Artificial
  Synthetic oligonucleotide
tcatgtattcgttacttcaaggggtcaatcctacctgaaatcatgatcgagtcaatctgt

SEQ ID NO: 458462 - DNA, 60 bp, Artificial
  Synthetic oligonucleotide
tcatgtcacccacaattgactcaaagtaatcctcaatgagtctagttgtaagcttggtgt

SEQ ID NO: 458463 - DNA, 60 bp, Artificial
  Synthetic oligonucleotide
tcatgtcacttcagctcgcgtctgcatgcaagctttttatgccgtgaccccaggaaggtg

SEQ ID NO: 458464 - DNA, 56 bp, Artificial
  Synthetic oligonucleotide
tcatgtccccgtcgagccatatgtggatgccacggttccccgaatccatgatgcgt

SEQ ID NO: 458465 - DNA, 59 bp, Artificial
  Synthetic oligonucleotide
tcatgtcgtctataaccaccaggaagcaggaaaatacgagaatcatacggaaaatgcgt

SEQ ID NO: 458466 - DNA, 52 bp, Artificial
  Synthetic oligonucleotide
tcatgtcgtgccttaagaagcatatcgtgttctttaccgagatggacaatag

SEQ ID NO: 458467 - DNA, 60 bp, Artificial
  Synthetic oligonucleotide
tcatgtctcgcgaccagatttgaatttgagactatgtgtgttgtcttttgaatatggccc

SEQ ID NO: 458468 - DNA, 60 bp, Artificial
  Synthetic oligonucleotide
tcatgtctctagacattaatacagaacaaatgtgtctggaggatgctatgtatggaactg

SEQ ID NO: 458469 - DNA, 60 bp, Artificial
  Synthetic oligonucleotide
tcatgtctttgtgagggaaccatgagaaacttcctagagtcctggctgttgcaacaaatt

SEQ ID NO: 458470 - DNA, 60 bp, Artificial
  Synthetic oligonucleotide
tcatgtgacaccagtaaatgttaccaatttgcacttgggcaggggaccacactggacaac

SEQ ID NO: 458471 - DNA, 60 bp, Artificial
  Synthetic oligonucleotide
tcatgtgacgtataatcatcaagaagctgcgaagtatgacaatcacacagagaatgctct

SEQ ID NO: 458472 - DNA, 54 bp, Artificial
  Synthetic oligonucleotide
tcatgtgaggggtaaacgtgttggttacttcactaatcgacgttttaactcacg

SEQ ID NO: 458473 - DNA, 60 bp, Artificial
  Synthetic oligonucleotide
tcatgtgataaggtcgcactaccattgatatgggaagggtacatagatctacctggctat

SEQ ID NO: 458474 - DNA, 54 bp, Artificial
  Synthetic oligonucleotide
tcatgtgattggaccttcgcaggcgtagtggaatccttgatactcttggctgag

SEQ ID NO: 458475 - DNA, 60 bp, Artificial
  Synthetic oligonucleotide
tcatgtgcttgaactgtcaagatccagctaggggtgcgcttatagctaggtgttggtacc

SEQ ID NO: 458476 - DNA, 60 bp, Artificial
  Synthetic oligonucleotide
tcatgtggctagccctattatttagatgggtgattgacttggtcaggagcactttatcca

SEQ ID NO: 458477 - DNA, 60 bp, Artificial
  Synthetic oligonucleotide
tcatgtgggatcctcttttgaatgagtttcccgaatccgttcacggatttcgttgcatgc

SEQ ID NO: 458478 - DNA, 55 bp, Artificial
  Synthetic oligonucleotide
tcatgtgggcttttgtttcccaaggctgagaggtacgacaaaagcacatggctca

SEQ ID NO: 458479 - DNA, 60 bp, Artificial
  Synthetic oligonucleotide
tcatgtgggtaaggtcatatgtgtttctgacgtcactcgtggtaacgggcttacacatcg

SEQ ID NO: 458480 - DNA, 60 bp, Artificial
  Synthetic oligonucleotide
tcatgtggtgcctactcctactctctgtaggggtaggcatctacctgctccccaatcgat

SEQ ID NO: 458481 - DNA, 60 bp, Artificial
  Synthetic oligonucleotide
tcatgtggtggttacagtattttatcaccagagccgaggcgcacttgcaagtgtgggttc

SEQ ID NO: 458482 - DNA, 55 bp, Artificial
  Synthetic oligonucleotide
tcatgtgtgactgaaacgtaagatagtcgctatcgtttctatcgcccagattaga

SEQ ID NO: 458483 - DNA, 60 bp, Artificial
  Synthetic oligonucleotide
tcatgtgtgtgtatgaaaggagattgttattgggtaatgacggatggtcctgcgaacaat

SEQ ID NO: 458484 - DNA, 60 bp, Artificial
  Synthetic oligonucleotide
tcatgtgtttcacatattcccaaagttaggtactatggaggatgaagtgagacgctttgg

SEQ ID NO: 458485 - DNA, 58 bp, Artificial
  Synthetic oligonucleotide
tcatgttagagttaatgtttacctctcagctattaacttagaatgttttgccccactc

SEQ ID NO: 458486 - DNA, 60 bp, Artificial
  Synthetic oligonucleotide
tcatgttagtcatccctctcgtgtatccttcgctcgccgcgttagccgtgctagtcgtaa

SEQ ID NO: 458487 - DNA, 60 bp, Artificial
  Synthetic oligonucleotide
tcatgttcgatgatccaacgcaaatgtggttaacaagtttgattggccatgattttaaag

SEQ ID NO: 458488 - DNA, 60 bp, Artificial
  Synthetic oligonucleotide
tcatgttgaccagtcaattggagacaccccccagatcactaacccctgtatattggagac

SEQ ID NO: 458489 - DNA, 55 bp, Artificial
  Synthetic oligonucleotide
tcatgttgagatcaaatgccattccttacactaatgtacaccactggatgagcgt

SEQ ID NO: 458490 - DNA, 50 bp, Artificial
  Synthetic oligonucleotide
tcatgtttcactataatgaccgatggcccaagtaatgggcaggcctcgta

SEQ ID NO: 458491 - DNA, 55 bp, Artificial
  Synthetic oligonucleotide
tcatgtttggatgtggtatagatttgaaagctacgatgccagcgcccttatgcgg

SEQ ID NO: 458492 - DNA, 53 bp, Artificial
  Synthetic oligonucleotide
tcatgtttggcacttttgagtgtactgttccacacagtgcgcagccaataaca

SEQ ID NO: 458493 - DNA, 59 bp, Artificial
  Synthetic oligonucleotide
tcatgttttggttggtgagggataggagaccatatggtacgcctatggattttgggcag

SEQ ID NO: 458494 - DNA, 56 bp, Artificial
  Synthetic oligonucleotide
tcattaaatcagggggattgggatataaatggtcagaagtgtcatttaaaccagct

SEQ ID NO: 458495 - DNA, 55 bp, Artificial
  Synthetic oligonucleotide
tcattaacctaatgcaacctcgccagcttgtttttcgccccgaggttttctggaa

SEQ ID NO: 458496 - DNA, 60 bp, Artificial
  Synthetic oligonucleotide
tcattaaggcagatccttcgaaggtcaggaggaatcgataaagagtcgatgggtttcaca

SEQ ID NO: 458497 - DNA, 60 bp, Artificial
  Synthetic oligonucleotide
tcattaattggcagggccatagcagagagagagaacacgtcagtctattcactgccacca

SEQ ID NO: 458498 - DNA, 60 bp, Artificial
  Synthetic oligonucleotide
tcattacagattcatcagtcatatcactgatagcaaaacttgacgctacagtgttcgccc

SEQ ID NO: 458499 - DNA, 53 bp, Artificial
  Synthetic oligonucleotide
tcattacatgccagtctgtctaagttctagaagatgccacttggtaggggaat

SEQ ID NO: 458500 - DNA, 55 bp, Artificial
  Synthetic oligonucleotide
tcattaccaccagaccctaaacattttgatggatatcagcaacaagcagttgtca

SEQ ID NO: 458501 - DNA, 60 bp, Artificial
  Synthetic oligonucleotide
tcattaccctaacaatgtcacacaatctgactttatattagactacacactaacacacga

SEQ ID NO: 458502 - DNA, 60 bp, Artificial
  Synthetic oligonucleotide
tcattactaatagtgcctgtatcagaactaagaggtgacaccagtataccaattactgta

SEQ ID NO: 458503 - DNA, 59 bp, Artificial
  Synthetic oligonucleotide
tcattactgtacacctttggactaaggtccagatgtccacacaaataattatgtggtcc

SEQ ID NO: 458504 - DNA, 58 bp, Artificial
  Synthetic oligonucleotide
tcattactgtacacctttggacttaagtcaagtggccgcacaagtaattgtgtcccca

SEQ ID NO: 458505 - DNA, 59 bp, Artificial
  Synthetic oligonucleotide
tcattactgtagacctttggacttaagtccagatgtccacataagtaattgtgtggacc

SEQ ID NO: 458506 - DNA, 58 bp, Artificial
  Synthetic oligonucleotide
tcattagaccacggtgatacgcattctagggggcagagtcatgttacaactatttgat

SEQ ID NO: 458507 - DNA, 59 bp, Artificial
  Synthetic oligonucleotide
tcattagaccgaatgagaatccagcacacaagagtcaattggtgtggatggcatgccat

SEQ ID NO: 458508 - DNA, 60 bp, Artificial
  Synthetic oligonucleotide
tcattagagatgcgcctcatgagctgggagaaagcgttaagaccgttttcgttccacacg

SEQ ID NO: 458509 - DNA, 60 bp, Artificial
  Synthetic oligonucleotide
tcattagagcatcttggttcataccgaaaagagactcctgattccatatgggaatgctct

SEQ ID NO: 458510 - DNA, 59 bp, Artificial
  Synthetic oligonucleotide
tcattagagtcggtaacgcgtactgttgttctcagtgctgcggtgtactttactacgga

SEQ ID NO: 458511 - DNA, 57 bp, Artificial
  Synthetic oligonucleotide
tcattagatcttcagtagaagggggttttacacccatcaattcagccaaaccaacta

SEQ ID NO: 458512 - DNA, 60 bp, Artificial
  Synthetic oligonucleotide
tcattagatgcatggaaatctttgctagaacctccgcgggagcggagatgtgtacctgct

SEQ ID NO: 458513 - DNA, 60 bp, Artificial
  Synthetic oligonucleotide
tcattagatgcatggaaatggttgttagtacctccgcgggagcgtaggtgcgtgcctgct

SEQ ID NO: 458514 - DNA, 59 bp, Artificial
  Synthetic oligonucleotide
tcattagctaccctgatatgggtaagtcttttcctaatcgatctaggtcgtatatcaag

SEQ ID NO: 458515 - DNA, 60 bp, Artificial
  Synthetic oligonucleotide
tcattaggaacaggggctacactagaagaaatgatgacagcatgtcagggagtgggaggg

SEQ ID NO: 458516 - DNA, 59 bp, Artificial
  Synthetic oligonucleotide
tcattagggcattactaactaaatagtagagtattaacatataggtgtatagaatgtat

SEQ ID NO: 458517 - DNA, 60 bp, Artificial
  Synthetic oligonucleotide
tcattagtgagactgacgcctacacccgtgggaataatttcaaagcagagtccgcacctg

SEQ ID NO: 458518 - DNA, 60 bp, Artificial
  Synthetic oligonucleotide
tcattataatagcgatattggcagcggccggaaagtcagacaaaatctgcattgggtacc

SEQ ID NO: 458519 - DNA, 60 bp, Artificial
  Synthetic oligonucleotide
tcattataatcaaaaacgtcacctggacagaccagtgtcatacagatcatcttagcacca

SEQ ID NO: 458520 - DNA, 60 bp, Artificial
  Synthetic oligonucleotide
tcattatataacacagtagtagttctctattgtgtacacgaaaagatagaggtccgagac

SEQ ID NO: 458521 - DNA, 59 bp, Artificial
  Synthetic oligonucleotide
tcattatgggatactataactacatcaaattacatattagcaagatcagttgtgcctga

SEQ ID NO: 458522 - DNA, 60 bp, Artificial
  Synthetic oligonucleotide
tcattattgacgcacctggtctgcttcgtgaggtgggcatctctgacgcaattgttaata

SEQ ID NO: 458523 - DNA, 56 bp, Artificial
  Synthetic oligonucleotide
tcattattgcgtcatactctttatcaaatgcatctaatcctaaaaagaaggtcttg

SEQ ID NO: 458524 - DNA, 60 bp, Artificial
  Synthetic oligonucleotide
tcattattgtacactctcgggcttagatctaggtggccgcacagataattgtgcggtccc

SEQ ID NO: 458525 - DNA, 53 bp, Artificial
  Synthetic oligonucleotide
tcattcaaagatcgaaacacatgtcaaagctatgctttatgtcagatttataa

SEQ ID NO: 458526 - DNA, 60 bp, Artificial
  Synthetic oligonucleotide
tcattcaaccccacccgaggtttcattcgcgcgtcactgactcaccctcagaacagcaaa

SEQ ID NO: 458527 - DNA, 60 bp, Artificial
  Synthetic oligonucleotide
tcattcaagtactctttatatgatgatgttgggcctggattgcaaaggaagatacttggg

SEQ ID NO: 458528 - DNA, 60 bp, Artificial
  Synthetic oligonucleotide
tcattcacaagggtaaggtattctttcagtatagcgagttgtctgctgcagacctcgtgg

SEQ ID NO: 458529 - DNA, 57 bp, Artificial
  Synthetic oligonucleotide
tcattcacagtatgtctcaggtacattccgggaaagtcccagtcgaacgtacccatg

SEQ ID NO: 458530 - DNA, 57 bp, Artificial
  Synthetic oligonucleotide
tcattcacagttaatctagggggtgtctttcatgaattaccttcattatgcagggtc

SEQ ID NO: 458531 - DNA, 54 bp, Artificial
  Synthetic oligonucleotide
tcattcaccggactattcgacggcccaatttacggacaaccgatcacactcgac

SEQ ID NO: 458532 - DNA, 60 bp, Artificial
  Synthetic oligonucleotide
tcattcacgcaagcctgcgcgtcactcgacaagacaacttccagtggccatccgcaccac

SEQ ID NO: 458533 - DNA, 60 bp, Artificial
  Synthetic oligonucleotide
tcattcacggtcaaattaggaggtgtcttccatgaattgccttcactatgtagggtcaac

SEQ ID NO: 458534 - DNA, 55 bp, Artificial
  Synthetic oligonucleotide
tcattcactacgaacttcggttcatccactactgaacttcggttcaatcactacg

SEQ ID NO: 458535 - DNA, 60 bp, Artificial
  Synthetic oligonucleotide
tcattcactggagaggaaatggccaccaaggcggattacacactcgatgaagagagcagg

SEQ ID NO: 458536 - DNA, 60 bp, Artificial
  Synthetic oligonucleotide
tcattcaggaagatctgtggatttgcaacaacacctgtatgtgagtatcaagggaatacc

SEQ ID NO: 458537 - DNA, 55 bp, Artificial
  Synthetic oligonucleotide
tcattcagtagaacggaattgatcccacctacctcctggggggaagtacttgacg

SEQ ID NO: 458538 - DNA, 60 bp, Artificial
  Synthetic oligonucleotide
tcattcagtgaaccactgactgttgtgggagtcatgctaaccctggccagcggtatgatg

SEQ ID NO: 458539 - DNA, 60 bp, Artificial
  Synthetic oligonucleotide
tcattcatgctgttgcccccgactatcgggttgaacataatcctaagaggcttgaggccg

SEQ ID NO: 458540 - DNA, 60 bp, Artificial
  Synthetic oligonucleotide
tcattcattcagagtaattcgtgaaatagctgtagctctccaagcggcatttgataattc

SEQ ID NO: 458541 - DNA, 60 bp, Artificial
  Synthetic oligonucleotide
tcattccacagttgcggttgatgcagttaggtctggtgagctaacaacccagttttcaaa

SEQ ID NO: 458542 - DNA, 60 bp, Artificial
  Synthetic oligonucleotide
tcattccagcaaaacaggatctacatgcaccctgccgtgttgacagctggcagaatcagt

SEQ ID NO: 458543 - DNA, 55 bp, Artificial
  Synthetic oligonucleotide
tcattccaggggcggggagtcttcgagctctcggacgaaaaggcaacgaacccga

SEQ ID NO: 458544 - DNA, 60 bp, Artificial
  Synthetic oligonucleotide
tcattccataaagggagaatggctctccatcagaccatgaaaggcaaaaggttgatgcct

SEQ ID NO: 458545 - DNA, 52 bp, Artificial
  Synthetic oligonucleotide
tcattccatcgcgccaagagctaccctcccgaatgccgaaccaaagctcagc

SEQ ID NO: 458546 - DNA, 57 bp, Artificial
  Synthetic oligonucleotide
tcattccatgtataaactcgctgtgcagtttttggaatactgtcacgctcccctcga

SEQ ID NO: 458547 - DNA, 60 bp, Artificial
  Synthetic oligonucleotide
tcattcctgtcaaggctattgagtgtataagctttgaagatatatcgcagaccgtagaaa

SEQ ID NO: 458548 - DNA, 60 bp, Artificial
  Synthetic oligonucleotide
tcattcgaagatcacatggaaactattcaggatataccaacattgaatgttgagagtcct

SEQ ID NO: 458549 - DNA, 60 bp, Artificial
  Synthetic oligonucleotide
tcattcgacaacatttcaaatattgtcttctatgggagaagagaatggctcaacaatgga

SEQ ID NO: 458550 - DNA, 60 bp, Artificial
  Synthetic oligonucleotide
tcattcgacagtattcactcagattccatgtctaacgacatgcactttgatcacgttgct

SEQ ID NO: 458551 - DNA, 60 bp, Artificial
  Synthetic oligonucleotide
tcattcgagccgacacataggaacgatgcattagaagttgcaccgttaattgagtccgtg

SEQ ID NO: 458552 - DNA, 58 bp, Artificial
  Synthetic oligonucleotide
tcattcgatgcccgaacctccaacgcctccattgcagccttgtcgttccccccgagag

SEQ ID NO: 458553 - DNA, 55 bp, Artificial
  Synthetic oligonucleotide
tcattcgcaactactttcgtcaacaacgttccaaagaatttggatcatgcctgcc

SEQ ID NO: 458554 - DNA, 57 bp, Artificial
  Synthetic oligonucleotide
tcattcgcaggacgtagcagggttttggactattgccgccacaaacttcacggatgt

SEQ ID NO: 458555 - DNA, 53 bp, Artificial
  Synthetic oligonucleotide
tcattcgcccctcgggtgtacgcggtattctacagcagcgtattagataaact

SEQ ID NO: 458556 - DNA, 55 bp, Artificial
  Synthetic oligonucleotide
tcattcggagttgaccctaagatacagcaaatcgtcgagaggtactacgacggtc

SEQ ID NO: 458557 - DNA, 60 bp, Artificial
  Synthetic oligonucleotide
tcattcggtcatgtttcaacattactcgaccaactgaacagagttttgaatgcacgtaac

SEQ ID NO: 458558 - DNA, 59 bp, Artificial
  Synthetic oligonucleotide
tcattcgtttataattcacaatctgcagttcaaataccaatttattattcttccaattc

SEQ ID NO: 458559 - DNA, 52 bp, Artificial
  Synthetic oligonucleotide
tcattctaagaggatcagtagctcataaatcctgtttgcctgcttgtatcta

SEQ ID NO: 458560 - DNA, 60 bp, Artificial
  Synthetic oligonucleotide
tcattctacagaagtatgagatggctgacacacaagagcaattcttaccctattcaagac

SEQ ID NO: 458561 - DNA, 60 bp, Artificial
  Synthetic oligonucleotide
tcattctacgccatctgggatgagacggccggtctatggtctacggacgagtacgatgtt

SEQ ID NO: 458562 - DNA, 60 bp, Artificial
  Synthetic oligonucleotide
tcattctagacacctgtaccattgaaggactaatctatggcaacccttcttgtgatctac

SEQ ID NO: 458563 - DNA, 58 bp, Artificial
  Synthetic oligonucleotide
tcattctagatacctgtactatcgaaggattggtctatggcaacccttcttgtgatct

SEQ ID NO: 458564 - DNA, 60 bp, Artificial
  Synthetic oligonucleotide
tcattctatcagtcttatttacggcggacacagtcaatgggaatccagcttgatcagagg

SEQ ID NO: 458565 - DNA, 60 bp, Artificial
  Synthetic oligonucleotide
tcattctcgtaattgtgaaatatacatgagtctagtcgtcttaaatggtggccatatatc

SEQ ID NO: 458566 - DNA, 60 bp, Artificial
  Synthetic oligonucleotide
tcattctcttgtcgtgaatctccactactaccgagcccgacgcattaattggcacttgtt

SEQ ID NO: 458567 - DNA, 57 bp, Artificial
  Synthetic oligonucleotide
tcattctgacgtccgtgagtctttagggaagtttatccctagcatcggaccggtcca

SEQ ID NO: 458568 - DNA, 60 bp, Artificial
  Synthetic oligonucleotide
tcattctgagaggatcaatggctcacaagtcctgtttgcctgcttgtgtctatgggcttg

SEQ ID NO: 458569 - DNA, 60 bp, Artificial
  Synthetic oligonucleotide
tcattctgcgcaaagttggtagtatcacgcttcttattcagcttttggggcgaggcatgc

SEQ ID NO: 458570 - DNA, 60 bp, Artificial
  Synthetic oligonucleotide
tcattcttacggacagtacaagcagagagtgaactcacctcagaaataccagtgaccttc

SEQ ID NO: 458571 - DNA, 57 bp, Artificial
  Synthetic oligonucleotide
tcattgaacagattgttaaagaccccagcttccagcccacctatgaaatacccggta

SEQ ID NO: 458572 - DNA, 60 bp, Artificial
  Synthetic oligonucleotide
tcattgaatgcactgttgctagcatggtcgaatgtgcgacagcaggatgtgagaatagct

SEQ ID NO: 458573 - DNA, 50 bp, Artificial
  Synthetic oligonucleotide
tcattgaattcatactcagcaccgactcccaagagaacacggcagacagc

SEQ ID NO: 458574 - DNA, 56 bp, Artificial
  Synthetic oligonucleotide
tcattgacccttataaagaatttggcgcttctgtggagttactctcgtttttgcct

SEQ ID NO: 458575 - DNA, 51 bp, Artificial
  Synthetic oligonucleotide
tcattgagaaaggcaggctaatacgcacaggagtgttgaggacgggacacc

SEQ ID NO: 458576 - DNA, 60 bp, Artificial
  Synthetic oligonucleotide
tcattgagaatgctacgttattatcaatattatcatactcctacgacaaatataacgccg

SEQ ID NO: 458577 - DNA, 55 bp, Artificial
  Synthetic oligonucleotide
tcattgagaggaatccaactaatcacaacatctgtcaacatagactagtcaacac

SEQ ID NO: 458578 - DNA, 54 bp, Artificial
  Synthetic oligonucleotide
tcattgaggcctcggacgcacacaacccaagactacttcgagtggaacgatggt

SEQ ID NO: 458579 - DNA, 60 bp, Artificial
  Synthetic oligonucleotide
tcattgaggggggatggacaggcatgatagatgggtggtacgggtaccatcaccagaatg

SEQ ID NO: 458580 - DNA, 52 bp, Artificial
  Synthetic oligonucleotide
tcattgaggtatttgcgggggcagacagtgctaccattcggtatgtttctct

SEQ ID NO: 458581 - DNA, 60 bp, Artificial
  Synthetic oligonucleotide
tcattgaggtttgggtacttgaccgtgtagagcaggccaagatctgtgagtgcctgtaca

SEQ ID NO: 458582 - DNA, 60 bp, Artificial
  Synthetic oligonucleotide
tcattgagtgtttgatggggcccaatgagcacccagctcaattattcttacttagctctt

SEQ ID NO: 458583 - DNA, 60 bp, Artificial
  Synthetic oligonucleotide
tcattgataactctcgtgattttgttcgtcgtatgactaatgctatgaaaggtggtccac

SEQ ID NO: 458584 - DNA, 60 bp, Artificial
  Synthetic oligonucleotide
tcattgatcatagtcgttgaccgaaaacctcatttgactgcatctggttgcctacatacg

SEQ ID NO: 458585 - DNA, 55 bp, Artificial
  Synthetic oligonucleotide
tcattgatcccaagcttcccccggatgtgctgtcaaccatctgtgacgcatttag

SEQ ID NO: 458586 - DNA, 56 bp, Artificial
  Synthetic oligonucleotide
tcattgattggttggaaccgcgttccaattaccgtttcatgcttcagggtgcgcgt

SEQ ID NO: 458587 - DNA, 55 bp, Artificial
  Synthetic oligonucleotide
tcattgattgttccaatgagcttgagtcgagctcgaaccgccttgcagggacgct

SEQ ID NO: 458588 - DNA, 57 bp, Artificial
  Synthetic oligonucleotide
tcattgcaacggaagcagcgttccaatgctttatgtacgatttgccagtcatgacag

SEQ ID NO: 458589 - DNA, 52 bp, Artificial
  Synthetic oligonucleotide
tcattgcaagttattgcgatcatctctctcctcctcgttgggggggccagtc

SEQ ID NO: 458590 - DNA, 58 bp, Artificial
  Synthetic oligonucleotide
tcattgccccacattgacttcacattctcggcaggatctaagagcacccgttctgtgc

SEQ ID NO: 458591 - DNA, 60 bp, Artificial
  Synthetic oligonucleotide
tcattgccgaagaattccaatggaccacagtggagcaaaatggaaaatccggagcctgca

SEQ ID NO: 458592 - DNA, 50 bp, Artificial
  Synthetic oligonucleotide
tcattgcgaagcttggctagcaactcgactagctgttgatgttggctttt

SEQ ID NO: 458593 - DNA, 55 bp, Artificial
  Synthetic oligonucleotide
tcattgcggctagaaacattgtcagaagggcaacagtctctgcggaccccttggc

SEQ ID NO: 458594 - DNA, 60 bp, Artificial
  Synthetic oligonucleotide
tcattgctgcaggtctaatcgagaacttcatgaagggcctacctgcagtcatccccccac

SEQ ID NO: 458595 - DNA, 55 bp, Artificial
  Synthetic oligonucleotide
tcattgcttctgtcataccacctggggttgaccccacgtcgatcagggatccggg

SEQ ID NO: 458596 - DNA, 57 bp, Artificial
  Synthetic oligonucleotide
tcattggaaaaacaaccagatcgtgaattacggttgaattattgttccaatagattc

SEQ ID NO: 458597 - DNA, 60 bp, Artificial
  Synthetic oligonucleotide
tcattggaccacagcacttggaacagctacccaggaaaaacaagatagctgtcagaacct

SEQ ID NO: 458598 - DNA, 60 bp, Artificial
  Synthetic oligonucleotide
tcattggaggctggtccaaacctaactccaaattgcagataaataggcaagtcatagttg

SEQ ID NO: 458599 - DNA, 53 bp, Artificial
  Synthetic oligonucleotide
tcattggaggtagcaataacaccagagtattcgcgctcatctggagcaagcgt

SEQ ID NO: 458600 - DNA, 60 bp, Artificial
  Synthetic oligonucleotide
tcattggatcagacagaataaatggaataagcgcagtaaatttccataaattgttccgag

SEQ ID NO: 458601 - DNA, 60 bp, Artificial
  Synthetic oligonucleotide
tcattggatgtgcatttatatttggaactctcgtttgtatgtggttgtgattattgatcg

SEQ ID NO: 458602 - DNA, 58 bp, Artificial
  Synthetic oligonucleotide
tcattggatttgtttgatgataagtaagatgcctgattggatttttgtagcagcactc

SEQ ID NO: 458603 - DNA, 55 bp, Artificial
  Synthetic oligonucleotide
tcattggcagtggcttggatgatattgagagcgataacgttcaccacaacatcta

SEQ ID NO: 458604 - DNA, 55 bp, Artificial
  Synthetic oligonucleotide
tcattggccatttcaacccatgcatttgaggagaagcgctacttgataactgggg

SEQ ID NO: 458605 - DNA, 58 bp, Artificial
  Synthetic oligonucleotide
tcattggccctcctacctcttctgtaccgtgctattgtggtgttgaccttttcttcga

SEQ ID NO: 458606 - DNA, 55 bp, Artificial
  Synthetic oligonucleotide
tcattggcgttatgaggttaaagcatcggcggagacgacctatgacagcggatat

SEQ ID NO: 458607 - DNA, 56 bp, Artificial
  Synthetic oligonucleotide
tcattgggagactctcctattagtattagtgcggcgtccaaaacccaacttcgtaa

SEQ ID NO: 458608 - DNA, 60 bp, Artificial
  Synthetic oligonucleotide
tcattgggatggaaggcttaactcagtcacagcgaagagaggtcgtggggctgatactct

SEQ ID NO: 458609 - DNA, 52 bp, Artificial
  Synthetic oligonucleotide
tcattgggccgggacgatcacgatctgtaagaacatagtgcacacgatccaa

SEQ ID NO: 458610 - DNA, 60 bp, Artificial
  Synthetic oligonucleotide
tcattggggccatgattctaacactgtgctggagtctggtttaaaacttctcattgaggt

SEQ ID NO: 458611 - DNA, 51 bp, Artificial
  Synthetic oligonucleotide
tcattgggttggggataatttgtagtgcctcagataacttatgggtcacaa

SEQ ID NO: 458612 - DNA, 60 bp, Artificial
  Synthetic oligonucleotide
tcattggtggttggaccacggctaattccaagtcacagataaatagacaggtcatagttg

SEQ ID NO: 458613 - DNA, 55 bp, Artificial
  Synthetic oligonucleotide
tcattggtgtttaaggttaaagagttcgcccccgacgcgcctctgtacactggac

SEQ ID NO: 458614 - DNA, 57 bp, Artificial
  Synthetic oligonucleotide
tcattgtaacttccaatacaaacatgtgtgtggtggtggatgggaattccacgacct

SEQ ID NO: 458615 - DNA, 60 bp, Artificial
  Synthetic oligonucleotide
tcattgtaatagcgatactggcagcggccgggaagtcagacaagatctgcattggatatc

SEQ ID NO: 458616 - DNA, 60 bp, Artificial
  Synthetic oligonucleotide
tcattgtaccaaagcttggacaatggccgacaatgtttgatgtggctacagctgtgtaca

SEQ ID NO: 458617 - DNA, 57 bp, Artificial
  Synthetic oligonucleotide
tcattgtagagcaccgcaaggtccctacagcgtcttttgacgtagaccgccgtgtgc

SEQ ID NO: 458618 - DNA, 60 bp, Artificial
  Synthetic oligonucleotide
tcattgtatctttcattaacataggggctttgatctcagaatcatcatcatccactatct

SEQ ID NO: 458619 - DNA, 55 bp, Artificial
  Synthetic oligonucleotide
tcattgtccgcgggagtgagatctgtttataataacgtcaccgcaacacagtccg

SEQ ID NO: 458620 - DNA, 55 bp, Artificial
  Synthetic oligonucleotide
tcattgtgtaaatcaacagtcatatccaactggtagtaatcagtctgtatcggtg

SEQ ID NO: 458621 - DNA, 55 bp, Artificial
  Synthetic oligonucleotide
tcattgttccccttgaccactaatcatgtatatgaagaagtgacactacaccttc

SEQ ID NO: 458622 - DNA, 56 bp, Artificial
  Synthetic oligonucleotide
tcattgttccctacgtcaaggtggatatgagaattcgtgacacgtgcacaaaggag

SEQ ID NO: 458623 - DNA, 55 bp, Artificial
  Synthetic oligonucleotide
tcattgttggtgggatagtttcggttggcggtctaatttctgtcggcgaaccaac

SEQ ID NO: 458624 - DNA, 59 bp, Artificial
  Synthetic oligonucleotide
tcattgttggtgttgagttctaagctaccattagaacagattacgaaaccggatgacat

SEQ ID NO: 458625 - DNA, 60 bp, Artificial
  Synthetic oligonucleotide
tcattgttgtctgatgccgtctcatttggagacactaggtcctgtaccaggttattttta

SEQ ID NO: 458626 - DNA, 56 bp, Artificial
  Synthetic oligonucleotide
tcattgttttctggggcaggcggtctcgacatggctgtagagcacgtgttcaacag

SEQ ID NO: 458627 - DNA, 60 bp, Artificial
  Synthetic oligonucleotide
tcatttaatctagctatgtttcccgcatatacatgactatcaggtccatgagctatcagc

SEQ ID NO: 458628 - DNA, 60 bp, Artificial
  Synthetic oligonucleotide
tcatttaatgtcacagaaccccatatttctacaagtgcacttgaatggattgatccggat

SEQ ID NO: 458629 - DNA, 58 bp, Artificial
  Synthetic oligonucleotide
tcatttacaggaggatattgttgataggtgtagacaatttgtgggacccctcaccgta

SEQ ID NO: 458630 - DNA, 56 bp, Artificial
  Synthetic oligonucleotide
tcatttaccgatgtcttgaacttagaaagttactttttggatgcggcatgagtatt

SEQ ID NO: 458631 - DNA, 54 bp, Artificial
  Synthetic oligonucleotide
tcatttacgaagcagactattacatgcccagtaacgaaatctacgaagttcttc

SEQ ID NO: 458632 - DNA, 50 bp, Artificial
  Synthetic oligonucleotide
tcatttacggggagagggattctagaagtttatatgcgttgctgggagtg

SEQ ID NO: 458633 - DNA, 59 bp, Artificial
  Synthetic oligonucleotide
tcatttacgtgtttctatcgtgttcacatgtttggtagtggagatatttgtaactgagg

SEQ ID NO: 458634 - DNA, 54 bp, Artificial
  Synthetic oligonucleotide
tcatttagatacggcaagggtgtttggatagggagaactaaaagtactagttcc

SEQ ID NO: 458635 - DNA, 60 bp, Artificial
  Synthetic oligonucleotide
tcatttatcaggcgagaattcgactctaattgcgaactcaatgcataacaaagcgattgg

SEQ ID NO: 458636 - DNA, 57 bp, Artificial
  Synthetic oligonucleotide
tcatttatgatgggatgcttaccgacagtattggttcatggtctaaaagcatcctca

SEQ ID NO: 458637 - DNA, 60 bp, Artificial
  Synthetic oligonucleotide
tcatttatgatgggatgcttgttgacagtatcggttcgtggtctcaaaatatcctcagaa

SEQ ID NO: 458638 - DNA, 59 bp, Artificial
  Synthetic oligonucleotide
tcatttcaactcccgcgtcgaaggtacgccgacgtctcaacttcgacagcccatatgct

SEQ ID NO: 458639 - DNA, 59 bp, Artificial
  Synthetic oligonucleotide
tcatttcaataagatgaactacacaccagttagttatggtttggtatctcaccaaccag

SEQ ID NO: 458640 - DNA, 55 bp, Artificial
  Synthetic oligonucleotide
tcatttcattaacacaggtcccaccactggggattattggactaagctggaaagt

SEQ ID NO: 458641 - DNA, 59 bp, Artificial
  Synthetic oligonucleotide
tcatttccaaccctcgaaatggtacaagacaagtactctcgctggcaaggatacctatc

SEQ ID NO: 458642 - DNA, 53 bp, Artificial
  Synthetic oligonucleotide
tcatttccgttcacggtcacatataaagtcggtaacgcgaccgctagctttgt

SEQ ID NO: 458643 - DNA, 58 bp, Artificial
  Synthetic oligonucleotide
tcatttcgaatttaagtgaagaggttgttccagtgatattgtctccctatgggcaatt

SEQ ID NO: 458644 - DNA, 60 bp, Artificial
  Synthetic oligonucleotide
tcatttctatctgaacagtatgtaggcgatgatactttgttttatactcaaccatgtatt

SEQ ID NO: 458645 - DNA, 60 bp, Artificial
  Synthetic oligonucleotide
tcatttctcaatcccgcgaatctaccgcttacgaaaaatggcttgactcaattgtcatcc

SEQ ID NO: 458646 - DNA, 55 bp, Artificial
  Synthetic oligonucleotide
tcatttgaacagcgtcatgatatagcccatgtgggtaaggtaatctgtgtgtccg

SEQ ID NO: 458647 - DNA, 53 bp, Artificial
  Synthetic oligonucleotide
tcatttgacaaggaaaggttgctctttttaagttgcgagcgcttgttctatgg

SEQ ID NO: 458648 - DNA, 56 bp, Artificial
  Synthetic oligonucleotide
tcatttgaccccgccaaggagttagagtatgttacaagtggtgaatacttaaggga

SEQ ID NO: 458649 - DNA, 52 bp, Artificial
  Synthetic oligonucleotide
tcatttgagctaaagaagctatgggagcaaacccattcaaagacaggattac

SEQ ID NO: 458650 - DNA, 56 bp, Artificial
  Synthetic oligonucleotide
tcatttgagtcgttttcgaacacatcccccgattccccctctcctatccgcaacaa

SEQ ID NO: 458651 - DNA, 58 bp, Artificial
  Synthetic oligonucleotide
tcatttgattacatggaatggatctttgagacagatgccggcaactcaacatactatg

SEQ ID NO: 458652 - DNA, 55 bp, Artificial
  Synthetic oligonucleotide
tcatttgattgaatggcatggttctgttctttgccccggttactttcggaagcac

SEQ ID NO: 458653 - DNA, 58 bp, Artificial
  Synthetic oligonucleotide
tcatttgctggtacaattatagagagcgcctgtaattttaacgtttccgtggaggaca

SEQ ID NO: 458654 - DNA, 51 bp, Artificial
  Synthetic oligonucleotide
tcatttggagtcgctggagtgaatgaatcagcagacatggcaataggaatg

SEQ ID NO: 458655 - DNA, 60 bp, Artificial
  Synthetic oligonucleotide
tcatttggtgtaccaacaagggatgttacagcgtatttatcagctaagctgtacaagaaa

SEQ ID NO: 458656 - DNA, 57 bp, Artificial
  Synthetic oligonucleotide
tcatttgtatttccgatgtgacacgtgggaatggtatcacccatcgtgtgggcaaac

SEQ ID NO: 458657 - DNA, 50 bp, Artificial
  Synthetic oligonucleotide
tcattttagtaaccctacttcagtcggattggattgggttatattgtcgt

SEQ ID NO: 458658 - DNA, 60 bp, Artificial
  Synthetic oligonucleotide
tcattttcaagacaatcgagctatgtggacacgaggcttcggcgtccaagacaacgttcg

SEQ ID NO: 458659 - DNA, 60 bp, Artificial
  Synthetic oligonucleotide
tcattttgagcgcgctaaagggagcgatgcggataatgagaagtattgcagtaaagaggg

SEQ ID NO: 458660 - DNA, 58 bp, Artificial
  Synthetic oligonucleotide
tccaaaaacagaaattctgatcccataccctgggatgacagcagccttaggtggggaa

SEQ ID NO: 458661 - DNA, 60 bp, Artificial
  Synthetic oligonucleotide
tccaaaaactatcccagggcaatgatgcatcctagcttcgctgggctcattgatccaaaa

SEQ ID NO: 458662 - DNA, 55 bp, Artificial
  Synthetic oligonucleotide
tccaaaaacttgagtccagtctgaaaaccttaactagtgagtttatagcccataa

SEQ ID NO: 458663 - DNA, 58 bp, Artificial
  Synthetic oligonucleotide
tccaaaacaaggccaacgtgtgctgggccaaagcactggtcccgatattacgcacggc

SEQ ID NO: 458664 - DNA, 60 bp, Artificial
  Synthetic oligonucleotide
tccaaaacagcatcaccatagagagaatggtcctatctgcatttgatgagagaaggaaca

SEQ ID NO: 458665 - DNA, 58 bp, Artificial
  Synthetic oligonucleotide
tccaaaaccatacgggactagacgctggattgcaaggtgatagttcgaaagcgactta

SEQ ID NO: 458666 - DNA, 57 bp, Artificial
  Synthetic oligonucleotide
tccaaaacgaggatatacccattgggaattgtaacacaaaatgtcaaacatatgcgg

SEQ ID NO: 458667 - DNA, 53 bp, Artificial
  Synthetic oligonucleotide
tccaaaacgcgagccgggaaagagacctcgccgcggttactacaccactctcg

SEQ ID NO: 458668 - DNA, 60 bp, Artificial
  Synthetic oligonucleotide
tccaaaagatctagatcactaaattcatcagcattctactacagagtgtagatacacgct

SEQ ID NO: 458669 - DNA, 60 bp, Artificial
  Synthetic oligonucleotide
tccaaaagatctagatcgttagattcagcggctttttactatagagtttgaatatcattg

SEQ ID NO: 458670 - DNA, 55 bp, Artificial
  Synthetic oligonucleotide
tccaaaagtaagctctgaagtacacatcccactaggacctgctacattagtagtg

SEQ ID NO: 458671 - DNA, 59 bp, Artificial
  Synthetic oligonucleotide
tccaaaatagtaagagcaaccgcagggaagatctatcctacgtctgcgaactggtctct

SEQ ID NO: 458672 - DNA, 60 bp, Artificial
  Synthetic oligonucleotide
tccaaaatagtcaggtattcagtctaatccgacccaatgagaatccagcacataagagtc

SEQ ID NO: 458673 - DNA, 59 bp, Artificial
  Synthetic oligonucleotide
tccaaaatcaatgaagtctccgtctttttccacataggccttgacgtctgacgagctct

SEQ ID NO: 458674 - DNA, 53 bp, Artificial
  Synthetic oligonucleotide
tccaaaatgaaagcaaacatcagttagatatggtcataactgctgtcaactcc

SEQ ID NO: 458675 - DNA, 60 bp, Artificial
  Synthetic oligonucleotide
tccaaaatgcattggatggatcgataattgagaatggaaacgtagctacgcgcgacgtcg

SEQ ID NO: 458676 - DNA, 60 bp, Artificial
  Synthetic oligonucleotide
tccaaaatgcgaatccagactgtaagaccatcttaagagcattaggaccaggggcttcat

SEQ ID NO: 458677 - DNA, 59 bp, Artificial
  Synthetic oligonucleotide
tccaaaatgttaccgactacttggtcagtcatggaattcaggccctgccaggacggcga

SEQ ID NO: 458678 - DNA, 53 bp, Artificial
  Synthetic oligonucleotide
tccaaacagcatgcttcaaagcccccaggttgtacccaccctgcgtcacaacc

SEQ ID NO: 458679 - DNA, 56 bp, Artificial
  Synthetic oligonucleotide
tccaaacccacgcaatggttggatgagagccaagtccgctactacgcgctctgcta

SEQ ID NO: 458680 - DNA, 55 bp, Artificial
  Synthetic oligonucleotide
tccaaaccccggcgcatcttccatgtctgtggaatgggtaatgggaccaccttcg

SEQ ID NO: 458681 - DNA, 52 bp, Artificial
  Synthetic oligonucleotide
tccaaaccctacttacctcaaccagccccttcgcgaccgactcgtccccgag

SEQ ID NO: 458682 - DNA, 57 bp, Artificial
  Synthetic oligonucleotide
tccaaaccgtggtaccacttcccatgggccagatgaacctcctacaggacgagagcc

SEQ ID NO: 458683 - DNA, 59 bp, Artificial
  Synthetic oligonucleotide
tccaaactcgcgattctaagggacagtgtgtttgcgaccccagacaaggcgtcacatgg

SEQ ID NO: 458684 - DNA, 60 bp, Artificial
  Synthetic oligonucleotide
tccaaactgtcagctgctactatcaaagccacaaacttgaagactcagctgaggaaagaa

SEQ ID NO: 458685 - DNA, 53 bp, Artificial
  Synthetic oligonucleotide
tccaaacttcttcttccctctccccgcacctaaggttacaactagccgtgcct

SEQ ID NO: 458686 - DNA, 59 bp, Artificial
  Synthetic oligonucleotide
tccaaagaacagtaaaactgatcgctgtattgctatcgagcccggctggaatatgtttt

SEQ ID NO: 458687 - DNA, 60 bp, Artificial
  Synthetic oligonucleotide
tccaaagaagcgcaagatgtcataatggaggttgttttcccaaatgaagtgggagctaga

SEQ ID NO: 458688 - DNA, 59 bp, Artificial
  Synthetic oligonucleotide
tccaaagcattgaagtggacgtcaccattcacttcattgggtttgacgggacagacgta

SEQ ID NO: 458689 - DNA, 58 bp, Artificial
  Synthetic oligonucleotide
tccaaagcttagattgttggcttacctttacacaccccttcgagccaacaatgctgga

SEQ ID NO: 458690 - DNA, 58 bp, Artificial
  Synthetic oligonucleotide
tccaaaggcacgaacctaatcattttaccggtaggcgtctaatccacgctgatgtagc

SEQ ID NO: 458691 - DNA, 58 bp, Artificial
  Synthetic oligonucleotide
tccaaaggttactacgttaacgcatttcttgaatctgcccgatcacttatccactgga

SEQ ID NO: 458692 - DNA, 55 bp, Artificial
  Synthetic oligonucleotide
tccaaaggtttgattagtgcaaagcgcaatccaatagcctaggatccactgtgcg

SEQ ID NO: 458693 - DNA, 58 bp, Artificial
  Synthetic oligonucleotide
tccaaagtacggcgccgtctgaacttcgacagcccgtatgccaaccgtgcgagtgccc

SEQ ID NO: 458694 - DNA, 55 bp, Artificial
  Synthetic oligonucleotide
tccaaagtatgcgagcactccggtccaaaggttgagagtacgcagagggaggaga

SEQ ID NO: 458695 - DNA, 55 bp, Artificial
  Synthetic oligonucleotide
tccaaagtgaccgaggggggagctaggaactcgggggaccagtggatcctacatg

SEQ ID NO: 458696 - DNA, 59 bp, Artificial
  Synthetic oligonucleotide
tccaaataacatggacagagcagttaaactgtatagaaagcttaagagggagataacat

SEQ ID NO: 458697 - DNA, 60 bp, Artificial
  Synthetic oligonucleotide
tccaaataccgctcttaggtatgctgtccagtcgttgaccacttctacccggacattgca

SEQ ID NO: 458698 - DNA, 60 bp, Artificial
  Synthetic oligonucleotide
tccaaatccagacactccagcatgctgggaccaccatgataacggtcccctccggaggag

SEQ ID NO: 458699 - DNA, 60 bp, Artificial
  Synthetic oligonucleotide
tccaaatctccaccaagacacacctaatccggtcgctgcttgctttctagccataattaa

SEQ ID NO: 458700 - DNA, 60 bp, Artificial
  Synthetic oligonucleotide
tccaaatgcgcagccgtttgaacatcatgctacagtaggactcacacttagaattgaatc

SEQ ID NO: 458701 - DNA, 59 bp, Artificial
  Synthetic oligonucleotide
tccaaattacgcagaggcatttcgcttacgtgtgtgctcggtctcccgactggaacgtg

SEQ ID NO: 458702 - DNA, 56 bp, Artificial
  Synthetic oligonucleotide
tccaaattgcgattgggcctattaccctccaaccccaggaaagtaccttgatgaca

SEQ ID NO: 458703 - DNA, 58 bp, Artificial
  Synthetic oligonucleotide
tccaaattgctggtgcagccttcgtcacttcaagaatgacacggaggttgaacgtcag

SEQ ID NO: 458704 - DNA, 60 bp, Artificial
  Synthetic oligonucleotide
tccaacaaagatccttatagatcatggttacgctcaaattagtaattaccatgaccatgt

SEQ ID NO: 458705 - DNA, 60 bp, Artificial
  Synthetic oligonucleotide
tccaacaaagtcacctgccctgcatgcgatatggcagatcatgcagtactacaaagtaga

SEQ ID NO: 458706 - DNA, 60 bp, Artificial
  Synthetic oligonucleotide
tccaacaaagtggtggcaccttactcatagatgtccggcagacgtctgtgagttaatccg

SEQ ID NO: 458707 - DNA, 60 bp, Artificial
  Synthetic oligonucleotide
tccaacaaatcaggtactgttacactacaattggggagtggctgctagcatgggtactac

SEQ ID NO: 458708 - DNA, 55 bp, Artificial
  Synthetic oligonucleotide
tccaacaagcgacgtttcccgtggacctttcgtttaagcgagacgacgtcacgca

SEQ ID NO: 458709 - DNA, 60 bp, Artificial
  Synthetic oligonucleotide
tccaacaatagatcacgtattagaccatgtgcaaacaatggaggagataaacaccctcca

SEQ ID NO: 458710 - DNA, 57 bp, Artificial
  Synthetic oligonucleotide
tccaacacccaccgttgcgaatcctccgagtcttaatcgtgcaactgatcgtgttga

SEQ ID NO: 458711 - DNA, 52 bp, Artificial
  Synthetic oligonucleotide
tccaacactgaaccagaagaagccatacaaactcgcacagtgataaatcagc

SEQ ID NO: 458712 - DNA, 60 bp, Artificial
  Synthetic oligonucleotide
tccaacagacctcatttgtgaagcgcgcttttaagcgcctgaaggacaactttgagatag

SEQ ID NO: 458713 - DNA, 57 bp, Artificial
  Synthetic oligonucleotide
tccaacagcaatttgcagatatctggaaggccgttccggccgttaatataaggtttc

SEQ ID NO: 458714 - DNA, 55 bp, Artificial
  Synthetic oligonucleotide
tccaacagcactcgcgtcggcactgtgtacgcagacaccacctggggatccgcta

SEQ ID NO: 458715 - DNA, 60 bp, Artificial
  Synthetic oligonucleotide
tccaacagggcaaaaacaactgcgatcgttatccgcagagcaactacgcaaagcttagta

SEQ ID NO: 458716 - DNA, 51 bp, Artificial
  Synthetic oligonucleotide
tccaacagggtatcggtcaggtgaacgtctacggtggaccgggcagtgacc

SEQ ID NO: 458717 - DNA, 57 bp, Artificial
  Synthetic oligonucleotide
tccaacatgaagaacgggttcgatggcattctctcctcccttgactccccctcttct

SEQ ID NO: 458718 - DNA, 55 bp, Artificial
  Synthetic oligonucleotide
tccaacattcaatgaatcagtacatccgtgctatgcatgagcaatacagaggctc

SEQ ID NO: 458719 - DNA, 57 bp, Artificial
  Synthetic oligonucleotide
tccaaccaatgctctagaatttcggaagagtttcaaaccaccaaaagtgtcacaagc

SEQ ID NO: 458720 - DNA, 55 bp, Artificial
  Synthetic oligonucleotide
tccaaccagtattggttatgttacggtaattccgatgcgaaatttggtggaacgc

SEQ ID NO: 458721 - DNA, 50 bp, Artificial
  Synthetic oligonucleotide
tccaacccactgagtcctaaagatgcccgggtcaagacgtttgtcaaagc

SEQ ID NO: 458722 - DNA, 60 bp, Artificial
  Synthetic oligonucleotide
tccaaccccacatctgtcgcacacaatccagtgtgtaggcagtcgtaacgggcaactgtg

SEQ ID NO: 458723 - DNA, 56 bp, Artificial
  Synthetic oligonucleotide
tccaacccgatccgttcatacttataggtcttggccgaagcgtgccaagaaccttg

SEQ ID NO: 458724 - DNA, 53 bp, Artificial
  Synthetic oligonucleotide
tccaaccgaggagcgacaatgtgtgaaccagtcactatcggcatggcaatcgt

SEQ ID NO: 458725 - DNA, 53 bp, Artificial
  Synthetic oligonucleotide
tccaaccgtcattgtacgtcgaggcaagcacaggattcctcaatctaagtcga

SEQ ID NO: 458726 - DNA, 60 bp, Artificial
  Synthetic oligonucleotide
tccaacctcaatgatgccacttaccagaggacaagagcccttgtgcgtactgggatggac

SEQ ID NO: 458727 - DNA, 60 bp, Artificial
  Synthetic oligonucleotide
tccaacctcggatctacttgcccacgattcattcggcccaatcgctagatgtgggactcg

SEQ ID NO: 458728 - DNA, 58 bp, Artificial
  Synthetic oligonucleotide
tccaacgaaacccaacatggtaatgcaagcaccataaaggcgcccgaagtgagccaag

SEQ ID NO: 458729 - DNA, 58 bp, Artificial
  Synthetic oligonucleotide
tccaacgacgcagcaggtcagagtccacaatagaatcattcttcgcacgcggggcgtg

SEQ ID NO: 458730 - DNA, 52 bp, Artificial
  Synthetic oligonucleotide
tccaacgacgggtcctagcacgagcagtttccatccgacgctagcgtacacg

SEQ ID NO: 458731 - DNA, 51 bp, Artificial
  Synthetic oligonucleotide
tccaacgagccctattacggaattttaacaccgaagggtcgaccctacaag

SEQ ID NO: 458732 - DNA, 53 bp, Artificial
  Synthetic oligonucleotide
tccaacgagcgctcttcatacacttcagaggaggatgtgctcactccagaatc

SEQ ID NO: 458733 - DNA, 58 bp, Artificial
  Synthetic oligonucleotide
tccaacgagtgatagtttacgttgttagatttgcatgttcaaatctaaaataagcaat

SEQ ID NO: 458734 - DNA, 53 bp, Artificial
  Synthetic oligonucleotide
tccaacgagtggagcacgtacaggggggtacgtcatccgtacaggggggtacg

SEQ ID NO: 458735 - DNA, 55 bp, Artificial
  Synthetic oligonucleotide
tccaacgcccggatgactcactatcaggccttgcttttggacacggaccgggtcc

SEQ ID NO: 458736 - DNA, 57 bp, Artificial
  Synthetic oligonucleotide
tccaacgctcttgtgacgagtgagcacaaccttagggaagcggacgccttctattcc

SEQ ID NO: 458737 - DNA, 51 bp, Artificial
  Synthetic oligonucleotide
tccaacgggtttcctgccaagcacctaaaacggtaggtgtgtactcttttc

SEQ ID NO: 458738 - DNA, 58 bp, Artificial
  Synthetic oligonucleotide
tccaacgtatagcgacacccagtctgcttccggaccgcgtgaccctgggccggtgcca

SEQ ID NO: 458739 - DNA, 60 bp, Artificial
  Synthetic oligonucleotide
tccaacgtgctggatacttaagttagcgattagcgaagctaggttctatgctcttgacgg

SEQ ID NO: 458740 - DNA, 53 bp, Artificial
  Synthetic oligonucleotide
tccaactaaatggaaaggacatcggttggaatagttacagaaaggagctacaa

SEQ ID NO: 458741 - DNA, 57 bp, Artificial
  Synthetic oligonucleotide
tccaactaattcccatgataagcaaatgtagaactaaagagggaaggcgaaagacca

SEQ ID NO: 458742 - DNA, 60 bp, Artificial
  Synthetic oligonucleotide
tccaactaccgcaccacaaactgaaagaatgatgcgcataaattggaaaaggtggtggca

SEQ ID NO: 458743 - DNA, 57 bp, Artificial
  Synthetic oligonucleotide
tccaactactgtccccttggttataacagtggcaaccctgagaacggctaagatgac

SEQ ID NO: 458744 - DNA, 60 bp, Artificial
  Synthetic oligonucleotide
tccaactcagagaacgggacatgctatcccggtgagttcatagattatgaggaattaagg

SEQ ID NO: 458745 - DNA, 60 bp, Artificial
  Synthetic oligonucleotide
tccaactgaagtccgtctgccccacgcagagtacgtgacacaactacactgtgcactagg

SEQ ID NO: 458746 - DNA, 60 bp, Artificial
  Synthetic oligonucleotide
tccaactggtattgagcctgatgaccatcttaaagagagatcaagcctcaggtatggaaa

SEQ ID NO: 458747 - DNA, 59 bp, Artificial
  Synthetic oligonucleotide
tccaactggttctccattggttcaaactcagttgtactctgattcgaggagcaaaagta

SEQ ID NO: 458748 - DNA, 57 bp, Artificial
  Synthetic oligonucleotide
tccaacttcaggaaactttgttttagctcgtggagctggcacaaaccactgggcttc

SEQ ID NO: 458749 - DNA, 56 bp, Artificial
  Synthetic oligonucleotide
tccaacttccaaactaagagcattactagtgtggtctctgagactagcacaattat

SEQ ID NO: 458750 - DNA, 54 bp, Artificial
  Synthetic oligonucleotide
tccaacttcgttcgtggtgaaagccaagaccgagtcagggttcgacccgcgtat

SEQ ID NO: 458751 - DNA, 55 bp, Artificial
  Synthetic oligonucleotide
tccaacttgatagcgaatcctggatcgagattaccgccacgcctaaaactattga

SEQ ID NO: 458752 - DNA, 60 bp, Artificial
  Synthetic oligonucleotide
tccaagaaacaggatttaacatacaggacatggacattgtggcctctgagcacttgctgc

SEQ ID NO: 458753 - DNA, 60 bp, Artificial
  Synthetic oligonucleotide
tccaagaacatagtctggacgtcaactctgcgctagtacagtgtttcactctcaacgcaa

SEQ ID NO: 458754 - DNA, 59 bp, Artificial
  Synthetic oligonucleotide
tccaagaccctattgatgtacgcggtgctcgttgggctggtgagagcttcaaagcgtta

SEQ ID NO: 458755 - DNA, 50 bp, Artificial
  Synthetic oligonucleotide
tccaagacctatcaatcttaacactaggactaccttaaggccgtctgtgt

SEQ ID NO: 458756 - DNA, 58 bp, Artificial
  Synthetic oligonucleotide
tccaagagtacaagtggagaacccgaaacatctccacgaggggatgttcttcagagcg

SEQ ID NO: 458757 - DNA, 60 bp, Artificial
  Synthetic oligonucleotide
tccaagagtacggctaatgttgtgctgatacaggttaactgccctacagacgtggtgagg

SEQ ID NO: 458758 - DNA, 55 bp, Artificial
  Synthetic oligonucleotide
tccaagagtgatgcaagctatggggcatagtacagaagatgtcacgcgctcaact

SEQ ID NO: 458759 - DNA, 60 bp, Artificial
  Synthetic oligonucleotide
tccaagatgtcatatagcaaatctaatcacaaatgtcgcgttatgcttaccaaccggaga

SEQ ID NO: 458760 - DNA, 60 bp, Artificial
  Synthetic oligonucleotide
tccaagattctggttttccatagtagacagactatgaatcagtctgctgtattctgtttc

SEQ ID NO: 458761 - DNA, 59 bp, Artificial
  Synthetic oligonucleotide
tccaagcaaccacaaatactcaaggccatgaaaacgaacttgcggctgaggattttgga

SEQ ID NO: 458762 - DNA, 60 bp, Artificial
  Synthetic oligonucleotide
tccaagcaagcaaagactgtaagactacgatcaacatagagagatttgagatggctgttc

SEQ ID NO: 458763 - DNA, 54 bp, Artificial
  Synthetic oligonucleotide
tccaagcattggacgatttgtatcagtcgtggcttgatgtgatctactatttcc

SEQ ID NO: 458764 - DNA, 55 bp, Artificial
  Synthetic oligonucleotide
tccaagccactccaagttgagtcttgcgacttcacttttgaagtccacctcctcc

SEQ ID NO: 458765 - DNA, 60 bp, Artificial
  Synthetic oligonucleotide
tccaagcctccgtagcatactgctaactaggcagttagcagtttccagctaactaggtaa

SEQ ID NO: 458766 - DNA, 57 bp, Artificial
  Synthetic oligonucleotide
tccaagcgatgtaccccgctccccctatggcttacagagacccaaatccaccaagac

SEQ ID NO: 458767 - DNA, 53 bp, Artificial
  Synthetic oligonucleotide
tccaagcggagtagcttctgcctttatattggaagctacagtgaatgtaattt

SEQ ID NO: 458768 - DNA, 56 bp, Artificial
  Synthetic oligonucleotide
tccaagctttagaaacgcaataaaagatttcttcaaagagtcggcgcgaaatgtaa

SEQ ID NO: 458769 - DNA, 55 bp, Artificial
  Synthetic oligonucleotide
tccaagctttgaccgcctgtagcagccgcgctttcggttgctccggtagtccgcc

SEQ ID NO: 458770 - DNA, 59 bp, Artificial
  Synthetic oligonucleotide
tccaaggaacagctgtcttccaaaccggtggacacgtctggcaacaagatgcctaagcc

SEQ ID NO: 458771 - DNA, 60 bp, Artificial
  Synthetic oligonucleotide
tccaaggaacgattaggatcatggtcctggcatgatggtgctgaaatcatctactttaag

SEQ ID NO: 458772 - DNA, 59 bp, Artificial
  Synthetic oligonucleotide
tccaaggaacggtcttggctcagactaacacgggatgggctcttctgctgttggtcgct

SEQ ID NO: 458773 - DNA, 60 bp, Artificial
  Synthetic oligonucleotide
tccaaggaattgggtcttttagcgagaagaatgacgcagagaagtagtggagatctatat

SEQ ID NO: 458774 - DNA, 58 bp, Artificial
  Synthetic oligonucleotide
tccaaggcacatggaatcaatcccaacgtcagaaccggaatccgaactgtgacgaccg

SEQ ID NO: 458775 - DNA, 58 bp, Artificial
  Synthetic oligonucleotide
tccaaggccgcgcagcggcactcttcacattctcagagacccagaccccaagttcctc

SEQ ID NO: 458776 - DNA, 59 bp, Artificial
  Synthetic oligonucleotide
tccaaggggagttaaggataacatctttggacagtgagaggttgggagagatcatgaaa

SEQ ID NO: 458777 - DNA, 55 bp, Artificial
  Synthetic oligonucleotide
tccaaggtaaagatgcaatcttgatccgcatgccaaaggattttcctccgtttgc

SEQ ID NO: 458778 - DNA, 59 bp, Artificial
  Synthetic oligonucleotide
tccaaggttacaggtggacaatatgcaagtaatgaacagtcgctggttaagcgattttg

SEQ ID NO: 458779 - DNA, 55 bp, Artificial
  Synthetic oligonucleotide
tccaagtaccgccatgacacaaaatgcgagcaacatgtcatctataacaaccgac

SEQ ID NO: 458780 - DNA, 55 bp, Artificial
  Synthetic oligonucleotide
tccaagtatcctttagtggttaggatttacatgagaatgaagcacgtcagggcgt

SEQ ID NO: 458781 - DNA, 58 bp, Artificial
  Synthetic oligonucleotide
tccaagtcggtagaatgagtctcgatgtcgcgagaccgagtgttgttaggcctccccc

SEQ ID NO: 458782 - DNA, 54 bp, Artificial
  Synthetic oligonucleotide
tccaagtcgtccagaaagtgaacgaacgtcctcggttccataaaggactaggac

SEQ ID NO: 458783 - DNA, 59 bp, Artificial
  Synthetic oligonucleotide
tccaagtcgtgatttctgttccgagcggtctcatttccaccttaaccagcggtatctga

SEQ ID NO: 458784 - DNA, 60 bp, Artificial
  Synthetic oligonucleotide
tccaagtgcttcctgatagatatcttatgccatgtggaacgacagaaccaaagatcaacc

SEQ ID NO: 458785 - DNA, 53 bp, Artificial
  Synthetic oligonucleotide
tccaagttagtcgggttcggaaacaatcaagtaaacctagcaataaacggtca

SEQ ID NO: 458786 - DNA, 60 bp, Artificial
  Synthetic oligonucleotide
tccaataacaggttctatggataccgcatatgcaaactctacacaacaagagaattctat

SEQ ID NO: 458787 - DNA, 60 bp, Artificial
  Synthetic oligonucleotide
tccaataccgagatgtactttgatcactgttctgggaccgtgcgctattaaggtcattga

SEQ ID NO: 458788 - DNA, 60 bp, Artificial
  Synthetic oligonucleotide
tccaatacgtgcgagagaagcacacatccagatgaaagcagcagcactgcgtggcgcaaa

SEQ ID NO: 458789 - DNA, 57 bp, Artificial
  Synthetic oligonucleotide
tccaatagtggtccaagattcaacttagctctacttttgggttctgtcaaattgaga

SEQ ID NO: 458790 - DNA, 59 bp, Artificial
  Synthetic oligonucleotide
tccaatatagaagttttacaccatgtacgatcaggaggaaggctggaatctccgaataa

SEQ ID NO: 458791 - DNA, 50 bp, Artificial
  Synthetic oligonucleotide
tccaatatcacaggactactcttgacacgtgatggaggaaatacaagtag

SEQ ID NO: 458792 - DNA, 53 bp, Artificial
  Synthetic oligonucleotide
tccaatatcccagaggaacttcccagcgttatcaagatgatgttggttctagc

SEQ ID NO: 458793 - DNA, 57 bp, Artificial
  Synthetic oligonucleotide
tccaatatctggggtgaaaagctccaaagtctattctgacgtgactccgtttagaag

SEQ ID NO: 458794 - DNA, 51 bp, Artificial
  Synthetic oligonucleotide
tccaatatttggttgggaatctgtttatgaaggaaactccaacgactcttc

SEQ ID NO: 458795 - DNA, 55 bp, Artificial
  Synthetic oligonucleotide
tccaatcacaagtaccattgtatctgcccaatgattagtgcagaggacccggatc

SEQ ID NO: 458796 - DNA, 60 bp, Artificial
  Synthetic oligonucleotide
tccaatcacgatgcctcatcaggggtgagctccgcatgtccatacaatgggaagtcctct

SEQ ID NO: 458797 - DNA, 60 bp, Artificial
  Synthetic oligonucleotide
tccaatcactggttctatggatgctgcatatgcaaactctacgcaacaagagaatttcat

SEQ ID NO: 458798 - DNA, 60 bp, Artificial
  Synthetic oligonucleotide
tccaatcagatacggaaccatagtctcaagattcaaggactgtgcagcacttgcgacatt

SEQ ID NO: 458799 - DNA, 58 bp, Artificial
  Synthetic oligonucleotide
tccaatcaggaaagtttgcctccagtgtttagaatggtagccaaggaatacgccaata

SEQ ID NO: 458800 - DNA, 59 bp, Artificial
  Synthetic oligonucleotide
tccaatcaggtcgcgtctgacgagtctagatatttgcaacaacttagggcccaagttgt

SEQ ID NO: 458801 - DNA, 60 bp, Artificial
  Synthetic oligonucleotide
tccaatcatgatgcctcatcaggagtgagctcggcatgcccatacattggtagatcttcc

SEQ ID NO: 458802 - DNA, 54 bp, Artificial
  Synthetic oligonucleotide
tccaatccatgcgtaaactctccccctaccggaacgggtgcctatacccaactc

SEQ ID NO: 458803 - DNA, 57 bp, Artificial
  Synthetic oligonucleotide
tccaatcctcggatgcccatacgatagtccccgtagtagtaacagcgaagaacaagg

SEQ ID NO: 458804 - DNA, 60 bp, Artificial
  Synthetic oligonucleotide
tccaatccttggtgcctaaagctgccagaggccagtatagtggatttgtaagaacgctat

SEQ ID NO: 458805 - DNA, 60 bp, Artificial
  Synthetic oligonucleotide
tccaatcctttaataccagtactatgcacttcactgatgagagaatagagtggaaagacc

SEQ ID NO: 458806 - DNA, 60 bp, Artificial
  Synthetic oligonucleotide
tccaatctgaatgatgccacataccagagaacaagggcacttgtgcgtactgggatggac

SEQ ID NO: 458807 - DNA, 57 bp, Artificial
  Synthetic oligonucleotide
tccaatctgggactactaacttctcggccacttctgttactctcgcgcctaacactt

SEQ ID NO: 458808 - DNA, 55 bp, Artificial
  Synthetic oligonucleotide
tccaatcttactgtgaatttgctggtccgtcctctccaagctgaattcatgggtc

SEQ ID NO: 458809 - DNA, 55 bp, Artificial
  Synthetic oligonucleotide
tccaatcttgcgcccgtttctttcacgcaacggatcactaattctgcagggaaaa

SEQ ID NO: 458810 - DNA, 60 bp, Artificial
  Synthetic oligonucleotide
tccaatgaagacagacctcgagctggacttttcactgccttcttcatcctcttacagtta

SEQ ID NO: 458811 - DNA, 55 bp, Artificial
  Synthetic oligonucleotide
tccaatgactacgcgcagatattagaccagttcgacctaaacatgtattttcgac

SEQ ID NO: 458812 - DNA, 60 bp, Artificial
  Synthetic oligonucleotide
tccaatgcagtggttaggttacactcttcatccagacaagtggcagttgcagaaaataga

SEQ ID NO: 458813 - DNA, 53 bp, Artificial
  Synthetic oligonucleotide
tccaatgcttaagggacactaactcacggcttggcctaggctccgaattgagg

SEQ ID NO: 458814 - DNA, 55 bp, Artificial
  Synthetic oligonucleotide
tccaatggacgtggctagatcgtcagccaacgtagttggaaacgtttcacagcga

SEQ ID NO: 458815 - DNA, 60 bp, Artificial
  Synthetic oligonucleotide
tccaatggactttggccaagtgttcaatatgtatgacaacgagcctagcactgctacgat

SEQ ID NO: 458816 - DNA, 55 bp, Artificial
  Synthetic oligonucleotide
tccaatggatactcagtacggggagattttgagtgctacctagtcgcgacaatca

SEQ ID NO: 458817 - DNA, 58 bp, Artificial
  Synthetic oligonucleotide
tccaatggatgaataggctcattgccttcgcttccaggggaaaccacgtcgcccccac

SEQ ID NO: 458818 - DNA, 52 bp, Artificial
  Synthetic oligonucleotide
tccaatggcgtcatgcacacgtcacgaggcacgttcctccagttaaaacgac

SEQ ID NO: 458819 - DNA, 57 bp, Artificial
  Synthetic oligonucleotide
tccaatgtagaaccgcgtaagcgtttctggataaatacgagagaacccataagtgaa

SEQ ID NO: 458820 - DNA, 56 bp, Artificial
  Synthetic oligonucleotide
tccaatgtgggtattgttactaattgtctggttgtccattgtacttttatttgagt

SEQ ID NO: 458821 - DNA, 60 bp, Artificial
  Synthetic oligonucleotide
tccaattaatgctatagatgactttgaatcactgatcagaaacattatactcgattatga

SEQ ID NO: 458822 - DNA, 57 bp, Artificial
  Synthetic oligonucleotide
tccaattactttagtaggccgtgtcgattccaatcctaaagtaatcactcttcagct

SEQ ID NO: 458823 - DNA, 60 bp, Artificial
  Synthetic oligonucleotide
tccaattaggtagtgagcaagcctgtaagaccgtggattccaatgattgtctagtcacca

SEQ ID NO: 458824 - DNA, 54 bp, Artificial
  Synthetic oligonucleotide
tccaattcaactcaattaacgcttttacagtgtaattcgtacttttcgtaagta

SEQ ID NO: 458825 - DNA, 60 bp, Artificial
  Synthetic oligonucleotide
tccaattcgcgtgtaatgggtgagtgagctgatgtggtcgccaggacatgtgccgatgtc

SEQ ID NO: 458826 - DNA, 58 bp, Artificial
  Synthetic oligonucleotide
tccaattctcacaatactgcgttcgggactggcggtagaatacgtgctatcccaaaaa

SEQ ID NO: 458827 - DNA, 60 bp, Artificial
  Synthetic oligonucleotide
tccaattgagtcagaggccgaacctagaggatctcccactgtccccaacatcctgaggaa

SEQ ID NO: 458828 - DNA, 60 bp, Artificial
  Synthetic oligonucleotide
tccaattgatagtaagtggaagagacgaacagtcaattgctgaagcaataattgtagcca

SEQ ID NO: 458829 - DNA, 60 bp, Artificial
  Synthetic oligonucleotide
tccaattgatgcgtccaccaaatatgacgccagccgtaaatgcattatttccgcaagccc

SEQ ID NO: 458830 - DNA, 60 bp, Artificial
  Synthetic oligonucleotide
tccaattgtcttcgacaatgacatgtatgttagcaaaaacataggctaaagatactattt

SEQ ID NO: 458831 - DNA, 60 bp, Artificial
  Synthetic oligonucleotide
tccaatttatttaggatcgatgcattatgatataacgtacgacactttgaagtcgaatgc

SEQ ID NO: 458832 - DNA, 52 bp, Artificial
  Synthetic oligonucleotide
tccaatttcttcatgtctgaggtccccatcactgcttcatcttccaccctag

SEQ ID NO: 458833 - DNA, 57 bp, Artificial
  Synthetic oligonucleotide
tccacaaacaatggtttctagacctaccactgccttggacctcgggagcttcaacaa

SEQ ID NO: 458834 - DNA, 54 bp, Artificial
  Synthetic oligonucleotide
tccacaaatcggcattctcgaatacatcctactcccatctctccacctctaaaa

SEQ ID NO: 458835 - DNA, 56 bp, Artificial
  Synthetic oligonucleotide
tccacaaccacccttggtgtcagaagttaagaccccctcagccaccaactccacca

SEQ ID NO: 458836 - DNA, 60 bp, Artificial
  Synthetic oligonucleotide
tccacaacctggtaaatgttgactagacttgataaatcataaatgcttgtgcaatggcca

SEQ ID NO: 458837 - DNA, 60 bp, Artificial
  Synthetic oligonucleotide
tccacaacgcacaccactccttcacgatcaagcacacaagctccgctaatcaactgccac

SEQ ID NO: 458838 - DNA, 59 bp, Artificial
  Synthetic oligonucleotide
tccacaacgtccataggaatgcaataggggactgccccaagtatgtgaatgttaaatcc

SEQ ID NO: 458839 - DNA, 55 bp, Artificial
  Synthetic oligonucleotide
tccacaagaattggcagcaaccgtcccacacaagtcaacactcagaagaagccag

SEQ ID NO: 458840 - DNA, 60 bp, Artificial
  Synthetic oligonucleotide
tccacaaggcgttagacaatgtccaggtactgtaggcgctgctcccagcctgaaaacact

SEQ ID NO: 458841 - DNA, 58 bp, Artificial
  Synthetic oligonucleotide
tccacaaggggctgtcatggggaggtactggggaggagctggctggaacgcccactta

SEQ ID NO: 458842 - DNA, 60 bp, Artificial
  Synthetic oligonucleotide
tccacaagtgtgataacaattgcattgagagcatccggaatggaacttatgatcacgaca

SEQ ID NO: 458843 - DNA, 60 bp, Artificial
  Synthetic oligonucleotide
tccacaattagaaggattttcagctgaatcaagaaagttgctccttattgttcaggctct

SEQ ID NO: 458844 - DNA, 60 bp, Artificial
  Synthetic oligonucleotide
tccacaattatactgtgattacaatgtagtactaatgaaatatgacgcgaatctacaact

SEQ ID NO: 458845 - DNA, 55 bp, Artificial
  Synthetic oligonucleotide
tccacacacgaactacccgaccccgataaataccctccaagaatacaaatcgcag

SEQ ID NO: 458846 - DNA, 59 bp, Artificial
  Synthetic oligonucleotide
tccacacccccacttcccgccagtacaaggacatgcgccgattcatcggctcatttcct

SEQ ID NO: 458847 - DNA, 57 bp, Artificial
  Synthetic oligonucleotide
tccacacccgcttccaaggttcgtcgccgtctgaacttcgccagcccgtatggcaac

SEQ ID NO: 458848 - DNA, 56 bp, Artificial
  Synthetic oligonucleotide
tccacacgtccaggctgtcaaactttccaggccgaatggcatctacccgcgaacac

SEQ ID NO: 458849 - DNA, 60 bp, Artificial
  Synthetic oligonucleotide
tccacactagtgctgggtacccatacagcgccctaggcattaagaagagggacatccttg

SEQ ID NO: 458850 - DNA, 56 bp, Artificial
  Synthetic oligonucleotide
tccacactcccgtcgttgtgttctccttggaccctcgttggactgacgccgacgcc

SEQ ID NO: 458851 - DNA, 55 bp, Artificial
  Synthetic oligonucleotide
tccacactccggtatggcaaggtacaatctgcccctaggtttgatccctcccggg

SEQ ID NO: 458852 - DNA, 51 bp, Artificial
  Synthetic oligonucleotide
tccacactgatgacaccgtcctcctgcctacggacaaactcccatgggcga

SEQ ID NO: 458853 - DNA, 58 bp, Artificial
  Synthetic oligonucleotide
tccacactggttcaaacaaacgcggctcaggaatgatcacaacccacaatggaaaaac

SEQ ID NO: 458854 - DNA, 54 bp, Artificial
  Synthetic oligonucleotide
tccacacttcggtatggcaaggttcagtccgcccccaggttcgatccctcccgg

SEQ ID NO: 458855 - DNA, 60 bp, Artificial
  Synthetic oligonucleotide
tccacagacgtggacagtatttcagtactcgagtctttgggcagtaccagcgatgtgcgc

SEQ ID NO: 458856 - DNA, 60 bp, Artificial
  Synthetic oligonucleotide
tccacagagcaatttgtggattgttatcagggcaggaaacgcacaatctaccaaaaagct

SEQ ID NO: 458857 - DNA, 60 bp, Artificial
  Synthetic oligonucleotide
tccacagctgagtctgggtctaatgcatcagcaaaacattggttacaatccccgttacaa

SEQ ID NO: 458858 - DNA, 55 bp, Artificial
  Synthetic oligonucleotide
tccacaggaggggacttagaaattacaacccatagctttaattgtggaggagagt

SEQ ID NO: 458859 - DNA, 60 bp, Artificial
  Synthetic oligonucleotide
tccacaggaggggtagaccgacacagcgatctcaaaatttcgctcgtcgtggaggcatgg

SEQ ID NO: 458860 - DNA, 59 bp, Artificial
  Synthetic oligonucleotide
tccacaggagtggggcctccggtgtgaataagccctcgtctggagcatcagacgttaaa

SEQ ID NO: 458861 - DNA, 60 bp, Artificial
  Synthetic oligonucleotide
tccacaggatcagttggcggaccctcaatatccatccagattgtgtctgatgagtctagc

SEQ ID NO: 458862 - DNA, 51 bp, Artificial
  Synthetic oligonucleotide
tccacaggatgtcccgagcgccttagcgcctgcaagtccatcacacaattc

SEQ ID NO: 458863 - DNA, 52 bp, Artificial
  Synthetic oligonucleotide
tccacaggattgcacgggacttgggctgtcagcaccctagtacagtcaactt

SEQ ID NO: 458864 - DNA, 55 bp, Artificial
  Synthetic oligonucleotide
tccacagggaaggtcgactctacgcctgcgaaccggtttcttcttggctattttg

SEQ ID NO: 458865 - DNA, 50 bp, Artificial
  Synthetic oligonucleotide
tccacaggttacacacgtttttccacgggttgccccggattttccacggg

SEQ ID NO: 458866 - DNA, 55 bp, Artificial
  Synthetic oligonucleotide
tccacagtagattcgattcgctcctcgatacagacctacccatggtccattccga

SEQ ID NO: 458867 - DNA, 60 bp, Artificial
  Synthetic oligonucleotide
tccacagtccagattccgccatgggtgatgactgagtatttagatgggaaatctgtgtct

SEQ ID NO: 458868 - DNA, 60 bp, Artificial
  Synthetic oligonucleotide
tccacagtccatgcggatggacgagtctgacaaccggcaacccatatcaacggtagaacc

SEQ ID NO: 458869 - DNA, 59 bp, Artificial
  Synthetic oligonucleotide
tccacagtctctcgaagcatgattctaatagccctcaacattaacattctggtacgatg

SEQ ID NO: 458870 - DNA, 60 bp, Artificial
  Synthetic oligonucleotide
tccacataaccaagtgtgatggatacatgaaaatagatttggatctaaacaatggtgtcg

SEQ ID NO: 458871 - DNA, 57 bp, Artificial
  Synthetic oligonucleotide
tccacatacagtaggtttaggccaagggtatgtaacaggatcagtgggaacaacacc

SEQ ID NO: 458872 - DNA, 55 bp, Artificial
  Synthetic oligonucleotide
tccacatatgccttgacatctgacgagcttttagctccctgaatgttcggatgga

SEQ ID NO: 458873 - DNA, 60 bp, Artificial
  Synthetic oligonucleotide
tccacatcaaataataaacctgcgcactaacaactgtgctacaatagtgttgccatatgt

SEQ ID NO: 458874 - DNA, 59 bp, Artificial
  Synthetic oligonucleotide
tccacatcactctctaacaggcgatacaactgttggtccacgtttaaagaccttgaatg

SEQ ID NO: 458875 - DNA, 60 bp, Artificial
  Synthetic oligonucleotide
tccacatcatatatcgtcctacgcattactaaaaacaggtccggctctaatcagtaaaca

SEQ ID NO: 458876 - DNA, 55 bp, Artificial
  Synthetic oligonucleotide
tccacatccataagatcaataggtaataacactacgatgcggattagtactgcca

SEQ ID NO: 458877 - DNA, 55 bp, Artificial
  Synthetic oligonucleotide
tccacatcccagaagtttgcttgaagtgggagctaatggatgaagattatcgggg

SEQ ID NO: 458878 - DNA, 60 bp, Artificial
  Synthetic oligonucleotide
tccacatctcgcaaacgccgaggctctgcttcaagtttacaacaatctctttagcaccga

SEQ ID NO: 458879 - DNA, 55 bp, Artificial
  Synthetic oligonucleotide
tccacattccggaggctggcttgaagtgggaattgatggatgaagactaccaggg

SEQ ID NO: 458880 - DNA, 50 bp, Artificial
  Synthetic oligonucleotide
tccacattctttgattggatcaggggtcttgttaagaaatctgaggatcc

SEQ ID NO: 458881 - DNA, 60 bp, Artificial
  Synthetic oligonucleotide
tccaccaaactcttcaagatcctcgagtcagggctctgtactttcctgctggtggctcca

SEQ ID NO: 458882 - DNA, 54 bp, Artificial
  Synthetic oligonucleotide
tccaccaaagctgctcagacttttgtcattttaagaagtaagaggtcagagcta

SEQ ID NO: 458883 - DNA, 52 bp, Artificial
  Synthetic oligonucleotide
tccaccaaatgggatatgaagataaccggggcagcgagagaattcaacctgt

SEQ ID NO: 458884 - DNA, 58 bp, Artificial
  Synthetic oligonucleotide
tccaccaacaattgaccatcttcgccgatggtcatctgccatatatcaaagacgaaaa

SEQ ID NO: 458885 - DNA, 60 bp, Artificial
  Synthetic oligonucleotide
tccaccaacctgcaatggctttcgctggatgtatctgcggcgttttatcatatacctgtt

SEQ ID NO: 458886 - DNA, 60 bp, Artificial
  Synthetic oligonucleotide
tccaccaatcggcagtcaggaaggcagcctaccccaatcactcctcctttgagagacact

SEQ ID NO: 458887 - DNA, 51 bp, Artificial
  Synthetic oligonucleotide
tccaccaatggagggtgagctaatcaatctagtctcctgcaaggattatcc

SEQ ID NO: 458888 - DNA, 55 bp, Artificial
  Synthetic oligonucleotide
tccaccaatgtgtcccccaatacatttgggggacattgggggctcggaaagagaa

SEQ ID NO: 458889 - DNA, 60 bp, Artificial
  Synthetic oligonucleotide
tccaccaccctactaatcaaagtattcttgtggcttgaggagagttatcagactgagatc

SEQ ID NO: 458890 - DNA, 60 bp, Artificial
  Synthetic oligonucleotide
tccaccacctccctctggaattgaggatcaatatagatttttgcaatctagagctacaag

SEQ ID NO: 458891 - DNA, 59 bp, Artificial
  Synthetic oligonucleotide
tccaccacctgtgcctaagcctagagcttgtaagaaggaagggtgttgctgtagtaata

SEQ ID NO: 458892 - DNA, 60 bp, Artificial
  Synthetic oligonucleotide
tccaccactctctctaacaggcgatataactgttggtccacgtttaaggatcttgatcac

SEQ ID NO: 458893 - DNA, 58 bp, Artificial
  Synthetic oligonucleotide
tccaccactctgaccactctgagtatttttacgttgatgcggttaatagagttaggcg

SEQ ID NO: 458894 - DNA, 55 bp, Artificial
  Synthetic oligonucleotide
tccaccacttctacctcggatttaaaagatcgtcatttccctcatagggagcgtg

SEQ ID NO: 458895 - DNA, 60 bp, Artificial
  Synthetic oligonucleotide
tccaccagggggcaattgagacgcttctcgtttcggatgcgcccacgagcgactcctctc

SEQ ID NO: 458896 - DNA, 55 bp, Artificial
  Synthetic oligonucleotide
tccaccagtacagtctgctcctcgtaggcgcacgtcgtgcagtacccgccgtagt

SEQ ID NO: 458897 - DNA, 53 bp, Artificial
  Synthetic oligonucleotide
tccaccagtcgccatgtactccccgtggtcccgaagcctccggtacgggctgg

SEQ ID NO: 458898 - DNA, 52 bp, Artificial
  Synthetic oligonucleotide
tccaccataacatctctaatcaggccctcacttactacttacatacgtctga

SEQ ID NO: 458899 - DNA, 55 bp, Artificial
  Synthetic oligonucleotide
tccaccataaccacgcaggaagcagcaaactcagtggtggcctacggtgtatggc

SEQ ID NO: 458900 - DNA, 51 bp, Artificial
  Synthetic oligonucleotide
tccaccatcacgacacaggaggcagctaacatagttatagcctatggggag

SEQ ID NO: 458901 - DNA, 60 bp, Artificial
  Synthetic oligonucleotide
tccaccatgataacagtcccctccggaggagtatgtgacctcatcaacacctatgcccga

SEQ ID NO: 458902 - DNA, 55 bp, Artificial
  Synthetic oligonucleotide
tccaccattactacgcaagagtgcgcaaacgtggttgtgggatacggcgtgtggc

SEQ ID NO: 458903 - DNA, 57 bp, Artificial
  Synthetic oligonucleotide
tccacccacaaagtgccacccccataaccgttcaagacacacatcccagtccaacga

SEQ ID NO: 458904 - DNA, 57 bp, Artificial
  Synthetic oligonucleotide
tccacccacaattaactactcgtgtactaacagtaccggatacgcctatcctgcact

SEQ ID NO: 458905 - DNA, 56 bp, Artificial
  Synthetic oligonucleotide
tccacccacagaagcgttgacgacgcaaaacgtccttaaagcgttgacgacgcaaa

SEQ ID NO: 458906 - DNA, 57 bp, Artificial
  Synthetic oligonucleotide
tccacccccaaaatcgcaaacgactacaccgctttcgaccaatcccagcatggagaa

SEQ ID NO: 458907 - DNA, 55 bp, Artificial
  Synthetic oligonucleotide
tccacccccaacttacgaacaggcgtgtgcctttggttccaattcttcgcttcca

SEQ ID NO: 458908 - DNA, 59 bp, Artificial
  Synthetic oligonucleotide
tccaccccgaggatgtgtgggaccagtggtttcccctcattctcagagcatgtaataaa

SEQ ID NO: 458909 - DNA, 56 bp, Artificial
  Synthetic oligonucleotide
tccacccctcctgtttcgtttgttagtctgtcaagccccgtcacttccactcttga

SEQ ID NO: 458910 - DNA, 53 bp, Artificial
  Synthetic oligonucleotide
tccacccgacacaaaagagaaccggtgtcgttaacattggccctattgttggg

SEQ ID NO: 458911 - DNA, 55 bp, Artificial
  Synthetic oligonucleotide
tccacccggcagggtactgtccgcttcagtcggttgggacgccgggccacgcttc

SEQ ID NO: 458912 - DNA, 57 bp, Artificial
  Synthetic oligonucleotide
tccacccggctgactactttcctctttcagccgagtttctcacacggacccggcatg

SEQ ID NO: 458913 - DNA, 58 bp, Artificial
  Synthetic oligonucleotide
tccaccctcaatcgacgctaaagctcccacacaagagaggggaacgcgatgttccaac

SEQ ID NO: 458914 - DNA, 55 bp, Artificial
  Synthetic oligonucleotide
tccaccctctacgtccacgcgggccacactcctttcgagatggccgactggtgcc

SEQ ID NO: 458915 - DNA, 57 bp, Artificial
  Synthetic oligonucleotide
tccacccttggttacgatcttctaagcgatctcatcggagttgttcgtcgtaccaac

SEQ ID NO: 458916 - DNA, 60 bp, Artificial
  Synthetic oligonucleotide
tccaccgattccagccttagtatgcgagaacctttatctcatgcctccattcaggagatg

SEQ ID NO: 458917 - DNA, 56 bp, Artificial
  Synthetic oligonucleotide
tccaccgcccaggagggcgttgtgactgtggtagccttgacagtatatccgaaggt

SEQ ID NO: 458918 - DNA, 55 bp, Artificial
  Synthetic oligonucleotide
tccaccgcttattcattgagcttcctacattgttaggacgcggtgcgattccagg

SEQ ID NO: 458919 - DNA, 58 bp, Artificial
  Synthetic oligonucleotide
tccaccggactcacaactaagatcggggccgttgcttcccgccgctggatgagtcgga

SEQ ID NO: 458920 - DNA, 56 bp, Artificial
  Synthetic oligonucleotide
tccacctaagatgattagccgatccaacggaaatcacccgttgggtggtgcgcggt

SEQ ID NO: 458921 - DNA, 60 bp, Artificial
  Synthetic oligonucleotide
tccacctagacgtagcagcacacctttacaggccacacgagctgcaggtagacggagagg

SEQ ID NO: 458922 - DNA, 56 bp, Artificial
  Synthetic oligonucleotide
tccacctattcctatctactaggaactcgcgaggtaagtttcacacccaattacta

SEQ ID NO: 458923 - DNA, 55 bp, Artificial
  Synthetic oligonucleotide
tccacctcaacggaacatcggcccattaccaacacaattttgttcaagcattgtc

SEQ ID NO: 458924 - DNA, 59 bp, Artificial
  Synthetic oligonucleotide
tccacctcaacttgatctgaggggttcacataggacttgtctattatgcggagggttgt

SEQ ID NO: 458925 - DNA, 58 bp, Artificial
  Synthetic oligonucleotide
tccacctcccgccgcagggggcggcttgacagtggatcagattatgggggtaggacaa

SEQ ID NO: 458926 - DNA, 55 bp, Artificial
  Synthetic oligonucleotide
tccacctcctagaacgcgtcacctcatccgcccgatggctatccaaaaccgccac

SEQ ID NO: 458927 - DNA, 60 bp, Artificial
  Synthetic oligonucleotide
tccacctcgataaccattcgaggcgtctctcacaccagcattctctcgtcgccatcactc

SEQ ID NO: 458928 - DNA, 60 bp, Artificial
  Synthetic oligonucleotide
tccacctctaagagacagtcatcctcaggccatgcagtggaattccactgccttccacca

SEQ ID NO: 458929 - DNA, 53 bp, Artificial
  Synthetic oligonucleotide
tccacctctggatcaggatggaaagtgtaatacaagtggtggcggcagttcgt

SEQ ID NO: 458930 - DNA, 56 bp, Artificial
  Synthetic oligonucleotide
tccacctgacctggtgtttgatcgtgatacccctggtgttcacatcttcggacgag

SEQ ID NO: 458931 - DNA, 58 bp, Artificial
  Synthetic oligonucleotide
tccacctgcctgcatcccctaaaaaggtgttacttccctactacgacgctatagcaga

SEQ ID NO: 458932 - DNA, 55 bp, Artificial
  Synthetic oligonucleotide
tccacctgtacagcgacgagcatcacgtgtacattgcccgcagtgtgtcgcggcg

SEQ ID NO: 458933 - DNA, 59 bp, Artificial
  Synthetic oligonucleotide
tccaccttaatgaatctgtaccaattgtgtgtacaagacctggcaataatacaagaaaa

SEQ ID NO: 458934 - DNA, 60 bp, Artificial
  Synthetic oligonucleotide
tccaccttctgggctaaagattggcccacaatacatgagtctgtgttgtccaatagacga

SEQ ID NO: 458935 - DNA, 54 bp, Artificial
  Synthetic oligonucleotide
tccacctttaatttgaactggcttcccgtattttgtgttgctttgccagtccct

SEQ ID NO: 458936 - DNA, 56 bp, Artificial
  Synthetic oligonucleotide
tccacgactccattaaggaggagctccgacccctcatccaacagacctcatttgtg

SEQ ID NO: 458937 - DNA, 55 bp, Artificial
  Synthetic oligonucleotide
tccacgacttgagagatgcgttttcctctttggctaggaaatctttatagctggc

SEQ ID NO: 458938 - DNA, 55 bp, Artificial
  Synthetic oligonucleotide
tccacgagatccctggcgaagtgttgttgcaaacgggaccggtaggcgcggaacc

SEQ ID NO: 458939 - DNA, 53 bp, Artificial
  Synthetic oligonucleotide
tccacgagatttgtgagcggattcttacctcttgtctgggacgatctgcggag

SEQ ID NO: 458940 - DNA, 52 bp, Artificial
  Synthetic oligonucleotide
tccacgaggtgccgaaaatcgcacgacggccctcccacgggcctccgacctg

SEQ ID NO: 458941 - DNA, 60 bp, Artificial
  Synthetic oligonucleotide
tccacgatgagatacactactgggattacgatagcctcacaacctttctcgagatcgtca

SEQ ID NO: 458942 - DNA, 60 bp, Artificial
  Synthetic oligonucleotide
tccacgattcaaacacgcagtgcaaatacttgataggtatgaacagtcacttaacggtga

SEQ ID NO: 458943 - DNA, 60 bp, Artificial
  Synthetic oligonucleotide
tccacgattccaatgtcagaagtctccatgagaaggttagaaggatgctaaaagacaatg

SEQ ID NO: 458944 - DNA, 60 bp, Artificial
  Synthetic oligonucleotide
tccacgattttactatgccttcagtgaccgtggtctcattttatgcgcccgagcaacaca

SEQ ID NO: 458945 - DNA, 58 bp, Artificial
  Synthetic oligonucleotide
tccacgcaacgacggtcatctctttttcgcattgaactcatacgaatagtagtatcat

SEQ ID NO: 458946 - DNA, 60 bp, Artificial
  Synthetic oligonucleotide
tccacgcaacgctccggctcgcatgaaaactctaactcagctactgagggctccaccata

SEQ ID NO: 458947 - DNA, 60 bp, Artificial
  Synthetic oligonucleotide
tccacgcaattgtcgatattgtcccacggaagtgaatccttcaactcgctaccaaagagc

SEQ ID NO: 458948 - DNA, 60 bp, Artificial
  Synthetic oligonucleotide
tccacgcacaacaacacgccacatgcactgcgtaaacgtgcttcggccacacaactatac

SEQ ID NO: 458949 - DNA, 60 bp, Artificial
  Synthetic oligonucleotide
tccacgccgaacggacttcttgagttccgcactggagcagccgagatatatggcggccaa

SEQ ID NO: 458950 - DNA, 58 bp, Artificial
  Synthetic oligonucleotide
tccacgccgggcctacctgtctgtcaagaccatttagacttttgggagagcgtcttca

SEQ ID NO: 458951 - DNA, 55 bp, Artificial
  Synthetic oligonucleotide
tccacgcggaaaacagccaggcaactggctcgttcagttgttggtgagggagcgt

SEQ ID NO: 458952 - DNA, 50 bp, Artificial
  Synthetic oligonucleotide
tccacgctccgggggacgggagtaggttcgacacacgcgtacatcacgac

SEQ ID NO: 458953 - DNA, 55 bp, Artificial
  Synthetic oligonucleotide
tccacggaacccctaacccctcatgtgatcccgagaagttgtgctttatgacccc

SEQ ID NO: 458954 - DNA, 60 bp, Artificial
  Synthetic oligonucleotide
tccacggaagtgtgaagccatatgatgagtacgttaacactgtatttacaactggtatgt

SEQ ID NO: 458955 - DNA, 52 bp, Artificial
  Synthetic oligonucleotide
tccacggagtgtatacaacgacttctatcatataaacgctagagccgtggta

SEQ ID NO: 458956 - DNA, 57 bp, Artificial
  Synthetic oligonucleotide
tccacgggaacgctacatttgggcgtcgcatatatatagcctatcggtccgccgcaa

SEQ ID NO: 458957 - DNA, 55 bp, Artificial
  Synthetic oligonucleotide
tccacgggtacaatccggaatgtggaaacgcggaagtcctcagcaactacttaag

SEQ ID NO: 458958 - DNA, 54 bp, Artificial
  Synthetic oligonucleotide
tccacgggtgggacctccgacggggcatgtttagcgcgtcaagtattaaaagaa

SEQ ID NO: 458959 - DNA, 59 bp, Artificial
  Synthetic oligonucleotide
tccacgtagaatccttccggcccctgaatgtggctaatcctaaccccgcagctattgca

SEQ ID NO: 458960 - DNA, 55 bp, Artificial
  Synthetic oligonucleotide
tccacgtagtttcacgtgaggatcagaccacctcgcggcactggggcatttcatc

SEQ ID NO: 458961 - DNA, 57 bp, Artificial
  Synthetic oligonucleotide
tccacgtcccaatatttggatgacgggctctactcagggtcctcagggtcctccgac

SEQ ID NO: 458962 - DNA, 60 bp, Artificial
  Synthetic oligonucleotide
tccacgtccccgcttacatcatctgttgcctcgggcaccaatctggtcctctatgctgcc

SEQ ID NO: 458963 - DNA, 53 bp, Artificial
  Synthetic oligonucleotide
tccacgtccgtttcgcgtggagagcaccctgatctggtggtcaaaccatcagg

SEQ ID NO: 458964 - DNA, 52 bp, Artificial
  Synthetic oligonucleotide
tccacgtcgggggccaccgccagacctagcacccccaagaaaaaagctttac

SEQ ID NO: 458965 - DNA, 57 bp, Artificial
  Synthetic oligonucleotide
tccactaaccttgttgaacattggttgtataaaccagatgataactttgaaatggac

SEQ ID NO: 458966 - DNA, 54 bp, Artificial
  Synthetic oligonucleotide
tccactaatgagtaacgtaaatatggatagtgaatacgttgatgcattaaagat

SEQ ID NO: 458967 - DNA, 55 bp, Artificial
  Synthetic oligonucleotide
tccactacctacctttcccgcttggcccagatgtatgcaaattacagaggatctg

SEQ ID NO: 458968 - DNA, 60 bp, Artificial
  Synthetic oligonucleotide
tccactagaaaacactatgcgtgcgcacacggctggctatgtcctatcatagctgggggc

SEQ ID NO: 458969 - DNA, 55 bp, Artificial
  Synthetic oligonucleotide
tccactagatcacctttcagagaaggaggatgcataatgtctgagtcagcagcac

SEQ ID NO: 458970 - DNA, 50 bp, Artificial
  Synthetic oligonucleotide
tccactaggaggtggctttttcctaacgtcccctggagttctgcattact

SEQ ID NO: 458971 - DNA, 59 bp, Artificial
  Synthetic oligonucleotide
tccactagtaaacgccatcgaatgcggtacgcaggacgtaactgtggacctttatcaca

SEQ ID NO: 458972 - DNA, 60 bp, Artificial
  Synthetic oligonucleotide
tccactataaacccaatagtagacctggcagatgaggctaggagctcctcactggtaaca

SEQ ID NO: 458973 - DNA, 59 bp, Artificial
  Synthetic oligonucleotide
tccactattacggtaccggaggcgtttataggtacctgctgtctgtattctatgacaca

SEQ ID NO: 458974 - DNA, 59 bp, Artificial
  Synthetic oligonucleotide
tccactccaactgagctccttgtggcccaagattcaccgggccttagttcgattgccga

SEQ ID NO: 458975 - DNA, 54 bp, Artificial
  Synthetic oligonucleotide
tccactccaaggtggagttacccaatgacgctgttgtggaaattgccgcgtcgt

SEQ ID NO: 458976 - DNA, 55 bp, Artificial
  Synthetic oligonucleotide
tccactcccgcctccaaagtacgccggaggttgaacttcgacagcccctaccgca

SEQ ID NO: 458977 - DNA, 53 bp, Artificial
  Synthetic oligonucleotide
tccactcctacaccattggccacacactgatcacaaatggtatcaatagtctc

SEQ ID NO: 458978 - DNA, 60 bp, Artificial
  Synthetic oligonucleotide
tccactcgggtgtcctcctggttgtcctctgttgagcccttccatccatccgcattgcag

SEQ ID NO: 458979 - DNA, 59 bp, Artificial
  Synthetic oligonucleotide
tccactcgtctccaccgtcaaccctgacggttccctaaccatgcatgaaagcgtggtga

SEQ ID NO: 458980 - DNA, 58 bp, Artificial
  Synthetic oligonucleotide
tccactctcccgcggttggagaccaacaggtgggaggggctatcgtcgacgtgatgtg

SEQ ID NO: 458981 - DNA, 56 bp, Artificial
  Synthetic oligonucleotide
tccactctctaaatcaatccttgacaatgttggaaagcacaaaaaggataaagggt

SEQ ID NO: 458982 - DNA, 58 bp, Artificial
  Synthetic oligonucleotide
tccactgagggtgcggagaaatcacctccagaagaaccccttcagcgaacagaagagt

SEQ ID NO: 458983 - DNA, 55 bp, Artificial
  Synthetic oligonucleotide
tccactgatcgcctactttgaaggaacgaggctgatggttacggagccaggcgtc

SEQ ID NO: 458984 - DNA, 60 bp, Artificial
  Synthetic oligonucleotide
tccactgctatggtgcttgtacaaagtatgaatatccatggcatactgccaaatgccact

SEQ ID NO: 458985 - DNA, 56 bp, Artificial
  Synthetic oligonucleotide
tccactggaaccccgagctcacatagagcccccaccttacataccagacctacttt

SEQ ID NO: 458986 - DNA, 60 bp, Artificial
  Synthetic oligonucleotide
tccactggagcacttgccagttgcatgggcctcatatacaacagaatgggaactgtgacc

SEQ ID NO: 458987 - DNA, 60 bp, Artificial
  Synthetic oligonucleotide
tccactggcaatatgagataaccgaaccagtcaagaccacttacgatgacggctacatat

SEQ ID NO: 458988 - DNA, 51 bp, Artificial
  Synthetic oligonucleotide
tccactgggcagaccaggagaaggagtctgccgtgccatctataaacgtgg

SEQ ID NO: 458989 - DNA, 53 bp, Artificial
  Synthetic oligonucleotide
tccactggggcaatctttcgaaaattggagtcgtagggacgggtagtgctagt

SEQ ID NO: 458990 - DNA, 52 bp, Artificial
  Synthetic oligonucleotide
tccactggtaacgtacctgtgggtacagtcgccatgattacccacaccaaga

SEQ ID NO: 458991 - DNA, 55 bp, Artificial
  Synthetic oligonucleotide
tccactggtttctttggttagagaaccaggttgctgccgtttggtttgccgttgc

SEQ ID NO: 458992 - DNA, 52 bp, Artificial
  Synthetic oligonucleotide
tccactgtccgaatgggattcatgacgtttttgaatcacgtggtccactccc

SEQ ID NO: 458993 - DNA, 60 bp, Artificial
  Synthetic oligonucleotide
tccacttcagggcttcagctgatcaatgttactcaacaccctgctaggatagcagagaca

SEQ ID NO: 458994 - DNA, 55 bp, Artificial
  Synthetic oligonucleotide
tccacttcgtttgagtaaaccctattattgaagtccagatgtccacttaagtaat

SEQ ID NO: 458995 - DNA, 54 bp, Artificial
  Synthetic oligonucleotide
tccacttctaaacgaattcccagaaaacgtccacggtttccgttgtatgctagc

SEQ ID NO: 458996 - DNA, 55 bp, Artificial
  Synthetic oligonucleotide
tccacttctgaaatgagcatcatttatgtcgtacaggagaagccctctgggtttc

SEQ ID NO: 458997 - DNA, 60 bp, Artificial
  Synthetic oligonucleotide
tccacttgacgttggaaattcctcaatccaagataaagcgtcacatgatgtgttcataat

SEQ ID NO: 458998 - DNA, 59 bp, Artificial
  Synthetic oligonucleotide
tccacttgactgcctggggactttttggtgacattccggtgtgtgacaaacaagtgcat

SEQ ID NO: 458999 - DNA, 60 bp, Artificial
  Synthetic oligonucleotide
tccacttgcatcggatctcgaggacctggctttagagccttggagcacaccaaatactcc

SEQ ID NO: 459000 - DNA, 54 bp, Artificial
  Synthetic oligonucleotide
tccacttgctactaacttcatcgagcgaggtatccctcccgatgccttctaaga

SEQ ID NO: 459001 - DNA, 55 bp, Artificial
  Synthetic oligonucleotide
tccacttgctgttgaaaggttttaagcctggcgtcatatatcgggactgtgtgcc

SEQ ID NO: 459002 - DNA, 50 bp, Artificial
  Synthetic oligonucleotide
tccacttgtgcataccctaagtgtaattattggaagactgaagcggaata

SEQ ID NO: 459003 - DNA, 53 bp, Artificial
  Synthetic oligonucleotide
tccactttgtatctatcttgaatctttctcaactggacactattatccacttg

SEQ ID NO: 459004 - DNA, 54 bp, Artificial
  Synthetic oligonucleotide
tccagaaacctcccaccggcgggtttcgcccgggcaaacatcaagttcgagcac

SEQ ID NO: 459005 - DNA, 57 bp, Artificial
  Synthetic oligonucleotide
tccagaaacttccgatatggtaccgtctgaatatacgttggcagataggtacgttac

SEQ ID NO: 459006 - DNA, 58 bp, Artificial
  Synthetic oligonucleotide
tccagaaaggaactcgcaggaacagacgctcgcaggcgaaaagacaaaggagtagtaa

SEQ ID NO: 459007 - DNA, 50 bp, Artificial
  Synthetic oligonucleotide
tccagaaattgactatgaattccctgggcttatgccttttgtcaggttta

SEQ ID NO: 459008 - DNA, 60 bp, Artificial
  Synthetic oligonucleotide
tccagaacagcataacaatagagagaatggttctctctgcatttgatgaaaggaggaaca

SEQ ID NO: 459009 - DNA, 59 bp, Artificial
  Synthetic oligonucleotide
tccagaactaagacaacttgcacagactttggtggacacaaaggttaaagagatatcaa

SEQ ID NO: 459010 - DNA, 54 bp, Artificial
  Synthetic oligonucleotide
tccagaactagcgcatgaagtgctttctaacatgtcaaacagcgctactaggtc

SEQ ID NO: 459011 - DNA, 55 bp, Artificial
  Synthetic oligonucleotide
tccagaagagggaacagctggggtggaatctgcggtactgagagggttcctaatt

SEQ ID NO: 459012 - DNA, 56 bp, Artificial
  Synthetic oligonucleotide
tccagaagataatagtaacccaggattactatcccttctaggaaaacctcaagaga

SEQ ID NO: 459013 - DNA, 59 bp, Artificial
  Synthetic oligonucleotide
tccagaagcggctttgagatgatttgggatccgaatgggtggactgaaacggacagtag

SEQ ID NO: 459014 - DNA, 50 bp, Artificial
  Synthetic oligonucleotide
tccagaatcagtacaattaaacaaagttacgtggcatcagcagtgactcc

SEQ ID NO: 459015 - DNA, 53 bp, Artificial
  Synthetic oligonucleotide
tccagaatcggatatggttgatgtgcctaaactagatatcgttagcgcgctta

SEQ ID NO: 459016 - DNA, 55 bp, Artificial
  Synthetic oligonucleotide
tccagaatctacggggtgtgttatggagtatactgaggagcaatcagggccgatc

SEQ ID NO: 459017 - DNA, 51 bp, Artificial
  Synthetic oligonucleotide
tccagaatgctggcccagctgacgttctcggcccaacggtcgatgtgcgtt

SEQ ID NO: 459018 - DNA, 59 bp, Artificial
  Synthetic oligonucleotide
tccagaattcgttatggtccataatacagccatatctacgtttattacattccccagtc

SEQ ID NO: 459019 - DNA, 60 bp, Artificial
  Synthetic oligonucleotide
tccagaattgtaagattgctcccctaatggtggcatacatgttggaaagagaactggtac

SEQ ID NO: 459020 - DNA, 53 bp, Artificial
  Synthetic oligonucleotide
tccagacaacaccaggagtgtttaaaaccccattcgggactattggagccctt

SEQ ID NO: 459021 - DNA, 51 bp, Artificial
  Synthetic oligonucleotide
tccagacacagcggcagttagcctccttggtggtcctgctaccaacaggga

SEQ ID NO: 459022 - DNA, 56 bp, Artificial
  Synthetic oligonucleotide
tccagacaccggaggccaaattccaggacaagcctcctattaagtggcttgggtac

SEQ ID NO: 459023 - DNA, 54 bp, Artificial
  Synthetic oligonucleotide
tccagacacctacaggatgataggagggtcatttccggaagggatctaccgact

SEQ ID NO: 459024 - DNA, 58 bp, Artificial
  Synthetic oligonucleotide
tccagacacgatctttcgcattcaggtttgcccctaactctagtagcacctgtatgat

SEQ ID NO: 459025 - DNA, 55 bp, Artificial
  Synthetic oligonucleotide
tccagaccacccaacactcctttcgtaccgcgccatgggaaggatcccggattac

SEQ ID NO: 459026 - DNA, 60 bp, Artificial
  Synthetic oligonucleotide
tccagaccactagccgggtcttccgttcgctattctggggcgagcctgccattgggcaga

SEQ ID NO: 459027 - DNA, 56 bp, Artificial
  Synthetic oligonucleotide
tccagaccctgaagttgagaaaacacttgtgaatccccaatgccttccgaaggttg

SEQ ID NO: 459028 - DNA, 60 bp, Artificial
  Synthetic oligonucleotide
tccagacgaaatgaaccgtgcgttctggttcctttgggcgatctacaatcgtatgcctga

SEQ ID NO: 459029 - DNA, 55 bp, Artificial
  Synthetic oligonucleotide
tccagacgacgccaccgtccttgtgccttcaagagtagagcaggccaagcttata

SEQ ID NO: 459030 - DNA, 58 bp, Artificial
  Synthetic oligonucleotide
tccagacgagacattatttacacactctttggaaggcggggatcttatataaaagaga

SEQ ID NO: 459031 - DNA, 60 bp, Artificial
  Synthetic oligonucleotide
tccagacggagctccctctgaagaggtgtctgttgagtttgttacttacggtgctgaaga

SEQ ID NO: 459032 - DNA, 57 bp, Artificial
  Synthetic oligonucleotide
tccagacgttgttcaaaccatcgtgaggtggtgaggcctctcatcattgcgggtcgg

SEQ ID NO: 459033 - DNA, 60 bp, Artificial
  Synthetic oligonucleotide
tccagactaaacagacaagagattgagggagtgaaactggattccaatggcaacgtctac

SEQ ID NO: 459034 - DNA, 52 bp, Artificial
  Synthetic oligonucleotide
tccagactacaaccctcccgtgatcgagacatggaagaggccggactatgaa

SEQ ID NO: 459035 - DNA, 59 bp, Artificial
  Synthetic oligonucleotide
tccagactctccttgcacgaggtggatcccagcacgtatttcccgtacgaggatccgcg

SEQ ID NO: 459036 - DNA, 56 bp, Artificial
  Synthetic oligonucleotide
tccagacttggaagttcaggtaggctttgtggagacccaacgctttcctcaggttg

SEQ ID NO: 459037 - DNA, 60 bp, Artificial
  Synthetic oligonucleotide
tccagagaagctctctcgacgcaggactcggcttgctgaggtgcacacagcaagaggcga

SEQ ID NO: 459038 - DNA, 60 bp, Artificial
  Synthetic oligonucleotide
tccagagaatcagagactagtctgggctattagaggcttagaattttgcagaggtcaacc

SEQ ID NO: 459039 - DNA, 57 bp, Artificial
  Synthetic oligonucleotide
tccagagaccgaccaactctttcgaattcatggacaggcttgtggaatgtgctacta

SEQ ID NO: 459040 - DNA, 59 bp, Artificial
  Synthetic oligonucleotide
tccagagacgagctatattaggcgcgttaaagtttgggtgcaagatacttggagatcgg

SEQ ID NO: 459041 - DNA, 60 bp, Artificial
  Synthetic oligonucleotide
tccagagagtttgcacggctttagatgtatgcttgcgatcaagtatcttcaaagcttaca

SEQ ID NO: 459042 - DNA, 55 bp, Artificial
  Synthetic oligonucleotide
tccagagattccgatgatagctccgccttttccagctgtcccgagtctccgactg

SEQ ID NO: 459043 - DNA, 59 bp, Artificial
  Synthetic oligonucleotide
tccagagcctaaaacgaaagtttatcctgagtcccttgcatagggatgtggcagaacta

SEQ ID NO: 459044 - DNA, 55 bp, Artificial
  Synthetic oligonucleotide
tccagagcgtgtcattctagccggaccgatgccagtgactgtggctagtgccgcc

SEQ ID NO: 459045 - DNA, 60 bp, Artificial
  Synthetic oligonucleotide
tccagaggaccccttcagcgaacagaaggctctctcacgcggtaggagaaagaccatagc

SEQ ID NO: 459046 - DNA, 59 bp, Artificial
  Synthetic oligonucleotide
tccagaggacccgtcgtgattttcgatgactacggcaaacttccgcagggatacattga

SEQ ID NO: 459047 - DNA, 55 bp, Artificial
  Synthetic oligonucleotide
tccagaggacttgagtaccataagaaatggaaagaccacaaagacctgactggtg

SEQ ID NO: 459048 - DNA, 60 bp, Artificial
  Synthetic oligonucleotide
tccagaggatcatggccctcaatggcacaatttgctaggcaagctggagaagcttacgaa

SEQ ID NO: 459049 - DNA, 55 bp, Artificial
  Synthetic oligonucleotide
tccagaggctggcagtctggacaccttattcatgccccaccgcctgttagccgtt

SEQ ID NO: 459050 - DNA, 55 bp, Artificial
  Synthetic oligonucleotide
tccagagggctatttggagcaattgccggattcattgagggaggatggacaggca

SEQ ID NO: 459051 - DNA, 59 bp, Artificial
  Synthetic oligonucleotide
tccagaggtaaccacgtcgccccgactcactacgtggcggagtctgatgcgtcgcagcg

SEQ ID NO: 459052 - DNA, 57 bp, Artificial
  Synthetic oligonucleotide
tccagagtactataaagactgctgacgaaggagtttctaactaaaaacatccgctgg

SEQ ID NO: 459053 - DNA, 59 bp, Artificial
  Synthetic oligonucleotide
tccagagtatccctgactagctcctctgtcccgttgaagtcgaatggtggaaccatttg

SEQ ID NO: 459054 - DNA, 60 bp, Artificial
  Synthetic oligonucleotide
tccagagttatttgggctggagaagatagcatgctcttcattacgagttagagatagtca

SEQ ID NO: 459055 - DNA, 60 bp, Artificial
  Synthetic oligonucleotide
tccagagttctaccaagactgagactgctgacacagaaactgctgacacaggaagtgctg

SEQ ID NO: 459056 - DNA, 59 bp, Artificial
  Synthetic oligonucleotide
tccagagttctatgtagttcttgtcaagcgccacgatcagtacgttcggaggtcaacct

SEQ ID NO: 459057 - DNA, 60 bp, Artificial
  Synthetic oligonucleotide
tccagatacacattagcgtactcggatatcgtcttacatgccgagcataaccaacattgg

SEQ ID NO: 459058 - DNA, 59 bp, Artificial
  Synthetic oligonucleotide
tccagatacgggaggaggataagatccatattcctactctccgttcgattactgcaggg

SEQ ID NO: 459059 - DNA, 55 bp, Artificial
  Synthetic oligonucleotide
tccagatactttggggtacgacttaatccgggatttaatatcagtcatcagggcc

SEQ ID NO: 459060 - DNA, 58 bp, Artificial
  Synthetic oligonucleotide
tccagatatcgacgtggttctatctataatcaaccacgtggttaccctcgtagccacg

SEQ ID NO: 459061 - DNA, 55 bp, Artificial
  Synthetic oligonucleotide
tccagatcgtaagatcattggggagacatccctttcttacttatttgagcgcgag

SEQ ID NO: 459062 - DNA, 60 bp, Artificial
  Synthetic oligonucleotide
tccagatctcagcgacgggtcatggtcaacggtcaatagcggggccgacacggaggatgt

SEQ ID NO: 459063 - DNA, 60 bp, Artificial
  Synthetic oligonucleotide
tccagatcttaaagctttggtcgagtactcaccagcatggtatccgtttgccttgcgaat

SEQ ID NO: 459064 - DNA, 56 bp, Artificial
  Synthetic oligonucleotide
tccagatgaaaaccttaggggctttagtctaaagctaagtgctgaaaatgacttta

SEQ ID NO: 459065 - DNA, 59 bp, Artificial
  Synthetic oligonucleotide
tccagatgcatagatttacccaacggtacgggccaacaggtattcaaacacgctgacga

SEQ ID NO: 459066 - DNA, 60 bp, Artificial
  Synthetic oligonucleotide
tccagatgtccacacaagtagttgtgtggtcccagagatcgggcccatatcgtcttccct

SEQ ID NO: 459067 - DNA, 55 bp, Artificial
  Synthetic oligonucleotide
tccagattaataattgcgagcagtaactttcttgctgccaaccctgagtcaggag

SEQ ID NO: 459068 - DNA, 51 bp, Artificial
  Synthetic oligonucleotide
tccagattcactcgaatgatcttagaaatggtggagcgaatgctttgttca

SEQ ID NO: 459069 - DNA, 60 bp, Artificial
  Synthetic oligonucleotide
tccagcaaacgttcaagtaagaagaatcacattccaggatgttgaggaatatattaggga

SEQ ID NO: 459070 - DNA, 52 bp, Artificial
  Synthetic oligonucleotide
tccagcaacgtgatgattcacgtcaacacgtttgcgcgccacacggccaatg

SEQ ID NO: 459071 - DNA, 55 bp, Artificial
  Synthetic oligonucleotide
tccagcaactgaagaactatctcctaggttcagagaatgtggtagagaagatcct

SEQ ID NO: 459072 - DNA, 60 bp, Artificial
  Synthetic oligonucleotide
tccagcaatagatatgctggagaataatcttagcagttccaaagactccatatctgtgga

SEQ ID NO: 459073 - DNA, 60 bp, Artificial
  Synthetic oligonucleotide
tccagcactagctgcattgacggcgttgtggtagacgtcgtctttgtttgattttgtacc

SEQ ID NO: 459074 - DNA, 58 bp, Artificial
  Synthetic oligonucleotide
tccagcactggtctaaaagacgatcttcttgaaaatttacaggcctatcagaaacgaa

SEQ ID NO: 459075 - DNA, 57 bp, Artificial
  Synthetic oligonucleotide
tccagcagaataagcatctattggacaatagtaaaaccgggagacatacttctgatt

SEQ ID NO: 459076 - DNA, 60 bp, Artificial
  Synthetic oligonucleotide
tccagcagagaaccccagcttcgaggagacaacccccgctccgaagcaggagctgagaga

SEQ ID NO: 459077 - DNA, 60 bp, Artificial
  Synthetic oligonucleotide
tccagcagagcgactcaaaatccttagaatattagctgaccaacaagaaagctttcagaa

SEQ ID NO: 459078 - DNA, 60 bp, Artificial
  Synthetic oligonucleotide
tccagcagatatagtcatttctactcccgcctccaaggtacgtcgccggctgaacttcga

SEQ ID NO: 459079 - DNA, 55 bp, Artificial
  Synthetic oligonucleotide
tccagcatccagggaattagtagtcagctatgcccctatcttatcaacacttccg

SEQ ID NO: 459080 - DNA, 60 bp, Artificial
  Synthetic oligonucleotide
tccagcatccagggatctagtagtcaattatgttaatactcacatgggcctaaagatcag

SEQ ID NO: 459081 - DNA, 60 bp, Artificial
  Synthetic oligonucleotide
tccagccagcagaagaagtaagaaccagcatctccaggacctagaaaaacataaggcaat

SEQ ID NO: 459082 - DNA, 60 bp, Artificial
  Synthetic oligonucleotide
tccagccagctagagcagcggcaacacgagacagggtgagatcgtctcttccaggatttc

SEQ ID NO: 459083 - DNA, 60 bp, Artificial
  Synthetic oligonucleotide
tccagcccagtgtggcctcacctatcctgatgcttttgagcgcaaaagggacatcctggt

SEQ ID NO: 459084 - DNA, 55 bp, Artificial
  Synthetic oligonucleotide
tccagccctacccaaacgcgcgttcgattaaccgcccacgcgccaaactctccga

SEQ ID NO: 459085 - DNA, 57 bp, Artificial
  Synthetic oligonucleotide
tccagccctatcgtcaatatcgccaacgagacacaagccaagggaggctcttctaat

SEQ ID NO: 459086 - DNA, 57 bp, Artificial
  Synthetic oligonucleotide
tccagccctttgattcgcccctcaaaatggtgagtcgctccagccaccccctgttac

SEQ ID NO: 459087 - DNA, 55 bp, Artificial
  Synthetic oligonucleotide
tccagccggtactactgtttccgaactcaagaacgattggtctttcatttgggag

SEQ ID NO: 459088 - DNA, 51 bp, Artificial
  Synthetic oligonucleotide
tccagcctacttcagagcagtgtaaagaaagcatcaagcaaacaaaacaag

SEQ ID NO: 459089 - DNA, 55 bp, Artificial
  Synthetic oligonucleotide
tccagcctggctgggtcgcgcactgactcctctcgtgggctgcgcggaagacgca

SEQ ID NO: 459090 - DNA, 54 bp, Artificial
  Synthetic oligonucleotide
tccagccttctgataccttgttgttcctaggccctttagaacaaggggggattc

SEQ ID NO: 459091 - DNA, 56 bp, Artificial
  Synthetic oligonucleotide
tccagcgagaagagccaggtataagagacaagttcacaacctcactcaggttatca

SEQ ID NO: 459092 - DNA, 60 bp, Artificial
  Synthetic oligonucleotide
tccagcgcaaaatgccataagcaccacattcccgtatactggagatcctccatacagcca

SEQ ID NO: 459093 - DNA, 54 bp, Artificial
  Synthetic oligonucleotide
tccagcgctcgtacccgcttaccatctgggctcttaccagatccagggtagcgg

SEQ ID NO: 459094 - DNA, 60 bp, Artificial
  Synthetic oligonucleotide
tccagcgctggtgatggatgggaaaccagtaattcttgagtcgtcgcaggaaaggcttga

SEQ ID NO: 459095 - DNA, 60 bp, Artificial
  Synthetic oligonucleotide
tccagcgttcgtaatgatgatgacattgcgaagatatgtgccagaacgtttaaccgagca

SEQ ID NO: 459096 - DNA, 53 bp, Artificial
  Synthetic oligonucleotide
tccagcgttgtttacgcggtcgtgtaatagttccggtcggtaagatttcctcc

SEQ ID NO: 459097 - DNA, 60 bp, Artificial
  Synthetic oligonucleotide
tccagctacagaaattagagatgaaatatgccgttgaatgcttatggccattaagccaca

SEQ ID NO: 459098 - DNA, 59 bp, Artificial
  Synthetic oligonucleotide
tccagctacgacaggtcctgggtcaccacgcagatctcgctgctgcagttgtctcacga

SEQ ID NO: 459099 - DNA, 60 bp, Artificial
  Synthetic oligonucleotide
tccagctattcgaccagagttggtcccgacaaaatggtggcacgttactcatagatgccc

SEQ ID NO: 459100 - DNA, 60 bp, Artificial
  Synthetic oligonucleotide
tccagctcagacatgcctcaagtggaaacccaatgaggtgccaactgtggtttggtgtgg

SEQ ID NO: 459101 - DNA, 57 bp, Artificial
  Synthetic oligonucleotide
tccagctctgtcggcccggagacccgggccgacagagcgccccccagtccgcggcaa

SEQ ID NO: 459102 - DNA, 60 bp, Artificial
  Synthetic oligonucleotide
tccagctggttatgcgatactaaaatgtaatgataaacagttcaatggaacaggatcatg

SEQ ID NO: 459103 - DNA, 58 bp, Artificial
  Synthetic oligonucleotide
tccagctggttatgcgattctaaagtgtaaggatacagaattcaacgggacggggaca

SEQ ID NO: 459104 - DNA, 60 bp, Artificial
  Synthetic oligonucleotide
tccagctggttatgcgattctaaagtgtaatgagaaaaatttcacagggacagggtcatg

SEQ ID NO: 459105 - DNA, 60 bp, Artificial
  Synthetic oligonucleotide
tccagctggttatgcgattctacagtgtagggataaacagttcaatgggacagggccatg

SEQ ID NO: 459106 - DNA, 59 bp, Artificial
  Synthetic oligonucleotide
tccagctgtgagctgatgatacccaagggcactggagacattttagtggattgctcagg

SEQ ID NO: 459107 - DNA, 60 bp, Artificial
  Synthetic oligonucleotide
tccagctgtgtgctgtgcgtgccatggattagccagacacactacaggttcgtgcatact

SEQ ID NO: 459108 - DNA, 55 bp, Artificial
  Synthetic oligonucleotide
tccaggaaattccccccggcactgcctgtatgggcacggccggactacaaccctc

SEQ ID NO: 459109 - DNA, 58 bp, Artificial
  Synthetic oligonucleotide
tccaggaaattcccccgagcgatgcccatatgggcgcgcccagattacaaccctccac

SEQ ID NO: 459110 - DNA, 55 bp, Artificial
  Synthetic oligonucleotide
tccaggaacgcgtctagccaatcacagtcgcaaggtaagctgaggaccgtctcgg

SEQ ID NO: 459111 - DNA, 56 bp, Artificial
  Synthetic oligonucleotide
tccaggaattagagtaaagcaaatgtgtaaactccttaggggagctaagtcactaa

SEQ ID NO: 459112 - DNA, 57 bp, Artificial
  Synthetic oligonucleotide
tccaggacctagcaggttggaaaagctacgtgaagcgagaggcaacgtacttaaaga

SEQ ID NO: 459113 - DNA, 55 bp, Artificial
  Synthetic oligonucleotide
tccaggacgacacagctggttgggatactagattacatgatgatgttttggagtg

SEQ ID NO: 459114 - DNA, 60 bp, Artificial
  Synthetic oligonucleotide
tccaggactgtaaaattgcccccttgatggtagcatacatgctagaaagagagttggtcc

SEQ ID NO: 459115 - DNA, 55 bp, Artificial
  Synthetic oligonucleotide
tccaggagaaagatttgtatggtgtggtttacctcaaggatgggtattaagtccc

SEQ ID NO: 459116 - DNA, 60 bp, Artificial
  Synthetic oligonucleotide
tccaggaggctattgcctcaccaagtggatgctggttgctgcagatatgaaatgctttgg

SEQ ID NO: 459117 - DNA, 60 bp, Artificial
  Synthetic oligonucleotide
tccaggagtgccgtagtcctgtcggaagctttagtgtgagcctctcacgaataagctcga

SEQ ID NO: 459118 - DNA, 60 bp, Artificial
  Synthetic oligonucleotide
tccaggataaccaagttgcctatctcataattgggatcttgacattgctatcagttgtgg

SEQ ID NO: 459119 - DNA, 50 bp, Artificial
  Synthetic oligonucleotide
tccaggatgagtcttagaccgtttagcggtacctctagaactctaactca

SEQ ID NO: 459120 - DNA, 60 bp, Artificial
  Synthetic oligonucleotide
tccaggattacagctgcacttgcaggttatacttgccaagccactgaagtggttgaggag

SEQ ID NO: 459121 - DNA, 55 bp, Artificial
  Synthetic oligonucleotide
tccaggattcgaatcatgtcgagtcggtcgctgaatgccaggcggtgtcctgcat

SEQ ID NO: 459122 - DNA, 60 bp, Artificial
  Synthetic oligonucleotide
tccaggattgtaaaattgcccctttgatggtggcatacatgctggaaagagaattggtcc

SEQ ID NO: 459123 - DNA, 55 bp, Artificial
  Synthetic oligonucleotide
tccaggcaccccgtacccagtccgactgatctagcttacggagcatctcaacagg

SEQ ID NO: 459124 - DNA, 55 bp, Artificial
  Synthetic oligonucleotide
tccaggcatcacaaatctgacctgctcactggatgccggacctcttgtcgtgggc

SEQ ID NO: 459125 - DNA, 50 bp, Artificial
  Synthetic oligonucleotide
tccaggcatctcttcgtatccctcatgttgctgtaccaaacctacggacg

SEQ ID NO: 459126 - DNA, 50 bp, Artificial
  Synthetic oligonucleotide
tccaggcccaagtatgggtcacagtagcaaatgccatgactgcgtatgag

SEQ ID NO: 459127 - DNA, 57 bp, Artificial
  Synthetic oligonucleotide
tccaggccttatttggacatttaccgatggcacgcctatgatttccgggccctgccc

SEQ ID NO: 459128 - DNA, 60 bp, Artificial
  Synthetic oligonucleotide
tccaggcgaactgccggaacttcatgtagaaggtgatctcggcctggtagaattcatctt

SEQ ID NO: 459129 - DNA, 54 bp, Artificial
  Synthetic oligonucleotide
tccaggcgggtgcaaacaatgcggtttgatgtcccagatccgtagtggaccagg

SEQ ID NO: 459130 - DNA, 55 bp, Artificial
  Synthetic oligonucleotide
tccagggagtaaatcggatgaagacattcacccatattccctcaaaatgcgcctt

SEQ ID NO: 459131 - DNA, 55 bp, Artificial
  Synthetic oligonucleotide
tccagggataggagagccccttcaccccaacgtgcgggctcccctctcccacgtc

SEQ ID NO: 459132 - DNA, 56 bp, Artificial
  Synthetic oligonucleotide
tccagggatttgtatcgttcaagaacaaaattcgtcttggtggattgaagaagaaa

SEQ ID NO: 459133 - DNA, 55 bp, Artificial
  Synthetic oligonucleotide
tccagggcagttagctaattcgttagtgaattacaggattgtcggatacggagtg

SEQ ID NO: 459134 - DNA, 51 bp, Artificial
  Synthetic oligonucleotide
tccagggccgtttgcacaaacgagttatgctccagttaactggggtcctgg

SEQ ID NO: 459135 - DNA, 57 bp, Artificial
  Synthetic oligonucleotide
tccaggggaggtttatgatgacccgattgatctgattgagtcagaagccgagccgaa

SEQ ID NO: 459136 - DNA, 51 bp, Artificial
  Synthetic oligonucleotide
tccaggggtggggaactccatccaaaagacagacttaagaaaggtcccacg

SEQ ID NO: 459137 - DNA, 55 bp, Artificial
  Synthetic oligonucleotide
tccagggtcgtggatcagttccgtttgtggtgaacggtgtctgaaaccctgtagt

SEQ ID NO: 459138 - DNA, 58 bp, Artificial
  Synthetic oligonucleotide
tccaggtaagatggtaatgggtctgtgagtgatgggtcgtggattatgagcagttgga

SEQ ID NO: 459139 - DNA, 56 bp, Artificial
  Synthetic oligonucleotide
tccaggtaccgtacttgggtgttgacagacacgaccaggggactcgccacaaggcg

SEQ ID NO: 459140 - DNA, 60 bp, Artificial
  Synthetic oligonucleotide
tccaggtaggatggtgatgcgcctgtgggttatgggtcgttgactatgagtagatggagt

SEQ ID NO: 459141 - DNA, 52 bp, Artificial
  Synthetic oligonucleotide
tccaggtccaaaacgcatcactgggtacgaggcctggagggatgaatatgaa

SEQ ID NO: 459142 - DNA, 60 bp, Artificial
  Synthetic oligonucleotide
tccaggtggaatgtgactagatctggaacgagtaaagcatgcaatgcatcaacaggtggc

SEQ ID NO: 459143 - DNA, 52 bp, Artificial
  Synthetic oligonucleotide
tccaggtggtcccaaggcgggtgagccgttcaagcccacacgcgagcaggga

SEQ ID NO: 459144 - DNA, 58 bp, Artificial
  Synthetic oligonucleotide
tccaggttaccatattgggccggagtacgtcagaatgtggtaggatctacagtggacg

SEQ ID NO: 459145 - DNA, 58 bp, Artificial
  Synthetic oligonucleotide
tccaggttacgacaccctgctagaaaatgtactgaagtgcccctcacgtcgacagaaa

SEQ ID NO: 459146 - DNA, 57 bp, Artificial
  Synthetic oligonucleotide
tccaggtttagaagttcataaatttttagataaatgttgtcgtgaagttcctgctca

SEQ ID NO: 459147 - DNA, 58 bp, Artificial
  Synthetic oligonucleotide
tccaggtttttaattcgtgcatttcctgatcctgttactgagggtctcagcttttgga

SEQ ID NO: 459148 - DNA, 56 bp, Artificial
  Synthetic oligonucleotide
tccagtaagatcgcgagtttgcatcagcgctcaaatgttacagtatacggaggcac

SEQ ID NO: 459149 - DNA, 56 bp, Artificial
  Synthetic oligonucleotide
tccagtaatatttagaccaaatgacgttcaaatcgattttctactaaatggccaag

SEQ ID NO: 459150 - DNA, 58 bp, Artificial
  Synthetic oligonucleotide
tccagtacctttatggcgtcgggtccgcagtggtgtcgtgggcactcaagtgggagta

SEQ ID NO: 459151 - DNA, 52 bp, Artificial
  Synthetic oligonucleotide
tccagtagattcaagcgggacgtacaagttgttagcccgctcaccatgggac

SEQ ID NO: 459152 - DNA, 60 bp, Artificial
  Synthetic oligonucleotide
tccagtatagtgtatgagtctgaccaccacatcttgcacttaccggggtgtgtaccctgt

SEQ ID NO: 459153 - DNA, 58 bp, Artificial
  Synthetic oligonucleotide
tccagtatgcctttccacaatgttcatccccttaccattgggaagtgccccaagtatg

SEQ ID NO: 459154 - DNA, 60 bp, Artificial
  Synthetic oligonucleotide
tccagtcaagccttcttctaagcgtgctggcgcattctaccggagggtcacaatcatcga

SEQ ID NO: 459155 - DNA, 60 bp, Artificial
  Synthetic oligonucleotide
tccagtcattcgagtccagacacgatgtggtccatataggtaaggtcatgtgcatctctg

SEQ ID NO: 459156 - DNA, 55 bp, Artificial
  Synthetic oligonucleotide
tccagtccggaaaagcctctggttgatttaagtccacgattatctgcagttcata

SEQ ID NO: 459157 - DNA, 60 bp, Artificial
  Synthetic oligonucleotide
tccagtcctctgaagacatgtactcatgtctgtgattttccttctcttgctggtaatcca

SEQ ID NO: 459158 - DNA, 59 bp, Artificial
  Synthetic oligonucleotide
tccagtcctgttccacagcgtggtcgcaacagttaacaccaccggatggtgaaccatta

SEQ ID NO: 459159 - DNA, 60 bp, Artificial
  Synthetic oligonucleotide
tccagtcgaactgcacctagccaagagatcacggaagactgatgtaaccagaggcttggc

SEQ ID NO: 459160 - DNA, 60 bp, Artificial
  Synthetic oligonucleotide
tccagtcgaagcatcaaatgaaatagccgatactgaatggaagaacacactatcacaact

SEQ ID NO: 459161 - DNA, 59 bp, Artificial
  Synthetic oligonucleotide
tccagtcgccgagacagttgttcttcattaataattctccgataggggcagcacgtttc

SEQ ID NO: 459162 - DNA, 50 bp, Artificial
  Synthetic oligonucleotide
tccagtcgctgggagagtagtatacaagagtggtatgagaagtcacacac

SEQ ID NO: 459163 - DNA, 60 bp, Artificial
  Synthetic oligonucleotide
tccagtcttatgagcagagggatgatgttaagcatactggtattgttcgttgtgttagtg

SEQ ID NO: 459164 - DNA, 60 bp, Artificial
  Synthetic oligonucleotide
tccagtcttctagagcccacgcaattgtggctttgactcgccacacggagaagtgtgtgg

SEQ ID NO: 459165 - DNA, 55 bp, Artificial
  Synthetic oligonucleotide
tccagtgaaacctcaagtaccacttagaccaatgagttacaagctagcaatagac

SEQ ID NO: 459166 - DNA, 57 bp, Artificial
  Synthetic oligonucleotide
tccagtgccttttcgagcaactgataacaactcagcagggggtccacaaaaacccat

SEQ ID NO: 459167 - DNA, 58 bp, Artificial
  Synthetic oligonucleotide
tccagtgctggtctgaaagatgaccttcttgaaaatttgcaggcctaccagaaacgga

SEQ ID NO: 459168 - DNA, 55 bp, Artificial
  Synthetic oligonucleotide
tccagtggaaccatcagcaccactgcccggacaataaggcatcctcgaatgcccc

SEQ ID NO: 459169 - DNA, 60 bp, Artificial
  Synthetic oligonucleotide
tccagtggagactaggagcatatagcacacaggtagacccacaagtagctgatcaattaa

SEQ ID NO: 459170 - DNA, 55 bp, Artificial
  Synthetic oligonucleotide
tccagtgggtgagataaactccagtatgcccttccacaatatacaccctcacacc

SEQ ID NO: 459171 - DNA, 52 bp, Artificial
  Synthetic oligonucleotide
tccagtgtatgctactttgaagatcagaatctatttttatgattctgttcag

SEQ ID NO: 459172 - DNA, 55 bp, Artificial
  Synthetic oligonucleotide
tccagtgtgcatcttacacagccaaccgtatttgtcccacaccttatcttcgtac

SEQ ID NO: 459173 - DNA, 56 bp, Artificial
  Synthetic oligonucleotide
tccagtgtgttgatagtcgtaatgggcaactgtgggatggaaccaactactttggg

SEQ ID NO: 459174 - DNA, 58 bp, Artificial
  Synthetic oligonucleotide
tccagtgttggaaattgtagtcccaccgagttcgcttggaaagtgacacacaattgcc

SEQ ID NO: 459175 - DNA, 60 bp, Artificial
  Synthetic oligonucleotide
tccagttaatgcgcccgccaaatatgacaccagctgttaatgcactatttccacaagcac

SEQ ID NO: 459176 - DNA, 60 bp, Artificial
  Synthetic oligonucleotide
tccagttcaggaacagtgagccctgttccggctactgcctctcacatctcgtcaaccttc

SEQ ID NO: 459177 - DNA, 52 bp, Artificial
  Synthetic oligonucleotide
tccagttccagcatcacagaccaggaccggcggtgctattgcacgcaatggt

SEQ ID NO: 459178 - DNA, 54 bp, Artificial
  Synthetic oligonucleotide
tccagttctgtaaactacatacctttgttttccctcaaatcattagtaaaacac

SEQ ID NO: 459179 - DNA, 54 bp, Artificial
  Synthetic oligonucleotide
tccagttgacgctcgtactttgcaatcagctacatctgccttggccgctgatac

SEQ ID NO: 459180 - DNA, 60 bp, Artificial
  Synthetic oligonucleotide
tccagttgcccaaagatcatacaacaatacaagcggagagcaaatgctgataatttgggg

SEQ ID NO: 459181 - DNA, 58 bp, Artificial
  Synthetic oligonucleotide
tccagtttcctacttgtgtgaagaatgtgttcggtagagataatcctaagttgcgaag

SEQ ID NO: 459182 - DNA, 60 bp, Artificial
  Synthetic oligonucleotide
tccataaacgcgagctatgcggatttgtctatacaagacccatataaggatcgattcaca

SEQ ID NO: 459183 - DNA, 55 bp, Artificial
  Synthetic oligonucleotide
tccataataaggctcccacaaaagacaacgtcaaatgcctaggatcctcggggcg

SEQ ID NO: 459184 - DNA, 60 bp, Artificial
  Synthetic oligonucleotide
tccataatcacacgcagcgtattcaagaatgagaacacccttgctcgtgtgacagggctc

SEQ ID NO: 459185 - DNA, 59 bp, Artificial
  Synthetic oligonucleotide
tccataatggggcttccatgaagttgccgcaacaggggggtcacacgtcctacgtgaca

SEQ ID NO: 459186 - DNA, 58 bp, Artificial
  Synthetic oligonucleotide
tccataattacaggtgaatcgtatggagagtcagttaaacaagcggttcttctcaacg

SEQ ID NO: 459187 - DNA, 60 bp, Artificial
  Synthetic oligonucleotide
tccatacaagcggatttcgaatctaggatatccacattagagcgcacggcggtcactagc

SEQ ID NO: 459188 - DNA, 60 bp, Artificial
  Synthetic oligonucleotide
tccataccagcccctggcacgcacctagctcccaatgaaggacctcagtcctctgctatc

SEQ ID NO: 459189 - DNA, 53 bp, Artificial
  Synthetic oligonucleotide
tccataccccccaccctccgaccagtttatgtccttggggtcacctactggcc

SEQ ID NO: 459190 - DNA, 52 bp, Artificial
  Synthetic oligonucleotide
tccatacggggatttatcttcgtcgacagaagtggttaaatcgtcagagact

SEQ ID NO: 459191 - DNA, 55 bp, Artificial
  Synthetic oligonucleotide
tccatacgtgcaccagtattcaagctctcttacgggtggtgtataactccttggt

SEQ ID NO: 459192 - DNA, 50 bp, Artificial
  Synthetic oligonucleotide
tccatactacgcagttatgaaaagtggctcaggcaaaaaagtgtctgtgc

SEQ ID NO: 459193 - DNA, 60 bp, Artificial
  Synthetic oligonucleotide
tccatactatggcattatcacagcctagccacacttatgacattgtcacaatgatggtca

SEQ ID NO: 459194 - DNA, 60 bp, Artificial
  Synthetic oligonucleotide
tccatactgttttacacactgtgaactcacggaatccgcatttcaggcacactatagagt

SEQ ID NO: 459195 - DNA, 55 bp, Artificial
  Synthetic oligonucleotide
tccatactttcacccggaagcaagtcatatccacacccaatacaaccgcctttcc

SEQ ID NO: 459196 - DNA, 55 bp, Artificial
  Synthetic oligonucleotide
tccatagaatggaggcaggggaagtataggacacaaatagaccctggcctggcag

SEQ ID NO: 459197 - DNA, 60 bp, Artificial
  Synthetic oligonucleotide
tccatagagacccagtttggaccccttacatgcatgcgtctcactggtgaacctggcacc

SEQ ID NO: 459198 - DNA, 59 bp, Artificial
  Synthetic oligonucleotide
tccatagatctgatctttcaaataccttgtgatagaataacctttaataaggacttgaa

SEQ ID NO: 459199 - DNA, 55 bp, Artificial
  Synthetic oligonucleotide
tccatagcctaactgcaatttcaggtgatctcaatgtgttcacatccataccacc

SEQ ID NO: 459200 - DNA, 60 bp, Artificial
  Synthetic oligonucleotide
tccataggaaaactactgaggagcccaccacagtagaattatgcttgacattttcagaca

SEQ ID NO: 459201 - DNA, 60 bp, Artificial
  Synthetic oligonucleotide
tccataggaattcagtgtgattatttcttctgcgaggttggaacacacataacccattgt

SEQ ID NO: 459202 - DNA, 59 bp, Artificial
  Synthetic oligonucleotide
tccatagtagggcaggaatctcaagttgcattgtatgtgtggtacttcctcctgatgtc

SEQ ID NO: 459203 - DNA, 51 bp, Artificial
  Synthetic oligonucleotide
tccatagtgctcaaagctaagccccaccattgataggcatctccggatttt

SEQ ID NO: 459204 - DNA, 60 bp, Artificial
  Synthetic oligonucleotide
tccatagttgtgacagtcaagggagatgtatagtgaacagccgcaacgcagatcaaccct

SEQ ID NO: 459205 - DNA, 58 bp, Artificial
  Synthetic oligonucleotide
tccatatattttttaggtaaggtctggatggacgaaaatatcaagaagcagaaccata

SEQ ID NO: 459206 - DNA, 54 bp, Artificial
  Synthetic oligonucleotide
tccatatcagcatcaagctgcatacatgatgacactcagtgtattagatgctac

SEQ ID NO: 459207 - DNA, 59 bp, Artificial
  Synthetic oligonucleotide
tccatatcatgtgtggagtgggctgcttagtcgcttattagttgaaaattaggggggtc

SEQ ID NO: 459208 - DNA, 60 bp, Artificial
  Synthetic oligonucleotide
tccatatgatcaaccattaacatctgacatgtccaaagcatggtatcctatatatgaaca

SEQ ID NO: 459209 - DNA, 60 bp, Artificial
  Synthetic oligonucleotide
tccatatgtcaatgtggcaccctccagctcttggacacaacacgcaaattggactcttgt

SEQ ID NO: 459210 - DNA, 60 bp, Artificial
  Synthetic oligonucleotide
tccatattagcccgttatcaggaagtgctcaacatgtagaggagtgttcctgttatcccc

SEQ ID NO: 459211 - DNA, 60 bp, Artificial
  Synthetic oligonucleotide
tccatattcagcatcattcactctgaatagatcacagccagcacatgataatttgatggg

SEQ ID NO: 459212 - DNA, 54 bp, Artificial
  Synthetic oligonucleotide
tccatcaaggattggcacaacgtgccttccaacgagcatggacgctctccgata

SEQ ID NO: 459213 - DNA, 60 bp, Artificial
  Synthetic oligonucleotide
tccatcaaggcatgtgattctgcgatgtgttatgggtctaccacgactaacctaatgaga

SEQ ID NO: 459214 - DNA, 55 bp, Artificial
  Synthetic oligonucleotide
tccatcaagggactttactaatagcaacgataccagaacatcagctggccactgc

SEQ ID NO: 459215 - DNA, 51 bp, Artificial
  Synthetic oligonucleotide
tccatcaattcttatcacatggccaatgcctcactatgtttacgattcagt

SEQ ID NO: 459216 - DNA, 56 bp, Artificial
  Synthetic oligonucleotide
tccatcacctacgctgagccgcatggcttggaccagaggccctattgttggcacta

SEQ ID NO: 459217 - DNA, 58 bp, Artificial
  Synthetic oligonucleotide
tccatcacgtccttcgaaactcttctcggggacaatatactcaagcgccttttcagac

SEQ ID NO: 459218 - DNA, 53 bp, Artificial
  Synthetic oligonucleotide
tccatcactgtcccccatcctaacataacagagacagccctcccgactacggg

SEQ ID NO: 459219 - DNA, 50 bp, Artificial
  Synthetic oligonucleotide
tccatcagagacacactggtaaacgcctgtgacgtgtcagacaagttgac

SEQ ID NO: 459220 - DNA, 55 bp, Artificial
  Synthetic oligonucleotide
tccatcagagatagaggaagccaataaaggagagaacaactgtctattacacccc

SEQ ID NO: 459221 - DNA, 60 bp, Artificial
  Synthetic oligonucleotide
tccatcagtgtgacaacaactgcattgaaagcataagaaacgggacatatgaccatgata

SEQ ID NO: 459222 - DNA, 60 bp, Artificial
  Synthetic oligonucleotide
tccatcatactcatcaactagtatattggctgcttcagaagacggtcgtttcatatttag

SEQ ID NO: 459223 - DNA, 60 bp, Artificial
  Synthetic oligonucleotide
tccatcatgaggatgtctataacttgtaccatatcttcttgcctgaattccccaattgta

SEQ ID NO: 459224 - DNA, 57 bp, Artificial
  Synthetic oligonucleotide
tccatcatttaaattagtggtatgacgtcacatgttaagttaacggtttctgcgaag

SEQ ID NO: 459225 - DNA, 55 bp, Artificial
  Synthetic oligonucleotide
tccatcatttcaggttataactgaatccacacctgctcaaggtgaaagttcactg

SEQ ID NO: 459226 - DNA, 55 bp, Artificial
  Synthetic oligonucleotide
tccatccacgccaccatcctggaagccgacaagggaatgcgcgtcgctgacactc

SEQ ID NO: 459227 - DNA, 52 bp, Artificial
  Synthetic oligonucleotide
tccatccacggactgcgcctacttctaggctgcggttgagcaaggggttaga

SEQ ID NO: 459228 - DNA, 60 bp, Artificial
  Synthetic oligonucleotide
tccatccagcttacggctaaaatggtcagtcgtgtctttacacgccgatgtcttacaaga

SEQ ID NO: 459229 - DNA, 60 bp, Artificial
  Synthetic oligonucleotide
tccatccatgttagatctgaaattgcctcctcgacggaataacaggtaggttgaagaagc

SEQ ID NO: 459230 - DNA, 54 bp, Artificial
  Synthetic oligonucleotide
tccatcccaggtgtttagtagaactggctagtattgaggtcccagattcaacta

SEQ ID NO: 459231 - DNA, 54 bp, Artificial
  Synthetic oligonucleotide
tccatcccctcccccagaaggtccccccaggaatggcggaaccccactcagcag

SEQ ID NO: 459232 - DNA, 60 bp, Artificial
  Synthetic oligonucleotide
tccatccctggacaagttagaaatctgattgaattgtgtgaggttgataccctcatacca

SEQ ID NO: 459233 - DNA, 54 bp, Artificial
  Synthetic oligonucleotide
tccatcccttccccccgagggtcgcccaggaatggcgggaccccacctcagcga

SEQ ID NO: 459234 - DNA, 54 bp, Artificial
  Synthetic oligonucleotide
tccatcccttccccctgagggtcgcccaggaatggcgggaccccactcgactgg

SEQ ID NO: 459235 - DNA, 55 bp, Artificial
  Synthetic oligonucleotide
tccatccgctgtgatgggctcactcctgtacaccgtgagtccgcgcagtgctgac

SEQ ID NO: 459236 - DNA, 60 bp, Artificial
  Synthetic oligonucleotide
tccatcctcctaggatccacaccactggacattgcccctgatggagcagtcttccagctg

SEQ ID NO: 459237 - DNA, 60 bp, Artificial
  Synthetic oligonucleotide
tccatcctcgaccgtacatggccacgccaaccactattttgtcagcggacacgttctgcg

SEQ ID NO: 459238 - DNA, 50 bp, Artificial
  Synthetic oligonucleotide
tccatccttggcaagtaacccaaagataagactaataccaggtcctagtc

SEQ ID NO: 459239 - DNA, 58 bp, Artificial
  Synthetic oligonucleotide
tccatcgacgagccgtcttgtctgtggtttcgaccccaccgaccagaaatctatgtcg

SEQ ID NO: 459240 - DNA, 60 bp, Artificial
  Synthetic oligonucleotide
tccatcgaggattatgttccgatggccgtcacctttgttgcctttgccatgactcgttac

SEQ ID NO: 459241 - DNA, 51 bp, Artificial
  Synthetic oligonucleotide
tccatcgccggttattcgaacgatacaacgtggccgtcggcgcttaccgtt

SEQ ID NO: 459242 - DNA, 60 bp, Artificial
  Synthetic oligonucleotide
tccatcgctggatacaccagcgcttgtgttccgagcacgagtatatgttccgctttcggc

SEQ ID NO: 459243 - DNA, 55 bp, Artificial
  Synthetic oligonucleotide
tccatcggacacggtacagaccagacacgtcatacaacacagatcgagatcggag

SEQ ID NO: 459244 - DNA, 60 bp, Artificial
  Synthetic oligonucleotide
tccatcgggataaagagggatatatggtcatgcgagctagcggaagagatgccgcaagcc

SEQ ID NO: 459245 - DNA, 60 bp, Artificial
  Synthetic oligonucleotide
tccatcggtcaaatgtttgagacaacaatgaggggagcgaaaagaatggccatcttgggc

SEQ ID NO: 459246 - DNA, 60 bp, Artificial
  Synthetic oligonucleotide
tccatcggttgcagctaccctgggatttggagcctacatgtccaaagcacatggcataga

SEQ ID NO: 459247 - DNA, 60 bp, Artificial
  Synthetic oligonucleotide
tccatcgtctctgcagtggatgctcacatatatggagcaaccgcattccaggtcaattcg

SEQ ID NO: 459248 - DNA, 60 bp, Artificial
  Synthetic oligonucleotide
tccatcgttagcatcagtatgtgctgtcttgacgaaaggcttcgtagtgtcgtttcataa

SEQ ID NO: 459249 - DNA, 57 bp, Artificial
  Synthetic oligonucleotide
tccatctaaacccaactcttatgatgagaaataagtccgtgtttggttcgactccaa

SEQ ID NO: 459250 - DNA, 60 bp, Artificial
  Synthetic oligonucleotide
tccatctaccgacaacatgatctatggcgctatttagcaattctctacctctgtaagggt

SEQ ID NO: 459251 - DNA, 56 bp, Artificial
  Synthetic oligonucleotide
tccatctcctacgagaacgtcgtggtccacacccgtgacggatccccgaaggtgta

SEQ ID NO: 459252 - DNA, 53 bp, Artificial
  Synthetic oligonucleotide
tccatctgaatgtggactcagatgatagtgtctacatagctgctttaggagtt

SEQ ID NO: 459253 - DNA, 59 bp, Artificial
  Synthetic oligonucleotide
tccatctgtacccacggtaagattctgtacctgggcactccgcagtcgcgggaatccat

SEQ ID NO: 459254 - DNA, 60 bp, Artificial
  Synthetic oligonucleotide
tccatctgtggtgaatgcagtcggttggttgcaagtttaccagctcactaccctgacgta

SEQ ID NO: 459255 - DNA, 55 bp, Artificial
  Synthetic oligonucleotide
tccatcttagccctcttgagtggggccggtgctgcaatgggctcagcgtctgtgg

SEQ ID NO: 459256 - DNA, 60 bp, Artificial
  Synthetic oligonucleotide
tccatcttccgaaagaccctctgctcacatttaccctgcaaactgccatcatttttcctc

SEQ ID NO: 459257 - DNA, 60 bp, Artificial
  Synthetic oligonucleotide
tccatcttcgtgaagctctctaactgcagcgatgtagagaggctcatatttggccaagag

SEQ ID NO: 459258 - DNA, 60 bp, Artificial
  Synthetic oligonucleotide
tccatcttcgtggagttccctaactgcagctatgtacagaggttcatatttggccaagag

SEQ ID NO: 459259 - DNA, 55 bp, Artificial
  Synthetic oligonucleotide
tccatgaatttagccaatgtcctcagtacaactggagcccaatctttggcattgg

SEQ ID NO: 459260 - DNA, 60 bp, Artificial
  Synthetic oligonucleotide
tccatgacactcagaactatctcgacgaagtgggcccacaccagcaagaagttcgcactt

SEQ ID NO: 459261 - DNA, 59 bp, Artificial
  Synthetic oligonucleotide
tccatgactctagctctagactttgaaggtataaccggcacaaactcatacagctttct

SEQ ID NO: 459262 - DNA, 54 bp, Artificial
  Synthetic oligonucleotide
tccatgactgaggtagacgatgatcgtgagccttctgtaccatcagagtacttg

SEQ ID NO: 459263 - DNA, 58 bp, Artificial
  Synthetic oligonucleotide
tccatgactggagtcatgcgtggcaactactatgcttttgtgggagtcatgtacaatc

SEQ ID NO: 459264 - DNA, 55 bp, Artificial
  Synthetic oligonucleotide
tccatgaggagggaattactgtttgattacccaactttcattaatcaggctgttt

SEQ ID NO: 459265 - DNA, 56 bp, Artificial
  Synthetic oligonucleotide
tccatgagggggtcatcccccaagtccacttgctgttgaaaggttttaagcctggc

SEQ ID NO: 459266 - DNA, 60 bp, Artificial
  Synthetic oligonucleotide
tccatgatggcgaccgtgctgtgattacatatgagggcgattctagtgcaggatacaatc

SEQ ID NO: 459267 - DNA, 52 bp, Artificial
  Synthetic oligonucleotide
tccatgattagcatggagctgtaggagtctaaattggggacgcagatgtttg

SEQ ID NO: 459268 - DNA, 60 bp, Artificial
  Synthetic oligonucleotide
tccatgattgcaccgctaccctgcctggtaatactccacgcatccaagttttacaagact

SEQ ID NO: 459269 - DNA, 60 bp, Artificial
  Synthetic oligonucleotide
tccatgcaatcaaatgagtcaacttgctgcacacaaccttgccatgtcgaatttctacgg

SEQ ID NO: 459270 - DNA, 60 bp, Artificial
  Synthetic oligonucleotide
tccatgcactaaccagtctgttttccgagagctaattcaacccatacaacaacacgccgc

SEQ ID NO: 459271 - DNA, 60 bp, Artificial
  Synthetic oligonucleotide
tccatgccagatgagtatcagatcatgtggaatgatggtacaattgattccgtttggtct

SEQ ID NO: 459272 - DNA, 59 bp, Artificial
  Synthetic oligonucleotide
tccatgccagtagacttacaagtctctgaggtgcctttgaaaccatctcctaggtttct

SEQ ID NO: 459273 - DNA, 56 bp, Artificial
  Synthetic oligonucleotide
tccatgccctaagcggcccagacccctgggaatccgatggtgggatgggaccccag

SEQ ID NO: 459274 - DNA, 59 bp, Artificial
  Synthetic oligonucleotide
tccatgccgtgtgaatacttggagtcctgcttgaattgcttctggtccgtaggttctct

SEQ ID NO: 459275 - DNA, 59 bp, Artificial
  Synthetic oligonucleotide
tccatgcctactgctcagtccactatgaaagcagaagaacttacaccgggtcggttccg

SEQ ID NO: 459276 - DNA, 58 bp, Artificial
  Synthetic oligonucleotide
tccatgcggtgcattttatgcggacacttcctacaggtagcgttgaccctaattttgg

SEQ ID NO: 459277 - DNA, 60 bp, Artificial
  Synthetic oligonucleotide
tccatgctggtacttacagtcgttggtgatgaaggctgaacagccgcaacccttccacac

SEQ ID NO: 459278 - DNA, 56 bp, Artificial
  Synthetic oligonucleotide
tccatgctgtcgcccccgattaccggatagaacataaccctaaaaggcttgaggcc

SEQ ID NO: 459279 - DNA, 54 bp, Artificial
  Synthetic oligonucleotide
tccatgcttttgggcaatggtcgctacgtgcctttccacattcaagtgcctcag

SEQ ID NO: 459280 - DNA, 57 bp, Artificial
  Synthetic oligonucleotide
tccatggaattgggtcctttaacgagaagaacgaagccgagaagtagtggagatcta

SEQ ID NO: 459281 - DNA, 60 bp, Artificial
  Synthetic oligonucleotide
tccatggagctaaggaggtggcgctcagctattcaactggtgcacttgccagttgtatgg

SEQ ID NO: 459282 - DNA, 60 bp, Artificial
  Synthetic oligonucleotide
tccatggcagacatctaagtgcttctttgaaaaggactaccagtatgaaacaggctgggg

SEQ ID NO: 459283 - DNA, 60 bp, Artificial
  Synthetic oligonucleotide
tccatggcatacagcaaagtgtcactatgagcgagattatcagtatgaaacaagttgggg

SEQ ID NO: 459284 - DNA, 60 bp, Artificial
  Synthetic oligonucleotide
tccatggcctcagcgcattttcactccacagttactctccaggtgaaatcaatagggtgg

SEQ ID NO: 459285 - DNA, 58 bp, Artificial
  Synthetic oligonucleotide
tccatggcgccggctcaaagaccctagccggcccaaagggcccaatcacccagatgta

SEQ ID NO: 459286 - DNA, 55 bp, Artificial
  Synthetic oligonucleotide
tccatgggattaacaggatgacacagactcctcagcgtctcgggagagtctgggc

SEQ ID NO: 459287 - DNA, 52 bp, Artificial
  Synthetic oligonucleotide
tccatgggccaacgaccgtagacacacacagtaatttgtccgcccagaatgc

SEQ ID NO: 459288 - DNA, 55 bp, Artificial
  Synthetic oligonucleotide
tccatgggcgtgaagaacgacctaacgggcctgttcattgcccggcacctgagcc

SEQ ID NO: 459289 - DNA, 60 bp, Artificial
  Synthetic oligonucleotide
tccatggggcatccgatgggcctcatacaagtatgcagaaaagattcgtgccatgttacc

SEQ ID NO: 459290 - DNA, 53 bp, Artificial
  Synthetic oligonucleotide
tccatggtaaacggggtagtaaaactgctgacaaaaccttgggacgtgattcc

SEQ ID NO: 459291 - DNA, 60 bp, Artificial
  Synthetic oligonucleotide
tccatggtccgcacggtttattgccttgtatatgctgcagccgcaaggaagatcgagtct

SEQ ID NO: 459292 - DNA, 58 bp, Artificial
  Synthetic oligonucleotide
tccatggtctatacatgtcaaatggaacccacgcatatgaagcaacgagattacaacc

SEQ ID NO: 459293 - DNA, 52 bp, Artificial
  Synthetic oligonucleotide
tccatggtggactccaggacccccgaaaggaggggggtgggccttggacctc

SEQ ID NO: 459294 - DNA, 52 bp, Artificial
  Synthetic oligonucleotide
tccatggttgtgacagttgagactgcggaagtatgtgcacccgcattcaagg

SEQ ID NO: 459295 - DNA, 60 bp, Artificial
  Synthetic oligonucleotide
tccatgtaaggtccagtcatttgagtcaagacacgatgtagttcatatagggaaggtcat

SEQ ID NO: 459296 - DNA, 60 bp, Artificial
  Synthetic oligonucleotide
tccatgtacaatatcgacgagtgttccctctttcgcgcacgctccgtcttatcaacggtc

SEQ ID NO: 459297 - DNA, 60 bp, Artificial
  Synthetic oligonucleotide
tccatgtaggacttaacatctgttgagctcttagcgctctgaatgttcggatggaaatgt

SEQ ID NO: 459298 - DNA, 56 bp, Artificial
  Synthetic oligonucleotide
tccatgtaggtataaacgtggtccctccttcactccacgacgattttattcacgta

SEQ ID NO: 459299 - DNA, 57 bp, Artificial
  Synthetic oligonucleotide
tccatgtagttactggcactcctagaggccttatttctactttcaccagaggtatct

SEQ ID NO: 459300 - DNA, 51 bp, Artificial
  Synthetic oligonucleotide
tccatgtgtagcaactttgaaattgctactatggtggcaagacatgatcct

SEQ ID NO: 459301 - DNA, 57 bp, Artificial
  Synthetic oligonucleotide
tccatgtgtgactagtaacaccgaggtgttcttactgttcacgaactttgacaacgg

SEQ ID NO: 459302 - DNA, 57 bp, Artificial
  Synthetic oligonucleotide
tccatgttctaaaactgcccgagcttcccatagggtgggttagagtcgtgtgcgtac

SEQ ID NO: 459303 - DNA, 50 bp, Artificial
  Synthetic oligonucleotide
tccatgttgcagctgagagcgatctgccgaaagaagcagaccccgaggct

SEQ ID NO: 459304 - DNA, 60 bp, Artificial
  Synthetic oligonucleotide
tccatgttgggtgtatatggatattaaccttcggaatggactagatggtaatcttgtatc

SEQ ID NO: 459305 - DNA, 60 bp, Artificial
  Synthetic oligonucleotide
tccattaaagcatgtgacatggcaatctgttatggtgcacaaagtgtcacactcattaga

SEQ ID NO: 459306 - DNA, 60 bp, Artificial
  Synthetic oligonucleotide
tccattaaatcatggagaaaggacatactgagaactcaggagtccgaatgtcaatgcatc

SEQ ID NO: 459307 - DNA, 53 bp, Artificial
  Synthetic oligonucleotide
tccattaatgataaccccaatgttttgcaccgttgctttttgaaaccccgtgg

SEQ ID NO: 459308 - DNA, 58 bp, Artificial
  Synthetic oligonucleotide
tccattaatgcaccaaccgtctctgacagtcgggctttagctagaaggtttcactttg

SEQ ID NO: 459309 - DNA, 57 bp, Artificial
  Synthetic oligonucleotide
tccattagaagcatgcttatcaaatgaagaccaagctaacaccttggtatccgactt

SEQ ID NO: 459310 - DNA, 60 bp, Artificial
  Synthetic oligonucleotide
tccattaggtagccccccaacagtgagcaacagtgaattcatatgtgttgggtggtcaag

SEQ ID NO: 459311 - DNA, 60 bp, Artificial
  Synthetic oligonucleotide
tccattagtgattagtgctacagcagcaacacgtatacaggttcctcttgctttcaacaa

SEQ ID NO: 459312 - DNA, 60 bp, Artificial
  Synthetic oligonucleotide
tccattcaagttctacaccacctcaaatgagcgatgtcacaattacatccgtaacctcat

SEQ ID NO: 459313 - DNA, 55 bp, Artificial
  Synthetic oligonucleotide
tccattcaatatgtgggatccgttattgaatgagtttcccgaaaccgttcacggt

SEQ ID NO: 459314 - DNA, 60 bp, Artificial
  Synthetic oligonucleotide
tccattcaatccagaggactatttggagcaattgccggattcattgaaggaggatggaca

SEQ ID NO: 459315 - DNA, 60 bp, Artificial
  Synthetic oligonucleotide
tccattcacggagcgtacgacatggggtttgagggtttgtgcaaggctatgcactcacac

SEQ ID NO: 459316 - DNA, 55 bp, Artificial
  Synthetic oligonucleotide
tccattccgagtgacctggcatcgctcctagcctccgtccctgtagtggaaggcg

SEQ ID NO: 459317 - DNA, 58 bp, Artificial
  Synthetic oligonucleotide
tccattcgatggactaagaaaccatctcagatgcaagaacacgttctgtcactgtgtc

SEQ ID NO: 459318 - DNA, 53 bp, Artificial
  Synthetic oligonucleotide
tccattcgattagccagcggattcttgccgattgtctgggacgacctccggag

SEQ ID NO: 459319 - DNA, 50 bp, Artificial
  Synthetic oligonucleotide
tccattcgattagtcaacggattctcagcacttatctgggaggacctgcg

SEQ ID NO: 459320 - DNA, 53 bp, Artificial
  Synthetic oligonucleotide
tccattcgattagtgaacggattcttaccacttgtctgggacgatctacggaa

SEQ ID NO: 459321 - DNA, 60 bp, Artificial
  Synthetic oligonucleotide
tccattcgctggactaaagacccacgtaacacacaagaccacgtgcggtcactgtgtctc

SEQ ID NO: 459322 - DNA, 60 bp, Artificial
  Synthetic oligonucleotide
tccattcgcttagtaagcggattcttgtcgcttgcctgggacgacctacggagcctgagc

SEQ ID NO: 459323 - DNA, 50 bp, Artificial
  Synthetic oligonucleotide
tccattcgcttggtaacaggtttctcagcacttatctgggacgacctgag

SEQ ID NO: 459324 - DNA, 51 bp, Artificial
  Synthetic oligonucleotide
tccattcgttaaagccctttcggactttaacaagatgacgggcgcaaccac

SEQ ID NO: 459325 - DNA, 60 bp, Artificial
  Synthetic oligonucleotide
tccattctcaacaataagaggaccgaggcttactgattgtacctcagcacagatttcgtt

SEQ ID NO: 459326 - DNA, 60 bp, Artificial
  Synthetic oligonucleotide
tccattctgggtcaagaacgacgatcatctcggcaattcttggccccaatccgattcttc

SEQ ID NO: 459327 - DNA, 58 bp, Artificial
  Synthetic oligonucleotide
tccattgacatgtctaaaatatttcttgatcgttttcggagttatgaagtattcccca

SEQ ID NO: 459328 - DNA, 51 bp, Artificial
  Synthetic oligonucleotide
tccattgctcttctggccgttcactccggaccagatatatatgatgagatt

SEQ ID NO: 459329 - DNA, 60 bp, Artificial
  Synthetic oligonucleotide
tccattgcttcaccggtcactggcagaaagttctccacatgaggcaatgcctggcaagtc

SEQ ID NO: 459330 - DNA, 59 bp, Artificial
  Synthetic oligonucleotide
tccattggacaatagtaaggccaggtgataacatcactttttcacataacggtggacta

SEQ ID NO: 459331 - DNA, 59 bp, Artificial
  Synthetic oligonucleotide
tccattggacaatggtacaaccaggtgataacatcactttttcgcataacggcggatta

SEQ ID NO: 459332 - DNA, 56 bp, Artificial
  Synthetic oligonucleotide
tccattggagaccaggagtacttcccaaagtactacccaacacaccgcccgagcaa

SEQ ID NO: 459333 - DNA, 59 bp, Artificial
  Synthetic oligonucleotide
tccattggagtttacgtcctacatatgctacccggaaggagattgatcgcgaacgaaga

SEQ ID NO: 459334 - DNA, 55 bp, Artificial
  Synthetic oligonucleotide
tccattggatgcttcttgatcccaacgacacagtgactttcaccttcaatggggc

SEQ ID NO: 459335 - DNA, 60 bp, Artificial
  Synthetic oligonucleotide
tccattggcctactctgtgtgatggcctcaagtgtactgttgtggatggccagtgtggag

SEQ ID NO: 459336 - DNA, 60 bp, Artificial
  Synthetic oligonucleotide
tccattgggaaagtgtgcaggactttgctagcaaagtctgtattcaacagtttgtatgca

SEQ ID NO: 459337 - DNA, 60 bp, Artificial
  Synthetic oligonucleotide
tccatttacaaactgtggctcccattgtgtctgtgggctcaaattcgaagcttcagatag

SEQ ID NO: 459338 - DNA, 51 bp, Artificial
  Synthetic oligonucleotide
tccatttacctgctcctgattacgttgttgatggacgtatcttaggagcag

SEQ ID NO: 459339 - DNA, 55 bp, Artificial
  Synthetic oligonucleotide
tccatttgaatttggggtttattgtgccagtggttcgaataagcggaagttggaa

SEQ ID NO: 459340 - DNA, 60 bp, Artificial
  Synthetic oligonucleotide
tccatttgtagatcataaagttttattatgcgaacaaggtttatgcagtaaatgtcttga

SEQ ID NO: 459341 - DNA, 51 bp, Artificial
  Synthetic oligonucleotide
tccattttatgatttcaaccggtttcggtcgcgcttggcacgcattttaag

SEQ ID NO: 459342 - DNA, 55 bp, Artificial
  Synthetic oligonucleotide
tccattttcatgatcaaccacacggctggctccgcgggcctcccgggccacttct

SEQ ID NO: 459343 - DNA, 57 bp, Artificial
  Synthetic oligonucleotide
tccattttgggttaagaatgacgaccatattggcaattcttggccccaatccgactc

SEQ ID NO: 459344 - DNA, 51 bp, Artificial
  Synthetic oligonucleotide
tcccaaaattgccagcacccttctacttaatcgtgtctttaaccagtgttt

SEQ ID NO: 459345 - DNA, 57 bp, Artificial
  Synthetic oligonucleotide
tcccaaacggactggtggcacaaatgtaccagcctgagcgggataaggttttcacca

SEQ ID NO: 459346 - DNA, 55 bp, Artificial
  Synthetic oligonucleotide
tcccaaacgttgtcgcaatggaggtgtgcttacccaatggtcatcaggtcgtgga

SEQ ID NO: 459347 - DNA, 52 bp, Artificial
  Synthetic oligonucleotide
tcccaaaggtgtcagggaaccagtatagagcatttagagtaacctttccaga

SEQ ID NO: 459348 - DNA, 59 bp, Artificial
  Synthetic oligonucleotide
tcccaaataaaaacgccattcgttgcttgaactgcagtgatgggttcccctgtgcgtga

SEQ ID NO: 459349 - DNA, 59 bp, Artificial
  Synthetic oligonucleotide
tcccaaatctaatccttttactgattacagttattctaatctgaatataaaggagtgca

SEQ ID NO: 459350 - DNA, 60 bp, Artificial
  Synthetic oligonucleotide
tcccaaatggaattgacccgagacctctccatcaatggtccagctgcccgggtgcaatca

SEQ ID NO: 459351 - DNA, 53 bp, Artificial
  Synthetic oligonucleotide
tcccaacacctgcctcgtaggtctcacccgttctcggacgggtgttatttttg

SEQ ID NO: 459352 - DNA, 57 bp, Artificial
  Synthetic oligonucleotide
tcccaacacttcaatctccaactgtagaggcatgtggatattcagataggataattc

SEQ ID NO: 459353 - DNA, 55 bp, Artificial
  Synthetic oligonucleotide
tcccaaccacggagcaggtggctacaacccagtaactggcctgtcgtaacgcgca

SEQ ID NO: 459354 - DNA, 50 bp, Artificial
  Synthetic oligonucleotide
tcccaacctcgtagagagatacgcgcggggtttcctggacacgccctctg

SEQ ID NO: 459355 - DNA, 60 bp, Artificial
  Synthetic oligonucleotide
tcccaacctcttcactgtcccaattaaggaagcaggcgaggactgccatgccccaacata

SEQ ID NO: 459356 - DNA, 57 bp, Artificial
  Synthetic oligonucleotide
tcccaacctgtggtgtaattgacgtgcgcgcatcagaactaacggggtgctcaccat

SEQ ID NO: 459357 - DNA, 54 bp, Artificial
  Synthetic oligonucleotide
tcccaacgaacttcgaagttttgagggaacagatgaaaggcgaaccagtggaac

SEQ ID NO: 459358 - DNA, 60 bp, Artificial
  Synthetic oligonucleotide
tcccaacgactctgccatactgacttacttctccgaagatagctccggcacggagagtga

SEQ ID NO: 459359 - DNA, 57 bp, Artificial
  Synthetic oligonucleotide
tcccaacgagcgtgacccagtaaatgcgagaagagcagcgtaagaaaatattagtca

SEQ ID NO: 459360 - DNA, 55 bp, Artificial
  Synthetic oligonucleotide
tcccaacgtcagaaccggaatccgaactgtgacgaccggagagtctatcacctac

SEQ ID NO: 459361 - DNA, 51 bp, Artificial
  Synthetic oligonucleotide
tcccaacgtggatggtgcggtgcgggattctcaaccacgacttacgtcgtg

SEQ ID NO: 459362 - DNA, 59 bp, Artificial
  Synthetic oligonucleotide
tcccaactaatgaacttcggtcagaatggaagcgtgatctgaaccttccagagtccgaa

SEQ ID NO: 459363 - DNA, 55 bp, Artificial
  Synthetic oligonucleotide
tcccaactgacaccttctgtgtcgacggcttctccaattgcgagtaccaatcccc

SEQ ID NO: 459364 - DNA, 60 bp, Artificial
  Synthetic oligonucleotide
tcccaactgcagtattgaaagtgtctggctcaagcctgtacaatcttgcgctcaatgtca

SEQ ID NO: 459365 - DNA, 51 bp, Artificial
  Synthetic oligonucleotide
tcccaacttgattgctagcccgtacgtgcagaacgaagtgtatctttccgc

SEQ ID NO: 459366 - DNA, 60 bp, Artificial
  Synthetic oligonucleotide
tcccaacttgtagtgtgattgacgtacgtgcatctgaactgactgggtgctcaccgttta

SEQ ID NO: 459367 - DNA, 55 bp, Artificial
  Synthetic oligonucleotide
tcccaagaagacccaagaagtgggatgacagttcagagtggtttgccttaccacc

SEQ ID NO: 459368 - DNA, 57 bp, Artificial
  Synthetic oligonucleotide
tcccaagacacaacgcagcagcggggcccaacaccaggggaagctgtaccctggtgg

SEQ ID NO: 459369 - DNA, 57 bp, Artificial
  Synthetic oligonucleotide
tcccaagaccctacaatgctatacaataagatggagtttgaaccctttcaatctttg

SEQ ID NO: 459370 - DNA, 57 bp, Artificial
  Synthetic oligonucleotide
tcccaagaccttccgagtatttgtgaccttgatccaatgtatggccaaccttcccca

SEQ ID NO: 459371 - DNA, 57 bp, Artificial
  Synthetic oligonucleotide
tcccaagacgctccgctaaaagcgccgctaaaacacccactaatgacgccatttcac

SEQ ID NO: 459372 - DNA, 60 bp, Artificial
  Synthetic oligonucleotide
tcccaagatttgacagaacaatgttcatcatcctcctattgctacctttagccctatcct

SEQ ID NO: 459373 - DNA, 52 bp, Artificial
  Synthetic oligonucleotide
tcccaagcaattagagaaccgtcttctgcgatgaatttaaccacatatcgtt

SEQ ID NO: 459374 - DNA, 55 bp, Artificial
  Synthetic oligonucleotide
tcccaaggacatcactaatcttttcatagccctcaagtcctgctagaaagacttt

SEQ ID NO: 459375 - DNA, 60 bp, Artificial
  Synthetic oligonucleotide
tcccaaggggtgcgaaggtccgtgtaaggtccagtcttatgaacagagacatgatatagc

SEQ ID NO: 459376 - DNA, 58 bp, Artificial
  Synthetic oligonucleotide
tcccaaggttccggcactgcaggtgtctcgtgttcaccggatgcaaaaaggttcgaga

SEQ ID NO: 459377 - DNA, 57 bp, Artificial
  Synthetic oligonucleotide
tcccaatatcgaggaggtggctttgtccaacactggagagatccccttttatggtaa

SEQ ID NO: 459378 - DNA, 60 bp, Artificial
  Synthetic oligonucleotide
tcccaatatggcaacaatttcgttgacatgtgtgccaggttgacacagtcttgtttgaac

SEQ ID NO: 459379 - DNA, 59 bp, Artificial
  Synthetic oligonucleotide
tcccaatcatcctaaaggccttgtatatgctttctacccgcgggcgtcagactgtcaaa

SEQ ID NO: 459380 - DNA, 59 bp, Artificial
  Synthetic oligonucleotide
tcccaatgcgttgaccaggcgtcgcttccataagggagtggctactggtttgcagttcc

SEQ ID NO: 459381 - DNA, 60 bp, Artificial
  Synthetic oligonucleotide
tcccaatggagtcccagtgcgtgagttgcagctgttggcctgtgctaccgaatgcatccg

SEQ ID NO: 459382 - DNA, 56 bp, Artificial
  Synthetic oligonucleotide
tcccaatgtatagctccttctctacactagtcaggaatgcggacccagaatttgtg

SEQ ID NO: 459383 - DNA, 59 bp, Artificial
  Synthetic oligonucleotide
tcccaattatcctaaaagccttatatatgctttctaccagagggcggcagactgtcaag

SEQ ID NO: 459384 - DNA, 51 bp, Artificial
  Synthetic oligonucleotide
tcccaattgttcaataagccatattggttacagaaggcgcagggacacaat

SEQ ID NO: 459385 - DNA, 52 bp, Artificial
  Synthetic oligonucleotide
tcccaatttcaatgttaccactgaacacacaaggaatcccccatgctgctat

SEQ ID NO: 459386 - DNA, 52 bp, Artificial
  Synthetic oligonucleotide
tcccaattttgggataaagacggaaaaccgcgcccttactatcacaccaccc

SEQ ID NO: 459387 - DNA, 58 bp, Artificial
  Synthetic oligonucleotide
tcccacaagaaccgttgcttgaattcccaccagtccaggacatcggtgcacgtgttaa

SEQ ID NO: 459388 - DNA, 60 bp, Artificial
  Synthetic oligonucleotide
tcccacaagccagccttttgactgaccaatcacgttgtatctacaaagcttagttagtgc

SEQ ID NO: 459389 - DNA, 58 bp, Artificial
  Synthetic oligonucleotide
tcccacaagtcaaggctggctaatgatcccaacaaagttggttttacgaagagtgcgc

SEQ ID NO: 459390 - DNA, 54 bp, Artificial
  Synthetic oligonucleotide
tcccacaatgcaattgtacagattgctgttactactgtgcccacaaagacaggt

SEQ ID NO: 459391 - DNA, 60 bp, Artificial
  Synthetic oligonucleotide
tcccacaattgaagcagactctcctgggtccataacgctggtcccaagcctactcaggtg

SEQ ID NO: 459392 - DNA, 57 bp, Artificial
  Synthetic oligonucleotide
tcccacaccgtcatatctacggtcagcagtggattaactttatgaaggatggcgtta

SEQ ID NO: 459393 - DNA, 60 bp, Artificial
  Synthetic oligonucleotide
tcccacactctcagaggcccatacaactgatgtctctactaggggaggcagcactgcacg

SEQ ID NO: 459394 - DNA, 57 bp, Artificial
  Synthetic oligonucleotide
tcccacagattgaaactagaggaattttcggagctatcgcaggttttattgaaggag

SEQ ID NO: 459395 - DNA, 60 bp, Artificial
  Synthetic oligonucleotide
tcccacaggacagcttatcacccatggaagagtgagtgcaaaacataacgatggtaactt

SEQ ID NO: 459396 - DNA, 60 bp, Artificial
  Synthetic oligonucleotide
tcccacataagtattgtatcacatgtcatgtcctcattcaacattgggagggaaattttg

SEQ ID NO: 459397 - DNA, 53 bp, Artificial
  Synthetic oligonucleotide
tcccacatagcaggccccgggccccctccaaaaatgaccggggagggcgctta

SEQ ID NO: 459398 - DNA, 57 bp, Artificial
  Synthetic oligonucleotide
tcccacatcaccaacgcagtggaaactgcaacccggggacgatccactcctgggaaa

SEQ ID NO: 459399 - DNA, 53 bp, Artificial
  Synthetic oligonucleotide
tcccacatccaaacattacggagtcagccctacccactacgggggaagtaccc

SEQ ID NO: 459400 - DNA, 58 bp, Artificial
  Synthetic oligonucleotide
tcccacatctggagtgctcccagtctgattccgtgttcccagaaccctccctccgatt

SEQ ID NO: 459401 - DNA, 51 bp, Artificial
  Synthetic oligonucleotide
tcccacattacagctgagacggctaagcgtagactggccagggggtccccc

SEQ ID NO: 459402 - DNA, 57 bp, Artificial
  Synthetic oligonucleotide
tcccaccatgccaactgtgcaatccacttgttgggtgttcacacttaactttaaagg

SEQ ID NO: 459403 - DNA, 55 bp, Artificial
  Synthetic oligonucleotide
tcccaccatttcctcaaaagctgaaatttagagagccacaaagggaagagcgcat

SEQ ID NO: 459404 - DNA, 58 bp, Artificial
  Synthetic oligonucleotide
tcccacccattgtcaggttagccatatacgccgcctggagtgaatctacatgctgcga

SEQ ID NO: 459405 - DNA, 60 bp, Artificial
  Synthetic oligonucleotide
tcccacccctagcatgccaacgactgctcctgcgttgcactccacacttacgtctgtgtg

SEQ ID NO: 459406 - DNA, 60 bp, Artificial
  Synthetic oligonucleotide
tcccacctctatctctgcggtcggtgtactagccccgcactcggctcttgctgttcttga

SEQ ID NO: 459407 - DNA, 59 bp, Artificial
  Synthetic oligonucleotide
tcccacctctgaccgtgctagatgggtccagacgagggaatatgaacgatctctacggt

SEQ ID NO: 459408 - DNA, 59 bp, Artificial
  Synthetic oligonucleotide
tcccacctggactaaggctacctacgtatccgatatagacccatctctcgtctctgact

SEQ ID NO: 459409 - DNA, 56 bp, Artificial
  Synthetic oligonucleotide
tcccacctggggaactaaacatcccttggggatgctttggcaccataaggtgtcga

SEQ ID NO: 459410 - DNA, 55 bp, Artificial
  Synthetic oligonucleotide
tcccacgctacatcacctagtaatactttaataagttcatacgcctgttgtggtg

SEQ ID NO: 459411 - DNA, 54 bp, Artificial
  Synthetic oligonucleotide
tcccacgtctagggtgctcccagtttgaactcgtgtttccaggaccctccctcc

SEQ ID NO: 459412 - DNA, 57 bp, Artificial
  Synthetic oligonucleotide
tcccacgtctggagtgctcccagtgtgaatccgtgttttcccagaacctccctccga

SEQ ID NO: 459413 - DNA, 57 bp, Artificial
  Synthetic oligonucleotide
tcccactaacatttgggtggtgctacaagctagtaccagttgacccaactgaagtag

SEQ ID NO: 459414 - DNA, 55 bp, Artificial
  Synthetic oligonucleotide
tcccactatgggttatctatcctctcgaaggccaacgctctgatcctcctggcga

SEQ ID NO: 459415 - DNA, 55 bp, Artificial
  Synthetic oligonucleotide
tcccactcagggctcaacaaagggctgcgaataacccgagtaggagtaggaaccc

SEQ ID NO: 459416 - DNA, 50 bp, Artificial
  Synthetic oligonucleotide
tcccactctctcggaactcaaaccatgaaatgtattgggtaagtggagcc

SEQ ID NO: 459417 - DNA, 59 bp, Artificial
  Synthetic oligonucleotide
tcccactgcttgtcttgactggatttgacttctaatgggtcaatttaatgggctttgaa

SEQ ID NO: 459418 - DNA, 60 bp, Artificial
  Synthetic oligonucleotide
tcccactggctttgtcatgctcagagtctctgatatcaaattctaaacaggttaagtgtg

SEQ ID NO: 459419 - DNA, 53 bp, Artificial
  Synthetic oligonucleotide
tcccactgggttccatcgggctaaccgttccactaacttaaagtgtgctaagg

SEQ ID NO: 459420 - DNA, 60 bp, Artificial
  Synthetic oligonucleotide
tcccactgttcaataagacggctgattttgttaatcagtgcatccgtgataggattggtc

SEQ ID NO: 459421 - DNA, 60 bp, Artificial
  Synthetic oligonucleotide
tcccactgttctggaacctgctgtgttacgcaggagtgatggacggttgttagatggtgt

SEQ ID NO: 459422 - DNA, 52 bp, Artificial
  Synthetic oligonucleotide
tcccacttaaagggttggttcgggcttcggttctcggtcgtgacgatcctcc

SEQ ID NO: 459423 - DNA, 60 bp, Artificial
  Synthetic oligonucleotide
tcccacttatctgggagcgtatggacgcactgttagcgtttgcatactgcgagtggttcg

SEQ ID NO: 459424 - DNA, 55 bp, Artificial
  Synthetic oligonucleotide
tcccacttgctccttgtatgacaatgcaaacttcagccttccagaatcaggaccg

SEQ ID NO: 459425 - DNA, 55 bp, Artificial
  Synthetic oligonucleotide
tcccacttggcacgcgctgcgtacggctattctaaatcgaactacgctgcctggt

SEQ ID NO: 459426 - DNA, 60 bp, Artificial
  Synthetic oligonucleotide
tcccagaaaaattggactctctattcatgggagagggcgctagcattgttgcacacacca

SEQ ID NO: 459427 - DNA, 57 bp, Artificial
  Synthetic oligonucleotide
tcccagaaaactttgctcgtcttgggcaggttgaccgggatgcgagagccgtccacc

SEQ ID NO: 459428 - DNA, 60 bp, Artificial
  Synthetic oligonucleotide
tcccagaacacggtaccatgctctatagatggctcaatctatttagatgaacatcctctc

SEQ ID NO: 459429 - DNA, 53 bp, Artificial
  Synthetic oligonucleotide
tcccagaagaccaagggccacagagggagccatataatgagtgggcattagag

SEQ ID NO: 459430 - DNA, 59 bp, Artificial
  Synthetic oligonucleotide
tcccagaatccatatcccaggtaaagttgaaaatctgttggaaatcatacaagtggata

SEQ ID NO: 459431 - DNA, 55 bp, Artificial
  Synthetic oligonucleotide
tcccagaatgtgctccctaatgcagggttcaacacttcccagaaggtctggagcc

SEQ ID NO: 459432 - DNA, 60 bp, Artificial
  Synthetic oligonucleotide
tcccagacatgtcttacaagcgaaggtcatggacttacaggcccatgtttcgcaagccca

SEQ ID NO: 459433 - DNA, 55 bp, Artificial
  Synthetic oligonucleotide
tcccagactagtgtttacttcaccttggagtcgcgctctttccgaaacaaatgcg

SEQ ID NO: 459434 - DNA, 56 bp, Artificial
  Synthetic oligonucleotide
tcccagactccggccccgaagccatcgcgggcaccgacacaacagcctcaaccccc

SEQ ID NO: 459435 - DNA, 60 bp, Artificial
  Synthetic oligonucleotide
tcccagagaattcctgaagtctatagatcttggaggattgcctgatgaagatttgataat

SEQ ID NO: 459436 - DNA, 55 bp, Artificial
  Synthetic oligonucleotide
tcccagaggcagctggtgcattccctgacagagagatcttcagttttaagtcccc

SEQ ID NO: 459437 - DNA, 60 bp, Artificial
  Synthetic oligonucleotide
tcccagagttgaagcctggtgagtcaagacatacatctgatcacatgtctatttacaaat

SEQ ID NO: 459438 - DNA, 60 bp, Artificial
  Synthetic oligonucleotide
tcccagataagttgcacaaagaaatctttgaagtgtgttgtaagttcaagggtgatgctg

SEQ ID NO: 459439 - DNA, 58 bp, Artificial
  Synthetic oligonucleotide
tcccagatatacgcgccactctctgctcgatccacagtgatgtactcccctgtgcgtg

SEQ ID NO: 459440 - DNA, 55 bp, Artificial
  Synthetic oligonucleotide
tcccagatttgtacgactacaaagagaaccgattcattgaaattggagtgacacg

SEQ ID NO: 459441 - DNA, 60 bp, Artificial
  Synthetic oligonucleotide
tcccagcactgagatgtcactgagaggagtaagaattagtaaaacgggggtagatgaata

SEQ ID NO: 459442 - DNA, 59 bp, Artificial
  Synthetic oligonucleotide
tcccagcatgaatatagtcacagattcccaatatgtgctggggatagtggcttctcaac

SEQ ID NO: 459443 - DNA, 52 bp, Artificial
  Synthetic oligonucleotide
tcccagccaacggtggtgtgccctattccgaacaagccgggtaaatacctgg

SEQ ID NO: 459444 - DNA, 59 bp, Artificial
  Synthetic oligonucleotide
tcccagcctccgcttatgaagtgcgcaacgtatccggggcgtaccatgtcacgaacgac

SEQ ID NO: 459445 - DNA, 60 bp, Artificial
  Synthetic oligonucleotide
tcccagcggcctcagaaccagccgatccacacgcgcagccctgtcgaatgcgtacttcat

SEQ ID NO: 459446 - DNA, 60 bp, Artificial
  Synthetic oligonucleotide
tcccagctaggaaatggaacccttgattccagcataggaccttgcacgatatctcgcaac

SEQ ID NO: 459447 - DNA, 60 bp, Artificial
  Synthetic oligonucleotide
tcccagctctggaagatatcagatcagctgaaattgtaagtagaatcatcatgcacccga

SEQ ID NO: 459448 - DNA, 56 bp, Artificial
  Synthetic oligonucleotide
tcccaggaagtgagggattattgcgaaaagaaaggttggatcgtcaatattactag

SEQ ID NO: 459449 - DNA, 55 bp, Artificial
  Synthetic oligonucleotide
tcccaggaattgctcactctttagctgttgaattgtgtgtaccgggtcttcatgg

SEQ ID NO: 459450 - DNA, 55 bp, Artificial
  Synthetic oligonucleotide
tcccaggatgtgctctctgatgcagggttcaactctccctaggaggtctggagcc

SEQ ID NO: 459451 - DNA, 55 bp, Artificial
  Synthetic oligonucleotide
tcccagggactggtacacggacaccatgtccggtccgtagttcatgggtttcacg

SEQ ID NO: 459452 - DNA, 52 bp, Artificial
  Synthetic oligonucleotide
tcccagggagcggggggtaggaaccggcacgacgggaacagagaaaacgcga

SEQ ID NO: 459453 - DNA, 58 bp, Artificial
  Synthetic oligonucleotide
tcccagggcaattcaggaaaaaatgtaactttgccacaactccaatttgtgaatatga

SEQ ID NO: 459454 - DNA, 60 bp, Artificial
  Synthetic oligonucleotide
tcccagtagccggtggaacaagcagtgtctacattgaggtgctgcatttaactcagggga

SEQ ID NO: 459455 - DNA, 60 bp, Artificial
  Synthetic oligonucleotide
tcccagtatgacataggaagacctgtgtttgaagtgggtgcagccatgcagacatcaatg

SEQ ID NO: 459456 - DNA, 58 bp, Artificial
  Synthetic oligonucleotide
tcccagtctgattccgtgttcccagaaccctccctccgatttctgtggcgggagctga

SEQ ID NO: 459457 - DNA, 60 bp, Artificial
  Synthetic oligonucleotide
tcccagtgcgggattccaagctgcgtcgttccctgtggacgtatcattcacccgcgattc

SEQ ID NO: 459458 - DNA, 51 bp, Artificial
  Synthetic oligonucleotide
tcccagtgcggggaaggacccaaagaaaactgggggtccaatctaccgaag

SEQ ID NO: 459459 - DNA, 56 bp, Artificial
  Synthetic oligonucleotide
tcccagtgctctaccctggtaccatcctaccaaggaaatttcaatacctggacagg

SEQ ID NO: 459460 - DNA, 60 bp, Artificial
  Synthetic oligonucleotide
tcccagtggaccatgagagcaactccatgttcagagggctacgtgactacaacccaatct

SEQ ID NO: 459461 - DNA, 58 bp, Artificial
  Synthetic oligonucleotide
tcccagtggcagatgtggcgggtatggcgggttcactctatcctacctcagcctatgc

SEQ ID NO: 459462 - DNA, 56 bp, Artificial
  Synthetic oligonucleotide
tcccagtggctcacttgtgtcttctgaggcccagttgtttaataaaccttactggt

SEQ ID NO: 459463 - DNA, 59 bp, Artificial
  Synthetic oligonucleotide
tcccagtggtgacgaccaagcctaagccagccttcgggtctattagctcgctagtcggc

SEQ ID NO: 459464 - DNA, 55 bp, Artificial
  Synthetic oligonucleotide
tcccagttcgagagtcccggacccctcggctctggagtccaccgacctgtgaggt

SEQ ID NO: 459465 - DNA, 57 bp, Artificial
  Synthetic oligonucleotide
tcccagttgcctcctttccctgtagttgactctcagttggaacttgagtatggttcc

SEQ ID NO: 459466 - DNA, 56 bp, Artificial
  Synthetic oligonucleotide
tcccataaaaggagacaacgggacgctgtcgttagatctccggtacgaatggcgga

SEQ ID NO: 459467 - DNA, 55 bp, Artificial
  Synthetic oligonucleotide
tcccatacgtaaactctctctctattgacagtatggtgaaacacaacaactgggg

SEQ ID NO: 459468 - DNA, 60 bp, Artificial
  Synthetic oligonucleotide
tcccatactgaggtcaggcatgttccattcatgatactaaagggatcaggaaaagtgtac

SEQ ID NO: 459469 - DNA, 56 bp, Artificial
  Synthetic oligonucleotide
tcccataggacggtcaggccaagtgagtcgggaggcgaccaaggtatcgtaagacc

SEQ ID NO: 459470 - DNA, 60 bp, Artificial
  Synthetic oligonucleotide
tcccatatccatgatagtacactgttaaatgcacaggcatctggtatctctctggacagt

SEQ ID NO: 459471 - DNA, 55 bp, Artificial
  Synthetic oligonucleotide
tcccatattaacatcaagtcagcagacggcgcgagtctgtgccggtacaggccat

SEQ ID NO: 459472 - DNA, 57 bp, Artificial
  Synthetic oligonucleotide
tcccatatttaaaagagcctccctcgtccttttgaagagtgactttgacagagtgcc

SEQ ID NO: 459473 - DNA, 60 bp, Artificial
  Synthetic oligonucleotide
tcccatcacggcctactctcaacagacgcggggcctacttggttgcatcgtcactagcct

SEQ ID NO: 459474 - DNA, 55 bp, Artificial
  Synthetic oligonucleotide
tcccatcactaacctatgcaatctgtgggacgataggggaattggtaccatgggg

SEQ ID NO: 459475 - DNA, 60 bp, Artificial
  Synthetic oligonucleotide
tcccatcctgggtctctggggcatttaagattgcaaagttcataggagctcattaatctc

SEQ ID NO: 459476 - DNA, 55 bp, Artificial
  Synthetic oligonucleotide
tcccatctcgtcagtggcttcattgaacgacctaacgccagtgggcaggttggtc

SEQ ID NO: 459477 - DNA, 57 bp, Artificial
  Synthetic oligonucleotide
tcccatctgataatgtagagactaggactacctatatgcactatgatggtacagaaa

SEQ ID NO: 459478 - DNA, 54 bp, Artificial
  Synthetic oligonucleotide
tcccatgatgttctccgtttcggggttgtggggtcgggtcagggcagcgacggg

SEQ ID NO: 459479 - DNA, 55 bp, Artificial
  Synthetic oligonucleotide
tcccatgcccgaccccgctaattactcctgtgcctactcctacttaccgtaggag

SEQ ID NO: 459480 - DNA, 51 bp, Artificial
  Synthetic oligonucleotide
tcccatgctctcccgacgtctcggagagtgatccgtgttttgaacacgatg

SEQ ID NO: 459481 - DNA, 57 bp, Artificial
  Synthetic oligonucleotide
tcccatggcaagttgttgggcggaggcatcaggatcagttcttgtacgtagaccgga

SEQ ID NO: 459482 - DNA, 60 bp, Artificial
  Synthetic oligonucleotide
tcccatgtatacacgccattctccgcctgaggcacagctgatgacgttcccctgtgcgtg

SEQ ID NO: 459483 - DNA, 60 bp, Artificial
  Synthetic oligonucleotide
tcccatgtcatgtgggctcaccaggctttaattcagaatgtcgaagcgggaagccccttg

SEQ ID NO: 459484 - DNA, 57 bp, Artificial
  Synthetic oligonucleotide
tcccatgtgggcaaggtattatgtgtgtccgatgtcacacgtggtaatgggctgacc

SEQ ID NO: 459485 - DNA, 60 bp, Artificial
  Synthetic oligonucleotide
tcccattaccaaaagagcttgggcacaaggagatatgcctatcagtcatgcgacggcaat

SEQ ID NO: 459486 - DNA, 60 bp, Artificial
  Synthetic oligonucleotide
tcccattagggcggagtgaatggcgccgttatacggcgccgtgatctccggaggatcaca

SEQ ID NO: 459487 - DNA, 60 bp, Artificial
  Synthetic oligonucleotide
tcccattataggtgacgagtacgacagtaacaagcaggatatggtcggctcttcgaaaga

SEQ ID NO: 459488 - DNA, 55 bp, Artificial
  Synthetic oligonucleotide
tcccattcgtatccaagacaacccggtataagcgactcctcaactttggtcaggg

SEQ ID NO: 459489 - DNA, 51 bp, Artificial
  Synthetic oligonucleotide
tcccattggcaagtgcacctacacgattggacgtcgcgtcaagggacgtcc

SEQ ID NO: 459490 - DNA, 60 bp, Artificial
  Synthetic oligonucleotide
tcccattgttacaagtggttgtgcaacagctctggatttggccagtaacaagagtgtggt

SEQ ID NO: 459491 - DNA, 58 bp, Artificial
  Synthetic oligonucleotide
tcccatttaaggaatgataccgatgtggtaaatttcgtgagcatggagttttctctta

SEQ ID NO: 459492 - DNA, 54 bp, Artificial
  Synthetic oligonucleotide
tcccatttatatctaaaggctaaaagtctctacctaggacaccaaggggcaaaa

SEQ ID NO: 459493 - DNA, 55 bp, Artificial
  Synthetic oligonucleotide
tccccaaactggtgagctttcgggtcatgtgcttaccagtacacccacagctggg

SEQ ID NO: 459494 - DNA, 51 bp, Artificial
  Synthetic oligonucleotide
tccccaaagcccggttcctcaccttccccatctccggccaaacccacaccc

SEQ ID NO: 459495 - DNA, 55 bp, Artificial
  Synthetic oligonucleotide
tccccaaagcctcccgcaggttgtagttgaactgtatctgaactgtaatgatgtc

SEQ ID NO: 459496 - DNA, 56 bp, Artificial
  Synthetic oligonucleotide
tccccaacccgcgggccggctattcttcttgctctttgctcgtcatcggcggtcaa

SEQ ID NO: 459497 - DNA, 52 bp, Artificial
  Synthetic oligonucleotide
tccccaacgactacattcttctctgtatcaatcgcattcagtaacccatcaa

SEQ ID NO: 459498 - DNA, 55 bp, Artificial
  Synthetic oligonucleotide
tccccaacgctttcctcaagttgtggttgaactggatttgtaacgtgattatgtc

SEQ ID NO: 459499 - DNA, 60 bp, Artificial
  Synthetic oligonucleotide
tccccaagctggaaccagagcgaatagtatcgatcctagagtgggatcgatcaaaagagc

SEQ ID NO: 459500 - DNA, 57 bp, Artificial
  Synthetic oligonucleotide
tccccaagcttatagaccaccaaatgcccctatcttatcaacacttccggagacttg

SEQ ID NO: 459501 - DNA, 55 bp, Artificial
  Synthetic oligonucleotide
tccccaaggaggtggacttaatatccagtccatccacaagcccctccacgccccc

SEQ ID NO: 459502 - DNA, 54 bp, Artificial
  Synthetic oligonucleotide
tccccaagtcagaccctcccaaaccgcctgtgttaccgcctgatccttcttccc

SEQ ID NO: 459503 - DNA, 60 bp, Artificial
  Synthetic oligonucleotide
tccccaatgctagacctgctcatactcacaggggaccctaggcaatccgaacacttcgaa

SEQ ID NO: 459504 - DNA, 51 bp, Artificial
  Synthetic oligonucleotide
tccccacaattagagcggctaaagttcaaggaccagtgtttgactacgcag

SEQ ID NO: 459505 - DNA, 59 bp, Artificial
  Synthetic oligonucleotide
tccccacacccaggagaacattatacctggtagagagtcagtgtccattttgccaggct

SEQ ID NO: 459506 - DNA, 55 bp, Artificial
  Synthetic oligonucleotide
tccccacatagcagagcccaggacccccttccaaagagaccgaggggggtggcta

SEQ ID NO: 459507 - DNA, 54 bp, Artificial
  Synthetic oligonucleotide
tccccacatagcagagcccggctccccttcaaaaaggaccggagggggcgcttg

SEQ ID NO: 459508 - DNA, 51 bp, Artificial
  Synthetic oligonucleotide
tccccacatagcagagtccggaccccctccaaaaaggaccggggggggagc

SEQ ID NO: 459509 - DNA, 55 bp, Artificial
  Synthetic oligonucleotide
tccccacatagcagatcctcggacccccttccaaaggaccgagggggagctagga

SEQ ID NO: 459510 - DNA, 55 bp, Artificial
  Synthetic oligonucleotide
tccccacatagcagctcccggagccccttccaaagcgaccgaggggggtggcttg

SEQ ID NO: 459511 - DNA, 55 bp, Artificial
  Synthetic oligonucleotide
tccccacatagcagctccgggagcccctttcaaaaatgaccggagggggagctag

SEQ ID NO: 459512 - DNA, 51 bp, Artificial
  Synthetic oligonucleotide
tccccacatagcgaggtcccggacccccttccaagtgaccggagggggtcc

SEQ ID NO: 459513 - DNA, 52 bp, Artificial
  Synthetic oligonucleotide
tccccacatagcggacttccggacccccttcgaaagtgaccgggggtggagc

SEQ ID NO: 459514 - DNA, 60 bp, Artificial
  Synthetic oligonucleotide
tccccacatgggccgtctacttagcccattatatgccaaagtcagcccaactggtgagcg

SEQ ID NO: 459515 - DNA, 56 bp, Artificial
  Synthetic oligonucleotide
tccccaccaccgagttgcgttccgaatggaaagaccacatgaaactcccttccagc

SEQ ID NO: 459516 - DNA, 54 bp, Artificial
  Synthetic oligonucleotide
tccccacccactcgaatgacgcggatcactaaccggtagttccggtaacaaaca

SEQ ID NO: 459517 - DNA, 58 bp, Artificial
  Synthetic oligonucleotide
tccccacccatcgtgggtgggttgaagacccagatcgtttgccagtgttagctcagct

SEQ ID NO: 459518 - DNA, 60 bp, Artificial
  Synthetic oligonucleotide
tccccacccatgacctggccacttataccccatgtcatattctgccacccaagacaattg

SEQ ID NO: 459519 - DNA, 52 bp, Artificial
  Synthetic oligonucleotide
tccccacgattgttgctttgacattccatatctttcccggatgactctcttc

SEQ ID NO: 459520 - DNA, 60 bp, Artificial
  Synthetic oligonucleotide
tccccactgaacacaaaggtgtgtacggcagtcttatggactcctatgcatacatgagga

SEQ ID NO: 459521 - DNA, 56 bp, Artificial
  Synthetic oligonucleotide
tccccactgtctcagactcagatgcaattcgcaggcgattttacatggactgtgac

SEQ ID NO: 459522 - DNA, 55 bp, Artificial
  Synthetic oligonucleotide
tccccacttagtgggcttcacttagcgaatgcattagccttaatcaaccaacgcc

SEQ ID NO: 459523 - DNA, 55 bp, Artificial
  Synthetic oligonucleotide
tccccagaattatacgcagatccagtagtagctctcagtcttgtaatagtatcgg

SEQ ID NO: 459524 - DNA, 54 bp, Artificial
  Synthetic oligonucleotide
tccccagaggtcctattaggcactgtcgtttacccaccagaacttttaatagga

SEQ ID NO: 459525 - DNA, 54 bp, Artificial
  Synthetic oligonucleotide
tccccagcggacttggggatggccaactttccgggcaatgtgtcgaaggggtcg

SEQ ID NO: 459526 - DNA, 57 bp, Artificial
  Synthetic oligonucleotide
tccccaggaagcagcgttgtaccgtctggtagggtgatacgcttaccgacctcgata

SEQ ID NO: 459527 - DNA, 57 bp, Artificial
  Synthetic oligonucleotide
tccccaggatctgctcaaaagggaaaaggacagttgacctcggtcaatgtggacttc

SEQ ID NO: 459528 - DNA, 55 bp, Artificial
  Synthetic oligonucleotide
tccccaggcccataaatctcaggtaccgacacttcaatttctggccttagtggta

SEQ ID NO: 459529 - DNA, 60 bp, Artificial
  Synthetic oligonucleotide
tccccaggtatatacgccactctctgctcgatccgcagtgatgtattcccctgtgcgtga

SEQ ID NO: 459530 - DNA, 59 bp, Artificial
  Synthetic oligonucleotide
tccccagtactcaagcagttctacgttctgatgaggcgaccacaacgaagtggttacac

SEQ ID NO: 459531 - DNA, 59 bp, Artificial
  Synthetic oligonucleotide
tccccagtagttcatacaggagaccggttggaatttctagcatggtggaggccatggtg

SEQ ID NO: 459532 - DNA, 60 bp, Artificial
  Synthetic oligonucleotide
tccccagtcgcgacaggagatatcagcctattctcggtcaatctcgactgccgtgtacga

SEQ ID NO: 459533 - DNA, 57 bp, Artificial
  Synthetic oligonucleotide
tccccagtcttggcaagactgaaccaagccgttcaaggtcatatattaagttgaaac

SEQ ID NO: 459534 - DNA, 54 bp, Artificial
  Synthetic oligonucleotide
tccccagttttggcaaatacagttacacggggtgtagagtcggtggagaagctt

SEQ ID NO: 459535 - DNA, 57 bp, Artificial
  Synthetic oligonucleotide
tccccataacgctggagacatctcggaaggggaaagaggtcggatggaagagaggag

SEQ ID NO: 459536 - DNA, 60 bp, Artificial
  Synthetic oligonucleotide
tccccatcaatacccacatacattgtgccaccgggtgattataccttgactcctctgtaa

SEQ ID NO: 459537 - DNA, 60 bp, Artificial
  Synthetic oligonucleotide
tccccatccaatgtggcttcacatgttagagttaatgtttacctttctgcaatcaatttg

SEQ ID NO: 459538 - DNA, 54 bp, Artificial
  Synthetic oligonucleotide
tccccatcccaggctattacggtggtagaagtggtgaaaagcgttacggtgtaa

SEQ ID NO: 459539 - DNA, 55 bp, Artificial
  Synthetic oligonucleotide
tccccatcttcgtgaagttctctggttacgcgaataaatttcttgtgggtaggtg

SEQ ID NO: 459540 - DNA, 60 bp, Artificial
  Synthetic oligonucleotide
tccccatggactttcccctcaagaagctggcacgatttggagctatgaaagccccattga

SEQ ID NO: 459541 - DNA, 55 bp, Artificial
  Synthetic oligonucleotide
tccccatggtaaaccatcacctaaaccgaatgctaattcattaaagccgtcgacc

SEQ ID NO: 459542 - DNA, 55 bp, Artificial
  Synthetic oligonucleotide
tccccatgtattaatgaatgcagccacaacctcccaagctgatttgtatattccc

SEQ ID NO: 459543 - DNA, 59 bp, Artificial
  Synthetic oligonucleotide
tccccattccagtgtatctccgtcctttgcgatgtaggacttgacgtcggagctggatt

SEQ ID NO: 459544 - DNA, 60 bp, Artificial
  Synthetic oligonucleotide
tccccattgcccaaggcacaaacaagcgacgatcatggacctacaggcccatgtaccgaa

SEQ ID NO: 459545 - DNA, 51 bp, Artificial
  Synthetic oligonucleotide
tcccccaacgggcgtatgcttggtcgggtgaagacagcgccaccctcggcg

SEQ ID NO: 459546 - DNA, 55 bp, Artificial
  Synthetic oligonucleotide
tcccccaatactgtgaattgctaaactttagagatcaccaacagagagacctatg

SEQ ID NO: 459547 - DNA, 53 bp, Artificial
  Synthetic oligonucleotide
tcccccacggaggaggaaggtagtccaacttgatgcgtctaacgtatcgaccg

SEQ ID NO: 459548 - DNA, 50 bp, Artificial
  Synthetic oligonucleotide
tcccccacggttaccgatgtaagccggatccaaagcgcccaccgagatca

SEQ ID NO: 459549 - DNA, 60 bp, Artificial
  Synthetic oligonucleotide
tcccccactgtctggctttcagttatatggatgatatggtattgggggccaagtctgtac

SEQ ID NO: 459550 - DNA, 54 bp, Artificial
  Synthetic oligonucleotide
tcccccaggaatggcgagaccccactctacagggtccgcgtaccatcctttctt

SEQ ID NO: 459551 - DNA, 51 bp, Artificial
  Synthetic oligonucleotide
tcccccagttgaggcaatgagcgtcggaacaccactaatttacgtgaataa

SEQ ID NO: 459552 - DNA, 53 bp, Artificial
  Synthetic oligonucleotide
tcccccatagggggtacctaaagcccagccaatcatctaaagtcaaccttcgg

SEQ ID NO: 459553 - DNA, 57 bp, Artificial
  Synthetic oligonucleotide
tcccccattgcttggcctttagttatatggatgacgtggtattgggggccaaatctg

SEQ ID NO: 459554 - DNA, 60 bp, Artificial
  Synthetic oligonucleotide
tccccccaaatgcatgagttcagcaggagttacttgaagaaggtttgtgatcatggcaaa

SEQ ID NO: 459555 - DNA, 59 bp, Artificial
  Synthetic oligonucleotide
tccccccacaacaagcccccagaacccgaggcaccaaggcatccagtgattccagatgc

SEQ ID NO: 459556 - DNA, 60 bp, Artificial
  Synthetic oligonucleotide
tccccccactgatcaaattgggaagcatgcttctgtgctatacactgccccagaggacac

SEQ ID NO: 459557 - DNA, 56 bp, Artificial
  Synthetic oligonucleotide
tccccccccctaaactgttcgtggataagtggtatgcacaggaggacctgtgcgac

SEQ ID NO: 459558 - DNA, 53 bp, Artificial
  Synthetic oligonucleotide
tcccccccctcgttttcctgtgatctcacttttccaacagcagtcccccctta

SEQ ID NO: 459559 - DNA, 57 bp, Artificial
  Synthetic oligonucleotide
tcccccgcgttgtagacatcattgacttgtgcgtcgctcagatgaagtggtcgtgga

SEQ ID NO: 459560 - DNA, 52 bp, Artificial
  Synthetic oligonucleotide
tcccccggtaaccccctttcgacgcgggtactgcgatagtgccaccccagtc

SEQ ID NO: 459561 - DNA, 56 bp, Artificial
  Synthetic oligonucleotide
tcccccgtagttgctacaagaaaaacttttcacatctatcgcttgctaaacgaggc

SEQ ID NO: 459562 - DNA, 60 bp, Artificial
  Synthetic oligonucleotide
tccccctgctcctctatgcgtcgacaccccctcgtactgtgatcaatgtggacatcaagg

SEQ ID NO: 459563 - DNA, 53 bp, Artificial
  Synthetic oligonucleotide
tccccctttaatttgaatgggcttcccgtcccttgtgttgctttgccagtccc

SEQ ID NO: 459564 - DNA, 58 bp, Artificial
  Synthetic oligonucleotide
tccccgaatctatggacccttccgagattctagatgacaaatctcactccttcacccg

SEQ ID NO: 459565 - DNA, 52 bp, Artificial
  Synthetic oligonucleotide
tccccgaccgaacgacccaactgtaggtaagtgtaatgacccttatccggga

SEQ ID NO: 459566 - DNA, 53 bp, Artificial
  Synthetic oligonucleotide
tccccgagaattgtaaggtacgactgcttaaaatggttctggatacggttaaa

SEQ ID NO: 459567 - DNA, 54 bp, Artificial
  Synthetic oligonucleotide
tccccgagacgctgggagactcccggaacaaggaaagagggataggaaggtaga

SEQ ID NO: 459568 - DNA, 55 bp, Artificial
  Synthetic oligonucleotide
tccccgagcccatagatcccaggtaccatcacttcaatttctggccttagtggta

SEQ ID NO: 459569 - DNA, 60 bp, Artificial
  Synthetic oligonucleotide
tccccgatgcgacctattgattggtgatcaaagctggtcatatatagtggaaagacctac

SEQ ID NO: 459570 - DNA, 55 bp, Artificial
  Synthetic oligonucleotide
tccccgattccagctctcatgatgcacaagatcattaaagttgtgcagggagagc

SEQ ID NO: 459571 - DNA, 53 bp, Artificial
  Synthetic oligonucleotide
tccccgattggtttgctatcactaaaaccaagcggggaggacaaaataagacc

SEQ ID NO: 459572 - DNA, 54 bp, Artificial
  Synthetic oligonucleotide
tccccgcatagcagagcccgggccccctccaaaaaggaccgagggtggagcttg

SEQ ID NO: 459573 - DNA, 60 bp, Artificial
  Synthetic oligonucleotide
tccccgctcagataattcagaggtggagcagcttagtcctagctttgctgcaatcacatt

SEQ ID NO: 459574 - DNA, 57 bp, Artificial
  Synthetic oligonucleotide
tccccgctctaccacaagggttgtgtggttgggttacatataggtgctgcggatggt

SEQ ID NO: 459575 - DNA, 56 bp, Artificial
  Synthetic oligonucleotide
tccccggaggcgttctggtctggggcgttgggtgggcctgctgtttcgtctgcgtg

SEQ ID NO: 459576 - DNA, 55 bp, Artificial
  Synthetic oligonucleotide
tccccggcactgatcctgaccggacaaagacgtcgaagcggtaacaacggggctc

SEQ ID NO: 459577 - DNA, 55 bp, Artificial
  Synthetic oligonucleotide
tccccggccgccaacttcagttctatgctcagtgtcggcggtggttatctgcggg

SEQ ID NO: 459578 - DNA, 55 bp, Artificial
  Synthetic oligonucleotide
tccccggcctgtatctaaccgacacagcacccatccgtaagggagccccgctaac

SEQ ID NO: 459579 - DNA, 55 bp, Artificial
  Synthetic oligonucleotide
tccccggctgatacacccagtcggcccgacccgtaggcataccctcgatacgaaa

SEQ ID NO: 459580 - DNA, 54 bp, Artificial
  Synthetic oligonucleotide
tccccggggctagcacctatcccacccctttgcgtcgccaaatagaaaaagaca

SEQ ID NO: 459581 - DNA, 59 bp, Artificial
  Synthetic oligonucleotide
tccccggggtctaatgcgctagttcctagcaggttgagttctctatatggatgtagcgc

SEQ ID NO: 459582 - DNA, 59 bp, Artificial
  Synthetic oligonucleotide
tccccggtcaagattgatacgctctaccagggcgaaaacaattgagatcgttatccgca

SEQ ID NO: 459583 - DNA, 60 bp, Artificial
  Synthetic oligonucleotide
tccccgtatagggcgtactgccccgattgtgacggaactgcctgcatctcgccgatagct

SEQ ID NO: 459584 - DNA, 60 bp, Artificial
  Synthetic oligonucleotide
tccccgtccaggcaaccctacaagaaatgcaagctcgacgtgcatttgagcgcgaacgag

SEQ ID NO: 459585 - DNA, 56 bp, Artificial
  Synthetic oligonucleotide
tccccgtctgggacctcatggaacactggtcccctcgtagtagatcattactcgtg

SEQ ID NO: 459586 - DNA, 57 bp, Artificial
  Synthetic oligonucleotide
tccccgtggagggagacagccaccgggataggacagagaaatcacctccagaggacc

SEQ ID NO: 459587 - DNA, 58 bp, Artificial
  Synthetic oligonucleotide
tccccgtgtgggatgtgacaagcttgctagcataaccaaccaaaccttgcttaagtcc

SEQ ID NO: 459588 - DNA, 55 bp, Artificial
  Synthetic oligonucleotide
tccccgttacctggggcctacggaagggcgaaacagcatacgttactcagagctg

SEQ ID NO: 459589 - DNA, 57 bp, Artificial
  Synthetic oligonucleotide
tccccgttgggcgaatcgccgtagagaacttgaaaccaagtacccattgctgctgcg

SEQ ID NO: 459590 - DNA, 55 bp, Artificial
  Synthetic oligonucleotide
tccccgtttagcgttcctatccaaggtgtgttaaccgtgcaacaactggagacga

SEQ ID NO: 459591 - DNA, 55 bp, Artificial
  Synthetic oligonucleotide
tccccgttttctattttggggttgccagagatcgtggtgcgaagtggggctatcc

SEQ ID NO: 459592 - DNA, 60 bp, Artificial
  Synthetic oligonucleotide
tcccctaatgcaccatgggtctttgcatgtgcacctgaccgatgtccaccaacttgtatt

SEQ ID NO: 459593 - DNA, 55 bp, Artificial
  Synthetic oligonucleotide
tcccctacactccatcattgtcagatacccgtgatccacatatgtgggttgttgg

SEQ ID NO: 459594 - DNA, 51 bp, Artificial
  Synthetic oligonucleotide
tcccctacgttggcattgcaaatgcgtactcacacttctacgacgggttcg

SEQ ID NO: 459595 - DNA, 59 bp, Artificial
  Synthetic oligonucleotide
tcccctagagactggcagagacttatcaacaaccattggggaatcagacccaagtctct

SEQ ID NO: 459596 - DNA, 59 bp, Artificial
  Synthetic oligonucleotide
tcccctagctgtaacttggtggaataggaatgggccaacgacaagtgcagtccattatc

SEQ ID NO: 459597 - DNA, 59 bp, Artificial
  Synthetic oligonucleotide
tcccctatataggatcaagaaccgaggataaaatcggacagcctgctatcaagccgcgg

SEQ ID NO: 459598 - DNA, 54 bp, Artificial
  Synthetic oligonucleotide
tcccctattagtgccccaatgtgtaatttccaaaaatacccttatccctgtgac

SEQ ID NO: 459599 - DNA, 60 bp, Artificial
  Synthetic oligonucleotide
tcccctatttaaacttcgccaccaagtagtgcattgcgcactatgtgggatccattagta

SEQ ID NO: 459600 - DNA, 57 bp, Artificial
  Synthetic oligonucleotide
tcccctatttaaacttcggcaccaagtattgtattttgcactatgtgggatccattg

SEQ ID NO: 459601 - DNA, 55 bp, Artificial
  Synthetic oligonucleotide
tcccctccacagatggtacctcgaacgggttaagtagcgccgcccaatgcgggag

SEQ ID NO: 459602 - DNA, 55 bp, Artificial
  Synthetic oligonucleotide
tcccctccactggcgcggtcaaactctacggccaaagaacagataacggcatttt

SEQ ID NO: 459603 - DNA, 50 bp, Artificial
  Synthetic oligonucleotide
tcccctccttaacaagcttgatgacactgaaaatgggcccaagctcgctc

SEQ ID NO: 459604 - DNA, 57 bp, Artificial
  Synthetic oligonucleotide
tcccctcgaacaatcaagtagtaccgtgtgacccaatcataatagaaagaaacataa

SEQ ID NO: 459605 - DNA, 60 bp, Artificial
  Synthetic oligonucleotide
tcccctcgaattggatgagcacgtgtagatgaggttccccattttcgtgaaactctctgc

SEQ ID NO: 459606 - DNA, 54 bp, Artificial
  Synthetic oligonucleotide
tcccctcgcgtattagatacccccattactctcttataaaccccgagtcatccc

SEQ ID NO: 459607 - DNA, 59 bp, Artificial
  Synthetic oligonucleotide
tcccctcgtctgaagagagggagcgcgtgataaggaaatgctgcgaggcctacaaaaac

SEQ ID NO: 459608 - DNA, 54 bp, Artificial
  Synthetic oligonucleotide
tcccctctcgcaaacacaatttttatgtccgccccgctcacattgtcccccacc

SEQ ID NO: 459609 - DNA, 59 bp, Artificial
  Synthetic oligonucleotide
tcccctgaatccgtttgtcagccataaggaaattgagtccgtaaacaatgctgtagtga

SEQ ID NO: 459610 - DNA, 54 bp, Artificial
  Synthetic oligonucleotide
tcccctgaccgtaaggacgcccttcgggcgactagactcttggccctcgctttg

SEQ ID NO: 459611 - DNA, 60 bp, Artificial
  Synthetic oligonucleotide
tcccctgcctggatttgctgaaccttgtcatctttcttgtgaggcttgtggttatgttca

SEQ ID NO: 459612 - DNA, 52 bp, Artificial
  Synthetic oligonucleotide
tcccctgcgttcgcgagggtaacacctcgaaatgttgggtggcggtggcccc

SEQ ID NO: 459613 - DNA, 56 bp, Artificial
  Synthetic oligonucleotide
tcccctgggcagacctatgcaacaaactcttcccagacgcaacaaccaaccaccta

SEQ ID NO: 459614 - DNA, 56 bp, Artificial
  Synthetic oligonucleotide
tcccctgggtgcgtgccctgcgttcgggagaacaactcctcccggtgctgggtagc

SEQ ID NO: 459615 - DNA, 58 bp, Artificial
  Synthetic oligonucleotide
tcccctggtaatagtggatgtggaacgtggttctgggagtgattattacttgcatccc

SEQ ID NO: 459616 - DNA, 60 bp, Artificial
  Synthetic oligonucleotide
tcccctggtgcctgtatggtatcatgaacttcttcttggctaatgctggtgactttgttg

SEQ ID NO: 459617 - DNA, 54 bp, Artificial
  Synthetic oligonucleotide
tcccctgtattgggatagaaatggtacatgatggtgggaaaacgacttggcact

SEQ ID NO: 459618 - DNA, 60 bp, Artificial
  Synthetic oligonucleotide
tcccctgtgcgagaatccatggttggcacaatcgatgtgttggtagaatgagcagccaca

SEQ ID NO: 459619 - DNA, 60 bp, Artificial
  Synthetic oligonucleotide
tcccctgtgcgtgaatccatgcccggaacagccaatatgcacgtatatggagcacccgca

SEQ ID NO: 459620 - DNA, 60 bp, Artificial
  Synthetic oligonucleotide
tcccctgtgcgtgaatccgtcattccggcagttgatgtttaggtaatacgaacagccaca

SEQ ID NO: 459621 - DNA, 60 bp, Artificial
  Synthetic oligonucleotide
tcccctgtgtgctctcgtggacatacattattctgagatggaacggtgcagtccgaccca

SEQ ID NO: 459622 - DNA, 58 bp, Artificial
  Synthetic oligonucleotide
tccccttaccattggagagtgtcccaaatatgtcaaatcaaataaactggtccttgca

SEQ ID NO: 459623 - DNA, 54 bp, Artificial
  Synthetic oligonucleotide
tccccttacttgttgggttaggcataaccactgccgtctcaactgggactactg

SEQ ID NO: 459624 - DNA, 56 bp, Artificial
  Synthetic oligonucleotide
tccccttaggttcttcagttttgacaataacaggctgttctacatcaataaggtct

SEQ ID NO: 459625 - DNA, 55 bp, Artificial
  Synthetic oligonucleotide
tccccttcaaaactggcttcagccatccagaaagctcacgaagaaggcatctgtg

SEQ ID NO: 459626 - DNA, 51 bp, Artificial
  Synthetic oligonucleotide
tccccttccgaacgagggggacggtccttggaccctcagggggcccatgga

SEQ ID NO: 459627 - DNA, 54 bp, Artificial
  Synthetic oligonucleotide
tccccttccgacgaatgaacgggctaatatttacgggcggaggaatagactata

SEQ ID NO: 459628 - DNA, 60 bp, Artificial
  Synthetic oligonucleotide
tccccttcttctcatgtcaacgtgggtacaggggagtctggcggggagacggcatgatgc

SEQ ID NO: 459629 - DNA, 56 bp, Artificial
  Synthetic oligonucleotide
tccccttgcaggatctgaacactatccaggaatttgaaatagaaacccctccaaaa

SEQ ID NO: 459630 - DNA, 54 bp, Artificial
  Synthetic oligonucleotide
tccccttggcctcgctattgggggggcctggatctggcttgcgcatgctggcct

SEQ ID NO: 459631 - DNA, 56 bp, Artificial
  Synthetic oligonucleotide
tccccttggcggtccctctctccttcaccagctggacgatcctctttgggtcgaac

SEQ ID NO: 459632 - DNA, 50 bp, Artificial
  Synthetic oligonucleotide
tccccttggtaaaggtaaaggacttaaccggtgatgaaggttccgtcgag

SEQ ID NO: 459633 - DNA, 56 bp, Artificial
  Synthetic oligonucleotide
tccccttgtctagaaactcgacacatgagatgtactgggtcagtggggcagctgga

SEQ ID NO: 459634 - DNA, 52 bp, Artificial
  Synthetic oligonucleotide
tcccctttagaatcccttaagattgaggtaggaaaagacgcgggtgagttcg

SEQ ID NO: 459635 - DNA, 53 bp, Artificial
  Synthetic oligonucleotide
tcccctttctgttttcaccactatcatcttttcttctacctcagtgtacttat

SEQ ID NO: 459636 - DNA, 56 bp, Artificial
  Synthetic oligonucleotide
tcccgaaaatgctaggtacttatacacctagacaagcaatttcgggggtcactcca

SEQ ID NO: 459637 - DNA, 50 bp, Artificial
  Synthetic oligonucleotide
tcccgaaagcgaggcacttacgggttgtggttgcacgccgtcagcttatc

SEQ ID NO: 459638 - DNA, 55 bp, Artificial
  Synthetic oligonucleotide
tcccgaaagggacaatttggttgatttactctgttttaggcttatctaagctgct

SEQ ID NO: 459639 - DNA, 54 bp, Artificial
  Synthetic oligonucleotide
tcccgaaagtcgaagctcttgacccactccggagataaatccgtattcaggtga

SEQ ID NO: 459640 - DNA, 59 bp, Artificial
  Synthetic oligonucleotide
tcccgaaattgcaaattcttgacaaaatctattagtacatagagaatacgctcgtaatg

SEQ ID NO: 459641 - DNA, 55 bp, Artificial
  Synthetic oligonucleotide
tcccgaacattggatctagaccctgggtaaggggccagtctggcagagtaagcat

SEQ ID NO: 459642 - DNA, 50 bp, Artificial
  Synthetic oligonucleotide
tcccgaacgagcttcgcacactcctagcccagatgggcattccccggatc

SEQ ID NO: 459643 - DNA, 60 bp, Artificial
  Synthetic oligonucleotide
tcccgaagacattccgttagaagcattccaggtcaaatgatcgtgcttgatagctcgtaa

SEQ ID NO: 459644 - DNA, 59 bp, Artificial
  Synthetic oligonucleotide
tcccgaagtctgtctgaagtgggaattaatggacgaggattaccagggacgcttgtgca

SEQ ID NO: 459645 - DNA, 55 bp, Artificial
  Synthetic oligonucleotide
tcccgaatacagggacgagaacgtagccagaatcttaaggctcatctgaccatgc

SEQ ID NO: 459646 - DNA, 57 bp, Artificial
  Synthetic oligonucleotide
tcccgaatctacgagactgctccattgcagtcaatcaaacctctctggcagccatat

SEQ ID NO: 459647 - DNA, 57 bp, Artificial
  Synthetic oligonucleotide
tcccgacaacgccggagcctacaaagagcccagggccattggatcccgatacctcac

SEQ ID NO: 459648 - DNA, 51 bp, Artificial
  Synthetic oligonucleotide
tcccgacacgcgcggcgggggtgtaccccctgggagggtaggtaccactac

SEQ ID NO: 459649 - DNA, 53 bp, Artificial
  Synthetic oligonucleotide
tcccgaccaagcgggaaactgccaaggtcgtgtccaaaaagctgttagaagac

SEQ ID NO: 459650 - DNA, 52 bp, Artificial
  Synthetic oligonucleotide
tcccgacccctacccaggttcctcggaacaggaacaccaaattactcatccc

SEQ ID NO: 459651 - DNA, 55 bp, Artificial
  Synthetic oligonucleotide
tcccgacgaccaatcagtcccgacgccaataaattccatgccccggacgccatca

SEQ ID NO: 459652 - DNA, 51 bp, Artificial
  Synthetic oligonucleotide
tcccgactcatgttggactggcttatcaccgggaataaaccttgtcgattg

SEQ ID NO: 459653 - DNA, 53 bp, Artificial
  Synthetic oligonucleotide
tcccgactccgacacgcccacccttcccccgtaggccctcgtctggtgggcca

SEQ ID NO: 459654 - DNA, 59 bp, Artificial
  Synthetic oligonucleotide
tcccgagaaaaaatgcgaagtattaatctatgagttcacgaattggctcgccaatggtc

SEQ ID NO: 459655 - DNA, 60 bp, Artificial
  Synthetic oligonucleotide
tcccgagcaatcagagcaccgagtgcacgctattgcctcctcctgtgtttctcatctttt

SEQ ID NO: 459656 - DNA, 54 bp, Artificial
  Synthetic oligonucleotide
tcccgagctatttacgaccccctgccaccgagtccctttcgtggagcgctcttc

SEQ ID NO: 459657 - DNA, 59 bp, Artificial
  Synthetic oligonucleotide
tcccgagcttgttgcattattgcacccagctcaaccacctttactacgggtttattgca

SEQ ID NO: 459658 - DNA, 56 bp, Artificial
  Synthetic oligonucleotide
tcccgagggaggagatcctctccatcccaacgtgcgggctcccctatcccacgtaa

SEQ ID NO: 459659 - DNA, 58 bp, Artificial
  Synthetic oligonucleotide
tcccgagggtcatcagaggacaaccacccttaggggattgtgaacacccaggagcaca

SEQ ID NO: 459660 - DNA, 60 bp, Artificial
  Synthetic oligonucleotide
tcccgaggtatctagagtgctggtggatgaggtcgtattacttcactttgggcaattgtg

SEQ ID NO: 459661 - DNA, 59 bp, Artificial
  Synthetic oligonucleotide
tcccgaggtcagccactcgttactaaggccacagctcctaagttgatcgcagcttaccc

SEQ ID NO: 459662 - DNA, 60 bp, Artificial
  Synthetic oligonucleotide
tcccgagtctaatgacgtccagatcataggtgattctacccttcaccacatttagagcca

SEQ ID NO: 459663 - DNA, 53 bp, Artificial
  Synthetic oligonucleotide
tcccgataatgcaactgtttaaatagcatttgagtgttactgctgatggttgg

SEQ ID NO: 459664 - DNA, 54 bp, Artificial
  Synthetic oligonucleotide
tcccgatacctgcaccacgacgccccgagcgactacccggcggttcttcctccg

SEQ ID NO: 459665 - DNA, 58 bp, Artificial
  Synthetic oligonucleotide
tcccgatacttctgaaagctctgtatatgttgacaacaagggggaggcaaactaccaa

SEQ ID NO: 459666 - DNA, 58 bp, Artificial
  Synthetic oligonucleotide
tcccgatatccagcctgaggtcaaagtaagacctatcaaggaagtggcgccaggtttg

SEQ ID NO: 459667 - DNA, 57 bp, Artificial
  Synthetic oligonucleotide
tcccgatgcccgtttaggtgtcggtgctgcggaacatttagaagcaatgggtatccg

SEQ ID NO: 459668 - DNA, 60 bp, Artificial
  Synthetic oligonucleotide
tcccgatgcgcgatgcagttctttcacccgatgtgataatacggagcgtcagagacgcga

SEQ ID NO: 459669 - DNA, 60 bp, Artificial
  Synthetic oligonucleotide
tcccgattaaagaggacgctcatgctagagagctccgcgctgtaactgctcagctgaacc

SEQ ID NO: 459670 - DNA, 55 bp, Artificial
  Synthetic oligonucleotide
tcccgcacggctgctactgtggttcgataactccgcccagcgttccgccttcctt

SEQ ID NO: 459671 - DNA, 55 bp, Artificial
  Synthetic oligonucleotide
tcccgcagagccggacgtggggcgagagacagggatggacgtggagaggggaacg

SEQ ID NO: 459672 - DNA, 53 bp, Artificial
  Synthetic oligonucleotide
tcccgcaggtaccctcaactaccacgtgcggtgactactgggagagcatacga

SEQ ID NO: 459673 - DNA, 59 bp, Artificial
  Synthetic oligonucleotide
tcccgccacctgcgagccaatcagacgcaaaaatggatactgcccttgttttaccagat

SEQ ID NO: 459674 - DNA, 57 bp, Artificial
  Synthetic oligonucleotide
tcccgcccgcattatatctaaaataagagtgtacatgaaacccaaacatgtaaggtg

SEQ ID NO: 459675 - DNA, 53 bp, Artificial
  Synthetic oligonucleotide
tcccgcccgcgtgattttaagactgaggttgacgtcatttacgggccaccggg

SEQ ID NO: 459676 - DNA, 60 bp, Artificial
  Synthetic oligonucleotide
tcccgccctgtcgtttcagccaatggcgagccgactgtgaagctatatacatctgttgag

SEQ ID NO: 459677 - DNA, 60 bp, Artificial
  Synthetic oligonucleotide
tcccgccgtacagatgcagtggagctactacttcagtaggcagagtattccccctatccg

SEQ ID NO: 459678 - DNA, 54 bp, Artificial
  Synthetic oligonucleotide
tcccgcctccacctcaggtcgtgttaacttatacgtcccaggaaccaagacctc

SEQ ID NO: 459679 - DNA, 55 bp, Artificial
  Synthetic oligonucleotide
tcccgcctttaatttgaactggcttgccgtacttacaatttgattgccagtcctt

SEQ ID NO: 459680 - DNA, 50 bp, Artificial
  Synthetic oligonucleotide
tcccgcctttcagaatgatgtcacaatagaatttgaacaagatctaaacc

SEQ ID NO: 459681 - DNA, 57 bp, Artificial
  Synthetic oligonucleotide
tcccgcgcaccctcctgaagcacattaaaaaccttaggtgggagaagatcaacgctg

SEQ ID NO: 459682 - DNA, 60 bp, Artificial
  Synthetic oligonucleotide
tcccgcgccgcagcagagctaggcgccgccagcggtggcaaagtgtactacaagccaaga

SEQ ID NO: 459683 - DNA, 55 bp, Artificial
  Synthetic oligonucleotide
tcccgcgcctctgctacaagctcactatatgggtccacgcctagcgggtcaatgg

SEQ ID NO: 459684 - DNA, 60 bp, Artificial
  Synthetic oligonucleotide
tcccgcgcgctataaaacttgctggcgaaggagtagagccgcaacatgtgggatccatta

SEQ ID NO: 459685 - DNA, 59 bp, Artificial
  Synthetic oligonucleotide
tcccgcggttggagaccaacaggtgggaggggctatcgtcgacgtgatgtgtcatgcaa

SEQ ID NO: 459686 - DNA, 52 bp, Artificial
  Synthetic oligonucleotide
tcccgctccactcaggagtggttgagcagatggggcatacagcatgtgacag

SEQ ID NO: 459687 - DNA, 50 bp, Artificial
  Synthetic oligonucleotide
tcccgctgagactctatataattgaaagcattaggaggattaactaactg

SEQ ID NO: 459688 - DNA, 52 bp, Artificial
  Synthetic oligonucleotide
tcccgctgctcatttgccgcagaaactggggttgccctttattccctgcatg

SEQ ID NO: 459689 - DNA, 50 bp, Artificial
  Synthetic oligonucleotide
tcccgcttagacgcaattgccgaagagcgggagatggacgaattcttaga

SEQ ID NO: 459690 - DNA, 56 bp, Artificial
  Synthetic oligonucleotide
tcccgctttcaccaatcggcagtcgggaaggcagcctactcccccttctccacctc

SEQ ID NO: 459691 - DNA, 54 bp, Artificial
  Synthetic oligonucleotide
tcccggacacagcagcagtaagtcttcatggaggtcctgcaacaaacagggact

SEQ ID NO: 459692 - DNA, 55 bp, Artificial
  Synthetic oligonucleotide
tcccggacaggccgtgtgctggttcaagtttttgcccccgagaattctggcactt

SEQ ID NO: 459693 - DNA, 50 bp, Artificial
  Synthetic oligonucleotide
tcccggaccccctttcaaagtgaccgaggggggtgactttgaacattggg

SEQ ID NO: 459694 - DNA, 53 bp, Artificial
  Synthetic oligonucleotide
tcccggataacattcttccagaaggattgtaataagtttacgacgggtgaaac

SEQ ID NO: 459695 - DNA, 55 bp, Artificial
  Synthetic oligonucleotide
tcccggatgagtcgacgtagatcttcccgctcagtgggcagggcgtatctctcgg

SEQ ID NO: 459696 - DNA, 60 bp, Artificial
  Synthetic oligonucleotide
tcccggcatcctcaactcaagccgcggtatctacacatacagttaccaaggcagagtcat

SEQ ID NO: 459697 - DNA, 60 bp, Artificial
  Synthetic oligonucleotide
tcccggcgcctactacaggatcaggttgcactcgaataccctcatttgacatgagtgcta

SEQ ID NO: 459698 - DNA, 55 bp, Artificial
  Synthetic oligonucleotide
tcccggcgcggtctgagcgtgtcagtgcaactgcattaaaaccgccccgcaaagc

SEQ ID NO: 459699 - DNA, 51 bp, Artificial
  Synthetic oligonucleotide
tcccggctaccccgtagtcctccgaaagtccctcgcacagcttatccccgt

SEQ ID NO: 459700 - DNA, 60 bp, Artificial
  Synthetic oligonucleotide
tcccggctgggtttgcgatgctaaagtgtaacaataagacattcaatggatcaggaccat

SEQ ID NO: 459701 - DNA, 60 bp, Artificial
  Synthetic oligonucleotide
tcccgggaaacaagctctatgctccgcatacatgcgagttcacgcctacatacatgcaca

SEQ ID NO: 459702 - DNA, 52 bp, Artificial
  Synthetic oligonucleotide
tcccgggaaaggagagcccctacaccccaacgtgcgggctcccctctcccac

SEQ ID NO: 459703 - DNA, 54 bp, Artificial
  Synthetic oligonucleotide
tcccgggaccgccgcaaaccccgtggtggcgtatggagagttcagcgagaaaat

SEQ ID NO: 459704 - DNA, 57 bp, Artificial
  Synthetic oligonucleotide
tcccgggcaacaataaagtgataagataagaccgtgagtttgaatatccacgttata

SEQ ID NO: 459705 - DNA, 51 bp, Artificial
  Synthetic oligonucleotide
tcccggggatcggcgaatcgtcccgggatggggactccaagggcccccttc

SEQ ID NO: 459706 - DNA, 55 bp, Artificial
  Synthetic oligonucleotide
tcccggggatgagctctacctcactgaccccgctgctacctggttcgaggctaat

SEQ ID NO: 459707 - DNA, 59 bp, Artificial
  Synthetic oligonucleotide
tcccggggattgtggttgcccgtacatatacaagaggggcaatgacattgtggtggctg

SEQ ID NO: 459708 - DNA, 55 bp, Artificial
  Synthetic oligonucleotide
tcccgggtccgacccgtcgtgatcatggtatctggcaggcccgggatcgggaaaa

SEQ ID NO: 459709 - DNA, 58 bp, Artificial
  Synthetic oligonucleotide
tcccggtgttgtgcccaggtatggaactgtgaaacattatgaatacaaggaagagccc

SEQ ID NO: 459710 - DNA, 57 bp, Artificial
  Synthetic oligonucleotide
tcccggttcagtgaccgactgagtatccatctacctaagaccacccgcttgacacct

SEQ ID NO: 459711 - DNA, 59 bp, Artificial
  Synthetic oligonucleotide
tcccggttggaatacaggatcagctgttggagttaacccagacttggcttggacacaga

SEQ ID NO: 459712 - DNA, 59 bp, Artificial
  Synthetic oligonucleotide
tcccgtacgactctagcatccactcgtactttatcactgacgagaacagtggtagcagt

SEQ ID NO: 459713 - DNA, 60 bp, Artificial
  Synthetic oligonucleotide
tcccgtacgtgtccgctgcggattatgcctacacggcatctgacacggcggaaacaacca

SEQ ID NO: 459714 - DNA, 60 bp, Artificial
  Synthetic oligonucleotide
tcccgtaggcgaagcaggtttattgacggttcatgctccaaccgcctcgatgatctatca

SEQ ID NO: 459715 - DNA, 60 bp, Artificial
  Synthetic oligonucleotide
tcccgtatcattagtgaatggagtgtcggtgggggcatcgacgcagtctgccttcttttg

SEQ ID NO: 459716 - DNA, 59 bp, Artificial
  Synthetic oligonucleotide
tcccgtcaaacctgtggtgggaaccagccacgctgagctggaagtagctgtaaaggatc

SEQ ID NO: 459717 - DNA, 55 bp, Artificial
  Synthetic oligonucleotide
tcccgtcacccgaacggtatactcggtacactattagcaaaggtgctaggtggtg

SEQ ID NO: 459718 - DNA, 51 bp, Artificial
  Synthetic oligonucleotide
tcccgtcctggtgtgtctctctgactactagtatgtatgctggttcgaagt

SEQ ID NO: 459719 - DNA, 55 bp, Artificial
  Synthetic oligonucleotide
tcccgtcgcaaacgtgcctctgcaacagacctgtaccgcacctgcaaggttacag

SEQ ID NO: 459720 - DNA, 51 bp, Artificial
  Synthetic oligonucleotide
tcccgtcggtgtgtaccgtttgaaacgtgcgaggctgactgccggggtgaa

SEQ ID NO: 459721 - DNA, 51 bp, Artificial
  Synthetic oligonucleotide
tcccgtcgtatgcgcgagagtttttggcgccctcgctatggaagtgggatc

SEQ ID NO: 459722 - DNA, 55 bp, Artificial
  Synthetic oligonucleotide
tcccgtctaagtgtgtctctcggactactaagatgtatgctggttcgtagtcctt

SEQ ID NO: 459723 - DNA, 50 bp, Artificial
  Synthetic oligonucleotide
tcccgtctctacggagtcttctgacttagcctggcgaacctttgtgttcg

SEQ ID NO: 459724 - DNA, 60 bp, Artificial
  Synthetic oligonucleotide
tcccgtgacgtcatagttgtgacgtcatcaattattctatacatgctgagtacttgctta

SEQ ID NO: 459725 - DNA, 60 bp, Artificial
  Synthetic oligonucleotide
tcccgtgcgctaagctgccgcatgtccaactttggatatgacaatctcgattatcatgct

SEQ ID NO: 459726 - DNA, 52 bp, Artificial
  Synthetic oligonucleotide
tcccgtgcggaaggtcaacactcacctccgaggggccccggggttcgacagc

SEQ ID NO: 459727 - DNA, 60 bp, Artificial
  Synthetic oligonucleotide
tcccgtgctacagcagaaagtcgttgagctagaaaaacagattatcgtgcagaaatcaat

SEQ ID NO: 459728 - DNA, 51 bp, Artificial
  Synthetic oligonucleotide
tcccgtggaggccttgcatcgcaaaacctcactacacccggccgtgtactc

SEQ ID NO: 459729 - DNA, 60 bp, Artificial
  Synthetic oligonucleotide
tcccgtggcgttgatcggtacctgttgcctgtattctatgacgcagtggtcgattttcat

SEQ ID NO: 459730 - DNA, 52 bp, Artificial
  Synthetic oligonucleotide
tcccgtggttgacggatgggcctaacatagggttaaagttaggtgttagtag

SEQ ID NO: 459731 - DNA, 55 bp, Artificial
  Synthetic oligonucleotide
tcccgtgtgtacgtgtcatgtaacaatccacctcccacatacagtggacgggtgg

SEQ ID NO: 459732 - DNA, 57 bp, Artificial
  Synthetic oligonucleotide
tcccgttaaagtcgaatggtggttgtatctctacgtatgtgtaggggattgtgcagt

SEQ ID NO: 459733 - DNA, 55 bp, Artificial
  Synthetic oligonucleotide
tcccgttagagagggaggtatgggaccaatggtggcatgactattggcaagtaac

SEQ ID NO: 459734 - DNA, 60 bp, Artificial
  Synthetic oligonucleotide
tcccgttagaggacccacgtcatagtgaatgtgctctctggactgaaatggactcgctgc

SEQ ID NO: 459735 - DNA, 52 bp, Artificial
  Synthetic oligonucleotide
tcccgttcacttccgaaaccaagttaaaatacgccgccgagttgatgtaaac

SEQ ID NO: 459736 - DNA, 51 bp, Artificial
  Synthetic oligonucleotide
tcccgttccgcgacagtgctgaccgaagcgtcgattgggatcctttgtgat

SEQ ID NO: 459737 - DNA, 60 bp, Artificial
  Synthetic oligonucleotide
tcccgttcgtcaatgcaagatgtattctgtatacagacgttggtataagacgccgtatag

SEQ ID NO: 459738 - DNA, 55 bp, Artificial
  Synthetic oligonucleotide
tcccgttggtaccactacgtcccggttctagtggtatcaactctgtcccaatcac

SEQ ID NO: 459739 - DNA, 50 bp, Artificial
  Synthetic oligonucleotide
tcccgtttgctttcccacgccccacaatccgtctagcaggcgcgtaactg

SEQ ID NO: 459740 - DNA, 58 bp, Artificial
  Synthetic oligonucleotide
tccctaaaccaggtgatatagcagtgtggacaggtggtaattacaattggaacacttg

SEQ ID NO: 459741 - DNA, 60 bp, Artificial
  Synthetic oligonucleotide
tccctaacaaatgtagagtggcagcttgggttcaaacagagatgaatctactgagcactc

SEQ ID NO: 459742 - DNA, 58 bp, Artificial
  Synthetic oligonucleotide
tccctaacacggactggaccaatccggttggagctcgagactgtcccacataagatac

SEQ ID NO: 459743 - DNA, 58 bp, Artificial
  Synthetic oligonucleotide
tccctaacatcttgagaaactctgactacaatctcaattcccccctgatagaagaccc

SEQ ID NO: 459744 - DNA, 60 bp, Artificial
  Synthetic oligonucleotide
tccctaaggcggccagaagtcagtacagcggatttgtgagaacattgttccaacaaatgc

SEQ ID NO: 459745 - DNA, 52 bp, Artificial
  Synthetic oligonucleotide
tccctaatacatagcacttatttctcttgctttacagcaggtgaagtaagaa

SEQ ID NO: 459746 - DNA, 55 bp, Artificial
  Synthetic oligonucleotide
tccctaatacatataggggcatccgatccagttatggacatgatcaaacggggcc

SEQ ID NO: 459747 - DNA, 51 bp, Artificial
  Synthetic oligonucleotide
tccctaatgcgccccagaatctaacgtatacggccactactgacagcgtca

SEQ ID NO: 459748 - DNA, 55 bp, Artificial
  Synthetic oligonucleotide
tccctaattttggaagagcggttgcgcgtctacaatcaccagatactgtcggtga

SEQ ID NO: 459749 - DNA, 51 bp, Artificial
  Synthetic oligonucleotide
tccctacaaggttatttaccaaagggattttcgagatgacgggattaaacc

SEQ ID NO: 459750 - DNA, 59 bp, Artificial
  Synthetic oligonucleotide
tccctacacgaacagtgaggctcccattcggaatctcagtcctacagaggcgaacggct

SEQ ID NO: 459751 - DNA, 51 bp, Artificial
  Synthetic oligonucleotide
tccctacagccatggaacgggaacgggatacaccatggacacagtcaacag

SEQ ID NO: 459752 - DNA, 55 bp, Artificial
  Synthetic oligonucleotide
tccctaccatacatgtcaagcctaattggaccttaacagaattacagtccacctt

SEQ ID NO: 459753 - DNA, 60 bp, Artificial
  Synthetic oligonucleotide
tccctaccgcggaaaggtgactgccggagaggtaatgtgagaggagcggtgagtggcatc

SEQ ID NO: 459754 - DNA, 51 bp, Artificial
  Synthetic oligonucleotide
tccctacgaggagtgacaccaccaaaccccgatctccacaaacaacccagc

SEQ ID NO: 459755 - DNA, 60 bp, Artificial
  Synthetic oligonucleotide
tccctactaagtatgtcacagcgagggttagtcctggtctgtgcattgctggtgatagag

SEQ ID NO: 459756 - DNA, 57 bp, Artificial
  Synthetic oligonucleotide
tccctactattgtgcatttaccctagttctagaactgcagctagtgcaattacaatt

SEQ ID NO: 459757 - DNA, 60 bp, Artificial
  Synthetic oligonucleotide
tccctactcatctggccactgacacggaactgacagagatacgtgggatgatggacgcca

SEQ ID NO: 459758 - DNA, 59 bp, Artificial
  Synthetic oligonucleotide
tccctactcccaagggcttgttatggggaggcataatgtatcagtctcctctgatttcg

SEQ ID NO: 459759 - DNA, 55 bp, Artificial
  Synthetic oligonucleotide
tccctacttctattggcggaggttctatgctcagatgcacctttactgaggtatg

SEQ ID NO: 459760 - DNA, 60 bp, Artificial
  Synthetic oligonucleotide
tccctagcagttcatacaggaggccagttggaatttccaacatggtggaggccatggtat

SEQ ID NO: 459761 - DNA, 59 bp, Artificial
  Synthetic oligonucleotide
tccctagcattgctcgtcctcttgctcccccaacgggcgtatgcttggtcgggtgaaga

SEQ ID NO: 459762 - DNA, 60 bp, Artificial
  Synthetic oligonucleotide
tccctaggtttgccgcaactctgtccataatttgcttgctcaccactggtgccctggcct

SEQ ID NO: 459763 - DNA, 60 bp, Artificial
  Synthetic oligonucleotide
tccctagtgttgcacattccttggctgtcgagctctgtgtaccagggatccatggatggg

SEQ ID NO: 459764 - DNA, 60 bp, Artificial
  Synthetic oligonucleotide
tccctataccccatgagcccgcttctacaacagtgcattaggggtgacacttcatcttgt

SEQ ID NO: 459765 - DNA, 50 bp, Artificial
  Synthetic oligonucleotide
tccctatcccacacctcgccgttccggtaaccctttcaacagaacataca

SEQ ID NO: 459766 - DNA, 59 bp, Artificial
  Synthetic oligonucleotide
tccctatcttgtgctggactttgatgggtacctgagtagagtgggccgtagagggtgac

SEQ ID NO: 459767 - DNA, 55 bp, Artificial
  Synthetic oligonucleotide
tccctatgtcaacatatgggtggaatctagtacgcttacagagcggagttgacgt

SEQ ID NO: 459768 - DNA, 55 bp, Artificial
  Synthetic oligonucleotide
tccctattgctgcacaatcccaagacatgtcatcaccttctagagttttcttagt

SEQ ID NO: 459769 - DNA, 55 bp, Artificial
  Synthetic oligonucleotide
tccctatttcagccctttgtgtgtggatcccagcatagaacatgagttaagtccc

SEQ ID NO: 459770 - DNA, 59 bp, Artificial
  Synthetic oligonucleotide
tccctcaattgtcattaaactagtgacctcagcttctaaagcagccaaggcttcccctg

SEQ ID NO: 459771 - DNA, 55 bp, Artificial
  Synthetic oligonucleotide
tccctcaccagtggatcaatctgaggactaataatagtgccaccatagtgatacc

SEQ ID NO: 459772 - DNA, 60 bp, Artificial
  Synthetic oligonucleotide
tccctcactatcacttggtcctgcattggaagtccacacaattgggaagacaatgagtac

SEQ ID NO: 459773 - DNA, 53 bp, Artificial
  Synthetic oligonucleotide
tccctcactcaatacacaaaattgtctcaccaactaatatcagatgtacaagc

SEQ ID NO: 459774 - DNA, 51 bp, Artificial
  Synthetic oligonucleotide
tccctcactcctatttcatccacttccgctcattgggcctgagtggaaagt

SEQ ID NO: 459775 - DNA, 55 bp, Artificial
  Synthetic oligonucleotide
tccctcactgagaggctttatgttgggggccctcttaccaattcaaggggggaga

SEQ ID NO: 459776 - DNA, 56 bp, Artificial
  Synthetic oligonucleotide
tccctcactgttcgggatcctcagccgtgggaacacctcgacctgtaccggccacc

SEQ ID NO: 459777 - DNA, 60 bp, Artificial
  Synthetic oligonucleotide
tccctcatgtgttgatgaacctggctgagaccacccaggctgacctatgcatcccctatg

SEQ ID NO: 459778 - DNA, 59 bp, Artificial
  Synthetic oligonucleotide
tccctccaagtcgtcaagtcatctgatggcaagtatacaatctcaaagaggtacggcaa

SEQ ID NO: 459779 - DNA, 60 bp, Artificial
  Synthetic oligonucleotide
tccctccacagaactgcgggtatgcaacagtaacagactctgtcgctgttgtcgtccaag

SEQ ID NO: 459780 - DNA, 58 bp, Artificial
  Synthetic oligonucleotide
tccctcctaaggtagagacacacccaatcagaggtatcgccccgcctctcagtgttgg

SEQ ID NO: 459781 - DNA, 60 bp, Artificial
  Synthetic oligonucleotide
tccctccttcgaatgcaagttggaagccgtgcaagcgcaacatatacttccacaagttca

SEQ ID NO: 459782 - DNA, 56 bp, Artificial
  Synthetic oligonucleotide
tccctcgccaaaaagtcaagaacgtgacaacaacgcctggagtgttcgccctgaaa

SEQ ID NO: 459783 - DNA, 57 bp, Artificial
  Synthetic oligonucleotide
tccctcgggcctactattcgaccgcggcccccattgataacattggaggagtccatc

SEQ ID NO: 459784 - DNA, 53 bp, Artificial
  Synthetic oligonucleotide
tccctcggtcagtggggccctattgcgtggttcgcacgagcagcttgattacg

SEQ ID NO: 459785 - DNA, 60 bp, Artificial
  Synthetic oligonucleotide
tccctctattaatactgaaggtacatatgtctgcgatccaacttgagtacctctaaatat

SEQ ID NO: 459786 - DNA, 60 bp, Artificial
  Synthetic oligonucleotide
tccctctcaatagctagggccatgcttgaaaggctcatggctggagctgttaacgtctgt

SEQ ID NO: 459787 - DNA, 60 bp, Artificial
  Synthetic oligonucleotide
tccctctcagattcgttatggcgccccgaatgtcttcggctcggctaatctgttcacgcc

SEQ ID NO: 459788 - DNA, 53 bp, Artificial
  Synthetic oligonucleotide
tccctctcccctcggtaaatatccgaggcctcctccctacgttctcccgaagc

SEQ ID NO: 459789 - DNA, 59 bp, Artificial
  Synthetic oligonucleotide
tccctctcgtgtatccttcgctcgccgcgttagccgtgctagtcgtaaacatgtccata

SEQ ID NO: 459790 - DNA, 60 bp, Artificial
  Synthetic oligonucleotide
tccctctgggtatggacgacttcacaagtgtactcaagatggacgattttgtcaatatgc

SEQ ID NO: 459791 - DNA, 56 bp, Artificial
  Synthetic oligonucleotide
tccctcttagtagacataaggtttgacaaatcagacatgactgaccagaggacttg

SEQ ID NO: 459792 - DNA, 59 bp, Artificial
  Synthetic oligonucleotide
tccctctttgcatccggaccaactcagagaatccagcttgtaaacaccaacggtagctg

SEQ ID NO: 459793 - DNA, 58 bp, Artificial
  Synthetic oligonucleotide
tccctgaaaaagaaaatgcctcggcggattgaagaagaagtatggctcccgtgctcac

SEQ ID NO: 459794 - DNA, 55 bp, Artificial
  Synthetic oligonucleotide
tccctgaaacaagagagcctcgcatcttaacaagaacccaatatagcaacccagc

SEQ ID NO: 459795 - DNA, 55 bp, Artificial
  Synthetic oligonucleotide
tccctgaaaccgtgaagccgcaaacgttatggacgactgcagatccctcgcctaa

SEQ ID NO: 459796 - DNA, 58 bp, Artificial
  Synthetic oligonucleotide
tccctgaagtctgcttaaagtgggagctaatggatgagaattatcggggaagactttg

SEQ ID NO: 459797 - DNA, 60 bp, Artificial
  Synthetic oligonucleotide
tccctgacaccatgcacttgcggctcctcggacctttacctggtcacgagacatgctgat

SEQ ID NO: 459798 - DNA, 60 bp, Artificial
  Synthetic oligonucleotide
tccctgacagtaatgcatacgtgcgttcatcctattcgccattaatggacacgcgtcagc

SEQ ID NO: 459799 - DNA, 58 bp, Artificial
  Synthetic oligonucleotide
tccctgactagctcctctgtcccgttgaagtcgaaagggggattcatatggacgtatg

SEQ ID NO: 459800 - DNA, 60 bp, Artificial
  Synthetic oligonucleotide
tccctgagcgcgagttggaattacgacagaccggcaagcctgtgttgataccttattctc

SEQ ID NO: 459801 - DNA, 54 bp, Artificial
  Synthetic oligonucleotide
tccctgagttccgttcagacgtagcggaaaagtttggtattaaactgactataa

SEQ ID NO: 459802 - DNA, 55 bp, Artificial
  Synthetic oligonucleotide
tccctgcaaggtctgtggagagccaacacagcacactcagcgagctacctgcccc

SEQ ID NO: 459803 - DNA, 60 bp, Artificial
  Synthetic oligonucleotide
tccctgcatcaataccagcttatagaacaacaaattatcactttgacactagccctatta

SEQ ID NO: 459804 - DNA, 60 bp, Artificial
  Synthetic oligonucleotide
tccctgcatttgctaggtgacccatgtcagagtgactatgataacgccaaggaccgaggt

SEQ ID NO: 459805 - DNA, 55 bp, Artificial
  Synthetic oligonucleotide
tccctgcgaaatgtgtcaccattccataggcaggccctgcagactgtatgggtca

SEQ ID NO: 459806 - DNA, 58 bp, Artificial
  Synthetic oligonucleotide
tccctgcgggggttctggaagaagcactccggtgagcccggcactctcctatggaata

SEQ ID NO: 459807 - DNA, 60 bp, Artificial
  Synthetic oligonucleotide
tccctgctgatacctcagacacattaagcacagagctgcaatacagcgttacggctgacg

SEQ ID NO: 459808 - DNA, 60 bp, Artificial
  Synthetic oligonucleotide
tccctgcttactctcagcttaaagccgatggtgcgcgttgtatgtcggatctgttagaag

SEQ ID NO: 459809 - DNA, 59 bp, Artificial
  Synthetic oligonucleotide
tccctgcttactggaggttggaagaccgtgtcaggccacgcaagtgccacttcgctaag

SEQ ID NO: 459810 - DNA, 60 bp, Artificial
  Synthetic oligonucleotide
tccctggcagccatagctaaccaggcagtggtcctgatgggtttagacaaaggatggccg

SEQ ID NO: 459811 - DNA, 60 bp, Artificial
  Synthetic oligonucleotide
tccctggccttctttgacctaagctctactagagtgcacaagaatgatgacattagaagg

SEQ ID NO: 459812 - DNA, 57 bp, Artificial
  Synthetic oligonucleotide
tccctggctgcaggcgggggcgcgttagccgcggggcgcgcgttccttagatgcggg

SEQ ID NO: 459813 - DNA, 60 bp, Artificial
  Synthetic oligonucleotide
tccctggctttctttgacctaagctccaccagagtgcataggtctgatgatattagaagg

SEQ ID NO: 459814 - DNA, 58 bp, Artificial
  Synthetic oligonucleotide
tccctggtgcgtgtatgggatgcggaagtgttgtttctggagaaaaggtgtcttggtg

SEQ ID NO: 459815 - DNA, 60 bp, Artificial
  Synthetic oligonucleotide
tccctggtggagcttcgtgtaacaacaccgaaatcaacagtggtcataagactgcacctg

SEQ ID NO: 459816 - DNA, 60 bp, Artificial
  Synthetic oligonucleotide
tccctggttcctaaggcagccagaggtcaatacagtggattcgtgaggacactgtttcag

SEQ ID NO: 459817 - DNA, 53 bp, Artificial
  Synthetic oligonucleotide
tccctggttgggaagcagtcgcccttccagaatgcctacaatgtcaagggcaa

SEQ ID NO: 459818 - DNA, 57 bp, Artificial
  Synthetic oligonucleotide
tccctgttcttagtttgtcttgttttcaagatctaacagctggcgcccggacaggga

SEQ ID NO: 459819 - DNA, 54 bp, Artificial
  Synthetic oligonucleotide
tccctgttggcaagagacagagcagcggtgttgaagacgcccctgttaataatg

SEQ ID NO: 459820 - DNA, 55 bp, Artificial
  Synthetic oligonucleotide
tccctgttggggacgttaccgaatatggcttccttaacctcagtggcagaccaac

SEQ ID NO: 459821 - DNA, 50 bp, Artificial
  Synthetic oligonucleotide
tcccttaacgcaatgccaccacgagtctccgccgcagtcgcaaggtttcc

SEQ ID NO: 459822 - DNA, 54 bp, Artificial
  Synthetic oligonucleotide
tcccttaccttacaacggcgtgttgagataggtcctcgggggaggttatccatg

SEQ ID NO: 459823 - DNA, 55 bp, Artificial
  Synthetic oligonucleotide
tcccttactagctcctctgtcccgttgaagtcgaatggtggaaccatttggacgt

SEQ ID NO: 459824 - DNA, 57 bp, Artificial
  Synthetic oligonucleotide
tcccttagcgctgctcagagccaagaatacccctagccggtttggtctaactcctta

SEQ ID NO: 459825 - DNA, 55 bp, Artificial
  Synthetic oligonucleotide
tcccttaggtcactagttgcctcatcaggcaccctggagtttaccaacgaaaact

SEQ ID NO: 459826 - DNA, 55 bp, Artificial
  Synthetic oligonucleotide
tcccttaggtcactagttgcctcatccggcaccctggagtttaacgatgaaagtt

SEQ ID NO: 459827 - DNA, 56 bp, Artificial
  Synthetic oligonucleotide
tcccttatccccgatcgacggaagtgtacgtccgatctatatttggtcctggcggc

SEQ ID NO: 459828 - DNA, 56 bp, Artificial
  Synthetic oligonucleotide
tcccttatcgtccgttcaaagagacctacttgcggttgctctaccctgagtatggc

SEQ ID NO: 459829 - DNA, 57 bp, Artificial
  Synthetic oligonucleotide
tcccttatctccacctctaagggacactcaaggtcagggccctgtactttcctgctg

SEQ ID NO: 459830 - DNA, 57 bp, Artificial
  Synthetic oligonucleotide
tcccttattaaacataatacctgtgtagttactactgacaatgggaagttcacagga

SEQ ID NO: 459831 - DNA, 59 bp, Artificial
  Synthetic oligonucleotide
tcccttattacattaagagcctctgacttatttgcggagttgagagctttggcgtaagc

SEQ ID NO: 459832 - DNA, 55 bp, Artificial
  Synthetic oligonucleotide
tcccttcagcaaaagtttcaatactccacgaagtcaaacctgttacatctgggtg

SEQ ID NO: 459833 - DNA, 60 bp, Artificial
  Synthetic oligonucleotide
tcccttccgccagatcccacctccgcgtgtcactgctggggtcgcccaggagtggcgcat

SEQ ID NO: 459834 - DNA, 55 bp, Artificial
  Synthetic oligonucleotide
tcccttcgaattgcagaagcacgtggagatgaggttgcccatcctcgtgtagttc

SEQ ID NO: 459835 - DNA, 60 bp, Artificial
  Synthetic oligonucleotide
tcccttcgaattggagaagcacatgcagatgaggttggccatcctcgtgaagctctctgc

SEQ ID NO: 459836 - DNA, 60 bp, Artificial
  Synthetic oligonucleotide
tcccttcgaattggatgagaacgtggagatgaggctccccattctcatgtaactctctgc

SEQ ID NO: 459837 - DNA, 60 bp, Artificial
  Synthetic oligonucleotide
tcccttcgtgagactgtgtctgaacgtgcctgacacagaatcacccgggtctaggactgg

SEQ ID NO: 459838 - DNA, 59 bp, Artificial
  Synthetic oligonucleotide
tcccttcgtggaggttcctggtctccgcgtgattacacgccgcagactcaaggcaccta

SEQ ID NO: 459839 - DNA, 59 bp, Artificial
  Synthetic oligonucleotide
tcccttgatttggatcaatttccattaggaaggcgattccttgcacagcaaggacttgg

SEQ ID NO: 459840 - DNA, 60 bp, Artificial
  Synthetic oligonucleotide
tcccttgcgattctactcacgcaaggcagctaaacgctggcttcgcaagcatcgccgcac

SEQ ID NO: 459841 - DNA, 55 bp, Artificial
  Synthetic oligonucleotide
tcccttggaagctgtaagaggtgagtccagaggggtatggattggcagaggtgag

SEQ ID NO: 459842 - DNA, 56 bp, Artificial
  Synthetic oligonucleotide
tcccttgtaaagagaggttgaacaagacctaccacataggaagagaaaggtgacca

SEQ ID NO: 459843 - DNA, 51 bp, Artificial
  Synthetic oligonucleotide
tcccttgtaagactcccgcaccggatgttgttgcaataagtttaaccggac

SEQ ID NO: 459844 - DNA, 60 bp, Artificial
  Synthetic oligonucleotide
tcccttgtctgcttctgtactgaaagtattgctgagcaagcataccaggaacatgagctg

SEQ ID NO: 459845 - DNA, 52 bp, Artificial
  Synthetic oligonucleotide
tcccttgtttacctcaagggctagcgttagatataggttcggctggatctcc

SEQ ID NO: 459846 - DNA, 55 bp, Artificial
  Synthetic oligonucleotide
tccctttatgtttgttacaaagaattccatacttgtcccagactttatcctcgaa

SEQ ID NO: 459847 - DNA, 60 bp, Artificial
  Synthetic oligonucleotide
tccctttcgaaagagcgaccataatggctgcattcacggggaatactgagggcagaacat

SEQ ID NO: 459848 - DNA, 60 bp, Artificial
  Synthetic oligonucleotide
tccctttcggttgcctctgacataagtgggactcaatgcatacagaccgattataagtat

SEQ ID NO: 459849 - DNA, 60 bp, Artificial
  Synthetic oligonucleotide
tccctttctgatgacacgcgatggcataaaatttgcttccaattgtggggcgatcagtac

SEQ ID NO: 459850 - DNA, 60 bp, Artificial
  Synthetic oligonucleotide
tccctttggctggtccaatggtggcaggaggtttacttctggcagcctacgtgatgagtg

SEQ ID NO: 459851 - DNA, 55 bp, Artificial
  Synthetic oligonucleotide
tccctttggtcaatttcgcgttcctttagcctctaggatgcttatcccgaactcc

SEQ ID NO: 459852 - DNA, 52 bp, Artificial
  Synthetic oligonucleotide
tccctttggtcaattttgcgttcctttaattccaggatacttaccctgaagt

SEQ ID NO: 459853 - DNA, 60 bp, Artificial
  Synthetic oligonucleotide
tcccttttcatttccaattagaaaagcaagtgatacatgctgagatacaagtcttgggtc

SEQ ID NO: 459854 - DNA, 59 bp, Artificial
  Synthetic oligonucleotide
tcccttttgagagagcgaccgttatggcagctttcattgggaacaatgagggaagaaca

SEQ ID NO: 459855 - DNA, 60 bp, Artificial
  Synthetic oligonucleotide
tccgaaaaaccagattcctgccagtagcaggcggaacaagcagtgtgtacattgaagtat

SEQ ID NO: 459856 - DNA, 59 bp, Artificial
  Synthetic oligonucleotide
tccgaaacaaagagtatgatcttgacaaggctataggaaaagccgtagaggctagccca

SEQ ID NO: 459857 - DNA, 56 bp, Artificial
  Synthetic oligonucleotide
tccgaaaccccggtctggcgtttaccaatacgctcagcactctccgctttgtccac

SEQ ID NO: 459858 - DNA, 53 bp, Artificial
  Synthetic oligonucleotide
tccgaaacgcatagcttcacctccgcgtcacgtctattatccaaacccttaga

SEQ ID NO: 459859 - DNA, 53 bp, Artificial
  Synthetic oligonucleotide
tccgaaagccctttacccgaacaatcgtcctcaagagtacggggaaagatgac

SEQ ID NO: 459860 - DNA, 54 bp, Artificial
  Synthetic oligonucleotide
tccgaaagctggtgtgcgcgagcgacatccttgatcgccgacttcccgcggtac

SEQ ID NO: 459861 - DNA, 50 bp, Artificial
  Synthetic oligonucleotide
tccgaaagtaaccactgcaaacgcttcagtcaatttgatttcccctacca

SEQ ID NO: 459862 - DNA, 60 bp, Artificial
  Synthetic oligonucleotide
tccgaaagtctgtcatactttgaggtcaaagcattgtgcccctctaagcttatcaggcgt

SEQ ID NO: 459863 - DNA, 60 bp, Artificial
  Synthetic oligonucleotide
tccgaaagtgaattttcacaattggctaacagcacgcgactacaataggatgggctgttc

SEQ ID NO: 459864 - DNA, 55 bp, Artificial
  Synthetic oligonucleotide
tccgaaagtttatctgtgtccgagggttgccactttgtacgattctctactccgt

SEQ ID NO: 459865 - DNA, 55 bp, Artificial
  Synthetic oligonucleotide
tccgaaatccaacagctcaaaacatctgttgcggtcatggaagccaacttaggca

SEQ ID NO: 459866 - DNA, 60 bp, Artificial
  Synthetic oligonucleotide
tccgaaattggagggatcaacactaataggagcttccacagtgtccataggaacacaata

SEQ ID NO: 459867 - DNA, 57 bp, Artificial
  Synthetic oligonucleotide
tccgaacaaagtgaaaacgtgctccaatttattgacgcgcaaccaaactctcaacta

SEQ ID NO: 459868 - DNA, 60 bp, Artificial
  Synthetic oligonucleotide
tccgaacaaatacgatatatcgatgatcaggagcaagcttgatgtacctagaacaccgtg

SEQ ID NO: 459869 - DNA, 57 bp, Artificial
  Synthetic oligonucleotide
tccgaacaaatagcgggttcgtcagactccgtcaagaacatttccacgcaaacgtca

SEQ ID NO: 459870 - DNA, 52 bp, Artificial
  Synthetic oligonucleotide
tccgaacaatgcaatggcgtttgcgcggagtcacggatggacatcaccaacc

SEQ ID NO: 459871 - DNA, 58 bp, Artificial
  Synthetic oligonucleotide
tccgaacaggttgttagagacccctgcactcagcccaccttcgaactgcccggagcca

SEQ ID NO: 459872 - DNA, 59 bp, Artificial
  Synthetic oligonucleotide
tccgaacatgttaaatgggcaaaccgctagtcgcagagcagcctgacgctacgccggag

SEQ ID NO: 459873 - DNA, 54 bp, Artificial
  Synthetic oligonucleotide
tccgaacccaaccgaagcaggtcctatattaagttgaaacagctacgtttcaaa

SEQ ID NO: 459874 - DNA, 53 bp, Artificial
  Synthetic oligonucleotide
tccgaaccgaaattggcaatttactgcccgtatgcctttagtctagctacggc

SEQ ID NO: 459875 - DNA, 58 bp, Artificial
  Synthetic oligonucleotide
tccgaacgagctagatgagaattcccctagatctgctatgttgccggtgtacaccttc

SEQ ID NO: 459876 - DNA, 60 bp, Artificial
  Synthetic oligonucleotide
tccgaacgccgaaatgagttcgcgcaaagtggctagacgacgccataaggatgctactga

SEQ ID NO: 459877 - DNA, 55 bp, Artificial
  Synthetic oligonucleotide
tccgaactagaacggccgagattatgaggtagaaggatatcgccaccaggacgag

SEQ ID NO: 459878 - DNA, 60 bp, Artificial
  Synthetic oligonucleotide
tccgaactagccccagacaccacagtgatactatcacttaagcaaaatctgaacgttgac

SEQ ID NO: 459879 - DNA, 57 bp, Artificial
  Synthetic oligonucleotide
tccgaagacagccggtgaccctaacctcttgcctaatcgatattaacaaccaatgga

SEQ ID NO: 459880 - DNA, 57 bp, Artificial
  Synthetic oligonucleotide
tccgaagacttattattggatgagggagttgaagattttagtggttcacaattagta

SEQ ID NO: 459881 - DNA, 55 bp, Artificial
  Synthetic oligonucleotide
tccgaagagaccttcatcggtgcgagtaatttttgacgagtgttttttacaacac

SEQ ID NO: 459882 - DNA, 55 bp, Artificial
  Synthetic oligonucleotide
tccgaagaggcaccagttctaccttaatgactgaggttactggaggcaggactgg

SEQ ID NO: 459883 - DNA, 60 bp, Artificial
  Synthetic oligonucleotide
tccgaagcagcctgccatcctaagcgccgaagatgatcgactaaagggtactgtccatga

SEQ ID NO: 459884 - DNA, 58 bp, Artificial
  Synthetic oligonucleotide
tccgaagccagaggaagtcaactccacggggtgcgatcactgggcggatcctccggtg

SEQ ID NO: 459885 - DNA, 60 bp, Artificial
  Synthetic oligonucleotide
tccgaagcctatctggcatcagacttagctgaacgtgaattgactagggatacgcacaag

SEQ ID NO: 459886 - DNA, 55 bp, Artificial
  Synthetic oligonucleotide
tccgaaggccttcacgtatttggactatccattaaacccacagcgtaccatgatg

SEQ ID NO: 459887 - DNA, 56 bp, Artificial
  Synthetic oligonucleotide
tccgaaggttaatcttaccgatcggtcatgtgaagagttcactgcaccgcagactg

SEQ ID NO: 459888 - DNA, 60 bp, Artificial
  Synthetic oligonucleotide
tccgaagtgaggagcacgataaagggttattcgctcttcctagtcgtgtgactatcatta

SEQ ID NO: 459889 - DNA, 51 bp, Artificial
  Synthetic oligonucleotide
tccgaagttaaaggactgtaaccgcaagctttgaaccgcctttcccggcgt

SEQ ID NO: 459890 - DNA, 60 bp, Artificial
  Synthetic oligonucleotide
tccgaagttgcgcacacccgattcggctcattcatcacgaactacgctgaggactatgcc

SEQ ID NO: 459891 - DNA, 55 bp, Artificial
  Synthetic oligonucleotide
tccgaataaactagcgcaattccccggttacatttcagaaggagagatgggttac

SEQ ID NO: 459892 - DNA, 60 bp, Artificial
  Synthetic oligonucleotide
tccgaataactgtcctgatgacatacgtgatttaatgacaagatgctgggcccaagatcc

SEQ ID NO: 459893 - DNA, 54 bp, Artificial
  Synthetic oligonucleotide
tccgaatccgtttgaggacgtgtcttttccgcggtcggagcttgtgccggtgcc

SEQ ID NO: 459894 - DNA, 56 bp, Artificial
  Synthetic oligonucleotide
tccgaatcgacacgatgctggtggatccaaggatttttgaggtaggaatccgaccg

SEQ ID NO: 459895 - DNA, 60 bp, Artificial
  Synthetic oligonucleotide
tccgaatggctgagtttatgctgccggggtcggacagcgccgaaggcgcgcgtgcgaggc

SEQ ID NO: 459896 - DNA, 59 bp, Artificial
  Synthetic oligonucleotide
tccgaatgtgcctccccgaattcctaagggttatgtagcacataatcaccgagaggtga

SEQ ID NO: 459897 - DNA, 55 bp, Artificial
  Synthetic oligonucleotide
tccgaattgcagctcgcctgtctggagatgtcaatttcattggtgtcagtgcagg

SEQ ID NO: 459898 - DNA, 55 bp, Artificial
  Synthetic oligonucleotide
tccgaattttacttgattccgtatttggacctgaaggaatgatgcccatcacaag

SEQ ID NO: 459899 - DNA, 53 bp, Artificial
  Synthetic oligonucleotide
tccgacaccgtcgcaaacctaaagtccgaaaatgtagagatcaacgttttagg

SEQ ID NO: 459900 - DNA, 57 bp, Artificial
  Synthetic oligonucleotide
tccgacacggaggcaaaatttcaaaaagattctcacaatgagtactaaatacaaatg

SEQ ID NO: 459901 - DNA, 55 bp, Artificial
  Synthetic oligonucleotide
tccgacactgcagtatgtggcgtccgccgggactctcctggcatcgccgttcgtg

SEQ ID NO: 459902 - DNA, 55 bp, Artificial
  Synthetic oligonucleotide
tccgacagaccgaacttgattccgcactgaaagacgtgctcgatgacctcgcaac

SEQ ID NO: 459903 - DNA, 60 bp, Artificial
  Synthetic oligonucleotide
tccgacaggaaatcttgtatccggtagacctcactagccggcgcgctagcgatacgcgcg

SEQ ID NO: 459904 - DNA, 60 bp, Artificial
  Synthetic oligonucleotide
tccgacagtgatggaccagatactgcgtagtggggtagatgttattggtagagggtagat

SEQ ID NO: 459905 - DNA, 58 bp, Artificial
  Synthetic oligonucleotide
tccgacatgccggctctatctaccggtctcttacacctccaccaaaacatcgtggacg

SEQ ID NO: 459906 - DNA, 53 bp, Artificial
  Synthetic oligonucleotide
tccgacatgggcaattgtaatgtcaagcaagaaacccaaccccagtcaacaag

SEQ ID NO: 459907 - DNA, 60 bp, Artificial
  Synthetic oligonucleotide
tccgaccaacttatcataatcatagtccacagaattccccttatcatcagtctttgggat

SEQ ID NO: 459908 - DNA, 55 bp, Artificial
  Synthetic oligonucleotide
tccgacccacgttttgcgttgagtgggatcccaacagtaggaattcgacggacaa

SEQ ID NO: 459909 - DNA, 59 bp, Artificial
  Synthetic oligonucleotide
tccgacccagcctggcctcgtgactccgttatgcaatacgactcaaactggagccctta

SEQ ID NO: 459910 - DNA, 55 bp, Artificial
  Synthetic oligonucleotide
tccgaccctattggtccccttattacctatccccagtaattgccttatcacttca

SEQ ID NO: 459911 - DNA, 57 bp, Artificial
  Synthetic oligonucleotide
tccgacccttcgtcgtccgaagacgttaaactacactctctttattgcgagtgctga

SEQ ID NO: 459912 - DNA, 60 bp, Artificial
  Synthetic oligonucleotide
tccgacctactcaaggcgctcaccccatcgcaactttgttcgttgatcgtactcagatca

SEQ ID NO: 459913 - DNA, 59 bp, Artificial
  Synthetic oligonucleotide
tccgacctccgcaggagtgccgtggagtcgcgtaggcgaggtagctattttgagctttg

SEQ ID NO: 459914 - DNA, 60 bp, Artificial
  Synthetic oligonucleotide
tccgacgcatgacatgctgcatatcatcagtggagaaccgaagaacaactgggtctttga

SEQ ID NO: 459915 - DNA, 51 bp, Artificial
  Synthetic oligonucleotide
tccgacgcctgagcctcactcggaccgtggtggctctcgtcaatcgggagc

SEQ ID NO: 459916 - DNA, 59 bp, Artificial
  Synthetic oligonucleotide
tccgacggcatggggagaaaaacttggagtatgctcatcacaacaaccaggacaaccgc

SEQ ID NO: 459917 - DNA, 58 bp, Artificial
  Synthetic oligonucleotide
tccgacgttagtgaaaatggaaagagagctaagatgtctgaatggatgtatcccaaaa

SEQ ID NO: 459918 - DNA, 60 bp, Artificial
  Synthetic oligonucleotide
tccgactaagtctggcagcgtactgcgacgccgtcgacggaaattgaagtactatctcag

SEQ ID NO: 459919 - DNA, 60 bp, Artificial
  Synthetic oligonucleotide
tccgactactcttggcccgatagaggctcaaaagcagagcttcgctccctcttattgcaa

SEQ ID NO: 459920 - DNA, 55 bp, Artificial
  Synthetic oligonucleotide
tccgactactgtctctcccatatcgtcaatgttctcgaagattggggaccttgcg

SEQ ID NO: 459921 - DNA, 54 bp, Artificial
  Synthetic oligonucleotide
tccgactcaagttcccggtcaatgggatgtgacgactctctacgaattttgtat

SEQ ID NO: 459922 - DNA, 55 bp, Artificial
  Synthetic oligonucleotide
tccgactccaaggacgattatacccgtgtgggttgcacaactgaacgagagctat

SEQ ID NO: 459923 - DNA, 60 bp, Artificial
  Synthetic oligonucleotide
tccgactggtagtcttcatacattcgacgaactatttggtgcaatgatccatagtcatgg

SEQ ID NO: 459924 - DNA, 57 bp, Artificial
  Synthetic oligonucleotide
tccgacttcggaaatcaggaaaaccataagtgcagccctcaaaagaggagaacagat

SEQ ID NO: 459925 - DNA, 54 bp, Artificial
  Synthetic oligonucleotide
tccgacttctttcggaggccggaccatgaaatctatcgctttcgccccagagta

SEQ ID NO: 459926 - DNA, 54 bp, Artificial
  Synthetic oligonucleotide
tccgacttgcggaccagctatccggggtcgttccccgtcacggtccgtcgtgtc

SEQ ID NO: 459927 - DNA, 54 bp, Artificial
  Synthetic oligonucleotide
tccgactttggatgagagcacgtctcccgagtcgtacacccgcacacgcaagtg

SEQ ID NO: 459928 - DNA, 60 bp, Artificial
  Synthetic oligonucleotide
tccgagaaactcacaaacaatgtcttatttggatagcatccagatgcccgattggaaatt

SEQ ID NO: 459929 - DNA, 55 bp, Artificial
  Synthetic oligonucleotide
tccgagaactgattaagaggtgtaggcctcgttgatctgtgactcaagaaagacg

SEQ ID NO: 459930 - DNA, 60 bp, Artificial
  Synthetic oligonucleotide
tccgagaagacacatattcacatcttctcattcactggagaggaaatggccactaaggcg

SEQ ID NO: 459931 - DNA, 60 bp, Artificial
  Synthetic oligonucleotide
tccgagaccaaagagggaatgtgctattgtcacctgaagaagtcagcgagacacaaggga

SEQ ID NO: 459932 - DNA, 60 bp, Artificial
  Synthetic oligonucleotide
tccgagactggagccacacaagtgggagaagtactgcgtcctcgaaataggagacatgct

SEQ ID NO: 459933 - DNA, 60 bp, Artificial
  Synthetic oligonucleotide
tccgagagaagcttccgcgaacaccggcggggaggatagcgctctgaatgtggcacatca

SEQ ID NO: 459934 - DNA, 53 bp, Artificial
  Synthetic oligonucleotide
tccgagagattagtgaacggattcttgccacttttctgggaggatctacggag

SEQ ID NO: 459935 - DNA, 56 bp, Artificial
  Synthetic oligonucleotide
tccgagagggtgcgataaaaggcggcaaagtcctccaagtcggctacatgcgccct

SEQ ID NO: 459936 - DNA, 60 bp, Artificial
  Synthetic oligonucleotide
tccgagaggtgtacacccaactatgtgaccataggctaatgtcggcagccgtcaaggatg

SEQ ID NO: 459937 - DNA, 53 bp, Artificial
  Synthetic oligonucleotide
tccgagatattagcgcacggattcttgatacttatctgggaagatctacggag

SEQ ID NO: 459938 - DNA, 60 bp, Artificial
  Synthetic oligonucleotide
tccgagatgcaagccagatatagctctgccggacagttgcgcgcggggttgtacatcccg

SEQ ID NO: 459939 - DNA, 54 bp, Artificial
  Synthetic oligonucleotide
tccgagattttaaacgaaagccctcccatcgctatagggagtccgtccgcgtcc

SEQ ID NO: 459940 - DNA, 60 bp, Artificial
  Synthetic oligonucleotide
tccgagcacctccgagtggtatcgcttgcgaagtcgctggtagctcacgaacttctgcat

SEQ ID NO: 459941 - DNA, 57 bp, Artificial
  Synthetic oligonucleotide
tccgagcaggaaatggacgtaaaataattgctgccgtggtggcacccgctaccaaag

SEQ ID NO: 459942 - DNA, 55 bp, Artificial
  Synthetic oligonucleotide
tccgagcattactgcttatctcacacgttaaatgtggattattggctcgaaggac

SEQ ID NO: 459943 - DNA, 55 bp, Artificial
  Synthetic oligonucleotide
tccgagccaaaactaaaaggtcgcttagagcaaatcatcgacccgttaggtatgg

SEQ ID NO: 459944 - DNA, 58 bp, Artificial
  Synthetic oligonucleotide
tccgagcccaacttgagctccacattgcctaccagcgcatagtgggtcaggtctcgta

SEQ ID NO: 459945 - DNA, 54 bp, Artificial
  Synthetic oligonucleotide
tccgagcctgcgctgccgactacgcgtcgcgcttgcacagtgttttgggtacag

SEQ ID NO: 459946 - DNA, 53 bp, Artificial
  Synthetic oligonucleotide
tccgagcgaagcgaggagtgcgaccccctgccctggacccacttcttcggagc

SEQ ID NO: 459947 - DNA, 55 bp, Artificial
  Synthetic oligonucleotide
tccgagcgacgaccccctcccgttacctctgccccgctgaatgatcacgcaattg

SEQ ID NO: 459948 - DNA, 60 bp, Artificial
  Synthetic oligonucleotide
tccgagcttaacgcgagaatacaacgcttccagtacacctgccgagaatgtatcgtccga

SEQ ID NO: 459949 - DNA, 59 bp, Artificial
  Synthetic oligonucleotide
tccgaggatttcatcgattacgctgactcaaaggataacaacaacagggccgttcgcta

SEQ ID NO: 459950 - DNA, 60 bp, Artificial
  Synthetic oligonucleotide
tccgaggcacacttccgattccgtcagattcgtcaggggcgtgctcagtctgatcagtgg

SEQ ID NO: 459951 - DNA, 54 bp, Artificial
  Synthetic oligonucleotide
tccgaggcccgtacgtgggctcgaagtttagtagagagtacgcgtacaaaagtc

SEQ ID NO: 459952 - DNA, 57 bp, Artificial
  Synthetic oligonucleotide
tccgagggttgggccagtagagagctcgacgcatcttccccgttttctaatgggagc

SEQ ID NO: 459953 - DNA, 59 bp, Artificial
  Synthetic oligonucleotide
tccgaggtggactttaaaggaacttgtgtcttaaagcacaagatgatagaggattcata

SEQ ID NO: 459954 - DNA, 52 bp, Artificial
  Synthetic oligonucleotide
tccgagtaatggggccgcctcgtacaaaattttcaagatcgaaaaggggaag

SEQ ID NO: 459955 - DNA, 58 bp, Artificial
  Synthetic oligonucleotide
tccgagtaggggaggtcctgtgatcgatccgttccgacatctggaaataatcgtttgc

SEQ ID NO: 459956 - DNA, 60 bp, Artificial
  Synthetic oligonucleotide
tccgagtgctccttctcgttcgagtcagctcacgagggggtgatccctgagacctcagct

SEQ ID NO: 459957 - DNA, 60 bp, Artificial
  Synthetic oligonucleotide
tccgagtggtatgacaattatgcatactacccggagacaccaggagcccttgcctcggcc

SEQ ID NO: 459958 - DNA, 57 bp, Artificial
  Synthetic oligonucleotide
tccgagtgtggcagatctagacccgtacgataaatcccttcattcgagagtttttcc

SEQ ID NO: 459959 - DNA, 55 bp, Artificial
  Synthetic oligonucleotide
tccgataaatggtttggaactcaaaagagcaagataggcagaactgcatttgagg

SEQ ID NO: 459960 - DNA, 52 bp, Artificial
  Synthetic oligonucleotide
tccgataaggtgaagaagatggggttagatctgtcaggacatttgtttattg

SEQ ID NO: 459961 - DNA, 56 bp, Artificial
  Synthetic oligonucleotide
tccgatacgcttcaaggattattgcctaacttttaccacagaacgcacactttaat

SEQ ID NO: 459962 - DNA, 54 bp, Artificial
  Synthetic oligonucleotide
tccgatataatattaccggatggccgcgcgctccctcttatatccgtacgccgc

SEQ ID NO: 459963 - DNA, 55 bp, Artificial
  Synthetic oligonucleotide
tccgatatattggagatcaattggtgcctcataattggtgttgcctaaaataccc

SEQ ID NO: 459964 - DNA, 60 bp, Artificial
  Synthetic oligonucleotide
tccgatatttgtttgcgtactggagttgttgccgcgtgctgttatgagctaacaaaacag

SEQ ID NO: 459965 - DNA, 60 bp, Artificial
  Synthetic oligonucleotide
tccgatcattgtgcttattggcgtggcacaatggagaagaaacatataacaaattcttag

SEQ ID NO: 459966 - DNA, 60 bp, Artificial
  Synthetic oligonucleotide
tccgatccctgttaaggctcgatgtctccttctgcctaaacccaagcgcttcgcacagtg

SEQ ID NO: 459967 - DNA, 59 bp, Artificial
  Synthetic oligonucleotide
tccgatcgaccaaggttattggcgctcctctctgtctagctgcccccgccaaatattac

SEQ ID NO: 459968 - DNA, 55 bp, Artificial
  Synthetic oligonucleotide
tccgatctgaacatggacggttattcccctaaggccgagggagtcttctccctgg

SEQ ID NO: 459969 - DNA, 60 bp, Artificial
  Synthetic oligonucleotide
tccgatctgacttggcgtgatccgtgacatgcgtagtgtgacacctgcccctaggtcaat

SEQ ID NO: 459970 - DNA, 60 bp, Artificial
  Synthetic oligonucleotide
tccgatctgcttgcccatgattcgttcggacctattgccaaatatggtacacgtaacgat

SEQ ID NO: 459971 - DNA, 55 bp, Artificial
  Synthetic oligonucleotide
tccgatcttgttcctcactttgactctcgcgtcagcagatgtgatgactctgatg

SEQ ID NO: 459972 - DNA, 58 bp, Artificial
  Synthetic oligonucleotide
tccgatgaagacaacgaggcctactgctcaaaagaaggagacgtgatacttaccctcg

SEQ ID NO: 459973 - DNA, 58 bp, Artificial
  Synthetic oligonucleotide
tccgatgatccttggctaaacacccccatcttcacagcgccgggcctgaccaacctgg

SEQ ID NO: 459974 - DNA, 55 bp, Artificial
  Synthetic oligonucleotide
tccgatgcgtctagcccaggagcatgcgcacgtgatacaagccggtcagtaccgc

SEQ ID NO: 459975 - DNA, 60 bp, Artificial
  Synthetic oligonucleotide
tccgatgctatgtctaaggcatcgacttttgtatcatttgatttggactatattggatga

SEQ ID NO: 459976 - DNA, 54 bp, Artificial
  Synthetic oligonucleotide
tccgatggaaacctctgagccaggggttaccgccgcaccgcaccagaaatctgc

SEQ ID NO: 459977 - DNA, 59 bp, Artificial
  Synthetic oligonucleotide
tccgatgtgtcagtgaagttactcgtgggtcacgcagtacccatagagttgggaagagg

SEQ ID NO: 459978 - DNA, 55 bp, Artificial
  Synthetic oligonucleotide
tccgatgttacgaggggaaatggtttgactcatcgagttggtaaacgtttctgcg

SEQ ID NO: 459979 - DNA, 50 bp, Artificial
  Synthetic oligonucleotide
tccgattactatctctatgacgagctctcttatgtcattcgtgggcacac

SEQ ID NO: 459980 - DNA, 58 bp, Artificial
  Synthetic oligonucleotide
tccgattcagcaatcgatgagcgagcggctggaaggcgtgttggggcagggggcagcc

SEQ ID NO: 459981 - DNA, 56 bp, Artificial
  Synthetic oligonucleotide
tccgattccggaagtctgacaacccccacgtcctttccgccatcgacgtcttgcta

SEQ ID NO: 459982 - DNA, 53 bp, Artificial
  Synthetic oligonucleotide
tccgatttcgacttccaacagctacgacgctttcttaaactagcccttaaaac

SEQ ID NO: 459983 - DNA, 57 bp, Artificial
  Synthetic oligonucleotide
tccgattttactactggcggttacgcaagtgatagtgatgaattcctactgacagtg

SEQ ID NO: 459984 - DNA, 55 bp, Artificial
  Synthetic oligonucleotide
tccgattttggaaacactaaggattttggagttgctcctacgtcagactttggac

SEQ ID NO: 459985 - DNA, 55 bp, Artificial
  Synthetic oligonucleotide
tccgcaaaagcggtgttggttatgacctgatcatcgatgggcagcttcccgaatt

SEQ ID NO: 459986 - DNA, 58 bp, Artificial
  Synthetic oligonucleotide
tccgcaaatcctatgttaacaataaggggaaggaagtccttgtgctatggggcattca

SEQ ID NO: 459987 - DNA, 60 bp, Artificial
  Synthetic oligonucleotide
tccgcaagcgccaccatttatatttcatgctacagttggacttacgttgcgcattgaatc

SEQ ID NO: 459988 - DNA, 51 bp, Artificial
  Synthetic oligonucleotide
tccgcaaggatactttggactaaacgcggacccgtatgactgcagcgcgta

SEQ ID NO: 459989 - DNA, 55 bp, Artificial
  Synthetic oligonucleotide
tccgcaatcaaagaggtttcgcggagcgaaatccggcatggcagttgtgaagaca

SEQ ID NO: 459990 - DNA, 60 bp, Artificial
  Synthetic oligonucleotide
tccgcaatcccaatttctgtagcaggcatatacctagtctaccttaagatctcagcccac

SEQ ID NO: 459991 - DNA, 55 bp, Artificial
  Synthetic oligonucleotide
tccgcaatggaatcaattcgctatgatgaatagagttacggatctatctgataga

SEQ ID NO: 459992 - DNA, 59 bp, Artificial
  Synthetic oligonucleotide
tccgcacataaggcacctgttgtgtcacgtgaaccagtgatccggaagaaggaatgggt

SEQ ID NO: 459993 - DNA, 60 bp, Artificial
  Synthetic oligonucleotide
tccgcaccaagtgccaccacctagatattcctacatacgtagcgaatctagtagaaataa

SEQ ID NO: 459994 - DNA, 57 bp, Artificial
  Synthetic oligonucleotide
tccgcacctgttggtctcattgtctaggcatacaaggtcgatcaaatattacacagt

SEQ ID NO: 459995 - DNA, 60 bp, Artificial
  Synthetic oligonucleotide
tccgcacgaatagcagtccaaaggactgccacaaatcaacccggagttgcattgtattgg

SEQ ID NO: 459996 - DNA, 58 bp, Artificial
  Synthetic oligonucleotide
tccgcacggcactttggatttggaggatgtggattagttttagcccgattacgttgca

SEQ ID NO: 459997 - DNA, 60 bp, Artificial
  Synthetic oligonucleotide
tccgcactaacacagaaattgacctcgtggttccatatgtcaattatcggaactatgtgg

SEQ ID NO: 459998 - DNA, 59 bp, Artificial
  Synthetic oligonucleotide
tccgcactatcaatatacggaggggcgatagcggagtcatcttgaacacgtggcgcctc

SEQ ID NO: 459999 - DNA, 55 bp, Artificial
  Synthetic oligonucleotide
tccgcactgcttatggcaatgcgtactccgagaacggttggcgtatgtgcaaccg

SEQ ID NO: 460000 - DNA, 50 bp, Artificial
  Synthetic oligonucleotide
tccgcagaagtggttccttactaaaggtgccacactgtggcgtaacgagg

SEQ ID NO: 460001 - DNA, 54 bp, Artificial
  Synthetic oligonucleotide
tccgcagcccgaaaagctaggagggacgggaacaaaactggaggacacccagtg

SEQ ID NO: 460002 - DNA, 58 bp, Artificial
  Synthetic oligonucleotide
tccgcaggaaccactccaaacatttcacaatggcttttatatccctcaaatctgtctt

SEQ ID NO: 460003 - DNA, 60 bp, Artificial
  Synthetic oligonucleotide
tccgcagtacttggcgactcttttcgcccaaccctgctctcacacagccaatgagatagc

SEQ ID NO: 460004 - DNA, 60 bp, Artificial
  Synthetic oligonucleotide
tccgcatagctcctctgagcttgttagtcaaaaggtggcctataaatgttgaccagtcat

SEQ ID NO: 460005 - DNA, 55 bp, Artificial
  Synthetic oligonucleotide
tccgcatatgcattcgcacagccaaagaacctctcttgaattactcctcgatcca

SEQ ID NO: 460006 - DNA, 58 bp, Artificial
  Synthetic oligonucleotide
tccgcattcgaatgggccgggcctatagtactcctactagcccaggactctcctggat

SEQ ID NO: 460007 - DNA, 57 bp, Artificial
  Synthetic oligonucleotide
tccgcattgtttagtaaagcgccgcaccacgatttgaattctcaatcaagaatttgt

SEQ ID NO: 460008 - DNA, 50 bp, Artificial
  Synthetic oligonucleotide
tccgccaaaagctaaaaccgcccgttcggatgttgaacgtaaccgaatgg

SEQ ID NO: 460009 - DNA, 56 bp, Artificial
  Synthetic oligonucleotide
tccgccaataattattataaaaggtcctgctaataatctaaagtgctggaggtttc

SEQ ID NO: 460010 - DNA, 50 bp, Artificial
  Synthetic oligonucleotide
tccgccagcagaaacgacctcgatagagatccaaattggtatcgggtcaa

SEQ ID NO: 460011 - DNA, 58 bp, Artificial
  Synthetic oligonucleotide
tccgccagtaataatgggccctgggagcctattaaattgactgctcctctttatatag

SEQ ID NO: 460012 - DNA, 60 bp, Artificial
  Synthetic oligonucleotide
tccgcccactcatctcgtgcatctacagagatacccgatatattctttacacctgacaac

SEQ ID NO: 460013 - DNA, 55 bp, Artificial
  Synthetic oligonucleotide
tccgcccccaacagccccgtcgggtcagcacgtaccgacggggcttcgtcatgcc

SEQ ID NO: 460014 - DNA, 51 bp, Artificial
  Synthetic oligonucleotide
tccgccccccggcggggccaagtgaggcttatcccggggaactcggctaag

SEQ ID NO: 460015 - DNA, 51 bp, Artificial
  Synthetic oligonucleotide
tccgccccccggcggggccgagtgaggcttatcccggggaactcggaccag

SEQ ID NO: 460016 - DNA, 52 bp, Artificial
  Synthetic oligonucleotide
tccgcccctcagaaagcaaacacaggtctacagctttcattgttagatctgg

SEQ ID NO: 460017 - DNA, 57 bp, Artificial
  Synthetic oligonucleotide
tccgcccctgtggaatgaaacgagcgcggataaaaggatgattggtacggacagtac

SEQ ID NO: 460018 - DNA, 55 bp, Artificial
  Synthetic oligonucleotide
tccgccctatcaccgtacctgcgcattccagctgcgaacgtcaacgtcgcacgtg

SEQ ID NO: 460019 - DNA, 60 bp, Artificial
  Synthetic oligonucleotide
tccgccctgtggacacatcccctctgccgatctcgggtgggcgcatgccgtcccttcgtg

SEQ ID NO: 460020 - DNA, 60 bp, Artificial
  Synthetic oligonucleotide
tccgccctttacataggggatgtttgtggcgcggtcatgatagcggcccaagcggtcatc

SEQ ID NO: 460021 - DNA, 60 bp, Artificial
  Synthetic oligonucleotide
tccgccgaagtatattcaatgatcgagtttttgatgttatcggtatcatggaatggaatg

SEQ ID NO: 460022 - DNA, 60 bp, Artificial
  Synthetic oligonucleotide
tccgccgcatcaataagtggatgatctggaatgcaactggattcgaggatgcacccgact

SEQ ID NO: 460023 - DNA, 52 bp, Artificial
  Synthetic oligonucleotide
tccgccgtacacagaagaggctgagttcgtcatagaggcatcggggtgcgct

SEQ ID NO: 460024 - DNA, 57 bp, Artificial
  Synthetic oligonucleotide
tccgccgtgtgtgtacagggtggtccattgccgtgttaactggttctcaccctggta

SEQ ID NO: 460025 - DNA, 54 bp, Artificial
  Synthetic oligonucleotide
tccgcctagatggggatgtaaagttttccggtggatcggttagtgggtcgctta

SEQ ID NO: 460026 - DNA, 60 bp, Artificial
  Synthetic oligonucleotide
tccgcctctaccactggttagtctatgatgcagagccgaaacaggcaatgccagacgcca

SEQ ID NO: 460027 - DNA, 56 bp, Artificial
  Synthetic oligonucleotide
tccgcctctgtgaccgttacccacacaaagtgccagttaagggcgcctttgtggag

SEQ ID NO: 460028 - DNA, 55 bp, Artificial
  Synthetic oligonucleotide
tccgccttcccctacacttggaaagttgggcgggaggtctgccatcgcttcgtgg

SEQ ID NO: 460029 - DNA, 60 bp, Artificial
  Synthetic oligonucleotide
tccgccttggtattcctcgagataacaattgagcaagagttggtaggagagttctgaggc

SEQ ID NO: 460030 - DNA, 56 bp, Artificial
  Synthetic oligonucleotide
tccgccttgtgcggaaatacctgtttgcccatgtgggtaagtgtccgcccgttcat

SEQ ID NO: 460031 - DNA, 50 bp, Artificial
  Synthetic oligonucleotide
tccgcctttgacaaacttccttcctacctcaccgagttctcgattggaca

SEQ ID NO: 460032 - DNA, 57 bp, Artificial
  Synthetic oligonucleotide
tccgcgactagcgccatcgtcagtcgactcgccgtccagcacaagctgtcacaggta

SEQ ID NO: 460033 - DNA, 52 bp, Artificial
  Synthetic oligonucleotide
tccgcgagatttggggtagcggagcctcaggagggtcccctccatagggttg

SEQ ID NO: 460034 - DNA, 60 bp, Artificial
  Synthetic oligonucleotide
tccgcgaggactggggaccctgtgacgaacatggagaacatcacatcaggattcctagga

SEQ ID NO: 460035 - DNA, 54 bp, Artificial
  Synthetic oligonucleotide
tccgcgatcccccctcacgtccagcccctccccgtgtctggtgaagggggactc

SEQ ID NO: 460036 - DNA, 60 bp, Artificial
  Synthetic oligonucleotide
tccgcgatgacagacggtatgtacgatgaggagtttgatagcaaagctctcaacgaaaca

SEQ ID NO: 460037 - DNA, 60 bp, Artificial
  Synthetic oligonucleotide
tccgcgcaaacgtctagcgtttccgctactcaatcgtccactgacttatctcaaacgagc

SEQ ID NO: 460038 - DNA, 59 bp, Artificial
  Synthetic oligonucleotide
tccgcgcaggtgaaagtaagtcctcctcaactgatcaataattggaggcaacacctagt

SEQ ID NO: 460039 - DNA, 54 bp, Artificial
  Synthetic oligonucleotide
tccgcggcaacgtgcctaacatcaggtcccgtgtactggagctcctacacaggc

SEQ ID NO: 460040 - DNA, 60 bp, Artificial
  Synthetic oligonucleotide
tccgcggcaatgccgcggactgggagggcatctgcctacattacaaatgcgctcctggct

SEQ ID NO: 460041 - DNA, 55 bp, Artificial
  Synthetic oligonucleotide
tccgcggctgacgcgacccaggccggctaccgaccggtccagtgggtcatcccgt

SEQ ID NO: 460042 - DNA, 59 bp, Artificial
  Synthetic oligonucleotide
tccgcgggtgatgacctgcggcctgagccttttgggccccgtgatgtaccgcgtcctga

SEQ ID NO: 460043 - DNA, 60 bp, Artificial
  Synthetic oligonucleotide
tccgcggtgcattatgccaataagtctgggatttaccatcttactaatgactgtcctaac

SEQ ID NO: 460044 - DNA, 53 bp, Artificial
  Synthetic oligonucleotide
tccgcgtagagaaactcggaccactctgagacgaaggcccgcgtccaggcgag

SEQ ID NO: 460045 - DNA, 59 bp, Artificial
  Synthetic oligonucleotide
tccgcgtagcggtatgtttcagcccaataggcccaatagtctcaaggcccaatagaaga

SEQ ID NO: 460046 - DNA, 57 bp, Artificial
  Synthetic oligonucleotide
tccgcgtcacaaagggtcaggtatggaccaacagacctatgttccgaaagcctcgga

SEQ ID NO: 460047 - DNA, 60 bp, Artificial
  Synthetic oligonucleotide
tccgcgtcacacagcatatggtggtcccatatattttttcgtacatctaatatgtgcgat

SEQ ID NO: 460048 - DNA, 57 bp, Artificial
  Synthetic oligonucleotide
tccgcgtcaccagaagacaaatgtggtccaacaggcccatgtaccggaaacccataa

SEQ ID NO: 460049 - DNA, 60 bp, Artificial
  Synthetic oligonucleotide
tccgcgtcaccagaagcaaaatatggccaacaggcccatgtatcggaagcccaagatgta

SEQ ID NO: 460050 - DNA, 60 bp, Artificial
  Synthetic oligonucleotide
tccgcgtccacattgcatatgtggtcccatacatcttttcgtacatctaatatgtgcgct

SEQ ID NO: 460051 - DNA, 57 bp, Artificial
  Synthetic oligonucleotide
tccgcgtgaggttgccagggcaatgcgtgctcatggtatgcacactctatttgctgt

SEQ ID NO: 460052 - DNA, 56 bp, Artificial
  Synthetic oligonucleotide
tccgcgtggtgtacatgagtatcacgcgtctatctgacagcggttgttacactgta

SEQ ID NO: 460053 - DNA, 58 bp, Artificial
  Synthetic oligonucleotide
tccgcgttggatggaattcccgttgaacgacccgtatccgccagagaagcagagcgaa

SEQ ID NO: 460054 - DNA, 60 bp, Artificial
  Synthetic oligonucleotide
tccgctacagtcactcagatgcctaaggaaacagccgacgcgcacaagctgcaaggacac

SEQ ID NO: 460055 - DNA, 60 bp, Artificial
  Synthetic oligonucleotide
tccgctatcgacttatctggtgtggcaaccaaaatcggcgcggcaggtctggtgattgtc

SEQ ID NO: 460056 - DNA, 58 bp, Artificial
  Synthetic oligonucleotide
tccgctatgtattggatctccgaaccccctacacgagtgtaggtggtaagaagcacag

SEQ ID NO: 460057 - DNA, 50 bp, Artificial
  Synthetic oligonucleotide
tccgctattagtgcttgcctatccttcattattgatgttggtggatgttg

SEQ ID NO: 460058 - DNA, 50 bp, Artificial
  Synthetic oligonucleotide
tccgctcaggttggtaaatctggtatgaccctgactccgggttctaaagc

SEQ ID NO: 460059 - DNA, 55 bp, Artificial
  Synthetic oligonucleotide
tccgctcatggtctctggtgatgactcgctgctcgactctgagcctcctgtccgc

SEQ ID NO: 460060 - DNA, 56 bp, Artificial
  Synthetic oligonucleotide
tccgctcattcattttgaaacgacctacgatgttatttacccgaaatcacatttcc

SEQ ID NO: 460061 - DNA, 50 bp, Artificial
  Synthetic oligonucleotide
tccgctccataaacgagtttggtgcgctcaaccaaaatccagctcccacc

SEQ ID NO: 460062 - DNA, 55 bp, Artificial
  Synthetic oligonucleotide
tccgctcgagttgtctacgcgtcgactaaactctattaaacgagcggcggcccaa

SEQ ID NO: 460063 - DNA, 60 bp, Artificial
  Synthetic oligonucleotide
tccgctcgctgggctcccactattgaagcagactctcctgggtccagaacgctggttcca

SEQ ID NO: 460064 - DNA, 57 bp, Artificial
  Synthetic oligonucleotide
tccgctcggacgactacacccagtcttccttcggaggctcctttggcacagagacct

SEQ ID NO: 460065 - DNA, 60 bp, Artificial
  Synthetic oligonucleotide
tccgctctatcatgatcactgctctcttcgtcggaaagatgctcgaaatgttagacatta

SEQ ID NO: 460066 - DNA, 60 bp, Artificial
  Synthetic oligonucleotide
tccgctctcggcagaggtgtgaaggatagtaagtctgtatccgcgtcatctgtcgctgga

SEQ ID NO: 460067 - DNA, 55 bp, Artificial
  Synthetic oligonucleotide
tccgctgatgactgagttgtcccaagaccgtgctaaaacgctctgttgtttgatg

SEQ ID NO: 460068 - DNA, 59 bp, Artificial
  Synthetic oligonucleotide
tccgctgatgggacactatatgaaaagcgttctaagcaaggaagcatacgttaaggact

SEQ ID NO: 460069 - DNA, 59 bp, Artificial
  Synthetic oligonucleotide
tccgctggccccaagaacccgggtctctcaatgatgctatcaggcgtctccgacctccc

SEQ ID NO: 460070 - DNA, 53 bp, Artificial
  Synthetic oligonucleotide
tccgctggggactttccagagggcgtgccagagggcgggtttagggagtggtt

SEQ ID NO: 460071 - DNA, 53 bp, Artificial
  Synthetic oligonucleotide
tccgctggggactttccaggggaggcgtaaactgggcgggactggggagtggc

SEQ ID NO: 460072 - DNA, 60 bp, Artificial
  Synthetic oligonucleotide
tccgctggtgaggtaacagtgaaaggtgcagtagtgagtgaggtagtccctgcagacttg

SEQ ID NO: 460073 - DNA, 58 bp, Artificial
  Synthetic oligonucleotide
tccgctgtgatcgtctaggcttgagggtctggacaacggcaactgttcaggttacggg

SEQ ID NO: 460074 - DNA, 60 bp, Artificial
  Synthetic oligonucleotide
tccgctgtggagcctattgtgccatttccggagttatttggcctggagaagatggcatgc

SEQ ID NO: 460075 - DNA, 58 bp, Artificial
  Synthetic oligonucleotide
tccgcttactgtgaatgaaaaaaggagattaaggttcattatgcctgccagattttac

SEQ ID NO: 460076 - DNA, 59 bp, Artificial
  Synthetic oligonucleotide
tccgcttatcaagctgacaaccgcttgcgacaacgcacaatcccccttgcaccggcttt

SEQ ID NO: 460077 - DNA, 57 bp, Artificial
  Synthetic oligonucleotide
tccgcttcctactctgacccctgtgctatacagtgcccttacctgggatgccagtcg

SEQ ID NO: 460078 - DNA, 60 bp, Artificial
  Synthetic oligonucleotide
tccgcttcggagaagtaccatttgtgaagacagtgaactctggtgaccgtctgctagcca

SEQ ID NO: 460079 - DNA, 53 bp, Artificial
  Synthetic oligonucleotide
tccgcttgcgacgttccgccgagttgccccgatggacacaaccgccacacacg

SEQ ID NO: 460080 - DNA, 55 bp, Artificial
  Synthetic oligonucleotide
tccgcttgtcggccaccgtcggccttccgcttggagctccaacgatccacactcc

SEQ ID NO: 460081 - DNA, 59 bp, Artificial
  Synthetic oligonucleotide
tccggaaaattaagaaggcagtgagcaccctgatggtaggtctgcaaagacgtggcaaa

SEQ ID NO: 460082 - DNA, 59 bp, Artificial
  Synthetic oligonucleotide
tccggaaatctcctgtgatgccgacatacgcgcttgtggatttgtttccttacgcctcc

SEQ ID NO: 460083 - DNA, 60 bp, Artificial
  Synthetic oligonucleotide
tccggaacattgtacacctcaccatacggcactcaggcaagctattctgtgttggggtga

SEQ ID NO: 460084 - DNA, 54 bp, Artificial
  Synthetic oligonucleotide
tccggaacctaaagggtacgtactgaacgttccaggacctggtgcatacagaat

SEQ ID NO: 460085 - DNA, 60 bp, Artificial
  Synthetic oligonucleotide
tccggaaggcgggcgccattctatcttatggaaagggctttcacatatggcaaacagtca

SEQ ID NO: 460086 - DNA, 50 bp, Artificial
  Synthetic oligonucleotide
tccggaatgactgatatcgctgggctgagtagaacaatattcctcaagtt

SEQ ID NO: 460087 - DNA, 52 bp, Artificial
  Synthetic oligonucleotide
tccggaatggaatgcattgctagcgcaatgccgtgacaatcctgaatatcgt

SEQ ID NO: 460088 - DNA, 53 bp, Artificial
  Synthetic oligonucleotide
tccggaattacttgtgggtgcaaaacgtagtttaaatccatggtgttaccact

SEQ ID NO: 460089 - DNA, 59 bp, Artificial
  Synthetic oligonucleotide
tccggaattctgtttagtgtagtcaaatctgcacggaatccacccgtagattggctcaa

SEQ ID NO: 460090 - DNA, 58 bp, Artificial
  Synthetic oligonucleotide
tccggacactggagagggagttgtctgcattgttggtcacgatgcatgggccaaagcc

SEQ ID NO: 460091 - DNA, 52 bp, Artificial
  Synthetic oligonucleotide
tccggacaggtgagtagttgcgtgttttccccgggatgaagagaagggagtt

SEQ ID NO: 460092 - DNA, 57 bp, Artificial
  Synthetic oligonucleotide
tccggacagtgcgtcggagcaacgttttgctcggactcaaggcaaacttttgaggag

SEQ ID NO: 460093 - DNA, 55 bp, Artificial
  Synthetic oligonucleotide
tccggactataaggcaattgattccgtccatagaccgacatcgagggtctcaaca

SEQ ID NO: 460094 - DNA, 55 bp, Artificial
  Synthetic oligonucleotide
tccggactcgccatttctaatttctcctttattctcgctcacgttctcaccacca

SEQ ID NO: 460095 - DNA, 60 bp, Artificial
  Synthetic oligonucleotide
tccggagacgcagggagctaatgaggtcagcggtacagcagaatcgacaaacgtaggagg

SEQ ID NO: 460096 - DNA, 60 bp, Artificial
  Synthetic oligonucleotide
tccggagcggcacctgacaatgcccctccccgcgtagtgccagccgcgttggacgcttca

SEQ ID NO: 460097 - DNA, 60 bp, Artificial
  Synthetic oligonucleotide
tccggaggagtatgtgacctcatcaacacctatgcccgaggatctgacgagggcaatcgc

SEQ ID NO: 460098 - DNA, 60 bp, Artificial
  Synthetic oligonucleotide
tccggaggtctgcttgaagtgggaattgatggatgaagactaccagggcagactgtgtaa

SEQ ID NO: 460099 - DNA, 51 bp, Artificial
  Synthetic oligonucleotide
tccggagtaaaaagagtaagcccaattaatccgatgtacttttaaggcctt

SEQ ID NO: 460100 - DNA, 55 bp, Artificial
  Synthetic oligonucleotide
tccggagttctacaaagactgctgacacgaagggacttactgctgacacagaagg

SEQ ID NO: 460101 - DNA, 60 bp, Artificial
  Synthetic oligonucleotide
tccggatacgctaaaattcataactacaatgatcacgttcactcattcgcagcgcaagct

SEQ ID NO: 460102 - DNA, 56 bp, Artificial
  Synthetic oligonucleotide
tccggatacggttcacgggtttcgttatatgctatctggtaaaatatctgcaactt

SEQ ID NO: 460103 - DNA, 58 bp, Artificial
  Synthetic oligonucleotide
tccggatcaaagctcgtcccttcttacttggacagataaagatggccatacggggcaa

SEQ ID NO: 460104 - DNA, 60 bp, Artificial
  Synthetic oligonucleotide
tccggatgagcaatattcggatctgactattttcgctacccgtcttacggcagcgcgtga

SEQ ID NO: 460105 - DNA, 50 bp, Artificial
  Synthetic oligonucleotide
tccggatgccaaacttaaacgacagccgtagcgctgtggggaagcagcaa

SEQ ID NO: 460106 - DNA, 55 bp, Artificial
  Synthetic oligonucleotide
tccggatggcacagtcaaccaggaccacaagtactacctgccaggcgacagtggg

SEQ ID NO: 460107 - DNA, 55 bp, Artificial
  Synthetic oligonucleotide
tccggatttggccaaacttcaattggattcaatacacccaccggatggggtgtac

SEQ ID NO: 460108 - DNA, 60 bp, Artificial
  Synthetic oligonucleotide
tccggattttgatctgaaagctgtcccccgtcatcaagccgttgtgcgcacctttgaaga

SEQ ID NO: 460109 - DNA, 60 bp, Artificial
  Synthetic oligonucleotide
tccggcaatgacgtatggttgggaaggactgtatcaactagcggtagatcaggctttgag

SEQ ID NO: 460110 - DNA, 55 bp, Artificial
  Synthetic oligonucleotide
tccggcacctgaagagcccgagattgtggacactggcgcgtctagtgaaggaggt

SEQ ID NO: 460111 - DNA, 55 bp, Artificial
  Synthetic oligonucleotide
tccggcatccgaagggaccggctaactgtcaaggggtaggacatgcaaaagaacc

SEQ ID NO: 460112 - DNA, 55 bp, Artificial
  Synthetic oligonucleotide
tccggccaagaccagaactggaacgaacaaccgcgttcgttcctatatcaagtta

SEQ ID NO: 460113 - DNA, 55 bp, Artificial
  Synthetic oligonucleotide
tccggccacagaaccaggtctacgtaccgaaggagtttggctggtgagcagagga

SEQ ID NO: 460114 - DNA, 56 bp, Artificial
  Synthetic oligonucleotide
tccggccagtagaactaccggaccaagaaacctggacagtaaatgagattcagaaa

SEQ ID NO: 460115 - DNA, 51 bp, Artificial
  Synthetic oligonucleotide
tccggcccaaatttttactcagcgtgaccgtcttaccctgggcgccatggg

SEQ ID NO: 460116 - DNA, 59 bp, Artificial
  Synthetic oligonucleotide
tccggcccccgatactgccccggtccctgatgttgactcacgtggcgctatattgcgcc

SEQ ID NO: 460117 - DNA, 58 bp, Artificial
  Synthetic oligonucleotide
tccggcccgaaaggttgagagcacctcagagggaggaagccacacggagtagaacaga

SEQ ID NO: 460118 - DNA, 56 bp, Artificial
  Synthetic oligonucleotide
tccggccggaaacaattggcagttacctccgacccgctagacatcttggacgaata

SEQ ID NO: 460119 - DNA, 54 bp, Artificial
  Synthetic oligonucleotide
tccggccggaagggtgaaacctccgccagagggaggaagccacacggagtagaa

SEQ ID NO: 460120 - DNA, 60 bp, Artificial
  Synthetic oligonucleotide
tccggcctgtggagtttgatgagtgttctacaaggagcgggcagtacagcagctcttgga

SEQ ID NO: 460121 - DNA, 57 bp, Artificial
  Synthetic oligonucleotide
tccggcggccatgcagccaccaggagggttggttagggctcccagccaagcagagag

SEQ ID NO: 460122 - DNA, 60 bp, Artificial
  Synthetic oligonucleotide
tccggctatcaccttctagaacaatactgatcggtctccatggccgcgcagcgggactgc

SEQ ID NO: 460123 - DNA, 51 bp, Artificial
  Synthetic oligonucleotide
tccggctcatgacaccccgccagtacctgatgttgactcccgcggcgctat

SEQ ID NO: 460124 - DNA, 52 bp, Artificial
  Synthetic oligonucleotide
tccgggaaatttgcccgaagaaaagatttccaagtcgataagggaaactcca

SEQ ID NO: 460125 - DNA, 55 bp, Artificial
  Synthetic oligonucleotide
tccgggaataccggagtgcggcccgagtcgcatacgaagcacaaaggattgccag

SEQ ID NO: 460126 - DNA, 50 bp, Artificial
  Synthetic oligonucleotide
tccgggacgaggcaataaggtcccgttctgggtagcccggtcaagactta

SEQ ID NO: 460127 - DNA, 52 bp, Artificial
  Synthetic oligonucleotide
tccgggagggtcgcggtcttctggggcaccgggagtagggggcaaccacaac

SEQ ID NO: 460128 - DNA, 60 bp, Artificial
  Synthetic oligonucleotide
tccgggatgcagaaaagacagtcgaggtggacccagatgatgttaacaagaatacattgc

SEQ ID NO: 460129 - DNA, 54 bp, Artificial
  Synthetic oligonucleotide
tccgggcacgagcccataaccaaggtgtcgaggtccggaaaaagaaatggatta

SEQ ID NO: 460130 - DNA, 53 bp, Artificial
  Synthetic oligonucleotide
tccgggccgacagggtaatagacccaaggcggtgcttgaaaccggtaatacta

SEQ ID NO: 460131 - DNA, 59 bp, Artificial
  Synthetic oligonucleotide
tccgggctatcgtataaatccagacgcccgttgcagagcacagtgttggtaagagccgt

SEQ ID NO: 460132 - DNA, 55 bp, Artificial
  Synthetic oligonucleotide
tccgggctggtctcggacctgaatgccattcgtcgctttagtgctgccatcgccc

SEQ ID NO: 460133 - DNA, 54 bp, Artificial
  Synthetic oligonucleotide
tccggggaagaatttcgtcacgagccggtacgccgttctcaactcggaggtcta

SEQ ID NO: 460134 - DNA, 58 bp, Artificial
  Synthetic oligonucleotide
tccggggaggggccaacctttgacgccaacaccgaatgtgccatagcttaccatcaca

SEQ ID NO: 460135 - DNA, 60 bp, Artificial
  Synthetic oligonucleotide
tccggggcagcctggtacgagcttacgcctgctgagactacggtgagactccgggcatat

SEQ ID NO: 460136 - DNA, 55 bp, Artificial
  Synthetic oligonucleotide
tccggggccaccctacccaatcaggtgaagctctgggagctaacgggcgtcacaa

SEQ ID NO: 460137 - DNA, 60 bp, Artificial
  Synthetic oligonucleotide
tccggggccgtgaatgctgctaatcccaacctccgagcgtgtgcgcacaatccagtgttg

SEQ ID NO: 460138 - DNA, 57 bp, Artificial
  Synthetic oligonucleotide
tccgggggatgtcactattgtggccttcgggcactggttggtgagggtcgtgagagg

SEQ ID NO: 460139 - DNA, 52 bp, Artificial
  Synthetic oligonucleotide
tccgggggttgggccgggctgaggagtagggaaccagtctgccgtctcccag

SEQ ID NO: 460140 - DNA, 59 bp, Artificial
  Synthetic oligonucleotide
tccggggtcataggagcagggtcaataggaaatttatatcaacaaggatggccatctaa

SEQ ID NO: 460141 - DNA, 60 bp, Artificial
  Synthetic oligonucleotide
tccggggtgagagctccggccacaccaagccccttccagacactaactgcagctcagctc

SEQ ID NO: 460142 - DNA, 50 bp, Artificial
  Synthetic oligonucleotide
tccgggtaaccacgccccatcttgtttcatcccagagtgaggcggtgacc

SEQ ID NO: 460143 - DNA, 57 bp, Artificial
  Synthetic oligonucleotide
tccgggtcataggtcacacctacgtcacaagtcacgtggggagggttggcgtatagc

SEQ ID NO: 460144 - DNA, 58 bp, Artificial
  Synthetic oligonucleotide
tccgggtcgttgggcgaatgacaatcgcaaccggcgtgtctaccaagcgaacacatgt

SEQ ID NO: 460145 - DNA, 60 bp, Artificial
  Synthetic oligonucleotide
tccgggtggatgcttcgtgcaaatgctatgaatgcctacgtgtacaaacgtagatgccta

SEQ ID NO: 460146 - DNA, 57 bp, Artificial
  Synthetic oligonucleotide
tccgggtggtaatcgtgtgggtgatctcagcggtaatgaagctctagcacgtggcac

SEQ ID NO: 460147 - DNA, 58 bp, Artificial
  Synthetic oligonucleotide
tccggtaagataggacagtcaggctaccgccccgtgtctaccaagatgcgtaagccta

SEQ ID NO: 460148 - DNA, 55 bp, Artificial
  Synthetic oligonucleotide
tccggtaccgtgcgtgaagccaccggcacctccggcgtggataatgcaaccggcc

SEQ ID NO: 460149 - DNA, 57 bp, Artificial
  Synthetic oligonucleotide
tccggtacttcgtttgacttcaatattgatttgtctttgaactgtgacatatttctt

SEQ ID NO: 460150 - DNA, 53 bp, Artificial
  Synthetic oligonucleotide
tccggtagttttcgaaattcagtgtttgtgggtttggtgtgtttgttatgaag

SEQ ID NO: 460151 - DNA, 52 bp, Artificial
  Synthetic oligonucleotide
tccggtatgatatctcgtaccgagaacctgacagtcaattcgactgcttccg

SEQ ID NO: 460152 - DNA, 54 bp, Artificial
  Synthetic oligonucleotide
tccggtcaattcctggctagggaacatcatagtttacgcccccacaatatgggt

SEQ ID NO: 460153 - DNA, 55 bp, Artificial
  Synthetic oligonucleotide
tccggtcatatgcccgccccttccgcttaggggctgtcaatcatcttaggtcccg

SEQ ID NO: 460154 - DNA, 60 bp, Artificial
  Synthetic oligonucleotide
tccggtcatgtgacttccggtgacgtgtctcctgtcacgtgacttccggtgacgcacttc

SEQ ID NO: 460155 - DNA, 57 bp, Artificial
  Synthetic oligonucleotide
tccggtccaacagaaaaagagtggggctgtttgcatacgtcacctaacgtatgaaca

SEQ ID NO: 460156 - DNA, 60 bp, Artificial
  Synthetic oligonucleotide
tccggtccagttgcacatcaggtgatagtgaacaaccaaaactggtcagggtactcagga

SEQ ID NO: 460157 - DNA, 56 bp, Artificial
  Synthetic oligonucleotide
tccggtccttggattacacccaggtgcctggtcgactacccttacagactttggca

SEQ ID NO: 460158 - DNA, 52 bp, Artificial
  Synthetic oligonucleotide
tccggtcgctggtgaagtctactacggtcgaggctcagccctacctagccac

SEQ ID NO: 460159 - DNA, 56 bp, Artificial
  Synthetic oligonucleotide
tccggtctcagcccaagcaggaaagggcgagttgtgtgcagtctttagagccgacc

SEQ ID NO: 460160 - DNA, 53 bp, Artificial
  Synthetic oligonucleotide
tccggtgaaaagtgccgtgacttactgcaaacaccgctgctggggcgaaaaac

SEQ ID NO: 460161 - DNA, 56 bp, Artificial
  Synthetic oligonucleotide
tccggtgaaatagttaaacgtgcgacctcgccatattcggcgctataagtaattac

SEQ ID NO: 460162 - DNA, 60 bp, Artificial
  Synthetic oligonucleotide
tccggtgcttgtcaagattactctcgacgaaggtcagccagcgtatgcgcctggtctgta

SEQ ID NO: 460163 - DNA, 56 bp, Artificial
  Synthetic oligonucleotide
tccggtggctagcatttttgtccagagcgagattggcgaacgcgatttgcaccttc

SEQ ID NO: 460164 - DNA, 57 bp, Artificial
  Synthetic oligonucleotide
tccggtgtgagtccaacaaacatcgctggtcgaagatcagaggtcctgtgagcttga

SEQ ID NO: 460165 - DNA, 51 bp, Artificial
  Synthetic oligonucleotide
tccggtgtgcaaaactttagagaattatatgctatacagagtgctaccagg

SEQ ID NO: 460166 - DNA, 54 bp, Artificial
  Synthetic oligonucleotide
tccggttcaagagggaccggataagcgatacaccggaggggccaagtacccaca

SEQ ID NO: 460167 - DNA, 51 bp, Artificial
  Synthetic oligonucleotide
tccggttcgaggatgcaccggattgtatgaagaagtaccctataaactatt

SEQ ID NO: 460168 - DNA, 58 bp, Artificial
  Synthetic oligonucleotide
tccggttgacgtcattaattcatgggcaggggatattctaagaacccaagaatcgtca

SEQ ID NO: 460169 - DNA, 53 bp, Artificial
  Synthetic oligonucleotide
tccgtaaaacaacgtcaatgtgcgattaactacgttttagacgaccgtaagcg

SEQ ID NO: 460170 - DNA, 52 bp, Artificial
  Synthetic oligonucleotide
tccgtaaagcgaagatctgggaagaaggtcaataaacaggtgcgaggaagtg

SEQ ID NO: 460171 - DNA, 55 bp, Artificial
  Synthetic oligonucleotide
tccgtaagactgtcacatgttatgatctttcatgtaatcagacagcatgcatccc

SEQ ID NO: 460172 - DNA, 54 bp, Artificial
  Synthetic oligonucleotide
tccgtaagagtcagcgactttagtcaagtagtctcccaactcacccaagccacg

SEQ ID NO: 460173 - DNA, 53 bp, Artificial
  Synthetic oligonucleotide
tccgtaagcgtgcacgttccccgtccacgccacggacccctaggaaaactgta

SEQ ID NO: 460174 - DNA, 57 bp, Artificial
  Synthetic oligonucleotide
tccgtaaggcgttcctgaggattcacttcaagtacgcggtccatgaggtactcggaa

SEQ ID NO: 460175 - DNA, 59 bp, Artificial
  Synthetic oligonucleotide
tccgtaagggtgccgtgtatgataaactcgaagcatggaagttggcctgggcactgagg

SEQ ID NO: 460176 - DNA, 55 bp, Artificial
  Synthetic oligonucleotide
tccgtacaggtggtgaaatgactaaaatacccctccgtcttcatatgaaacctgc

SEQ ID NO: 460177 - DNA, 54 bp, Artificial
  Synthetic oligonucleotide
tccgtacccacggcccaaagaggctccgcacctcggaggctatcggaggccctt

SEQ ID NO: 460178 - DNA, 60 bp, Artificial
  Synthetic oligonucleotide
tccgtacgactaagatagtcggagatcatccgttggtcatagaacgtgtgcgggccatcg

SEQ ID NO: 460179 - DNA, 60 bp, Artificial
  Synthetic oligonucleotide
tccgtacgtatcccaggttcgacgatttcatcagtgctctggtctccacgatggcgctca

SEQ ID NO: 460180 - DNA, 52 bp, Artificial
  Synthetic oligonucleotide
tccgtactctaaagcataccaccctaatattaagtgtaagtagctgttttgg

SEQ ID NO: 460181 - DNA, 56 bp, Artificial
  Synthetic oligonucleotide
tccgtactctggggcctgacgaattctactatgccatcgttggacgggaaaagggc

SEQ ID NO: 460182 - DNA, 57 bp, Artificial
  Synthetic oligonucleotide
tccgtactttgtgttgcatcgccagtccctctgggcccccatgaactctttaaagtg

SEQ ID NO: 460183 - DNA, 60 bp, Artificial
  Synthetic oligonucleotide
tccgtagagcttcctccgccgacgatgcatttaacgccttggcatatgagtcgttagccg

SEQ ID NO: 460184 - DNA, 58 bp, Artificial
  Synthetic oligonucleotide
tccgtagcacccggctctagccctcaccaggtctacaatattacctgggaagtgacca

SEQ ID NO: 460185 - DNA, 60 bp, Artificial
  Synthetic oligonucleotide
tccgtagccttattggcaacctcctctctggctaccgatcgtcgttgtttgggcaatgca

SEQ ID NO: 460186 - DNA, 57 bp, Artificial
  Synthetic oligonucleotide
tccgtagcggtcagcttactgctacgcttgtaggtcgtaacggtaaccttgagccta

SEQ ID NO: 460187 - DNA, 59 bp, Artificial
  Synthetic oligonucleotide
tccgtagctcgcaacctcatcagcactgcttctaggtatccccgtaagttaaaggccta

SEQ ID NO: 460188 - DNA, 59 bp, Artificial
  Synthetic oligonucleotide
tccgtatccgtacgcgtcttgactggcgacagtgcgcacgtagctaagtttactctacg

SEQ ID NO: 460189 - DNA, 55 bp, Artificial
  Synthetic oligonucleotide
tccgtatgagagccgccattttagcttcggccgccattttaggccctcgcgggcc

SEQ ID NO: 460190 - DNA, 60 bp, Artificial
  Synthetic oligonucleotide
tccgtatgtaatgcaagcaaagtcgccgggaagtgccacacagttctaacagtatagcta

SEQ ID NO: 460191 - DNA, 53 bp, Artificial
  Synthetic oligonucleotide
tccgtatgtttaacctatggagaataacgttggactcgaaatactccggggac

SEQ ID NO: 460192 - DNA, 55 bp, Artificial
  Synthetic oligonucleotide
tccgtattgtttggtggctctcaccagacataaagtcacttttaggtacgaatat

SEQ ID NO: 460193 - DNA, 60 bp, Artificial
  Synthetic oligonucleotide
tccgtcaaatcatgcaccatttctcagatgcagctgaagcatacattgagatgagaaatt

SEQ ID NO: 460194 - DNA, 60 bp, Artificial
  Synthetic oligonucleotide
tccgtcaaccgtctataatgacagtggccgtaacctcagtcgacatgttgcacaattcgg

SEQ ID NO: 460195 - DNA, 53 bp, Artificial
  Synthetic oligonucleotide
tccgtcagaacaacgccgctctccaggaccaactcgatgagttacaggaagcg

SEQ ID NO: 460196 - DNA, 53 bp, Artificial
  Synthetic oligonucleotide
tccgtcagccccggaggaactccaccgccccttcgtaatcgagggagagggag

SEQ ID NO: 460197 - DNA, 60 bp, Artificial
  Synthetic oligonucleotide
tccgtcagtaagagatcttctagataccgcctcagctctgtatcgggatgccttagaatc

SEQ ID NO: 460198 - DNA, 60 bp, Artificial
  Synthetic oligonucleotide
tccgtcatgcgcttgtcgtgaatctccactatgacggaccctgtggcgttaatcggtacc

SEQ ID NO: 460199 - DNA, 56 bp, Artificial
  Synthetic oligonucleotide
tccgtcatgtttatgaaaccttccaagtttcgaaaactggctgccatcaacccaaa

SEQ ID NO: 460200 - DNA, 58 bp, Artificial
  Synthetic oligonucleotide
tccgtcattcttttgtcatgaatttccacaattaccgagccagttgcgttaatcggaa

SEQ ID NO: 460201 - DNA, 55 bp, Artificial
  Synthetic oligonucleotide
tccgtcccaggcaaaacggttgactggttgtcagaccggcccgaggctaccttca

SEQ ID NO: 460202 - DNA, 55 bp, Artificial
  Synthetic oligonucleotide
tccgtcccgccgtacatgcaccacaatacggaacaccggcggcattgtctcgccg

SEQ ID NO: 460203 - DNA, 50 bp, Artificial
  Synthetic oligonucleotide
tccgtccgcacgagctgtggaaaaacgcagggggtgtgtctggaactgtc

SEQ ID NO: 460204 - DNA, 50 bp, Artificial
  Synthetic oligonucleotide
tccgtccgtgcttatcccgaagatcgagtctcccggtgacctccccgatt

SEQ ID NO: 460205 - DNA, 54 bp, Artificial
  Synthetic oligonucleotide
tccgtcctccaggaacggccccctcttgagaaacgtgtcattaccggctgggga

SEQ ID NO: 460206 - DNA, 60 bp, Artificial
  Synthetic oligonucleotide
tccgtcctctccaagctgaattcatgggtcctcactatgcttatggacaaccctttgttg

SEQ ID NO: 460207 - DNA, 59 bp, Artificial
  Synthetic oligonucleotide
tccgtccttatcgacataagacttgacgtctgaactggatttagctccctgaatgtttg

SEQ ID NO: 460208 - DNA, 57 bp, Artificial
  Synthetic oligonucleotide
tccgtccttcaagtttgcgcttccacaagcgtgtacgcctcgggctttgaagtatgt

SEQ ID NO: 460209 - DNA, 58 bp, Artificial
  Synthetic oligonucleotide
tccgtccttggtaatgtatgttttgacgtcggagctggatttagctccctgtatgttc

SEQ ID NO: 460210 - DNA, 57 bp, Artificial
  Synthetic oligonucleotide
tccgtcgacctggaaatttccccagtcgattgtgtccccgtccttgctgatgtagga

SEQ ID NO: 460211 - DNA, 50 bp, Artificial
  Synthetic oligonucleotide
tccgtcgacttaagcgacgcgcggagaagggggctaaattacgtcggcct

SEQ ID NO: 460212 - DNA, 53 bp, Artificial
  Synthetic oligonucleotide
tccgtcgcattggccccacacgtggggcttggcctagaaacaagagccgaaac

SEQ ID NO: 460213 - DNA, 56 bp, Artificial
  Synthetic oligonucleotide
tccgtcgcccacaggacgtcaagttcccgggtggcggacagatcgttggtggagta

SEQ ID NO: 460214 - DNA, 60 bp, Artificial
  Synthetic oligonucleotide
tccgtcggtgataccacgtggcaccattgatagtaatgttgatacacttgatgcattccc

SEQ ID NO: 460215 - DNA, 60 bp, Artificial
  Synthetic oligonucleotide
tccgtcgtcgccagctctcccctatcgatcgttaactccactgtcaatatccgtggcctg

SEQ ID NO: 460216 - DNA, 57 bp, Artificial
  Synthetic oligonucleotide
tccgtctacggcgagttgccctgcgtttcgccgccctgtgttgaggtttgatagagg

SEQ ID NO: 460217 - DNA, 55 bp, Artificial
  Synthetic oligonucleotide
tccgtctgacattgcggatgccatctcacgttgttctcagatgcagctcactgtc

SEQ ID NO: 460218 - DNA, 56 bp, Artificial
  Synthetic oligonucleotide
tccgtcttatgttatttacagcacgtgcttcgttatgagagggatgtgattacagc

SEQ ID NO: 460219 - DNA, 59 bp, Artificial
  Synthetic oligonucleotide
tccgtcttttcctgatattcatttgtgccaggacattattaacaaatgtgaacaatttg

SEQ ID NO: 460220 - DNA, 52 bp, Artificial
  Synthetic oligonucleotide
tccgtgaaaatcggaaggtggatgttaccataaacattaatgtcgcaggtgg

SEQ ID NO: 460221 - DNA, 55 bp, Artificial
  Synthetic oligonucleotide
tccgtgaacccactgacctaaaacagttcaagcaagatgctaagtattcacacgg

SEQ ID NO: 460222 - DNA, 54 bp, Artificial
  Synthetic oligonucleotide
tccgtgaacccctaacaggtcgtaatggagtaataggcacaacatgccttttac

SEQ ID NO: 460223 - DNA, 59 bp, Artificial
  Synthetic oligonucleotide
tccgtgacgcttgatcatcatgactcgtacactggcaatgaggttgccatctgggacga

SEQ ID NO: 460224 - DNA, 50 bp, Artificial
  Synthetic oligonucleotide
tccgtgagattagtgaacggattcttagcactcttctgggacgatctgcg

SEQ ID NO: 460225 - DNA, 50 bp, Artificial
  Synthetic oligonucleotide
tccgtgagattagtgagcggattattgacacttatctgggaggatctacg

SEQ ID NO: 460226 - DNA, 55 bp, Artificial
  Synthetic oligonucleotide
tccgtgatcaaggctagagagtatgagtcttttctccctgtcgagttgttgcgtg

SEQ ID NO: 460227 - DNA, 60 bp, Artificial
  Synthetic oligonucleotide
tccgtgatcatggcagttgatcgatatgtaatacgaacaaccacacggcagatcaactct

SEQ ID NO: 460228 - DNA, 60 bp, Artificial
  Synthetic oligonucleotide
tccgtgatgtattcttgggtgaagaatttctgtgatacacctatagctgcagaaagcaat

SEQ ID NO: 460229 - DNA, 53 bp, Artificial
  Synthetic oligonucleotide
tccgtgattgactgtaatgtctcagtcactcagattgtcgacttcagccttga

SEQ ID NO: 460230 - DNA, 60 bp, Artificial
  Synthetic oligonucleotide
tccgtgcactactagacatcacttccataactaggcagttttactggttgaaagcaaata

SEQ ID NO: 460231 - DNA, 51 bp, Artificial
  Synthetic oligonucleotide
tccgtgcaggtcttggcggcgcaacacgtgttccatggctgatctaaacgc

SEQ ID NO: 460232 - DNA, 55 bp, Artificial
  Synthetic oligonucleotide
tccgtgcaggttccacaagcacttcgtgtgccgtgtgacctacctataaaagagc

SEQ ID NO: 460233 - DNA, 56 bp, Artificial
  Synthetic oligonucleotide
tccgtgccaatcagatattaattttgttggaaccggaagggcttggcgaagttgag

SEQ ID NO: 460234 - DNA, 52 bp, Artificial
  Synthetic oligonucleotide
tccgtgccacaagataacctgcaacacttgcatgagcgaagtaaagggaaga

SEQ ID NO: 460235 - DNA, 55 bp, Artificial
  Synthetic oligonucleotide
tccgtgccacccctggctcgggcgctttcggaactgccgtcgcaggtcaagaaat

SEQ ID NO: 460236 - DNA, 60 bp, Artificial
  Synthetic oligonucleotide
tccgtgccagcgctccaatttgagcactcatgctacctatcctgtttcggcaatgaccca

SEQ ID NO: 460237 - DNA, 60 bp, Artificial
  Synthetic oligonucleotide
tccgtgcgattagagaacggattattgacacttatctgggacgacctgaggagcctgtgt

SEQ ID NO: 460238 - DNA, 58 bp, Artificial
  Synthetic oligonucleotide
tccgtgcgcttagtggacggattcttgactcttatctgggaagacctgcggaacctgt

SEQ ID NO: 460239 - DNA, 60 bp, Artificial
  Synthetic oligonucleotide
tccgtgctctccggtctgacgaattccactatgccatcgttggacgggaacagggcgagc

SEQ ID NO: 460240 - DNA, 60 bp, Artificial
  Synthetic oligonucleotide
tccgtgctgtggcactggctttgcgtttgtggccgactatcccatgtaatatagtcaccg

SEQ ID NO: 460241 - DNA, 59 bp, Artificial
  Synthetic oligonucleotide
tccgtgcttttagtattattcgagttctctgagtctccatacagtgtgggtggcccacg

SEQ ID NO: 460242 - DNA, 55 bp, Artificial
  Synthetic oligonucleotide
tccgtggaacagccacgctcgggcgatccctcggaggtcttgccgcagttggtct

SEQ ID NO: 460243 - DNA, 59 bp, Artificial
  Synthetic oligonucleotide
tccgtggcaggactcgccgtccactctggacctgacgagtaccggcgtctcttcgagcc

SEQ ID NO: 460244 - DNA, 50 bp, Artificial
  Synthetic oligonucleotide
tccgtgggattagtgaacggattcttggcgattatctgggacgacctgcg

SEQ ID NO: 460245 - DNA, 55 bp, Artificial
  Synthetic oligonucleotide
tccgtggttggcttggaaagttgcgaaacacacaaaacccttggacatgacatgg

SEQ ID NO: 460246 - DNA, 55 bp, Artificial
  Synthetic oligonucleotide
tccgtgtaaatcgactcggtacaggaatcccagcacacccactcagaatgttgcg

SEQ ID NO: 460247 - DNA, 60 bp, Artificial
  Synthetic oligonucleotide
tccgtgtaacagggtagattcaagagtcacgagacctccattaatcatctcagttgatca

SEQ ID NO: 460248 - DNA, 59 bp, Artificial
  Synthetic oligonucleotide
tccgtgtagtgtcgcgaagtgaaatctcaacgctttgggtcggcgcgcgtctcctctct

SEQ ID NO: 460249 - DNA, 55 bp, Artificial
  Synthetic oligonucleotide
tccgtgtatcgaaccccaacgaagtatactacaacgaaactggagaggctggtct

SEQ ID NO: 460250 - DNA, 53 bp, Artificial
  Synthetic oligonucleotide
tccgtgtcacaagatcacttgcaacacttgcatgaacaaggtaaaggggagag

SEQ ID NO: 460251 - DNA, 58 bp, Artificial
  Synthetic oligonucleotide
tccgtgtctgacagcaccctagctcgtttcttgttgctttcatcgtgggacttggccg

SEQ ID NO: 460252 - DNA, 50 bp, Artificial
  Synthetic oligonucleotide
tccgtgtctggacttgctagcctcttcgtacaaggtccctcccagaaact

SEQ ID NO: 460253 - DNA, 52 bp, Artificial
  Synthetic oligonucleotide
tccgtgtctttaaaccaacatttaagcatgctagtgtgatgtcccgattaat

SEQ ID NO: 460254 - DNA, 60 bp, Artificial
  Synthetic oligonucleotide
tccgtgtgatctggcctaccgacgggtttatccgcttctaaggagcacgcatggcacttc

SEQ ID NO: 460255 - DNA, 60 bp, Artificial
  Synthetic oligonucleotide
tccgtgtgccggtgtgcaggattcacatcgttttgtgaatgtgtgagtagcctatttata

SEQ ID NO: 460256 - DNA, 60 bp, Artificial
  Synthetic oligonucleotide
tccgtgttgaggagtcaatctaccaatgttgtgacttagcccccgaagccagacaggtca

SEQ ID NO: 460257 - DNA, 60 bp, Artificial
  Synthetic oligonucleotide
tccgtgttgaggagtcaatttaccagtgttgtgacttggctcccgaagccagacaggcta

SEQ ID NO: 460258 - DNA, 55 bp, Artificial
  Synthetic oligonucleotide
tccgtgttgtttatatgagcatcacccgtctttcggataacgggtattacaccgt

SEQ ID NO: 460259 - DNA, 55 bp, Artificial
  Synthetic oligonucleotide
tccgttacaagaaggccgggtgtcgtatgagtggtgacatgaatacggcactagg

SEQ ID NO: 460260 - DNA, 50 bp, Artificial
  Synthetic oligonucleotide
tccgttacctacaactgaatttgagtatcataccgaaatacgcacaacgg

SEQ ID NO: 460261 - DNA, 52 bp, Artificial
  Synthetic oligonucleotide
tccgttacggtcgattaccttcttggtagtccttacgaaaccataaatcttg

SEQ ID NO: 460262 - DNA, 60 bp, Artificial
  Synthetic oligonucleotide
tccgttagagatcatatcgagtgcgtcacctcatgttttggtggcgctgacaagacacac

SEQ ID NO: 460263 - DNA, 60 bp, Artificial
  Synthetic oligonucleotide
tccgttaggactgtgtcttattgggtctgcactcctgagaagtctatgaaacctctcaac

SEQ ID NO: 460264 - DNA, 60 bp, Artificial
  Synthetic oligonucleotide
tccgttagtcgtttgttataggatagcatatgccttgacaaacagtgctataagtcttca

SEQ ID NO: 460265 - DNA, 51 bp, Artificial
  Synthetic oligonucleotide
tccgttagttcgttttattaacgtagatttttcttcccaacgtcctgactg

SEQ ID NO: 460266 - DNA, 52 bp, Artificial
  Synthetic oligonucleotide
tccgttccccgaacgtacacggacgtgcctcggtcgatcatgtagcgtacaa

SEQ ID NO: 460267 - DNA, 50 bp, Artificial
  Synthetic oligonucleotide
tccgttcgattagtgagcgggttatttgcacttgcctgggacgacctgag

SEQ ID NO: 460268 - DNA, 60 bp, Artificial
  Synthetic oligonucleotide
tccgttcgcacagactggatatgctccagttaattggggacacggtgaattgtctgactc

SEQ ID NO: 460269 - DNA, 55 bp, Artificial
  Synthetic oligonucleotide
tccgttcggctcaccactaactgacaacccttgcgtcaacttccagattctgggg

SEQ ID NO: 460270 - DNA, 56 bp, Artificial
  Synthetic oligonucleotide
tccgttcgtcccgaaatgtgggaaccaacttcgagttcaatatccgtgtatctgac

SEQ ID NO: 460271 - DNA, 59 bp, Artificial
  Synthetic oligonucleotide
tccgttctcgcatccctctctggtacactccttttgaactatgcaatcgaacctcccac

SEQ ID NO: 460272 - DNA, 60 bp, Artificial
  Synthetic oligonucleotide
tccgttctgggttaagaatgaggatcatgttggaaactcatggcctcagtctgactccgt

SEQ ID NO: 460273 - DNA, 55 bp, Artificial
  Synthetic oligonucleotide
tccgttctgtggcgaggggaccctttacactagaacctggtcaacatccggcttc

SEQ ID NO: 460274 - DNA, 56 bp, Artificial
  Synthetic oligonucleotide
tccgttgaggtccagatgtccgctgagatagttgtgacgtcccaatgatctagccc

SEQ ID NO: 460275 - DNA, 51 bp, Artificial
  Synthetic oligonucleotide
tccgttgcaactatttgcatgtaccatctctccatcgtctacggttatttc

SEQ ID NO: 460276 - DNA, 58 bp, Artificial
  Synthetic oligonucleotide
tccgttgccgccaccctaggcttcggggcgtatatgtctaaagcacatggtgtcgacc

SEQ ID NO: 460277 - DNA, 58 bp, Artificial
  Synthetic oligonucleotide
tccgttgctgccaccttaggttttggggcgtatatgtccaaggcacatggcgttgacc

SEQ ID NO: 460278 - DNA, 59 bp, Artificial
  Synthetic oligonucleotide
tccgttgctgccaccttgagttttggggcgtatatgtctaaggcatatggcaccgaccc

SEQ ID NO: 460279 - DNA, 50 bp, Artificial
  Synthetic oligonucleotide
tccgttggaagagagtagcgtggacagagagttaagtcctagattgcacg

SEQ ID NO: 460280 - DNA, 59 bp, Artificial
  Synthetic oligonucleotide
tccgttggaccaaggacgcaaaatccacccaggaccacgtgagatcactgtgcctattg

SEQ ID NO: 460281 - DNA, 53 bp, Artificial
  Synthetic oligonucleotide
tccgttggcacaggaagcgaaatgcactgagtacataaataacggattgccgc

SEQ ID NO: 460282 - DNA, 60 bp, Artificial
  Synthetic oligonucleotide
tccgttgggcaggattctctgatgttattgaagaactcgtccttggtgttggatgaatca

SEQ ID NO: 460283 - DNA, 55 bp, Artificial
  Synthetic oligonucleotide
tccgttgggccaaagaccacaagattccggttgggcccgctcgtggtagtgctgc

SEQ ID NO: 460284 - DNA, 60 bp, Artificial
  Synthetic oligonucleotide
tccgttgggcgattgaccattcatgcactgattcgctcatttctcctcggaatattagag

SEQ ID NO: 460285 - DNA, 54 bp, Artificial
  Synthetic oligonucleotide
tccgttggggctccgtcggtattaccggcctccctgactacaggaatgtcgaag

SEQ ID NO: 460286 - DNA, 51 bp, Artificial
  Synthetic oligonucleotide
tccgttggtaccccaactttgcacaccaaagggaagttttagaaagagtgg

SEQ ID NO: 460287 - DNA, 59 bp, Artificial
  Synthetic oligonucleotide
tccgttgtgcgttagaactcaagcatgtatcgggaacatactctgttgacgggtcggcc

SEQ ID NO: 460288 - DNA, 57 bp, Artificial
  Synthetic oligonucleotide
tccgtttaaagggctgtcaactgatagaaaaatggatgaggtctctcaaataggaat

SEQ ID NO: 460289 - DNA, 50 bp, Artificial
  Synthetic oligonucleotide
tccgtttacccatggcaaacacattgcacgtgtctaggaacatagcatgt

SEQ ID NO: 460290 - DNA, 57 bp, Artificial
  Synthetic oligonucleotide
tccgtttactatcgaggaagctatcttgggccggcctgggcatttaggaccaatgga

SEQ ID NO: 460291 - DNA, 56 bp, Artificial
  Synthetic oligonucleotide
tccgtttatcaagccagaggttaaaccagggacaccagcacaggaagctgaatttt

SEQ ID NO: 460292 - DNA, 60 bp, Artificial
  Synthetic oligonucleotide
tccgtttatgcgtccgagttatccgtgatgaaggtagacatgcgacacttatccttaatg

SEQ ID NO: 460293 - DNA, 53 bp, Artificial
  Synthetic oligonucleotide
tccgtttgcaacggacacccaacgaaatatatccgggtggacttaggtttgcc

SEQ ID NO: 460294 - DNA, 55 bp, Artificial
  Synthetic oligonucleotide
tccgtttgcctccctcagatccctctttgggacagaccagtagtcacagcaaggg

SEQ ID NO: 460295 - DNA, 58 bp, Artificial
  Synthetic oligonucleotide
tccgttttaaagatgatacttcctttgaggacattaatggtatcaggagaccgaagca

SEQ ID NO: 460296 - DNA, 51 bp, Artificial
  Synthetic oligonucleotide
tccgttttagtaggttgggacgcagggctacactccgcacccgtagtggta

SEQ ID NO: 460297 - DNA, 55 bp, Artificial
  Synthetic oligonucleotide
tccgttttcgctggcgattttttcgtcgctgcaacgaatcctattaacttcgaaa

SEQ ID NO: 460298 - DNA, 51 bp, Artificial
  Synthetic oligonucleotide
tccgtttttcccgggagattcgtaggcgaccaccaaaaggcgcccataggg

SEQ ID NO: 460299 - DNA, 58 bp, Artificial
  Synthetic oligonucleotide
tcctaaaactcatcggaatcgccaaactgactgattccggtgtcatttttcgacacgc

SEQ ID NO: 460300 - DNA, 55 bp, Artificial
  Synthetic oligonucleotide
tcctaaaatagagccctggaaccagccaggaagtcagcctaaaactccttgtacc

SEQ ID NO: 460301 - DNA, 57 bp, Artificial
  Synthetic oligonucleotide
tcctaaacaggttcaaatgtttatcattggatgtataccgtgtttaggtgaatattg

SEQ ID NO: 460302 - DNA, 55 bp, Artificial
  Synthetic oligonucleotide
tcctaaaccaaaacgtcaagcggaagaccaacggtcacgtccaacacgagctgga

SEQ ID NO: 460303 - DNA, 55 bp, Artificial
  Synthetic oligonucleotide
tcctaaacctgtaaaacacattagcgaagctcactcgcaacctggcagcaggagg

SEQ ID NO: 460304 - DNA, 55 bp, Artificial
  Synthetic oligonucleotide
tcctaacaatagacatcacggatcacctaatgacgaagaacgacatataggcgat

SEQ ID NO: 460305 - DNA, 60 bp, Artificial
  Synthetic oligonucleotide
tcctaacaatagctcagaatctagattggtggtggacttctctcagttttccagggggca

SEQ ID NO: 460306 - DNA, 60 bp, Artificial
  Synthetic oligonucleotide
tcctaacagaccctcgcagggtgcgcgctcgtgggctggacgcgcaccctgcgagcccaa

SEQ ID NO: 460307 - DNA, 60 bp, Artificial
  Synthetic oligonucleotide
tcctaacatcaactttatgcttatactatccaactgaagctgcgacacaaataaatgaca

SEQ ID NO: 460308 - DNA, 52 bp, Artificial
  Synthetic oligonucleotide
tcctaacgttgggactaaagtatttaacgtaacagatggagctagtctgacc

SEQ ID NO: 460309 - DNA, 60 bp, Artificial
  Synthetic oligonucleotide
tcctaactgctagccttatgcggttgctgtgtattgagagggcttatatgtagctttcat

SEQ ID NO: 460310 - DNA, 53 bp, Artificial
  Synthetic oligonucleotide
tcctaagagcgatataagcgtttatgaactaactggtataattaaccgtgacg

SEQ ID NO: 460311 - DNA, 57 bp, Artificial
  Synthetic oligonucleotide
tcctaagctatttataccactcgaaagagttctggcgacgaagtggcaagggaacac

SEQ ID NO: 460312 - DNA, 60 bp, Artificial
  Synthetic oligonucleotide
tcctaaggacattttgcttgagagggcaaagaactatcgtgttgcgcaggagagcaacag

SEQ ID NO: 460313 - DNA, 59 bp, Artificial
  Synthetic oligonucleotide
tcctaaggcgccgtccgcaagacgtaagtcttgcacattcgctctaccaggtcaaacgc

SEQ ID NO: 460314 - DNA, 53 bp, Artificial
  Synthetic oligonucleotide
tcctaagggcattagatgcgccgtaacggatgctaagtggttctgctttgaca

SEQ ID NO: 460315 - DNA, 59 bp, Artificial
  Synthetic oligonucleotide
tcctaaggttcgtacatttgatattccgaattatagacctcagccattatgccaaccta

SEQ ID NO: 460316 - DNA, 55 bp, Artificial
  Synthetic oligonucleotide
tcctaataagtttggactgcctgatcctagtttatataatcctgagacacaacgc

SEQ ID NO: 460317 - DNA, 50 bp, Artificial
  Synthetic oligonucleotide
tcctaatagtcgcgttaaaatcccgcgtagtgctattacatacgctcaca

SEQ ID NO: 460318 - DNA, 53 bp, Artificial
  Synthetic oligonucleotide
tcctaatccgcatgacacccaaacacagtctcgacgaaatcgggacacgaggg

SEQ ID NO: 460319 - DNA, 60 bp, Artificial
  Synthetic oligonucleotide
tcctaatcgacaaagctcggagaaggctcacatccttcaacaagcagagaaattgggtct

SEQ ID NO: 460320 - DNA, 60 bp, Artificial
  Synthetic oligonucleotide
tcctaatcgtactcgtagcccgcgttcgacaagccttactctctctcatgtcgagagagt

SEQ ID NO: 460321 - DNA, 57 bp, Artificial
  Synthetic oligonucleotide
tcctaatctatctaagtacccaagaacttgattgcgtaagaccctcaagaaacgcca

SEQ ID NO: 460322 - DNA, 52 bp, Artificial
  Synthetic oligonucleotide
tcctaatcttattagggatgcctgtagaaaggtgtttcatagaattcagtct

SEQ ID NO: 460323 - DNA, 58 bp, Artificial
  Synthetic oligonucleotide
tcctaatgacctggcccacattgtcttccccgtccggctatcgccttcgataactata

SEQ ID NO: 460324 - DNA, 55 bp, Artificial
  Synthetic oligonucleotide
tcctaatggggcttggaaaaggatggccgctccacagaatggacctcggtgtgcc

SEQ ID NO: 460325 - DNA, 53 bp, Artificial
  Synthetic oligonucleotide
tcctaatgtcaacaggtaaggtcctcggaatacacgtaggcggaaacggacac

SEQ ID NO: 460326 - DNA, 50 bp, Artificial
  Synthetic oligonucleotide
tcctaattcccaatctgtgtagcttgactgccttatgtgtgctaaggcac

SEQ ID NO: 460327 - DNA, 55 bp, Artificial
  Synthetic oligonucleotide
tcctacaagggtaagcctcataaatcgcatattcgcattggaaagcagaagcacc

SEQ ID NO: 460328 - DNA, 51 bp, Artificial
  Synthetic oligonucleotide
tcctacaatacggcttcaacatggtgaccgagaagccagtttacgaactgg

SEQ ID NO: 460329 - DNA, 55 bp, Artificial
  Synthetic oligonucleotide
tcctacacatggacaggtgccctgatcacaccatgcgctgcggaggagagcaaac

SEQ ID NO: 460330 - DNA, 60 bp, Artificial
  Synthetic oligonucleotide
tcctacaccaacgcctcgcgttctgagagcctcggtatgcagtgtgaccactagcgctgg

SEQ ID NO: 460331 - DNA, 52 bp, Artificial
  Synthetic oligonucleotide
tcctacaccctccccgtcctatccgattgcatcggggacaccacgtggttcc

SEQ ID NO: 460332 - DNA, 57 bp, Artificial
  Synthetic oligonucleotide
tcctacacctagggcttatgtagatttaggttctacttctcctgtgacgattaattc

SEQ ID NO: 460333 - DNA, 55 bp, Artificial
  Synthetic oligonucleotide
tcctacaggccagcttattactcatggaagagtaagtgcaaaacataatgatggg

SEQ ID NO: 460334 - DNA, 55 bp, Artificial
  Synthetic oligonucleotide
tcctacagggaagaaccttaaggcattttttaagatgacacctgacaactacaaa

SEQ ID NO: 460335 - DNA, 57 bp, Artificial
  Synthetic oligonucleotide
tcctacaggtgtttttgactcaatgtcacttagtctgaagcttatgggtttgggtgg

SEQ ID NO: 460336 - DNA, 50 bp, Artificial
  Synthetic oligonucleotide
tcctacagttgcctccctcagggtcaggcaaaaagtatcacgatctacta

SEQ ID NO: 460337 - DNA, 60 bp, Artificial
  Synthetic oligonucleotide
tcctacatagcgggagcggtgtcccaccggtttgcgctgactgcggcaaacccgctgcca

SEQ ID NO: 460338 - DNA, 59 bp, Artificial
  Synthetic oligonucleotide
tcctacattgcagaaacaccaaactctgagaatgggacatgttacccagggtatttcgc

SEQ ID NO: 460339 - DNA, 51 bp, Artificial
  Synthetic oligonucleotide
tcctaccactggtataacaattactgattcaacaactggtgcgggttctat

SEQ ID NO: 460340 - DNA, 60 bp, Artificial
  Synthetic oligonucleotide
tcctaccatataccgtgggtttcatcgtaaagccaggggctgttatctcagcgatgatgc

SEQ ID NO: 460341 - DNA, 58 bp, Artificial
  Synthetic oligonucleotide
tcctacccaacaaagaagggtgattgtggtctgccctacttcaactctctgcgccaag

SEQ ID NO: 460342 - DNA, 58 bp, Artificial
  Synthetic oligonucleotide
tcctacccccatgaagttgacgctagtctcctagcccaatcaggaaaagactatggac

SEQ ID NO: 460343 - DNA, 55 bp, Artificial
  Synthetic oligonucleotide
tcctacccgatccatctcaaaattagttggtcagctagcctatccagaaagacac

SEQ ID NO: 460344 - DNA, 58 bp, Artificial
  Synthetic oligonucleotide
tcctacccttttcagaacgctcattacaccaacaatgagagggagaacattcttttca

SEQ ID NO: 460345 - DNA, 55 bp, Artificial
  Synthetic oligonucleotide
tcctaccgagatggcacaaaggcaataaattacaacggtttaaattgtgttagtg

SEQ ID NO: 460346 - DNA, 55 bp, Artificial
  Synthetic oligonucleotide
tcctaccggagtatgccttacatccgtcaattacgccgacgcctggctatcgcgg

SEQ ID NO: 460347 - DNA, 55 bp, Artificial
  Synthetic oligonucleotide
tcctacctccaagggtgattgtggtactctcatttactgtgtctctggtcctgct

SEQ ID NO: 460348 - DNA, 54 bp, Artificial
  Synthetic oligonucleotide
tcctacctgccgtccccactttgccgtgcccggtacagaaaagtttggcacgaa

SEQ ID NO: 460349 - DNA, 60 bp, Artificial
  Synthetic oligonucleotide
tcctaccttagaagagatgctaactgcctgtcaaggagtaggtggaccaggccagaaagc

SEQ ID NO: 460350 - DNA, 56 bp, Artificial
  Synthetic oligonucleotide
tcctacgaaatattctaagcaagaaagaacgaacttcctaagggcttgtatgagag

SEQ ID NO: 460351 - DNA, 55 bp, Artificial
  Synthetic oligonucleotide
tcctacgactggccaatccttggtgaatgtggtgtccagcagtcgctccctagca

SEQ ID NO: 460352 - DNA, 57 bp, Artificial
  Synthetic oligonucleotide
tcctacgagacccgtaagaaggcttgggcaggtgctccaattgtccttgcgttcacc

SEQ ID NO: 460353 - DNA, 60 bp, Artificial
  Synthetic oligonucleotide
tcctacgccatgaccaggatccgagataccctacatctggtggagtgtcccacaccagcc

SEQ ID NO: 460354 - DNA, 55 bp, Artificial
  Synthetic oligonucleotide
tcctacgctcagcagacggcacgccgcactacgatcgcccttctttcgaccagga

SEQ ID NO: 460355 - DNA, 57 bp, Artificial
  Synthetic oligonucleotide
tcctacgtgcggtgtcgtgtttagtgtagacgcgcgccaacaggaacagttaggcaa

SEQ ID NO: 460356 - DNA, 60 bp, Artificial
  Synthetic oligonucleotide
tcctacgtttcggtgtcttagcgcatgtttctagagagagaagcatagcaaaacgcaaga

SEQ ID NO: 460357 - DNA, 55 bp, Artificial
  Synthetic oligonucleotide
tcctactatcaccctcaatcacaatactcatcggtctaaaaggccgcgcagcggc

SEQ ID NO: 460358 - DNA, 57 bp, Artificial
  Synthetic oligonucleotide
tcctactcattcctacgttaccatctcgtacgattacccagttgtcaagacgaataa

SEQ ID NO: 460359 - DNA, 59 bp, Artificial
  Synthetic oligonucleotide
tcctactccggagccaccaacaggtacaacacattcaactccggtagcgcactggccat

SEQ ID NO: 460360 - DNA, 54 bp, Artificial
  Synthetic oligonucleotide
tcctactgaggctgcaacagaaataaatgataattcgtggaaagacacgctctc

SEQ ID NO: 460361 - DNA, 60 bp, Artificial
  Synthetic oligonucleotide
tcctactgctgtaagccgccctagcgagacctacagcgcacaggcctcaccagtggccgt

SEQ ID NO: 460362 - DNA, 51 bp, Artificial
  Synthetic oligonucleotide
tcctactggtgatgctggctatcatttgtacatctggggtcatcatgtttt

SEQ ID NO: 460363 - DNA, 60 bp, Artificial
  Synthetic oligonucleotide
tcctactgttcaagcctccaagctgtgccttgggtggctttagggcatggacatcgaccc

SEQ ID NO: 460364 - DNA, 57 bp, Artificial
  Synthetic oligonucleotide
tcctacttagcagctgcaatgcagttctttgaagggacatgtcctgaagattggacc

SEQ ID NO: 460365 - DNA, 55 bp, Artificial
  Synthetic oligonucleotide
tcctacttggagtatatgacgttctttccgtcacacgcgacacgagaggcggtac

SEQ ID NO: 460366 - DNA, 55 bp, Artificial
  Synthetic oligonucleotide
tcctactttccagtacatacaggggttaaaccaaagtatccggatgacgtggcag

SEQ ID NO: 460367 - DNA, 53 bp, Artificial
  Synthetic oligonucleotide
tcctactttgcgtccccgaaatgagagtgagttcctagttaaactttctacct

SEQ ID NO: 460368 - DNA, 55 bp, Artificial
  Synthetic oligonucleotide
tcctagaaaggcgcgggccgaggtaccaaggcggcgtgtggagcgggagtcaaga

SEQ ID NO: 460369 - DNA, 59 bp, Artificial
  Synthetic oligonucleotide
tcctagacaggaccccactcccacaaggagttaagactgcattctgtgaactgcctttc

SEQ ID NO: 460370 - DNA, 54 bp, Artificial
  Synthetic oligonucleotide
tcctagacgtagatttgaaaataatgccaggatataagactcatgcaggattac

SEQ ID NO: 460371 - DNA, 55 bp, Artificial
  Synthetic oligonucleotide
tcctagagctccattaaattccaatgctatgttgtccactgagtctatgatgagt

SEQ ID NO: 460372 - DNA, 55 bp, Artificial
  Synthetic oligonucleotide
tcctagaggacaaacttctaaaggtctctccaagaaatactctggtttgcttgag

SEQ ID NO: 460373 - DNA, 55 bp, Artificial
  Synthetic oligonucleotide
tcctagatgaggttcttgcccccggtgggccttataacttgaccgtcggcagttg

SEQ ID NO: 460374 - DNA, 55 bp, Artificial
  Synthetic oligonucleotide
tcctagatgcgagtacacctaggatcggcccctcgggactacctacggtagtggt

SEQ ID NO: 460375 - DNA, 55 bp, Artificial
  Synthetic oligonucleotide
tcctagcaaccaatgtgacactgcatttcaggcaaaacgaacgcagcattcctgc

SEQ ID NO: 460376 - DNA, 55 bp, Artificial
  Synthetic oligonucleotide
tcctagcagctctggctgcgtactgcctgtccacgggctgcgtggtcatagtagg

SEQ ID NO: 460377 - DNA, 60 bp, Artificial
  Synthetic oligonucleotide
tcctagcgacctgtatcaacggcgtgtgttggactgtctatcatggcgccggctcaaaga

SEQ ID NO: 460378 - DNA, 60 bp, Artificial
  Synthetic oligonucleotide
tcctaggaattgggacatcaactcaaatgatcaaggcaggaagaatccttattggtgagc

SEQ ID NO: 460379 - DNA, 55 bp, Artificial
  Synthetic oligonucleotide
tcctaggactggttatgttaggagtgctcctggaggtgtactattgacagagacc

SEQ ID NO: 460380 - DNA, 60 bp, Artificial
  Synthetic oligonucleotide
tcctaggaggagtggcctgggcgggactgggagtggtcaaccctcagatgctgcatataa

SEQ ID NO: 460381 - DNA, 57 bp, Artificial
  Synthetic oligonucleotide
tcctaggccatggctccatagtttgggacaatatatctatggcacttatggggatac

SEQ ID NO: 460382 - DNA, 59 bp, Artificial
  Synthetic oligonucleotide
tcctagggctagatcccctgggcagacctatgcaacaaactcttcccagacgcaacaac

SEQ ID NO: 460383 - DNA, 51 bp, Artificial
  Synthetic oligonucleotide
tcctaggtggccatatttacatagtagactggtcgtgtttcatttcaaaaa

SEQ ID NO: 460384 - DNA, 55 bp, Artificial
  Synthetic oligonucleotide
tcctaggtttgattcatccgcggtaccgactgtggatatgtggggtgatgctgca

SEQ ID NO: 460385 - DNA, 60 bp, Artificial
  Synthetic oligonucleotide
tcctagtaactacggtaacattgcatttcaagcaatatgagtgcgatttccccgcaaaca

SEQ ID NO: 460386 - DNA, 55 bp, Artificial
  Synthetic oligonucleotide
tcctagtagcggggtattgaatatccctcgtatcctattgtaccttgttagaact

SEQ ID NO: 460387 - DNA, 54 bp, Artificial
  Synthetic oligonucleotide
tcctagtcccgcacgggtaataggagagccggtctttgacccccggtatggcta

SEQ ID NO: 460388 - DNA, 51 bp, Artificial
  Synthetic oligonucleotide
tcctagtgatcgcgccgggaacgtagacatgccgagttgcttggaagctcg

SEQ ID NO: 460389 - DNA, 55 bp, Artificial
  Synthetic oligonucleotide
tcctagttctccgcaagccaacgtttctgctactttgtacactggtaataaactg

SEQ ID NO: 460390 - DNA, 60 bp, Artificial
  Synthetic oligonucleotide
tcctataatgaactcagtgacggtgagacaggacttagagaggcagttaggagaattgag

SEQ ID NO: 460391 - DNA, 60 bp, Artificial
  Synthetic oligonucleotide
tcctatactatcaaaactgaagagctaataattactacacacactgccattgggcaagct

SEQ ID NO: 460392 - DNA, 52 bp, Artificial
  Synthetic oligonucleotide
tcctatatatacaaaatatcgtgaagactacgcaacaacaaactcttcacat

SEQ ID NO: 460393 - DNA, 60 bp, Artificial
  Synthetic oligonucleotide
tcctatatgtgaatatcaaacaggacatagcaaggtaggacctctacaatatttagcact

SEQ ID NO: 460394 - DNA, 60 bp, Artificial
  Synthetic oligonucleotide
tcctatattgcagaaacaccaaatgctgagaatggaatatgttacccagggtacttctcc

SEQ ID NO: 460395 - DNA, 53 bp, Artificial
  Synthetic oligonucleotide
tcctatcaagtggacttacgacatcactgaagaattaccagttaaatctggtg

SEQ ID NO: 460396 - DNA, 55 bp, Artificial
  Synthetic oligonucleotide
tcctatcacaaaaaggaagctccttgcctagagtgtaatacctcaggattcactt

SEQ ID NO: 460397 - DNA, 60 bp, Artificial
  Synthetic oligonucleotide
tcctatcaccacggatatcgaatgtgatgaccttgtgcccgaaatgtcaggagctcatgt

SEQ ID NO: 460398 - DNA, 60 bp, Artificial
  Synthetic oligonucleotide
tcctatccagatgttacttgtatccatgcgccaggatcaggaccactgtacataaatctc

SEQ ID NO: 460399 - DNA, 59 bp, Artificial
  Synthetic oligonucleotide
tcctatcccacttcgcaaacgacaccggatgcgtgtggggcataggagaggacataccc

SEQ ID NO: 460400 - DNA, 60 bp, Artificial
  Synthetic oligonucleotide
tcctatccccgattatatctaggaatctgcagcttgaagggtgagtagtcccgtacatgt

SEQ ID NO: 460401 - DNA, 55 bp, Artificial
  Synthetic oligonucleotide
tcctatccctaatacacaagcaccaccaagtcaggggaatcccggaccgtttgta

SEQ ID NO: 460402 - DNA, 55 bp, Artificial
  Synthetic oligonucleotide
tcctatccctcaataagccccaaagccttactgttcccagaacgcttaccacaaa

SEQ ID NO: 460403 - DNA, 55 bp, Artificial
  Synthetic oligonucleotide
tcctatcctgttcatattacgaagctaacaagagcagtgcgagtaggcatcgaag

SEQ ID NO: 460404 - DNA, 60 bp, Artificial
  Synthetic oligonucleotide
tcctatcgagaccatgcgtgacagaatgtcgtgggacgaatcaaacctccgcgtcatgga

SEQ ID NO: 460405 - DNA, 60 bp, Artificial
  Synthetic oligonucleotide
tcctatcgtacttctggaagcccatgattctccaggcccaagctcaattggacatttaga

SEQ ID NO: 460406 - DNA, 60 bp, Artificial
  Synthetic oligonucleotide
tcctatctcaggcgaacacaatcaatgggaatacaactggaccagaggattattgtgctc

SEQ ID NO: 460407 - DNA, 51 bp, Artificial
  Synthetic oligonucleotide
tcctatctccaatatcttgctcaacaatcacctgtcccttctcctacacag

SEQ ID NO: 460408 - DNA, 60 bp, Artificial
  Synthetic oligonucleotide
tcctatctctctaaatagatcgtatccattgtaatgctcatcactaagacccaacctcct

SEQ ID NO: 460409 - DNA, 60 bp, Artificial
  Synthetic oligonucleotide
tcctatgaacccaagtgcattcatgcgaaagccccggaggggtgagtagcatggactcga

SEQ ID NO: 460410 - DNA, 60 bp, Artificial
  Synthetic oligonucleotide
tcctatgaggcccatcatgatgtgtctcatactggtaaggttatttgtgtgagtgatgtt

SEQ ID NO: 460411 - DNA, 60 bp, Artificial
  Synthetic oligonucleotide
tcctatgatacccgctgctttgactcaacagtcactgagcgcgacatacgcactgagcat

SEQ ID NO: 460412 - DNA, 50 bp, Artificial
  Synthetic oligonucleotide
tcctatgcaaggtctaggtactttccagttgctaaggagacaccatggca

SEQ ID NO: 460413 - DNA, 54 bp, Artificial
  Synthetic oligonucleotide
tcctatgcatcctccgggacagtgtttgtcgatgcgacgatgagtgcgttcgga

SEQ ID NO: 460414 - DNA, 58 bp, Artificial
  Synthetic oligonucleotide
tcctatgcccggcttaatagcaaagcccggagaaattgtcgtacctgttgatatcttc

SEQ ID NO: 460415 - DNA, 60 bp, Artificial
  Synthetic oligonucleotide
tcctatggcaggaagaagcggagacagcgacgaagcactcctcctagcagtgaggaccat

SEQ ID NO: 460416 - DNA, 59 bp, Artificial
  Synthetic oligonucleotide
tcctatggctacgtcctcgttcaacctttctgaattggtagctacccgcggctcatcag

SEQ ID NO: 460417 - DNA, 60 bp, Artificial
  Synthetic oligonucleotide
tcctatgggacgactatgggatgagcaatcccatccacgacgccctcaggttgcaagaac

SEQ ID NO: 460418 - DNA, 59 bp, Artificial
  Synthetic oligonucleotide
tcctatgggtctattcgggcgcgcagcgcaacaccccacattacttgaaacccaatcga

SEQ ID NO: 460419 - DNA, 56 bp, Artificial
  Synthetic oligonucleotide
tcctatggtcgcagggcccggaagacattggacgtttacgcgtccctccagttgcg

SEQ ID NO: 460420 - DNA, 60 bp, Artificial
  Synthetic oligonucleotide
tcctatgtgaaacggaactagggtcaccactagtgcttgatgactgttcactagaaggtc

SEQ ID NO: 460421 - DNA, 55 bp, Artificial
  Synthetic oligonucleotide
tcctatgtgaactctcgcagtcacttctggctgcagccattggtttcggccaagg

SEQ ID NO: 460422 - DNA, 56 bp, Artificial
  Synthetic oligonucleotide
tcctatgtttgtagtcagagtgttttccatatgtgaataaacgtttatcgttttaa

SEQ ID NO: 460423 - DNA, 59 bp, Artificial
  Synthetic oligonucleotide
tcctattaccccaagcagttgggcacttttgctcgacctgtcagggatgagttatagga

SEQ ID NO: 460424 - DNA, 57 bp, Artificial
  Synthetic oligonucleotide
tcctattattcgtaccttatgccagtcatgggtatgactaattgcctagctcgcgag

SEQ ID NO: 460425 - DNA, 60 bp, Artificial
  Synthetic oligonucleotide
tcctattcaagccgtgatagtcgttcctcgtgcttagtaactaaggatgaaatgcatgtc

SEQ ID NO: 460426 - DNA, 55 bp, Artificial
  Synthetic oligonucleotide
tcctattcatagtctcttgcctagtaaaggggctggttgacagtgtcagtgacag

SEQ ID NO: 460427 - DNA, 56 bp, Artificial
  Synthetic oligonucleotide
tcctattcttggtctagagggcaacgggggacgtagcagtgactttattaagttga

SEQ ID NO: 460428 - DNA, 60 bp, Artificial
  Synthetic oligonucleotide
tcctattgcaatgacgcttatctagcagatatgactcatataagtttccaggtattaagt

SEQ ID NO: 460429 - DNA, 60 bp, Artificial
  Synthetic oligonucleotide
tcctattgcaccggcggacagtattgaactgcagcccttggtgtcctccactgcccccag

SEQ ID NO: 460430 - DNA, 60 bp, Artificial
  Synthetic oligonucleotide
tcctattgctggcactacgcgcctcgacagtgcggtattgtacccgcgtcagaggtgtgt

SEQ ID NO: 460431 - DNA, 59 bp, Artificial
  Synthetic oligonucleotide
tcctatttgtcagacctagatgccaccgctgttgataagacaaccaaacccggtgtagc

SEQ ID NO: 460432 - DNA, 53 bp, Artificial
  Synthetic oligonucleotide
tcctatttttaatagggccctgcttaacactgctaagtttgcagacgcattag

SEQ ID NO: 460433 - DNA, 50 bp, Artificial
  Synthetic oligonucleotide
tcctcaaaagatgtctcaagtttgtctggaggtattgactatgtcatggt

SEQ ID NO: 460434 - DNA, 57 bp, Artificial
  Synthetic oligonucleotide
tcctcaaaagggactttcagcgttggtgcgttgaggcccactgtgagtacatccgct

SEQ ID NO: 460435 - DNA, 55 bp, Artificial
  Synthetic oligonucleotide
tcctcaaacgaggactccgagtcctgttcggagacgtactcaaactgaggagggg

SEQ ID NO: 460436 - DNA, 60 bp, Artificial
  Synthetic oligonucleotide
tcctcaaagacgaggcttatgaacgaattactagagataatccatgccctaagcggccca

SEQ ID NO: 460437 - DNA, 60 bp, Artificial
  Synthetic oligonucleotide
tcctcaaagcagtgaggatcatcaaaatcttatatcaaagcagtaagtagtacatgtaat

SEQ ID NO: 460438 - DNA, 55 bp, Artificial
  Synthetic oligonucleotide
tcctcaaagcttagaaccggatggccgcgcgatttttttaagtggtgggtccaga

SEQ ID NO: 460439 - DNA, 58 bp, Artificial
  Synthetic oligonucleotide
tcctcaaatgggactttcagagttggtgcgttgaggccaacggttagtacatccgcca

SEQ ID NO: 460440 - DNA, 60 bp, Artificial
  Synthetic oligonucleotide
tcctcaaccttgatgggattgaagaaacatctgaaggttatagtactgtgacatcaatgt

SEQ ID NO: 460441 - DNA, 57 bp, Artificial
  Synthetic oligonucleotide
tcctcaacgtccacgtggtgtgcctaatgcacgtcgtaacttgttttccgttcatcc

SEQ ID NO: 460442 - DNA, 55 bp, Artificial
  Synthetic oligonucleotide
tcctcaacttccggtattacgggcgacaatacgacaacgtcctctgagcccgccc

SEQ ID NO: 460443 - DNA, 60 bp, Artificial
  Synthetic oligonucleotide
tcctcaagcacattgcgctgctcgaggcgtacaccggaccaaccagtggacttccccgcc

SEQ ID NO: 460444 - DNA, 55 bp, Artificial
  Synthetic oligonucleotide
tcctcaagctcttttcttccagagacccactgctcgaggatgtcttctcgtcccc

SEQ ID NO: 460445 - DNA, 60 bp, Artificial
  Synthetic oligonucleotide
tcctcaagtggactatctgtttccaggcttgtcttcttttagttactatctgaatgctgc

SEQ ID NO: 460446 - DNA, 60 bp, Artificial
  Synthetic oligonucleotide
tcctcaagttcgttctgtccaatctcaagatcaacaagtctactccgtggactcaggacc

SEQ ID NO: 460447 - DNA, 55 bp, Artificial
  Synthetic oligonucleotide
tcctcaagttggcgggagatgttgagtccaaccctgggcccttcttcttctccga

SEQ ID NO: 460448 - DNA, 57 bp, Artificial
  Synthetic oligonucleotide
tcctcaatcctaacctttgaagagagagacacatcatcactaagcattgaggctaga

SEQ ID NO: 460449 - DNA, 54 bp, Artificial
  Synthetic oligonucleotide
tcctcaatttatgcataccattcgacttgccatccagcagtttgaccctacggc

SEQ ID NO: 460450 - DNA, 55 bp, Artificial
  Synthetic oligonucleotide
tcctcacaggattcttgatggaagggactgcacactaatagatgccctactgggg

SEQ ID NO: 460451 - DNA, 59 bp, Artificial
  Synthetic oligonucleotide
tcctcacctcggtaagtggagagtgacgtggaacattgtgagccattcctgaaaggtta

SEQ ID NO: 460452 - DNA, 57 bp, Artificial
  Synthetic oligonucleotide
tcctcacgcgttcgggaggagttagtgtagttaagcgactgcagtcatactacaacc

SEQ ID NO: 460453 - DNA, 60 bp, Artificial
  Synthetic oligonucleotide
tcctcacttaccaccgcagatgaaatgcgtgtgagaaatgtgcttactgataaggatacg

SEQ ID NO: 460454 - DNA, 52 bp, Artificial
  Synthetic oligonucleotide
tcctcacttgactcacttgcttcagcctcttcccgcctgtgtcttcccgggc

SEQ ID NO: 460455 - DNA, 52 bp, Artificial
  Synthetic oligonucleotide
tcctcagaaaattttgtaggaggggttcaggccttggatgctctggagtgta

SEQ ID NO: 460456 - DNA, 55 bp, Artificial
  Synthetic oligonucleotide
tcctcagaaagtgcaattaatgcagatttaagtatgaccaacttaatcgaagccc

SEQ ID NO: 460457 - DNA, 55 bp, Artificial
  Synthetic oligonucleotide
tcctcagagcagaccggagccaacagctccaccagcagagaactttgggatgggg

SEQ ID NO: 460458 - DNA, 55 bp, Artificial
  Synthetic oligonucleotide
tcctcagagcggagtcaaggggcctatcgggcgggcggtaatccagcggaaccgg

SEQ ID NO: 460459 - DNA, 60 bp, Artificial
  Synthetic oligonucleotide
tcctcagatcacttcttcagtggccctcgtggagaatcactctccttctgagctccttcg

SEQ ID NO: 460460 - DNA, 60 bp, Artificial
  Synthetic oligonucleotide
tcctcaggaactatcccagtgcagggtaccactctccacatgttttcagtgggtggagag

SEQ ID NO: 460461 - DNA, 57 bp, Artificial
  Synthetic oligonucleotide
tcctcaggatcgtcccatcaaaacacgcaaactgtattgtctagggggagttggaac

SEQ ID NO: 460462 - DNA, 60 bp, Artificial
  Synthetic oligonucleotide
tcctcaggggagccaaagcactaacagatatagtaacactgactgaggaagcagaactag

SEQ ID NO: 460463 - DNA, 54 bp, Artificial
  Synthetic oligonucleotide
tcctcagggtctaccagtcatgttaacccctggttcagaacaatttctaacaac

SEQ ID NO: 460464 - DNA, 60 bp, Artificial
  Synthetic oligonucleotide
tcctcaggtgattggcattgcgataccaagtggatgggagaccacgtcattacaaagtca

SEQ ID NO: 460465 - DNA, 58 bp, Artificial
  Synthetic oligonucleotide
tcctcaggttgtagttgaattgaacttgtattgtcgtgacgtcgtggttctgtagaaa

SEQ ID NO: 460466 - DNA, 54 bp, Artificial
  Synthetic oligonucleotide
tcctcagtcatgtacggttgaatcctttcgagaagttgaaaagaaccggcgcga

SEQ ID NO: 460467 - DNA, 51 bp, Artificial
  Synthetic oligonucleotide
tcctcagtcgcgtaaggcctcgtcaacgagcaacctacacgcgcgctgccc

SEQ ID NO: 460468 - DNA, 60 bp, Artificial
  Synthetic oligonucleotide
tcctcagtcgttggcggccaatgcatccggacgaatagattccattggactgtgtatgcc

SEQ ID NO: 460469 - DNA, 58 bp, Artificial
  Synthetic oligonucleotide
tcctcagtgcgacctattgcttggtggtcaaagctggtcatatatagtggaaaggcct

SEQ ID NO: 460470 - DNA, 60 bp, Artificial
  Synthetic oligonucleotide
tcctcataatgacatgttaaatgtcaatctggcaaaaactaatgacgccattaaagacat

SEQ ID NO: 460471 - DNA, 60 bp, Artificial
  Synthetic oligonucleotide
tcctcatacagtgggtttagggcaaggatatgtcacagggcaagtggaattgagctatgt

SEQ ID NO: 460472 - DNA, 60 bp, Artificial
  Synthetic oligonucleotide
tcctcatacgtgtgcgtggttgattcgctgggtgacaactatctcggtggtagagatgtg

SEQ ID NO: 460473 - DNA, 60 bp, Artificial
  Synthetic oligonucleotide
tcctcatcatcagaagcacatacatggaagactgggatgtggggttacaaatgctgcgca

SEQ ID NO: 460474 - DNA, 55 bp, Artificial
  Synthetic oligonucleotide
tcctcatcccgcaggcagtagcgcttcgttgctcgtaggtccgtcaccagcgagt

SEQ ID NO: 460475 - DNA, 60 bp, Artificial
  Synthetic oligonucleotide
tcctcatcgctgctcccaccgaagacatctccctccttacccttcacaacgtggagcgtg

SEQ ID NO: 460476 - DNA, 60 bp, Artificial
  Synthetic oligonucleotide
tcctcatctgacagtggagccaacaggttgggatagtgatgaaccaattctacctaatca

SEQ ID NO: 460477 - DNA, 60 bp, Artificial
  Synthetic oligonucleotide
tcctcatctttgacgctcgtacctgcattgaagacatctcttctgcacacatgttctccg

SEQ ID NO: 460478 - DNA, 60 bp, Artificial
  Synthetic oligonucleotide
tcctcatgcagattgccatcttagttacgactatgacactacatttcaagcacaatgaat

SEQ ID NO: 460479 - DNA, 60 bp, Artificial
  Synthetic oligonucleotide
tcctcatgcatccgactttgatgtggacagcttatccatccttgacaccctggatggagc

SEQ ID NO: 460480 - DNA, 59 bp, Artificial
  Synthetic oligonucleotide
tcctcatggggccttgaacagtagtcttccctttcagaacgtacatcctatcactattg

SEQ ID NO: 460481 - DNA, 55 bp, Artificial
  Synthetic oligonucleotide
tcctcattcatagatagactatttgctcaaatagatcaagagcagaacacagctg

SEQ ID NO: 460482 - DNA, 55 bp, Artificial
  Synthetic oligonucleotide
tcctcattcccagcttccagaccagacccaagggtcgcaaaacagtaaccgttaa

SEQ ID NO: 460483 - DNA, 57 bp, Artificial
  Synthetic oligonucleotide
tcctccaacgctctttcctcaccttggattggtcacgtttcgacaagcgtgcctact

SEQ ID NO: 460484 - DNA, 60 bp, Artificial
  Synthetic oligonucleotide
tcctccaagctatcgcttagaggagcatcaaggcacagtaacagtcatagattataaaaa

SEQ ID NO: 460485 - DNA, 59 bp, Artificial
  Synthetic oligonucleotide
tcctccaagtaaggatccaaactatgcatagggcctttgccggcactatggccctagta

SEQ ID NO: 460486 - DNA, 55 bp, Artificial
  Synthetic oligonucleotide
tcctccagaatcttggcgtccgacgtgatgcccttggctttcagcttcggcagca

SEQ ID NO: 460487 - DNA, 57 bp, Artificial
  Synthetic oligonucleotide
tcctccagatagccaggaagaatgggcttgtgttaagcccaacaaaaatgaaagtgg

SEQ ID NO: 460488 - DNA, 60 bp, Artificial
  Synthetic oligonucleotide
tcctccaggtatgaattggacagaacttatcactaactactcaccatctcgtgaagataa

SEQ ID NO: 460489 - DNA, 58 bp, Artificial
  Synthetic oligonucleotide
tcctccagttgttcaggtacgtcgatgagcctttcttcgactgggtctacaactcgcc

SEQ ID NO: 460490 - DNA, 55 bp, Artificial
  Synthetic oligonucleotide
tcctccatctgctgaagatccctacacatagacacatcaaaggaggctcatgtcc

SEQ ID NO: 460491 - DNA, 60 bp, Artificial
  Synthetic oligonucleotide
tcctccatctggagtgactcgcaatgttgatgtggatttgcgatcaccgttttacaagcg

SEQ ID NO: 460492 - DNA, 53 bp, Artificial
  Synthetic oligonucleotide
tcctccattcggaaaacgcaacctctttagacaaccaaagcgtgaggaacggg

SEQ ID NO: 460493 - DNA, 56 bp, Artificial
  Synthetic oligonucleotide
tcctcccccatagggaataaaagttgtgaaataaataaacagagactcacattggc

SEQ ID NO: 460494 - DNA, 53 bp, Artificial
  Synthetic oligonucleotide
tcctccccccgagggtcccgagtgaggcttatcccggggatcggcctccgctc

SEQ ID NO: 460495 - DNA, 59 bp, Artificial
  Synthetic oligonucleotide
tcctccccgtcaaccgacgtgctcggtccgtgcttcgaagaattgtttgcagatagcag

SEQ ID NO: 460496 - DNA, 58 bp, Artificial
  Synthetic oligonucleotide
tcctccccttgcagatcgtccgtcgatctggaaagtaccccattcaagaacatctccg

SEQ ID NO: 460497 - DNA, 55 bp, Artificial
  Synthetic oligonucleotide
tcctcccgccgtaaggcgtttaaggtgactagtttgcttggctagtcaccaccca

SEQ ID NO: 460498 - DNA, 53 bp, Artificial
  Synthetic oligonucleotide
tcctcccgtgaaacccgtatgtatatgggttttacgacagaccattttaacga

SEQ ID NO: 460499 - DNA, 51 bp, Artificial
  Synthetic oligonucleotide
tcctccctgagctcatccgtcaatgtgtggagcggcgattgcgaaccttgg

SEQ ID NO: 460500 - DNA, 57 bp, Artificial
  Synthetic oligonucleotide
tcctccctgcattgtaactgctaatgactatttccttcctaaaactttgttagccag

SEQ ID NO: 460501 - DNA, 54 bp, Artificial
  Synthetic oligonucleotide
tcctccctggatctttcagggtggtttacgtcaggctacagcgggggggacatt

SEQ ID NO: 460502 - DNA, 60 bp, Artificial
  Synthetic oligonucleotide
tcctccctgttactggcaagaacatggatgatctctccaaaaactatcccagggcaatga

SEQ ID NO: 460503 - DNA, 60 bp, Artificial
  Synthetic oligonucleotide
tcctcccttctatgcccacactgtgcagaatcaatgccaccaactccctcataagaggtc

SEQ ID NO: 460504 - DNA, 60 bp, Artificial
  Synthetic oligonucleotide
tcctccgatctccgattctggcacttccggtcatcaatttacgacacgcgcggcggtgtg

SEQ ID NO: 460505 - DNA, 60 bp, Artificial
  Synthetic oligonucleotide
tcctccgcgatgacctgacattctcagtggggctcaatagctatgctatggggtcacagc

SEQ ID NO: 460506 - DNA, 53 bp, Artificial
  Synthetic oligonucleotide
tcctccgctctgatccacattcatttcgctagcaaccctttcgataatttgtc

SEQ ID NO: 460507 - DNA, 55 bp, Artificial
  Synthetic oligonucleotide
tcctccggacaccaacgtgacgagcgcagtcattcagagtaacgaccacctgtcg

SEQ ID NO: 460508 - DNA, 60 bp, Artificial
  Synthetic oligonucleotide
tcctccggcccctgaatgcggctaaccttaaacccggatccatgctatgcaatccagcat

SEQ ID NO: 460509 - DNA, 58 bp, Artificial
  Synthetic oligonucleotide
tcctccggcccctgaatgcggctaatcctaactgcggagcacatacccctaatccaaa

SEQ ID NO: 460510 - DNA, 60 bp, Artificial
  Synthetic oligonucleotide
tcctccggcccctgaatgcggctaatcttaccccacagctgttgcacacaatcaagtgtg

SEQ ID NO: 460511 - DNA, 59 bp, Artificial
  Synthetic oligonucleotide
tcctccggcccctgaatgtggctaatcctaaccccgctgctattgcacacgaaccagtg

SEQ ID NO: 460512 - DNA, 55 bp, Artificial
  Synthetic oligonucleotide
tcctccgggacagtgtttgtcgatgcgacgatgagtgcgttcggattgaagcaga

SEQ ID NO: 460513 - DNA, 60 bp, Artificial
  Synthetic oligonucleotide
tcctccgggatgtgctcagcacctagcctaaactaagtccatatgcccatctttgctgct

SEQ ID NO: 460514 - DNA, 54 bp, Artificial
  Synthetic oligonucleotide
tcctccgtagaacctgctcgcataccccgctgtcgcaaacgggtggtacatgtt

SEQ ID NO: 460515 - DNA, 53 bp, Artificial
  Synthetic oligonucleotide
tcctccgtgggagagcccgttcctacagcttctcacgacgcccccgacggggg

SEQ ID NO: 460516 - DNA, 60 bp, Artificial
  Synthetic oligonucleotide
tcctcctaatcctacaaacggggaaataatgagtgcgactcagagagtcgatgacgctac

SEQ ID NO: 460517 - DNA, 55 bp, Artificial
  Synthetic oligonucleotide
tcctcctagaatgggatggttacgtgccattttgcgattcttaggtgccggaatg

SEQ ID NO: 460518 - DNA, 56 bp, Artificial
  Synthetic oligonucleotide
tcctcctagcagcagggttctctgaaccgggcgactgcggtggtattctaaggtgt

SEQ ID NO: 460519 - DNA, 60 bp, Artificial
  Synthetic oligonucleotide
tcctcctagccaccgcccgcagccgactacaggacgctgtcaaggccatggcagaggccg

SEQ ID NO: 460520 - DNA, 60 bp, Artificial
  Synthetic oligonucleotide
tcctcctataattagaggtgatttacaattgattccagagggactgatgccgcgatttag

SEQ ID NO: 460521 - DNA, 55 bp, Artificial
  Synthetic oligonucleotide
tcctcctcgcacgctgcccagagggcgactctatcaccatggagtttaagaagga

SEQ ID NO: 460522 - DNA, 60 bp, Artificial
  Synthetic oligonucleotide
tcctcctcgcacttcctcctcgcacctgacgtcatcattatgtcctcttttaaatggtgc

SEQ ID NO: 460523 - DNA, 55 bp, Artificial
  Synthetic oligonucleotide
tcctcctctatagtaaggattcggaacgtgtgtaaacgaacgtgctgtgccctcc

SEQ ID NO: 460524 - DNA, 51 bp, Artificial
  Synthetic oligonucleotide
tcctcctgagcgagcctccgtcccggaccctcagcctgttgacctgcaaga

SEQ ID NO: 460525 - DNA, 55 bp, Artificial
  Synthetic oligonucleotide
tcctccttgacaatgtgcagatgccagacaggataataccccagctctatggacc

SEQ ID NO: 460526 - DNA, 58 bp, Artificial
  Synthetic oligonucleotide
tcctcctttacaaccgctctgaatagggcgcgtactctgaatgaacagggcttttcac

SEQ ID NO: 460527 - DNA, 55 bp, Artificial
  Synthetic oligonucleotide
tcctcgaatcacgtgatattcggtctcttgatcttgcaattcgacgtcagtctcg

SEQ ID NO: 460528 - DNA, 59 bp, Artificial
  Synthetic oligonucleotide
tcctcgaatgttccccagccagggattgtcctcctcgagcctcttgaggttcttgttga

SEQ ID NO: 460529 - DNA, 57 bp, Artificial
  Synthetic oligonucleotide
tcctcgacagtcaaggactcgagtttgctgacgtttccaacggacggtcacgcggaa

SEQ ID NO: 460530 - DNA, 60 bp, Artificial
  Synthetic oligonucleotide
tcctcgacccaaatgccaacagtcagaggcgcgaattcatcatctttttgagggatgtca

SEQ ID NO: 460531 - DNA, 60 bp, Artificial
  Synthetic oligonucleotide
tcctcgaggtctgaacacccgatgtgctactgcgtccgtacggcattcaacgcattgttt

SEQ ID NO: 460532 - DNA, 57 bp, Artificial
  Synthetic oligonucleotide
tcctcgatctgaagaggatcgtaagtttgaaagtcatattgaaaagaggaaacctta

SEQ ID NO: 460533 - DNA, 60 bp, Artificial
  Synthetic oligonucleotide
tcctcgcaggattacaggtggtatatttcttgtggacaaaaatccttacaatagctcaga

SEQ ID NO: 460534 - DNA, 55 bp, Artificial
  Synthetic oligonucleotide
tcctcgcaggttcataccaatgtgcctctggatcaggatggctgtccatatttat

SEQ ID NO: 460535 - DNA, 55 bp, Artificial
  Synthetic oligonucleotide
tcctcgcctgcggacaagcgggctgcgttcagctccgacgatctagatttcgcac

SEQ ID NO: 460536 - DNA, 60 bp, Artificial
  Synthetic oligonucleotide
tcctcgcgtacagctttcggacgatttacctgagacgctcgattttacgtcacagtgctc

SEQ ID NO: 460537 - DNA, 60 bp, Artificial
  Synthetic oligonucleotide
tcctcgctaaagcgcttgcactccctgctatagcgacaattgagcgcagcctttcgatga

SEQ ID NO: 460538 - DNA, 58 bp, Artificial
  Synthetic oligonucleotide
tcctcggaaatatccttgcgtttcacaaacgtgtatggcgtgtttcctgcctatctgg

SEQ ID NO: 460539 - DNA, 55 bp, Artificial
  Synthetic oligonucleotide
tcctcggaagacatctcacaactcttgatagaaatcaaaaggctatatgccttgc

SEQ ID NO: 460540 - DNA, 55 bp, Artificial
  Synthetic oligonucleotide
tcctcggacctttacctggtcacgaggcacgccgatgtcattcctgtacgccggc

SEQ ID NO: 460541 - DNA, 60 bp, Artificial
  Synthetic oligonucleotide
tcctcggcgtctgaaggccatctctgtcgctatgcacggagcatgtctatatatagatcg

SEQ ID NO: 460542 - DNA, 55 bp, Artificial
  Synthetic oligonucleotide
tcctcgggacactttccatcatgcgcttatctggtgaagggccaaccttcgacgc

SEQ ID NO: 460543 - DNA, 57 bp, Artificial
  Synthetic oligonucleotide
tcctcgggaggcccactactgtgtcccgcgggacacgccgtgggcatattcagggcc

SEQ ID NO: 460544 - DNA, 52 bp, Artificial
  Synthetic oligonucleotide
tcctcgggagggccactgctgtgccccgcaggacacgccgtaggcatattta

SEQ ID NO: 460545 - DNA, 55 bp, Artificial
  Synthetic oligonucleotide
tcctcgggaggtccgctgttgtgccccgcgggacatgctgtaggcatattcagag

SEQ ID NO: 460546 - DNA, 59 bp, Artificial
  Synthetic oligonucleotide
tcctcgggcttagtactcaacagtctgttacatccagacttattgcaatgggttataaa

SEQ ID NO: 460547 - DNA, 60 bp, Artificial
  Synthetic oligonucleotide
tcctcggtggctctgctgaggtatgtgaatccagacacaggtcgcaccctatttgaggcc

SEQ ID NO: 460548 - DNA, 60 bp, Artificial
  Synthetic oligonucleotide
tcctcgtaagcaatgatgcttatctgctcgggcgagagaaagcactacgggaatcacact

SEQ ID NO: 460549 - DNA, 60 bp, Artificial
  Synthetic oligonucleotide
tcctcgtactggagcgacaatggatggtgcacttgtgacactcatcgtcacgtcactttt

SEQ ID NO: 460550 - DNA, 60 bp, Artificial
  Synthetic oligonucleotide
tcctcgtcaaggaactctttataggatgatgttggaccaggattgcacaggaagattgtg

SEQ ID NO: 460551 - DNA, 60 bp, Artificial
  Synthetic oligonucleotide
tcctcgtcacaaacaaaagaaggacatggaccaacaggcccatgtatcgcaagcccagac

SEQ ID NO: 460552 - DNA, 57 bp, Artificial
  Synthetic oligonucleotide
tcctcgtcacaaacaaaaggagaacatgggtcaaccggcccatgtacaggaagccca

SEQ ID NO: 460553 - DNA, 60 bp, Artificial
  Synthetic oligonucleotide
tcctcgtccagatattccttatatgatgatgttggtccaggattgcatagaaagattgtc

SEQ ID NO: 460554 - DNA, 51 bp, Artificial
  Synthetic oligonucleotide
tcctcgtcgccccctttgtcagggtgaaattccttacacttttttaaatag

SEQ ID NO: 460555 - DNA, 53 bp, Artificial
  Synthetic oligonucleotide
tcctcgtcggtgaatccccccctgcgactcttcttccccggaccggagtcaac

SEQ ID NO: 460556 - DNA, 55 bp, Artificial
  Synthetic oligonucleotide
tcctcgtctaggtactctttatagctggagttgggaccaggattgcagaggaaga

SEQ ID NO: 460557 - DNA, 60 bp, Artificial
  Synthetic oligonucleotide
tcctcgtctgggtagataggtttgttatgtttgtgccactcgacatgacatgacttgcag

SEQ ID NO: 460558 - DNA, 54 bp, Artificial
  Synthetic oligonucleotide
tcctcgtgctaaatcttgtgtctcacgcataggtgatgcaatctttactggttg

SEQ ID NO: 460559 - DNA, 60 bp, Artificial
  Synthetic oligonucleotide
tcctcgtggatgtgaaggcccgtgtaaggtccagtcgtatgaagcccgtcatgatatagc

SEQ ID NO: 460560 - DNA, 60 bp, Artificial
  Synthetic oligonucleotide
tcctcgtggctgtgaaggaccttgtaaggtccagtcgtatgaacagagacatgatatctc

SEQ ID NO: 460561 - DNA, 60 bp, Artificial
  Synthetic oligonucleotide
tcctcgtgggtggagtcctcgctgcactcgcggcctactgcttatcggtgggctgtgttg

SEQ ID NO: 460562 - DNA, 57 bp, Artificial
  Synthetic oligonucleotide
tcctcgttgggattgagaccagacggagtcttccaaatcggaggatccggcctctcg

SEQ ID NO: 460563 - DNA, 58 bp, Artificial
  Synthetic oligonucleotide
tcctcgtttagcatggtggaatagtcatagatttggtcgtacgttgtttaatcttatg

SEQ ID NO: 460564 - DNA, 53 bp, Artificial
  Synthetic oligonucleotide
tcctctaatctgcctcaagaaccgaccccgtccaagagggaagacgcactcaa

SEQ ID NO: 460565 - DNA, 60 bp, Artificial
  Synthetic oligonucleotide
tcctctaattccaggatcatcaacaaccagcacgggaccatgcagaacctgcacgatcac

SEQ ID NO: 460566 - DNA, 56 bp, Artificial
  Synthetic oligonucleotide
tcctctaattccaggatccacaacgaccagtacaggaccctgcaaaacctgcacga

SEQ ID NO: 460567 - DNA, 60 bp, Artificial
  Synthetic oligonucleotide
tcctctacagccgacaggatccgagtctatcaaatctctctttggtatcgcttcggtatt

SEQ ID NO: 460568 - DNA, 55 bp, Artificial
  Synthetic oligonucleotide
tcctctagaatcgatccacgttcattcgctgtctacatcgtcgcgacgtcagacg

SEQ ID NO: 460569 - DNA, 60 bp, Artificial
  Synthetic oligonucleotide
tcctctagcagaagaagagcacacaaaatggcatcaagatgcgaactcgttgcatctaga

SEQ ID NO: 460570 - DNA, 59 bp, Artificial
  Synthetic oligonucleotide
tcctctagccatccgctaagtggcgctagaagtccgtgttaggcgtcaaccaccagagg

SEQ ID NO: 460571 - DNA, 60 bp, Artificial
  Synthetic oligonucleotide
tcctctaggaggaaatggtgcaatgtctataatggagctagcaacagctgggatagggat

SEQ ID NO: 460572 - DNA, 60 bp, Artificial
  Synthetic oligonucleotide
tcctctagtaggatcgggaatggcaacggctattgcaacaggtagagcgattgaaggtgc

SEQ ID NO: 460573 - DNA, 58 bp, Artificial
  Synthetic oligonucleotide
tcctctatctcaggaaaaaacatacctactacactagaagaactacgacgctcgaata

SEQ ID NO: 460574 - DNA, 54 bp, Artificial
  Synthetic oligonucleotide
tcctctatgttgatctcccccaatctgacagtgtctctgtttctgcttacatct

SEQ ID NO: 460575 - DNA, 55 bp, Artificial
  Synthetic oligonucleotide
tcctctattacatcctttactaaagtaaaggtttgtacgatttccaagtgccgca

SEQ ID NO: 460576 - DNA, 59 bp, Artificial
  Synthetic oligonucleotide
tcctctcaacactcgtggggaggtatggccgtaagacaaaattgtatgaggcagcccat

SEQ ID NO: 460577 - DNA, 57 bp, Artificial
  Synthetic oligonucleotide
tcctctcaacggaggaagcctgcagcttgacccccccccactcggctcgttctagat

SEQ ID NO: 460578 - DNA, 60 bp, Artificial
  Synthetic oligonucleotide
tcctctcagatctcggaatcacataccaacaacttaatgtctacgcctcatcaagagacc

SEQ ID NO: 460579 - DNA, 60 bp, Artificial
  Synthetic oligonucleotide
tcctctcctctatctggctctaggcaaattgaatctcttaaatcagaagccagagctttt

SEQ ID NO: 460580 - DNA, 53 bp, Artificial
  Synthetic oligonucleotide
tcctctccttgtttattcttgatttcgcttacgcgttggattctcctcgacag

SEQ ID NO: 460581 - DNA, 59 bp, Artificial
  Synthetic oligonucleotide
tcctctcgaaccaagattgtgcgggattaatgagcatcaagcagttacacttctcctca

SEQ ID NO: 460582 - DNA, 53 bp, Artificial
  Synthetic oligonucleotide
tcctctcggccaacgatgttaaatggcgggagtcgagggagtggttgaccacg

SEQ ID NO: 460583 - DNA, 60 bp, Artificial
  Synthetic oligonucleotide
tcctctctatgcggctgaggcaaagagagtgttttcccttgagaaaaagatgagcaatta

SEQ ID NO: 460584 - DNA, 58 bp, Artificial
  Synthetic oligonucleotide
tcctctctggccaaaagcccagcgttgatagcgccttttgggatgcaggaaccccacc

SEQ ID NO: 460585 - DNA, 55 bp, Artificial
  Synthetic oligonucleotide
tcctctgacgaagcttacgaaatcaacgcgtcataccgtaccgggtgcaaggcgg

SEQ ID NO: 460586 - DNA, 60 bp, Artificial
  Synthetic oligonucleotide
tcctctgatctggccgaagcgacatccgctgtgatggctggcgtgccgctaactgaggtg

SEQ ID NO: 460587 - DNA, 60 bp, Artificial
  Synthetic oligonucleotide
tcctctgcatgtccaaatacctgggattcagagattaccacaatttcgtccgagcgttgt

SEQ ID NO: 460588 - DNA, 55 bp, Artificial
  Synthetic oligonucleotide
tcctctgcggggagtgcggcatagaactcaccgaggaaacagtcaccataggcca

SEQ ID NO: 460589 - DNA, 60 bp, Artificial
  Synthetic oligonucleotide
tcctctgctaccacattgagatccggtggcttcatgtcagttcccataccatttgcctct

SEQ ID NO: 460590 - DNA, 60 bp, Artificial
  Synthetic oligonucleotide
tcctctggaagaatttggggttcctgacatgccaccaagcactagcacacctacaagctc

SEQ ID NO: 460591 - DNA, 55 bp, Artificial
  Synthetic oligonucleotide
tcctctggacccacacgatttctggagatgtcccgtaggggaacccctactgagc

SEQ ID NO: 460592 - DNA, 55 bp, Artificial
  Synthetic oligonucleotide
tcctctggtacatccttttcctgaaagcttacacggcttcagatgtatgcttgcc

SEQ ID NO: 460593 - DNA, 60 bp, Artificial
  Synthetic oligonucleotide
tcctctgtacctttgccacgtgtagctacagatgctaccccaacacatggcgcaatatcc

SEQ ID NO: 460594 - DNA, 60 bp, Artificial
  Synthetic oligonucleotide
tcctctgtagcgggacgttgcttcccacagatattccctctgcgattcggacagcctctg

SEQ ID NO: 460595 - DNA, 55 bp, Artificial
  Synthetic oligonucleotide
tcctctgtagggagcacaccaactacctccgcccacgactcctcagcgacgagtg

SEQ ID NO: 460596 - DNA, 60 bp, Artificial
  Synthetic oligonucleotide
tcctctgtgagtgctatgacgcaggttgtgcttggtatgagctcttacccgccgagacta

SEQ ID NO: 460597 - DNA, 60 bp, Artificial
  Synthetic oligonucleotide
tcctctgtgagtgctatgacgcgggctgtgcttggtatgaactcacacccgccgagacca

SEQ ID NO: 460598 - DNA, 60 bp, Artificial
  Synthetic oligonucleotide
tcctctgttcgacttcgcacgcatgttccgtcgctacggtccaggcgaacttatgctgca

SEQ ID NO: 460599 - DNA, 55 bp, Artificial
  Synthetic oligonucleotide
tcctcttagaccaagaacatttggggcctttattggcaccacaaggtgtacaaag

SEQ ID NO: 460600 - DNA, 60 bp, Artificial
  Synthetic oligonucleotide
tcctcttatcatgagaaatgaagccactgacaatagcagcattcattggctgcaggaatg

SEQ ID NO: 460601 - DNA, 60 bp, Artificial
  Synthetic oligonucleotide
tcctcttcttgatgattctaccaccatgagtgatgttttcaatagtccacaggcgcgacg

SEQ ID NO: 460602 - DNA, 52 bp, Artificial
  Synthetic oligonucleotide
tcctcttgaaaatggaaggaatcaacttgagcaatagtattaagccattaac

SEQ ID NO: 460603 - DNA, 55 bp, Artificial
  Synthetic oligonucleotide
tcctcttgctaccgcgtacctttgcgggatccatcgagaattagtccgtagactg

SEQ ID NO: 460604 - DNA, 57 bp, Artificial
  Synthetic oligonucleotide
tcctcttggagattttggtgtgcacaacaactcccttgtcaacctagccaggggaat

SEQ ID NO: 460605 - DNA, 56 bp, Artificial
  Synthetic oligonucleotide
tcctcttgtcgtgtatctccacgattaccgacccggtggcgttaatcggcacctgt

SEQ ID NO: 460606 - DNA, 58 bp, Artificial
  Synthetic oligonucleotide
tcctctttccgcattcggtagtggtagcgtgtgtcagattaggtttgacacacccctc

SEQ ID NO: 460607 - DNA, 57 bp, Artificial
  Synthetic oligonucleotide
tcctctttcggcaaattctgtgccgcccttaagtggaagactgccacttattccttg

SEQ ID NO: 460608 - DNA, 57 bp, Artificial
  Synthetic oligonucleotide
tcctctttctaccaatcttatttacgccgaactcaatcaatggggattcaacttgac

SEQ ID NO: 460609 - DNA, 59 bp, Artificial
  Synthetic oligonucleotide
tcctctttctcgaggaagtctttatagctggacccttcaccaggattgcaaagcacgat

SEQ ID NO: 460610 - DNA, 58 bp, Artificial
  Synthetic oligonucleotide
tcctctttggtcagggagcactttggataggtgaggaaataatttctggcgtttatca

SEQ ID NO: 460611 - DNA, 59 bp, Artificial
  Synthetic oligonucleotide
tcctctttgtcgaggaaacttttatagctggctccctctcctggattacagagcacgat

SEQ ID NO: 460612 - DNA, 59 bp, Artificial
  Synthetic oligonucleotide
tcctctttgttgaggaagtctttataactagccccctcgcctggattgcacagcacgat

SEQ ID NO: 460613 - DNA, 60 bp, Artificial
  Synthetic oligonucleotide
tcctgaaaacattatggtatacactgtttggacatacatttattaccagactttagatga

SEQ ID NO: 460614 - DNA, 60 bp, Artificial
  Synthetic oligonucleotide
tcctgaaaagattacacatcttcgatgtagccagggttccagatgatcaaatgtatagat

SEQ ID NO: 460615 - DNA, 58 bp, Artificial
  Synthetic oligonucleotide
tcctgaacttcctattctatactttgacaacaaattatgtattggtgatcgatactgt

SEQ ID NO: 460616 - DNA, 57 bp, Artificial
  Synthetic oligonucleotide
tcctgaagaccgatttaaatagtggcaactgcgtagtacagtgccaaactgagaaag

SEQ ID NO: 460617 - DNA, 55 bp, Artificial
  Synthetic oligonucleotide
tcctgaaggtatagttgggttaaggcaggacatatttgaacgagttgaccgtggg

SEQ ID NO: 460618 - DNA, 60 bp, Artificial
  Synthetic oligonucleotide
tcctgaagtggacatttgacagccgcctggcactaagacacatagccagagagaaacatc

SEQ ID NO: 460619 - DNA, 56 bp, Artificial
  Synthetic oligonucleotide
tcctgaatatttggatcattggtttcgaacagacgatttttctagtgataactttt

SEQ ID NO: 460620 - DNA, 60 bp, Artificial
  Synthetic oligonucleotide
tcctgaattttatagattcatcgctttccagaagccattagcgtctgaatgttagatcca

SEQ ID NO: 460621 - DNA, 57 bp, Artificial
  Synthetic oligonucleotide
tcctgacactctccccatattacaagtgcttcctggctcgtgggatatggtggctcc

SEQ ID NO: 460622 - DNA, 54 bp, Artificial
  Synthetic oligonucleotide
tcctgacagcccacgactctcctggcctaagttgtattgggctgcgaagcccaa

SEQ ID NO: 460623 - DNA, 60 bp, Artificial
  Synthetic oligonucleotide
tcctgacataggcagccctattgtactaacaataggactgcctattaatatgcccaatac

SEQ ID NO: 460624 - DNA, 51 bp, Artificial
  Synthetic oligonucleotide
tcctgaccacgagtggctgcggtattacatccccggtgcgaacggcaagtg

SEQ ID NO: 460625 - DNA, 60 bp, Artificial
  Synthetic oligonucleotide
tcctgacccctgctcaactagggggactgagcaacctccaatactcaaggctctacacga

SEQ ID NO: 460626 - DNA, 55 bp, Artificial
  Synthetic oligonucleotide
tcctgaccgtgcagcaccagcgggcgtatcgagcgacgaacagcctgctcatcaa

SEQ ID NO: 460627 - DNA, 55 bp, Artificial
  Synthetic oligonucleotide
tcctgaccgttgatgcgtaatcattgcacgccgttatccgtccgatttgcaacac

SEQ ID NO: 460628 - DNA, 60 bp, Artificial
  Synthetic oligonucleotide
tcctgacgttaatgcgaaagagtactttagtgtcgacacactcatcttggcattggaatg

SEQ ID NO: 460629 - DNA, 51 bp, Artificial
  Synthetic oligonucleotide
tcctgactcacagccgccgtgacatccacaaccgtgtgaaggatcacgacg

SEQ ID NO: 460630 - DNA, 58 bp, Artificial
  Synthetic oligonucleotide
tcctgactttactgaattaattgctcctttatacgcattgataccaaagtctacaaaa

SEQ ID NO: 460631 - DNA, 54 bp, Artificial
  Synthetic oligonucleotide
tcctgagacacctttacaactgttagccagggatatggcttacaaatacattac

SEQ ID NO: 460632 - DNA, 60 bp, Artificial
  Synthetic oligonucleotide
tcctgagactgacactgatgcaggtacacttactgctcaagggagcagacatggaacaac

SEQ ID NO: 460633 - DNA, 55 bp, Artificial
  Synthetic oligonucleotide
tcctgagagaaatgagcaaggacaaactttatggagtaaaatgaatgatgccgga

SEQ ID NO: 460634 - DNA, 57 bp, Artificial
  Synthetic oligonucleotide
tcctgagagggtttctcatcttgggtaaagaaaacaagagatacggcccagcattaa

SEQ ID NO: 460635 - DNA, 57 bp, Artificial
  Synthetic oligonucleotide
tcctgagaggttagccagctgccgaccccttactgactttgcccagggctggggccc

SEQ ID NO: 460636 - DNA, 60 bp, Artificial
  Synthetic oligonucleotide
tcctgagattaactggacggcagacgtacaatattcaatatggcaacatgaaagagtcgg

SEQ ID NO: 460637 - DNA, 59 bp, Artificial
  Synthetic oligonucleotide
tcctgagcaatatgttctatcgtttgacgcctcccgccagtctatgggagccgggtcgc

SEQ ID NO: 460638 - DNA, 60 bp, Artificial
  Synthetic oligonucleotide
tcctgagcattgcacacctcatcatactgcactcaggcaagccatactatgttgggggga

SEQ ID NO: 460639 - DNA, 55 bp, Artificial
  Synthetic oligonucleotide
tcctgaggactggactagctatggaatcctgatagctcggaagggagataagatc

SEQ ID NO: 460640 - DNA, 60 bp, Artificial
  Synthetic oligonucleotide
tcctgaggaggacattggaaattctgggacagaacatcaacaaaggactgcagtggctga

SEQ ID NO: 460641 - DNA, 60 bp, Artificial
  Synthetic oligonucleotide
tcctgaggttgtggttgaactggatctgcatttctatgtagtcccagttgttgttgaatg

SEQ ID NO: 460642 - DNA, 60 bp, Artificial
  Synthetic oligonucleotide
tcctgagtacagacacacactcgaacgaatcttgccacgcatattcggcccatcgatcga

SEQ ID NO: 460643 - DNA, 60 bp, Artificial
  Synthetic oligonucleotide
tcctgagtacaggacagtcgtcagtagttcgacgtgagcaccagcccacctcgagatgct

SEQ ID NO: 460644 - DNA, 60 bp, Artificial
  Synthetic oligonucleotide
tcctgagtcactatccttaatcatcactcagtatggttatgagacgaaaggattccagcg

SEQ ID NO: 460645 - DNA, 59 bp, Artificial
  Synthetic oligonucleotide
tcctgagtgggagtttgttaacacccctcatctagtgaaattatggtatcagttagaga

SEQ ID NO: 460646 - DNA, 59 bp, Artificial
  Synthetic oligonucleotide
tcctgagtggtttaaggtcctgttggccttaagatcacccaagggcatcttgccagatg

SEQ ID NO: 460647 - DNA, 60 bp, Artificial
  Synthetic oligonucleotide
tcctgataggcagattttgtatagtatattctcataagggtttctctcacctggagtgtc

SEQ ID NO: 460648 - DNA, 59 bp, Artificial
  Synthetic oligonucleotide
tcctgatagggagcgtttggtatgggctgttagaggaatggaaattggtcgtggacagc

SEQ ID NO: 460649 - DNA, 60 bp, Artificial
  Synthetic oligonucleotide
tcctgataggggtctacgggagctccgtaatttacatggtgcagctgccaatctttggcg

SEQ ID NO: 460650 - DNA, 60 bp, Artificial
  Synthetic oligonucleotide
tcctgatatgagctactggaggccgcctgtacacaatgtcccggggctcgagcacctctg

SEQ ID NO: 460651 - DNA, 58 bp, Artificial
  Synthetic oligonucleotide
tcctgatattgcctcgttttcagttgacccccacctgtcctgtgataataacttggta

SEQ ID NO: 460652 - DNA, 60 bp, Artificial
  Synthetic oligonucleotide
tcctgatcgtgagtatgtccatattcatcgtgaatggacggttgacgtggctgatgatct

SEQ ID NO: 460653 - DNA, 60 bp, Artificial
  Synthetic oligonucleotide
tcctgatgtgcctagaggctgtgaaggcccatgtaaggtgcagtcctttgagtctagaca

SEQ ID NO: 460654 - DNA, 56 bp, Artificial
  Synthetic oligonucleotide
tcctgattcaagtctatgaagctaacgcaggcataccatggcacagagacgacgaa

SEQ ID NO: 460655 - DNA, 60 bp, Artificial
  Synthetic oligonucleotide
tcctgattcagactatactgccgcttataagcaaatcacctggggagccatagggtgcag

SEQ ID NO: 460656 - DNA, 58 bp, Artificial
  Synthetic oligonucleotide
tcctgattccttgagcgccttcccgtatacctggaaggttggaagagaggtgtgccac

SEQ ID NO: 460657 - DNA, 60 bp, Artificial
  Synthetic oligonucleotide
tcctgattgagttggcgtggcatcagccccgggactttgatcaggttgcagccctagttt

SEQ ID NO: 460658 - DNA, 60 bp, Artificial
  Synthetic oligonucleotide
tcctgattggaatgctgtgcgtcatgtcaatgggaacattcatttttctcatgaacagga

SEQ ID NO: 460659 - DNA, 60 bp, Artificial
  Synthetic oligonucleotide
tcctgatttggtgcccctgttcgagaacactcacgttagttacgcctgctggcaagagga

SEQ ID NO: 460660 - DNA, 59 bp, Artificial
  Synthetic oligonucleotide
tcctgcaaacgctgtctttgtcactgacaaaccgttgcccattgattacaatcttggag

SEQ ID NO: 460661 - DNA, 60 bp, Artificial
  Synthetic oligonucleotide
tcctgcaaagttagaattcatgtgaatgaaccagatgagttcacagtacacgtgaaaagc

SEQ ID NO: 460662 - DNA, 53 bp, Artificial
  Synthetic oligonucleotide
tcctgcaacttcgacccgacgcaacatcaaccctacaatccagcataaggtca

SEQ ID NO: 460663 - DNA, 52 bp, Artificial
  Synthetic oligonucleotide
tcctgcaatacaattagtaaacagcacaatacaggatggtgatatgggtgat

SEQ ID NO: 460664 - DNA, 60 bp, Artificial
  Synthetic oligonucleotide
tcctgcacatacagtctgtgcatgctagcagtaatatccacaatacgctatcgaaccctg

SEQ ID NO: 460665 - DNA, 55 bp, Artificial
  Synthetic oligonucleotide
tcctgcaccaaggctttcgccttggaaacctccctaggtctcaataaggcctggg

SEQ ID NO: 460666 - DNA, 60 bp, Artificial
  Synthetic oligonucleotide
tcctgcacttgcatccaaggtgattgctattgggtaatgactgacggccccgccaatagg

SEQ ID NO: 460667 - DNA, 58 bp, Artificial
  Synthetic oligonucleotide
tcctgcagatataggaattttcacacccgtctccaaggtacggcgccgtctgaacttc

SEQ ID NO: 460668 - DNA, 57 bp, Artificial
  Synthetic oligonucleotide
tcctgcatatctcatgaaatcaaatattcccattctactgagcttagtaactgttcc

SEQ ID NO: 460669 - DNA, 60 bp, Artificial
  Synthetic oligonucleotide
tcctgcatctgtatctagtactgtcaccgaagtatcctctgttgcgtctactgaacccga

SEQ ID NO: 460670 - DNA, 60 bp, Artificial
  Synthetic oligonucleotide
tcctgcattacgctacggcttgcctcgccttctgatcgcttgagggtcgaaaattgagcg

SEQ ID NO: 460671 - DNA, 55 bp, Artificial
  Synthetic oligonucleotide
tcctgcatttgatgtggtgcccggcagtgataatgctttgggcgagacatcctcc

SEQ ID NO: 460672 - DNA, 55 bp, Artificial
  Synthetic oligonucleotide
tcctgcccgatcatcaattcccattcctcatccaccccacgatgccaatgaggga

SEQ ID NO: 460673 - DNA, 59 bp, Artificial
  Synthetic oligonucleotide
tcctgccctctctcccaatctattcaccgttcgccctcacaggtggcgctttcttccaa

SEQ ID NO: 460674 - DNA, 56 bp, Artificial
  Synthetic oligonucleotide
tcctgccgcggccacgcctagtcggaacgagggtacagcaggggtcccctagccat

SEQ ID NO: 460675 - DNA, 60 bp, Artificial
  Synthetic oligonucleotide
tcctgccgcgttgggtcctccttgtagtgggatccagccggttctgacactgttgagcca

SEQ ID NO: 460676 - DNA, 54 bp, Artificial
  Synthetic oligonucleotide
tcctgccgggcttatagaaacctacgtaaacgtaggcgggcgttggtcagttga

SEQ ID NO: 460677 - DNA, 60 bp, Artificial
  Synthetic oligonucleotide
tcctgcctatctactccgcaacacaaactgaccatatctgaagtatcagggcaaggactg

SEQ ID NO: 460678 - DNA, 60 bp, Artificial
  Synthetic oligonucleotide
tcctgcctccaacaagcggcagtcagggagacagcctacccctctctctccacctctgag

SEQ ID NO: 460679 - DNA, 55 bp, Artificial
  Synthetic oligonucleotide
tcctgcctgacgctgcctacgtgtaccgcgttggtcgcaccgctacgtaccccaa

SEQ ID NO: 460680 - DNA, 60 bp, Artificial
  Synthetic oligonucleotide
tcctgcctgcctgcttgtgtgtatggacttgctgtggccagtggatacgacttcgagagg

SEQ ID NO: 460681 - DNA, 55 bp, Artificial
  Synthetic oligonucleotide
tcctgcgagacaaggctgcgcagccaaaggtaagcggacgccgagtaagatccgc

SEQ ID NO: 460682 - DNA, 57 bp, Artificial
  Synthetic oligonucleotide
tcctgcgcacattgccaaactgaacaaactactcactgaggagtccgcacgatgcgc

SEQ ID NO: 460683 - DNA, 55 bp, Artificial
  Synthetic oligonucleotide
tcctgcgccgaactacgagttcgcgctgtggagggtatctgcagaggagtacgtg

SEQ ID NO: 460684 - DNA, 55 bp, Artificial
  Synthetic oligonucleotide
tcctgcggaccagacttcttatggcgccaatgagactcgcgctctatcggcacca

SEQ ID NO: 460685 - DNA, 57 bp, Artificial
  Synthetic oligonucleotide
tcctgcgtcgccaaaggtgttagcgcacccaaacggcgcacctaccaatgttattgg

SEQ ID NO: 460686 - DNA, 60 bp, Artificial
  Synthetic oligonucleotide
tcctgcgtcggaatctccgcctcctcatgacctaaatatagcgctacgtcatttccgtgg

SEQ ID NO: 460687 - DNA, 60 bp, Artificial
  Synthetic oligonucleotide
tcctgcgtctgaatctccgccccctcatgacctaagtatagcgtgacgtcacttccgtgg

SEQ ID NO: 460688 - DNA, 54 bp, Artificial
  Synthetic oligonucleotide
tcctgcgttccctaacggggcacggtgataggccgttgaccccgacttgcaatc

SEQ ID NO: 460689 - DNA, 57 bp, Artificial
  Synthetic oligonucleotide
tcctgctaatataacggataaaaacatccaagcagcactaaaacaaagtgttggtac

SEQ ID NO: 460690 - DNA, 60 bp, Artificial
  Synthetic oligonucleotide
tcctgctatggcagattctgttgtcgatttgagtaatgttagcaatgatgtgggaagtgc

SEQ ID NO: 460691 - DNA, 59 bp, Artificial
  Synthetic oligonucleotide
tcctgctcaaggaacctctatgtatccctcctgttgctgtacaaaaccttcggatggaa

SEQ ID NO: 460692 - DNA, 59 bp, Artificial
  Synthetic oligonucleotide
tcctgctgacgaactctcgttcggagtccattgttttgttagaggtgttgtagcgccta

SEQ ID NO: 460693 - DNA, 55 bp, Artificial
  Synthetic oligonucleotide
tcctgctgcggattgcaaagtacaagcccactttgctatatccattcatggaggt

SEQ ID NO: 460694 - DNA, 60 bp, Artificial
  Synthetic oligonucleotide
tcctgctggtatgaattggaccgaattgcttaacaattattcagcctcgagggaagataa

SEQ ID NO: 460695 - DNA, 60 bp, Artificial
  Synthetic oligonucleotide
tcctgctggtggctccagttcagggatagtgaaccctgctccgaatattgcctctcacat

SEQ ID NO: 460696 - DNA, 50 bp, Artificial
  Synthetic oligonucleotide
tcctgctgttaaacaccggggtgtccattggtcccacaggcccgattggc

SEQ ID NO: 460697 - DNA, 60 bp, Artificial
  Synthetic oligonucleotide
tcctgcttccaccaatcggcagtcaggaagacagcctactcccatctcttcacctctaag

SEQ ID NO: 460698 - DNA, 59 bp, Artificial
  Synthetic oligonucleotide
tcctggaaaaagttaaagtcgaataccagaagactatgggatcaatggtgtgtgatgta

SEQ ID NO: 460699 - DNA, 52 bp, Artificial
  Synthetic oligonucleotide
tcctggaaaagctatcacttttgtatcaccgaggagatctcttgctgagtct

SEQ ID NO: 460700 - DNA, 52 bp, Artificial
  Synthetic oligonucleotide
tcctggaaattcttgtattgatacatttttcgacgggtatgaagttgcgact

SEQ ID NO: 460701 - DNA, 60 bp, Artificial
  Synthetic oligonucleotide
tcctggagagagttccaagcaattggtctccaggatcaaaaagagggctggcgctctcct

SEQ ID NO: 460702 - DNA, 60 bp, Artificial
  Synthetic oligonucleotide
tcctggagagttgctgaactatctgattgtgaagagtaattcgcctattgcgaattggag

SEQ ID NO: 460703 - DNA, 60 bp, Artificial
  Synthetic oligonucleotide
tcctggatatgtgctgtggcgtccatgtcgccactgaggtcaaccacataccagaccacc

SEQ ID NO: 460704 - DNA, 60 bp, Artificial
  Synthetic oligonucleotide
tcctggatccaagcataggtggagtctgcggagtaaatctgaacaggttcctcgtgagga

SEQ ID NO: 460705 - DNA, 54 bp, Artificial
  Synthetic oligonucleotide
tcctggatctgacgcctctgggtgaaggccacgggacccgtgagtttgaacctg

SEQ ID NO: 460706 - DNA, 60 bp, Artificial
  Synthetic oligonucleotide
tcctggatggattgcgcaaatcaaaactgattcagcgctttgctggtaagtgtgcgactt

SEQ ID NO: 460707 - DNA, 57 bp, Artificial
  Synthetic oligonucleotide
tcctggattaaggccaccagggtacggggttgctgcgcacttgtcatcgagcgtgtt

SEQ ID NO: 460708 - DNA, 55 bp, Artificial
  Synthetic oligonucleotide
tcctggattagaaccaccaaggttaccggagaccatcccctcgtcatcgagcggg

SEQ ID NO: 460709 - DNA, 60 bp, Artificial
  Synthetic oligonucleotide
tcctggattgcacagcacgattgagggtatgccacctttaatttgaactggcttgccgta

SEQ ID NO: 460710 - DNA, 57 bp, Artificial
  Synthetic oligonucleotide
tcctggattgcataggaagatagtgggaattccgccttttatttgaactggcttccc

SEQ ID NO: 460711 - DNA, 56 bp, Artificial
  Synthetic oligonucleotide
tcctggatttagttggtcgctagaagactgaaaggatggagttgcgtttttaggta

SEQ ID NO: 460712 - DNA, 60 bp, Artificial
  Synthetic oligonucleotide
tcctggcaaacaatgggaaatttgagttcattgctgaggaattccaatggaacacagtca

SEQ ID NO: 460713 - DNA, 60 bp, Artificial
  Synthetic oligonucleotide
tcctggcaccgttgaccaggctattcgagtagcgctcgcgacatgtcctaccgctgatga

SEQ ID NO: 460714 - DNA, 55 bp, Artificial
  Synthetic oligonucleotide
tcctggcatcacaaccgccatcgagcaagctgctctggctgcggccaattctgcc

SEQ ID NO: 460715 - DNA, 55 bp, Artificial
  Synthetic oligonucleotide
tcctggcatcacagcctgttttcctacatcagcaccacatggcagtgggttcctt

SEQ ID NO: 460716 - DNA, 60 bp, Artificial
  Synthetic oligonucleotide
tcctggcattaactgcagatctacaggtggatagtactagtgttccaggccctgatgtga

SEQ ID NO: 460717 - DNA, 53 bp, Artificial
  Synthetic oligonucleotide
tcctggccatagaaagatacctacaggatcaacggctcctagggatgtgggga

SEQ ID NO: 460718 - DNA, 55 bp, Artificial
  Synthetic oligonucleotide
tcctggccgtctacgaaccttccgtacctggcacgtatctgcgcgctgactgcga

SEQ ID NO: 460719 - DNA, 51 bp, Artificial
  Synthetic oligonucleotide
tcctggcgcatgtcatacacaccacattactcatttgtacttaaacaattg

SEQ ID NO: 460720 - DNA, 59 bp, Artificial
  Synthetic oligonucleotide
tcctggcgcgcaaaaagtcctgctgtccttgagtctcattggagggttcgttcgttcga

SEQ ID NO: 460721 - DNA, 58 bp, Artificial
  Synthetic oligonucleotide
tcctggcggacataaataacccgctataggacgaagtggtagccaccactgatcaaac

SEQ ID NO: 460722 - DNA, 60 bp, Artificial
  Synthetic oligonucleotide
tcctggctagtgtcgattccgaggaagttcgcgactattgtcgcactcaaggatggatag

SEQ ID NO: 460723 - DNA, 58 bp, Artificial
  Synthetic oligonucleotide
tcctggctgtggaaagatacctaaaggatcaacagctcctggggatttggggttgctc

SEQ ID NO: 460724 - DNA, 57 bp, Artificial
  Synthetic oligonucleotide
tcctgggaatatagaaaatctagaggaactcaggacactctttagttccgctagttc

SEQ ID NO: 460725 - DNA, 60 bp, Artificial
  Synthetic oligonucleotide
tcctgggagaaccatccgcagtgacagcagctagtgcagcccaaagacgtggacgcatcg

SEQ ID NO: 460726 - DNA, 51 bp, Artificial
  Synthetic oligonucleotide
tcctgggagggtatgtcctttgggcagtgctcacgtgccctgacgctgtac

SEQ ID NO: 460727 - DNA, 54 bp, Artificial
  Synthetic oligonucleotide
tcctgggatttaatgtgggtaagtaaggggtagccgtggcgagggacttatcac

SEQ ID NO: 460728 - DNA, 60 bp, Artificial
  Synthetic oligonucleotide
tcctgggcaggagatataatgagaactcaggagtcttcctgcacttgcatccaaggtgat

SEQ ID NO: 460729 - DNA, 60 bp, Artificial
  Synthetic oligonucleotide
tcctgggccggagatattctaagaactcaggaatcatcatgcacttgcattcaaggtgag

SEQ ID NO: 460730 - DNA, 53 bp, Artificial
  Synthetic oligonucleotide
tcctgggccttgttatcagtggaggcatgttactaagttttttaaacgtttag

SEQ ID NO: 460731 - DNA, 55 bp, Artificial
  Synthetic oligonucleotide
tcctgggcgccgtgaactctgcgcggtccttcatccttgtctggggtaaccctga

SEQ ID NO: 460732 - DNA, 57 bp, Artificial
  Synthetic oligonucleotide
tcctgggctgggcgcaaaagaagttcgggaagaggaacaccatctggctctttgggc

SEQ ID NO: 460733 - DNA, 60 bp, Artificial
  Synthetic oligonucleotide
tcctggggcaatcacagtccatgaagcccagggcgcaactttcactgagactacaattat

SEQ ID NO: 460734 - DNA, 55 bp, Artificial
  Synthetic oligonucleotide
tcctgggtcaaccaattctacacacttgcccccatgggaaatgggacggggcgta

SEQ ID NO: 460735 - DNA, 60 bp, Artificial
  Synthetic oligonucleotide
tcctgggtgcatgcttaagcaacttagagattctaagtgcgcttgtattagctgtaagtt

SEQ ID NO: 460736 - DNA, 60 bp, Artificial
  Synthetic oligonucleotide
tcctgggtggttctacacaagtatatagctaagtacacttccgaatggctgagtttatgc

SEQ ID NO: 460737 - DNA, 58 bp, Artificial
  Synthetic oligonucleotide
tcctgggtgtgttccatgcgtcaccactggaaacacatcgcagtgttgggtcccggtt

SEQ ID NO: 460738 - DNA, 58 bp, Artificial
  Synthetic oligonucleotide
tcctgggtttcttcggaaggactttgtccgtgtacttctagcacaagatgctagtgta

SEQ ID NO: 460739 - DNA, 60 bp, Artificial
  Synthetic oligonucleotide
tcctggtaactactgtaacattgcatttcaagcaatatgaatgcaactctctcccaaaca

SEQ ID NO: 460740 - DNA, 60 bp, Artificial
  Synthetic oligonucleotide
tcctggtatcaaatgtaaagcattgagtaagtgcataagaggggcaaaagcacttaccga

SEQ ID NO: 460741 - DNA, 60 bp, Artificial
  Synthetic oligonucleotide
tcctggtcaagccttgcgggttgtacgtcatgcgtagcttagactgcgaagcatgtaccg

SEQ ID NO: 460742 - DNA, 55 bp, Artificial
  Synthetic oligonucleotide
tcctggtcaaggcttgggtcaatgagaccggcaaaacttggatgcatcatctgcc

SEQ ID NO: 460743 - DNA, 60 bp, Artificial
  Synthetic oligonucleotide
tcctggtcgtatatactgttttcgaacgcagtgccgaggcctacatggtccacatttgca

SEQ ID NO: 460744 - DNA, 60 bp, Artificial
  Synthetic oligonucleotide
tcctggtcgtatatactgttttctgacacagcgccgaggcctacgtggtctacatttcca

SEQ ID NO: 460745 - DNA, 58 bp, Artificial
  Synthetic oligonucleotide
tcctggtctccgcgtgactacacgccgcagactcaaggcacctacacgaacgggcggt

SEQ ID NO: 460746 - DNA, 56 bp, Artificial
  Synthetic oligonucleotide
tcctggtgaacatattaaaatggatttgactagtttatatcgtcctagtactttta

SEQ ID NO: 460747 - DNA, 60 bp, Artificial
  Synthetic oligonucleotide
tcctggtgagcgaacgtgccagccttatcatgaaatacccagagagagaaggtgagctac

SEQ ID NO: 460748 - DNA, 59 bp, Artificial
  Synthetic oligonucleotide
tcctggtgcgtaccatcaacaccatgaccgaggcacacgtcgaagctttcgagcaatac

SEQ ID NO: 460749 - DNA, 53 bp, Artificial
  Synthetic oligonucleotide
tcctggtggcatcattatgccaggaaggatttcagagttcactgttgctgtcc

SEQ ID NO: 460750 - DNA, 55 bp, Artificial
  Synthetic oligonucleotide
tcctggtgggcggaaatcaaaaccttacgtcgtagttggtactacgcggcataga

SEQ ID NO: 460751 - DNA, 51 bp, Artificial
  Synthetic oligonucleotide
tcctggttaaaggatctccaccattcctcccactctggggtcccataggtt

SEQ ID NO: 460752 - DNA, 60 bp, Artificial
  Synthetic oligonucleotide
tcctggttacaagagcttgagggctgccagagttatgtgcaaatcaaagggtcctgcttc

SEQ ID NO: 460753 - DNA, 60 bp, Artificial
  Synthetic oligonucleotide
tcctggttagcggctataaccttgcactgcctactaagagagtcacctgggtagcgccac

SEQ ID NO: 460754 - DNA, 56 bp, Artificial
  Synthetic oligonucleotide
tcctggttgagtgggatcacatacaagctgaatcaggtgcagttcactcttaatgg

SEQ ID NO: 460755 - DNA, 56 bp, Artificial
  Synthetic oligonucleotide
tcctggtttgattgcgcgaacgaaaatctacccgctaaagaataaggataactgga

SEQ ID NO: 460756 - DNA, 59 bp, Artificial
  Synthetic oligonucleotide
tcctgtacaggacgcgtccgagtgacctagtcggtttggaggatccgttgctgcgatac

SEQ ID NO: 460757 - DNA, 55 bp, Artificial
  Synthetic oligonucleotide
tcctgtacgactctcaccctctatgacaatacttatgggtctatttggccgcgca

SEQ ID NO: 460758 - DNA, 54 bp, Artificial
  Synthetic oligonucleotide
tcctgtatgaatgcctcatcagcaatctggcacatatcagcgtcgcgttcgtca

SEQ ID NO: 460759 - DNA, 60 bp, Artificial
  Synthetic oligonucleotide
tcctgtcaacacacaggacttttgcgcagatctgtccgtctctagtgccaactttatccc

SEQ ID NO: 460760 - DNA, 59 bp, Artificial
  Synthetic oligonucleotide
tcctgtcaatcgacctattgattggaaagtatgtcagagaattgtggatcctttgggtt

SEQ ID NO: 460761 - DNA, 53 bp, Artificial
  Synthetic oligonucleotide
tcctgtccacttccgaaaccaagttaaaatacgccgacgggttgatgtgaacc

SEQ ID NO: 460762 - DNA, 60 bp, Artificial
  Synthetic oligonucleotide
tcctgtccattgtccttaggactatgaggctaccgtccatgcctattgccataggcctcg

SEQ ID NO: 460763 - DNA, 58 bp, Artificial
  Synthetic oligonucleotide
tcctgtcccccaattaaattaacacagtctataattcaggacggtgaaatgtgcgata

SEQ ID NO: 460764 - DNA, 60 bp, Artificial
  Synthetic oligonucleotide
tcctgtctattactcggcgcgcctgcatcctgtgaccacgcttgcagaggggacgtacga

SEQ ID NO: 460765 - DNA, 59 bp, Artificial
  Synthetic oligonucleotide
tcctgtctgggaaggctccccgttcccagaatttggttattgcgcatatggattgtaga

SEQ ID NO: 460766 - DNA, 55 bp, Artificial
  Synthetic oligonucleotide
tcctgtgaaggacagaaccgtctcgggtcccgctccaggccacctccttaacgga

SEQ ID NO: 460767 - DNA, 59 bp, Artificial
  Synthetic oligonucleotide
tcctgtgatgccgacatacgcgcttgtggatttgtttccttacgcctcctggaaagttc

SEQ ID NO: 460768 - DNA, 53 bp, Artificial
  Synthetic oligonucleotide
tcctgtgatggatgaggcaaccctcaccaactcaatcatgtggttgcgtggcg

SEQ ID NO: 460769 - DNA, 59 bp, Artificial
  Synthetic oligonucleotide
tcctgtgcgataccgtgaccggaactgcatgtcgcgtcgcggatcccctaaaaaggcta

SEQ ID NO: 460770 - DNA, 60 bp, Artificial
  Synthetic oligonucleotide
tcctgtgcgcgatgtggatacacgcctccacgtattgtagatcaatacgtttggaagtgt

SEQ ID NO: 460771 - DNA, 60 bp, Artificial
  Synthetic oligonucleotide
tcctgtgtgctgaagagcaaggagtaacagattatatccacatgttaggtgaggcttttg

SEQ ID NO: 460772 - DNA, 54 bp, Artificial
  Synthetic oligonucleotide
tcctgtgttcaattacaacagaagcaccaagagactcacagtcctaggaaagga

SEQ ID NO: 460773 - DNA, 55 bp, Artificial
  Synthetic oligonucleotide
tcctgtgttgcaccttgattggaacctgagtagagtgggcattcgagggtgacga

SEQ ID NO: 460774 - DNA, 60 bp, Artificial
  Synthetic oligonucleotide
tcctgtgtttgtcaatataatgggctcatgggtgaagccacagtgtgttggttatgagaa

SEQ ID NO: 460775 - DNA, 60 bp, Artificial
  Synthetic oligonucleotide
tcctgttaatcgaagactcaatcgagtcatagatattgtggtccggctggaggaagccgc

SEQ ID NO: 460776 - DNA, 54 bp, Artificial
  Synthetic oligonucleotide
tcctgttaatttaacaacgggtcaacctaacggtatatatacagacttctacag

SEQ ID NO: 460777 - DNA, 58 bp, Artificial
  Synthetic oligonucleotide
tcctgttacccgagcgggacagatgttgaatgtgtctgtagggacaattggcggggaa

SEQ ID NO: 460778 - DNA, 55 bp, Artificial
  Synthetic oligonucleotide
tcctgttatcccaacatggggaaagtggagtgtgtttgcagggacaattggaacg

SEQ ID NO: 460779 - DNA, 60 bp, Artificial
  Synthetic oligonucleotide
tcctgttatgtgcactctcagctacagatgcagacacaatatgtataggctaccatgcga

SEQ ID NO: 460780 - DNA, 58 bp, Artificial
  Synthetic oligonucleotide
tcctgttattcttccgcacgatgctgacaacaccgaacgtggctcaggtcgtagcgta

SEQ ID NO: 460781 - DNA, 60 bp, Artificial
  Synthetic oligonucleotide
tcctgttattgtatgtgattgtcatgttttatgctgtggattgtacatgagtcttgcctt

SEQ ID NO: 460782 - DNA, 51 bp, Artificial
  Synthetic oligonucleotide
tcctgttcgaggctaagctctatagtgaaggctacattgctgtgtcttatt

SEQ ID NO: 460783 - DNA, 59 bp, Artificial
  Synthetic oligonucleotide
tcctgttctttatgttgagacgtggccgaatatgatttcaggacgactagccgactggt

SEQ ID NO: 460784 - DNA, 55 bp, Artificial
  Synthetic oligonucleotide
tcctgtttagttacgagcgacattgctccgtgtattcactcgttggaatgaatac

SEQ ID NO: 460785 - DNA, 57 bp, Artificial
  Synthetic oligonucleotide
tcctgtttcgtcagctgcgcttatccgttataaagcaccttctttgaacggtaattc

SEQ ID NO: 460786 - DNA, 58 bp, Artificial
  Synthetic oligonucleotide
tccttaaacctggtgagccctgtggagttcagggtgggagtgtgtgaagacacatacc

SEQ ID NO: 460787 - DNA, 53 bp, Artificial
  Synthetic oligonucleotide
tccttaaaggtaagcttcggatccgactggaaattggtgcctacccgtacgtg

SEQ ID NO: 460788 - DNA, 57 bp, Artificial
  Synthetic oligonucleotide
tccttaaagtgctttaagtattgggggttgacgtcatcaatgacgttataccaagca

SEQ ID NO: 460789 - DNA, 50 bp, Artificial
  Synthetic oligonucleotide
tccttaacctaacaagagtaatttttcaaccaccctcgggaggggaccca

SEQ ID NO: 460790 - DNA, 60 bp, Artificial
  Synthetic oligonucleotide
tccttaactgtggcagtgtcaaactcaacaactgtgttatcccatgctctaccttttatc

SEQ ID NO: 460791 - DNA, 55 bp, Artificial
  Synthetic oligonucleotide
tccttaagcttaaatcattgatgcaactatacaggagtttaggagatcgggctcg

SEQ ID NO: 460792 - DNA, 55 bp, Artificial
  Synthetic oligonucleotide
tccttaatctcagtggtagaccaacccaccggaccatgatgtacaatttcccaac

SEQ ID NO: 460793 - DNA, 58 bp, Artificial
  Synthetic oligonucleotide
tccttaatgaaggtggcgtgccaaacttttacacttaccgcgctgttgacgccaatca

SEQ ID NO: 460794 - DNA, 60 bp, Artificial
  Synthetic oligonucleotide
tccttaatgagtggctttgtaatccaatggatataacactatactattatcagcaaactg

SEQ ID NO: 460795 - DNA, 51 bp, Artificial
  Synthetic oligonucleotide
tccttaatggacataagagagtcgttgctctccattgcggcaccaatgggc

SEQ ID NO: 460796 - DNA, 50 bp, Artificial
  Synthetic oligonucleotide
tccttacaattctccactttcagtcctaccagctgtctggtataatggac

SEQ ID NO: 460797 - DNA, 58 bp, Artificial
  Synthetic oligonucleotide
tccttacatagcagctccaggacccccttccaaaaagactgagggaggagcttggagc

SEQ ID NO: 460798 - DNA, 55 bp, Artificial
  Synthetic oligonucleotide
tccttacataggcctgcccttacagcccgccagggtacagtacgggtcagccggt

SEQ ID NO: 460799 - DNA, 57 bp, Artificial
  Synthetic oligonucleotide
tccttacataggcgacaccacctctttccattgcggtgacgacgtattactatgtgg

SEQ ID NO: 460800 - DNA, 60 bp, Artificial
  Synthetic oligonucleotide
tccttacatcttgctgatgggtttagtttcaccttcgctcctgatgcatttatacaggtt

SEQ ID NO: 460801 - DNA, 60 bp, Artificial
  Synthetic oligonucleotide
tccttaccaggctactgatactcaacttaatttcttgcctggtgcatatgcgcaaatatc

SEQ ID NO: 460802 - DNA, 60 bp, Artificial
  Synthetic oligonucleotide
tccttacccgaggaggcccgaactgccatacactcgctgactgagagactctatgtggga

SEQ ID NO: 460803 - DNA, 55 bp, Artificial
  Synthetic oligonucleotide
tccttacgagcaattctgtggagagaaacatttcaagctgtatgagtcactcaag

SEQ ID NO: 460804 - DNA, 56 bp, Artificial
  Synthetic oligonucleotide
tccttacgggcacgtcacctacgacattggtggaaatttcgcatctcaccttttta

SEQ ID NO: 460805 - DNA, 55 bp, Artificial
  Synthetic oligonucleotide
tccttactgtgggaattttgtcattaaggctgctaacaagtatctccgtaagggt

SEQ ID NO: 460806 - DNA, 60 bp, Artificial
  Synthetic oligonucleotide
tccttagacagaatccgacagaagaacaagccgtagatatatgcaaggcagcaatgggct

SEQ ID NO: 460807 - DNA, 55 bp, Artificial
  Synthetic oligonucleotide
tccttaggagccagttccttaatgactctaagagcctccgacttacttcccgcgt

SEQ ID NO: 460808 - DNA, 53 bp, Artificial
  Synthetic oligonucleotide
tccttaggttgggagtccctcaggaatttgttaatacctggtttaccagtcat

SEQ ID NO: 460809 - DNA, 60 bp, Artificial
  Synthetic oligonucleotide
tccttagtatacatacaatagtgagacgggcgtccgagaggatccggtgtgcgtgtacaa

SEQ ID NO: 460810 - DNA, 60 bp, Artificial
  Synthetic oligonucleotide
tccttagtgagcctgaagagatgctcaccgatgaactctggttctagaggacatttgctg

SEQ ID NO: 460811 - DNA, 55 bp, Artificial
  Synthetic oligonucleotide
tccttatctggcacatttggcgaggatgtacaacggttatgctggtggtatggag

SEQ ID NO: 460812 - DNA, 55 bp, Artificial
  Synthetic oligonucleotide
tccttatgcgcggggctagctgactctctagtgtatacgctgcctgtagcgcacc

SEQ ID NO: 460813 - DNA, 53 bp, Artificial
  Synthetic oligonucleotide
tccttatgctcagtataatttctggattgtagacttgacagagcgtctttctt

SEQ ID NO: 460814 - DNA, 60 bp, Artificial
  Synthetic oligonucleotide
tccttatgctgctgcctacgcaaatatgcatttgctggatactcaaaagcagcgatttaa

SEQ ID NO: 460815 - DNA, 59 bp, Artificial
  Synthetic oligonucleotide
tccttatgggttctgcacccgctcccgtgagggttgtggcgtgtgtgccgattgtgtgg

SEQ ID NO: 460816 - DNA, 52 bp, Artificial
  Synthetic oligonucleotide
tccttatgtcttaaagggagactatctccgacctcgcaacctcagacagcca

SEQ ID NO: 460817 - DNA, 55 bp, Artificial
  Synthetic oligonucleotide
tccttattctggttgtcttacgtcggcgtgattcatcaacagaacacatatcgaa

SEQ ID NO: 460818 - DNA, 58 bp, Artificial
  Synthetic oligonucleotide
tccttcaaccctgaaactaacgcaattctttgcgttagtgcattaggaagaagctatg

SEQ ID NO: 460819 - DNA, 55 bp, Artificial
  Synthetic oligonucleotide
tccttcaccatcagcaagaccgcctccaagaccttccggtcagaggcaattaatg

SEQ ID NO: 460820 - DNA, 50 bp, Artificial
  Synthetic oligonucleotide
tccttcacggtgaaacgtcccttaggggacgaatagctcaaagtgaatgt

SEQ ID NO: 460821 - DNA, 52 bp, Artificial
  Synthetic oligonucleotide
tccttcactgcataatgctcttgttgcagtggagcgtcgtgtgttcaccgtg

SEQ ID NO: 460822 - DNA, 50 bp, Artificial
  Synthetic oligonucleotide
tccttcagactcgtgatttacactcactatgtatgccaactcctgatgcg

SEQ ID NO: 460823 - DNA, 55 bp, Artificial
  Synthetic oligonucleotide
tccttcatccttggacctcaggtcccccggtctaagccgcttggaatacgacagg

SEQ ID NO: 460824 - DNA, 60 bp, Artificial
  Synthetic oligonucleotide
tccttcattgcatcattccgccccatctacggcacgaatgttacgctctcccgatctaag

SEQ ID NO: 460825 - DNA, 57 bp, Artificial
  Synthetic oligonucleotide
tccttccaaccgacgtatgactgtcctatggaaacagttgggaatcgcaagcggtgt

SEQ ID NO: 460826 - DNA, 60 bp, Artificial
  Synthetic oligonucleotide
tccttccagtgctttagctttagatagtgcggtgcgacgtcatctatgacgttataatcc

SEQ ID NO: 460827 - DNA, 55 bp, Artificial
  Synthetic oligonucleotide
tccttcccgccccaccacgcagtggacatgtccgagttttcctttataagtcctg

SEQ ID NO: 460828 - DNA, 53 bp, Artificial
  Synthetic oligonucleotide
tccttccctcaatcagcacctcacggtgtcgtttttctacatgtcacatatgt

SEQ ID NO: 460829 - DNA, 57 bp, Artificial
  Synthetic oligonucleotide
tccttccgaaggaaggaatcttttctgaagatcgaataaagttagttgcttgctgaa

SEQ ID NO: 460830 - DNA, 60 bp, Artificial
  Synthetic oligonucleotide
tccttccgaaggttatacaaagcatgtgatcaggaagaatcctaatggacagagagaact

SEQ ID NO: 460831 - DNA, 58 bp, Artificial
  Synthetic oligonucleotide
tccttccggcccctgaatgtggctaatcctaaccccgcagccattacacacaagccag

SEQ ID NO: 460832 - DNA, 53 bp, Artificial
  Synthetic oligonucleotide
tccttccgttaggccagattttgagcgaggcgtgtgcgactgtggcgatccgg

SEQ ID NO: 460833 - DNA, 52 bp, Artificial
  Synthetic oligonucleotide
tccttcctcacgcagtgcaacccctcgaacatcggtcaagggaccctagagc

SEQ ID NO: 460834 - DNA, 59 bp, Artificial
  Synthetic oligonucleotide
tccttcctgtcagaaggggatgtcctcgcagcttccagggatttcgcagccggtttggc

SEQ ID NO: 460835 - DNA, 50 bp, Artificial
  Synthetic oligonucleotide
tccttcctgttaccaattcattgtgagtattctcgtgtggatgccccgct

SEQ ID NO: 460836 - DNA, 60 bp, Artificial
  Synthetic oligonucleotide
tccttcgaactggatgagaacatgcaggtgtggagtcccatcttcatgtagctctctgca

SEQ ID NO: 460837 - DNA, 60 bp, Artificial
  Synthetic oligonucleotide
tccttcgaattggatgaggacatgcaagtgaggagtcccatcttcgtgtaattccctgca

SEQ ID NO: 460838 - DNA, 60 bp, Artificial
  Synthetic oligonucleotide
tccttcgaccgcatgtacatcacccaccgcgggtctcgtaaacgcattctcggcacactg

SEQ ID NO: 460839 - DNA, 58 bp, Artificial
  Synthetic oligonucleotide
tccttcgacgatcagacttatcggtctgttcggccgcgcttcggcggataaggcgaaa

SEQ ID NO: 460840 - DNA, 53 bp, Artificial
  Synthetic oligonucleotide
tccttcgactgacacagaacaaaccaatttatataagaacaatcctgggagag

SEQ ID NO: 460841 - DNA, 53 bp, Artificial
  Synthetic oligonucleotide
tccttcgagggtgacgaagatcgcattcttgatagcccagtttttgagtgcgg

SEQ ID NO: 460842 - DNA, 59 bp, Artificial
  Synthetic oligonucleotide
tccttcgcaagcctttgtgattcgaggggaacatgaagggaagttgtatgacgccagag

SEQ ID NO: 460843 - DNA, 55 bp, Artificial
  Synthetic oligonucleotide
tccttcggtcaatttcgcgttcctttagtttctaggatgcttatcctgaactccc

SEQ ID NO: 460844 - DNA, 60 bp, Artificial
  Synthetic oligonucleotide
tccttcgtcgaatcaattagatcgagggtaatcattaatggagttactgcgagatctgaa

SEQ ID NO: 460845 - DNA, 60 bp, Artificial
  Synthetic oligonucleotide
tccttcgtgtgttatgcttgctcctcagttaatgcgaatacttcatgtatatgctttgga

SEQ ID NO: 460846 - DNA, 58 bp, Artificial
  Synthetic oligonucleotide
tccttctacttgagccaacacgaccattgtgtgaaaacgtatgcaaacaactgcgagg

SEQ ID NO: 460847 - DNA, 60 bp, Artificial
  Synthetic oligonucleotide
tccttctatgatatcgcaggaagcctctttactcgcttattcaatcgccccgagtatgat

SEQ ID NO: 460848 - DNA, 60 bp, Artificial
  Synthetic oligonucleotide
tccttctcattattgaatccatcctctgggcagcaagtgcaacagaaattccccttgtcc

SEQ ID NO: 460849 - DNA, 57 bp, Artificial
  Synthetic oligonucleotide
tccttctcatttagagctttacgcactaagaggtctgctttaaacggctccacaaaa

SEQ ID NO: 460850 - DNA, 57 bp, Artificial
  Synthetic oligonucleotide
tccttctcggagacccatgccaaaccgtctattcttccgtcaatccggactcttcta

SEQ ID NO: 460851 - DNA, 60 bp, Artificial
  Synthetic oligonucleotide
tccttctcgtcgcctctccagcatgtctgtgagcggtaatgtgtcagatggtaacaatca

SEQ ID NO: 460852 - DNA, 60 bp, Artificial
  Synthetic oligonucleotide
tccttctctagagagcatacgagttcttggggctgcgaagaatggggctgtattgctgtt

SEQ ID NO: 460853 - DNA, 60 bp, Artificial
  Synthetic oligonucleotide
tccttctcttgcgactaatgatattgccgcctcaaccatgggtgcacttgcgaatactac

SEQ ID NO: 460854 - DNA, 59 bp, Artificial
  Synthetic oligonucleotide
tccttctgcacaaacagtacttgatagacttgtttttattcaagttccctatgatatca

SEQ ID NO: 460855 - DNA, 59 bp, Artificial
  Synthetic oligonucleotide
tccttctggagaggggcattcccgtagaaggtgcgacgtggtgacactcgcacgcgtaa

SEQ ID NO: 460856 - DNA, 60 bp, Artificial
  Synthetic oligonucleotide
tccttctgttacatgcaccatatggagcttcctacaggagttcatgctggtacagacttg

SEQ ID NO: 460857 - DNA, 56 bp, Artificial
  Synthetic oligonucleotide
tccttcttcagaaaatccgaacagtccgtttcgtctacttcttccgtactcacgca

SEQ ID NO: 460858 - DNA, 55 bp, Artificial
  Synthetic oligonucleotide
tccttgaaaatggggttccagttaccagctccgttgacctgattgaaacaaccca

SEQ ID NO: 460859 - DNA, 56 bp, Artificial
  Synthetic oligonucleotide
tccttgaagaatcccacccggggatctttgaaaactcgtgcctcgaagcgatggaa

SEQ ID NO: 460860 - DNA, 57 bp, Artificial
  Synthetic oligonucleotide
tccttgaagagtcccacccagggatctttgaaaactcatgtcttgaaacgatggaag

SEQ ID NO: 460861 - DNA, 60 bp, Artificial
  Synthetic oligonucleotide
tccttgagaatgtaatctcgtactttgttgacgctcatggcactctgaatgttcgggtgg

SEQ ID NO: 460862 - DNA, 60 bp, Artificial
  Synthetic oligonucleotide
tccttgagacttatcatagggttgatgatatgattaatttgcactatcctgggggtcaat

SEQ ID NO: 460863 - DNA, 60 bp, Artificial
  Synthetic oligonucleotide
tccttgagcaaggtttcgtaatgagacaggagtatttgagtccactggaagctgcgaaac

SEQ ID NO: 460864 - DNA, 60 bp, Artificial
  Synthetic oligonucleotide
tccttgagcgaaaagaacgatgcagagaagtagtggagatctatgttgcatctgatcgga

SEQ ID NO: 460865 - DNA, 60 bp, Artificial
  Synthetic oligonucleotide
tccttgagggagaagaatgacgaggaaaagtaatggaggtcgatgttgcatcgtatcgga

SEQ ID NO: 460866 - DNA, 60 bp, Artificial
  Synthetic oligonucleotide
tccttgataagctactgctgcgaaagctggaatgagcaacctccaggaattacaggaaaa

SEQ ID NO: 460867 - DNA, 58 bp, Artificial
  Synthetic oligonucleotide
tccttgatacacatacccgtgacgtccgtacttgtccgccactacgtaccgctcagag

SEQ ID NO: 460868 - DNA, 60 bp, Artificial
  Synthetic oligonucleotide
tccttgatcacgcctgtgtgactccaaaatggggcaagttgtcacatttctgcaatctct

SEQ ID NO: 460869 - DNA, 60 bp, Artificial
  Synthetic oligonucleotide
tccttgatgccgtgtctcacgatgcgttggcgccacagtgtctggcaacttctagttctc

SEQ ID NO: 460870 - DNA, 56 bp, Artificial
  Synthetic oligonucleotide
tccttgcaaccaattatgcatagtgcatcagaattaggacggactctacctacatg

SEQ ID NO: 460871 - DNA, 58 bp, Artificial
  Synthetic oligonucleotide
tccttgcgagcccattcttcctccgtttgtcattgagggcacccatcactactacgcc

SEQ ID NO: 460872 - DNA, 53 bp, Artificial
  Synthetic oligonucleotide
tccttgctacataatcacatggatttaagtgcttaaggcttaaacttacttca

SEQ ID NO: 460873 - DNA, 50 bp, Artificial
  Synthetic oligonucleotide
tccttgctattgcttgttttgacaagtattgttcttttgttgtgctgcgg

SEQ ID NO: 460874 - DNA, 60 bp, Artificial
  Synthetic oligonucleotide
tccttgctgagcacaggtcttggtatgacaatgtccagactgttccttgtagtggcctca

SEQ ID NO: 460875 - DNA, 58 bp, Artificial
  Synthetic oligonucleotide
tccttggaagctaggtacttgatacgctagttttggattgtcttgtgcccaacattag

SEQ ID NO: 460876 - DNA, 52 bp, Artificial
  Synthetic oligonucleotide
tccttggaatccctcctttcgggttcttacggtgtcgacactcccgaggaag

SEQ ID NO: 460877 - DNA, 45 bp, Artificial
  Synthetic oligonucleotide
tccttggacctcccggtcccccggtctaagccacttggaatatga

SEQ ID NO: 460878 - DNA, 50 bp, Artificial
  Synthetic oligonucleotide
tccttggcttccgctgtcaggacttctgcgagttgacgcacgtcgtcctc

SEQ ID NO: 460879 - DNA, 60 bp, Artificial
  Synthetic oligonucleotide
tccttgggaaatagtctagagtattggctaacagttcctcatgtaatctactacaattca

SEQ ID NO: 460880 - DNA, 57 bp, Artificial
  Synthetic oligonucleotide
tccttggtacctaaagcggccagaggccaatacagtggatttgtaaggacgctattc

SEQ ID NO: 460881 - DNA, 57 bp, Artificial
  Synthetic oligonucleotide
tccttgtcgcacttgtgccagagttgaagacccttgaaacacgccaaaagtaccagt

SEQ ID NO: 460882 - DNA, 58 bp, Artificial
  Synthetic oligonucleotide
tccttgtgctatggggtgttcatcacccgtctaacatagaggaacaaaggaccctcta

SEQ ID NO: 460883 - DNA, 60 bp, Artificial
  Synthetic oligonucleotide
tccttgttattacaatgagagatagcatcgaaagtaattgaaacaaattagccaatattg

SEQ ID NO: 460884 - DNA, 53 bp, Artificial
  Synthetic oligonucleotide
tccttgttgacactgcctttgtcaactctccaataggacactgtgacatatgt

SEQ ID NO: 460885 - DNA, 60 bp, Artificial
  Synthetic oligonucleotide
tccttgtttccgtcagcctgctctactaaatctacatttcatgctgtcccggttcatatc

SEQ ID NO: 460886 - DNA, 52 bp, Artificial
  Synthetic oligonucleotide
tcctttaaacgaagcttcgttgttgaggcgctaaaaggtcttggtataccgg

SEQ ID NO: 460887 - DNA, 50 bp, Artificial
  Synthetic oligonucleotide
tcctttaatttgaaccggctttccatatttacagttagattgccagtcct

SEQ ID NO: 460888 - DNA, 56 bp, Artificial
  Synthetic oligonucleotide
tcctttataaggaccaatcaggtttccacccttggcgcccaagtatggctgaattg

SEQ ID NO: 460889 - DNA, 60 bp, Artificial
  Synthetic oligonucleotide
tcctttatcacgtcgacagaccgctgtggatacatgcttgggaagacttggttcaatagc

SEQ ID NO: 460890 - DNA, 51 bp, Artificial
  Synthetic oligonucleotide
tcctttcaaaaacccttgaagttcttcctaaatcactttccactctgagtt

SEQ ID NO: 460891 - DNA, 56 bp, Artificial
  Synthetic oligonucleotide
tcctttcaacacttgtcgggaggtacggtcgtagaacgaaactgtatgaggcagcc

SEQ ID NO: 460892 - DNA, 57 bp, Artificial
  Synthetic oligonucleotide
tcctttcaacttttaggtacaggtggctctgctacaatgtcctataaatttccagcc

SEQ ID NO: 460893 - DNA, 60 bp, Artificial
  Synthetic oligonucleotide
tcctttccgaactggacaggtagtggctgattctttgcagatggctgaagatctggcgtg

SEQ ID NO: 460894 - DNA, 60 bp, Artificial
  Synthetic oligonucleotide
tcctttcgatggaacacttgcaatggatcatcctcctggaacgatcttcataaaaatggc

SEQ ID NO: 460895 - DNA, 55 bp, Artificial
  Synthetic oligonucleotide
tcctttcgcctggagcccttgtggtcggtgtggtctgtgcagcaatactgcgccg

SEQ ID NO: 460896 - DNA, 60 bp, Artificial
  Synthetic oligonucleotide
tcctttctctttgaagatgcgcctagatggatctaagagcagtgagaattttgagatcat

SEQ ID NO: 460897 - DNA, 55 bp, Artificial
  Synthetic oligonucleotide
tcctttctgcgaccgctcccgatctggttcctctcttcgagaacacccacgttag

SEQ ID NO: 460898 - DNA, 58 bp, Artificial
  Synthetic oligonucleotide
tcctttgaccgtgtacaaagtggactctgatgacgtccttgagatgtggaatagagct

SEQ ID NO: 460899 - DNA, 52 bp, Artificial
  Synthetic oligonucleotide
tcctttgagaagtaaacgtggttcattttttacgccacgtcgtttttatcca

SEQ ID NO: 460900 - DNA, 60 bp, Artificial
  Synthetic oligonucleotide
tcctttgcaagtggccaccgactcacatgcactaacactaggtactggtcagggggttgc

SEQ ID NO: 460901 - DNA, 55 bp, Artificial
  Synthetic oligonucleotide
tcctttgcattatggcctgtgtatttttttagacgtaggcgccgtaaacgtattc

SEQ ID NO: 460902 - DNA, 54 bp, Artificial
  Synthetic oligonucleotide
tcctttggggctaattcctttaatacgttcaacgcatcatctttatttcccgta

SEQ ID NO: 460903 - DNA, 52 bp, Artificial
  Synthetic oligonucleotide
tcctttggggctttctccttcagtatagtgagcgcctctgatttggactctg

SEQ ID NO: 460904 - DNA, 55 bp, Artificial
  Synthetic oligonucleotide
tcctttggtgcaaattcctttaatactttcaacgcctcatctttatttcctgtgt

SEQ ID NO: 460905 - DNA, 55 bp, Artificial
  Synthetic oligonucleotide
tcctttggtgctaactccctaatgactttaagggcctcatctttatttcctgtgt

SEQ ID NO: 460906 - DNA, 60 bp, Artificial
  Synthetic oligonucleotide
tcctttgtgtgggatggtccagcactagttgccatgacggcatcggacgaatgacaattt

SEQ ID NO: 460907 - DNA, 53 bp, Artificial
  Synthetic oligonucleotide
tccttttacggacgatatataaactatcttagaaatttttcactgctaccaac

SEQ ID NO: 460908 - DNA, 51 bp, Artificial
  Synthetic oligonucleotide
tccttttccggcttcaggaggtggaaggtcatgagttgctccacagatctt

SEQ ID NO: 460909 - DNA, 55 bp, Artificial
  Synthetic oligonucleotide
tccttttggcttacctctcagactagggtttattaccttcgaaaattgcaccaga

SEQ ID NO: 460910 - DNA, 53 bp, Artificial
  Synthetic oligonucleotide
tccttttgggcccccatgaactccttaaagtgctttaggtaatgcgggtcgac

SEQ ID NO: 460911 - DNA, 58 bp, Artificial
  Synthetic oligonucleotide
tcgaaaaaaaactcagacgatgtccagactcaccattttttactcgaagctgtctatg

SEQ ID NO: 460912 - DNA, 59 bp, Artificial
  Synthetic oligonucleotide
tcgaaaaaggtcgcactctagtattgggatatgaaaagccagcacgtagagttgctaag

SEQ ID NO: 460913 - DNA, 58 bp, Artificial
  Synthetic oligonucleotide
tcgaaaacgggcctggataaacaggcccatgtacagaaagcccacaatgtacaggatg

SEQ ID NO: 460914 - DNA, 51 bp, Artificial
  Synthetic oligonucleotide
tcgaaaacttaaccgagaaatatcgtcgtaataatttgaaaccttttcagt

SEQ ID NO: 460915 - DNA, 54 bp, Artificial
  Synthetic oligonucleotide
tcgaaaagaaggtacttcatcgtttcgtagagaacctctttggtccaattatcg

SEQ ID NO: 460916 - DNA, 56 bp, Artificial
  Synthetic oligonucleotide
tcgaaaagcccaaatttcttccagatctgtacgattacaaggagaaccgatttatc

SEQ ID NO: 460917 - DNA, 58 bp, Artificial
  Synthetic oligonucleotide
tcgaaaagcttggacagcagggtatagccggatgctctgtgcctaaattccgttaatt

SEQ ID NO: 460918 - DNA, 58 bp, Artificial
  Synthetic oligonucleotide
tcgaaaagcttttattctcaggcgatgattctctaggattttcagtgcttccccctgt

SEQ ID NO: 460919 - DNA, 59 bp, Artificial
  Synthetic oligonucleotide
tcgaaaagtcacggaccataattgcacttcagatttggatgttcggacgtgtggagaag

SEQ ID NO: 460920 - DNA, 60 bp, Artificial
  Synthetic oligonucleotide
tcgaaaatcgatagcatgatctcatctttgggtcgaagagatgatattgttaaccaagac

SEQ ID NO: 460921 - DNA, 60 bp, Artificial
  Synthetic oligonucleotide
tcgaaaatggaaatgtagccacacgagatgttgacgttttcataggtgcatgttctgaac

SEQ ID NO: 460922 - DNA, 55 bp, Artificial
  Synthetic oligonucleotide
tcgaaaatgggcggcgcaagcctctctttatatagagcgcacataccggtcggca

SEQ ID NO: 460923 - DNA, 55 bp, Artificial
  Synthetic oligonucleotide
tcgaaaatgtcttatatttcgaagcactcgatcgcgtgtatgtttgcgattacgg

SEQ ID NO: 460924 - DNA, 58 bp, Artificial
  Synthetic oligonucleotide
tcgaaaccctggagcaaacattaggacggctggaaaatcggtcactgtcgtccattgc

SEQ ID NO: 460925 - DNA, 60 bp, Artificial
  Synthetic oligonucleotide
tcgaaacgatgtttattccgatcttgttcctcactttgactctcgcgtcagcagatgtga

SEQ ID NO: 460926 - DNA, 50 bp, Artificial
  Synthetic oligonucleotide
tcgaaacgtttcgtatcgtattggtatagaatatcgcaaattgaagtgac

SEQ ID NO: 460927 - DNA, 59 bp, Artificial
  Synthetic oligonucleotide
tcgaaagaatcacctaaaatcgctggtgattgttactaccatggcactggtaaagacta

SEQ ID NO: 460928 - DNA, 55 bp, Artificial
  Synthetic oligonucleotide
tcgaaagacaagggtggcgactccttgcacctatcacggcctatgcccaacagac

SEQ ID NO: 460929 - DNA, 60 bp, Artificial
  Synthetic oligonucleotide
tcgaaagacatggttacattgggtataccggcaccacagctagcgtgtgtagtaactggc

SEQ ID NO: 460930 - DNA, 51 bp, Artificial
  Synthetic oligonucleotide
tcgaaagacccgtcttctgggcggtttttctctcgtgagccatgacaccaa

SEQ ID NO: 460931 - DNA, 59 bp, Artificial
  Synthetic oligonucleotide
tcgaaagccaaaaagtcggtgatgctgaaaggagccccatcaggtatagcaggtccgcg

SEQ ID NO: 460932 - DNA, 56 bp, Artificial
  Synthetic oligonucleotide
tcgaaagctgtgaccagcgttgccgataaggctaatgacaccctcgcaaccttgcg

SEQ ID NO: 460933 - DNA, 58 bp, Artificial
  Synthetic oligonucleotide
tcgaaagctttcatcctatctcccgatggtcttagcattataattcaggggtcggcct

SEQ ID NO: 460934 - DNA, 58 bp, Artificial
  Synthetic oligonucleotide
tcgaaaggcggtgtgcatgttgccgtgacggcgtggcctatcgaagagttcgggcggg

SEQ ID NO: 460935 - DNA, 54 bp, Artificial
  Synthetic oligonucleotide
tcgaaaggctatatgggactgcaaaaggtatggtaaacaaccccacagcctttt

SEQ ID NO: 460936 - DNA, 51 bp, Artificial
  Synthetic oligonucleotide
tcgaaaggctgtcaggagtaagccgaccaccaaataggcagcatccagtag

SEQ ID NO: 460937 - DNA, 60 bp, Artificial
  Synthetic oligonucleotide
tcgaaagggtttactcattcacgctcctgatgagcaatactcagatctgactatcttttc

SEQ ID NO: 460938 - DNA, 51 bp, Artificial
  Synthetic oligonucleotide
tcgaaaggttaaaacatggaacctttggccctgtacactttagaaaccaag

SEQ ID NO: 460939 - DNA, 55 bp, Artificial
  Synthetic oligonucleotide
tcgaaagtagtgtaggtaagtgttctcacactttaaactgagacgtgtccaatac

SEQ ID NO: 460940 - DNA, 60 bp, Artificial
  Synthetic oligonucleotide
tcgaaagtatcgtgaggccgccatttgtaatttagatttcattacgtctgaggctcatgc

SEQ ID NO: 460941 - DNA, 60 bp, Artificial
  Synthetic oligonucleotide
tcgaaataccaacaatcattcactccaagtccgggagcacggccacaggtgaatggacaa

SEQ ID NO: 460942 - DNA, 51 bp, Artificial
  Synthetic oligonucleotide
tcgaaatattgctccgagacttttttgggccattaagaagtggataagtgg

SEQ ID NO: 460943 - DNA, 60 bp, Artificial
  Synthetic oligonucleotide
tcgaaatatttcataagtgtgatgacgactgtatggccagtattagaaacaacacttatg

SEQ ID NO: 460944 - DNA, 60 bp, Artificial
  Synthetic oligonucleotide
tcgaaatgagatgcccgatttgccaggtgtgatgagatcaaattatgatatccgcgaatt

SEQ ID NO: 460945 - DNA, 55 bp, Artificial
  Synthetic oligonucleotide
tcgaaatgagtggcgcatatggcatggtccagttgtctgttaatttaggcagacg

SEQ ID NO: 460946 - DNA, 54 bp, Artificial
  Synthetic oligonucleotide
tcgaaatgtttcgccatgctcgccacacaattgctcaagagtcaacacaacctt

SEQ ID NO: 460947 - DNA, 58 bp, Artificial
  Synthetic oligonucleotide
tcgaaattcagattttgtgggttcggtgtgtttgttatgaaatctgccaatgcaaagg

SEQ ID NO: 460948 - DNA, 55 bp, Artificial
  Synthetic oligonucleotide
tcgaaatttgaagcgtactcgttgcaaacgaaccgattgtgcgtcaacgattgcg

SEQ ID NO: 460949 - DNA, 60 bp, Artificial
  Synthetic oligonucleotide
tcgaacaaatatgtacgggcaatagttcccgatcaaacattcgatgaattaaagcagatg

SEQ ID NO: 460950 - DNA, 50 bp, Artificial
  Synthetic oligonucleotide
tcgaacaaggaaaacgacgcccactatcgaatgctgtggcagacccgtta

SEQ ID NO: 460951 - DNA, 50 bp, Artificial
  Synthetic oligonucleotide
tcgaacaaggtacttgcttactacagcgttggaccaggttcgattccggc

SEQ ID NO: 460952 - DNA, 60 bp, Artificial
  Synthetic oligonucleotide
tcgaacaatatacgttggtcgaacgtgagaatatcacgattgacagctcgactcacgtga

SEQ ID NO: 460953 - DNA, 55 bp, Artificial
  Synthetic oligonucleotide
tcgaacaccactatccaattcctagcgatgaactttctgctaagcaacttgcgct

SEQ ID NO: 460954 - DNA, 55 bp, Artificial
  Synthetic oligonucleotide
tcgaacactccttttaccgggagtgttttcctgatgacaagacgtcgcctgatct

SEQ ID NO: 460955 - DNA, 60 bp, Artificial
  Synthetic oligonucleotide
tcgaacatacgtacaggcgacgatatggctgtggagcgcgtaaatccaagtgatatacgt

SEQ ID NO: 460956 - DNA, 55 bp, Artificial
  Synthetic oligonucleotide
tcgaaccaagaattgatgacttggatacactcacgtctaatctcgctggacgaac

SEQ ID NO: 460957 - DNA, 56 bp, Artificial
  Synthetic oligonucleotide
tcgaacccaaggatgtcccccgctaccccacggacaccgtcatcgaaaacatctca

SEQ ID NO: 460958 - DNA, 53 bp, Artificial
  Synthetic oligonucleotide
tcgaaccccgtggcgtaaagagattgacgcctttactagataaaactttgctt

SEQ ID NO: 460959 - DNA, 53 bp, Artificial
  Synthetic oligonucleotide
tcgaacgacgtattctggttctcagggatctttatcaggttaaaggaggcaca

SEQ ID NO: 460960 - DNA, 58 bp, Artificial
  Synthetic oligonucleotide
tcgaacggaccaatcgttgttgagggcaacgcgaagctctattaatggcgtcgttgga

SEQ ID NO: 460961 - DNA, 58 bp, Artificial
  Synthetic oligonucleotide
tcgaacggaggtatgatcccatcatggccgtatgggatcatgaaggtcttcttcgcca

SEQ ID NO: 460962 - DNA, 60 bp, Artificial
  Synthetic oligonucleotide
tcgaacggcttggcaggcagtggacgaccctgcggacatcggctttacgcgcgacgtcta

SEQ ID NO: 460963 - DNA, 58 bp, Artificial
  Synthetic oligonucleotide
tcgaacggttcccattcagtgatgcggtagacatcctgccactcgtcacgcgtttcct

SEQ ID NO: 460964 - DNA, 55 bp, Artificial
  Synthetic oligonucleotide
tcgaacgtaacacacctgttcaatttcgagttaggtattcaccgatcatgtctga

SEQ ID NO: 460965 - DNA, 60 bp, Artificial
  Synthetic oligonucleotide
tcgaacgtagagctaacctcctaccattgcacatggtacacgcacacgttggaggagcgc

SEQ ID NO: 460966 - DNA, 51 bp, Artificial
  Synthetic oligonucleotide
tcgaacgtccagaagaagcgcctatcatgtcatacgttaatgggatgtctc

SEQ ID NO: 460967 - DNA, 60 bp, Artificial
  Synthetic oligonucleotide
tcgaacgtggcataaagatctgggcatgcttactcctgctgtcaacaatagcgatgggct

SEQ ID NO: 460968 - DNA, 60 bp, Artificial
  Synthetic oligonucleotide
tcgaacgtggtgttcctgtacatgatagctaacatatgacgaatcccctcctctaaatca

SEQ ID NO: 460969 - DNA, 58 bp, Artificial
  Synthetic oligonucleotide
tcgaacgtttagaccggtcgctaccactggcgctgagtatgtcaacgctcggacccag

SEQ ID NO: 460970 - DNA, 57 bp, Artificial
  Synthetic oligonucleotide
tcgaactagaagaatcctaaccctaggattaataagaagatttgctatagagtatag

SEQ ID NO: 460971 - DNA, 55 bp, Artificial
  Synthetic oligonucleotide
tcgaactggtcgcattacagatactcgtacaatcgacatcggccatctgagtcat

SEQ ID NO: 460972 - DNA, 56 bp, Artificial
  Synthetic oligonucleotide
tcgaactgtggtaactgaacaacacagtagaagggtcaaaaccataattgtcaggg

SEQ ID NO: 460973 - DNA, 60 bp, Artificial
  Synthetic oligonucleotide
tcgaagaatctctgattcgtgcattggtagttcccttcgaactgcaacaacacgtggaga

SEQ ID NO: 460974 - DNA, 60 bp, Artificial
  Synthetic oligonucleotide
tcgaagaatctgttattcgtgcactggaattttccttcgaactgtatgagcacatggaga

SEQ ID NO: 460975 - DNA, 58 bp, Artificial
  Synthetic oligonucleotide
tcgaagaatctgttattcgtgcagacgaacttcccttcgaactggataagaacgtgga

SEQ ID NO: 460976 - DNA, 60 bp, Artificial
  Synthetic oligonucleotide
tcgaagaatctgttatttgtgcactggtatttgccttcgaactggagaagcacgtggata

SEQ ID NO: 460977 - DNA, 50 bp, Artificial
  Synthetic oligonucleotide
tcgaagaccgcttccgctcctattttgcttttaccctccctacccccggg

SEQ ID NO: 460978 - DNA, 55 bp, Artificial
  Synthetic oligonucleotide
tcgaagacctaccaatagataccaaactagaggtgacatcagagttcctacagag

SEQ ID NO: 460979 - DNA, 60 bp, Artificial
  Synthetic oligonucleotide
tcgaagactgtacaccccatatatttgggctcactccattatgatatttcgttttcgaca

SEQ ID NO: 460980 - DNA, 57 bp, Artificial
  Synthetic oligonucleotide
tcgaagagagtcgggcgctctaccaagcgtcgggcgggctaaatggcgactccttcc

SEQ ID NO: 460981 - DNA, 52 bp, Artificial
  Synthetic oligonucleotide
tcgaagagcatgagaactaacctgcgacagatgagttccctgatgaggcaag

SEQ ID NO: 460982 - DNA, 60 bp, Artificial
  Synthetic oligonucleotide
tcgaagaggggtatatgtggtgatgaattctcaatgtcattggatgtttgcacacaaacg

SEQ ID NO: 460983 - DNA, 60 bp, Artificial
  Synthetic oligonucleotide
tcgaagatcgatgtgtggagtttggtgcccgttggctctgccagctgcaccatagctgca

SEQ ID NO: 460984 - DNA, 55 bp, Artificial
  Synthetic oligonucleotide
tcgaagatgcctactattcagtcacaatggtggtgtttcacggttttcttcctga

SEQ ID NO: 460985 - DNA, 59 bp, Artificial
  Synthetic oligonucleotide
tcgaagatgtgccgccgagcgttgtggttttgtaccacgactccgtcaggctaggccta

SEQ ID NO: 460986 - DNA, 60 bp, Artificial
  Synthetic oligonucleotide
tcgaagcccaattctggacatggacgcgcatctaatgggcttcctctcccattttccgta

SEQ ID NO: 460987 - DNA, 57 bp, Artificial
  Synthetic oligonucleotide
tcgaagctaaagagtggagacacacgagaaagaaagcgtcccaagagggcgagggga

SEQ ID NO: 460988 - DNA, 51 bp, Artificial
  Synthetic oligonucleotide
tcgaaggatacggtcgcgttctggttaagtccgggccgtcccccgaacatc

SEQ ID NO: 460989 - DNA, 52 bp, Artificial
  Synthetic oligonucleotide
tcgaaggcgacgtaccgtacgtgaccacgaagacggactcggacagggtgct

SEQ ID NO: 460990 - DNA, 59 bp, Artificial
  Synthetic oligonucleotide
tcgaaggctgaacttcgacagcccatataccaaccgtgttgctgtccccattgtccaag

SEQ ID NO: 460991 - DNA, 51 bp, Artificial
  Synthetic oligonucleotide
tcgaaggggacagtccccgactggctgtggttaagcgcacactgtctttga

SEQ ID NO: 460992 - DNA, 55 bp, Artificial
  Synthetic oligonucleotide
tcgaaggtgcgtcggcggctgaacttcgacagcccttatacgggtcgtgctgctg

SEQ ID NO: 460993 - DNA, 57 bp, Artificial
  Synthetic oligonucleotide
tcgaagtacctttcgacgaacacgtcgaatatggtttacagtgtatggcagacgcct

SEQ ID NO: 460994 - DNA, 54 bp, Artificial
  Synthetic oligonucleotide
tcgaagtagcgccccagtgcgctagcctgagccagtgacctccccgaacgctgg

SEQ ID NO: 460995 - DNA, 55 bp, Artificial
  Synthetic oligonucleotide
tcgaagttccgccacgcacctatggcttctgttcacactcggtgccgcatgcggc

SEQ ID NO: 460996 - DNA, 59 bp, Artificial
  Synthetic oligonucleotide
tcgaatacaagattaccttgaatgaagataaaccactttcagatctatgcgttaaagaa

SEQ ID NO: 460997 - DNA, 53 bp, Artificial
  Synthetic oligonucleotide
tcgaataccggcctttacgtatcctacgaaatcggcgacggtacttccgcaac

SEQ ID NO: 460998 - DNA, 50 bp, Artificial
  Synthetic oligonucleotide
tcgaatatcacaggactactattgacacgtgatggaagtaacgatactgg

SEQ ID NO: 460999 - DNA, 55 bp, Artificial
  Synthetic oligonucleotide
tcgaatcaactactgaagtaggcaactttcgtgtagttgattggacggtgtctgg

SEQ ID NO: 461000 - DNA, 53 bp, Artificial
  Synthetic oligonucleotide
tcgaatcaggctggagccgcagctaacgtggtactggcactcccgtctcgacc

SEQ ID NO: 461001 - DNA, 59 bp, Artificial
  Synthetic oligonucleotide
tcgaatcataaaacattagctactgaggtacgtaattgcaagtggtgttcagttaataa

SEQ ID NO: 461002 - DNA, 57 bp, Artificial
  Synthetic oligonucleotide
tcgaatccccttccacgattaacgacaatggacgataactattattatgttcaggcc

SEQ ID NO: 461003 - DNA, 55 bp, Artificial
  Synthetic oligonucleotide
tcgaatccttcgtcgacattatggtcttacaagcagtcttctccttttccggtcc

SEQ ID NO: 461004 - DNA, 60 bp, Artificial
  Synthetic oligonucleotide
tcgaatccttctgcaggcgaataatcggtgagaccccgatgacagataagattttcgctg

SEQ ID NO: 461005 - DNA, 57 bp, Artificial
  Synthetic oligonucleotide
tcgaatcgaccacaccggaacagttgccatgccggactctattggccgatttgtgta

SEQ ID NO: 461006 - DNA, 60 bp, Artificial
  Synthetic oligonucleotide
tcgaatcgacctccaagatgtgtacacaattgatcctacactaactctgcgccagataga

SEQ ID NO: 461007 - DNA, 52 bp, Artificial
  Synthetic oligonucleotide
tcgaatctaagtttgtcatcccactggatccgactgatttacaagattgtta

SEQ ID NO: 461008 - DNA, 60 bp, Artificial
  Synthetic oligonucleotide
tcgaatctagtgaagatcctaaaagatacagctgcgattgaccttgaaactcgtcaaaag

SEQ ID NO: 461009 - DNA, 60 bp, Artificial
  Synthetic oligonucleotide
tcgaatctattcgttcgagagttataatcaacggcgtgactgcaagagccgagtggaatg

SEQ ID NO: 461010 - DNA, 60 bp, Artificial
  Synthetic oligonucleotide
tcgaatctgcactgggataacatcttcaaactcgcctcatgtggtcaaaacagctactca

SEQ ID NO: 461011 - DNA, 56 bp, Artificial
  Synthetic oligonucleotide
tcgaatgaagaaacggttgttaaattaacgccgcatcgctcaaaaatggcaagttc

SEQ ID NO: 461012 - DNA, 55 bp, Artificial
  Synthetic oligonucleotide
tcgaatgcagtactagctagttaaaactaccggtatgcgatctttgaccgagaac

SEQ ID NO: 461013 - DNA, 60 bp, Artificial
  Synthetic oligonucleotide
tcgaatgcgtttacgccaacttcgactctcagctcaagtcgtcgtacgatggtagatcta

SEQ ID NO: 461014 - DNA, 60 bp, Artificial
  Synthetic oligonucleotide
tcgaatgctagtgacgagagcatgattgagacacgctgtgttcttaactcgcacagcaca

SEQ ID NO: 461015 - DNA, 60 bp, Artificial
  Synthetic oligonucleotide
tcgaatggcgactccgacatttgatagtgcatattttagatctggatctgtggttcaaaa

SEQ ID NO: 461016 - DNA, 51 bp, Artificial
  Synthetic oligonucleotide
tcgaatggtggaaccatttggacgtatgtgtatggtatgttgcagcggata

SEQ ID NO: 461017 - DNA, 60 bp, Artificial
  Synthetic oligonucleotide
tcgaatggtgggattatcccatggtgtctgtatgggatcatgaatttctttttggctaat

SEQ ID NO: 461018 - DNA, 60 bp, Artificial
  Synthetic oligonucleotide
tcgaatgtacagaactcctgatgtgcccaaaggctgtgaaggcccatgtaaggtccagtc

SEQ ID NO: 461019 - DNA, 59 bp, Artificial
  Synthetic oligonucleotide
tcgaatgtacgttcaaagtcacgttcgaatgtgataacgcagtaccacaacgacttctc

SEQ ID NO: 461020 - DNA, 55 bp, Artificial
  Synthetic oligonucleotide
tcgaatgtttgtcactcatgacaatgagcggtcgatttacgattttgggccacct

SEQ ID NO: 461021 - DNA, 55 bp, Artificial
  Synthetic oligonucleotide
tcgaattatgaatcaagaaccaggtgaatcttcgtttctagactgggcttctgat

SEQ ID NO: 461022 - DNA, 56 bp, Artificial
  Synthetic oligonucleotide
tcgaattctcaatccactgaaaatcgtctttcaaccaagaaaatccccctactcga

SEQ ID NO: 461023 - DNA, 55 bp, Artificial
  Synthetic oligonucleotide
tcgaattgcgaattgaaccacggataaccttttcaggaaccttgatccgaacctc

SEQ ID NO: 461024 - DNA, 60 bp, Artificial
  Synthetic oligonucleotide
tcgaattgtctcgcttgctctgttgtgagccttacatctataatagaaatgtcccttcta

SEQ ID NO: 461025 - DNA, 50 bp, Artificial
  Synthetic oligonucleotide
tcgaattgttattattggttaacgggtaattgattagtcgaaacgaatcg

SEQ ID NO: 461026 - DNA, 56 bp, Artificial
  Synthetic oligonucleotide
tcgacaaacttaggaaactaagaatcgaattcgaaggaatcattcaacgaatggaa

SEQ ID NO: 461027 - DNA, 59 bp, Artificial
  Synthetic oligonucleotide
tcgacaaatacttgtacaatacgtaactgtaacaagctaggaccacgagagaatgttgc

SEQ ID NO: 461028 - DNA, 60 bp, Artificial
  Synthetic oligonucleotide
tcgacaacattctccaagcaagttgtgagagattgtacagtggtcgaatgggtgtctgga

SEQ ID NO: 461029 - DNA, 60 bp, Artificial
  Synthetic oligonucleotide
tcgacaacgagcctagtacagctacaatcaagaatgatctcagagaccgttatcaagtgc

SEQ ID NO: 461030 - DNA, 51 bp, Artificial
  Synthetic oligonucleotide
tcgacaacgatgtgaacatctaccgaccgacaacattagtacaatcgtcga

SEQ ID NO: 461031 - DNA, 50 bp, Artificial
  Synthetic oligonucleotide
tcgacaagcactctccgtccaaatccgagccccttcttccgtgccacacg

SEQ ID NO: 461032 - DNA, 60 bp, Artificial
  Synthetic oligonucleotide
tcgacaaggttaacgaggcttacgacatagtgagccgtgcgagctataagaggactagga

SEQ ID NO: 461033 - DNA, 60 bp, Artificial
  Synthetic oligonucleotide
tcgacaagttgtacacaactatctaaatgtgggacccattagtcaatgactttcctgaca

SEQ ID NO: 461034 - DNA, 56 bp, Artificial
  Synthetic oligonucleotide
tcgacaataggtcgtgttggggcggagagctaaaaacagcggtgaaaaccaattgc

SEQ ID NO: 461035 - DNA, 58 bp, Artificial
  Synthetic oligonucleotide
tcgacaatgaatggtacccaactgacctattgactgtaaacttagacgatgaagtatt

SEQ ID NO: 461036 - DNA, 58 bp, Artificial
  Synthetic oligonucleotide
tcgacaatgtgggtgcttagccgcctgttccgtaatgggcaacttaatgacgacgacc

SEQ ID NO: 461037 - DNA, 55 bp, Artificial
  Synthetic oligonucleotide
tcgacacaaacgtcaactatcagtagaagattgagactaaaggaaatggcaacac

SEQ ID NO: 461038 - DNA, 60 bp, Artificial
  Synthetic oligonucleotide
tcgacacaccaaggacatcgagctcatgagaggacaaacccatttgtcgtaagacagctt

SEQ ID NO: 461039 - DNA, 60 bp, Artificial
  Synthetic oligonucleotide
tcgacacactatgatgtatgccggttcccatggagctatcaagctccatagggtgagacc

SEQ ID NO: 461040 - DNA, 60 bp, Artificial
  Synthetic oligonucleotide
tcgacacagatacgatagacttgctgatcaaagggtctagctgtatcctttcatatgtca

SEQ ID NO: 461041 - DNA, 53 bp, Artificial
  Synthetic oligonucleotide
tcgacaccagacggggccagtcagattggcactaaaagcggcctgactgtgca

SEQ ID NO: 461042 - DNA, 60 bp, Artificial
  Synthetic oligonucleotide
tcgacaccatcatgtcatctaacattaattgcgattgtatgccccacaatggcccaaacc

SEQ ID NO: 461043 - DNA, 60 bp, Artificial
  Synthetic oligonucleotide
tcgacaccatccgagccgatgacacctctgggtgagcctgcactcttgcccgcgttgcaa

SEQ ID NO: 461044 - DNA, 54 bp, Artificial
  Synthetic oligonucleotide
tcgacacccacctttctgatgggtgcccaatacggatgggctccgattctcgga

SEQ ID NO: 461045 - DNA, 58 bp, Artificial
  Synthetic oligonucleotide
tcgacacgctccttgaaaatggggttccagtcaccagctccgttgacctgattgaaac

SEQ ID NO: 461046 - DNA, 52 bp, Artificial
  Synthetic oligonucleotide
tcgacactgtgtttggttcccgtccttgaaggactacgtcggtttgaagatt

SEQ ID NO: 461047 - DNA, 51 bp, Artificial
  Synthetic oligonucleotide
tcgacacttgtggggagatgtggccgtaagacgaaattgtacgaggctgcc

SEQ ID NO: 461048 - DNA, 57 bp, Artificial
  Synthetic oligonucleotide
tcgacagaacgccggactcggacctgagggattcacaatcgctaacgacggaacaac

SEQ ID NO: 461049 - DNA, 59 bp, Artificial
  Synthetic oligonucleotide
tcgacagacttattagtggccgcatggttgtgcttaatacttacgtaactcagttacta

SEQ ID NO: 461050 - DNA, 60 bp, Artificial
  Synthetic oligonucleotide
tcgacagcccatactccagccgtgctgttgtccccactgtccgaggcacaagcaagcgtc

SEQ ID NO: 461051 - DNA, 55 bp, Artificial
  Synthetic oligonucleotide
tcgacagcccatttgcacgaccccaaccggtgaatcccgacgacgcagagaccac

SEQ ID NO: 461052 - DNA, 58 bp, Artificial
  Synthetic oligonucleotide
tcgacagcccgtatgccaaccgtgtgagtgcccccattgccctcgccacaaaccgaag

SEQ ID NO: 461053 - DNA, 60 bp, Artificial
  Synthetic oligonucleotide
tcgacagcccttactcaacccgtgtagctgtccccactgtccgcgtcacaaaatctcgca

SEQ ID NO: 461054 - DNA, 55 bp, Artificial
  Synthetic oligonucleotide
tcgacagccttctttcttctccgatcccttcacatagattgttgctccattgggc

SEQ ID NO: 461055 - DNA, 55 bp, Artificial
  Synthetic oligonucleotide
tcgacagctaccgaggacattgggcgcttgcagttacgccgagcgtgggtgaact

SEQ ID NO: 461056 - DNA, 58 bp, Artificial
  Synthetic oligonucleotide
tcgacaggaaaagccaaggtgtgttgtgttaaattaactgctatggacttagagttgc

SEQ ID NO: 461057 - DNA, 60 bp, Artificial
  Synthetic oligonucleotide
tcgacaggaacagcagagtgctgtggatgttgacgatggtcattttgtcaacatacagct

SEQ ID NO: 461058 - DNA, 55 bp, Artificial
  Synthetic oligonucleotide
tcgacaggagccaaaacgagcttcgaaggaagttgagatacactctatggcgttt

SEQ ID NO: 461059 - DNA, 60 bp, Artificial
  Synthetic oligonucleotide
tcgacaggctggcatacacaaatgacttcgaggcgtatgaccagtcgcaggatggagcta

SEQ ID NO: 461060 - DNA, 60 bp, Artificial
  Synthetic oligonucleotide
tcgacagtgcacagacctctgaaagctccatatcaatcagggtcaaaggagaatcttcaa

SEQ ID NO: 461061 - DNA, 59 bp, Artificial
  Synthetic oligonucleotide
tcgacagtggaacatagacaagcccttgtacggaaaagctgtgaacgtctctatgaagg

SEQ ID NO: 461062 - DNA, 54 bp, Artificial
  Synthetic oligonucleotide
tcgacatagatcaacgcaagtgcgtcagaaaaagtgatgctggcccactgtgcc

SEQ ID NO: 461063 - DNA, 55 bp, Artificial
  Synthetic oligonucleotide
tcgacatcaacacagctaacaatctttgctttcggtgaagtgtttcgctgaaagc

SEQ ID NO: 461064 - DNA, 55 bp, Artificial
  Synthetic oligonucleotide
tcgacattacctcacgtaggggataacatccaccatctgcctcacggaggtaggt

SEQ ID NO: 461065 - DNA, 60 bp, Artificial
  Synthetic oligonucleotide
tcgacattcttgaagacctcattgctgatgggcgcctccaaattaccccttatgtcacct

SEQ ID NO: 461066 - DNA, 55 bp, Artificial
  Synthetic oligonucleotide
tcgaccaacattacggagtgggactaaaggagattaagcttcgagcgtccacggt

SEQ ID NO: 461067 - DNA, 56 bp, Artificial
  Synthetic oligonucleotide
tcgaccaacctcgagttggatatggttaagtacaccatggctttgaggcggtacgg

SEQ ID NO: 461068 - DNA, 56 bp, Artificial
  Synthetic oligonucleotide
tcgaccaagcacgggaccaatgttttaaatactcgtgtaatataatatacgagaat

SEQ ID NO: 461069 - DNA, 55 bp, Artificial
  Synthetic oligonucleotide
tcgaccacagctacttccacgcgatgttcgcctacgtcaagcccatgggccacgg

SEQ ID NO: 461070 - DNA, 60 bp, Artificial
  Synthetic oligonucleotide
tcgaccacgcaacaccaaacacgtcaagccactccgaataccttgcagcgatcgcactac

SEQ ID NO: 461071 - DNA, 52 bp, Artificial
  Synthetic oligonucleotide
tcgaccactcatgcactgattcgctcgtttctccccggaatattagggtatg

SEQ ID NO: 461072 - DNA, 56 bp, Artificial
  Synthetic oligonucleotide
tcgaccactggacggaccgttcatcgtcgtgttcccagttgggaatcctttggtga

SEQ ID NO: 461073 - DNA, 55 bp, Artificial
  Synthetic oligonucleotide
tcgaccagagacattctccagacgcgcgacttgcactcactatgtatgcccactc

SEQ ID NO: 461074 - DNA, 55 bp, Artificial
  Synthetic oligonucleotide
tcgaccagcaacaactgattaacttgcaggaatacactcaaccgagtgtaatgct

SEQ ID NO: 461075 - DNA, 58 bp, Artificial
  Synthetic oligonucleotide
tcgaccagcttcccctaggagagcactccccgactcgtctgtcgtcgaccatgatgcg

SEQ ID NO: 461076 - DNA, 60 bp, Artificial
  Synthetic oligonucleotide
tcgaccaggggtgttcaaattgcatccaatgaaaacatggaaaccatgaattccagcacg

SEQ ID NO: 461077 - DNA, 60 bp, Artificial
  Synthetic oligonucleotide
tcgaccaggtagtgtcccttgccaggcttcagcaagatgccctaactcatgtgttaccgg

SEQ ID NO: 461078 - DNA, 52 bp, Artificial
  Synthetic oligonucleotide
tcgaccagtgcatccgcggggccgtcccattcagtgccgacaccgtccgagc

SEQ ID NO: 461079 - DNA, 60 bp, Artificial
  Synthetic oligonucleotide
tcgaccatccaatcatggtgtctggagatgacagtgtgattggcggaaacccaacggtgt

SEQ ID NO: 461080 - DNA, 56 bp, Artificial
  Synthetic oligonucleotide
tcgacccaacccttaatgccgtttgttgagctatttggatctgttaatgtttgcag

SEQ ID NO: 461081 - DNA, 56 bp, Artificial
  Synthetic oligonucleotide
tcgacccaagatcgaacttggagtggggtgtgatggtctatgattattctgaactg

SEQ ID NO: 461082 - DNA, 54 bp, Artificial
  Synthetic oligonucleotide
tcgacccattttgcaagggtctcctcccgtcctccccttcgttctctcttcgga

SEQ ID NO: 461083 - DNA, 53 bp, Artificial
  Synthetic oligonucleotide
tcgacccattttgtgagggtctcctcccgtcctccccttcggtttctcttcga

SEQ ID NO: 461084 - DNA, 58 bp, Artificial
  Synthetic oligonucleotide
tcgacccctttcacgagctttcgtcttatttctctaggttgagctacgagatgacgac

SEQ ID NO: 461085 - DNA, 55 bp, Artificial
  Synthetic oligonucleotide
tcgacccgctctatgcagatcgtaaccgaagagttgtgttcgtacattggcgcac

SEQ ID NO: 461086 - DNA, 59 bp, Artificial
  Synthetic oligonucleotide
tcgaccggccccgattgctgctgtcttacctccctgcccggagcttgaacagggcctgc

SEQ ID NO: 461087 - DNA, 60 bp, Artificial
  Synthetic oligonucleotide
tcgaccgtggatgggcgacgcgcaacgcctggacagtcgacgagtcctatgtagtcgccg

SEQ ID NO: 461088 - DNA, 58 bp, Artificial
  Synthetic oligonucleotide
tcgaccgtgtggtgtcgtacccgcgtcgcaggtgtgtggtccagtgtattgtttcacc

SEQ ID NO: 461089 - DNA, 60 bp, Artificial
  Synthetic oligonucleotide
tcgacctaaaaagtggctttcatcaggtagcaatgcacccagattcggtagaatggacag

SEQ ID NO: 461090 - DNA, 55 bp, Artificial
  Synthetic oligonucleotide
tcgacctactgagataggagcatgacaaatgacgaccgtggtgattgagggcagc

SEQ ID NO: 461091 - DNA, 59 bp, Artificial
  Synthetic oligonucleotide
tcgacctctgggcctgccgagactcaggccccagtacagtggaggtggttgagaggaac

SEQ ID NO: 461092 - DNA, 55 bp, Artificial
  Synthetic oligonucleotide
tcgacctgtcctcgtgggatgcgttcgtagacagcctcaaggacggcaggggcat

SEQ ID NO: 461093 - DNA, 50 bp, Artificial
  Synthetic oligonucleotide
tcgaccttgttaagaagcgtggtagagaaacaaataaagaggttacactt

SEQ ID NO: 461094 - DNA, 50 bp, Artificial
  Synthetic oligonucleotide
tcgacgaacatcgggattactttgtatgttcgcagatcaaagtcacagcc

SEQ ID NO: 461095 - DNA, 52 bp, Artificial
  Synthetic oligonucleotide
tcgacgacaatactattaggtctatatggccgcgcagcggcactcttcacat

SEQ ID NO: 461096 - DNA, 52 bp, Artificial
  Synthetic oligonucleotide
tcgacgacagttgggccgcttctattagtcgcattatgtccctaacagcggg

SEQ ID NO: 461097 - DNA, 54 bp, Artificial
  Synthetic oligonucleotide
tcgacgacccctgccagaagtccacccacgaacttcccgaccccgatagacacc

SEQ ID NO: 461098 - DNA, 55 bp, Artificial
  Synthetic oligonucleotide
tcgacgagtgggaataagacaaaccaagttgagggtacggcaaggacgctaccat

SEQ ID NO: 461099 - DNA, 55 bp, Artificial
  Synthetic oligonucleotide
tcgacgagtgtgctggtggtgcagtggaagctacctactatcacgctatcaccga

SEQ ID NO: 461100 - DNA, 55 bp, Artificial
  Synthetic oligonucleotide
tcgacgatccaggcgagggaacgtcgagtcaacgagaggtctacagccgagaggg

SEQ ID NO: 461101 - DNA, 60 bp, Artificial
  Synthetic oligonucleotide
tcgacgatgcactgcccacaaggaaggagacctaagaggtctgttgcgcatttcgaagcc

SEQ ID NO: 461102 - DNA, 53 bp, Artificial
  Synthetic oligonucleotide
tcgacgatggctaaaagcacgaagttggtgtttgcttcaacttttcaggccat

SEQ ID NO: 461103 - DNA, 55 bp, Artificial
  Synthetic oligonucleotide
tcgacgattaaagcagtcgtgcaaagtgccaaatactggaatctggcagagtgca

SEQ ID NO: 461104 - DNA, 60 bp, Artificial
  Synthetic oligonucleotide
tcgacgattgccatcctcgtgtgaattccgggctccgcttgcactgatggtacctcttac

SEQ ID NO: 461105 - DNA, 60 bp, Artificial
  Synthetic oligonucleotide
tcgacgcaggactcggcttgctgaggtgcacacagcaagaggcgagagcggcgactggtg

SEQ ID NO: 461106 - DNA, 60 bp, Artificial
  Synthetic oligonucleotide
tcgacgcattgaagctggagcatggcataaaccgcattgagggtgcgaagaaaggccctg

SEQ ID NO: 461107 - DNA, 60 bp, Artificial
  Synthetic oligonucleotide
tcgacgccctgggtcctgcagaggtcttacctgtggacgcccttgatcctgctgttgttc

SEQ ID NO: 461108 - DNA, 58 bp, Artificial
  Synthetic oligonucleotide
tcgacgcgtatctgcgtttggacggaagtgatcgtgtccaaggcgcgtttaacattcc

SEQ ID NO: 461109 - DNA, 60 bp, Artificial
  Synthetic oligonucleotide
tcgacgcgttgcgctcagcactctaccccgagtgtagcttaggccgatgagtctgggcat

SEQ ID NO: 461110 - DNA, 50 bp, Artificial
  Synthetic oligonucleotide
tcgacgcttggcacaagtcatacttgctgagatcggggagttgctacagg

SEQ ID NO: 461111 - DNA, 52 bp, Artificial
  Synthetic oligonucleotide
tcgacggcagcacattagacgcaaccggcgaggcacgagtagtcaattacga

SEQ ID NO: 461112 - DNA, 55 bp, Artificial
  Synthetic oligonucleotide
tcgacggcatttatgacacgcttaaacagacggcgaagatttctaaattcgcggg

SEQ ID NO: 461113 - DNA, 60 bp, Artificial
  Synthetic oligonucleotide
tcgacggctcttcaggagttgtaaatccagcaatggatccaatttatgatgagccgacga

SEQ ID NO: 461114 - DNA, 53 bp, Artificial
  Synthetic oligonucleotide
tcgacgggctacgaaaacccggtaaggcagtatctagcttactttacaccaac

SEQ ID NO: 461115 - DNA, 60 bp, Artificial
  Synthetic oligonucleotide
tcgacggtcgtatagcgggtccgcaggctaaggcaaagagccgcgagcacatcactccaa

SEQ ID NO: 461116 - DNA, 54 bp, Artificial
  Synthetic oligonucleotide
tcgacgtacggcgagagtgacgccatgaacgctcacgcgcttgtggcatggact

SEQ ID NO: 461117 - DNA, 60 bp, Artificial
  Synthetic oligonucleotide
tcgacgtactgtacgttgactcgctgcgcagcgtgtacaacgagttgggtggtaacctga

SEQ ID NO: 461118 - DNA, 60 bp, Artificial
  Synthetic oligonucleotide
tcgacgtatggctctcttcttggcaatcctgtgctgtggcttgatagaggggggagttga

SEQ ID NO: 461119 - DNA, 58 bp, Artificial
  Synthetic oligonucleotide
tcgacgtgcgagaaatccacatccttgtcattgaactgtttggacaggatttttaccg

SEQ ID NO: 461120 - DNA, 60 bp, Artificial
  Synthetic oligonucleotide
tcgacgttaacgcgattgacagcgcgttattacgattgcgaacactgggcgctgataaga

SEQ ID NO: 461121 - DNA, 57 bp, Artificial
  Synthetic oligonucleotide
tcgacgttctccccgtcggactatggttcggtgttcgctgcaaatcgattgaccgga

SEQ ID NO: 461122 - DNA, 60 bp, Artificial
  Synthetic oligonucleotide
tcgactacacccccagtgagctaaggtcctttctatgcgaaatgctgccagattccttgc

SEQ ID NO: 461123 - DNA, 53 bp, Artificial
  Synthetic oligonucleotide
tcgactacgtggtgtgtaattgttccgcggtgaactcaaagactttcgaatgg

SEQ ID NO: 461124 - DNA, 51 bp, Artificial
  Synthetic oligonucleotide
tcgactagattagacgactgcaggccctctagcaaaacgtacactacactg

SEQ ID NO: 461125 - DNA, 50 bp, Artificial
  Synthetic oligonucleotide
tcgactagcagggcaagggtagagtattcatacccccagacgattccagg

SEQ ID NO: 461126 - DNA, 52 bp, Artificial
  Synthetic oligonucleotide
tcgactagtaagggtgatcctgcacctagggttattcagcctcgcaacccta

SEQ ID NO: 461127 - DNA, 60 bp, Artificial
  Synthetic oligonucleotide
tcgactatcaccctgtatgactacacttacgggtcgtaatggccgcgcagcggcagacac

SEQ ID NO: 461128 - DNA, 52 bp, Artificial
  Synthetic oligonucleotide
tcgactcaacactcgaaatatgccacaacaggaacatcaaagtaagcttcgt

SEQ ID NO: 461129 - DNA, 60 bp, Artificial
  Synthetic oligonucleotide
tcgactcaatgatatggtggatgggattaagctacagttggacgcatccagacaatgtca

SEQ ID NO: 461130 - DNA, 50 bp, Artificial
  Synthetic oligonucleotide
tcgactcaccttgtctcttgggaactcgtctcggactgatgcctttgaac

SEQ ID NO: 461131 - DNA, 54 bp, Artificial
  Synthetic oligonucleotide
tcgactcagacgaagtcccgggctataaatttgctccggtagaaccaaccgacg

SEQ ID NO: 461132 - DNA, 59 bp, Artificial
  Synthetic oligonucleotide
tcgactcctaggggtctcatttcaaccttcaccaatggtatctgatagtcctcaaatgg

SEQ ID NO: 461133 - DNA, 52 bp, Artificial
  Synthetic oligonucleotide
tcgactcgtcagattcaactttcaggtgacgttcaggcaacaggtgtctttg

SEQ ID NO: 461134 - DNA, 60 bp, Artificial
  Synthetic oligonucleotide
tcgactgagcgttccatctcttgagacacctgaagagaccaccgctcccatcatgacaca

SEQ ID NO: 461135 - DNA, 53 bp, Artificial
  Synthetic oligonucleotide
tcgactgcatgggtaacaccccctacggcaagggtgctatgtccaagacctcg

SEQ ID NO: 461136 - DNA, 55 bp, Artificial
  Synthetic oligonucleotide
tcgactgccgctgcggtaactggcaggaccacctatggctcctactcgcagatgg

SEQ ID NO: 461137 - DNA, 60 bp, Artificial
  Synthetic oligonucleotide
tcgactgcgacatgaggctagtgctgagtgggaacctcgtgtggaagcgttaaaccagga

SEQ ID NO: 461138 - DNA, 60 bp, Artificial
  Synthetic oligonucleotide
tcgactggaatccaaccgggccatcctgggctgatgatgagcgggaggtggactacaatg

SEQ ID NO: 461139 - DNA, 60 bp, Artificial
  Synthetic oligonucleotide
tcgactggagcagtcaaccagggaatgagtcagagattctccgatacaacatctcgcagc

SEQ ID NO: 461140 - DNA, 58 bp, Artificial
  Synthetic oligonucleotide
tcgactgggatcgtgttaaacccacttgtgatgctgaatcacctgggtccaaaacact

SEQ ID NO: 461141 - DNA, 55 bp, Artificial
  Synthetic oligonucleotide
tcgactgggatggaattcatggtcactatgataaggttacttgttctacgaggtc

SEQ ID NO: 461142 - DNA, 55 bp, Artificial
  Synthetic oligonucleotide
tcgactgggcgtcgcacaacatgggaggcaacatttgggacccttcatataaatt

SEQ ID NO: 461143 - DNA, 55 bp, Artificial
  Synthetic oligonucleotide
tcgactgttgttagtgggaatggtgtggtggcgattgcgatggattcgcaatctc

SEQ ID NO: 461144 - DNA, 60 bp, Artificial
  Synthetic oligonucleotide
tcgacttaatctggcgcttatttgagctgttgttgaaggaaattgtaatactatctcatt

SEQ ID NO: 461145 - DNA, 51 bp, Artificial
  Synthetic oligonucleotide
tcgacttatccatctgaatgatgcgcgtttattgcacacgcggcgaagctc

SEQ ID NO: 461146 - DNA, 55 bp, Artificial
  Synthetic oligonucleotide
tcgacttctggctcttctgccgccgtgctgaggtggcagcacttagggccttcga

SEQ ID NO: 461147 - DNA, 51 bp, Artificial
  Synthetic oligonucleotide
tcgacttcttcaatccatctaactgattcaggcagatgcctgattacataa

SEQ ID NO: 461148 - DNA, 57 bp, Artificial
  Synthetic oligonucleotide
tcgacttggaaccgaagatgcctgtcgcattagacggcgaggtccaagccggtccta

SEQ ID NO: 461149 - DNA, 57 bp, Artificial
  Synthetic oligonucleotide
tcgactttcactcaaacgtcgcaagcgggactggttaatttgatcaacgacgtaatg

SEQ ID NO: 461150 - DNA, 60 bp, Artificial
  Synthetic oligonucleotide
tcgactttcgagtgctagcgcgagcaaggtagcctacaccttgcagacggacgtcaactc

SEQ ID NO: 461151 - DNA, 60 bp, Artificial
  Synthetic oligonucleotide
tcgactttttctatctgccggctggtattgtgatcgttgtagacctgtatacgaaactga

SEQ ID NO: 461152 - DNA, 59 bp, Artificial
  Synthetic oligonucleotide
tcgagaaagtaaagattctgcccaaagataggtggacacagcatacaacaactggaggt

SEQ ID NO: 461153 - DNA, 58 bp, Artificial
  Synthetic oligonucleotide
tcgagaaattgagcactcctgttactctcgttcaattagagcaccccactttacttcg

SEQ ID NO: 461154 - DNA, 55 bp, Artificial
  Synthetic oligonucleotide
tcgagaactactttacgttccggggtgtttgtgcctacttcgtgttcatctcagt

SEQ ID NO: 461155 - DNA, 57 bp, Artificial
  Synthetic oligonucleotide
tcgagaactcatatcaatactgaaattgttaatgagtgcccttcacgaaattggaaa

SEQ ID NO: 461156 - DNA, 54 bp, Artificial
  Synthetic oligonucleotide
tcgagaactggtcacgtctttatcggtatgtccaagaggtctgatggtacatgg

SEQ ID NO: 461157 - DNA, 57 bp, Artificial
  Synthetic oligonucleotide
tcgagaacttctccatgccgcagggtaattcacagcgcacgttagctggcgtcactg

SEQ ID NO: 461158 - DNA, 55 bp, Artificial
  Synthetic oligonucleotide
tcgagaagacacagactcgttgctggcgatcagtcactctccagttcacgtctcg

SEQ ID NO: 461159 - DNA, 60 bp, Artificial
  Synthetic oligonucleotide
tcgagaagactcgaccattgaagtctaggtgtccactgagatagttatgtgggcctaacg

SEQ ID NO: 461160 - DNA, 59 bp, Artificial
  Synthetic oligonucleotide
tcgagaagcgagtaactgtgtcagttgctcagccatcccgtaaccgtaagaactataaa

SEQ ID NO: 461161 - DNA, 60 bp, Artificial
  Synthetic oligonucleotide
tcgagaagcgcacagtggagcgcatggtggtggatgtagagggcgaaaccccccgcgctg

SEQ ID NO: 461162 - DNA, 60 bp, Artificial
  Synthetic oligonucleotide
tcgagaagtgccgtgtggaaagagttatctgagaagaaacggcgtggacagagaatgcac

SEQ ID NO: 461163 - DNA, 59 bp, Artificial
  Synthetic oligonucleotide
tcgagaatatcaatcggggactgtcccaagtatgtcaaacagggatctttgaaactagc

SEQ ID NO: 461164 - DNA, 60 bp, Artificial
  Synthetic oligonucleotide
tcgagaatgtgttcatggttaatggtaaggagtacagttggagaactcatagtttcatca

SEQ ID NO: 461165 - DNA, 60 bp, Artificial
  Synthetic oligonucleotide
tcgagacaaaccacacaggaacatactgttctctgaatggagtcagtccagtgcatttgg

SEQ ID NO: 461166 - DNA, 60 bp, Artificial
  Synthetic oligonucleotide
tcgagacaaatgaaatgtcctacatgctcactcaccctctggccatgctcctcagcaaaa

SEQ ID NO: 461167 - DNA, 55 bp, Artificial
  Synthetic oligonucleotide
tcgagacaatttctcaaagctgggcttcctgaaagatatagaagatgtgtcagga

SEQ ID NO: 461168 - DNA, 60 bp, Artificial
  Synthetic oligonucleotide
tcgagacacgatgtggtccatataggtaaggtcatgtgcatctctgatgtcactcgtgga

SEQ ID NO: 461169 - DNA, 55 bp, Artificial
  Synthetic oligonucleotide
tcgagacagagctctacgctctggcctctgaccgcccagaatgggtgcgcgctct

SEQ ID NO: 461170 - DNA, 60 bp, Artificial
  Synthetic oligonucleotide
tcgagacatcgcatcccgtagcaccgtcaatatctaaaacgcggcagaaacggtcaaagc

SEQ ID NO: 461171 - DNA, 54 bp, Artificial
  Synthetic oligonucleotide
tcgagacctcaataagttttggcagttggatgaaacattagacgtatccaacat

SEQ ID NO: 461172 - DNA, 58 bp, Artificial
  Synthetic oligonucleotide
tcgagacgaattaaactatttcgtctgcggagacgaaactgctcctactacgaatcaa

SEQ ID NO: 461173 - DNA, 60 bp, Artificial
  Synthetic oligonucleotide
tcgagactcggatcacatctggccagcaaggatatgcaccacttgatggtagccacgtga

SEQ ID NO: 461174 - DNA, 58 bp, Artificial
  Synthetic oligonucleotide
tcgagacttgctcctgccctgttctacactgcactgtggtgctactctaccggttgct

SEQ ID NO: 461175 - DNA, 60 bp, Artificial
  Synthetic oligonucleotide
tcgagagacactccagatatacatatcactatgatgccgattactctcggtgggattcaa

SEQ ID NO: 461176 - DNA, 60 bp, Artificial
  Synthetic oligonucleotide
tcgagagagcgaccataatggcggcattcacagggaacaccgaaggcagaacatctgaca

SEQ ID NO: 461177 - DNA, 60 bp, Artificial
  Synthetic oligonucleotide
tcgagagatcaaccatcatggcagcatttacagggaatactgaaggcagaacatctgaca

SEQ ID NO: 461178 - DNA, 56 bp, Artificial
  Synthetic oligonucleotide
tcgagagcaatgccctttaagtcaagtccgtaagtgctggactcatttcaaggtgt

SEQ ID NO: 461179 - DNA, 60 bp, Artificial
  Synthetic oligonucleotide
tcgagagcagttcaccctatatttcttggctcgatgcactatgatgttacgtacgaggtt

SEQ ID NO: 461180 - DNA, 57 bp, Artificial
  Synthetic oligonucleotide
tcgagagcctctcccgcacttcctgcattgacggcgttatggtagacgtcgtcttta

SEQ ID NO: 461181 - DNA, 55 bp, Artificial
  Synthetic oligonucleotide
tcgagaggggagcacgactgtggaacgggtgaggatcgacgcgacggactattcc

SEQ ID NO: 461182 - DNA, 56 bp, Artificial
  Synthetic oligonucleotide
tcgagaggtaatcgccgttcctaacccagcgaagttgttgattcgtatgggtagga

SEQ ID NO: 461183 - DNA, 60 bp, Artificial
  Synthetic oligonucleotide
tcgagagtgttacgttccgcagcaccaaactcgccacagcccaccgacttggcatgaagt

SEQ ID NO: 461184 - DNA, 59 bp, Artificial
  Synthetic oligonucleotide
tcgagatactcaaagcacgccaccactccattcccgaagtgtacattgagggttacctg

SEQ ID NO: 461185 - DNA, 60 bp, Artificial
  Synthetic oligonucleotide
tcgagatagcggactattgcattcgtcaagaggatggaatgttcacagattggttcttgc

SEQ ID NO: 461186 - DNA, 57 bp, Artificial
  Synthetic oligonucleotide
tcgagatcacgagccacataacggaagggttgaacacccgccaggaaacgtgggcca

SEQ ID NO: 461187 - DNA, 55 bp, Artificial
  Synthetic oligonucleotide
tcgagatcgcgaaagattttgaaccaacggattagctctgcgttcgtatgggtgc

SEQ ID NO: 461188 - DNA, 58 bp, Artificial
  Synthetic oligonucleotide
tcgagatgcgaaaatggaggctatttaaacctgatgggtttgtgatttccgaaatcac

SEQ ID NO: 461189 - DNA, 58 bp, Artificial
  Synthetic oligonucleotide
tcgagatgctacgtggacgagggcatgcccaagacacaccttaaccctggcgggggtc

SEQ ID NO: 461190 - DNA, 60 bp, Artificial
  Synthetic oligonucleotide
tcgagatggagggataatattgccagattgcgtgctagcgcccagcatcaattaatcgct

SEQ ID NO: 461191 - DNA, 60 bp, Artificial
  Synthetic oligonucleotide
tcgagatgtccacacaaatagttgtgtggacctagtgacctggcccacattgtcttgcct

SEQ ID NO: 461192 - DNA, 60 bp, Artificial
  Synthetic oligonucleotide
tcgagattattcgctcaagactgcaccgtgcgttggtcaacgactctgcctcggcgattt

SEQ ID NO: 461193 - DNA, 52 bp, Artificial
  Synthetic oligonucleotide
tcgagattctgaagaaggacaatttctgattgcatcctattataacagtttt

SEQ ID NO: 461194 - DNA, 60 bp, Artificial
  Synthetic oligonucleotide
tcgagcacaggctcacggctgcgtgcaatttcactcgtggggatcgttgcaacttggagg

SEQ ID NO: 461195 - DNA, 60 bp, Artificial
  Synthetic oligonucleotide
tcgagcacattgcaagtatgagaaggaactacttcacagcagaagtgtcccactgtcggg

SEQ ID NO: 461196 - DNA, 60 bp, Artificial
  Synthetic oligonucleotide
tcgagcacattgcgagtatgagaaggaattacttcacagcagaagtgtcacactgccggg

SEQ ID NO: 461197 - DNA, 52 bp, Artificial
  Synthetic oligonucleotide
tcgagcagcagtttctgtgaattcactgtcgtcaaagcggagtataaagtac

SEQ ID NO: 461198 - DNA, 59 bp, Artificial
  Synthetic oligonucleotide
tcgagcaggggttactctacatgccgcaggagcttacggtgtccgatagcgtcctaatt

SEQ ID NO: 461199 - DNA, 60 bp, Artificial
  Synthetic oligonucleotide
tcgagcagtagatattaataccatctttactctcaatttcacatggtgcatacctagtgc

SEQ ID NO: 461200 - DNA, 60 bp, Artificial
  Synthetic oligonucleotide
tcgagcagtctggttttggtgggactgatcattgccatgggtctttggatgtgcttgaat

SEQ ID NO: 461201 - DNA, 60 bp, Artificial
  Synthetic oligonucleotide
tcgagcatacactacgttctagctcagcggtcagagagttttttttgtgccgtcctagtg

SEQ ID NO: 461202 - DNA, 57 bp, Artificial
  Synthetic oligonucleotide
tcgagcatagagatcacacgcccaaagtactcagctcaagccatcattaactcaggt

SEQ ID NO: 461203 - DNA, 55 bp, Artificial
  Synthetic oligonucleotide
tcgagcatcatgccacagtaggcctaacgttgcgtatcgagtctgcggtttgcga

SEQ ID NO: 461204 - DNA, 58 bp, Artificial
  Synthetic oligonucleotide
tcgagcatctttgctacgggtaccatacttcgtgagggcccacgccctactacgagtg

SEQ ID NO: 461205 - DNA, 60 bp, Artificial
  Synthetic oligonucleotide
tcgagccactattcgcactcgctctggtgcacagatagggtcgcaagtccatttttacag

SEQ ID NO: 461206 - DNA, 60 bp, Artificial
  Synthetic oligonucleotide
tcgagccagcgatgatgacaagaatgaagaagttaggctatattggtgaagaacccctta

SEQ ID NO: 461207 - DNA, 60 bp, Artificial
  Synthetic oligonucleotide
tcgagccagggcaagaaacagccgtccctcactcctatttcatccacttccgctcattgg

SEQ ID NO: 461208 - DNA, 57 bp, Artificial
  Synthetic oligonucleotide
tcgagccattacagttctgacatgtatgtttaaacaattcaggattggtatgacata

SEQ ID NO: 461209 - DNA, 60 bp, Artificial
  Synthetic oligonucleotide
tcgagcccaaggatgctgcccgatacccattagacacgatctgcagcgccattcccccaa

SEQ ID NO: 461210 - DNA, 55 bp, Artificial
  Synthetic oligonucleotide
tcgagcccactgcaggagcacaaatcgctgctcccactgccggacaagtcaaccc

SEQ ID NO: 461211 - DNA, 55 bp, Artificial
  Synthetic oligonucleotide
tcgagcccacttgccgtgtcacaatctggtttaacgctgaacacaggtgatggcc

SEQ ID NO: 461212 - DNA, 59 bp, Artificial
  Synthetic oligonucleotide
tcgagccgacagcgtacgcgttacgctgtccggataggccatgccaaatccaaagccgt

SEQ ID NO: 461213 - DNA, 55 bp, Artificial
  Synthetic oligonucleotide
tcgagccgactcgaccacttgctgaaaacgtacataagcagttgtcgcaggcacc

SEQ ID NO: 461214 - DNA, 55 bp, Artificial
  Synthetic oligonucleotide
tcgagccgtggtcccgaacgtctggattcgaaccgccgcctatttgtgaggcgtg

SEQ ID NO: 461215 - DNA, 58 bp, Artificial
  Synthetic oligonucleotide
tcgagcctcccgactaacggctactgttgagctcgttgctagtccggaccgcttagag

SEQ ID NO: 461216 - DNA, 52 bp, Artificial
  Synthetic oligonucleotide
tcgagcctcgcccaaagtagacatagccgtggacaaatggacagcacagcga

SEQ ID NO: 461217 - DNA, 60 bp, Artificial
  Synthetic oligonucleotide
tcgagcctggtgagttttcatacatacgatttgtggatccactaaccggtgctcaaattg

SEQ ID NO: 461218 - DNA, 56 bp, Artificial
  Synthetic oligonucleotide
tcgagcgaggccgcacgaatactaaagccaacacttccgtgatagctcgatatctg

SEQ ID NO: 461219 - DNA, 59 bp, Artificial
  Synthetic oligonucleotide
tcgagcgataccgtcaaggttgctgctgacaacgtggtcggtctgttcaaccaccgttc

SEQ ID NO: 461220 - DNA, 60 bp, Artificial
  Synthetic oligonucleotide
tcgagcgatggttcgagactcggatcacatctggccagcaaggatatgcaccacttgatg

SEQ ID NO: 461221 - DNA, 60 bp, Artificial
  Synthetic oligonucleotide
tcgagcgcatcacatcaaagatttcgctggtcaaaccattggtgacctctacccacaatt

SEQ ID NO: 461222 - DNA, 60 bp, Artificial
  Synthetic oligonucleotide
tcgagcgctctcccttttgggaaggatgaggtcaagtcgagtgtgagcactcacttcact

SEQ ID NO: 461223 - DNA, 60 bp, Artificial
  Synthetic oligonucleotide
tcgagcgggtggattccatatgttgaaagagtgtgtgagcgttcggagattaaaaggaga

SEQ ID NO: 461224 - DNA, 55 bp, Artificial
  Synthetic oligonucleotide
tcgagcgtgttcttgcaatacccctacacgaaaatcacccgcctcctctgcgagc

SEQ ID NO: 461225 - DNA, 59 bp, Artificial
  Synthetic oligonucleotide
tcgagctcgaattagaattaggctcatggttatactaaaggagtttttcatgagtttga

SEQ ID NO: 461226 - DNA, 60 bp, Artificial
  Synthetic oligonucleotide
tcgagctgcaaagctccaggactgcacaatgctcgtgaacggagacgaccttgtcgttat

SEQ ID NO: 461227 - DNA, 60 bp, Artificial
  Synthetic oligonucleotide
tcgagctgcggcgaaccagggagtgaaagctgcgggcgagagctttagcctggactgtcc

SEQ ID NO: 461228 - DNA, 60 bp, Artificial
  Synthetic oligonucleotide
tcgagctgctgtgtgcacccggggggttgctaaggcagtggacttcatacccgttgaaca

SEQ ID NO: 461229 - DNA, 55 bp, Artificial
  Synthetic oligonucleotide
tcgagcttatcgccatgccacaagacatccgggaaactattcctgaaattgaccc

SEQ ID NO: 461230 - DNA, 55 bp, Artificial
  Synthetic oligonucleotide
tcgagcttcagccttacactgactcggcgctcttccaattctcaggggtctctcc

SEQ ID NO: 461231 - DNA, 58 bp, Artificial
  Synthetic oligonucleotide
tcgaggaaatcttgcaacattcgtgcgacgctcttaatttcaccgtagttatagacta

SEQ ID NO: 461232 - DNA, 60 bp, Artificial
  Synthetic oligonucleotide
tcgaggaacatcacttctccaaaaggcattcgccgggacagaagatgaattctgggtgga

SEQ ID NO: 461233 - DNA, 52 bp, Artificial
  Synthetic oligonucleotide
tcgaggaataacgcacgcaaacaatttcaagcagggtttagttaggggattc

SEQ ID NO: 461234 - DNA, 59 bp, Artificial
  Synthetic oligonucleotide
tcgaggaatgcggagtagtggcagcgattttgtgtcaagccatgtatccatgtggccga

SEQ ID NO: 461235 - DNA, 54 bp, Artificial
  Synthetic oligonucleotide
tcgaggacatgggtctggacccgtccaagtacgtgctctggtatgacgcttcgc

SEQ ID NO: 461236 - DNA, 60 bp, Artificial
  Synthetic oligonucleotide
tcgaggacttacgcggatatgcatggctagcaacattgggaggtgattggcccagaacat

SEQ ID NO: 461237 - DNA, 60 bp, Artificial
  Synthetic oligonucleotide
tcgaggagagcgctgtaacttggaggacagggatagatcagaactcagcccgctgctact

SEQ ID NO: 461238 - DNA, 60 bp, Artificial
  Synthetic oligonucleotide
tcgaggagattcagactccctacgcgcgcgccaatctccacgacgctgactaatgccccc

SEQ ID NO: 461239 - DNA, 59 bp, Artificial
  Synthetic oligonucleotide
tcgaggagcagccattaccagtcgtcaacacccattcgtttaggaagtcgccactcgcc

SEQ ID NO: 461240 - DNA, 59 bp, Artificial
  Synthetic oligonucleotide
tcgaggaggatacgtctggattcggcaaccaagatccaatggttacgggtacatgtcaa

SEQ ID NO: 461241 - DNA, 55 bp, Artificial
  Synthetic oligonucleotide
tcgaggaggtcgatttgtaaagcccattgatgaacccaaaatgtcagcccaatcc

SEQ ID NO: 461242 - DNA, 60 bp, Artificial
  Synthetic oligonucleotide
tcgaggaggttaatgtcgctaatggcagtgttgtatctaacagagaaacttgcaatccaa

SEQ ID NO: 461243 - DNA, 55 bp, Artificial
  Synthetic oligonucleotide
tcgaggagtcagtgcacgatccggtgcccggcggtgtcagtgtcgccgatctaat

SEQ ID NO: 461244 - DNA, 58 bp, Artificial
  Synthetic oligonucleotide
tcgaggatcctagagaacgacccagaacgctacatgagctatgtgaaagcttgaatac

SEQ ID NO: 461245 - DNA, 56 bp, Artificial
  Synthetic oligonucleotide
tcgaggatttggcagtgggcgccaagcagatccggaaatttggagagagcctagac

SEQ ID NO: 461246 - DNA, 60 bp, Artificial
  Synthetic oligonucleotide
tcgaggcaagaattcagcgaagaccagttcttatgctacaaatcagagggcagttctggc

SEQ ID NO: 461247 - DNA, 55 bp, Artificial
  Synthetic oligonucleotide
tcgaggcaataatagatcgtatttatacaactataacgctaatgatgagggaccg

SEQ ID NO: 461248 - DNA, 58 bp, Artificial
  Synthetic oligonucleotide
tcgaggccacaagtgtagcagtgctcaggagggttaaaggacctgcattcataggctg

SEQ ID NO: 461249 - DNA, 59 bp, Artificial
  Synthetic oligonucleotide
tcgaggcgaaagaacttcgtttgtcgatataattaatgagttgagtgagcgaggctacg

SEQ ID NO: 461250 - DNA, 60 bp, Artificial
  Synthetic oligonucleotide
tcgaggcggttgggccatacacgttcagtgcaatgctaccaaatttcaccaaggcactct

SEQ ID NO: 461251 - DNA, 60 bp, Artificial
  Synthetic oligonucleotide
tcgaggcgttagcagaccgaactcagcagtttaagagggataaacttgaagcatgggcga

SEQ ID NO: 461252 - DNA, 55 bp, Artificial
  Synthetic oligonucleotide
tcgaggctacagtccgatggcagtggtgttgccgtctcgaacctagccgttacac

SEQ ID NO: 461253 - DNA, 60 bp, Artificial
  Synthetic oligonucleotide
tcgaggctgtggaactactgggagtagacagtgaaggaaaagtccgccagctatcaagta

SEQ ID NO: 461254 - DNA, 56 bp, Artificial
  Synthetic oligonucleotide
tcgagggaatctggacgagtgacgggcgccgagaaaccagaggctccgatacaccc

SEQ ID NO: 461255 - DNA, 55 bp, Artificial
  Synthetic oligonucleotide
tcgagggctggaattgacaaatgcagctgagcgctacgaggctatctatcccagg

SEQ ID NO: 461256 - DNA, 53 bp, Artificial
  Synthetic oligonucleotide
tcgagggtaggtatcatctttaaggctaccggccagctgtctggcacgccaaa

SEQ ID NO: 461257 - DNA, 56 bp, Artificial
  Synthetic oligonucleotide
tcgagggtcaggaggaattgataaggagtcaacgggtttcacctatagcggaataa

SEQ ID NO: 461258 - DNA, 60 bp, Artificial
  Synthetic oligonucleotide
tcgagggtgtctccgtcttctccagataggacttgacgtccgagcttgatttagctccat

SEQ ID NO: 461259 - DNA, 56 bp, Artificial
  Synthetic oligonucleotide
tcgaggtcactgcaggattggggttctctgcggaggaacggtattcaaacggtttc

SEQ ID NO: 461260 - DNA, 53 bp, Artificial
  Synthetic oligonucleotide
tcgaggtcaggttcacctttacgctcgtggtttcgagaacctggggtttcagg

SEQ ID NO: 461261 - DNA, 59 bp, Artificial
  Synthetic oligonucleotide
tcgaggtgacttgtaatcgcaatgcaccgactttttcccaaacaccgatcgatcaccaa

SEQ ID NO: 461262 - DNA, 54 bp, Artificial
  Synthetic oligonucleotide
tcgaggtggcctaagggattggaacccctgatggtcgtagtcgaatttcccgtg

SEQ ID NO: 461263 - DNA, 52 bp, Artificial
  Synthetic oligonucleotide
tcgaggttaaggacggtgtctacaggatttttagccccggcttgttctgggg

SEQ ID NO: 461264 - DNA, 60 bp, Artificial
  Synthetic oligonucleotide
tcgaggttatcactcatccaccaatgagagacggggcgacaactgcgcatgctcttgacg

SEQ ID NO: 461265 - DNA, 58 bp, Artificial
  Synthetic oligonucleotide
tcgaggttattttaagatgcgcactgggaaaagctcgataatgagatcagatgcacct

SEQ ID NO: 461266 - DNA, 60 bp, Artificial
  Synthetic oligonucleotide
tcgaggtttgaatctgttgcttggtcagcaagtgcttgtcatgatggcattagttggttg

SEQ ID NO: 461267 - DNA, 60 bp, Artificial
  Synthetic oligonucleotide
tcgagtacatccaccttggcgtactacaagtaaggctgcaaattatgcacagaacctatg

SEQ ID NO: 461268 - DNA, 55 bp, Artificial
  Synthetic oligonucleotide
tcgagtacggggaaatgtctacccaaggtaaacgaacagatctacaggtagctca

SEQ ID NO: 461269 - DNA, 55 bp, Artificial
  Synthetic oligonucleotide
tcgagtaggaacgaaacatgcaatactactagttgcagtttctttcctaacgtta

SEQ ID NO: 461270 - DNA, 60 bp, Artificial
  Synthetic oligonucleotide
tcgagtattgtgtacgagacggccgataccattctgcactctccggggtgcgtcccttgc

SEQ ID NO: 461271 - DNA, 60 bp, Artificial
  Synthetic oligonucleotide
tcgagtcaaaccgctcaatcgtcgacgacttcaagtaccaaatctactagtgatcaagca

SEQ ID NO: 461272 - DNA, 59 bp, Artificial
  Synthetic oligonucleotide
tcgagtcaagaactaagccattcactgtccctatcttaactgttgaggaaatgtccaat

SEQ ID NO: 461273 - DNA, 60 bp, Artificial
  Synthetic oligonucleotide
tcgagtcagctcacgagggggtcgtgccagagacctcagcttatgaccacgttcctttaa

SEQ ID NO: 461274 - DNA, 55 bp, Artificial
  Synthetic oligonucleotide
tcgagtcattcctagtccacaagatggtggatgatctagagcttcaaagaggaac

SEQ ID NO: 461275 - DNA, 51 bp, Artificial
  Synthetic oligonucleotide
tcgagtcggctggacacgcgttactagttccattcctagtaaagcggatcc

SEQ ID NO: 461276 - DNA, 59 bp, Artificial
  Synthetic oligonucleotide
tcgagtcgtggggctacgacaggctaactcacgagatacgcaagttttatgcgtgggta

SEQ ID NO: 461277 - DNA, 50 bp, Artificial
  Synthetic oligonucleotide
tcgagtctcgcgcctccagggccttagtcgtgccaaccgacgaaattcta

SEQ ID NO: 461278 - DNA, 60 bp, Artificial
  Synthetic oligonucleotide
tcgagtcttctcgcgccagtgcacaactccaagcatgaccccacgcttctgcccgcgtcc

SEQ ID NO: 461279 - DNA, 56 bp, Artificial
  Synthetic oligonucleotide
tcgagtctttaaacctgcacgaccgagtataaagaaccgctttgtggagacgcgcg

SEQ ID NO: 461280 - DNA, 50 bp, Artificial
  Synthetic oligonucleotide
tcgagtgagattgcaacacgtatagagcattcactagctgatggcataaa

SEQ ID NO: 461281 - DNA, 53 bp, Artificial
  Synthetic oligonucleotide
tcgagtgcaaactcacacagtcagtggctcctaaggctactcacatggccact

SEQ ID NO: 461282 - DNA, 55 bp, Artificial
  Synthetic oligonucleotide
tcgagtgcccagtacctcagggactcgacggggatacctactaggcgggctatgc

SEQ ID NO: 461283 - DNA, 59 bp, Artificial
  Synthetic oligonucleotide
tcgagtgccgtacggtgcttgggaataagaccttccgcacatcaataactgacggtgcc

SEQ ID NO: 461284 - DNA, 55 bp, Artificial
  Synthetic oligonucleotide
tcgagtgggcctcgcactttacgcgcacacgcccctctcgcgcaccacacaccac

SEQ ID NO: 461285 - DNA, 59 bp, Artificial
  Synthetic oligonucleotide
tcgagtggtgatcacgagagatttttaagatcgaggtgaagccccacagttagtattct

SEQ ID NO: 461286 - DNA, 58 bp, Artificial
  Synthetic oligonucleotide
tcgagtgtatcaacaattgagcgccgtaactctgcttaacttgacggggtttggtcca

SEQ ID NO: 461287 - DNA, 60 bp, Artificial
  Synthetic oligonucleotide
tcgagtgtgtgtgcagagacaactggagagggagtaatagaccatggataagattcaaca

SEQ ID NO: 461288 - DNA, 59 bp, Artificial
  Synthetic oligonucleotide
tcgagtgttaagaacgaggctcaaaatacccgagtcgattttgccttcagacgcataga

SEQ ID NO: 461289 - DNA, 55 bp, Artificial
  Synthetic oligonucleotide
tcgagttcaatatacttcagaaggaagaatctctcttactctaagagttcaaaaa

SEQ ID NO: 461290 - DNA, 59 bp, Artificial
  Synthetic oligonucleotide
tcgagttcatctcactgttttgcggctgcccatcgtctactagaaaccgattttgttta

SEQ ID NO: 461291 - DNA, 51 bp, Artificial
  Synthetic oligonucleotide
tcgagttccgagatgcccatgccaagaaacaagaggtggtcgtcttaggct

SEQ ID NO: 461292 - DNA, 60 bp, Artificial
  Synthetic oligonucleotide
tcgagttctctgagtctccatacagtgtgggtggcccacgtgatattcgagcctcttgga

SEQ ID NO: 461293 - DNA, 50 bp, Artificial
  Synthetic oligonucleotide
tcgagttgaagaagctgtgggagcagacctgttcaaaggcaggactgtta

SEQ ID NO: 461294 - DNA, 60 bp, Artificial
  Synthetic oligonucleotide
tcgagttgcgcgcccattgcttgctgcacgatctagattagtaagagcagttcagatgga

SEQ ID NO: 461295 - DNA, 60 bp, Artificial
  Synthetic oligonucleotide
tcgagttggattgaacttgatgaaataggagaggacgttgctccaattgagcacattgca

SEQ ID NO: 461296 - DNA, 55 bp, Artificial
  Synthetic oligonucleotide
tcgagtttagggggtggaccgctcactcggtctaatgtcaagttcggagggtgga

SEQ ID NO: 461297 - DNA, 53 bp, Artificial
  Synthetic oligonucleotide
tcgagtttcggttttcctgatgaagacggaacttcgtacgaatttaaatcgcc

SEQ ID NO: 461298 - DNA, 60 bp, Artificial
  Synthetic oligonucleotide
tcgagtttgaattataaagagagcggccactttctttagtggcagccatgtgggatccat

SEQ ID NO: 461299 - DNA, 54 bp, Artificial
  Synthetic oligonucleotide
tcgagttttcgagcagcacacttaaactcacttcaggacaccttaagtgtcgcg

SEQ ID NO: 461300 - DNA, 52 bp, Artificial
  Synthetic oligonucleotide
tcgagttttgtcaaactcagccagtctatgtcgatggaaagtggattatggt

SEQ ID NO: 461301 - DNA, 51 bp, Artificial
  Synthetic oligonucleotide
tcgataaggataccgacttcgccagtagagccgccccacgggttggggcca

SEQ ID NO: 461302 - DNA, 55 bp, Artificial
  Synthetic oligonucleotide
tcgatacaacgtgatagtagtttcagtccttcaattagcaccatcctcggctctc

SEQ ID NO: 461303 - DNA, 60 bp, Artificial
  Synthetic oligonucleotide
tcgatacatatatcgagtgcacaaaaaattcccgcgcagccaatgaaatcgttatgaacg

SEQ ID NO: 461304 - DNA, 60 bp, Artificial
  Synthetic oligonucleotide
tcgataccaattacagcagcagcatggtacctgtgggaagtgaagaaacaacgggctgga

SEQ ID NO: 461305 - DNA, 59 bp, Artificial
  Synthetic oligonucleotide
tcgatacgtggtacaaaaccggcgggagcgtgatggtgtcctctcgtcctgaacgtgca

SEQ ID NO: 461306 - DNA, 60 bp, Artificial
  Synthetic oligonucleotide
tcgatagcatagccgctctccattagtatgatcgatcgactgttggaagtgagagacccg

SEQ ID NO: 461307 - DNA, 54 bp, Artificial
  Synthetic oligonucleotide
tcgatagctatgacttcagttgcgagcgttcgtatacgtgccgtttgttcacta

SEQ ID NO: 461308 - DNA, 56 bp, Artificial
  Synthetic oligonucleotide
tcgatagttgatctaggtccgtataacagtcaacggaccttcacgacagtttttag

SEQ ID NO: 461309 - DNA, 50 bp, Artificial
  Synthetic oligonucleotide
tcgatagtttgaattacatcgtacagtacatgtctgatagctctaattac

SEQ ID NO: 461310 - DNA, 50 bp, Artificial
  Synthetic oligonucleotide
tcgatatctcctacgtctgtatgccatgactcaccgtctacaaatgcgag

SEQ ID NO: 461311 - DNA, 60 bp, Artificial
  Synthetic oligonucleotide
tcgatatggagatagaacgagcagccgcattcgaggtctacccgcctacgtcggagtgcc

SEQ ID NO: 461312 - DNA, 59 bp, Artificial
  Synthetic oligonucleotide
tcgatattaccactactaacatatacatgtatgtcaataggaacagctattatgacagg

SEQ ID NO: 461313 - DNA, 58 bp, Artificial
  Synthetic oligonucleotide
tcgatattgcttgtcgaaaatggaaatagcatcctttgatttttacattcgggaacac

SEQ ID NO: 461314 - DNA, 55 bp, Artificial
  Synthetic oligonucleotide
tcgatattgtagatggttttgacagacgtgacatacggttcaaatcgtttaccat

SEQ ID NO: 461315 - DNA, 55 bp, Artificial
  Synthetic oligonucleotide
tcgatcaaacgagatgatgggaaacgtcgtcatttctactctaataaggcccatg

SEQ ID NO: 461316 - DNA, 55 bp, Artificial
  Synthetic oligonucleotide
tcgatcacctctaaagggtccagggtaccttcttgacgtagtgcgattttacact

SEQ ID NO: 461317 - DNA, 56 bp, Artificial
  Synthetic oligonucleotide
tcgatcacgtttcctcacgcatgaagtcttcgacttaacgtccgatttacccggag

SEQ ID NO: 461318 - DNA, 57 bp, Artificial
  Synthetic oligonucleotide
tcgatcagctaaagaatttgctatgttacaagacgatttaacagtattaagatacgc

SEQ ID NO: 461319 - DNA, 58 bp, Artificial
  Synthetic oligonucleotide
tcgatcatttccgtaggctagcctgaaaaccgacgaaaggagatccgcgtgagcgaag

SEQ ID NO: 461320 - DNA, 57 bp, Artificial
  Synthetic oligonucleotide
tcgatccaatgttctccgacgccgttgctaatctcccctccaatgcactggcctcac

SEQ ID NO: 461321 - DNA, 60 bp, Artificial
  Synthetic oligonucleotide
tcgatccagactcagttctggcggccattagtgttggaactttgcgccagcacattggtt

SEQ ID NO: 461322 - DNA, 60 bp, Artificial
  Synthetic oligonucleotide
tcgatcccataatcgatagtcgtgattttcacgcagagatcttacaagatttctaggcgc

SEQ ID NO: 461323 - DNA, 54 bp, Artificial
  Synthetic oligonucleotide
tcgatcccggaatttgggtaaggtcatcgataccctaacgtgtgggttcgccga

SEQ ID NO: 461324 - DNA, 54 bp, Artificial
  Synthetic oligonucleotide
tcgatccctcagtctccccctaagaaaagcgttatcacactgcgacgtgctgac

SEQ ID NO: 461325 - DNA, 60 bp, Artificial
  Synthetic oligonucleotide
tcgatccctggacgcccgtgtcaaggcgacggccgatgaattgaacgctactgcctccca

SEQ ID NO: 461326 - DNA, 54 bp, Artificial
  Synthetic oligonucleotide
tcgatcccttccctccccccaagcgtcgcccaggaatggcgggaccccactcca

SEQ ID NO: 461327 - DNA, 58 bp, Artificial
  Synthetic oligonucleotide
tcgatccgaataaattggctcagtttccaggatacatatccgaaggtgaaatgggtta

SEQ ID NO: 461328 - DNA, 60 bp, Artificial
  Synthetic oligonucleotide
tcgatccgatttcaagaggcgatcgacaataagttccgacaacatgatcctgagcgcctg

SEQ ID NO: 461329 - DNA, 55 bp, Artificial
  Synthetic oligonucleotide
tcgatccggtctggcatcacttggctcatcaccctgatcctgggcgggctcttgg

SEQ ID NO: 461330 - DNA, 55 bp, Artificial
  Synthetic oligonucleotide
tcgatcctgaagatttctctgcagttcgtttcgtagatccactcacagagcgaac

SEQ ID NO: 461331 - DNA, 60 bp, Artificial
  Synthetic oligonucleotide
tcgatcctgctgaagggaaccgcactgtcattgtgacttcgaaaccagtatctaatggta

SEQ ID NO: 461332 - DNA, 56 bp, Artificial
  Synthetic oligonucleotide
tcgatcgaagaattacaccgcagttaccgggaataacgtttactgatgtaagtgtc

SEQ ID NO: 461333 - DNA, 51 bp, Artificial
  Synthetic oligonucleotide
tcgatcgagacggttggggggtccaaatttgaactcaacccgaaccccaat

SEQ ID NO: 461334 - DNA, 59 bp, Artificial
  Synthetic oligonucleotide
tcgatcgcctacgatcgtcaccccgtcaagctctatctcgacgcttacgtctcggtacg

SEQ ID NO: 461335 - DNA, 57 bp, Artificial
  Synthetic oligonucleotide
tcgatcgcgtatgcgggaaagattatttgaacggtcggcggcgattgacactggccc

SEQ ID NO: 461336 - DNA, 56 bp, Artificial
  Synthetic oligonucleotide
tcgatcgcgtttcctgacgcacgaggtttttgatctgacgtccgacttacccggag

SEQ ID NO: 461337 - DNA, 55 bp, Artificial
  Synthetic oligonucleotide
tcgatcgctccagcctctcttcatggcatgtcctgtacgacccactcaaagcccc

SEQ ID NO: 461338 - DNA, 58 bp, Artificial
  Synthetic oligonucleotide
tcgatcgctcctacaaggggcgaacttataaggtctccacaagaggcctgtcctggaa

SEQ ID NO: 461339 - DNA, 59 bp, Artificial
  Synthetic oligonucleotide
tcgatcggacgtatgcaagcatgatcacgcatctgcttacaaagcccacacagcatcgc

SEQ ID NO: 461340 - DNA, 55 bp, Artificial
  Synthetic oligonucleotide
tcgatcggggaagtcctcaccttggctcaggctaagacagccgaggcctacgcag

SEQ ID NO: 461341 - DNA, 55 bp, Artificial
  Synthetic oligonucleotide
tcgatcgtcggggcagagttattcagatggtttcaaacccagctcaaatcggtgc

SEQ ID NO: 461342 - DNA, 55 bp, Artificial
  Synthetic oligonucleotide
tcgatcgtgggcttctgacaactctgatgataaaacaatgtaatgctcttctcgc

SEQ ID NO: 461343 - DNA, 60 bp, Artificial
  Synthetic oligonucleotide
tcgatctagtgacatggtggatgggattaagttacagttagacgcgtctaggcaatgtca

SEQ ID NO: 461344 - DNA, 58 bp, Artificial
  Synthetic oligonucleotide
tcgatctcagtcgcactgcattcgaacccgtttacccaggcgaaactttcgagaacat

SEQ ID NO: 461345 - DNA, 60 bp, Artificial
  Synthetic oligonucleotide
tcgatctcagttaatttcggtacgttatgccatagatccacatgttgcatacgtcccaca

SEQ ID NO: 461346 - DNA, 50 bp, Artificial
  Synthetic oligonucleotide
tcgatctcgagacaaacaaagaaccctctagcgtttcctttgacgttaaa

SEQ ID NO: 461347 - DNA, 60 bp, Artificial
  Synthetic oligonucleotide
tcgatcttacatgacacgtggaacggtttcacggaagagacacatcccaaaatgcctatc

SEQ ID NO: 461348 - DNA, 60 bp, Artificial
  Synthetic oligonucleotide
tcgatcttgacacaagagctaaactgccgagtcggggtgcgaacacctgcgagaatcgga

SEQ ID NO: 461349 - DNA, 57 bp, Artificial
  Synthetic oligonucleotide
tcgatgaaacatgatttatgtagagatatgtacctgataataactgaaattggatat

SEQ ID NO: 461350 - DNA, 60 bp, Artificial
  Synthetic oligonucleotide
tcgatgaatagatgtcgacgcaaaaggacgtctgggcgttgaacccgaatatgatcgcta

SEQ ID NO: 461351 - DNA, 60 bp, Artificial
  Synthetic oligonucleotide
tcgatgaattttggacattaatcatggacgttaataccaccaatggcaacttcatagccg

SEQ ID NO: 461352 - DNA, 60 bp, Artificial
  Synthetic oligonucleotide
tcgatgacagtggcataggagaagatgaagctcaaaatacttctcaggtagcgttggact

SEQ ID NO: 461353 - DNA, 60 bp, Artificial
  Synthetic oligonucleotide
tcgatgacattgtttaccttcatgactattcatattatactaacaatgagataaggactg

SEQ ID NO: 461354 - DNA, 55 bp, Artificial
  Synthetic oligonucleotide
tcgatgagaaggaaaaccgtgatgttattgtgactgcttcggatttcaaacgtaa

SEQ ID NO: 461355 - DNA, 60 bp, Artificial
  Synthetic oligonucleotide
tcgatgagagaaacatatcgttggaccacactttaagctcaggtgtggtcgtccgtaggc

SEQ ID NO: 461356 - DNA, 59 bp, Artificial
  Synthetic oligonucleotide
tcgatgagagattcacccaaactactggtcagagtgcatttgtcatgaactacactgag

SEQ ID NO: 461357 - DNA, 55 bp, Artificial
  Synthetic oligonucleotide
tcgatgagctttgtactggagtggtctcgacttcaactttaagaggggacaatcc

SEQ ID NO: 461358 - DNA, 59 bp, Artificial
  Synthetic oligonucleotide
tcgatgaggtccattctcgattgctaccagtgtccgacaccaagtatgaaatatatcgt

SEQ ID NO: 461359 - DNA, 53 bp, Artificial
  Synthetic oligonucleotide
tcgatgaggtgcctttgaaccctttatcccggggttcttcggaaggtgagact

SEQ ID NO: 461360 - DNA, 55 bp, Artificial
  Synthetic oligonucleotide
tcgatgagtgcaggtggatattgcatttaataaggtccacccgaagtcgggacag

SEQ ID NO: 461361 - DNA, 60 bp, Artificial
  Synthetic oligonucleotide
tcgatgagtgctttttgacgcatgctggttgcgtgtatgcagccgcaactttggctcagg

SEQ ID NO: 461362 - DNA, 51 bp, Artificial
  Synthetic oligonucleotide
tcgatgatatctctcacgatatcatccttggattgcttagtggtgttcccc

SEQ ID NO: 461363 - DNA, 60 bp, Artificial
  Synthetic oligonucleotide
tcgatgcaaaagctggacagaccatagcgtgcttcgcgcattcggtattgtgcaaattcg

SEQ ID NO: 461364 - DNA, 55 bp, Artificial
  Synthetic oligonucleotide
tcgatgcagttgatatcgagatagtatgtgcagccacagtctaggtcgacacgcc

SEQ ID NO: 461365 - DNA, 56 bp, Artificial
  Synthetic oligonucleotide
tcgatgcgaggaaaggatgagggtcctggacagtgaccagcaagatcggaccttca

SEQ ID NO: 461366 - DNA, 58 bp, Artificial
  Synthetic oligonucleotide
tcgatgcggcacctgtgccccctgtccctaagactgttggattgcctagccccattgt

SEQ ID NO: 461367 - DNA, 60 bp, Artificial
  Synthetic oligonucleotide
tcgatgctacgttgattcagcaaattactaccactctggtggtttggacggagcttatga

SEQ ID NO: 461368 - DNA, 60 bp, Artificial
  Synthetic oligonucleotide
tcgatgctccgatttgatgaccgatgtcgatcaacctggtggactttatggcgtcgtgtc

SEQ ID NO: 461369 - DNA, 60 bp, Artificial
  Synthetic oligonucleotide
tcgatgctctacggagcgcaattgaagttgagagggatggaatgcaggaggaggcaatac

SEQ ID NO: 461370 - DNA, 60 bp, Artificial
  Synthetic oligonucleotide
tcgatgctgcgtatgcctcccggttcgtgtaacggtgcaacagctatctttggtaacgtc

SEQ ID NO: 461371 - DNA, 60 bp, Artificial
  Synthetic oligonucleotide
tcgatgcttcgactccactgtcactgaacaggatatcagggtggaagaggaaatttacca

SEQ ID NO: 461372 - DNA, 60 bp, Artificial
  Synthetic oligonucleotide
tcgatggaaaggaatggatgcatgtttgcatgactgggaacgacaatgatgcaagtggcc

SEQ ID NO: 461373 - DNA, 60 bp, Artificial
  Synthetic oligonucleotide
tcgatggaagagactgcacactgatagatgctctcttgggggatcctcactgcgatgttt

SEQ ID NO: 461374 - DNA, 60 bp, Artificial
  Synthetic oligonucleotide
tcgatggaccaaagatgcgcgtaatactcaagatcacgtgcgatccctatgcctgttggc

SEQ ID NO: 461375 - DNA, 54 bp, Artificial
  Synthetic oligonucleotide
tcgatggaccgctccaaaacggcccgccctgaagtcaactgctctctcaaccgt

SEQ ID NO: 461376 - DNA, 59 bp, Artificial
  Synthetic oligonucleotide
tcgatggatcaggtctttacaccgccgcgttctatacgggcagatcaataccaggcccc

SEQ ID NO: 461377 - DNA, 58 bp, Artificial
  Synthetic oligonucleotide
tcgatggatttatgctccgatcttcgacacccgttataaaataatggaaaccgagata

SEQ ID NO: 461378 - DNA, 60 bp, Artificial
  Synthetic oligonucleotide
tcgatggcacattccacgaagtaacgatcaggtcagatactcacgatttacaggtctgga

SEQ ID NO: 461379 - DNA, 60 bp, Artificial
  Synthetic oligonucleotide
tcgatggctcttcgataagttacacggcaatcttaagggagtgagctcagcttctagcaa

SEQ ID NO: 461380 - DNA, 60 bp, Artificial
  Synthetic oligonucleotide
tcgatgggcctcatacaaatatgcagagaagattcgtgccatgttgccaccagacttttt

SEQ ID NO: 461381 - DNA, 60 bp, Artificial
  Synthetic oligonucleotide
tcgatggtcaactccagggcactacccctgtctcgctcagtcaactttgcaagattaggg

SEQ ID NO: 461382 - DNA, 60 bp, Artificial
  Synthetic oligonucleotide
tcgatggtcacaggaaaaccctctcgatcgcgtagttcagtgattcacgggtgacgccta

SEQ ID NO: 461383 - DNA, 58 bp, Artificial
  Synthetic oligonucleotide
tcgatggtggctagggttgctaaatttccagtatatttctggttggtgtacgacaaga

SEQ ID NO: 461384 - DNA, 52 bp, Artificial
  Synthetic oligonucleotide
tcgatgtaatctccgtcctttgcgacgtaggacttgacgtcggtactggatt

SEQ ID NO: 461385 - DNA, 60 bp, Artificial
  Synthetic oligonucleotide
tcgatgtaggacttgacgtcggacgatgatttagctccctgaatgttcggatggaaatgt

SEQ ID NO: 461386 - DNA, 50 bp, Artificial
  Synthetic oligonucleotide
tcgatgtcagtgccccgatgtccccggaggatataggccaaacctctgcg

SEQ ID NO: 461387 - DNA, 60 bp, Artificial
  Synthetic oligonucleotide
tcgatgtcgttcactttgaagatttaaccagccattggcacgcgttgggactagcacaag

SEQ ID NO: 461388 - DNA, 60 bp, Artificial
  Synthetic oligonucleotide
tcgatgtggctagagttccagacgatcaaatgtatagattaagggacagactacgactac

SEQ ID NO: 461389 - DNA, 60 bp, Artificial
  Synthetic oligonucleotide
tcgatgtgtacgtaaatagagcacccgcactctatatcaattcgtcgtctcctgattcct

SEQ ID NO: 461390 - DNA, 60 bp, Artificial
  Synthetic oligonucleotide
tcgatgtgttccagcacagaattccttggacaatggaactggcctgatggggctaaaata

SEQ ID NO: 461391 - DNA, 60 bp, Artificial
  Synthetic oligonucleotide
tcgatgttacatcttagtggaaatgtccaggaagcttgtaatgattcattgtcagtgatt

SEQ ID NO: 461392 - DNA, 60 bp, Artificial
  Synthetic oligonucleotide
tcgatgttccgaattaatgacggatgtgatcaacccactggactttatggcgttgtatcg

SEQ ID NO: 461393 - DNA, 55 bp, Artificial
  Synthetic oligonucleotide
tcgatgttcgtgatggtgctaggtataccgacagattcatgtctgttgctggatc

SEQ ID NO: 461394 - DNA, 54 bp, Artificial
  Synthetic oligonucleotide
tcgattaagaccgagtaaattaaatgtttcaaggaaactaggatacgatcgtgt

SEQ ID NO: 461395 - DNA, 56 bp, Artificial
  Synthetic oligonucleotide
tcgattacaagccggttgagaatgatggggaggttttacctcgtattttagatatg

SEQ ID NO: 461396 - DNA, 56 bp, Artificial
  Synthetic oligonucleotide
tcgattacacaccgcaaggtatccgcggttcgattgctcgctcgtgcgcttcattc

SEQ ID NO: 461397 - DNA, 60 bp, Artificial
  Synthetic oligonucleotide
tcgattacatccatgcccataatctcatggttttcgagtacaaatatatccagtcgttcg

SEQ ID NO: 461398 - DNA, 54 bp, Artificial
  Synthetic oligonucleotide
tcgattacccctgaagtcgggacaccggtccaaacggcgcttgtaggtgcgttc

SEQ ID NO: 461399 - DNA, 60 bp, Artificial
  Synthetic oligonucleotide
tcgattaccgactcacttcacaacctaaaatcagagatcgcttcgctgtttatgcccctg

SEQ ID NO: 461400 - DNA, 55 bp, Artificial
  Synthetic oligonucleotide
tcgattacgtgttcaaacgaagttccaacatcgccccacactcgatcaccggtac

SEQ ID NO: 461401 - DNA, 60 bp, Artificial
  Synthetic oligonucleotide
tcgattatgtcccagaggaaaagccaagcttcaagaccatagagacggaagtctctctca

SEQ ID NO: 461402 - DNA, 60 bp, Artificial
  Synthetic oligonucleotide
tcgattattgggctgatagagagtgctttaacccttgcttttatgtggaattgatcagag

SEQ ID NO: 461403 - DNA, 60 bp, Artificial
  Synthetic oligonucleotide
tcgattcagccatttgtgaatctgtactcgctgacgccaccgaaacaatgttggctaatg

SEQ ID NO: 461404 - DNA, 60 bp, Artificial
  Synthetic oligonucleotide
tcgattcgagataattgaaggaagagaccgaacaatggcctggacagtggtgaatagcat

SEQ ID NO: 461405 - DNA, 60 bp, Artificial
  Synthetic oligonucleotide
tcgattcggaccggctcatctcgacaagaggcggcgttcctcagtactctcaatcttctt

SEQ ID NO: 461406 - DNA, 55 bp, Artificial
  Synthetic oligonucleotide
tcgattcgtcgacccacttacaggtgtaactcttgacgagcaaataactgtggac

SEQ ID NO: 461407 - DNA, 57 bp, Artificial
  Synthetic oligonucleotide
tcgattctggtctggttatagggatcaacccgtggtggtttacgatgattgggcgaa

SEQ ID NO: 461408 - DNA, 51 bp, Artificial
  Synthetic oligonucleotide
tcgattcttcgttggagagccaggggcaagagaatttgtacctgggtgtgg

SEQ ID NO: 461409 - DNA, 60 bp, Artificial
  Synthetic oligonucleotide
tcgattcttctccagaggccatccagttgctgacacaatcatttcttcatcagtcggtct

SEQ ID NO: 461410 - DNA, 57 bp, Artificial
  Synthetic oligonucleotide
tcgattcttgtttgacctgaatcattctttcttgggtgcatgtctaagaggtaactt

SEQ ID NO: 461411 - DNA, 60 bp, Artificial
  Synthetic oligonucleotide
tcgattgacgagctgatcccgagcacgcggtattggatcactgcccaaggcgtccaacag

SEQ ID NO: 461412 - DNA, 54 bp, Artificial
  Synthetic oligonucleotide
tcgattgcaagacattctcgagagaggctacgacactttccgatcggttcttgg

SEQ ID NO: 461413 - DNA, 60 bp, Artificial
  Synthetic oligonucleotide
tcgattgcacgaactaatatagcagcattctgatatatcaactgtcggtgacagaggcta

SEQ ID NO: 461414 - DNA, 57 bp, Artificial
  Synthetic oligonucleotide
tcgattgccgaatcgtccaatccgctcaggtttttgtatggtctactggtaacggac

SEQ ID NO: 461415 - DNA, 60 bp, Artificial
  Synthetic oligonucleotide
tcgattggaagctatcacagcagcaatgatagagtcatggggatatgaggagttaacgca

SEQ ID NO: 461416 - DNA, 59 bp, Artificial
  Synthetic oligonucleotide
tcgattggccagtcgaggctatcgtacatgctgcaggattggttgcttgctgcgcaccg

SEQ ID NO: 461417 - DNA, 60 bp, Artificial
  Synthetic oligonucleotide
tcgattggccgaacagggcaattcgcgcacgattatgcgtaatcaagcccacagatcgca

SEQ ID NO: 461418 - DNA, 57 bp, Artificial
  Synthetic oligonucleotide
tcgatttagccccctgtaagttcggatggaaatgtgcgctcctacttggggatacca

SEQ ID NO: 461419 - DNA, 59 bp, Artificial
  Synthetic oligonucleotide
tcgatttagctccctgaatgttcggatggaaatgtgttgaccaggtcggggacaccaga

SEQ ID NO: 461420 - DNA, 59 bp, Artificial
  Synthetic oligonucleotide
tcgatttagctccttgaatgtttggatggaaatgtgctgaccgggatggggagaccagg

SEQ ID NO: 461421 - DNA, 60 bp, Artificial
  Synthetic oligonucleotide
tcgatttaggcggcagatacagcgagtcagtcatatcctcctgcgaatggggtaagcagc

SEQ ID NO: 461422 - DNA, 56 bp, Artificial
  Synthetic oligonucleotide
tcgatttatagtggttgtatgaggttcgtgtgtttgctattcctttacgtgtttaa

SEQ ID NO: 461423 - DNA, 51 bp, Artificial
  Synthetic oligonucleotide
tcgatttcaggttctcgtgttagtgttgataaagatggtttcccaacaaag

SEQ ID NO: 461424 - DNA, 53 bp, Artificial
  Synthetic oligonucleotide
tcgatttctccagttgacgacatccttgataacaacttatctttacgggatca

SEQ ID NO: 461425 - DNA, 54 bp, Artificial
  Synthetic oligonucleotide
tcgatttgggaaactccaaaatcaatgaagtttccgtctttctccacgtaggtc

SEQ ID NO: 461426 - DNA, 52 bp, Artificial
  Synthetic oligonucleotide
tcgattttcatacatcggcctttgagtctcatggtagcctgctcgaatgagc

SEQ ID NO: 461427 - DNA, 55 bp, Artificial
  Synthetic oligonucleotide
tcgattttcatgcagctacggctgagcctagcggttaactgcgacgccgtggacg

SEQ ID NO: 461428 - DNA, 60 bp, Artificial
  Synthetic oligonucleotide
tcgattttttgtactgatcatgatagccgcctcagatacttataatggcagaatatggtg

SEQ ID NO: 461429 - DNA, 56 bp, Artificial
  Synthetic oligonucleotide
tcgcaaaaacaattcgaattagcaaaagaatttcgcgatctgttaattaacgctct

SEQ ID NO: 461430 - DNA, 55 bp, Artificial
  Synthetic oligonucleotide
tcgcaaaacaccgacccttgtctcaggcgatgactcctacttatccggaaccctt

SEQ ID NO: 461431 - DNA, 56 bp, Artificial
  Synthetic oligonucleotide
tcgcaaaagtcaaatccttccttggatcaaacgtttctcaccgcctccgacgcacc

SEQ ID NO: 461432 - DNA, 54 bp, Artificial
  Synthetic oligonucleotide
tcgcaaacatagtacttgttgtaacctttcacaccgtttctacgggttagctaa

SEQ ID NO: 461433 - DNA, 51 bp, Artificial
  Synthetic oligonucleotide
tcgcaaagaaatggaatcgcaccacaatcagactcacttagaaaactatca

SEQ ID NO: 461434 - DNA, 52 bp, Artificial
  Synthetic oligonucleotide
tcgcaaaggaaataaacattggtggcacacgacggaatttttgatcacatta

SEQ ID NO: 461435 - DNA, 60 bp, Artificial
  Synthetic oligonucleotide
tcgcaaataatttcgcatctgcgcagtttataagtaggtagtaacagagcatgcatgata

SEQ ID NO: 461436 - DNA, 60 bp, Artificial
  Synthetic oligonucleotide
tcgcaacaataatatgaggttgatagacggctctgatgtttcccatgcaaccatcaaccg

SEQ ID NO: 461437 - DNA, 60 bp, Artificial
  Synthetic oligonucleotide
tcgcaacatcgtggaagcacgtgtgaagaggtctggtgatgaaaattggcaaagttggct

SEQ ID NO: 461438 - DNA, 58 bp, Artificial
  Synthetic oligonucleotide
tcgcaacatgattgttgaacagcaccggacgctcgcagcgaaagacgcctacgccagt

SEQ ID NO: 461439 - DNA, 60 bp, Artificial
  Synthetic oligonucleotide
tcgcaaccgcctgtgacttgcaatatccgttcggctcaccactaactgacgacccttgcg

SEQ ID NO: 461440 - DNA, 55 bp, Artificial
  Synthetic oligonucleotide
tcgcaacctaaacatgtaaaagactgtgcaagtatggtgaagttgtataggcgag

SEQ ID NO: 461441 - DNA, 55 bp, Artificial
  Synthetic oligonucleotide
tcgcaacgacaaggtgctgtgagcaacaatgacaccaagggtactgttaagtatg

SEQ ID NO: 461442 - DNA, 60 bp, Artificial
  Synthetic oligonucleotide
tcgcaacgccaataactgaggcaccagcacatgcaactcctgttgaagttgtgaacctgc

SEQ ID NO: 461443 - DNA, 54 bp, Artificial
  Synthetic oligonucleotide
tcgcaacggagtttgcaccgtgccgaattcatgatcttcgatcatgcccgatac

SEQ ID NO: 461444 - DNA, 52 bp, Artificial
  Synthetic oligonucleotide
tcgcaactacgaccacaattcaagacccactgcgtactctgcgaaaactaca

SEQ ID NO: 461445 - DNA, 55 bp, Artificial
  Synthetic oligonucleotide
tcgcaactcttacatgtcaaccaataaagaggagtatatcctggtgggccgaagc

SEQ ID NO: 461446 - DNA, 57 bp, Artificial
  Synthetic oligonucleotide
tcgcaagaaatcgcagtttcacagttaattgacctagcactactaccgttagatatg

SEQ ID NO: 461447 - DNA, 60 bp, Artificial
  Synthetic oligonucleotide
tcgcaagaagttctgtgaagagcacatcctatccctatataccctatccttaacctatcc

SEQ ID NO: 461448 - DNA, 60 bp, Artificial
  Synthetic oligonucleotide
tcgcaagattcctatgggattgggcctcagtccgtttctcatggctcagtttactagtgc

SEQ ID NO: 461449 - DNA, 60 bp, Artificial
  Synthetic oligonucleotide
tcgcaagccaaacaggtatgacgttgctcaatacaaatacagaaatgttccaattaccaa

SEQ ID NO: 461450 - DNA, 60 bp, Artificial
  Synthetic oligonucleotide
tcgcaagcccagaatgtacaggatgtatagaagccctgatgtccctaagggatgtgaagg

SEQ ID NO: 461451 - DNA, 51 bp, Artificial
  Synthetic oligonucleotide
tcgcaagcccgcgaaggcctaaaactagcaattggggagaactttgccgta

SEQ ID NO: 461452 - DNA, 60 bp, Artificial
  Synthetic oligonucleotide
tcgcaagccgacatggattaaccattgtgacaagacggttccagctgcactgcgatattt

SEQ ID NO: 461453 - DNA, 55 bp, Artificial
  Synthetic oligonucleotide
tcgcaaggactgcaaagccaaaccacttgcaaagcattctgccaggcagtccaca

SEQ ID NO: 461454 - DNA, 60 bp, Artificial
  Synthetic oligonucleotide
tcgcaaggaggggggagatccgagcagtgatagaagaactcgtgctcgcgagagcggagc

SEQ ID NO: 461455 - DNA, 60 bp, Artificial
  Synthetic oligonucleotide
tcgcaagggattacacagctaaatgcctttctggtggagacgccgcagaaagccatggta

SEQ ID NO: 461456 - DNA, 54 bp, Artificial
  Synthetic oligonucleotide
tcgcaatacaacgacgacgcactcgtagggcagcaagacgcgctccacgagttc

SEQ ID NO: 461457 - DNA, 60 bp, Artificial
  Synthetic oligonucleotide
tcgcaatacgttttaacgcattcgaagattaatcaaaatgcgcgcagtgagtccgaggat

SEQ ID NO: 461458 - DNA, 52 bp, Artificial
  Synthetic oligonucleotide
tcgcaatactgcgcaatcgagcgaaagtccggcgggaagtcatagcatggag

SEQ ID NO: 461459 - DNA, 57 bp, Artificial
  Synthetic oligonucleotide
tcgcaatcacaagatttagaaggggcttctgtttcgcacttgggagtaagggttcaa

SEQ ID NO: 461460 - DNA, 60 bp, Artificial
  Synthetic oligonucleotide
tcgcaatccacgcaatttggctaatgcgctaggcatctactctgaagcacccgggcgcac

SEQ ID NO: 461461 - DNA, 59 bp, Artificial
  Synthetic oligonucleotide
tcgcaatcgcggcaactgatacgcaaaaaggtagggtgtggaggatgaatccgtatccg

SEQ ID NO: 461462 - DNA, 60 bp, Artificial
  Synthetic oligonucleotide
tcgcaatgatcaacagtaccttaactggcaatggtactcaagtgtacttagctcccacgc

SEQ ID NO: 461463 - DNA, 60 bp, Artificial
  Synthetic oligonucleotide
tcgcaatgggtatgcagcacatcgcttgagacgttcacctaataccgtgagagaacttgc

SEQ ID NO: 461464 - DNA, 56 bp, Artificial
  Synthetic oligonucleotide
tcgcaattcctgggaccgatcataatcacgggctcgtggatactgattgtgaaccg

SEQ ID NO: 461465 - DNA, 60 bp, Artificial
  Synthetic oligonucleotide
tcgcaattgaatttcacgggagcgaagctgaaacggttatgatggcagatccacgaagac

SEQ ID NO: 461466 - DNA, 50 bp, Artificial
  Synthetic oligonucleotide
tcgcacaaggaccagaggaagaatttggccgatcactcattaaacacaac

SEQ ID NO: 461467 - DNA, 56 bp, Artificial
  Synthetic oligonucleotide
tcgcacaaggtggaacacgaggggaacgcttaaaccattatgaccagcctttgacc

SEQ ID NO: 461468 - DNA, 55 bp, Artificial
  Synthetic oligonucleotide
tcgcacaatatgggtacggtgcgattacacgcaatgaaggtctgacagatcacag

SEQ ID NO: 461469 - DNA, 58 bp, Artificial
  Synthetic oligonucleotide
tcgcacaatccttacgcgaattcttccttcaacgtccaactatgcttttcacccgcaa

SEQ ID NO: 461470 - DNA, 56 bp, Artificial
  Synthetic oligonucleotide
tcgcacaatcttgggcagtgtgaggtccgatattttcgagttacttgacggaatcg

SEQ ID NO: 461471 - DNA, 59 bp, Artificial
  Synthetic oligonucleotide
tcgcacacaatccagtgtgtaggcagtcgtaacgggcaactgtgggacggaaccgacta

SEQ ID NO: 461472 - DNA, 60 bp, Artificial
  Synthetic oligonucleotide
tcgcacacagcctgaccgtgttgcattcccttataacgctctggacggattcccgttcta

SEQ ID NO: 461473 - DNA, 60 bp, Artificial
  Synthetic oligonucleotide
tcgcacacggctggtcagtttggttcttccaacatgagcacatgcataagtacattgttt

SEQ ID NO: 461474 - DNA, 55 bp, Artificial
  Synthetic oligonucleotide
tcgcacactaatgagttgccctataggggttgccccttcccctagtaacagtcgt

SEQ ID NO: 461475 - DNA, 52 bp, Artificial
  Synthetic oligonucleotide
tcgcacaggccacgcgtttgaccccaaacggtctcgagattacaagaagtta

SEQ ID NO: 461476 - DNA, 60 bp, Artificial
  Synthetic oligonucleotide
tcgcacagtggatcctaggcgctttttggtcacgcataaatcgtgagcaagaataaacat

SEQ ID NO: 461477 - DNA, 56 bp, Artificial
  Synthetic oligonucleotide
tcgcaccaaaggtgatctaggtcttgaaaaggaaagtgttaaacgtacactatata

SEQ ID NO: 461478 - DNA, 56 bp, Artificial
  Synthetic oligonucleotide
tcgcaccattaaaagtgaactgaagaaacgtaagacggccaaaccccacgcgatga

SEQ ID NO: 461479 - DNA, 60 bp, Artificial
  Synthetic oligonucleotide
tcgcacccaggctatatctaaggggatgcgtcgtttggagcgggagcatgcccagaagtt

SEQ ID NO: 461480 - DNA, 55 bp, Artificial
  Synthetic oligonucleotide
tcgcaccccttactgtcttctctggacccaaggctctcacccctggcgtctaccc

SEQ ID NO: 461481 - DNA, 57 bp, Artificial
  Synthetic oligonucleotide
tcgcaccccttttaaattacgccatagtaattttggttatagatggcagcctatgac

SEQ ID NO: 461482 - DNA, 58 bp, Artificial
  Synthetic oligonucleotide
tcgcaccggctctgcgataaccatagattcgtcccagggggccacttttgacattgtg

SEQ ID NO: 461483 - DNA, 60 bp, Artificial
  Synthetic oligonucleotide
tcgcaccgtgcgtaggctgcgtcgtccgcgcctgcgcagggcatatcgctaccgtctacg

SEQ ID NO: 461484 - DNA, 60 bp, Artificial
  Synthetic oligonucleotide
tcgcacctctctttacgcggcctccccgtctgttccttctcatctgccggaccgtgtgca

SEQ ID NO: 461485 - DNA, 60 bp, Artificial
  Synthetic oligonucleotide
tcgcacgtgtggaggcggcgctccacatctggataccgcctcttcaagttagaggcggta

SEQ ID NO: 461486 - DNA, 55 bp, Artificial
  Synthetic oligonucleotide
tcgcacgtgttacgggtgaaacttcaacatggggccctgcgcgccaaccgtatgg

SEQ ID NO: 461487 - DNA, 60 bp, Artificial
  Synthetic oligonucleotide
tcgcactcaagacgggatgtcaggtgcaccagtttgtgacaaatattgtcgggtgttagc

SEQ ID NO: 461488 - DNA, 57 bp, Artificial
  Synthetic oligonucleotide
tcgcactcaagtgtagacaggtcacctgcctgctcccacccccctggaccgttttgg

SEQ ID NO: 461489 - DNA, 60 bp, Artificial
  Synthetic oligonucleotide
tcgcactcacatcagtatttagcacttggtgtgcttcggacatctgcaacagggagggta

SEQ ID NO: 461490 - DNA, 60 bp, Artificial
  Synthetic oligonucleotide
tcgcactcctccagcctacagaccaccaaatgcacctatcttatccacacttccggaaac

SEQ ID NO: 461491 - DNA, 57 bp, Artificial
  Synthetic oligonucleotide
tcgcactcgcatagagcccatagcagagcagcaaggtcttcggtacctggagtaaga

SEQ ID NO: 461492 - DNA, 60 bp, Artificial
  Synthetic oligonucleotide
tcgcactcgtggtgtggtcgagtcccgtgcaagtgttcgaacagcgcttcgtttcaatct

SEQ ID NO: 461493 - DNA, 60 bp, Artificial
  Synthetic oligonucleotide
tcgcactgaatagaggttctggatccggtatcatcacttcagacgcaccagtgcatgatt

SEQ ID NO: 461494 - DNA, 59 bp, Artificial
  Synthetic oligonucleotide
tcgcactgagtagaggccctggatcagggataatcacctcaaacgcaccactggatgaa

SEQ ID NO: 461495 - DNA, 60 bp, Artificial
  Synthetic oligonucleotide
tcgcactgagtagaggctttgggtcaggaatcatcgtctcaaatgcatcaatggatgaat

SEQ ID NO: 461496 - DNA, 60 bp, Artificial
  Synthetic oligonucleotide
tcgcactgctggcagtgcactccggcccggatgtgtatgacgaaatattcatgccattca

SEQ ID NO: 461497 - DNA, 60 bp, Artificial
  Synthetic oligonucleotide
tcgcactgttgggaggtctagataggtctgctattctattgcgtctagatgtggcttcaa

SEQ ID NO: 461498 - DNA, 56 bp, Artificial
  Synthetic oligonucleotide
tcgcagaaacctctcaagaaagaacttaagaaggttgagaaacaagtgaaggtgct

SEQ ID NO: 461499 - DNA, 60 bp, Artificial
  Synthetic oligonucleotide
tcgcagacacgttgcttccaaatgcatccccaacgattcgaacgcagaggctttccctaa

SEQ ID NO: 461500 - DNA, 55 bp, Artificial
  Synthetic oligonucleotide
tcgcagacgattctacatggactgtgatatagaggtgacagactcctacaagacg

SEQ ID NO: 461501 - DNA, 60 bp, Artificial
  Synthetic oligonucleotide
tcgcagagagcgagatcggttcagccgcgattgatggtctagtacaaggaagcgtacact

SEQ ID NO: 461502 - DNA, 60 bp, Artificial
  Synthetic oligonucleotide
tcgcagagatctgattcagactggccccttgataagatattcctcttcatgaaatcacaa

SEQ ID NO: 461503 - DNA, 60 bp, Artificial
  Synthetic oligonucleotide
tcgcagaggataggttgggtgaagagatagcttacgaaatgggcggtgcattttccagtg

SEQ ID NO: 461504 - DNA, 60 bp, Artificial
  Synthetic oligonucleotide
tcgcagatgcacgctcggaggatgatacggtcgaagactgtacaccccatatatttgggc

SEQ ID NO: 461505 - DNA, 60 bp, Artificial
  Synthetic oligonucleotide
tcgcagatggctcttgtcagtgaatctgacggaataacagtcgtgaagacagcgttggcg

SEQ ID NO: 461506 - DNA, 60 bp, Artificial
  Synthetic oligonucleotide
tcgcagcaaaccacttgtactgcatcaggagaggagacttgctcacaccggaggtacgca

SEQ ID NO: 461507 - DNA, 59 bp, Artificial
  Synthetic oligonucleotide
tcgcagcaccgcctgtagatatagatggcatacgtgagccagtttccggctcgttaatg

SEQ ID NO: 461508 - DNA, 60 bp, Artificial
  Synthetic oligonucleotide
tcgcagcatcacagacgtttaaaaactatgtatctaagctttcagaccaactattggtat

SEQ ID NO: 461509 - DNA, 60 bp, Artificial
  Synthetic oligonucleotide
tcgcagctcaccgctgtgaaggcagatcttcgagagatcaagagtcagcaatcccagctc

SEQ ID NO: 461510 - DNA, 60 bp, Artificial
  Synthetic oligonucleotide
tcgcagctgctatgggtgatatagaccgtgctgatgatgaccctaaaactgagctcaaga

SEQ ID NO: 461511 - DNA, 60 bp, Artificial
  Synthetic oligonucleotide
tcgcagctgggaagactctagtactgccattcaacagattagctgagcaaacgaaaccgt

SEQ ID NO: 461512 - DNA, 60 bp, Artificial
  Synthetic oligonucleotide
tcgcaggaagaattaattgtgtctcaaacattacaggactaataataacaagagatggtg

SEQ ID NO: 461513 - DNA, 58 bp, Artificial
  Synthetic oligonucleotide
tcgcaggaattaacaccaggggacaccctgccagtgtgctatgtaagtactgaaactg

SEQ ID NO: 461514 - DNA, 60 bp, Artificial
  Synthetic oligonucleotide
tcgcaggcctagataaagattatctggtgattcttcgcggatcgtcaagccaggagattc

SEQ ID NO: 461515 - DNA, 60 bp, Artificial
  Synthetic oligonucleotide
tcgcaggctattgcgtgtttgcaaagacacattcggaccactttgggacgtctaagcgct

SEQ ID NO: 461516 - DNA, 53 bp, Artificial
  Synthetic oligonucleotide
tcgcagggttagtctatgggaattacgaactaattacgaaactcgcaaatcta

SEQ ID NO: 461517 - DNA, 59 bp, Artificial
  Synthetic oligonucleotide
tcgcaggtgttgatgacacctccagcaccctggttggcacccttaacggtcgtatcaag

SEQ ID NO: 461518 - DNA, 55 bp, Artificial
  Synthetic oligonucleotide
tcgcagtcaaacattataagtactgatgagacaatagagtgtctccagaatgcaa

SEQ ID NO: 461519 - DNA, 60 bp, Artificial
  Synthetic oligonucleotide
tcgcataactttcattgacgtgacagcccccacaattgaacagtggctggtggacaaccc

SEQ ID NO: 461520 - DNA, 52 bp, Artificial
  Synthetic oligonucleotide
tcgcatagcgactccagtcgagcccagcgcaccaccggaatgaggcagcaga

SEQ ID NO: 461521 - DNA, 60 bp, Artificial
  Synthetic oligonucleotide
tcgcatatgagtacgcgaaagacaacaaccgggctttgagcgcgaagcttgacgctatcc

SEQ ID NO: 461522 - DNA, 60 bp, Artificial
  Synthetic oligonucleotide
tcgcatcaaacccactagagctagctgtagaaattgcaaacaagactgtgatagatactg

SEQ ID NO: 461523 - DNA, 60 bp, Artificial
  Synthetic oligonucleotide
tcgcatcacccaagggtcctgttatccagatgtacaccaatgtggacaaggaccttgtgg

SEQ ID NO: 461524 - DNA, 58 bp, Artificial
  Synthetic oligonucleotide
tcgcatcatgttgctcgcttctcgggctcgcactgattaaatgcctaactgtcgccga

SEQ ID NO: 461525 - DNA, 60 bp, Artificial
  Synthetic oligonucleotide
tcgcatcattcacttcagaggaacaatcccgaatttcagctcaagctgtgctaactctgg

SEQ ID NO: 461526 - DNA, 56 bp, Artificial
  Synthetic oligonucleotide
tcgcatcctacctcacggaattcagcattgggcactcgctcggcgatgaattctgg

SEQ ID NO: 461527 - DNA, 52 bp, Artificial
  Synthetic oligonucleotide
tcgcatcgcagccgaagttcgcgcttcccgagccggtcgtcaaagctcgaac

SEQ ID NO: 461528 - DNA, 51 bp, Artificial
  Synthetic oligonucleotide
tcgcatcgcgcaacgagggtctaatgaacgcggctgaacttgcgttgcatc

SEQ ID NO: 461529 - DNA, 60 bp, Artificial
  Synthetic oligonucleotide
tcgcatctcggggtaaccatgtctctcccacgcattatgttccagagaccgatgcatcac

SEQ ID NO: 461530 - DNA, 53 bp, Artificial
  Synthetic oligonucleotide
tcgcatcttgtttaagtggtattaaattcggtaaaagggtatattctaaagcg

SEQ ID NO: 461531 - DNA, 52 bp, Artificial
  Synthetic oligonucleotide
tcgcatgaggcactctggcaacgtaacggcgaactcgtaccaatgctcggct

SEQ ID NO: 461532 - DNA, 59 bp, Artificial
  Synthetic oligonucleotide
tcgcatgagtgtacgccgtctagaaaaccaattcgtttagagtgcacccgcattacact

SEQ ID NO: 461533 - DNA, 60 bp, Artificial
  Synthetic oligonucleotide
tcgcatgagttgagtgggtcgccatatatagacgtacgtgttacatactcaattacagct

SEQ ID NO: 461534 - DNA, 60 bp, Artificial
  Synthetic oligonucleotide
tcgcatgccaagggatgagaacaagcatccacgtatcgccgtttttgtacaaccagccga

SEQ ID NO: 461535 - DNA, 56 bp, Artificial
  Synthetic oligonucleotide
tcgcatgcgatgatatccgcgactagtttatccacccattccgaaccaccaagatg

SEQ ID NO: 461536 - DNA, 55 bp, Artificial
  Synthetic oligonucleotide
tcgcatgggtcaagactcgcaaacttacgtctaccaatgcacacttgatacgggg

SEQ ID NO: 461537 - DNA, 59 bp, Artificial
  Synthetic oligonucleotide
tcgcatggtgcctcaaaattagatttctctcaagatccaagtaaattcactgacccagt

SEQ ID NO: 461538 - DNA, 57 bp, Artificial
  Synthetic oligonucleotide
tcgcatggtgtgctatcattagtaggtcgagcgtaggctgcggtaacccccttggta

SEQ ID NO: 461539 - DNA, 56 bp, Artificial
  Synthetic oligonucleotide
tcgcatggttcgtacctctatcactccacgtccaaagacgcagaaggagaccggtg

SEQ ID NO: 461540 - DNA, 60 bp, Artificial
  Synthetic oligonucleotide
tcgcatgtattttccgatctaattgacgactatgaatatggagtaattggcggcaaccaa

SEQ ID NO: 461541 - DNA, 58 bp, Artificial
  Synthetic oligonucleotide
tcgcattcctgtgaacgattctgccgtccacacttgagcgttgccgtgtcgtcgtata

SEQ ID NO: 461542 - DNA, 53 bp, Artificial
  Synthetic oligonucleotide
tcgcattctctgggacaaagccgtgtagaatacctgtcagggctgtggcacat

SEQ ID NO: 461543 - DNA, 50 bp, Artificial
  Synthetic oligonucleotide
tcgccaaaagacaaggcatctcgcacactcaaattcttaaacgtttacaa

SEQ ID NO: 461544 - DNA, 56 bp, Artificial
  Synthetic oligonucleotide
tcgccaaatggtgggaaagtcgaacagtccggccccagtatactcgaacgcttctc

SEQ ID NO: 461545 - DNA, 51 bp, Artificial
  Synthetic oligonucleotide
tcgccaaccaagctgccggcgtcgaaccttgataggctccaccatgcgtta

SEQ ID NO: 461546 - DNA, 53 bp, Artificial
  Synthetic oligonucleotide
tcgccaaccgtcaaagtggacccatcgggtataagaggcccgcgtaccgtgaa

SEQ ID NO: 461547 - DNA, 60 bp, Artificial
  Synthetic oligonucleotide
tcgccaactatgctcagatcatgcatctaccctcagaacccgtcccctttgacgacagaa

SEQ ID NO: 461548 - DNA, 55 bp, Artificial
  Synthetic oligonucleotide
tcgccacgacattggagcatcgatttaaagagataccggacgagcagctggcggt

SEQ ID NO: 461549 - DNA, 56 bp, Artificial
  Synthetic oligonucleotide
tcgccacgaccgtaccagccaccaccagtatttgcttggtcgaattccatgtcgct

SEQ ID NO: 461550 - DNA, 60 bp, Artificial
  Synthetic oligonucleotide
tcgccacgttagacgctcgcggccttatagcttcatctcgcgcgcatgccatagtcgcgc

SEQ ID NO: 461551 - DNA, 55 bp, Artificial
  Synthetic oligonucleotide
tcgccactaccggattgcgcgagctccaaagggaaatacccagtgctaacgaacc

SEQ ID NO: 461552 - DNA, 60 bp, Artificial
  Synthetic oligonucleotide
tcgccactgggaaagaggccattgagagtctctataagaacaagaagcagtgcaagtaga

SEQ ID NO: 461553 - DNA, 58 bp, Artificial
  Synthetic oligonucleotide
tcgccagacacaacgttatgggccaatctagaaattggtgctttactcttttccagta

SEQ ID NO: 461554 - DNA, 55 bp, Artificial
  Synthetic oligonucleotide
tcgccagactatactcaacatatggctacaattggtgtgctagcgacgccggaaa

SEQ ID NO: 461555 - DNA, 55 bp, Artificial
  Synthetic oligonucleotide
tcgccagcccggtgcggttaacgtaagggtcagcgagccgaatatggtaatagtg

SEQ ID NO: 461556 - DNA, 58 bp, Artificial
  Synthetic oligonucleotide
tcgccagctgggtcatgagtcgattcagatcacggtggacacgtacacggatgtggat

SEQ ID NO: 461557 - DNA, 60 bp, Artificial
  Synthetic oligonucleotide
tcgccagcttttataatgtcgagagcctctcccgcacttgctgcattgacggcgttgtga

SEQ ID NO: 461558 - DNA, 60 bp, Artificial
  Synthetic oligonucleotide
tcgccaggaagcgatatgctgcgttgatgatctctcctcctgcgaaacgcaaccctccat

SEQ ID NO: 461559 - DNA, 60 bp, Artificial
  Synthetic oligonucleotide
tcgccaggagattgagggagtgaaattagactccagtgggaatgtgtataaaatactgtc

SEQ ID NO: 461560 - DNA, 56 bp, Artificial
  Synthetic oligonucleotide
tcgccaggttcagaactcttgtgtggacttcgagagccctcatcagagctcgtgga

SEQ ID NO: 461561 - DNA, 53 bp, Artificial
  Synthetic oligonucleotide
tcgccagtactcgggtccccttttcaagggtttaattccgggtgcgtgtctga

SEQ ID NO: 461562 - DNA, 60 bp, Artificial
  Synthetic oligonucleotide
tcgccatactgggtccgctcatggtgctccaggttggcctaaacagagtgccgtacttcg

SEQ ID NO: 461563 - DNA, 60 bp, Artificial
  Synthetic oligonucleotide
tcgccatatcatgcttcttaatttgcgttgttctattgggtttcattatgtgggcttgcc

SEQ ID NO: 461564 - DNA, 60 bp, Artificial
  Synthetic oligonucleotide
tcgccatcatttctaggctgtagaataataaatgggcgccagctagtccccaaccgtgac

SEQ ID NO: 461565 - DNA, 55 bp, Artificial
  Synthetic oligonucleotide
tcgccatgaacgataattcatatttcaaagtcgagtatgccaccgcttgtgggac

SEQ ID NO: 461566 - DNA, 55 bp, Artificial
  Synthetic oligonucleotide
tcgccatgacctgtataaggctcagacatctcatcagacgtccgacgcaacgtga

SEQ ID NO: 461567 - DNA, 54 bp, Artificial
  Synthetic oligonucleotide
tcgccattccgagggtaggacctgggctcagcccgggtacccttggcccctcta

SEQ ID NO: 461568 - DNA, 56 bp, Artificial
  Synthetic oligonucleotide
tcgcccactccaccaacagtccacattttgattgttaggtgggttactggaccgcc

SEQ ID NO: 461569 - DNA, 50 bp, Artificial
  Synthetic oligonucleotide
tcgccccaatagtcatctttcaagggggtacgaatcaatgcaagtgctat

SEQ ID NO: 461570 - DNA, 59 bp, Artificial
  Synthetic oligonucleotide
tcgccccacactcgatcaccggtaccctcttctccaccgatctgatgtccaacaaccag

SEQ ID NO: 461571 - DNA, 55 bp, Artificial
  Synthetic oligonucleotide
tcgccccacagcactggaagactcgcaccgtcccaggtgcgggcactttcgggtc

SEQ ID NO: 461572 - DNA, 54 bp, Artificial
  Synthetic oligonucleotide
tcgccccacgacccgactcacctcaaagggacgacccttggttccgacgcctca

SEQ ID NO: 461573 - DNA, 55 bp, Artificial
  Synthetic oligonucleotide
tcgccccatccgtggtacaccatcttgcttgcttaaacactcgcaacgcactggc

SEQ ID NO: 461574 - DNA, 60 bp, Artificial
  Synthetic oligonucleotide
tcgccccgttcgacgaatattggtatgataaccagcccctgttagctcaggctgttgaga

SEQ ID NO: 461575 - DNA, 57 bp, Artificial
  Synthetic oligonucleotide
tcgcccctccgagttagagaggagaaccagtgagcgagttaacccgcacacgagcga

SEQ ID NO: 461576 - DNA, 58 bp, Artificial
  Synthetic oligonucleotide
tcgcccgatctgtaaccacatatactcggaactcaaatacgctggatttacccccagc

SEQ ID NO: 461577 - DNA, 56 bp, Artificial
  Synthetic oligonucleotide
tcgcccgcctttagaccacctactccttcagaggttggaagaagaaatacgacagc

SEQ ID NO: 461578 - DNA, 54 bp, Artificial
  Synthetic oligonucleotide
tcgcccgctcaaacgtagttcttagtcccgttaattgaatcggactatgttcgt

SEQ ID NO: 461579 - DNA, 55 bp, Artificial
  Synthetic oligonucleotide
tcgcccgctgtctcgcttgccatttcgctcgtccgcccctcgcttgccatctcac

SEQ ID NO: 461580 - DNA, 60 bp, Artificial
  Synthetic oligonucleotide
tcgcccggacatgatgctgggcagtgataaccccaattggggcgctcgtgtcacaggtga

SEQ ID NO: 461581 - DNA, 53 bp, Artificial
  Synthetic oligonucleotide
tcgcccggtaaatgtcgtagggtcacacgttaaggattggaactcccggtctg

SEQ ID NO: 461582 - DNA, 55 bp, Artificial
  Synthetic oligonucleotide
tcgcccggtagctacactactgttgtttcagggactataactactagcagtttcg

SEQ ID NO: 461583 - DNA, 53 bp, Artificial
  Synthetic oligonucleotide
tcgccctccacgtcctcctgccggtccttcacagtctaacggttctaaaaacg

SEQ ID NO: 461584 - DNA, 51 bp, Artificial
  Synthetic oligonucleotide
tcgcccttgcgttcccgccaacataagtcgcgtaccgtagtcgctcagaga

SEQ ID NO: 461585 - DNA, 57 bp, Artificial
  Synthetic oligonucleotide
tcgccgaacccggtgactgcggcggactacttcgctgcgaacacggggttatgggca

SEQ ID NO: 461586 - DNA, 57 bp, Artificial
  Synthetic oligonucleotide
tcgccgaacttaacagaccagtaccctgcaaaccttcaaatgtcaacagaccagtta

SEQ ID NO: 461587 - DNA, 54 bp, Artificial
  Synthetic oligonucleotide
tcgccgacactaaaaaccactttggcggaacccccacccccactgatgctaata

SEQ ID NO: 461588 - DNA, 55 bp, Artificial
  Synthetic oligonucleotide
tcgccgacctcatggggtacattccgctcgtcggcgcccccctagggggcgccgc

SEQ ID NO: 461589 - DNA, 57 bp, Artificial
  Synthetic oligonucleotide
tcgccgaccttcctgggggataagcgtatcgagggctctgtttggcccaaatccata

SEQ ID NO: 461590 - DNA, 55 bp, Artificial
  Synthetic oligonucleotide
tcgccgagtgaagcgtgactcatacgcaggagtggctaaacgtgggtacacacgt

SEQ ID NO: 461591 - DNA, 57 bp, Artificial
  Synthetic oligonucleotide
tcgccgagttcaagtgctgtttcctcaactccagtagagaaacttgtttcagcttcg

SEQ ID NO: 461592 - DNA, 60 bp, Artificial
  Synthetic oligonucleotide
tcgccgcaaagctgtcgggcctcggacttaatgctgtggcgtattaccgaggtcttgatg

SEQ ID NO: 461593 - DNA, 60 bp, Artificial
  Synthetic oligonucleotide
tcgccgcactaggcaaagagtcttattcagactccatcagcgtggccgctctctcctcca

SEQ ID NO: 461594 - DNA, 60 bp, Artificial
  Synthetic oligonucleotide
tcgccgccaagtaaggacagagcaaaggtgttccaaggtctcacacggcacagaaagcat

SEQ ID NO: 461595 - DNA, 56 bp, Artificial
  Synthetic oligonucleotide
tcgccgccttcaaccccgccatgaatcagtacatcgtggggaacttcttagacccg

SEQ ID NO: 461596 - DNA, 55 bp, Artificial
  Synthetic oligonucleotide
tcgccgcggtagatgctcatccagcacatcgtcttaggcctcctcctcggcggtg

SEQ ID NO: 461597 - DNA, 60 bp, Artificial
  Synthetic oligonucleotide
tcgccggcacgtgttgattaatgtcaagattgacaacgaaaggcagtacgattctagtga

SEQ ID NO: 461598 - DNA, 60 bp, Artificial
  Synthetic oligonucleotide
tcgccggccccatcggtaggcgagtcgatagctagccttttcggacggatgcatgaggcc

SEQ ID NO: 461599 - DNA, 52 bp, Artificial
  Synthetic oligonucleotide
tcgccgggacttactttgcgatgcaggcccatgttaaggcttacggcctcca

SEQ ID NO: 461600 - DNA, 55 bp, Artificial
  Synthetic oligonucleotide
tcgccggttgtgtataatgggcaccgtcgattccacaacgatgccaaactccacg

SEQ ID NO: 461601 - DNA, 55 bp, Artificial
  Synthetic oligonucleotide
tcgccgtaagttgactggtcgatgggttcggggcggctgttggacgttagtacac

SEQ ID NO: 461602 - DNA, 60 bp, Artificial
  Synthetic oligonucleotide
tcgccgtgatgaaatacattctcacgaattctcactccaataggttcgcctgtttagcga

SEQ ID NO: 461603 - DNA, 59 bp, Artificial
  Synthetic oligonucleotide
tcgcctacgagagcttgaggacacgaccagctgctccctaccaagtaccgaccataggg

SEQ ID NO: 461604 - DNA, 60 bp, Artificial
  Synthetic oligonucleotide
tcgcctactcccggcggttgtgaagagctgtgtgcaatgcacacgttaagctcgggtacc

SEQ ID NO: 461605 - DNA, 60 bp, Artificial
  Synthetic oligonucleotide
tcgcctcagaagaaaagtttgtcaccatgacagacttggtgcctggcatcctcgaaaagc

SEQ ID NO: 461606 - DNA, 60 bp, Artificial
  Synthetic oligonucleotide
tcgcctcataaggcttcccaacataagtcagccattggaatgtctgctaccatgacagat

SEQ ID NO: 461607 - DNA, 55 bp, Artificial
  Synthetic oligonucleotide
tcgcctcctcttagtgtcgctgacgacgtagtgtcgttgagtatggacccttact

SEQ ID NO: 461608 - DNA, 59 bp, Artificial
  Synthetic oligonucleotide
tcgcctcgggcaaagacagacaattagaacacgctctggtaccagtattggaagtcagg

SEQ ID NO: 461609 - DNA, 60 bp, Artificial
  Synthetic oligonucleotide
tcgcctggtgaaaaaactgaatcttggtctattcgcgctcaggttgagggtgatatacaa

SEQ ID NO: 461610 - DNA, 56 bp, Artificial
  Synthetic oligonucleotide
tcgcctgtgctgaggggcatctaccgtcgtacgtgcttaactgctgccacgactta

SEQ ID NO: 461611 - DNA, 59 bp, Artificial
  Synthetic oligonucleotide
tcgccttgatgctaacgctgtgtcaaatcttcgtcgcctatgggccattgctggctgcg

SEQ ID NO: 461612 - DNA, 59 bp, Artificial
  Synthetic oligonucleotide
tcgccttgcttccgttggtttggctatggccaaaggctctttcaaatcgacgatggtca

SEQ ID NO: 461613 - DNA, 60 bp, Artificial
  Synthetic oligonucleotide
tcgcgaacataggacattgggtgacacgccatcaaatgaaacgatatgcgtacacagaca

SEQ ID NO: 461614 - DNA, 55 bp, Artificial
  Synthetic oligonucleotide
tcgcgaacgtggccggatccctctacgtcgtgccggatcccgaggactgaccagt

SEQ ID NO: 461615 - DNA, 52 bp, Artificial
  Synthetic oligonucleotide
tcgcgaagaattagatctgagtactccgggtcatcagatttccggcatctct

SEQ ID NO: 461616 - DNA, 59 bp, Artificial
  Synthetic oligonucleotide
tcgcgaaggactggaccacccggatcggtgggaatggcttattgattacatggatagga

SEQ ID NO: 461617 - DNA, 57 bp, Artificial
  Synthetic oligonucleotide
tcgcgaatgtctaacgccaccccgctaccgcttaacaataggcgatacgttacctga

SEQ ID NO: 461618 - DNA, 60 bp, Artificial
  Synthetic oligonucleotide
tcgcgacacaggccccgactgagaagactgtcgaagattttctagatttagttatgcaaa

SEQ ID NO: 461619 - DNA, 60 bp, Artificial
  Synthetic oligonucleotide
tcgcgacagttgagacagggactgcggacggtgttatcgctagtacagacgagtcagcct

SEQ ID NO: 461620 - DNA, 60 bp, Artificial
  Synthetic oligonucleotide
tcgcgacctagtgaggtgtgtatggttgacggcacggacatgtgcttggctgactttcac

SEQ ID NO: 461621 - DNA, 58 bp, Artificial
  Synthetic oligonucleotide
tcgcgacgaatcacccggcgttcggtaagaacgccgaaccgatctactgatcggcagc

SEQ ID NO: 461622 - DNA, 51 bp, Artificial
  Synthetic oligonucleotide
tcgcgacggtgtagagggaaggttgtatgttaacccgaaaaggtgggtagg

SEQ ID NO: 461623 - DNA, 56 bp, Artificial
  Synthetic oligonucleotide
tcgcgagagctaaggtgggttaccttaagaacactcctgaaaacaggttgatctac

SEQ ID NO: 461624 - DNA, 59 bp, Artificial
  Synthetic oligonucleotide
tcgcgagcaaaaactcgctctcagacttggcgaaatccccgattattcccgcctcctca

SEQ ID NO: 461625 - DNA, 54 bp, Artificial
  Synthetic oligonucleotide
tcgcgaggcttttcgtcgttaccaggaagagagaccaccggaaaccaccgccat

SEQ ID NO: 461626 - DNA, 55 bp, Artificial
  Synthetic oligonucleotide
tcgcgagtgctttagcacgagcggtccagatttaaagtagaaaatttcccgccca

SEQ ID NO: 461627 - DNA, 60 bp, Artificial
  Synthetic oligonucleotide
tcgcgagttagctggtgcaattcctgagtctctcagcaacttaaccctccttcaaacaag

SEQ ID NO: 461628 - DNA, 60 bp, Artificial
  Synthetic oligonucleotide
tcgcgataaccctattcggctaactacagagaacgttacgcaatatgtgacaaagctgaa

SEQ ID NO: 461629 - DNA, 57 bp, Artificial
  Synthetic oligonucleotide
tcgcgatagtatccaccctggcagtagacaacaggctttccaagactgcactgaatc

SEQ ID NO: 461630 - DNA, 60 bp, Artificial
  Synthetic oligonucleotide
tcgcgatcttctacgcccattccctgccccctgttgttgggcggaattatgcggcatcta

SEQ ID NO: 461631 - DNA, 55 bp, Artificial
  Synthetic oligonucleotide
tcgcgatgcacgcgatagtaaagttgggagagtagtggttgatgatgactcaggg

SEQ ID NO: 461632 - DNA, 59 bp, Artificial
  Synthetic oligonucleotide
tcgcgatgcgacacaccgataaacaacgtattaatcatagcctcgactatatgttgatg

SEQ ID NO: 461633 - DNA, 60 bp, Artificial
  Synthetic oligonucleotide
tcgcgatggaaggttgatgtcggctagtagttttgaattcgacccagatcgaattcttca

SEQ ID NO: 461634 - DNA, 60 bp, Artificial
  Synthetic oligonucleotide
tcgcgattcacatgatgagtggttactagatcagattgagttcgagctcaatgagacggt

SEQ ID NO: 461635 - DNA, 59 bp, Artificial
  Synthetic oligonucleotide
tcgcgcaaaggagacggaatgaggtatagcttggataccctaattagtgaattgcgccg

SEQ ID NO: 461636 - DNA, 59 bp, Artificial
  Synthetic oligonucleotide
tcgcgcaatgtgggtaaggtcatcgataccctaacgtgcggcttcgccgacctcatggg

SEQ ID NO: 461637 - DNA, 60 bp, Artificial
  Synthetic oligonucleotide
tcgcgcagcacgcctgcacgcagtgaatctctgagctgcgcagtaccaagtctgggacag

SEQ ID NO: 461638 - DNA, 50 bp, Artificial
  Synthetic oligonucleotide
tcgcgcatcgtgaatgccataaatttcgacgctatcgtttaaacggtcgc

SEQ ID NO: 461639 - DNA, 55 bp, Artificial
  Synthetic oligonucleotide
tcgcgcatgacgcaaccggcaaacgggtctactacctgacccgggaccctgaaac

SEQ ID NO: 461640 - DNA, 59 bp, Artificial
  Synthetic oligonucleotide
tcgcgccccttgacattgtaacgcgtactgaatctatccgaagtgataagacggttgac

SEQ ID NO: 461641 - DNA, 60 bp, Artificial
  Synthetic oligonucleotide
tcgcgccgatctagacgaaagtgcttacctgcacattcagtctcatcttcctggctacct

SEQ ID NO: 461642 - DNA, 60 bp, Artificial
  Synthetic oligonucleotide
tcgcgcctatcacggcctattctcaacagacgcggggcttacttggctgtatcatcacta

SEQ ID NO: 461643 - DNA, 54 bp, Artificial
  Synthetic oligonucleotide
tcgcgcgagagttcccggatatctacgtcaggcatgggcgtggtttgcataatc

SEQ ID NO: 461644 - DNA, 60 bp, Artificial
  Synthetic oligonucleotide
tcgcgcgatttgaccatattggtcgcgatgactgactatgtccacttttacctgttggtg

SEQ ID NO: 461645 - DNA, 54 bp, Artificial
  Synthetic oligonucleotide
tcgcgctatttctcggaaagtaacgatgggttgcctctaaggggtccgtcgagt

SEQ ID NO: 461646 - DNA, 55 bp, Artificial
  Synthetic oligonucleotide
tcgcgctcaccgggtttctgttccccggatttgcggtcgggagctggcaatgggg

SEQ ID NO: 461647 - DNA, 51 bp, Artificial
  Synthetic oligonucleotide
tcgcgctctcagcgtagggggaggactggcaggggtaggagaggcatctac

SEQ ID NO: 461648 - DNA, 57 bp, Artificial
  Synthetic oligonucleotide
tcgcgcttaccagcgtgttacggccaggcataacgattccaagctcggtcggtttag

SEQ ID NO: 461649 - DNA, 60 bp, Artificial
  Synthetic oligonucleotide
tcgcggaacaaggcttgaatagtgacttgtagtgagttgtcgaacacatgtcaggctgta

SEQ ID NO: 461650 - DNA, 55 bp, Artificial
  Synthetic oligonucleotide
tcgcggacgacctggacacgatcaacgtactgcgtgacgaccttgacatcgcggc

SEQ ID NO: 461651 - DNA, 60 bp, Artificial
  Synthetic oligonucleotide
tcgcggagaatgatcagatgcgcgcgttagcacgagcgttacagcgtgaagcgactgaaa

SEQ ID NO: 461652 - DNA, 55 bp, Artificial
  Synthetic oligonucleotide
tcgcggcaacggatggaagtgatttggctttgatcgacacacacctttccggcga

SEQ ID NO: 461653 - DNA, 55 bp, Artificial
  Synthetic oligonucleotide
tcgcggccatcttggaagccgtggtgccctcgcgccccgaccccacccacgaaaa

SEQ ID NO: 461654 - DNA, 54 bp, Artificial
  Synthetic oligonucleotide
tcgcggctgatcgggtaccggcgcagaccgcaaggtggttagttctccaaagtg

SEQ ID NO: 461655 - DNA, 59 bp, Artificial
  Synthetic oligonucleotide
tcgcgggatggaagttgcggaaccagaagtattaggtgtggaattcaagaacgtgctgc

SEQ ID NO: 461656 - DNA, 57 bp, Artificial
  Synthetic oligonucleotide
tcgcggggaggacagatcagctcccgagaggggtaggtcggtaaagagcattggaac

SEQ ID NO: 461657 - DNA, 56 bp, Artificial
  Synthetic oligonucleotide
tcgcggggccccgtgtattcctctgcggagaacgcgggtttggacctcgatgacga

SEQ ID NO: 461658 - DNA, 56 bp, Artificial
  Synthetic oligonucleotide
tcgcggggggctcccaccgacgtccgtcaaactcgaagatgtgccgccgagcgttg

SEQ ID NO: 461659 - DNA, 60 bp, Artificial
  Synthetic oligonucleotide
tcgcggtcacacatttctaagatagagtgggtgcctgattcattacacaggacgatcgtg

SEQ ID NO: 461660 - DNA, 59 bp, Artificial
  Synthetic oligonucleotide
tcgcggtcgactgttgacacatgttggcaccgaacgacggatccctaagttattagcga

SEQ ID NO: 461661 - DNA, 55 bp, Artificial
  Synthetic oligonucleotide
tcgcggtctagctgccgtgagcatgcctactaccgccgggaaacggaagaggaca

SEQ ID NO: 461662 - DNA, 57 bp, Artificial
  Synthetic oligonucleotide
tcgcggtctgaatgaggccattaagacctcaaccgcacccgtttacgctccaattaa

SEQ ID NO: 461663 - DNA, 59 bp, Artificial
  Synthetic oligonucleotide
tcgcggtggtcgttttattaacacaggtacaccatggcacaaagaagacgctatatcta

SEQ ID NO: 461664 - DNA, 52 bp, Artificial
  Synthetic oligonucleotide
tcgcggtttggaaggggtcccgaccgtttactcaacgctgcacctggaccgg

SEQ ID NO: 461665 - DNA, 55 bp, Artificial
  Synthetic oligonucleotide
tcgcgtaatggacttgacccattttggtctgggtacaagcgccaagcagttgtca

SEQ ID NO: 461666 - DNA, 60 bp, Artificial
  Synthetic oligonucleotide
tcgcgtacacacacttacgattcaacgtgccggaaaatgttgcacaagtgtacgctggag

SEQ ID NO: 461667 - DNA, 60 bp, Artificial
  Synthetic oligonucleotide
tcgcgtacacgtcttacatacggtctgtccgttgcgaaggtgacagcgcggattacattg

SEQ ID NO: 461668 - DNA, 57 bp, Artificial
  Synthetic oligonucleotide
tcgcgtacgaaagcctgaagactagacctgccgcaccccaccaagtacctactattg

SEQ ID NO: 461669 - DNA, 58 bp, Artificial
  Synthetic oligonucleotide
tcgcgtatcatttagaaaggcacaagaacgccatgaggcacgactcgtggcagacaaa

SEQ ID NO: 461670 - DNA, 60 bp, Artificial
  Synthetic oligonucleotide
tcgcgtccgaagcatcgccgtcgctaggtcacggtttgaggctggaatccgtcgcatcat

SEQ ID NO: 461671 - DNA, 55 bp, Artificial
  Synthetic oligonucleotide
tcgcgtctcagtgttagctgtaaaaagtcactcaagtcctcggccactacagatg

SEQ ID NO: 461672 - DNA, 60 bp, Artificial
  Synthetic oligonucleotide
tcgcgtgaaggagtggccgagcaaacagaaagattgagagatctgcggcgaagagagaag

SEQ ID NO: 461673 - DNA, 60 bp, Artificial
  Synthetic oligonucleotide
tcgcgtgttaggagtcctaaaacttgaatctgaagctcaagtggaggatgagataaataa

SEQ ID NO: 461674 - DNA, 55 bp, Artificial
  Synthetic oligonucleotide
tcgcgttacgggtgagacttcaacatggggacctgcacgccaaccgtatggtttt

SEQ ID NO: 461675 - DNA, 60 bp, Artificial
  Synthetic oligonucleotide
tcgcgttactcgagcctttatcacttgctcttatacagctaagtgatcctgtcatgcctc

SEQ ID NO: 461676 - DNA, 60 bp, Artificial
  Synthetic oligonucleotide
tcgcgttattgaatacatcggcgtgaattcaatgagaacagcggggcgcacggccacgat

SEQ ID NO: 461677 - DNA, 50 bp, Artificial
  Synthetic oligonucleotide
tcgcgttgaccgtctaggtaaggatccacgcgggtgcacgtctcaaccta

SEQ ID NO: 461678 - DNA, 55 bp, Artificial
  Synthetic oligonucleotide
tcgcgtttaagaaggggacgaaagcgtctacgatcattaaacggttatgcagtgt

SEQ ID NO: 461679 - DNA, 60 bp, Artificial
  Synthetic oligonucleotide
tcgcgtttataggaacttgttgtctgtattctataacgcaatgatcgattttcatacagc

SEQ ID NO: 461680 - DNA, 60 bp, Artificial
  Synthetic oligonucleotide
tcgctaaagatgcagaatgcgcaaatacgtagaatcagacccgatggtacggtgcttcgt

SEQ ID NO: 461681 - DNA, 57 bp, Artificial
  Synthetic oligonucleotide
tcgctaaatccaatattggttgcgaacgggttgtccatccagcttacggctaaaatg

SEQ ID NO: 461682 - DNA, 55 bp, Artificial
  Synthetic oligonucleotide
tcgctaaatcctggtctactaaatccgggcggtaaagcttggactttgatcgacc

SEQ ID NO: 461683 - DNA, 60 bp, Artificial
  Synthetic oligonucleotide
tcgctaacgctgagctaccacgcatgttagtggaccacaagacaaagataatccacgtcg

SEQ ID NO: 461684 - DNA, 52 bp, Artificial
  Synthetic oligonucleotide
tcgctaactacaggacgggacaaagtgtatatattgacggcgtagaaggtcg

SEQ ID NO: 461685 - DNA, 60 bp, Artificial
  Synthetic oligonucleotide
tcgctaactgagagtgattaactacaggtcgttagactgctagcggcctgactgatagtc

SEQ ID NO: 461686 - DNA, 60 bp, Artificial
  Synthetic oligonucleotide
tcgctaagcttagcggaattcggcgcaaattggtgaagcttgctggaaatcataccccta

SEQ ID NO: 461687 - DNA, 60 bp, Artificial
  Synthetic oligonucleotide
tcgctaaggagatagtggccagctgtgataaatgtcagccaaaaggagaggccatacatg

SEQ ID NO: 461688 - DNA, 60 bp, Artificial
  Synthetic oligonucleotide
tcgctaatcactggtagtaagataaaaaactcagatctgaaccataatattcgcatcact

SEQ ID NO: 461689 - DNA, 60 bp, Artificial
  Synthetic oligonucleotide
tcgctaatcaggctaggcagatggtgcaggcaatgaggacaattggaactcatcctaact

SEQ ID NO: 461690 - DNA, 50 bp, Artificial
  Synthetic oligonucleotide
tcgctaatgatcgggtccctacacaagtacgagatattacgcgaaggata

SEQ ID NO: 461691 - DNA, 55 bp, Artificial
  Synthetic oligonucleotide
tcgctaatggccggactttaccttaagccctagacgaatcatctagaacccactg

SEQ ID NO: 461692 - DNA, 60 bp, Artificial
  Synthetic oligonucleotide
tcgctacaacatttcctgggcaggtggtccttgctcctaattttgatagatccgatgcca

SEQ ID NO: 461693 - DNA, 60 bp, Artificial
  Synthetic oligonucleotide
tcgctaccagcgaccacgcactgaccacgatccttatgtggcagtttacacacccttgcc

SEQ ID NO: 461694 - DNA, 60 bp, Artificial
  Synthetic oligonucleotide
tcgctacccattgcaaggtggctttgcatccagacaggacctatcgtgtgagggacaaaa

SEQ ID NO: 461695 - DNA, 60 bp, Artificial
  Synthetic oligonucleotide
tcgctacgcctgtggatatggtgtatatctactgctttggctccgcatacttcacaaggg

SEQ ID NO: 461696 - DNA, 56 bp, Artificial
  Synthetic oligonucleotide
tcgctacggccctggctggggagcgatcacccgagtaccacccatctagtcccccc

SEQ ID NO: 461697 - DNA, 54 bp, Artificial
  Synthetic oligonucleotide
tcgctacggtaacgtaatgtacccaatagtatctagcccggctagtgaagaggc

SEQ ID NO: 461698 - DNA, 58 bp, Artificial
  Synthetic oligonucleotide
tcgctacgtaacagaactaacgctcacatcaaactcgaactacccgctaccgaacaga

SEQ ID NO: 461699 - DNA, 59 bp, Artificial
  Synthetic oligonucleotide
tcgctacgtggcagtaccacgagaaggctcaaaggtcccatttattgtactcctcagcg

SEQ ID NO: 461700 - DNA, 60 bp, Artificial
  Synthetic oligonucleotide
tcgctactatcagctttagccctacgagtgtcagcggcagaaacactcgtcgcacagagg

SEQ ID NO: 461701 - DNA, 55 bp, Artificial
  Synthetic oligonucleotide
tcgctactccgaacgtcaccagcacaccgccacctgtgctcacgacgggtgtgag

SEQ ID NO: 461702 - DNA, 59 bp, Artificial
  Synthetic oligonucleotide
tcgctactcgtcagctttgcggcaattagttggagggccggttacaccggatggctaca

SEQ ID NO: 461703 - DNA, 55 bp, Artificial
  Synthetic oligonucleotide
tcgctagacgttcaccaatgccatctttcttactgggggccttaaagcagtcggg

SEQ ID NO: 461704 - DNA, 60 bp, Artificial
  Synthetic oligonucleotide
tcgctagaggggtcgttagggatgattattatcagtgatggctcggtggtgaataaaagc

SEQ ID NO: 461705 - DNA, 60 bp, Artificial
  Synthetic oligonucleotide
tcgctagcaacgcactagctctcagccaacctaaaccagtggataactccgttcagaaca

SEQ ID NO: 461706 - DNA, 60 bp, Artificial
  Synthetic oligonucleotide
tcgctagctgagtgtcaatgcaaaacgttcaacgatcaggcttctgctggtccgttcctt

SEQ ID NO: 461707 - DNA, 59 bp, Artificial
  Synthetic oligonucleotide
tcgctagctgttgggatggtagcgttacttgtggactactacagtaaagcattaagggc

SEQ ID NO: 461708 - DNA, 56 bp, Artificial
  Synthetic oligonucleotide
tcgctagggaacccaagacagcaaaattcttgctaatcgggtagcgaacctccacc

SEQ ID NO: 461709 - DNA, 55 bp, Artificial
  Synthetic oligonucleotide
tcgctaggtaacactagcagcgtcaaccgggcgcacagtgccttctaggtgactt

SEQ ID NO: 461710 - DNA, 59 bp, Artificial
  Synthetic oligonucleotide
tcgctatactggctacgagacattacggctaggccctaagtcattgatcaggtctatag

SEQ ID NO: 461711 - DNA, 56 bp, Artificial
  Synthetic oligonucleotide
tcgctatggcccgggtgggtccaaggctgtgttccaggctatccgtgaagtgaacc

SEQ ID NO: 461712 - DNA, 60 bp, Artificial
  Synthetic oligonucleotide
tcgctatggtagctctcaagttactgccgctgcgaaagatgttacgaatatgattaccga

SEQ ID NO: 461713 - DNA, 60 bp, Artificial
  Synthetic oligonucleotide
tcgctattatacaggaagatcaaatagacatttcaagatgattagaaactattatgagga

SEQ ID NO: 461714 - DNA, 60 bp, Artificial
  Synthetic oligonucleotide
tcgctcaaaatgggcactaagctggctgcgccgactgtgtagagatgcgacctatctatg

SEQ ID NO: 461715 - DNA, 60 bp, Artificial
  Synthetic oligonucleotide
tcgctcaatgtctccagaatcggtacggagtgagcatccctgtatacagagcaggagcga

SEQ ID NO: 461716 - DNA, 60 bp, Artificial
  Synthetic oligonucleotide
tcgctcacacctttgttgctcaactctgttcttagcataagaagtttcttcatggaggac

SEQ ID NO: 461717 - DNA, 53 bp, Artificial
  Synthetic oligonucleotide
tcgctcacagacctcggtcagaacctattgtatgctaactccgctcatgcgtt

SEQ ID NO: 461718 - DNA, 53 bp, Artificial
  Synthetic oligonucleotide
tcgctcacagttgcagatgaaaaggtgggtgccaaaactagatgcggtggatt

SEQ ID NO: 461719 - DNA, 60 bp, Artificial
  Synthetic oligonucleotide
tcgctcagaggctatcagaatatatcacgactgaacgcgttcgctttgacgccatgaaac

SEQ ID NO: 461720 - DNA, 60 bp, Artificial
  Synthetic oligonucleotide
tcgctcatgagaagattaccagatggttggttatattgccatgctgatggatcccaattt

SEQ ID NO: 461721 - DNA, 60 bp, Artificial
  Synthetic oligonucleotide
tcgctcctatctgggggatgcttcagactggtgccaagaattatctgaaggttgtcaagg

SEQ ID NO: 461722 - DNA, 55 bp, Artificial
  Synthetic oligonucleotide
tcgctcctcggggctacttcaagatgcgcaccgggaaaagctcgataatgaggtc

SEQ ID NO: 461723 - DNA, 60 bp, Artificial
  Synthetic oligonucleotide
tcgctcctcttcttataagttgatgcgccaacaagttctctccgcagcggtgtcagaacc

SEQ ID NO: 461724 - DNA, 60 bp, Artificial
  Synthetic oligonucleotide
tcgctcgatactgctctttgttagcgttgttgtactcatctaaggttcctataccaaata

SEQ ID NO: 461725 - DNA, 59 bp, Artificial
  Synthetic oligonucleotide
tcgctcgcctgttgaagtcgcaattgaacaacatagaatcttcgcaatacgttttaacg

SEQ ID NO: 461726 - DNA, 53 bp, Artificial
  Synthetic oligonucleotide
tcgctcgcgcgattcggacctgcggcctcggggggggtcgggggctttactaa

SEQ ID NO: 461727 - DNA, 60 bp, Artificial
  Synthetic oligonucleotide
tcgctcgctacggagtgacctccaagctatgtgtgccatgaacaatttgcggtgtggctc

SEQ ID NO: 461728 - DNA, 60 bp, Artificial
  Synthetic oligonucleotide
tcgctcgtctctgggtcttggacatccctggacgagctccaaccgctcaacgcacttaac

SEQ ID NO: 461729 - DNA, 60 bp, Artificial
  Synthetic oligonucleotide
tcgctcgtgaccaacgtgccaactctgacgagtggtgcgatcatcgagtgtccggctacc

SEQ ID NO: 461730 - DNA, 55 bp, Artificial
  Synthetic oligonucleotide
tcgctctaccgggtgacgtgggagatggcggcgcttagcccctacgtgtacttcc

SEQ ID NO: 461731 - DNA, 60 bp, Artificial
  Synthetic oligonucleotide
tcgctctcctgcctttggtgccttccctgtcaagaaacaaccagctgttctcactcagaa

SEQ ID NO: 461732 - DNA, 55 bp, Artificial
  Synthetic oligonucleotide
tcgctctgagtatgctcccatggcatgtgtgggttgatcatgaggatctttcttg

SEQ ID NO: 461733 - DNA, 55 bp, Artificial
  Synthetic oligonucleotide
tcgctctggcgaacctccaaagatcagaaccgtgttcggagtccccaaatcccta

SEQ ID NO: 461734 - DNA, 60 bp, Artificial
  Synthetic oligonucleotide
tcgctctggtaaaaacccatacttatatttctcgccagcagatcaacgctttatagatca

SEQ ID NO: 461735 - DNA, 57 bp, Artificial
  Synthetic oligonucleotide
tcgctctggttacacatacaacagaacatacatggaaacaagagtttccgcttgtgg

SEQ ID NO: 461736 - DNA, 55 bp, Artificial
  Synthetic oligonucleotide
tcgctctgtaaggacatctgttaaggtctctaagggtaccaaacgcaaacggtcg

SEQ ID NO: 461737 - DNA, 57 bp, Artificial
  Synthetic oligonucleotide
tcgctcttaaatcgtctcatcacgttgtagctaccgataacaagctatcgttcaatg

SEQ ID NO: 461738 - DNA, 60 bp, Artificial
  Synthetic oligonucleotide
tcgctcttaatgatgaggacgtcaatgagctagtatttagatttcgattagctgtggcta

SEQ ID NO: 461739 - DNA, 59 bp, Artificial
  Synthetic oligonucleotide
tcgctcttaatgtcgttaaatggtatgtcgtgcaccattacttgtatggtgttccgtat

SEQ ID NO: 461740 - DNA, 60 bp, Artificial
  Synthetic oligonucleotide
tcgctgaaacgagtgtaaatctggcatagcatacaggttactcttgttgggttctagatg

SEQ ID NO: 461741 - DNA, 59 bp, Artificial
  Synthetic oligonucleotide
tcgctgaaactgatgagaatgcaagagcgtttctagcttctaattctcaggcgaagtat

SEQ ID NO: 461742 - DNA, 55 bp, Artificial
  Synthetic oligonucleotide
tcgctgaaagatcggttctatatacgtcatgtgatgaaacgtgtattgtctgtcg

SEQ ID NO: 461743 - DNA, 55 bp, Artificial
  Synthetic oligonucleotide
tcgctgaataccgaactcttttctcccagacaactgacatgattcgactcgctta

SEQ ID NO: 461744 - DNA, 60 bp, Artificial
  Synthetic oligonucleotide
tcgctgaatccgctaggcaggtatgcctgcgcactatggtccaacttaccaccatcacct

SEQ ID NO: 461745 - DNA, 56 bp, Artificial
  Synthetic oligonucleotide
tcgctgaattaacggggatgttacgtgcaaatcggtagtttcgttcaggttgattc

SEQ ID NO: 461746 - DNA, 60 bp, Artificial
  Synthetic oligonucleotide
tcgctgacagtcctccccgacctgtaagtccggctcgttctgagaccagcacattacagg

SEQ ID NO: 461747 - DNA, 59 bp, Artificial
  Synthetic oligonucleotide
tcgctgatccttctggagctaggcgcgtctatgctgccacgcttcgcgacggatcgccg

SEQ ID NO: 461748 - DNA, 55 bp, Artificial
  Synthetic oligonucleotide
tcgctgatcttcatgcagtccagtttaatgaatgtgaatatgtcactgatgaaga

SEQ ID NO: 461749 - DNA, 52 bp, Artificial
  Synthetic oligonucleotide
tcgctgatgaaacacaatctgttccccatctcgaccgcgacgggtgaattta

SEQ ID NO: 461750 - DNA, 60 bp, Artificial
  Synthetic oligonucleotide
tcgctgattacggcgatgctcctcccctgagtacaaaaaccatgttttggcgcacctcgc

SEQ ID NO: 461751 - DNA, 60 bp, Artificial
  Synthetic oligonucleotide
tcgctgcaattggagttcggggtaaattcagatagtacctacgatgctacagtcgatagt

SEQ ID NO: 461752 - DNA, 60 bp, Artificial
  Synthetic oligonucleotide
tcgctgcacgagcgctcaccgttatgagatcttgcgtcacgctacaggatgcgagaatag

SEQ ID NO: 461753 - DNA, 60 bp, Artificial
  Synthetic oligonucleotide
tcgctgcagcgtgaagaggtaaggtgtcgggcgagtctagaggggtggcagacctctagg

SEQ ID NO: 461754 - DNA, 60 bp, Artificial
  Synthetic oligonucleotide
tcgctgccctgcggatgtatgtgagctgatccgtggtgcataccccatgatccagaccac

SEQ ID NO: 461755 - DNA, 51 bp, Artificial
  Synthetic oligonucleotide
tcgctgccgagatggagccagatctgccttggggttaagcccttggggtta

SEQ ID NO: 461756 - DNA, 60 bp, Artificial
  Synthetic oligonucleotide
tcgctgcgtctaatgacctcggctgatctatccacgctatctcagtctgccattggtaat

SEQ ID NO: 461757 - DNA, 60 bp, Artificial
  Synthetic oligonucleotide
tcgctgctcataggcatcgagtttagtccggattctcggacatttcaatcgctaaatcgt

SEQ ID NO: 461758 - DNA, 60 bp, Artificial
  Synthetic oligonucleotide
tcgctgctgcattactagatttgctagaaggcaaggccttgaatattaactgtccatcag

SEQ ID NO: 461759 - DNA, 55 bp, Artificial
  Synthetic oligonucleotide
tcgctggaggatacggaacccctgccaccctcggtcgaatgacggaacggcagat

SEQ ID NO: 461760 - DNA, 60 bp, Artificial
  Synthetic oligonucleotide
tcgctggaggatcggcacatgggaatcctcccttctcaagagcagccgagtcttggtcat

SEQ ID NO: 461761 - DNA, 55 bp, Artificial
  Synthetic oligonucleotide
tcgctggcataagtatcatatgagagaggagcacgggtccgagatagttacttgg

SEQ ID NO: 461762 - DNA, 59 bp, Artificial
  Synthetic oligonucleotide
tcgctggggatgttgcctcgaatgtcagacttgtttttaagtttgacaaagcattcgaa

SEQ ID NO: 461763 - DNA, 54 bp, Artificial
  Synthetic oligonucleotide
tcgctgggtcgtaagtttctctttcaggcaggcctacaacggtcaaccgttaac

SEQ ID NO: 461764 - DNA, 55 bp, Artificial
  Synthetic oligonucleotide
tcgctggtgatgactgtctgatcatatgtgagaggcccatgtgcgaccctagcga

SEQ ID NO: 461765 - DNA, 60 bp, Artificial
  Synthetic oligonucleotide
tcgctggtgccagtctccggatttcgggtcattgctaacccgagtggatgtaacacttgc

SEQ ID NO: 461766 - DNA, 60 bp, Artificial
  Synthetic oligonucleotide
tcgctgtaagtgttttatcaaagaatagagccatcgaagagaaccataaagagattatac

SEQ ID NO: 461767 - DNA, 60 bp, Artificial
  Synthetic oligonucleotide
tcgctgtcagccaacttgaatgatgcggtctgtagtggtggtgattatacgttcgcattg

SEQ ID NO: 461768 - DNA, 55 bp, Artificial
  Synthetic oligonucleotide
tcgctgtcgtggataacgcgtcatccatttgcacgtcttcccaaattcaacttac

SEQ ID NO: 461769 - DNA, 55 bp, Artificial
  Synthetic oligonucleotide
tcgctgtgacttcaagattggaaatctacagctatgagcaaaagaaagcccttcg

SEQ ID NO: 461770 - DNA, 51 bp, Artificial
  Synthetic oligonucleotide
tcgctgtggactgttctcggcacgcgtatgaacccgattgactccgtgctc

SEQ ID NO: 461771 - DNA, 52 bp, Artificial
  Synthetic oligonucleotide
tcgctgttgaacctcacgttaatccagtagatagacaatacactgtatttgg

SEQ ID NO: 461772 - DNA, 55 bp, Artificial
  Synthetic oligonucleotide
tcgcttaaaactaaactgcgtgtagcgttgggtacgatagatcaaacctaccaca

SEQ ID NO: 461773 - DNA, 55 bp, Artificial
  Synthetic oligonucleotide
tcgcttaatcgcctgcttttctgcgtcattgataatctggcgcaatgtctcagtg

SEQ ID NO: 461774 - DNA, 57 bp, Artificial
  Synthetic oligonucleotide
tcgcttagggtatgacgggttcctgtcatactacagtggtgcgaaactccgtactta

SEQ ID NO: 461775 - DNA, 58 bp, Artificial
  Synthetic oligonucleotide
tcgcttatagagtagaaactttcgaggaggtgccatttgacgtacaaaaatttgcaga

SEQ ID NO: 461776 - DNA, 60 bp, Artificial
  Synthetic oligonucleotide
tcgcttatatttggctagtcagtccaacggatgctcaagccactataacgataggaagcg

SEQ ID NO: 461777 - DNA, 55 bp, Artificial
  Synthetic oligonucleotide
tcgcttcaagcgtgttggatgaacaccgtaaaaggtccttcgcaaagcgcctcct

SEQ ID NO: 461778 - DNA, 51 bp, Artificial
  Synthetic oligonucleotide
tcgcttcaccgaggtaatcaccagcggagtcgtcgtaaccggggcggctac

SEQ ID NO: 461779 - DNA, 55 bp, Artificial
  Synthetic oligonucleotide
tcgcttcacgcggctcctttcaccctaagacaggtccccgcgttgacgcccagta

SEQ ID NO: 461780 - DNA, 60 bp, Artificial
  Synthetic oligonucleotide
tcgcttcactgtcccgtattgtgcgagaacagagaaattgcagatcccaaaggcttatgc

SEQ ID NO: 461781 - DNA, 60 bp, Artificial
  Synthetic oligonucleotide
tcgcttccgatgtcgcatgcttggcctgaaggtgatcctgagaaatctgccaaccatcca

SEQ ID NO: 461782 - DNA, 59 bp, Artificial
  Synthetic oligonucleotide
tcgcttctcagatcactggtatcgcccaagtggctgaagtcactgtgcacgccgctgat

SEQ ID NO: 461783 - DNA, 59 bp, Artificial
  Synthetic oligonucleotide
tcgcttctgcggtaccataacaaggtataccgcacgtcctcgcggactgcttcccagcg

SEQ ID NO: 461784 - DNA, 54 bp, Artificial
  Synthetic oligonucleotide
tcgcttgaatttctggtagattaaccccaaacatgagttttgaaacttcggaag

SEQ ID NO: 461785 - DNA, 55 bp, Artificial
  Synthetic oligonucleotide
tcgcttgagttggagtatctcatgatgcaagttcctttcggttctctgacgtacg

SEQ ID NO: 461786 - DNA, 52 bp, Artificial
  Synthetic oligonucleotide
tcgcttgcaactggacgcggggcgagcgttgtgacctagacgacagggacag

SEQ ID NO: 461787 - DNA, 56 bp, Artificial
  Synthetic oligonucleotide
tcgcttgctacaatggctgggaagtgtgatttatttggggggtttgggaataggca

SEQ ID NO: 461788 - DNA, 60 bp, Artificial
  Synthetic oligonucleotide
tcgcttgtactgggtctctcttggtagaccaggtcgagcctgaaaggtcagtggattatc

SEQ ID NO: 461789 - DNA, 58 bp, Artificial
  Synthetic oligonucleotide
tcgcttgtatgctatataacaatggtgggcgaaatgccagcactaaaggacctggttc

SEQ ID NO: 461790 - DNA, 55 bp, Artificial
  Synthetic oligonucleotide
tcgctttacttttaaggcagccttaagaatcccttccatgttctttgtggtgacc

SEQ ID NO: 461791 - DNA, 60 bp, Artificial
  Synthetic oligonucleotide
tcgctttatatgacacaaagacgtccagagctctaggtatgtttaataatactgtgcgta

SEQ ID NO: 461792 - DNA, 60 bp, Artificial
  Synthetic oligonucleotide
tcgctttcgtgcgactataaacgtagacacatctctagtggagttgggcgctgatatccg

SEQ ID NO: 461793 - DNA, 56 bp, Artificial
  Synthetic oligonucleotide
tcgctttctccaaacatacaactaatttggaagagttaccatccgttttctctatg

SEQ ID NO: 461794 - DNA, 59 bp, Artificial
  Synthetic oligonucleotide
tcgctttgaacaatcttgagggttcgtgggatgaagaaaaactcacagtattgcttgaa

SEQ ID NO: 461795 - DNA, 54 bp, Artificial
  Synthetic oligonucleotide
tcgctttgcaaatctatggcgaagcttcacttccggtggtgaagatagcttctt

SEQ ID NO: 461796 - DNA, 55 bp, Artificial
  Synthetic oligonucleotide
tcgctttggggcgttgagtccgtcgattcttgggtgaatcgttcgaccgtctggg

SEQ ID NO: 461797 - DNA, 50 bp, Artificial
  Synthetic oligonucleotide
tcgctttgtggacttctctcagttgtatgcttgaatggttttacaacatg

SEQ ID NO: 461798 - DNA, 54 bp, Artificial
  Synthetic oligonucleotide
tcgcttttaagccagttaaaaatccagaacctaagggttatgtcttgaatgtcc

SEQ ID NO: 461799 - DNA, 55 bp, Artificial
  Synthetic oligonucleotide
tcgcttttgcattcctcggacttttattgaacctgcttaactgctcccagactgt

SEQ ID NO: 461800 - DNA, 54 bp, Artificial
  Synthetic oligonucleotide
tcggaaaactgctatgaacctcggtttaaaaccggtgcattatccacacgtaag

SEQ ID NO: 461801 - DNA, 60 bp, Artificial
  Synthetic oligonucleotide
tcggaaaagtccacgacgcctgtaaagactcattgtctgtcattctcttgtcgtgaatct

SEQ ID NO: 461802 - DNA, 59 bp, Artificial
  Synthetic oligonucleotide
tcggaaaagtccacgatgcctgtaaagactcgttgtcagtcagtctccggtcgtgaatc

SEQ ID NO: 461803 - DNA, 59 bp, Artificial
  Synthetic oligonucleotide
tcggaaaagtccatgacgcctgtaatgactcgttgtccgtcatccttttgtcgtggatc

SEQ ID NO: 461804 - DNA, 55 bp, Artificial
  Synthetic oligonucleotide
tcggaaacccaagcgccgcccccattttgtgaagagggtgtcacaccggcttgga

SEQ ID NO: 461805 - DNA, 60 bp, Artificial
  Synthetic oligonucleotide
tcggaaactcggaatggagctcccgtcaatggctcatctgagcaacaaggtacttctgga

SEQ ID NO: 461806 - DNA, 60 bp, Artificial
  Synthetic oligonucleotide
tcggaaagaagatgaacaactgtagaacaggacgaacagtgttcgatggctgagtttaga

SEQ ID NO: 461807 - DNA, 55 bp, Artificial
  Synthetic oligonucleotide
tcggaaagagggaagacatctggtgcggcagtttgatcggaacgcggacaagggc

SEQ ID NO: 461808 - DNA, 60 bp, Artificial
  Synthetic oligonucleotide
tcggaaagcagcgatgcctctcaaaaagttactcgatgattgaatatttttgcctctcga

SEQ ID NO: 461809 - DNA, 60 bp, Artificial
  Synthetic oligonucleotide
tcggaacaacttcaacatctaggtccgatcaggtgtcctcattcaggtacgcttccatga

SEQ ID NO: 461810 - DNA, 52 bp, Artificial
  Synthetic oligonucleotide
tcggaacaggacctcacggcgacctccgttataggactcgtactgagggtgt

SEQ ID NO: 461811 - DNA, 58 bp, Artificial
  Synthetic oligonucleotide
tcggaacatgcacaacttacttggcgttaaggggttgtgaagttgtatgctggtagac

SEQ ID NO: 461812 - DNA, 51 bp, Artificial
  Synthetic oligonucleotide
tcggaacatgcatagcttactgggcgttcaggggctatgaagttgtatgct

SEQ ID NO: 461813 - DNA, 59 bp, Artificial
  Synthetic oligonucleotide
tcggaacatgggcttgaacgctgtggcgtattacagagggttggacgtctccataatac

SEQ ID NO: 461814 - DNA, 55 bp, Artificial
  Synthetic oligonucleotide
tcggaacgaaacacatcgtccaccacgtagtcccggccagatcgatcgaagacgc

SEQ ID NO: 461815 - DNA, 58 bp, Artificial
  Synthetic oligonucleotide
tcggaactgatcactccgaggtggtgcttaccataaagcaccggtgtgtgggtttcaa

SEQ ID NO: 461816 - DNA, 55 bp, Artificial
  Synthetic oligonucleotide
tcggaactgatttggaagaaagcttggccttttgccgattagtaccggtttcatg

SEQ ID NO: 461817 - DNA, 50 bp, Artificial
  Synthetic oligonucleotide
tcggaactgtgtgggattgtgatcaatccccactgcaaatctacctggag

SEQ ID NO: 461818 - DNA, 54 bp, Artificial
  Synthetic oligonucleotide
tcggaactttagaacgtacttggtaaattacgacttttcatatcgtttatggca

SEQ ID NO: 461819 - DNA, 56 bp, Artificial
  Synthetic oligonucleotide
tcggaagaaaggttgtctgttcaaaacatcgcgacgttcgttcttgttctcacgcg

SEQ ID NO: 461820 - DNA, 55 bp, Artificial
  Synthetic oligonucleotide
tcggaagaagtcagcaccgcacacggtaaaactcgtgtagtggcataaggggtgg

SEQ ID NO: 461821 - DNA, 55 bp, Artificial
  Synthetic oligonucleotide
tcggaagacttcggagcggtcgcaacctcgtgggagacgccaacctatccccaag

SEQ ID NO: 461822 - DNA, 59 bp, Artificial
  Synthetic oligonucleotide
tcggaagagaacggtcaactacaggtatccttgagacaagctaaagaacagattgccaa

SEQ ID NO: 461823 - DNA, 59 bp, Artificial
  Synthetic oligonucleotide
tcggaagagcattattgctcccagagtactcaacactgtaccgccgttggctcgactca

SEQ ID NO: 461824 - DNA, 60 bp, Artificial
  Synthetic oligonucleotide
tcggaagatgtttgaatctgcctgaatacagcgtgctgagaaagcgctggttagacatgt

SEQ ID NO: 461825 - DNA, 57 bp, Artificial
  Synthetic oligonucleotide
tcggaagcgattcaaaactctgttggacatgcccgtgtaaagtctaccgttgggcat

SEQ ID NO: 461826 - DNA, 55 bp, Artificial
  Synthetic oligonucleotide
tcggaaggacttcggtccgtgtacttctagcacaacgtgctagtttcaggggtac

SEQ ID NO: 461827 - DNA, 58 bp, Artificial
  Synthetic oligonucleotide
tcggaagtagaaaatataatggcggagccatgtcatcgaaggataatttgggtctacg

SEQ ID NO: 461828 - DNA, 60 bp, Artificial
  Synthetic oligonucleotide
tcggaatagacatcgtacatttagttacatgcgagtgacgcatggtatcgtcaaccatcg

SEQ ID NO: 461829 - DNA, 60 bp, Artificial
  Synthetic oligonucleotide
tcggaatcaatgttaccacataccaggtcattgacggaagcgctcaagagatagtttcga

SEQ ID NO: 461830 - DNA, 55 bp, Artificial
  Synthetic oligonucleotide
tcggaatccccacccatcgacacctcaaaggcgaagcctgtcctttgcctcacag

SEQ ID NO: 461831 - DNA, 60 bp, Artificial
  Synthetic oligonucleotide
tcggaatgttcgtggcttcttatacgtatcaatccgagacgatgatggaacaatgcgtcc

SEQ ID NO: 461832 - DNA, 57 bp, Artificial
  Synthetic oligonucleotide
tcggaattcctatgtggatcgaattgatgtcattttacgcaaggacgttgtaatgcg

SEQ ID NO: 461833 - DNA, 56 bp, Artificial
  Synthetic oligonucleotide
tcggaattcgacgtcagttgaatgtttagccgaggatagttttaatttaccgagca

SEQ ID NO: 461834 - DNA, 55 bp, Artificial
  Synthetic oligonucleotide
tcggaattcggcccatgggttatcctgcgaagatggtcgacgttagttgagccgc

SEQ ID NO: 461835 - DNA, 52 bp, Artificial
  Synthetic oligonucleotide
tcggaattggagacctgcatgctagccctaggagagtccaaattagccgctc

SEQ ID NO: 461836 - DNA, 60 bp, Artificial
  Synthetic oligonucleotide
tcggaattgtgaactctgcttgtttcgtgtctccctccgtcaatcgcatgtcgtgaatct

SEQ ID NO: 461837 - DNA, 60 bp, Artificial
  Synthetic oligonucleotide
tcggaattgtgaattctgcttgttttgtgtctccctctgtcaatctcatatcgtgaattt

SEQ ID NO: 461838 - DNA, 58 bp, Artificial
  Synthetic oligonucleotide
tcggacagccaccagcagccccctctggtctgggaactaatacgatggctacaggcag

SEQ ID NO: 461839 - DNA, 56 bp, Artificial
  Synthetic oligonucleotide
tcggacagggtaatggtgtctcccctagccgtaacatggtggaacaggaatgggcc

SEQ ID NO: 461840 - DNA, 55 bp, Artificial
  Synthetic oligonucleotide
tcggacagtcaaccggactgtccaatattggccattctctgcctccgatctttat

SEQ ID NO: 461841 - DNA, 56 bp, Artificial
  Synthetic oligonucleotide
tcggacatcaaaacaaaggagtgtacgtggcagggtacaaaatcataaactaccac

SEQ ID NO: 461842 - DNA, 60 bp, Artificial
  Synthetic oligonucleotide
tcggacatccctccgaccaatcagagttggccgccatgtaagcggaacattgacttccac

SEQ ID NO: 461843 - DNA, 58 bp, Artificial
  Synthetic oligonucleotide
tcggacatgctgtgaaggcgaacgaacactggctacacgacgtgaaatggccacacgg

SEQ ID NO: 461844 - DNA, 60 bp, Artificial
  Synthetic oligonucleotide
tcggacattttgggatgatgcgcgatgctatccaactgtatggaacatgcgcctgtccct

SEQ ID NO: 461845 - DNA, 54 bp, Artificial
  Synthetic oligonucleotide
tcggaccaacggcaagtccattagccgtgacggttgcgggtggtaaatttgtta

SEQ ID NO: 461846 - DNA, 60 bp, Artificial
  Synthetic oligonucleotide
tcggaccaagagttagctcgcgcgtaaggaattcttatgtagacaggattgatgtaatct

SEQ ID NO: 461847 - DNA, 54 bp, Artificial
  Synthetic oligonucleotide
tcggaccaatctcacctgattacacgcaacatatggctactataggtgtgctag

SEQ ID NO: 461848 - DNA, 55 bp, Artificial
  Synthetic oligonucleotide
tcggaccacgaagtcttactattagacttatgacgcaacactactggcgaattcc

SEQ ID NO: 461849 - DNA, 53 bp, Artificial
  Synthetic oligonucleotide
tcggacccaccctcgccacggacgtgtacaacggggtgactcccgccgactcg

SEQ ID NO: 461850 - DNA, 60 bp, Artificial
  Synthetic oligonucleotide
tcggacccgaatataagcagcatgaccttccgccaagtgtgtgaggcatttgccccggag

SEQ ID NO: 461851 - DNA, 60 bp, Artificial
  Synthetic oligonucleotide
tcggaccctattgatgaatgagttaggtgttccatttcatctggggaccaagcaagtgtg

SEQ ID NO: 461852 - DNA, 55 bp, Artificial
  Synthetic oligonucleotide
tcggaccgacgcaacagtctcggggttatctaactctgggaggggtggattaggc

SEQ ID NO: 461853 - DNA, 53 bp, Artificial
  Synthetic oligonucleotide
tcggaccgcccccacctctggctcgcggttcccctctcccggggcggtggcac

SEQ ID NO: 461854 - DNA, 57 bp, Artificial
  Synthetic oligonucleotide
tcggaccgcggggaggtggagatgccatgccgacccgaagaggaaagaagaacgcga

SEQ ID NO: 461855 - DNA, 55 bp, Artificial
  Synthetic oligonucleotide
tcggaccgtctcacacaaacaatcccaagtaaaggctctgacgtctcccccttta

SEQ ID NO: 461856 - DNA, 59 bp, Artificial
  Synthetic oligonucleotide
tcggacctaacagtaggagatcagatcgtacattggcgctatgagttatatcccccggt

SEQ ID NO: 461857 - DNA, 58 bp, Artificial
  Synthetic oligonucleotide
tcggacctgcgagaaggactactccaactggcagattgtaccctacacgggtgggcca

SEQ ID NO: 461858 - DNA, 50 bp, Artificial
  Synthetic oligonucleotide
tcggacctgcggcctcgggggggtcgggggctttattaaacggactccga

SEQ ID NO: 461859 - DNA, 60 bp, Artificial
  Synthetic oligonucleotide
tcggacctggaggagacttcaccctgaggatgagtagtcctcgcaatgccgtgtatgccc

SEQ ID NO: 461860 - DNA, 52 bp, Artificial
  Synthetic oligonucleotide
tcggaccttgcaacgttcgaccatgtttgcagtcaacgatgccgcttcgcgg

SEQ ID NO: 461861 - DNA, 56 bp, Artificial
  Synthetic oligonucleotide
tcggaccttttcgccggtaccttagcgacgtcttggcctgcgacgactcaagagaa

SEQ ID NO: 461862 - DNA, 55 bp, Artificial
  Synthetic oligonucleotide
tcggacgaaaaggcaacgaacccgatcgtgccttcctttgacatgagtaacgaag

SEQ ID NO: 461863 - DNA, 56 bp, Artificial
  Synthetic oligonucleotide
tcggacgaggatttagctccctggatgttggggtgaaagtgattcgaccttgtggg

SEQ ID NO: 461864 - DNA, 54 bp, Artificial
  Synthetic oligonucleotide
tcggacgattatcattctctgggcgtaaccatcacgttctatgtggtcaacaac

SEQ ID NO: 461865 - DNA, 54 bp, Artificial
  Synthetic oligonucleotide
tcggacgcagacttggacagtacgttggcgactatatgagcagaatcatactct

SEQ ID NO: 461866 - DNA, 59 bp, Artificial
  Synthetic oligonucleotide
tcggacgctgatttagctccctgaatgttcggatggaaatgtactgacctggacgggga

SEQ ID NO: 461867 - DNA, 60 bp, Artificial
  Synthetic oligonucleotide
tcggacggatcattgcacttacgagtcagcactcagatggtgggataaacaatcagtaac

SEQ ID NO: 461868 - DNA, 60 bp, Artificial
  Synthetic oligonucleotide
tcggacggggagctttatattgtcaatagcgaatgtgttgtctgtaacagtgagtctttg

SEQ ID NO: 461869 - DNA, 58 bp, Artificial
  Synthetic oligonucleotide
tcggacggtgtgcctaccagtctgggaggaatcgacggtagtctccatttgcgcagag

SEQ ID NO: 461870 - DNA, 58 bp, Artificial
  Synthetic oligonucleotide
tcggacgtgaaaccttctgtgaccgatactctaaacgttgacaggcccgtgcctgcta

SEQ ID NO: 461871 - DNA, 60 bp, Artificial
  Synthetic oligonucleotide
tcggacgtgacgacagaatccagatgcccaaccatgggagaggctcataatcccaaggca

SEQ ID NO: 461872 - DNA, 55 bp, Artificial
  Synthetic oligonucleotide
tcggacgttaagaacaatttgaccggactagtactaccaaagctggatcgagatt

SEQ ID NO: 461873 - DNA, 55 bp, Artificial
  Synthetic oligonucleotide
tcggactagatggtggcattggtacaaaagaggaaaacacagaaagacacaccac

SEQ ID NO: 461874 - DNA, 60 bp, Artificial
  Synthetic oligonucleotide
tcggactgagagacagggagcgtggcccctggacgcaggactcggcttgtgacagcgcaa

SEQ ID NO: 461875 - DNA, 57 bp, Artificial
  Synthetic oligonucleotide
tcggactggtctctaagcctctcacccaccgacaggtaccgggcgactatgccacct

SEQ ID NO: 461876 - DNA, 60 bp, Artificial
  Synthetic oligonucleotide
tcggactgtactttcccgacacgcaatgtgcagcactgccaccgattttagtggaccacg

SEQ ID NO: 461877 - DNA, 58 bp, Artificial
  Synthetic oligonucleotide
tcggagaaagacagggtcctattcggcgccatgaaagccgacatagagattattctag

SEQ ID NO: 461878 - DNA, 58 bp, Artificial
  Synthetic oligonucleotide
tcggagaactcgaccttcctcctgaggcaaggaccacagccaacttcctcttacaagc

SEQ ID NO: 461879 - DNA, 55 bp, Artificial
  Synthetic oligonucleotide
tcggagaagactcgtgtgcaagttgtcgaagagctagctgatagaatagtattag

SEQ ID NO: 461880 - DNA, 60 bp, Artificial
  Synthetic oligonucleotide
tcggagacagggagaccgacgagcggcactgctatccccgcggcccctctcaacattgaa

SEQ ID NO: 461881 - DNA, 55 bp, Artificial
  Synthetic oligonucleotide
tcggagacccacttctgaagaagttattgcgcacaatgcacacaagcgcttggcc

SEQ ID NO: 461882 - DNA, 58 bp, Artificial
  Synthetic oligonucleotide
tcggagaggcctccggttgcaggtaagtgcaacaaaaagagtcataggactgagttcc

SEQ ID NO: 461883 - DNA, 56 bp, Artificial
  Synthetic oligonucleotide
tcggagataaaggctatttagtgactaaagttgacgggcgcaccatgaaaattggt

SEQ ID NO: 461884 - DNA, 55 bp, Artificial
  Synthetic oligonucleotide
tcggagatgtgtaagaatctggaggttgatccctatacagctgccaaggtgattg

SEQ ID NO: 461885 - DNA, 54 bp, Artificial
  Synthetic oligonucleotide
tcggagatttagaggctacggggtcgcgcgtgatggacgcagctgattgcttcc

SEQ ID NO: 461886 - DNA, 59 bp, Artificial
  Synthetic oligonucleotide
tcggagcaagagcccgtgataccaacggatcgagagggctttatctcgagttcgttgga

SEQ ID NO: 461887 - DNA, 60 bp, Artificial
  Synthetic oligonucleotide
tcggagcacacagaattcttggacctgacagtggaggtcaagtcgatggaggatcagagc

SEQ ID NO: 461888 - DNA, 57 bp, Artificial
  Synthetic oligonucleotide
tcggagcccggaagggtatatcaactgaatgtttagcagtcgacaatttcagtttac

SEQ ID NO: 461889 - DNA, 60 bp, Artificial
  Synthetic oligonucleotide
tcggagctaggatccacagccatggtaatctggcgatatcgccgtctctcaaggatcggt

SEQ ID NO: 461890 - DNA, 60 bp, Artificial
  Synthetic oligonucleotide
tcggaggacgaagtctcgatgtctcaaagtgatgcccctcccgaaacggcaatggatgta

SEQ ID NO: 461891 - DNA, 50 bp, Artificial
  Synthetic oligonucleotide
tcggaggaggagaagagtggctccgtgagggagatgaagagtgcattctt

SEQ ID NO: 461892 - DNA, 55 bp, Artificial
  Synthetic oligonucleotide
tcggaggaggtagacatagacgagcggcatactataacctgttcatcgcacttgg

SEQ ID NO: 461893 - DNA, 60 bp, Artificial
  Synthetic oligonucleotide
tcggaggatgcgcttaccgctgtgattactgcagcgtatttgactatctgtcaccagcgc

SEQ ID NO: 461894 - DNA, 60 bp, Artificial
  Synthetic oligonucleotide
tcggagggtcgacttctgagtctcgcagtagcgcaggcttgtttggtctgtttatactgg

SEQ ID NO: 461895 - DNA, 57 bp, Artificial
  Synthetic oligonucleotide
tcggaggtaacatcacgcgggtcgagtcagagaacaaggtaataatcctcgactcgt

SEQ ID NO: 461896 - DNA, 60 bp, Artificial
  Synthetic oligonucleotide
tcggaggtgttgacatgagggcgggacgcataatcgcgtgggatgggcaagccgcactac

SEQ ID NO: 461897 - DNA, 57 bp, Artificial
  Synthetic oligonucleotide
tcggagtagtaaaggaaaagctgtgcacgaacgaacaactactgtccttgctttcac

SEQ ID NO: 461898 - DNA, 60 bp, Artificial
  Synthetic oligonucleotide
tcggagtatcttctccacaacaatcgctacatgacatcatatgtctcttatccggccaag

SEQ ID NO: 461899 - DNA, 54 bp, Artificial
  Synthetic oligonucleotide
tcggagtcgaattttacgacacgcgcggcggtgtgtacccctgggagggtagaa

SEQ ID NO: 461900 - DNA, 55 bp, Artificial
  Synthetic oligonucleotide
tcggagtgaagacggaaaggtcatgtctaaggacccggtgaaacctggtatactg

SEQ ID NO: 461901 - DNA, 54 bp, Artificial
  Synthetic oligonucleotide
tcggagtgattcagccagaggactgcatgggctacgaaccgggggaccggaagc

SEQ ID NO: 461902 - DNA, 60 bp, Artificial
  Synthetic oligonucleotide
tcggagtggggagagaggctcggagtcctcaccagatcgctcgacgagggggagcccatc

SEQ ID NO: 461903 - DNA, 55 bp, Artificial
  Synthetic oligonucleotide
tcggagtgtgcggtaggagttaattctcaggggtgtgcatggaacgagttggacc

SEQ ID NO: 461904 - DNA, 55 bp, Artificial
  Synthetic oligonucleotide
tcggataaatacatcaaggctccgtgtaagctgacttcaggtatggattatacat

SEQ ID NO: 461905 - DNA, 55 bp, Artificial
  Synthetic oligonucleotide
tcggataaggaacgttatcggttcgagtcagcataacagatcgcacaccgtgtgc

SEQ ID NO: 461906 - DNA, 57 bp, Artificial
  Synthetic oligonucleotide
tcggatactcatttcaatttagatgtagtaaatgagtgcccttcccgaaattggaaa

SEQ ID NO: 461907 - DNA, 53 bp, Artificial
  Synthetic oligonucleotide
tcggatagcgtcttcatgtgtagagccattgcaccgcatcatcaacaacgaag

SEQ ID NO: 461908 - DNA, 54 bp, Artificial
  Synthetic oligonucleotide
tcggatcaaccaggcgacgaacgcccccgtccaggtcaccaacgtaaacgtcac

SEQ ID NO: 461909 - DNA, 55 bp, Artificial
  Synthetic oligonucleotide
tcggatcacgcgacgctctaagttaaattaaaatgtcgagacacgtacgtccgca

SEQ ID NO: 461910 - DNA, 55 bp, Artificial
  Synthetic oligonucleotide
tcggatcactgggccagcatcttcgtgccgttctgatcaccagagggtcgcgtcg

SEQ ID NO: 461911 - DNA, 56 bp, Artificial
  Synthetic oligonucleotide
tcggatccaaaccggggtaggagtgacgggatgatcgcgtattcaaacgcggactc

SEQ ID NO: 461912 - DNA, 55 bp, Artificial
  Synthetic oligonucleotide
tcggatcctcagagcggagaggtttcgagtatgacgcagtccgttcctggtgccg

SEQ ID NO: 461913 - DNA, 58 bp, Artificial
  Synthetic oligonucleotide
tcggatcctccgcacgcccgacgttcccagaggatgtgaaggcccttgcaaggtccaa

SEQ ID NO: 461914 - DNA, 56 bp, Artificial
  Synthetic oligonucleotide
tcggatcttccctgggacggtctcctcaacgtttgatcatcccttttcaacgcctg

SEQ ID NO: 461915 - DNA, 57 bp, Artificial
  Synthetic oligonucleotide
tcggatgacaggccgaggttcgacgtgtcgatggtattcaaaaatgtaacctacgta

SEQ ID NO: 461916 - DNA, 59 bp, Artificial
  Synthetic oligonucleotide
tcggatgatcaaacgtggaatcaatgatcgtaacttttggagaggcgaaaatggacgga

SEQ ID NO: 461917 - DNA, 55 bp, Artificial
  Synthetic oligonucleotide
tcggatgattccgggaatgggtgttgaattgttggaggagggttccgttgatacc

SEQ ID NO: 461918 - DNA, 55 bp, Artificial
  Synthetic oligonucleotide
tcggatggaaatgtgttgacctggtaggggacggtatatcgaagaatcggttatt

SEQ ID NO: 461919 - DNA, 59 bp, Artificial
  Synthetic oligonucleotide
tcggatggatgctaatccggacataattttgacaagtaaccgaagttcatccgatgagt

SEQ ID NO: 461920 - DNA, 59 bp, Artificial
  Synthetic oligonucleotide
tcggatggctaagtcttcatataagcctggacggattcgtagaaagcgcgtacagcaag

SEQ ID NO: 461921 - DNA, 55 bp, Artificial
  Synthetic oligonucleotide
tcggatgggcgggtgataagaaactcagaatttcgagatctaatgacgagcaggg

SEQ ID NO: 461922 - DNA, 58 bp, Artificial
  Synthetic oligonucleotide
tcggatgtgaatatggatggttctgttcccaaattggaaggagttttctctattgtta

SEQ ID NO: 461923 - DNA, 58 bp, Artificial
  Synthetic oligonucleotide
tcggatgtgtcgtatgaaatatgcagtcaagcatgacgatagattagattgtcttgct

SEQ ID NO: 461924 - DNA, 60 bp, Artificial
  Synthetic oligonucleotide
tcggatgttcctagcaatgataacatacataacaagaaatcaacctgagtggtttagaaa

SEQ ID NO: 461925 - DNA, 55 bp, Artificial
  Synthetic oligonucleotide
tcggattaccaccagcgagggcggaattaagagaagtaccatttggcgggtacca

SEQ ID NO: 461926 - DNA, 53 bp, Artificial
  Synthetic oligonucleotide
tcggattccgataaactacggtccaacaggtcaacccctagattttcgtattg

SEQ ID NO: 461927 - DNA, 57 bp, Artificial
  Synthetic oligonucleotide
tcggattggagaatttatccacgaacgatttgattcaagttattaaagatgagaccg

SEQ ID NO: 461928 - DNA, 60 bp, Artificial
  Synthetic oligonucleotide
tcggattgggaagcattgcaacccagcaacccgagagcaacatcctggacatagatctac

SEQ ID NO: 461929 - DNA, 60 bp, Artificial
  Synthetic oligonucleotide
tcggatttagacgaagcattcaacgcgtctgcatatacctgagctaaatgctggccctcc

SEQ ID NO: 461930 - DNA, 54 bp, Artificial
  Synthetic oligonucleotide
tcggatttaggtgagataggataaaaacctaacaagtcagtcacagatgtgacc

SEQ ID NO: 461931 - DNA, 59 bp, Artificial
  Synthetic oligonucleotide
tcggatttgaaattagtcgcagtggaatgtatagtcctgaaaatgattatcgttgggta

SEQ ID NO: 461932 - DNA, 57 bp, Artificial
  Synthetic oligonucleotide
tcggatttgttgttagcggccaaccgtgagaccgcaaaggatgcaaaaaacagtgga

SEQ ID NO: 461933 - DNA, 55 bp, Artificial
  Synthetic oligonucleotide
tcggattttaaaccgtactctgaattgctagccttatgcaaatgacgtgtactga

SEQ ID NO: 461934 - DNA, 57 bp, Artificial
  Synthetic oligonucleotide
tcggcaacaccattctaggcggagtttggggtggtttagaaggcatggcgagtggta

SEQ ID NO: 461935 - DNA, 53 bp, Artificial
  Synthetic oligonucleotide
tcggcaacacggagatggttactcaaataatctaattagaagtgataggctag

SEQ ID NO: 461936 - DNA, 55 bp, Artificial
  Synthetic oligonucleotide
tcggcaacccgtcgcgcccgttcgggcacacctactacctcggcgcgatcccgaa

SEQ ID NO: 461937 - DNA, 60 bp, Artificial
  Synthetic oligonucleotide
tcggcaacttactgcgacaagttcttaagtctcaaaagtatgaggaatcattacatgtcc

SEQ ID NO: 461938 - DNA, 59 bp, Artificial
  Synthetic oligonucleotide
tcggcaagaggcgagagcggcgactggtgagtacgccaaattttatttgactagcgaga

SEQ ID NO: 461939 - DNA, 59 bp, Artificial
  Synthetic oligonucleotide
tcggcaaggaattcatctcaattgcccagaaacggttagagtgcctttctatgtcaacg

SEQ ID NO: 461940 - DNA, 57 bp, Artificial
  Synthetic oligonucleotide
tcggcaaggttcgaatttgagaagcattgcaagtgttctgttcgagcagtgaatatt

SEQ ID NO: 461941 - DNA, 56 bp, Artificial
  Synthetic oligonucleotide
tcggcaagtaaacgtaggcaaagattggttaagcaggccaagtcgtctgacaagac

SEQ ID NO: 461942 - DNA, 52 bp, Artificial
  Synthetic oligonucleotide
tcggcaagttctttccgtatgcgcggcccggtgaatatccgtcgccgcttgt

SEQ ID NO: 461943 - DNA, 60 bp, Artificial
  Synthetic oligonucleotide
tcggcaatgcttatagctcattttacgatggttggtcacacttcacacaggacggtacct

SEQ ID NO: 461944 - DNA, 60 bp, Artificial
  Synthetic oligonucleotide
tcggcaccagataagctggggaatcgagcagcaggttggtacactcgggatgggaccact

SEQ ID NO: 461945 - DNA, 51 bp, Artificial
  Synthetic oligonucleotide
tcggcacctatggccttaatactttcaccaacatggaagcccaattaatta

SEQ ID NO: 461946 - DNA, 58 bp, Artificial
  Synthetic oligonucleotide
tcggcacctgcgttgaattcacccaacgtagaagcctgcgggtacagcgatagagttt

SEQ ID NO: 461947 - DNA, 55 bp, Artificial
  Synthetic oligonucleotide
tcggcactcactctgcgggcggcaacggagttggatactgctcatgcgtgtccag

SEQ ID NO: 461948 - DNA, 50 bp, Artificial
  Synthetic oligonucleotide
tcggcactgtcctagaccaagcagagactgcgggggcgagactggttgtg

SEQ ID NO: 461949 - DNA, 57 bp, Artificial
  Synthetic oligonucleotide
tcggcagcggttgataattggtctattcgagttaataatgcagagtcgagactttct

SEQ ID NO: 461950 - DNA, 60 bp, Artificial
  Synthetic oligonucleotide
tcggcaggcagacctgttcatggcatgtacaatgtcaaccaccgcggcatacaaccagct

SEQ ID NO: 461951 - DNA, 59 bp, Artificial
  Synthetic oligonucleotide
tcggcagggaactgatgtatggatggggcggacaattagtcgaacctccaggtcaggat

SEQ ID NO: 461952 - DNA, 56 bp, Artificial
  Synthetic oligonucleotide
tcggcagtccccgtggactgggtcccgaccggtaggacgacctggtcaattcatgc

SEQ ID NO: 461953 - DNA, 53 bp, Artificial
  Synthetic oligonucleotide
tcggcagtggagttctggcgggtaatgctttcgtatatccacaccagatcatt

SEQ ID NO: 461954 - DNA, 54 bp, Artificial
  Synthetic oligonucleotide
tcggcattacccaagacacacaaggcgttcacctctattcatctcgaaaagaga

SEQ ID NO: 461955 - DNA, 60 bp, Artificial
  Synthetic oligonucleotide
tcggccaaaatatgttatatcactacttaggccgggcaggatacacgatacatgttcagt

SEQ ID NO: 461956 - DNA, 57 bp, Artificial
  Synthetic oligonucleotide
tcggccaatcatgtggtagtcttaaaggttatttattagtggtgggccactatatac

SEQ ID NO: 461957 - DNA, 54 bp, Artificial
  Synthetic oligonucleotide
tcggccaatgttatgcgttcctggaacgttagataagtggaaagtgacgtatgc

SEQ ID NO: 461958 - DNA, 52 bp, Artificial
  Synthetic oligonucleotide
tcggccaccgttcccactgtttctcctccccttacaaacagtaacaactcct

SEQ ID NO: 461959 - DNA, 55 bp, Artificial
  Synthetic oligonucleotide
tcggccagatctaaatttggctacggggctaaggacgtccggaacctatcccgca

SEQ ID NO: 461960 - DNA, 55 bp, Artificial
  Synthetic oligonucleotide
tcggccaggcacccattgggagatcgattttacagaagtcaagccagggctgtat

SEQ ID NO: 461961 - DNA, 58 bp, Artificial
  Synthetic oligonucleotide
tcggcccactcttgcatatcgtctggcacgttagtgaacgaggataggggaaacggag

SEQ ID NO: 461962 - DNA, 60 bp, Artificial
  Synthetic oligonucleotide
tcggcccatgtatcggaagcccatgatgtacaggatgtggaggagtccagatgtgccctt

SEQ ID NO: 461963 - DNA, 55 bp, Artificial
  Synthetic oligonucleotide
tcggccccgttcacttccgaaatcaagttaaaatacgtcgcagagttgacataaa

SEQ ID NO: 461964 - DNA, 60 bp, Artificial
  Synthetic oligonucleotide
tcggccctggtgatagatctgtgcgtcgcttcaaaccgtctgctaccttaaagtctgcat

SEQ ID NO: 461965 - DNA, 55 bp, Artificial
  Synthetic oligonucleotide
tcggcccttggaaagcatgccagacattagccttgatgcatgatgccattgtctt

SEQ ID NO: 461966 - DNA, 58 bp, Artificial
  Synthetic oligonucleotide
tcggccctttgtattccaggctaatcggcacttcgacttcaatcaagaaaccgctggc

SEQ ID NO: 461967 - DNA, 50 bp, Artificial
  Synthetic oligonucleotide
tcggccgcctccccgagttttaccaccccaagcaaaagacggggtcgaaa

SEQ ID NO: 461968 - DNA, 55 bp, Artificial
  Synthetic oligonucleotide
tcggccgcggcgcgtctggacttgtcggtctcctcacaccaggcgccaaacaaaa

SEQ ID NO: 461969 - DNA, 53 bp, Artificial
  Synthetic oligonucleotide
tcggccgctactttaacagctcgcgtttaaccttttattcgtccgtccaggta

SEQ ID NO: 461970 - DNA, 57 bp, Artificial
  Synthetic oligonucleotide
tcggccgtatggtcggtcataaccaactactctttaccggtttgtcttctgatatca

SEQ ID NO: 461971 - DNA, 52 bp, Artificial
  Synthetic oligonucleotide
tcggccgtgtggatgtcggctatgtaaccccggctgggggagtaattaatca

SEQ ID NO: 461972 - DNA, 59 bp, Artificial
  Synthetic oligonucleotide
tcggcctacgcaggtcgcatgaacggctcgctggccggtggcagtaaggcggcaggcac

SEQ ID NO: 461973 - DNA, 60 bp, Artificial
  Synthetic oligonucleotide
tcggcctcatgctgtagtcatcgatggcaaggcgcgagtcatgctgtctgacaagtgcta

SEQ ID NO: 461974 - DNA, 60 bp, Artificial
  Synthetic oligonucleotide
tcggcctcgtgtgggcctatatagtcgtgcattgcaccaggtgcaggttacagaccctgc

SEQ ID NO: 461975 - DNA, 54 bp, Artificial
  Synthetic oligonucleotide
tcggcctgccaggatcgaggggccagcagcttttatcgaaatttggtatggttt

SEQ ID NO: 461976 - DNA, 57 bp, Artificial
  Synthetic oligonucleotide
tcggcctgtccagataaaggagccagcagcttttaccggaacttggtatggtttgtg

SEQ ID NO: 461977 - DNA, 55 bp, Artificial
  Synthetic oligonucleotide
tcggccttagtgaccaaaggaatagcggactctgaaggtccaagagtgcagttcc

SEQ ID NO: 461978 - DNA, 55 bp, Artificial
  Synthetic oligonucleotide
tcggccttcgtgagggcgtatgccgaccgaacgaacctcagcccacccactgact

SEQ ID NO: 461979 - DNA, 55 bp, Artificial
  Synthetic oligonucleotide
tcggcgaaagggaccaccgacgtctaccactcccgagcgtgtccgcaggttcaga

SEQ ID NO: 461980 - DNA, 60 bp, Artificial
  Synthetic oligonucleotide
tcggcgaacgtgacgtaatgtagtagtggtgtctataaagattatatcaattgcgctgtc

SEQ ID NO: 461981 - DNA, 60 bp, Artificial
  Synthetic oligonucleotide
tcggcgaagatcgattcagttttgcctccattaactatacgcgaggcgagcggtgtgcgt

SEQ ID NO: 461982 - DNA, 60 bp, Artificial
  Synthetic oligonucleotide
tcggcgaagctaaagaaccgctacctggatccattctggaaatgtgggatggtgagatct

SEQ ID NO: 461983 - DNA, 59 bp, Artificial
  Synthetic oligonucleotide
tcggcgacagacgaatacgggtcgatcggcgcggaatgggaataccagcactcgggcta

SEQ ID NO: 461984 - DNA, 57 bp, Artificial
  Synthetic oligonucleotide
tcggcgactgtgtacaggccgattggtgccccatttctggggggctttgttccgctc

SEQ ID NO: 461985 - DNA, 57 bp, Artificial
  Synthetic oligonucleotide
tcggcgagagaaactcaacgagccctaaatcagggctgtgatttttgaggttacatt

SEQ ID NO: 461986 - DNA, 50 bp, Artificial
  Synthetic oligonucleotide
tcggcgagcaaccgtatcacgaagagatccgtctgtgtgtggagcagggg

SEQ ID NO: 461987 - DNA, 55 bp, Artificial
  Synthetic oligonucleotide
tcggcgagcattacttcagaagaaacctaacgctgttaatgggtcaacaccgaaa

SEQ ID NO: 461988 - DNA, 60 bp, Artificial
  Synthetic oligonucleotide
tcggcgaggagcttgtcatgctaaaagaccccgcattactgcaaatacagacagtgctac

SEQ ID NO: 461989 - DNA, 60 bp, Artificial
  Synthetic oligonucleotide
tcggcgagtgaagcgcgactcatacgcaggagtggttaagcgtgggtatacacgctaagc

SEQ ID NO: 461990 - DNA, 60 bp, Artificial
  Synthetic oligonucleotide
tcggcgatgccgcgagagcaaaggtttcccttgtcagggggatgtctgggtggctcaata

SEQ ID NO: 461991 - DNA, 60 bp, Artificial
  Synthetic oligonucleotide
tcggcgcaatgtcaggtgcaggaaatacaaagctggcaataccgattgtcgaaaagtaca

SEQ ID NO: 461992 - DNA, 60 bp, Artificial
  Synthetic oligonucleotide
tcggcgcgcacacattagacggagtcgtcgtgacgaaaacatgtgatacggatattacgt

SEQ ID NO: 461993 - DNA, 55 bp, Artificial
  Synthetic oligonucleotide
tcggcgctcgaggtggtcttgaggaagcgggcggtgcgcagcttcgcgaacatcg

SEQ ID NO: 461994 - DNA, 56 bp, Artificial
  Synthetic oligonucleotide
tcggcggctgttgtttgacaaacccagcttttgtacacaggaaatgtgacaaaaaa

SEQ ID NO: 461995 - DNA, 59 bp, Artificial
  Synthetic oligonucleotide
tcggcgggctgccgacagaattgatttcgtcggctggaggtcaactgttctactcccgc

SEQ ID NO: 461996 - DNA, 55 bp, Artificial
  Synthetic oligonucleotide
tcggcggtagcgtcccggcccttgtttatgttcgcccgatcagtgaaaggccgat

SEQ ID NO: 461997 - DNA, 56 bp, Artificial
  Synthetic oligonucleotide
tcggcggtcccgtcacattgggttccaacaagtcgaacaacctggtctatacacgc

SEQ ID NO: 461998 - DNA, 60 bp, Artificial
  Synthetic oligonucleotide
tcggcgtaatgatgacgttctcggaacgtgagctattgtgggcttgtcgggctccacatt

SEQ ID NO: 461999 - DNA, 55 bp, Artificial
  Synthetic oligonucleotide
tcggcgtactggaccttaatgacggacgagcgcctatatcccgagttgataccgt

SEQ ID NO: 462000 - DNA, 57 bp, Artificial
  Synthetic oligonucleotide
tcggcgtaggttgtggttgaaccggacttcgatgtggtatattctggtcctggtgaa

SEQ ID NO: 462001 - DNA, 51 bp, Artificial
  Synthetic oligonucleotide
tcggcgttaataatcatcattggcctcgtattggcgactctagtggccatg

SEQ ID NO: 462002 - DNA, 57 bp, Artificial
  Synthetic oligonucleotide
tcggcgttaccacaccgaaacccactatcagaacgaagcacagaacgctcggacttg

SEQ ID NO: 462003 - DNA, 53 bp, Artificial
  Synthetic oligonucleotide
tcggctaagcactctgaaaaaattacttagccgtgcccattgggagaaagctc

SEQ ID NO: 462004 - DNA, 55 bp, Artificial
  Synthetic oligonucleotide
tcggctacaaccaaatgtgaccacaagcgcgttcaactatttgtcgccactccct

SEQ ID NO: 462005 - DNA, 57 bp, Artificial
  Synthetic oligonucleotide
tcggctaccaatcaacaaactccacggaaactgtagacacactaacagaaaacaatg

SEQ ID NO: 462006 - DNA, 57 bp, Artificial
  Synthetic oligonucleotide
tcggctaccagtcaacaaactccacggaaactgttgatacgctaatagaaaccaatg

SEQ ID NO: 462007 - DNA, 55 bp, Artificial
  Synthetic oligonucleotide
tcggctaggaacatggatgatacgcacagtattattcagtttctacaacgccccg

SEQ ID NO: 462008 - DNA, 52 bp, Artificial
  Synthetic oligonucleotide
tcggctatatcggtcgagctaccggaaccccagtccgccgtagtctgctcta

SEQ ID NO: 462009 - DNA, 60 bp, Artificial
  Synthetic oligonucleotide
tcggctcaacttcgacagccctatggctcgccgtgctactgcccccattgtccgtgccac

SEQ ID NO: 462010 - DNA, 60 bp, Artificial
  Synthetic oligonucleotide
tcggctcaatatgtttcgagtattacactacgacaaagatctctcaaggtgagatagacg

SEQ ID NO: 462011 - DNA, 51 bp, Artificial
  Synthetic oligonucleotide
tcggctcaatggtggacattgtcgtggacgacatgaaacgcgagaaaattg

SEQ ID NO: 462012 - DNA, 57 bp, Artificial
  Synthetic oligonucleotide
tcggctccgtatcacctacattcctactaccggatccacttccacgggtcgtgtctc

SEQ ID NO: 462013 - DNA, 60 bp, Artificial
  Synthetic oligonucleotide
tcggctcggcagcaattgatggactaatccagggcagtgttgaatcggtattaacgggtg

SEQ ID NO: 462014 - DNA, 57 bp, Artificial
  Synthetic oligonucleotide
tcggctctgaatggacaaattgtacccgtgaaaatgcaagtaaggttagcaaaagcg

SEQ ID NO: 462015 - DNA, 55 bp, Artificial
  Synthetic oligonucleotide
tcggctctggccctgtctctatttctgctgtcggtgtcctcgcacctcattctgc

SEQ ID NO: 462016 - DNA, 60 bp, Artificial
  Synthetic oligonucleotide
tcggctcttgcgcgttcaaatcgcgcgttggaattgccaatcactccctctatgacgtga

SEQ ID NO: 462017 - DNA, 50 bp, Artificial
  Synthetic oligonucleotide
tcggctgacaaccgagtgcaataaccactatactaataaacctatgccga

SEQ ID NO: 462018 - DNA, 60 bp, Artificial
  Synthetic oligonucleotide
tcggctgatctgtcgacgctctcacagtcggctattggtaattccactggatttcctccg

SEQ ID NO: 462019 - DNA, 60 bp, Artificial
  Synthetic oligonucleotide
tcggctgcacttggatgaatgggactgggtttactaaaacatgcggagcaccaccttgcc

SEQ ID NO: 462020 - DNA, 58 bp, Artificial
  Synthetic oligonucleotide
tcggctggaaagagccaaacatagtcaaaccacatgaaaagggcattaatcctaacta

SEQ ID NO: 462021 - DNA, 54 bp, Artificial
  Synthetic oligonucleotide
tcggctgggctcagaaaaagttcgggaaacgcaacaccatctggctgtttggac

SEQ ID NO: 462022 - DNA, 51 bp, Artificial
  Synthetic oligonucleotide
tcggctgtggaggctacgtaggtcttttatgctacggcatgcccagtccga

SEQ ID NO: 462023 - DNA, 60 bp, Artificial
  Synthetic oligonucleotide
tcggcttaggagggcgaaaagctgagtggcgtcggagggagctctactgcagggagccaa

SEQ ID NO: 462024 - DNA, 56 bp, Artificial
  Synthetic oligonucleotide
tcggcttcactcccaactcattcaaccggtctgcgatgcttctgtatccgtaccca

SEQ ID NO: 462025 - DNA, 59 bp, Artificial
  Synthetic oligonucleotide
tcggcttcattatcttttctgataactactttacgccacaagtttgcactagaatgtta

SEQ ID NO: 462026 - DNA, 60 bp, Artificial
  Synthetic oligonucleotide
tcggcttgactcacgtgccctggttaacgttgggggagatcagctcatgttcgtagaata

SEQ ID NO: 462027 - DNA, 51 bp, Artificial
  Synthetic oligonucleotide
tcggcttgggccgcagatgtatatgcttcgtggtctccgcggcccgttagg

SEQ ID NO: 462028 - DNA, 55 bp, Artificial
  Synthetic oligonucleotide
tcggcttggggaactgacgtcaccatccagcgaaatcgatggccggccctcatcg

SEQ ID NO: 462029 - DNA, 59 bp, Artificial
  Synthetic oligonucleotide
tcgggaaaaatcggtgggagtgctcaagtgattgttgtgtggcaacgttgtcgtgagtc

SEQ ID NO: 462030 - DNA, 55 bp, Artificial
  Synthetic oligonucleotide
tcgggaaaagtacccgccacgcatgttgagtacataagggcttgcacaaactggc

SEQ ID NO: 462031 - DNA, 54 bp, Artificial
  Synthetic oligonucleotide
tcgggaaagctatggccgaaccgagacgcatctgacttcccagtcactgtgcgg

SEQ ID NO: 462032 - DNA, 55 bp, Artificial
  Synthetic oligonucleotide
tcgggaacggaacaatacagaagattggaatatgggacggggaagaggagttcca

SEQ ID NO: 462033 - DNA, 60 bp, Artificial
  Synthetic oligonucleotide
tcgggaagctcattgttgccaattatggacaaggagcatctgatcctgatatgttggggg

SEQ ID NO: 462034 - DNA, 58 bp, Artificial
  Synthetic oligonucleotide
tcgggaatggggctcaggatacgtttactctgtcagaccccgcatacatcggcctacc

SEQ ID NO: 462035 - DNA, 60 bp, Artificial
  Synthetic oligonucleotide
tcgggaatgtccaggacgcctgtaacgattcattgtccgtcattctcttgtcgtggatct

SEQ ID NO: 462036 - DNA, 58 bp, Artificial
  Synthetic oligonucleotide
tcgggacaacttcgacatcaggctggttcaagaacacaataacaaacaacttagaaca

SEQ ID NO: 462037 - DNA, 55 bp, Artificial
  Synthetic oligonucleotide
tcgggacacagctgagtgaaggcagtaagggcggcaggaatcaaccacgacggag

SEQ ID NO: 462038 - DNA, 60 bp, Artificial
  Synthetic oligonucleotide
tcgggacatagaatgctgattgcattttcgaactctgagcaaaggaactgctttttggct

SEQ ID NO: 462039 - DNA, 55 bp, Artificial
  Synthetic oligonucleotide
tcgggacccagcctttggtgaaaacacaatgactgctgaggttccggtagtgtgg

SEQ ID NO: 462040 - DNA, 55 bp, Artificial
  Synthetic oligonucleotide
tcgggaccggcgacccggctgttggtggttggatcaaaggtcgtgatggccttct

SEQ ID NO: 462041 - DNA, 56 bp, Artificial
  Synthetic oligonucleotide
tcgggaccgtggccaccgagcccaagctcttcggggacttcaacacttctgacacc

SEQ ID NO: 462042 - DNA, 59 bp, Artificial
  Synthetic oligonucleotide
tcgggacgccgaggaaagacgtcgcaaagagcaaaagtgcgcagaagaggaagagaggc

SEQ ID NO: 462043 - DNA, 51 bp, Artificial
  Synthetic oligonucleotide
tcgggactgggcgcataacggcctacgagatctagccgtagctgtagagcc

SEQ ID NO: 462044 - DNA, 56 bp, Artificial
  Synthetic oligonucleotide
tcgggagagcccttcacctaccttctttcaaggcactcgagcggaaatggtacgac

SEQ ID NO: 462045 - DNA, 57 bp, Artificial
  Synthetic oligonucleotide
tcgggagcgccactctctgttcggccctctacgtgggggacctgtgcgggtctgtct

SEQ ID NO: 462046 - DNA, 60 bp, Artificial
  Synthetic oligonucleotide
tcgggagctagcggcacttctgggaccgacgggagccgatcctcaacctactgctgtcca

SEQ ID NO: 462047 - DNA, 54 bp, Artificial
  Synthetic oligonucleotide
tcgggaggactttcggctcactcccgctcggagtaggacgatcgactgctaaac

SEQ ID NO: 462048 - DNA, 56 bp, Artificial
  Synthetic oligonucleotide
tcgggaggagagtttggtacagccgtttgcagcacggggcgatctaagctttgggt

SEQ ID NO: 462049 - DNA, 60 bp, Artificial
  Synthetic oligonucleotide
tcgggaggttctacatacaaatgtgcactgaactcaaactcagtgactacgaagggagac

SEQ ID NO: 462050 - DNA, 51 bp, Artificial
  Synthetic oligonucleotide
tcgggagttcctgagctcctgcggcacagatgcgtcagtgccctggatgtc

SEQ ID NO: 462051 - DNA, 57 bp, Artificial
  Synthetic oligonucleotide
tcgggagtttgtcattggagacttattggaagacgttactaatgttgctaggaataa

SEQ ID NO: 462052 - DNA, 57 bp, Artificial
  Synthetic oligonucleotide
tcgggataagggttttagcgctaatctcattacaggtctccctaacactctatgggc

SEQ ID NO: 462053 - DNA, 55 bp, Artificial
  Synthetic oligonucleotide
tcgggataccggagtctattatcggactcatccagaactctcgaacgattcggcg

SEQ ID NO: 462054 - DNA, 55 bp, Artificial
  Synthetic oligonucleotide
tcgggatcacaaagcccgggaggagggcgtttacagcgtcttacatcaacgggac

SEQ ID NO: 462055 - DNA, 59 bp, Artificial
  Synthetic oligonucleotide
tcgggatcactcagcgccctaggcgctctctcgctgaacctcccttggaaaaggaggag

SEQ ID NO: 462056 - DNA, 58 bp, Artificial
  Synthetic oligonucleotide
tcgggatggctccggtgaccctgatcgactctaacaacccaatggtggctacggccca

SEQ ID NO: 462057 - DNA, 60 bp, Artificial
  Synthetic oligonucleotide
tcgggattagaggtaaacatagtaacagactcacaatatgcattaggaatcatccaagca

SEQ ID NO: 462058 - DNA, 56 bp, Artificial
  Synthetic oligonucleotide
tcgggattcaaatcgtcaagaaaatgaagacaggggaaaggttcttcaagatctgg

SEQ ID NO: 462059 - DNA, 55 bp, Artificial
  Synthetic oligonucleotide
tcgggcaatgcagtacgcgagatccatcgtcatgacatcgacccggtcctcgtag

SEQ ID NO: 462060 - DNA, 56 bp, Artificial
  Synthetic oligonucleotide
tcgggcacagatggagttctttaactccgtcaacgagtcgattaagaccgagtaaa

SEQ ID NO: 462061 - DNA, 55 bp, Artificial
  Synthetic oligonucleotide
tcgggcagcagcacgccggacagcacgatcgtttcctcgtcctcgccgacgtact

SEQ ID NO: 462062 - DNA, 60 bp, Artificial
  Synthetic oligonucleotide
tcgggcatacgtttgcagagattgcatacacactgtgccaagcttcagctaataggccct

SEQ ID NO: 462063 - DNA, 55 bp, Artificial
  Synthetic oligonucleotide
tcgggcatagaaaaattaggccacataatatagcaactggtgattatcctcctcg

SEQ ID NO: 462064 - DNA, 53 bp, Artificial
  Synthetic oligonucleotide
tcgggccacgccggctaaacctccagtggtgaggccggtagggtccctgttag

SEQ ID NO: 462065 - DNA, 60 bp, Artificial
  Synthetic oligonucleotide
tcgggccagcacattacaaggagctgtctgatctcaacaccataagccaccctttaatgg

SEQ ID NO: 462066 - DNA, 59 bp, Artificial
  Synthetic oligonucleotide
tcgggccatccggtattcgtcactgacgtaatgccgattggtctagctggaggactccc

SEQ ID NO: 462067 - DNA, 53 bp, Artificial
  Synthetic oligonucleotide
tcgggccctctggaagactccggagctggatttgggaaaggggtacaagttcg

SEQ ID NO: 462068 - DNA, 55 bp, Artificial
  Synthetic oligonucleotide
tcgggccgtccgaacccttcgcgtctcggatcccgcaggcttcgttcgcatgcac

SEQ ID NO: 462069 - DNA, 52 bp, Artificial
  Synthetic oligonucleotide
tcgggcctagcaacacggacgaactcggaacagtgacgttcctccatgtccg

SEQ ID NO: 462070 - DNA, 53 bp, Artificial
  Synthetic oligonucleotide
tcgggcctctcgtttttgttattcgaaacgtgatctacgcgtatagttatttt

SEQ ID NO: 462071 - DNA, 59 bp, Artificial
  Synthetic oligonucleotide
tcgggcgcatgttacgtgttcgctttactcggtcgtgtctttaccatcggcacaatgaa

SEQ ID NO: 462072 - DNA, 50 bp, Artificial
  Synthetic oligonucleotide
tcgggcgcattcagacttggttcgctgggacgtgtttcgttgtcacccgt

SEQ ID NO: 462073 - DNA, 53 bp, Artificial
  Synthetic oligonucleotide
tcgggcgccagccgtgagagattatttggcgctttagacgtcgagtacatgga

SEQ ID NO: 462074 - DNA, 60 bp, Artificial
  Synthetic oligonucleotide
tcgggctcagtgatgtgctaggaccttctgtgcttgtgaaggcgagaggtgcacggacta

SEQ ID NO: 462075 - DNA, 60 bp, Artificial
  Synthetic oligonucleotide
tcgggctccaaggacggtggaacgcctcactcatacaacgcgatctcatgatagcaggag

SEQ ID NO: 462076 - DNA, 59 bp, Artificial
  Synthetic oligonucleotide
tcgggctgcagtgtgccctcaaaaacaacagagccctgttaacactcctaatttgtgcc

SEQ ID NO: 462077 - DNA, 60 bp, Artificial
  Synthetic oligonucleotide
tcgggctgcgtgtctccgacgaatcggatgaacgccctcagggccttgatgtcagaaaac

SEQ ID NO: 462078 - DNA, 55 bp, Artificial
  Synthetic oligonucleotide
tcgggctgttacacaagaattccgccatgtgataatccactcgtgcaatacaacg

SEQ ID NO: 462079 - DNA, 52 bp, Artificial
  Synthetic oligonucleotide
tcgggcttaatcgttaaaactccggaataatcgtataaactcgggaataatc

SEQ ID NO: 462080 - DNA, 51 bp, Artificial
  Synthetic oligonucleotide
tcgggcttatggtgttcttgggactgatgtgggtgacgaccatggttggac

SEQ ID NO: 462081 - DNA, 60 bp, Artificial
  Synthetic oligonucleotide
tcgggcttgggactggccgggctgtgggcaaggctctgtggacgctcttaatatgcacct

SEQ ID NO: 462082 - DNA, 60 bp, Artificial
  Synthetic oligonucleotide
tcgggcttgtatggggctttttactgacaattgagcttgttatttgggcagcaagtgcag

SEQ ID NO: 462083 - DNA, 51 bp, Artificial
  Synthetic oligonucleotide
tcgggcttgttcgactctgttgtcctatgcgaggcgtatgacactggttgc

SEQ ID NO: 462084 - DNA, 55 bp, Artificial
  Synthetic oligonucleotide
tcgggctttgaaatcatcaaagttacagaggggtggattaactctcccaaccatg

SEQ ID NO: 462085 - DNA, 55 bp, Artificial
  Synthetic oligonucleotide
tcggggaaaatccctcacactcgcctgagacattgtgtttggtttcctaaggttc

SEQ ID NO: 462086 - DNA, 55 bp, Artificial
  Synthetic oligonucleotide
tcggggaagtgctggccttggctcaggctaagacagccgaggcctacacagctac

SEQ ID NO: 462087 - DNA, 55 bp, Artificial
  Synthetic oligonucleotide
tcggggaatctggatctatgcattgtgaattacgctatcgaggcgagcttcgggt

SEQ ID NO: 462088 - DNA, 53 bp, Artificial
  Synthetic oligonucleotide
tcggggaatgggtctcttatttatagtagaggacctaaatggcattgtcgtaa

SEQ ID NO: 462089 - DNA, 59 bp, Artificial
  Synthetic oligonucleotide
tcggggaattttcgttcgtgctgagggcatacgagtcgcattaaattcaagaccagaca

SEQ ID NO: 462090 - DNA, 50 bp, Artificial
  Synthetic oligonucleotide
tcggggacctctcccgaggggaaaagatctcggcggacatcaatggacgc

SEQ ID NO: 462091 - DNA, 60 bp, Artificial
  Synthetic oligonucleotide
tcggggactacataactaatgatagctatccgaagatgtctgtggttatgaggaatacca

SEQ ID NO: 462092 - DNA, 54 bp, Artificial
  Synthetic oligonucleotide
tcggggagaacacaggtccctccccgaaacaggagcagagcttcgggatcgggg

SEQ ID NO: 462093 - DNA, 59 bp, Artificial
  Synthetic oligonucleotide
tcggggataccataacaatccacgacaaaggattcacaccagcgcttgacataagagcg

SEQ ID NO: 462094 - DNA, 57 bp, Artificial
  Synthetic oligonucleotide
tcggggatacctagtggccagctgagagctttcagaacatttggcaaccctctccta

SEQ ID NO: 462095 - DNA, 60 bp, Artificial
  Synthetic oligonucleotide
tcggggatgcgtatttcacgatcccgctatatgagccataccaaaaatacacatgtttta

SEQ ID NO: 462096 - DNA, 58 bp, Artificial
  Synthetic oligonucleotide
tcggggatgtagctcaaggaaaagccaccactgcttctagtattgagtatttaactct

SEQ ID NO: 462097 - DNA, 56 bp, Artificial
  Synthetic oligonucleotide
tcggggcaatcaaaaggggtgggatttgtcggcacaggaatggtggttaagatcga

SEQ ID NO: 462098 - DNA, 59 bp, Artificial
  Synthetic oligonucleotide
tcggggcacgtttttggtaacgacgagatgctgacaaaacttctcaacgtatgatctgc

SEQ ID NO: 462099 - DNA, 60 bp, Artificial
  Synthetic oligonucleotide
tcggggcagaagtagtgccaggatttcaggcactctcagaaggctgcacgccctatgata

SEQ ID NO: 462100 - DNA, 55 bp, Artificial
  Synthetic oligonucleotide
tcggggcagcagcaaaacactgtttcaagcccagtgtattttgctactccaagcg

SEQ ID NO: 462101 - DNA, 60 bp, Artificial
  Synthetic oligonucleotide
tcggggcatgttgcagggatctttagggctgctgtatgcaccagaggtgtggcaaaagcc

SEQ ID NO: 462102 - DNA, 52 bp, Artificial
  Synthetic oligonucleotide
tcggggcgtaagtcactaaaggtgaccaaaacgaccgagcctacaggttccg

SEQ ID NO: 462103 - DNA, 59 bp, Artificial
  Synthetic oligonucleotide
tcggggctgaatatatacgtgatctaataggggtgctacggtgtaagagttatggcgaa

SEQ ID NO: 462104 - DNA, 55 bp, Artificial
  Synthetic oligonucleotide
tcgggggacaccctaaactctatggaaacggtggaatgggggacaatatatatga

SEQ ID NO: 462105 - DNA, 59 bp, Artificial
  Synthetic oligonucleotide
tcgggggcaccagaagttggtgtgaacctcgacttgggcggggtcatctgcagtgagta

SEQ ID NO: 462106 - DNA, 50 bp, Artificial
  Synthetic oligonucleotide
tcgggggcgacggattgcacttgaaacacggtagacgacagctccgagga

SEQ ID NO: 462107 - DNA, 56 bp, Artificial
  Synthetic oligonucleotide
tcgggggggcgcgcctgtggcgcttatttactaaacagactccgagtcgccatttg

SEQ ID NO: 462108 - DNA, 57 bp, Artificial
  Synthetic oligonucleotide
tcggggggtccattgttatgccccgcgggacacgccgtgggcatattcagggctgcg

SEQ ID NO: 462109 - DNA, 59 bp, Artificial
  Synthetic oligonucleotide
tcgggggtcccccgcctgcgaatgtggctccggatccagctcactacacggctgtcctg

SEQ ID NO: 462110 - DNA, 54 bp, Artificial
  Synthetic oligonucleotide
tcgggggtcgcttgttactggtctaagtaccggtggcgttcgtgccgtctggta

SEQ ID NO: 462111 - DNA, 60 bp, Artificial
  Synthetic oligonucleotide
tcggggtaccctcatctctaatcccgtggcactgctcgctacagagatgtgcactaccca

SEQ ID NO: 462112 - DNA, 54 bp, Artificial
  Synthetic oligonucleotide
tcggggtagcagggcatgtagtggctttgggcgtggtatcgctagttggcgcaa

SEQ ID NO: 462113 - DNA, 55 bp, Artificial
  Synthetic oligonucleotide
tcggggtatcagcgtcgccacagacagcaagtagcggcacgatagccgcgatcgt

SEQ ID NO: 462114 - DNA, 52 bp, Artificial
  Synthetic oligonucleotide
tcggggtcgtaatccttacgcaagagcctactgtaggaaacccctgagccta

SEQ ID NO: 462115 - DNA, 55 bp, Artificial
  Synthetic oligonucleotide
tcggggtgacgtacggatatgcaacggctgaggactttgtaagcgggcccaacac

SEQ ID NO: 462116 - DNA, 58 bp, Artificial
  Synthetic oligonucleotide
tcggggttcttatcagacctgtctggtgcaaccgtggatgtcaaagaggttaaattga

SEQ ID NO: 462117 - DNA, 58 bp, Artificial
  Synthetic oligonucleotide
tcggggttgattctgtgtactaaagatgaggtgttggctgagcagaccatttttaaat

SEQ ID NO: 462118 - DNA, 59 bp, Artificial
  Synthetic oligonucleotide
tcggggtttcgaggcgtcaggactgttgctggatctcatcgtgtagtgccattgagctt

SEQ ID NO: 462119 - DNA, 50 bp, Artificial
  Synthetic oligonucleotide
tcggggtttgggagcacgcgttgtgtcatggtttgcgaactgccgacgat

SEQ ID NO: 462120 - DNA, 55 bp, Artificial
  Synthetic oligonucleotide
tcgggtaattccacaataactacccaggaagctgtgagtgctgtagtagcttatg

SEQ ID NO: 462121 - DNA, 59 bp, Artificial
  Synthetic oligonucleotide
tcgggtacacttacattctcgaaggtagcatagccgctctcttcaggttcgggatcgga

SEQ ID NO: 462122 - DNA, 55 bp, Artificial
  Synthetic oligonucleotide
tcgggtagcctccaggtatcgaagaccgcgggatacactttgaagcaaacgtttc

SEQ ID NO: 462123 - DNA, 50 bp, Artificial
  Synthetic oligonucleotide
tcgggtatcattcaaggacacaaccgatgtagaacctagtggtctctaca

SEQ ID NO: 462124 - DNA, 56 bp, Artificial
  Synthetic oligonucleotide
tcgggtcaaaaacccacacaatagggcgatgccctgacttagcgatcacttaaagg

SEQ ID NO: 462125 - DNA, 54 bp, Artificial
  Synthetic oligonucleotide
tcgggtcaccctgtcgcgttccctcacgccgacgtgtgtttccaccgctcgtca

SEQ ID NO: 462126 - DNA, 60 bp, Artificial
  Synthetic oligonucleotide
tcgggtcatcatctttgctgcgcaactacttctggagcccgggtacccaccttgtgtgga

SEQ ID NO: 462127 - DNA, 55 bp, Artificial
  Synthetic oligonucleotide
tcgggtccaccatcgatgggagcccggtgcttcctactaacgcatcttccatgcg

SEQ ID NO: 462128 - DNA, 53 bp, Artificial
  Synthetic oligonucleotide
tcgggtccagactggtctgattggtctaaagggaatcttgttggaggatggag

SEQ ID NO: 462129 - DNA, 50 bp, Artificial
  Synthetic oligonucleotide
tcgggtccatacgtgtccacttcccgaccgggtgacttacacaccgacct

SEQ ID NO: 462130 - DNA, 54 bp, Artificial
  Synthetic oligonucleotide
tcgggtcctctcaaacttgggctatgtaatcggggaatgggtccttatttatag

SEQ ID NO: 462131 - DNA, 53 bp, Artificial
  Synthetic oligonucleotide
tcgggtcgtccgtcgtccgtgacgtttgtcagcgcgcgattaaatagtgccag

SEQ ID NO: 462132 - DNA, 55 bp, Artificial
  Synthetic oligonucleotide
tcgggtctcgggcttaacgctgtagcgtattaccggggtcttgacgtgtccgtca

SEQ ID NO: 462133 - DNA, 53 bp, Artificial
  Synthetic oligonucleotide
tcgggtgaatgaccggaggagggggttcaactggagggggttcaactggagga

SEQ ID NO: 462134 - DNA, 51 bp, Artificial
  Synthetic oligonucleotide
tcgggtgatggatgccgcagatacattcaggaacaccgcggattctgcgat

SEQ ID NO: 462135 - DNA, 55 bp, Artificial
  Synthetic oligonucleotide
tcgggtgatgtagagcgttgcgccgacgcagtctttgcgatcggcgtagagcaga

SEQ ID NO: 462136 - DNA, 60 bp, Artificial
  Synthetic oligonucleotide
tcgggtggagtcatgaggagtggcttcttagcggaattcttcttggacaacgattgcgaa

SEQ ID NO: 462137 - DNA, 51 bp, Artificial
  Synthetic oligonucleotide
tcgggtgtaacttcatccgatccaagcaaggcggagtacggttcgagggaa

SEQ ID NO: 462138 - DNA, 55 bp, Artificial
  Synthetic oligonucleotide
tcgggtgtgaagcccgtccatattacgctcggtcaagcagtctgtttgtagacgg

SEQ ID NO: 462139 - DNA, 60 bp, Artificial
  Synthetic oligonucleotide
tcgggtgtgaagtctggcgggcagatgacggatgtgttgaagactgtcgccgatgtgtct

SEQ ID NO: 462140 - DNA, 56 bp, Artificial
  Synthetic oligonucleotide
tcgggtgtggagtcttgcgcgttgttactcaatgtggaagccaacacggtgggatg

SEQ ID NO: 462141 - DNA, 55 bp, Artificial
  Synthetic oligonucleotide
tcgggttaggtctatcaccctggggaactccacgatcactacgcaggagtgtgca

SEQ ID NO: 462142 - DNA, 56 bp, Artificial
  Synthetic oligonucleotide
tcgggttcactgacgcaaaaaacacggttctgcgctggtaggtcgattcaagccgg

SEQ ID NO: 462143 - DNA, 54 bp, Artificial
  Synthetic oligonucleotide
tcgggttcaggtttatgaactatatccttacagcagaacatgtggttcagggat

SEQ ID NO: 462144 - DNA, 55 bp, Artificial
  Synthetic oligonucleotide
tcgggttccggccggtatgggttggctacgatccagcgctttccggcgactcggc

SEQ ID NO: 462145 - DNA, 51 bp, Artificial
  Synthetic oligonucleotide
tcgggttcctgggctagacacgactggttctgttagcgcaagcgatgcgtt

SEQ ID NO: 462146 - DNA, 57 bp, Artificial
  Synthetic oligonucleotide
tcgggttcgaatttattcgttccaatctgtttgtgcaggcgccaaaaactggcgatg

SEQ ID NO: 462147 - DNA, 53 bp, Artificial
  Synthetic oligonucleotide
tcgggttgaacataaccctaagcgacttgaggccgcttaccgagagacgtgct

SEQ ID NO: 462148 - DNA, 49 bp, Artificial
  Synthetic oligonucleotide
tcgggttgagaaaccttgaatcttttcctttggaaccctggttcccccg

SEQ ID NO: 462149 - DNA, 54 bp, Artificial
  Synthetic oligonucleotide
tcgggttggggataccaagtcgaagaatctgttgttttgacatttgaattttcc

SEQ ID NO: 462150 - DNA, 60 bp, Artificial
  Synthetic oligonucleotide
tcgggttgtgttgggacataaccgttgatggcgagcagggttcagctcagaatacaacga

SEQ ID NO: 462151 - DNA, 56 bp, Artificial
  Synthetic oligonucleotide
tcgggtttaagtgggatttctctctcctcaattggagacacctctgagcaagtctc

SEQ ID NO: 462152 - DNA, 59 bp, Artificial
  Synthetic oligonucleotide
tcgggtttgttcctgataccggccctgcatcacgcagtgtaatccgctccattataaaa

SEQ ID NO: 462153 - DNA, 53 bp, Artificial
  Synthetic oligonucleotide
tcgggttttcactgaagtacatcgggccacctgcctgggtactgggggcgctg

SEQ ID NO: 462154 - DNA, 55 bp, Artificial
  Synthetic oligonucleotide
tcggtaaagtgtctcttactgcagaggcggttgctcatctacaaggcatggacgc

SEQ ID NO: 462155 - DNA, 51 bp, Artificial
  Synthetic oligonucleotide
tcggtaaattttccgataaagttagaggacgtacctttgtagatcacgcgg

SEQ ID NO: 462156 - DNA, 51 bp, Artificial
  Synthetic oligonucleotide
tcggtaacatcttgcagattgtgactctagacaaggtagcgtttagtgctc

SEQ ID NO: 462157 - DNA, 53 bp, Artificial
  Synthetic oligonucleotide
tcggtaacgacgaactacttacgaaactcttaaatatataatcccgtgactgg

SEQ ID NO: 462158 - DNA, 50 bp, Artificial
  Synthetic oligonucleotide
tcggtaagaagtatgggtacgacttcgaacacgaggctacgtacgacagc

SEQ ID NO: 462159 - DNA, 58 bp, Artificial
  Synthetic oligonucleotide
tcggtaagtattgctggtaacgatgtttcggtcgaactacctgtcactgctacaactg

SEQ ID NO: 462160 - DNA, 55 bp, Artificial
  Synthetic oligonucleotide
tcggtaagtgcctgctgataccagaatatagtgtcctacgtcgacgctggttgga

SEQ ID NO: 462161 - DNA, 60 bp, Artificial
  Synthetic oligonucleotide
tcggtaagtggttggatgatagagatggtagcaaatatcgtatgttgaaccgtagactag

SEQ ID NO: 462162 - DNA, 51 bp, Artificial
  Synthetic oligonucleotide
tcggtaagtttcttcccctcctccaaactttttggaggcatttactactaa

SEQ ID NO: 462163 - DNA, 57 bp, Artificial
  Synthetic oligonucleotide
tcggtaatccattttagatgcagactcctgctagagtgtttgctcctactgagggac

SEQ ID NO: 462164 - DNA, 56 bp, Artificial
  Synthetic oligonucleotide
tcggtaatggtccgttatcttgggttggaggattgtgagtatatacaaccaaccac

SEQ ID NO: 462165 - DNA, 60 bp, Artificial
  Synthetic oligonucleotide
tcggtacaaatgacatagatgtacctacagtttgcgccctcaatttatgcttatcaatgc

SEQ ID NO: 462166 - DNA, 55 bp, Artificial
  Synthetic oligonucleotide
tcggtacacaccaaagtctctgtgtaccgatatatcggtacacaatatatactag

SEQ ID NO: 462167 - DNA, 56 bp, Artificial
  Synthetic oligonucleotide
tcggtacacatttaatttgggacattggattgcaatcgtcttgcacaatggtggtt

SEQ ID NO: 462168 - DNA, 57 bp, Artificial
  Synthetic oligonucleotide
tcggtaccgcttcaagtgatttctctgcaggcagcgtcctatcccttgctattaccg

SEQ ID NO: 462169 - DNA, 59 bp, Artificial
  Synthetic oligonucleotide
tcggtagaatctattgcgtgcagtgtgccgtaagcccgaggtgcaattactgttccgcg

SEQ ID NO: 462170 - DNA, 60 bp, Artificial
  Synthetic oligonucleotide
tcggtagcaaactgagcaatgcatggttctacagagactatgagatagtgcgtgggggct

SEQ ID NO: 462171 - DNA, 54 bp, Artificial
  Synthetic oligonucleotide
tcggtagtaccagatttaaaggaattagtttcaaccgaagcgcacattcaaaaa

SEQ ID NO: 462172 - DNA, 55 bp, Artificial
  Synthetic oligonucleotide
tcggtagtgaacaattgccgaaagacggagaaatacatcgtagaaacgaagaaag

SEQ ID NO: 462173 - DNA, 55 bp, Artificial
  Synthetic oligonucleotide
tcggtatatacaaaatgactgttcaggctgacttagtgaagtacatcgctctcca

SEQ ID NO: 462174 - DNA, 56 bp, Artificial
  Synthetic oligonucleotide
tcggtatatatgctccagcaagctacggacatataagcgtgctagaggagacacaa

SEQ ID NO: 462175 - DNA, 57 bp, Artificial
  Synthetic oligonucleotide
tcggtatcgcccaccaggcgactaccacgccgactgacctgaccgttaccacacgga

SEQ ID NO: 462176 - DNA, 51 bp, Artificial
  Synthetic oligonucleotide
tcggtattcacgcgggcacaattttcctgggaatggagtcagcctccccct

SEQ ID NO: 462177 - DNA, 55 bp, Artificial
  Synthetic oligonucleotide
tcggtattgaaagtacgcaccaccaaataaagtgtcgaggtcgggaatgtcttcg

SEQ ID NO: 462178 - DNA, 60 bp, Artificial
  Synthetic oligonucleotide
tcggtattgcgaagtactctatttcggttttcgagtagctcagtaagacagcaatggcgc

SEQ ID NO: 462179 - DNA, 55 bp, Artificial
  Synthetic oligonucleotide
tcggtatttagttggctcgaaaataatacggagaatcaacacctatttgctcgtg

SEQ ID NO: 462180 - DNA, 60 bp, Artificial
  Synthetic oligonucleotide
tcggtcaagtggttacggttgaggctcagaacagcgttatgccgttattgcgtgctatgg

SEQ ID NO: 462181 - DNA, 59 bp, Artificial
  Synthetic oligonucleotide
tcggtcaccttgaaaacggctgcggataatacgatcaggttcctgcgggattcatccag

SEQ ID NO: 462182 - DNA, 54 bp, Artificial
  Synthetic oligonucleotide
tcggtcactcacatttccggttcgtatctatctcctgcggatcaagaacaactc

SEQ ID NO: 462183 - DNA, 59 bp, Artificial
  Synthetic oligonucleotide
tcggtcacttgctgctaatttgaatacagtaacgtgtactggtggtagttacagcttcg

SEQ ID NO: 462184 - DNA, 57 bp, Artificial
  Synthetic oligonucleotide
tcggtcagacctatcctcactatagcctgttcgcctaccggacaaaaacggcgactg

SEQ ID NO: 462185 - DNA, 60 bp, Artificial
  Synthetic oligonucleotide
tcggtcatacgggccttttgaggctgtgcatagtggcgcgctagcatgtgtatcacgtgg

SEQ ID NO: 462186 - DNA, 60 bp, Artificial
  Synthetic oligonucleotide
tcggtcatataatattcggacgctacgtgtggaggaggctctctggctccgtgagtgtca

SEQ ID NO: 462187 - DNA, 56 bp, Artificial
  Synthetic oligonucleotide
tcggtcatccgatagatgctcataccaaccagttcattctcgaatcctttaaagtc

SEQ ID NO: 462188 - DNA, 60 bp, Artificial
  Synthetic oligonucleotide
tcggtcatgttggtttctaactcgaaagatgatgttgaacgtgcaacagcatacttcacg

SEQ ID NO: 462189 - DNA, 57 bp, Artificial
  Synthetic oligonucleotide
tcggtcattacttggcaaccagtacaaacgcctgagagacgtagtccgccggaagag

SEQ ID NO: 462190 - DNA, 51 bp, Artificial
  Synthetic oligonucleotide
tcggtccaaacgccgatccagttctagtctttgcggcattcaacgccggac

SEQ ID NO: 462191 - DNA, 56 bp, Artificial
  Synthetic oligonucleotide
tcggtccaaccaccaacgcggaccaagccccctaccagggcagagtatacgcaagc

SEQ ID NO: 462192 - DNA, 59 bp, Artificial
  Synthetic oligonucleotide
tcggtccctctgtctcactcaacgcctatcccacctcaacggaagaccgtgctgttgaa

SEQ ID NO: 462193 - DNA, 59 bp, Artificial
  Synthetic oligonucleotide
tcggtccggatgcatttcaattatcgaattggatttagaccatgaaggttattcagcag

SEQ ID NO: 462194 - DNA, 60 bp, Artificial
  Synthetic oligonucleotide
tcggtcctaacttggcctggatagctactagaccacttcgcaacgatgctaatgccatcc

SEQ ID NO: 462195 - DNA, 57 bp, Artificial
  Synthetic oligonucleotide
tcggtcgacagtctctgaatcgtcgattattgtcccggaaggaaagggatcattttg

SEQ ID NO: 462196 - DNA, 53 bp, Artificial
  Synthetic oligonucleotide
tcggtcgacggggtgactgtacctttaggtggtaaagtgggccaccactataa

SEQ ID NO: 462197 - DNA, 58 bp, Artificial
  Synthetic oligonucleotide
tcggtcgcaaggtacgtaattatcgccagattaactcgttccgtggcatgtggcctta

SEQ ID NO: 462198 - DNA, 55 bp, Artificial
  Synthetic oligonucleotide
tcggtcgtgccgttgtgttagaggtggctttgggctgccctgatgccgttcctcc

SEQ ID NO: 462199 - DNA, 60 bp, Artificial
  Synthetic oligonucleotide
tcggtcgttcagttgcagtcatcgatctgaaggagcagaactgtctcttccatgtggcga

SEQ ID NO: 462200 - DNA, 52 bp, Artificial
  Synthetic oligonucleotide
tcggtctaacccttcgctgggttgctgggaactgcaaggtcgtgccattcag

SEQ ID NO: 462201 - DNA, 60 bp, Artificial
  Synthetic oligonucleotide
tcggtctcacaggcagatggtgaccacaaccaatccactaatcaggcatgagaacaggat

SEQ ID NO: 462202 - DNA, 55 bp, Artificial
  Synthetic oligonucleotide
tcggtcttatgtgagtgctacgacgcgggctgtgcttggtacgagctcacgcccg

SEQ ID NO: 462203 - DNA, 57 bp, Artificial
  Synthetic oligonucleotide
tcggtgaaaatcgcaccacagccaatcggcgtgcgtgtaacaaagccgacaccgaaa

SEQ ID NO: 462204 - DNA, 57 bp, Artificial
  Synthetic oligonucleotide
tcggtgaatcctcccctgagaggcctcttcctaggcccggagtctacctccatctgg

SEQ ID NO: 462205 - DNA, 60 bp, Artificial
  Synthetic oligonucleotide
tcggtgacaatccgcgtcccaaagatggagagggcagctgtaatccagtgactgttgatg

SEQ ID NO: 462206 - DNA, 55 bp, Artificial
  Synthetic oligonucleotide
tcggtgagggaacaaagcttaagattaaggtgactaagaaacagaacaagacgta

SEQ ID NO: 462207 - DNA, 55 bp, Artificial
  Synthetic oligonucleotide
tcggtgcaaccatgcggataagttcaacgcgcatcaccgaaatgccatgcgaacc

SEQ ID NO: 462208 - DNA, 55 bp, Artificial
  Synthetic oligonucleotide
tcggtgcaacgactatgctaacttcaaatggcgcttatgtatatggagttctgcc

SEQ ID NO: 462209 - DNA, 53 bp, Artificial
  Synthetic oligonucleotide
tcggtgcaatggtgagggttggtgtttaccctggttgtaccgttgatgggatt

SEQ ID NO: 462210 - DNA, 55 bp, Artificial
  Synthetic oligonucleotide
tcggtgcacagtccatgacaactctatggctacatggatcacatgcagagtcgac

SEQ ID NO: 462211 - DNA, 52 bp, Artificial
  Synthetic oligonucleotide
tcggtgcagagggtcgtatacagacattaggtggagtactttacctctacat

SEQ ID NO: 462212 - DNA, 55 bp, Artificial
  Synthetic oligonucleotide
tcggtgcagcgatgctcccacaccacacagccggtgggctcccacgtcttgtaca

SEQ ID NO: 462213 - DNA, 60 bp, Artificial
  Synthetic oligonucleotide
tcggtgcatcgctgtccctgtgcggccaggccaatcgtacgagccacccagctatgtcga

SEQ ID NO: 462214 - DNA, 60 bp, Artificial
  Synthetic oligonucleotide
tcggtgccaaaagtgtaaatatatgggagtctaggtccatgcgctgcaattattttggga

SEQ ID NO: 462215 - DNA, 53 bp, Artificial
  Synthetic oligonucleotide
tcggtgccctccaacatgcatttatgtcgcaggaatggcagagttaggtgcct

SEQ ID NO: 462216 - DNA, 60 bp, Artificial
  Synthetic oligonucleotide
tcggtgctagggcgattaccttgcgccaagttgaacctgtagcgacttgcgtggctgtaa

SEQ ID NO: 462217 - DNA, 58 bp, Artificial
  Synthetic oligonucleotide
tcggtgcttagcctgggcaagttttacgcgcgcaagatttacaagacgccgtacgtgc

SEQ ID NO: 462218 - DNA, 60 bp, Artificial
  Synthetic oligonucleotide
tcggtggacgccagactgctcgcaccctgatgtacaacttcccaacaagggcaggtcagt

SEQ ID NO: 462219 - DNA, 53 bp, Artificial
  Synthetic oligonucleotide
tcggtggacgtaaaatttcacagcgcaataatttataaacgtacccaatcaac

SEQ ID NO: 462220 - DNA, 55 bp, Artificial
  Synthetic oligonucleotide
tcggtggaggccaacctggactacccctgcggcatgaagcacgggctcacgatca

SEQ ID NO: 462221 - DNA, 60 bp, Artificial
  Synthetic oligonucleotide
tcggtggatgatcctagatcagaggaggacagaagatttgagagtcatatagaatgtagg

SEQ ID NO: 462222 - DNA, 59 bp, Artificial
  Synthetic oligonucleotide
tcggtggcccaacggtaggcacgtcgtagcgaatgggatcacgcatattcgtacgacga

SEQ ID NO: 462223 - DNA, 55 bp, Artificial
  Synthetic oligonucleotide
tcggtggcgatgtgtgtatccgccgttgttagtgggaataatccacagcggccct

SEQ ID NO: 462224 - DNA, 60 bp, Artificial
  Synthetic oligonucleotide
tcggtggcgtctaacgccttctccccgtatggggtcttgacaacgatcatcacagctctc

SEQ ID NO: 462225 - DNA, 58 bp, Artificial
  Synthetic oligonucleotide
tcggtggctataactggatcgcttcgattatttccatcggaacgcgtacttacaacaa

SEQ ID NO: 462226 - DNA, 53 bp, Artificial
  Synthetic oligonucleotide
tcggtgggagtgtagagatcgtagccggcggagcccagagtcgcacgttgagg

SEQ ID NO: 462227 - DNA, 56 bp, Artificial
  Synthetic oligonucleotide
tcggtgggtgcgtcctgtgcccgagggtattgtttatcctgtcggttataatgaac

SEQ ID NO: 462228 - DNA, 58 bp, Artificial
  Synthetic oligonucleotide
tcggtgggtgcgtcttggacgtttccggccagctttgtgtcgccgtcgctgatgtttg

SEQ ID NO: 462229 - DNA, 55 bp, Artificial
  Synthetic oligonucleotide
tcggtggttgatagggtcatccacgccctgtcctgctgacgaactctcgttcgga

SEQ ID NO: 462230 - DNA, 59 bp, Artificial
  Synthetic oligonucleotide
tcggtgtacactctaattctatggcaatcggtgtaacggggtgcgatatataggtgtac

SEQ ID NO: 462231 - DNA, 56 bp, Artificial
  Synthetic oligonucleotide
tcggtgtatcggtgtcttatttatacctagacacccaatggctatttggtaatttc

SEQ ID NO: 462232 - DNA, 60 bp, Artificial
  Synthetic oligonucleotide
tcggtgtattgcgcttgtgtggaacttacgtgtgcatgcccgcacactatttggacgaga

SEQ ID NO: 462233 - DNA, 57 bp, Artificial
  Synthetic oligonucleotide
tcggtgtcaatccggatcataaggattattgcgtctttcctgactctggggggtggg

SEQ ID NO: 462234 - DNA, 56 bp, Artificial
  Synthetic oligonucleotide
tcggtgtcccaccgattcatagtgaaacgtcggtgggtgtttacactggagtccaa

SEQ ID NO: 462235 - DNA, 55 bp, Artificial
  Synthetic oligonucleotide
tcggtgtcgttggatgttcctgtgtctagtggcgttggtgttggacgtgcacgtg

SEQ ID NO: 462236 - DNA, 58 bp, Artificial
  Synthetic oligonucleotide
tcggtgtctctcaaagctctatggcaatcggttgtttccggtgtcttatttataccta

SEQ ID NO: 462237 - DNA, 54 bp, Artificial
  Synthetic oligonucleotide
tcggtgtcttatttataggtactagagttactatcactttagacctactaaccg

SEQ ID NO: 462238 - DNA, 60 bp, Artificial
  Synthetic oligonucleotide
tcggtgtgagccagtcgtgattgtgctccgcggagacgcggggcaagggaaatctttatc

SEQ ID NO: 462239 - DNA, 60 bp, Artificial
  Synthetic oligonucleotide
tcggtgtgagcttgttcacacatgacggccttgtggtttacaagacccacctgctagatc

SEQ ID NO: 462240 - DNA, 60 bp, Artificial
  Synthetic oligonucleotide
tcggtgttagatctgtttgactggtctcgatttcgtgctactataaacatagacacgtgt

SEQ ID NO: 462241 - DNA, 60 bp, Artificial
  Synthetic oligonucleotide
tcggtgttctataccccatctgggaagatgagttgagcagaaagcagatcctcgaaaggg

SEQ ID NO: 462242 - DNA, 60 bp, Artificial
  Synthetic oligonucleotide
tcggtgttggtcaatacttatcagtggatcatcaggaactgggagactgtgaaaattcaa

SEQ ID NO: 462243 - DNA, 54 bp, Artificial
  Synthetic oligonucleotide
tcggttaaggttagacacttggcagggtattacacttgggcagctcggttaagg

SEQ ID NO: 462244 - DNA, 52 bp, Artificial
  Synthetic oligonucleotide
tcggttaatttgcgggctgtctactaccgcccagtacccgcccacccgattc

SEQ ID NO: 462245 - DNA, 51 bp, Artificial
  Synthetic oligonucleotide
tcggttagattgttaggtccttgtacgtaatcttgtagcacggtaggagca

SEQ ID NO: 462246 - DNA, 57 bp, Artificial
  Synthetic oligonucleotide
tcggttagtctcgtcagccgactttactggcggacctgacaacagtaccaccctcac

SEQ ID NO: 462247 - DNA, 56 bp, Artificial
  Synthetic oligonucleotide
tcggttattacagaactgtttgggcttgccgccgctacagggtttaccacagaagc

SEQ ID NO: 462248 - DNA, 52 bp, Artificial
  Synthetic oligonucleotide
tcggttattgagacgtatttcgacgggtacgatgttgcgacgggaggtttag

SEQ ID NO: 462249 - DNA, 59 bp, Artificial
  Synthetic oligonucleotide
tcggttcagccgcgattgatgggttagttcaaggaagtgttcattcgatcatgacgggg

SEQ ID NO: 462250 - DNA, 60 bp, Artificial
  Synthetic oligonucleotide
tcggttcaggaacatccttgtcccaagcggtgactgtgcagccgggcggtgtggtgttgc

SEQ ID NO: 462251 - DNA, 60 bp, Artificial
  Synthetic oligonucleotide
tcggttcagtgcgactgttacaggtggacaatatacgtctaaggaacaagctgtcatcaa

SEQ ID NO: 462252 - DNA, 58 bp, Artificial
  Synthetic oligonucleotide
tcggttcatacaccaaatctggccgagtctactgcatttggggagcccgcgtaaacag

SEQ ID NO: 462253 - DNA, 55 bp, Artificial
  Synthetic oligonucleotide
tcggttcattatcgacgccgagtgacgacggctagggggaaaagcagctattgtc

SEQ ID NO: 462254 - DNA, 60 bp, Artificial
  Synthetic oligonucleotide
tcggttcccttcaaagtcagtaagcccggatcatcgcgagcattgcgaggcttctaacgc

SEQ ID NO: 462255 - DNA, 55 bp, Artificial
  Synthetic oligonucleotide
tcggttccgctcaggagtggggggctacgaggttacagctacgaggtggcgggta

SEQ ID NO: 462256 - DNA, 49 bp, Artificial
  Synthetic oligonucleotide
tcggttcggtgaaaacaacgaactctcgtttggtgggttcccgggtacg

SEQ ID NO: 462257 - DNA, 53 bp, Artificial
  Synthetic oligonucleotide
tcggttcgtgtacttttagtatatttgccaagttttaaaccacaactgccagt

SEQ ID NO: 462258 - DNA, 55 bp, Artificial
  Synthetic oligonucleotide
tcggttctataaaactctaagggccgagcaatgcacacaagaagtaaaacattgg

SEQ ID NO: 462259 - DNA, 60 bp, Artificial
  Synthetic oligonucleotide
tcggttctatgtgctgatggtgatagccgcttcagatacaaacaatagcagggtttggtg

SEQ ID NO: 462260 - DNA, 58 bp, Artificial
  Synthetic oligonucleotide
tcggttctttatggactgtgacattgaggtaactgattcctataagacagaactgggt

SEQ ID NO: 462261 - DNA, 55 bp, Artificial
  Synthetic oligonucleotide
tcggttgatacacttcagttccaaacaactttttctacgtataaagcatcaggtt

SEQ ID NO: 462262 - DNA, 60 bp, Artificial
  Synthetic oligonucleotide
tcggttgatgtctctactgaattggagacaatatatagtgtctccaaatggcataatggt

SEQ ID NO: 462263 - DNA, 59 bp, Artificial
  Synthetic oligonucleotide
tcggttgatttggtgtgtggagggcgcgaagttattgccgtgccgaatccagcgaagct

SEQ ID NO: 462264 - DNA, 60 bp, Artificial
  Synthetic oligonucleotide
tcggttgcaacagtcgctaaagacatgtcaaaggatgctatagagccaattagccgtttt

SEQ ID NO: 462265 - DNA, 58 bp, Artificial
  Synthetic oligonucleotide
tcggttgccttgtaccacgaggtgcacctcctgaagattacctatatttgttccatac

SEQ ID NO: 462266 - DNA, 59 bp, Artificial
  Synthetic oligonucleotide
tcggttggaattctatgccactggagagagattggttaggggattgtcagagaacccat

SEQ ID NO: 462267 - DNA, 55 bp, Artificial
  Synthetic oligonucleotide
tcggttggttgcaagtttaccagctcactaccctgacgtaccctgcaaatacccc

SEQ ID NO: 462268 - DNA, 56 bp, Artificial
  Synthetic oligonucleotide
tcggttgtcgcattaaccccgccaagcagagcgtgggttttgggactggtgagttc

SEQ ID NO: 462269 - DNA, 60 bp, Artificial
  Synthetic oligonucleotide
tcggttgttgaatgccgttgcgctggttgacctgagcattggttgatcgccagccaccat

SEQ ID NO: 462270 - DNA, 58 bp, Artificial
  Synthetic oligonucleotide
tcggtttaatatttcacgcacttcatccatcggaggttctatagactccggatctacc

SEQ ID NO: 462271 - DNA, 60 bp, Artificial
  Synthetic oligonucleotide
tcggtttacggaccagtgctcatccttgtaccatcgcgtgaactttcagtgaacctcgca

SEQ ID NO: 462272 - DNA, 55 bp, Artificial
  Synthetic oligonucleotide
tcggtttcatcctgcctgacgctgcctacgtgtaccgcgttggtcgcaccgctac

SEQ ID NO: 462273 - DNA, 53 bp, Artificial
  Synthetic oligonucleotide
tcggtttcgggccactcatattaacgaaccgacacctctttgaacggaataac

SEQ ID NO: 462274 - DNA, 54 bp, Artificial
  Synthetic oligonucleotide
tcggtttcttcgctccttccaacttgccgggtgtaacgccctgggttgtctggc

SEQ ID NO: 462275 - DNA, 54 bp, Artificial
  Synthetic oligonucleotide
tcggtttggtattttacgattaaaatacccaggtctactgcttccgagcctgat

SEQ ID NO: 462276 - DNA, 53 bp, Artificial
  Synthetic oligonucleotide
tcggttttaccgactgtataggtcccctgatgtcccgcggggttgcgagggac

SEQ ID NO: 462277 - DNA, 56 bp, Artificial
  Synthetic oligonucleotide
tcggttttgcttatgacgcgggtgtcggcgttaagagcgggtcgccaacaacttgc

SEQ ID NO: 462278 - DNA, 60 bp, Artificial
  Synthetic oligonucleotide
tcggttttggagcgcgtgtaagttatgagggttgctcagattatctattgacggcacacc

SEQ ID NO: 462279 - DNA, 60 bp, Artificial
  Synthetic oligonucleotide
tcggtttttcacctacatatgattgcaagttggaaatggtagatgggaggcggcgctgct

SEQ ID NO: 462280 - DNA, 51 bp, Artificial
  Synthetic oligonucleotide
tcggttttttactacggacacccgaagagagtcgtccccgaactccgaaga

SEQ ID NO: 462281 - DNA, 57 bp, Artificial
  Synthetic oligonucleotide
tcgtaaaacttattgctggaagaactaggacaggcacccgtagcttttatgtgtatc

SEQ ID NO: 462282 - DNA, 57 bp, Artificial
  Synthetic oligonucleotide
tcgtaaaaggaagatctcacttaaggaatgacaccgatgtggtaaactttgttagca

SEQ ID NO: 462283 - DNA, 54 bp, Artificial
  Synthetic oligonucleotide
tcgtaaaatggtttttgacatcaggaaagtacttgataaaagaggttcgtacgc

SEQ ID NO: 462284 - DNA, 55 bp, Artificial
  Synthetic oligonucleotide
tcgtaaaattaagggtatattttcacaagcaaaaatttcattgttctacacagaa

SEQ ID NO: 462285 - DNA, 58 bp, Artificial
  Synthetic oligonucleotide
tcgtaaaccacatctaagttcgtcggggttgttgcatacatttgatgaagtattcggc

SEQ ID NO: 462286 - DNA, 56 bp, Artificial
  Synthetic oligonucleotide
tcgtaaagagttttgcccgaaaacgacctgtcgttgagaagcgtgacatgtttgac

SEQ ID NO: 462287 - DNA, 60 bp, Artificial
  Synthetic oligonucleotide
tcgtaaatgatgtatgggttgatgccgagctttcaaacgctccggaaatctcctgtgatg

SEQ ID NO: 462288 - DNA, 59 bp, Artificial
  Synthetic oligonucleotide
tcgtaaattccctattgaggtcgttactcgggatgatactatgtttatgactgtggaga

SEQ ID NO: 462289 - DNA, 60 bp, Artificial
  Synthetic oligonucleotide
tcgtaacgaatctaatgatgtatcaacgtcagttggaaagagacagacgtcaactggtac

SEQ ID NO: 462290 - DNA, 52 bp, Artificial
  Synthetic oligonucleotide
tcgtaacgcgtaactctgggacggaaccgactactttgggtgtccgtgtttc

SEQ ID NO: 462291 - DNA, 56 bp, Artificial
  Synthetic oligonucleotide
tcgtaacgtgttcacttcaagtgtagccagcaccttatgtcgaaaagccccctccc

SEQ ID NO: 462292 - DNA, 60 bp, Artificial
  Synthetic oligonucleotide
tcgtaacttttaatgttccagaatgtgatgaaggcgcggttatgaacatcgtacaggcga

SEQ ID NO: 462293 - DNA, 55 bp, Artificial
  Synthetic oligonucleotide
tcgtaagaactttgtgagaccaaagcctcccagagagggccgaactgggaggtta

SEQ ID NO: 462294 - DNA, 60 bp, Artificial
  Synthetic oligonucleotide
tcgtaagcagcacgtacatctggatgatctacgatagcgttgaagtcacgagtggtacac

SEQ ID NO: 462295 - DNA, 57 bp, Artificial
  Synthetic oligonucleotide
tcgtaagccccacttgggttcgtctgggtgtctgcatacgttcgacgagctattcgg

SEQ ID NO: 462296 - DNA, 60 bp, Artificial
  Synthetic oligonucleotide
tcgtaagctggcaatagggaacctcgttatgtccactaacctggctgcgttgcgcaagca

SEQ ID NO: 462297 - DNA, 59 bp, Artificial
  Synthetic oligonucleotide
tcgtaagctgtcgggtatgtcggactggttgtgcagtcgcttaagggccagaggcgctt

SEQ ID NO: 462298 - DNA, 60 bp, Artificial
  Synthetic oligonucleotide
tcgtaaggacgccatgttgggtacgcacgtgatatgggacctcggtctgcaatcaagttg

SEQ ID NO: 462299 - DNA, 53 bp, Artificial
  Synthetic oligonucleotide
tcgtaagtgcaatattccatttagacttaccacgtctagattacgttctgcgg

SEQ ID NO: 462300 - DNA, 55 bp, Artificial
  Synthetic oligonucleotide
tcgtaatcagtgggaacgtaagatcgttcctcacattcatgcccttggtaatccg

SEQ ID NO: 462301 - DNA, 60 bp, Artificial
  Synthetic oligonucleotide
tcgtaatgggcagtggatgcgtagagtccctgatgggatccactactcggtcggttataa

SEQ ID NO: 462302 - DNA, 60 bp, Artificial
  Synthetic oligonucleotide
tcgtaattacaggcccttacccgctgtggatgtcagcgagagtgtcacagaggatgtaca

SEQ ID NO: 462303 - DNA, 60 bp, Artificial
  Synthetic oligonucleotide
tcgtaattatgtccgcaatctcttccctcgtaatactccccgcctgtgatgccgatggac

SEQ ID NO: 462304 - DNA, 60 bp, Artificial
  Synthetic oligonucleotide
tcgtaattatgtcgaagcgagctgcagatctcgtcatttctatgcacgctctgaaagtac

SEQ ID NO: 462305 - DNA, 59 bp, Artificial
  Synthetic oligonucleotide
tcgtaatttagattctactaatagtatgatttatacttatatcggaatatttgttcatg

SEQ ID NO: 462306 - DNA, 58 bp, Artificial
  Synthetic oligonucleotide
tcgtacaacgtcaccaggatttccttatgcacaaatgaaaagaaatgctccaggtaaa

SEQ ID NO: 462307 - DNA, 58 bp, Artificial
  Synthetic oligonucleotide
tcgtacaccacccgcatataggccaccaaatgcccctatcttatcaacacttccggaa

SEQ ID NO: 462308 - DNA, 55 bp, Artificial
  Synthetic oligonucleotide
tcgtacacccgcacgcgcatcgacaccctgatggagtacgccctcgtgaatgcca

SEQ ID NO: 462309 - DNA, 53 bp, Artificial
  Synthetic oligonucleotide
tcgtacacttatgtctcgtgggatggtcaaacaattaccagaacacccttaga

SEQ ID NO: 462310 - DNA, 58 bp, Artificial
  Synthetic oligonucleotide
tcgtacagaaggccagttgggatttctagcatggtggaggccatggtttctagggccc

SEQ ID NO: 462311 - DNA, 55 bp, Artificial
  Synthetic oligonucleotide
tcgtacagaatagttgatgaggataccgcattcgaaactggaattgacggaacgt

SEQ ID NO: 462312 - DNA, 55 bp, Artificial
  Synthetic oligonucleotide
tcgtacagcctccaggcccccccctcccgggagagccatagtggtctgcggaacc

SEQ ID NO: 462313 - DNA, 55 bp, Artificial
  Synthetic oligonucleotide
tcgtacagctccgaagagtactgactactgctacaataactcttttaccagacgc

SEQ ID NO: 462314 - DNA, 60 bp, Artificial
  Synthetic oligonucleotide
tcgtacagtagcccggtctttgccggttgccgtcatagcagcacaaaatgcatctatgtg

SEQ ID NO: 462315 - DNA, 55 bp, Artificial
  Synthetic oligonucleotide
tcgtacatagaggagaaatggaacagataacaatggtaaccgtaaaggtggaaaa

SEQ ID NO: 462316 - DNA, 59 bp, Artificial
  Synthetic oligonucleotide
tcgtacatcgaatcaacgcaggtgcctcaacaaacgcaactcctacaaacggacgccga

SEQ ID NO: 462317 - DNA, 60 bp, Artificial
  Synthetic oligonucleotide
tcgtacatcgagtgacgattctggatctactattgatgagcttcgccgcaagaatgagga

SEQ ID NO: 462318 - DNA, 50 bp, Artificial
  Synthetic oligonucleotide
tcgtacatgaatgaggacggtctagggatccagggtacttgtaattgggg

SEQ ID NO: 462319 - DNA, 56 bp, Artificial
  Synthetic oligonucleotide
tcgtacatgcccaggtacggtaggcagaggaatctcaatgatcgcagtctagcacg

SEQ ID NO: 462320 - DNA, 50 bp, Artificial
  Synthetic oligonucleotide
tcgtacatggtaaacaatcaatgcttgacttattaaatgaacgtggacta

SEQ ID NO: 462321 - DNA, 60 bp, Artificial
  Synthetic oligonucleotide
tcgtacattttatgagactacttagaatgcggtttgctgtaccattcgatcagttgtcaa

SEQ ID NO: 462322 - DNA, 50 bp, Artificial
  Synthetic oligonucleotide
tcgtaccagattgacgcggtacggcctctagctgactatggagtacacaa

SEQ ID NO: 462323 - DNA, 58 bp, Artificial
  Synthetic oligonucleotide
tcgtaccaggccgcaggatgaggcgtcgaccttcgctttgatcccaaccaaacactac

SEQ ID NO: 462324 - DNA, 57 bp, Artificial
  Synthetic oligonucleotide
tcgtacccagtttatgtaacattcaaggacacggaggattctgaacctactggcctc

SEQ ID NO: 462325 - DNA, 50 bp, Artificial
  Synthetic oligonucleotide
tcgtacccattgcgcttgctggccggagtggtgaacgcagaccacatgtc

SEQ ID NO: 462326 - DNA, 57 bp, Artificial
  Synthetic oligonucleotide
tcgtacccgcgtcgcaggtgtgtggtccagtgtattgtttcaccccaagccctgttg

SEQ ID NO: 462327 - DNA, 59 bp, Artificial
  Synthetic oligonucleotide
tcgtacctctgggtgcgaggccagtcggccatcccagccccggctgagtttatgaacac

SEQ ID NO: 462328 - DNA, 60 bp, Artificial
  Synthetic oligonucleotide
tcgtacgaacagagggatgatgttaagcacactggtattgttcgctgcgttagtgatgtc

SEQ ID NO: 462329 - DNA, 58 bp, Artificial
  Synthetic oligonucleotide
tcgtacgcaccagtttacttagagaaacgtcgtgcacaaatatcggcgctattaacta

SEQ ID NO: 462330 - DNA, 58 bp, Artificial
  Synthetic oligonucleotide
tcgtacgtaacaaatatttctgatgaggttagtgaaatcggagctaggaaaacagcga

SEQ ID NO: 462331 - DNA, 60 bp, Artificial
  Synthetic oligonucleotide
tcgtacgtaagaatgggttgttgcatgaaagtgatgaaccacgagcagatctgttttatt

SEQ ID NO: 462332 - DNA, 56 bp, Artificial
  Synthetic oligonucleotide
tcgtacgtagtaacatgggatcaggacataccctgtaaacctttaccatatactaa

SEQ ID NO: 462333 - DNA, 56 bp, Artificial
  Synthetic oligonucleotide
tcgtacgtatggggcccatgttccggacgtataaaaacacgcgtacaaggcaatga

SEQ ID NO: 462334 - DNA, 55 bp, Artificial
  Synthetic oligonucleotide
tcgtacgtggtgaagtccactcctccgttgaagtagttgtgtctgccgagactgc

SEQ ID NO: 462335 - DNA, 55 bp, Artificial
  Synthetic oligonucleotide
tcgtacgttgaaaaatcgaaaccaactcaacctcttgttcaagaacggaagatga

SEQ ID NO: 462336 - DNA, 60 bp, Artificial
  Synthetic oligonucleotide
tcgtactatgtactctgcacttccgatcctgccctacacggctaaccgcaacgctaatgg

SEQ ID NO: 462337 - DNA, 51 bp, Artificial
  Synthetic oligonucleotide
tcgtactccgatttgcgtggaaccaatcgctcgtcaaacacatatcgactc

SEQ ID NO: 462338 - DNA, 56 bp, Artificial
  Synthetic oligonucleotide
tcgtactcgtttactgtgcctttcatttctccaacccacttccgcatggtgggaac

SEQ ID NO: 462339 - DNA, 56 bp, Artificial
  Synthetic oligonucleotide
tcgtacttacctatcctctgggaagtattagctttcccgtcgtatgcgcgagagtt

SEQ ID NO: 462340 - DNA, 60 bp, Artificial
  Synthetic oligonucleotide
tcgtactttgtgtggccgatggatgatctacatgtgatagcagtctgtgtgctgtccacg

SEQ ID NO: 462341 - DNA, 57 bp, Artificial
  Synthetic oligonucleotide
tcgtagagcctggagacctaatagtcttcaacacaatagggaacctaattgccccaa

SEQ ID NO: 462342 - DNA, 60 bp, Artificial
  Synthetic oligonucleotide
tcgtagagtagatgacgcgacagtagctataaggagcgcgataaataatttagtcgtaga

SEQ ID NO: 462343 - DNA, 55 bp, Artificial
  Synthetic oligonucleotide
tcgtagagtcaagttcagtaaactgtagttgactaaattgggaaagtagcaggga

SEQ ID NO: 462344 - DNA, 57 bp, Artificial
  Synthetic oligonucleotide
tcgtagcacgcgtcgagcgtgtgtcgattaagttggtccgagccagtgtatcttgaa

SEQ ID NO: 462345 - DNA, 52 bp, Artificial
  Synthetic oligonucleotide
tcgtagcccgtgctacgcgcacggagcacgtacgagcacagagcaggaattt

SEQ ID NO: 462346 - DNA, 59 bp, Artificial
  Synthetic oligonucleotide
tcgtagcgtggcgaaagcaccggagcagtctcaggaattacaatgcgcctgtaaaaccg

SEQ ID NO: 462347 - DNA, 60 bp, Artificial
  Synthetic oligonucleotide
tcgtagctcatgagatgaacattgctctgtgtcagcaataccctaagatggtgactggag

SEQ ID NO: 462348 - DNA, 57 bp, Artificial
  Synthetic oligonucleotide
tcgtagcttaattattcaatggtcccctatataaacttggtccccaagtagtgcaca

SEQ ID NO: 462349 - DNA, 60 bp, Artificial
  Synthetic oligonucleotide
tcgtagcttagcaaacaccccggtttctctgtctctatttcggaccctgatgcatgatac

SEQ ID NO: 462350 - DNA, 58 bp, Artificial
  Synthetic oligonucleotide
tcgtaggcacatggttgggtcggctaccaagtgcgctagcctctaaactcgaacaggt

SEQ ID NO: 462351 - DNA, 57 bp, Artificial
  Synthetic oligonucleotide
tcgtaggcgcgtcgagaaacgagttgaccccaccttgcacgagagtccccaagacga

SEQ ID NO: 462352 - DNA, 57 bp, Artificial
  Synthetic oligonucleotide
tcgtagggctttcccccactgtttggctttcagttatatggatgatgtggtattggg

SEQ ID NO: 462353 - DNA, 53 bp, Artificial
  Synthetic oligonucleotide
tcgtaggggtcgaataatcgtgatcgtcccaaatgcgatacaaactagtgata

SEQ ID NO: 462354 - DNA, 55 bp, Artificial
  Synthetic oligonucleotide
tcgtaggtcacgtgaagaacgggtctatgcgtatctcaggttcgcgctggtgtag

SEQ ID NO: 462355 - DNA, 57 bp, Artificial
  Synthetic oligonucleotide
tcgtaggtcatttgctctttacagcgggcggtagatttacgaatttaacacagaata

SEQ ID NO: 462356 - DNA, 60 bp, Artificial
  Synthetic oligonucleotide
tcgtaggtctagtactcttgaccctatcaccacactataaggtgttcctcgctaggctca

SEQ ID NO: 462357 - DNA, 51 bp, Artificial
  Synthetic oligonucleotide
tcgtagtaggcgaggcggcgggtctgaccgacaacgctaccgtaatactcg

SEQ ID NO: 462358 - DNA, 55 bp, Artificial
  Synthetic oligonucleotide
tcgtagtcgctttggaaaatgtcgtaaacgcgttgaagcaagaaatcgagagatc

SEQ ID NO: 462359 - DNA, 55 bp, Artificial
  Synthetic oligonucleotide
tcgtagtggcacctttatgctggtctattcgattggcactaacacacctgcaacg

SEQ ID NO: 462360 - DNA, 51 bp, Artificial
  Synthetic oligonucleotide
tcgtagtgggtgaatctaacgttactgaaagcgagcgttcgcctggcatgc

SEQ ID NO: 462361 - DNA, 57 bp, Artificial
  Synthetic oligonucleotide
tcgtagttataaaaccaggtgcattatgcattatagacacccctgaagggaaaggaa

SEQ ID NO: 462362 - DNA, 58 bp, Artificial
  Synthetic oligonucleotide
tcgtatacattgattattgggacgattctcaagcttttagaaacatggtatacgttcg

SEQ ID NO: 462363 - DNA, 60 bp, Artificial
  Synthetic oligonucleotide
tcgtatacgttgctgcgtctgtcagtaagaaggtctctgctcagggcgcaaacggtgacc

SEQ ID NO: 462364 - DNA, 57 bp, Artificial
  Synthetic oligonucleotide
tcgtataggcctcgtgccatacgtcgaaattatgcgaaaacgccgtataaattggta

SEQ ID NO: 462365 - DNA, 60 bp, Artificial
  Synthetic oligonucleotide
tcgtatatgaaaatcattaatgtgagaggaatttataacgatgttgttgaatgtatcgac

SEQ ID NO: 462366 - DNA, 57 bp, Artificial
  Synthetic oligonucleotide
tcgtatattttacaacgcgcaaatccacaatttggaagcgtcatgggtttaagatac

SEQ ID NO: 462367 - DNA, 60 bp, Artificial
  Synthetic oligonucleotide
tcgtatcaatatcacacccagacaattctgcatgtattttgcaaaaattgtctggaacat

SEQ ID NO: 462368 - DNA, 57 bp, Artificial
  Synthetic oligonucleotide
tcgtatcgggtgtacgggtctataaggtctcattgtccggaatataaggatggttgc

SEQ ID NO: 462369 - DNA, 56 bp, Artificial
  Synthetic oligonucleotide
tcgtatcggtttctcattcgatttgcgggtttgtttgaaacttcggtccataatgc

SEQ ID NO: 462370 - DNA, 50 bp, Artificial
  Synthetic oligonucleotide
tcgtatctatcttggaatgggatagatcacatgaacccatccatagactt

SEQ ID NO: 462371 - DNA, 58 bp, Artificial
  Synthetic oligonucleotide
tcgtatctccgagaggagacgagaaagaggtggatctccctttgccatccgaggggac

SEQ ID NO: 462372 - DNA, 60 bp, Artificial
  Synthetic oligonucleotide
tcgtatctgtatgtggtacactctggttctggtgtatatctggtcctctacccagtatat

SEQ ID NO: 462373 - DNA, 60 bp, Artificial
  Synthetic oligonucleotide
tcgtatcttaagagcggcagtggagttaccacagacgcatgtcgtgctcaggcgatgcaa

SEQ ID NO: 462374 - DNA, 53 bp, Artificial
  Synthetic oligonucleotide
tcgtatctttaatcaccctcatagcgactgctgttaccgcttctgtatcttta

SEQ ID NO: 462375 - DNA, 60 bp, Artificial
  Synthetic oligonucleotide
tcgtatgaggatgaccgagctgaagcgcatagacatgaagataagctggagagcgactaa

SEQ ID NO: 462376 - DNA, 51 bp, Artificial
  Synthetic oligonucleotide
tcgtatgcaggaacagggtgggctgtgcccgctgtgtcgagtcccccttga

SEQ ID NO: 462377 - DNA, 55 bp, Artificial
  Synthetic oligonucleotide
tcgtatgggtcactctcgactggatatcatatccttaaaacaaacactgtggaac

SEQ ID NO: 462378 - DNA, 53 bp, Artificial
  Synthetic oligonucleotide
tcgtatggttcctatgtcttccgttgaaaagggatttagtttcggggatatta

SEQ ID NO: 462379 - DNA, 60 bp, Artificial
  Synthetic oligonucleotide
tcgtatgtgctgaattgttgccatgacctgttagttacgcaatccggtgcagtgactaag

SEQ ID NO: 462380 - DNA, 59 bp, Artificial
  Synthetic oligonucleotide
tcgtattaaatactgactggagtggctacagtgggtccttcatggactattgggccgag

SEQ ID NO: 462381 - DNA, 55 bp, Artificial
  Synthetic oligonucleotide
tcgtattacccaactcgattcggtaggaggatggtaatgcaaggggtcctagcat

SEQ ID NO: 462382 - DNA, 60 bp, Artificial
  Synthetic oligonucleotide
tcgtattattgcagctgcacggttgctcatgctaccgggacaagatagtcataatccctc

SEQ ID NO: 462383 - DNA, 59 bp, Artificial
  Synthetic oligonucleotide
tcgtattcggaaagtgtccttctatgttcgcacctctgtcgacctatacactgactttg

SEQ ID NO: 462384 - DNA, 60 bp, Artificial
  Synthetic oligonucleotide
tcgtattgagctgtctgaaagagtgagttcgagagaggccacgcagtcaaaaataatggt

SEQ ID NO: 462385 - DNA, 59 bp, Artificial
  Synthetic oligonucleotide
tcgtatttcgtggcccgatgatggtacgttgcgtgccataccccagtccccatcagtaa

SEQ ID NO: 462386 - DNA, 60 bp, Artificial
  Synthetic oligonucleotide
tcgtcaaataaattcctgccactctatgcttgtgagaataagaggatcaaagagctcctt

SEQ ID NO: 462387 - DNA, 60 bp, Artificial
  Synthetic oligonucleotide
tcgtcaacactgcgatcagctaacagcgctgtttcagtatggacggatataagtgatata

SEQ ID NO: 462388 - DNA, 55 bp, Artificial
  Synthetic oligonucleotide
tcgtcaactaggggaattgttcggcatgaaagacctctatgataggacccatgat

SEQ ID NO: 462389 - DNA, 55 bp, Artificial
  Synthetic oligonucleotide
tcgtcaactgggcgtaaacacatacagggctttgtaacattaaaacgttctcaac

SEQ ID NO: 462390 - DNA, 57 bp, Artificial
  Synthetic oligonucleotide
tcgtcaagaaattcccctcccttttcaatgtaagccttgacatcggacgatgattta

SEQ ID NO: 462391 - DNA, 56 bp, Artificial
  Synthetic oligonucleotide
tcgtcaagacatgcggagcacccccctgtaaattggggcctggtaccaacaactcc

SEQ ID NO: 462392 - DNA, 60 bp, Artificial
  Synthetic oligonucleotide
tcgtcaagagaccagcggtgatgaggacgcgaataggactcttcagtggcccagactcgt

SEQ ID NO: 462393 - DNA, 60 bp, Artificial
  Synthetic oligonucleotide
tcgtcaagctgccgagatgatcagaagaagagctaatgcgtcgggcataatagtggctac

SEQ ID NO: 462394 - DNA, 55 bp, Artificial
  Synthetic oligonucleotide
tcgtcaaggaactctttataggacgaacgtggtcctggattgcaaaggaagatgg

SEQ ID NO: 462395 - DNA, 52 bp, Artificial
  Synthetic oligonucleotide
tcgtcaatccagaaacagttaatgatcaatctttccaagatttcctctggct

SEQ ID NO: 462396 - DNA, 60 bp, Artificial
  Synthetic oligonucleotide
tcgtcaattcacatacgatttaatgatggtaacatttgtcggttcagtgactcaatatgt

SEQ ID NO: 462397 - DNA, 60 bp, Artificial
  Synthetic oligonucleotide
tcgtcacccctcctttgtgtctcacaaacgacgaatctgcgctcggcaaatgacaggatc

SEQ ID NO: 462398 - DNA, 60 bp, Artificial
  Synthetic oligonucleotide
tcgtcacgcttcggctgctcataaaacctggcaggccacgaagcacgagggtgccggtgc

SEQ ID NO: 462399 - DNA, 51 bp, Artificial
  Synthetic oligonucleotide
tcgtcactcgggagcacggcgaggttgggcccgtcctcgcatggcgtgacc

SEQ ID NO: 462400 - DNA, 59 bp, Artificial
  Synthetic oligonucleotide
tcgtcagaaagatgatgactaattcccaagacactgaactctctttcaccatcactggg

SEQ ID NO: 462401 - DNA, 54 bp, Artificial
  Synthetic oligonucleotide
tcgtcagaccgtggcgcgtctaggtgggcgtttggaacacgtgggtgaataagc

SEQ ID NO: 462402 - DNA, 54 bp, Artificial
  Synthetic oligonucleotide
tcgtcagaggaaatttaccggtaggaaagcgtgttgaactattcgtagataacg

SEQ ID NO: 462403 - DNA, 60 bp, Artificial
  Synthetic oligonucleotide
tcgtcaggtaaggattaaacatctacattgtccctaatatgtatcagtcaagatatgcac

SEQ ID NO: 462404 - DNA, 60 bp, Artificial
  Synthetic oligonucleotide
tcgtcagtagtagggcgcaggggtccgacacaattgccagatgcaactgtagaacaggtg

SEQ ID NO: 462405 - DNA, 57 bp, Artificial
  Synthetic oligonucleotide
tcgtcagtatgatactagggttagcaaacctggtgttgtactttagatggttgggtc

SEQ ID NO: 462406 - DNA, 56 bp, Artificial
  Synthetic oligonucleotide
tcgtcagtggctcgttaccgtctgtcttcacaattcgtaaagatttcgagaagggg

SEQ ID NO: 462407 - DNA, 60 bp, Artificial
  Synthetic oligonucleotide
tcgtcagttggacattgcgttgaacgattacctattgtatatgtataatacgcgtgtgca

SEQ ID NO: 462408 - DNA, 60 bp, Artificial
  Synthetic oligonucleotide
tcgtcatcagcctggtgcgactacgacaggcgggtcgtgattacagctgacgtgcaccaa

SEQ ID NO: 462409 - DNA, 60 bp, Artificial
  Synthetic oligonucleotide
tcgtcatctactgacttctcaagctgtgttgggatagcccagattggggacaatccgttc

SEQ ID NO: 462410 - DNA, 60 bp, Artificial
  Synthetic oligonucleotide
tcgtcatgcaaacgtcctgctcgcaggtgtaaatgcccaactgaaccgcaatctgaggtt

SEQ ID NO: 462411 - DNA, 50 bp, Artificial
  Synthetic oligonucleotide
tcgtcatgcacctgcattaaaggagactgctattgggtgatgactgacgg

SEQ ID NO: 462412 - DNA, 60 bp, Artificial
  Synthetic oligonucleotide
tcgtcatgccccaattccacgttatagcacatacctaatgctactgctaattgtctcata

SEQ ID NO: 462413 - DNA, 60 bp, Artificial
  Synthetic oligonucleotide
tcgtcatggacgacttttatgggtggttgccgtatgatgatttgctgagaattaccgacc

SEQ ID NO: 462414 - DNA, 55 bp, Artificial
  Synthetic oligonucleotide
tcgtcattgaatgtaggtggacggacacagcattctgtaacgtatacacgtatgt

SEQ ID NO: 462415 - DNA, 54 bp, Artificial
  Synthetic oligonucleotide
tcgtcattttgctaccagggctggaacagctggtgacaaagtaccaacaggaaa

SEQ ID NO: 462416 - DNA, 50 bp, Artificial
  Synthetic oligonucleotide
tcgtccaaaccgtactgtctgaagatgcgttccccgacagttctcagtcg

SEQ ID NO: 462417 - DNA, 54 bp, Artificial
  Synthetic oligonucleotide
tcgtccaacataatttgccgctttgtcttgaacataatggcggtagaggatcaa

SEQ ID NO: 462418 - DNA, 60 bp, Artificial
  Synthetic oligonucleotide
tcgtccaaccaacttgctgtacaggccatgaccgatactgctgtggatgctttgtccgct

SEQ ID NO: 462419 - DNA, 59 bp, Artificial
  Synthetic oligonucleotide
tcgtccaatacaggaggaaacagcacaagagtcagaaccagaatcaccaagtttcttag

SEQ ID NO: 462420 - DNA, 57 bp, Artificial
  Synthetic oligonucleotide
tcgtccaatgtatcggaaacccagattttaccgggccagaaggagcagtgatgttcc

SEQ ID NO: 462421 - DNA, 57 bp, Artificial
  Synthetic oligonucleotide
tcgtccacgaaattgacagagccgaagcagtttctaacctcagtaaaggacggacca

SEQ ID NO: 462422 - DNA, 60 bp, Artificial
  Synthetic oligonucleotide
tcgtccactacagcacagggttgcgacaccatcgctcggtgcaactgccaaacgggggta

SEQ ID NO: 462423 - DNA, 58 bp, Artificial
  Synthetic oligonucleotide
tcgtccactctaacacgtggtactcaattgacctagagaagggggaggccaactgcac

SEQ ID NO: 462424 - DNA, 55 bp, Artificial
  Synthetic oligonucleotide
tcgtccagattcggaatgttagaaaacatttgtgtatccccaacgctttccgaag

SEQ ID NO: 462425 - DNA, 60 bp, Artificial
  Synthetic oligonucleotide
tcgtccagggatctggcaattagattgtacacatctagaagggaaagtcatcctagtagc

SEQ ID NO: 462426 - DNA, 60 bp, Artificial
  Synthetic oligonucleotide
tcgtccaggtatacacgccactctcgcattgagttgcagtgagtaattcccctgtgcgta

SEQ ID NO: 462427 - DNA, 58 bp, Artificial
  Synthetic oligonucleotide
tcgtccattgaccaaaacgtcgtcgttcgagcgttaggtgccagtggaagtactgctc

SEQ ID NO: 462428 - DNA, 54 bp, Artificial
  Synthetic oligonucleotide
tcgtcccaatacttatggggggccttggattagtccttggcttcaccacggaaa

SEQ ID NO: 462429 - DNA, 58 bp, Artificial
  Synthetic oligonucleotide
tcgtcccagaagcttgaactaatgtcgtccagatttggaaattcaggtaggccttgtg

SEQ ID NO: 462430 - DNA, 54 bp, Artificial
  Synthetic oligonucleotide
tcgtccccgttttgctaaaggctaaggctccggcgttccttcttcatgaaacga

SEQ ID NO: 462431 - DNA, 54 bp, Artificial
  Synthetic oligonucleotide
tcgtcccggaggaggggggctacctggttaagcatgtctctgacttggaggttt

SEQ ID NO: 462432 - DNA, 56 bp, Artificial
  Synthetic oligonucleotide
tcgtcccggttaacaacttgagcagccacatcaactctattgaagcatatcaaatc

SEQ ID NO: 462433 - DNA, 51 bp, Artificial
  Synthetic oligonucleotide
tcgtcccgtgcccatgccattgtagccctgacccgtcatacggagaaatgt

SEQ ID NO: 462434 - DNA, 55 bp, Artificial
  Synthetic oligonucleotide
tcgtcccttgagatggtaggatttgatgtcaagaacaaatactgcctcgagattg

SEQ ID NO: 462435 - DNA, 52 bp, Artificial
  Synthetic oligonucleotide
tcgtccgaaagacctaatcagggagacagaagcttgtctcaagaattataat

SEQ ID NO: 462436 - DNA, 58 bp, Artificial
  Synthetic oligonucleotide
tcgtccgagatagcgttaaaagttataaggacggcagactctgctttaatgcatggtt

SEQ ID NO: 462437 - DNA, 56 bp, Artificial
  Synthetic oligonucleotide
tcgtccgcccttcttcgtgactaaggctcaggcagttttccctccagggactgatt

SEQ ID NO: 462438 - DNA, 60 bp, Artificial
  Synthetic oligonucleotide
tcgtccgctgtcgaacatagaacaggtgtgctcttcgcctatccatacgccctgcatcga

SEQ ID NO: 462439 - DNA, 53 bp, Artificial
  Synthetic oligonucleotide
tcgtccggccagggatctgttcgatcaaagaatttggggtcttggggtcagca

SEQ ID NO: 462440 - DNA, 55 bp, Artificial
  Synthetic oligonucleotide
tcgtccgggacaagaagccttgcgagttttcctctgtggatcccctcattccttt

SEQ ID NO: 462441 - DNA, 55 bp, Artificial
  Synthetic oligonucleotide
tcgtccggtttgagaaagctggaccttgggcagaacaacaacaaactgccagcag

SEQ ID NO: 462442 - DNA, 52 bp, Artificial
  Synthetic oligonucleotide
tcgtccgtaagcgtatagtggaaatgctctgtgatacactagacggtgttag

SEQ ID NO: 462443 - DNA, 60 bp, Artificial
  Synthetic oligonucleotide
tcgtccgtagctctcgcaacgagaaccaggaaatgccacgcccgattagtgacacctgga

SEQ ID NO: 462444 - DNA, 58 bp, Artificial
  Synthetic oligonucleotide
tcgtccgtctaaccttggcattaggccagagaggggcggacttagaaggtgagatgta

SEQ ID NO: 462445 - DNA, 55 bp, Artificial
  Synthetic oligonucleotide
tcgtccgttcagaacatactcagatgtggcagccgctgtatcccattgggatcac

SEQ ID NO: 462446 - DNA, 55 bp, Artificial
  Synthetic oligonucleotide
tcgtcctaccccggagttttgtaggaatgcgtacaactggaaagttgcaggtgac

SEQ ID NO: 462447 - DNA, 55 bp, Artificial
  Synthetic oligonucleotide
tcgtcctattctgctcatgcactctgaattttgggcatctggctatgacgtagac

SEQ ID NO: 462448 - DNA, 53 bp, Artificial
  Synthetic oligonucleotide
tcgtcctcggggggccggggctcaacaagtacaacgcgaaagcctggaggaac

SEQ ID NO: 462449 - DNA, 60 bp, Artificial
  Synthetic oligonucleotide
tcgtccttcaaacagcaagtcgtgctgctcaccactacgctcgccttgtacctcagagcc

SEQ ID NO: 462450 - DNA, 57 bp, Artificial
  Synthetic oligonucleotide
tcgtcgaaatgttcgtcgtacgaactcagctactcggtttaatatcaaggtggcgag

SEQ ID NO: 462451 - DNA, 53 bp, Artificial
  Synthetic oligonucleotide
tcgtcgactagtcgaaaacgccggaaaaaaacgatatcgtcggacggtggaca

SEQ ID NO: 462452 - DNA, 60 bp, Artificial
  Synthetic oligonucleotide
tcgtcgatataagcggagcttttctgtgactgtacgtagtgtattgatcttcgtgttctg

SEQ ID NO: 462453 - DNA, 60 bp, Artificial
  Synthetic oligonucleotide
tcgtcgatgactgataaactctctaagcaggaggattacgcagggattgtttcaaggcgt

SEQ ID NO: 462454 - DNA, 58 bp, Artificial
  Synthetic oligonucleotide
tcgtcgcaatacggaatcggtaattctgaaatggatctctccgttagcctggctaaag

SEQ ID NO: 462455 - DNA, 60 bp, Artificial
  Synthetic oligonucleotide
tcgtcgcagataataaacgtcatcatgaagcatgcacgtttgtcccgtcgtaagcgtgcg

SEQ ID NO: 462456 - DNA, 57 bp, Artificial
  Synthetic oligonucleotide
tcgtcgccccaacgccttataacctttgataaccctacatatgaaggtgaagatata

SEQ ID NO: 462457 - DNA, 51 bp, Artificial
  Synthetic oligonucleotide
tcgtcgcctacaaaatgcacagtacgagagggcggcactgaaaggacagct

SEQ ID NO: 462458 - DNA, 59 bp, Artificial
  Synthetic oligonucleotide
tcgtcgcctagacgttctatgtggtaatgttctgcaatacttatttcccaatcctgtag

SEQ ID NO: 462459 - DNA, 52 bp, Artificial
  Synthetic oligonucleotide
tcgtcgctgtgggtaagggtaactccgcgaagacccctttcgcgtacgccct

SEQ ID NO: 462460 - DNA, 58 bp, Artificial
  Synthetic oligonucleotide
tcgtcggagccaagaattctgaactcgttgacagcttggcaagattgttcaaaattgg

SEQ ID NO: 462461 - DNA, 60 bp, Artificial
  Synthetic oligonucleotide
tcgtcggctgcttgcgtgcctggatgcgggatgtgtgagccgcgcggcggctagtggttt

SEQ ID NO: 462462 - DNA, 59 bp, Artificial
  Synthetic oligonucleotide
tcgtcggctggaggtcaactattctactcccgccccgttgtctcagccaatggcgagcc

SEQ ID NO: 462463 - DNA, 60 bp, Artificial
  Synthetic oligonucleotide
tcgtcgggatccatacgcctgaaggcaagctggtctataatatgtggtctggcctgttca

SEQ ID NO: 462464 - DNA, 53 bp, Artificial
  Synthetic oligonucleotide
tcgtcgggtttccaggcgggtgcaaacaatgcggtttgatgtcccagatccgt

SEQ ID NO: 462465 - DNA, 60 bp, Artificial
  Synthetic oligonucleotide
tcgtcggtaggtatggccgccgaacgaagctgtatgaagcggcccattctgatgttcgcg

SEQ ID NO: 462466 - DNA, 55 bp, Artificial
  Synthetic oligonucleotide
tcgtcggtctgtgaagctggagactgctcacgcgtcggctcgtcctttcgtccac

SEQ ID NO: 462467 - DNA, 58 bp, Artificial
  Synthetic oligonucleotide
tcgtcggtgatcctgtctctccttgtcggtgaatccccccctgagaggcctcttccta

SEQ ID NO: 462468 - DNA, 54 bp, Artificial
  Synthetic oligonucleotide
tcgtcgtatatggcgtatagtatgtggtgtatgtggtcttctgctccgtctctc

SEQ ID NO: 462469 - DNA, 55 bp, Artificial
  Synthetic oligonucleotide
tcgtcgtatcggaataataatcccagaacacagtaccatgctctatagatggctc

SEQ ID NO: 462470 - DNA, 59 bp, Artificial
  Synthetic oligonucleotide
tcgtcgtctccggttggctgccctcctacgacgataatatagactccgcggtctcgcgc

SEQ ID NO: 462471 - DNA, 60 bp, Artificial
  Synthetic oligonucleotide
tcgtcgtctgaatttcgacagcccctattctcgacgtgctgctgtccccactgtccgcgt

SEQ ID NO: 462472 - DNA, 55 bp, Artificial
  Synthetic oligonucleotide
tcgtcgtctgtaatcgctgatttcagtgaattcaacctagtttctcctcactttg

SEQ ID NO: 462473 - DNA, 60 bp, Artificial
  Synthetic oligonucleotide
tcgtcgtgccaagtcaattggtcgatgcgagaggtgctacaggatctttccgccagtgtg

SEQ ID NO: 462474 - DNA, 60 bp, Artificial
  Synthetic oligonucleotide
tcgtcgttgacaatctatctaagctgggcgctgatctgactcacgtgttgccagcgagtg

SEQ ID NO: 462475 - DNA, 59 bp, Artificial
  Synthetic oligonucleotide
tcgtctaaatagtctttatatgaggaatttggacctggattgcagaggaagattgttgg

SEQ ID NO: 462476 - DNA, 60 bp, Artificial
  Synthetic oligonucleotide
tcgtctacctaatgtaggcggtcgtcagatcaggcgtactccacatcgtgctactgttcc

SEQ ID NO: 462477 - DNA, 60 bp, Artificial
  Synthetic oligonucleotide
tcgtctatcaatcaataagcaccagaatctctaaagttgtaagggagtatgcttggccat

SEQ ID NO: 462478 - DNA, 53 bp, Artificial
  Synthetic oligonucleotide
tcgtctatgggacagataaccttgaggggcttgacctctcaacctccgctgga

SEQ ID NO: 462479 - DNA, 58 bp, Artificial
  Synthetic oligonucleotide
tcgtctcaacaagccatgaccggactaatgaaagccttccagaaactaagccctacca

SEQ ID NO: 462480 - DNA, 60 bp, Artificial
  Synthetic oligonucleotide
tcgtctcaatcgcaggagcgtttcttccgagtggatagccacttcgaaaggatcgccgca

SEQ ID NO: 462481 - DNA, 60 bp, Artificial
  Synthetic oligonucleotide
tcgtctcacgttctccagctgaactatttggagatccaatctccaaacaatatacgcgta

SEQ ID NO: 462482 - DNA, 60 bp, Artificial
  Synthetic oligonucleotide
tcgtctcccgctgtcaactctgcgagagactgaagaaatagccatgcgttgttacaatga

SEQ ID NO: 462483 - DNA, 55 bp, Artificial
  Synthetic oligonucleotide
tcgtctcctcgaagatggtcttgacggagccagcccgtgccaataggtgggccac

SEQ ID NO: 462484 - DNA, 55 bp, Artificial
  Synthetic oligonucleotide
tcgtctcgcggtgagttaacccgcacaaaagaccgagctactcgtaagcgtaatg

SEQ ID NO: 462485 - DNA, 60 bp, Artificial
  Synthetic oligonucleotide
tcgtctctatcccactaggacataattacactctcataggacccccaatcacttcagagg

SEQ ID NO: 462486 - DNA, 55 bp, Artificial
  Synthetic oligonucleotide
tcgtctcttgcggtaagcacttttacgtgatggaaagagacaagtacagacacgg

SEQ ID NO: 462487 - DNA, 60 bp, Artificial
  Synthetic oligonucleotide
tcgtctgctacctctaacgcgcttaattttgtgtcctcgaacattgagaggttgtacata

SEQ ID NO: 462488 - DNA, 60 bp, Artificial
  Synthetic oligonucleotide
tcgtctgctgctcaatgtcttattcctggacaggcgcgctagtcaccccgtgcgccgcgg

SEQ ID NO: 462489 - DNA, 59 bp, Artificial
  Synthetic oligonucleotide
tcgtctggcggttcttgcgttcctgatccggctgggcctaagcaagccgctacggatac

SEQ ID NO: 462490 - DNA, 55 bp, Artificial
  Synthetic oligonucleotide
tcgtctgggatgacggacacggagatgcgcagctggcttgagcccatcttgggtg

SEQ ID NO: 462491 - DNA, 60 bp, Artificial
  Synthetic oligonucleotide
tcgtctgggtaatgatattaagcgcacacttgtgtaccgcatgttgtcaccattctacgg

SEQ ID NO: 462492 - DNA, 50 bp, Artificial
  Synthetic oligonucleotide
tcgtctgtgcactgtgagaacgctccattacgtccgtgagcgcgcgtgga

SEQ ID NO: 462493 - DNA, 58 bp, Artificial
  Synthetic oligonucleotide
tcgtcttagacttcggaggaagttgcgtcacacattacctccgcggacataacctaca

SEQ ID NO: 462494 - DNA, 60 bp, Artificial
  Synthetic oligonucleotide
tcgtcttcagcgacctcaccgctcaaagagctggtgataaattggtctccctcctgttgg

SEQ ID NO: 462495 - DNA, 56 bp, Artificial
  Synthetic oligonucleotide
tcgtcttccccgtccgactgacacccacaatcactaaacttattggtcaattgggc

SEQ ID NO: 462496 - DNA, 55 bp, Artificial
  Synthetic oligonucleotide
tcgtcttggctgtgctactccctagcacggtcgctacccactcgcatcgctcgtc

SEQ ID NO: 462497 - DNA, 59 bp, Artificial
  Synthetic oligonucleotide
tcgtctttatttggggctgcaatatcattattatttaagcgtgtatggggcaaactata

SEQ ID NO: 462498 - DNA, 60 bp, Artificial
  Synthetic oligonucleotide
tcgtctttcatcattcttttgactgcggctgggtcaacaatacacgctgcagcaacatgc

SEQ ID NO: 462499 - DNA, 60 bp, Artificial
  Synthetic oligonucleotide
tcgtctttgaatcattgagcggctcattaattgcgaatattgcatcttaattagattata

SEQ ID NO: 462500 - DNA, 60 bp, Artificial
  Synthetic oligonucleotide
tcgtcttttctccccgccaacatgaaacagtgcaggactgcaattgttcaatctatcccg

SEQ ID NO: 462501 - DNA, 53 bp, Artificial
  Synthetic oligonucleotide
tcgtgaaaacgcttactccgggatctgaaggtagagtatttgttgctaaacct

SEQ ID NO: 462502 - DNA, 60 bp, Artificial
  Synthetic oligonucleotide
tcgtgaaagcagagaagatatcgacggccaagggtgacccagcacctagggtgatacagc

SEQ ID NO: 462503 - DNA, 60 bp, Artificial
  Synthetic oligonucleotide
tcgtgaaattggaggacccaatagagagtgactattctacttcagatatctccctcatgt

SEQ ID NO: 462504 - DNA, 60 bp, Artificial
  Synthetic oligonucleotide
tcgtgaacacggaacatgcctatgagaacaaacgccacactgttgaaggcgggatgccat

SEQ ID NO: 462505 - DNA, 55 bp, Artificial
  Synthetic oligonucleotide
tcgtgaaccggttggccaacatcggaagcaacggcgtcatcgcgttgccggggat

SEQ ID NO: 462506 - DNA, 55 bp, Artificial
  Synthetic oligonucleotide
tcgtgaacgaggatgtagggactataagaccagtgttaggggagagagtaatccc

SEQ ID NO: 462507 - DNA, 60 bp, Artificial
  Synthetic oligonucleotide
tcgtgaactactcactattcttcccacttctactaccgctggcaagatcacatgcgacat

SEQ ID NO: 462508 - DNA, 60 bp, Artificial
  Synthetic oligonucleotide
tcgtgaactggagcaagcgtatatgaatcctatctatgtcgtccgtctcaaggacggaac

SEQ ID NO: 462509 - DNA, 60 bp, Artificial
  Synthetic oligonucleotide
tcgtgaaggagacggatgaccccagaaccatcatgaagggcacaaggctccacgtctcac

SEQ ID NO: 462510 - DNA, 59 bp, Artificial
  Synthetic oligonucleotide
tcgtgaatactataattgcataacaactattgttagtccatctgtttacaaagagtcag

SEQ ID NO: 462511 - DNA, 60 bp, Artificial
  Synthetic oligonucleotide
tcgtgaatctccacgattactgaccctgtggcgttgatcggaacttgttgtctgtattct

SEQ ID NO: 462512 - DNA, 60 bp, Artificial
  Synthetic oligonucleotide
tcgtgaatctccactactacggagcccgacgcattaattggcacctgttgcctatactct

SEQ ID NO: 462513 - DNA, 55 bp, Artificial
  Synthetic oligonucleotide
tcgtgaatctctagccaggtttatccctactattggacccgttcaggccactacg

SEQ ID NO: 462514 - DNA, 60 bp, Artificial
  Synthetic oligonucleotide
tcgtgacagaagacctgttacaaccccatatggtttcggagagttattcaacatgtatga

SEQ ID NO: 462515 - DNA, 60 bp, Artificial
  Synthetic oligonucleotide
tcgtgacagaaggcccaataaggatccgctaaactttggccagatcttcacgacgtatga

SEQ ID NO: 462516 - DNA, 60 bp, Artificial
  Synthetic oligonucleotide
tcgtgaccattcaatgacgatataaatgtttggcgtggatcatgaagatagggtttatga

SEQ ID NO: 462517 - DNA, 57 bp, Artificial
  Synthetic oligonucleotide
tcgtgaccggagatcatataatgccggtaagtttagatcgtatcgtgtttaccgtcg

SEQ ID NO: 462518 - DNA, 60 bp, Artificial
  Synthetic oligonucleotide
tcgtgacctcattaactccaatggtgctgatgctatgggagttagggggttggtagacgc

SEQ ID NO: 462519 - DNA, 59 bp, Artificial
  Synthetic oligonucleotide
tcgtgacgaatgtttaactaaacatccttcacttggagacagtaattcggatgcactcc

SEQ ID NO: 462520 - DNA, 55 bp, Artificial
  Synthetic oligonucleotide
tcgtgacggcagggcatgtcgttggacaacacaaggttgtgtcagcgtgtgtggg

SEQ ID NO: 462521 - DNA, 55 bp, Artificial
  Synthetic oligonucleotide
tcgtgacggttgcttagcccctcgacacctccgtgagctccaggtttacgagcgc

SEQ ID NO: 462522 - DNA, 60 bp, Artificial
  Synthetic oligonucleotide
tcgtgactatatcagacagagacaaggtgcacttgcagggatggagccaaaggaatttca

SEQ ID NO: 462523 - DNA, 58 bp, Artificial
  Synthetic oligonucleotide
tcgtgactatttccgtgatattggccgtatggttctcactgccgagggtcgttcggtc

SEQ ID NO: 462524 - DNA, 60 bp, Artificial
  Synthetic oligonucleotide
tcgtgactgaactcatcaaacgtggagtctcgatacatgatagtcagtatattcctaatc

SEQ ID NO: 462525 - DNA, 52 bp, Artificial
  Synthetic oligonucleotide
tcgtgacttgactaagtttggaggttcacctttcctcaactccgattagaat

SEQ ID NO: 462526 - DNA, 51 bp, Artificial
  Synthetic oligonucleotide
tcgtgagattacagtgaggcccctaagaattgactaagtctgcgaacttgt

SEQ ID NO: 462527 - DNA, 60 bp, Artificial
  Synthetic oligonucleotide
tcgtgaggaagatgatgactaattcgcaagatacagagctctccttcacaattactggag

SEQ ID NO: 462528 - DNA, 60 bp, Artificial
  Synthetic oligonucleotide
tcgtgaggacactattccaacagatgcgggatgtgcttggaacgtttgacactgttcaga

SEQ ID NO: 462529 - DNA, 56 bp, Artificial
  Synthetic oligonucleotide
tcgtgaggtaatcgctgtccccaacccggcaaagttgttaattcgcatgggaagga

SEQ ID NO: 462530 - DNA, 60 bp, Artificial
  Synthetic oligonucleotide
tcgtgagtccaaactccaaaggttgctgcctgaattggctatggtgtcttatgtgccaga

SEQ ID NO: 462531 - DNA, 59 bp, Artificial
  Synthetic oligonucleotide
tcgtgataagaaggattatctacagtacagtttaatagagatgtttaaggatagattaa

SEQ ID NO: 462532 - DNA, 60 bp, Artificial
  Synthetic oligonucleotide
tcgtgatattggtcgtatggttcttgctgccgagggtcgcaaggctaatgattcacacgc

SEQ ID NO: 462533 - DNA, 53 bp, Artificial
  Synthetic oligonucleotide
tcgtgatcatcgcactaatctatgctagttctttcctttctagtgggcgccgc

SEQ ID NO: 462534 - DNA, 60 bp, Artificial
  Synthetic oligonucleotide
tcgtgatctatctttccaggatctcagtgaaacaccttgtcaggtggatttaatgacttc

SEQ ID NO: 462535 - DNA, 59 bp, Artificial
  Synthetic oligonucleotide
tcgtgatctggtacttgttattcgtgccaaaaattatggcgaagcgacccggagatata

SEQ ID NO: 462536 - DNA, 60 bp, Artificial
  Synthetic oligonucleotide
tcgtgatggttggtgaaaacggctatagtctgtaaaccatgcaactggcacctatgaaaa

SEQ ID NO: 462537 - DNA, 60 bp, Artificial
  Synthetic oligonucleotide
tcgtgatgtgcaggtgtggtcacaaccggtcctggcacaggtatgcgtgggatcggttcc

SEQ ID NO: 462538 - DNA, 60 bp, Artificial
  Synthetic oligonucleotide
tcgtgattctcactatcgcgggcatcgttctccgtgtcctccgccgctggattcccggtc

SEQ ID NO: 462539 - DNA, 57 bp, Artificial
  Synthetic oligonucleotide
tcgtgattctgttcatgctggccagaatcttttcgttgacctttcaaatctttacgc

SEQ ID NO: 462540 - DNA, 59 bp, Artificial
  Synthetic oligonucleotide
tcgtgattggaagacggaggtcatcgttctgattggtcgtcctggaagcgggaagagcc

SEQ ID NO: 462541 - DNA, 57 bp, Artificial
  Synthetic oligonucleotide
tcgtgattttacaatctttgccgtaaaatgacgttcggttatataacttcacagcca

SEQ ID NO: 462542 - DNA, 55 bp, Artificial
  Synthetic oligonucleotide
tcgtgcaaaaggacctgaaaaggtaactgaaacaaggcatctcttgaaggccaag

SEQ ID NO: 462543 - DNA, 60 bp, Artificial
  Synthetic oligonucleotide
tcgtgcaaacatacgggcagtacagcgattctggcataacatttcgcagacctaagttca

SEQ ID NO: 462544 - DNA, 59 bp, Artificial
  Synthetic oligonucleotide
tcgtgcaaagtgtgtttgctatcattggaatgtttggacataacgataccgttgttttc

SEQ ID NO: 462545 - DNA, 57 bp, Artificial
  Synthetic oligonucleotide
tcgtgcaacccgtgtcggagacgccttcgttagtgacgtcgagcctctaccctctgg

SEQ ID NO: 462546 - DNA, 59 bp, Artificial
  Synthetic oligonucleotide
tcgtgcaactcgtgttggagatgtattcgttagtgacgtcgatcctttaccacccagcc

SEQ ID NO: 462547 - DNA, 55 bp, Artificial
  Synthetic oligonucleotide
tcgtgcacccgcactctagatcaactcgccgtcgtctgatcgctctcctcttggc

SEQ ID NO: 462548 - DNA, 60 bp, Artificial
  Synthetic oligonucleotide
tcgtgcagacgtatttcccttcgaactggataagcacgtggagatgagggctcccatctt

SEQ ID NO: 462549 - DNA, 54 bp, Artificial
  Synthetic oligonucleotide
tcgtgcagatttacagcacgagtcaagaagtagttttgctatgttcaagcggag

SEQ ID NO: 462550 - DNA, 60 bp, Artificial
  Synthetic oligonucleotide
tcgtgcatctgaatttcccctcgaattggataagcacgtggagatgagggctcccatctt

SEQ ID NO: 462551 - DNA, 60 bp, Artificial
  Synthetic oligonucleotide
tcgtgcatgcttgctggtgcggaaagtcgctgggggtcattatgtccaaatggctttcat

SEQ ID NO: 462552 - DNA, 60 bp, Artificial
  Synthetic oligonucleotide
tcgtgccaagggaagtgtacgactccctcttcacgtacacaagagcagtgcgcactctcc

SEQ ID NO: 462553 - DNA, 59 bp, Artificial
  Synthetic oligonucleotide
tcgtgccaccaaaggtcgattcgagtaaagacggagaagatatgattgcaccggtgtct

SEQ ID NO: 462554 - DNA, 51 bp, Artificial
  Synthetic oligonucleotide
tcgtgccagagagcgtctacaacgctctcttcacctacacgcgagccgtca

SEQ ID NO: 462555 - DNA, 55 bp, Artificial
  Synthetic oligonucleotide
tcgtgcccaggctcagtggtgctatggacggctctggaggagcgttgcctgcttt

SEQ ID NO: 462556 - DNA, 58 bp, Artificial
  Synthetic oligonucleotide
tcgtgcccctaatacgcagtaataaagccttagtcttctcgattattacttggtatgc

SEQ ID NO: 462557 - DNA, 55 bp, Artificial
  Synthetic oligonucleotide
tcgtgcccgcagtcagccatcggcctcagaacccgactgcgcgatgaaccgcaca

SEQ ID NO: 462558 - DNA, 60 bp, Artificial
  Synthetic oligonucleotide
tcgtgcctcagatgtgatagtggagtctcttcaaggtaacacttggattgaagttacatc

SEQ ID NO: 462559 - DNA, 51 bp, Artificial
  Synthetic oligonucleotide
tcgtgcctccgcttctgctcatgcccgcccctggattgaaacttcctggaa

SEQ ID NO: 462560 - DNA, 58 bp, Artificial
  Synthetic oligonucleotide
tcgtgcctccttccttgggggtgcgaacatagccgattgtgtagagtccaggttgacc

SEQ ID NO: 462561 - DNA, 59 bp, Artificial
  Synthetic oligonucleotide
tcgtgcctgcacacgcagccagacagaataagtggatccgatttagtcgcgcaacacaa

SEQ ID NO: 462562 - DNA, 60 bp, Artificial
  Synthetic oligonucleotide
tcgtgcgaatgtctgattcgttacagcgaaggacgtcgtccatcctatactcgtcacgca

SEQ ID NO: 462563 - DNA, 60 bp, Artificial
  Synthetic oligonucleotide
tcgtgcggttaaggtgtcagttcattggacatctcagaagcccactgtggacgtttttga

SEQ ID NO: 462564 - DNA, 56 bp, Artificial
  Synthetic oligonucleotide
tcgtgcgtggatccgtactactaaaatagttggtgaccacccgttggttatagagc

SEQ ID NO: 462565 - DNA, 50 bp, Artificial
  Synthetic oligonucleotide
tcgtgctaacagactgcacctgttgcgccgaaggcaatctatataagggc

SEQ ID NO: 462566 - DNA, 60 bp, Artificial
  Synthetic oligonucleotide
tcgtgctaagctgtggaagttgacagacatgcggttctctataaaccctcaagaaattga

SEQ ID NO: 462567 - DNA, 60 bp, Artificial
  Synthetic oligonucleotide
tcgtgctagttctgattatatgagttacagaaggacatcgcagttaactgtttcagcaca

SEQ ID NO: 462568 - DNA, 60 bp, Artificial
  Synthetic oligonucleotide
tcgtgctcagctctcggtcctgagctctcttgctcccgagaccttctggtcggctatccg

SEQ ID NO: 462569 - DNA, 60 bp, Artificial
  Synthetic oligonucleotide
tcgtgctgatgcttgtaaaagcgtccgcaatactcgcagcgctgcacgggctgtacctta

SEQ ID NO: 462570 - DNA, 55 bp, Artificial
  Synthetic oligonucleotide
tcgtgctgcgttgtggttataccaacgtggaaagttaacctaccatcatgtaggt

SEQ ID NO: 462571 - DNA, 54 bp, Artificial
  Synthetic oligonucleotide
tcgtgcttccagcgcccccgtccgctcccgccggatgactcaggatgactggtc

SEQ ID NO: 462572 - DNA, 55 bp, Artificial
  Synthetic oligonucleotide
tcgtggacatccttgcagggtatggtgcgggcgtggcgggagctctcgtagcatt

SEQ ID NO: 462573 - DNA, 56 bp, Artificial
  Synthetic oligonucleotide
tcgtggacatggctcgcgaagtatcggctcagtaccgccaaaccgttgaaggtctt

SEQ ID NO: 462574 - DNA, 60 bp, Artificial
  Synthetic oligonucleotide
tcgtggacccccgatgcgtgacctctgtagacttgcacgtcgagctcagggacgcgtgca

SEQ ID NO: 462575 - DNA, 59 bp, Artificial
  Synthetic oligonucleotide
tcgtggagaaccgcacttcaagtcgccgagcgtgcatatgcgaggactgaacacatttg

SEQ ID NO: 462576 - DNA, 55 bp, Artificial
  Synthetic oligonucleotide
tcgtggagcgtcattatcgtgtcaatgtcgggcgagttgtcgaaaacttgcgtct

SEQ ID NO: 462577 - DNA, 60 bp, Artificial
  Synthetic oligonucleotide
tcgtggatctcaatgaccacatgcccgactgcattaattggtacttgacttcgatattca

SEQ ID NO: 462578 - DNA, 60 bp, Artificial
  Synthetic oligonucleotide
tcgtggatctccacaattactgatcctgtggcgttgattggtacctgttgcctgtattct

SEQ ID NO: 462579 - DNA, 59 bp, Artificial
  Synthetic oligonucleotide
tcgtggatctccacgatgacggaacctgtggcgtttatgggtacctgttgcctgtattc

SEQ ID NO: 462580 - DNA, 51 bp, Artificial
  Synthetic oligonucleotide
tcgtggatttgcgttagagcatggagtgtcaaggccaacaaccgaacatat

SEQ ID NO: 462581 - DNA, 59 bp, Artificial
  Synthetic oligonucleotide
tcgtggcagctaacgggcggtacccctgtgacgattgtgtcccgtcagttggggcatga

SEQ ID NO: 462582 - DNA, 52 bp, Artificial
  Synthetic oligonucleotide
tcgtggcagctacaccagggtcaacaacacggccaagcctgagtgctggcat

SEQ ID NO: 462583 - DNA, 60 bp, Artificial
  Synthetic oligonucleotide
tcgtggcatatttcgtaaatatgcgtcgggacaccaggaggtgtcctctcaactttctca

SEQ ID NO: 462584 - DNA, 55 bp, Artificial
  Synthetic oligonucleotide
tcgtggccatccgtataatattaccggatggccgcgattttttttcaagtggtcc

SEQ ID NO: 462585 - DNA, 55 bp, Artificial
  Synthetic oligonucleotide
tcgtggccgaacgtgtgaagggttcttctttgcctattccaagcccgctgccagt

SEQ ID NO: 462586 - DNA, 60 bp, Artificial
  Synthetic oligonucleotide
tcgtggcgacagacgctctaatgacgggctttaccggcgactttgactcagtgatcgact

SEQ ID NO: 462587 - DNA, 57 bp, Artificial
  Synthetic oligonucleotide
tcgtggcgactcgtccaaaccgactcccgctcaaggggtcaatcaaatactggaaca

SEQ ID NO: 462588 - DNA, 59 bp, Artificial
  Synthetic oligonucleotide
tcgtggcgccaaggttggagtaggtacgtctgcataagtcgccgggcgagtcacctctc

SEQ ID NO: 462589 - DNA, 55 bp, Artificial
  Synthetic oligonucleotide
tcgtggcgtacgcgtctgggcgtcgcagcttcggagatgttctgacgggaatgtc

SEQ ID NO: 462590 - DNA, 50 bp, Artificial
  Synthetic oligonucleotide
tcgtggctttgtcaagacacaagtcggaattcatttattacaccctagct

SEQ ID NO: 462591 - DNA, 56 bp, Artificial
  Synthetic oligonucleotide
tcgtgggaacggcaatggactccgccgggtgcgtggcggaagggtatctcgccgaa

SEQ ID NO: 462592 - DNA, 60 bp, Artificial
  Synthetic oligonucleotide
tcgtgggcaccattaatgctatactagccagaatcgccgcggctaggtctctcctgcaca

SEQ ID NO: 462593 - DNA, 52 bp, Artificial
  Synthetic oligonucleotide
tcgtgggcgcttggatcgctcatgcgtggagcatatcacaagtggcgagacg

SEQ ID NO: 462594 - DNA, 59 bp, Artificial
  Synthetic oligonucleotide
tcgtggggtgtgccagggcaaggtgcctcttgcgtgcgtactcgttctttacaaccata

SEQ ID NO: 462595 - DNA, 58 bp, Artificial
  Synthetic oligonucleotide
tcgtgggtaatcccctggatcacaccagtacggggagagtccgggatgtgagcatcat

SEQ ID NO: 462596 - DNA, 55 bp, Artificial
  Synthetic oligonucleotide
tcgtgggtacaatcaacgctctcctggcaaggattgcggctgcccgctccctagt

SEQ ID NO: 462597 - DNA, 55 bp, Artificial
  Synthetic oligonucleotide
tcgtgggtcaagccctggaccccaaatccttcgaaactgacggttgcagttgccc

SEQ ID NO: 462598 - DNA, 59 bp, Artificial
  Synthetic oligonucleotide
tcgtgggtggggcaacggatgtggacttttcgggaagggaagcattgacacatgtgcaa

SEQ ID NO: 462599 - DNA, 57 bp, Artificial
  Synthetic oligonucleotide
tcgtggtaccaatcgcgatcttctacgcccattccctgccccctgttgttgggcgga

SEQ ID NO: 462600 - DNA, 51 bp, Artificial
  Synthetic oligonucleotide
tcgtggtagccccaagggcggtgtagaccccttcgggtataatacccttcg

SEQ ID NO: 462601 - DNA, 58 bp, Artificial
  Synthetic oligonucleotide
tcgtggtcacaaccgacatctcggaaatgggagcgaacttcaaggccacaagggtcat

SEQ ID NO: 462602 - DNA, 54 bp, Artificial
  Synthetic oligonucleotide
tcgtggtcactggttacggcgctgtgcgtgctctcgaatgttacgtttccgtgt

SEQ ID NO: 462603 - DNA, 60 bp, Artificial
  Synthetic oligonucleotide
tcgtggtccctcctggcgcacccactagttgcgacgtgttgtgctttgcatctgcttgca

SEQ ID NO: 462604 - DNA, 59 bp, Artificial
  Synthetic oligonucleotide
tcgtggtctgaaggtggcgactgggctaactctgagctatggaaactcgccctttactg

SEQ ID NO: 462605 - DNA, 52 bp, Artificial
  Synthetic oligonucleotide
tcgtggtgggggaaccccgattggttggtcagtttgtacaaaacctcgagac

SEQ ID NO: 462606 - DNA, 54 bp, Artificial
  Synthetic oligonucleotide
tcgtggtgttcgtgatgaggcatggactctattctacaacactaatggtcagag

SEQ ID NO: 462607 - DNA, 57 bp, Artificial
  Synthetic oligonucleotide
tcgtggtttcagaactgttggccgagggctaaggaattttgcccgcgctgcgaagga

SEQ ID NO: 462608 - DNA, 55 bp, Artificial
  Synthetic oligonucleotide
tcgtgtacaaggcacagatacacgatccgcccaaatattacgttgcaagagctct

SEQ ID NO: 462609 - DNA, 55 bp, Artificial
  Synthetic oligonucleotide
tcgtgtaccgctccatcgtgtgggcccaacccttcggggccggttcgatgtgtat

SEQ ID NO: 462610 - DNA, 60 bp, Artificial
  Synthetic oligonucleotide
tcgtgtacctgcggaataagccgaagaccaatcagtcaagatcgctctaaaggtgtggtg

SEQ ID NO: 462611 - DNA, 57 bp, Artificial
  Synthetic oligonucleotide
tcgtgtacgagcagatttctctagggcgggcttcacccgacccgtaatagtgcgcct

SEQ ID NO: 462612 - DNA, 60 bp, Artificial
  Synthetic oligonucleotide
tcgtgtagaacagcaggatatgatgactcaatccttacagtacttaaacgagcgtgatga

SEQ ID NO: 462613 - DNA, 55 bp, Artificial
  Synthetic oligonucleotide
tcgtgtagatggttgccgtatgtctggggacatgaacactagcatgggtaattac

SEQ ID NO: 462614 - DNA, 51 bp, Artificial
  Synthetic oligonucleotide
tcgtgtagtaacgagtattatagacccagtatggaagttctgaaattgagg

SEQ ID NO: 462615 - DNA, 56 bp, Artificial
  Synthetic oligonucleotide
tcgtgtatgtccttgtgcgtgccgtgaaacctctttccggtgggacagtgacccgg

SEQ ID NO: 462616 - DNA, 59 bp, Artificial
  Synthetic oligonucleotide
tcgtgtatttttgcagcggccgaacgaatgataccaagtcttcgtaaggcactgaccat

SEQ ID NO: 462617 - DNA, 60 bp, Artificial
  Synthetic oligonucleotide
tcgtgtcagtgctccactctggcggcagggttactgcggcgcgattcactaggccgtgga

SEQ ID NO: 462618 - DNA, 60 bp, Artificial
  Synthetic oligonucleotide
tcgtgtcgagtcgtgctgtccgcacatttatcattagtgtgttagaatacccgaggcatg

SEQ ID NO: 462619 - DNA, 55 bp, Artificial
  Synthetic oligonucleotide
tcgtgtcgcattgctccgttgatacgtaatgatagcgttatcccacctgctcgtg

SEQ ID NO: 462620 - DNA, 58 bp, Artificial
  Synthetic oligonucleotide
tcgtgtcgctcactctgtaatacaatttccagggaattgggtctttcagggagaagaa

SEQ ID NO: 462621 - DNA, 52 bp, Artificial
  Synthetic oligonucleotide
tcgtgtcggcccgaacgctatccgcgcaaacttcttgggtctccgccacgtt

SEQ ID NO: 462622 - DNA, 60 bp, Artificial
  Synthetic oligonucleotide
tcgtgtcggtagctaagatgatagaggacaagatggctgaggtgagggctagagaaaaag

SEQ ID NO: 462623 - DNA, 55 bp, Artificial
  Synthetic oligonucleotide
tcgtgtcgtagccgcggtacttctccgtcacgtccgcgtgcgtcaggtggtacac

SEQ ID NO: 462624 - DNA, 51 bp, Artificial
  Synthetic oligonucleotide
tcgtgtcgttgggttgaacgtccagagttatcgtttttcccgtaagagttt

SEQ ID NO: 462625 - DNA, 50 bp, Artificial
  Synthetic oligonucleotide
tcgtgtcttatggtcgcagtgcatagcccagccatacatcgactcgaaga

SEQ ID NO: 462626 - DNA, 60 bp, Artificial
  Synthetic oligonucleotide
tcgtgtgaaggttaccaggccacatctagcaccacagacccccatcgagggaagtcagat

SEQ ID NO: 462627 - DNA, 60 bp, Artificial
  Synthetic oligonucleotide
tcgtgtgaagtggtccgatcctacttgtgatactgactttcctgggtccaatgcgtctgg

SEQ ID NO: 462628 - DNA, 58 bp, Artificial
  Synthetic oligonucleotide
tcgtgtgcgcagatggacttatcgtcgtttgtgggcgtcgagtcccgtggtttagtgg

SEQ ID NO: 462629 - DNA, 60 bp, Artificial
  Synthetic oligonucleotide
tcgtgtggcccaacttactattgggaattctaccatcacgacgcaggaagcagctaacat

SEQ ID NO: 462630 - DNA, 58 bp, Artificial
  Synthetic oligonucleotide
tcgtgtgtagtgcggtctggctaaccgtaacggcgtatcggctcggttcttcgatgat

SEQ ID NO: 462631 - DNA, 60 bp, Artificial
  Synthetic oligonucleotide
tcgtgtgtatcaatgcacaccggcgatgacgtgtatatgcgacttcgtaccctccgtgat

SEQ ID NO: 462632 - DNA, 60 bp, Artificial
  Synthetic oligonucleotide
tcgtgtgtatgctaagttaggcggtgtggtagctaatgctatgctcaagtgtgtgtcact

SEQ ID NO: 462633 - DNA, 60 bp, Artificial
  Synthetic oligonucleotide
tcgtgtgtgggaatacgcgtgacagactgaccgataggagaacgaaatgctgcaagtacc

SEQ ID NO: 462634 - DNA, 60 bp, Artificial
  Synthetic oligonucleotide
tcgtgtgttacgatctctgttctggaatgagccggctattggccagaagttagtcttcac

SEQ ID NO: 462635 - DNA, 55 bp, Artificial
  Synthetic oligonucleotide
tcgtgtgttagcatggtatattccttcctcgtactggagcgacaatggctggtgc

SEQ ID NO: 462636 - DNA, 60 bp, Artificial
  Synthetic oligonucleotide
tcgtgtgttgctcaatgtcctattcctggacaggcgcactcatcaccccgtgtgccgcgg

SEQ ID NO: 462637 - DNA, 54 bp, Artificial
  Synthetic oligonucleotide
tcgtgttaagattgcttgccagtttcgggaccctgagggctttaacgtgggaac

SEQ ID NO: 462638 - DNA, 56 bp, Artificial
  Synthetic oligonucleotide
tcgtgttactggagagacttcaacctggggaccagcgcgtcagccttacggatttt

SEQ ID NO: 462639 - DNA, 59 bp, Artificial
  Synthetic oligonucleotide
tcgtgttagatgtaagttggatatcgctttggtttgcctttaatcggtcatttgagcca

SEQ ID NO: 462640 - DNA, 60 bp, Artificial
  Synthetic oligonucleotide
tcgtgttatggtaaggatttcagggaaatcgcaatggtgctggctcagtcctgctctaat

SEQ ID NO: 462641 - DNA, 59 bp, Artificial
  Synthetic oligonucleotide
tcgtgttatgtaatccgatccaacttgcgataccgattttcctgggtccaatgcgtctg

SEQ ID NO: 462642 - DNA, 55 bp, Artificial
  Synthetic oligonucleotide
tcgtgttcgaactcagcaccaaggcacaatcgcgcaacattaaatctagtcgggc

SEQ ID NO: 462643 - DNA, 55 bp, Artificial
  Synthetic oligonucleotide
tcgtgttcgagtcggataaattttgtcttacgaccgacggttatcaccatttaga

SEQ ID NO: 462644 - DNA, 55 bp, Artificial
  Synthetic oligonucleotide
tcgtgttcgggagggaacaaccgcgagctgaaggaccctacgctgggccacttga

SEQ ID NO: 462645 - DNA, 60 bp, Artificial
  Synthetic oligonucleotide
tcgtgttctggaactcaggtatgttgttcgctgcagtagaagcgcctccagcatgtacgt

SEQ ID NO: 462646 - DNA, 60 bp, Artificial
  Synthetic oligonucleotide
tcgtgttgacagacataccagccagtgcatcgaagattgtggtcttcactttcccattgg

SEQ ID NO: 462647 - DNA, 59 bp, Artificial
  Synthetic oligonucleotide
tcgtgttgagcctggtgtcgtccactaccagtttacggcaggtgtccctggctccggca

SEQ ID NO: 462648 - DNA, 52 bp, Artificial
  Synthetic oligonucleotide
tcgtgttgagttcgtagagacaggtgaccctatggagattgggaccggcccc

SEQ ID NO: 462649 - DNA, 55 bp, Artificial
  Synthetic oligonucleotide
tcgtgttgccatatctacatatactactagtcttggtgccggccctgtgtcagtt

SEQ ID NO: 462650 - DNA, 60 bp, Artificial
  Synthetic oligonucleotide
tcgtgttgctctgccaatcatgctgggcccccatgaattccttgaagtgctttaggtagt

SEQ ID NO: 462651 - DNA, 56 bp, Artificial
  Synthetic oligonucleotide
tcgtgttgctttgccagtccctttgggccccgatgaattccttaaagtgcttgaaa

SEQ ID NO: 462652 - DNA, 56 bp, Artificial
  Synthetic oligonucleotide
tcgtgtttgattgccaatccctctgggcccccatgaattctttaaagtgtttcaaa

SEQ ID NO: 462653 - DNA, 60 bp, Artificial
  Synthetic oligonucleotide
tcgttaaagctcgtgttggaagaggaggcatgggctgccgcaaacgacttcgaagatcta

SEQ ID NO: 462654 - DNA, 59 bp, Artificial
  Synthetic oligonucleotide
tcgttaaccacgttaacgcaattgtaccagtcactggtctctgcggagaacatatcggc

SEQ ID NO: 462655 - DNA, 54 bp, Artificial
  Synthetic oligonucleotide
tcgttaaccggtcgattacatcgtggccgaacgtgtgaagggttcttctttgcc

SEQ ID NO: 462656 - DNA, 60 bp, Artificial
  Synthetic oligonucleotide
tcgttaacctgtgggtgagagctagtagccgtagtatcagaactttgtctgagactaagc

SEQ ID NO: 462657 - DNA, 54 bp, Artificial
  Synthetic oligonucleotide
tcgttaagaataaaactacacttcgagagggacaacgccatttttcagctcgtt

SEQ ID NO: 462658 - DNA, 60 bp, Artificial
  Synthetic oligonucleotide
tcgttaagaatgcgtctgactggtcacaaatgcgatttacgtttggtccgactcttgatc

SEQ ID NO: 462659 - DNA, 59 bp, Artificial
  Synthetic oligonucleotide
tcgttaagacgaaagaccctagtgagggtggccatacctcaatataggcattcatggga

SEQ ID NO: 462660 - DNA, 54 bp, Artificial
  Synthetic oligonucleotide
tcgttaataagctataatatgggactaactggaagttataaagaattttactaa

SEQ ID NO: 462661 - DNA, 60 bp, Artificial
  Synthetic oligonucleotide
tcgttacagctctagttgtagggtttttccttctcaacgggatgcttgagcaggctgcag

SEQ ID NO: 462662 - DNA, 60 bp, Artificial
  Synthetic oligonucleotide
tcgttacatggaactgcaccgggccattcctaaatttaggtagatgcgacaaatctcaga

SEQ ID NO: 462663 - DNA, 55 bp, Artificial
  Synthetic oligonucleotide
tcgttaccaggttttacggcgttttcagtctactgttactggtggtcagtatgct

SEQ ID NO: 462664 - DNA, 54 bp, Artificial
  Synthetic oligonucleotide
tcgttacccgaccaactacttcgggaaacctagtaccaccatgaaagttgcgca

SEQ ID NO: 462665 - DNA, 59 bp, Artificial
  Synthetic oligonucleotide
tcgttacccgcacatcaactacgcaaagcctagtatcacctttgatgtactaagactgg

SEQ ID NO: 462666 - DNA, 55 bp, Artificial
  Synthetic oligonucleotide
tcgttacctaatacagcgttcaaacaaaagttatttatgaacactcaaagcgttc

SEQ ID NO: 462667 - DNA, 54 bp, Artificial
  Synthetic oligonucleotide
tcgttactgtaaaccctagggtttagatccaagtgaccgcacaagtaattgtgg

SEQ ID NO: 462668 - DNA, 60 bp, Artificial
  Synthetic oligonucleotide
tcgttacttaccaagttacactctcctgttcttgcatggcaaactcaatgttggctgcag

SEQ ID NO: 462669 - DNA, 50 bp, Artificial
  Synthetic oligonucleotide
tcgttacttctacagcagtttaagacacatcataattcgcaaagaggtca

SEQ ID NO: 462670 - DNA, 53 bp, Artificial
  Synthetic oligonucleotide
tcgttagcttcgtttacgtaagtcattgttggtaagtagatacgtttacctcc

SEQ ID NO: 462671 - DNA, 60 bp, Artificial
  Synthetic oligonucleotide
tcgttagtatacttgatcgtcatttccatgtaaatatgaacaacacatgagatgaatcgt

SEQ ID NO: 462672 - DNA, 60 bp, Artificial
  Synthetic oligonucleotide
tcgttagtcacaaagaaattgaatcagtcaacagtgcagtagtaatgcctgcgcatggcc

SEQ ID NO: 462673 - DNA, 60 bp, Artificial
  Synthetic oligonucleotide
tcgttatacgaatctacatcatcacgtatctataatgttgagattagaggattaagatca

SEQ ID NO: 462674 - DNA, 60 bp, Artificial
  Synthetic oligonucleotide
tcgttatagacttcgtcgcgaagtagtggagcgcgtcaacatgtgggatccactggtgaa

SEQ ID NO: 462675 - DNA, 60 bp, Artificial
  Synthetic oligonucleotide
tcgttatagtgttgaactctcgctccgtgttctagacccattcttcacgcgagcagtaac

SEQ ID NO: 462676 - DNA, 56 bp, Artificial
  Synthetic oligonucleotide
tcgttatccgcaaagtgcccacgcaaagcctagtaacactttgaaaggtctatggt

SEQ ID NO: 462677 - DNA, 60 bp, Artificial
  Synthetic oligonucleotide
tcgttatccgcaagatgcctacgcagaacctagtatcacactggaagattctcggttggt

SEQ ID NO: 462678 - DNA, 53 bp, Artificial
  Synthetic oligonucleotide
tcgttatcgcaatacagccgtttatcacggaatagcgatgtagcagaaacttt

SEQ ID NO: 462679 - DNA, 60 bp, Artificial
  Synthetic oligonucleotide
tcgttatgcaatcgagagatcgagtattgcgggtagacacatattatgaggagatgtcac

SEQ ID NO: 462680 - DNA, 58 bp, Artificial
  Synthetic oligonucleotide
tcgttattatgtcgtgctgtgttaggaatggtctgccgtcctgttccaaaattttgaa

SEQ ID NO: 462681 - DNA, 55 bp, Artificial
  Synthetic oligonucleotide
tcgttcaacaagtcttccctcacctaccgacaccacgttcgcttcaccgagcact

SEQ ID NO: 462682 - DNA, 60 bp, Artificial
  Synthetic oligonucleotide
tcgttcaaccacctccggctggactcacggcgccgtgtggccatttagctggactgtgcg

SEQ ID NO: 462683 - DNA, 55 bp, Artificial
  Synthetic oligonucleotide
tcgttcaacggacacctcaccgctcatacggcagtcgctgcactgccctgcgttg

SEQ ID NO: 462684 - DNA, 60 bp, Artificial
  Synthetic oligonucleotide
tcgttcaattggcccaaagacattgtaatgttggattccgctctctgtgctcccacaatt

SEQ ID NO: 462685 - DNA, 55 bp, Artificial
  Synthetic oligonucleotide
tcgttcaggcccttgttaagagatattctctaaaagagggcaacccttccaggga

SEQ ID NO: 462686 - DNA, 54 bp, Artificial
  Synthetic oligonucleotide
tcgttcatgaaccgtgtggcgaagaaccttgactggatgctggtatcttacaag

SEQ ID NO: 462687 - DNA, 60 bp, Artificial
  Synthetic oligonucleotide
tcgttcattgcgaaccttatgcacccattgtacagctggattgttttaatgttgtatggt

SEQ ID NO: 462688 - DNA, 60 bp, Artificial
  Synthetic oligonucleotide
tcgttccaatgcacgacttgagattacacaattatccaatatattccttagattcgagta

SEQ ID NO: 462689 - DNA, 53 bp, Artificial
  Synthetic oligonucleotide
tcgttccacatcactgaaaacgtagttttgcccgtgtctaaagcgggtttttg

SEQ ID NO: 462690 - DNA, 60 bp, Artificial
  Synthetic oligonucleotide
tcgttccacttactggagttcttcatatgaagaaattgataagtgatgctgggaaggtcc

SEQ ID NO: 462691 - DNA, 53 bp, Artificial
  Synthetic oligonucleotide
tcgttccagacccttaccccgaacccaggaggaccgagacccgacaggctcga

SEQ ID NO: 462692 - DNA, 53 bp, Artificial
  Synthetic oligonucleotide
tcgttccatatagtgaaggtcctcttggtaaactttactgatctcgtttaaat

SEQ ID NO: 462693 - DNA, 55 bp, Artificial
  Synthetic oligonucleotide
tcgttcccaatttgaccaaccctcgtaccttcatgctggacttgcccgacttaac

SEQ ID NO: 462694 - DNA, 54 bp, Artificial
  Synthetic oligonucleotide
tcgttccccttacgaggaggtattatcctcgagaccacttagcgcctccgatta

SEQ ID NO: 462695 - DNA, 51 bp, Artificial
  Synthetic oligonucleotide
tcgttcccctttggacgttgcctgttttctgacaaggaaaaatttttatgg

SEQ ID NO: 462696 - DNA, 55 bp, Artificial
  Synthetic oligonucleotide
tcgttcccgcccgtaagtacatagaagtgccagaacagcctaccgctcctcctgc

SEQ ID NO: 462697 - DNA, 60 bp, Artificial
  Synthetic oligonucleotide
tcgttccctgaaaacgcacaagtgcaaactctgcgaattctcgataggacatcaatgcat

SEQ ID NO: 462698 - DNA, 50 bp, Artificial
  Synthetic oligonucleotide
tcgttccgaatctaccctggagaacttcatggggagagcagcttgcgtgt

SEQ ID NO: 462699 - DNA, 58 bp, Artificial
  Synthetic oligonucleotide
tcgttccggaacccacttcgtcagagcagtcattacctgagcgtcaaataaaagcgta

SEQ ID NO: 462700 - DNA, 56 bp, Artificial
  Synthetic oligonucleotide
tcgttccttctaacccgttgaagtcgaatggaacgcgtaactgttggcatgtgtaa

SEQ ID NO: 462701 - DNA, 51 bp, Artificial
  Synthetic oligonucleotide
tcgttcgaactggactcccggtcgttttaactcgactggggccaaaacgaa

SEQ ID NO: 462702 - DNA, 54 bp, Artificial
  Synthetic oligonucleotide
tcgttcgagtaatcagattaagagcatggatgagactaaaatgtctgttcagcg

SEQ ID NO: 462703 - DNA, 54 bp, Artificial
  Synthetic oligonucleotide
tcgttcgatgcgttcttgtcgagcgggacgaggtaggccagctatcctgcaccc

SEQ ID NO: 462704 - DNA, 51 bp, Artificial
  Synthetic oligonucleotide
tcgttcgcaatctccctaaaactcggatgaactcgaccaaagacgcagata

SEQ ID NO: 462705 - DNA, 60 bp, Artificial
  Synthetic oligonucleotide
tcgttcgcctgacatcccttcgcattgtgccgaacacagagcctaccacttcccggatct

SEQ ID NO: 462706 - DNA, 55 bp, Artificial
  Synthetic oligonucleotide
tcgttcgttcgatttccgtttttcgattaatttgtggtatctgtacatgttggcc

SEQ ID NO: 462707 - DNA, 50 bp, Artificial
  Synthetic oligonucleotide
tcgttcgttcggggcacgcgctacctcggaatgttggcgacaggcttgcg

SEQ ID NO: 462708 - DNA, 50 bp, Artificial
  Synthetic oligonucleotide
tcgttcgtttgtgcattattcacaaccaacgtggttgtgctgctaccgtc

SEQ ID NO: 462709 - DNA, 60 bp, Artificial
  Synthetic oligonucleotide
tcgttctaccaatcatatctcaggcggacacaatcaatggggatacaactggatcagagg

SEQ ID NO: 462710 - DNA, 57 bp, Artificial
  Synthetic oligonucleotide
tcgttctatatgacgtagatttgacaatcgataacactgtatcagtgctctatgctg

SEQ ID NO: 462711 - DNA, 50 bp, Artificial
  Synthetic oligonucleotide
tcgttctatttaaactttatcgatttaaatggtctgtaataatgaactcg

SEQ ID NO: 462712 - DNA, 55 bp, Artificial
  Synthetic oligonucleotide
tcgttctcagcggctgacactgcgttttgtgcccgtggatcgggaagatactgct

SEQ ID NO: 462713 - DNA, 60 bp, Artificial
  Synthetic oligonucleotide
tcgttctgaacatagaccttttgtctacgagcagtctgttcgatcttaggatcagcacct

SEQ ID NO: 462714 - DNA, 60 bp, Artificial
  Synthetic oligonucleotide
tcgttctggaacaagtaaagcatgcaatgcatcaacaggtgcccaatccttctatagaag

SEQ ID NO: 462715 - DNA, 51 bp, Artificial
  Synthetic oligonucleotide
tcgttctggcatcaaacccctgataagcaaaagcttgtagccattcctgaa

SEQ ID NO: 462716 - DNA, 55 bp, Artificial
  Synthetic oligonucleotide
tcgttctggtgtgttcactgagctaacacatgttcgaatgacgactaccagtagg

SEQ ID NO: 462717 - DNA, 59 bp, Artificial
  Synthetic oligonucleotide
tcgttcttaagtgcggtatactacaacttgactcagatagctaagcaaataataccgcc

SEQ ID NO: 462718 - DNA, 60 bp, Artificial
  Synthetic oligonucleotide
tcgttcttcggaacgacaatagctggcgttacggctactgcaaccgccgcagacgctgct

SEQ ID NO: 462719 - DNA, 58 bp, Artificial
  Synthetic oligonucleotide
tcgttctttggagcaggccatcccgaagctgtcgtcggctgtcgtttcggccacgacg

SEQ ID NO: 462720 - DNA, 60 bp, Artificial
  Synthetic oligonucleotide
tcgttgaaagcaacatgcaccacgcatggggtgcatgccgatgcggatctgatagaagca

SEQ ID NO: 462721 - DNA, 60 bp, Artificial
  Synthetic oligonucleotide
tcgttgaaggaataacatctagctacttgcagactcccgcttgttggaatgcacagacag

SEQ ID NO: 462722 - DNA, 55 bp, Artificial
  Synthetic oligonucleotide
tcgttgacatgtgtgccaggttgacacagtcttgtttgaacatgcctgtcgaacc

SEQ ID NO: 462723 - DNA, 55 bp, Artificial
  Synthetic oligonucleotide
tcgttgacccgaaatacaactcaccggaactcactttccatacctgggacttcaa

SEQ ID NO: 462724 - DNA, 60 bp, Artificial
  Synthetic oligonucleotide
tcgttgacggggcggtcttagaggccaatggcccagagcgctacaatctctccttcgatg

SEQ ID NO: 462725 - DNA, 56 bp, Artificial
  Synthetic oligonucleotide
tcgttgagagagggggacgcaagcagaggaagaaagcccatggtgacgcgcagaga

SEQ ID NO: 462726 - DNA, 60 bp, Artificial
  Synthetic oligonucleotide
tcgttgagttttcacgaagcaacgcagctactgtggctagtgaaatagctcatagtcctg

SEQ ID NO: 462727 - DNA, 60 bp, Artificial
  Synthetic oligonucleotide
tcgttgatgaaccgagagtagagataacggcagagggaacccttgacagtttcttgcatg

SEQ ID NO: 462728 - DNA, 55 bp, Artificial
  Synthetic oligonucleotide
tcgttgatgcaggatgaatatcttacatcttcgaagtatttagtgcgtgagggga

SEQ ID NO: 462729 - DNA, 55 bp, Artificial
  Synthetic oligonucleotide
tcgttgatttacgtcccggacatccagattgcgctaccgttgctgctgttttagc

SEQ ID NO: 462730 - DNA, 60 bp, Artificial
  Synthetic oligonucleotide
tcgttgcaactaatgttgcaagcaacaacaatgctaacaacactagtgctacatctcgat

SEQ ID NO: 462731 - DNA, 59 bp, Artificial
  Synthetic oligonucleotide
tcgttgcactgactagacacaaggtcacgttccgctacgagtactgtggtgtattgaac

SEQ ID NO: 462732 - DNA, 60 bp, Artificial
  Synthetic oligonucleotide
tcgttgcagctactgctgctagcagtaacaatgctagtgacaatagtaacaccattaagg

SEQ ID NO: 462733 - DNA, 50 bp, Artificial
  Synthetic oligonucleotide
tcgttgcagctactgctgctagtgctgaaaacactagtgacaatagtgat

SEQ ID NO: 462734 - DNA, 56 bp, Artificial
  Synthetic oligonucleotide
tcgttgcaggtggctaccttttcctggaccagttctggttcgggtatcaagttctc

SEQ ID NO: 462735 - DNA, 50 bp, Artificial
  Synthetic oligonucleotide
tcgttgccacaaatctgaagtgtcctaaggaaacgttgcgacattgtgtt

SEQ ID NO: 462736 - DNA, 59 bp, Artificial
  Synthetic oligonucleotide
tcgttgcccactcgtaggggagtgccttctgaagcatggaaaggtactcttgcttcgag

SEQ ID NO: 462737 - DNA, 60 bp, Artificial
  Synthetic oligonucleotide
tcgttgccggctacagcgggggagacatatatcacagcttgtctcatgcccggccccgct

SEQ ID NO: 462738 - DNA, 60 bp, Artificial
  Synthetic oligonucleotide
tcgttgcctcagtcctcgtcaagagggcctctggtgagatgcttgccctggcagtcagga

SEQ ID NO: 462739 - DNA, 58 bp, Artificial
  Synthetic oligonucleotide
tcgttgcgacgaagaatcaggcgggcaacgaccagacacacaccgacgactacaaccg

SEQ ID NO: 462740 - DNA, 59 bp, Artificial
  Synthetic oligonucleotide
tcgttggaaactagtaacagtcccatgaacaacttgctgcgtacagccacgtggaagag

SEQ ID NO: 462741 - DNA, 55 bp, Artificial
  Synthetic oligonucleotide
tcgttggacccgcaacccacaacagactaatgaacatgtggactcgctctgccga

SEQ ID NO: 462742 - DNA, 57 bp, Artificial
  Synthetic oligonucleotide
tcgttggatgttagaccgacacaaattcagaagggtcacattttcggtcagaggtta

SEQ ID NO: 462743 - DNA, 59 bp, Artificial
  Synthetic oligonucleotide
tcgttggcgaggatgatagttggtatgctctttgaggctaccttccgtctcttcccgta

SEQ ID NO: 462744 - DNA, 60 bp, Artificial
  Synthetic oligonucleotide
tcgttggctgtctgttgtccccctctagcagatcgtccgtcgatctgaaactctccccac

SEQ ID NO: 462745 - DNA, 60 bp, Artificial
  Synthetic oligonucleotide
tcgttgggcagatcactagagcgatcgcacgcgctgcgtatgtctagccgcgtttgcacg

SEQ ID NO: 462746 - DNA, 58 bp, Artificial
  Synthetic oligonucleotide
tcgttgggccacaattgacggcgtatgggatcctagggtatatcctgtatacaccaag

SEQ ID NO: 462747 - DNA, 55 bp, Artificial
  Synthetic oligonucleotide
tcgttgggcccaaggactcagttgggacgtttggttttatgatacacatacacgg

SEQ ID NO: 462748 - DNA, 58 bp, Artificial
  Synthetic oligonucleotide
tcgttgggcttcatttatatcgatagacataagttagttaataagagtgatttccgag

SEQ ID NO: 462749 - DNA, 51 bp, Artificial
  Synthetic oligonucleotide
tcgttggggctcgtgatatcaaccaccacgtcaatcccctgcgccacgtct

SEQ ID NO: 462750 - DNA, 52 bp, Artificial
  Synthetic oligonucleotide
tcgttgggggtctgccccatccgaacgcagccccgctggagctactatgaca

SEQ ID NO: 462751 - DNA, 55 bp, Artificial
  Synthetic oligonucleotide
tcgttgtataaaacgacatcgcttatgttctcatacgtcagcaaatgttagagag

SEQ ID NO: 462752 - DNA, 60 bp, Artificial
  Synthetic oligonucleotide
tcgttgtcgcatcattggtaagggcatactcgtttctgcgtgactcaatgtatctgttcg

SEQ ID NO: 462753 - DNA, 60 bp, Artificial
  Synthetic oligonucleotide
tcgttgtcgtttgagaggacgctccatctcctgagatgtagctagctcgattgaacctga

SEQ ID NO: 462754 - DNA, 55 bp, Artificial
  Synthetic oligonucleotide
tcgttgtgatcttcggggactcgccgggcgttgtggcccgcgagctagcaagcgt

SEQ ID NO: 462755 - DNA, 60 bp, Artificial
  Synthetic oligonucleotide
tcgttgtgggccccacctgatagatctgcaaaattattgggcctgtaaatgctattgggc

SEQ ID NO: 462756 - DNA, 55 bp, Artificial
  Synthetic oligonucleotide
tcgttgttcctccccaaccatccaaaggtgccttcgattcgatttcttatttcag

SEQ ID NO: 462757 - DNA, 55 bp, Artificial
  Synthetic oligonucleotide
tcgtttaaagatcaaacaacccagctctcatcctttaataaggtcttactttcca

SEQ ID NO: 462758 - DNA, 53 bp, Artificial
  Synthetic oligonucleotide
tcgtttaagtctcgacgtgggtcatcgtatccccaacgacgatcttatccacg

SEQ ID NO: 462759 - DNA, 54 bp, Artificial
  Synthetic oligonucleotide
tcgtttaattgggccattgacattgtaatgtttgattgggcccgttgtaacccg

SEQ ID NO: 462760 - DNA, 56 bp, Artificial
  Synthetic oligonucleotide
tcgtttacacggcatgtagtcatgctgctgtggacgcactatgtgagaaggcacat

SEQ ID NO: 462761 - DNA, 53 bp, Artificial
  Synthetic oligonucleotide
tcgtttacacggtccttaatcatataaagacgtaccaagccaaagctttaact

SEQ ID NO: 462762 - DNA, 55 bp, Artificial
  Synthetic oligonucleotide
tcgtttacataggcctgccttaacttcccgaagaggcacagtacgttttagcaga

SEQ ID NO: 462763 - DNA, 60 bp, Artificial
  Synthetic oligonucleotide
tcgtttataactaagataattcgagttgatggagatgataattatgcagttctacagttt

SEQ ID NO: 462764 - DNA, 54 bp, Artificial
  Synthetic oligonucleotide
tcgtttatctttacactcacgacttgagatcaaacaccactatctcattcgtga

SEQ ID NO: 462765 - DNA, 58 bp, Artificial
  Synthetic oligonucleotide
tcgtttcaaactctctgtccgcgtattatcttaaggaccagaaagatttactgcgtga

SEQ ID NO: 462766 - DNA, 57 bp, Artificial
  Synthetic oligonucleotide
tcgtttcaaccccggatatgttgctacatatcgttcaacgttgactgtaccgtcgat

SEQ ID NO: 462767 - DNA, 55 bp, Artificial
  Synthetic oligonucleotide
tcgtttcacggacggaccaacgcgggtctgggcaagtgaccacttacgctctcaa

SEQ ID NO: 462768 - DNA, 57 bp, Artificial
  Synthetic oligonucleotide
tcgtttcatatttagtcctggtttatttcctaacctaaatcagtcagtctgtgacaa

SEQ ID NO: 462769 - DNA, 56 bp, Artificial
  Synthetic oligonucleotide
tcgtttccactgttgatatcgatcgggtcttgccaaaacgaaactgaatccccgta

SEQ ID NO: 462770 - DNA, 55 bp, Artificial
  Synthetic oligonucleotide
tcgtttcctataaaattccatccagagttatttggccaagaagccttcagcaatg

SEQ ID NO: 462771 - DNA, 54 bp, Artificial
  Synthetic oligonucleotide
tcgtttcgaaaaacagtctgctatttcgagagtatcgtattcacattcgaatgc

SEQ ID NO: 462772 - DNA, 56 bp, Artificial
  Synthetic oligonucleotide
tcgtttcgattcggtgtacaccgattgccttctctagccccctatcggtgtatcgg

SEQ ID NO: 462773 - DNA, 60 bp, Artificial
  Synthetic oligonucleotide
tcgtttcgtcatcaaagtatggcgagtgtaaactccacatctgtcggcttgaccgagtgt

SEQ ID NO: 462774 - DNA, 57 bp, Artificial
  Synthetic oligonucleotide
tcgtttctcactaacctaagacaggagggtcgtcatagctactaccttttcctatga

SEQ ID NO: 462775 - DNA, 60 bp, Artificial
  Synthetic oligonucleotide
tcgtttctgacctggggtgtgacagttctatgctagccgaggtcttttcaggtagagtgc

SEQ ID NO: 462776 - DNA, 55 bp, Artificial
  Synthetic oligonucleotide
tcgtttgactcgcgtctttaccacccatgagacgtgtaccgaattgaccacatgg

SEQ ID NO: 462777 - DNA, 60 bp, Artificial
  Synthetic oligonucleotide
tcgtttgcaggctttacacagattccgtgccactgttactggtggacaatatgcgtctaa

SEQ ID NO: 462778 - DNA, 60 bp, Artificial
  Synthetic oligonucleotide
tcgtttgggctgctagtgcagatacacccttacttgaacctggctggtcagatacagctc

SEQ ID NO: 462779 - DNA, 53 bp, Artificial
  Synthetic oligonucleotide
tcgtttgggttcaattcccttaccttacaacggcgtgttgagataggtccttg

SEQ ID NO: 462780 - DNA, 60 bp, Artificial
  Synthetic oligonucleotide
tcgtttggttcatttgacagcttatagcaacctaaccttctaaccactgcatgctactaa

SEQ ID NO: 462781 - DNA, 58 bp, Artificial
  Synthetic oligonucleotide
tcgtttgtgagcgcgtactcaacgcgttcagactgaacgtatcctcccacggacaaac

SEQ ID NO: 462782 - DNA, 60 bp, Artificial
  Synthetic oligonucleotide
tcgtttgtggaagccgtgagggccatagatgaaggtgacagggagttggctgaggcgtgt

SEQ ID NO: 462783 - DNA, 50 bp, Artificial
  Synthetic oligonucleotide
tcgttttaagaacttagatgctcacgatgcctattacattgtaaaacgtt

SEQ ID NO: 462784 - DNA, 53 bp, Artificial
  Synthetic oligonucleotide
tcgttttaatggctttcatggggtaaaacccttaggtaggagccgatgggctc

SEQ ID NO: 462785 - DNA, 58 bp, Artificial
  Synthetic oligonucleotide
tcgttttacagaagtagggagatacttaatgcaaggactagctaacggaatcatgaaa

SEQ ID NO: 462786 - DNA, 52 bp, Artificial
  Synthetic oligonucleotide
tcgttttaccaatcctatttgcggcgcactcaatcgatgggtatacaactgg

SEQ ID NO: 462787 - DNA, 59 bp, Artificial
  Synthetic oligonucleotide
tcgttttacgtcaactgttactggaggtcaatatgcgagcaaggaacaagcccttgtca

SEQ ID NO: 462788 - DNA, 52 bp, Artificial
  Synthetic oligonucleotide
tcgttttcaatatcccatttacctaaggcaatcgggtcgaataaatcggggt

SEQ ID NO: 462789 - DNA, 60 bp, Artificial
  Synthetic oligonucleotide
tcgttttcaggtcatgcacaagttctatggcaaggtgacaggtggacagtatgccggcaa

SEQ ID NO: 462790 - DNA, 51 bp, Artificial
  Synthetic oligonucleotide
tcgttttcgattgcgaagacgcggtattgtcactatttcgaaaacttgacc

SEQ ID NO: 462791 - DNA, 53 bp, Artificial
  Synthetic oligonucleotide
tcgttttgaacaacccaacgactgatggtcccggttgccgttccgggagacca

SEQ ID NO: 462792 - DNA, 52 bp, Artificial
  Synthetic oligonucleotide
tcgtttttaacgaaggggttatggaagacttgaactgtcgttggactaaaga

SEQ ID NO: 462793 - DNA, 57 bp, Artificial
  Synthetic oligonucleotide
tcgtttttaaggtcatgcctgaggacatagcaggggacgggtttaggttggcatcaa

SEQ ID NO: 462794 - DNA, 60 bp, Artificial
  Synthetic oligonucleotide
tcgtttttgaacatcaagagatatcgtaaattcaggacacgaattgttggcaatgttgat

SEQ ID NO: 462795 - DNA, 54 bp, Artificial
  Synthetic oligonucleotide
tctaaaacaaccagtacatggagcatattacgacccatcaaaagacttagtagc

SEQ ID NO: 462796 - DNA, 55 bp, Artificial
  Synthetic oligonucleotide
tctaaaaccatgtgttaaactgacaccaatatgtgtcaccatgcaatgtacgacc

SEQ ID NO: 462797 - DNA, 58 bp, Artificial
  Synthetic oligonucleotide
tctaaaacgcccaggcttgctcatatttgactccaaatgagtgtctctcaaacccccc

SEQ ID NO: 462798 - DNA, 57 bp, Artificial
  Synthetic oligonucleotide
tctaaaacggttgctaaattagatgaagacgtgaataaacttaggatgacattatct

SEQ ID NO: 462799 - DNA, 60 bp, Artificial
  Synthetic oligonucleotide
tctaaaacgtgttgaaagacttttcatatgggatgtgtcatcagatcgatcgcagatgga

SEQ ID NO: 462800 - DNA, 58 bp, Artificial
  Synthetic oligonucleotide
tctaaaactcatatgaattggtagttatggtagctcttatatactagaagttccttta

SEQ ID NO: 462801 - DNA, 60 bp, Artificial
  Synthetic oligonucleotide
tctaaaactggcagttggtctgaagaatgtgcctgccagagcaagtagaggactatttgg

SEQ ID NO: 462802 - DNA, 53 bp, Artificial
  Synthetic oligonucleotide
tctaaaactggggtgaccgaggcttggaccgacttctttacgaagtcgagagg

SEQ ID NO: 462803 - DNA, 60 bp, Artificial
  Synthetic oligonucleotide
tctaaaacttcccagacaactatggggggattttggaagaatgcagcaggcatataagca

SEQ ID NO: 462804 - DNA, 55 bp, Artificial
  Synthetic oligonucleotide
tctaaaaggaacagcagttgatgaaccatatgctgtaaatgcaaaagttggatca

SEQ ID NO: 462805 - DNA, 55 bp, Artificial
  Synthetic oligonucleotide
tctaaaagtggatagagacacttcgaaatttacgaatgaacggttactggtttca

SEQ ID NO: 462806 - DNA, 60 bp, Artificial
  Synthetic oligonucleotide
tctaaaatgttggtccctagcctacttagatgtctgtatgggtgcagctcgttctcgacc

SEQ ID NO: 462807 - DNA, 56 bp, Artificial
  Synthetic oligonucleotide
tctaaacagggaaacggccactgaactatttgatgaatttctcacacgaattaaaa

SEQ ID NO: 462808 - DNA, 60 bp, Artificial
  Synthetic oligonucleotide
tctaaacgtcatggagaatgcgtgtcaaacagacgagtgcatggtagacgaaactctgtc

SEQ ID NO: 462809 - DNA, 56 bp, Artificial
  Synthetic oligonucleotide
tctaaactggtaacaggtcgggacatccaggttgctaaggaggacctaggaagatc

SEQ ID NO: 462810 - DNA, 57 bp, Artificial
  Synthetic oligonucleotide
tctaaagaggaatctaagcagctgttagaggtcttgaaaacaaaagaagagcaccac

SEQ ID NO: 462811 - DNA, 59 bp, Artificial
  Synthetic oligonucleotide
tctaaagagtagaggaaccgattgcagagaaaagttagacagtaaatccacagtccaga

SEQ ID NO: 462812 - DNA, 54 bp, Artificial
  Synthetic oligonucleotide
tctaaagataaaagatctttcaagattaaaactagttccctcacaccggtgacc

SEQ ID NO: 462813 - DNA, 54 bp, Artificial
  Synthetic oligonucleotide
tctaaagatttcccaaatatgtctgagacagatttgtgtttcctattgcattgg

SEQ ID NO: 462814 - DNA, 55 bp, Artificial
  Synthetic oligonucleotide
tctaaagccagcggcaatggctccgctcgtatgaaatcttccatccgtaagtccg

SEQ ID NO: 462815 - DNA, 60 bp, Artificial
  Synthetic oligonucleotide
tctaaaggaatcagtacatggagcatactatgacccatcaaaagacttaatagctgaaat

SEQ ID NO: 462816 - DNA, 60 bp, Artificial
  Synthetic oligonucleotide
tctaaaggatcaaggttggtcatacatagtggagaggcccagtgcaccagaggggatgtg

SEQ ID NO: 462817 - DNA, 55 bp, Artificial
  Synthetic oligonucleotide
tctaaagggatcgtggctgaagcttcaggggtcaaatcgggtgagttaactaccc

SEQ ID NO: 462818 - DNA, 60 bp, Artificial
  Synthetic oligonucleotide
tctaaagggcctcatcaacatatggaagagtggtctattgcagctcattgtttttttact

SEQ ID NO: 462819 - DNA, 57 bp, Artificial
  Synthetic oligonucleotide
tctaaagggtgaaattccacagccctataagataactttaaatgtggttgcagtgcg

SEQ ID NO: 462820 - DNA, 51 bp, Artificial
  Synthetic oligonucleotide
tctaaagtattgcacactgatggctatgttaaacgcacgtctgttttttgc

SEQ ID NO: 462821 - DNA, 60 bp, Artificial
  Synthetic oligonucleotide
tctaaagtcatagtgtttgaagggaatagaaatttgcgaacacctgcagaatacttgatc

SEQ ID NO: 462822 - DNA, 55 bp, Artificial
  Synthetic oligonucleotide
tctaaagtctatagcccacttagttaccttagagttttagatctctgaagggtgt

SEQ ID NO: 462823 - DNA, 55 bp, Artificial
  Synthetic oligonucleotide
tctaaagtttgtgttacacgccgctcttttgtttccgcttatacaaactgtagag

SEQ ID NO: 462824 - DNA, 57 bp, Artificial
  Synthetic oligonucleotide
tctaaatcgaactacgctgcctggtgtcttgccccctatcttccctccggcggatcg

SEQ ID NO: 462825 - DNA, 60 bp, Artificial
  Synthetic oligonucleotide
tctaaatctctcaattccgctgttgcgaaacatattgaagctaatgtttcacttggatat

SEQ ID NO: 462826 - DNA, 59 bp, Artificial
  Synthetic oligonucleotide
tctaaatgaccgctcaagtagttatgtgggcctaaagcacgagcccacattgtcttgcc

SEQ ID NO: 462827 - DNA, 55 bp, Artificial
  Synthetic oligonucleotide
tctaaatggaagaagagaagtaatttatgttaagctggtctccgggtggtgggag

SEQ ID NO: 462828 - DNA, 60 bp, Artificial
  Synthetic oligonucleotide
tctaaattgtccgagtctgtttcagatcggtatttgtacaaaggtgattctgttcatgcg

SEQ ID NO: 462829 - DNA, 59 bp, Artificial
  Synthetic oligonucleotide
tctaacaaagcctgatggtgttccagtagagcgtcatgatggtccaaaaggcctcttga

SEQ ID NO: 462830 - DNA, 53 bp, Artificial
  Synthetic oligonucleotide
tctaacaatgtcccccggtcagaggagttcaactgcatccgtgcagatccggc

SEQ ID NO: 462831 - DNA, 53 bp, Artificial
  Synthetic oligonucleotide
tctaacacaatgtgctagttttagggtacgggtgtcccccgctttgcggggtc

SEQ ID NO: 462832 - DNA, 52 bp, Artificial
  Synthetic oligonucleotide
tctaacaccttctcgctggcgggtaaattgtatgacctgacgctgttaaata

SEQ ID NO: 462833 - DNA, 55 bp, Artificial
  Synthetic oligonucleotide
tctaacagcacgactaaaatgggggcaaaactttttagcctcatccagggagctt

SEQ ID NO: 462834 - DNA, 60 bp, Artificial
  Synthetic oligonucleotide
tctaacagtgaaagcattccaagacgcttaactctgccgaacatgaaattagaatacttg

SEQ ID NO: 462835 - DNA, 60 bp, Artificial
  Synthetic oligonucleotide
tctaaccacagacaaccatagagcaaaagcaccatttcgtgagacccccctgccagttga

SEQ ID NO: 462836 - DNA, 59 bp, Artificial
  Synthetic oligonucleotide
tctaaccacagactattgtgtattagttgagctctggcccagagtaatttaccactccc

SEQ ID NO: 462837 - DNA, 55 bp, Artificial
  Synthetic oligonucleotide
tctaaccataatttccttgtgcaggctagtaatgtgcaattgcgtgttattggcc

SEQ ID NO: 462838 - DNA, 57 bp, Artificial
  Synthetic oligonucleotide
tctaaccatgacttagacctggccagataccagggaaccactctaaaactttacaga

SEQ ID NO: 462839 - DNA, 56 bp, Artificial
  Synthetic oligonucleotide
tctaaccattttcgctactaacaccgctctcccaaatgagctgattttaacggcgg

SEQ ID NO: 462840 - DNA, 59 bp, Artificial
  Synthetic oligonucleotide
tctaaccccttctcagtccgcgcccatacacacgcggccgcgaagtctatagaattaga

SEQ ID NO: 462841 - DNA, 56 bp, Artificial
  Synthetic oligonucleotide
tctaacccgacctatcctgtccggatgggaggagcagttacacaccccaaatacgc

SEQ ID NO: 462842 - DNA, 55 bp, Artificial
  Synthetic oligonucleotide
tctaacctcctctacctgggtgttctccccttccatgggttggccctgcacttgg

SEQ ID NO: 462843 - DNA, 57 bp, Artificial
  Synthetic oligonucleotide
tctaacctttggaagagatacggtcatagagtatttggtgtctttcggagtgtggat

SEQ ID NO: 462844 - DNA, 51 bp, Artificial
  Synthetic oligonucleotide
tctaacgaggattcgtcggactattatgtctcgagcggattctatgggcag

SEQ ID NO: 462845 - DNA, 55 bp, Artificial
  Synthetic oligonucleotide
tctaacgcatgtaatcggggaaaaggtcacaatatatagtatggtacctaatggc

SEQ ID NO: 462846 - DNA, 57 bp, Artificial
  Synthetic oligonucleotide
tctaacgcctggcaacacgaatacgcgtgtctcccgttattcgagcagtgcgcgtca

SEQ ID NO: 462847 - DNA, 60 bp, Artificial
  Synthetic oligonucleotide
tctaacggatttgtctatgaccatagattggtatctgagctctgaagaaagtgttacgtc

SEQ ID NO: 462848 - DNA, 57 bp, Artificial
  Synthetic oligonucleotide
tctaacggtagatatccaagttctaccaggtttccgattctatggacgaagtgctgg

SEQ ID NO: 462849 - DNA, 60 bp, Artificial
  Synthetic oligonucleotide
tctaacgtcacgcctgaacaaaagctggtcgagaaatccatgtcctatgtggcaaccgat

SEQ ID NO: 462850 - DNA, 60 bp, Artificial
  Synthetic oligonucleotide
tctaactcagttagccagaacactcagagcatatccctattcggtgacagaatcgatgct

SEQ ID NO: 462851 - DNA, 58 bp, Artificial
  Synthetic oligonucleotide
tctaactgacacaagtcggcctaatgaccccggaagcggaaactgtgatgaaccaata

SEQ ID NO: 462852 - DNA, 55 bp, Artificial
  Synthetic oligonucleotide
tctaactgagatagagcacgacttactgctccaggtgacatttggtcgaacgtac

SEQ ID NO: 462853 - DNA, 59 bp, Artificial
  Synthetic oligonucleotide
tctaactgcccatatgacttatgcagatacttgggaaccattctaaaattttacaaaca

SEQ ID NO: 462854 - DNA, 57 bp, Artificial
  Synthetic oligonucleotide
tctaactgtgaacgtaaggggttcaggaatgagaatacttgtgagaggcaactcccc

SEQ ID NO: 462855 - DNA, 60 bp, Artificial
  Synthetic oligonucleotide
tctaacttctttcttccacacacccactgctcgagaagctcttctctgcttccgcgattt

SEQ ID NO: 462856 - DNA, 58 bp, Artificial
  Synthetic oligonucleotide
tctaacttctttcttccgctcacccactgctcgaggatctcttctctccctccgcggt

SEQ ID NO: 462857 - DNA, 60 bp, Artificial
  Synthetic oligonucleotide
tctaacttgatgacttctgtgtcagaaggagggggctcattttccttagcagcttgtatc

SEQ ID NO: 462858 - DNA, 58 bp, Artificial
  Synthetic oligonucleotide
tctaactttattcaatcttgctgacacgcttcttggtggtttgccgacagaattaatt

SEQ ID NO: 462859 - DNA, 60 bp, Artificial
  Synthetic oligonucleotide
tctaagaaaccctgtgcatggagtctattatgatccatcaaaagatataatagcagaaat

SEQ ID NO: 462860 - DNA, 60 bp, Artificial
  Synthetic oligonucleotide
tctaagagatcgtttgcaggttcttcacaagtttagtgctactgtcactggtggacagta

SEQ ID NO: 462861 - DNA, 55 bp, Artificial
  Synthetic oligonucleotide
tctaagagcagtgagaactttgaaatcatacattctccttttgtgcgtctgttgc

SEQ ID NO: 462862 - DNA, 56 bp, Artificial
  Synthetic oligonucleotide
tctaagagccgagcaagcctcccaggaggtaaaaaattggatgacagaaaccttgt

SEQ ID NO: 462863 - DNA, 55 bp, Artificial
  Synthetic oligonucleotide
tctaagaggggcccctatagccctctacggctaacctgaatggactgcgacgtag

SEQ ID NO: 462864 - DNA, 57 bp, Artificial
  Synthetic oligonucleotide
tctaagagtatcaagcttcatcagaggaacaaaagtaatcccaagggggaagctttc

SEQ ID NO: 462865 - DNA, 55 bp, Artificial
  Synthetic oligonucleotide
tctaagagtattaagcttcatcagagggaccaaagtatctccaagggggaaactt

SEQ ID NO: 462866 - DNA, 60 bp, Artificial
  Synthetic oligonucleotide
tctaagatcattgaattcatactgtgtttctctagtatagaaaaacatccatgaggaaac

SEQ ID NO: 462867 - DNA, 58 bp, Artificial
  Synthetic oligonucleotide
tctaagatgaaaggcgtgattcttaaaccactacctgaagtggctaggatcttgtacc

SEQ ID NO: 462868 - DNA, 55 bp, Artificial
  Synthetic oligonucleotide
tctaagatgaagactcaagatttctaccaaaggtattcagattgtttggccaagt

SEQ ID NO: 462869 - DNA, 52 bp, Artificial
  Synthetic oligonucleotide
tctaagcacagaaattccggtggatgagaacacccgtttcccaaatggtaag

SEQ ID NO: 462870 - DNA, 60 bp, Artificial
  Synthetic oligonucleotide
tctaagcactgatccaacggcaatccctcgaacacttgcaatattggaccatttgttaag

SEQ ID NO: 462871 - DNA, 60 bp, Artificial
  Synthetic oligonucleotide
tctaagcagtatacctacggagaccggtccttacttctatcaagatctgaactctgtgaa

SEQ ID NO: 462872 - DNA, 55 bp, Artificial
  Synthetic oligonucleotide
tctaagccattcacttatgttcgattagctctggattggttcaagtttgagacta

SEQ ID NO: 462873 - DNA, 60 bp, Artificial
  Synthetic oligonucleotide
tctaagccctccccctgatcacacaaaaactttctctgctggtgctatcggagtctgtgt

SEQ ID NO: 462874 - DNA, 50 bp, Artificial
  Synthetic oligonucleotide
tctaagcggtaagcccactcaccgcactatgatgtataacttccctacga

SEQ ID NO: 462875 - DNA, 60 bp, Artificial
  Synthetic oligonucleotide
tctaagcttaggatggtctctgatggcatcttagtggctctctcaacggtgattggtcgg

SEQ ID NO: 462876 - DNA, 60 bp, Artificial
  Synthetic oligonucleotide
tctaagcttttacaatttctgtgaatgttcagatcctgagatcgtaaaagatgcctatct

SEQ ID NO: 462877 - DNA, 57 bp, Artificial
  Synthetic oligonucleotide
tctaaggacaattcgattcggctttccgctggtggggacatctgggttacaagagaa

SEQ ID NO: 462878 - DNA, 51 bp, Artificial
  Synthetic oligonucleotide
tctaaggaccctgtgtcccggagtaccggttacgtttacgttccctgtgtg

SEQ ID NO: 462879 - DNA, 60 bp, Artificial
  Synthetic oligonucleotide
tctaaggaggccaccaccttcgttagaacagctgattccgtgctattgaatgacgcatca

SEQ ID NO: 462880 - DNA, 60 bp, Artificial
  Synthetic oligonucleotide
tctaaggccatacgccaacatgcggaggcagctggctgtagcatgattgaggacattgag

SEQ ID NO: 462881 - DNA, 55 bp, Artificial
  Synthetic oligonucleotide
tctaaggcccatggggtcgatcctaacgtcaggaccggggtgagaacaattacca

SEQ ID NO: 462882 - DNA, 59 bp, Artificial
  Synthetic oligonucleotide
tctaaggctatttgcctgcgtaagcctaaggtgtttacgcttgtgcaagtagttgattc

SEQ ID NO: 462883 - DNA, 56 bp, Artificial
  Synthetic oligonucleotide
tctaagggcatcatccgtgttgatctgggcttatggagacaacgaagtaaactgga

SEQ ID NO: 462884 - DNA, 51 bp, Artificial
  Synthetic oligonucleotide
tctaagggccttcggggtgtagctgctcggctgcagaaccgcggcagaggt

SEQ ID NO: 462885 - DNA, 58 bp, Artificial
  Synthetic oligonucleotide
tctaagggcttttgagcctagcgttgggctacgttctcgcacaaggtcgactatacga

SEQ ID NO: 462886 - DNA, 55 bp, Artificial
  Synthetic oligonucleotide
tctaagggttcatggtgatctgaggttggtgcttcggaccaagttgatgagcacc

SEQ ID NO: 462887 - DNA, 55 bp, Artificial
  Synthetic oligonucleotide
tctaaggtggtgatacctatctttaagatgcaagggtttttcactgggtctattg

SEQ ID NO: 462888 - DNA, 55 bp, Artificial
  Synthetic oligonucleotide
tctaagtacgacatctcctggctcgccgctatcgtcctcttggttgcgtaccaac

SEQ ID NO: 462889 - DNA, 55 bp, Artificial
  Synthetic oligonucleotide
tctaagtgagattagaggtgggagtcgtagtatgtctctaaaactcaggcattgg

SEQ ID NO: 462890 - DNA, 60 bp, Artificial
  Synthetic oligonucleotide
tctaagtgtctgtaagaagagaaaggcaggaagcaacgtcatgttggctgtctgtaagcg

SEQ ID NO: 462891 - DNA, 51 bp, Artificial
  Synthetic oligonucleotide
tctaagtgtgcaacacaagatcatgaggtcactgaggactgtactttttgt

SEQ ID NO: 462892 - DNA, 59 bp, Artificial
  Synthetic oligonucleotide
tctaagtgttggattgatgcttcgaatttcagagacttcgttaagggtcaagattctta

SEQ ID NO: 462893 - DNA, 50 bp, Artificial
  Synthetic oligonucleotide
tctaagttacgtccccgaggcgaagaaaacggaaagggtcttgtggctag

SEQ ID NO: 462894 - DNA, 60 bp, Artificial
  Synthetic oligonucleotide
tctaataaccatctatgcactgtttgtatggcccagtttgcttcaactgacgctcttacc

SEQ ID NO: 462895 - DNA, 60 bp, Artificial
  Synthetic oligonucleotide
tctaataacgctatggtgctatatacagacgtgtctcagtgggactcatctcaacataac

SEQ ID NO: 462896 - DNA, 60 bp, Artificial
  Synthetic oligonucleotide
tctaataatgccatggtgctatatacggacgtctcccaatgggattcatctcaacacaat

SEQ ID NO: 462897 - DNA, 58 bp, Artificial
  Synthetic oligonucleotide
tctaatacagcagcacggtacgctcctgtctaaatcggacgaaattacgttgactggg

SEQ ID NO: 462898 - DNA, 54 bp, Artificial
  Synthetic oligonucleotide
tctaataccagcccctccaacatggatctgtgcagcgttaataagccagcggag

SEQ ID NO: 462899 - DNA, 55 bp, Artificial
  Synthetic oligonucleotide
tctaatacggatgaagatgttgttgttgcggaacacgaaccatgtcgccccgcga

SEQ ID NO: 462900 - DNA, 60 bp, Artificial
  Synthetic oligonucleotide
tctaatactgcttttagcagtcactcaactggctgtgagtagcccagttatcactagatg

SEQ ID NO: 462901 - DNA, 60 bp, Artificial
  Synthetic oligonucleotide
tctaatagagcagtgccacgtctcagtgacggaccataagaaatggcagttcaactcacc

SEQ ID NO: 462902 - DNA, 51 bp, Artificial
  Synthetic oligonucleotide
tctaatagtggttacgtagtcggtgaccgggggtctcttctcacttgtggg

SEQ ID NO: 462903 - DNA, 60 bp, Artificial
  Synthetic oligonucleotide
tctaatagtgtatccgccctgggtcagcgagtccatgttacagaacaaggaattacgaga

SEQ ID NO: 462904 - DNA, 60 bp, Artificial
  Synthetic oligonucleotide
tctaatattgctgctcaattgaagggcttgagtgctatctctatactagatgttcctata

SEQ ID NO: 462905 - DNA, 58 bp, Artificial
  Synthetic oligonucleotide
tctaatcaaacgcaacgacccagagtactacttgtactacaccattcgtgcccaagaa

SEQ ID NO: 462906 - DNA, 58 bp, Artificial
  Synthetic oligonucleotide
tctaatcataggtaaatcatacgcagccgctgtagttcttagagcccccttacccctg

SEQ ID NO: 462907 - DNA, 60 bp, Artificial
  Synthetic oligonucleotide
tctaatccagacgttaagactcacgcatttgggatgacagttactagccaattagagcgt

SEQ ID NO: 462908 - DNA, 60 bp, Artificial
  Synthetic oligonucleotide
tctaatccgaccaaacgaaaatccagcacataagagtcaattggtgtggatggcatgcca

SEQ ID NO: 462909 - DNA, 52 bp, Artificial
  Synthetic oligonucleotide
tctaatcctggtcctgtgcaatcgcgccccgtatatgcttgcgacaacgacc

SEQ ID NO: 462910 - DNA, 52 bp, Artificial
  Synthetic oligonucleotide
tctaatcgtctgtagattccaattaatgtctgtagattccatgtcgttcaac

SEQ ID NO: 462911 - DNA, 60 bp, Artificial
  Synthetic oligonucleotide
tctaatgacgggctacaccggtgactttgattcagtgatcgactgtaatacatgtgtcac

SEQ ID NO: 462912 - DNA, 60 bp, Artificial
  Synthetic oligonucleotide
tctaatgacgggctttaccggcgactttgattcagtgatcgactgcaatacaagtgtcat

SEQ ID NO: 462913 - DNA, 60 bp, Artificial
  Synthetic oligonucleotide
tctaatgacgggtttcactggcgacttcgactcagtgatcgactgtaatgtatgtgtcac

SEQ ID NO: 462914 - DNA, 55 bp, Artificial
  Synthetic oligonucleotide
tctaatgagatgactgcccggggtttatatgccggggagaaaggtagtgaattgt

SEQ ID NO: 462915 - DNA, 60 bp, Artificial
  Synthetic oligonucleotide
tctaatgccttcaactcatttctacttatcgactggtcaagatttgatcatcttgcccct

SEQ ID NO: 462916 - DNA, 60 bp, Artificial
  Synthetic oligonucleotide
tctaatggagttgacccaacaaagaagcagtcatccagttactatggcccaggcccatgt

SEQ ID NO: 462917 - DNA, 60 bp, Artificial
  Synthetic oligonucleotide
tctaatggcacagtgaaagaccgaagcccatatagaactctaatgagtgtcgaagtaggg

SEQ ID NO: 462918 - DNA, 51 bp, Artificial
  Synthetic oligonucleotide
tctaatggcgaattagtagcgactagattatactctcattacgccataaag

SEQ ID NO: 462919 - DNA, 60 bp, Artificial
  Synthetic oligonucleotide
tctaatggctacaatgatgccccccacctgacagagataccctgctatagctgtgctaga

SEQ ID NO: 462920 - DNA, 60 bp, Artificial
  Synthetic oligonucleotide
tctaatggcttgtgtaactatgaatatgcaacatgttcaaactctcactaccgaaaagtt

SEQ ID NO: 462921 - DNA, 60 bp, Artificial
  Synthetic oligonucleotide
tctaatggtattaagcttagaaaactcgaacgtgggatgttcttgcgtgctggtgacatc

SEQ ID NO: 462922 - DNA, 60 bp, Artificial
  Synthetic oligonucleotide
tctaatgtcgcagtctcgcactcgcgagatactcacaaaaaccaccgtggaccatatggc

SEQ ID NO: 462923 - DNA, 60 bp, Artificial
  Synthetic oligonucleotide
tctaatgtgtgataaatttggcatgctaaaactcgttgatccaggtaatctaatgtcaca

SEQ ID NO: 462924 - DNA, 60 bp, Artificial
  Synthetic oligonucleotide
tctaattacaacaactcgatctcgcagcgcgcagggtactaggataccaatctcacggcc

SEQ ID NO: 462925 - DNA, 60 bp, Artificial
  Synthetic oligonucleotide
tctaattacatgtgagagggaagccaggtatctgcgtattctacacacgagagccctgcc

SEQ ID NO: 462926 - DNA, 60 bp, Artificial
  Synthetic oligonucleotide
tctaattatgtctcatgccagtagtatgtactggagcaccgaacctccagttcgtctgcc

SEQ ID NO: 462927 - DNA, 60 bp, Artificial
  Synthetic oligonucleotide
tctaattctcaacaggggcggtgatgaaaatccgcgcggcccagtgagccgtgaacatgt

SEQ ID NO: 462928 - DNA, 50 bp, Artificial
  Synthetic oligonucleotide
tctaattgccccttggtatgcatacaaatttgtcaacacagatagtaaag

SEQ ID NO: 462929 - DNA, 60 bp, Artificial
  Synthetic oligonucleotide
tctaattgctccttggtatgcatacaaatttgtcagcacaaataagaagggagccgtctt

SEQ ID NO: 462930 - DNA, 52 bp, Artificial
  Synthetic oligonucleotide
tctaattgggaaaagtaagaacgtattgaacatacagatagatgatgtcaag

SEQ ID NO: 462931 - DNA, 55 bp, Artificial
  Synthetic oligonucleotide
tctaattgggaaggtgtatgtcgtctgtaatgactcgttgtcattcatgcgtgtg

SEQ ID NO: 462932 - DNA, 55 bp, Artificial
  Synthetic oligonucleotide
tctaattgggaatgtccatgaggcctgtaatgactcgttgtccgtcattctcttg

SEQ ID NO: 462933 - DNA, 58 bp, Artificial
  Synthetic oligonucleotide
tctaatttgtctaggaagtaaccgtcaggattgacacctttctaattgtgtgatttca

SEQ ID NO: 462934 - DNA, 56 bp, Artificial
  Synthetic oligonucleotide
tctacaaacccggtaggtctctttggtgcaggatagggtatgaccgatgtggggag

SEQ ID NO: 462935 - DNA, 55 bp, Artificial
  Synthetic oligonucleotide
tctacaaagagaagtcaacaaaccataatcccgaatgtcgggtctagaccctggg

SEQ ID NO: 462936 - DNA, 59 bp, Artificial
  Synthetic oligonucleotide
tctacaaaggacgagagaaacatatgcacctcagggataagagtcttatcccttagtta

SEQ ID NO: 462937 - DNA, 60 bp, Artificial
  Synthetic oligonucleotide
tctacaaatttgcggacttctctcaggtgtatgatctggactacaagtgtttcgatgcga

SEQ ID NO: 462938 - DNA, 55 bp, Artificial
  Synthetic oligonucleotide
tctacaacaaactgggaatggcgcccttcggcgaccctgttacgatgttcaccgt

SEQ ID NO: 462939 - DNA, 59 bp, Artificial
  Synthetic oligonucleotide
tctacaacatttacaggagggtccgagtacctagaataccatggaggcctgtacagctc

SEQ ID NO: 462940 - DNA, 57 bp, Artificial
  Synthetic oligonucleotide
tctacaaccgattttgaaatccgtccttacagattcttcccagcctcgccgcaggtg

SEQ ID NO: 462941 - DNA, 60 bp, Artificial
  Synthetic oligonucleotide
tctacaacctacttgcagccgtcaaggctaggtatggtgcaaatttcaatctgtacaagg

SEQ ID NO: 462942 - DNA, 57 bp, Artificial
  Synthetic oligonucleotide
tctacaacgtcaactctttctggaaaatctattggtaggaacgaacagtatgtttca

SEQ ID NO: 462943 - DNA, 54 bp, Artificial
  Synthetic oligonucleotide
tctacaacgtccctgtaagtttgagttatgaccgacaaaaagtctacgtagaaa

SEQ ID NO: 462944 - DNA, 55 bp, Artificial
  Synthetic oligonucleotide
tctacaactcctgcagggtatgtgagggttagtagattaggtactcgtgcaacca

SEQ ID NO: 462945 - DNA, 54 bp, Artificial
  Synthetic oligonucleotide
tctacaactcttcgtcttcttagcactggctggaagatcctgttcctacacaat

SEQ ID NO: 462946 - DNA, 60 bp, Artificial
  Synthetic oligonucleotide
tctacaagagtattgccgcgagattgggtcatgaaactgcattcgctacactagtgataa

SEQ ID NO: 462947 - DNA, 55 bp, Artificial
  Synthetic oligonucleotide
tctacaaggcggatttggaggcgcaatggtgcgaattaagttggttggaaagatc

SEQ ID NO: 462948 - DNA, 60 bp, Artificial
  Synthetic oligonucleotide
tctacaagtaaagatagcaattttagaccttcaatcaccacagctcttaggtgcacctga

SEQ ID NO: 462949 - DNA, 55 bp, Artificial
  Synthetic oligonucleotide
tctacaagtactacctctgaaaatctctcctcgaattctagacacacctccacgt

SEQ ID NO: 462950 - DNA, 55 bp, Artificial
  Synthetic oligonucleotide
tctacacaagcttgtgaagtaattcagaatagaattacaggtctttattgcaata

SEQ ID NO: 462951 - DNA, 57 bp, Artificial
  Synthetic oligonucleotide
tctacacagtgtgtcgggaacgtacgattcgcgcttaccagagggaaacaccacaag

SEQ ID NO: 462952 - DNA, 54 bp, Artificial
  Synthetic oligonucleotide
tctacaccacctggggaaaaaccgtagtgtgcctgtacctattccagctttccc

SEQ ID NO: 462953 - DNA, 60 bp, Artificial
  Synthetic oligonucleotide
tctacaccaggatcgctgacgtggaattccatacattctctctctgttgacaggtttagc

SEQ ID NO: 462954 - DNA, 50 bp, Artificial
  Synthetic oligonucleotide
tctacacctgaaagaaactgggaccaaacaagaggagaacttgacatgca

SEQ ID NO: 462955 - DNA, 59 bp, Artificial
  Synthetic oligonucleotide
tctacacgaggatcagtttggtccagatttcgttttaggtcataatacagctttgtcca

SEQ ID NO: 462956 - DNA, 55 bp, Artificial
  Synthetic oligonucleotide
tctacactggaactttccttcgaattgaagcagaacatgtaagtgaggaacccca

SEQ ID NO: 462957 - DNA, 51 bp, Artificial
  Synthetic oligonucleotide
tctacactttgcctatattatccgactgaggctgcgactgaaataaacgat

SEQ ID NO: 462958 - DNA, 60 bp, Artificial
  Synthetic oligonucleotide
tctacagagcgatacatgccaagatacggtcttcagcgaaatctcaccgattatagctta

SEQ ID NO: 462959 - DNA, 59 bp, Artificial
  Synthetic oligonucleotide
tctacagaggcttggacgtttcggtaataccaacatccggagacgtcgtagtctgcgca

SEQ ID NO: 462960 - DNA, 60 bp, Artificial
  Synthetic oligonucleotide
tctacagatacatgaatgattatttccatctgtcagccaaaacaggaagagcatgggcct

SEQ ID NO: 462961 - DNA, 55 bp, Artificial
  Synthetic oligonucleotide
tctacagatgcacggtcgtaaaccgctggttttcgggattacgtcgaacttcggc

SEQ ID NO: 462962 - DNA, 60 bp, Artificial
  Synthetic oligonucleotide
tctacagatttgtccaatcgctgtggcctcatcaagatctaagtgatgtcattgaatcaa

SEQ ID NO: 462963 - DNA, 60 bp, Artificial
  Synthetic oligonucleotide
tctacagcatcttataagcttaagttctcaggatggcagtctgaaggaaagccatgggga

SEQ ID NO: 462964 - DNA, 59 bp, Artificial
  Synthetic oligonucleotide
tctacaggcagcgtgagggggccgttatgaacaaagtcgctgagacgatacgcagcatg

SEQ ID NO: 462965 - DNA, 56 bp, Artificial
  Synthetic oligonucleotide
tctacaggtataacagatttacccagcggcactcgttaaccggcggtctgtggtta

SEQ ID NO: 462966 - DNA, 50 bp, Artificial
  Synthetic oligonucleotide
tctacaggtctaccatgttggcaacctactgaaaggagataaggtcaatg

SEQ ID NO: 462967 - DNA, 60 bp, Artificial
  Synthetic oligonucleotide
tctacaggtgttgaccctaaacctagaagatgagtatcggcttcatgagacctcagcaga

SEQ ID NO: 462968 - DNA, 55 bp, Artificial
  Synthetic oligonucleotide
tctacataatgtctgtaagaagtaagttggtttccccttataccccatctgccga

SEQ ID NO: 462969 - DNA, 60 bp, Artificial
  Synthetic oligonucleotide
tctacatacagatgtgcactgaactcaagctcagcgactatgaagggagactgattcaga

SEQ ID NO: 462970 - DNA, 58 bp, Artificial
  Synthetic oligonucleotide
tctacatagcttacggaacagttcccactccaagtggtagtatcagtcgagaagttcc

SEQ ID NO: 462971 - DNA, 60 bp, Artificial
  Synthetic oligonucleotide
tctacatcaaccgtgctgacgaggcccttgcctcacacgatcgtgcccagctcaaacctc

SEQ ID NO: 462972 - DNA, 55 bp, Artificial
  Synthetic oligonucleotide
tctacatcacgcctatagctgcggctgttggattccccttctataataactctgc

SEQ ID NO: 462973 - DNA, 59 bp, Artificial
  Synthetic oligonucleotide
tctacatctacgccacgtctgcccggtactgttgtcccccgtcgaccttcacacatcgc

SEQ ID NO: 462974 - DNA, 60 bp, Artificial
  Synthetic oligonucleotide
tctacatgcccatgattcaccaggttttaattcaattgggcctgtaatgccgaaccttga

SEQ ID NO: 462975 - DNA, 59 bp, Artificial
  Synthetic oligonucleotide
tctacatggagtcatacctttgatatgcgtaagcatgtgaatgctaatggtatgattcg

SEQ ID NO: 462976 - DNA, 50 bp, Artificial
  Synthetic oligonucleotide
tctacattagcgatcagctgcaaaagagccgcattgagttgcgtcaacat

SEQ ID NO: 462977 - DNA, 55 bp, Artificial
  Synthetic oligonucleotide
tctacattggcaacggtcaggtgatgggtgtcaacaatcctggcgccgccgtgtg

SEQ ID NO: 462978 - DNA, 58 bp, Artificial
  Synthetic oligonucleotide
tctaccaaagcagtaagtagtattgtaatgacccccttacaaatctatgcaatagtag

SEQ ID NO: 462979 - DNA, 55 bp, Artificial
  Synthetic oligonucleotide
tctaccaaccctatgtatgtttctgatactgtgacgtttgtcaatgtggccaccg

SEQ ID NO: 462980 - DNA, 60 bp, Artificial
  Synthetic oligonucleotide
tctaccaagagtttttaatgcacagaaacagatggaccagaagcaaccatgacctagacc

SEQ ID NO: 462981 - DNA, 58 bp, Artificial
  Synthetic oligonucleotide
tctaccaatatcgaaccacttgacgactgtattagctttaagtccgaaatacttagca

SEQ ID NO: 462982 - DNA, 52 bp, Artificial
  Synthetic oligonucleotide
tctaccaatgagagagagtccggagataatagtaagaaaccggctgatgatt

SEQ ID NO: 462983 - DNA, 60 bp, Artificial
  Synthetic oligonucleotide
tctaccaattcataaaaaagctgagatttggaatgatgtacccacactattatgttttgc

SEQ ID NO: 462984 - DNA, 55 bp, Artificial
  Synthetic oligonucleotide
tctaccagatgcaaagcagaagagaggagcagtcttgcttggaatgctcggcctc

SEQ ID NO: 462985 - DNA, 60 bp, Artificial
  Synthetic oligonucleotide
tctaccagcaaatcagacaggatctgcatcggttaccatgcaaacaactcgacaacacaa

SEQ ID NO: 462986 - DNA, 60 bp, Artificial
  Synthetic oligonucleotide
tctaccagctatcttatcatcagacactactgaagaattatccatagccaggttgacaaa

SEQ ID NO: 462987 - DNA, 60 bp, Artificial
  Synthetic oligonucleotide
tctaccatgtcaccaacgattgccctaactcgagcattgtgtacgaggcggatgatgcca

SEQ ID NO: 462988 - DNA, 60 bp, Artificial
  Synthetic oligonucleotide
tctaccatgtcaccaatgattgccctaactcgagtattgtgtacgaggcgcccgatgcta

SEQ ID NO: 462989 - DNA, 54 bp, Artificial
  Synthetic oligonucleotide
tctacccagaagggcgttaagggagatttcgagggaagcgtgactgggtactgg

SEQ ID NO: 462990 - DNA, 58 bp, Artificial
  Synthetic oligonucleotide
tctacccgactccttcagtgggttcattccctacatgtccgactacctgcgactcacg

SEQ ID NO: 462991 - DNA, 56 bp, Artificial
  Synthetic oligonucleotide
tctacccgcgttgtttcggcggataaataagtggctgacgtggaatgccatccggt

SEQ ID NO: 462992 - DNA, 60 bp, Artificial
  Synthetic oligonucleotide
tctacccgcttctagcgcaacttagaaaacagcaatgctcaattatgtacggacttgaaa

SEQ ID NO: 462993 - DNA, 56 bp, Artificial
  Synthetic oligonucleotide
tctacccggacgagtttataccgaacttcgacgcagtgagagaagcggtggacggc

SEQ ID NO: 462994 - DNA, 60 bp, Artificial
  Synthetic oligonucleotide
tctacccgtgcctcctgtcttgtcttactcgagcgaacccacaactccgtcctgctgagc

SEQ ID NO: 462995 - DNA, 51 bp, Artificial
  Synthetic oligonucleotide
tctaccctcaagttgatagcaatgttgtacacaccactcagagctaataat

SEQ ID NO: 462996 - DNA, 55 bp, Artificial
  Synthetic oligonucleotide
tctaccctgacgtgcatgatgcagaactgcccagaatattagttgaccatgacac

SEQ ID NO: 462997 - DNA, 60 bp, Artificial
  Synthetic oligonucleotide
tctacccttccaagggatggctttaatgcacttagtgatggagttcacaggctaggccag

SEQ ID NO: 462998 - DNA, 53 bp, Artificial
  Synthetic oligonucleotide
tctacccttgtatgctagtgaagcaaaaaggattaaagtgttgtaccataaat

SEQ ID NO: 462999 - DNA, 53 bp, Artificial
  Synthetic oligonucleotide
tctaccgaaagggacccgtacgaaatactcaagatgggtgtcccaatctaaag

SEQ ID NO: 463000 - DNA, 60 bp, Artificial
  Synthetic oligonucleotide
tctaccgggatatatggcaacatctatttgtcagaatatagaagtgatcctcttgaccgt

SEQ ID NO: 463001 - DNA, 57 bp, Artificial
  Synthetic oligonucleotide
tctaccgtagaggtggtcgtagagcgcgcccctaccgcattagtgcgttcaacccta

SEQ ID NO: 463002 - DNA, 55 bp, Artificial
  Synthetic oligonucleotide
tctaccgtggtgcttcatagggaacagacccgttctctactgcctctgcaacgag

SEQ ID NO: 463003 - DNA, 53 bp, Artificial
  Synthetic oligonucleotide
tctaccgttaatccttatgccgagagcattaaagaagcaattcactactttaa

SEQ ID NO: 463004 - DNA, 55 bp, Artificial
  Synthetic oligonucleotide
tctacctactctggctttgaacctttaatcagaaaattctttgagcggcctttta

SEQ ID NO: 463005 - DNA, 55 bp, Artificial
  Synthetic oligonucleotide
tctacctagtgataatttgcaggtcgaacaggttatgacaactaccgaagactcg

SEQ ID NO: 463006 - DNA, 54 bp, Artificial
  Synthetic oligonucleotide
tctacctccacttgaatgtgacgcaaccggcaaccttctttgctcgccgcattg

SEQ ID NO: 463007 - DNA, 57 bp, Artificial
  Synthetic oligonucleotide
tctacctccatctggtctgttcgggtcctgttcgccgggggagccggctctccatcc

SEQ ID NO: 463008 - DNA, 58 bp, Artificial
  Synthetic oligonucleotide
tctacctctaaaagtcactaagcactccgagcgaagcgaggagtgcgacccccctgcc

SEQ ID NO: 463009 - DNA, 55 bp, Artificial
  Synthetic oligonucleotide
tctacctctgggtcttgggtcaggcaccatacagtcaactcagtgctgaaggaaa

SEQ ID NO: 463010 - DNA, 55 bp, Artificial
  Synthetic oligonucleotide
tctacctgaagggaagggatctttctggatacattggataacgactcaggatggt

SEQ ID NO: 463011 - DNA, 60 bp, Artificial
  Synthetic oligonucleotide
tctacctgactgagcccgccgtaacctggttcgaagctaacaagccggcgcagccagcac

SEQ ID NO: 463012 - DNA, 60 bp, Artificial
  Synthetic oligonucleotide
tctacctggcaactgatgtgtccgcctactccggttttatcaatcagtccacgctggaat

SEQ ID NO: 463013 - DNA, 56 bp, Artificial
  Synthetic oligonucleotide
tctacctgtctccgcccgaagggggagagagatactcctgggacccgccgatagtc

SEQ ID NO: 463014 - DNA, 60 bp, Artificial
  Synthetic oligonucleotide
tctaccttatgatgacctcgatgttgattacaccgccttgtgtcgtgaacgtgatgattc

SEQ ID NO: 463015 - DNA, 55 bp, Artificial
  Synthetic oligonucleotide
tctacgaaacatataaccaagagatcaagagcgaggagccggagtcgcagtccac

SEQ ID NO: 463016 - DNA, 60 bp, Artificial
  Synthetic oligonucleotide
tctacgaataggcgcacttctcaagaagcaaagtaaagactggttggctagcttcgctct

SEQ ID NO: 463017 - DNA, 55 bp, Artificial
  Synthetic oligonucleotide
tctacgacaaggtccgactacagcttagggataatgcaaaagagctgggtaacgg

SEQ ID NO: 463018 - DNA, 60 bp, Artificial
  Synthetic oligonucleotide
tctacgacagcagtgagtatcccctctttatgctttccatgtgggtagctataggactaa

SEQ ID NO: 463019 - DNA, 55 bp, Artificial
  Synthetic oligonucleotide
tctacgacagcatcgcgatgcgcgccttcgcgggcatcgacctggcgcgcgagaa

SEQ ID NO: 463020 - DNA, 54 bp, Artificial
  Synthetic oligonucleotide
tctacgacaggtgggccgtgttaccacgccacgctaaacccgggccaaccatcc

SEQ ID NO: 463021 - DNA, 59 bp, Artificial
  Synthetic oligonucleotide
tctacgaccctgtacataaccctccatgggtttatgtccttcatggtagagaacgatga

SEQ ID NO: 463022 - DNA, 59 bp, Artificial
  Synthetic oligonucleotide
tctacgacgcaattacggtgctatatctgggaggtttgccgtcggcacttatgttgcta

SEQ ID NO: 463023 - DNA, 59 bp, Artificial
  Synthetic oligonucleotide
tctacgagtgagttatcactgtcagaattatttatccttgggatattacgccttaggct

SEQ ID NO: 463024 - DNA, 57 bp, Artificial
  Synthetic oligonucleotide
tctacgcaatccgctgtgtagtctttggacaatattttaattgttggcggtttgtat

SEQ ID NO: 463025 - DNA, 59 bp, Artificial
  Synthetic oligonucleotide
tctacgccggtgtagtcgtatcacgttctgatattgactcacttttcattactggtaaa

SEQ ID NO: 463026 - DNA, 52 bp, Artificial
  Synthetic oligonucleotide
tctacgcctgaataggtgaccggaggccggcacctttccttcgaacaactgt

SEQ ID NO: 463027 - DNA, 55 bp, Artificial
  Synthetic oligonucleotide
tctacgcgtgaggaactgaaagccctctacgacgaagtatccggccacaaactga

SEQ ID NO: 463028 - DNA, 60 bp, Artificial
  Synthetic oligonucleotide
tctacgctcccacaatatgggtgcgcatgatattgatgacccactttttctcaatactcc

SEQ ID NO: 463029 - DNA, 60 bp, Artificial
  Synthetic oligonucleotide
tctacggacttggaattgcatcgagcttcagccttacactgactcggcgctcttccaatt

SEQ ID NO: 463030 - DNA, 60 bp, Artificial
  Synthetic oligonucleotide
tctacggccaagggctctcttggtcgcggtatgattcacaagatggagcacgaacttctc

SEQ ID NO: 463031 - DNA, 55 bp, Artificial
  Synthetic oligonucleotide
tctacggcgagttcctctcttcttcgccgccctgtgtcgtggtttgatagagggg

SEQ ID NO: 463032 - DNA, 60 bp, Artificial
  Synthetic oligonucleotide
tctacgggaacctgtctgtcacctgccatattcgtagtgccatagcccctcatgggtcta

SEQ ID NO: 463033 - DNA, 59 bp, Artificial
  Synthetic oligonucleotide
tctacgggcctttaccatgtcaccaacgactgccctaattcgagcattgtgtacgaggc

SEQ ID NO: 463034 - DNA, 52 bp, Artificial
  Synthetic oligonucleotide
tctacggggctctatcatgtcaccaatgattgccctaacacgagtattgtgt

SEQ ID NO: 463035 - DNA, 55 bp, Artificial
  Synthetic oligonucleotide
tctacgggtggtcaggggtgtacagctgcagtgtgcgttgtcgcggcaagtcgag

SEQ ID NO: 463036 - DNA, 60 bp, Artificial
  Synthetic oligonucleotide
tctacggtaatgagaatctctccccataaaatgatgaatccaagcggtggcgcccttgct

SEQ ID NO: 463037 - DNA, 54 bp, Artificial
  Synthetic oligonucleotide
tctacggtagcctgactgattcttatgcttacatgagaaacggttgggatgtcg

SEQ ID NO: 463038 - DNA, 58 bp, Artificial
  Synthetic oligonucleotide
tctacggtcctggccaaagtgttaccattgacggggaacgctacaccctgccgcatca

SEQ ID NO: 463039 - DNA, 51 bp, Artificial
  Synthetic oligonucleotide
tctacgtaaagcagcaaaggtgcgagagctacggcactggagccactcaag

SEQ ID NO: 463040 - DNA, 50 bp, Artificial
  Synthetic oligonucleotide
tctacgtaacgacatggctaaggaatatagtaatcgtggtagtaagcaat

SEQ ID NO: 463041 - DNA, 57 bp, Artificial
  Synthetic oligonucleotide
tctacgtagatttcaggtaacggtaacgggaggcccgtcaggatgcaaggaggctgc

SEQ ID NO: 463042 - DNA, 60 bp, Artificial
  Synthetic oligonucleotide
tctacgtcccaatctttagaaaatcgtgctactcagcagtcttgggttgatgtaattgag

SEQ ID NO: 463043 - DNA, 53 bp, Artificial
  Synthetic oligonucleotide
tctacgtcgaatggttactctgcgggcactgatgctaaaatacatgatcggaa

SEQ ID NO: 463044 - DNA, 60 bp, Artificial
  Synthetic oligonucleotide
tctacgtgctctacgccctgcgtagacactatgagggagttgagctggacacttacacca

SEQ ID NO: 463045 - DNA, 53 bp, Artificial
  Synthetic oligonucleotide
tctacgtggaagaaaataagcagttagtatcgtgtccctgtccggaaaagggg

SEQ ID NO: 463046 - DNA, 60 bp, Artificial
  Synthetic oligonucleotide
tctacgttggttatctgacagctcatcgttaggtcgaaactgtgatagtgtcaattgtcg

SEQ ID NO: 463047 - DNA, 55 bp, Artificial
  Synthetic oligonucleotide
tctacgtttattacggacgaactggggcagggaaatctcggagagcctgggagga

SEQ ID NO: 463048 - DNA, 60 bp, Artificial
  Synthetic oligonucleotide
tctacgttttacgactgatgtttaattcatagtacaggctggatattcaaggttatatca

SEQ ID NO: 463049 - DNA, 55 bp, Artificial
  Synthetic oligonucleotide
tctacgttttcggcgactgtgtacaggccgattggtgccccatttctggggggct

SEQ ID NO: 463050 - DNA, 60 bp, Artificial
  Synthetic oligonucleotide
tctactaatcctatgtatgtctctgacactgtcacatttgttaatgtggcgactggcgcc

SEQ ID NO: 463051 - DNA, 57 bp, Artificial
  Synthetic oligonucleotide
tctactacaaaagagccagaaatcaaaagactagggaagaatataactaactatgag

SEQ ID NO: 463052 - DNA, 60 bp, Artificial
  Synthetic oligonucleotide
tctactacatcagggatgaggtgccctgagcacactgggtccttcagaaagatatgtgga

SEQ ID NO: 463053 - DNA, 54 bp, Artificial
  Synthetic oligonucleotide
tctactacctgacccgtgatcccgagatccccctggcacgagctgcctgggaaa

SEQ ID NO: 463054 - DNA, 56 bp, Artificial
  Synthetic oligonucleotide
tctactaggaccagcaatcctgggggagggggttccacaagaagccctagtgctaa

SEQ ID NO: 463055 - DNA, 56 bp, Artificial
  Synthetic oligonucleotide
tctactaggggaaaaagttctagtgtgtgccttccaagggggacatagagatcagg

SEQ ID NO: 463056 - DNA, 60 bp, Artificial
  Synthetic oligonucleotide
tctactataactctacgcataagcgcctctttttgcgccaagctagcttctgggaaccaa

SEQ ID NO: 463057 - DNA, 50 bp, Artificial
  Synthetic oligonucleotide
tctactatctcgccggattcgccgaacaatacgctaacatgatttcatgc

SEQ ID NO: 463058 - DNA, 60 bp, Artificial
  Synthetic oligonucleotide
tctactatgtttgcagacggagcctcaccggtactggtttatcagtatgcagcatccgga

SEQ ID NO: 463059 - DNA, 57 bp, Artificial
  Synthetic oligonucleotide
tctactatttcttgggcccatggaaggaggtggtataatctttaagcactggtgtac

SEQ ID NO: 463060 - DNA, 59 bp, Artificial
  Synthetic oligonucleotide
tctactcaatactctcactactgaccttcaaattgaagagtgtatggtccccggaccac

SEQ ID NO: 463061 - DNA, 60 bp, Artificial
  Synthetic oligonucleotide
tctactcacacaaatgatgtaaggcaattaacagaagtggtgcaaaaggtggccacagaa

SEQ ID NO: 463062 - DNA, 57 bp, Artificial
  Synthetic oligonucleotide
tctactcagacacaaattggcttaacttctacgctttgtatttactatccaaaagag

SEQ ID NO: 463063 - DNA, 53 bp, Artificial
  Synthetic oligonucleotide
tctactcagccaaagtatcgttccagcgcgtaccgcgcacggaaatcaacgcc

SEQ ID NO: 463064 - DNA, 56 bp, Artificial
  Synthetic oligonucleotide
tctactcagtagtaaccatataaggacaataaccgtttaacaacactatcgtccca

SEQ ID NO: 463065 - DNA, 60 bp, Artificial
  Synthetic oligonucleotide
tctactccatccctctctatatacctgataactggtaaatcctcatttgaaagtatctta

SEQ ID NO: 463066 - DNA, 51 bp, Artificial
  Synthetic oligonucleotide
tctactcgcacgcacagcgcaacagttaaacggaccgacagttcgcaccga

SEQ ID NO: 463067 - DNA, 56 bp, Artificial
  Synthetic oligonucleotide
tctactcggatcgccgcgtagttgtatccgccgaacttcgagaaccggactaccga

SEQ ID NO: 463068 - DNA, 59 bp, Artificial
  Synthetic oligonucleotide
tctactcgtgcaattcgagagaaactaccgcttggtgttgtcgcccgatcccgctacgc

SEQ ID NO: 463069 - DNA, 53 bp, Artificial
  Synthetic oligonucleotide
tctactctacaagtttatacaacagaacgtatacattgatatcctacgacgag

SEQ ID NO: 463070 - DNA, 60 bp, Artificial
  Synthetic oligonucleotide
tctactcttgtacagaatggtaagcacgtgtgataggaggtacaagcaaccctattgcat

SEQ ID NO: 463071 - DNA, 60 bp, Artificial
  Synthetic oligonucleotide
tctactgacggagtcagtcaaacagatgttgctaaacagactaatgacaatgatgcgtcc

SEQ ID NO: 463072 - DNA, 59 bp, Artificial
  Synthetic oligonucleotide
tctactgacgggaaaaagaggacatcacttaaacagtgcacgagacagatcctagaggt

SEQ ID NO: 463073 - DNA, 60 bp, Artificial
  Synthetic oligonucleotide
tctactgatgaataaatcaaattgtatgtgacattaagaaatccaataaacaacacatct

SEQ ID NO: 463074 - DNA, 59 bp, Artificial
  Synthetic oligonucleotide
tctactgatgccactatttatgccaattgcatacttttatggttggtcatataacaaaa

SEQ ID NO: 463075 - DNA, 55 bp, Artificial
  Synthetic oligonucleotide
tctactgcataaaagctgatgctctgtaacagtcggttgcgagtctctccagcgg

SEQ ID NO: 463076 - DNA, 59 bp, Artificial
  Synthetic oligonucleotide
tctactgcccccgaccttactcctctgtttgagaataccgctgtcagttacgcttgctg

SEQ ID NO: 463077 - DNA, 55 bp, Artificial
  Synthetic oligonucleotide
tctactggggctcctgtcgccatcctgtgaacgccaccgtttttacccacccaaa

SEQ ID NO: 463078 - DNA, 57 bp, Artificial
  Synthetic oligonucleotide
tctactggtggcaatgggctcgttggctttgcagacgtcagggacctcctgtggttg

SEQ ID NO: 463079 - DNA, 58 bp, Artificial
  Synthetic oligonucleotide
tctactgtagtacaacacaattgtttaatagtacttggagtagtactggagagtcaaa

SEQ ID NO: 463080 - DNA, 60 bp, Artificial
  Synthetic oligonucleotide
tctactgtatctacccccatatgagttaacgagtgcatcatcaccatatctattgaatca

SEQ ID NO: 463081 - DNA, 53 bp, Artificial
  Synthetic oligonucleotide
tctactgtgattataatattgttctagttgatgctagctcttatactaatgat

SEQ ID NO: 463082 - DNA, 50 bp, Artificial
  Synthetic oligonucleotide
tctactgttaaatcccaatgacgaattaagtattctccagaaacaccacg

SEQ ID NO: 463083 - DNA, 56 bp, Artificial
  Synthetic oligonucleotide
tctacttactcggcagtacgtcgaccgtgacatctggtggagtttatctcttcagt

SEQ ID NO: 463084 - DNA, 54 bp, Artificial
  Synthetic oligonucleotide
tctacttccgtcttgaaataaaaacgatggttcaaaacctattctaactccaga

SEQ ID NO: 463085 - DNA, 59 bp, Artificial
  Synthetic oligonucleotide
tctacttcgacaacggaagctgagggttcggaaagacgcatccatataggagcgccctc

SEQ ID NO: 463086 - DNA, 58 bp, Artificial
  Synthetic oligonucleotide
tctacttcggcaaccagcttagttttagacgaccaattatgggcagaactgctgttac

SEQ ID NO: 463087 - DNA, 53 bp, Artificial
  Synthetic oligonucleotide
tctactttaagagtcttaaagaacaggtacagtggcgaaactggagtagctgc

SEQ ID NO: 463088 - DNA, 50 bp, Artificial
  Synthetic oligonucleotide
tctactttattaggccagttgtgcgggtattacactcaatggtcaggatc

SEQ ID NO: 463089 - DNA, 55 bp, Artificial
  Synthetic oligonucleotide
tctactttgaatacaccatacgttttagtgatcctacctttgttcaacgggattc

SEQ ID NO: 463090 - DNA, 60 bp, Artificial
  Synthetic oligonucleotide
tctagaaataggggacatgctcctcagaactgctgtaggtcaggtatcaagacccatgtt

SEQ ID NO: 463091 - DNA, 60 bp, Artificial
  Synthetic oligonucleotide
tctagaacacttccgcctaactgatgaagatctttatacggatgtaatgcgctatgtcct

SEQ ID NO: 463092 - DNA, 58 bp, Artificial
  Synthetic oligonucleotide
tctagaagatcaaatgtaataactattcctagatttgagactccaagagagattaata

SEQ ID NO: 463093 - DNA, 53 bp, Artificial
  Synthetic oligonucleotide
tctagaaggcagaagcttcattagaggacattgcccaattgggataacaggag

SEQ ID NO: 463094 - DNA, 59 bp, Artificial
  Synthetic oligonucleotide
tctagaagggggatactgtcctaatcttgaatggttagagcctagatcagactataagt

SEQ ID NO: 463095 - DNA, 56 bp, Artificial
  Synthetic oligonucleotide
tctagaagtctgcttcatgtattcggatttccacttcattgacgagagaggcgaat

SEQ ID NO: 463096 - DNA, 60 bp, Artificial
  Synthetic oligonucleotide
tctagaataatagcactggatccaattcccctgtcaccctgggtgattggggagcagggc

SEQ ID NO: 463097 - DNA, 60 bp, Artificial
  Synthetic oligonucleotide
tctagaatcgtatcgtcaggtgctttctggtcagtacgagctaaagcgcgttgacattaa

SEQ ID NO: 463098 - DNA, 55 bp, Artificial
  Synthetic oligonucleotide
tctagaatggcgaggccagcggttcgaacagtattaacgaatactgaggttggag

SEQ ID NO: 463099 - DNA, 53 bp, Artificial
  Synthetic oligonucleotide
tctagaattgtaacaaacagccaagaacatccagttgaggtgactacacgtgt

SEQ ID NO: 463100 - DNA, 50 bp, Artificial
  Synthetic oligonucleotide
tctagaatttacccaactttgccgacagctcctacagctgaagatctcga

SEQ ID NO: 463101 - DNA, 58 bp, Artificial
  Synthetic oligonucleotide
tctagacaagttagaggaagtgaatttttgctcccacactataaggaaagacagctac

SEQ ID NO: 463102 - DNA, 56 bp, Artificial
  Synthetic oligonucleotide
tctagacagaatgttgggacacactctacacaaaatgcagtgactaatggatctag

SEQ ID NO: 463103 - DNA, 56 bp, Artificial
  Synthetic oligonucleotide
tctagacaggaagccacgcggtttctccttagacgcccctctttctctaactcctc

SEQ ID NO: 463104 - DNA, 58 bp, Artificial
  Synthetic oligonucleotide
tctagacatctaaagatagatataacgtctacaatcgaccttctgtcagatgtctcaa

SEQ ID NO: 463105 - DNA, 56 bp, Artificial
  Synthetic oligonucleotide
tctagaccagtttcccctaggacgtaggtttcttgcacagcgcggtttagggtgca

SEQ ID NO: 463106 - DNA, 58 bp, Artificial
  Synthetic oligonucleotide
tctagaccctgggtaaggggtctgtctagtagaataagcatccattggacaatagtta

SEQ ID NO: 463107 - DNA, 60 bp, Artificial
  Synthetic oligonucleotide
tctagacgatctttctggagcttgggtcgaaaaacacaactggagcgatgtgcttcgtag

SEQ ID NO: 463108 - DNA, 60 bp, Artificial
  Synthetic oligonucleotide
tctagagactacatcaagttattgagtcttgatgtctccggtgtcattaatgtgaagaca

SEQ ID NO: 463109 - DNA, 60 bp, Artificial
  Synthetic oligonucleotide
tctagagagagaagcatagcaaaacgcaaaatgctaggcaaaagagcgtgtcgtttcgat

SEQ ID NO: 463110 - DNA, 55 bp, Artificial
  Synthetic oligonucleotide
tctagagagagaagctctcgtttagcgcttctagagagagaagcaatcggtggac

SEQ ID NO: 463111 - DNA, 60 bp, Artificial
  Synthetic oligonucleotide
tctagagagagaagctctcgttttagagagagaagctattggtgacatccaccgattgcc

SEQ ID NO: 463112 - DNA, 60 bp, Artificial
  Synthetic oligonucleotide
tctagaggaaccattatgtctcgcgttagccaagtactcgcatccatctcagacccctct

SEQ ID NO: 463113 - DNA, 60 bp, Artificial
  Synthetic oligonucleotide
tctagaggccatctatgaacaattcctgtaccacagaaacaggtggtccaggtctaacca

SEQ ID NO: 463114 - DNA, 55 bp, Artificial
  Synthetic oligonucleotide
tctagagtcttgggatgtcatgacactatttcgtatgaatcagctgtgagtagtg

SEQ ID NO: 463115 - DNA, 60 bp, Artificial
  Synthetic oligonucleotide
tctagagtgagataagcacactcgaattcctccgataggaaagttcgcacaccgttagtg

SEQ ID NO: 463116 - DNA, 60 bp, Artificial
  Synthetic oligonucleotide
tctagagtgagataagcacactcgaatttttctccgaatggaaagttcgcaccaccgata

SEQ ID NO: 463117 - DNA, 56 bp, Artificial
  Synthetic oligonucleotide
tctagatacaataaaactaaatacttaaatctctgtaaataagtcgttccagaagc

SEQ ID NO: 463118 - DNA, 54 bp, Artificial
  Synthetic oligonucleotide
tctagatagcacaagtgccctcaatgaggaaaatttcgggcgaccttacatttc

SEQ ID NO: 463119 - DNA, 54 bp, Artificial
  Synthetic oligonucleotide
tctagatcaagcacttctgtttccccggactgagtatcaataaactgctcacgc

SEQ ID NO: 463120 - DNA, 60 bp, Artificial
  Synthetic oligonucleotide
tctagatcgatctgtggcagatcttgtaatatgtggaatgtcaaacacgtagttcaacat

SEQ ID NO: 463121 - DNA, 60 bp, Artificial
  Synthetic oligonucleotide
tctagatcgtgctgtaactcgtttcagggatctttacaatcggagggtacagcaagtcag

SEQ ID NO: 463122 - DNA, 60 bp, Artificial
  Synthetic oligonucleotide
tctagatgactcaaagtacagcttactacaaaagctgagcaagctcgaaggaattaatct

SEQ ID NO: 463123 - DNA, 60 bp, Artificial
  Synthetic oligonucleotide
tctagatgactcaaagtacagcttgctgcagaagttaagtaagctcgaaggaattaatct

SEQ ID NO: 463124 - DNA, 57 bp, Artificial
  Synthetic oligonucleotide
tctagatgaggcagtggaggattttagtgggtcccaattagtaataggtaataggcg

SEQ ID NO: 463125 - DNA, 60 bp, Artificial
  Synthetic oligonucleotide
tctagatggcatgagattccactttggatacactactcttgaaaaggggtggatatctat

SEQ ID NO: 463126 - DNA, 60 bp, Artificial
  Synthetic oligonucleotide
tctagatgtgggtccgctcgaaaatgtaaccatgtatctctggcaagacgaatcgtggag

SEQ ID NO: 463127 - DNA, 59 bp, Artificial
  Synthetic oligonucleotide
tctagatgttatgatgacgagtcggtcgggctccgcgctaggtttggtcgcctagggga

SEQ ID NO: 463128 - DNA, 51 bp, Artificial
  Synthetic oligonucleotide
tctagattcacacatgcgagtgtcaaagtaccgtacttttatccacgtgtg

SEQ ID NO: 463129 - DNA, 57 bp, Artificial
  Synthetic oligonucleotide
tctagcacaacgtgctagtcttagggtacgggtgccccttgtcttcgcaccttcgtg

SEQ ID NO: 463130 - DNA, 55 bp, Artificial
  Synthetic oligonucleotide
tctagcacactcgaactgaggagcagatattgggcaataaggaccaggagtgggg

SEQ ID NO: 463131 - DNA, 55 bp, Artificial
  Synthetic oligonucleotide
tctagcaccgctaatcggcgttacctttgaaacaggtagccaaaaccggcgaaca

SEQ ID NO: 463132 - DNA, 59 bp, Artificial
  Synthetic oligonucleotide
tctagcacgcgttagtgaggttttacctcctattatctatgtgtcagtgagggtagccc

SEQ ID NO: 463133 - DNA, 60 bp, Artificial
  Synthetic oligonucleotide
tctagcacgtctccgtctttgtcgatatatgccttgacgtcggacgccgatttagctccc

SEQ ID NO: 463134 - DNA, 53 bp, Artificial
  Synthetic oligonucleotide
tctagcagatctgccgtcgattcggaattctccccattcaattgtgtctccat

SEQ ID NO: 463135 - DNA, 60 bp, Artificial
  Synthetic oligonucleotide
tctagcagatctggcaactttagtacgtatagattaataaactgtaatacctcaaccata

SEQ ID NO: 463136 - DNA, 60 bp, Artificial
  Synthetic oligonucleotide
tctagcagccacaacgctgacgtgtcaagacgagcctctagacttgtcttcgtcctcact

SEQ ID NO: 463137 - DNA, 60 bp, Artificial
  Synthetic oligonucleotide
tctagcatagagtctttcttcgcgcgaggtgcatgcgtagccattataaccgtggataac

SEQ ID NO: 463138 - DNA, 51 bp, Artificial
  Synthetic oligonucleotide
tctagcatggatgcgacagatagagggggcagtgttgaagcctactttatc

SEQ ID NO: 463139 - DNA, 56 bp, Artificial
  Synthetic oligonucleotide
tctagccaaactgggtcagtatttgatttctgaccaattcggttactttaagtcga

SEQ ID NO: 463140 - DNA, 60 bp, Artificial
  Synthetic oligonucleotide
tctagccacacctgtgctaggagtcggttctcgcattaccgccttagatcgtactctcga

SEQ ID NO: 463141 - DNA, 60 bp, Artificial
  Synthetic oligonucleotide
tctagccatcataaatgcctcgcagtgtcgccggtgtattctattcggagattcccgcca

SEQ ID NO: 463142 - DNA, 54 bp, Artificial
  Synthetic oligonucleotide
tctagccattctgccacgccactcacaaccagggaaaactatctgggtagagca

SEQ ID NO: 463143 - DNA, 55 bp, Artificial
  Synthetic oligonucleotide
tctagcccaggtggtctttccggtacgagttggtccgcagatgtagaggctgggg

SEQ ID NO: 463144 - DNA, 51 bp, Artificial
  Synthetic oligonucleotide
tctagcccatcactacaatggactatcataggattcttgtagcctttacaa

SEQ ID NO: 463145 - DNA, 52 bp, Artificial
  Synthetic oligonucleotide
tctagccctgatgcacggttacatcattctcgtactcggcccagtcaagaaa

SEQ ID NO: 463146 - DNA, 58 bp, Artificial
  Synthetic oligonucleotide
tctagccgattacatgggtgtaccacataaatctagcgttaatctaaccgaaatgtcg

SEQ ID NO: 463147 - DNA, 60 bp, Artificial
  Synthetic oligonucleotide
tctagcctcaaaccacacaaggcacatgagaaacaccatgccaatgctaagctgttctat

SEQ ID NO: 463148 - DNA, 57 bp, Artificial
  Synthetic oligonucleotide
tctagcgagcatggttacctcttaccaggttatggaacacgtattacccgtcgtcaa

SEQ ID NO: 463149 - DNA, 60 bp, Artificial
  Synthetic oligonucleotide
tctagcgcaggcaatctgccagattataattgcttagtgcggttaatccaacccttagtg

SEQ ID NO: 463150 - DNA, 51 bp, Artificial
  Synthetic oligonucleotide
tctagcgcgacgcgatacatgtacgaaagttcagagtcggatacgtatatg

SEQ ID NO: 463151 - DNA, 50 bp, Artificial
  Synthetic oligonucleotide
tctagcgctgattatgttaaatatcagcaaaccatgaacgccacttggct

SEQ ID NO: 463152 - DNA, 59 bp, Artificial
  Synthetic oligonucleotide
tctagcgtgccaggacgagcccctcgatttgtctgcgtcctcgcagactgaatatgagg

SEQ ID NO: 463153 - DNA, 60 bp, Artificial
  Synthetic oligonucleotide
tctagctggttcatggtacttttgatgctataacctcgtattataggacctcacagttcg

SEQ ID NO: 463154 - DNA, 60 bp, Artificial
  Synthetic oligonucleotide
tctagctgtacccaccacctaccgcttgccagagttggcggtagaagaggctgtgcgtga

SEQ ID NO: 463155 - DNA, 56 bp, Artificial
  Synthetic oligonucleotide
tctagcttatcacccctttacaaattgcgggtcacattgtgtatgcgggttaaaat

SEQ ID NO: 463156 - DNA, 50 bp, Artificial
  Synthetic oligonucleotide
tctagcttctgggggcctgtcgatgcttcccagtacgctaccgctctgcg

SEQ ID NO: 463157 - DNA, 60 bp, Artificial
  Synthetic oligonucleotide
tctaggaaactccaccattacgacacaagaggctgccaactcagtggtggcatatggcga

SEQ ID NO: 463158 - DNA, 54 bp, Artificial
  Synthetic oligonucleotide
tctaggaagatcgagacggacttgttgttaagtcgaataccaaaaagggcgtgg

SEQ ID NO: 463159 - DNA, 58 bp, Artificial
  Synthetic oligonucleotide
tctaggaattctttataactgctgtttggaccaggattgcaaaggaagattgttggta

SEQ ID NO: 463160 - DNA, 60 bp, Artificial
  Synthetic oligonucleotide
tctaggaccagcaactggtttccttgtcagatcaatacttgtgttgtcccatgacctgcc

SEQ ID NO: 463161 - DNA, 60 bp, Artificial
  Synthetic oligonucleotide
tctaggacgtctccgtccttgtcgatgtatgctttgacgtccgatgctgatttagctccc

SEQ ID NO: 463162 - DNA, 60 bp, Artificial
  Synthetic oligonucleotide
tctaggagatgtgtcagtcaatgggactagtacgcacagagttacgccatcggtcttgtt

SEQ ID NO: 463163 - DNA, 60 bp, Artificial
  Synthetic oligonucleotide
tctaggattctggcagaagctatggcaggggcaatagccaacatgcccatgaatatggta

SEQ ID NO: 463164 - DNA, 55 bp, Artificial
  Synthetic oligonucleotide
tctaggcaggcctgtttatggccgtaatccacagggtggggttcgaataagcagg

SEQ ID NO: 463165 - DNA, 52 bp, Artificial
  Synthetic oligonucleotide
tctaggcatactatgccgaatctatggtttctattgttcttgggactagttg

SEQ ID NO: 463166 - DNA, 55 bp, Artificial
  Synthetic oligonucleotide
tctaggcatgatgtctctcatattgggaaggtgatgtgcatcagcgacgttacac

SEQ ID NO: 463167 - DNA, 55 bp, Artificial
  Synthetic oligonucleotide
tctaggcatgttaaggtctgcataattggtacagtatctaaattctctcagggcg

SEQ ID NO: 463168 - DNA, 58 bp, Artificial
  Synthetic oligonucleotide
tctaggccgtgggagtttcactggtcggtgtctatctctaaaggtcactaagcactcc

SEQ ID NO: 463169 - DNA, 55 bp, Artificial
  Synthetic oligonucleotide
tctaggcgaaactacagccgtcgtggacggaacgttaagtcttgtagagctacgc

SEQ ID NO: 463170 - DNA, 59 bp, Artificial
  Synthetic oligonucleotide
tctaggcggtgaaccttggtacgacccaatcgacggtgcgaagtacatcacacctgaga

SEQ ID NO: 463171 - DNA, 60 bp, Artificial
  Synthetic oligonucleotide
tctaggctgtcgtgctcctgaatccactcgccccctccgggacgcggttgcttcagtgcg

SEQ ID NO: 463172 - DNA, 60 bp, Artificial
  Synthetic oligonucleotide
tctagggccagaattgatgcacggattgatttcgaatctggacggattaagaatgaggag

SEQ ID NO: 463173 - DNA, 57 bp, Artificial
  Synthetic oligonucleotide
tctagggcccggattgatgccagaattgacttcgagtccggacggattaagaaagaa

SEQ ID NO: 463174 - DNA, 60 bp, Artificial
  Synthetic oligonucleotide
tctagggcttgaatttgtgaaagtgcatcctctttagttagagagcagtgtgggtatgtg

SEQ ID NO: 463175 - DNA, 60 bp, Artificial
  Synthetic oligonucleotide
tctagggcttggaggcgattatgccgactgcctgacgaccaggcgatctcttttgtccgc

SEQ ID NO: 463176 - DNA, 56 bp, Artificial
  Synthetic oligonucleotide
tctaggggtccggatatccgttatgggacaaacacctcagcctacccaagcgctac

SEQ ID NO: 463177 - DNA, 50 bp, Artificial
  Synthetic oligonucleotide
tctagggtaattggatctttcccatcacggtttgtgtctcttaatggagc

SEQ ID NO: 463178 - DNA, 56 bp, Artificial
  Synthetic oligonucleotide
tctaggtacctcacccccaccgactgctcggggtttgactggtctgtacctatgtg

SEQ ID NO: 463179 - DNA, 51 bp, Artificial
  Synthetic oligonucleotide
tctaggtagagacaaggatgttaatgctggctcgaaaggcagagtagtgcc

SEQ ID NO: 463180 - DNA, 54 bp, Artificial
  Synthetic oligonucleotide
tctaggtatatatgacagagtccttattatcccaactcatgctgaccctggtag

SEQ ID NO: 463181 - DNA, 60 bp, Artificial
  Synthetic oligonucleotide
tctaggtattctttatagcttgagttgggccctggattgcagagggaagatagcggaatg

SEQ ID NO: 463182 - DNA, 60 bp, Artificial
  Synthetic oligonucleotide
tctaggtcaattggtagattctttccctcagatactctgtgcaatcctggcaacaagatt

SEQ ID NO: 463183 - DNA, 60 bp, Artificial
  Synthetic oligonucleotide
tctaggtccctgccgtcttctctatatggagtagccgtgagccctaacctgatgctattc

SEQ ID NO: 463184 - DNA, 58 bp, Artificial
  Synthetic oligonucleotide
tctaggtcttatcacatcacaagtcccacctcagactctgcagggtgatccaacaacc

SEQ ID NO: 463185 - DNA, 55 bp, Artificial
  Synthetic oligonucleotide
tctaggtggcagggatgttgatgctagcaaaaccccatatgtgcttgcaagagca

SEQ ID NO: 463186 - DNA, 60 bp, Artificial
  Synthetic oligonucleotide
tctaggtgttgttggatctctacaacgcaagttgaagcatttgcctcatcatagatgtaa

SEQ ID NO: 463187 - DNA, 60 bp, Artificial
  Synthetic oligonucleotide
tctaggttcctggatatgtcgtccatccaaactaagtcagagtgtgcttcaacaagtgtg

SEQ ID NO: 463188 - DNA, 50 bp, Artificial
  Synthetic oligonucleotide
tctagtaaaattatggtatcagttagaacaggagcccatagtaggagcag

SEQ ID NO: 463189 - DNA, 60 bp, Artificial
  Synthetic oligonucleotide
tctagtaaaggagagatcgagccagaacgtacaagctccacttattatgcatttcttaag

SEQ ID NO: 463190 - DNA, 60 bp, Artificial
  Synthetic oligonucleotide
tctagtacgctggttcctagcctgttgagatctctgtatgggtgtattgcgttttctaat

SEQ ID NO: 463191 - DNA, 60 bp, Artificial
  Synthetic oligonucleotide
tctagtactaccctatgacagattatctgagctttcgggaccatcagccgtagccagatt

SEQ ID NO: 463192 - DNA, 56 bp, Artificial
  Synthetic oligonucleotide
tctagtacttgtatgtgttataaatataacgggatatagaaccgaatcacctacct

SEQ ID NO: 463193 - DNA, 60 bp, Artificial
  Synthetic oligonucleotide
tctagtagatcaagctcgcgctctagtctggcgtctaatccaccaggtgttaaccgagtg

SEQ ID NO: 463194 - DNA, 58 bp, Artificial
  Synthetic oligonucleotide
tctagtatgggcaagcagggagctggaaagattcgcacttaaccctggccttttagaa

SEQ ID NO: 463195 - DNA, 60 bp, Artificial
  Synthetic oligonucleotide
tctagtcagtcgggaagatatcatctccatttactgttcgtagaaggatgtacttccagg

SEQ ID NO: 463196 - DNA, 55 bp, Artificial
  Synthetic oligonucleotide
tctagtccacatgaaaagtggagtggacgtgttccataagccagctgagtcagct

SEQ ID NO: 463197 - DNA, 60 bp, Artificial
  Synthetic oligonucleotide
tctagtcttaatgattcagtggcaatgaggcagacgtttgggaacctgtataagaccttc

SEQ ID NO: 463198 - DNA, 54 bp, Artificial
  Synthetic oligonucleotide
tctagtcttgggctgttcagaaacagtgatatccaattcaaaacaagtgaagtg

SEQ ID NO: 463199 - DNA, 58 bp, Artificial
  Synthetic oligonucleotide
tctagtgaaggagttacccctagtaccactgcggtgcctgatatcgttagtctttcaa

SEQ ID NO: 463200 - DNA, 60 bp, Artificial
  Synthetic oligonucleotide
tctagtgagacagtatgcagagaaggttcgagtttctggaccagtttgtacatcccatct

SEQ ID NO: 463201 - DNA, 60 bp, Artificial
  Synthetic oligonucleotide
tctagtgatcccattgtcccttatggagagttatttgggctcgagcaaggatcatgttcc

SEQ ID NO: 463202 - DNA, 60 bp, Artificial
  Synthetic oligonucleotide
tctagtgattatgtttgagagcactccgagcgggtctcgaacgctcgaagaggtgctcga

SEQ ID NO: 463203 - DNA, 55 bp, Artificial
  Synthetic oligonucleotide
tctagtgcccctcacattatatttgaaagtaggggtggtggcttttctgtagggg

SEQ ID NO: 463204 - DNA, 54 bp, Artificial
  Synthetic oligonucleotide
tctagtgcgcgaccttgtaatgaggaataagttccatccttattatagatcggg

SEQ ID NO: 463205 - DNA, 60 bp, Artificial
  Synthetic oligonucleotide
tctagtgcttgggggcattacctacactgatgtgctacgatacgtcatcctcgtaggggc

SEQ ID NO: 463206 - DNA, 55 bp, Artificial
  Synthetic oligonucleotide
tctagtggacattggcaaagaaatttgttacgtgttgagatccccatccgtcctg

SEQ ID NO: 463207 - DNA, 60 bp, Artificial
  Synthetic oligonucleotide
tctagtggcctcggcaccacatacactggagacaccacatacactagagacaccactgga

SEQ ID NO: 463208 - DNA, 55 bp, Artificial
  Synthetic oligonucleotide
tctagtgtccgagcaattcactgacgaacactccaaacagaagggagcacagttg

SEQ ID NO: 463209 - DNA, 52 bp, Artificial
  Synthetic oligonucleotide
tctagttaagtaacctattagtttaacaactaaccatggataaccggataac

SEQ ID NO: 463210 - DNA, 60 bp, Artificial
  Synthetic oligonucleotide
tctagttatgtgtgctcaggacttgttggcgacacaccaagaaatgacgatagctccagc

SEQ ID NO: 463211 - DNA, 55 bp, Artificial
  Synthetic oligonucleotide
tctagttcacaaaagatagggtatccaccggaagcctttatatgtgcaaccgtcc

SEQ ID NO: 463212 - DNA, 60 bp, Artificial
  Synthetic oligonucleotide
tctagttcaggcagtgcgtcgacggttgtgatcacggtgcaagccttctgtaggccagtg

SEQ ID NO: 463213 - DNA, 57 bp, Artificial
  Synthetic oligonucleotide
tctagttctacgcacatggtccccgctgactgggaaatttcgtatcatttccgggac

SEQ ID NO: 463214 - DNA, 55 bp, Artificial
  Synthetic oligonucleotide
tctagttgcatatttcatatcgatcgccctagcgtagctccccatattatagtgc

SEQ ID NO: 463215 - DNA, 55 bp, Artificial
  Synthetic oligonucleotide
tctagtttggagaaggattgagaactttgctatgccccaaggtaattcgcagcaa

SEQ ID NO: 463216 - DNA, 55 bp, Artificial
  Synthetic oligonucleotide
tctataaactacgaatgggtgtgtaactcaattaggcagagtagctggctcttac

SEQ ID NO: 463217 - DNA, 60 bp, Artificial
  Synthetic oligonucleotide
tctataaatatgttgtatgtctcccgttctgtaatgcaagatgtattctgtttacagacg

SEQ ID NO: 463218 - DNA, 59 bp, Artificial
  Synthetic oligonucleotide
tctataaccaccaggaagcaggaaaatacgagaatcatacggagaatgcgttattgttg

SEQ ID NO: 463219 - DNA, 58 bp, Artificial
  Synthetic oligonucleotide
tctataactggggaaccgatttcaacgccggttcaagcgtgtttgctgatagaccata

SEQ ID NO: 463220 - DNA, 55 bp, Artificial
  Synthetic oligonucleotide
tctataagatgttacttgctctacagactgaatgggctactgtgcccatgaggct

SEQ ID NO: 463221 - DNA, 60 bp, Artificial
  Synthetic oligonucleotide
tctataatcaccaagaagctgctaagtatgaaaatcacactgagaatgctttgttattgt

SEQ ID NO: 463222 - DNA, 58 bp, Artificial
  Synthetic oligonucleotide
tctataatgcggagggtagtaattccactggctctaccctttatcccaatccagacca

SEQ ID NO: 463223 - DNA, 60 bp, Artificial
  Synthetic oligonucleotide
tctatacagccgggactcagcggggggtatcgatgcttggatgttcatgagcattctgcg

SEQ ID NO: 463224 - DNA, 55 bp, Artificial
  Synthetic oligonucleotide
tctatacattggtacaaacgactgcactgagggccctaacgacgtgatcataccg

SEQ ID NO: 463225 - DNA, 55 bp, Artificial
  Synthetic oligonucleotide
tctatacggggaagtgacgttaagggagctcgaggaatcaaacctcggcgttcta

SEQ ID NO: 463226 - DNA, 58 bp, Artificial
  Synthetic oligonucleotide
tctatacggtattattgacgtagcaacgcaggtctacaagacgggtgtagtacgtagc

SEQ ID NO: 463227 - DNA, 55 bp, Artificial
  Synthetic oligonucleotide
tctatactctccctcgggtacccacatcagctccgacaaccggaggttggtcgtg

SEQ ID NO: 463228 - DNA, 55 bp, Artificial
  Synthetic oligonucleotide
tctatacttggtgacgacgagtggtcatcgacgttcgaagccattgacccagtcg

SEQ ID NO: 463229 - DNA, 60 bp, Artificial
  Synthetic oligonucleotide
tctatagaacaggagacataacaggagacataagaaaagcatattgtaaggttaatggaa

SEQ ID NO: 463230 - DNA, 57 bp, Artificial
  Synthetic oligonucleotide
tctatagaagagatgtcaacttatttttgaggattttttcagaagcattccccggaa

SEQ ID NO: 463231 - DNA, 60 bp, Artificial
  Synthetic oligonucleotide
tctatagaagcatcaactggttgaccaaaaagaaaccagacacttatgacttcaatgaag

SEQ ID NO: 463232 - DNA, 60 bp, Artificial
  Synthetic oligonucleotide
tctatagacagcacttggctaatgtcactcctattgaatctattcctcctgtaggtgaac

SEQ ID NO: 463233 - DNA, 57 bp, Artificial
  Synthetic oligonucleotide
tctatagatttgtggcaccgggggaacgtccctccggcatgttcgactcgtctatcc

SEQ ID NO: 463234 - DNA, 50 bp, Artificial
  Synthetic oligonucleotide
tctatagtgcaaaagaccacgggtactgggttcccaaggtcaaagtacag

SEQ ID NO: 463235 - DNA, 60 bp, Artificial
  Synthetic oligonucleotide
tctatataagagagaaaccacacgtagcgcatccttttgtgggtcaccatattcttggga

SEQ ID NO: 463236 - DNA, 60 bp, Artificial
  Synthetic oligonucleotide
tctatatatagacattcatttacacagtttaagtagagagagaatttctaagaagaagaa

SEQ ID NO: 463237 - DNA, 55 bp, Artificial
  Synthetic oligonucleotide
tctatatatgggagatttctactcacagcagtaggagactgtgcctatctagggc

SEQ ID NO: 463238 - DNA, 56 bp, Artificial
  Synthetic oligonucleotide
tctatatcaacagaaaatgctaatgcttgttactcgatttgtttcacgactgtaca

SEQ ID NO: 463239 - DNA, 60 bp, Artificial
  Synthetic oligonucleotide
tctatatccagagaaggtgtcttgacaagagtaatctgatcgtcactagaggtatatgac

SEQ ID NO: 463240 - DNA, 57 bp, Artificial
  Synthetic oligonucleotide
tctatatcggcgggggtgcttacattccacgtaccagagacgccgatcttagggtag

SEQ ID NO: 463241 - DNA, 60 bp, Artificial
  Synthetic oligonucleotide
tctatatcgtatgtatcgctcacgcgatgtaccatatgggtgcgagggaccatgtaaagt

SEQ ID NO: 463242 - DNA, 57 bp, Artificial
  Synthetic oligonucleotide
tctatatgaagagcatgggaactcagcccctttatacttacaaacaggggtgtcctg

SEQ ID NO: 463243 - DNA, 58 bp, Artificial
  Synthetic oligonucleotide
tctatatgaattacacttcctccgtaggaggaagcacagggggagaataccacttctc

SEQ ID NO: 463244 - DNA, 56 bp, Artificial
  Synthetic oligonucleotide
tctatatgagggtgaccctaatagcaaaaggacatggaggaccgtgtaccgggtta

SEQ ID NO: 463245 - DNA, 60 bp, Artificial
  Synthetic oligonucleotide
tctatatgattacgatgattacgcgttgcccagatctactgtcatgctcaatggatctta

SEQ ID NO: 463246 - DNA, 60 bp, Artificial
  Synthetic oligonucleotide
tctatatgcatctccacaactcgagggattttcagctgaatcgaggaaattgcttctcat

SEQ ID NO: 463247 - DNA, 55 bp, Artificial
  Synthetic oligonucleotide
tctatattcaaactcacaatcgactagtataagcacagaccaacctagttcctca

SEQ ID NO: 463248 - DNA, 60 bp, Artificial
  Synthetic oligonucleotide
tctatattgaggtgctgcatttaacccaggggacatgctgggagcagatgtacactccag

SEQ ID NO: 463249 - DNA, 54 bp, Artificial
  Synthetic oligonucleotide
tctatcaaaacctaagggacaaaccggtcagcctacttccacgaatggggtgta

SEQ ID NO: 463250 - DNA, 60 bp, Artificial
  Synthetic oligonucleotide
tctatcaaacgtagatagctagatcagttgctaacagacttagtgtcatgggagcaaaac

SEQ ID NO: 463251 - DNA, 60 bp, Artificial
  Synthetic oligonucleotide
tctatcaacaatagcccttctcattggagtggggaacctaatcttcaatacagtcataca

SEQ ID NO: 463252 - DNA, 60 bp, Artificial
  Synthetic oligonucleotide
tctatcaacggtgattggtcggccgatcaagaacctactggcatctgtcaagccgctcaa

SEQ ID NO: 463253 - DNA, 60 bp, Artificial
  Synthetic oligonucleotide
tctatcaagtgctgctttgactggtgcatttatgtcatttaagaagaaagaggatcccac

SEQ ID NO: 463254 - DNA, 60 bp, Artificial
  Synthetic oligonucleotide
tctatcacattaaaccatcaactggtgcttacggacttaaggcttcaattggatcacgtc

SEQ ID NO: 463255 - DNA, 50 bp, Artificial
  Synthetic oligonucleotide
tctatcagaactcaaacacttatgtgtccgtgggaacatcaacgctaaat

SEQ ID NO: 463256 - DNA, 60 bp, Artificial
  Synthetic oligonucleotide
tctatcagtcgtacttgcggaggactcagtccatgggaatacagcttgaccaaagaatca

SEQ ID NO: 463257 - DNA, 60 bp, Artificial
  Synthetic oligonucleotide
tctatcatcaagaagagaacctacatggaacttgggtacaagacttccacatatgctggc

SEQ ID NO: 463258 - DNA, 60 bp, Artificial
  Synthetic oligonucleotide
tctatcatgatatcatgccttatcatctccagcagggaaattatagagaatgccacatct

SEQ ID NO: 463259 - DNA, 60 bp, Artificial
  Synthetic oligonucleotide
tctatccaaggacaatgcgattaggataggagaagatgcccacatccttgtcacaagaga

SEQ ID NO: 463260 - DNA, 50 bp, Artificial
  Synthetic oligonucleotide
tctatccaatccgcgctgtacgacaagtaccgcatatcatctctccgagt

SEQ ID NO: 463261 - DNA, 53 bp, Artificial
  Synthetic oligonucleotide
tctatccaccactcggaagcgcgcgcggtccccctctacttctaaatctacac

SEQ ID NO: 463262 - DNA, 57 bp, Artificial
  Synthetic oligonucleotide
tctatccacttgtgtcacagtcgatagcatttcattaatggaccccctggttccagg

SEQ ID NO: 463263 - DNA, 53 bp, Artificial
  Synthetic oligonucleotide
tctatccccgatccacgcagcaacagcgggcacagtcgcagtcggtggactgt

SEQ ID NO: 463264 - DNA, 60 bp, Artificial
  Synthetic oligonucleotide
tctatccctcatggtctgattagcttgtctagcgtgtcccaaccgccagccatagcatac

SEQ ID NO: 463265 - DNA, 60 bp, Artificial
  Synthetic oligonucleotide
tctatccctcgcacgttcctcctgcctgtcacttacgttgtccactgggtctcgccgcag

SEQ ID NO: 463266 - DNA, 55 bp, Artificial
  Synthetic oligonucleotide
tctatccgcagtgctgcctcacaattcttatcggttcctctgtctcactcaacgc

SEQ ID NO: 463267 - DNA, 59 bp, Artificial
  Synthetic oligonucleotide
tctatccgtagaagaagcctgtaagctgacgcccccacactcggccagatctaaatttg

SEQ ID NO: 463268 - DNA, 54 bp, Artificial
  Synthetic oligonucleotide
tctatccgtgaaaagggtacgtgttgccccttccttcttcggagaattcacacg

SEQ ID NO: 463269 - DNA, 55 bp, Artificial
  Synthetic oligonucleotide
tctatcgaagttgtgccgataaattcccctgtgagcgttgagagaaataccaacg

SEQ ID NO: 463270 - DNA, 54 bp, Artificial
  Synthetic oligonucleotide
tctatcgccaaccaccccagctagctggcttctcctagaatgggacgcccccta

SEQ ID NO: 463271 - DNA, 55 bp, Artificial
  Synthetic oligonucleotide
tctatcgtctcacagagttgatgcggttctttgcatttgacattatgcagtgctg

SEQ ID NO: 463272 - DNA, 55 bp, Artificial
  Synthetic oligonucleotide
tctatcgtgttcacatgtttggtagtggagatatttgtaactgaggtgacgttgt

SEQ ID NO: 463273 - DNA, 60 bp, Artificial
  Synthetic oligonucleotide
tctatctaaggctgtgctagtgatgacgaattggactaggtctatcgctaaaggggctga

SEQ ID NO: 463274 - DNA, 59 bp, Artificial
  Synthetic oligonucleotide
tctatctaataatagttgccaacaattattagacatagagacgtgacaaccgactacgg

SEQ ID NO: 463275 - DNA, 60 bp, Artificial
  Synthetic oligonucleotide
tctatctacctgagcttgctgctaaatggttcgaggccaataagccgacccgtccgactc

SEQ ID NO: 463276 - DNA, 53 bp, Artificial
  Synthetic oligonucleotide
tctatctcgagtacagcaacagaatcgagagcttcgtcggtagttctttaacc

SEQ ID NO: 463277 - DNA, 53 bp, Artificial
  Synthetic oligonucleotide
tctatctcttgctaagcgtggggccgagtgctggtgtaaggattacgtgttgg

SEQ ID NO: 463278 - DNA, 60 bp, Artificial
  Synthetic oligonucleotide
tctatctgcccttaagttactggtaagcgaggtgcccaatacagaagtgtatcagtctgg

SEQ ID NO: 463279 - DNA, 56 bp, Artificial
  Synthetic oligonucleotide
tctatctggttgccaactacgattgggtgcctacttcaaccacaaaagtatataag

SEQ ID NO: 463280 - DNA, 55 bp, Artificial
  Synthetic oligonucleotide
tctatctgtaatgatagtaaagcatagctatggttggcaatgtggcagctatggc

SEQ ID NO: 463281 - DNA, 52 bp, Artificial
  Synthetic oligonucleotide
tctatcttaaagcacagaggatatcagttatctaagtaagcagtatgcttgg

SEQ ID NO: 463282 - DNA, 50 bp, Artificial
  Synthetic oligonucleotide
tctatcttcctccaagacgctacggggactattcgtattcgatacgataa

SEQ ID NO: 463283 - DNA, 59 bp, Artificial
  Synthetic oligonucleotide
tctatctttttggaacgcccatcgtcaatgaggagattattgtcaggaacaccgaatgg

SEQ ID NO: 463284 - DNA, 52 bp, Artificial
  Synthetic oligonucleotide
tctatgaatgtgcttggacctgcagcacaggcgtggtgcagaaaagcttaag

SEQ ID NO: 463285 - DNA, 57 bp, Artificial
  Synthetic oligonucleotide
tctatgacaccctttttggcaacggaaagatgccagacgggagcggacacgtaccca

SEQ ID NO: 463286 - DNA, 58 bp, Artificial
  Synthetic oligonucleotide
tctatgaccgtactactttcgaggacgcgacgggctggacgtggcaccttaggtgcca

SEQ ID NO: 463287 - DNA, 58 bp, Artificial
  Synthetic oligonucleotide
tctatgacgtccttctctcctccagagttcccacctggtttgtcgaccttctaattga

SEQ ID NO: 463288 - DNA, 60 bp, Artificial
  Synthetic oligonucleotide
tctatgacgtgacgtacgatgatctggttaggatgtcgagtgaagtatttgtgctcaaga

SEQ ID NO: 463289 - DNA, 60 bp, Artificial
  Synthetic oligonucleotide
tctatgactcgctggaagcacctcccgacactccgctgtccgagattccctctccgacag

SEQ ID NO: 463290 - DNA, 59 bp, Artificial
  Synthetic oligonucleotide
tctatgagccttgtaaacatctttgttctaagatcaccaatatatagttccctgttacc

SEQ ID NO: 463291 - DNA, 59 bp, Artificial
  Synthetic oligonucleotide
tctatgataaaagaggtggaatagtatgtagtgctagttacgcctaggatccccggtgc

SEQ ID NO: 463292 - DNA, 54 bp, Artificial
  Synthetic oligonucleotide
tctatgatgacattgagatgctcgctgatgagactatctatgatgatttgcaga

SEQ ID NO: 463293 - DNA, 51 bp, Artificial
  Synthetic oligonucleotide
tctatgatgatggagcacctgaatgtggtataaagtgttggtttgtaaaat

SEQ ID NO: 463294 - DNA, 57 bp, Artificial
  Synthetic oligonucleotide
tctatgcaaaccagccctttcgagagttagtcggtatgaagaaccgcaacgtggaag

SEQ ID NO: 463295 - DNA, 60 bp, Artificial
  Synthetic oligonucleotide
tctatgcaggacgtgtcaacacaagtgtcaaatgtgagtagaaatctgagattgaaagag

SEQ ID NO: 463296 - DNA, 50 bp, Artificial
  Synthetic oligonucleotide
tctatgccaaggtgacaggtggacagtacgccagcaatgaacaggcgata

SEQ ID NO: 463297 - DNA, 60 bp, Artificial
  Synthetic oligonucleotide
tctatgccctcagccaagggacaacaatcagagggaaacattcaaatggaacaatacacg

SEQ ID NO: 463298 - DNA, 52 bp, Artificial
  Synthetic oligonucleotide
tctatgccgtacttagtaagagtattgttagtgattaatatccaccgttttg

SEQ ID NO: 463299 - DNA, 60 bp, Artificial
  Synthetic oligonucleotide
tctatgcctccacggggggcatgaagcagatccccgtgaaatggactgcccccgaggctc

SEQ ID NO: 463300 - DNA, 59 bp, Artificial
  Synthetic oligonucleotide
tctatgctacaatggtccttccacccgaggctctacacaagatgaactccctatacccc

SEQ ID NO: 463301 - DNA, 60 bp, Artificial
  Synthetic oligonucleotide
tctatgctattcctactcatatgtctgatcaaattgtccaatcattaacacctgatgaaa

SEQ ID NO: 463302 - DNA, 57 bp, Artificial
  Synthetic oligonucleotide
tctatgctgcgccatgggattcagacgacgttttcatgttgcattgtgttgcaccgc

SEQ ID NO: 463303 - DNA, 60 bp, Artificial
  Synthetic oligonucleotide
tctatggaccgccggggtgtggcaagagtagatgggccaatgagcagcctgggagtaaat

SEQ ID NO: 463304 - DNA, 55 bp, Artificial
  Synthetic oligonucleotide
tctatggagagcatagtaatatggggaaagactcctaagtttagactacccatcc

SEQ ID NO: 463305 - DNA, 60 bp, Artificial
  Synthetic oligonucleotide
tctatggatatgctccagatggggtacttccactggagactgggagagactacaccgttg

SEQ ID NO: 463306 - DNA, 57 bp, Artificial
  Synthetic oligonucleotide
tctatggatgttttaatgacaggaattccccgattctagacttgggaggaaattatg

SEQ ID NO: 463307 - DNA, 60 bp, Artificial
  Synthetic oligonucleotide
tctatggctatgccccagacggagtactgcctctggagaccgggagagactacaccgttg

SEQ ID NO: 463308 - DNA, 58 bp, Artificial
  Synthetic oligonucleotide
tctatggctttccctgcccccgcattctcactagccaatcttttgaacggcagttacg

SEQ ID NO: 463309 - DNA, 55 bp, Artificial
  Synthetic oligonucleotide
tctatgggagccgggccgcataacctcacatacgagctcacctccgctggtttgc

SEQ ID NO: 463310 - DNA, 60 bp, Artificial
  Synthetic oligonucleotide
tctatgggatcaaagtctaaaaccatgtgttaagttgacaccactatgtgtcactatgca

SEQ ID NO: 463311 - DNA, 50 bp, Artificial
  Synthetic oligonucleotide
tctatgggattctagatacaatgagtcttatgctgctgagattagaaggc

SEQ ID NO: 463312 - DNA, 55 bp, Artificial
  Synthetic oligonucleotide
tctatggggatccagctagaccagaggattatcctcatgtacatgattgagtggg

SEQ ID NO: 463313 - DNA, 60 bp, Artificial
  Synthetic oligonucleotide
tctatggggcaagaaggaatctctagcacagaagcggcaatggtgctagaggactccctg

SEQ ID NO: 463314 - DNA, 60 bp, Artificial
  Synthetic oligonucleotide
tctatggtggaagttcaacaaacagtataggagacatttatgtcgactatactgtaacac

SEQ ID NO: 463315 - DNA, 55 bp, Artificial
  Synthetic oligonucleotide
tctatggtgttcttcattgatgtttccagtccgttgaagtcgaagggtactgcgt

SEQ ID NO: 463316 - DNA, 60 bp, Artificial
  Synthetic oligonucleotide
tctatgtaggtgctcgtgataatggcaaagtttttcgcgcttatcacaagggcgcacaag

SEQ ID NO: 463317 - DNA, 57 bp, Artificial
  Synthetic oligonucleotide
tctatgtatcggtgtatcggagtcttatttataggtactagagttactaccacttta

SEQ ID NO: 463318 - DNA, 60 bp, Artificial
  Synthetic oligonucleotide
tctatgtcacatatatggctcacaacaaatactgtgagcacacggtgtctgtccataact

SEQ ID NO: 463319 - DNA, 58 bp, Artificial
  Synthetic oligonucleotide
tctatgtcatactcctggactggggccttgataaccccttgcagcccggaggaaggaa

SEQ ID NO: 463320 - DNA, 60 bp, Artificial
  Synthetic oligonucleotide
tctatgtccatccacgtcttggcatttgggtcaagctgcaacattgcatctttaagggtc

SEQ ID NO: 463321 - DNA, 59 bp, Artificial
  Synthetic oligonucleotide
tctatgtccgacatatatgctgtcaccggggttatcccgggaggggcttctctatgaat

SEQ ID NO: 463322 - DNA, 59 bp, Artificial
  Synthetic oligonucleotide
tctatgtcgtcggggcggatagaaccagtggccattctcatccacggagggcctggaaa

SEQ ID NO: 463323 - DNA, 60 bp, Artificial
  Synthetic oligonucleotide
tctatgtcgtgcacttcctgggcatggtctacgtgataatataaagcggtgcacttccga

SEQ ID NO: 463324 - DNA, 58 bp, Artificial
  Synthetic oligonucleotide
tctatgtggtcgactatcttgaaatagaggggatttgtcagctcccagataaagacgg

SEQ ID NO: 463325 - DNA, 53 bp, Artificial
  Synthetic oligonucleotide
tctatgtgtatttctactattctcattggtattgcttagtattctctgtcctg

SEQ ID NO: 463326 - DNA, 55 bp, Artificial
  Synthetic oligonucleotide
tctatgttcgctcccaggcgttggaggaatggtgtcggaagggtagggttgggcc

SEQ ID NO: 463327 - DNA, 60 bp, Artificial
  Synthetic oligonucleotide
tctatgttgcatctgatcggaaaagtccatgacgcctgtaacgattcgttttccgtcatt

SEQ ID NO: 463328 - DNA, 56 bp, Artificial
  Synthetic oligonucleotide
tctatgttgcgaattacctcttaaggtctaatgagactctcccaccggagctttcc

SEQ ID NO: 463329 - DNA, 57 bp, Artificial
  Synthetic oligonucleotide
tctattaaacgaccactaagagagaccaagttgatgaaaccgtactcaggaacgcaa

SEQ ID NO: 463330 - DNA, 55 bp, Artificial
  Synthetic oligonucleotide
tctattacggagacgagcatatacaaactcatttctctacaggtagctgggaacg

SEQ ID NO: 463331 - DNA, 50 bp, Artificial
  Synthetic oligonucleotide
tctattagcattggacaggtggaacaacctgtggagttggtttaacataa

SEQ ID NO: 463332 - DNA, 60 bp, Artificial
  Synthetic oligonucleotide
tctattagcccatgtgagacaaacgtgaggttttcacgaaaccatgcagcacgatgcaga

SEQ ID NO: 463333 - DNA, 55 bp, Artificial
  Synthetic oligonucleotide
tctattagttatggatgttacatcatcttctgtgttatccccgtcatgtaaggcc

SEQ ID NO: 463334 - DNA, 60 bp, Artificial
  Synthetic oligonucleotide
tctattagttgtggtcatacccgaacaccaacttgcatctatagagggagcaaacgtgtc

SEQ ID NO: 463335 - DNA, 50 bp, Artificial
  Synthetic oligonucleotide
tctattattacggtaattttgtacgccagttttatctcccttaccccctt

SEQ ID NO: 463336 - DNA, 60 bp, Artificial
  Synthetic oligonucleotide
tctattattgcacaagccatagcacaagcagttggtaatgttggttgttacaatgctgcc

SEQ ID NO: 463337 - DNA, 59 bp, Artificial
  Synthetic oligonucleotide
tctattcagggttctattatcctctactactatcaggtcaaggggttatggttcaatca

SEQ ID NO: 463338 - DNA, 58 bp, Artificial
  Synthetic oligonucleotide
tctattccgaagtagtatgagcacccgcacgttagatcaactctccgtctccggacgg

SEQ ID NO: 463339 - DNA, 55 bp, Artificial
  Synthetic oligonucleotide
tctattctgtggtagtatgatggctactgggaaaattttgatcagttacagccca

SEQ ID NO: 463340 - DNA, 55 bp, Artificial
  Synthetic oligonucleotide
tctattgaggtggataaacttacatgccaaggacgaagtcatgatacagggaggc

SEQ ID NO: 463341 - DNA, 60 bp, Artificial
  Synthetic oligonucleotide
tctattgatacagctgcaagacatggtgtgccagccaaactcgactgattacactggccc

SEQ ID NO: 463342 - DNA, 60 bp, Artificial
  Synthetic oligonucleotide
tctattgcactctggacaaacgcattttgacgctcttagattactgccacagtttgaagc

SEQ ID NO: 463343 - DNA, 50 bp, Artificial
  Synthetic oligonucleotide
tctattggtgctatgtacgcattttatagggggggaataaggctgaagat

SEQ ID NO: 463344 - DNA, 55 bp, Artificial
  Synthetic oligonucleotide
tctattgtgagttaccttaacaagaaacagaacaattttgtccagctggcacgtg

SEQ ID NO: 463345 - DNA, 60 bp, Artificial
  Synthetic oligonucleotide
tctattgtgatagatatgatgcaggggtcagatgacagcagcatgatgattagcttcccc

SEQ ID NO: 463346 - DNA, 57 bp, Artificial
  Synthetic oligonucleotide
tctattgtggacgccgggttgaccatacccggcctcacacgggtgatagatactggt

SEQ ID NO: 463347 - DNA, 53 bp, Artificial
  Synthetic oligonucleotide
tctattgttatactaggtggggattactatttgtggccctatacacatttact

SEQ ID NO: 463348 - DNA, 58 bp, Artificial
  Synthetic oligonucleotide
tctattgttgctggagtcctggagtcccatttatactaaaagcctctaggactccaag

SEQ ID NO: 463349 - DNA, 53 bp, Artificial
  Synthetic oligonucleotide
tctatttgcattttaggtaaagtatggatggacgaaaacatcaagaagcagaa

SEQ ID NO: 463350 - DNA, 58 bp, Artificial
  Synthetic oligonucleotide
tctatttgcgattaatggtggaccatctacctatatattgtgtcggacaggtaggttt

SEQ ID NO: 463351 - DNA, 58 bp, Artificial
  Synthetic oligonucleotide
tctatttgggtattactcccagtcgaagtgcaagggtggtcatacttcaaattatatc

SEQ ID NO: 463352 - DNA, 51 bp, Artificial
  Synthetic oligonucleotide
tctatttgtaaatatcctgattatttacaaatgtctaatgatccatatggc

SEQ ID NO: 463353 - DNA, 53 bp, Artificial
  Synthetic oligonucleotide
tctatttgtgaattgcaatctgtcgtaaataatcaacttagtttgacctccat

SEQ ID NO: 463354 - DNA, 51 bp, Artificial
  Synthetic oligonucleotide
tctattttagggctgttggggctttcgcaccaacccggtccgggtttattc

SEQ ID NO: 463355 - DNA, 58 bp, Artificial
  Synthetic oligonucleotide
tctcaaaagcaagttactgaacttcttttaaattatgcgttaagaattccagtgtgca

SEQ ID NO: 463356 - DNA, 59 bp, Artificial
  Synthetic oligonucleotide
tctcaaaatatgcatttcctataatacccccgcttttgtgtctgtgaggcgcgtcggag

SEQ ID NO: 463357 - DNA, 55 bp, Artificial
  Synthetic oligonucleotide
tctcaaaattctatgagatctgtttctccttttcacagtgatgctctgagaaccg

SEQ ID NO: 463358 - DNA, 53 bp, Artificial
  Synthetic oligonucleotide
tctcaaacaacgtttaaggacacgtcgcagccgacgccagtcccgcacgcccg

SEQ ID NO: 463359 - DNA, 60 bp, Artificial
  Synthetic oligonucleotide
tctcaaacacattggagacaatgtgtatgtagctcagagggtttacaaggtagaggctga

SEQ ID NO: 463360 - DNA, 58 bp, Artificial
  Synthetic oligonucleotide
tctcaaacagaactccacgtccaggtcataggaactggttagtaggctatttgagtag

SEQ ID NO: 463361 - DNA, 55 bp, Artificial
  Synthetic oligonucleotide
tctcaaaccagcggacacggccggcgctgccggatcctgattgcggaacctagaa

SEQ ID NO: 463362 - DNA, 60 bp, Artificial
  Synthetic oligonucleotide
tctcaaactctgagcttcgtgctaaaaactcgcaacgttagaaatgactttgtgcaatcc

SEQ ID NO: 463363 - DNA, 59 bp, Artificial
  Synthetic oligonucleotide
tctcaaactctgagcttcgtgcttaaaaaccacagtgtccgtaaggactttgtgctctc

SEQ ID NO: 463364 - DNA, 59 bp, Artificial
  Synthetic oligonucleotide
tctcaaagaaatacttgcggcacgtcagtacgtaagtatcaactttgagggtgctagtg

SEQ ID NO: 463365 - DNA, 57 bp, Artificial
  Synthetic oligonucleotide
tctcaaagaaatacttgcggcacgtcagtacgtaagtgttaactttgaggaagtgga

SEQ ID NO: 463366 - DNA, 59 bp, Artificial
  Synthetic oligonucleotide
tctcaaagaaatacttgcggcacgtcagtacgtaagtgttaactttgagtgtgtgtgaa

SEQ ID NO: 463367 - DNA, 60 bp, Artificial
  Synthetic oligonucleotide
tctcaaagaaatacttgcggcacgtcagttcgtaagtatcagtcttgagagtgtgcgtga

SEQ ID NO: 463368 - DNA, 60 bp, Artificial
  Synthetic oligonucleotide
tctcaaagacagacttgcggcacacacaaaaggaaactccagtggtctcgcattgacttg

SEQ ID NO: 463369 - DNA, 60 bp, Artificial
  Synthetic oligonucleotide
tctcaaagacatacctgcggcacatacaagtgttaaaggtgttcacaatgtctaagaggg

SEQ ID NO: 463370 - DNA, 55 bp, Artificial
  Synthetic oligonucleotide
tctcaaagacttgcgatttgtcaacaagcaaacgctcttgcttccgcactatgcg

SEQ ID NO: 463371 - DNA, 56 bp, Artificial
  Synthetic oligonucleotide
tctcaaagaggtcaaggttaaagtgcactgtcctgttggaactatgggtggacttt

SEQ ID NO: 463372 - DNA, 60 bp, Artificial
  Synthetic oligonucleotide
tctcaaagcaggtccgtcttgcagcacttggaactggcacgtataacagcatgttaacgt

SEQ ID NO: 463373 - DNA, 60 bp, Artificial
  Synthetic oligonucleotide
tctcaaaggagggactcaaatctccagcatggctttgagcatagtggagcagaattacaa

SEQ ID NO: 463374 - DNA, 55 bp, Artificial
  Synthetic oligonucleotide
tctcaaaggatggaaagccatactcctacacaggaggctcacatgcatctcgagg

SEQ ID NO: 463375 - DNA, 55 bp, Artificial
  Synthetic oligonucleotide
tctcaaagtcaatagatctaatctcgttcaatattcccctagaacccaccagttc

SEQ ID NO: 463376 - DNA, 60 bp, Artificial
  Synthetic oligonucleotide
tctcaaatgcatcgatggatgagtgtgacacgaagtgtcaaacaccccggggggcaataa

SEQ ID NO: 463377 - DNA, 58 bp, Artificial
  Synthetic oligonucleotide
tctcaacaagtattgtttggagatagacttatccaaattcgacaaatctcaaggggaa

SEQ ID NO: 463378 - DNA, 60 bp, Artificial
  Synthetic oligonucleotide
tctcaacatcagatgttaaagacaaaaacctatatagtatacacactccaacaaacacca

SEQ ID NO: 463379 - DNA, 56 bp, Artificial
  Synthetic oligonucleotide
tctcaacattaacaaagaaccggtgagccaatctgacaaattctattcactattta

SEQ ID NO: 463380 - DNA, 51 bp, Artificial
  Synthetic oligonucleotide
tctcaacattatggtgtgggatattccgccgctatcgtttatttatacgtt

SEQ ID NO: 463381 - DNA, 54 bp, Artificial
  Synthetic oligonucleotide
tctcaaccacatacgactaagttcaagttctctctgacaggacccatcggtttt

SEQ ID NO: 463382 - DNA, 60 bp, Artificial
  Synthetic oligonucleotide
tctcaaccagaggatgcaaactactcaagtaatcttactgtccaagcaatgttcatacca

SEQ ID NO: 463383 - DNA, 55 bp, Artificial
  Synthetic oligonucleotide
tctcaaccccgtcctacacgtcagactacaagcaatatgatcagtcgcaggacgc

SEQ ID NO: 463384 - DNA, 52 bp, Artificial
  Synthetic oligonucleotide
tctcaacgacactggtgtgattcataattttgcttaccataatcgtgttaaa

SEQ ID NO: 463385 - DNA, 55 bp, Artificial
  Synthetic oligonucleotide
tctcaactacaccatattcaaggtcaggatgtatgtgggaggagtcgagcacagg

SEQ ID NO: 463386 - DNA, 53 bp, Artificial
  Synthetic oligonucleotide
tctcaactcaatctcggagttttttgacaccttgctcctaaaaggggctcatg

SEQ ID NO: 463387 - DNA, 60 bp, Artificial
  Synthetic oligonucleotide
tctcaactcacccactgcagaggagtgtggttatagcgacagggtgagatcaataacatt

SEQ ID NO: 463388 - DNA, 55 bp, Artificial
  Synthetic oligonucleotide
tctcaactctttctcgggcaattgggagagctatgactacctgcgcttcctgggg

SEQ ID NO: 463389 - DNA, 56 bp, Artificial
  Synthetic oligonucleotide
tctcaacttcccccactaaagtgggggaagttgagagcgtggaacacaagtgtgtg

SEQ ID NO: 463390 - DNA, 57 bp, Artificial
  Synthetic oligonucleotide
tctcaacttctcaaggtctgatgataactccagcaactcatccttagatagccctcc

SEQ ID NO: 463391 - DNA, 58 bp, Artificial
  Synthetic oligonucleotide
tctcaactttctctatgtaattggtgtctggagtcccatatataggtaagacccctaa

SEQ ID NO: 463392 - DNA, 53 bp, Artificial
  Synthetic oligonucleotide
tctcaagaggtttactgctagtctgagtggtggtcaatatgcctctaaagagc

SEQ ID NO: 463393 - DNA, 60 bp, Artificial
  Synthetic oligonucleotide
tctcaagcatgtttccaccatccaccaaacatgcacctgccttcacagcggcagagagac

SEQ ID NO: 463394 - DNA, 60 bp, Artificial
  Synthetic oligonucleotide
tctcaagcatttagaaatatggtttacgttcgatcattatcggcaaatttaaatgatgtg

SEQ ID NO: 463395 - DNA, 60 bp, Artificial
  Synthetic oligonucleotide
tctcaagcgccagcattataaattacccgcaactgcattatcgttttgccatcaaagtat

SEQ ID NO: 463396 - DNA, 60 bp, Artificial
  Synthetic oligonucleotide
tctcaagctcattttaggagtttacgccgagtacaatcacatcggtgcatgcgtaaatca

SEQ ID NO: 463397 - DNA, 60 bp, Artificial
  Synthetic oligonucleotide
tctcaaggagtgtgtagataattacttgtttgaagcaatatttgcctacagattaggtga

SEQ ID NO: 463398 - DNA, 56 bp, Artificial
  Synthetic oligonucleotide
tctcaaggctcaggagactctcacgcagatgcctaacgtgcggttatacgtaggtg

SEQ ID NO: 463399 - DNA, 55 bp, Artificial
  Synthetic oligonucleotide
tctcaagggactgagacgggggtggaaaggcctcaagtacttggggaatctcctg

SEQ ID NO: 463400 - DNA, 60 bp, Artificial
  Synthetic oligonucleotide
tctcaaggggaaatttcaaacagcagcacagcgagcaatgatggaccaggtgagggaaag

SEQ ID NO: 463401 - DNA, 53 bp, Artificial
  Synthetic oligonucleotide
tctcaaggtcaaattaacgggcgaaatcatgcactctgactcagtcagaccag

SEQ ID NO: 463402 - DNA, 60 bp, Artificial
  Synthetic oligonucleotide
tctcaagtgagttaaagtgtttcggcaatactgccatagctaaatgtaacttagatcaca

SEQ ID NO: 463403 - DNA, 54 bp, Artificial
  Synthetic oligonucleotide
tctcaagttaatcatagatcaaattgagaacacatggcactcacatacaggagt

SEQ ID NO: 463404 - DNA, 60 bp, Artificial
  Synthetic oligonucleotide
tctcaatatatagtagagtccattatagaatatatttgccacgtggcggccatccgttat

SEQ ID NO: 463405 - DNA, 60 bp, Artificial
  Synthetic oligonucleotide
tctcaatatggggctactgccccatacacattagccatagtagaatctgtagcggacaat

SEQ ID NO: 463406 - DNA, 60 bp, Artificial
  Synthetic oligonucleotide
tctcaatccactcatgatgaagagccaggaaaacgggcaggtggcaacgccactgacaat

SEQ ID NO: 463407 - DNA, 60 bp, Artificial
  Synthetic oligonucleotide
tctcaatcggcatcctttgctcgttccatcgcctcgggcggacagctaggtgaaatagtc

SEQ ID NO: 463408 - DNA, 60 bp, Artificial
  Synthetic oligonucleotide
tctcaatgacaagcattcaaatgggacagtaaaagacaggagtccattccgcacattaat

SEQ ID NO: 463409 - DNA, 50 bp, Artificial
  Synthetic oligonucleotide
tctcaatgacatgggacgtctaaaccttcttattctatcacctgtttgca

SEQ ID NO: 463410 - DNA, 58 bp, Artificial
  Synthetic oligonucleotide
tctcaatgctactcaatacgggtgcgactccagaaggcactttcaaccccaacaccct

SEQ ID NO: 463411 - DNA, 57 bp, Artificial
  Synthetic oligonucleotide
tctcaatgttgtggtgtactttattacgggactctgcccgcggatggaaattacttc

SEQ ID NO: 463412 - DNA, 60 bp, Artificial
  Synthetic oligonucleotide
tctcacaaaatgggtaacgcgacgtctgtagtacagaacttcaacatacaaggtgatggc

SEQ ID NO: 463413 - DNA, 55 bp, Artificial
  Synthetic oligonucleotide
tctcacaaatcatgcctgccggcctgtgtgtatggactggctgtggcgagtggat

SEQ ID NO: 463414 - DNA, 58 bp, Artificial
  Synthetic oligonucleotide
tctcacaaggttgaggactatcatcattttaacgtctttcttccagtctctccccttg

SEQ ID NO: 463415 - DNA, 55 bp, Artificial
  Synthetic oligonucleotide
tctcacacaggtgacacggctggagttcatatgattgtccactgcccctctagag

SEQ ID NO: 463416 - DNA, 57 bp, Artificial
  Synthetic oligonucleotide
tctcacaccacacaacccactacttgcatgtgagaggcatagtactatagctggtta

SEQ ID NO: 463417 - DNA, 60 bp, Artificial
  Synthetic oligonucleotide
tctcacacgaactgaacagagatactctgacaaaagagatctacattgccctaaccagac

SEQ ID NO: 463418 - DNA, 55 bp, Artificial
  Synthetic oligonucleotide
tctcacacgcaatcttgcattacccttatccgggtaacgccggtcatgtttgcgg

SEQ ID NO: 463419 - DNA, 60 bp, Artificial
  Synthetic oligonucleotide
tctcacactagaacttctatgttagctgatagaggaggttatgtgcctgtgtataagcaa

SEQ ID NO: 463420 - DNA, 55 bp, Artificial
  Synthetic oligonucleotide
tctcacagacaatccccgaccgaatgacccaaatgtaggtaagtgtaacgaccct

SEQ ID NO: 463421 - DNA, 57 bp, Artificial
  Synthetic oligonucleotide
tctcacagagtgaaggtttagtcagagtaagcagactaggtcaacgaggcaccatta

SEQ ID NO: 463422 - DNA, 53 bp, Artificial
  Synthetic oligonucleotide
tctcacaggtgtctaccccgccactgacaacttcgcggccgccgtttctgcct

SEQ ID NO: 463423 - DNA, 60 bp, Artificial
  Synthetic oligonucleotide
tctcaccctctgataagagcgtactttacggatgctgttgacaatgaagttctgtacgaa

SEQ ID NO: 463424 - DNA, 59 bp, Artificial
  Synthetic oligonucleotide
tctcaccgctgccgagtatgaccagtccacttacggttcttcgaccggcccagtctatg

SEQ ID NO: 463425 - DNA, 55 bp, Artificial
  Synthetic oligonucleotide
tctcaccggcaacaaatccactcagttcacggagattcgttccgtgtgtggtttt

SEQ ID NO: 463426 - DNA, 59 bp, Artificial
  Synthetic oligonucleotide
tctcaccgtccgctttgtctacatgtttgtaattccatcaaacatgttttatattccac

SEQ ID NO: 463427 - DNA, 52 bp, Artificial
  Synthetic oligonucleotide
tctcacctactggggtattatcagtgacagtaccgaggaagtctgtgttaag

SEQ ID NO: 463428 - DNA, 58 bp, Artificial
  Synthetic oligonucleotide
tctcacgaactgttgccctgagtcgctctcagtactgacgtgcgtagcggtcggctag

SEQ ID NO: 463429 - DNA, 60 bp, Artificial
  Synthetic oligonucleotide
tctcacgagtgcttggctatcgatactacgcgatactggacctttggcggtaacgctcca

SEQ ID NO: 463430 - DNA, 60 bp, Artificial
  Synthetic oligonucleotide
tctcacgccgttgcctggaggatgttcacagtgggccgtcttatgcactgatgaatcagt

SEQ ID NO: 463431 - DNA, 60 bp, Artificial
  Synthetic oligonucleotide
tctcacggccgcagaatccactcatgtaaaagcgtacacatcatagatgggagttagaga

SEQ ID NO: 463432 - DNA, 60 bp, Artificial
  Synthetic oligonucleotide
tctcacgggttaatgatatacgagcttatcgaaaccaattactcctagaacagtcagcac

SEQ ID NO: 463433 - DNA, 52 bp, Artificial
  Synthetic oligonucleotide
tctcacgtcgacgtttacaaggtggatgttgtagacgtgttgttcgagatag

SEQ ID NO: 463434 - DNA, 58 bp, Artificial
  Synthetic oligonucleotide
tctcactagccaatcttttgaatggtagttacggtgtcgacactcccgaggaagtgga

SEQ ID NO: 463435 - DNA, 60 bp, Artificial
  Synthetic oligonucleotide
tctcactcatcgaccgtccacaaagacgcgtctttgaaccctgttctgaaccactcagta

SEQ ID NO: 463436 - DNA, 58 bp, Artificial
  Synthetic oligonucleotide
tctcactctcgagatcacgcgatgttgtaccgatgggacgcgtaacgcatgctccgcg

SEQ ID NO: 463437 - DNA, 60 bp, Artificial
  Synthetic oligonucleotide
tctcactgacccaagacttgagccacacaaatgggagaagtactgtgttcttgagatagg

SEQ ID NO: 463438 - DNA, 60 bp, Artificial
  Synthetic oligonucleotide
tctcactgcagagcaacagaatatataatgaagggagtatacataaacacagctttactc

SEQ ID NO: 463439 - DNA, 52 bp, Artificial
  Synthetic oligonucleotide
tctcactgtcaacatcgtctgggtgtctgacaattccactgccaagcccacc

SEQ ID NO: 463440 - DNA, 57 bp, Artificial
  Synthetic oligonucleotide
tctcactgtcgctatcgggtggagccattaacgtaactaccgcagttaatttaactg

SEQ ID NO: 463441 - DNA, 55 bp, Artificial
  Synthetic oligonucleotide
tctcagaacgtcacaatcaatccaggaccatttgcacaaacaagctacgcaccag

SEQ ID NO: 463442 - DNA, 60 bp, Artificial
  Synthetic oligonucleotide
tctcagacatgaaggctatgcatgagacactcttcgagcatatcaaggcagcaatgccta

SEQ ID NO: 463443 - DNA, 57 bp, Artificial
  Synthetic oligonucleotide
tctcagacgaaaaggcaacgaacccgatcgtgccttcctttgacatgaacaacgagg

SEQ ID NO: 463444 - DNA, 57 bp, Artificial
  Synthetic oligonucleotide
tctcagacgacgtagtatacgaagtcgtgtgtaggtaagggtatttatagaagcgcg

SEQ ID NO: 463445 - DNA, 60 bp, Artificial
  Synthetic oligonucleotide
tctcagacgcaattggctcgagttattttagactggctatacacacctcgaccccaccag

SEQ ID NO: 463446 - DNA, 51 bp, Artificial
  Synthetic oligonucleotide
tctcagacgggatcgtataagtgaacttgagtttgtccaagtgatctgtct

SEQ ID NO: 463447 - DNA, 58 bp, Artificial
  Synthetic oligonucleotide
tctcagaggatacgaaaatatcaggttatcaacccacaacgttatcaacgcagaaacg

SEQ ID NO: 463448 - DNA, 55 bp, Artificial
  Synthetic oligonucleotide
tctcagattttaaggcagggacacctatccccggggtcatttacgaaccatctta

SEQ ID NO: 463449 - DNA, 60 bp, Artificial
  Synthetic oligonucleotide
tctcagcaatgtcaacgaccgaccctgaggcatacttcaaagactgtgtgttcacatact

SEQ ID NO: 463450 - DNA, 60 bp, Artificial
  Synthetic oligonucleotide
tctcagccaatggcgagccgactgtaaagttatatacatctgttgagaatgcgcagcagg

SEQ ID NO: 463451 - DNA, 60 bp, Artificial
  Synthetic oligonucleotide
tctcagccatgcatcgaggggtgcaatccgtatggccaacaactggcgtatacgtgaagt

SEQ ID NO: 463452 - DNA, 55 bp, Artificial
  Synthetic oligonucleotide
tctcagccatgtacaccggctgggttgggaacatggaggttcagctggtcctcgc

SEQ ID NO: 463453 - DNA, 59 bp, Artificial
  Synthetic oligonucleotide
tctcagccccactgggaaaatcatagccgttgaatcgtaacacgcgttacatatccaat

SEQ ID NO: 463454 - DNA, 55 bp, Artificial
  Synthetic oligonucleotide
tctcagcctacgtggcggggatcttgggcctgggtgaggtatactcgggtgtcct

SEQ ID NO: 463455 - DNA, 55 bp, Artificial
  Synthetic oligonucleotide
tctcagcgcaacgcgtcgctggcgtattcagataagaacggaagcgttcaccacg

SEQ ID NO: 463456 - DNA, 60 bp, Artificial
  Synthetic oligonucleotide
tctcagctaggctaggcaatgagatcttgcttggcccggctgacactgaggtgtcggggg

SEQ ID NO: 463457 - DNA, 58 bp, Artificial
  Synthetic oligonucleotide
tctcagctttcaacaacttctcgcaaccaaccactgtttaattgcaattcccaaatct

SEQ ID NO: 463458 - DNA, 60 bp, Artificial
  Synthetic oligonucleotide
tctcaggacgtattggacgtaattgccaactcgacttctgaatttatgacatcgcgggac

SEQ ID NO: 463459 - DNA, 51 bp, Artificial
  Synthetic oligonucleotide
tctcaggattactccagtcgcatgaattggcttagtgccggcccccacatg

SEQ ID NO: 463460 - DNA, 54 bp, Artificial
  Synthetic oligonucleotide
tctcaggcctttgcgatgtattatgacctgagtagtctaagaagagtgtgtatg

SEQ ID NO: 463461 - DNA, 55 bp, Artificial
  Synthetic oligonucleotide
tctcagtagggctctctacttacgtagtaggctctcagcttccctgcgaacctga

SEQ ID NO: 463462 - DNA, 55 bp, Artificial
  Synthetic oligonucleotide
tctcagtatgctcttaggttactcagtaaaaggcctacagaaacagactcagagc

SEQ ID NO: 463463 - DNA, 60 bp, Artificial
  Synthetic oligonucleotide
tctcagtattcctcgtcagtcggagattatgtcaatggttcgaaaaccaacatttctgat

SEQ ID NO: 463464 - DNA, 60 bp, Artificial
  Synthetic oligonucleotide
tctcagtcgaggatccgttaacgcaatctactgtgtgccttagtggaagtgaacattcgt

SEQ ID NO: 463465 - DNA, 60 bp, Artificial
  Synthetic oligonucleotide
tctcagttgatctgtttcataatcgattgtattttcgagaagcgtgtacaaatacgcggg

SEQ ID NO: 463466 - DNA, 60 bp, Artificial
  Synthetic oligonucleotide
tctcagttgcgtgaactgtctggtgaagtcactaggctacaaatggagttgagtcgagct

SEQ ID NO: 463467 - DNA, 60 bp, Artificial
  Synthetic oligonucleotide
tctcagtttgatattggacagtataaaaacatgatgaatgttataacaacagtgtactat

SEQ ID NO: 463468 - DNA, 60 bp, Artificial
  Synthetic oligonucleotide
tctcataagggaatggtgacaaatgaaagagaagtgtcttttcagggaggtcacattgaa

SEQ ID NO: 463469 - DNA, 57 bp, Artificial
  Synthetic oligonucleotide
tctcatacgatacctagttggtaaagttttaaccttatcagaatctacatccttgac

SEQ ID NO: 463470 - DNA, 60 bp, Artificial
  Synthetic oligonucleotide
tctcatacgtgggctaccaagccttgtccaagaggcacatacccatggttacagacatct

SEQ ID NO: 463471 - DNA, 60 bp, Artificial
  Synthetic oligonucleotide
tctcatactactcgtatcccgcaagccacactagcaatcgatacgtccttctcgagtatt

SEQ ID NO: 463472 - DNA, 60 bp, Artificial
  Synthetic oligonucleotide
tctcatatccaccccattgggcaccccaccgacagtgagtaacagtgatttcatatgtgt

SEQ ID NO: 463473 - DNA, 60 bp, Artificial
  Synthetic oligonucleotide
tctcatatcgttaagagtggatttctgccgatatggagactgactggagatgagagtcta

SEQ ID NO: 463474 - DNA, 57 bp, Artificial
  Synthetic oligonucleotide
tctcatatggagggtacacaaacaagcgaatggaatttggtaccatatctgtgacat

SEQ ID NO: 463475 - DNA, 60 bp, Artificial
  Synthetic oligonucleotide
tctcatatgtccttgagttcgttgagaagcaagctcaaataggtagtgtgagggtgaacg

SEQ ID NO: 463476 - DNA, 55 bp, Artificial
  Synthetic oligonucleotide
tctcatatgtgcaatgatcccgagtctcgtttacttcaatcgactgagtgggagc

SEQ ID NO: 463477 - DNA, 56 bp, Artificial
  Synthetic oligonucleotide
tctcatattacccaaaatgggaccgagcccacttcattaacgacccggacgtcatc

SEQ ID NO: 463478 - DNA, 53 bp, Artificial
  Synthetic oligonucleotide
tctcatcaatggttacagaaacaagcgcgacaagactcatcccacggagcact

SEQ ID NO: 463479 - DNA, 60 bp, Artificial
  Synthetic oligonucleotide
tctcatcagaccaaacgaaaatccagcgcataaaagtcaactagtgtggatggcatgcca

SEQ ID NO: 463480 - DNA, 57 bp, Artificial
  Synthetic oligonucleotide
tctcatcagtgggtactcccggaggcggatcccgtttagggagctcaacacttactc

SEQ ID NO: 463481 - DNA, 60 bp, Artificial
  Synthetic oligonucleotide
tctcatcatgtggtttcctataacagaggatataattacctgtgtctggttggtacaatg

SEQ ID NO: 463482 - DNA, 55 bp, Artificial
  Synthetic oligonucleotide
tctcatcggctgcgtctaccaggccaagagagagtgctttgacatgaggaccgag

SEQ ID NO: 463483 - DNA, 59 bp, Artificial
  Synthetic oligonucleotide
tctcatctgacagacctaagctaagttggtagttatattactctaaactacctaagtca

SEQ ID NO: 463484 - DNA, 60 bp, Artificial
  Synthetic oligonucleotide
tctcatctgggagagtcttccaagacaagtctatgaatccagctgtagattgagtttcac

SEQ ID NO: 463485 - DNA, 60 bp, Artificial
  Synthetic oligonucleotide
tctcatcttcctggcacgatctgcactcatcctgagaggatcagtggcccataaatcctg

SEQ ID NO: 463486 - DNA, 60 bp, Artificial
  Synthetic oligonucleotide
tctcatctttcttgcacgatctgctctcatcctgaggggatcagtggctcataagtcctg

SEQ ID NO: 463487 - DNA, 60 bp, Artificial
  Synthetic oligonucleotide
tctcatgacaggaatgtttccccatgcagatctatcaaggcctaataaatccataagctc

SEQ ID NO: 463488 - DNA, 60 bp, Artificial
  Synthetic oligonucleotide
tctcatgacgtgcactccatggatgtagacggtagtgtaaaacaaatggttgaacgtgag

SEQ ID NO: 463489 - DNA, 60 bp, Artificial
  Synthetic oligonucleotide
tctcatgaggtgtgaagccaaagattggacagggtgtgaagagccgcgtgtgctcacttt

SEQ ID NO: 463490 - DNA, 53 bp, Artificial
  Synthetic oligonucleotide
tctcatgatctcgcctatcagtcctatctcgatgctggtgtaaacccgtactt

SEQ ID NO: 463491 - DNA, 60 bp, Artificial
  Synthetic oligonucleotide
tctcatgcacgacgccgtcgttctgctccttggccccgtcaagaagtatcaacgcgtctt

SEQ ID NO: 463492 - DNA, 58 bp, Artificial
  Synthetic oligonucleotide
tctcatgctatcatggggtttgcgtggggaaattttttcatcacggaagttgacgtct

SEQ ID NO: 463493 - DNA, 55 bp, Artificial
  Synthetic oligonucleotide
tctcatgctcccacttggaatgcagaactttcttcttgactcaaggggccctgct

SEQ ID NO: 463494 - DNA, 60 bp, Artificial
  Synthetic oligonucleotide
tctcatgcttgtagagcgcccaattgtggattttgtagcccatgtttcttctggttggac

SEQ ID NO: 463495 - DNA, 56 bp, Artificial
  Synthetic oligonucleotide
tctcatgggatgccgcttggaaggttaaatttgagaggtaaccatttttcagtggt

SEQ ID NO: 463496 - DNA, 56 bp, Artificial
  Synthetic oligonucleotide
tctcatggtcgggaatgtttaatcccttctcggggagacccactaaggagcttcaa

SEQ ID NO: 463497 - DNA, 60 bp, Artificial
  Synthetic oligonucleotide
tctcatgtacatgtcccactgttcaagcctccaagctgtgccttgggtggctttggggca

SEQ ID NO: 463498 - DNA, 60 bp, Artificial
  Synthetic oligonucleotide
tctcatgtacttggttacatggaaagatcaaggcccgattcaatggagcaaaaagtgcaa

SEQ ID NO: 463499 - DNA, 60 bp, Artificial
  Synthetic oligonucleotide
tctcatgtcgggaaggtgatgtgtatatccgatgtcacacgtggtaatggtattacacat

SEQ ID NO: 463500 - DNA, 60 bp, Artificial
  Synthetic oligonucleotide
tctcatgtgtcatgatattctcaagcgagtcttcaatcactgtcgtgactgtgaccattt

SEQ ID NO: 463501 - DNA, 58 bp, Artificial
  Synthetic oligonucleotide
tctcatgttcgcccttagaatgtagaaccttttttctcacacagggctcattacttaa

SEQ ID NO: 463502 - DNA, 55 bp, Artificial
  Synthetic oligonucleotide
tctcatgttcgcctcgacacacggatccgccgcagtccgaatgggaggctcacgg

SEQ ID NO: 463503 - DNA, 60 bp, Artificial
  Synthetic oligonucleotide
tctcatgttgttaatggagtgttcgtgtttagcttaatcatggacacaaagccttattta

SEQ ID NO: 463504 - DNA, 60 bp, Artificial
  Synthetic oligonucleotide
tctcattagagaaacatcaggagtgatattggcattggatcctccttgggtgattccggt

SEQ ID NO: 463505 - DNA, 60 bp, Artificial
  Synthetic oligonucleotide
tctcattaggagtgagtgacttaagaaatcaaactggcggccactcaacagttgtgaatc

SEQ ID NO: 463506 - DNA, 50 bp, Artificial
  Synthetic oligonucleotide
tctcattcaaccgtggctttagacgattataacaatcgagcttatcgact

SEQ ID NO: 463507 - DNA, 60 bp, Artificial
  Synthetic oligonucleotide
tctcattcaggagtatgttctaatggattattgatgactcaaactttaactataccaaac

SEQ ID NO: 463508 - DNA, 60 bp, Artificial
  Synthetic oligonucleotide
tctcattgatgcctgatgtggcccattcattagccgttgagttatgtgtgccaggtttgc

SEQ ID NO: 463509 - DNA, 60 bp, Artificial
  Synthetic oligonucleotide
tctcattgattagagctaacggttcattcttaggagtcatgcgtaaccgtcataacattg

SEQ ID NO: 463510 - DNA, 60 bp, Artificial
  Synthetic oligonucleotide
tctcattgcagagccacagaatacataatgaagggagtatacatcaatactgctttgctt

SEQ ID NO: 463511 - DNA, 60 bp, Artificial
  Synthetic oligonucleotide
tctcattggctgattacgttgagatcgacaactgggcctctaccaactttggaggagatg

SEQ ID NO: 463512 - DNA, 52 bp, Artificial
  Synthetic oligonucleotide
tctcattgtatgcgttttaatctgatcacactcatcccaggaagtgtgtggt

SEQ ID NO: 463513 - DNA, 56 bp, Artificial
  Synthetic oligonucleotide
tctcattgttcaggcacttagggacaacttggaacctgggaccttcgatcttgggg

SEQ ID NO: 463514 - DNA, 60 bp, Artificial
  Synthetic oligonucleotide
tctcatttatactaggagcctctatagaactctcaatctggttcgcacacgtggcggcca

SEQ ID NO: 463515 - DNA, 60 bp, Artificial
  Synthetic oligonucleotide
tctcatttatatctctgataccatcgaatgacgcttatcagactccaattcagtcctcag

SEQ ID NO: 463516 - DNA, 57 bp, Artificial
  Synthetic oligonucleotide
tctcatttccaccttcactaatgctatctgatagtcctcaaacgggacttttagcgt

SEQ ID NO: 463517 - DNA, 60 bp, Artificial
  Synthetic oligonucleotide
tctccaaaactgctttgggcaagaatcaagatgatgagtgaaagacagcttctcaaggag

SEQ ID NO: 463518 - DNA, 60 bp, Artificial
  Synthetic oligonucleotide
tctccaaaagcgcctgcctacactgcgaatccgtctccgttccaacctcctcagatgcaa

SEQ ID NO: 463519 - DNA, 58 bp, Artificial
  Synthetic oligonucleotide
tctccaaacaaaggtctttcttgacttccaggagaagccaaccaacatctgtgacagt

SEQ ID NO: 463520 - DNA, 55 bp, Artificial
  Synthetic oligonucleotide
tctccaaaccattgcacggtaaggtcttaaccttcactcagtccgacaaggaagc

SEQ ID NO: 463521 - DNA, 58 bp, Artificial
  Synthetic oligonucleotide
tctccaaacctacgccctcttgacagcctcttacaggcctcccgtgtcctacacgcta

SEQ ID NO: 463522 - DNA, 60 bp, Artificial
  Synthetic oligonucleotide
tctccaaatatagaagcttgcggttacagtgatagagtgatgcagcttactctaggaaac

SEQ ID NO: 463523 - DNA, 57 bp, Artificial
  Synthetic oligonucleotide
tctccaacacttttggtgtagacgtctcgcctagatcgtttgagaatgggggctttc

SEQ ID NO: 463524 - DNA, 59 bp, Artificial
  Synthetic oligonucleotide
tctccaaccaagagccacttaagttgtaagtgcttaatgaaaggatgattgaagaaaga

SEQ ID NO: 463525 - DNA, 52 bp, Artificial
  Synthetic oligonucleotide
tctccaagccgatccctcaaatcagcagtcaggattgccacagtttactcat

SEQ ID NO: 463526 - DNA, 58 bp, Artificial
  Synthetic oligonucleotide
tctccaatgtcaatattggtggctctagttgacataaatggaacgtttataactaatg

SEQ ID NO: 463527 - DNA, 55 bp, Artificial
  Synthetic oligonucleotide
tctccaattagtaatctattgagagttgctgcctggaagaagggttgtctgatgg

SEQ ID NO: 463528 - DNA, 50 bp, Artificial
  Synthetic oligonucleotide
tctccacaacggtcccagtcaggatgcgattgtgcgagaccttccgagcc

SEQ ID NO: 463529 - DNA, 60 bp, Artificial
  Synthetic oligonucleotide
tctccacaattactgatcctgttgcgtttatgggtacctgttgcctatattctatgacgc

SEQ ID NO: 463530 - DNA, 55 bp, Artificial
  Synthetic oligonucleotide
tctccacagcggcctgggagcccttggagctaggtaaagcggcctgggagccctt

SEQ ID NO: 463531 - DNA, 60 bp, Artificial
  Synthetic oligonucleotide
tctccacagtatcgcacactactgttcccctgtctacaagctttgatgtccctgttttta

SEQ ID NO: 463532 - DNA, 60 bp, Artificial
  Synthetic oligonucleotide
tctccacatcccagaagtctgcctgaaatgggagttgatggacgaagactatcaggggag

SEQ ID NO: 463533 - DNA, 58 bp, Artificial
  Synthetic oligonucleotide
tctccacattacgtaggatcctgcccgtggggatgcccaggatttctttggacctatc

SEQ ID NO: 463534 - DNA, 59 bp, Artificial
  Synthetic oligonucleotide
tctccaccacattgtctcctccattgacgattggggaccctgtactttcgacggagatg

SEQ ID NO: 463535 - DNA, 51 bp, Artificial
  Synthetic oligonucleotide
tctccaccatgtcttcttgtctaaactctcctattcgagaatccttgtaca

SEQ ID NO: 463536 - DNA, 58 bp, Artificial
  Synthetic oligonucleotide
tctccactacccttctctctgtaatggctgcgattaagtctgtcttttggtgctttac

SEQ ID NO: 463537 - DNA, 58 bp, Artificial
  Synthetic oligonucleotide
tctccacttcatgtttactgggcctaccgacgcgaaagctcggtacatggtggcgtac

SEQ ID NO: 463538 - DNA, 60 bp, Artificial
  Synthetic oligonucleotide
tctccagatctcactatgcctgagatgccccttgaccactttccaactaagtccgaaata

SEQ ID NO: 463539 - DNA, 55 bp, Artificial
  Synthetic oligonucleotide
tctccagcctgcacctcagtatacgaggaaactccaactacaaggcagtgtcttg

SEQ ID NO: 463540 - DNA, 58 bp, Artificial
  Synthetic oligonucleotide
tctccaggggattgtggtggcatacttagatgtcaccacggggtgatagggattatta

SEQ ID NO: 463541 - DNA, 60 bp, Artificial
  Synthetic oligonucleotide
tctccagggtctagaatacttgtgtccaatctatgaagttgtctatatggatgtactgcg

SEQ ID NO: 463542 - DNA, 58 bp, Artificial
  Synthetic oligonucleotide
tctccagggtctattactatgtaatacaggggctgccagaaaccttaatgagcttaaa

SEQ ID NO: 463543 - DNA, 58 bp, Artificial
  Synthetic oligonucleotide
tctccagtacgaccttcgcaaaacaccgacccttgtctcaggcgatgactcctactta

SEQ ID NO: 463544 - DNA, 55 bp, Artificial
  Synthetic oligonucleotide
tctccagtagcacgacgacacgtactttttgcttcactaatcgatcgaagaactt

SEQ ID NO: 463545 - DNA, 50 bp, Artificial
  Synthetic oligonucleotide
tctccagtcccggaaggaatgaactgggtttacaaactccgtaggacctt

SEQ ID NO: 463546 - DNA, 55 bp, Artificial
  Synthetic oligonucleotide
tctccatgagatttcaggttttgcgatttctgaacttggtggtctcctaggtatc

SEQ ID NO: 463547 - DNA, 52 bp, Artificial
  Synthetic oligonucleotide
tctccatgcgggttgagtaccaatacggttgcctccccgccaacactgtccc

SEQ ID NO: 463548 - DNA, 50 bp, Artificial
  Synthetic oligonucleotide
tctccatggcaacagccttggacaccaaaacgtggctcgcacacattttg

SEQ ID NO: 463549 - DNA, 60 bp, Artificial
  Synthetic oligonucleotide
tctccatgtatgttttaacatctgagcagcttttagctcgctgaatgttcggatggtaat

SEQ ID NO: 463550 - DNA, 54 bp, Artificial
  Synthetic oligonucleotide
tctccatgtgtcccctgcacacactgaagacttcacagactgctcccatcaacc

SEQ ID NO: 463551 - DNA, 58 bp, Artificial
  Synthetic oligonucleotide
tctccattattcttaaaatatgttgcgaattaatccctgacaagggaacacacaccag

SEQ ID NO: 463552 - DNA, 54 bp, Artificial
  Synthetic oligonucleotide
tctcccaactccggcacgtaaagcggcacgggttccgttgaggcctcgtaacga

SEQ ID NO: 463553 - DNA, 60 bp, Artificial
  Synthetic oligonucleotide
tctcccaagcgaaagctttaagagatggccatacgaaagtatgacttatgcagaatttat

SEQ ID NO: 463554 - DNA, 55 bp, Artificial
  Synthetic oligonucleotide
tctcccaatatattggtacgggagtcagcagcgacagttttgttaaacttcgagg

SEQ ID NO: 463555 - DNA, 60 bp, Artificial
  Synthetic oligonucleotide
tctcccaattagacggggtgtctagcagcggtacgacagtaatgagtcatgcctattggt

SEQ ID NO: 463556 - DNA, 50 bp, Artificial
  Synthetic oligonucleotide
tctcccacaccgtagtgatccccaccgtaggcgaggttgtccgttgagga

SEQ ID NO: 463557 - DNA, 55 bp, Artificial
  Synthetic oligonucleotide
tctcccacagaagtggtaaccgatgtgccatacgcctctatgtatccaagcgttg

SEQ ID NO: 463558 - DNA, 50 bp, Artificial
  Synthetic oligonucleotide
tctcccacatgctactacctaatcagtacttcaagttgctcaagcagttc

SEQ ID NO: 463559 - DNA, 57 bp, Artificial
  Synthetic oligonucleotide
tctcccacccgataagagaaccaaccaaaaccaaattgcaaatcatttctgaacatg

SEQ ID NO: 463560 - DNA, 59 bp, Artificial
  Synthetic oligonucleotide
tctcccagaatctcacttgagattctggtccctaccaagtatgcgaagctgtttaccct

SEQ ID NO: 463561 - DNA, 55 bp, Artificial
  Synthetic oligonucleotide
tctcccagagcaaaatcagaataccattgacacaaaatacccgggaatcaggtgc

SEQ ID NO: 463562 - DNA, 60 bp, Artificial
  Synthetic oligonucleotide
tctcccagataaaggcgccattcctccattgaagagcaccaatgtcttcccctgtgcgta

SEQ ID NO: 463563 - DNA, 55 bp, Artificial
  Synthetic oligonucleotide
tctcccagcatctggctaacgccgccactactgctttcgagcggtcgcgcggtaa

SEQ ID NO: 463564 - DNA, 60 bp, Artificial
  Synthetic oligonucleotide
tctcccatgcaagctactatctgagccatctcccacgtctttgactaaaggcccatccac

SEQ ID NO: 463565 - DNA, 50 bp, Artificial
  Synthetic oligonucleotide
tctcccatggacgctctcggacacggggtaatgacaccatccggcctgaa

SEQ ID NO: 463566 - DNA, 55 bp, Artificial
  Synthetic oligonucleotide
tctcccatgtcggcaaggtaatatgcgtgtccgacgttacccgtggtaacggtat

SEQ ID NO: 463567 - DNA, 55 bp, Artificial
  Synthetic oligonucleotide
tctcccatgtgtttagtctcaaagcaaaatcgctttaggtcatcaaagcaacaag

SEQ ID NO: 463568 - DNA, 58 bp, Artificial
  Synthetic oligonucleotide
tctccccacgaactctcacgggtggcagcgactctcagaaaacttggagcgcctcccc

SEQ ID NO: 463569 - DNA, 58 bp, Artificial
  Synthetic oligonucleotide
tctccccctcaatgttctctcaaattctagggttccctctttgataaagtctatgatg

SEQ ID NO: 463570 - DNA, 53 bp, Artificial
  Synthetic oligonucleotide
tctccccgaatcgcatcccccctccgaatagcccataatcaggcatccgctct

SEQ ID NO: 463571 - DNA, 51 bp, Artificial
  Synthetic oligonucleotide
tctccccggtgatcttgcatagactgttcccacggttgaaagcgagtgatc

SEQ ID NO: 463572 - DNA, 52 bp, Artificial
  Synthetic oligonucleotide
tctcccgacctatgttgtgccaccgggtgattatactttaacacctctgtaa

SEQ ID NO: 463573 - DNA, 55 bp, Artificial
  Synthetic oligonucleotide
tctcccgacgcgtgcggataaggaggaggggcccctagagcgtcgtcagacgcta

SEQ ID NO: 463574 - DNA, 55 bp, Artificial
  Synthetic oligonucleotide
tctcccggaattatgcccgagccctctaagattagtagacggccagacttgtgac

SEQ ID NO: 463575 - DNA, 56 bp, Artificial
  Synthetic oligonucleotide
tctcccggggtactgagggtcaagcgggattacgagggaaccctagagcagctgac

SEQ ID NO: 463576 - DNA, 58 bp, Artificial
  Synthetic oligonucleotide
tctcccgtctccggagaatttgcgaaaccgcttccgagaatggcttaaatgacatctc

SEQ ID NO: 463577 - DNA, 60 bp, Artificial
  Synthetic oligonucleotide
tctccctctcaggaggtgaccaattatccccaagttctcatttaccatatccaatgccac

SEQ ID NO: 463578 - DNA, 55 bp, Artificial
  Synthetic oligonucleotide
tctccctcttgagggcactactaatccgaatggttatgccaattgggatatagac

SEQ ID NO: 463579 - DNA, 55 bp, Artificial
  Synthetic oligonucleotide
tctccctgcccctcccgcccacctgccagccgaagctactgctgctgaagcagtg

SEQ ID NO: 463580 - DNA, 59 bp, Artificial
  Synthetic oligonucleotide
tctccctggaggcgtggaatctattgcggaaattagccctgtgcccgatgttgcgtccg

SEQ ID NO: 463581 - DNA, 52 bp, Artificial
  Synthetic oligonucleotide
tctcccttcacttacggcccgcgttacgttcaggacgggaacttcgtcaacg

SEQ ID NO: 463582 - DNA, 60 bp, Artificial
  Synthetic oligonucleotide
tctccctttgacctgtgatctagacccgatgtaaggccacccatcaccagatagacacaa

SEQ ID NO: 463583 - DNA, 51 bp, Artificial
  Synthetic oligonucleotide
tctccctttgttggggtgatgatatagtaagtgtacttttcgcgccacgct

SEQ ID NO: 463584 - DNA, 54 bp, Artificial
  Synthetic oligonucleotide
tctccgaagagaccagcagcatagacatgcctactcaacaagtcggagtcctca

SEQ ID NO: 463585 - DNA, 55 bp, Artificial
  Synthetic oligonucleotide
tctccgacagatgcccaatctgcaagtatcctctgccaacaaaactgcagatcaa

SEQ ID NO: 463586 - DNA, 58 bp, Artificial
  Synthetic oligonucleotide
tctccgaccggcgaaggctggaaggacatgctgctgggggcaacaggtggacctcccc

SEQ ID NO: 463587 - DNA, 60 bp, Artificial
  Synthetic oligonucleotide
tctccgagagtccaccgatacatcagatgtagccgctaaggttgctggtactatcaagca

SEQ ID NO: 463588 - DNA, 60 bp, Artificial
  Synthetic oligonucleotide
tctccgagtacaaaccagtgtggatgtccatgacttatgacgttgcagtcttgaagctag

SEQ ID NO: 463589 - DNA, 55 bp, Artificial
  Synthetic oligonucleotide
tctccgattcgggcacttccggtcaccaatttccgacacgcgcggcggtgtgtac

SEQ ID NO: 463590 - DNA, 56 bp, Artificial
  Synthetic oligonucleotide
tctccgcaattttcctattggtgatcactagggggtaggctatagtattaccctac

SEQ ID NO: 463591 - DNA, 59 bp, Artificial
  Synthetic oligonucleotide
tctccgcactcgggggaccccagactgtacaggcgttgtccgtgcttctctcctatgta

SEQ ID NO: 463592 - DNA, 51 bp, Artificial
  Synthetic oligonucleotide
tctccgcattacaaacagtggttagctcgggggatttggtggctccaatac

SEQ ID NO: 463593 - DNA, 50 bp, Artificial
  Synthetic oligonucleotide
tctccgcattatatgcggcatattaccaccaccaaatagacgggggtaat

SEQ ID NO: 463594 - DNA, 58 bp, Artificial
  Synthetic oligonucleotide
tctccgccaggacattaaaacatgtcgtggagaccgccgagccaaaatttactgcaaa

SEQ ID NO: 463595 - DNA, 60 bp, Artificial
  Synthetic oligonucleotide
tctccgccaggacattaaaacatgtcgtggagaccgccggcatacaaccttgcccagaga

SEQ ID NO: 463596 - DNA, 54 bp, Artificial
  Synthetic oligonucleotide
tctccgcccgaagagggaaggagatacttctaggaccggccgatagtcttgagg

SEQ ID NO: 463597 - DNA, 53 bp, Artificial
  Synthetic oligonucleotide
tctccgcggtgggtgtattagccccacactcggcccttgctgttcttgaggac

SEQ ID NO: 463598 - DNA, 60 bp, Artificial
  Synthetic oligonucleotide
tctccggcaggacacaaagtcatgccgtggagaccgccggtccataacgtgccaggtaga

SEQ ID NO: 463599 - DNA, 60 bp, Artificial
  Synthetic oligonucleotide
tctccgggcccttcccagaggctcagccttgttaacaccaatggcagttggcacatcaac

SEQ ID NO: 463600 - DNA, 51 bp, Artificial
  Synthetic oligonucleotide
tctccgggctctccaagacagccaagactcggaggagagtcaagaagaagc

SEQ ID NO: 463601 - DNA, 50 bp, Artificial
  Synthetic oligonucleotide
tctccggggtttccgaatcaacacatcgactaacttggtagctaacacgc

SEQ ID NO: 463602 - DNA, 58 bp, Artificial
  Synthetic oligonucleotide
tctccgggtgcctgtgagtacctacggcctgtgagggccaaataggacgccacaccca

SEQ ID NO: 463603 - DNA, 55 bp, Artificial
  Synthetic oligonucleotide
tctccgtagcccatgaccaaaatggacgtaggtactactacctcacacgagaccc

SEQ ID NO: 463604 - DNA, 60 bp, Artificial
  Synthetic oligonucleotide
tctccgtcattcgtgctcgtgactatgccgaagcgaaccggcgatatactaatttcaacg

SEQ ID NO: 463605 - DNA, 60 bp, Artificial
  Synthetic oligonucleotide
tctccgtctttttccatgtaggatttgacatcgcttgagctcttagctccctgaatgttc

SEQ ID NO: 463606 - DNA, 60 bp, Artificial
  Synthetic oligonucleotide
tctccgtgaatgcataaaccgcaaaagaagactacttgcactaccagatgtacctgaaac

SEQ ID NO: 463607 - DNA, 55 bp, Artificial
  Synthetic oligonucleotide
tctccgtgatgcggccatgatccggactcagatccagcgggaaatggaattggtg

SEQ ID NO: 463608 - DNA, 60 bp, Artificial
  Synthetic oligonucleotide
tctccgtgctcccaccatggaagcagaatctcctgggtctaggaaattggtgcccagtct

SEQ ID NO: 463609 - DNA, 54 bp, Artificial
  Synthetic oligonucleotide
tctccgttgttgtggtcgtggatcgtaaaccccacttgggacctactggcggtc

SEQ ID NO: 463610 - DNA, 54 bp, Artificial
  Synthetic oligonucleotide
tctcctacagagaagatagaggtacttcacttctccaaaaggcctttgcgggga

SEQ ID NO: 463611 - DNA, 60 bp, Artificial
  Synthetic oligonucleotide
tctcctacgaccaatgtcgtgccactaaatcgcagactacctcatgcattggtgactgaa

SEQ ID NO: 463612 - DNA, 58 bp, Artificial
  Synthetic oligonucleotide
tctcctacgggaggaggtcacattccaggtcgggctcaaccgatacttggtcggatca

SEQ ID NO: 463613 - DNA, 55 bp, Artificial
  Synthetic oligonucleotide
tctcctacgggaggaggtcacattccaggtcgggcttaaccagtacatagttggg

SEQ ID NO: 463614 - DNA, 59 bp, Artificial
  Synthetic oligonucleotide
tctcctactatcccgatttcccatccaccaccatgcttaaagtgtcctgagctaaaaga

SEQ ID NO: 463615 - DNA, 57 bp, Artificial
  Synthetic oligonucleotide
tctcctagacaccgccactgctttgtttcgagaagccttagagtctcctgaacattg

SEQ ID NO: 463616 - DNA, 60 bp, Artificial
  Synthetic oligonucleotide
tctcctagagtaattaattcagctgatggtactaccacatggtacttcaatccagttgtt

SEQ ID NO: 463617 - DNA, 60 bp, Artificial
  Synthetic oligonucleotide
tctcctagatttcttcggaagggcttcgtgagaagctcgtgcacggtaatacactgatat

SEQ ID NO: 463618 - DNA, 60 bp, Artificial
  Synthetic oligonucleotide
tctcctagcaactttatgtatgctccagatacaaaccaagatcagaaaacagttgggcct

SEQ ID NO: 463619 - DNA, 60 bp, Artificial
  Synthetic oligonucleotide
tctcctagcattcagcattactgcattcatcatcgctagtttcaattcaagtcctagtaa

SEQ ID NO: 463620 - DNA, 60 bp, Artificial
  Synthetic oligonucleotide
tctcctatagagccgttgtctatattaggcccgtcatcaaatgatcaaatcatctattac

SEQ ID NO: 463621 - DNA, 60 bp, Artificial
  Synthetic oligonucleotide
tctcctatagatgggcaatgcgtttcattacataaccatgatcttcccgctttagtgtct

SEQ ID NO: 463622 - DNA, 60 bp, Artificial
  Synthetic oligonucleotide
tctcctatagtctaacagcacatcatttattccttctaagtcagcagtatttccgtcctt

SEQ ID NO: 463623 - DNA, 60 bp, Artificial
  Synthetic oligonucleotide
tctcctatatcagaacccttgtacatgatcttcaatatattatgtatcccgtcctccaaa

SEQ ID NO: 463624 - DNA, 60 bp, Artificial
  Synthetic oligonucleotide
tctcctcactgactgtgaatgtgagaggatcaggaatgaggatactggtaagaggcaatt

SEQ ID NO: 463625 - DNA, 60 bp, Artificial
  Synthetic oligonucleotide
tctcctcagcagtgtgacacatttcgagaaaattaagattctgcccagagatcaatggac

SEQ ID NO: 463626 - DNA, 57 bp, Artificial
  Synthetic oligonucleotide
tctcctcccctccctcttatactcaacagatccctatccgcaaggaccggggacagc

SEQ ID NO: 463627 - DNA, 60 bp, Artificial
  Synthetic oligonucleotide
tctcctcccgcaagaatcgcttcagtgacaataacttcacggattacaacgaacacagct

SEQ ID NO: 463628 - DNA, 55 bp, Artificial
  Synthetic oligonucleotide
tctcctccttaactgtgaatgtaagaggatcaggaatgaggatactactaagagg

SEQ ID NO: 463629 - DNA, 60 bp, Artificial
  Synthetic oligonucleotide
tctcctccttactccaggctattgcccaactaggcaagcccagctacataaacactgata

SEQ ID NO: 463630 - DNA, 55 bp, Artificial
  Synthetic oligonucleotide
tctcctcgtgggtcaaagagaatccccaacggccaacgcggccagtggactcggt

SEQ ID NO: 463631 - DNA, 60 bp, Artificial
  Synthetic oligonucleotide
tctcctctcgtcatcagtcattgtcatcatttgccctggtagtaatttcattgctctctt

SEQ ID NO: 463632 - DNA, 57 bp, Artificial
  Synthetic oligonucleotide
tctcctcttttgatctccaatacaatttcccggtgatcggagtcgaattttacgaca

SEQ ID NO: 463633 - DNA, 56 bp, Artificial
  Synthetic oligonucleotide
tctcctgaggttgtggttgaaccgtatctggatgtggtacactttggtcgttgtgt

SEQ ID NO: 463634 - DNA, 56 bp, Artificial
  Synthetic oligonucleotide
tctcctgcctcagcaagaaggaaggctcgcttacgttacttgccgctcatagatcc

SEQ ID NO: 463635 - DNA, 55 bp, Artificial
  Synthetic oligonucleotide
tctcctgcctgcattacgtagatttcgcagttcgcgtagaagtagtcatactgcg

SEQ ID NO: 463636 - DNA, 60 bp, Artificial
  Synthetic oligonucleotide
tctcctggatccagtacgcttgttcccagcctatttagatctcgatacgggtgcaactcg

SEQ ID NO: 463637 - DNA, 57 bp, Artificial
  Synthetic oligonucleotide
tctcctggctcagtttactagtgccatttgttcagtggttcgtagggctttccccca

SEQ ID NO: 463638 - DNA, 55 bp, Artificial
  Synthetic oligonucleotide
tctcctgggtttccttatgttcaagaaagattgactaaaagagatttgatttggt

SEQ ID NO: 463639 - DNA, 50 bp, Artificial
  Synthetic oligonucleotide
tctcctgtagtcgttggcactacggataaggtaggtctccccacttacac

SEQ ID NO: 463640 - DNA, 51 bp, Artificial
  Synthetic oligonucleotide
tctcctgtgacacatgccgatcctattgattggaaatctgaggaaccggta

SEQ ID NO: 463641 - DNA, 52 bp, Artificial
  Synthetic oligonucleotide
tctccttaatatcttgcgatcagaagactgcctactattgagatctggggga

SEQ ID NO: 463642 - DNA, 54 bp, Artificial
  Synthetic oligonucleotide
tctccttcattgccggtttctgttccgttaaattcgcaggacgtccgcccggag

SEQ ID NO: 463643 - DNA, 55 bp, Artificial
  Synthetic oligonucleotide
tctccttctgatggccctcctcttagcttgcctgtgtgctttcttgatagagggg

SEQ ID NO: 463644 - DNA, 54 bp, Artificial
  Synthetic oligonucleotide
tctccttgtcggtgaaccctcccttggaggaactcttcccaggtccggagtcta

SEQ ID NO: 463645 - DNA, 55 bp, Artificial
  Synthetic oligonucleotide
tctccttgtcggtgaatactcccctggaggacttcctcccaggtccggagtctac

SEQ ID NO: 463646 - DNA, 59 bp, Artificial
  Synthetic oligonucleotide
tctcctttgcacgccgtgggaccatacaggagaagttgatctccgtggcgggactcgcc

SEQ ID NO: 463647 - DNA, 60 bp, Artificial
  Synthetic oligonucleotide
tctcctttgcatagagggcccactccattctcatctaaaaggacagtagttagagtatta

SEQ ID NO: 463648 - DNA, 55 bp, Artificial
  Synthetic oligonucleotide
tctcctttgttgcactccaccacggaatgggccattttaccttgctcttactcgg

SEQ ID NO: 463649 - DNA, 51 bp, Artificial
  Synthetic oligonucleotide
tctccttttagcagtcttgtgctgtgctttgatagaggggggcttcaaggg

SEQ ID NO: 463650 - DNA, 60 bp, Artificial
  Synthetic oligonucleotide
tctcgaaactactatccaaaatagagtaacggcgtgactgccgttctatgctgaatacac

SEQ ID NO: 463651 - DNA, 60 bp, Artificial
  Synthetic oligonucleotide
tctcgaaatttaccaatcaattgcttctgtcgctactggaagcggtgatccgcacagtag

SEQ ID NO: 463652 - DNA, 59 bp, Artificial
  Synthetic oligonucleotide
tctcgaacccacgtccgatattcaccagctcgttgcaaccaagatggggaatcaaagct

SEQ ID NO: 463653 - DNA, 60 bp, Artificial
  Synthetic oligonucleotide
tctcgaacgagacgtcatctcacacttcggaatatttacaacagcgtgtttcatgtggta

SEQ ID NO: 463654 - DNA, 52 bp, Artificial
  Synthetic oligonucleotide
tctcgaagagtcgagccaacaggtggcccgcgcaacgtttctgtccgcagta

SEQ ID NO: 463655 - DNA, 57 bp, Artificial
  Synthetic oligonucleotide
tctcgaagatacacttgttttctttgccaacggggatgaccttctaattgccattaa

SEQ ID NO: 463656 - DNA, 60 bp, Artificial
  Synthetic oligonucleotide
tctcgaagcattaggacctaaccccacattggaagagatgttgcaagcctgccagggagt

SEQ ID NO: 463657 - DNA, 54 bp, Artificial
  Synthetic oligonucleotide
tctcgacaccaaggaaccttggcaggttgtgaaactgatcatcatatatttgta

SEQ ID NO: 463658 - DNA, 53 bp, Artificial
  Synthetic oligonucleotide
tctcgaccctcgatctttatatacccacgtggttcggctagtctttgttgacc

SEQ ID NO: 463659 - DNA, 54 bp, Artificial
  Synthetic oligonucleotide
tctcgaccttcaagaggactgttaaagtcttttgaatctagaatcgcgatatat

SEQ ID NO: 463660 - DNA, 60 bp, Artificial
  Synthetic oligonucleotide
tctcgactctggatgagatgttgattgtgtgtattggcctgggtgcactcgggttcaacg

SEQ ID NO: 463661 - DNA, 57 bp, Artificial
  Synthetic oligonucleotide
tctcgacttaccctacaagtttgggtgctggccctgcgtctatttccgcagtcggtg

SEQ ID NO: 463662 - DNA, 60 bp, Artificial
  Synthetic oligonucleotide
tctcgacttatttaactctttagtcgagatatatggacacagatagttatatgataacca

SEQ ID NO: 463663 - DNA, 60 bp, Artificial
  Synthetic oligonucleotide
tctcgagaaaacttcagacaactggcagacagccgttgcaaccaatttgtcataatcata

SEQ ID NO: 463664 - DNA, 55 bp, Artificial
  Synthetic oligonucleotide
tctcgagacagaagaggtgtatcaaccgggaagatggttcatgagagcagctcaa

SEQ ID NO: 463665 - DNA, 60 bp, Artificial
  Synthetic oligonucleotide
tctcgagacctggaaaaacatggagcaatcacaagtagcaatacagcagctactaatgct

SEQ ID NO: 463666 - DNA, 57 bp, Artificial
  Synthetic oligonucleotide
tctcgagatcagctgcaagagacatcagttcctccgcactgagccttcccaccttca

SEQ ID NO: 463667 - DNA, 51 bp, Artificial
  Synthetic oligonucleotide
tctcgagatgcaagatttcatctatctcagagatatggcacgtagtgctaa

SEQ ID NO: 463668 - DNA, 55 bp, Artificial
  Synthetic oligonucleotide
tctcgagccggcccagggtttgatcaggccgcccactgagattgagctcaaagcc

SEQ ID NO: 463669 - DNA, 60 bp, Artificial
  Synthetic oligonucleotide
tctcgagcgctagcgcaagcaaagtagcctacactttacagacggatgtcaactccatac

SEQ ID NO: 463670 - DNA, 60 bp, Artificial
  Synthetic oligonucleotide
tctcgagctgtcaccactatactgagctcccttactattaccagcctacttcgcaggctt

SEQ ID NO: 463671 - DNA, 59 bp, Artificial
  Synthetic oligonucleotide
tctcgagggcgtttatgtggactttaatggactggatgacactgaggccgggagaaaca

SEQ ID NO: 463672 - DNA, 54 bp, Artificial
  Synthetic oligonucleotide
tctcgagtatttcaatcttttagaaagaaggtaagaattattgatttaacggaa

SEQ ID NO: 463673 - DNA, 60 bp, Artificial
  Synthetic oligonucleotide
tctcgagttcacagccgatttgataatcgagaggcgagaggggaatgatgtttgttatcc

SEQ ID NO: 463674 - DNA, 54 bp, Artificial
  Synthetic oligonucleotide
tctcgataacttttatccagacccggttattgccgttatgactggggggtcaag

SEQ ID NO: 463675 - DNA, 56 bp, Artificial
  Synthetic oligonucleotide
tctcgataagagttattggggaggggatccattccgcgagtcctgcgggaagcact

SEQ ID NO: 463676 - DNA, 60 bp, Artificial
  Synthetic oligonucleotide
tctcgatacttagcagagattaacatctcgctgctctaggcctgctttgcaataaatcct

SEQ ID NO: 463677 - DNA, 55 bp, Artificial
  Synthetic oligonucleotide
tctcgatatggtatggtcctatctaagaccaaatctataatcactacccttcgac

SEQ ID NO: 463678 - DNA, 52 bp, Artificial
  Synthetic oligonucleotide
tctcgatgccaaagaactcgtggacaaagatgggacaaatcttgagttaaca

SEQ ID NO: 463679 - DNA, 60 bp, Artificial
  Synthetic oligonucleotide
tctcgatggaggctagtcgtggagggctccctccgacgtccgtcaaactcgaagatgtgc

SEQ ID NO: 463680 - DNA, 56 bp, Artificial
  Synthetic oligonucleotide
tctcgcaaaagaagattgcgggtgtgggcttgttacgtcccgagttaaccagtctc

SEQ ID NO: 463681 - DNA, 57 bp, Artificial
  Synthetic oligonucleotide
tctcgcaaaccgagttatcgctccgacctaccctgaggccacccagtatgaaggacg

SEQ ID NO: 463682 - DNA, 59 bp, Artificial
  Synthetic oligonucleotide
tctcgcaactttccagcctcagtccaattccaaaatggccgctgcaccctttccggcga

SEQ ID NO: 463683 - DNA, 60 bp, Artificial
  Synthetic oligonucleotide
tctcgcacactcttatagagagttgcctctggaccgttgtcacgatctggttggcagcct

SEQ ID NO: 463684 - DNA, 60 bp, Artificial
  Synthetic oligonucleotide
tctcgcagacgtgccgtcgctattgtcggacttaggtgtgtatcgtggctactgggctgc

SEQ ID NO: 463685 - DNA, 56 bp, Artificial
  Synthetic oligonucleotide
tctcgcagggccgtcaggcccgagagaccgaccagcccggagggcccagtcagtgt

SEQ ID NO: 463686 - DNA, 55 bp, Artificial
  Synthetic oligonucleotide
tctcgcaggttcacgccaccgtgcaagagtggtcgacgcctgcaacgtcgacgaa

SEQ ID NO: 463687 - DNA, 60 bp, Artificial
  Synthetic oligonucleotide
tctcgccgtgcacggtatcacactgatgataccttcagagtgcaggcatcgcctacggtt

SEQ ID NO: 463688 - DNA, 55 bp, Artificial
  Synthetic oligonucleotide
tctcgccgttggtgtttcacccttaacaaccctacagacggcgagatcgaatacg

SEQ ID NO: 463689 - DNA, 60 bp, Artificial
  Synthetic oligonucleotide
tctcgcgatcactctcatgagtggtcggggtgtccgcgtggacaaagtgtcggagcgtct

SEQ ID NO: 463690 - DNA, 55 bp, Artificial
  Synthetic oligonucleotide
tctcgcgcaccacacaccaccgcacactgccgaggtcgggcgagagagggcgccc

SEQ ID NO: 463691 - DNA, 60 bp, Artificial
  Synthetic oligonucleotide
tctcgcgcgcgtgctttatattttgaattattgtcgcgcgatgaccgactatgggccatt

SEQ ID NO: 463692 - DNA, 60 bp, Artificial
  Synthetic oligonucleotide
tctcgcgcggtggagaccgttatgctgtggctctccactctatttacgatgttccatgcg

SEQ ID NO: 463693 - DNA, 60 bp, Artificial
  Synthetic oligonucleotide
tctcgcgctaaagatccgtgcgcacgagagtttggtgaagatacgcttgtgtaagccata

SEQ ID NO: 463694 - DNA, 60 bp, Artificial
  Synthetic oligonucleotide
tctcgcgggttggcgagcatacgcatatagtgggtgtacaatctctaattatagaacatc

SEQ ID NO: 463695 - DNA, 60 bp, Artificial
  Synthetic oligonucleotide
tctcgcgtgataatagtgaccagcaacagtccccccgatgcctggtacagcgaggaaaag

SEQ ID NO: 463696 - DNA, 59 bp, Artificial
  Synthetic oligonucleotide
tctcgctcgtgtgcgggttaactcgctcactggttctcctctctaactcggaggggcga

SEQ ID NO: 463697 - DNA, 60 bp, Artificial
  Synthetic oligonucleotide
tctcgctctgttagagttgaccgcaatgctgacgtgggaatcgcacatcctcggatgagc

SEQ ID NO: 463698 - DNA, 55 bp, Artificial
  Synthetic oligonucleotide
tctcgctggactggtaagttccacttatctccgatctacatcgaacacagctacg

SEQ ID NO: 463699 - DNA, 57 bp, Artificial
  Synthetic oligonucleotide
tctcgcttgtacatagccacgaaaacccgaataaagatcgcaacgaccgaacgcgcg

SEQ ID NO: 463700 - DNA, 60 bp, Artificial
  Synthetic oligonucleotide
tctcggaaaatactgagaaaaccaatataatgtgcaatattagtgaggcggacggatgaa

SEQ ID NO: 463701 - DNA, 60 bp, Artificial
  Synthetic oligonucleotide
tctcggaagtatcccagacagtgcggaatcactgagccctctgagcccgacaacgtgtcc

SEQ ID NO: 463702 - DNA, 57 bp, Artificial
  Synthetic oligonucleotide
tctcggaatctggcgatcttatcggaatccacaccggttcaaacaaacttggctccg

SEQ ID NO: 463703 - DNA, 59 bp, Artificial
  Synthetic oligonucleotide
tctcggagacagattcggactagaagaagatttccgaaacacaatacgaggtgaggcaa

SEQ ID NO: 463704 - DNA, 60 bp, Artificial
  Synthetic oligonucleotide
tctcggagctgccattcagcaacgtaggtgagtggggccagactatcgacgtattgcctt

SEQ ID NO: 463705 - DNA, 60 bp, Artificial
  Synthetic oligonucleotide
tctcggattccgagctggctatggtgccacctcctgctacgtgtgaggaaatgcttgaat

SEQ ID NO: 463706 - DNA, 58 bp, Artificial
  Synthetic oligonucleotide
tctcggcaaggaagaggtgtaattcatacatgggcacaactggttccctggcgacgtt

SEQ ID NO: 463707 - DNA, 56 bp, Artificial
  Synthetic oligonucleotide
tctcggccttaccctttggtctatcctacgagctgtataccgacgcgcctaagttg

SEQ ID NO: 463708 - DNA, 60 bp, Artificial
  Synthetic oligonucleotide
tctcggccttcactcaatgggcgataaagcccgacaaagttggtctcttgctcgcaggca

SEQ ID NO: 463709 - DNA, 54 bp, Artificial
  Synthetic oligonucleotide
tctcggcgcagctcccccttccgggactggaaccgactacctgaaaggaacaag

SEQ ID NO: 463710 - DNA, 54 bp, Artificial
  Synthetic oligonucleotide
tctcggcgttagcggtttagaaaggttcaagagtgtactcactcaacccttccg

SEQ ID NO: 463711 - DNA, 60 bp, Artificial
  Synthetic oligonucleotide
tctcggctaaggtcacaggtggacagtatgccagcaacgagcaggcgttggttaggcgct

SEQ ID NO: 463712 - DNA, 54 bp, Artificial
  Synthetic oligonucleotide
tctcggctacgagatcagcaaacaacatatgaagatcgaagaaagcagatggaa

SEQ ID NO: 463713 - DNA, 60 bp, Artificial
  Synthetic oligonucleotide
tctcggctgagaccaccgcgagctctatctccggtcctcggaccgtctccacgtggactc

SEQ ID NO: 463714 - DNA, 59 bp, Artificial
  Synthetic oligonucleotide
tctcggcttacgaggtgttgaattcgcatcagaacgaatctgagagacccaaggatcag

SEQ ID NO: 463715 - DNA, 53 bp, Artificial
  Synthetic oligonucleotide
tctcgggacctgggaaaacatggggcaatcacaagtagtaatacagcacatac

SEQ ID NO: 463716 - DNA, 60 bp, Artificial
  Synthetic oligonucleotide
tctcgggagtgatacatgcgaaggctaattgcaatgatgatcctatggagttgtctcaag

SEQ ID NO: 463717 - DNA, 60 bp, Artificial
  Synthetic oligonucleotide
tctcgggcacatataatgtacttgggtatccaacgaacaacgagctcccagatgatctga

SEQ ID NO: 463718 - DNA, 56 bp, Artificial
  Synthetic oligonucleotide
tctcgggccagtacttcataaccgagtgatgtaacgcccaagggtatcccaagcgg

SEQ ID NO: 463719 - DNA, 55 bp, Artificial
  Synthetic oligonucleotide
tctcggggccgcttggggctccaccgcccgcttctccgtctgctgtaccgaccga

SEQ ID NO: 463720 - DNA, 55 bp, Artificial
  Synthetic oligonucleotide
tctcggggccgtttgggtctctaccgtccccttcttcatctgctgttccggccga

SEQ ID NO: 463721 - DNA, 58 bp, Artificial
  Synthetic oligonucleotide
tctcgggggtcttatggactgtctaccacggagctggcaataagactctagccggctc

SEQ ID NO: 463722 - DNA, 51 bp, Artificial
  Synthetic oligonucleotide
tctcggggttttgacgccccaccgaggagaccaaagggtggtgttcacccc

SEQ ID NO: 463723 - DNA, 51 bp, Artificial
  Synthetic oligonucleotide
tctcgggtacgagggcgcagggtacgacctgagaagcgagtggactctccc

SEQ ID NO: 463724 - DNA, 60 bp, Artificial
  Synthetic oligonucleotide
tctcggtacagagaaaccttcctttcgagagagcaaccatcatggcggcattcacaggga

SEQ ID NO: 463725 - DNA, 59 bp, Artificial
  Synthetic oligonucleotide
tctcggtacgttgccggcgccaacgtttttgagcggtgtgagtttgcagtctgcgttca

SEQ ID NO: 463726 - DNA, 59 bp, Artificial
  Synthetic oligonucleotide
tctcggtagcaattttagagaatagatcaaagtattacaaagcgtttgaagaaggctca

SEQ ID NO: 463727 - DNA, 55 bp, Artificial
  Synthetic oligonucleotide
tctcggtccgcttcaaatgcctttaaggaatcttttagtgctaacactgtgaatg

SEQ ID NO: 463728 - DNA, 55 bp, Artificial
  Synthetic oligonucleotide
tctcggtctagctttagtgcccacaagaaaacagctgtagcgaccacacaaaggc

SEQ ID NO: 463729 - DNA, 52 bp, Artificial
  Synthetic oligonucleotide
tctcgtaaggatgaacctccatctttaaaaccacgtatggaggtggagttcc

SEQ ID NO: 463730 - DNA, 60 bp, Artificial
  Synthetic oligonucleotide
tctcgtaatacttcctgcttgtgacgccgaaggaccaggatcgattgcggaatcgtccag

SEQ ID NO: 463731 - DNA, 60 bp, Artificial
  Synthetic oligonucleotide
tctcgtacgatagacggctcgctattgctgatttctgcacgaaggacagaatggtgtatt

SEQ ID NO: 463732 - DNA, 53 bp, Artificial
  Synthetic oligonucleotide
tctcgtacgcgcctatcaccttctatctggatgtttcgatctctagtgtgggc

SEQ ID NO: 463733 - DNA, 60 bp, Artificial
  Synthetic oligonucleotide
tctcgtactacatgatatccacgaatattacaagcttcaaggctacacacccaaccgagc

SEQ ID NO: 463734 - DNA, 58 bp, Artificial
  Synthetic oligonucleotide
tctcgtaggtgcactaaatcggttacgtctgttgtgtccacgctgttttatgacaaaa

SEQ ID NO: 463735 - DNA, 55 bp, Artificial
  Synthetic oligonucleotide
tctcgtatgacacaattcatgacatctgctcagaacgtgttacaagtgctcggac

SEQ ID NO: 463736 - DNA, 60 bp, Artificial
  Synthetic oligonucleotide
tctcgtattggcatagacagtggtcgattccaatggtactgtttgacgatacgatcaagt

SEQ ID NO: 463737 - DNA, 57 bp, Artificial
  Synthetic oligonucleotide
tctcgtcacaactcatcccgagtggcgtgaagaccacactgttctccgccaacatcg

SEQ ID NO: 463738 - DNA, 60 bp, Artificial
  Synthetic oligonucleotide
tctcgtcacgtgggcatgaatctgatgctgtttccctgcagacaatgcgagagaatgaat

SEQ ID NO: 463739 - DNA, 60 bp, Artificial
  Synthetic oligonucleotide
tctcgtcatactcctgttgatattactaagcttttaccgtccgaaattgatgatagaggc

SEQ ID NO: 463740 - DNA, 60 bp, Artificial
  Synthetic oligonucleotide
tctcgtccaatcatgtcacgtttgacgagattagatattttgaactacttgggctcgaag

SEQ ID NO: 463741 - DNA, 52 bp, Artificial
  Synthetic oligonucleotide
tctcgtccgggacgttagtaaaggaggagagttgaaacggaggagcccaagg

SEQ ID NO: 463742 - DNA, 55 bp, Artificial
  Synthetic oligonucleotide
tctcgtcgagaccgatccaacgagccctggcccatttcaagactcctccgctaag

SEQ ID NO: 463743 - DNA, 60 bp, Artificial
  Synthetic oligonucleotide
tctcgtcggtcgcctagatttctgtttcctatgcaatcgattaccaggcacgtgatcgct

SEQ ID NO: 463744 - DNA, 51 bp, Artificial
  Synthetic oligonucleotide
tctcgtcgttgtcgctactcttgcaccgctttgccgagggctcttcacacg

SEQ ID NO: 463745 - DNA, 60 bp, Artificial
  Synthetic oligonucleotide
tctcgtctcatagaggcgagcagtttgaatgactcagtgtacctgagaatgacattcggg

SEQ ID NO: 463746 - DNA, 55 bp, Artificial
  Synthetic oligonucleotide
tctcgtctgaggggacatgctcgcactatgcttggacgctctctgccgaacgtct

SEQ ID NO: 463747 - DNA, 60 bp, Artificial
  Synthetic oligonucleotide
tctcgtctgtcccaattttctcaagttgcgtgtacgcctgtagctcattatcgcatgcga

SEQ ID NO: 463748 - DNA, 59 bp, Artificial
  Synthetic oligonucleotide
tctcgtgacccttcacacaagttctactcatactacgagcctattgaggactgcgcaga

SEQ ID NO: 463749 - DNA, 56 bp, Artificial
  Synthetic oligonucleotide
tctcgtgaccggagatcgtataatgccggtaagggtagatcatttcgttcttaccg

SEQ ID NO: 463750 - DNA, 55 bp, Artificial
  Synthetic oligonucleotide
tctcgtgataggctctttgacatgaaatatcacaagctttctccagacagttcgg

SEQ ID NO: 463751 - DNA, 55 bp, Artificial
  Synthetic oligonucleotide
tctcgtgcacacgctatcgttgcactcactcgacatacggagaaatgcgtcatcc

SEQ ID NO: 463752 - DNA, 60 bp, Artificial
  Synthetic oligonucleotide
tctcgtgcgtcaacccaccatgtctgtgcttcgcgagtactcccaagtccctgacatcaa

SEQ ID NO: 463753 - DNA, 52 bp, Artificial
  Synthetic oligonucleotide
tctcgtggggtccaggtatttggcaagtctacataatagagctttacccact

SEQ ID NO: 463754 - DNA, 55 bp, Artificial
  Synthetic oligonucleotide
tctcgtggtcgacgcagaccgagggtccatgaacatttcgtcacgtgacgtgtcg

SEQ ID NO: 463755 - DNA, 60 bp, Artificial
  Synthetic oligonucleotide
tctcgtgtagtcgcctattcaatagaaacataggagacccattagtgtccgccattgctg

SEQ ID NO: 463756 - DNA, 57 bp, Artificial
  Synthetic oligonucleotide
tctcgtgtgctccacgtagaatccttccggcccctgaatgtggctaatcctaacccc

SEQ ID NO: 463757 - DNA, 60 bp, Artificial
  Synthetic oligonucleotide
tctcgttacttattagcacatgcgtacaggcagacagaatctgtgtaggatacttaagca

SEQ ID NO: 463758 - DNA, 57 bp, Artificial
  Synthetic oligonucleotide
tctcgttcaggtcgtgttactccgggaacggcgagcaagttctacccacgacagcga

SEQ ID NO: 463759 - DNA, 58 bp, Artificial
  Synthetic oligonucleotide
tctcgttcttacaccaactagggaggctgcccaaatgattcgtcggagggccaatgaa

SEQ ID NO: 463760 - DNA, 54 bp, Artificial
  Synthetic oligonucleotide
tctcgttgaagcaagacatcatagcgataactgattggtcaggatacagcggga

SEQ ID NO: 463761 - DNA, 55 bp, Artificial
  Synthetic oligonucleotide
tctcgttgtcttggtcaaccagtgaccggtcaacccgcctacccgacgactggcc

SEQ ID NO: 463762 - DNA, 60 bp, Artificial
  Synthetic oligonucleotide
tctcgttgtttctcgagaatattgctcgtcatgcaaacgtcctgctcgcaggtgtaaatg

SEQ ID NO: 463763 - DNA, 51 bp, Artificial
  Synthetic oligonucleotide
tctcgttttatgttgggctcaattcgtttgtcgtagggtctcagctcccct

SEQ ID NO: 463764 - DNA, 60 bp, Artificial
  Synthetic oligonucleotide
tctctaaaactcaggcattggatggcgaaggaagtgctgtgatcgggggcgcatgtgctc

SEQ ID NO: 463765 - DNA, 60 bp, Artificial
  Synthetic oligonucleotide
tctctaacatgagaatccttatacatgaacctcaacatattatgtatttcttcctctata

SEQ ID NO: 463766 - DNA, 53 bp, Artificial
  Synthetic oligonucleotide
tctctaaccaactcacataggttttaggacccgagactggttttaacacggcc

SEQ ID NO: 463767 - DNA, 60 bp, Artificial
  Synthetic oligonucleotide
tctctaaccattgcaacagtatgtttcctcatgcagattgccatcctagcaacaactgtg

SEQ ID NO: 463768 - DNA, 57 bp, Artificial
  Synthetic oligonucleotide
tctctaagtctctgcccaacagaaccaggtcatatattaagctaaaacgacttcgtt

SEQ ID NO: 463769 - DNA, 60 bp, Artificial
  Synthetic oligonucleotide
tctctaataagagagaatcagatgttacagcatagaatatctaatttgactggtgtgaac

SEQ ID NO: 463770 - DNA, 60 bp, Artificial
  Synthetic oligonucleotide
tctctacaactagtacttcccgtgttgtggttcactatgacccaatcactcagtcagcgt

SEQ ID NO: 463771 - DNA, 59 bp, Artificial
  Synthetic oligonucleotide
tctctacaattatggtgcacaagtgaagttacctgacggcattactactaacgtcgtta

SEQ ID NO: 463772 - DNA, 60 bp, Artificial
  Synthetic oligonucleotide
tctctacagccatctaatcagagacctctgacaagtattcagaagtcagctttagatgca

SEQ ID NO: 463773 - DNA, 58 bp, Artificial
  Synthetic oligonucleotide
tctctacattgttcccacctgccgctcccctagcccacgcaattggggaaggtgtaga

SEQ ID NO: 463774 - DNA, 52 bp, Artificial
  Synthetic oligonucleotide
tctctacccttattctcaccgctctcagcatgtatgcatctaggttcaggcc

SEQ ID NO: 463775 - DNA, 60 bp, Artificial
  Synthetic oligonucleotide
tctctacctaggactatcatgggtaatgaagttagaaggatttcatatagtgtattcagt

SEQ ID NO: 463776 - DNA, 59 bp, Artificial
  Synthetic oligonucleotide
tctctacgctagctcatcgtccgttctctgtcaagtggctgcgtagtgttgctctaccc

SEQ ID NO: 463777 - DNA, 52 bp, Artificial
  Synthetic oligonucleotide
tctctacgtgagcataagatattcggtctagatgaagatgagagcacgggtc

SEQ ID NO: 463778 - DNA, 58 bp, Artificial
  Synthetic oligonucleotide
tctctacgttaacgtcatcggctacaaccaaatgtgaccacaagcgcgttcaactatt

SEQ ID NO: 463779 - DNA, 60 bp, Artificial
  Synthetic oligonucleotide
tctctacttagtccagcacgaagtctggagacctctggcggcagcctaccaagaacaact

SEQ ID NO: 463780 - DNA, 50 bp, Artificial
  Synthetic oligonucleotide
tctctagaaagtgctaggcaagggaccgcaaagctaacaacttggctggg

SEQ ID NO: 463781 - DNA, 55 bp, Artificial
  Synthetic oligonucleotide
tctctagataggcgtactattgtagacgtgtgcctttccccgacctcgagtgcgg

SEQ ID NO: 463782 - DNA, 55 bp, Artificial
  Synthetic oligonucleotide
tctctagcaagcagaatgacaagtgttggaggggctgacaattacggagaatcgg

SEQ ID NO: 463783 - DNA, 58 bp, Artificial
  Synthetic oligonucleotide
tctctagcagtggcgcccgaaaggggactcgaaagcgaaagtaagaccagaggagatc

SEQ ID NO: 463784 - DNA, 59 bp, Artificial
  Synthetic oligonucleotide
tctctagcgatgttgaaaggtgaaagattgaaggcgtatacacaacgtggttttgagaa

SEQ ID NO: 463785 - DNA, 55 bp, Artificial
  Synthetic oligonucleotide
tctctagctttatcaccggcagggtaattccacgatactgcagaaaacccgattt

SEQ ID NO: 463786 - DNA, 50 bp, Artificial
  Synthetic oligonucleotide
tctctagggacctgacccgcagtcacaacatttgctcgttagacccagca

SEQ ID NO: 463787 - DNA, 60 bp, Artificial
  Synthetic oligonucleotide
tctctagtgacttgagctacagattcggtagcgagaccgcaaagttttgtggtgatcagg

SEQ ID NO: 463788 - DNA, 60 bp, Artificial
  Synthetic oligonucleotide
tctctagtgctccctatccccttaacatggctgatctctctgagaagggaatgcactttg

SEQ ID NO: 463789 - DNA, 60 bp, Artificial
  Synthetic oligonucleotide
tctctagttgcttcctcaggaaccctagagttcatcacagaaggattcacatggacagga

SEQ ID NO: 463790 - DNA, 59 bp, Artificial
  Synthetic oligonucleotide
tctctagttggcaatggaaatgataaggttagttttactataaatataatgcctacatg

SEQ ID NO: 463791 - DNA, 59 bp, Artificial
  Synthetic oligonucleotide
tctctataacgatactaggcagtttataacggctatatctaggcacacggagacgttta

SEQ ID NO: 463792 - DNA, 55 bp, Artificial
  Synthetic oligonucleotide
tctctatatgggaggagaccgacaacatcaaagcgactatcgactcccagaggga

SEQ ID NO: 463793 - DNA, 56 bp, Artificial
  Synthetic oligonucleotide
tctctatatgggtgtatttctgattccgtctccgtgtgagtcctcccaatagtgct

SEQ ID NO: 463794 - DNA, 58 bp, Artificial
  Synthetic oligonucleotide
tctctatcaaagcagtaagtagtatatgtaatgctaaccccagtacaaatactagcaa

SEQ ID NO: 463795 - DNA, 60 bp, Artificial
  Synthetic oligonucleotide
tctctatcccctatcggtgtatcggtgtcttatatatactagagctactaaaagcccata

SEQ ID NO: 463796 - DNA, 59 bp, Artificial
  Synthetic oligonucleotide
tctctatccggaaacatattagaggatcgcgtgaattggcaattcggaatttaattgtg

SEQ ID NO: 463797 - DNA, 58 bp, Artificial
  Synthetic oligonucleotide
tctctatcggaggattacttccttggtattttggaagaatgctacagaacaatccacg

SEQ ID NO: 463798 - DNA, 51 bp, Artificial
  Synthetic oligonucleotide
tctctatggcacacgaactgaccggcagaggggtcaaagagggttgtctat

SEQ ID NO: 463799 - DNA, 60 bp, Artificial
  Synthetic oligonucleotide
tctctattctagagtgggacaggagcaaagagcttatgcatcgcactgaggcgatatgtg

SEQ ID NO: 463800 - DNA, 55 bp, Artificial
  Synthetic oligonucleotide
tctctattgccggttaaatcggtaattaaaggcgcgttttgcggtgatgattcgg

SEQ ID NO: 463801 - DNA, 52 bp, Artificial
  Synthetic oligonucleotide
tctctcaaatcactctttggaatcgtgtcagtactctattgtatccacgcag

SEQ ID NO: 463802 - DNA, 55 bp, Artificial
  Synthetic oligonucleotide
tctctcaaggaaaatgaccatggggtccaaagaaattctgtccgcaacagctgct

SEQ ID NO: 463803 - DNA, 58 bp, Artificial
  Synthetic oligonucleotide
tctctcacaccgtgcccttttatggctgtgtgaactggactaatgagaactttccctt

SEQ ID NO: 463804 - DNA, 60 bp, Artificial
  Synthetic oligonucleotide
tctctcacagatcggcgaacaaactgtcctaaataaggaaatctactatcagaacacatc

SEQ ID NO: 463805 - DNA, 50 bp, Artificial
  Synthetic oligonucleotide
tctctcactcggtgaaagttgactccttcttctagtgcatcttcactccc

SEQ ID NO: 463806 - DNA, 60 bp, Artificial
  Synthetic oligonucleotide
tctctcacttccacagtgatgaagcacagatccatcttagaggaccaccctcagcagccc

SEQ ID NO: 463807 - DNA, 58 bp, Artificial
  Synthetic oligonucleotide
tctctcacttggttacttactgactccggtacaggtattaatattaacagcactcaag

SEQ ID NO: 463808 - DNA, 60 bp, Artificial
  Synthetic oligonucleotide
tctctcagcggcaagcgattctatatctcttgccctctgtgagctcttattgcccccagg

SEQ ID NO: 463809 - DNA, 56 bp, Artificial
  Synthetic oligonucleotide
tctctccccattggagaccaggagtacttcccaaagtactacccaacacatcgccc

SEQ ID NO: 463810 - DNA, 60 bp, Artificial
  Synthetic oligonucleotide
tctctccctccaatgcgcatgtgttcaatgggacacgcggttcattcacccgagtgtgcg

SEQ ID NO: 463811 - DNA, 54 bp, Artificial
  Synthetic oligonucleotide
tctctccgaagtctcaggacttcggcgtactgacatcaggtctgtcctctcgac

SEQ ID NO: 463812 - DNA, 60 bp, Artificial
  Synthetic oligonucleotide
tctctccgcacgcacgtggacatgatggtgggagcggccaccctatgctcagctctctac

SEQ ID NO: 463813 - DNA, 53 bp, Artificial
  Synthetic oligonucleotide
tctctcctaaaactcgccggaacgcccaaactggcagttcccggcgtcatttt

SEQ ID NO: 463814 - DNA, 60 bp, Artificial
  Synthetic oligonucleotide
tctctcctaatattgtcatgtatccttgggtgaattggagcaatttagaggttgctgaac

SEQ ID NO: 463815 - DNA, 55 bp, Artificial
  Synthetic oligonucleotide
tctctcctgggtatgcgcaactgaatactcgcgcttgtgtgtttgctgggcctgg

SEQ ID NO: 463816 - DNA, 60 bp, Artificial
  Synthetic oligonucleotide
tctctccttcgtccatgtaatggatcatacagttgtgttgaaagtattctttctgatgtg

SEQ ID NO: 463817 - DNA, 56 bp, Artificial
  Synthetic oligonucleotide
tctctcggactactaagatgtatgctggttcgtagtccttagtgagcctgaagaga

SEQ ID NO: 463818 - DNA, 59 bp, Artificial
  Synthetic oligonucleotide
tctctcggaggcgggttgttgcaagaacgcagccaatggttatggtcgctaccaacggc

SEQ ID NO: 463819 - DNA, 55 bp, Artificial
  Synthetic oligonucleotide
tctctcgggaagtatatagatctcaaaacacttgagtcagggtcggttaagggtt

SEQ ID NO: 463820 - DNA, 54 bp, Artificial
  Synthetic oligonucleotide
tctctcgtaagggttaaggggaggaccccaaggcatagggtgtgtaagggctga

SEQ ID NO: 463821 - DNA, 60 bp, Artificial
  Synthetic oligonucleotide
tctctcgtccaggtttggccttcgcaagccgagctgagctaggatcggaatcgcctaccg

SEQ ID NO: 463822 - DNA, 51 bp, Artificial
  Synthetic oligonucleotide
tctctcgtttcagacccatgccccaaacccagagggactcgacaggcccag

SEQ ID NO: 463823 - DNA, 59 bp, Artificial
  Synthetic oligonucleotide
tctctctaattcggtgaacatcccacgtggacaataccgagccaagctatccaggtaac

SEQ ID NO: 463824 - DNA, 57 bp, Artificial
  Synthetic oligonucleotide
tctctctaccccgacatttacaactatcaaattcactcccagacccttcactacgtc

SEQ ID NO: 463825 - DNA, 60 bp, Artificial
  Synthetic oligonucleotide
tctctctatgcaatcggtgtctggggtcttatttatacctagacactaaatggcattatt

SEQ ID NO: 463826 - DNA, 55 bp, Artificial
  Synthetic oligonucleotide
tctctctccgcatggatggacgccttggccactcgatggaccgctccaaaacggc

SEQ ID NO: 463827 - DNA, 59 bp, Artificial
  Synthetic oligonucleotide
tctctctcgagttcctctaacttctttcttccgcctacccactgctcgaggatctcttc

SEQ ID NO: 463828 - DNA, 60 bp, Artificial
  Synthetic oligonucleotide
tctctctctgcggtgaagtctttgtttggggatctcaatccccatcttgagaaacaacga

SEQ ID NO: 463829 - DNA, 60 bp, Artificial
  Synthetic oligonucleotide
tctctctgagttgacatcactgacacaagtctatctgagactgtggtgaatgactgcccg

SEQ ID NO: 463830 - DNA, 60 bp, Artificial
  Synthetic oligonucleotide
tctctctgcgtttgatgaaaggaggaacagatacctggaagaacatcccagtgcaggaaa

SEQ ID NO: 463831 - DNA, 58 bp, Artificial
  Synthetic oligonucleotide
tctctctggacctagcaacgtgcttaagtgcttcaggtaccgggcaaagcaaatgcac

SEQ ID NO: 463832 - DNA, 60 bp, Artificial
  Synthetic oligonucleotide
tctctctgggcccccataaattccttcatatgctttagatagtgcgggtcgacgtcatca

SEQ ID NO: 463833 - DNA, 58 bp, Artificial
  Synthetic oligonucleotide
tctctctgtactattttggggtggagggtctgagcttctttgtgccccataagaataa

SEQ ID NO: 463834 - DNA, 60 bp, Artificial
  Synthetic oligonucleotide
tctctcttacaaagttggatatttgtgtgcagggcttccaagcgacactcctagagggga

SEQ ID NO: 463835 - DNA, 60 bp, Artificial
  Synthetic oligonucleotide
tctctcttacagagttgggtacttatgtgcagggattcctagtgatactccaagagggga

SEQ ID NO: 463836 - DNA, 60 bp, Artificial
  Synthetic oligonucleotide
tctctcttacagagttgggtatctgtgtgcagggctgccaagcgacaccccgagagggga

SEQ ID NO: 463837 - DNA, 60 bp, Artificial
  Synthetic oligonucleotide
tctctcttcggaacgaagtgtgatgttgaacacacagctgctgagattagctatgtcaag

SEQ ID NO: 463838 - DNA, 60 bp, Artificial
  Synthetic oligonucleotide
tctctcttctgtgttcttaatcgaagatgcctactattcagtcacaatggtggtgtttta

SEQ ID NO: 463839 - DNA, 59 bp, Artificial
  Synthetic oligonucleotide
tctctgaatggcaaggataagtccaggcatatagggactgcccagggactgctgtactc

SEQ ID NO: 463840 - DNA, 60 bp, Artificial
  Synthetic oligonucleotide
tctctgacctaaggctggataatgagattcttcgaggacagattgccgtgttacgacagg

SEQ ID NO: 463841 - DNA, 60 bp, Artificial
  Synthetic oligonucleotide
tctctgactggaactgctaagcatatcgaagaatgctcatgttacgggaagcgaacagga

SEQ ID NO: 463842 - DNA, 55 bp, Artificial
  Synthetic oligonucleotide
tctctgagaatgggcccctcatcagcttgggtttggaaggcaactttgcaagcgt

SEQ ID NO: 463843 - DNA, 55 bp, Artificial
  Synthetic oligonucleotide
tctctgagctagggtataacgtgctcgattctgatacttatggaaaggtcttgac

SEQ ID NO: 463844 - DNA, 59 bp, Artificial
  Synthetic oligonucleotide
tctctgaggcgcgagacctgagagactcgtaagtcacggacgcgacagcagactctaca

SEQ ID NO: 463845 - DNA, 60 bp, Artificial
  Synthetic oligonucleotide
tctctgatgcaaggatcaactctcccgaggagatctggggcagctggtgcagcagtgaag

SEQ ID NO: 463846 - DNA, 53 bp, Artificial
  Synthetic oligonucleotide
tctctgattcggcgctccacatctcaccaactgaatgctctggacaatagtct

SEQ ID NO: 463847 - DNA, 60 bp, Artificial
  Synthetic oligonucleotide
tctctgatttctacaatgtcggagaattcccatgccgagtcggacatggagactttgcat

SEQ ID NO: 463848 - DNA, 60 bp, Artificial
  Synthetic oligonucleotide
tctctgcagaactctgcatacgccacggagcagtggacattacaggacacgagctacgag

SEQ ID NO: 463849 - DNA, 58 bp, Artificial
  Synthetic oligonucleotide
tctctgcagatcttgatgtattttttgttagaaggaagttgtatggacagtagttgat

SEQ ID NO: 463850 - DNA, 58 bp, Artificial
  Synthetic oligonucleotide
tctctgcatttgaggaaaggaggaacaaatacctggaagagcaccccagtgcgggaaa

SEQ ID NO: 463851 - DNA, 58 bp, Artificial
  Synthetic oligonucleotide
tctctgccacaatttgccagatagtgaccctgctaagcaatatatacttcaatgtgag

SEQ ID NO: 463852 - DNA, 55 bp, Artificial
  Synthetic oligonucleotide
tctctgccagctggtggggttctttacactttatgttgtgtagggccgcagcaac

SEQ ID NO: 463853 - DNA, 60 bp, Artificial
  Synthetic oligonucleotide
tctctgcccgagaatgaggagtatgagactgaccaaatactcccagacctagcatggatg

SEQ ID NO: 463854 - DNA, 60 bp, Artificial
  Synthetic oligonucleotide
tctctgcctgatccgcagtgatgctctcccctgtgcgagaatccatggttggcacaatct

SEQ ID NO: 463855 - DNA, 58 bp, Artificial
  Synthetic oligonucleotide
tctctgcgagggttttggaagaaacactccggcgagcccggcactcttctatggaata

SEQ ID NO: 463856 - DNA, 55 bp, Artificial
  Synthetic oligonucleotide
tctctgcgatccaaactccatccctgagcctgtccgtgtccgtcctggaatcttg

SEQ ID NO: 463857 - DNA, 60 bp, Artificial
  Synthetic oligonucleotide
tctctgcggaccccttggcctcactattagagatgtgtcacagtactcaaataggaggag

SEQ ID NO: 463858 - DNA, 51 bp, Artificial
  Synthetic oligonucleotide
tctctgcggagacggggtgcgtggttgtcacgggtgggtcaccgagcatcc

SEQ ID NO: 463859 - DNA, 60 bp, Artificial
  Synthetic oligonucleotide
tctctgcgttactttaaattgcactcataatatcactgacataaagcaccacccaaatgg

SEQ ID NO: 463860 - DNA, 55 bp, Artificial
  Synthetic oligonucleotide
tctctgcgtttgactgacctctagtgcatccatgagggctgatacatgtgaggct

SEQ ID NO: 463861 - DNA, 54 bp, Artificial
  Synthetic oligonucleotide
tctctgctatccacttatctgcgaccaagacaggatgcagagttgccagtatgg

SEQ ID NO: 463862 - DNA, 53 bp, Artificial
  Synthetic oligonucleotide
tctctgctttaatgcttttaatgggcttcctgggccatacatcaaatggttct

SEQ ID NO: 463863 - DNA, 58 bp, Artificial
  Synthetic oligonucleotide
tctctggacatgacccagggctcatctttgggatccgacttaaaattacagactcggg

SEQ ID NO: 463864 - DNA, 53 bp, Artificial
  Synthetic oligonucleotide
tctctggagttatttcaccagctcatgcctatctgctggactgcttgcctcag

SEQ ID NO: 463865 - DNA, 60 bp, Artificial
  Synthetic oligonucleotide
tctctggatgggatatgagttacatccagataagtggacagtccagcaaataaaattgcc

SEQ ID NO: 463866 - DNA, 60 bp, Artificial
  Synthetic oligonucleotide
tctctggccgcgcagcggcatttcttccgaaatactcatcagcccactcctgcatctcat

SEQ ID NO: 463867 - DNA, 55 bp, Artificial
  Synthetic oligonucleotide
tctctggcctgcccgagctcacgacagttccccaaccagatgtgaccaatacggc

SEQ ID NO: 463868 - DNA, 60 bp, Artificial
  Synthetic oligonucleotide
tctctggctcccagtcacgtacgcgtcgactgataatggaccaatttgtaagtgcgcagt

SEQ ID NO: 463869 - DNA, 50 bp, Artificial
  Synthetic oligonucleotide
tctctgggctactctggtgtttccgcccgagatactagcaggatatcgat

SEQ ID NO: 463870 - DNA, 50 bp, Artificial
  Synthetic oligonucleotide
tctctggggggagtatcagggatgtcactaggtagattccacattcgaca

SEQ ID NO: 463871 - DNA, 52 bp, Artificial
  Synthetic oligonucleotide
tctctggtaaggagagcctctgagcgtcgaatgcggacgttagtgctggctc

SEQ ID NO: 463872 - DNA, 60 bp, Artificial
  Synthetic oligonucleotide
tctctggtcgggattgatccctttcgtctgctgcaaaacagccaagtcttcagtctaatt

SEQ ID NO: 463873 - DNA, 60 bp, Artificial
  Synthetic oligonucleotide
tctctggtggaattcattcacgaaaagaggccaacgatacgagatattgccaccgaacat

SEQ ID NO: 463874 - DNA, 58 bp, Artificial
  Synthetic oligonucleotide
tctctggttgattctcatgacgttaaggtcgaaaaggacataggagttgacggggatg

SEQ ID NO: 463875 - DNA, 55 bp, Artificial
  Synthetic oligonucleotide
tctctgtaactactgtttgggcctttattgcagaggaagatggtgggaattccca

SEQ ID NO: 463876 - DNA, 55 bp, Artificial
  Synthetic oligonucleotide
tctctgtacaagacatgtatactcctccttactgttgttgtttaaaacctacggc

SEQ ID NO: 463877 - DNA, 53 bp, Artificial
  Synthetic oligonucleotide
tctctgtcctcggatgacctcctgcgcatgagcaatagagtagccgctagtct

SEQ ID NO: 463878 - DNA, 60 bp, Artificial
  Synthetic oligonucleotide
tctctgtcgagtcagaagtcggggatagctgatgagatagctgcatcatcaacgtttaag

SEQ ID NO: 463879 - DNA, 60 bp, Artificial
  Synthetic oligonucleotide
tctctgtcgtccgtgccagaaactatggtgaagcgtccagcagatatctacatttcaact

SEQ ID NO: 463880 - DNA, 60 bp, Artificial
  Synthetic oligonucleotide
tctctgtctattccatcagtgcagtcacacattaaacatattacgtacgatgccttttta

SEQ ID NO: 463881 - DNA, 58 bp, Artificial
  Synthetic oligonucleotide
tctctgtgaccctattcgagtgtttgtaaaaggagaaccgcataagcagtccaaatta

SEQ ID NO: 463882 - DNA, 55 bp, Artificial
  Synthetic oligonucleotide
tctctgtgatcctattcgtctctttgtaaaacaagagccacataaacagagtaag

SEQ ID NO: 463883 - DNA, 60 bp, Artificial
  Synthetic oligonucleotide
tctctgtgctcctttgacgtctcttttcgacgctcagtgcaaccgcttttctattcatgt

SEQ ID NO: 463884 - DNA, 53 bp, Artificial
  Synthetic oligonucleotide
tctctgtgttactctaaattgcactgatccacagactaataccactggtgcta

SEQ ID NO: 463885 - DNA, 56 bp, Artificial
  Synthetic oligonucleotide
tctctgttaacatctgatggtgtaatcaagagacctaactttacgctcccgcggag

SEQ ID NO: 463886 - DNA, 51 bp, Artificial
  Synthetic oligonucleotide
tctctgttctcgcagctccggcgggttaccacccgagctttttgcggcagt

SEQ ID NO: 463887 - DNA, 55 bp, Artificial
  Synthetic oligonucleotide
tctctgttgtgggctcccgatgcggctgggaaatacactgagcctagggctatcg

SEQ ID NO: 463888 - DNA, 58 bp, Artificial
  Synthetic oligonucleotide
tctcttaaatgaagctagtgtgaatctatttggtattttatcagtagactgtacttct

SEQ ID NO: 463889 - DNA, 60 bp, Artificial
  Synthetic oligonucleotide
tctcttaattcactaagatttagattcagattggcagttgaagaaccatattttagatta

SEQ ID NO: 463890 - DNA, 54 bp, Artificial
  Synthetic oligonucleotide
tctcttaccaactcaggagaaatggactttgtaggggatagggaaacctgtcgg

SEQ ID NO: 463891 - DNA, 58 bp, Artificial
  Synthetic oligonucleotide
tctcttaggtcactagttgcctcatccggcaccctggaatttacccaagaaagcttca

SEQ ID NO: 463892 - DNA, 55 bp, Artificial
  Synthetic oligonucleotide
tctcttagtattctcaccagttcaacagaagctaagcatgtgtttagccctggac

SEQ ID NO: 463893 - DNA, 60 bp, Artificial
  Synthetic oligonucleotide
tctcttatcaacatggtagtaaaaagcgctctgaacatcgaaacccagtctcgagaagtc

SEQ ID NO: 463894 - DNA, 57 bp, Artificial
  Synthetic oligonucleotide
tctcttatcatgccgtctaccaattgccgatattggtccatgcttaggcacaccaaa

SEQ ID NO: 463895 - DNA, 60 bp, Artificial
  Synthetic oligonucleotide
tctcttatcatgtatctccacaattacagtccctgttgcgttaatcggaacctgttgcct

SEQ ID NO: 463896 - DNA, 56 bp, Artificial
  Synthetic oligonucleotide
tctcttatgcaacgtttcagctctttccttttgacgtaaacaccagttcgaggtat

SEQ ID NO: 463897 - DNA, 58 bp, Artificial
  Synthetic oligonucleotide
tctcttatggaccagcactgttcaacattaccccccacacggccagagctcttgaccg

SEQ ID NO: 463898 - DNA, 60 bp, Artificial
  Synthetic oligonucleotide
tctcttcacaggccggatgaattccgtcatatacttaactcatccttatcgtacgctgaa

SEQ ID NO: 463899 - DNA, 50 bp, Artificial
  Synthetic oligonucleotide
tctcttcacgtacttgaacttaacgagcaacgggacgtcctggctcgtgg

SEQ ID NO: 463900 - DNA, 55 bp, Artificial
  Synthetic oligonucleotide
tctcttcatttcgtttaatctgacttcgagcaacgaaatgtggtgtaccactagt

SEQ ID NO: 463901 - DNA, 59 bp, Artificial
  Synthetic oligonucleotide
tctcttccagcggttgattgttgtacgttggacgaagagtacagagtagtgcgatttaa

SEQ ID NO: 463902 - DNA, 55 bp, Artificial
  Synthetic oligonucleotide
tctcttctgcccggtttgttgttttcccgccatgtatattccagcggagccaaat

SEQ ID NO: 463903 - DNA, 54 bp, Artificial
  Synthetic oligonucleotide
tctcttgaaattagcaggaagatggcccgtaaaaacaatacatacagacaatgg

SEQ ID NO: 463904 - DNA, 59 bp, Artificial
  Synthetic oligonucleotide
tctcttgcctaatgaaagggctggttgacagtgttggcaactccttcttccctggactg

SEQ ID NO: 463905 - DNA, 56 bp, Artificial
  Synthetic oligonucleotide
tctcttgcggcttaagccgacactacatggacctacgccccttctataccggttgg

SEQ ID NO: 463906 - DNA, 55 bp, Artificial
  Synthetic oligonucleotide
tctcttggagcgggatcctattagacttgggccttggaccagtttcctctgctgg

SEQ ID NO: 463907 - DNA, 57 bp, Artificial
  Synthetic oligonucleotide
tctcttggggcatttttccaccttgttatcgggtaatacctgcatatataacggcga

SEQ ID NO: 463908 - DNA, 56 bp, Artificial
  Synthetic oligonucleotide
tctcttggtcggtgaatcctcccctgagaggtctcttcctaggcccggagtctacc

SEQ ID NO: 463909 - DNA, 59 bp, Artificial
  Synthetic oligonucleotide
tctcttggtcgtgaaggctcgccgcggaggaaccacggaggagctgtcatttgggccca

SEQ ID NO: 463910 - DNA, 59 bp, Artificial
  Synthetic oligonucleotide
tctcttgtccagggagacaatcagacaattgcagtcaccaagcgggtcccaagttcatg

SEQ ID NO: 463911 - DNA, 58 bp, Artificial
  Synthetic oligonucleotide
tctcttgtctatgtggtgtcccaggggcgttgtcacaagtgttggggaaagtgtataa

SEQ ID NO: 463912 - DNA, 60 bp, Artificial
  Synthetic oligonucleotide
tctcttgtgggcctaaatcagtccaattccatgcatgctttaaccagcatatgtcttgcg

SEQ ID NO: 463913 - DNA, 55 bp, Artificial
  Synthetic oligonucleotide
tctctttcaatgacgtgtatcgcagttggcatggtcacactgtacctaggagtca

SEQ ID NO: 463914 - DNA, 57 bp, Artificial
  Synthetic oligonucleotide
tctctttcgagctcctcagcttttttccttgagttcacccacttctcgaggacctct

SEQ ID NO: 463915 - DNA, 60 bp, Artificial
  Synthetic oligonucleotide
tctctttctgacatgttcaatgggttacggtctatcagttctagtgaattcgttagatcc

SEQ ID NO: 463916 - DNA, 55 bp, Artificial
  Synthetic oligonucleotide
tctctttgattgtagagtatatgtagtcagagcaagaaacactgcagtagtcaac

SEQ ID NO: 463917 - DNA, 55 bp, Artificial
  Synthetic oligonucleotide
tctctttgctgcagccaaattccctgaatgcccagaaggttcaagtatctctgct

SEQ ID NO: 463918 - DNA, 60 bp, Artificial
  Synthetic oligonucleotide
tctctttgtgcgcctatgaggtgtttccaatgcttcatctttaagtaagctgggtctacg

SEQ ID NO: 463919 - DNA, 60 bp, Artificial
  Synthetic oligonucleotide
tctctttttattagagaagaggatcgcgcggcactatccgatccagagttgagaagtgtt

SEQ ID NO: 463920 - DNA, 56 bp, Artificial
  Synthetic oligonucleotide
tctctttttattgatcggccaagatcaatcggtaattgctacgaaatttccacccg

SEQ ID NO: 463921 - DNA, 54 bp, Artificial
  Synthetic oligonucleotide
tctcttttttcgagggttgtcgataggggagccaccttggcaagtagtatcccc

SEQ ID NO: 463922 - DNA, 58 bp, Artificial
  Synthetic oligonucleotide
tctgaaaatatgggccagactgttaccacacccttaagtttgaccttagatcattgga

SEQ ID NO: 463923 - DNA, 56 bp, Artificial
  Synthetic oligonucleotide
tctgaaaccatctgtgactgatgtgtccacatcttttgtggccacttgtagttcac

SEQ ID NO: 463924 - DNA, 56 bp, Artificial
  Synthetic oligonucleotide
tctgaaaggctgatcaatagagcccgagatctgtatactagatacacaacacaggt

SEQ ID NO: 463925 - DNA, 60 bp, Artificial
  Synthetic oligonucleotide
tctgaaagttatcaggtaagcatcttagatgttatcgatcgtttagctcatacatcaata

SEQ ID NO: 463926 - DNA, 60 bp, Artificial
  Synthetic oligonucleotide
tctgaaattaagcattgaggacccaagtcacgagggagagggaataccgctgtatgatgc

SEQ ID NO: 463927 - DNA, 60 bp, Artificial
  Synthetic oligonucleotide
tctgaacaaactatcccctatactccatcactctcagacacccgcgacccacatatgtgg

SEQ ID NO: 463928 - DNA, 50 bp, Artificial
  Synthetic oligonucleotide
tctgaacaaggattgaatcgtcttccttcaacctgacatctatgttgaac

SEQ ID NO: 463929 - DNA, 53 bp, Artificial
  Synthetic oligonucleotide
tctgaacagtgtgcgcagcagtgaactgggtagaataacccgcccgcgcttga

SEQ ID NO: 463930 - DNA, 60 bp, Artificial
  Synthetic oligonucleotide
tctgaacattcagtcaaaggcaaactgaatatggccacggccactcaattgtgtaaggat

SEQ ID NO: 463931 - DNA, 60 bp, Artificial
  Synthetic oligonucleotide
tctgaacattgctgacctcagaaaagtccagaccattaagaaggctggttgcatccttga

SEQ ID NO: 463932 - DNA, 60 bp, Artificial
  Synthetic oligonucleotide
tctgaaccaatcagcaatactaattttcttactgagaaagctgtggcttcagtaaaatta

SEQ ID NO: 463933 - DNA, 60 bp, Artificial
  Synthetic oligonucleotide
tctgaacccgtttgtcagccataaggaaattgagtccgtgaacaatgctgtagtaatgcc

SEQ ID NO: 463934 - DNA, 55 bp, Artificial
  Synthetic oligonucleotide
tctgaacctatgctactgcatatccgaaacactccaagcgttctcggcggttcgc

SEQ ID NO: 463935 - DNA, 60 bp, Artificial
  Synthetic oligonucleotide
tctgaaccttggcaagtcaacaccatattgcgaggaagagcttcaataactgcactagtc

SEQ ID NO: 463936 - DNA, 59 bp, Artificial
  Synthetic oligonucleotide
tctgaactagcagaggcgtacattattaaacgcaacataacaaaaccgtatatgccacg

SEQ ID NO: 463937 - DNA, 60 bp, Artificial
  Synthetic oligonucleotide
tctgaactagctggtttgctgtcaatgtcatcagcgtcgaatggcgaatcaaggcaacta

SEQ ID NO: 463938 - DNA, 60 bp, Artificial
  Synthetic oligonucleotide
tctgaactgatctcattgtcatgagagcatcaacctccttgttcatgtctctcaatctag

SEQ ID NO: 463939 - DNA, 60 bp, Artificial
  Synthetic oligonucleotide
tctgaactggttaatatggcagaatcctcaggacaatcaggcgtaggatttcaacctcca

SEQ ID NO: 463940 - DNA, 56 bp, Artificial
  Synthetic oligonucleotide
tctgaacttaggagccccacaaaaaggcatcttgtggttggtaattcaggtgaacc

SEQ ID NO: 463941 - DNA, 56 bp, Artificial
  Synthetic oligonucleotide
tctgaacttcgacggcccgtatgtcaaccgtgtgagtgtccccattgcccaaggca

SEQ ID NO: 463942 - DNA, 55 bp, Artificial
  Synthetic oligonucleotide
tctgaacttgctgatagtcatgatatatggtgcagttgtgatactccatttgctc

SEQ ID NO: 463943 - DNA, 55 bp, Artificial
  Synthetic oligonucleotide
tctgaagaaagaatttcgggtgcgcagcagtcggaagctcggaatggagctcccg

SEQ ID NO: 463944 - DNA, 52 bp, Artificial
  Synthetic oligonucleotide
tctgaagacaccttcaaccccgtgtatccatatgacacagaaaccgggcctc

SEQ ID NO: 463945 - DNA, 60 bp, Artificial
  Synthetic oligonucleotide
tctgaagagctgtatgacataaggctgcagcacctggaactgtcaaagcttaaacaagag

SEQ ID NO: 463946 - DNA, 60 bp, Artificial
  Synthetic oligonucleotide
tctgaagattcgaatgttttctttacatcctcaaagtccttgtatttcgatgatcgcttc

SEQ ID NO: 463947 - DNA, 52 bp, Artificial
  Synthetic oligonucleotide
tctgaagcaaaagttttgccgcgagaggcgggtgagctttgggccgtcgtgg

SEQ ID NO: 463948 - DNA, 60 bp, Artificial
  Synthetic oligonucleotide
tctgaagcagaaaaagaggcttccgcaactgaagcagctttttaagcgggcgcattggga

SEQ ID NO: 463949 - DNA, 53 bp, Artificial
  Synthetic oligonucleotide
tctgaagccaacagggttctaactgccgtgctgtcgtcattagtatctggtac

SEQ ID NO: 463950 - DNA, 60 bp, Artificial
  Synthetic oligonucleotide
tctgaagccattgagcttcaacgtgaaatgtgaaacaatcgaccttaaaacgcatgcaaa

SEQ ID NO: 463951 - DNA, 60 bp, Artificial
  Synthetic oligonucleotide
tctgaagcttagcattgaagacccgagtcatgagggcgaggggataccgctgtatgatgc

SEQ ID NO: 463952 - DNA, 60 bp, Artificial
  Synthetic oligonucleotide
tctgaagtcacaatatagggtgactttccctggtgttcttgaagatctagcttattcaag

SEQ ID NO: 463953 - DNA, 60 bp, Artificial
  Synthetic oligonucleotide
tctgaagtgcagaaagcttatgatgttgaagctgctgacatgggtacaattttaaatggt

SEQ ID NO: 463954 - DNA, 50 bp, Artificial
  Synthetic oligonucleotide
tctgaatacctctgccggttacccgtacgtcaccatgggagtgaggaaaa

SEQ ID NO: 463955 - DNA, 60 bp, Artificial
  Synthetic oligonucleotide
tctgaatactgcagttccaataggatcttgcgttagtaaatgccacaccgacaggggctc

SEQ ID NO: 463956 - DNA, 60 bp, Artificial
  Synthetic oligonucleotide
tctgaatagaaaccagcctgctgctacagcattggccaacacaatagaagtgttcagatc

SEQ ID NO: 463957 - DNA, 60 bp, Artificial
  Synthetic oligonucleotide
tctgaatccccatcttgagaaacagcgagctcgtcggacggacgaagctcgcgactattg

SEQ ID NO: 463958 - DNA, 58 bp, Artificial
  Synthetic oligonucleotide
tctgaatctaacactaccacccacaccggaggtgagctccgaggtcgaccaacctctg

SEQ ID NO: 463959 - DNA, 55 bp, Artificial
  Synthetic oligonucleotide
tctgaatctcctgcgcagaccccgcctcttcctcctaccacgatatgcacgccga

SEQ ID NO: 463960 - DNA, 58 bp, Artificial
  Synthetic oligonucleotide
tctgaatcttgagttggtataccgttccgaatctgtggaaccatagtagtttgaagta

SEQ ID NO: 463961 - DNA, 55 bp, Artificial
  Synthetic oligonucleotide
tctgaatgccccatccgcaagcggcattaccatacctgaacgcgactcagagcat

SEQ ID NO: 463962 - DNA, 60 bp, Artificial
  Synthetic oligonucleotide
tctgaatgtgtctgtgtgaacggttcatgttttaccataatgaccgatggcccgagtaat

SEQ ID NO: 463963 - DNA, 58 bp, Artificial
  Synthetic oligonucleotide
tctgaatgtgtttgtataaacggttcgtgttttactataatgactgacggcccaagca

SEQ ID NO: 463964 - DNA, 59 bp, Artificial
  Synthetic oligonucleotide
tctgaattatagcctaagaatggcaaagaaccatcactacaaacctggagtcaaattct

SEQ ID NO: 463965 - DNA, 55 bp, Artificial
  Synthetic oligonucleotide
tctgaatttcttgaaggtgttccgaccctagtgccctcagacgaaaagaggaggt

SEQ ID NO: 463966 - DNA, 55 bp, Artificial
  Synthetic oligonucleotide
tctgacaaactaccactagtccgacaaagttcgatggaactggaccagcactccg

SEQ ID NO: 463967 - DNA, 60 bp, Artificial
  Synthetic oligonucleotide
tctgacaacctattgatgaggaacaaactgagggagattttgaaggtcccatactgcagc

SEQ ID NO: 463968 - DNA, 60 bp, Artificial
  Synthetic oligonucleotide
tctgacaagattaaattcctcaatccggatagggagtacgacttcagagatctcacttgg

SEQ ID NO: 463969 - DNA, 51 bp, Artificial
  Synthetic oligonucleotide
tctgacaatgtaaaggttatatagtcagaattccaaattacgttgctaggt

SEQ ID NO: 463970 - DNA, 56 bp, Artificial
  Synthetic oligonucleotide
tctgacaattgagcgcaatgcgctatttattattccaacaagaaggcgtctgagcg

SEQ ID NO: 463971 - DNA, 60 bp, Artificial
  Synthetic oligonucleotide
tctgacacatctctggatatgtacgactcgaccaatcaaaattcaaaatagaggcctagt

SEQ ID NO: 463972 - DNA, 60 bp, Artificial
  Synthetic oligonucleotide
tctgacacgccaatcttgtgtctctcgttgtcccccgcttcagaccccagattggcacac

SEQ ID NO: 463973 - DNA, 57 bp, Artificial
  Synthetic oligonucleotide
tctgacacgtcgatcctctttgaggtacggccaattcaggctagcgaccagccctgg

SEQ ID NO: 463974 - DNA, 60 bp, Artificial
  Synthetic oligonucleotide
tctgacaggtcctgatttccctctagaagaggcccctgtgttcaagagaacagggtcagc

SEQ ID NO: 463975 - DNA, 60 bp, Artificial
  Synthetic oligonucleotide
tctgacatccgtttcgtttcagtctaatatccgatgacgtgctaggtcttggacgattct

SEQ ID NO: 463976 - DNA, 55 bp, Artificial
  Synthetic oligonucleotide
tctgacatcttgctcatctgtctttatataatggacttcactctgccttatttgg

SEQ ID NO: 463977 - DNA, 60 bp, Artificial
  Synthetic oligonucleotide
tctgacattaatggtgaaggttacacctttgccattcttgtaggtgatagtcatttagtg

SEQ ID NO: 463978 - DNA, 60 bp, Artificial
  Synthetic oligonucleotide
tctgacattgcaccctcccaccatgcatcagtacaggaggaacgtactctcgggaccagt

SEQ ID NO: 463979 - DNA, 60 bp, Artificial
  Synthetic oligonucleotide
tctgaccaacaatagttccaaggtgtcgtacataacatatcccagcatatctcgtagtgc

SEQ ID NO: 463980 - DNA, 55 bp, Artificial
  Synthetic oligonucleotide
tctgaccaaccagcgtcggggcgttgttacgcctgtcagtgacatcgtgtcatcg

SEQ ID NO: 463981 - DNA, 55 bp, Artificial
  Synthetic oligonucleotide
tctgacccaacacacataaccgcagaaacggcgggtcgacgcctcggaaggggct

SEQ ID NO: 463982 - DNA, 60 bp, Artificial
  Synthetic oligonucleotide
tctgacccctgacagctgaggaccataccttgagggagagcgccgattacagaagaggtt

SEQ ID NO: 463983 - DNA, 55 bp, Artificial
  Synthetic oligonucleotide
tctgaccttcgtttgttctaatgacgaagggaattggagcatgataggtgtttcg

SEQ ID NO: 463984 - DNA, 54 bp, Artificial
  Synthetic oligonucleotide
tctgacgcaatcgtcggtaagggcggtttctcactcactcgacagttccataac

SEQ ID NO: 463985 - DNA, 55 bp, Artificial
  Synthetic oligonucleotide
tctgacgcacaagagcaatcgtttcgtaaggattttgatgacttgtcacagttcg

SEQ ID NO: 463986 - DNA, 54 bp, Artificial
  Synthetic oligonucleotide
tctgacgcataataattgttggcaacaatcgtgcataataacttaggaaccgag

SEQ ID NO: 463987 - DNA, 54 bp, Artificial
  Synthetic oligonucleotide
tctgacgccatgactatggctatgcataaaaaatttagtccgaatagacagatg

SEQ ID NO: 463988 - DNA, 53 bp, Artificial
  Synthetic oligonucleotide
tctgacgctttatatcagaaggaagtgcccatttatggtgcaatacccgatcc

SEQ ID NO: 463989 - DNA, 60 bp, Artificial
  Synthetic oligonucleotide
tctgacggtgccagttcttctctagtgttgagtaatgcgcgtagtactaagtctaggcgt

SEQ ID NO: 463990 - DNA, 56 bp, Artificial
  Synthetic oligonucleotide
tctgacgtggagggtgtagcccagaaatactgtttaaagccttcacacggcgccta

SEQ ID NO: 463991 - DNA, 60 bp, Artificial
  Synthetic oligonucleotide
tctgactactagtatgtatgctggttcgaagtccctagtgagcctgaagagatgctcacc

SEQ ID NO: 463992 - DNA, 54 bp, Artificial
  Synthetic oligonucleotide
tctgactatctgtccgtaatggcaaccagcggtcagacccaatatatcaaccgt

SEQ ID NO: 463993 - DNA, 60 bp, Artificial
  Synthetic oligonucleotide
tctgactcagaaagtgcgagtccagattgttacatctgaaaagagttactggcatgtgta

SEQ ID NO: 463994 - DNA, 57 bp, Artificial
  Synthetic oligonucleotide
tctgactctcgacgcttcaggcgaccttttccacccgctcctggagaaggattccct

SEQ ID NO: 463995 - DNA, 60 bp, Artificial
  Synthetic oligonucleotide
tctgactcttgtttccgctggagacgacttcaccctcaggatgcccatctcccccacaaa

SEQ ID NO: 463996 - DNA, 55 bp, Artificial
  Synthetic oligonucleotide
tctgactgatttgttcaacttcgcaaaacagatcagttcgtgggcaagccaggga

SEQ ID NO: 463997 - DNA, 60 bp, Artificial
  Synthetic oligonucleotide
tctgactggaactgccaagcacatcgaagaatgctcatgctacggggagcaggcagggat

SEQ ID NO: 463998 - DNA, 60 bp, Artificial
  Synthetic oligonucleotide
tctgacttaaaaataggacagcataggacaaaagtagaggagttaagagaccatctgctg

SEQ ID NO: 463999 - DNA, 60 bp, Artificial
  Synthetic oligonucleotide
tctgacttactgccgctgttaagtgccttggcgtaagcgtcattggctgattgttgtccc

SEQ ID NO: 464000 - DNA, 55 bp, Artificial
  Synthetic oligonucleotide
tctgacttccgaagcataaagatgacctatcttacattagtaacttaccaggctc

SEQ ID NO: 464001 - DNA, 60 bp, Artificial
  Synthetic oligonucleotide
tctgacttgaaaaaggtatctcgcgcgatatcaatacttcaacagtcgaacgcaaattta

SEQ ID NO: 464002 - DNA, 60 bp, Artificial
  Synthetic oligonucleotide
tctgactttcctcgctgcaataaagaagaggttgagatttgatagtgtggctaacaacat

SEQ ID NO: 464003 - DNA, 60 bp, Artificial
  Synthetic oligonucleotide
tctgagaaagatagggctgtgttgggcgcgttagaatcggacattgtggatataattgga

SEQ ID NO: 464004 - DNA, 60 bp, Artificial
  Synthetic oligonucleotide
tctgagaagtactacaatgcgttatctgagctgtcagtgctcgagaatctcgattcattc

SEQ ID NO: 464005 - DNA, 60 bp, Artificial
  Synthetic oligonucleotide
tctgagaatatcacggacaatgttaaagtcataatagtacagctgaatcaatctgtagaa

SEQ ID NO: 464006 - DNA, 58 bp, Artificial
  Synthetic oligonucleotide
tctgagaatcagttcgtcctttagctttggaggcttcactttcaaaagaacaagtgga

SEQ ID NO: 464007 - DNA, 60 bp, Artificial
  Synthetic oligonucleotide
tctgagacaatctgtcgagatcagatgagttggggtatttggctgtgtaaatcagcccta

SEQ ID NO: 464008 - DNA, 50 bp, Artificial
  Synthetic oligonucleotide
tctgagacctttgagaatcaaacatgactcagaacctatcggccctaact

SEQ ID NO: 464009 - DNA, 60 bp, Artificial
  Synthetic oligonucleotide
tctgagacgtaccagttattgatgacctttattaactactctgacgagaatattccgtca

SEQ ID NO: 464010 - DNA, 58 bp, Artificial
  Synthetic oligonucleotide
tctgagagagggaactaagtatttagggttcagtgttgtgacagataatggtcgaacc

SEQ ID NO: 464011 - DNA, 57 bp, Artificial
  Synthetic oligonucleotide
tctgagattgtcgggtgtgagaccgacgaagtcgaaagatgaggggccgtcgaaagg

SEQ ID NO: 464012 - DNA, 60 bp, Artificial
  Synthetic oligonucleotide
tctgagcaaagagaatgctacgtcgtataatgtgaggacattcgactcattcctcattaa

SEQ ID NO: 464013 - DNA, 60 bp, Artificial
  Synthetic oligonucleotide
tctgagcagcttttagctgcctgaatgttcggatggtaatgtgccgatctgcatctggaa

SEQ ID NO: 464014 - DNA, 60 bp, Artificial
  Synthetic oligonucleotide
tctgagcaggtgtactggtcactaccggacatgatgcaagatccggtgactttccgctcg

SEQ ID NO: 464015 - DNA, 55 bp, Artificial
  Synthetic oligonucleotide
tctgagccttctatacctagcagggccgccatacttaccccggcggcccctctac

SEQ ID NO: 464016 - DNA, 60 bp, Artificial
  Synthetic oligonucleotide
tctgagcgatgtgtgtgtcatattgacaagtcgacgggcgctcttattgatgctgcctgg

SEQ ID NO: 464017 - DNA, 54 bp, Artificial
  Synthetic oligonucleotide
tctgagcgcacctgacatgcgagagtgggcagttaaggaaagcggtaacacgat

SEQ ID NO: 464018 - DNA, 60 bp, Artificial
  Synthetic oligonucleotide
tctgagcgtcgatcactctctgttcgttccgcggaagccggtatgtccgattctgtacgg

SEQ ID NO: 464019 - DNA, 60 bp, Artificial
  Synthetic oligonucleotide
tctgagctaaatattggaactggcacctccgcttacacatcactgaatgtgctggctaga

SEQ ID NO: 464020 - DNA, 58 bp, Artificial
  Synthetic oligonucleotide
tctgagctaataccgtctcatactgaatcaatttacgtaaaggcgttccttttatatg

SEQ ID NO: 464021 - DNA, 59 bp, Artificial
  Synthetic oligonucleotide
tctgagctcaactgggttttacctggaagctgagactgataggccagtggaaagtgaaa

SEQ ID NO: 464022 - DNA, 55 bp, Artificial
  Synthetic oligonucleotide
tctgaggaaattcagtcggagaaagtggaaatacaaccacttgatgatcgtgaga

SEQ ID NO: 464023 - DNA, 59 bp, Artificial
  Synthetic oligonucleotide
tctgaggaagtagctcagaaacctcgaatagtctataactataaacgtttgaatgacaa

SEQ ID NO: 464024 - DNA, 59 bp, Artificial
  Synthetic oligonucleotide
tctgaggaatgggggactctggggacgcatttatatgaagtccccaaatggcatgttcg

SEQ ID NO: 464025 - DNA, 60 bp, Artificial
  Synthetic oligonucleotide
tctgaggagaagctacgaaagaaatcttcattctatcagtcttatctcaggagaacacaa

SEQ ID NO: 464026 - DNA, 60 bp, Artificial
  Synthetic oligonucleotide
tctgaggaggtcgcttctgccttagctaacgacgcaatcgtgttagtgtcaaatcatctc

SEQ ID NO: 464027 - DNA, 60 bp, Artificial
  Synthetic oligonucleotide
tctgaggcatcttcgcctccatataccatcccgtgtctgtgtgactacgctatgactgcc

SEQ ID NO: 464028 - DNA, 60 bp, Artificial
  Synthetic oligonucleotide
tctgaggcatttacaaccacaaatcgggcatattttctggcaaggcaaagtcaggtgaga

SEQ ID NO: 464029 - DNA, 55 bp, Artificial
  Synthetic oligonucleotide
tctgaggctaatgagcagatttgcttgtacatcctgggtgagagcatgtccagca

SEQ ID NO: 464030 - DNA, 60 bp, Artificial
  Synthetic oligonucleotide
tctgagggaaaccactcattgttagatggtgcactagttattgctagcctaccattgttc

SEQ ID NO: 464031 - DNA, 57 bp, Artificial
  Synthetic oligonucleotide
tctgaggggatcagtggctcacaaatcctgcctacctgcttgtgtatatggattagc

SEQ ID NO: 464032 - DNA, 55 bp, Artificial
  Synthetic oligonucleotide
tctgaggggtcaccgttcaggtgtctgacctccatcccttcagggcgagggccta

SEQ ID NO: 464033 - DNA, 60 bp, Artificial
  Synthetic oligonucleotide
tctgaggggttcacataggacttgtctattatgcggagagtggttattccactagctcta

SEQ ID NO: 464034 - DNA, 59 bp, Artificial
  Synthetic oligonucleotide
tctgaggtacaagtcatttgcagaaaacccagatttggaaatagaggcaaagtgtgttg

SEQ ID NO: 464035 - DNA, 58 bp, Artificial
  Synthetic oligonucleotide
tctgaggtcgaccctgctgagcccgccccgtctgatgtatcggggacctatgctgtcc

SEQ ID NO: 464036 - DNA, 51 bp, Artificial
  Synthetic oligonucleotide
tctgaggtgtttctacgatcgcaagggtgtgttaaagccctgggggttttc

SEQ ID NO: 464037 - DNA, 50 bp, Artificial
  Synthetic oligonucleotide
tctgaggttgcttgattgtattatgatgttcctttcttctgataacacca

SEQ ID NO: 464038 - DNA, 60 bp, Artificial
  Synthetic oligonucleotide
tctgagtcagactacgcagcgagcagaatgtacggattatttaccccagtagacctggat

SEQ ID NO: 464039 - DNA, 56 bp, Artificial
  Synthetic oligonucleotide
tctgagtccccaataggtaaatgagcccccaattgagtccccaatatatcggggac

SEQ ID NO: 464040 - DNA, 59 bp, Artificial
  Synthetic oligonucleotide
tctgagtctccatacagtgtgggtggcccacgtgctattcgagcctcttggaatgagag

SEQ ID NO: 464041 - DNA, 57 bp, Artificial
  Synthetic oligonucleotide
tctgagtctgatagtgtaaattctattggttgtgaaacggcgtttgcggaagtatct

SEQ ID NO: 464042 - DNA, 60 bp, Artificial
  Synthetic oligonucleotide
tctgagtgcgtatgccaggatgaattttgttatactctgataacagacggaccgtccgac

SEQ ID NO: 464043 - DNA, 55 bp, Artificial
  Synthetic oligonucleotide
tctgagttcacccttgacaaagaagaacttgagattggttctcgtttcttcgact

SEQ ID NO: 464044 - DNA, 51 bp, Artificial
  Synthetic oligonucleotide
tctgataagtcttcgaaatatctcatctcagttaggccgtattgaatcaat

SEQ ID NO: 464045 - DNA, 55 bp, Artificial
  Synthetic oligonucleotide
tctgataatgaacctgcaaattaagacctatggtcaaggcagcgggaatgcagcc

SEQ ID NO: 464046 - DNA, 55 bp, Artificial
  Synthetic oligonucleotide
tctgataatggatggacataatgtttcattgatggacttgctcagttccctagtt

SEQ ID NO: 464047 - DNA, 60 bp, Artificial
  Synthetic oligonucleotide
tctgataatgttgcgagatccgcttattgctttttatcccgttgaatggaatggctttgg

SEQ ID NO: 464048 - DNA, 60 bp, Artificial
  Synthetic oligonucleotide
tctgatacttaacgaatggttatgtaacccaatggatataacgttgtattattatcagca

SEQ ID NO: 464049 - DNA, 60 bp, Artificial
  Synthetic oligonucleotide
tctgatatcattcgaggtgctaagggtgggtcgattatgatgatgaacccctctgattta

SEQ ID NO: 464050 - DNA, 54 bp, Artificial
  Synthetic oligonucleotide
tctgatattctcaggtaagtatgaaggggctcaattagtatttaatgcacctca

SEQ ID NO: 464051 - DNA, 60 bp, Artificial
  Synthetic oligonucleotide
tctgatcatcattaagtgaccgtcatgggtgatatattaggcgcagtttatgatttaggg

SEQ ID NO: 464052 - DNA, 54 bp, Artificial
  Synthetic oligonucleotide
tctgatccccactggtaccaataaaacgtgcgtcatcgaacaaattgtatactg

SEQ ID NO: 464053 - DNA, 60 bp, Artificial
  Synthetic oligonucleotide
tctgatccgcctcaaacccaccctccatggaccaacacccctgctatacagactgggcgc

SEQ ID NO: 464054 - DNA, 60 bp, Artificial
  Synthetic oligonucleotide
tctgatcctaaaggggccaactggaacagcagtggactctattaggatcaagaccactga

SEQ ID NO: 464055 - DNA, 60 bp, Artificial
  Synthetic oligonucleotide
tctgatccttaaaagactttatgtcatttggtcttctataacaatggatgtacctctgtg

SEQ ID NO: 464056 - DNA, 60 bp, Artificial
  Synthetic oligonucleotide
tctgatccttctcaaggtggtgaaattaagatcactcattttactacctggacatccatt

SEQ ID NO: 464057 - DNA, 60 bp, Artificial
  Synthetic oligonucleotide
tctgatcggaaatgtccatgacgcctgtaatgattcgttgtcagtcattcttttgtcgtg

SEQ ID NO: 464058 - DNA, 59 bp, Artificial
  Synthetic oligonucleotide
tctgatctgtatgtggtacaccctggttctggtgtatagctggtcctctaccctgtaca

SEQ ID NO: 464059 - DNA, 60 bp, Artificial
  Synthetic oligonucleotide
tctgatctgtgtaggatccagttacagttctcatctagctagaatggcgggtgtatcctt

SEQ ID NO: 464060 - DNA, 58 bp, Artificial
  Synthetic oligonucleotide
tctgatgaataaccaacgaaaaaaggcgagaagtacgcctttcaatatgctgaaacgc

SEQ ID NO: 464061 - DNA, 55 bp, Artificial
  Synthetic oligonucleotide
tctgatgaattggtctcttctgtgggccgagccgaaaaggatcctgatctgagcc

SEQ ID NO: 464062 - DNA, 60 bp, Artificial
  Synthetic oligonucleotide
tctgatgacagcttcttgtatctctgtcaagttagccaatctcaaattctgaccgttctt

SEQ ID NO: 464063 - DNA, 60 bp, Artificial
  Synthetic oligonucleotide
tctgatgacttcgctctcatagtgaatgcaccgaatcatgagggaatacaagccggagtg

SEQ ID NO: 464064 - DNA, 60 bp, Artificial
  Synthetic oligonucleotide
tctgatgccaagttagggatattcgtatcctcgatgaaggaagacttgtctaacaataac

SEQ ID NO: 464065 - DNA, 50 bp, Artificial
  Synthetic oligonucleotide
tctgatgcgcatcgaaagatatgatacaaatgcacaaggtaattccgtgt

SEQ ID NO: 464066 - DNA, 55 bp, Artificial
  Synthetic oligonucleotide
tctgatggcctcaaggagaccatgtatggtattggctatgggccaataatcatca

SEQ ID NO: 464067 - DNA, 60 bp, Artificial
  Synthetic oligonucleotide
tctgatgggagaactagccggagcgccaagagtgccacggagtggtggcataggttcttg

SEQ ID NO: 464068 - DNA, 55 bp, Artificial
  Synthetic oligonucleotide
tctgatgggtaaagcgattactattgaccaggctctaaacggaaaatttggttcg

SEQ ID NO: 464069 - DNA, 60 bp, Artificial
  Synthetic oligonucleotide
tctgatggtaaattccggactatgatctccttccattttgacgatgcaccaggtttaagc

SEQ ID NO: 464070 - DNA, 60 bp, Artificial
  Synthetic oligonucleotide
tctgatgtcacacgtggtaatggtatcacccatcgtgttggcaagcgtttttgtgttaag

SEQ ID NO: 464071 - DNA, 60 bp, Artificial
  Synthetic oligonucleotide
tctgatgttctcaagtttctaagtagttgcaatcgagacgaacgaagcttgaggagcgaa

SEQ ID NO: 464072 - DNA, 52 bp, Artificial
  Synthetic oligonucleotide
tctgattaaagaagagctacggcaattcaaagaagaaaccaggatggcaata

SEQ ID NO: 464073 - DNA, 58 bp, Artificial
  Synthetic oligonucleotide
tctgattaacatcttgaagggtgcagaatggatttaccaccaatttgaaaaagtgatc

SEQ ID NO: 464074 - DNA, 60 bp, Artificial
  Synthetic oligonucleotide
tctgattactgtcgtcgccttgatgctaacgctgtgtcaaatcttcgtcgcctatgggcc

SEQ ID NO: 464075 - DNA, 52 bp, Artificial
  Synthetic oligonucleotide
tctgattattgcgggaactggacttggggtctataatccacacagtttcctg

SEQ ID NO: 464076 - DNA, 60 bp, Artificial
  Synthetic oligonucleotide
tctgattcaatacaacctgacaattggagatcatgggggtgaggtagggagacatctgat

SEQ ID NO: 464077 - DNA, 55 bp, Artificial
  Synthetic oligonucleotide
tctgattctgagtaggcgataccttctcgagaaagagccatctcaagaaaaccgc

SEQ ID NO: 464078 - DNA, 60 bp, Artificial
  Synthetic oligonucleotide
tctgattgagtctagctggttctatgtcaaaatctatccaggcataacccatcatcagat

SEQ ID NO: 464079 - DNA, 60 bp, Artificial
  Synthetic oligonucleotide
tctgattgcctcatatggtcttgcaaccacagatttgaaatcctgtgtcttgggtgttct

SEQ ID NO: 464080 - DNA, 60 bp, Artificial
  Synthetic oligonucleotide
tctgattggcacgtatgcccggggctctgatgaaggtaaccgccacaccaacgagactct

SEQ ID NO: 464081 - DNA, 55 bp, Artificial
  Synthetic oligonucleotide
tctgatttaacaagcaatatgtcggaagcggcatcatctgtaagattgacgtcag

SEQ ID NO: 464082 - DNA, 55 bp, Artificial
  Synthetic oligonucleotide
tctgatttaataggtgttcttcgtgccgggaattatgtcgaagcgaccggcagat

SEQ ID NO: 464083 - DNA, 60 bp, Artificial
  Synthetic oligonucleotide
tctgatttagaaatagggcagcacagaacaaaaatcgaggagttgagaaaccatctactg

SEQ ID NO: 464084 - DNA, 58 bp, Artificial
  Synthetic oligonucleotide
tctgatttgatttaagctaagttggtagttatatcactctaaactacctaagtcacta

SEQ ID NO: 464085 - DNA, 55 bp, Artificial
  Synthetic oligonucleotide
tctgcaaaacaaggcgaatacggaccacaagctttagttactctgtacgaaaact

SEQ ID NO: 464086 - DNA, 60 bp, Artificial
  Synthetic oligonucleotide
tctgcaaaactgcatagataattatgccatagaagtgtcttatgcatacttgatgggtga

SEQ ID NO: 464087 - DNA, 55 bp, Artificial
  Synthetic oligonucleotide
tctgcaaaccctaatgaatagcttatttgttggggtttgtatagcttttatttgg

SEQ ID NO: 464088 - DNA, 55 bp, Artificial
  Synthetic oligonucleotide
tctgcaaacggatgtgcactcaattgcgaggactctagcatgcatcaatagactc

SEQ ID NO: 464089 - DNA, 58 bp, Artificial
  Synthetic oligonucleotide
tctgcaacaaaagagatgacatttcttctcccagaaccggagtggacataccctcgtt

SEQ ID NO: 464090 - DNA, 60 bp, Artificial
  Synthetic oligonucleotide
tctgcaacaaattgatgaccagatcacaagagaaatctcctcactcaccattgaaagact

SEQ ID NO: 464091 - DNA, 58 bp, Artificial
  Synthetic oligonucleotide
tctgcaacacaacaggagtcgataaacccaaatttcttccggatctatacgactacaa

SEQ ID NO: 464092 - DNA, 60 bp, Artificial
  Synthetic oligonucleotide
tctgcaacagggggtggtgagggtctaggagaatatgacatattgaccactgtagatcca

SEQ ID NO: 464093 - DNA, 60 bp, Artificial
  Synthetic oligonucleotide
tctgcaacctgaacggaatagctccattacaactagggaagtgcaatgtggcggggtggc

SEQ ID NO: 464094 - DNA, 53 bp, Artificial
  Synthetic oligonucleotide
tctgcaacgcagttaaacccagggggaaccgtggttagacccgctactggtaa

SEQ ID NO: 464095 - DNA, 55 bp, Artificial
  Synthetic oligonucleotide
tctgcaagatcatgaacaaggcccctctcgatctaagggaatgcaccatagaggg

SEQ ID NO: 464096 - DNA, 60 bp, Artificial
  Synthetic oligonucleotide
tctgcaagatcccaaagtaagaggcctgtattttcctgctggtggctccagttcagaaac

SEQ ID NO: 464097 - DNA, 55 bp, Artificial
  Synthetic oligonucleotide
tctgcaagatgtcctaacccatgtatcacaggagtctatactgatccgtatccct

SEQ ID NO: 464098 - DNA, 60 bp, Artificial
  Synthetic oligonucleotide
tctgcaataatatgactttcgacaacttggtacacattgactaatgtactaagatcaaaa

SEQ ID NO: 464099 - DNA, 60 bp, Artificial
  Synthetic oligonucleotide
tctgcaatagtagggctaatagtagcaagcatagcagccataattgtgtggagcatagta

SEQ ID NO: 464100 - DNA, 56 bp, Artificial
  Synthetic oligonucleotide
tctgcaattgaagggtaaacgtagtttgaaccaggtgaatgccctatttggggatc

SEQ ID NO: 464101 - DNA, 55 bp, Artificial
  Synthetic oligonucleotide
tctgcaattggcaatcactaacctccaagcccagtacccgaggtccagaccccgc

SEQ ID NO: 464102 - DNA, 53 bp, Artificial
  Synthetic oligonucleotide
tctgcacaaaccgtgcatatcgcgcaatacaaacgttgaaacaatcacgttgc

SEQ ID NO: 464103 - DNA, 55 bp, Artificial
  Synthetic oligonucleotide
tctgcaccacatgtcagaacgcagggaagcccgtgatgggccaggacggatggca

SEQ ID NO: 464104 - DNA, 58 bp, Artificial
  Synthetic oligonucleotide
tctgcaccatagaaatcctcagctctgtgaatccagctgaagttagtgcggagggtga

SEQ ID NO: 464105 - DNA, 55 bp, Artificial
  Synthetic oligonucleotide
tctgcacccaagggaaaaggccaaccgacctgggacaatgtggactcctaggaac

SEQ ID NO: 464106 - DNA, 58 bp, Artificial
  Synthetic oligonucleotide
tctgcaccgttgtttcttgaaacctcgtggccgcgatgttcagcggtggtacaccgcc

SEQ ID NO: 464107 - DNA, 60 bp, Artificial
  Synthetic oligonucleotide
tctgcaccttcagaggggatgtcacccacattgctggtactcaagaatacacaatgaatc

SEQ ID NO: 464108 - DNA, 60 bp, Artificial
  Synthetic oligonucleotide
tctgcaccttttcaactcagacgttcatgactccatattagtatcatactcatcagattt

SEQ ID NO: 464109 - DNA, 60 bp, Artificial
  Synthetic oligonucleotide
tctgcacggatttcgatgtatgctggcaataaagtacttacaatccttcgagtgtaagta

SEQ ID NO: 464110 - DNA, 60 bp, Artificial
  Synthetic oligonucleotide
tctgcactgtgggctaacatagacatgagggacaaatttgccaaatgggatataagcttc

SEQ ID NO: 464111 - DNA, 57 bp, Artificial
  Synthetic oligonucleotide
tctgcagagttaatgggcctgtaaatgctattgggcttgtttgtattgggcttgtac

SEQ ID NO: 464112 - DNA, 60 bp, Artificial
  Synthetic oligonucleotide
tctgcagcatatgaagacctgagagtgtcaagtttcatcagggggacaaaagtgatccca

SEQ ID NO: 464113 - DNA, 55 bp, Artificial
  Synthetic oligonucleotide
tctgcagcatttgaacagaggacatatagtcaatgtattgcgactccagcttttg

SEQ ID NO: 464114 - DNA, 60 bp, Artificial
  Synthetic oligonucleotide
tctgcagcctgaatggaatagcccccttacaactggggaagtgtaacgtagcaggatgga

SEQ ID NO: 464115 - DNA, 60 bp, Artificial
  Synthetic oligonucleotide
tctgcaggcaccaacattgcttatgttcttcctataatagtcgaacagagtttttatgtt

SEQ ID NO: 464116 - DNA, 57 bp, Artificial
  Synthetic oligonucleotide
tctgcagttagtagaaaatacgtattccccagatactctgggatacgatttaattag

SEQ ID NO: 464117 - DNA, 60 bp, Artificial
  Synthetic oligonucleotide
tctgcagttagtagagaagacttattcgcctgacacattagggcacgatttaattaggga

SEQ ID NO: 464118 - DNA, 53 bp, Artificial
  Synthetic oligonucleotide
tctgcatccggaggccgtctgtctgctgtgagatgaagcctaggttgccttgg

SEQ ID NO: 464119 - DNA, 55 bp, Artificial
  Synthetic oligonucleotide
tctgcatcgcatggcacatacggggcagggctgcccctctatttgcctacgcttg

SEQ ID NO: 464120 - DNA, 56 bp, Artificial
  Synthetic oligonucleotide
tctgcatcgggcccctctttgcaaacccaaggtccaataatccgagcgacgacccc

SEQ ID NO: 464121 - DNA, 60 bp, Artificial
  Synthetic oligonucleotide
tctgcatctaatgcaacgtggtccggttataatgtcagtccagtaaactgcgcacgctct

SEQ ID NO: 464122 - DNA, 50 bp, Artificial
  Synthetic oligonucleotide
tctgcatctattcgggtctttcccgttgaaaattgtgacatactcatact

SEQ ID NO: 464123 - DNA, 60 bp, Artificial
  Synthetic oligonucleotide
tctgcattgaatcatgcaggaaacttagaacagcgtgacaatgagtcaccactagtggtt

SEQ ID NO: 464124 - DNA, 60 bp, Artificial
  Synthetic oligonucleotide
tctgccaactcatacacggagaaaacaatatcgttagaatgaggatacttatcgttatta

SEQ ID NO: 464125 - DNA, 54 bp, Artificial
  Synthetic oligonucleotide
tctgccaactttggaaccgttaacggtaagtttcgcaactctctcggttgccaa

SEQ ID NO: 464126 - DNA, 59 bp, Artificial
  Synthetic oligonucleotide
tctgccaagcagttggctggggtgatcctatcacccattggagccacggacaaaatcgg

SEQ ID NO: 464127 - DNA, 60 bp, Artificial
  Synthetic oligonucleotide
tctgccaattgggtctgttgatagtattgcagctcttttggatctactatatcgaagatc

SEQ ID NO: 464128 - DNA, 50 bp, Artificial
  Synthetic oligonucleotide
tctgccacctgcgggggcacgccaacccgatctagcgccaaggtgctatc

SEQ ID NO: 464129 - DNA, 60 bp, Artificial
  Synthetic oligonucleotide
tctgccactacgtatgattctatctacgttgcttgtgtgaccgattggattgataacaat

SEQ ID NO: 464130 - DNA, 55 bp, Artificial
  Synthetic oligonucleotide
tctgccactgctaagctgtgaggcagtgcaggctgggacagccgacctccaggtt

SEQ ID NO: 464131 - DNA, 60 bp, Artificial
  Synthetic oligonucleotide
tctgccactttatctgctacctctgtggcctcctcatataataccaccgttcctttgtct

SEQ ID NO: 464132 - DNA, 55 bp, Artificial
  Synthetic oligonucleotide
tctgccagatatagtgaaggaggttattcatctgtatgtcccaacttgttgtctc

SEQ ID NO: 464133 - DNA, 52 bp, Artificial
  Synthetic oligonucleotide
tctgccagatgtacaccaatgtagatcaagacatggtaggatggccggcacc

SEQ ID NO: 464134 - DNA, 57 bp, Artificial
  Synthetic oligonucleotide
tctgccagtgacgactctgagttggacgagtcgctgcttagtgacacacccggtctt

SEQ ID NO: 464135 - DNA, 60 bp, Artificial
  Synthetic oligonucleotide
tctgccataaggaaagccatattagggcaagtagttagccctaggtgtgattatcaaaca

SEQ ID NO: 464136 - DNA, 60 bp, Artificial
  Synthetic oligonucleotide
tctgccataaggaaagccttattaggacaagtagttagccctatatgtgaatatcagaca

SEQ ID NO: 464137 - DNA, 60 bp, Artificial
  Synthetic oligonucleotide
tctgccatacaagaaatagtgagtgcaggcattgaaccaaactggttgatcatgagtgag

SEQ ID NO: 464138 - DNA, 55 bp, Artificial
  Synthetic oligonucleotide
tctgccatactactgtgccatggataaacgacacattaacacctaattgggataa

SEQ ID NO: 464139 - DNA, 55 bp, Artificial
  Synthetic oligonucleotide
tctgccatcagcgctacctacgaacacaggccatttccaaaggcatgcgtcggct

SEQ ID NO: 464140 - DNA, 55 bp, Artificial
  Synthetic oligonucleotide
tctgccattatttacaatgccagagtactcataagatgcccatacactgaaccca

SEQ ID NO: 464141 - DNA, 55 bp, Artificial
  Synthetic oligonucleotide
tctgcccacactaatgatgtaagacagttaacagaagtggtgcaaaaggtgaccc

SEQ ID NO: 464142 - DNA, 51 bp, Artificial
  Synthetic oligonucleotide
tctgcccactagatacaacaatgaatgggattggttgttcaccagctagta

SEQ ID NO: 464143 - DNA, 60 bp, Artificial
  Synthetic oligonucleotide
tctgcccctagtggaagccctctctacactattgcgctctgtgactcctttagtcctcga

SEQ ID NO: 464144 - DNA, 53 bp, Artificial
  Synthetic oligonucleotide
tctgcccgagccgtgtcgcagtgttattacgggtgtctggtacgccggggtct

SEQ ID NO: 464145 - DNA, 56 bp, Artificial
  Synthetic oligonucleotide
tctgcccggtcttggcaaggcgcccgggagcacttagaaaaaagagttataccgca

SEQ ID NO: 464146 - DNA, 55 bp, Artificial
  Synthetic oligonucleotide
tctgccctaagtgtcatcaagaaagaagtcaggtcacgcctgtacaaggattgcg

SEQ ID NO: 464147 - DNA, 58 bp, Artificial
  Synthetic oligonucleotide
tctgccctgttagtgggtgggctatatacagtaaagacaatagtgtaagaattggttc

SEQ ID NO: 464148 - DNA, 55 bp, Artificial
  Synthetic oligonucleotide
tctgccgaggcccttagatgggaacacagtgtttacaacgacatctttcgatctg

SEQ ID NO: 464149 - DNA, 50 bp, Artificial
  Synthetic oligonucleotide
tctgccgagtttcctctctagcgagggcctgcttagtggcctcagcgcgg

SEQ ID NO: 464150 - DNA, 58 bp, Artificial
  Synthetic oligonucleotide
tctgccggctcttggcattttggaatcggggggcactcaaagtcctgtgcaattgggg

SEQ ID NO: 464151 - DNA, 60 bp, Artificial
  Synthetic oligonucleotide
tctgccggtacacgcgcgtcaccaatgaccgcgcctatgtcaacttgtggctcgagcgcg

SEQ ID NO: 464152 - DNA, 60 bp, Artificial
  Synthetic oligonucleotide
tctgccgtgtgacagagctagacagcaccgtacagccgtacacctctgccactagagagt

SEQ ID NO: 464153 - DNA, 60 bp, Artificial
  Synthetic oligonucleotide
tctgcctcatcttggggcgccaccaaccagccggccgatcaagtcgatgactcccctctc

SEQ ID NO: 464154 - DNA, 52 bp, Artificial
  Synthetic oligonucleotide
tctgcctccacagcccatcgacgacccctgccaaaaagacacccacgaaata

SEQ ID NO: 464155 - DNA, 55 bp, Artificial
  Synthetic oligonucleotide
tctgcctcccatgaaggacgcaagtaatagctcacaatcgtcttgcatctcagcg

SEQ ID NO: 464156 - DNA, 55 bp, Artificial
  Synthetic oligonucleotide
tctgcctgatgtgcagtgatgagttcccctgtgcgtgaatccatgtcctgcgcag

SEQ ID NO: 464157 - DNA, 60 bp, Artificial
  Synthetic oligonucleotide
tctgcctgcatgttctgattctgcttacaatcaatataatagtggtacattagccgaaat

SEQ ID NO: 464158 - DNA, 60 bp, Artificial
  Synthetic oligonucleotide
tctgcctggggtatgtttgtccacacatgcgatccattgtgctccctgggactggcaaga

SEQ ID NO: 464159 - DNA, 60 bp, Artificial
  Synthetic oligonucleotide
tctgcgcaagttctgatgatcagacttctaacagcagctcttaacaggaacagggggtca

SEQ ID NO: 464160 - DNA, 55 bp, Artificial
  Synthetic oligonucleotide
tctgcgcaattcccaactaccgcgttagtgggtaatactggtttccgtcagttaa

SEQ ID NO: 464161 - DNA, 60 bp, Artificial
  Synthetic oligonucleotide
tctgcgccaaatcctcagggaatcaggagggattgacaaggaaacaacgggattcacata

SEQ ID NO: 464162 - DNA, 58 bp, Artificial
  Synthetic oligonucleotide
tctgcgcccaatatttttaggttgaaaaatgctgtacatttataatctacgtaataca

SEQ ID NO: 464163 - DNA, 60 bp, Artificial
  Synthetic oligonucleotide
tctgcgcgttagcgcggaagatagccggaggccattacgtgcagatggccatcattaagt

SEQ ID NO: 464164 - DNA, 60 bp, Artificial
  Synthetic oligonucleotide
tctgcgctaaatagcaacagctctggaggggaatcgctagtgtctacacttgacaccaat

SEQ ID NO: 464165 - DNA, 56 bp, Artificial
  Synthetic oligonucleotide
tctgcggagtggacatcaaagccatggccgcccatgaacacgggctgcccctcatt

SEQ ID NO: 464166 - DNA, 60 bp, Artificial
  Synthetic oligonucleotide
tctgcggatccgggtcgttgcccataggtgtagccaaatatcacgggtctgatcaggaac

SEQ ID NO: 464167 - DNA, 59 bp, Artificial
  Synthetic oligonucleotide
tctgcggctgggataaacgttggaccgatatccccagattatacccaacatatggctac

SEQ ID NO: 464168 - DNA, 58 bp, Artificial
  Synthetic oligonucleotide
tctgcgggacgaaaatcttacactccacggactgaaagcacggtgtcgcgtgtgcatg

SEQ ID NO: 464169 - DNA, 56 bp, Artificial
  Synthetic oligonucleotide
tctgcggggacatatagacgcctgtctagaggttagacgctctccggtgctggagc

SEQ ID NO: 464170 - DNA, 58 bp, Artificial
  Synthetic oligonucleotide
tctgcggggggtttagtgaggggtggttggagtgcgatctccttgatgagcgtaccgc

SEQ ID NO: 464171 - DNA, 52 bp, Artificial
  Synthetic oligonucleotide
tctgcgggtggaccaaatgaagtccccctacgaagcagcccacgaaagggca

SEQ ID NO: 464172 - DNA, 57 bp, Artificial
  Synthetic oligonucleotide
tctgcgggttccctatacgcaagccaatacttcaagttcggcgccacgcctaaagga

SEQ ID NO: 464173 - DNA, 59 bp, Artificial
  Synthetic oligonucleotide
tctgcgtctagtgtggtcagctcctacgcttgacgggttggttgttgccccaccgcagg

SEQ ID NO: 464174 - DNA, 59 bp, Artificial
  Synthetic oligonucleotide
tctgcgtgaagacatagcgcaagttacggccctacttaacactcagataaaggttccgc

SEQ ID NO: 464175 - DNA, 60 bp, Artificial
  Synthetic oligonucleotide
tctgcgttatcatggattgaaatttcattcccacacttaaactatcacaatcttctgaca

SEQ ID NO: 464176 - DNA, 51 bp, Artificial
  Synthetic oligonucleotide
tctgcgttctgaaccgtttgcattagagtttgattgactcgattgcgacga

SEQ ID NO: 464177 - DNA, 54 bp, Artificial
  Synthetic oligonucleotide
tctgctaatggagtaaccacacattatgtttctcagattggcggcttcccagat

SEQ ID NO: 464178 - DNA, 60 bp, Artificial
  Synthetic oligonucleotide
tctgctaccttgtttacagagattgcaacaccccattcagtctgggtgtttgcatgtgca

SEQ ID NO: 464179 - DNA, 60 bp, Artificial
  Synthetic oligonucleotide
tctgctacgggtaccatactttgtgagggctcacgctctgttacgagtgtgcaccctggt

SEQ ID NO: 464180 - DNA, 60 bp, Artificial
  Synthetic oligonucleotide
tctgctactttacagagtgtaggtacatgtgtcgtgtgcaattcgcaaacatctttaagg

SEQ ID NO: 464181 - DNA, 52 bp, Artificial
  Synthetic oligonucleotide
tctgctaggaggcaggtacgtcctgtggttgatggttgtttacgtggtactg

SEQ ID NO: 464182 - DNA, 51 bp, Artificial
  Synthetic oligonucleotide
tctgctaggtttcctggtgctcgcggtgtgctcggttctgatacttacaag

SEQ ID NO: 464183 - DNA, 60 bp, Artificial
  Synthetic oligonucleotide
tctgctattgacgagtcgtcaccttttagtactccgattcagggtgtgttagcagttcag

SEQ ID NO: 464184 - DNA, 58 bp, Artificial
  Synthetic oligonucleotide
tctgctattggtaacacaattgaagcactattccaaggtccgcctaagtttagaccca

SEQ ID NO: 464185 - DNA, 53 bp, Artificial
  Synthetic oligonucleotide
tctgctcaaagtgccctacttcgtgcgcgtccaaggcctactccggatctgcg

SEQ ID NO: 464186 - DNA, 54 bp, Artificial
  Synthetic oligonucleotide
tctgctcaagccatcattgactcgggcgggccctgcagtgggcatctccgaagg

SEQ ID NO: 464187 - DNA, 60 bp, Artificial
  Synthetic oligonucleotide
tctgctcatactaatgatgtaaaacaattagtggaggtagtgcaaaaagtggctacagaa

SEQ ID NO: 464188 - DNA, 55 bp, Artificial
  Synthetic oligonucleotide
tctgctcatggaggctagcagccagtactcgtccttgccctaccctcagccgcca

SEQ ID NO: 464189 - DNA, 60 bp, Artificial
  Synthetic oligonucleotide
tctgctccaaaacagccaagtgttcagtctaatccgaccaaatgaaaatccagcacacaa

SEQ ID NO: 464190 - DNA, 60 bp, Artificial
  Synthetic oligonucleotide
tctgctccaaaacagtcaagtcttcagtctcatcaggccaaacgaaaatccagcacataa

SEQ ID NO: 464191 - DNA, 60 bp, Artificial
  Synthetic oligonucleotide
tctgctccaaaatctgaggggtacatcttacaaaaggactttagcagctcagatttgtcg

SEQ ID NO: 464192 - DNA, 56 bp, Artificial
  Synthetic oligonucleotide
tctgctcccttcatcgtccccatggcctccctcgaggaaaaaggcacccactacac

SEQ ID NO: 464193 - DNA, 55 bp, Artificial
  Synthetic oligonucleotide
tctgctccggcgttggggttatggtcttcgattgaggaggccgagggaagccacc

SEQ ID NO: 464194 - DNA, 55 bp, Artificial
  Synthetic oligonucleotide
tctgctcctgttggcgttgccccaacgggcatacgcgctggactcagaggtggcc

SEQ ID NO: 464195 - DNA, 60 bp, Artificial
  Synthetic oligonucleotide
tctgctcgaacatggaagggaacgtcagagtgacctccgcagcgtcgtttgtgagagcgt

SEQ ID NO: 464196 - DNA, 60 bp, Artificial
  Synthetic oligonucleotide
tctgctctccttgctcccactatagaagcagactctcccgggtctaatacgctggagccc

SEQ ID NO: 464197 - DNA, 60 bp, Artificial
  Synthetic oligonucleotide
tctgctctcggactcaatgcagtggcctattacagggggctggacgtgtcagtaataccg

SEQ ID NO: 464198 - DNA, 60 bp, Artificial
  Synthetic oligonucleotide
tctgctctgcggtcctatttagtcctctagatctagatgcccacgttgcctcacatggct

SEQ ID NO: 464199 - DNA, 55 bp, Artificial
  Synthetic oligonucleotide
tctgctctggtggaagcaaccaaattttgtgcacctatatacgagtgtgcttggg

SEQ ID NO: 464200 - DNA, 52 bp, Artificial
  Synthetic oligonucleotide
tctgctgacacaccagatcatgtatgtgcccccgggtggcccagtgccaaat

SEQ ID NO: 464201 - DNA, 59 bp, Artificial
  Synthetic oligonucleotide
tctgctgaccctttaccgggagaccataggtaacactcgagttgatgagaccacgtaca

SEQ ID NO: 464202 - DNA, 60 bp, Artificial
  Synthetic oligonucleotide
tctgctgacctcctctagcaaatctgccgtcgatctggaattcaccccatgtgagggtat

SEQ ID NO: 464203 - DNA, 56 bp, Artificial
  Synthetic oligonucleotide
tctgctgagagtagttatccacgatagtgtttccctcgccaatacttcctgacatt

SEQ ID NO: 464204 - DNA, 54 bp, Artificial
  Synthetic oligonucleotide
tctgctgaggggtcctacctcgcacgttcgcatggtgtatctgtctataggcgt

SEQ ID NO: 464205 - DNA, 55 bp, Artificial
  Synthetic oligonucleotide
tctgctgcagatccagtgcgggccttggacggtaacagccggtcactactcgctg

SEQ ID NO: 464206 - DNA, 59 bp, Artificial
  Synthetic oligonucleotide
tctgctgccttgggcagggggagaggacgaggctcgcgtccaggaccaagccccattag

SEQ ID NO: 464207 - DNA, 60 bp, Artificial
  Synthetic oligonucleotide
tctgctggcagagtgtcactgtggagcaagaggctcctggtccactagggacgtttgtgc

SEQ ID NO: 464208 - DNA, 60 bp, Artificial
  Synthetic oligonucleotide
tctgctgggatggcggcgattcgtaagggcgcgattcagggtgcagcgttggctggcgtt

SEQ ID NO: 464209 - DNA, 60 bp, Artificial
  Synthetic oligonucleotide
tctgctgggctagactctagccttggtaataaatataattctctgctgggtccctgttct

SEQ ID NO: 464210 - DNA, 55 bp, Artificial
  Synthetic oligonucleotide
tctgctggtggggacatttgggtaacgagagagccttatgtgtcgtgcgatcctg

SEQ ID NO: 464211 - DNA, 60 bp, Artificial
  Synthetic oligonucleotide
tctgctgtgcctacagctcccccactggaggagactccactacttcaactttaggggcag

SEQ ID NO: 464212 - DNA, 58 bp, Artificial
  Synthetic oligonucleotide
tctgcttaaataatgtcagggaatgtgatatctggacgttaatgatttacgtgtctca

SEQ ID NO: 464213 - DNA, 52 bp, Artificial
  Synthetic oligonucleotide
tctgcttatggtaagaatctgatttcagtatcagataatgatttctctaatc

SEQ ID NO: 464214 - DNA, 60 bp, Artificial
  Synthetic oligonucleotide
tctgcttcatgtactccgactttcacttcattgatgagcggggcgagtcagtaattgtcg

SEQ ID NO: 464215 - DNA, 60 bp, Artificial
  Synthetic oligonucleotide
tctgcttcccgaccaaaatttctcatatgaattcctgccgatgcaaaatgctgaagtgac

SEQ ID NO: 464216 - DNA, 56 bp, Artificial
  Synthetic oligonucleotide
tctgcttccggttttgtcaacacactccatgtcctagttggcccttcaccatcgcc

SEQ ID NO: 464217 - DNA, 60 bp, Artificial
  Synthetic oligonucleotide
tctgcttcctaccgacggcgacctggttgaacgggtagagctcagccggcatgacattga

SEQ ID NO: 464218 - DNA, 60 bp, Artificial
  Synthetic oligonucleotide
tctgcttgaaatgggaattgatggatgaggactaccaaggcaggctatgcaaccccctga

SEQ ID NO: 464219 - DNA, 60 bp, Artificial
  Synthetic oligonucleotide
tctgcttgaagtgggaattgatggataaagattaccaggggcgattgtgcaatccgctaa

SEQ ID NO: 464220 - DNA, 59 bp, Artificial
  Synthetic oligonucleotide
tctgcttgacccgcagtgatgatctcccctgtgcgtgaatccattatcagcgcagttga

SEQ ID NO: 464221 - DNA, 58 bp, Artificial
  Synthetic oligonucleotide
tctgcttgaggaccgtatcatgaccacaagtcacggtactaccacctcgaccacacaa

SEQ ID NO: 464222 - DNA, 59 bp, Artificial
  Synthetic oligonucleotide
tctgcttggcacctactcccgtgggtctgatgaaggaaaccgccacaccaacgagactc

SEQ ID NO: 464223 - DNA, 60 bp, Artificial
  Synthetic oligonucleotide
tctgcttggcagttaccaggctggagccggagtgatggtagagggagtgttccacacact

SEQ ID NO: 464224 - DNA, 55 bp, Artificial
  Synthetic oligonucleotide
tctgcttgtaccgggtctcggttagagaaccaggtctgagcccgggagctccctg

SEQ ID NO: 464225 - DNA, 60 bp, Artificial
  Synthetic oligonucleotide
tctgcttgtctcagtgacatgcccattccgtagaataccacgttgtcttgaattgagttc

SEQ ID NO: 464226 - DNA, 60 bp, Artificial
  Synthetic oligonucleotide
tctgctttgtatcgggaggccttagagtctccggaacattgttcgcctcaccatacagca

SEQ ID NO: 464227 - DNA, 59 bp, Artificial
  Synthetic oligonucleotide
tctgctttttgtccccgtcctattgtttcccttgcccaacatcgaccagcatctgtgac

SEQ ID NO: 464228 - DNA, 55 bp, Artificial
  Synthetic oligonucleotide
tctggaaagagagaagacatctggtgtggcagtttgattggcacacgaacccggg

SEQ ID NO: 464229 - DNA, 60 bp, Artificial
  Synthetic oligonucleotide
tctggaaagccgaaggttgcattataggatccggtggtgctgccgtctatgctcgggtct

SEQ ID NO: 464230 - DNA, 55 bp, Artificial
  Synthetic oligonucleotide
tctggaaagctagatttaggtgaaagaaccttgaattacagtgaagatgcctaca

SEQ ID NO: 464231 - DNA, 60 bp, Artificial
  Synthetic oligonucleotide
tctggaaaggcatttgtggcattcactccctcggagatggtgccataggtgcagcaactg

SEQ ID NO: 464232 - DNA, 58 bp, Artificial
  Synthetic oligonucleotide
tctggaaagtagccacaattgttgtgactattaccaggactaaagacacagttctcgt

SEQ ID NO: 464233 - DNA, 58 bp, Artificial
  Synthetic oligonucleotide
tctggaaatcggagaatgataggacttgtcaaggttgtgatcggtctagccctctcag

SEQ ID NO: 464234 - DNA, 58 bp, Artificial
  Synthetic oligonucleotide
tctggaaatctgtacgagagactcttgcgggcgcgtggggagacttatggaaaactct

SEQ ID NO: 464235 - DNA, 60 bp, Artificial
  Synthetic oligonucleotide
tctggaaattccgtaaatctcagccatggttacgtcatcgtccaagtgcatcgtcttcca

SEQ ID NO: 464236 - DNA, 60 bp, Artificial
  Synthetic oligonucleotide
tctggaacatctgcaaagctgaagtgcagaacacatacctagccaaacccattgcaaatc

SEQ ID NO: 464237 - DNA, 60 bp, Artificial
  Synthetic oligonucleotide
tctggaactgtaatgtagacatgtacccagagttctcaattgtttgtaggtttgatactc

SEQ ID NO: 464238 - DNA, 56 bp, Artificial
  Synthetic oligonucleotide
tctggaagacaccccattctaacacgtccccgtctttgtcgatgtattgtttgacg

SEQ ID NO: 464239 - DNA, 60 bp, Artificial
  Synthetic oligonucleotide
tctggaaggagtgaatgatgtgcacaacaaacaagatgtgactaagggagtgagttgtgc

SEQ ID NO: 464240 - DNA, 55 bp, Artificial
  Synthetic oligonucleotide
tctggaaggcgggcatcttatataaacgggaaactacacgtagcgcctcattttt

SEQ ID NO: 464241 - DNA, 52 bp, Artificial
  Synthetic oligonucleotide
tctggaatgggtcgctaaaggctgaactgagaccagctgaaaaagtgctcgc

SEQ ID NO: 464242 - DNA, 56 bp, Artificial
  Synthetic oligonucleotide
tctggacacaccaagtccatccttaacctacggacaaacaccgagaccaacaatcc

SEQ ID NO: 464243 - DNA, 59 bp, Artificial
  Synthetic oligonucleotide
tctggacattgctgacttcagagaagtccaatccgttcaggaggctagttgcatccttg

SEQ ID NO: 464244 - DNA, 57 bp, Artificial
  Synthetic oligonucleotide
tctggaccaaatcgctccaatgaggtttgtgttagatctaggggggaagagttacaa

SEQ ID NO: 464245 - DNA, 60 bp, Artificial
  Synthetic oligonucleotide
tctggaccaactaatgctcactacaatcagaacgctaatggcgatcgattggctgaaaat

SEQ ID NO: 464246 - DNA, 59 bp, Artificial
  Synthetic oligonucleotide
tctggaccaatacttgtgaatatatttggatcttgggtgaaaccacagtgtgttgggta

SEQ ID NO: 464247 - DNA, 60 bp, Artificial
  Synthetic oligonucleotide
tctggaccgttgtcacgatctggttggcagcctattccatgatagcgagactggggtggt

SEQ ID NO: 464248 - DNA, 58 bp, Artificial
  Synthetic oligonucleotide
tctggacgtggccctaggcagaccaaaatgcatggggaacacaccctccgcaaaagtc

SEQ ID NO: 464249 - DNA, 60 bp, Artificial
  Synthetic oligonucleotide
tctggactcagatggacacccagaactaacctaaaccatcaccccgtgccttatacatca

SEQ ID NO: 464250 - DNA, 55 bp, Artificial
  Synthetic oligonucleotide
tctggactcctttccccgtacaggtctgaggcaagacctagtcctagacttcggc

SEQ ID NO: 464251 - DNA, 60 bp, Artificial
  Synthetic oligonucleotide
tctggactgctagaggaccctcgctgccatggctaccttctatgaagtcattgttcgcgt

SEQ ID NO: 464252 - DNA, 55 bp, Artificial
  Synthetic oligonucleotide
tctggacttacgctagaccaatccgccccaacattgccattaattgcttcgtttg

SEQ ID NO: 464253 - DNA, 55 bp, Artificial
  Synthetic oligonucleotide
tctggactttgagttgataaactggcccggaacggaagaagtcctggagtttgag

SEQ ID NO: 464254 - DNA, 60 bp, Artificial
  Synthetic oligonucleotide
tctggactttgagttgatatatcgttccgaatctctcgaaccatagtagtttgaagtata

SEQ ID NO: 464255 - DNA, 56 bp, Artificial
  Synthetic oligonucleotide
tctggagacatcgggccaggagcgtccgcgctaagctactgtcccagggggggagg

SEQ ID NO: 464256 - DNA, 55 bp, Artificial
  Synthetic oligonucleotide
tctggagacttccgacctgtgaggtcgaggattccccgtggagggagacagccac

SEQ ID NO: 464257 - DNA, 56 bp, Artificial
  Synthetic oligonucleotide
tctggagagagttaggtcatctcgagaaggattcccagatttgagcttgtacttca

SEQ ID NO: 464258 - DNA, 60 bp, Artificial
  Synthetic oligonucleotide
tctggagaggaggagtataaaaacttcattgagaagatcagatcaaccagcattggtaaa

SEQ ID NO: 464259 - DNA, 60 bp, Artificial
  Synthetic oligonucleotide
tctggagatattcctccttacttgtcgcagtctggataatagttcgccatcgttcatcag

SEQ ID NO: 464260 - DNA, 60 bp, Artificial
  Synthetic oligonucleotide
tctggagatcctctaaatccccaaatgcatgaatttagcaggtcgctattgaagaaatgc

SEQ ID NO: 464261 - DNA, 54 bp, Artificial
  Synthetic oligonucleotide
tctggagattacaagataaagaatttggcatccttatcatatgacactataacc

SEQ ID NO: 464262 - DNA, 60 bp, Artificial
  Synthetic oligonucleotide
tctggagcaaagctcatcggaactgacaattctgtcgtcctttcgcggaaacatacatcg

SEQ ID NO: 464263 - DNA, 55 bp, Artificial
  Synthetic oligonucleotide
tctggagcaagtcttgctagctgcacgtcgatgcgctatgtggaagggcccagac

SEQ ID NO: 464264 - DNA, 58 bp, Artificial
  Synthetic oligonucleotide
tctggagcgatgctagaatgtttgctgacggacagacccaaaaagcgttcatagagta

SEQ ID NO: 464265 - DNA, 51 bp, Artificial
  Synthetic oligonucleotide
tctggaggacgtctgatgagtaccaccgacacaaccactaccgaaccgagt

SEQ ID NO: 464266 - DNA, 55 bp, Artificial
  Synthetic oligonucleotide
tctggaggagggtcgcgaactggcgctacggtgtgctgctggcacctacgcaaaa

SEQ ID NO: 464267 - DNA, 50 bp, Artificial
  Synthetic oligonucleotide
tctggaggatcctaccgctttaaatatcaaaggaggggctagtcccacca

SEQ ID NO: 464268 - DNA, 55 bp, Artificial
  Synthetic oligonucleotide
tctggaggttttactttagcagatgatgcggcagcaaagaaacagcgtgaggagg

SEQ ID NO: 464269 - DNA, 60 bp, Artificial
  Synthetic oligonucleotide
tctggagtggagtccgctgttctgaggggattcctcattctgggcaaagaagacaggaga

SEQ ID NO: 464270 - DNA, 55 bp, Artificial
  Synthetic oligonucleotide
tctggagtttgacgctgacttgataattgaacgaagggaaggaaccgatgtgtgc

SEQ ID NO: 464271 - DNA, 55 bp, Artificial
  Synthetic oligonucleotide
tctggataccatttggggtaacatgacttggatgcagtgggagaaagaaattgac

SEQ ID NO: 464272 - DNA, 60 bp, Artificial
  Synthetic oligonucleotide
tctggatatgacgtcggtgaattgtgctctaaaggatacatgagcgttcctcaagtgtta

SEQ ID NO: 464273 - DNA, 58 bp, Artificial
  Synthetic oligonucleotide
tctggatccaattgcccacctcgttacggtcaggcgtaggcccttctctatcaatccg

SEQ ID NO: 464274 - DNA, 60 bp, Artificial
  Synthetic oligonucleotide
tctggatctattagcggggcgtaatcgcggagagaaagtgaaggattcgcaagcgctcgt

SEQ ID NO: 464275 - DNA, 60 bp, Artificial
  Synthetic oligonucleotide
tctggatggatgagaacattaagactaagaatcatacgaatagtgttatgtttttccttg

SEQ ID NO: 464276 - DNA, 52 bp, Artificial
  Synthetic oligonucleotide
tctggatgtgagttcggtgcgatttaacacacgggtttggagaaaccgaccc

SEQ ID NO: 464277 - DNA, 60 bp, Artificial
  Synthetic oligonucleotide
tctggatgtgctctaatgggtcattgcaatgcagaatatgcatttagagcttggatttca

SEQ ID NO: 464278 - DNA, 59 bp, Artificial
  Synthetic oligonucleotide
tctggatgtttcggccatccaggttaggtcagacgctgcctcttctagggttaagcaac

SEQ ID NO: 464279 - DNA, 60 bp, Artificial
  Synthetic oligonucleotide
tctggattattgcttataagagagaaataacctatacagaggattctcaacagcacagaa

SEQ ID NO: 464280 - DNA, 51 bp, Artificial
  Synthetic oligonucleotide
tctggattcgactggagatagacatgagcggaggagatttatcaggacccg

SEQ ID NO: 464281 - DNA, 51 bp, Artificial
  Synthetic oligonucleotide
tctggattcgtcctggaccccctcggatgacgagattatcgaggacaatga

SEQ ID NO: 464282 - DNA, 60 bp, Artificial
  Synthetic oligonucleotide
tctggattggataagtctagggcgaggtctagctacatcggctctcgttccaaccgctgg

SEQ ID NO: 464283 - DNA, 55 bp, Artificial
  Synthetic oligonucleotide
tctggcaacagactatacatgcacccggcagttctaactcctggtcgaatgagtg

SEQ ID NO: 464284 - DNA, 55 bp, Artificial
  Synthetic oligonucleotide
tctggcacctatgcgggtctccccatcgctgattacggcgatgccccgcctttga

SEQ ID NO: 464285 - DNA, 60 bp, Artificial
  Synthetic oligonucleotide
tctggcacgatctgcactcattctgagaggatccgtggctcataaatcctgcctgcctgc

SEQ ID NO: 464286 - DNA, 55 bp, Artificial
  Synthetic oligonucleotide
tctggcagacccgtactgtcgtgcgctcggatatcacctccgaggagggcacgat

SEQ ID NO: 464287 - DNA, 60 bp, Artificial
  Synthetic oligonucleotide
tctggcagatgctcggatttgtacgtgtctctggttaatgctgctcataagtagcgttga

SEQ ID NO: 464288 - DNA, 60 bp, Artificial
  Synthetic oligonucleotide
tctggcagcattgctgtgggcacatatactatgactaaggtgcctgtctctctcgcaatg

SEQ ID NO: 464289 - DNA, 60 bp, Artificial
  Synthetic oligonucleotide
tctggcagccaatcagttgcttccagcacgggcagtacttgaagggtatgtcgtcgatta

SEQ ID NO: 464290 - DNA, 60 bp, Artificial
  Synthetic oligonucleotide
tctggcatgaaactgttatcataatcacaacgaccatccactattggaaccagtgtgatg

SEQ ID NO: 464291 - DNA, 55 bp, Artificial
  Synthetic oligonucleotide
tctggcatgaaccaggatccagtgccttttatccctgaagggatagcagctgcca

SEQ ID NO: 464292 - DNA, 60 bp, Artificial
  Synthetic oligonucleotide
tctggcattcaagcaccagtgggtgctattacaactattgaggatccagtgttagctaaa

SEQ ID NO: 464293 - DNA, 60 bp, Artificial
  Synthetic oligonucleotide
tctggccaattcatgaccactgatgactttcagtcacctagtgcgttaccatggtttcac

SEQ ID NO: 464294 - DNA, 56 bp, Artificial
  Synthetic oligonucleotide
tctggccacctgggtgggaagtaatttggaagacccagcatccagggaattagtag

SEQ ID NO: 464295 - DNA, 59 bp, Artificial
  Synthetic oligonucleotide
tctggccacctgggtgggaggtaatttgcaagacccaacatccagggaagcagtagtca

SEQ ID NO: 464296 - DNA, 59 bp, Artificial
  Synthetic oligonucleotide
tctggccagtcccacccttagcgagctagttgatctcaccaataaggtgacaaacgccc

SEQ ID NO: 464297 - DNA, 56 bp, Artificial
  Synthetic oligonucleotide
tctggcccaataattaagagaacgtgttcaaaatctgggtatgaccgaaggtcaag

SEQ ID NO: 464298 - DNA, 60 bp, Artificial
  Synthetic oligonucleotide
tctggcccatttctgccgcaaattccaacctctgtacgccacagaagcaaagagagtgta

SEQ ID NO: 464299 - DNA, 60 bp, Artificial
  Synthetic oligonucleotide
tctggccgcgcagcggaactccgaccaaaatattcagcaacccaatgttgcatatcctca

SEQ ID NO: 464300 - DNA, 57 bp, Artificial
  Synthetic oligonucleotide
tctggccgctccccagactccgacgttgagtcctgttcttccatgccccccctagag

SEQ ID NO: 464301 - DNA, 54 bp, Artificial
  Synthetic oligonucleotide
tctggccgtcgattaaccccgacaccggaggaacgcaatactggtggttcccgc

SEQ ID NO: 464302 - DNA, 55 bp, Artificial
  Synthetic oligonucleotide
tctggccgtgattatatccccggccgtcagcttgaattctacgcgcagtgccgac

SEQ ID NO: 464303 - DNA, 60 bp, Artificial
  Synthetic oligonucleotide
tctggccgtgtgcatcgggtgctcaatcgttttagtcgtgtggttcttctacgagcgggc

SEQ ID NO: 464304 - DNA, 55 bp, Artificial
  Synthetic oligonucleotide
tctggcgacgaattttctgaatagagttgaaaggcagttgagttacgcaccacga

SEQ ID NO: 464305 - DNA, 55 bp, Artificial
  Synthetic oligonucleotide
tctggcgacgactcactcatagaccaccctcttcccactcgccacgactggccct

SEQ ID NO: 464306 - DNA, 55 bp, Artificial
  Synthetic oligonucleotide
tctggcgaggggatggcgtcatgcacactcgctgccactgcggagctgaaatcac

SEQ ID NO: 464307 - DNA, 55 bp, Artificial
  Synthetic oligonucleotide
tctggcgaggtatgtggtgctagtcgccgccgttttcgcagaagccaacagtgga

SEQ ID NO: 464308 - DNA, 55 bp, Artificial
  Synthetic oligonucleotide
tctggcgatacctgtgccaggaggtagtaactacaactctgctgttcggcgtcag

SEQ ID NO: 464309 - DNA, 60 bp, Artificial
  Synthetic oligonucleotide
tctggcgatctactcaacagtcgccagttcactagtgcttttggtctccctgggggcaat

SEQ ID NO: 464310 - DNA, 55 bp, Artificial
  Synthetic oligonucleotide
tctggcgcactggtgacatagcgagcccggaagctcgtcccatgccctgtcgata

SEQ ID NO: 464311 - DNA, 60 bp, Artificial
  Synthetic oligonucleotide
tctggcgccaagcgaataatggggaggacgcaactgctggtctaacccatctaatgatat

SEQ ID NO: 464312 - DNA, 57 bp, Artificial
  Synthetic oligonucleotide
tctggcgcctccctggctccccacctcgaaggaggtggggagccagggaggccctga

SEQ ID NO: 464313 - DNA, 54 bp, Artificial
  Synthetic oligonucleotide
tctggcgggggtaaacggggctatgtctttcagtttgaaacgtgcagaacttac

SEQ ID NO: 464314 - DNA, 55 bp, Artificial
  Synthetic oligonucleotide
tctggctaagggttccaaaggttttgaagcaggtttccattcagaaattgttcaa

SEQ ID NO: 464315 - DNA, 60 bp, Artificial
  Synthetic oligonucleotide
tctggctaagttattgtcttctctcgagcttgataatcccaggattgtctagcttatggg

SEQ ID NO: 464316 - DNA, 60 bp, Artificial
  Synthetic oligonucleotide
tctggctacaaagagcgcagggtcataataatggcatcttatggggtaatcaattgtttg

SEQ ID NO: 464317 - DNA, 55 bp, Artificial
  Synthetic oligonucleotide
tctggctacgaccgcctccggtgtgggtgtgtgtccgtcgtcttcctctctcgcg

SEQ ID NO: 464318 - DNA, 55 bp, Artificial
  Synthetic oligonucleotide
tctggctatcaatggggcagagattgattacaggccatctattgatcgcgcttca

SEQ ID NO: 464319 - DNA, 54 bp, Artificial
  Synthetic oligonucleotide
tctggctcaggggcgtttttattatttaacgaacccatacccgacaggattaga

SEQ ID NO: 464320 - DNA, 59 bp, Artificial
  Synthetic oligonucleotide
tctggctgacacgtaaaggatcaaattatccggttgccaaaggatcgtacaacaataca

SEQ ID NO: 464321 - DNA, 60 bp, Artificial
  Synthetic oligonucleotide
tctggctgacttgaaggaaaggagtaaaatcagtcaggctagaaatgctgctgaaatgag

SEQ ID NO: 464322 - DNA, 58 bp, Artificial
  Synthetic oligonucleotide
tctggctgcactgtcccgaactttctatgggaagactgtagaagtggactaagatttt

SEQ ID NO: 464323 - DNA, 55 bp, Artificial
  Synthetic oligonucleotide
tctggcttagatttgagagctctcatcatcaatcttggcggtttaccaagcagac

SEQ ID NO: 464324 - DNA, 59 bp, Artificial
  Synthetic oligonucleotide
tctggcttccaacacgtgtggacgaccaacgtactaagtatgtggtcgcacataagttg

SEQ ID NO: 464325 - DNA, 59 bp, Artificial
  Synthetic oligonucleotide
tctggcttgacgcgtgcgtaggtccgctcatagaccagccttcctgttggcccccaagg

SEQ ID NO: 464326 - DNA, 60 bp, Artificial
  Synthetic oligonucleotide
tctggctttcagccaagaccactcagaaagcaacaacagcactgcaacactgtgcttggg

SEQ ID NO: 464327 - DNA, 60 bp, Artificial
  Synthetic oligonucleotide
tctgggaactgcaatgttgcaactaacagatggccagtgatacaatgcgagaatgacaaa

SEQ ID NO: 464328 - DNA, 55 bp, Artificial
  Synthetic oligonucleotide
tctgggaagcttagttaaccgttccagacgtggggaccaagtagtgtatgaccac

SEQ ID NO: 464329 - DNA, 60 bp, Artificial
  Synthetic oligonucleotide
tctgggaaggatcacctggtaagttctggaacaccacgatagctgtttccatggcgaaca

SEQ ID NO: 464330 - DNA, 55 bp, Artificial
  Synthetic oligonucleotide
tctgggaagtcgatttaacagagcgattttctcaagatctagaccagtttccgct

SEQ ID NO: 464331 - DNA, 57 bp, Artificial
  Synthetic oligonucleotide
tctgggaagttgaagactatggatttggaattttcacgacaaacatatggttgaaat

SEQ ID NO: 464332 - DNA, 52 bp, Artificial
  Synthetic oligonucleotide
tctgggaattggtgaaactgattaggggttatggaccatgagtgactataac

SEQ ID NO: 464333 - DNA, 58 bp, Artificial
  Synthetic oligonucleotide
tctgggaatttatcttggatggtctattcccaagaataaacagacttacgatgcccta

SEQ ID NO: 464334 - DNA, 60 bp, Artificial
  Synthetic oligonucleotide
tctgggaccgtcaacgtcagtcaatccggaggtgatgacaatatgggagagagaacgact

SEQ ID NO: 464335 - DNA, 57 bp, Artificial
  Synthetic oligonucleotide
tctgggacggggttcacctctccaactgacacttcaaccccggactcccctgatgca

SEQ ID NO: 464336 - DNA, 60 bp, Artificial
  Synthetic oligonucleotide
tctgggactcatcctgctcgtgaacctactattcttcgagagtggcgagatggcaagctg

SEQ ID NO: 464337 - DNA, 50 bp, Artificial
  Synthetic oligonucleotide
tctgggactttggactgcaatcatccgttacccttgtaataccatggatc

SEQ ID NO: 464338 - DNA, 57 bp, Artificial
  Synthetic oligonucleotide
tctgggaggagtttgtgacatggttccctcattatggggttggaccaattaatcgtg

SEQ ID NO: 464339 - DNA, 56 bp, Artificial
  Synthetic oligonucleotide
tctgggagttctattgctcaaaaagcgattggtagtgggcgtgaggaaagtttaaa

SEQ ID NO: 464340 - DNA, 60 bp, Artificial
  Synthetic oligonucleotide
tctgggatagcgcccagcaattttatgaaccacaggatagcgcctgtggaaaatttgtga

SEQ ID NO: 464341 - DNA, 53 bp, Artificial
  Synthetic oligonucleotide
tctgggatccgcctacgacccttactttacctactcgggtagcattccctatt

SEQ ID NO: 464342 - DNA, 60 bp, Artificial
  Synthetic oligonucleotide
tctgggcaaagaggaaaatcagcacaaacctctgagctactccaggttccaaaatcaggc

SEQ ID NO: 464343 - DNA, 52 bp, Artificial
  Synthetic oligonucleotide
tctgggcactgtcgtatattctctgggtgactatcgtgttattgaccttgca

SEQ ID NO: 464344 - DNA, 55 bp, Artificial
  Synthetic oligonucleotide
tctgggccgtcgcccccccaatcgagccagcgaacgagcgaacgcgacagggggg

SEQ ID NO: 464345 - DNA, 60 bp, Artificial
  Synthetic oligonucleotide
tctgggcgggaccggggagtggccagccctcagatgctgcatataagcagctgcttctcg

SEQ ID NO: 464346 - DNA, 60 bp, Artificial
  Synthetic oligonucleotide
tctgggcgttgcctatgggcatccgctttcaacaagtcaaattggtgaccgctgttttgc

SEQ ID NO: 464347 - DNA, 55 bp, Artificial
  Synthetic oligonucleotide
tctgggctaaacacatgtggaacttcgttagcgggatacaatatctggcgggcct

SEQ ID NO: 464348 - DNA, 57 bp, Artificial
  Synthetic oligonucleotide
tctgggctacacatgcctgtgtacccacagaccccaacccacaagaaatagctctaa

SEQ ID NO: 464349 - DNA, 57 bp, Artificial
  Synthetic oligonucleotide
tctgggctccaattactttagtaggccgtgtcgattccaatcctaaagtaatcactc

SEQ ID NO: 464350 - DNA, 55 bp, Artificial
  Synthetic oligonucleotide
tctggggaccgacttctcggctgggtttcatcgtcacgccttcagttcgtagtgt

SEQ ID NO: 464351 - DNA, 53 bp, Artificial
  Synthetic oligonucleotide
tctggggaggaagtgcattactttaaccagtatatcgagaataagaatccccc

SEQ ID NO: 464352 - DNA, 55 bp, Artificial
  Synthetic oligonucleotide
tctggggaggccaccgcgcctgagtcgcgcgggtgccaggggtgcgaactctgtc

SEQ ID NO: 464353 - DNA, 53 bp, Artificial
  Synthetic oligonucleotide
tctggggatacctgagtcaattatcgggctaattcaaaactctagaacaatca

SEQ ID NO: 464354 - DNA, 51 bp, Artificial
  Synthetic oligonucleotide
tctggggcattggatggatgggacattcaatatcaaaactgcatttcactg

SEQ ID NO: 464355 - DNA, 52 bp, Artificial
  Synthetic oligonucleotide
tctggggcggctctcctatacctcaccaggtggtcagaaacccctgccgaga

SEQ ID NO: 464356 - DNA, 60 bp, Artificial
  Synthetic oligonucleotide
tctggggctgtgatgtcggcgttgccactgtatgtgcggctgcatttaaaggtgttagtg

SEQ ID NO: 464357 - DNA, 55 bp, Artificial
  Synthetic oligonucleotide
tctggggtaatcccatgcgccagcggggaattgcccacgatgaccggtggattca

SEQ ID NO: 464358 - DNA, 58 bp, Artificial
  Synthetic oligonucleotide
tctggggttacgaaaccttcacaggtggctggttcagactgaaccatgaactattctg

SEQ ID NO: 464359 - DNA, 60 bp, Artificial
  Synthetic oligonucleotide
tctggggttgctctggaaaactcatttgcaccactgctgtgccttggaatgttagttgga

SEQ ID NO: 464360 - DNA, 60 bp, Artificial
  Synthetic oligonucleotide
tctgggtacagacagttactacttcacatgctactttttgcggctgtggtgaccctagta

SEQ ID NO: 464361 - DNA, 55 bp, Artificial
  Synthetic oligonucleotide
tctgggtaggaactgtaatggagtttactaatcaaggggttctagtcgagtataa

SEQ ID NO: 464362 - DNA, 59 bp, Artificial
  Synthetic oligonucleotide
tctgggtcgtaagtttttggcacagtctaacctgtctacgcagcgatctgtccgtaagc

SEQ ID NO: 464363 - DNA, 51 bp, Artificial
  Synthetic oligonucleotide
tctgggtcgtatatagtctcaggcagccagttgcagtcttactttaaggcg

SEQ ID NO: 464364 - DNA, 60 bp, Artificial
  Synthetic oligonucleotide
tctgggtgacgagagaaccttatgtgtcatgcgatcctggtaaatgttatcagtttgcac

SEQ ID NO: 464365 - DNA, 55 bp, Artificial
  Synthetic oligonucleotide
tctgggtgacgtgctttggctcgcgtacaagcgggcgatggagctcccagatgag

SEQ ID NO: 464366 - DNA, 50 bp, Artificial
  Synthetic oligonucleotide
tctgggtggagttagatcaagatgtctacgttgacaaaaagattagagaa

SEQ ID NO: 464367 - DNA, 59 bp, Artificial
  Synthetic oligonucleotide
tctgggtggttcaaaagcactacgtatattacattagaccaaacttgcgagcacttgaa

SEQ ID NO: 464368 - DNA, 58 bp, Artificial
  Synthetic oligonucleotide
tctgggttcagcctagattatgggttttcagtgatgggcaaaactacttcttattgga

SEQ ID NO: 464369 - DNA, 55 bp, Artificial
  Synthetic oligonucleotide
tctgggttccacctgaggacccactggcgagccccagtcggcttgccaaattcct

SEQ ID NO: 464370 - DNA, 58 bp, Artificial
  Synthetic oligonucleotide
tctgggttgattggaatggctgaaacagttggtggtatcggaaggtggattgtcaatt

SEQ ID NO: 464371 - DNA, 60 bp, Artificial
  Synthetic oligonucleotide
tctgggttggctgtacccaagttgccaattcctgagaaatatctcaagatgcctatcacg

SEQ ID NO: 464372 - DNA, 51 bp, Artificial
  Synthetic oligonucleotide
tctgggttgggaccccgaaacccaattagtaactccgggagtgtacactaa

SEQ ID NO: 464373 - DNA, 57 bp, Artificial
  Synthetic oligonucleotide
tctgggttggtgatcagtactttaggatacccagaacttatattatgccaacaatgc

SEQ ID NO: 464374 - DNA, 52 bp, Artificial
  Synthetic oligonucleotide
tctgggtttttcgttgtgtttcgggaagttccccatttacacgataccagac

SEQ ID NO: 464375 - DNA, 55 bp, Artificial
  Synthetic oligonucleotide
tctggtaaagaccatccgagtcaagccccataaagaagttctccaggcagtgtcg

SEQ ID NO: 464376 - DNA, 60 bp, Artificial
  Synthetic oligonucleotide
tctggtaaaggacctgaacttggatcgtgtcataatctagttgcaatctcgagacatcgg

SEQ ID NO: 464377 - DNA, 60 bp, Artificial
  Synthetic oligonucleotide
tctggtacagaagtgggatgtcatccgctgtccagtcatatggaaccctgccggagtggg

SEQ ID NO: 464378 - DNA, 59 bp, Artificial
  Synthetic oligonucleotide
tctggtacattgttatgtgtttctgatgttactcgtggtaacggtcttactcatcgttc

SEQ ID NO: 464379 - DNA, 56 bp, Artificial
  Synthetic oligonucleotide
tctggtaccctgctttgtgtatccgatattacccgtggtaatgggcttactcatcg

SEQ ID NO: 464380 - DNA, 60 bp, Artificial
  Synthetic oligonucleotide
tctggtacctgagctgtgggctgctcttcccaaagggcgaaagatacacacaagtggact

SEQ ID NO: 464381 - DNA, 60 bp, Artificial
  Synthetic oligonucleotide
tctggtacgactgcatgtcggttttgaacgcgaaaccaggctccgtccaatgatcagagt

SEQ ID NO: 464382 - DNA, 57 bp, Artificial
  Synthetic oligonucleotide
tctggtactgtgtctttgatggctgtgcttaaaagtcgcaatgattacccgagcgta

SEQ ID NO: 464383 - DNA, 60 bp, Artificial
  Synthetic oligonucleotide
tctggtagactcctacctgtcgagatagctggtcttcgggcctgtactggccctcagcac

SEQ ID NO: 464384 - DNA, 54 bp, Artificial
  Synthetic oligonucleotide
tctggtataattcgataaccaggtcgcgcgcgatgtgttaacgctctcgcgtag

SEQ ID NO: 464385 - DNA, 60 bp, Artificial
  Synthetic oligonucleotide
tctggtatagctgcagtagagatacagaagatagatgaactgttcacgctgattagatgt

SEQ ID NO: 464386 - DNA, 54 bp, Artificial
  Synthetic oligonucleotide
tctggtattgcggtacctttgtacgcctgttttatactccctccccccgtgcaa

SEQ ID NO: 464387 - DNA, 60 bp, Artificial
  Synthetic oligonucleotide
tctggtatttgcactgaggagttatgaaagcggaacagccgcactgcttccacactatcc

SEQ ID NO: 464388 - DNA, 60 bp, Artificial
  Synthetic oligonucleotide
tctggtattttctctgttgaaggcaaaagctgcatcaacaggtgtttttatgtggagttg

SEQ ID NO: 464389 - DNA, 57 bp, Artificial
  Synthetic oligonucleotide
tctggtcaaaaatgcaggttaccttgttggaagaaagccactggcattctttagttg

SEQ ID NO: 464390 - DNA, 55 bp, Artificial
  Synthetic oligonucleotide
tctggtcaacgccagagtaggctccacgggtctacgtcttggccagaaggcaacg

SEQ ID NO: 464391 - DNA, 56 bp, Artificial
  Synthetic oligonucleotide
tctggtcccgtgttgtacaattcggcacgggatggggcttctgggttagcggccac

SEQ ID NO: 464392 - DNA, 55 bp, Artificial
  Synthetic oligonucleotide
tctggtcgggatagaccccttcaaactacttcaaaacagtcaagtatttagccta

SEQ ID NO: 464393 - DNA, 57 bp, Artificial
  Synthetic oligonucleotide
tctggtcgtattccccgtaatccctctgctaagagggacgcacttcaggtggctacc

SEQ ID NO: 464394 - DNA, 51 bp, Artificial
  Synthetic oligonucleotide
tctggtcgtccatgttggacatcgcgtagcgcatcattcggtgctcaacct

SEQ ID NO: 464395 - DNA, 55 bp, Artificial
  Synthetic oligonucleotide
tctggtctacaatacctctggtactcaaatcaatggactaacctttggtacaggt

SEQ ID NO: 464396 - DNA, 60 bp, Artificial
  Synthetic oligonucleotide
tctggtctaccgctggaaggctaagagcgataatcgtgcacatactcagcgtgtgacact

SEQ ID NO: 464397 - DNA, 55 bp, Artificial
  Synthetic oligonucleotide
tctggtctagtattaaagtttcaacccttgttcttacagccctaggtatgtacgc

SEQ ID NO: 464398 - DNA, 59 bp, Artificial
  Synthetic oligonucleotide
tctggtctttaacagaactccacgtccaggtcatagaaactggttggtaggctgcctga

SEQ ID NO: 464399 - DNA, 51 bp, Artificial
  Synthetic oligonucleotide
tctggtgaaaggacatccagagttgtccatggatggtttctgcggtgaaaa

SEQ ID NO: 464400 - DNA, 58 bp, Artificial
  Synthetic oligonucleotide
tctggtgacgatatcttactagtacttggtgcatttaataagtacacggccaacttta

SEQ ID NO: 464401 - DNA, 55 bp, Artificial
  Synthetic oligonucleotide
tctggtgagccgtgcaagtactagcataccaatgatgcacaaggccgatcagaag

SEQ ID NO: 464402 - DNA, 59 bp, Artificial
  Synthetic oligonucleotide
tctggtgatagatacgttaggatgggaactgaaagcatgaattttgccaagggtccgga

SEQ ID NO: 464403 - DNA, 54 bp, Artificial
  Synthetic oligonucleotide
tctggtgcggcagtttgatcggaacgcggacaagggccacttgggcagaaaaca

SEQ ID NO: 464404 - DNA, 55 bp, Artificial
  Synthetic oligonucleotide
tctggtggaacgtacttcgcttggggtagacaccctgagcaaggtagtaactgtg

SEQ ID NO: 464405 - DNA, 51 bp, Artificial
  Synthetic oligonucleotide
tctggtggcagtacttcaagcaaaaaattactggggaccatgaattcgtgc

SEQ ID NO: 464406 - DNA, 60 bp, Artificial
  Synthetic oligonucleotide
tctggtggcgcttgaaattgtcaacaactcaattctgttaagtaggttgcactgaacaat

SEQ ID NO: 464407 - DNA, 54 bp, Artificial
  Synthetic oligonucleotide
tctggtggggtcgctaaaactaaacgccttaacggtacgcatgcttagacgcaa

SEQ ID NO: 464408 - DNA, 60 bp, Artificial
  Synthetic oligonucleotide
tctggtgtaatcacatgtgtatgcagggataattggcatggttcgaatcgaccgtgggtg

SEQ ID NO: 464409 - DNA, 60 bp, Artificial
  Synthetic oligonucleotide
tctggtgtatgtgcacatagtgcgtcagcttgccccctaacgtcacctcctcgtgtagtt

SEQ ID NO: 464410 - DNA, 59 bp, Artificial
  Synthetic oligonucleotide
tctggtgtgatcccagaaggtgcagttctctttacagtgagcaatgacactgtgaaccg

SEQ ID NO: 464411 - DNA, 55 bp, Artificial
  Synthetic oligonucleotide
tctggtgtgcaattcaggtatacagatcctgacacatacactagtgctggtcacc

SEQ ID NO: 464412 - DNA, 60 bp, Artificial
  Synthetic oligonucleotide
tctggtgtgtcttaggagattcaaaccttccaggcatcgagatttgggatagcgcactta

SEQ ID NO: 464413 - DNA, 53 bp, Artificial
  Synthetic oligonucleotide
tctggttacgcgaataaatttcttgtgggtaggtgtttgaagtgcctgtaatt

SEQ ID NO: 464414 - DNA, 56 bp, Artificial
  Synthetic oligonucleotide
tctggttactgtatccaccgccgggttttgtcacgggcggtatgtcttgagtagcg

SEQ ID NO: 464415 - DNA, 55 bp, Artificial
  Synthetic oligonucleotide
tctggttagttagggataggcgtcctgtcacaacgccatatgggttcggcgaggc

SEQ ID NO: 464416 - DNA, 59 bp, Artificial
  Synthetic oligonucleotide
tctggttcacacagcattccgagcaggattagccaaggtcatctatccgagtcctaacc

SEQ ID NO: 464417 - DNA, 55 bp, Artificial
  Synthetic oligonucleotide
tctggttcatttggcgtgatttcaccctttacgttgggtttgatgtccccgaaga

SEQ ID NO: 464418 - DNA, 55 bp, Artificial
  Synthetic oligonucleotide
tctggttcgtctacgatggtggaaacctaccagtgcagttttatgaagcccaggc

SEQ ID NO: 464419 - DNA, 60 bp, Artificial
  Synthetic oligonucleotide
tctggttcgtgggaacgttgaggatattatggatgcaggaatcacaattcagaatcattt

SEQ ID NO: 464420 - DNA, 50 bp, Artificial
  Synthetic oligonucleotide
tctggttctgcctactcctgcttgctacaggggtaggcatttaccttctc

SEQ ID NO: 464421 - DNA, 58 bp, Artificial
  Synthetic oligonucleotide
tctggttgccttcttggcgttgcggtgttgcaccttgataggaaccggagtagagtgg

SEQ ID NO: 464422 - DNA, 53 bp, Artificial
  Synthetic oligonucleotide
tctggttggttagggaccgtagaccctacggtactcccatggatttcggtcag

SEQ ID NO: 464423 - DNA, 60 bp, Artificial
  Synthetic oligonucleotide
tctggttgtgcctgctcggactgtcaatggtctggatcgccttttgtggatacaagagtt

SEQ ID NO: 464424 - DNA, 58 bp, Artificial
  Synthetic oligonucleotide
tctggttgttctcagcgcctgcctgtacgttagcagctacgttaggtccaccgccccc

SEQ ID NO: 464425 - DNA, 54 bp, Artificial
  Synthetic oligonucleotide
tctggtttaaattacttaatagagtactaactgaattgggctttccaggtgatt

SEQ ID NO: 464426 - DNA, 50 bp, Artificial
  Synthetic oligonucleotide
tctggtttagataactccacacccgtagtaacattacctcttgcttccgg

SEQ ID NO: 464427 - DNA, 59 bp, Artificial
  Synthetic oligonucleotide
tctggtttcgcagttcacttcatgaagcaggaaatcctagatgcgatggctcgcatctc

SEQ ID NO: 464428 - DNA, 60 bp, Artificial
  Synthetic oligonucleotide
tctggtttggtgtctgaatggacattagatgagagtagagtattttatggtacttataaa

SEQ ID NO: 464429 - DNA, 60 bp, Artificial
  Synthetic oligonucleotide
tctggtttgtccaaccagagtttaaatgaggatccctctcctggattgcagaggaagata

SEQ ID NO: 464430 - DNA, 59 bp, Artificial
  Synthetic oligonucleotide
tctggtttgttccaagcatcaaatcaggaaatgacattgccaactgtttaagaaagaac

SEQ ID NO: 464431 - DNA, 58 bp, Artificial
  Synthetic oligonucleotide
tctgtaaaaaagatgtttggagagttgagtgtggtatcccttctggatttccactcac

SEQ ID NO: 464432 - DNA, 60 bp, Artificial
  Synthetic oligonucleotide
tctgtaacctgactgatgccttcaagaagagcaccttcgaccacacactcatgagtataa

SEQ ID NO: 464433 - DNA, 55 bp, Artificial
  Synthetic oligonucleotide
tctgtaagacaggatgatggccaaatgagaccaattatggtcgttccattcggag

SEQ ID NO: 464434 - DNA, 60 bp, Artificial
  Synthetic oligonucleotide
tctgtaagggacataacaacatgtactgtcaacagttggacatcgacagttatccgcgcc

SEQ ID NO: 464435 - DNA, 53 bp, Artificial
  Synthetic oligonucleotide
tctgtaagtcactaaacgttttacggtgaacgggttgtccatccagttacgga

SEQ ID NO: 464436 - DNA, 58 bp, Artificial
  Synthetic oligonucleotide
tctgtaatgattcagtatacatgatgactcatagccaaccttcaggaaaccccgcaac

SEQ ID NO: 464437 - DNA, 55 bp, Artificial
  Synthetic oligonucleotide
tctgtaattgcctgttaatcaataaaccggttgattcgtttcagttgaactttgg

SEQ ID NO: 464438 - DNA, 53 bp, Artificial
  Synthetic oligonucleotide
tctgtaattggtccagacacatcgttgacaataaatgaagttggggtaccggc

SEQ ID NO: 464439 - DNA, 55 bp, Artificial
  Synthetic oligonucleotide
tctgtacaactggacgcgtcccgagaaaatgacgcaggagcggatggacgctgct

SEQ ID NO: 464440 - DNA, 60 bp, Artificial
  Synthetic oligonucleotide
tctgtacaatatccggaatctccacatcccggaagtctgcttgaaatgggagctaatgga

SEQ ID NO: 464441 - DNA, 60 bp, Artificial
  Synthetic oligonucleotide
tctgtacaggttcaaccgttgtgttcaacggcactctctcatcgggggcctgtggtatca

SEQ ID NO: 464442 - DNA, 55 bp, Artificial
  Synthetic oligonucleotide
tctgtacccagtgaagaaactatcgtgtaggcaatgcagattccgcatcaaagat

SEQ ID NO: 464443 - DNA, 50 bp, Artificial
  Synthetic oligonucleotide
tctgtacgcccatggatttcgttggcgcatgagaacgtaagtgatgtaga

SEQ ID NO: 464444 - DNA, 53 bp, Artificial
  Synthetic oligonucleotide
tctgtactatgtgttctgatagcgggatactacagatcatttggcggggaagg

SEQ ID NO: 464445 - DNA, 60 bp, Artificial
  Synthetic oligonucleotide
tctgtactctatgacgcaatggtcaatcttcatgcagctacgactgagtctagctgtcaa

SEQ ID NO: 464446 - DNA, 55 bp, Artificial
  Synthetic oligonucleotide
tctgtacttctccagaaaactggtttgttttagctgaaaaaacttactgtcacac

SEQ ID NO: 464447 - DNA, 60 bp, Artificial
  Synthetic oligonucleotide
tctgtacttgaagcgctatcgcagtacccatcccgtctcacgttctccgacagaactatt

SEQ ID NO: 464448 - DNA, 50 bp, Artificial
  Synthetic oligonucleotide
tctgtagaaccgattaataggttgttacgtaagtatcctcatatgcatcc

SEQ ID NO: 464449 - DNA, 55 bp, Artificial
  Synthetic oligonucleotide
tctgtagcccacaaatcatgccttcctgcctgtatatatggacttgctgtagcca

SEQ ID NO: 464450 - DNA, 60 bp, Artificial
  Synthetic oligonucleotide
tctgtagctatcactggatcactaaggctatttccgtcagaacgagtgttaactactaat

SEQ ID NO: 464451 - DNA, 54 bp, Artificial
  Synthetic oligonucleotide
tctgtaggagtgtgttgcgagtataaggaaggacacagacaggtaggatcccta

SEQ ID NO: 464452 - DNA, 53 bp, Artificial
  Synthetic oligonucleotide
tctgtagtattcaaagggtacagagagggggtgagacccccctcctgggggaa

SEQ ID NO: 464453 - DNA, 60 bp, Artificial
  Synthetic oligonucleotide
tctgtagtgattaccgacagagtcgtaatgcagcggccttaattgcgggctgtgggctca

SEQ ID NO: 464454 - DNA, 60 bp, Artificial
  Synthetic oligonucleotide
tctgtataaaggtgctgtgcccatacaccagcactatgatggaaaccatggagcgactgc

SEQ ID NO: 464455 - DNA, 55 bp, Artificial
  Synthetic oligonucleotide
tctgtataccgtttctggagttacgcggccctcttttacaccatccgggtgacca

SEQ ID NO: 464456 - DNA, 60 bp, Artificial
  Synthetic oligonucleotide
tctgtatattcggatgataccgatctatgtcaaagtacctctcatcacgagtagtgacag

SEQ ID NO: 464457 - DNA, 58 bp, Artificial
  Synthetic oligonucleotide
tctgtatcgtggataattgatacctccagatttacgaatcggacaagaaaatttgtaa

SEQ ID NO: 464458 - DNA, 58 bp, Artificial
  Synthetic oligonucleotide
tctgtatctggggggagactctccctcacccagacatacttggccgcctcagacgcct

SEQ ID NO: 464459 - DNA, 51 bp, Artificial
  Synthetic oligonucleotide
tctgtatgacagcgtgaggccaacaagggtgattaaggaaatctgtatccc

SEQ ID NO: 464460 - DNA, 60 bp, Artificial
  Synthetic oligonucleotide
tctgtatgattacaaggagaaccgattcattgagattggagtgacacggagggaagttca

SEQ ID NO: 464461 - DNA, 58 bp, Artificial
  Synthetic oligonucleotide
tctgtatggaatatgccgcaaacaatctaagtatgagtgtgttcagtccaataatatt

SEQ ID NO: 464462 - DNA, 60 bp, Artificial
  Synthetic oligonucleotide
tctgtatggattcatcataaaaggaagatcccatttaaggaatgacactgatgtggtaaa

SEQ ID NO: 464463 - DNA, 60 bp, Artificial
  Synthetic oligonucleotide
tctgtatggggtatcagacaactccgagctcgcctgctagccttagaaacctttatacag

SEQ ID NO: 464464 - DNA, 59 bp, Artificial
  Synthetic oligonucleotide
tctgtatgggtgtattgcgttttctaattcagagtccgcatcggtatgagacaatccta

SEQ ID NO: 464465 - DNA, 54 bp, Artificial
  Synthetic oligonucleotide
tctgtatgtgattagcatatatgcacaaggtgtctggtcaaatctccagctaag

SEQ ID NO: 464466 - DNA, 60 bp, Artificial
  Synthetic oligonucleotide
tctgtattcgatcacagcatgatcgaccttcatgcatctgcccattatctggacggtctt

SEQ ID NO: 464467 - DNA, 56 bp, Artificial
  Synthetic oligonucleotide
tctgtcaaagacggctgctggctgtccggtgagactcgggaatgagagttgcagtc

SEQ ID NO: 464468 - DNA, 60 bp, Artificial
  Synthetic oligonucleotide
tctgtcaaagtccaaagccgccagaagtgctcttgtgtcagtgatgacatcggactttac

SEQ ID NO: 464469 - DNA, 60 bp, Artificial
  Synthetic oligonucleotide
tctgtcaatgactatcaatgtgcgagaagggtttttaaactacagtatggatcacagcaa

SEQ ID NO: 464470 - DNA, 55 bp, Artificial
  Synthetic oligonucleotide
tctgtcacagatgtacagtgttatgccattgcatttctgaacccttgtcacatgc

SEQ ID NO: 464471 - DNA, 59 bp, Artificial
  Synthetic oligonucleotide
tctgtcaccactgcccaaacgacagagacgaaaaagcacacaaccctggaccccagcac

SEQ ID NO: 464472 - DNA, 55 bp, Artificial
  Synthetic oligonucleotide
tctgtcacgtagaaatcatgtagcagttcagagggaaatagcgttagacatgttc

SEQ ID NO: 464473 - DNA, 60 bp, Artificial
  Synthetic oligonucleotide
tctgtcacttaacatgtcaactaacaatctgcatgcatgttacacagtgcatagagtacc

SEQ ID NO: 464474 - DNA, 57 bp, Artificial
  Synthetic oligonucleotide
tctgtcagaccccgcatacatcggcctacccaccagtggggcgttcaagctagaata

SEQ ID NO: 464475 - DNA, 59 bp, Artificial
  Synthetic oligonucleotide
tctgtcagatggtttcaactacaaatttccttcctaacatggccagtctggagagaaag

SEQ ID NO: 464476 - DNA, 60 bp, Artificial
  Synthetic oligonucleotide
tctgtcatgttcgggaacttgacagtgtagagcaaaccaagtgcactcagcgcttggaca

SEQ ID NO: 464477 - DNA, 56 bp, Artificial
  Synthetic oligonucleotide
tctgtcatttgggacgaggaagcctaattcctggaaatacgtaccgggcacaacaa

SEQ ID NO: 464478 - DNA, 60 bp, Artificial
  Synthetic oligonucleotide
tctgtccactgagccgccaccggctggttacgcaattgtgcggcgatatattgtcaagag

SEQ ID NO: 464479 - DNA, 59 bp, Artificial
  Synthetic oligonucleotide
tctgtccatggagtgcttaatccaacttaccaagctgggttacgacgcgacgccgttca

SEQ ID NO: 464480 - DNA, 59 bp, Artificial
  Synthetic oligonucleotide
tctgtcccattttgctcacctcctcggctggacatcacctactagtgtaggggttatgc

SEQ ID NO: 464481 - DNA, 59 bp, Artificial
  Synthetic oligonucleotide
tctgtcccgaatacagcgtcgactccaagcaacctagtcgcgagaaacgtgcacggccg

SEQ ID NO: 464482 - DNA, 59 bp, Artificial
  Synthetic oligonucleotide
tctgtccgagagggcttaattgagtactacaccacacttgggttcactatgaaggtgga

SEQ ID NO: 464483 - DNA, 60 bp, Artificial
  Synthetic oligonucleotide
tctgtcctaactgcacatctaccgacatccccgatgatggatcgtcaattaaatcgattc

SEQ ID NO: 464484 - DNA, 60 bp, Artificial
  Synthetic oligonucleotide
tctgtcctcgcgtctggatggaaaagatatgtgccgagttcttccaacgacgatctcgct

SEQ ID NO: 464485 - DNA, 56 bp, Artificial
  Synthetic oligonucleotide
tctgtccttaaggcgaatgaggtgttcgttcttaagcagaatgactctccgtatat

SEQ ID NO: 464486 - DNA, 51 bp, Artificial
  Synthetic oligonucleotide
tctgtccttggtcaacgtttgaaaaatcgagaacggttcgaaacgagacta

SEQ ID NO: 464487 - DNA, 54 bp, Artificial
  Synthetic oligonucleotide
tctgtcgacggttatgactgatagagacgccagacttgctgtcaccgctctctc

SEQ ID NO: 464488 - DNA, 58 bp, Artificial
  Synthetic oligonucleotide
tctgtcgatgtagagttcaaagacgcagtaggttctggcgggaactccacagaaacgg

SEQ ID NO: 464489 - DNA, 58 bp, Artificial
  Synthetic oligonucleotide
tctgtcgcctctggcggtaagacggtcccagctaccgctgctgtaacgggcaataccc

SEQ ID NO: 464490 - DNA, 58 bp, Artificial
  Synthetic oligonucleotide
tctgtcggattttgaacaaggccccacttgacctaagaggatgcaccatggagggttg

SEQ ID NO: 464491 - DNA, 54 bp, Artificial
  Synthetic oligonucleotide
tctgtcgggtttggataacagggcccaagggagggccatcgcccacaagtggcg

SEQ ID NO: 464492 - DNA, 56 bp, Artificial
  Synthetic oligonucleotide
tctgtcggttatctcgacgaacggcgtgtaagtgtcaagcgttacggggaagcgct

SEQ ID NO: 464493 - DNA, 52 bp, Artificial
  Synthetic oligonucleotide
tctgtcgtggagccccgctacggcccataggcatcccacgtatccgttggga

SEQ ID NO: 464494 - DNA, 55 bp, Artificial
  Synthetic oligonucleotide
tctgtcgtttaactcgtacctcaacgagtcttactactggtagagatccaataaa

SEQ ID NO: 464495 - DNA, 56 bp, Artificial
  Synthetic oligonucleotide
tctgtcgtttcagatccataccccagacccaaggggtctcgacaggcccgaaagaa

SEQ ID NO: 464496 - DNA, 53 bp, Artificial
  Synthetic oligonucleotide
tctgtctaaagtgggagctaatggatgaagactatcaggggagactttgcaac

SEQ ID NO: 464497 - DNA, 60 bp, Artificial
  Synthetic oligonucleotide
tctgtctaagaactaccctagggcaatgatgcacccaagctttgctgggctcattgatcc

SEQ ID NO: 464498 - DNA, 60 bp, Artificial
  Synthetic oligonucleotide
tctgtctcaacaacacacagaaaggggtcaattggatgaccactgtaacttatcaatcta

SEQ ID NO: 464499 - DNA, 60 bp, Artificial
  Synthetic oligonucleotide
tctgtctccagggcacccaatgccttcaaaatgacgtttcctgtcagctcagtcaacagg

SEQ ID NO: 464500 - DNA, 58 bp, Artificial
  Synthetic oligonucleotide
tctgtctcgtcacactgttggggctaggtattatagtatatctaagaggttattcgat

SEQ ID NO: 464501 - DNA, 60 bp, Artificial
  Synthetic oligonucleotide
tctgtctctccattggacatttcgacgtcaatcctacaaatgggatcctatcatatctga

SEQ ID NO: 464502 - DNA, 60 bp, Artificial
  Synthetic oligonucleotide
tctgtctggccgcgcagcgacaacccttccaaaataatcatcagcccactcttgcatctc

SEQ ID NO: 464503 - DNA, 59 bp, Artificial
  Synthetic oligonucleotide
tctgtctttaaggggggggtgggtgggagatgcacaacatcagtagactgactggcctg

SEQ ID NO: 464504 - DNA, 59 bp, Artificial
  Synthetic oligonucleotide
tctgtgaactgtttggataggattttgaccgtcggtgccctgaacggaatatccactga

SEQ ID NO: 464505 - DNA, 55 bp, Artificial
  Synthetic oligonucleotide
tctgtgacagagccgaaaacgattcgtcggtatacgactcgtgcattgcttgacg

SEQ ID NO: 464506 - DNA, 55 bp, Artificial
  Synthetic oligonucleotide
tctgtgaccagagagaccgagctggcttcgggccgacggacgatcgacgcaagta

SEQ ID NO: 464507 - DNA, 55 bp, Artificial
  Synthetic oligonucleotide
tctgtgaccatgctcctcatgctactgcccacagccctgacgttccatctgacca

SEQ ID NO: 464508 - DNA, 52 bp, Artificial
  Synthetic oligonucleotide
tctgtgacggcattccacgtggcatatcgtggtgacgcccaatgggctccgt

SEQ ID NO: 464509 - DNA, 58 bp, Artificial
  Synthetic oligonucleotide
tctgtgacgtgtgcaggaggtgattataattttgcactaccagttggccaatggccat

SEQ ID NO: 464510 - DNA, 60 bp, Artificial
  Synthetic oligonucleotide
tctgtgagaaacgcgtcctatatgatgtgatacagaagttgtcaattgagacgatgggta

SEQ ID NO: 464511 - DNA, 55 bp, Artificial
  Synthetic oligonucleotide
tctgtgagaaatttgatgtcgcagagagaaccgagcggcgacagtgtcgcaactg

SEQ ID NO: 464512 - DNA, 60 bp, Artificial
  Synthetic oligonucleotide
tctgtgagactctatataattgaatgcacttggaggattcattaattgcgaatccatctg

SEQ ID NO: 464513 - DNA, 60 bp, Artificial
  Synthetic oligonucleotide
tctgtgagagcgcgggaactcaggaggacgcggcgaacctacgagtcttcacggaggcta

SEQ ID NO: 464514 - DNA, 55 bp, Artificial
  Synthetic oligonucleotide
tctgtgagcatgaaatgagcctagttgtgaggaaaccaggtgtgaagaacacagg

SEQ ID NO: 464515 - DNA, 55 bp, Artificial
  Synthetic oligonucleotide
tctgtgagttgctccgcctaaccgaccggtacccgcataaagtacctgtcaaggg

SEQ ID NO: 464516 - DNA, 60 bp, Artificial
  Synthetic oligonucleotide
tctgtgatagactgcaacacatgtgtcacccagacagtcgacttcagccttgaccctacc

SEQ ID NO: 464517 - DNA, 57 bp, Artificial
  Synthetic oligonucleotide
tctgtgcacaagttttgatgattcactcaaactccttggtaaatgggctggttatgc

SEQ ID NO: 464518 - DNA, 55 bp, Artificial
  Synthetic oligonucleotide
tctgtgcagaccccgccttggacaatagaacagcacgtactgcaactaactgcac

SEQ ID NO: 464519 - DNA, 52 bp, Artificial
  Synthetic oligonucleotide
tctgtgcatatgccagtggaagataccatcccatcaagagcactattgatgc

SEQ ID NO: 464520 - DNA, 59 bp, Artificial
  Synthetic oligonucleotide
tctgtgcgagactcgggtgtccgatttcgcgaaggaattacccagcgtctagccagtac

SEQ ID NO: 464521 - DNA, 54 bp, Artificial
  Synthetic oligonucleotide
tctgtgctaactcaatctcctaacctccgtatctggaaacagtgcaacactcgc

SEQ ID NO: 464522 - DNA, 55 bp, Artificial
  Synthetic oligonucleotide
tctgtgctcagcacaacgccaccgcctgcgtcgtccatcacgcgaataagggcac

SEQ ID NO: 464523 - DNA, 51 bp, Artificial
  Synthetic oligonucleotide
tctgtgctgctaccagaagagatcgagataacttcgactgagaagagttct

SEQ ID NO: 464524 - DNA, 60 bp, Artificial
  Synthetic oligonucleotide
tctgtggagaaggacactgcgatggtagatgttgaaggatccacctctctgtctaataaa

SEQ ID NO: 464525 - DNA, 50 bp, Artificial
  Synthetic oligonucleotide
tctgtggagaaggatacgactatggttgacgtggaaggctctactacgct

SEQ ID NO: 464526 - DNA, 55 bp, Artificial
  Synthetic oligonucleotide
tctgtggagtccgtgcctactacccccccaatgcctacatccctgcccaggtacg

SEQ ID NO: 464527 - DNA, 60 bp, Artificial
  Synthetic oligonucleotide
tctgtggcatggtctgctactgcatgtagtgacggacccggttggctaacactagggatc

SEQ ID NO: 464528 - DNA, 55 bp, Artificial
  Synthetic oligonucleotide
tctgtggcccaaaacccacacgctgtggagcaatggagtgctggaaagtcagatg

SEQ ID NO: 464529 - DNA, 60 bp, Artificial
  Synthetic oligonucleotide
tctgtggctgcatgttcgagggcttgaagacctatcgctcgcgattgtttgagcggagct

SEQ ID NO: 464530 - DNA, 55 bp, Artificial
  Synthetic oligonucleotide
tctgtgggacaacggccgcggcgtcgaccaggcacgcactcttggctcttggcaa

SEQ ID NO: 464531 - DNA, 60 bp, Artificial
  Synthetic oligonucleotide
tctgtggtcacgccaactcgagttcgtttgactatatccaggtcatcacctgaaactgcc

SEQ ID NO: 464532 - DNA, 57 bp, Artificial
  Synthetic oligonucleotide
tctgtggtgggtgcccagattgctttacggatgtcatatgcaaattgacaaccacat

SEQ ID NO: 464533 - DNA, 55 bp, Artificial
  Synthetic oligonucleotide
tctgtgtaatttctcttacctgcgaatccctggagtccgggccagggacctcgca

SEQ ID NO: 464534 - DNA, 56 bp, Artificial
  Synthetic oligonucleotide
tctgtgtatatattggggaaagtttggatggacgacaacatcaagttaaagaacca

SEQ ID NO: 464535 - DNA, 57 bp, Artificial
  Synthetic oligonucleotide
tctgtgtcctcactgctccatacctattatctgaacactcaagacctgcctgttgaa

SEQ ID NO: 464536 - DNA, 58 bp, Artificial
  Synthetic oligonucleotide
tctgtgtcgcaccttgatgggtacctgagtagagtgggccgtagagggtgacgaaggt

SEQ ID NO: 464537 - DNA, 60 bp, Artificial
  Synthetic oligonucleotide
tctgtgtgaaatctgtctacgtgctgggaaagatatggatggatgaaaacatcaagacga

SEQ ID NO: 464538 - DNA, 60 bp, Artificial
  Synthetic oligonucleotide
tctgtgtgccccaatctcctctctcatatctccgtgagtacagacaccatgtctgattta

SEQ ID NO: 464539 - DNA, 59 bp, Artificial
  Synthetic oligonucleotide
tctgtgtgtgataacaatgcacttcccttaatctggaggggtttaatagatttgacagg

SEQ ID NO: 464540 - DNA, 50 bp, Artificial
  Synthetic oligonucleotide
tctgtgttaagtctgtgtatactttagggaagatttggatggatgagaac

SEQ ID NO: 464541 - DNA, 60 bp, Artificial
  Synthetic oligonucleotide
tctgtgttactggggatgatagaaatgcgactgctagtttcatttatgatgggatgctcg

SEQ ID NO: 464542 - DNA, 57 bp, Artificial
  Synthetic oligonucleotide
tctgtgtttaaagcggtatattttgggcgccggcatatcgttgcttggaccagggcc

SEQ ID NO: 464543 - DNA, 60 bp, Artificial
  Synthetic oligonucleotide
tctgtgttttctagagtgtgctgctctgcagctgcattggagggtttcacgggaacgaca

SEQ ID NO: 464544 - DNA, 60 bp, Artificial
  Synthetic oligonucleotide
tctgttaactcagagcacatcttctcagtagaccacaattgtgaaactattgctaaggat

SEQ ID NO: 464545 - DNA, 58 bp, Artificial
  Synthetic oligonucleotide
tctgttaattttaaagagcctatgcaacgttatcaatggaaagttctcccgcaaggca

SEQ ID NO: 464546 - DNA, 56 bp, Artificial
  Synthetic oligonucleotide
tctgttagagataccattggatgattgtttagtaccttgtaacttttgcggtaatt

SEQ ID NO: 464547 - DNA, 57 bp, Artificial
  Synthetic oligonucleotide
tctgttagagtccaaaacgcctttcaatgagattcaaacttttgaaacgtatgcgga

SEQ ID NO: 464548 - DNA, 55 bp, Artificial
  Synthetic oligonucleotide
tctgttagcctatctggagtttcttttgtaataaagtggcaaaggtaactaatgt

SEQ ID NO: 464549 - DNA, 58 bp, Artificial
  Synthetic oligonucleotide
tctgttagggtttatatagaaggttagaatctgtgtttatagttgagagcttccacga

SEQ ID NO: 464550 - DNA, 55 bp, Artificial
  Synthetic oligonucleotide
tctgttagttcaaagcacataatggaggatgaatattttgtgtacaagggagcct

SEQ ID NO: 464551 - DNA, 60 bp, Artificial
  Synthetic oligonucleotide
tctgttattcgagcatttgtatttcccctcgaattgcataagcacgtggagatgagggct

SEQ ID NO: 464552 - DNA, 60 bp, Artificial
  Synthetic oligonucleotide
tctgttattcgtgcagacgtatttgccctcgaactggataagcacgtggagatgagggct

SEQ ID NO: 464553 - DNA, 54 bp, Artificial
  Synthetic oligonucleotide
tctgttcagctccctgtatggatgcgatgtctctactatatcggactccgcatc

SEQ ID NO: 464554 - DNA, 60 bp, Artificial
  Synthetic oligonucleotide
tctgttcatggaagcgtggcgtgggtggtcgaagtccgcttttgcgtgtgctacaggtat

SEQ ID NO: 464555 - DNA, 60 bp, Artificial
  Synthetic oligonucleotide
tctgttcatggatgcggacctaattagtttcctttcccatttaccatagtctacatgtga

SEQ ID NO: 464556 - DNA, 60 bp, Artificial
  Synthetic oligonucleotide
tctgttccccatcgtcggcctgtaacgaacatgggcaatctatttggatctctgataagt

SEQ ID NO: 464557 - DNA, 54 bp, Artificial
  Synthetic oligonucleotide
tctgttctagatggtaaccctgtttttaaattagtcggagaaacttccacagag

SEQ ID NO: 464558 - DNA, 60 bp, Artificial
  Synthetic oligonucleotide
tctgttgacctccgcgtgcagatcttccatcgatctgaaattcaccccagtcgatgtaat

SEQ ID NO: 464559 - DNA, 60 bp, Artificial
  Synthetic oligonucleotide
tctgttgagaacgcgcagcaagataagggcattaccatcccacacgatatagatttgggt

SEQ ID NO: 464560 - DNA, 51 bp, Artificial
  Synthetic oligonucleotide
tctgttgagaatgcgcagcaggacaagggtattaccatcccacatgatata

SEQ ID NO: 464561 - DNA, 60 bp, Artificial
  Synthetic oligonucleotide
tctgttgagagcaaaagctgcgtcaataggtgtttctatgtggagttgataagggggaga

SEQ ID NO: 464562 - DNA, 60 bp, Artificial
  Synthetic oligonucleotide
tctgttgaggactcaaacctacatcatagtcaacatattcaacttgccttacatgcgcag

SEQ ID NO: 464563 - DNA, 60 bp, Artificial
  Synthetic oligonucleotide
tctgttgaggccgcccaattagaccaaggtgtgacaatacctcatgatatagacctaggg

SEQ ID NO: 464564 - DNA, 59 bp, Artificial
  Synthetic oligonucleotide
tctgttgataaggatacgacaatgtttgacgtgggagggtctactacgctctctaatag

SEQ ID NO: 464565 - DNA, 51 bp, Artificial
  Synthetic oligonucleotide
tctgttgattctaccatcaatgcagtcaatgaaaaggtagaaagcgtcggt

SEQ ID NO: 464566 - DNA, 60 bp, Artificial
  Synthetic oligonucleotide
tctgttgcgaaacgtacagctctgattacattgttaagcgaaatgacacctattctatct

SEQ ID NO: 464567 - DNA, 59 bp, Artificial
  Synthetic oligonucleotide
tctgttgctattactggatcgttaagactctttccttctgaacgtgtgttgactacgaa

SEQ ID NO: 464568 - DNA, 60 bp, Artificial
  Synthetic oligonucleotide
tctgttgctgccaccctagggtttggggcgtatatgtctaaggcatatggcactgaccct

SEQ ID NO: 464569 - DNA, 56 bp, Artificial
  Synthetic oligonucleotide
tctgttggacgttgacgccccccgagacccaagctttcccctctcagtaatgtggc

SEQ ID NO: 464570 - DNA, 60 bp, Artificial
  Synthetic oligonucleotide
tctgttggtggtgacactgtgcctcgtgagtgttcgcatgatgagccggatacctgcccg

SEQ ID NO: 464571 - DNA, 58 bp, Artificial
  Synthetic oligonucleotide
tctgttggttaccatggcgggaatgtcacaaggcgctcccgcctcggtactggggtca

SEQ ID NO: 464572 - DNA, 58 bp, Artificial
  Synthetic oligonucleotide
tctgttgtatccaaatccgcatcgattgggcctgtccccagagcacttcgtgtggccc

SEQ ID NO: 464573 - DNA, 57 bp, Artificial
  Synthetic oligonucleotide
tctgttgtcaatattggggaatctataccattagaaacatttgtggaaacacagggg

SEQ ID NO: 464574 - DNA, 52 bp, Artificial
  Synthetic oligonucleotide
tctgttgtctgacggtcgcagacgaacaggacgttacagccattgtttttcg

SEQ ID NO: 464575 - DNA, 55 bp, Artificial
  Synthetic oligonucleotide
tctgttgtgtccgggcggggtgacgacgtagggtttgaggtcgatacgactcaag

SEQ ID NO: 464576 - DNA, 60 bp, Artificial
  Synthetic oligonucleotide
tctgttgttgtatatggcatgtactcatgcctctaaccccgtgtatgctactttgaaagt

SEQ ID NO: 464577 - DNA, 55 bp, Artificial
  Synthetic oligonucleotide
tctgtttaagctaaacaactatgaagtgccagatgatgttgtgcgtaggcatgac

SEQ ID NO: 464578 - DNA, 60 bp, Artificial
  Synthetic oligonucleotide
tctgtttatgtgctgggtaagatctggatggatgagaacattaagactaagaatcatacg

SEQ ID NO: 464579 - DNA, 59 bp, Artificial
  Synthetic oligonucleotide
tctgtttcaagtgtgactagtaaggttagacgtcgtgccgttgctagcaacacgaggat

SEQ ID NO: 464580 - DNA, 60 bp, Artificial
  Synthetic oligonucleotide
tctgtttcatgtatacagatttccactttattgatgagagagctgaatcaatgattgtag

SEQ ID NO: 464581 - DNA, 53 bp, Artificial
  Synthetic oligonucleotide
tctgtttccccggtgaacttgcatagactgtgcccacggttgaaagcgaccga

SEQ ID NO: 464582 - DNA, 60 bp, Artificial
  Synthetic oligonucleotide
tctgtttgttgaaagctgaagattgtgaagtgcagagtccctatgctatctccattcacg

SEQ ID NO: 464583 - DNA, 50 bp, Artificial
  Synthetic oligonucleotide
tctgttttcccgggtcctcgaagtggtttttgcgactaaaatcgcaatga

SEQ ID NO: 464584 - DNA, 54 bp, Artificial
  Synthetic oligonucleotide
tctgtttttcaatatgttgcaaccctctttgggcggttggataaccaagaattt

SEQ ID NO: 464585 - DNA, 60 bp, Artificial
  Synthetic oligonucleotide
tctgttttttaggtgcaacatcagaacctatatttgtgccaacaatggatgattttagag

SEQ ID NO: 464586 - DNA, 54 bp, Artificial
  Synthetic oligonucleotide
tcttaaaagtccaatcctccggaccaacattagcgtctgtagaaacaattgttt

SEQ ID NO: 464587 - DNA, 60 bp, Artificial
  Synthetic oligonucleotide
tcttaaacctcgaagcagtcgctgtctgcgccgctccgtgcgactgctgctgatgggatc

SEQ ID NO: 464588 - DNA, 55 bp, Artificial
  Synthetic oligonucleotide
tcttaaactagttgacggtcaaatatgcgacatcatcaacggagcattgggaagc

SEQ ID NO: 464589 - DNA, 60 bp, Artificial
  Synthetic oligonucleotide
tcttaaactcagtgaatgatacacggcactcatgttcaagggaatcagacaacccgtagt

SEQ ID NO: 464590 - DNA, 53 bp, Artificial
  Synthetic oligonucleotide
tcttaaagaagtactatccaacttagggttccaacccaatttaatagatagat

SEQ ID NO: 464591 - DNA, 60 bp, Artificial
  Synthetic oligonucleotide
tcttaaagatgtgtgttgagatgttatcatggctagactggctgagtgagcaagagttga

SEQ ID NO: 464592 - DNA, 58 bp, Artificial
  Synthetic oligonucleotide
tcttaaagccttgtacatgctttcaacgcgtgggagacagactgtgaaagaaaataag

SEQ ID NO: 464593 - DNA, 54 bp, Artificial
  Synthetic oligonucleotide
tcttaaaggataccttggagcgctccttcaccttgagaccttcttcccgttggg

SEQ ID NO: 464594 - DNA, 59 bp, Artificial
  Synthetic oligonucleotide
tcttaaagtgtcagccacaccaccagggcgtgaaactgaattttccacacaatatcctg

SEQ ID NO: 464595 - DNA, 59 bp, Artificial
  Synthetic oligonucleotide
tcttaaataccagatcatgctggattctgtacaagggcgtggtcctgggatggctttta

SEQ ID NO: 464596 - DNA, 56 bp, Artificial
  Synthetic oligonucleotide
tcttaacatattcttccagcactttttggattttgtcctgatccaaagtaagactt

SEQ ID NO: 464597 - DNA, 51 bp, Artificial
  Synthetic oligonucleotide
tcttaacatccctggtaactacggatgttatccaacggttcctgctaaaaa

SEQ ID NO: 464598 - DNA, 51 bp, Artificial
  Synthetic oligonucleotide
tcttaacccgggcgaaattacagaaagggttagagacgccgcaaaaataaa

SEQ ID NO: 464599 - DNA, 55 bp, Artificial
  Synthetic oligonucleotide
tcttaacttgaggaccatttggaaagataccggtggtgggaaatatgaagacgtg

SEQ ID NO: 464600 - DNA, 59 bp, Artificial
  Synthetic oligonucleotide
tcttaagagactcacagagcctgaagtactcagactcttcaaacactttctcatcctgg

SEQ ID NO: 464601 - DNA, 60 bp, Artificial
  Synthetic oligonucleotide
tcttaagagcactaggaccaggggctacattagaagagatgatgacagcatgtcagggag

SEQ ID NO: 464602 - DNA, 54 bp, Artificial
  Synthetic oligonucleotide
tcttaaggaaatggcccagattagaaggaaaaatgagcttttcacctacttaag

SEQ ID NO: 464603 - DNA, 53 bp, Artificial
  Synthetic oligonucleotide
tcttaaggacactacaaacatgaagccctgctacggttcttttgccaggccta

SEQ ID NO: 464604 - DNA, 60 bp, Artificial
  Synthetic oligonucleotide
tcttaaggctactggtacaccttctagtacttccactgctacttctgtgtactcaaatca

SEQ ID NO: 464605 - DNA, 55 bp, Artificial
  Synthetic oligonucleotide
tcttaagggtattttccgtccgaaattgatgcgatcacttttgctggaagagcct

SEQ ID NO: 464606 - DNA, 57 bp, Artificial
  Synthetic oligonucleotide
tcttaaggtgggaatttgacagcaacctagcacgcagacacatggcccgcgagctac

SEQ ID NO: 464607 - DNA, 55 bp, Artificial
  Synthetic oligonucleotide
tcttaagtctgtgccttccaagcgtgttggaagtaaagccacgccggctcgcccc

SEQ ID NO: 464608 - DNA, 58 bp, Artificial
  Synthetic oligonucleotide
tcttaagtgaaatagagctagcagtaccagggttactttcgcttaacaacttgacagc

SEQ ID NO: 464609 - DNA, 51 bp, Artificial
  Synthetic oligonucleotide
tcttaagtgctgagggagacaattttctcctagctatgtcgagaataatct

SEQ ID NO: 464610 - DNA, 55 bp, Artificial
  Synthetic oligonucleotide
tcttaagtggaaggacgaggcaaataggtattgtgggagcggtccggagacttgg

SEQ ID NO: 464611 - DNA, 53 bp, Artificial
  Synthetic oligonucleotide
tcttaataaagtcgcgacatggtgaatttgtgattaggaacacaacgcagctc

SEQ ID NO: 464612 - DNA, 60 bp, Artificial
  Synthetic oligonucleotide
tcttaataactactgtggcattgcatttcaagcaatatgagtgcaatccccctgcaaaca

SEQ ID NO: 464613 - DNA, 60 bp, Artificial
  Synthetic oligonucleotide
tcttaatcttacatgtccatggacagttgggatgaccaaattctatagaggttgggacaa

SEQ ID NO: 464614 - DNA, 55 bp, Artificial
  Synthetic oligonucleotide
tcttaatcttcgaacaaacaccgagaccaacaatccgtgtgccaagacaattgtc

SEQ ID NO: 464615 - DNA, 59 bp, Artificial
  Synthetic oligonucleotide
tcttaatgacaaacactcaaatgggacagtaaaagacaggagtccctttcgcacattga

SEQ ID NO: 464616 - DNA, 60 bp, Artificial
  Synthetic oligonucleotide
tcttaatgctacccgttccttgtcttctattctggcaactcgctctggatcaatcactcg

SEQ ID NO: 464617 - DNA, 54 bp, Artificial
  Synthetic oligonucleotide
tcttaatggctttcatggggtaatcccctaggataggagcctgagggctctgct

SEQ ID NO: 464618 - DNA, 60 bp, Artificial
  Synthetic oligonucleotide
tcttaatggtgccttcaattctgaattagcctcacatgatgagtcaatcagactagttgg

SEQ ID NO: 464619 - DNA, 54 bp, Artificial
  Synthetic oligonucleotide
tcttaattcctcgttagaaaatagtgctaacatcttgggtccttttccgtcatt

SEQ ID NO: 464620 - DNA, 55 bp, Artificial
  Synthetic oligonucleotide
tcttacaagacgctcgagctgcctttgggttttactccttgaacccttcggaaga

SEQ ID NO: 464621 - DNA, 60 bp, Artificial
  Synthetic oligonucleotide
tcttacaatgctaaacttctcgtgctaatcgaaaacgacagaacattagacctgcatgat

SEQ ID NO: 464622 - DNA, 51 bp, Artificial
  Synthetic oligonucleotide
tcttacacccctaccacggacaacagcggacagcaggctagtcaggaagcc

SEQ ID NO: 464623 - DNA, 60 bp, Artificial
  Synthetic oligonucleotide
tcttacactacaaccatcaagcctgtgtcgtataaactcgatggtgttacttacacagag

SEQ ID NO: 464624 - DNA, 55 bp, Artificial
  Synthetic oligonucleotide
tcttacactcattttgattcacccagcgtttctgagacgattcgctactcttgcg

SEQ ID NO: 464625 - DNA, 58 bp, Artificial
  Synthetic oligonucleotide
tcttacagagaatacccctccctggtgatctggagtaaaaggagccattcggtgttga

SEQ ID NO: 464626 - DNA, 55 bp, Artificial
  Synthetic oligonucleotide
tcttacagccggaggtagtaacctagtggcttttgctgacgttagggaccttctc

SEQ ID NO: 464627 - DNA, 60 bp, Artificial
  Synthetic oligonucleotide
tcttacattattggggtctagcttgtggagaaagaccatggcatctaggtcatggagtag

SEQ ID NO: 464628 - DNA, 55 bp, Artificial
  Synthetic oligonucleotide
tcttacatttggcgtgttgaatatttcagattccatggtgccagatgttgtagcg

SEQ ID NO: 464629 - DNA, 50 bp, Artificial
  Synthetic oligonucleotide
tcttaccatgtagagccgatagaggacgcgtcgaaaggatgtttgcatac

SEQ ID NO: 464630 - DNA, 60 bp, Artificial
  Synthetic oligonucleotide
tcttacccatgagattgaaaccatcgggcgtcactttgggaagagtgggacagatcacac

SEQ ID NO: 464631 - DNA, 59 bp, Artificial
  Synthetic oligonucleotide
tcttacctcgagtacatcatggcagacaccatagttgacaaagcattcactacaactct

SEQ ID NO: 464632 - DNA, 60 bp, Artificial
  Synthetic oligonucleotide
tcttacgatctgagttctgctaccgatagattacctatggcctttcagaagcaaattata

SEQ ID NO: 464633 - DNA, 56 bp, Artificial
  Synthetic oligonucleotide
tcttacgcttacttgtgacaagattcttgatggacgggggaacgccgtttttctca

SEQ ID NO: 464634 - DNA, 57 bp, Artificial
  Synthetic oligonucleotide
tcttacgtattgtcgaactgaggttcttactcgacccttacacacctaatcctcaca

SEQ ID NO: 464635 - DNA, 60 bp, Artificial
  Synthetic oligonucleotide
tcttactagacacaggagctgatgactcaatagtagcaggaatagagttaggggacaatt

SEQ ID NO: 464636 - DNA, 58 bp, Artificial
  Synthetic oligonucleotide
tcttactccctgatctagaaattctcaccaagggtattgcagacgagctaaaccaact

SEQ ID NO: 464637 - DNA, 60 bp, Artificial
  Synthetic oligonucleotide
tcttactccctgttgagccccttactttctcatggatgcttctccgcgagattgcgttat

SEQ ID NO: 464638 - DNA, 54 bp, Artificial
  Synthetic oligonucleotide
tcttactcttagtggagtaatggtttccatagaagaacctggttggtattcttt

SEQ ID NO: 464639 - DNA, 60 bp, Artificial
  Synthetic oligonucleotide
tcttactgacattttggctgcgcagcagaattggctccgcaggtgaataaactatgaaac

SEQ ID NO: 464640 - DNA, 56 bp, Artificial
  Synthetic oligonucleotide
tcttactgagacaaatccaacgagcctttgaccgtcgcaaaattcccaatagaagt

SEQ ID NO: 464641 - DNA, 60 bp, Artificial
  Synthetic oligonucleotide
tcttactgcctctagtgactatactgatagcaatacatttctagctatttagctagcgtt

SEQ ID NO: 464642 - DNA, 58 bp, Artificial
  Synthetic oligonucleotide
tcttacttaaatgagacccattttagtgatcaaatagagcaggaggcggacaacatga

SEQ ID NO: 464643 - DNA, 55 bp, Artificial
  Synthetic oligonucleotide
tcttactttagcaaactgcactccaccgtgaggctctgtaaccttcacaagcgga

SEQ ID NO: 464644 - DNA, 60 bp, Artificial
  Synthetic oligonucleotide
tcttagaatgttctttatggaagattggtgggttggacaagagatgcttgaaaatctata

SEQ ID NO: 464645 - DNA, 55 bp, Artificial
  Synthetic oligonucleotide
tcttagaattgctagaaccgaaacgactagaatagagaatgttggcagattagac

SEQ ID NO: 464646 - DNA, 59 bp, Artificial
  Synthetic oligonucleotide
tcttagacaccctaataggatgtctaaggaccaaattaaaatgctcctagatcagatta

SEQ ID NO: 464647 - DNA, 60 bp, Artificial
  Synthetic oligonucleotide
tcttagaccagatcttactggcacatctaaatcctacgtacggtcgttgtagcaggtgtg

SEQ ID NO: 464648 - DNA, 60 bp, Artificial
  Synthetic oligonucleotide
tcttagacgtctgctcagattataatggttatatgattaatttcaagatgtctggattaa

SEQ ID NO: 464649 - DNA, 56 bp, Artificial
  Synthetic oligonucleotide
tcttagagagctggccattaaagcctttggccaacctcccccaagcggtgactcgg

SEQ ID NO: 464650 - DNA, 60 bp, Artificial
  Synthetic oligonucleotide
tcttagagataggttgcaagttattaggaggttcacttctactgtgactggtggtcagta

SEQ ID NO: 464651 - DNA, 60 bp, Artificial
  Synthetic oligonucleotide
tcttagaggctagaaaggcggtgcggggcgatgatgggcgccccactcaactgcccaatg

SEQ ID NO: 464652 - DNA, 58 bp, Artificial
  Synthetic oligonucleotide
tcttagatcgtagtcagcgttgtaaataaccagtttgcggccgcttacgatagactta

SEQ ID NO: 464653 - DNA, 60 bp, Artificial
  Synthetic oligonucleotide
tcttagattggccacttttataatattgctagcaactgcagagaccctcctgtcgttaaa

SEQ ID NO: 464654 - DNA, 60 bp, Artificial
  Synthetic oligonucleotide
tcttagcacgtgacccgagatttaagcatcgagtgtatcaacaattgagcgccgtaactc

SEQ ID NO: 464655 - DNA, 55 bp, Artificial
  Synthetic oligonucleotide
tcttagcagcggtgcatatgctgactactcggatgagttccaatacttccaaacg

SEQ ID NO: 464656 - DNA, 56 bp, Artificial
  Synthetic oligonucleotide
tcttagcatcgcagaaatatccaataccctattcggggaatttaggatcgttccct

SEQ ID NO: 464657 - DNA, 55 bp, Artificial
  Synthetic oligonucleotide
tcttagcgaatatgaaaggtaagaatcatattgtactagctacacacgcagggat

SEQ ID NO: 464658 - DNA, 51 bp, Artificial
  Synthetic oligonucleotide
tcttagcggctgtgccataaccgcaagtgtacatccctcggctggccgaga

SEQ ID NO: 464659 - DNA, 60 bp, Artificial
  Synthetic oligonucleotide
tcttagctgctgctaatagctatgcagacacttattcacttacgaatcaggaccttgacc

SEQ ID NO: 464660 - DNA, 55 bp, Artificial
  Synthetic oligonucleotide
tcttaggacaaaagcgacgatgacaggtaaccccatggggtctaggtttgtccca

SEQ ID NO: 464661 - DNA, 60 bp, Artificial
  Synthetic oligonucleotide
tcttaggagagcaagttcagagcattaattttcgcatgaaaatccaatgtcatgctaact

SEQ ID NO: 464662 - DNA, 57 bp, Artificial
  Synthetic oligonucleotide
tcttaggcttttggatgttaatgatttatagtgtgtgggggaacaacttgtgggtca

SEQ ID NO: 464663 - DNA, 53 bp, Artificial
  Synthetic oligonucleotide
tcttagggtcacaataaaatgagactatatggccaaccttgccactgtttgag

SEQ ID NO: 464664 - DNA, 56 bp, Artificial
  Synthetic oligonucleotide
tcttaggttgtagtactagtccgtggaagtggcttaagactaaagtgagccagttg

SEQ ID NO: 464665 - DNA, 51 bp, Artificial
  Synthetic oligonucleotide
tcttagtaggcatacgcaagcccttgtgtattatactgtcactgcggatgc

SEQ ID NO: 464666 - DNA, 51 bp, Artificial
  Synthetic oligonucleotide
tcttagtatcactgaatggtgttgtgcagattgcaggtacaaactacacag

SEQ ID NO: 464667 - DNA, 59 bp, Artificial
  Synthetic oligonucleotide
tcttagtcaacaccaagccattggcttaataggcacaattcttttgacagctggtttaa

SEQ ID NO: 464668 - DNA, 60 bp, Artificial
  Synthetic oligonucleotide
tcttagtccaaaagctgtcgcgcagcttagtccgcgtcttgagtcaatttcattgtcacc

SEQ ID NO: 464669 - DNA, 60 bp, Artificial
  Synthetic oligonucleotide
tcttagtcctagatgcactacaatacgttatccaataagtagaaggcatataaggaagtg

SEQ ID NO: 464670 - DNA, 56 bp, Artificial
  Synthetic oligonucleotide
tcttagtgaagaacgcctttggagcgctcttcaagaaattctccccgactccctcc

SEQ ID NO: 464671 - DNA, 57 bp, Artificial
  Synthetic oligonucleotide
tcttagtgatgactatgtcttggttggagcacatgagtgtcctattctaatgtgact

SEQ ID NO: 464672 - DNA, 56 bp, Artificial
  Synthetic oligonucleotide
tcttagtgggtaatgatgtacagttaactggtgtgaatagaggttattcatgtacg

SEQ ID NO: 464673 - DNA, 54 bp, Artificial
  Synthetic oligonucleotide
tcttagtgtaactaaggctaaggcacgcagtgctattgaagtccatgtagcttt

SEQ ID NO: 464674 - DNA, 60 bp, Artificial
  Synthetic oligonucleotide
tcttagtgtgatccatcgattgcacttcgtccttgaaattcgcgttcaagttttcacaat

SEQ ID NO: 464675 - DNA, 54 bp, Artificial
  Synthetic oligonucleotide
tcttagttgagaggcaggtgaatccgctaatgtgagatattaatacgattgtag

SEQ ID NO: 464676 - DNA, 59 bp, Artificial
  Synthetic oligonucleotide
tcttagttttacacttactgctaagaacaacagcatcttctttagttggacactgtatg

SEQ ID NO: 464677 - DNA, 55 bp, Artificial
  Synthetic oligonucleotide
tcttataaatcgacatcccggagaaggcggctggaacactcttgcatctgaccct

SEQ ID NO: 464678 - DNA, 57 bp, Artificial
  Synthetic oligonucleotide
tcttatactttagttggcaaatcttcttactatgcatttaactcggccacaaaacac

SEQ ID NO: 464679 - DNA, 60 bp, Artificial
  Synthetic oligonucleotide
tcttatatcaaagcagtaagtatatgtaatgttggatttactagcattaggagtagcagc

SEQ ID NO: 464680 - DNA, 60 bp, Artificial
  Synthetic oligonucleotide
tcttatatcctcgaaatggtgctacgcaccacatccggatggtgagcctagctcactttg

SEQ ID NO: 464681 - DNA, 54 bp, Artificial
  Synthetic oligonucleotide
tcttatcaacacttccggagactactgttattagacaacgaagcaggtcctcta

SEQ ID NO: 464682 - DNA, 53 bp, Artificial
  Synthetic oligonucleotide
tcttatcactgacgtagatcttgatcgcgaaggcagcctatgataaaacagcc

SEQ ID NO: 464683 - DNA, 60 bp, Artificial
  Synthetic oligonucleotide
tcttatcatgtagagccgattgaggacgcgtcaaaggggtgtttgcatacgagaaccatg

SEQ ID NO: 464684 - DNA, 60 bp, Artificial
  Synthetic oligonucleotide
tcttatccatcagagtgtcagcctctctgggcgaggacccagtgttgactgtaccgccta

SEQ ID NO: 464685 - DNA, 55 bp, Artificial
  Synthetic oligonucleotide
tcttatcggaaaagtccacgacgcttgcagagattcgttgtccgtcatgcgtttg

SEQ ID NO: 464686 - DNA, 59 bp, Artificial
  Synthetic oligonucleotide
tcttatctgcggaagtgcaacgtcacttccgtggctccaagtcgcggattagtattacc

SEQ ID NO: 464687 - DNA, 55 bp, Artificial
  Synthetic oligonucleotide
tcttatctggtgctaatcagatccatacaaatgttgagagaaggagtctaatgaa

SEQ ID NO: 464688 - DNA, 60 bp, Artificial
  Synthetic oligonucleotide
tcttatgaagaggtcaatgggatacgcaaaccaagacatctgtatgtttccatgcctact

SEQ ID NO: 464689 - DNA, 51 bp, Artificial
  Synthetic oligonucleotide
tcttatgagttggacccccattgcaaagcatcttcactcgcatcaacgatc

SEQ ID NO: 464690 - DNA, 60 bp, Artificial
  Synthetic oligonucleotide
tcttatgattccgatgatattccccaaccagggattgtcatcctcgagtttcttgaggcc

SEQ ID NO: 464691 - DNA, 60 bp, Artificial
  Synthetic oligonucleotide
tcttatgctcattatgccgattcgtcaccctgggctgagaatgtcctggtggtgccgtgc

SEQ ID NO: 464692 - DNA, 60 bp, Artificial
  Synthetic oligonucleotide
tcttatggaagatagacatagtcccacatcactaatgcaagtagtacgcaactgtatcag

SEQ ID NO: 464693 - DNA, 54 bp, Artificial
  Synthetic oligonucleotide
tcttatggagaacacagtaccctattgttgtcaataacaagtcccggaaaaacc

SEQ ID NO: 464694 - DNA, 60 bp, Artificial
  Synthetic oligonucleotide
tcttatggccaggagccatggacacttgtacaaactagtctggagactgtgcgcagtcct

SEQ ID NO: 464695 - DNA, 55 bp, Artificial
  Synthetic oligonucleotide
tcttatggggagcgaatccaaaggcttggtagagttggtcgttgcaaacccggat

SEQ ID NO: 464696 - DNA, 60 bp, Artificial
  Synthetic oligonucleotide
tcttatggtatgatatctggattaacgcttgactgtttttcgaacttcatttacggcgca

SEQ ID NO: 464697 - DNA, 60 bp, Artificial
  Synthetic oligonucleotide
tcttatgtaaggctgttgattcatatgaaaacctactcgtcacagagaatgaacaaatgc

SEQ ID NO: 464698 - DNA, 59 bp, Artificial
  Synthetic oligonucleotide
tcttatgttgtcaatgcgcactggtgttaacgcacccccgggaccaagttcagtggtga

SEQ ID NO: 464699 - DNA, 50 bp, Artificial
  Synthetic oligonucleotide
tcttatgtttcaagcagcgcacctctggtcgctcaagcgcagccacccct

SEQ ID NO: 464700 - DNA, 51 bp, Artificial
  Synthetic oligonucleotide
tcttattaacagtatgtataacttaccctggtaaaacattctgcacggaaa

SEQ ID NO: 464701 - DNA, 55 bp, Artificial
  Synthetic oligonucleotide
tcttattaccactcatcgcggtccatgcttatgacttatctgaggatccgtgcgg

SEQ ID NO: 464702 - DNA, 54 bp, Artificial
  Synthetic oligonucleotide
tcttattacgtgtggaaaatctatatacagaagggcgcccgaacctgggacccc

SEQ ID NO: 464703 - DNA, 59 bp, Artificial
  Synthetic oligonucleotide
tcttattatgtgtaggtgccttaatatttaccaaactagcatcaactatagaagtagga

SEQ ID NO: 464704 - DNA, 51 bp, Artificial
  Synthetic oligonucleotide
tcttattcaacacacttgcgaacatggttttcacattctgcagatatgagg

SEQ ID NO: 464705 - DNA, 51 bp, Artificial
  Synthetic oligonucleotide
tcttattcctccttgcttatcttatggaatgtgtaacgttaccaactacgt

SEQ ID NO: 464706 - DNA, 59 bp, Artificial
  Synthetic oligonucleotide
tcttattgtaatggcgttagagaattgtatcttaattcgtctaacgttactgctatgga

SEQ ID NO: 464707 - DNA, 57 bp, Artificial
  Synthetic oligonucleotide
tcttattgtcgtgaggctgatataggaccgaagaagttaggtgattaccggttgatg

SEQ ID NO: 464708 - DNA, 59 bp, Artificial
  Synthetic oligonucleotide
tcttattgtgatggcgttagggcgggttatgttaactcgtctaatgtcactattcctga

SEQ ID NO: 464709 - DNA, 57 bp, Artificial
  Synthetic oligonucleotide
tcttattttcctagcacggttagcactcatcctaagggggtcagttgcacgtaagtc

SEQ ID NO: 464710 - DNA, 50 bp, Artificial
  Synthetic oligonucleotide
tcttcaaacttgaatgcagttatgttttggttggagaaacatgcgaatga

SEQ ID NO: 464711 - DNA, 54 bp, Artificial
  Synthetic oligonucleotide
tcttcaacacggaagccctaataggaaaccctaggaaagcgtcctgccacctta

SEQ ID NO: 464712 - DNA, 60 bp, Artificial
  Synthetic oligonucleotide
tcttcaacatatgtgcagcgtttagcagcgatcggcgcgttatatcccaatgaattcacc

SEQ ID NO: 464713 - DNA, 55 bp, Artificial
  Synthetic oligonucleotide
tcttcaacgctcaaaacgccacgccgggaactacctcggtgtacccagaggacaa

SEQ ID NO: 464714 - DNA, 60 bp, Artificial
  Synthetic oligonucleotide
tcttcaactatgtcgtcggacatgtatcgccaaacgccgagctcgcaaccacggccagta

SEQ ID NO: 464715 - DNA, 55 bp, Artificial
  Synthetic oligonucleotide
tcttcaagcaaattatggcttggatctggccctctgaagacccagtgccagccct

SEQ ID NO: 464716 - DNA, 55 bp, Artificial
  Synthetic oligonucleotide
tcttcaagggcgtgatgtccctcgtgggctgccgtgggttgaatggcatggacct

SEQ ID NO: 464717 - DNA, 60 bp, Artificial
  Synthetic oligonucleotide
tcttcaaggtggttgtcttgaatgggcacattgtgccctataccatgccatgatccccag

SEQ ID NO: 464718 - DNA, 60 bp, Artificial
  Synthetic oligonucleotide
tcttcaagtcaaatctaccaatcgagaactgtgatgctacatgccagactattgcaggag

SEQ ID NO: 464719 - DNA, 57 bp, Artificial
  Synthetic oligonucleotide
tcttcaagtgacggagtactatctagtatggctgtcacttttaaacgagcccttggg

SEQ ID NO: 464720 - DNA, 60 bp, Artificial
  Synthetic oligonucleotide
tcttcaagtgtttatgagtcgatcattcagacaagagcttcagtctggggatcaactgca

SEQ ID NO: 464721 - DNA, 53 bp, Artificial
  Synthetic oligonucleotide
tcttcaattgaaattacaagggtggatgcagttctccaaccttcactacctgg

SEQ ID NO: 464722 - DNA, 60 bp, Artificial
  Synthetic oligonucleotide
tcttcaatttgatactgatgaacatggatcagatagaacgcgcatcagatcaaactgcgc

SEQ ID NO: 464723 - DNA, 55 bp, Artificial
  Synthetic oligonucleotide
tcttcacaaccccaccaggaggttggtgtgacacaaaaatcgagtactccaactt

SEQ ID NO: 464724 - DNA, 60 bp, Artificial
  Synthetic oligonucleotide
tcttcacacctcctccgagccggtaattctccatggcagctgactcaatttttagattgg

SEQ ID NO: 464725 - DNA, 60 bp, Artificial
  Synthetic oligonucleotide
tcttcacacctccttcgagctggcaattctccatggcagctgactcagttcctagattgg

SEQ ID NO: 464726 - DNA, 60 bp, Artificial
  Synthetic oligonucleotide
tcttcacacgatacgtcgagtacgagcctgcgggtcctcatcagggtccgggctggatgg

SEQ ID NO: 464727 - DNA, 51 bp, Artificial
  Synthetic oligonucleotide
tcttcacagcttcaaaagagctcacatcaaggctcggagatatcacggtga

SEQ ID NO: 464728 - DNA, 60 bp, Artificial
  Synthetic oligonucleotide
tcttcacatcttcttcgagcgggtaattcaccatggcagctgactcaatttctggattgg

SEQ ID NO: 464729 - DNA, 55 bp, Artificial
  Synthetic oligonucleotide
tcttcaccctttataattgcaacatccaattggtctaatccaagtcctaaaacgg

SEQ ID NO: 464730 - DNA, 60 bp, Artificial
  Synthetic oligonucleotide
tcttcacgatcgactggtctggattcgaccaacgtctaccacgtgtcatcactgacatat

SEQ ID NO: 464731 - DNA, 60 bp, Artificial
  Synthetic oligonucleotide
tcttcactcgctagcaacattagacgattaaaggacgccttacagcaaggactagaggcg

SEQ ID NO: 464732 - DNA, 60 bp, Artificial
  Synthetic oligonucleotide
tcttcactcgtgggatcccgcctccgcttgtacttcctgaagatccacgcaagcgtagct

SEQ ID NO: 464733 - DNA, 51 bp, Artificial
  Synthetic oligonucleotide
tcttcactgcaccttgcaaggggaggcccgccgagactacgtccgcgactg

SEQ ID NO: 464734 - DNA, 59 bp, Artificial
  Synthetic oligonucleotide
tcttcagaaattacgtcaatgtacaatcgaagggatctctccctccggctgtggccgcg

SEQ ID NO: 464735 - DNA, 59 bp, Artificial
  Synthetic oligonucleotide
tcttcagattcactgcaattgctccgactcgtgcggtgctggacaggtggagaggcgtc

SEQ ID NO: 464736 - DNA, 60 bp, Artificial
  Synthetic oligonucleotide
tcttcagccgagaggaaaatgtggtatcagaagtgtactccatgacacattctaatccca

SEQ ID NO: 464737 - DNA, 55 bp, Artificial
  Synthetic oligonucleotide
tcttcagcttgccttgcatcctacagaaatgtaccccgttgacgacgttcgtgtc

SEQ ID NO: 464738 - DNA, 52 bp, Artificial
  Synthetic oligonucleotide
tcttcaggacggcatgcaccgagttacacaagactctgtgcaacaaagcagt

SEQ ID NO: 464739 - DNA, 57 bp, Artificial
  Synthetic oligonucleotide
tcttcaggcaccgttctgtccctccaagctagccttattaaatctcggtaggaccca

SEQ ID NO: 464740 - DNA, 58 bp, Artificial
  Synthetic oligonucleotide
tcttcaggtcgaacggtctaacagccaatgaatcgggacggctaatagatttcctcaa

SEQ ID NO: 464741 - DNA, 60 bp, Artificial
  Synthetic oligonucleotide
tcttcaggtgccccgattctgtgctcctccgggcatgttattgggatgttcaccgctgct

SEQ ID NO: 464742 - DNA, 60 bp, Artificial
  Synthetic oligonucleotide
tcttcagtcggagtaatgatcccttagctttgcaggctcgttatgctcaaatgtatgatg

SEQ ID NO: 464743 - DNA, 57 bp, Artificial
  Synthetic oligonucleotide
tcttcagtttccccttaaattttgcgaagtgtgttcgttgatgaacatttgtgtcgc

SEQ ID NO: 464744 - DNA, 60 bp, Artificial
  Synthetic oligonucleotide
tcttcatagaaagaagcagcgctttcagcagttgctacccatatgacatccctgactatg

SEQ ID NO: 464745 - DNA, 60 bp, Artificial
  Synthetic oligonucleotide
tcttcatatgggatgtgtcatcagatcgatcgcagatggatgatgatgaatgggaatcga

SEQ ID NO: 464746 - DNA, 59 bp, Artificial
  Synthetic oligonucleotide
tcttcatcatccaaagggctgacctaaagacaccgaagtaccgcaccttcgtgcccaga

SEQ ID NO: 464747 - DNA, 60 bp, Artificial
  Synthetic oligonucleotide
tcttcatccctctcactttatcatgctctgagacattggtctctaattctaagcaagtta

SEQ ID NO: 464748 - DNA, 60 bp, Artificial
  Synthetic oligonucleotide
tcttcatccttctgagatagatgttgtcacttcctcagaccctatttcagatgtcactgg

SEQ ID NO: 464749 - DNA, 60 bp, Artificial
  Synthetic oligonucleotide
tcttcatcggtacgatggaacacggacagcgtggttcatacggccgctcgatcttctacg

SEQ ID NO: 464750 - DNA, 51 bp, Artificial
  Synthetic oligonucleotide
tcttcatgaagttcgcgacagatgcgaatgaatttcttgttaacaggtgtt

SEQ ID NO: 464751 - DNA, 60 bp, Artificial
  Synthetic oligonucleotide
tcttcatgcatcgacgcctgacagtcgcaccccactgttccgccgtagacggaaactgta

SEQ ID NO: 464752 - DNA, 55 bp, Artificial
  Synthetic oligonucleotide
tcttcatgcgttatagtaccagagtcccacgatattccatgtacattgcgtgtca

SEQ ID NO: 464753 - DNA, 56 bp, Artificial
  Synthetic oligonucleotide
tcttcatgtcttcatggtcctctgcattgttcatgagtaaaacatctgtgacagtg

SEQ ID NO: 464754 - DNA, 59 bp, Artificial
  Synthetic oligonucleotide
tcttcattgcgaacttggtgctcttctggcgacagtgctctgggcccacgaaactgact

SEQ ID NO: 464755 - DNA, 59 bp, Artificial
  Synthetic oligonucleotide
tcttcattgtccactactactgtagtaggattagctctagcattggtaacttttacgtc

SEQ ID NO: 464756 - DNA, 60 bp, Artificial
  Synthetic oligonucleotide
tcttcatttaaatgttgtcatgactctgattgttcatctgagggattaatggcatctgca

SEQ ID NO: 464757 - DNA, 59 bp, Artificial
  Synthetic oligonucleotide
tcttccaaaaccgaaggttgcatctgaggcattcatggcaacaaataaggcatattttt

SEQ ID NO: 464758 - DNA, 52 bp, Artificial
  Synthetic oligonucleotide
tcttccaaatgggtactgtgtgacaaatgccactgttggcactcatcaattg

SEQ ID NO: 464759 - DNA, 52 bp, Artificial
  Synthetic oligonucleotide
tcttccaacaacttaaaacgtggtttacttaaggtcttatataactctagac

SEQ ID NO: 464760 - DNA, 52 bp, Artificial
  Synthetic oligonucleotide
tcttccaacagtctgactccgaccctgaatcgaccctcgcaacacaccttga

SEQ ID NO: 464761 - DNA, 55 bp, Artificial
  Synthetic oligonucleotide
tcttccaacattccttcatacccttcagccactgctgcatatacaggtggaccac

SEQ ID NO: 464762 - DNA, 55 bp, Artificial
  Synthetic oligonucleotide
tcttccaacgctggaaaggtgtatctaccacctagtgcccctgttgctcgtgtgc

SEQ ID NO: 464763 - DNA, 57 bp, Artificial
  Synthetic oligonucleotide
tcttccaacgttgatcgaaggtgaacttaaggttactcgtgtcaaaactgtatagca

SEQ ID NO: 464764 - DNA, 55 bp, Artificial
  Synthetic oligonucleotide
tcttccaactatacaagctcacatgcgtaattaccagtcctcccaattccgaggt

SEQ ID NO: 464765 - DNA, 56 bp, Artificial
  Synthetic oligonucleotide
tcttccaagacaagtctatgaatccagctgtagattgagtttcacccatcctagta

SEQ ID NO: 464766 - DNA, 60 bp, Artificial
  Synthetic oligonucleotide
tcttccaagccggaaggtttgagagagtcgaagcgcccgccaatctgcaattggcaatca

SEQ ID NO: 464767 - DNA, 55 bp, Artificial
  Synthetic oligonucleotide
tcttccaagtttaaagagtcttgtgcttgtaagtttctagtcccttcctggtgac

SEQ ID NO: 464768 - DNA, 60 bp, Artificial
  Synthetic oligonucleotide
tcttccaatctgtattggccaatctcacctcattcggactaaagcctaccgctgcagaca

SEQ ID NO: 464769 - DNA, 60 bp, Artificial
  Synthetic oligonucleotide
tcttccaattctcaggggtctctccacccttcgaccctctcgctcttgagtgttatcaca

SEQ ID NO: 464770 - DNA, 58 bp, Artificial
  Synthetic oligonucleotide
tcttccaccgaacttctccagccttgaaaactttagagcctatgtggatggattcgaa

SEQ ID NO: 464771 - DNA, 60 bp, Artificial
  Synthetic oligonucleotide
tcttccaggacagaaggcgcgcgatgacgtgaactctgagcccgcccaacctgttgaaga

SEQ ID NO: 464772 - DNA, 60 bp, Artificial
  Synthetic oligonucleotide
tcttccatatgtatggcatctcgcgaacattcaagggaggcatcgtcaaacgttgagtag

SEQ ID NO: 464773 - DNA, 60 bp, Artificial
  Synthetic oligonucleotide
tcttccatgagcctgtggtgccagacccacctcacccccgctgtcaagctcgcgaacgac

SEQ ID NO: 464774 - DNA, 51 bp, Artificial
  Synthetic oligonucleotide
tcttccattcgcaacccattaatgagagaccaaaacaagcttggtgctggt

SEQ ID NO: 464775 - DNA, 55 bp, Artificial
  Synthetic oligonucleotide
tcttcccatacaagttcccacactaggttgctcattgatacacctccttcttacg

SEQ ID NO: 464776 - DNA, 60 bp, Artificial
  Synthetic oligonucleotide
tcttcccctgtgaaaatgggcttcctgagtatgtctgtcaattgttgtactgtgtatgct

SEQ ID NO: 464777 - DNA, 57 bp, Artificial
  Synthetic oligonucleotide
tcttcccgagctgaagaaaacccaactgactgagattctttcggtttctgagttcga

SEQ ID NO: 464778 - DNA, 53 bp, Artificial
  Synthetic oligonucleotide
tcttcccgattccgatacgactccctccccccaggtgccccccaggaatggcg

SEQ ID NO: 464779 - DNA, 55 bp, Artificial
  Synthetic oligonucleotide
tcttcccgccaaatgatcgggacagtgtacttacgattctactgttgtcgacgct

SEQ ID NO: 464780 - DNA, 60 bp, Artificial
  Synthetic oligonucleotide
tcttcccgggcatggtctggcaggaccgcgacatctacctgcagggcccgatatgggcca

SEQ ID NO: 464781 - DNA, 59 bp, Artificial
  Synthetic oligonucleotide
tcttccctagcagttcatacaggaggccggttggaatttccagtatggtggaggccatg

SEQ ID NO: 464782 - DNA, 55 bp, Artificial
  Synthetic oligonucleotide
tcttccctcgtaatactccccgcctgtgatgccgatggacctgggtcgattgccg

SEQ ID NO: 464783 - DNA, 60 bp, Artificial
  Synthetic oligonucleotide
tcttcccttttcacaaggacaatgcaatacgattgggtgagaacaaggacgtcatagtca

SEQ ID NO: 464784 - DNA, 55 bp, Artificial
  Synthetic oligonucleotide
tcttccgagcgttctaagtaagccagcatttcggaaagggctactcaagtacaac

SEQ ID NO: 464785 - DNA, 60 bp, Artificial
  Synthetic oligonucleotide
tcttccgccaaaggttatgagcgcagtaatgaatcaactactaattaagcgcgcccagcc

SEQ ID NO: 464786 - DNA, 53 bp, Artificial
  Synthetic oligonucleotide
tcttccgccagtccaactaccccagtatttcacctttgatttgacagcactca

SEQ ID NO: 464787 - DNA, 57 bp, Artificial
  Synthetic oligonucleotide
tcttccgcctgcagaggtctacggggttatccagcaaaccacagttcgataaggccc

SEQ ID NO: 464788 - DNA, 51 bp, Artificial
  Synthetic oligonucleotide
tcttccgcggcaaacgcaggcctctcttccgcaacaaacgccctttgatca

SEQ ID NO: 464789 - DNA, 53 bp, Artificial
  Synthetic oligonucleotide
tcttccgtcgcgaaacctccaagtcgctgactctgactccagacccgaatcca

SEQ ID NO: 464790 - DNA, 60 bp, Artificial
  Synthetic oligonucleotide
tcttcctagatcgtgcggcttgtggatcgatcttcaagacgcggacagggaaggacaccc

SEQ ID NO: 464791 - DNA, 55 bp, Artificial
  Synthetic oligonucleotide
tcttcctaggcccggagtctatctccatccggtctgttcgggccttcttcgccgg

SEQ ID NO: 464792 - DNA, 55 bp, Artificial
  Synthetic oligonucleotide
tcttcctccccggtgtccatggagtccccttccacctggatgagcacggagcccg

SEQ ID NO: 464793 - DNA, 60 bp, Artificial
  Synthetic oligonucleotide
tcttcctctactgacctcagcccccctgacagcccgcatgcttcagatgatgatatggac

SEQ ID NO: 464794 - DNA, 56 bp, Artificial
  Synthetic oligonucleotide
tcttcctctagggcgtagtgttgtgggataccctagagtacacattaaacacccac

SEQ ID NO: 464795 - DNA, 55 bp, Artificial
  Synthetic oligonucleotide
tcttcctctcttcgaccgcccccgacctcgtgcctctcttcgagaacacccacgt

SEQ ID NO: 464796 - DNA, 51 bp, Artificial
  Synthetic oligonucleotide
tcttcctgctcctgtaccgtcagcacctcctatgattcagtatataccagt

SEQ ID NO: 464797 - DNA, 52 bp, Artificial
  Synthetic oligonucleotide
tcttcctggtttgcgcgaagcttccagggtaggattaatcaatccgttactc

SEQ ID NO: 464798 - DNA, 59 bp, Artificial
  Synthetic oligonucleotide
tcttccttactcaaggttccctactcaatgacaaacattctaatggcacagtgaaagac

SEQ ID NO: 464799 - DNA, 60 bp, Artificial
  Synthetic oligonucleotide
tcttcgacgatgagaacagggggctaattgcctatcccacatccatccggtccctgtcag

SEQ ID NO: 464800 - DNA, 53 bp, Artificial
  Synthetic oligonucleotide
tcttcgactaccagcacgggaccatgcagaacctgcacgactcctgctcaagg

SEQ ID NO: 464801 - DNA, 55 bp, Artificial
  Synthetic oligonucleotide
tcttcgactcgatggatctgttcacgtacggtgatgacggtgtctacatcgtccc

SEQ ID NO: 464802 - DNA, 60 bp, Artificial
  Synthetic oligonucleotide
tcttcgactttatggcggggaagctttcatcagaagatctgtggtatgccatcccggtgc

SEQ ID NO: 464803 - DNA, 60 bp, Artificial
  Synthetic oligonucleotide
tcttcgagcacctcatgccatgtctggagagacctttctatccaatgtgggacgagagtc

SEQ ID NO: 464804 - DNA, 60 bp, Artificial
  Synthetic oligonucleotide
tcttcgatccatagggctgcttgcacaggatttccaatcacatgtcagccccgccatcat

SEQ ID NO: 464805 - DNA, 50 bp, Artificial
  Synthetic oligonucleotide
tcttcgcaactacaagttcactcttctcggtgagttgaacgtcgttcccg

SEQ ID NO: 464806 - DNA, 59 bp, Artificial
  Synthetic oligonucleotide
tcttcgccacgaacactgacctgccggtgactgtatttggtcccgaccgcaccatccca

SEQ ID NO: 464807 - DNA, 56 bp, Artificial
  Synthetic oligonucleotide
tcttcgcccgtcgagacccttccaacgtctcgatcgtgcgttagtggggaatccac

SEQ ID NO: 464808 - DNA, 55 bp, Artificial
  Synthetic oligonucleotide
tcttcgcgaggatcccaaacggcgctcggacggtctgggcaatcgacatgtcgca

SEQ ID NO: 464809 - DNA, 60 bp, Artificial
  Synthetic oligonucleotide
tcttcgcgcgaggtgcatgcgtagccattataaccgtggataactcagtttccgccacga

SEQ ID NO: 464810 - DNA, 55 bp, Artificial
  Synthetic oligonucleotide
tcttcgctcgtgctcggtcgacaacgacgaggcctatgtgatgcgcgacgccgtt

SEQ ID NO: 464811 - DNA, 50 bp, Artificial
  Synthetic oligonucleotide
tcttcggacccctttgggttcttcaagccagtttacttagggtaccctac

SEQ ID NO: 464812 - DNA, 53 bp, Artificial
  Synthetic oligonucleotide
tcttcggacctggtaagattccaataacgacgacgaaagataatatttccccg

SEQ ID NO: 464813 - DNA, 56 bp, Artificial
  Synthetic oligonucleotide
tcttcggagacaatgcagaggagtacgacaactaaggaaaaatacccttgtttcta

SEQ ID NO: 464814 - DNA, 54 bp, Artificial
  Synthetic oligonucleotide
tcttcggatataacggtcattacatctcccactgctcaggatatcgctaggtct

SEQ ID NO: 464815 - DNA, 59 bp, Artificial
  Synthetic oligonucleotide
tcttcgtaatttatacacacagatagtgtatacgccaattttaacaattgacggataca

SEQ ID NO: 464816 - DNA, 53 bp, Artificial
  Synthetic oligonucleotide
tcttcgtccctcattcgaaactcaattccttgaacgtttggaaaacctcgacc

SEQ ID NO: 464817 - DNA, 59 bp, Artificial
  Synthetic oligonucleotide
tcttcgtgaagttctctacagaccttgacaaacagcttgttgacaggagtgttaaggga

SEQ ID NO: 464818 - DNA, 60 bp, Artificial
  Synthetic oligonucleotide
tcttcgtgcagctctctgcagactttgatatatttcttattgactggagtatttatggta

SEQ ID NO: 464819 - DNA, 55 bp, Artificial
  Synthetic oligonucleotide
tcttctaacccctggtctcgtttcacatctctctgctaagcaccactctaccgcc

SEQ ID NO: 464820 - DNA, 58 bp, Artificial
  Synthetic oligonucleotide
tcttctaacctagagttagagatttctaactgtaagattgcacctaacaagtctatta

SEQ ID NO: 464821 - DNA, 60 bp, Artificial
  Synthetic oligonucleotide
tcttctaagtctgaacttactggtgactctgctgctcttgcgggtgtttcaaggaaacaa

SEQ ID NO: 464822 - DNA, 60 bp, Artificial
  Synthetic oligonucleotide
tcttctacccatatgccctagctcattgataagctggaaggtgaacctaggatactcgac

SEQ ID NO: 464823 - DNA, 58 bp, Artificial
  Synthetic oligonucleotide
tcttctaccgctatggatttgtagctaatttcagtatggagttgcccagttttggagt

SEQ ID NO: 464824 - DNA, 60 bp, Artificial
  Synthetic oligonucleotide
tcttctacgatgtgttcgagggcaccaaagagccagcggtgcttactagcaaagacccaa

SEQ ID NO: 464825 - DNA, 56 bp, Artificial
  Synthetic oligonucleotide
tcttctactgagctttaattcaaatcctttggttgcaagtcattatggctcactcc

SEQ ID NO: 464826 - DNA, 60 bp, Artificial
  Synthetic oligonucleotide
tcttctcgctcgttgtaacgtgtcgagtgattcaatcagcgctgtcatctcccagagagc

SEQ ID NO: 464827 - DNA, 55 bp, Artificial
  Synthetic oligonucleotide
tcttctctaaccgtgaatgtgaggggctcaggaatgagaatacctgtgagaggta

SEQ ID NO: 464828 - DNA, 60 bp, Artificial
  Synthetic oligonucleotide
tcttctctctcagtgctagcctctgctaagcagtctgagtacattagagtttcccaacag

SEQ ID NO: 464829 - DNA, 60 bp, Artificial
  Synthetic oligonucleotide
tcttctctgatctgtgtcgcaccttgatgggtacctgagtagagtgggccgtagagggtg

SEQ ID NO: 464830 - DNA, 55 bp, Artificial
  Synthetic oligonucleotide
tcttctgaacccttcacacgaggtaccacccacccgagtgatacgcgtgtggcgg

SEQ ID NO: 464831 - DNA, 60 bp, Artificial
  Synthetic oligonucleotide
tcttctgatattacgcaggttacccgcagctctctgggctactcagcaaaaccacgatac

SEQ ID NO: 464832 - DNA, 53 bp, Artificial
  Synthetic oligonucleotide
tcttctgcaaccacaacacctgctgtattagatattacccctgcttctgggtc

SEQ ID NO: 464833 - DNA, 53 bp, Artificial
  Synthetic oligonucleotide
tcttctgccgaagtctctgcctcctcacatctcgacctcctacgaccgcgatg

SEQ ID NO: 464834 - DNA, 56 bp, Artificial
  Synthetic oligonucleotide
tcttctgcgggtactacactggctctgccggtgccatccgtaatcctctcgctctt

SEQ ID NO: 464835 - DNA, 55 bp, Artificial
  Synthetic oligonucleotide
tcttctggaagacaaacacaacggaaagttatgcagactagggggaatagccccg

SEQ ID NO: 464836 - DNA, 55 bp, Artificial
  Synthetic oligonucleotide
tcttctggaagacaaacataacggaaaactatgtaagctaaggggaatagcccca

SEQ ID NO: 464837 - DNA, 58 bp, Artificial
  Synthetic oligonucleotide
tcttctgtcaaagttgctgtgctgaggaggaagatcgccaactgcgatcatcggacgg

SEQ ID NO: 464838 - DNA, 59 bp, Artificial
  Synthetic oligonucleotide
tcttcttagcctgacgttgattacgaatgacatacccttggtgtttttgtatgtgatcg

SEQ ID NO: 464839 - DNA, 60 bp, Artificial
  Synthetic oligonucleotide
tcttcttatgtgcctgaactatacactcatccaggctgtgtgaatctcccattctcagaa

SEQ ID NO: 464840 - DNA, 52 bp, Artificial
  Synthetic oligonucleotide
tcttcttcaagatcctccctggtgaggacacgaacccgttcaaggacggcga

SEQ ID NO: 464841 - DNA, 60 bp, Artificial
  Synthetic oligonucleotide
tcttcttcacgacaacagttttcctgcaattgattggaataccaacccacagacacattg

SEQ ID NO: 464842 - DNA, 60 bp, Artificial
  Synthetic oligonucleotide
tcttcttcagtgttgtcgccttcttgtaaggcactcatgcagtgcttaatggatggtgac

SEQ ID NO: 464843 - DNA, 60 bp, Artificial
  Synthetic oligonucleotide
tcttcttccattctcagcatgtgaggcctaccatcaggtggatagctgcttcttgctctc

SEQ ID NO: 464844 - DNA, 55 bp, Artificial
  Synthetic oligonucleotide
tcttcttccgaataggtgtactcgtaccagacgggcttgccccttccgtgccacc

SEQ ID NO: 464845 - DNA, 60 bp, Artificial
  Synthetic oligonucleotide
tcttcttcgcctcccgatgctggactttgattggtacctgagtacagcggatttgagaga

SEQ ID NO: 464846 - DNA, 55 bp, Artificial
  Synthetic oligonucleotide
tcttcttctaattattgaatccatcctctgggcagcaagtgcagcagaaatcccc

SEQ ID NO: 464847 - DNA, 60 bp, Artificial
  Synthetic oligonucleotide
tcttcttgcctcctacggacgctgaaagcaaggaaatccgatttcgcggcgagctctcaa

SEQ ID NO: 464848 - DNA, 55 bp, Artificial
  Synthetic oligonucleotide
tcttcttggttcgtgataggagaccatttggtactccacaggattttggtcaggt

SEQ ID NO: 464849 - DNA, 54 bp, Artificial
  Synthetic oligonucleotide
tcttctttacctgactttcaatttcaggtttgagtgttgttagagaaggggccc

SEQ ID NO: 464850 - DNA, 55 bp, Artificial
  Synthetic oligonucleotide
tcttctttcgtaaccgcttagggttcctcgctggtgagaacattgtaatgtcccg

SEQ ID NO: 464851 - DNA, 55 bp, Artificial
  Synthetic oligonucleotide
tcttgaaacctcgtggccgcgatgttcagcggtggtacaccgcctccactcgtgg

SEQ ID NO: 464852 - DNA, 50 bp, Artificial
  Synthetic oligonucleotide
tcttgaaacgttacacaccctcaattacattatactgctgaacacgaagc

SEQ ID NO: 464853 - DNA, 58 bp, Artificial
  Synthetic oligonucleotide
tcttgaaaggaggttcccgtttcatttgcgcattagagctgtagccagctactcgcgc

SEQ ID NO: 464854 - DNA, 56 bp, Artificial
  Synthetic oligonucleotide
tcttgaaatacaggggatttggaacctcccagataaaaacggaattctctgcctga

SEQ ID NO: 464855 - DNA, 60 bp, Artificial
  Synthetic oligonucleotide
tcttgaaataggggacatgctcctgcggactgcaataggccaagtatcaaggcctatgtt

SEQ ID NO: 464856 - DNA, 51 bp, Artificial
  Synthetic oligonucleotide
tcttgaaattggcgcccacccccgctcaataaacgataaccctaatgtggt

SEQ ID NO: 464857 - DNA, 60 bp, Artificial
  Synthetic oligonucleotide
tcttgaacaaattcgttctactgtgacagtagatggaatagggcacaacacaactgttgt

SEQ ID NO: 464858 - DNA, 59 bp, Artificial
  Synthetic oligonucleotide
tcttgaacattcaaggcgatgcctggttggacttatccgaggtgacagcctaccgttcc

SEQ ID NO: 464859 - DNA, 60 bp, Artificial
  Synthetic oligonucleotide
tcttgaagatactctagtgaacccttgaatggcaatctcaagcgcctctgtaggaaagcc

SEQ ID NO: 464860 - DNA, 55 bp, Artificial
  Synthetic oligonucleotide
tcttgaagcgggttatagaggacgactttgagtacgtgaacgcagaagacgagcc

SEQ ID NO: 464861 - DNA, 60 bp, Artificial
  Synthetic oligonucleotide
tcttgaaggggaattaacgttccgaattgcagctcgcctgtctggagatgtcaatttcat

SEQ ID NO: 464862 - DNA, 57 bp, Artificial
  Synthetic oligonucleotide
tcttgaagttcagaaaacacttgtgaatccccaacgccttccgcaggttgtggttga

SEQ ID NO: 464863 - DNA, 60 bp, Artificial
  Synthetic oligonucleotide
tcttgaatcccggtggcaaggcttggactttaatagaccccactctcagcactgacgatc

SEQ ID NO: 464864 - DNA, 60 bp, Artificial
  Synthetic oligonucleotide
tcttgaatgggcacattgtgccctataccatgccatgatccccagttctcgtttagtgga

SEQ ID NO: 464865 - DNA, 60 bp, Artificial
  Synthetic oligonucleotide
tcttgacaaaaatcatgtggctgacatcgataagttgattgactatgctgcctctggtga

SEQ ID NO: 464866 - DNA, 60 bp, Artificial
  Synthetic oligonucleotide
tcttgacaaaatatgccttggacatcatgcagtccccaatggcaccatcgtaaagactct

SEQ ID NO: 464867 - DNA, 60 bp, Artificial
  Synthetic oligonucleotide
tcttgacaaagtcaatggggtttcagagatggaaaacagtaaggtttatgatgatggagc

SEQ ID NO: 464868 - DNA, 56 bp, Artificial
  Synthetic oligonucleotide
tcttgacaacaaacattcaaatggcacaatacatgataggattccccaccggaccc

SEQ ID NO: 464869 - DNA, 55 bp, Artificial
  Synthetic oligonucleotide
tcttgacaccgggccatggacagctaatctccagttgactttctgccatggacac

SEQ ID NO: 464870 - DNA, 60 bp, Artificial
  Synthetic oligonucleotide
tcttgacactttacttaatttatgtatgattggatatggaagcgataaagtgagagaggt

SEQ ID NO: 464871 - DNA, 55 bp, Artificial
  Synthetic oligonucleotide
tcttgacagtatgcaagtgtatgctcaagcgcgctcggacaaatgggtgctagac

SEQ ID NO: 464872 - DNA, 60 bp, Artificial
  Synthetic oligonucleotide
tcttgacattgatgaacctacagggcaaaccgcagactggctgagcattgtggtctacct

SEQ ID NO: 464873 - DNA, 59 bp, Artificial
  Synthetic oligonucleotide
tcttgaccaagcggagaccagcggagtgagactcacagtcctcgcaaccgctacccccc

SEQ ID NO: 464874 - DNA, 60 bp, Artificial
  Synthetic oligonucleotide
tcttgacccgtcaactcctgacggtttaaagctggcgagtgatgcagagatatgggccgg

SEQ ID NO: 464875 - DNA, 60 bp, Artificial
  Synthetic oligonucleotide
tcttgaccgtaattacggcattgctattccaacaccaccgaaccttgacctcatcatgga

SEQ ID NO: 464876 - DNA, 55 bp, Artificial
  Synthetic oligonucleotide
tcttgacgcctgggccacagtttgaccccgcttatgaccagctgagaccccagcg

SEQ ID NO: 464877 - DNA, 52 bp, Artificial
  Synthetic oligonucleotide
tcttgactgtcggtgcccggaatgggatgtcgacggaatgtttcgcggtgga

SEQ ID NO: 464878 - DNA, 59 bp, Artificial
  Synthetic oligonucleotide
tcttgagaaatacgttgaagacaccaaaatagatctctggtcttacaatgcggacgttc

SEQ ID NO: 464879 - DNA, 60 bp, Artificial
  Synthetic oligonucleotide
tcttgagacggctgcaccagtggctaagctcggagtgttccactccatgctccggttcct

SEQ ID NO: 464880 - DNA, 60 bp, Artificial
  Synthetic oligonucleotide
tcttgagagaataagagaaagagcagaagacagtggcaatgagagtgatggagaccagga

SEQ ID NO: 464881 - DNA, 57 bp, Artificial
  Synthetic oligonucleotide
tcttgagagggttatgtcatcccttcctgggtttccgctcttcagaccgtaggtcga

SEQ ID NO: 464882 - DNA, 59 bp, Artificial
  Synthetic oligonucleotide
tcttgagagtgtgagatcattgcggcccggatttccagactttagcttgtacttgctga

SEQ ID NO: 464883 - DNA, 60 bp, Artificial
  Synthetic oligonucleotide
tcttgagataggagacatgctcctacgaactgcaataggccaagtgtcgaggcctctgtt

SEQ ID NO: 464884 - DNA, 55 bp, Artificial
  Synthetic oligonucleotide
tcttgagcctctcatgtcttccttcattggatgtacgtgatagttatgctcttcg

SEQ ID NO: 464885 - DNA, 60 bp, Artificial
  Synthetic oligonucleotide
tcttgagctctcaggttttcttgctacataatcgcatggattcaaatgtttaagacccga

SEQ ID NO: 464886 - DNA, 58 bp, Artificial
  Synthetic oligonucleotide
tcttgaggctccttagtaaaacaactctcacttgcctaggagacttcaaacaactcca

SEQ ID NO: 464887 - DNA, 55 bp, Artificial
  Synthetic oligonucleotide
tcttgagggagcgaaatcacagctgctcgagtttaggaatctcaactccgaccac

SEQ ID NO: 464888 - DNA, 53 bp, Artificial
  Synthetic oligonucleotide
tcttgagggtccgagatcagcaggggaacgtactcttatctcctgaagaggtt

SEQ ID NO: 464889 - DNA, 60 bp, Artificial
  Synthetic oligonucleotide
tcttgagtcaaaactcagcgttgtccacgtttgtaacatatcctagctatgttaagtctg

SEQ ID NO: 464890 - DNA, 60 bp, Artificial
  Synthetic oligonucleotide
tcttgatagagggcggatgtgagggtgatgaagatcgcattcttcagagtccagttcctg

SEQ ID NO: 464891 - DNA, 55 bp, Artificial
  Synthetic oligonucleotide
tcttgatagcatgcaggtgtatgctcaagcgcgctcggatagatgggtgctggac

SEQ ID NO: 464892 - DNA, 60 bp, Artificial
  Synthetic oligonucleotide
tcttgatataacggctgatccaactacggctccacagattgagcgaatgatgcgcataaa

SEQ ID NO: 464893 - DNA, 60 bp, Artificial
  Synthetic oligonucleotide
tcttgatggagcaaactgcacactgatagatgctctattgggggaccctcattgtgatga

SEQ ID NO: 464894 - DNA, 60 bp, Artificial
  Synthetic oligonucleotide
tcttgattgtgaacactagtaagtaccccaatatgtatgtcccagttggtgctgtgaccg

SEQ ID NO: 464895 - DNA, 60 bp, Artificial
  Synthetic oligonucleotide
tcttgatttatccgtctttaatgactggactaagggatctgatactcgattgatgccgac

SEQ ID NO: 464896 - DNA, 55 bp, Artificial
  Synthetic oligonucleotide
tcttgattttcttcttagccttccggaggtctctctcgagttcctctaacttctt

SEQ ID NO: 464897 - DNA, 58 bp, Artificial
  Synthetic oligonucleotide
tcttgcaaaaggagagaaggctaatgtgttaattgggcaaggagacgtagtgttggta

SEQ ID NO: 464898 - DNA, 54 bp, Artificial
  Synthetic oligonucleotide
tcttgcaaatcaaccgggacgttaacaaacgacgagagtctgaacggcggaacc

SEQ ID NO: 464899 - DNA, 53 bp, Artificial
  Synthetic oligonucleotide
tcttgcaaatgccccagattttccaaaacatcgacgtcttaaagccccctttt

SEQ ID NO: 464900 - DNA, 60 bp, Artificial
  Synthetic oligonucleotide
tcttgcaatctgatcataagtagatgaatcatcaatgatttctacaggattcaactctag

SEQ ID NO: 464901 - DNA, 60 bp, Artificial
  Synthetic oligonucleotide
tcttgcacgttgttactcaatgtggaagccaacacggtgggatgtcgtctacctcccaga

SEQ ID NO: 464902 - DNA, 53 bp, Artificial
  Synthetic oligonucleotide
tcttgcacgtttgctcatcgtggtcacatgacatgggatgctatcaacggttc

SEQ ID NO: 464903 - DNA, 60 bp, Artificial
  Synthetic oligonucleotide
tcttgcactacctcaatggaagaaaaatatgcccacaggctggaggcataaagagatgct

SEQ ID NO: 464904 - DNA, 55 bp, Artificial
  Synthetic oligonucleotide
tcttgcagatggcgttctggttaccaagcgacaagaaattatatctcccaccctc

SEQ ID NO: 464905 - DNA, 54 bp, Artificial
  Synthetic oligonucleotide
tcttgcagcttacagtgcaaggggcatatctaccatcaacaatcagttctgacc

SEQ ID NO: 464906 - DNA, 60 bp, Artificial
  Synthetic oligonucleotide
tcttgcatgaggtcccattgagggatatcttactagttattatgctagtgatagcctcct

SEQ ID NO: 464907 - DNA, 60 bp, Artificial
  Synthetic oligonucleotide
tcttgcatgcagggaccacaatgataacagtcccctccggaggaatttgcgacctaatca

SEQ ID NO: 464908 - DNA, 60 bp, Artificial
  Synthetic oligonucleotide
tcttgccaacatggcgttcactttctgcagataccaagttccatccggaactccgatatg

SEQ ID NO: 464909 - DNA, 60 bp, Artificial
  Synthetic oligonucleotide
tcttgccaatccagatgctaccatatatggaaaatgaagggtttgccaggataataaatc

SEQ ID NO: 464910 - DNA, 56 bp, Artificial
  Synthetic oligonucleotide
tcttgccaccttagcccttattggatgtgatggaagtccttggaggtggttgaagc

SEQ ID NO: 464911 - DNA, 50 bp, Artificial
  Synthetic oligonucleotide
tcttgccagatcgtgaaacatggataaccacgtcagtatggccaatgaac

SEQ ID NO: 464912 - DNA, 53 bp, Artificial
  Synthetic oligonucleotide
tcttgccagtattaacagtacctctgaatacaaaataccttcttttagggggg

SEQ ID NO: 464913 - DNA, 53 bp, Artificial
  Synthetic oligonucleotide
tcttgccatttgtccgcgaccgggggtcgctcctagacgcggaccccgtttcg

SEQ ID NO: 464914 - DNA, 55 bp, Artificial
  Synthetic oligonucleotide
tcttgcctaagtcaactagcctagattcaatagtgtttaatacaactaccctgtc

SEQ ID NO: 464915 - DNA, 57 bp, Artificial
  Synthetic oligonucleotide
tcttgcctgaccgtgcccgcgtcagcctaccaagtacgcaactcctcgggcctttac

SEQ ID NO: 464916 - DNA, 52 bp, Artificial
  Synthetic oligonucleotide
tcttgcgaccaaaccggctgcctggaatttcaagaacattcagaaggtcatg

SEQ ID NO: 464917 - DNA, 60 bp, Artificial
  Synthetic oligonucleotide
tcttgcgcggcgcacctggacaaggcaagagtgtatgctctgagatgcttgctagaatgc

SEQ ID NO: 464918 - DNA, 52 bp, Artificial
  Synthetic oligonucleotide
tcttgcggcagtgtgcggacatactttttttgcactggaagatacctttggg

SEQ ID NO: 464919 - DNA, 59 bp, Artificial
  Synthetic oligonucleotide
tcttgcgggtcccttactttgtgagggctcacgtattgattaagatctgtagcttggtc

SEQ ID NO: 464920 - DNA, 56 bp, Artificial
  Synthetic oligonucleotide
tcttgcgttagtaagtgccacactgacaagggttcaatctctacaactaaaccctt

SEQ ID NO: 464921 - DNA, 55 bp, Artificial
  Synthetic oligonucleotide
tcttgcgtttcgtaagtgtggttaatagcgatgcacgggatatcattcatagtca

SEQ ID NO: 464922 - DNA, 59 bp, Artificial
  Synthetic oligonucleotide
tcttgctaatcgggtagcgaacctccacctcaacttgatctgaggggttcacataggac

SEQ ID NO: 464923 - DNA, 60 bp, Artificial
  Synthetic oligonucleotide
tcttgctatcacagacctgcagagtcgtgttaaatccttggaatctgtttcgagtcacgg

SEQ ID NO: 464924 - DNA, 60 bp, Artificial
  Synthetic oligonucleotide
tcttgctccaaaggtatcaagtaataagggtaagagcttacacatatggtgttgtggaca

SEQ ID NO: 464925 - DNA, 60 bp, Artificial
  Synthetic oligonucleotide
tcttgctcctggagtaatctggttgtttcagacaaccattctaagtcagctttggcctgc

SEQ ID NO: 464926 - DNA, 60 bp, Artificial
  Synthetic oligonucleotide
tcttgctctgtgtcgcgatagaaatgttcgcttcaggcaggcactcgatagtcgcgcgat

SEQ ID NO: 464927 - DNA, 60 bp, Artificial
  Synthetic oligonucleotide
tcttgctgacacgcttctcggtggtctaccgacagaattgatttcgtcggctgggggtca

SEQ ID NO: 464928 - DNA, 55 bp, Artificial
  Synthetic oligonucleotide
tcttgctgcaagcattaggaatcaatccctctatttgcctcataatcctataact

SEQ ID NO: 464929 - DNA, 50 bp, Artificial
  Synthetic oligonucleotide
tcttgcttcttttcataacaaacgactgtctgtaatttggagagataata

SEQ ID NO: 464930 - DNA, 58 bp, Artificial
  Synthetic oligonucleotide
tcttgcttgaatacggaaagaattaggctgtcttggcattttgaactgggactccagg

SEQ ID NO: 464931 - DNA, 55 bp, Artificial
  Synthetic oligonucleotide
tcttgcttgtcaagagcaaacgttttgtttccgacataatcaaccactttaaggg

SEQ ID NO: 464932 - DNA, 60 bp, Artificial
  Synthetic oligonucleotide
tcttggaaacatacatgaatactcggctgtgtatgtgtacggaaaattccaccagatgtg

SEQ ID NO: 464933 - DNA, 54 bp, Artificial
  Synthetic oligonucleotide
tcttggaactaggcccgagagaattatgtttggttttcacgacgacccttccta

SEQ ID NO: 464934 - DNA, 55 bp, Artificial
  Synthetic oligonucleotide
tcttggaagccttcaggcggtacaccccttttgatcccacctcagaggcccaaaa

SEQ ID NO: 464935 - DNA, 60 bp, Artificial
  Synthetic oligonucleotide
tcttggaataacagcgcacgttataggaattgataggtatagagaggataatgtcaaacg

SEQ ID NO: 464936 - DNA, 55 bp, Artificial
  Synthetic oligonucleotide
tcttggacagttgtccttacaagttcgtttaactgggctacggacatggttatgt

SEQ ID NO: 464937 - DNA, 60 bp, Artificial
  Synthetic oligonucleotide
tcttggaccaattcctttagtgttttgatctgtatggtgattggccacatttgatcagtt

SEQ ID NO: 464938 - DNA, 57 bp, Artificial
  Synthetic oligonucleotide
tcttggaccgtagtccttactagctcgtttaattggcccattgacatggtaatgttg

SEQ ID NO: 464939 - DNA, 55 bp, Artificial
  Synthetic oligonucleotide
tcttggaccgttgtcctaaccagttcgtttaattgggccatagacatggtaatgt

SEQ ID NO: 464940 - DNA, 58 bp, Artificial
  Synthetic oligonucleotide
tcttggacctgacagtggaggtcaagtcgatggaggatcagagcaccttggggtcgta

SEQ ID NO: 464941 - DNA, 57 bp, Artificial
  Synthetic oligonucleotide
tcttggacgactaagggcttaatgctactgaaacacgcgaaatcaacaacggacaac

SEQ ID NO: 464942 - DNA, 59 bp, Artificial
  Synthetic oligonucleotide
tcttggagcaacccgctcaatacccagaaatttgggcgtgcccccgcgagatcactagc

SEQ ID NO: 464943 - DNA, 60 bp, Artificial
  Synthetic oligonucleotide
tcttggaggattgcatgaagcaattgaggagtgcctgattaatgacccctgggttttgct

SEQ ID NO: 464944 - DNA, 60 bp, Artificial
  Synthetic oligonucleotide
tcttggagtacataatttacatatgatcggtctgttgcgaaacgaacagctctaattaca

SEQ ID NO: 464945 - DNA, 52 bp, Artificial
  Synthetic oligonucleotide
tcttggagtgaatcaactcattctactttgagccaaaaagtgatatctcaca

SEQ ID NO: 464946 - DNA, 60 bp, Artificial
  Synthetic oligonucleotide
tcttggataccaatacccccctgtgcagttccaacgtcatatacactgctctcagccgtg

SEQ ID NO: 464947 - DNA, 53 bp, Artificial
  Synthetic oligonucleotide
tcttggatgataagccggacggttcatcgtggcatacaaaagaccaactcgtt

SEQ ID NO: 464948 - DNA, 60 bp, Artificial
  Synthetic oligonucleotide
tcttggatgatctgtctcaaccatggtgtgagaagcacaattgggccgatgtcttgagaa

SEQ ID NO: 464949 - DNA, 60 bp, Artificial
  Synthetic oligonucleotide
tcttggatgtgagttggatatcgctttggtttgcctttaatcgatcgtttgagccaacgc

SEQ ID NO: 464950 - DNA, 55 bp, Artificial
  Synthetic oligonucleotide
tcttggattgacgccctctctgatgccctggctcttctaggagatgactctgtga

SEQ ID NO: 464951 - DNA, 60 bp, Artificial
  Synthetic oligonucleotide
tcttggcaactccgcctcaaacaactattatccagggacccagacgatcgcactatcata

SEQ ID NO: 464952 - DNA, 59 bp, Artificial
  Synthetic oligonucleotide
tcttggcaagatctgtagtaccagatttaaaggaactagtatcaaccgaggcacaaatc

SEQ ID NO: 464953 - DNA, 60 bp, Artificial
  Synthetic oligonucleotide
tcttggcaattgcgcctgaagacgctcctcgacaggaacccagatgaccgcactatcttc

SEQ ID NO: 464954 - DNA, 60 bp, Artificial
  Synthetic oligonucleotide
tcttggcagccgccttgtacgcctacgtgtgctggtctaaaccgaaatgccatgtcacat

SEQ ID NO: 464955 - DNA, 52 bp, Artificial
  Synthetic oligonucleotide
tcttggccaagaagaagatacccgatttcaccataccgtatcccgccatatc

SEQ ID NO: 464956 - DNA, 60 bp, Artificial
  Synthetic oligonucleotide
tcttggcccattgcaccacacctcagaggcaagtgaatgcattatactgcattatatgga

SEQ ID NO: 464957 - DNA, 56 bp, Artificial
  Synthetic oligonucleotide
tcttggccgccctgcaagcggtctatttactttcacaagtttgccaccggtctcgg

SEQ ID NO: 464958 - DNA, 60 bp, Artificial
  Synthetic oligonucleotide
tcttggccggtgtatgcgttaatctgaacagtcaaagactacgtattcatcgatttacga

SEQ ID NO: 464959 - DNA, 60 bp, Artificial
  Synthetic oligonucleotide
tcttggcctactgtcatgattcacctgatcttgttatgcagttacataaaccagtgattg

SEQ ID NO: 464960 - DNA, 56 bp, Artificial
  Synthetic oligonucleotide
tcttggcgaaccataggtgaaccgtgccacgggcctgcctaccgaaaggaaaagca

SEQ ID NO: 464961 - DNA, 60 bp, Artificial
  Synthetic oligonucleotide
tcttggctattctgtgttggaccttgattggtacctgagaagagtggctcttggagggtg

SEQ ID NO: 464962 - DNA, 60 bp, Artificial
  Synthetic oligonucleotide
tcttggctcgaaacttggcagttttgccataatgagattctcaggtgaggcgagtacctt

SEQ ID NO: 464963 - DNA, 60 bp, Artificial
  Synthetic oligonucleotide
tcttgggaaacccagaatgcgatttgctgctcacagtgagctcatggtcctatattgtag

SEQ ID NO: 464964 - DNA, 59 bp, Artificial
  Synthetic oligonucleotide
tcttgggacgtcatgtggaagtgcttgactcgacttaagcccacgctcgtgggccctaa

SEQ ID NO: 464965 - DNA, 60 bp, Artificial
  Synthetic oligonucleotide
tcttgggagtgaatttttgaaggatttcatctgcatattgcggagtagaaattatgccga

SEQ ID NO: 464966 - DNA, 59 bp, Artificial
  Synthetic oligonucleotide
tcttgggatatgatgtggaagtgtctcatcagactcaaacccacccttaccggccccac

SEQ ID NO: 464967 - DNA, 60 bp, Artificial
  Synthetic oligonucleotide
tcttgggatctatgtgcctgtgcttgacaaggaacgcttatttagctctgcagcgtatcc

SEQ ID NO: 464968 - DNA, 55 bp, Artificial
  Synthetic oligonucleotide
tcttgggcaatgcgttggcacagaccttttgccagaactgtaagcatgagaagcc

SEQ ID NO: 464969 - DNA, 57 bp, Artificial
  Synthetic oligonucleotide
tcttgggccactcaaaatagcccaattaagtatatatccagtacgcccacttaaaga

SEQ ID NO: 464970 - DNA, 56 bp, Artificial
  Synthetic oligonucleotide
tcttgggccctcaagtgggagtatgtggtgctcgcatttctgcttctagcagacgc

SEQ ID NO: 464971 - DNA, 56 bp, Artificial
  Synthetic oligonucleotide
tcttgggcctggtaacggcctggataaaggcccacctgtcaataaggcggacagcg

SEQ ID NO: 464972 - DNA, 58 bp, Artificial
  Synthetic oligonucleotide
tcttgggctttcgcaaaatacctatgggagtgggcctcagtccgtttctcctggctca

SEQ ID NO: 464973 - DNA, 60 bp, Artificial
  Synthetic oligonucleotide
tcttggggaatcctaaatgcgacatattgcttggtgatcaaaactggtcatacatagtgg

SEQ ID NO: 464974 - DNA, 59 bp, Artificial
  Synthetic oligonucleotide
tcttggggacgtgtgtataggtaacgcatcacatatcgagtcgatcattacaatatcga

SEQ ID NO: 464975 - DNA, 56 bp, Artificial
  Synthetic oligonucleotide
tcttggggatgttaacaatttgtagtgctgcaaacaacttgtgggttactgtctac

SEQ ID NO: 464976 - DNA, 49 bp, Artificial
  Synthetic oligonucleotide
tcttggggcccaaacgacccccggcgaaggtcccgcaatttgggtaagg

SEQ ID NO: 464977 - DNA, 52 bp, Artificial
  Synthetic oligonucleotide
tcttggggcccatgccattcgatcctcatacaaaggggtctcccaatcatgc

SEQ ID NO: 464978 - DNA, 59 bp, Artificial
  Synthetic oligonucleotide
tcttggggctcaagtctagatgcccacaaaggtaattatgtgggcctagagacctggcc

SEQ ID NO: 464979 - DNA, 60 bp, Artificial
  Synthetic oligonucleotide
tcttggggtcgtctggtgctttgttgttcgcacctcaatcagtcgcatgatgcttggcac

SEQ ID NO: 464980 - DNA, 60 bp, Artificial
  Synthetic oligonucleotide
tcttgggtactctgacgcagatggttagtgcgcctccgcatatcattaacgctactgacg

SEQ ID NO: 464981 - DNA, 60 bp, Artificial
  Synthetic oligonucleotide
tcttggtagcaatggagaatcagcacacaattgatctggccgactcagaaatgaacaaac

SEQ ID NO: 464982 - DNA, 53 bp, Artificial
  Synthetic oligonucleotide
tcttggtattacgagaacgggcgtacacacgtaggaaatcccgacacggtagt

SEQ ID NO: 464983 - DNA, 54 bp, Artificial
  Synthetic oligonucleotide
tcttggtatttctaagtacacttggagaaattgggaaatcggtaattctgcccc

SEQ ID NO: 464984 - DNA, 60 bp, Artificial
  Synthetic oligonucleotide
tcttggtctcagctgacatcaagatatctaacatccaccgagacgttaacactaccggac

SEQ ID NO: 464985 - DNA, 57 bp, Artificial
  Synthetic oligonucleotide
tcttggtgagcgtgtctttgagcctagagagattacatacgagtttaagttaccgtt

SEQ ID NO: 464986 - DNA, 57 bp, Artificial
  Synthetic oligonucleotide
tcttggtgataaaattgatgtcccgctcttcctaaaaaacgcgtgactgcggtaatc

SEQ ID NO: 464987 - DNA, 51 bp, Artificial
  Synthetic oligonucleotide
tcttggtgcactctagcgaaaacgcaaatggcaatctgaagcgcctctgta

SEQ ID NO: 464988 - DNA, 60 bp, Artificial
  Synthetic oligonucleotide
tcttggttcatgccgctgacaacagactcacgccaggctgaccacgtgccattgctacaa

SEQ ID NO: 464989 - DNA, 57 bp, Artificial
  Synthetic oligonucleotide
tcttggttcctgcagggttgtaaggaattattagcttggggaatgtgtattctggct

SEQ ID NO: 464990 - DNA, 53 bp, Artificial
  Synthetic oligonucleotide
tcttggttggtacgtcccctagtggtaagtggcgtcgtaaaggtccaagcgga

SEQ ID NO: 464991 - DNA, 51 bp, Artificial
  Synthetic oligonucleotide
tcttgtaacctgtgtaggttcccgtatggtaggtcctccgcttcttcgttc

SEQ ID NO: 464992 - DNA, 59 bp, Artificial
  Synthetic oligonucleotide
tcttgtaataagaagggtgtaccccgattgaggctctctcaaactggctgattatatcg

SEQ ID NO: 464993 - DNA, 55 bp, Artificial
  Synthetic oligonucleotide
tcttgtacgagatctgattcttgttctccgagcaaagaactatggcgaagcgacc

SEQ ID NO: 464994 - DNA, 55 bp, Artificial
  Synthetic oligonucleotide
tcttgtagccgctaaaacactgactttctgttttaatggtggcacttgcgcactc

SEQ ID NO: 464995 - DNA, 60 bp, Artificial
  Synthetic oligonucleotide
tcttgtatcaacaggccgcttaagcagacgagcaacccctgaagcgggatgtacgtcttg

SEQ ID NO: 464996 - DNA, 55 bp, Artificial
  Synthetic oligonucleotide
tcttgtatccggtagacctcactagccggcgcgctagcgatacgcgcgcggaact

SEQ ID NO: 464997 - DNA, 53 bp, Artificial
  Synthetic oligonucleotide
tcttgtatgggtacatatcagccggttttaaccaattgtttgtaccttgtact

SEQ ID NO: 464998 - DNA, 60 bp, Artificial
  Synthetic oligonucleotide
tcttgtccaacatgttcaatgacgacgaaacttttactgctttgcatactttagcaagta

SEQ ID NO: 464999 - DNA, 58 bp, Artificial
  Synthetic oligonucleotide
tcttgtccatgcgggtgttaccttccgcgtagacgtgccaccagttgttatatacggc

SEQ ID NO: 465000 - DNA, 60 bp, Artificial
  Synthetic oligonucleotide
tcttgtccgagcgctccaatcaactggaaaggaatctcaatctccactttttagacaaga

SEQ ID NO: 465001 - DNA, 54 bp, Artificial
  Synthetic oligonucleotide
tcttgtccggtagcacagagcggaactcatctaccgtcaacatcccaggctgag

SEQ ID NO: 465002 - DNA, 53 bp, Artificial
  Synthetic oligonucleotide
tcttgtccgtggaactgggaaaagtagtacccgaacatcatacacgtaaggat

SEQ ID NO: 465003 - DNA, 60 bp, Artificial
  Synthetic oligonucleotide
tcttgtcgaagactggggaccctgcaccgaatatggagaacatcgcatcaggactcctag

SEQ ID NO: 465004 - DNA, 60 bp, Artificial
  Synthetic oligonucleotide
tcttgtcggttattatcctctcggccatgtcaattctgccatctggagtgaggctgtaaa

SEQ ID NO: 465005 - DNA, 55 bp, Artificial
  Synthetic oligonucleotide
tcttgtcgtgcaagagaaaggcagccactggtttgccaaaccctgagtgggctga

SEQ ID NO: 465006 - DNA, 51 bp, Artificial
  Synthetic oligonucleotide
tcttgtctatcgtccaagataacgcgatcactttggaatcgcgcataaacc

SEQ ID NO: 465007 - DNA, 60 bp, Artificial
  Synthetic oligonucleotide
tcttgtctgccggcttgtgtatatgggcttgcagtggcaagtgggcatgacttcgaaaga

SEQ ID NO: 465008 - DNA, 57 bp, Artificial
  Synthetic oligonucleotide
tcttgtctttccaaggcctcactgtgcgcgttaaagttgtttcggtgactgtgaacg

SEQ ID NO: 465009 - DNA, 58 bp, Artificial
  Synthetic oligonucleotide
tcttgtgactgttttacgtgagttgttcatgtgggacaagaatgagtgtgctgagctt

SEQ ID NO: 465010 - DNA, 60 bp, Artificial
  Synthetic oligonucleotide
tcttgtgatacatatatggtgcccacaaaaactatattcaatacatgatgcactgcatct

SEQ ID NO: 465011 - DNA, 60 bp, Artificial
  Synthetic oligonucleotide
tcttgtgcaaggacaatgttgcgtgttgtccattgatgaaatgtcacgactgccactatg

SEQ ID NO: 465012 - DNA, 60 bp, Artificial
  Synthetic oligonucleotide
tcttgtgcccagctctgacttcaaagccccacccacaccagctacccctctactgacctc

SEQ ID NO: 465013 - DNA, 55 bp, Artificial
  Synthetic oligonucleotide
tcttgtgcctgtcggtcttgcatcaccaacctaactggcgcgactacctgaccgc

SEQ ID NO: 465014 - DNA, 55 bp, Artificial
  Synthetic oligonucleotide
tcttgtgctgtctacgaactattggaattcgacatacatggaaacagctatcgtc

SEQ ID NO: 465015 - DNA, 57 bp, Artificial
  Synthetic oligonucleotide
tcttgtggacttctacttgtttattagcaaagttgtctttaatccaacatgttaaca

SEQ ID NO: 465016 - DNA, 60 bp, Artificial
  Synthetic oligonucleotide
tcttgtggagatggggtaccatgctccttgggatgttaatgatctgtagtgctacagaac

SEQ ID NO: 465017 - DNA, 60 bp, Artificial
  Synthetic oligonucleotide
tcttgtggcacacgagagtgttgcgaaagatcgtgcggctacttgcgagaggggcgagtc

SEQ ID NO: 465018 - DNA, 58 bp, Artificial
  Synthetic oligonucleotide
tcttgtggcactaggggcagcccaggctatcaagatcggaaccttaaaaggacggcca

SEQ ID NO: 465019 - DNA, 60 bp, Artificial
  Synthetic oligonucleotide
tcttgtgtggtagccccaggatccggtcctgtgctggtcaggtttgcaggaggatgggtg

SEQ ID NO: 465020 - DNA, 59 bp, Artificial
  Synthetic oligonucleotide
tcttgtgtgttcgcaacgcaacccaaaagtttggttcttcgtatcagatgcacaggttg

SEQ ID NO: 465021 - DNA, 56 bp, Artificial
  Synthetic oligonucleotide
tcttgtgttagcaaatgccacaccgacaggggttcaatctctacaactaaaccctt

SEQ ID NO: 465022 - DNA, 51 bp, Artificial
  Synthetic oligonucleotide
tcttgttacgattttcagacggctatgagtggtattgatggggatgaaact

SEQ ID NO: 465023 - DNA, 57 bp, Artificial
  Synthetic oligonucleotide
tcttgttagccctgcttggccctctctatctactccagtacagcttgctccgaacgc

SEQ ID NO: 465024 - DNA, 53 bp, Artificial
  Synthetic oligonucleotide
tcttgttaggattttgtgttatatggttctatattgtcacaaaccaaacattc

SEQ ID NO: 465025 - DNA, 58 bp, Artificial
  Synthetic oligonucleotide
tcttgttccctgatgggtccctttacttttcatggatgcttctccacgagattgcgtt

SEQ ID NO: 465026 - DNA, 60 bp, Artificial
  Synthetic oligonucleotide
tcttgttgacctctgtttctggagtaccctattctatacagcatcaatcttcctacatct

SEQ ID NO: 465027 - DNA, 55 bp, Artificial
  Synthetic oligonucleotide
tcttgttgttagacagtaccttactttcgaactccagttggcaagacggcagggg

SEQ ID NO: 465028 - DNA, 60 bp, Artificial
  Synthetic oligonucleotide
tcttgtttaacgatcgccttactaaatgtcctaaatgcgcagctgcgtcctatcagacag

SEQ ID NO: 465029 - DNA, 55 bp, Artificial
  Synthetic oligonucleotide
tcttgtttaatattgcagacaccctgttaggggggctaccgacggacctggtatc

SEQ ID NO: 465030 - DNA, 60 bp, Artificial
  Synthetic oligonucleotide
tcttgtttgcagaaggcatatttgttgtgactccaagggttggcttgaaactctatctta

SEQ ID NO: 465031 - DNA, 57 bp, Artificial
  Synthetic oligonucleotide
tctttaaacttctagccccgcaattatcacaaagattgcggggagcaagcctcggta

SEQ ID NO: 465032 - DNA, 55 bp, Artificial
  Synthetic oligonucleotide
tctttaacaaacgcttcgtagttaaacatcgtatctcgaacaatcacgtccgata

SEQ ID NO: 465033 - DNA, 55 bp, Artificial
  Synthetic oligonucleotide
tctttaacgtttatagcttcagagaccatacatggcacggattgaggacggccat

SEQ ID NO: 465034 - DNA, 55 bp, Artificial
  Synthetic oligonucleotide
tctttaactatgacaacacaagtttagcaccatcaccttcaaagttaggcgggtt

SEQ ID NO: 465035 - DNA, 58 bp, Artificial
  Synthetic oligonucleotide
tctttaactgggcggtaaaaaccaagctcaaactcactccattgcctgccgctgccaa

SEQ ID NO: 465036 - DNA, 58 bp, Artificial
  Synthetic oligonucleotide
tctttaagacccaaaagaaacgaccagtctgaggctgtgaagacatccagattcggta

SEQ ID NO: 465037 - DNA, 54 bp, Artificial
  Synthetic oligonucleotide
tctttaagccatcctcaggaggggacccagaaattgtaacacagttttacagtt

SEQ ID NO: 465038 - DNA, 60 bp, Artificial
  Synthetic oligonucleotide
tctttaagtctggatatgatgctggtgaattgagttctaaaggatacatgagtgtcaccc

SEQ ID NO: 465039 - DNA, 58 bp, Artificial
  Synthetic oligonucleotide
tctttaattggcaaatggactccagaatgatggaggtaaggactcagagtttttccaa

SEQ ID NO: 465040 - DNA, 56 bp, Artificial
  Synthetic oligonucleotide
tctttaatttgaattaagcccactttgtatggcggaagccttcagtcgttgtggtc

SEQ ID NO: 465041 - DNA, 60 bp, Artificial
  Synthetic oligonucleotide
tctttacaagtgacacttgctcgcgtgacaacctcacccccacagttattagagagccta

SEQ ID NO: 465042 - DNA, 60 bp, Artificial
  Synthetic oligonucleotide
tctttacaatgtgggtctgcctcctagtcctagagtcaatactttgggctgccagtgctt

SEQ ID NO: 465043 - DNA, 60 bp, Artificial
  Synthetic oligonucleotide
tctttacactaaaatagagcagacggcattagatcaggaatcgacagaagaagagactaa

SEQ ID NO: 465044 - DNA, 50 bp, Artificial
  Synthetic oligonucleotide
tctttacactcaccccgggatataagacccttctcagccggtgtctgtgg

SEQ ID NO: 465045 - DNA, 60 bp, Artificial
  Synthetic oligonucleotide
tctttacactttgataggcctacaactgtacaggctgctcctgatccacatttccaagat

SEQ ID NO: 465046 - DNA, 60 bp, Artificial
  Synthetic oligonucleotide
tctttacagatttgatgattctgatgataacacttgtaaaggtttagattatagcttaag

SEQ ID NO: 465047 - DNA, 60 bp, Artificial
  Synthetic oligonucleotide
tctttacatgctctagcatatctactccatccctctctatgtacctgataactggtaaat

SEQ ID NO: 465048 - DNA, 58 bp, Artificial
  Synthetic oligonucleotide
tctttacccaagtcaccaacttttagaactgtgttgttctgaacacttctcatagtca

SEQ ID NO: 465049 - DNA, 51 bp, Artificial
  Synthetic oligonucleotide
tctttacccagatgagttaaactttgtttattcctttggggaacacttcaa

SEQ ID NO: 465050 - DNA, 60 bp, Artificial
  Synthetic oligonucleotide
tctttacctgattggtatgagagagaacgtgtcctccaaacatgtggaccattccatgtt

SEQ ID NO: 465051 - DNA, 55 bp, Artificial
  Synthetic oligonucleotide
tctttacgaagtcgagaggtggcgtctatgcgccactttcctgcgagcctaccag

SEQ ID NO: 465052 - DNA, 55 bp, Artificial
  Synthetic oligonucleotide
tctttacgcggactccccacctgtgcctttacatcggccggcccgtgtgcacttc

SEQ ID NO: 465053 - DNA, 58 bp, Artificial
  Synthetic oligonucleotide
tctttacgcggtctccccgtttgtgccttctcatctgccggaccgtgtgcacttcgct

SEQ ID NO: 465054 - DNA, 55 bp, Artificial
  Synthetic oligonucleotide
tctttacgtctggctgagggaagctgaaagcaaggccgtagtgcttgactttcgt

SEQ ID NO: 465055 - DNA, 55 bp, Artificial
  Synthetic oligonucleotide
tctttactagtgaatctcttcatttgctcatagaacacacattcttcctcaggag

SEQ ID NO: 465056 - DNA, 59 bp, Artificial
  Synthetic oligonucleotide
tctttactctctaaccacgaagcggcaccaatattgccccctgcacatgttaaaacatg

SEQ ID NO: 465057 - DNA, 55 bp, Artificial
  Synthetic oligonucleotide
tctttactgatccctcggttgtgcagcccatcccacctgtggaggccggtggtcg

SEQ ID NO: 465058 - DNA, 55 bp, Artificial
  Synthetic oligonucleotide
tctttagaacccaatattatggtaagtgcttggactgctagcataactcgcacgc

SEQ ID NO: 465059 - DNA, 60 bp, Artificial
  Synthetic oligonucleotide
tctttagataaggtatgaactccatcctgacaaatagacagtacagcctatacaactacc

SEQ ID NO: 465060 - DNA, 54 bp, Artificial
  Synthetic oligonucleotide
tctttagcacgcaaacacctggcccgagagctacatccggagtattacaagaac

SEQ ID NO: 465061 - DNA, 60 bp, Artificial
  Synthetic oligonucleotide
tctttagcccctatctgacagtgcgcatgcctcactgggccggagtgcgtcagaatgtga

SEQ ID NO: 465062 - DNA, 53 bp, Artificial
  Synthetic oligonucleotide
tctttagccgttgagagttatgcattattgaatagcggccatctgggagtttg

SEQ ID NO: 465063 - DNA, 50 bp, Artificial
  Synthetic oligonucleotide
tctttagcgaaatcttactctgctagaactacgatcgtccttggtgataa

SEQ ID NO: 465064 - DNA, 54 bp, Artificial
  Synthetic oligonucleotide
tctttaggggttccgacacctagcaaactggttttttcgctgcttggtgcaaag

SEQ ID NO: 465065 - DNA, 60 bp, Artificial
  Synthetic oligonucleotide
tctttaggtgaacccgtacatagggctaacgaaatgcaacggtcgatgcacactatcaca

SEQ ID NO: 465066 - DNA, 60 bp, Artificial
  Synthetic oligonucleotide
tctttataagactagatcgcactagtacgctatggcggagtaccctcagtctgctttcgt

SEQ ID NO: 465067 - DNA, 60 bp, Artificial
  Synthetic oligonucleotide
tctttatactgatgcctcttattgtacaactgaacaaagcataacctacacagagttgaa

SEQ ID NO: 465068 - DNA, 58 bp, Artificial
  Synthetic oligonucleotide
tctttatagctggaattgggccctggattgcagaggaagatagtgggaatacctcctt

SEQ ID NO: 465069 - DNA, 60 bp, Artificial
  Synthetic oligonucleotide
tctttatggccccggagtatcctacactggacgtgtttgcaatggacaacagatggtcca

SEQ ID NO: 465070 - DNA, 57 bp, Artificial
  Synthetic oligonucleotide
tctttatggggtagatgggttagaacccatagacataacaaccagtgcaggttatcc

SEQ ID NO: 465071 - DNA, 54 bp, Artificial
  Synthetic oligonucleotide
tctttatgtaaatgcattcttctgtagagatgcagtctgaagatattggattaa

SEQ ID NO: 465072 - DNA, 55 bp, Artificial
  Synthetic oligonucleotide
tctttattacaaattgctggtgcggcttttgtcacctcacgcattgtgaggcgca

SEQ ID NO: 465073 - DNA, 52 bp, Artificial
  Synthetic oligonucleotide
tctttattctgttgttgtctagctcgaggtgtgtcacgtgatcaagtgcgga

SEQ ID NO: 465074 - DNA, 55 bp, Artificial
  Synthetic oligonucleotide
tctttattggagctacgacatcactcaatcgatggtgttatgacttcgaggtacg

SEQ ID NO: 465075 - DNA, 55 bp, Artificial
  Synthetic oligonucleotide
tctttcaaagaacagtctgatcgtgttcatgaaatggctaggcaagaatggatga

SEQ ID NO: 465076 - DNA, 59 bp, Artificial
  Synthetic oligonucleotide
tctttcaatatgaccacagaactaaaggataagagacagcaagtatattcactttttta

SEQ ID NO: 465077 - DNA, 51 bp, Artificial
  Synthetic oligonucleotide
tctttcagatctcataattttggcctttagcttctcaagatcagctgcaag

SEQ ID NO: 465078 - DNA, 60 bp, Artificial
  Synthetic oligonucleotide
tctttcagattcaccgatgtcagagggaacaaaacgtaaagctgatactcctgttgaaga

SEQ ID NO: 465079 - DNA, 60 bp, Artificial
  Synthetic oligonucleotide
tctttcagctgtgcaaaatacgtattacacccgaaattatggcctacctccatggtatga

SEQ ID NO: 465080 - DNA, 54 bp, Artificial
  Synthetic oligonucleotide
tctttcatcgacggccgtgtctggttcccagtctacggagggcttaaacccaat

SEQ ID NO: 465081 - DNA, 52 bp, Artificial
  Synthetic oligonucleotide
tctttcatgtctcgagtagtttacaagcactatgggagcttgatctcagaag

SEQ ID NO: 465082 - DNA, 60 bp, Artificial
  Synthetic oligonucleotide
tctttcattaattagtgtatgtgtgactggattgatgtggatgtttgtgactaaaaaata

SEQ ID NO: 465083 - DNA, 54 bp, Artificial
  Synthetic oligonucleotide
tctttccccgatggggctcagatccaatacttttcgtaaaatgcaaaaacgccc

SEQ ID NO: 465084 - DNA, 56 bp, Artificial
  Synthetic oligonucleotide
tctttccctccagggcaacgttcagtttctagacgctcgttcaaccaccacaaagc

SEQ ID NO: 465085 - DNA, 60 bp, Artificial
  Synthetic oligonucleotide
tctttccgagcagattcagtcaatttaccagtttgcatggttggcataaagtcagcatcg

SEQ ID NO: 465086 - DNA, 60 bp, Artificial
  Synthetic oligonucleotide
tctttccgccaggtatgaattggactgatttgatcactaactactcaccatctagagaag

SEQ ID NO: 465087 - DNA, 60 bp, Artificial
  Synthetic oligonucleotide
tctttccgccgaatgatcgggacagtgtactcacgatcctactactgtcgacgctcgcag

SEQ ID NO: 465088 - DNA, 59 bp, Artificial
  Synthetic oligonucleotide
tctttcctcaatgggtcatgtggtagtgttggttttaacattgactatgattgcgtgtc

SEQ ID NO: 465089 - DNA, 57 bp, Artificial
  Synthetic oligonucleotide
tctttcctctatgggcaaacttagtcatcttaactaagagtttgtctcttgtgtaat

SEQ ID NO: 465090 - DNA, 52 bp, Artificial
  Synthetic oligonucleotide
tctttcgaggccgttgtctttgaggaagttcctcccttattcgtagggaagt

SEQ ID NO: 465091 - DNA, 60 bp, Artificial
  Synthetic oligonucleotide
tctttcggctgacttgtttcgcaatcttcggatgtaagccaacagctcgaggtagatata

SEQ ID NO: 465092 - DNA, 55 bp, Artificial
  Synthetic oligonucleotide
tctttcggtccggttatgtcgacagccactctaacatctcacaggctgtcacttg

SEQ ID NO: 465093 - DNA, 53 bp, Artificial
  Synthetic oligonucleotide
tctttcgtgctcccttggaactctgtctcgtctgtgctccccgtgcgctgggg

SEQ ID NO: 465094 - DNA, 60 bp, Artificial
  Synthetic oligonucleotide
tctttcgttcctcattctttggcgtatattactttatacagcagttacaactcagctgtg

SEQ ID NO: 465095 - DNA, 55 bp, Artificial
  Synthetic oligonucleotide
tctttcgttgctcagatgcatgcgatgatgaacgatgtatcaccagaggatctcg

SEQ ID NO: 465096 - DNA, 55 bp, Artificial
  Synthetic oligonucleotide
tctttctaggaatgataacaaaactcaattcagtcgtcgatggctcatgcgggtc

SEQ ID NO: 465097 - DNA, 60 bp, Artificial
  Synthetic oligonucleotide
tctttctatgcagagatgaagtggttgctgtcgaattcagacaatgcggcattcccccag

SEQ ID NO: 465098 - DNA, 60 bp, Artificial
  Synthetic oligonucleotide
tctttctcagatctgcgtggaaacgcgcaacggattgtttatgatgatgaattacagatg

SEQ ID NO: 465099 - DNA, 60 bp, Artificial
  Synthetic oligonucleotide
tctttctccttcgccctggttcagtgatctctcactagagagattggagccttgtgatcc

SEQ ID NO: 465100 - DNA, 60 bp, Artificial
  Synthetic oligonucleotide
tctttctgacgaaattcaagagattggatcagctaagtcacaggatgttactataaatcc

SEQ ID NO: 465101 - DNA, 60 bp, Artificial
  Synthetic oligonucleotide
tctttctgattggtttggctgatagtagttaacaacaatcactctttataaatatatgta

SEQ ID NO: 465102 - DNA, 60 bp, Artificial
  Synthetic oligonucleotide
tctttctgctaaatagcactagacccccgcaaggagcttggttcggctgcacttggatga

SEQ ID NO: 465103 - DNA, 60 bp, Artificial
  Synthetic oligonucleotide
tctttctggccaggtctgcacttattctgagaggagcagtggcccataaatcatgcctgc

SEQ ID NO: 465104 - DNA, 60 bp, Artificial
  Synthetic oligonucleotide
tctttctgtcgttaagtgtcgtcttcctgcagattgcggtgttaattgtggtatgcctgc

SEQ ID NO: 465105 - DNA, 60 bp, Artificial
  Synthetic oligonucleotide
tctttcttgcacggtctgctctaattctgaggggatcagtggctcataagtcctgcctgc

SEQ ID NO: 465106 - DNA, 52 bp, Artificial
  Synthetic oligonucleotide
tctttcttggggacatctatttcgggggtcctttggacagtatatcatgggg

SEQ ID NO: 465107 - DNA, 57 bp, Artificial
  Synthetic oligonucleotide
tctttgaaaactcgtgtcttgaaacgatggaaattgtccaacaaacaagagtggaca

SEQ ID NO: 465108 - DNA, 59 bp, Artificial
  Synthetic oligonucleotide
tctttgaaacctacgctctttctcgatatggtatggtcctatctaagaccaaatctata

SEQ ID NO: 465109 - DNA, 56 bp, Artificial
  Synthetic oligonucleotide
tctttgaaactcgtattcggactcagttagttaactttaagcaagagtacgcagag

SEQ ID NO: 465110 - DNA, 58 bp, Artificial
  Synthetic oligonucleotide
tctttgaaagtgtgttaacgtcgaaccacggaattgtcctgattaatgttgataatga

SEQ ID NO: 465111 - DNA, 59 bp, Artificial
  Synthetic oligonucleotide
tctttgaagatgtcaaaggacaaaccggagataagagacacctacagtctggacttgga

SEQ ID NO: 465112 - DNA, 60 bp, Artificial
  Synthetic oligonucleotide
tctttgaatgttaggatggaaatgtgctgacctggtttgagagaccaggtcgaataggcg

SEQ ID NO: 465113 - DNA, 60 bp, Artificial
  Synthetic oligonucleotide
tctttgacatggagcaaagcgctcaagaagttagagaaggtgacggtacaagggtctcaa

SEQ ID NO: 465114 - DNA, 55 bp, Artificial
  Synthetic oligonucleotide
tctttgacattcccggagccggtggactccctcgtccgatacaagtcgttgaccc

SEQ ID NO: 465115 - DNA, 60 bp, Artificial
  Synthetic oligonucleotide
tctttgacgaagccaagaagactgtggaagctctcaacgggtatctagacaagcacaagg

SEQ ID NO: 465116 - DNA, 57 bp, Artificial
  Synthetic oligonucleotide
tctttgagaacctaagatggcggaaccgctggtcgcatagcaacgtgggttacgatt

SEQ ID NO: 465117 - DNA, 60 bp, Artificial
  Synthetic oligonucleotide
tctttgagaatttacctagctgatttaggtgataaggagttatctcctatagatgggcaa

SEQ ID NO: 465118 - DNA, 56 bp, Artificial
  Synthetic oligonucleotide
tctttgagaatttacctggctgatctaggcgacaaggttaaagaaagacaagggta

SEQ ID NO: 465119 - DNA, 60 bp, Artificial
  Synthetic oligonucleotide
tctttgaggacttagagcgagagctcagttcgtcaccccactggcccagaatcagacact

SEQ ID NO: 465120 - DNA, 56 bp, Artificial
  Synthetic oligonucleotide
tctttgagtgtgaagggtaacgttgtcatgtgcgtgcctaaatttattgagttacc

SEQ ID NO: 465121 - DNA, 58 bp, Artificial
  Synthetic oligonucleotide
tctttgagttctcaacactggaaggctaccagttgaactgggagcgaaaatgtgactt

SEQ ID NO: 465122 - DNA, 56 bp, Artificial
  Synthetic oligonucleotide
tctttgatcccgaattagacatggaagtcgttttcgagttacagggcaattccacc

SEQ ID NO: 465123 - DNA, 55 bp, Artificial
  Synthetic oligonucleotide
tctttgattccttaatgatggaaagttttcacgatgaagtccgagtcgtttcaga

SEQ ID NO: 465124 - DNA, 59 bp, Artificial
  Synthetic oligonucleotide
tctttgatttcagatcaactactgatgaggaaccacctaagagacttgatgggggtacc

SEQ ID NO: 465125 - DNA, 60 bp, Artificial
  Synthetic oligonucleotide
tctttgcaacccagctaataagacaaaaataccagaatcacatggcataagagccaggaa

SEQ ID NO: 465126 - DNA, 55 bp, Artificial
  Synthetic oligonucleotide
tctttgcagccctttcagctccttggtgcttacactataaagcactagagtctta

SEQ ID NO: 465127 - DNA, 60 bp, Artificial
  Synthetic oligonucleotide
tctttgcaggcgagacaatttattgaagcatatgcgcgtcttttgcagctgcgcaattac

SEQ ID NO: 465128 - DNA, 52 bp, Artificial
  Synthetic oligonucleotide
tctttgcattccattttcttctctccacatctcaaaagatgaagttatgtgc

SEQ ID NO: 465129 - DNA, 60 bp, Artificial
  Synthetic oligonucleotide
tctttgcattcccaaatacaactatcacgcttgaggatgaagcacaatatgactttcact

SEQ ID NO: 465130 - DNA, 49 bp, Artificial
  Synthetic oligonucleotide
tctttgcccccaacttaaacgttgggaggttttaagtaattctttagaa

SEQ ID NO: 465131 - DNA, 51 bp, Artificial
  Synthetic oligonucleotide
tctttgccctcgcttcttttatcgcgtccgccaggtaagatcttagcctta

SEQ ID NO: 465132 - DNA, 58 bp, Artificial
  Synthetic oligonucleotide
tctttgccctgggtacaaaagtcttagagctgctagagttatgtgtaagtcaaaagga

SEQ ID NO: 465133 - DNA, 53 bp, Artificial
  Synthetic oligonucleotide
tctttgcgcgctaattttgacgtcgctaagaccgttcgtggacacgtgagcag

SEQ ID NO: 465134 - DNA, 60 bp, Artificial
  Synthetic oligonucleotide
tctttgcgggatctgcctttgagtgccgagtccttggagctctggcgcaccggtgctctc

SEQ ID NO: 465135 - DNA, 55 bp, Artificial
  Synthetic oligonucleotide
tctttgctaccacattacttggtgaggttctaaattactatggcaactggtctgg

SEQ ID NO: 465136 - DNA, 60 bp, Artificial
  Synthetic oligonucleotide
tctttgctctagtattgaactttagtgatgagtgtacttggcatgtacacctgattagtt

SEQ ID NO: 465137 - DNA, 58 bp, Artificial
  Synthetic oligonucleotide
tctttggaactcgtattcggattcaattagttaactttaagcaggagtgcgcatagtc

SEQ ID NO: 465138 - DNA, 58 bp, Artificial
  Synthetic oligonucleotide
tctttggagcaatagcgggattcatagaaaacggctgggaaggaatggttgatgggtg

SEQ ID NO: 465139 - DNA, 55 bp, Artificial
  Synthetic oligonucleotide
tctttggaggagaccaatgaaacgagtcatcatagaaggaacgccagtgcaagcc

SEQ ID NO: 465140 - DNA, 55 bp, Artificial
  Synthetic oligonucleotide
tctttggatagtatttttatagtgggctgtttaaatctaatgtccgttgaatgtt

SEQ ID NO: 465141 - DNA, 60 bp, Artificial
  Synthetic oligonucleotide
tctttggatcggcggtgccatgttcgacagtcgattctgtcagttcatggagtactatca

SEQ ID NO: 465142 - DNA, 59 bp, Artificial
  Synthetic oligonucleotide
tctttggattcgttggatttgtctcgaagcgagggagccaattacaccgattatcgagc

SEQ ID NO: 465143 - DNA, 56 bp, Artificial
  Synthetic oligonucleotide
tctttggattgtaaatatagagcacccatgcaaacaaagtttccacctttaatact

SEQ ID NO: 465144 - DNA, 60 bp, Artificial
  Synthetic oligonucleotide
tctttggcaactggaaagcttgtcaaactctggctctcatgcacgacttcgtaattctca

SEQ ID NO: 465145 - DNA, 56 bp, Artificial
  Synthetic oligonucleotide
tctttggcacagaaggactagaagctttagacctaaacaccagtgctgggttccct

SEQ ID NO: 465146 - DNA, 53 bp, Artificial
  Synthetic oligonucleotide
tctttggcccgggtggaaccccctcattgtttccaacctcgtgctccactaag

SEQ ID NO: 465147 - DNA, 55 bp, Artificial
  Synthetic oligonucleotide
tctttgggcaactttgttgctcagacggactatggtcctggtgttaggataggtc

SEQ ID NO: 465148 - DNA, 56 bp, Artificial
  Synthetic oligonucleotide
tctttggggaccctgtccagcttgactctaaggttgttcgccccgctcacttcgtg

SEQ ID NO: 465149 - DNA, 60 bp, Artificial
  Synthetic oligonucleotide
tctttgggtggaatcagtccagtgcacttgggagactgtagcttcgagggctggattgta

SEQ ID NO: 465150 - DNA, 58 bp, Artificial
  Synthetic oligonucleotide
tctttggtaccatctaatgataattatcagacgcctatagctaattcagttacagtta

SEQ ID NO: 465151 - DNA, 57 bp, Artificial
  Synthetic oligonucleotide
tctttggtagggatagaccctttcaaactgcttcaaaccagccaagtatacagccta

SEQ ID NO: 465152 - DNA, 53 bp, Artificial
  Synthetic oligonucleotide
tctttggtaggtttcttggaacttccctctgaatcagattttcctaggaacgg

SEQ ID NO: 465153 - DNA, 55 bp, Artificial
  Synthetic oligonucleotide
tctttggtccaggagtgggcgcacttaagcgcctcttcagcaggccttctgctga

SEQ ID NO: 465154 - DNA, 57 bp, Artificial
  Synthetic oligonucleotide
tctttggtctctaagttcaccataatgttttgaacacagttccttccttcataaaga

SEQ ID NO: 465155 - DNA, 60 bp, Artificial
  Synthetic oligonucleotide
tctttggttcatgtcaagacatcataaaagaggaactatctgtttacaggaaagatacag

SEQ ID NO: 465156 - DNA, 57 bp, Artificial
  Synthetic oligonucleotide
tctttgtaaaggagagaatcctttactaactccagaacaatgggtcaagtgattgga

SEQ ID NO: 465157 - DNA, 60 bp, Artificial
  Synthetic oligonucleotide
tctttgtcactctcatctgtttagaaactttatcatatgtggaagaatcatcaactattt

SEQ ID NO: 465158 - DNA, 59 bp, Artificial
  Synthetic oligonucleotide
tctttgtctatatatgtgctgccctgtgttcgtactcttgtgaaggggttaaatgcggg

SEQ ID NO: 465159 - DNA, 60 bp, Artificial
  Synthetic oligonucleotide
tctttgtggcccggcaggcgctcatatggatctcccagattccataccaggtcaccatct

SEQ ID NO: 465160 - DNA, 51 bp, Artificial
  Synthetic oligonucleotide
tcttttaaaactaacaatgcctgcccttaacctacgataccttttctcgat

SEQ ID NO: 465161 - DNA, 55 bp, Artificial
  Synthetic oligonucleotide
tcttttacagatggctatgtggcggcctggtgacggcaaggtatacctgcctccc

SEQ ID NO: 465162 - DNA, 60 bp, Artificial
  Synthetic oligonucleotide
tcttttaccggctagagttatagctatggtctggaccgtatcgttagtgtctgcgatcac

SEQ ID NO: 465163 - DNA, 53 bp, Artificial
  Synthetic oligonucleotide
tcttttagaaggtagcaaatgtacctcaattgtctcacatggattccattctc

SEQ ID NO: 465164 - DNA, 50 bp, Artificial
  Synthetic oligonucleotide
tcttttaggagctgatggcatttttgtaatactggggttgtcaccaattg

SEQ ID NO: 465165 - DNA, 55 bp, Artificial
  Synthetic oligonucleotide
tcttttatgaggatctgacacgccattggcatgcactgggtggcgctcaggaagc

SEQ ID NO: 465166 - DNA, 53 bp, Artificial
  Synthetic oligonucleotide
tcttttcaactcgtgtgtggagatatttaggagttatctagagttgagtgcca

SEQ ID NO: 465167 - DNA, 55 bp, Artificial
  Synthetic oligonucleotide
tcttttcacaccttgaaaacctagaagcgtgaacagtttgtgcctaggatccccg

SEQ ID NO: 465168 - DNA, 60 bp, Artificial
  Synthetic oligonucleotide
tcttttcatgtggggcatacaccatccacctaccgacacagaacagacagacttgtacaa

SEQ ID NO: 465169 - DNA, 58 bp, Artificial
  Synthetic oligonucleotide
tcttttccggatttacggggaaacgcgcaaaagatagtatatgatgatgagttacaga

SEQ ID NO: 465170 - DNA, 55 bp, Artificial
  Synthetic oligonucleotide
tcttttccgttataccgtagaccaagcttgacgccatacatagcgccggttgagg

SEQ ID NO: 465171 - DNA, 59 bp, Artificial
  Synthetic oligonucleotide
tcttttcctcttcagtggcgttcgtgcctgattaggtgaaaagactccttcacggatca

SEQ ID NO: 465172 - DNA, 57 bp, Artificial
  Synthetic oligonucleotide
tcttttccttattgggattggaggtcaacccgcatttgctatcgatcctggcttctt

SEQ ID NO: 465173 - DNA, 57 bp, Artificial
  Synthetic oligonucleotide
tcttttcgtctgacactggcccgggtcacctacagcagaggtccgtaaggcaacatg

SEQ ID NO: 465174 - DNA, 59 bp, Artificial
  Synthetic oligonucleotide
tcttttctatagtgctctttagtatcctctgcccccggagaggacacaagaaagctgtg

SEQ ID NO: 465175 - DNA, 60 bp, Artificial
  Synthetic oligonucleotide
tcttttctccaggtataattgcagaatcaaatcatagtgtttgtgataaaaagacagtgc

SEQ ID NO: 465176 - DNA, 60 bp, Artificial
  Synthetic oligonucleotide
tcttttgagtcaagacacgatgtagttcatatagggaaggtcatgtgtattagtgatgtg

SEQ ID NO: 465177 - DNA, 55 bp, Artificial
  Synthetic oligonucleotide
tcttttgcaccgaacgtcatatgtatgagattactaatcactgacccatcgcacc

SEQ ID NO: 465178 - DNA, 53 bp, Artificial
  Synthetic oligonucleotide
tcttttgccatgctgacacagagcggctcctgaccgtgggaaacccatttttc

SEQ ID NO: 465179 - DNA, 59 bp, Artificial
  Synthetic oligonucleotide
tcttttgcgtaggtcatgttgtggttggaatcgtaatcatgttgctactgtgtgcggga

SEQ ID NO: 465180 - DNA, 58 bp, Artificial
  Synthetic oligonucleotide
tcttttgctacgaagaggagttaccaaccgagcaggatacatcttcggaggaggagcc

SEQ ID NO: 465181 - DNA, 60 bp, Artificial
  Synthetic oligonucleotide
tcttttggacactaacacacctttgtgcagctccaatgtcatatacacagccctcagtcg

SEQ ID NO: 465182 - DNA, 60 bp, Artificial
  Synthetic oligonucleotide
tcttttggagaaacacgttccagttctatggcatctagagctgcatgtaatgaatttccg

SEQ ID NO: 465183 - DNA, 56 bp, Artificial
  Synthetic oligonucleotide
tcttttgtcagtctgtacttcctcttgatacaatctaaccggtaccatttttccgc

SEQ ID NO: 465184 - DNA, 60 bp, Artificial
  Synthetic oligonucleotide
tcttttgttgaagaatgcttcccagaactcactatcgggaacaccacaatgccaggcaca

SEQ ID NO: 465185 - DNA, 60 bp, Artificial
  Synthetic oligonucleotide
tctttttatcagtcctacttgagaagaacgcagtcaatggggatacaactagatcagagg

SEQ ID NO: 465186 - DNA, 54 bp, Artificial
  Synthetic oligonucleotide
tctttttcggagaactgtttggacagtatccttactgttggtgcccggaacgga

SEQ ID NO: 465187 - DNA, 59 bp, Artificial
  Synthetic oligonucleotide
tctttttcgtttcatgtgggttttagaaagcaaaaaatgatagatgcggcgctagatca

SEQ ID NO: 465188 - DNA, 60 bp, Artificial
  Synthetic oligonucleotide
tctttttggcacggtctgcactcattctgagaggatcagtggcccataagtcctgcctac

SEQ ID NO: 465189 - DNA, 60 bp, Artificial
  Synthetic oligonucleotide
tctttttgggatttgatctgggcatcgatgtcgtacattttgaagatttggccgctcact

SEQ ID NO: 465190 - DNA, 60 bp, Artificial
  Synthetic oligonucleotide
tgaaaaacgtttctgtgtgtattgtgcagctatgcactcaatgtttgagggccacataag

SEQ ID NO: 465191 - DNA, 60 bp, Artificial
  Synthetic oligonucleotide
tgaaaaagcctgtcgctttgaaagtgaaagctaagaacctgattgtcactgagagtggcg

SEQ ID NO: 465192 - DNA, 60 bp, Artificial
  Synthetic oligonucleotide
tgaaaaatcatgctctatcaggagagtgtaaggctgcaagcgaagttgcaaaacgtgttc

SEQ ID NO: 465193 - DNA, 60 bp, Artificial
  Synthetic oligonucleotide
tgaaaacaaatgcttcgagcagtgtggagcgattggctgtggatgtttcaacataaatcc

SEQ ID NO: 465194 - DNA, 60 bp, Artificial
  Synthetic oligonucleotide
tgaaaacacaagcaatcccactgcgtaccacaaggggccgctgactcggctggctctccc

SEQ ID NO: 465195 - DNA, 60 bp, Artificial
  Synthetic oligonucleotide
tgaaaacactgtcgataccaagctctcatccagcctgaaaccgaggaacaccctcgcgcc

SEQ ID NO: 465196 - DNA, 56 bp, Artificial
  Synthetic oligonucleotide
tgaaaacagactcgggctgcccggagggggctagatgctacgtgttcaaccctgag

SEQ ID NO: 465197 - DNA, 59 bp, Artificial
  Synthetic oligonucleotide
tgaaaacagttattcatacttcagaggttctcttataatcaggttaagtgtttatgcta

SEQ ID NO: 465198 - DNA, 60 bp, Artificial
  Synthetic oligonucleotide
tgaaaaccatgttttgaggtaaatgtctgatgattgaggaaatcaggcctggttgggcat

SEQ ID NO: 465199 - DNA, 55 bp, Artificial
  Synthetic oligonucleotide
tgaaaacctcccgtacacggtccctcctctcagcgagagggagcacagggcagca

SEQ ID NO: 465200 - DNA, 51 bp, Artificial
  Synthetic oligonucleotide
tgaaaacgttaaggaatgaatacgtggttgcattgtacgcgctgtctaacg

SEQ ID NO: 465201 - DNA, 59 bp, Artificial
  Synthetic oligonucleotide
tgaaaacgttcactagggtatcctctgtagcagataacgctgtggcactactaagacgc

SEQ ID NO: 465202 - DNA, 58 bp, Artificial
  Synthetic oligonucleotide
tgaaaactattaattgggcgaaggaagcagaaggacgtatcctagtaatggatgcgga

SEQ ID NO: 465203 - DNA, 60 bp, Artificial
  Synthetic oligonucleotide
tgaaaactgtgtttcgttgaacactcctcatggacatgagtctgtcaacctctttattca

SEQ ID NO: 465204 - DNA, 58 bp, Artificial
  Synthetic oligonucleotide
tgaaaacttggagattggcgtgacaaggatagcggaaacgctagggagatcgtacagt

SEQ ID NO: 465205 - DNA, 51 bp, Artificial
  Synthetic oligonucleotide
tgaaaagacattcgcatcatggtggagtcatcagttaagtaggggttttac

SEQ ID NO: 465206 - DNA, 59 bp, Artificial
  Synthetic oligonucleotide
tgaaaagacctattctccggacacaatcggatacgatcttgttcgtgacttaatctctg

SEQ ID NO: 465207 - DNA, 59 bp, Artificial
  Synthetic oligonucleotide
tgaaaaggcacatgagtacaccatacgaggggatcgtggacaccctagtttcacttata

SEQ ID NO: 465208 - DNA, 55 bp, Artificial
  Synthetic oligonucleotide
tgaaaaggcgagatgtgctaccggcccaagtcggggtcaatccttattcacgaga

SEQ ID NO: 465209 - DNA, 55 bp, Artificial
  Synthetic oligonucleotide
tgaaaaggctggctacggctggacggccgaccctgcacgtcttgctcgagcaaag

SEQ ID NO: 465210 - DNA, 54 bp, Artificial
  Synthetic oligonucleotide
tgaaaaggctttggagaatgcttgatccccgacaaggacttactgttctaagga

SEQ ID NO: 465211 - DNA, 55 bp, Artificial
  Synthetic oligonucleotide
tgaaaaggggtcatgtgtgaccatagtggctgatgacagaccaacagttgacatc

SEQ ID NO: 465212 - DNA, 52 bp, Artificial
  Synthetic oligonucleotide
tgaaaaggtcgaaaggttaaaacatggaacctttggccctgtccattttaga

SEQ ID NO: 465213 - DNA, 59 bp, Artificial
  Synthetic oligonucleotide
tgaaaaggtgtatcaagagtactggaactgggttaatatgaattctcgtgctgtttatg

SEQ ID NO: 465214 - DNA, 55 bp, Artificial
  Synthetic oligonucleotide
tgaaaaggttgaagcgaacaaaacgcgaacattcacagcagctccaattgaaact

SEQ ID NO: 465215 - DNA, 53 bp, Artificial
  Synthetic oligonucleotide
tgaaaagtcccacccgggaatctttgaaaactcgtgtcttgaaacgatggaag

SEQ ID NO: 465216 - DNA, 50 bp, Artificial
  Synthetic oligonucleotide
tgaaaagtcgtcctggaagggctttaaaaggtcctacgacgaagtttacg

SEQ ID NO: 465217 - DNA, 60 bp, Artificial
  Synthetic oligonucleotide
tgaaaagtctctgactgtgcagaacattgcaaattttattcgacatcacattggtggggt

SEQ ID NO: 465218 - DNA, 60 bp, Artificial
  Synthetic oligonucleotide
tgaaaagtgaactggagtacggtaattgtgacaccaaatgtcagactccaatgggtgcta

SEQ ID NO: 465219 - DNA, 55 bp, Artificial
  Synthetic oligonucleotide
tgaaaagtgctctgtctacactgttgaatccggtaccgaagttactgagtttgca

SEQ ID NO: 465220 - DNA, 57 bp, Artificial
  Synthetic oligonucleotide
tgaaaataatgatagggataaagtaatagatttcacgcagaagcaaaagaggggtgt

SEQ ID NO: 465221 - DNA, 59 bp, Artificial
  Synthetic oligonucleotide
tgaaaatcagaaaacactcgatgagcatgacgcgaacgtgaacaatctatataacaagg

SEQ ID NO: 465222 - DNA, 55 bp, Artificial
  Synthetic oligonucleotide
tgaaaatccaatggcggacataatgttagtgaaggatcattttgacgacttgagg

SEQ ID NO: 465223 - DNA, 55 bp, Artificial
  Synthetic oligonucleotide
tgaaaatccacatgcagcttgggtctttgcatgtgctcctgaccgatgtccacca

SEQ ID NO: 465224 - DNA, 54 bp, Artificial
  Synthetic oligonucleotide
tgaaaatgaagcttgatgccagcttccctcgaggtacttagcggtaatgcgtaa

SEQ ID NO: 465225 - DNA, 60 bp, Artificial
  Synthetic oligonucleotide
tgaaaatgcttctggcatacacaggcgttcatgccagacctaacgtacttactataaagg

SEQ ID NO: 465226 - DNA, 60 bp, Artificial
  Synthetic oligonucleotide
tgaaaatgcttgaggaaccagtaaaacatgacgatcatttattacaagactctgaactag

SEQ ID NO: 465227 - DNA, 60 bp, Artificial
  Synthetic oligonucleotide
tgaaaatggtcgctatattcattggttacatatgggatcgggcgaagtgctcgaaactat

SEQ ID NO: 465228 - DNA, 60 bp, Artificial
  Synthetic oligonucleotide
tgaaaatgtccctaaaacaaagatacagcacctggaagagtgttcctgctatgtggacac

SEQ ID NO: 465229 - DNA, 57 bp, Artificial
  Synthetic oligonucleotide
tgaaaattcccggtgaagtccacaatttaatggagatagcagaggttgactcggtcg

SEQ ID NO: 465230 - DNA, 55 bp, Artificial
  Synthetic oligonucleotide
tgaaaattgtagaatatgtggaggtcattgtaatggctaacttccttccgaagga

SEQ ID NO: 465231 - DNA, 60 bp, Artificial
  Synthetic oligonucleotide
tgaaaatttcttccctagcagctcatacaggagaccagtcgggatttccagtatggtgga

SEQ ID NO: 465232 - DNA, 50 bp, Artificial
  Synthetic oligonucleotide
tgaaaattttgtaactaaacgcatatggattacaagcgaaaaacctttag

SEQ ID NO: 465233 - DNA, 53 bp, Artificial
  Synthetic oligonucleotide
tgaaacaaagggtgaatgaaaaatatacaagttgggtgcaaaaagcaaaaaag

SEQ ID NO: 465234 - DNA, 58 bp, Artificial
  Synthetic oligonucleotide
tgaaacaacccttggtgatactgagcgaatgccggtgtcgggagagggattcggtaga

SEQ ID NO: 465235 - DNA, 53 bp, Artificial
  Synthetic oligonucleotide
tgaaacaagagccacacaaacagagtaaacttgatgagggtcgttaccgcctc

SEQ ID NO: 465236 - DNA, 53 bp, Artificial
  Synthetic oligonucleotide
tgaaacaataacgcgtgttcgacatattgtacataatgaccgagcgtctatgt

SEQ ID NO: 465237 - DNA, 55 bp, Artificial
  Synthetic oligonucleotide
tgaaacaatgcattttcataaggaacctcttcagtaatccttgagcattgacctc

SEQ ID NO: 465238 - DNA, 55 bp, Artificial
  Synthetic oligonucleotide
tgaaacaatggaagttgttcaacaaacaagggtggataaactaactcaaggtcgc

SEQ ID NO: 465239 - DNA, 53 bp, Artificial
  Synthetic oligonucleotide
tgaaacacaacaactgggggattgcaatactgccgttagcccctctaaacttc

SEQ ID NO: 465240 - DNA, 56 bp, Artificial
  Synthetic oligonucleotide
tgaaacaccgggaaagggaacaccgaatgtcactcttggccgatcttgcaggtttg

SEQ ID NO: 465241 - DNA, 57 bp, Artificial
  Synthetic oligonucleotide
tgaaacaccggtttgaaataattgaagggagagatcgaacaatggcttggacagtgg

SEQ ID NO: 465242 - DNA, 58 bp, Artificial
  Synthetic oligonucleotide
tgaaacacgttagactcggtaaggaaatgactgctatttggactcccacctcgcgcca

SEQ ID NO: 465243 - DNA, 60 bp, Artificial
  Synthetic oligonucleotide
tgaaacactaacagttaactggggagaagatataaatgttcagccattgtatcagctact

SEQ ID NO: 465244 - DNA, 55 bp, Artificial
  Synthetic oligonucleotide
tgaaacagaggctctcgggttcagaacaacacgattcaaaggattccatcttgtg

SEQ ID NO: 465245 - DNA, 60 bp, Artificial
  Synthetic oligonucleotide
tgaaacagttgcaaatcaggttgcaaaatctagtgtgctaccacgattatattccattca

SEQ ID NO: 465246 - DNA, 52 bp, Artificial
  Synthetic oligonucleotide
tgaaacatagggcattagtgcaattaaaatgtccaccactgcttcttacctc

SEQ ID NO: 465247 - DNA, 60 bp, Artificial
  Synthetic oligonucleotide
tgaaacatcctaaagtatatgcttcactattagaattatccaatgtaatgtctccatact

SEQ ID NO: 465248 - DNA, 57 bp, Artificial
  Synthetic oligonucleotide
tgaaacattcgaggaggtacctttcgatgtgcaaaaattcgcagacttagttacaga

SEQ ID NO: 465249 - DNA, 54 bp, Artificial
  Synthetic oligonucleotide
tgaaaccaagttccaaacgcgctggtgcgttctacaggagggttaccatcattg

SEQ ID NO: 465250 - DNA, 57 bp, Artificial
  Synthetic oligonucleotide
tgaaaccacaataaccactgcgcaggaaactaagcgcggcagaattcaaactaaaaa

SEQ ID NO: 465251 - DNA, 58 bp, Artificial
  Synthetic oligonucleotide
tgaaaccaccaatgttagaggtaatctctacaatgatgagggtttccgactcagcgta

SEQ ID NO: 465252 - DNA, 58 bp, Artificial
  Synthetic oligonucleotide
tgaaaccaccggggcctactctgacattatatacaaccctttcacagacaaaggcaca

SEQ ID NO: 465253 - DNA, 54 bp, Artificial
  Synthetic oligonucleotide
tgaaaccaggagtcctgaagctgtttatactcggatcatgatgaatggaggccg

SEQ ID NO: 465254 - DNA, 60 bp, Artificial
  Synthetic oligonucleotide
tgaaacccgcagcagtacgattgcagagtgtcgttcctatgacaccagtggctgtaggta

SEQ ID NO: 465255 - DNA, 55 bp, Artificial
  Synthetic oligonucleotide
tgaaaccctgataccccacccacaaagaaaggttcagcttatatctctgcttggt

SEQ ID NO: 465256 - DNA, 55 bp, Artificial
  Synthetic oligonucleotide
tgaaaccgggattttcaatataagctcacctacttgtttactcaatcgtgtacag

SEQ ID NO: 465257 - DNA, 55 bp, Artificial
  Synthetic oligonucleotide
tgaaaccggggccgttattctaccaggattacaagggacccgtctatcatagagc

SEQ ID NO: 465258 - DNA, 50 bp, Artificial
  Synthetic oligonucleotide
tgaaaccgtacacggttttaggtgtatgctagcggttaaataccttctac

SEQ ID NO: 465259 - DNA, 60 bp, Artificial
  Synthetic oligonucleotide
tgaaaccgtatttgatatgtctgagtgagctagaaacttaacacactagtcacgatgtga

SEQ ID NO: 465260 - DNA, 58 bp, Artificial
  Synthetic oligonucleotide
tgaaacctatggggatacttgggaaggagttgaagctatagtaagaatgttgcaacat

SEQ ID NO: 465261 - DNA, 55 bp, Artificial
  Synthetic oligonucleotide
tgaaacctctcaactataaggatggcgaaaacgttgttgaagtcgtcttcagcga

SEQ ID NO: 465262 - DNA, 58 bp, Artificial
  Synthetic oligonucleotide
tgaaacgaaaacgggactctagcatacttactgacagccagacagcgaccaaaagaat

SEQ ID NO: 465263 - DNA, 60 bp, Artificial
  Synthetic oligonucleotide
tgaaacgaatgactcaactacagttgaaccagtacttgatggaccatatcaaccaacgac

SEQ ID NO: 465264 - DNA, 55 bp, Artificial
  Synthetic oligonucleotide
tgaaacgcatttggaacatggcgggtggtgatgataagagaaactccctcgaggg

SEQ ID NO: 465265 - DNA, 57 bp, Artificial
  Synthetic oligonucleotide
tgaaacgcccgttgcgaggacctaccgcagggtactctaccatcattgtcagagacc

SEQ ID NO: 465266 - DNA, 56 bp, Artificial
  Synthetic oligonucleotide
tgaaacgcctttacgataggttacaatcagtcgacacgtcaacactcccgtatatt

SEQ ID NO: 465267 - DNA, 60 bp, Artificial
  Synthetic oligonucleotide
tgaaacgcgagagaaaccgcgtgtcaactgtgcaacagctgacaaagagattctcacttg

SEQ ID NO: 465268 - DNA, 60 bp, Artificial
  Synthetic oligonucleotide
tgaaacgcgatgtgccgaattacccaggattcttgttgatcacgctacgcaaaccatgca

SEQ ID NO: 465269 - DNA, 57 bp, Artificial
  Synthetic oligonucleotide
tgaaacggcgatggttgttcaacatggagaccgacggtcgaattggttcggacatcc

SEQ ID NO: 465270 - DNA, 56 bp, Artificial
  Synthetic oligonucleotide
tgaaacgtaaacgatctaaacattaaataaactgtgaatttgtttcagactgtgaa

SEQ ID NO: 465271 - DNA, 55 bp, Artificial
  Synthetic oligonucleotide
tgaaacgtatgtgggcgatgacatgttgatgtatacaaacctaaatgtgatacgc

SEQ ID NO: 465272 - DNA, 60 bp, Artificial
  Synthetic oligonucleotide
tgaaactaaaaaccaaatgtggatgtctggcattgctgactcccatgacagttggtgtga

SEQ ID NO: 465273 - DNA, 60 bp, Artificial
  Synthetic oligonucleotide
tgaaactaacacttatgttaagatgcatgtcgacacttggttgcgcaaatacgctgccga

SEQ ID NO: 465274 - DNA, 57 bp, Artificial
  Synthetic oligonucleotide
tgaaactactgggacagagcagtctcagggggctacagagggggtgggaagccctta

SEQ ID NO: 465275 - DNA, 60 bp, Artificial
  Synthetic oligonucleotide
tgaaactagaatcaatgggaattcaccagattttggcgatctactccacagtcgccagtt

SEQ ID NO: 465276 - DNA, 54 bp, Artificial
  Synthetic oligonucleotide
tgaaactaggagatcaagacttagacgatgaaacaactatgctctcactatttg

SEQ ID NO: 465277 - DNA, 51 bp, Artificial
  Synthetic oligonucleotide
tgaaactaggttgtgccccgtgggtcggaccacgcccgcagatcaaagtcg

SEQ ID NO: 465278 - DNA, 59 bp, Artificial
  Synthetic oligonucleotide
tgaaactagtcgatgttcaacccgctcgggaagatcacttattggcttatctcaacgaa

SEQ ID NO: 465279 - DNA, 51 bp, Artificial
  Synthetic oligonucleotide
tgaaactattctgtcaaatggtatccacagtagagtttataccaccaatgg

SEQ ID NO: 465280 - DNA, 60 bp, Artificial
  Synthetic oligonucleotide
tgaaactcaccatggcatgtttgaaaatcttctctctgaaacgcaaagacaagagccact

SEQ ID NO: 465281 - DNA, 59 bp, Artificial
  Synthetic oligonucleotide
tgaaactctcccatttgctttcacattaaatcaattcagatctataattaaagggatcg

SEQ ID NO: 465282 - DNA, 60 bp, Artificial
  Synthetic oligonucleotide
tgaaactgacatgagaaattgctctttcaatataaccacagaattaagagataagaggag

SEQ ID NO: 465283 - DNA, 60 bp, Artificial
  Synthetic oligonucleotide
tgaaactgagctatccctgtgattcatctctgtcttcatcatctctaaggccactaccta

SEQ ID NO: 465284 - DNA, 51 bp, Artificial
  Synthetic oligonucleotide
tgaaactgcacagagcttcaggactatgcccagggtataagagtcttagag

SEQ ID NO: 465285 - DNA, 56 bp, Artificial
  Synthetic oligonucleotide
tgaaactgcatgggaattaacaccctacagtttcgttgcggattggtttgtgaacg

SEQ ID NO: 465286 - DNA, 57 bp, Artificial
  Synthetic oligonucleotide
tgaaactggcaacagggatgagaaacgtgcctgagaaacaaaccaggggtctgttcg

SEQ ID NO: 465287 - DNA, 60 bp, Artificial
  Synthetic oligonucleotide
tgaaagaaacagtattgcttaccggctatgcacaatggtttaccgacgcatatctacaac

SEQ ID NO: 465288 - DNA, 58 bp, Artificial
  Synthetic oligonucleotide
tgaaagaaagtggtccccgcgcactggttttggtcggccagtcatattcacgcgtgaa

SEQ ID NO: 465289 - DNA, 55 bp, Artificial
  Synthetic oligonucleotide
tgaaagaatcatccaaaatggcgatagtagaagataatttcaacccaaacaatga

SEQ ID NO: 465290 - DNA, 60 bp, Artificial
  Synthetic oligonucleotide
tgaaagacttaggttgtaaccagaaacattgatctgagactgctcttgtgttatatagct

SEQ ID NO: 465291 - DNA, 58 bp, Artificial
  Synthetic oligonucleotide
tgaaagagagggatactccctagttgggattgatcctttccgtctgctccaaaacagc

SEQ ID NO: 465292 - DNA, 53 bp, Artificial
  Synthetic oligonucleotide
tgaaagagatctcaaaccaagatccactcaagatctgaatgactggattaaca

SEQ ID NO: 465293 - DNA, 54 bp, Artificial
  Synthetic oligonucleotide
tgaaagaggcctccgggtgaaggtaagtgcctacaccgaaaaccgtagccagaa

SEQ ID NO: 465294 - DNA, 57 bp, Artificial
  Synthetic oligonucleotide
tgaaagaggttctttgtgagccttgtacctgtgacaacccaacatgtctaggtttaa

SEQ ID NO: 465295 - DNA, 57 bp, Artificial
  Synthetic oligonucleotide
tgaaagaggttgccactgggagaaatccaaacaaagatcctctaaagcttgggtaca

SEQ ID NO: 465296 - DNA, 60 bp, Artificial
  Synthetic oligonucleotide
tgaaagatgaacggttcatgagtctatcaagcgctatgcctcaagcgagtggtggatttg

SEQ ID NO: 465297 - DNA, 53 bp, Artificial
  Synthetic oligonucleotide
tgaaagatggttcgagacgcgcataacgtcaggtcagcaggggtatgctccat

SEQ ID NO: 465298 - DNA, 60 bp, Artificial
  Synthetic oligonucleotide
tgaaagcaaatcactatttagaggtctgagggattataatccgatagctagcgtcatatg

SEQ ID NO: 465299 - DNA, 60 bp, Artificial
  Synthetic oligonucleotide
tgaaagcaatggttagctactgtaagccaggaacacttaaggagaaactgatgtccattg

SEQ ID NO: 465300 - DNA, 60 bp, Artificial
  Synthetic oligonucleotide
tgaaagccaatgaaatctccaagtccaacaataagtacattctggatggaggacacttga

SEQ ID NO: 465301 - DNA, 59 bp, Artificial
  Synthetic oligonucleotide
tgaaagccaccatcagggagggaagcgtctaccgtcgccgcaacttccactcccatgaa

SEQ ID NO: 465302 - DNA, 55 bp, Artificial
  Synthetic oligonucleotide
tgaaagcccatcagtgacacaagtcacgcttggtgggaaacctatggacctcgcc

SEQ ID NO: 465303 - DNA, 60 bp, Artificial
  Synthetic oligonucleotide
tgaaagcgcatttggcctggtgtgcgccacttgtgagcaaattgcggattcccaacatcg

SEQ ID NO: 465304 - DNA, 60 bp, Artificial
  Synthetic oligonucleotide
tgaaagctactatgagcaaagggcgagcgagctactaacgctgcatggcatatccgagct

SEQ ID NO: 465305 - DNA, 51 bp, Artificial
  Synthetic oligonucleotide
tgaaagctattcattagagcagatacaatctccggagtatgcgccacttag

SEQ ID NO: 465306 - DNA, 60 bp, Artificial
  Synthetic oligonucleotide
tgaaagctgatgagttaacacctggcagattcaggactatcgtgtgtggcctgttccctg

SEQ ID NO: 465307 - DNA, 58 bp, Artificial
  Synthetic oligonucleotide
tgaaagctgcagcattgcgagatgcgaataataagatgtttggactggatggaaaagt

SEQ ID NO: 465308 - DNA, 60 bp, Artificial
  Synthetic oligonucleotide
tgaaaggaatgaaatcgttgcgtatcttttagtagcttccttagctgatgtgtatgcggc

SEQ ID NO: 465309 - DNA, 60 bp, Artificial
  Synthetic oligonucleotide
tgaaaggacacacaacgggaagctctgcagcctaaatggagtgaagcctctcattttgag

SEQ ID NO: 465310 - DNA, 51 bp, Artificial
  Synthetic oligonucleotide
tgaaaggaccatggactgttgggattaacaaattcaatcgaggatgggaca

SEQ ID NO: 465311 - DNA, 60 bp, Artificial
  Synthetic oligonucleotide
tgaaaggagttggaacaatagcaatggagttaatcaggatgatcaaacgtggaatcaatg

SEQ ID NO: 465312 - DNA, 60 bp, Artificial
  Synthetic oligonucleotide
tgaaaggatgattgaagaaagactttccgggcttgtgccacatattaatcatctcaggac

SEQ ID NO: 465313 - DNA, 57 bp, Artificial
  Synthetic oligonucleotide
tgaaaggccctacacgcgtgaacgctggtttagtgctaccgtgacgcgccgacaacc

SEQ ID NO: 465314 - DNA, 56 bp, Artificial
  Synthetic oligonucleotide
tgaaaggggaccaaatatgtatcgggtaccacgccaacaattccacagagaaagtc

SEQ ID NO: 465315 - DNA, 57 bp, Artificial
  Synthetic oligonucleotide
tgaaaggggtcttgtaacgtatatgtggtcccaacatgccttttcgtacatcgcttg

SEQ ID NO: 465316 - DNA, 55 bp, Artificial
  Synthetic oligonucleotide
tgaaagggttcgggttcttaaatggggacaacacatggctagggaggactatcag

SEQ ID NO: 465317 - DNA, 53 bp, Artificial
  Synthetic oligonucleotide
tgaaaggtacgaaactatttatccgaggcataagggcaccgactctgtcacgt

SEQ ID NO: 465318 - DNA, 57 bp, Artificial
  Synthetic oligonucleotide
tgaaaggtccagacggaatgccgtattacgatattccaagtattggcgaaattttgc

SEQ ID NO: 465319 - DNA, 53 bp, Artificial
  Synthetic oligonucleotide
tgaaaggtccgaacgatgcgaaagacgccccgcccggtccctcaccctcccag

SEQ ID NO: 465320 - DNA, 56 bp, Artificial
  Synthetic oligonucleotide
tgaaaggtcggaattacaaagacttaggtaattgccatccgatagggatggtaata

SEQ ID NO: 465321 - DNA, 60 bp, Artificial
  Synthetic oligonucleotide
tgaaaggtgggagtcaacaacactgaaccacatggcagacaagagttttgccacggcaga

SEQ ID NO: 465322 - DNA, 60 bp, Artificial
  Synthetic oligonucleotide
tgaaagtacgtattcccctgatacactcggatacgatctaatccgtgatctgatacttgt

SEQ ID NO: 465323 - DNA, 60 bp, Artificial
  Synthetic oligonucleotide
tgaaagtactagctttaagacacagtgtgactcaagtatatgcagatacgcaaacgtact

SEQ ID NO: 465324 - DNA, 55 bp, Artificial
  Synthetic oligonucleotide
tgaaagtaggacgaaagggatctactttcaaatcccctgacactctcaatttgcc

SEQ ID NO: 465325 - DNA, 60 bp, Artificial
  Synthetic oligonucleotide
tgaaagtataagaaacgggacatatgaccatgatatttacagagacgaagcaatcaacaa

SEQ ID NO: 465326 - DNA, 60 bp, Artificial
  Synthetic oligonucleotide
tgaaagtattagctttaagacacagtgtggctcaggtatatgcagatacgcaaacctata

SEQ ID NO: 465327 - DNA, 55 bp, Artificial
  Synthetic oligonucleotide
tgaaagtcgttcagatgatgtggcacgaagacatgctgagttggtggagatggag

SEQ ID NO: 465328 - DNA, 60 bp, Artificial
  Synthetic oligonucleotide
tgaaagtctccctgaagtcattgacaaagactcacacagcctactgtattctgattcctc

SEQ ID NO: 465329 - DNA, 57 bp, Artificial
  Synthetic oligonucleotide
tgaaagtcttaatccctgggcctaccaatacaggataagtgatggtcagctactttt

SEQ ID NO: 465330 - DNA, 60 bp, Artificial
  Synthetic oligonucleotide
tgaaagtgatagctttaagacgcgacctggtctcgtcatatgcagatactcaagtctatg

SEQ ID NO: 465331 - DNA, 55 bp, Artificial
  Synthetic oligonucleotide
tgaaagtgccgaaagatgagtttgatgtggctcgttggcgtatacaatcgatatt

SEQ ID NO: 465332 - DNA, 57 bp, Artificial
  Synthetic oligonucleotide
tgaaagtgggtcccaccttatccaaagaaagacaaatggactgggtcaatgcaattg

SEQ ID NO: 465333 - DNA, 50 bp, Artificial
  Synthetic oligonucleotide
tgaaagttccttactgcaactatactagattctggtatgtaaaccacaca

SEQ ID NO: 465334 - DNA, 56 bp, Artificial
  Synthetic oligonucleotide
tgaaagttgggtgtccgtagatgaacgactcaaccgaatgttgaaaggagaagtaa

SEQ ID NO: 465335 - DNA, 58 bp, Artificial
  Synthetic oligonucleotide
tgaaataaggactgatcaacattgggtgactaaaacaaatatagaagactatttacta

SEQ ID NO: 465336 - DNA, 55 bp, Artificial
  Synthetic oligonucleotide
tgaaataagtcctggttgtgtgtcagctagatccttgagcaacaatccgtgagag

SEQ ID NO: 465337 - DNA, 60 bp, Artificial
  Synthetic oligonucleotide
tgaaatacccgacttattagacccatcaataatatactctgacaaaagtcattcgatgaa

SEQ ID NO: 465338 - DNA, 60 bp, Artificial
  Synthetic oligonucleotide
tgaaatacggagcaagactatttacattcactggaaacacaccgaacgcagcgccacaag

SEQ ID NO: 465339 - DNA, 59 bp, Artificial
  Synthetic oligonucleotide
tgaaatagaagaacctcctactgaaagcacacctgtcactgcatttgggcgggccttta

SEQ ID NO: 465340 - DNA, 60 bp, Artificial
  Synthetic oligonucleotide
tgaaatagaggggatttgttatctcccagataaacacgccattctcggcctgagctgcag

SEQ ID NO: 465341 - DNA, 60 bp, Artificial
  Synthetic oligonucleotide
tgaaatagcagaaggccatgaaagctcagcgctactatattgtctcatggtcatgtacct

SEQ ID NO: 465342 - DNA, 60 bp, Artificial
  Synthetic oligonucleotide
tgaaatagcatcgtagcttaagtttcaatgattgcaggtaacgcggacttctccatgtcc

SEQ ID NO: 465343 - DNA, 60 bp, Artificial
  Synthetic oligonucleotide
tgaaataggagacatgctcctacgaactgcaataggccaagtatcacgacctatgttcct

SEQ ID NO: 465344 - DNA, 60 bp, Artificial
  Synthetic oligonucleotide
tgaaataggggacatgctcctacgaactgcaataggccaagtgtcgagacccatgtttct

SEQ ID NO: 465345 - DNA, 60 bp, Artificial
  Synthetic oligonucleotide
tgaaataggggacatgcttctaagaactgctataggccaagtctcaagacccatgttctt

SEQ ID NO: 465346 - DNA, 58 bp, Artificial
  Synthetic oligonucleotide
tgaaatagtgccggagcctaaaactcacttccccgcaaccaacgcgggtatgctgctg

SEQ ID NO: 465347 - DNA, 60 bp, Artificial
  Synthetic oligonucleotide
tgaaatatggtgatttgcagtttgacagtcgcgatattgtcactgagacatggagatgtc

SEQ ID NO: 465348 - DNA, 60 bp, Artificial
  Synthetic oligonucleotide
tgaaatattgcaagccactagcgtcgttatgcttagcctctggatacatgggattaattg

SEQ ID NO: 465349 - DNA, 51 bp, Artificial
  Synthetic oligonucleotide
tgaaatcaacactgattgctattggacagtctaaagaaattgaaactacaa

SEQ ID NO: 465350 - DNA, 60 bp, Artificial
  Synthetic oligonucleotide
tgaaatcaaccgtatagcagttcgccatgcgtttataagatataatactctattggcgac

SEQ ID NO: 465351 - DNA, 57 bp, Artificial
  Synthetic oligonucleotide
tgaaatcaatcttaaagggacatgcacactggcacataggatggttgaagaatctta

SEQ ID NO: 465352 - DNA, 54 bp, Artificial
  Synthetic oligonucleotide
tgaaatcacaatgggttaaaaagactgagaaaatcggggccatcaaagttaaac

SEQ ID NO: 465353 - DNA, 51 bp, Artificial
  Synthetic oligonucleotide
tgaaatcacacccagactatctaagtagttcatcacttgtgtcctaaagac

SEQ ID NO: 465354 - DNA, 60 bp, Artificial
  Synthetic oligonucleotide
tgaaatcacatataagaaatacaccagtttgattctcccagtgatgtctgaattgggtat

SEQ ID NO: 465355 - DNA, 59 bp, Artificial
  Synthetic oligonucleotide
tgaaatcagttactagaacaatggactttatcatttatagattcttattggttatagtc

SEQ ID NO: 465356 - DNA, 59 bp, Artificial
  Synthetic oligonucleotide
tgaaatcatttgtcgcctgcgtcaaggttatcttgtccttgcgacgtagacggaagtag

SEQ ID NO: 465357 - DNA, 60 bp, Artificial
  Synthetic oligonucleotide
tgaaatcctggatccatccaggtatttacatgaacagatatggtgcaaaaatgatcacgt

SEQ ID NO: 465358 - DNA, 60 bp, Artificial
  Synthetic oligonucleotide
tgaaatcgcgtgcgtcatgaacgcggctagtgcctctgtcggtctgatgagtggttccag

SEQ ID NO: 465359 - DNA, 56 bp, Artificial
  Synthetic oligonucleotide
tgaaatcgtttatcaagtcgaaccttcttccatttccgatgaattccgtgttacga

SEQ ID NO: 465360 - DNA, 60 bp, Artificial
  Synthetic oligonucleotide
tgaaatctagatggccactcaagtaattatgtgggcctaatgctctagcccacatcgtct

SEQ ID NO: 465361 - DNA, 55 bp, Artificial
  Synthetic oligonucleotide
tgaaatctgcgatgatgactatgccggtatcagcaccggtggtcgtgtgctggcg

SEQ ID NO: 465362 - DNA, 60 bp, Artificial
  Synthetic oligonucleotide
tgaaatcttcccagagctcaaacagtacagctggcctaagcgaggtagtggggcagaaag

SEQ ID NO: 465363 - DNA, 57 bp, Artificial
  Synthetic oligonucleotide
tgaaatgaattggggaatgggtctcaatatatactaagagtccgttagcttagatct

SEQ ID NO: 465364 - DNA, 60 bp, Artificial
  Synthetic oligonucleotide
tgaaatgacgatatcccacacgtatgaattggagagtctctctggtgttgtcgatgacgc

SEQ ID NO: 465365 - DNA, 55 bp, Artificial
  Synthetic oligonucleotide
tgaaatgcaccttcctggatcggaagtagacagttcgttactgtccatgagtggg

SEQ ID NO: 465366 - DNA, 60 bp, Artificial
  Synthetic oligonucleotide
tgaaatgcctaggaagtgacaaatttgagtcggtcactataactgatcctagaagtaaca

SEQ ID NO: 465367 - DNA, 55 bp, Artificial
  Synthetic oligonucleotide
tgaaatgcgtgataataaggttgaggaggatgtgcacgcgtgtgcgagcgcgatc

SEQ ID NO: 465368 - DNA, 57 bp, Artificial
  Synthetic oligonucleotide
tgaaatggtgtaaaacccaatcgtccagaggcggattgatctccaaatctgggaacg

SEQ ID NO: 465369 - DNA, 60 bp, Artificial
  Synthetic oligonucleotide
tgaaatggtgtcaattgttctgtcgaagaagatagacgttactaaatacttcacagatga

SEQ ID NO: 465370 - DNA, 60 bp, Artificial
  Synthetic oligonucleotide
tgaaatgtgtcggagaaggaggtatcgcgctcacaggcggggtgccagttgtccaggagt

SEQ ID NO: 465371 - DNA, 56 bp, Artificial
  Synthetic oligonucleotide
tgaaattaaaattggactatacctgacatagttggacacgtggtccattcctttta

SEQ ID NO: 465372 - DNA, 55 bp, Artificial
  Synthetic oligonucleotide
tgaaattaagatcactcattttactacctggacatccattccaactttagctgcc

SEQ ID NO: 465373 - DNA, 58 bp, Artificial
  Synthetic oligonucleotide
tgaaattctggtcaggtatcactacaaactactgctgcaagagcataatgctcccaac

SEQ ID NO: 465374 - DNA, 60 bp, Artificial
  Synthetic oligonucleotide
tgaaattgcagaacttttgcaatggtgctttaatgagtacgactgtactcttgctggctt

SEQ ID NO: 465375 - DNA, 60 bp, Artificial
  Synthetic oligonucleotide
tgaaattgctgaatccttaagagctgtaataccacctacgactgctcctgtacctactgg

SEQ ID NO: 465376 - DNA, 59 bp, Artificial
  Synthetic oligonucleotide
tgaaatttcgtagaaatttactagataaagttagccaatcagcgcacgcgtgtgcggtc

SEQ ID NO: 465377 - DNA, 60 bp, Artificial
  Synthetic oligonucleotide
tgaaatttgcaagtctggcttgcacgggttgctatgcttgtagctctggcatctcctgta

SEQ ID NO: 465378 - DNA, 60 bp, Artificial
  Synthetic oligonucleotide
tgaaattttctcagaagagcaatccaaggcccatcaattaaccgttcgtgaaatcatcag

SEQ ID NO: 465379 - DNA, 52 bp, Artificial
  Synthetic oligonucleotide
tgaacaaaacggggccacaaaggcccttaacgaccacgtggtggaactccgc

SEQ ID NO: 465380 - DNA, 55 bp, Artificial
  Synthetic oligonucleotide
tgaacaaaaggtcgatccctgaaatagcaacacggcctaaggtgaacgggcaagg

SEQ ID NO: 465381 - DNA, 59 bp, Artificial
  Synthetic oligonucleotide
tgaacaaagctgcgaagtgatccatgtaagccctcagaaccgtctcggaaagaggaccc

SEQ ID NO: 465382 - DNA, 54 bp, Artificial
  Synthetic oligonucleotide
tgaacaacagatcggagaactattacgtaacggctcactgagttttacttcgtt

SEQ ID NO: 465383 - DNA, 51 bp, Artificial
  Synthetic oligonucleotide
tgaacaaccttaaatgtagcttaccacacagaaatgagagtaacaagtgga

SEQ ID NO: 465384 - DNA, 60 bp, Artificial
  Synthetic oligonucleotide
tgaacaagctcgatatatgaaatggcagtatggttcaaaaaatgagttgggtacaattat

SEQ ID NO: 465385 - DNA, 59 bp, Artificial
  Synthetic oligonucleotide
tgaacaaggacaaaccctctggagcaaaacaaacgatgctggatcagaccgagtaatgg

SEQ ID NO: 465386 - DNA, 60 bp, Artificial
  Synthetic oligonucleotide
tgaacaaggccagacactgtggagcaaaacaaacgatgcagggtccgacagagtaatggt

SEQ ID NO: 465387 - DNA, 57 bp, Artificial
  Synthetic oligonucleotide
tgaacaaggcccctctcgacctaagtggatgcaccatagagggttggattttgggga

SEQ ID NO: 465388 - DNA, 60 bp, Artificial
  Synthetic oligonucleotide
tgaacaagggctgccactcatcggcaaccaaccaggagtggacgaggaggtgcgaaacac

SEQ ID NO: 465389 - DNA, 58 bp, Artificial
  Synthetic oligonucleotide
tgaacaagtaaattcttctagaagtgttgttctttttaagacagatgcaggctttgaa

SEQ ID NO: 465390 - DNA, 55 bp, Artificial
  Synthetic oligonucleotide
tgaacaagtgtgccttgaggttgggcactgcaattatgagatgctgaggaatgct

SEQ ID NO: 465391 - DNA, 52 bp, Artificial
  Synthetic oligonucleotide
tgaacaagttccatttgtaacattcgaaaactatggtaagatgtacctcgac

SEQ ID NO: 465392 - DNA, 52 bp, Artificial
  Synthetic oligonucleotide
tgaacacacaaaggtttgcccggtgtgtaaaaaggagtttacctcaaccgat

SEQ ID NO: 465393 - DNA, 60 bp, Artificial
  Synthetic oligonucleotide
tgaacacattgcaagcatgagaaggaattatttcacatcagaggtgtctcactgcagagc

SEQ ID NO: 465394 - DNA, 52 bp, Artificial
  Synthetic oligonucleotide
tgaacacctattcgatgatgcaggcttccaaagcaggctcgacgccctacca

SEQ ID NO: 465395 - DNA, 55 bp, Artificial
  Synthetic oligonucleotide
tgaacacgacaacgccatcgctctggattcagaagttaagaagtggtcagacgct

SEQ ID NO: 465396 - DNA, 55 bp, Artificial
  Synthetic oligonucleotide
tgaacactagtcgcgtatgagtattcaagctgtccacaatgtgtcgtcaacaggc

SEQ ID NO: 465397 - DNA, 60 bp, Artificial
  Synthetic oligonucleotide
tgaacactcctcatggacataagtctgtcaacttctttattcaggtccctcaacttattg

SEQ ID NO: 465398 - DNA, 60 bp, Artificial
  Synthetic oligonucleotide
tgaacactgccgaaagtgtcactcgaaggagacaacgcaaggattgtgaccgtgagaaac

SEQ ID NO: 465399 - DNA, 54 bp, Artificial
  Synthetic oligonucleotide
tgaacacttgcaaccttagcaaagtccaacccggatagaagagcccttgtgtcg

SEQ ID NO: 465400 - DNA, 57 bp, Artificial
  Synthetic oligonucleotide
tgaacagaacgcaaggaacaacctctggaacaaccaaccaatcacggctgcttttta

SEQ ID NO: 465401 - DNA, 60 bp, Artificial
  Synthetic oligonucleotide
tgaacagagctggcttgattgtaaagaggaaggcgagacatttgaagaggtcagtctgga

SEQ ID NO: 465402 - DNA, 55 bp, Artificial
  Synthetic oligonucleotide
tgaacagatggagactggtggggaacgccaggatgccacagaaatcagggcatct

SEQ ID NO: 465403 - DNA, 60 bp, Artificial
  Synthetic oligonucleotide
tgaacagccagaacatcggcttgaagccatttgtgcatctatgattgaagcatggggtta

SEQ ID NO: 465404 - DNA, 60 bp, Artificial
  Synthetic oligonucleotide
tgaacagcgtcacgatatctcccatactggtaaggtgatgtgtgtctcggatgtcactcg

SEQ ID NO: 465405 - DNA, 59 bp, Artificial
  Synthetic oligonucleotide
tgaacagctggaaagggctggactaaggtacatacacattggagctttacaagtaagaa

SEQ ID NO: 465406 - DNA, 57 bp, Artificial
  Synthetic oligonucleotide
tgaacagcttgggtggttgcagatgtggtaagtaccccaatctaaagaaaccaacag

SEQ ID NO: 465407 - DNA, 60 bp, Artificial
  Synthetic oligonucleotide
tgaacaggcaggggatagaatcggtgaagctagagaatcttggtgtgtatcaaattcttg

SEQ ID NO: 465408 - DNA, 55 bp, Artificial
  Synthetic oligonucleotide
tgaacaggctaatagcctttgcctccaggggcaaccatgtctctcctacacacta

SEQ ID NO: 465409 - DNA, 56 bp, Artificial
  Synthetic oligonucleotide
tgaacagtagtctcccttttcagaacgtgcatcctatcactattggagaatgcccc

SEQ ID NO: 465410 - DNA, 60 bp, Artificial
  Synthetic oligonucleotide
tgaacagttcctatatcacagaaacagatggtccagatctaaccatgacttagacctagc

SEQ ID NO: 465411 - DNA, 60 bp, Artificial
  Synthetic oligonucleotide
tgaacagttgctcaatcagagttgtcttccggatcaaaattctctctatctccattatct

SEQ ID NO: 465412 - DNA, 60 bp, Artificial
  Synthetic oligonucleotide
tgaacatacaggtgatgcatctattataaatcctcaggctgaaagtagctttatagattt

SEQ ID NO: 465413 - DNA, 60 bp, Artificial
  Synthetic oligonucleotide
tgaacatatagtccaactgagaagagttttgacaacagctaccattacacttcttccgga

SEQ ID NO: 465414 - DNA, 60 bp, Artificial
  Synthetic oligonucleotide
tgaacatcagacagtcgagaagtgcacaatgtgcatttgttgtcgcaggaattgacccct

SEQ ID NO: 465415 - DNA, 50 bp, Artificial
  Synthetic oligonucleotide
tgaacatccagtccaggaagttgttagccagatttggagaccagcgggga

SEQ ID NO: 465416 - DNA, 55 bp, Artificial
  Synthetic oligonucleotide
tgaacatccatcgtctgtctcactagacaaaccaactttgtggcatcactggaac

SEQ ID NO: 465417 - DNA, 60 bp, Artificial
  Synthetic oligonucleotide
tgaacatcgttttggagatcaatctcccaactctttacacactccgagataccaagattg

SEQ ID NO: 465418 - DNA, 59 bp, Artificial
  Synthetic oligonucleotide
tgaacatgatcccctttgggatccaaaaatgattgtgcgtagacataggaatcttttac

SEQ ID NO: 465419 - DNA, 55 bp, Artificial
  Synthetic oligonucleotide
tgaacatgctccaatagaattgatttatgcatgcaggtcagcgagagaattcgcg

SEQ ID NO: 465420 - DNA, 60 bp, Artificial
  Synthetic oligonucleotide
tgaacatgctccacctcctgtaggtactatgcgtcatcgttcgactacggcgactgatag

SEQ ID NO: 465421 - DNA, 54 bp, Artificial
  Synthetic oligonucleotide
tgaacatgtcatcgaacatcatcgatttaacggacgacaatgtcaacgtcagcg

SEQ ID NO: 465422 - DNA, 60 bp, Artificial
  Synthetic oligonucleotide
tgaacatgtgaaatgggcaaacctctagagcagcctgacgctacgccggagtgcgacgag

SEQ ID NO: 465423 - DNA, 60 bp, Artificial
  Synthetic oligonucleotide
tgaacatgttgatgcatcactcccagttcagaagatcaagttaaccggagcagagcattt

SEQ ID NO: 465424 - DNA, 60 bp, Artificial
  Synthetic oligonucleotide
tgaacattactaacttcagagaagtccagcccattcaacagactagttgcatctttgatg

SEQ ID NO: 465425 - DNA, 52 bp, Artificial
  Synthetic oligonucleotide
tgaacattatggagtatagtttacaacaagcagattacattgagggaaatac

SEQ ID NO: 465426 - DNA, 55 bp, Artificial
  Synthetic oligonucleotide
tgaacattattcgaatgttcatctcgtcgtatgggagacccatcaccccatagtc

SEQ ID NO: 465427 - DNA, 58 bp, Artificial
  Synthetic oligonucleotide
tgaacattggggaccagtggagccatgggatgctcttcccgattccgcccaaactcct

SEQ ID NO: 465428 - DNA, 60 bp, Artificial
  Synthetic oligonucleotide
tgaacatttcgtactcatagtctatcaacctattccaaattacaccatctgaacataatc

SEQ ID NO: 465429 - DNA, 55 bp, Artificial
  Synthetic oligonucleotide
tgaaccaaatattagagttcgtgtgccatttcccatagacaagaatatatcggca

SEQ ID NO: 465430 - DNA, 55 bp, Artificial
  Synthetic oligonucleotide
tgaaccaacaagacccttagctgaaaacgtctttaagcaattatccagtggtcct

SEQ ID NO: 465431 - DNA, 58 bp, Artificial
  Synthetic oligonucleotide
tgaaccaaccgaaagctgtgacaatccctcctacatcggccaaatcgactacgataga

SEQ ID NO: 465432 - DNA, 56 bp, Artificial
  Synthetic oligonucleotide
tgaaccaaggtgctccaaccgtccacagcgtgtcaaccctccacctcgacgaagtt

SEQ ID NO: 465433 - DNA, 57 bp, Artificial
  Synthetic oligonucleotide
tgaaccacaccttaaggtaacactgagactggtactcggtttctagtgacaggctaa

SEQ ID NO: 465434 - DNA, 52 bp, Artificial
  Synthetic oligonucleotide
tgaaccacatggagggtccaaaacctgaaggaccgaaaggtccgttttccag

SEQ ID NO: 465435 - DNA, 59 bp, Artificial
  Synthetic oligonucleotide
tgaaccacgcatcgtttgaatacactttagggcttagatctaagtgaccacataaatag

SEQ ID NO: 465436 - DNA, 53 bp, Artificial
  Synthetic oligonucleotide
tgaaccagggcaaggaaaatctttcttaacacacacactatccaggcagttgc

SEQ ID NO: 465437 - DNA, 53 bp, Artificial
  Synthetic oligonucleotide
tgaaccatcaacccaggaatactcaacaaccaagcacacttatgttgatacgg

SEQ ID NO: 465438 - DNA, 57 bp, Artificial
  Synthetic oligonucleotide
tgaaccatcaggcaagaggggttaacattgaagcatccataacctattcctccactc

SEQ ID NO: 465439 - DNA, 50 bp, Artificial
  Synthetic oligonucleotide
tgaaccatcctcaggaggggatctagaagttacaacacatagctttaatt

SEQ ID NO: 465440 - DNA, 60 bp, Artificial
  Synthetic oligonucleotide
tgaaccatctttctcaataatacgaacacgtacaatgaacttatacggattaccagcagc

SEQ ID NO: 465441 - DNA, 57 bp, Artificial
  Synthetic oligonucleotide
tgaaccatgtggcaataagccaatgatgtaacttaatagaccaggttgagcatcttc

SEQ ID NO: 465442 - DNA, 59 bp, Artificial
  Synthetic oligonucleotide
tgaaccattcatacagtttacggatagagttatcttcacaaagaacaagtcttatcctg

SEQ ID NO: 465443 - DNA, 56 bp, Artificial
  Synthetic oligonucleotide
tgaaccattcgacggcgacgcttagcgaggtcgcgcgccacgtcattgcgccgcaa

SEQ ID NO: 465444 - DNA, 60 bp, Artificial
  Synthetic oligonucleotide
tgaacccaaatataatcaatagacttgcaggacagatcaatctaagcccacaaagtcctt

SEQ ID NO: 465445 - DNA, 59 bp, Artificial
  Synthetic oligonucleotide
tgaacccaactgactcccgtactgccatttcaatggccctgccatacgtgtttatgccg

SEQ ID NO: 465446 - DNA, 60 bp, Artificial
  Synthetic oligonucleotide
tgaacccactattatcgccacgacattggagcatcgatttaaagagataccggacgagca

SEQ ID NO: 465447 - DNA, 54 bp, Artificial
  Synthetic oligonucleotide
tgaacccactttcttgaaccatgaacattggggaagtgagtcttcagggtcgag

SEQ ID NO: 465448 - DNA, 59 bp, Artificial
  Synthetic oligonucleotide
tgaacccatgttgtggtacgaggagttgacgatgagtctactagggtcgaggtttgtgc

SEQ ID NO: 465449 - DNA, 58 bp, Artificial
  Synthetic oligonucleotide
tgaacccccaggaaacttttgaagccttcagacaatatgtttgcttgttcatcaattc

SEQ ID NO: 465450 - DNA, 54 bp, Artificial
  Synthetic oligonucleotide
tgaacccccaggtcaaaagggtacgtgccctcctatcaaacttatacattcgcc

SEQ ID NO: 465451 - DNA, 53 bp, Artificial
  Synthetic oligonucleotide
tgaacccccgttggattccggaggcaattatcgcaatatttcaacaaatgcaa

SEQ ID NO: 465452 - DNA, 59 bp, Artificial
  Synthetic oligonucleotide
tgaacccggaaaaagggagtgtgattcaaagcgcaccatatatttcaggagagtgattg

SEQ ID NO: 465453 - DNA, 55 bp, Artificial
  Synthetic oligonucleotide
tgaacccgtctgtcgccgccacattagggtttggagcgtacatgtccaaggcaca

SEQ ID NO: 465454 - DNA, 53 bp, Artificial
  Synthetic oligonucleotide
tgaaccctacgttccgaagtacgtctcggaaggtgccgaatcgcacatctgaa

SEQ ID NO: 465455 - DNA, 55 bp, Artificial
  Synthetic oligonucleotide
tgaaccctgccgacgacccgtctcggggtcgcttaggactctcccgtcctctctg

SEQ ID NO: 465456 - DNA, 51 bp, Artificial
  Synthetic oligonucleotide
tgaacccttactcccctcaagttttagagaggttgacaaagttccagcaca

SEQ ID NO: 465457 - DNA, 54 bp, Artificial
  Synthetic oligonucleotide
tgaaccgaacttgacaaaagtgcggtaggggtaaattctccgcattcggtgcgg

SEQ ID NO: 465458 - DNA, 52 bp, Artificial
  Synthetic oligonucleotide
tgaaccgactgatcgcgttcgcttcgcggggcaaccacgtctcccccacgca

SEQ ID NO: 465459 - DNA, 55 bp, Artificial
  Synthetic oligonucleotide
tgaaccggacttcgatgtggtatattctggtcctggtgaacaacgggtcctccac

SEQ ID NO: 465460 - DNA, 51 bp, Artificial
  Synthetic oligonucleotide
tgaaccgtctcattgccttcgcttcgcgtggcaatcacgtgtctcctacgc

SEQ ID NO: 465461 - DNA, 59 bp, Artificial
  Synthetic oligonucleotide
tgaaccgtggccggtgagtacagcgaagtcgcccaattgactcgaatcgcagacgcttt

SEQ ID NO: 465462 - DNA, 59 bp, Artificial
  Synthetic oligonucleotide
tgaacctactatactaagtgttggtgatgttgtatcatatggtaacatactacttagtg

SEQ ID NO: 465463 - DNA, 50 bp, Artificial
  Synthetic oligonucleotide
tgaacctactgatttaaagcagttcaagcaggatgctaagtactcacatg

SEQ ID NO: 465464 - DNA, 55 bp, Artificial
  Synthetic oligonucleotide
tgaacctagcagactacaaaaggactttctatcctgtagctgagtggacatactc

SEQ ID NO: 465465 - DNA, 60 bp, Artificial
  Synthetic oligonucleotide
tgaacctatcagtaatgcctcaagtgatgggaagagcttctcgctctgcgagtcgcattc

SEQ ID NO: 465466 - DNA, 60 bp, Artificial
  Synthetic oligonucleotide
tgaacctatgtatgtaccaacaatggatgattatagatcagctgagctattcacaaggat

SEQ ID NO: 465467 - DNA, 55 bp, Artificial
  Synthetic oligonucleotide
tgaacctattagtagtactcctattcctggtcttagacgtatagctgccccacgt

SEQ ID NO: 465468 - DNA, 55 bp, Artificial
  Synthetic oligonucleotide
tgaacctgccatagagaccttgaggaagattaagtgtcatgggcactctcccctc

SEQ ID NO: 465469 - DNA, 60 bp, Artificial
  Synthetic oligonucleotide
tgaacctggatgtcgctggaacttatctcgtcaccttggtagtgacttcttctggcagtg

SEQ ID NO: 465470 - DNA, 55 bp, Artificial
  Synthetic oligonucleotide
tgaacctggcgtctatcgccgctcccgtggacgcctcttcccatacttcctcgtc

SEQ ID NO: 465471 - DNA, 53 bp, Artificial
  Synthetic oligonucleotide
tgaacctgttccgccattatggtgtaaaacaatcatgtcaatcggttttcttg

SEQ ID NO: 465472 - DNA, 51 bp, Artificial
  Synthetic oligonucleotide
tgaaccttttatggtccagacaacactgaggatgcgtggcttgacagtttt

SEQ ID NO: 465473 - DNA, 55 bp, Artificial
  Synthetic oligonucleotide
tgaacgaagggcgctcgtgacagcggcgaggggtggctgtacgtcagcacgaggt

SEQ ID NO: 465474 - DNA, 60 bp, Artificial
  Synthetic oligonucleotide
tgaacgagaggttcattgtgaagaagaagtggagaactcatttgatgtctactggtactg

SEQ ID NO: 465475 - DNA, 55 bp, Artificial
  Synthetic oligonucleotide
tgaacgagatcttcgtccgagctgaggccaacctcgaacgggcacgagcctccac

SEQ ID NO: 465476 - DNA, 60 bp, Artificial
  Synthetic oligonucleotide
tgaacgagatgcgtttcgaagcaagtgacatcccgctttattataggtgggacaagttca

SEQ ID NO: 465477 - DNA, 52 bp, Artificial
  Synthetic oligonucleotide
tgaacgaggctgtcaacgctgttgcagctagtgcattagcaccctcagcatc

SEQ ID NO: 465478 - DNA, 55 bp, Artificial
  Synthetic oligonucleotide
tgaacgatcagctttatcaaatgatactttcgtgttttgctatgctcaaggtcct

SEQ ID NO: 465479 - DNA, 60 bp, Artificial
  Synthetic oligonucleotide
tgaacgcaaaaaatcctatcagagctcgtatagctaatgatagtattatgacttttaaca

SEQ ID NO: 465480 - DNA, 51 bp, Artificial
  Synthetic oligonucleotide
tgaacgcacgcaaacgtatccactggagctgtgtcgctcgttcgctgaatc

SEQ ID NO: 465481 - DNA, 60 bp, Artificial
  Synthetic oligonucleotide
tgaacgcattggagtgcacgttcaatgccatgagagcaaaagcatacctttctacacaaa

SEQ ID NO: 465482 - DNA, 58 bp, Artificial
  Synthetic oligonucleotide
tgaacgccacaatggcacgggccaaagaagtccaggacgccgagatctacaaacttct

SEQ ID NO: 465483 - DNA, 56 bp, Artificial
  Synthetic oligonucleotide
tgaacgccccctggaatctgccaacagtcttacataagaggactcttggactttca

SEQ ID NO: 465484 - DNA, 56 bp, Artificial
  Synthetic oligonucleotide
tgaacgcccctcgaagcctgccaacagtcttacataagcggactcttggactctca

SEQ ID NO: 465485 - DNA, 60 bp, Artificial
  Synthetic oligonucleotide
tgaacgccttgctgcgttagagtcattgttcggccgcccgccaccttcatgatggcagaa

SEQ ID NO: 465486 - DNA, 55 bp, Artificial
  Synthetic oligonucleotide
tgaacgcgggacctgcgatagtgccaacccacgtcttttcccactcctaacccga

SEQ ID NO: 465487 - DNA, 56 bp, Artificial
  Synthetic oligonucleotide
tgaacgctccccagagcttgccaacggtcttgcgtaaacggactcttggactttcc

SEQ ID NO: 465488 - DNA, 58 bp, Artificial
  Synthetic oligonucleotide
tgaacggaaccttcggggtggcgtcagcctccgtgttggtcatcgagagcgcacccag

SEQ ID NO: 465489 - DNA, 54 bp, Artificial
  Synthetic oligonucleotide
tgaacggcgaaggacaactcaccgtccccgccacggcccctttagtctcaggga

SEQ ID NO: 465490 - DNA, 59 bp, Artificial
  Synthetic oligonucleotide
tgaacgggactgggtacacaaaaacatgcggagcaccaccttgccgcattaggagagac

SEQ ID NO: 465491 - DNA, 60 bp, Artificial
  Synthetic oligonucleotide
tgaacggggagagggtctcttttcccgtgtgcacgtatgtgccagctacactgtgtgacc

SEQ ID NO: 465492 - DNA, 53 bp, Artificial
  Synthetic oligonucleotide
tgaacggtgtgattcgatccatgtcatgcggaggcggaactccatcactaaga

SEQ ID NO: 465493 - DNA, 58 bp, Artificial
  Synthetic oligonucleotide
tgaacggttcatgttttaccataatgaccgatggcccgagtaatggggccgcatcgta

SEQ ID NO: 465494 - DNA, 60 bp, Artificial
  Synthetic oligonucleotide
tgaacggtttatgagtctatcaagcgctatgcctcaggcgagcggtggatttgatcgtat

SEQ ID NO: 465495 - DNA, 60 bp, Artificial
  Synthetic oligonucleotide
tgaacgtaatgcaggtatgccatataatccatttaaaacgactttagataacatgacctc

SEQ ID NO: 465496 - DNA, 60 bp, Artificial
  Synthetic oligonucleotide
tgaacgtaccagatgattggtcgttcgcgaactggaagttagtgagagtcgctatatcaa

SEQ ID NO: 465497 - DNA, 59 bp, Artificial
  Synthetic oligonucleotide
tgaacgtgaattgactagggatacgcacaaggccattgtgtttgtaaccaagtctgtat

SEQ ID NO: 465498 - DNA, 59 bp, Artificial
  Synthetic oligonucleotide
tgaacgtgagaccgttgctcgtatggaacagttagacaaactgaaccccgtgtggatca

SEQ ID NO: 465499 - DNA, 60 bp, Artificial
  Synthetic oligonucleotide
tgaacgtgatttgtatcccagtttggaagctcccattatcgtgcatggctatttcggtca

SEQ ID NO: 465500 - DNA, 55 bp, Artificial
  Synthetic oligonucleotide
tgaacgtgccagctcgcccacgtgtgccgcagatcatgaaagcgcagccctgaca

SEQ ID NO: 465501 - DNA, 55 bp, Artificial
  Synthetic oligonucleotide
tgaacgtggatttggcagtcgtgtttggcatggataccacagtcataggatggcc

SEQ ID NO: 465502 - DNA, 56 bp, Artificial
  Synthetic oligonucleotide
tgaacgtggcggagttacccgagtctgaggcctctcgtttagagttatcggcggaa

SEQ ID NO: 465503 - DNA, 55 bp, Artificial
  Synthetic oligonucleotide
tgaacgtgttgccgatctcgtttcaggcgacagtccaggtacagttctcctcggc

SEQ ID NO: 465504 - DNA, 58 bp, Artificial
  Synthetic oligonucleotide
tgaacgttgacttaaaatctcaataccgcatttcgtttcatggcatccaagaggaggg

SEQ ID NO: 465505 - DNA, 55 bp, Artificial
  Synthetic oligonucleotide
tgaacgtttgttcagattgtgaatacgcctcttgtccgtgtcatctacgaagctc

SEQ ID NO: 465506 - DNA, 60 bp, Artificial
  Synthetic oligonucleotide
tgaactaaggcagctagctcaatccctaattgacaccaaggtgaaggagatctccaacca

SEQ ID NO: 465507 - DNA, 60 bp, Artificial
  Synthetic oligonucleotide
tgaactacataccaatgggagctggctacacactttgtccgccgatggaggcttttggct

SEQ ID NO: 465508 - DNA, 51 bp, Artificial
  Synthetic oligonucleotide
tgaactactgcaaggctaaacccataggaggctcttcgagccccttttaag

SEQ ID NO: 465509 - DNA, 60 bp, Artificial
  Synthetic oligonucleotide
tgaactactttgggcatacgtttgcggagattgcatatacactgtgccaagcttcagcta

SEQ ID NO: 465510 - DNA, 55 bp, Artificial
  Synthetic oligonucleotide
tgaactagatctcctctaaacaaggccccaagctgctcacgagctctaaacttcg

SEQ ID NO: 465511 - DNA, 60 bp, Artificial
  Synthetic oligonucleotide
tgaactagatcttgcgcaactttccttggatgatactagttctcttcgtggatctgtgtt

SEQ ID NO: 465512 - DNA, 60 bp, Artificial
  Synthetic oligonucleotide
tgaactatatacagttcaagtccaagcagagaaccgaaccggtctgtgttctaattcatg

SEQ ID NO: 465513 - DNA, 60 bp, Artificial
  Synthetic oligonucleotide
tgaactattactggacactagtagagcctggagacacaataacattcgaggcaactggaa

SEQ ID NO: 465514 - DNA, 60 bp, Artificial
  Synthetic oligonucleotide
tgaactcaaacgtcaatttctttgtatcaatgccagaagacttcaacgcatacctttgcg

SEQ ID NO: 465515 - DNA, 58 bp, Artificial
  Synthetic oligonucleotide
tgaactcaaagactataatatagtaatggagtatgcctttaaatttcagtggggaggc

SEQ ID NO: 465516 - DNA, 60 bp, Artificial
  Synthetic oligonucleotide
tgaactcacaaagtgaccacccacacccaactcaggctcaaagtcagcatagacagaaaa

SEQ ID NO: 465517 - DNA, 60 bp, Artificial
  Synthetic oligonucleotide
tgaactcacaacaccgcgtggccattttagctggattgtgcggacgaacaccgctcacac

SEQ ID NO: 465518 - DNA, 58 bp, Artificial
  Synthetic oligonucleotide
tgaactcactttgttctgacgaaaagagagatactagaaccgcaagactattactagg

SEQ ID NO: 465519 - DNA, 58 bp, Artificial
  Synthetic oligonucleotide
tgaactcactttgttctgacgagaggaaagatgctagaaccgcaagactgctgctagg

SEQ ID NO: 465520 - DNA, 60 bp, Artificial
  Synthetic oligonucleotide
tgaactcaggcagctagcacaatctctgatcgatactaaggtgaaggagatctccaacca

SEQ ID NO: 465521 - DNA, 60 bp, Artificial
  Synthetic oligonucleotide
tgaactcattgatcaatgatcagctgataatgaaaaatcatcttagggatttgatgggga

SEQ ID NO: 465522 - DNA, 60 bp, Artificial
  Synthetic oligonucleotide
tgaactcattgcgatttagatttagactctctgtagaagaaccatcgttttccattacga

SEQ ID NO: 465523 - DNA, 60 bp, Artificial
  Synthetic oligonucleotide
tgaactcattggcaattgactgcatggctaaacacaacaattggggaattgtgatcctgc

SEQ ID NO: 465524 - DNA, 60 bp, Artificial
  Synthetic oligonucleotide
tgaactccgagcaagtacctacactgcagttgcagaacaacgaaggcttagaaaacttga

SEQ ID NO: 465525 - DNA, 60 bp, Artificial
  Synthetic oligonucleotide
tgaactcgatgaagattgggaagattttaaatataagccagagccaacagaatcaacacc

SEQ ID NO: 465526 - DNA, 55 bp, Artificial
  Synthetic oligonucleotide
tgaactctaaatacccttaagaaacgaccagtctgagggcgtaagctcgtccaaa

SEQ ID NO: 465527 - DNA, 58 bp, Artificial
  Synthetic oligonucleotide
tgaactctttaaagtgttttagataatgcggatcaacgtcatcgatgacgttaaacca

SEQ ID NO: 465528 - DNA, 60 bp, Artificial
  Synthetic oligonucleotide
tgaactgattactggaataattgaaaccttcagttcagatgacatcgaggatgagcacta

SEQ ID NO: 465529 - DNA, 55 bp, Artificial
  Synthetic oligonucleotide
tgaactgcattagggtacgtaggtcaccacatccaacgtagtgcacctcttcggc

SEQ ID NO: 465530 - DNA, 59 bp, Artificial
  Synthetic oligonucleotide
tgaactgcctaaagattcagcttttttggactacactgccgataactgcgggacctgga

SEQ ID NO: 465531 - DNA, 59 bp, Artificial
  Synthetic oligonucleotide
tgaactggacttgtaaggttattatgtcgttgttggatagaaatggtctctcgtggtgc

SEQ ID NO: 465532 - DNA, 51 bp, Artificial
  Synthetic oligonucleotide
tgaactggagagtatatcaagaaatgccctttcaatatcccgagctatcga

SEQ ID NO: 465533 - DNA, 59 bp, Artificial
  Synthetic oligonucleotide
tgaactggatcctgatcgtgagtatgtccataatcatcgggaatggacggttgaagtgg

SEQ ID NO: 465534 - DNA, 56 bp, Artificial
  Synthetic oligonucleotide
tgaactggctttccgtactttgtgttggattgccagtccctttgggcccccatgaa

SEQ ID NO: 465535 - DNA, 56 bp, Artificial
  Synthetic oligonucleotide
tgaactggggaaactgtccaactttcttctcgatatgtacaaggtggagtcgggaa

SEQ ID NO: 465536 - DNA, 55 bp, Artificial
  Synthetic oligonucleotide
tgaactggttgtacaaatcaggtaacacatacccaatactaaacgtcaccatgca

SEQ ID NO: 465537 - DNA, 55 bp, Artificial
  Synthetic oligonucleotide
tgaactgtacaagttcgagctacgaaaatctagttgtctcctacaggaaaagggc

SEQ ID NO: 465538 - DNA, 60 bp, Artificial
  Synthetic oligonucleotide
tgaactgtttggagagccaatctccaaacaatatacgcgaaaagaaatctgtgaaacaca

SEQ ID NO: 465539 - DNA, 57 bp, Artificial
  Synthetic oligonucleotide
tgaacttacacgataattttgagtctttgtgggatacaataacgacttcaaattata

SEQ ID NO: 465540 - DNA, 60 bp, Artificial
  Synthetic oligonucleotide
tgaacttacagtacatgttaaaagtgatgacccagatgtagttgcagctagctcaagtct

SEQ ID NO: 465541 - DNA, 55 bp, Artificial
  Synthetic oligonucleotide
tgaacttagttgaggagctaccacttggagaattttcacccggacgtatttcaag

SEQ ID NO: 465542 - DNA, 54 bp, Artificial
  Synthetic oligonucleotide
tgaacttcaatagtgcccttattcaagtgtacaaggatggttgcaggttacctc

SEQ ID NO: 465543 - DNA, 60 bp, Artificial
  Synthetic oligonucleotide
tgaacttcgacaccccttataccagtcgtgctgctgtccccactgtcctcgtcacaaaca

SEQ ID NO: 465544 - DNA, 60 bp, Artificial
  Synthetic oligonucleotide
tgaacttcgacagcccgtatcagagccgtgtgcctgccctcactgcccgaggcacacgaa

SEQ ID NO: 465545 - DNA, 60 bp, Artificial
  Synthetic oligonucleotide
tgaacttcgataatgagttgacgacctggcgtaacaccgtggtcgacttagtcttgcgca

SEQ ID NO: 465546 - DNA, 60 bp, Artificial
  Synthetic oligonucleotide
tgaacttgatttagctccctgaatgttcggatggaaatgtgttgacctggttgaggatac

SEQ ID NO: 465547 - DNA, 57 bp, Artificial
  Synthetic oligonucleotide
tgaacttggagtaccgtccgctgtctggttcgacaaggtacgtggcacgacctggag

SEQ ID NO: 465548 - DNA, 60 bp, Artificial
  Synthetic oligonucleotide
tgaacttgggcaatgacgagtacgatgagtggcacgctgcgcgcagagagtttgtcaacg

SEQ ID NO: 465549 - DNA, 55 bp, Artificial
  Synthetic oligonucleotide
tgaactttgtagatacttccggctcattaattcgtaacattgaccgtgaatctgg

SEQ ID NO: 465550 - DNA, 52 bp, Artificial
  Synthetic oligonucleotide
tgaactttgtccaagccccaaatggagaattcacagtgtctccccgcaattc

SEQ ID NO: 465551 - DNA, 55 bp, Artificial
  Synthetic oligonucleotide
tgaacttttcggacttagttctttcgttgggtgccacagtttctgtcggcactcc

SEQ ID NO: 465552 - DNA, 60 bp, Artificial
  Synthetic oligonucleotide
tgaagaaaactatcactccagttgtttacactgggaccattcgagagaggcaaatgaaga

SEQ ID NO: 465553 - DNA, 60 bp, Artificial
  Synthetic oligonucleotide
tgaagaaacatgtcaatacacaggagcattacgggaacacctcgagcaagtgtggaacaa

SEQ ID NO: 465554 - DNA, 60 bp, Artificial
  Synthetic oligonucleotide
tgaagaaagacataagacatctaagttcagcagctgtctccttctagtgtttaataattt

SEQ ID NO: 465555 - DNA, 51 bp, Artificial
  Synthetic oligonucleotide
tgaagaaagatggttttgaagttctatggacacttggttttccagaccata

SEQ ID NO: 465556 - DNA, 57 bp, Artificial
  Synthetic oligonucleotide
tgaagaaaggagagtcagttattggaagagaagtccctctttatttatactgtagga

SEQ ID NO: 465557 - DNA, 60 bp, Artificial
  Synthetic oligonucleotide
tgaagaaatgatcaaaaaggaagcagtatatgtaggatgggtgccagctcacaaaggact

SEQ ID NO: 465558 - DNA, 55 bp, Artificial
  Synthetic oligonucleotide
tgaagaacaggacaaaagatttgtctgcaaacactccatggtagatagaggatgg

SEQ ID NO: 465559 - DNA, 60 bp, Artificial
  Synthetic oligonucleotide
tgaagaacgatcttcgagatcgtttccaagtgctgcacaggtttcatgcgaaggttacag

SEQ ID NO: 465560 - DNA, 57 bp, Artificial
  Synthetic oligonucleotide
tgaagaacggggccaatcctgatattgaagtcgttttgtaccatctaaaactgactc

SEQ ID NO: 465561 - DNA, 55 bp, Artificial
  Synthetic oligonucleotide
tgaagaagaagaggccaagatccggcaaaggatttttaggccaacaaggaaacaa

SEQ ID NO: 465562 - DNA, 55 bp, Artificial
  Synthetic oligonucleotide
tgaagaagcctcttcgaaccagtctcgaaactttcacattccaaccacacatacc

SEQ ID NO: 465563 - DNA, 60 bp, Artificial
  Synthetic oligonucleotide
tgaagaatactggagtggatacataggacaaacggcagtgaaatgtgatgatcttgggca

SEQ ID NO: 465564 - DNA, 54 bp, Artificial
  Synthetic oligonucleotide
tgaagaatagcgtgtggagcgatccttggtgttaattcaccttgaggagcacgt

SEQ ID NO: 465565 - DNA, 58 bp, Artificial
  Synthetic oligonucleotide
tgaagaatcccacccagggatatttgaaaactcgtgtcttgagacgatggaggttgtc

SEQ ID NO: 465566 - DNA, 50 bp, Artificial
  Synthetic oligonucleotide
tgaagaatttcagtgggaggctatgtttgtcaagtctcgggcgggcagcc

SEQ ID NO: 465567 - DNA, 60 bp, Artificial
  Synthetic oligonucleotide
tgaagacaattaccaatcttatagagatgctgatggagccaataacaatcctcttggagt

SEQ ID NO: 465568 - DNA, 57 bp, Artificial
  Synthetic oligonucleotide
tgaagacaggcgtgacgttcgaattccttttatgtgtcgtgacatcccagaaaaact

SEQ ID NO: 465569 - DNA, 60 bp, Artificial
  Synthetic oligonucleotide
tgaagacagttcgtttaccgcgcaatctatcattgctaccacatcgttggcttataatta

SEQ ID NO: 465570 - DNA, 59 bp, Artificial
  Synthetic oligonucleotide
tgaagacatcaacggcctccacaactgccaatttgccgactccgccaccccttacacca

SEQ ID NO: 465571 - DNA, 55 bp, Artificial
  Synthetic oligonucleotide
tgaagacatgcgtcctctagggagatatgagatcccaaacaactgctgacctgtt

SEQ ID NO: 465572 - DNA, 60 bp, Artificial
  Synthetic oligonucleotide
tgaagacatttttcggatggaaagagccccacattgtcaagccgcatgagaaaggcataa

SEQ ID NO: 465573 - DNA, 55 bp, Artificial
  Synthetic oligonucleotide
tgaagaccacccctctacatgaagcaaccggctgatggagcaacagcattaatgg

SEQ ID NO: 465574 - DNA, 60 bp, Artificial
  Synthetic oligonucleotide
tgaagaccctagacttttacgaatgctccattgtggctgaggaagaacatcacactactg

SEQ ID NO: 465575 - DNA, 60 bp, Artificial
  Synthetic oligonucleotide
tgaagaccgatttgaacagtggcaactgcatagtacagtgtcaaactgagaaaggtggtt

SEQ ID NO: 465576 - DNA, 57 bp, Artificial
  Synthetic oligonucleotide
tgaagacctttggactaaggtccaggtgtccacacagataattgtgtgggcctaaag

SEQ ID NO: 465577 - DNA, 55 bp, Artificial
  Synthetic oligonucleotide
tgaagacgaaaatcgctagtaagcctatggcgtcctaacgtgttgtttttaatac

SEQ ID NO: 465578 - DNA, 60 bp, Artificial
  Synthetic oligonucleotide
tgaagacgcgtgatgctttttactcgacaggcggaaagacagccgacatagcttttgcgt

SEQ ID NO: 465579 - DNA, 60 bp, Artificial
  Synthetic oligonucleotide
tgaagactcccaaaagtgcaacagtactaatacaaagtactatgagtgcatatggaataa

SEQ ID NO: 465580 - DNA, 60 bp, Artificial
  Synthetic oligonucleotide
tgaagacttacttgagatctagagtgagataagcacactcgaaattctccgttaggaaag

SEQ ID NO: 465581 - DNA, 60 bp, Artificial
  Synthetic oligonucleotide
tgaagagaaatagacaactcatgaacacatttacctctgactggagaggttgggactact

SEQ ID NO: 465582 - DNA, 60 bp, Artificial
  Synthetic oligonucleotide
tgaagagatctttctacgtctatgcaaatggaggtcgtggcttctgtaaggctcacaatt

SEQ ID NO: 465583 - DNA, 55 bp, Artificial
  Synthetic oligonucleotide
tgaagagattgacagcacgtgcgtgttctttgtcaatggtgatgatttgctgatt

SEQ ID NO: 465584 - DNA, 51 bp, Artificial
  Synthetic oligonucleotide
tgaagagctgcataattgcactagggccgcatagagtacaagtggtatacg

SEQ ID NO: 465585 - DNA, 59 bp, Artificial
  Synthetic oligonucleotide
tgaagagcttgtacatcccggtactctccccaaccccactcagtggacacagcttacgc

SEQ ID NO: 465586 - DNA, 54 bp, Artificial
  Synthetic oligonucleotide
tgaagaggacagccacccctagagaagtggtaattgtctacttttgcttgctca

SEQ ID NO: 465587 - DNA, 56 bp, Artificial
  Synthetic oligonucleotide
tgaagaggcctcaacttgttcaggaacgaatactcatagccttggagaaaggaaat

SEQ ID NO: 465588 - DNA, 60 bp, Artificial
  Synthetic oligonucleotide
tgaagaggcgatccctatattcgcaagaactcggaatgcatcattatagcttacccgtgt

SEQ ID NO: 465589 - DNA, 60 bp, Artificial
  Synthetic oligonucleotide
tgaagaggcgggcaattgcaacacccggaatgcaaatcagaggattcgtgtactttgttg

SEQ ID NO: 465590 - DNA, 55 bp, Artificial
  Synthetic oligonucleotide
tgaagaggtgcctctgatcggagcgggcatggcaacggctgttgcgacgggaaga

SEQ ID NO: 465591 - DNA, 60 bp, Artificial
  Synthetic oligonucleotide
tgaagaggtggccgttgagagcaagtcaatttacaagggacttcgtgattataatggcat

SEQ ID NO: 465592 - DNA, 60 bp, Artificial
  Synthetic oligonucleotide
tgaagagtcagcttgtcactaaacatgtagtcaaaggggaatgtatgttattcaagcagt

SEQ ID NO: 465593 - DNA, 60 bp, Artificial
  Synthetic oligonucleotide
tgaagagtctcaaactggcagtcggcctgaggaatgtgcctgctgcatcagatagagggc

SEQ ID NO: 465594 - DNA, 60 bp, Artificial
  Synthetic oligonucleotide
tgaagagtgcgggtatagtgatagggtgaggtccatcactctgggcaactccaccattac

SEQ ID NO: 465595 - DNA, 60 bp, Artificial
  Synthetic oligonucleotide
tgaagagtggaagtctgattcataatagtcataaggcaaggcagtaagcattctcagaac

SEQ ID NO: 465596 - DNA, 58 bp, Artificial
  Synthetic oligonucleotide
tgaagataacattcttgatggtccaatttttaagcgacgcattttccgccttatctag

SEQ ID NO: 465597 - DNA, 53 bp, Artificial
  Synthetic oligonucleotide
tgaagatacaagtagcgattgaggggctgggagtccccaccgaccaaatagcg

SEQ ID NO: 465598 - DNA, 60 bp, Artificial
  Synthetic oligonucleotide
tgaagatacaagtatattatagcctaaacaatgtacatgatgttttatcacttaagcttg

SEQ ID NO: 465599 - DNA, 55 bp, Artificial
  Synthetic oligonucleotide
tgaagatagaatgtccacatactgtgggtttaggtcagggttacgtgacaggttc

SEQ ID NO: 465600 - DNA, 59 bp, Artificial
  Synthetic oligonucleotide
tgaagatcagggaaccaacctgtcaaactcatctgtatataacagagcctaattttggt

SEQ ID NO: 465601 - DNA, 60 bp, Artificial
  Synthetic oligonucleotide
tgaagatcattcagaatggtcgataccaacccaactggaaccaatctatccgcgcttcga

SEQ ID NO: 465602 - DNA, 58 bp, Artificial
  Synthetic oligonucleotide
tgaagatccggttcaacaccttctaggatggcgtactactatccctggagaaggaatc

SEQ ID NO: 465603 - DNA, 59 bp, Artificial
  Synthetic oligonucleotide
tgaagatcctgtgttgcgtatgcgtgttgcacgtggacgtcatatgtggcatatgtctg

SEQ ID NO: 465604 - DNA, 55 bp, Artificial
  Synthetic oligonucleotide
tgaagatctagggaatgacacgtataacatcgtagccatgatagaaccccttgtt

SEQ ID NO: 465605 - DNA, 59 bp, Artificial
  Synthetic oligonucleotide
tgaagatctcgtttccaaatcaccgagtgacaggttggtttgttatatgaaacatggcg

SEQ ID NO: 465606 - DNA, 54 bp, Artificial
  Synthetic oligonucleotide
tgaagatcttcatattctccatgatgcgaacgtcgactatgaacctgactccct

SEQ ID NO: 465607 - DNA, 53 bp, Artificial
  Synthetic oligonucleotide
tgaagatcttcatattctccatgatgcgaactcactcaagtcgaccggctcgg

SEQ ID NO: 465608 - DNA, 54 bp, Artificial
  Synthetic oligonucleotide
tgaagatgacgtcaggcatcactttacccctagtgagcggcaattgtgtctgtc

SEQ ID NO: 465609 - DNA, 60 bp, Artificial
  Synthetic oligonucleotide
tgaagatgactatccagattgcaacttggctctatctgctaatcaaccagaaactactat

SEQ ID NO: 465610 - DNA, 58 bp, Artificial
  Synthetic oligonucleotide
tgaagatggccagggctttgaaggaagtctccctctagatctaattagttgtttcgaa

SEQ ID NO: 465611 - DNA, 51 bp, Artificial
  Synthetic oligonucleotide
tgaagatgttcacttcgcgatgttgatgtgtcccagcggcgaggatgtcca

SEQ ID NO: 465612 - DNA, 58 bp, Artificial
  Synthetic oligonucleotide
tgaagatgttttcttcatccttgtatggcatggcggtgagaaaggttctccgccttag

SEQ ID NO: 465613 - DNA, 60 bp, Artificial
  Synthetic oligonucleotide
tgaagattcaaatgctcgcgcctttttagctcataacagtcaggcaaaatttgttagaga

SEQ ID NO: 465614 - DNA, 60 bp, Artificial
  Synthetic oligonucleotide
tgaagattcttttactggatggggatatcgcttatatgaagaaagtgctgatggaggttt

SEQ ID NO: 465615 - DNA, 55 bp, Artificial
  Synthetic oligonucleotide
tgaagattgaacgtgttgccactgacgtcagcatggatggttatggccccaagac

SEQ ID NO: 465616 - DNA, 55 bp, Artificial
  Synthetic oligonucleotide
tgaagcaaccgttctgcgaggattgccggcatattccaatatcaaaggggagccc

SEQ ID NO: 465617 - DNA, 60 bp, Artificial
  Synthetic oligonucleotide
tgaagcaatcattgcctattattatgctcgcttagcttctgaagatagtaatgctgcagc

SEQ ID NO: 465618 - DNA, 59 bp, Artificial
  Synthetic oligonucleotide
tgaagcaattaaagccaattgtgtctctttgcatgaaggttgctccctccactaagttt

SEQ ID NO: 465619 - DNA, 60 bp, Artificial
  Synthetic oligonucleotide
tgaagcaccagtctccatctggtcccgtgttgtacaattcggcacgggatggggcttctg

SEQ ID NO: 465620 - DNA, 60 bp, Artificial
  Synthetic oligonucleotide
tgaagcagcggacgctgtgcctaccgtcagaagtgacagagagacttgtcgacatagcgc

SEQ ID NO: 465621 - DNA, 60 bp, Artificial
  Synthetic oligonucleotide
tgaagcaggcttggcctatgtagagcaagagctgcacaactttttcctgaagggcgagct

SEQ ID NO: 465622 - DNA, 60 bp, Artificial
  Synthetic oligonucleotide
tgaagcatatgttactgaaaatgatgataccagagtgtacaatgcttcgggtacgcttcg

SEQ ID NO: 465623 - DNA, 60 bp, Artificial
  Synthetic oligonucleotide
tgaagcatgcaaattaatgatacctaaaggaactggcgggaaacagatatccaatcaaat

SEQ ID NO: 465624 - DNA, 55 bp, Artificial
  Synthetic oligonucleotide
tgaagcatgtacaactttagtagattcaagggtgagcatggatccaggagttatg

SEQ ID NO: 465625 - DNA, 58 bp, Artificial
  Synthetic oligonucleotide
tgaagcatttgaagcgggcactgacggaagatttttcgcgtacaaggttagaacactg

SEQ ID NO: 465626 - DNA, 54 bp, Artificial
  Synthetic oligonucleotide
tgaagccaccgaaaatagacaaggggtcttattatggcaaaaggttgttacttc

SEQ ID NO: 465627 - DNA, 60 bp, Artificial
  Synthetic oligonucleotide
tgaagccatctatcctggtattaatgcgacatatcttccaggcttgtgatttgggtaatc

SEQ ID NO: 465628 - DNA, 60 bp, Artificial
  Synthetic oligonucleotide
tgaagcccactgtttaagcgcagcattgttctcttcatccaagtactcttataggaggac

SEQ ID NO: 465629 - DNA, 55 bp, Artificial
  Synthetic oligonucleotide
tgaagcccagttgatttagcccatctaaaaaagaagcccatctaaaaaagaagcc

SEQ ID NO: 465630 - DNA, 60 bp, Artificial
  Synthetic oligonucleotide
tgaagccgcagtgctctccgcaggttgtggttgaacattatctgcaccttgattatgtcg

SEQ ID NO: 465631 - DNA, 60 bp, Artificial
  Synthetic oligonucleotide
tgaagccggcgacgttatcgatgcactcgtccacaagaattggttacatcactccgtcta

SEQ ID NO: 465632 - DNA, 58 bp, Artificial
  Synthetic oligonucleotide
tgaagccgggggatgtactagtaattaacagtaatggtaatctgatcgctcctcgagg

SEQ ID NO: 465633 - DNA, 55 bp, Artificial
  Synthetic oligonucleotide
tgaagcctatcgtgcccgcaaggcatgcttggtagagatgagacgcaaaccgggt

SEQ ID NO: 465634 - DNA, 55 bp, Artificial
  Synthetic oligonucleotide
tgaagcctgccattctagaagaaggagaaggcagggtcgtgcttggagtcccgtc

SEQ ID NO: 465635 - DNA, 60 bp, Artificial
  Synthetic oligonucleotide
tgaagcctttgacgcatcacaagatcattacatcatggctttcgaggtcgcagtaatgaa

SEQ ID NO: 465636 - DNA, 60 bp, Artificial
  Synthetic oligonucleotide
tgaagcgacagattactcctccatggcagctgacgggatgaagcaggcaatgggtggggc

SEQ ID NO: 465637 - DNA, 55 bp, Artificial
  Synthetic oligonucleotide
tgaagcgcacgtagctgagaggctccctttccttgttgtttatcgtgcagttgag

SEQ ID NO: 465638 - DNA, 60 bp, Artificial
  Synthetic oligonucleotide
tgaagcgtgtgtcaggtacgttgaacaggtttctgagataaatttgttgtatacattagc

SEQ ID NO: 465639 - DNA, 55 bp, Artificial
  Synthetic oligonucleotide
tgaagcgttgtgggagacagtctccaagtatcgttacgatgcaggctttggccga

SEQ ID NO: 465640 - DNA, 60 bp, Artificial
  Synthetic oligonucleotide
tgaagctatcaatacaatgtttgcgtgctatgagtgcaggagtccaagatgttatagtag

SEQ ID NO: 465641 - DNA, 60 bp, Artificial
  Synthetic oligonucleotide
tgaagctcaaattaaatctatgataggaagcgatgatatatggcaaaatattataagcac

SEQ ID NO: 465642 - DNA, 51 bp, Artificial
  Synthetic oligonucleotide
tgaagctcagatacagaaaatgtctcaggatttgcagcttgaagctttaac

SEQ ID NO: 465643 - DNA, 54 bp, Artificial
  Synthetic oligonucleotide
tgaagctccactacggactgttaagggcactggactctcagccggtcttggcac

SEQ ID NO: 465644 - DNA, 60 bp, Artificial
  Synthetic oligonucleotide
tgaagctcgtggcttacgtttcaatgaagctggtacacccgcaaatctcatccagagggg

SEQ ID NO: 465645 - DNA, 60 bp, Artificial
  Synthetic oligonucleotide
tgaagctctcgaactgcagcgatgtagagaggctcatactttgccaagagagtgcgaaga

SEQ ID NO: 465646 - DNA, 60 bp, Artificial
  Synthetic oligonucleotide
tgaagctgaacaaaggacattgtatcagaatgtcgggacctatgtatcagtaggaacatc

SEQ ID NO: 465647 - DNA, 60 bp, Artificial
  Synthetic oligonucleotide
tgaagctgaatcaacaatggttaaagagtacaggcagaaaattgatgcactaaaggccgc

SEQ ID NO: 465648 - DNA, 55 bp, Artificial
  Synthetic oligonucleotide
tgaagctgacgaataatgtactgggtgcctttaaggtggagctgttcatcacgtg

SEQ ID NO: 465649 - DNA, 60 bp, Artificial
  Synthetic oligonucleotide
tgaagctgattcacctgggtcgagaaatgttgtgcccaatctgtttaggtccctatatgg

SEQ ID NO: 465650 - DNA, 60 bp, Artificial
  Synthetic oligonucleotide
tgaagctggagaatcttggtgtgtatcaaattcttgccatctatagtacggtatcgagca

SEQ ID NO: 465651 - DNA, 60 bp, Artificial
  Synthetic oligonucleotide
tgaagctgttagacattttcctaggatatggctccatagcttggggcaacatatctatga

SEQ ID NO: 465652 - DNA, 51 bp, Artificial
  Synthetic oligonucleotide
tgaagcttgctagctagacactagctagtaatgggaaggggctcatttgag

SEQ ID NO: 465653 - DNA, 58 bp, Artificial
  Synthetic oligonucleotide
tgaagctttcgaaacttcatgaaaagcactagttctattgttttctagatttcgtggc

SEQ ID NO: 465654 - DNA, 60 bp, Artificial
  Synthetic oligonucleotide
tgaagctttttaatgaggctacagaagagttagtggatgttgacaccgaccatgatgcta

SEQ ID NO: 465655 - DNA, 56 bp, Artificial
  Synthetic oligonucleotide
tgaaggacataagcaatagatcaccatcatcttgcatctcagcgaagtgtgcataa

SEQ ID NO: 465656 - DNA, 55 bp, Artificial
  Synthetic oligonucleotide
tgaaggaccaggactcccagtcaagagtaaggcttggtagggctcctttggtagg

SEQ ID NO: 465657 - DNA, 55 bp, Artificial
  Synthetic oligonucleotide
tgaaggacgcttgtgtcaaactgcgcgttgtgagcaaccagggtcttggttctcg

SEQ ID NO: 465658 - DNA, 59 bp, Artificial
  Synthetic oligonucleotide
tgaaggactatcaggactagtggctgctcaagatcctcctcccgctgccccgtatcagc

SEQ ID NO: 465659 - DNA, 60 bp, Artificial
  Synthetic oligonucleotide
tgaaggagagaacagcacattgttacaccctgcgagcctgcatgggatggaagacccgga

SEQ ID NO: 465660 - DNA, 58 bp, Artificial
  Synthetic oligonucleotide
tgaaggagagcgagcacgaggaacggtattatttcaatttggtgtagacggactcgac

SEQ ID NO: 465661 - DNA, 55 bp, Artificial
  Synthetic oligonucleotide
tgaaggagaggcctctaactgcaccacctgctgctctaatggcaccaatgccatc

SEQ ID NO: 465662 - DNA, 58 bp, Artificial
  Synthetic oligonucleotide
tgaaggagcaagcgttggtcaaaaggttttacaggttgaatcatcacgtaacatataa

SEQ ID NO: 465663 - DNA, 59 bp, Artificial
  Synthetic oligonucleotide
tgaaggagccgacccagaatatgtcagagaagcttttcactgtgggttaatttcattaa

SEQ ID NO: 465664 - DNA, 59 bp, Artificial
  Synthetic oligonucleotide
tgaaggagtacaatgacggagtgaacgctctcaagaataccgaatggctgatcaaaaag

SEQ ID NO: 465665 - DNA, 57 bp, Artificial
  Synthetic oligonucleotide
tgaaggagtcttctccctcgttgtggtggtcgatcggaaaccccatttgagtcaatc

SEQ ID NO: 465666 - DNA, 55 bp, Artificial
  Synthetic oligonucleotide
tgaaggataagaatttgaagatagacatgcgtgaaacgatgagactctggactcg

SEQ ID NO: 465667 - DNA, 60 bp, Artificial
  Synthetic oligonucleotide
tgaaggatatgaagacttctatcattcgctatagcgaatatctgaagaaaccatgtgtgg

SEQ ID NO: 465668 - DNA, 55 bp, Artificial
  Synthetic oligonucleotide
tgaaggatatgctttgtatgacgaacgtttatacactttaatgggaaaaagttac

SEQ ID NO: 465669 - DNA, 57 bp, Artificial
  Synthetic oligonucleotide
tgaaggcaacccattactatacgatttagagaaggacataaagttggatcgcgtttc

SEQ ID NO: 465670 - DNA, 60 bp, Artificial
  Synthetic oligonucleotide
tgaaggcaagtaacgtttctgaatactacgcctcggcggctgcaatactcatggacagct

SEQ ID NO: 465671 - DNA, 55 bp, Artificial
  Synthetic oligonucleotide
tgaaggcacttggaggatttgctaactgagaattcatatgcaaatagagggccgc

SEQ ID NO: 465672 - DNA, 56 bp, Artificial
  Synthetic oligonucleotide
tgaaggccaaagtctttatggttagtaaacctacattctgcggttggaatttgtgc

SEQ ID NO: 465673 - DNA, 60 bp, Artificial
  Synthetic oligonucleotide
tgaaggccatctctgacgtcacccgataaaccggttatatcatgttgctaggcgcggagt

SEQ ID NO: 465674 - DNA, 60 bp, Artificial
  Synthetic oligonucleotide
tgaaggcccatgtaaagttcaatcatgtgaggcccgtcatgatgtttcacatactggtaa

SEQ ID NO: 465675 - DNA, 60 bp, Artificial
  Synthetic oligonucleotide
tgaaggcccatgtaaggtccaatcttatgagcagcgtcatgatatctcacatgttgggaa

SEQ ID NO: 465676 - DNA, 60 bp, Artificial
  Synthetic oligonucleotide
tgaaggcccatgtaaggtgcaatcttttgaatccaggcacgatgtctcccatattggtaa

SEQ ID NO: 465677 - DNA, 60 bp, Artificial
  Synthetic oligonucleotide
tgaaggccggtctatgattgacaagcgtgacaaagctgtgttagacggccgcaagagttg

SEQ ID NO: 465678 - DNA, 60 bp, Artificial
  Synthetic oligonucleotide
tgaaggcgctaaccagtggatgaacaggctaatagcctttgcctccaggggcaaccatgt

SEQ ID NO: 465679 - DNA, 55 bp, Artificial
  Synthetic oligonucleotide
tgaaggcggaaattgttttgacgtttcgacgaagaaggcatgttattttggctca

SEQ ID NO: 465680 - DNA, 57 bp, Artificial
  Synthetic oligonucleotide
tgaaggctgaacacccgcagcccttccacactatcctcgtcctcgtttcaggaactt

SEQ ID NO: 465681 - DNA, 54 bp, Artificial
  Synthetic oligonucleotide
tgaaggctgaagagataacaccaggaagattccgcactgcagtatgtgggctat

SEQ ID NO: 465682 - DNA, 54 bp, Artificial
  Synthetic oligonucleotide
tgaaggctgaggaactaacaccaggaaggttcaggacaatagtctgtggattat

SEQ ID NO: 465683 - DNA, 57 bp, Artificial
  Synthetic oligonucleotide
tgaaggctgccctgactggggcaaattcttttgggccccgatatgttcgagcccatt

SEQ ID NO: 465684 - DNA, 55 bp, Artificial
  Synthetic oligonucleotide
tgaaggctgctgatattcagacaactcatgatgtccatttggcaccaggcgttgg

SEQ ID NO: 465685 - DNA, 60 bp, Artificial
  Synthetic oligonucleotide
tgaaggctgtccgcgccatatgttttggtgattcagaacagatagctttcgggtcgagag

SEQ ID NO: 465686 - DNA, 60 bp, Artificial
  Synthetic oligonucleotide
tgaagggaaagtgaggtacaaacgaagaggatgcagaatgagtggtgacatgaacaccgc

SEQ ID NO: 465687 - DNA, 55 bp, Artificial
  Synthetic oligonucleotide
tgaagggagtctctccaattatttggacccaccattgcagagtttcttcagttag

SEQ ID NO: 465688 - DNA, 60 bp, Artificial
  Synthetic oligonucleotide
tgaagggagtgtacatcaacactgctctactcaatgcatcctgtgctgcaatggatgact

SEQ ID NO: 465689 - DNA, 59 bp, Artificial
  Synthetic oligonucleotide
tgaaggggctggacgtcaccgggttcctagatgcctggaacgacatgtcagaattcggc

SEQ ID NO: 465690 - DNA, 57 bp, Artificial
  Synthetic oligonucleotide
tgaagggggcttgtgcacccagccccacctcgctgacgcccccgtcagacgacgact

SEQ ID NO: 465691 - DNA, 60 bp, Artificial
  Synthetic oligonucleotide
tgaaggggggtggaccggaatgatagatggatggtatggttatcatcatcagaatgagca

SEQ ID NO: 465692 - DNA, 57 bp, Artificial
  Synthetic oligonucleotide
tgaagggggtcggaacaatggtgatggaactaattcggatgataaagcgagggatta

SEQ ID NO: 465693 - DNA, 60 bp, Artificial
  Synthetic oligonucleotide
tgaagggtacggcctctctaaagcataatatggtgaagggctgcacagatgagcgcatgt

SEQ ID NO: 465694 - DNA, 55 bp, Artificial
  Synthetic oligonucleotide
tgaagggtcctcaggcacaataaattttgctcatgtgatttgaaccctgcttgtg

SEQ ID NO: 465695 - DNA, 60 bp, Artificial
  Synthetic oligonucleotide
tgaagggtgtaggaccagcagaaccaggcgattgtggaggcattttaagatgtgtacatg

SEQ ID NO: 465696 - DNA, 59 bp, Artificial
  Synthetic oligonucleotide
tgaagggtgtgtggagtaccagtgcaagttccaacatctttggcgcatggttccccagt

SEQ ID NO: 465697 - DNA, 50 bp, Artificial
  Synthetic oligonucleotide
tgaagggtgttatcaacatttgggggagtggcctactgcagttcattgtg

SEQ ID NO: 465698 - DNA, 60 bp, Artificial
  Synthetic oligonucleotide
tgaagggtgttggaacaatggtaatggaactcatcaggatgatcaaacgcgggataaatg

SEQ ID NO: 465699 - DNA, 60 bp, Artificial
  Synthetic oligonucleotide
tgaagggttattcacacgtagatcgtcacatgcatccagacgcctccgtgatgaaagttg

SEQ ID NO: 465700 - DNA, 48 bp, Artificial
  Synthetic oligonucleotide
tgaaggtaggtaaaacccgggagttttaattaattctacctgtacccc

SEQ ID NO: 465701 - DNA, 60 bp, Artificial
  Synthetic oligonucleotide
tgaaggtccatgtaagatccaatcatttgatcaacgtgactcagtaacccatacaggtaa

SEQ ID NO: 465702 - DNA, 60 bp, Artificial
  Synthetic oligonucleotide
tgaaggtgagttctactacctcctgtaatgagacaaaattcaaagatgctgagtgctcca

SEQ ID NO: 465703 - DNA, 60 bp, Artificial
  Synthetic oligonucleotide
tgaaggtgatccggtatctcgctggccgaacaactgagccggagcgggtagcatgactga

SEQ ID NO: 465704 - DNA, 54 bp, Artificial
  Synthetic oligonucleotide
tgaaggtgccacacctaatggaactttaccaattaaggatgttagttggaactt

SEQ ID NO: 465705 - DNA, 55 bp, Artificial
  Synthetic oligonucleotide
tgaaggtggaggccacgtcctcctccggtacctctgacccctgggccgtgcctcc

SEQ ID NO: 465706 - DNA, 55 bp, Artificial
  Synthetic oligonucleotide
tgaaggtgtgccatccatgcatccagcatctcgaggccagctggtgagccgtagc

SEQ ID NO: 465707 - DNA, 54 bp, Artificial
  Synthetic oligonucleotide
tgaaggttattttgcgcaaggatgtagtaaatgcggggatttataaccggttaa

SEQ ID NO: 465708 - DNA, 58 bp, Artificial
  Synthetic oligonucleotide
tgaaggttcttatgtccttatgattgcaattattagggttcttaggatataaataaca

SEQ ID NO: 465709 - DNA, 60 bp, Artificial
  Synthetic oligonucleotide
tgaaggttcttgtgctggatgcattaactgttttgagaacatacattgtgagttcacaat

SEQ ID NO: 465710 - DNA, 55 bp, Artificial
  Synthetic oligonucleotide
tgaaggttggtagaattctgatttggttgggcttggtacctagtatatccggatc

SEQ ID NO: 465711 - DNA, 55 bp, Artificial
  Synthetic oligonucleotide
tgaaggtttgcgtccatcaaacctccctacataatatgatagttagtctcgaacg

SEQ ID NO: 465712 - DNA, 52 bp, Artificial
  Synthetic oligonucleotide
tgaaggttttgttccaactgggtataagacacgtgcagtcggaaaatgaaca

SEQ ID NO: 465713 - DNA, 60 bp, Artificial
  Synthetic oligonucleotide
tgaaggtttttacgcacctgagatgtaccatgcttacatggatgatcccctatcgccgat

SEQ ID NO: 465714 - DNA, 58 bp, Artificial
  Synthetic oligonucleotide
tgaagtaaaagtgagggagctgcgacattgggaccattcctgttacggacccactgtg

SEQ ID NO: 465715 - DNA, 56 bp, Artificial
  Synthetic oligonucleotide
tgaagtacaggaagtcgggggctgaggctgctttaatactaggcgcctttaagaaa

SEQ ID NO: 465716 - DNA, 60 bp, Artificial
  Synthetic oligonucleotide
tgaagtaccagaacccaatgggagaactagatcaggatttgcttcaggaagtatgtgatg

SEQ ID NO: 465717 - DNA, 59 bp, Artificial
  Synthetic oligonucleotide
tgaagtacttgggaccttcggacaaccactccaagcacattcctctactagctgtcctc

SEQ ID NO: 465718 - DNA, 52 bp, Artificial
  Synthetic oligonucleotide
tgaagtagatcaactgtcaaaattactagtagctcgtgaattcaatgttacg

SEQ ID NO: 465719 - DNA, 60 bp, Artificial
  Synthetic oligonucleotide
tgaagtagcatttggcctggtatgcgccacctgtgaacagattgctgactcccagcatcg

SEQ ID NO: 465720 - DNA, 60 bp, Artificial
  Synthetic oligonucleotide
tgaagtagtgaatgccacagagacggtggaaactgcgaacaccaagaaaatatgcactca

SEQ ID NO: 465721 - DNA, 60 bp, Artificial
  Synthetic oligonucleotide
tgaagtagtgaatgctacggagacggtagaaactgcgagtatcaagaaaatctgcaccca

SEQ ID NO: 465722 - DNA, 58 bp, Artificial
  Synthetic oligonucleotide
tgaagtatggtcaaaaggtatttacatatgagggcgaaacaccaaacgctagaactga

SEQ ID NO: 465723 - DNA, 60 bp, Artificial
  Synthetic oligonucleotide
tgaagtattatctccgttaagtcatgagagagctgatattcatctctatgtgactctata

SEQ ID NO: 465724 - DNA, 55 bp, Artificial
  Synthetic oligonucleotide
tgaagtcaacaatcctcatgacatgccttctcctcctccattgtacaatccatgg

SEQ ID NO: 465725 - DNA, 60 bp, Artificial
  Synthetic oligonucleotide
tgaagtcactgagctcatgtacaaactgggtgcctcacccctggcagggttgatacgtag

SEQ ID NO: 465726 - DNA, 58 bp, Artificial
  Synthetic oligonucleotide
tgaagtcccctgcctgagtggtgttcaaggttatcttgtccttgcgacgtaggcggaa

SEQ ID NO: 465727 - DNA, 52 bp, Artificial
  Synthetic oligonucleotide
tgaagtcgaccatgggacttggggacttgacaaatggaagttttcgttgtgt

SEQ ID NO: 465728 - DNA, 52 bp, Artificial
  Synthetic oligonucleotide
tgaagtcggagaccaggaagcccgttcgatcggtaggcagattgcctctgat

SEQ ID NO: 465729 - DNA, 53 bp, Artificial
  Synthetic oligonucleotide
tgaagtcgggcccgacttctatgaaaaaatttggtagcttggtgggaccgaaa

SEQ ID NO: 465730 - DNA, 56 bp, Artificial
  Synthetic oligonucleotide
tgaagtcgtcacggggcggacgctctgtgccagggcatggcagtgccatgtcccat

SEQ ID NO: 465731 - DNA, 60 bp, Artificial
  Synthetic oligonucleotide
tgaagtctgacgtgaaaccttccgtcactgatactttgaatatcgatcgcccattaccag

SEQ ID NO: 465732 - DNA, 60 bp, Artificial
  Synthetic oligonucleotide
tgaagtctgtgtatattttagggaagatatggatggatgaaaacatcaagctcaagaacc

SEQ ID NO: 465733 - DNA, 60 bp, Artificial
  Synthetic oligonucleotide
tgaagtgactaatgctactgaactggttcagagttcctcaacagggaaaatatgcaacaa

SEQ ID NO: 465734 - DNA, 55 bp, Artificial
  Synthetic oligonucleotide
tgaagtgatgagatttgaaaacaacggacctgatgtgtgcatgtcctttgccatg

SEQ ID NO: 465735 - DNA, 60 bp, Artificial
  Synthetic oligonucleotide
tgaagtgcaagtgatcctcgcagggaacgcgttcaccgccgggaaagtcatatttgcagc

SEQ ID NO: 465736 - DNA, 59 bp, Artificial
  Synthetic oligonucleotide
tgaagtggaaacgcagccgttgtcacaggtagagagggaaaatggcgaccacgtggagc

SEQ ID NO: 465737 - DNA, 53 bp, Artificial
  Synthetic oligonucleotide
tgaagtggatcaacgttggtcctcgtcctggcacttctaagtatgtttctgat

SEQ ID NO: 465738 - DNA, 54 bp, Artificial
  Synthetic oligonucleotide
tgaagtgggcgcccacccacgttcaattaacgacaaccccaatgttttgcaccg

SEQ ID NO: 465739 - DNA, 55 bp, Artificial
  Synthetic oligonucleotide
tgaagtggttgggacaggagtgcacctgctttttagaaccagcagagggtctagt

SEQ ID NO: 465740 - DNA, 58 bp, Artificial
  Synthetic oligonucleotide
tgaagtgtaagatgaccagtgtgtggtatcccacagttcgttatacagcagactgtaa

SEQ ID NO: 465741 - DNA, 58 bp, Artificial
  Synthetic oligonucleotide
tgaagtgtctatcagtctttacaacaaagacatccaagacccagtaaattttctaaga

SEQ ID NO: 465742 - DNA, 60 bp, Artificial
  Synthetic oligonucleotide
tgaagtgtctcactgcagggcaacagaatacataatgaagggagtatacataaacacagc

SEQ ID NO: 465743 - DNA, 55 bp, Artificial
  Synthetic oligonucleotide
tgaagttaacctgaaagatggtgtatacttagtaccgttgtacgccatagtaggt

SEQ ID NO: 465744 - DNA, 51 bp, Artificial
  Synthetic oligonucleotide
tgaagttaagcgtcacaccccggctacccgtttggtagacttccgggacgg

SEQ ID NO: 465745 - DNA, 60 bp, Artificial
  Synthetic oligonucleotide
tgaagttatccgcgtcattccgtcgatatcggaatcgaacgaaattattcgtgtgcaatg

SEQ ID NO: 465746 - DNA, 60 bp, Artificial
  Synthetic oligonucleotide
tgaagttattttatggagacaaagcattatatattcaaggctttggtgatcgtggaatag

SEQ ID NO: 465747 - DNA, 60 bp, Artificial
  Synthetic oligonucleotide
tgaagttgaatgcgtagtggagggatacttcgattgtaaggtaggggatcatataatcat

SEQ ID NO: 465748 - DNA, 60 bp, Artificial
  Synthetic oligonucleotide
tgaagttgattagtaactaaattaggcgtccagagacaactgggcgtctttgcattgata

SEQ ID NO: 465749 - DNA, 60 bp, Artificial
  Synthetic oligonucleotide
tgaagttggggttttgagatctttcaactgagagagggtttcttctttgctcagagagca

SEQ ID NO: 465750 - DNA, 55 bp, Artificial
  Synthetic oligonucleotide
tgaagttgtgaacctgccaccaacgcgctcctattgggctgagacacttgtcggt

SEQ ID NO: 465751 - DNA, 54 bp, Artificial
  Synthetic oligonucleotide
tgaagtttaggggggaggctcctgcgcaagtaggaacactccccccggacgaca

SEQ ID NO: 465752 - DNA, 58 bp, Artificial
  Synthetic oligonucleotide
tgaagtttcgccacgctcgcgacaaaagagctggcttcgaaattgacaacaatgatga

SEQ ID NO: 465753 - DNA, 58 bp, Artificial
  Synthetic oligonucleotide
tgaagtttctacagaggcatattcggctcttcaaactctaactcccaactttccacag

SEQ ID NO: 465754 - DNA, 60 bp, Artificial
  Synthetic oligonucleotide
tgaagtttgctacgctcaaacataccacttggaggaagtggtatgacactagtgatgagc

SEQ ID NO: 465755 - DNA, 56 bp, Artificial
  Synthetic oligonucleotide
tgaagtttggatgacggtggccgaaaatttaaacgtagcatatgcgaacccacgcg

SEQ ID NO: 465756 - DNA, 56 bp, Artificial
  Synthetic oligonucleotide
tgaataaacatttgacgtccggaaacttccgaaggaagccaagattgcttcgtggc

SEQ ID NO: 465757 - DNA, 60 bp, Artificial
  Synthetic oligonucleotide
tgaataacattgttgcccgtgcagcagctagctatgctgccgaaggacctgttggcatcc

SEQ ID NO: 465758 - DNA, 53 bp, Artificial
  Synthetic oligonucleotide
tgaataacttctggacatgcgtttgtactttatccagatgtaagacgtaatcc

SEQ ID NO: 465759 - DNA, 60 bp, Artificial
  Synthetic oligonucleotide
tgaataagaaggatgttactggcgcggagatgaagccgtttaatgatggttcaaggtata

SEQ ID NO: 465760 - DNA, 54 bp, Artificial
  Synthetic oligonucleotide
tgaataatccttccgaaaacgagcgcaagaaaatacgggagcttccaatctccc

SEQ ID NO: 465761 - DNA, 58 bp, Artificial
  Synthetic oligonucleotide
tgaatacaaaattactttgaatgaagataaaccaatttcagatgtatgtgttaaagaa

SEQ ID NO: 465762 - DNA, 60 bp, Artificial
  Synthetic oligonucleotide
tgaatacaagatcgataggagacatgtcctgtcacatgtagagtttaacctaactaggat

SEQ ID NO: 465763 - DNA, 60 bp, Artificial
  Synthetic oligonucleotide
tgaatacacattctagaacagacttaagtgaagttgacacatttcagataatacacacat

SEQ ID NO: 465764 - DNA, 55 bp, Artificial
  Synthetic oligonucleotide
tgaatacagtaacgtgtactggtggtagttacagcttcgtgttgcctttaggtgg

SEQ ID NO: 465765 - DNA, 54 bp, Artificial
  Synthetic oligonucleotide
tgaataccgggatgataggggatttagttcggtctgagatgagggtggtttatc

SEQ ID NO: 465766 - DNA, 59 bp, Artificial
  Synthetic oligonucleotide
tgaatacgaggtgatgaaggataaaccgtattacttagtaacatgggctaactcatcta

SEQ ID NO: 465767 - DNA, 59 bp, Artificial
  Synthetic oligonucleotide
tgaatacggtcgtgggtagaagaacaatcaatggaagaagacgaccacgcaggcaaaca

SEQ ID NO: 465768 - DNA, 58 bp, Artificial
  Synthetic oligonucleotide
tgaatactaccccaagcatatacaatacaatttactaattggtgagggcccttgtgaa

SEQ ID NO: 465769 - DNA, 53 bp, Artificial
  Synthetic oligonucleotide
tgaatactggcaagcatgtacccagaccattcaaagacatgtctctgctccaa

SEQ ID NO: 465770 - DNA, 50 bp, Artificial
  Synthetic oligonucleotide
tgaatacttccctcaaattggcctatgataatcggtcgttacagcgcatg

SEQ ID NO: 465771 - DNA, 55 bp, Artificial
  Synthetic oligonucleotide
tgaatagatcacaaccggcgcatgacaacttaatgggaactatgtggattaacgc

SEQ ID NO: 465772 - DNA, 54 bp, Artificial
  Synthetic oligonucleotide
tgaatagatggatgggaaagttgacttttcctcaaggcacttctcggagtgtta

SEQ ID NO: 465773 - DNA, 54 bp, Artificial
  Synthetic oligonucleotide
tgaatagcactgggtttaccaagacgtgcgggggccccccgtgcgacatcgggg

SEQ ID NO: 465774 - DNA, 60 bp, Artificial
  Synthetic oligonucleotide
tgaatagtgcatgtactattcatgaatagtagtagatagtgactgatagcgactgaaagc

SEQ ID NO: 465775 - DNA, 52 bp, Artificial
  Synthetic oligonucleotide
tgaatataatgtagagccatggacgctgcaggacacaagtcaagaattatgg

SEQ ID NO: 465776 - DNA, 54 bp, Artificial
  Synthetic oligonucleotide
tgaatatacgtatgaatagtcacataatataatcacattaccatcttcacatga

SEQ ID NO: 465777 - DNA, 56 bp, Artificial
  Synthetic oligonucleotide
tgaatatagcgacgtgcttaccaacaggagaatatgtatctccaaatccgcgaatt

SEQ ID NO: 465778 - DNA, 58 bp, Artificial
  Synthetic oligonucleotide
tgaatatatagttgcactatatgcgctgtctaacgacttcaataatagagaagatgtg

SEQ ID NO: 465779 - DNA, 60 bp, Artificial
  Synthetic oligonucleotide
tgaatatatcagtggtcactactaagttggatgtgctcaagatacacctcgcttcactat

SEQ ID NO: 465780 - DNA, 60 bp, Artificial
  Synthetic oligonucleotide
tgaatatgctattctttgagatcagtcaaatgcggacacactcagtaggagggtttagag

SEQ ID NO: 465781 - DNA, 50 bp, Artificial
  Synthetic oligonucleotide
tgaatatggagcactcgaggcagttcaccatcaaaacactaacgacatga

SEQ ID NO: 465782 - DNA, 60 bp, Artificial
  Synthetic oligonucleotide
tgaatattacccagcaaggtaccagaccaatgtactcctggcagttggccctgcggaagc

SEQ ID NO: 465783 - DNA, 55 bp, Artificial
  Synthetic oligonucleotide
tgaatcaaaactatcaccacgttcagttacaatggttcatcaggttgagacagtt

SEQ ID NO: 465784 - DNA, 60 bp, Artificial
  Synthetic oligonucleotide
tgaatcaaacatatgttaacattagcaatgctaacattgttgctggacaggatgcaactt

SEQ ID NO: 465785 - DNA, 60 bp, Artificial
  Synthetic oligonucleotide
tgaatcaactgggatgacattcaaatatggcactatactgatcaccccaggagccacgaa

SEQ ID NO: 465786 - DNA, 60 bp, Artificial
  Synthetic oligonucleotide
tgaatcaagaattcgtctccattccacgttgctgttgccaatactgtttggagagcgccc

SEQ ID NO: 465787 - DNA, 60 bp, Artificial
  Synthetic oligonucleotide
tgaatcacaaggtctaacagtcaacaaggcagtgattgtagttgaccaagatctggttgc

SEQ ID NO: 465788 - DNA, 56 bp, Artificial
  Synthetic oligonucleotide
tgaatcacttgcctccgggttttgtccccactgcaccagtagtcatccgtaggtgc

SEQ ID NO: 465789 - DNA, 57 bp, Artificial
  Synthetic oligonucleotide
tgaatcagttagcaccgacctggggaaatacgccgccctaggattcaaagtcgagga

SEQ ID NO: 465790 - DNA, 55 bp, Artificial
  Synthetic oligonucleotide
tgaatcagttgaatggagtcagaggcattgatgactatgagtcactcgtaagatt

SEQ ID NO: 465791 - DNA, 57 bp, Artificial
  Synthetic oligonucleotide
tgaatcatacgaattagacgtcgatatcaacctattagtttggcagttgttaagctc

SEQ ID NO: 465792 - DNA, 59 bp, Artificial
  Synthetic oligonucleotide
tgaatcatcaacgcagaggtctcaaggtctacatccgaaaccggttggatgtaaaggaa

SEQ ID NO: 465793 - DNA, 58 bp, Artificial
  Synthetic oligonucleotide
tgaatcattctctgaatttaatgcgttatttaggactaaagaagaaaggattactcat

SEQ ID NO: 465794 - DNA, 60 bp, Artificial
  Synthetic oligonucleotide
tgaatcattgaagaatggaagttacatctatatgtctcattatcaagattgttctttaac

SEQ ID NO: 465795 - DNA, 60 bp, Artificial
  Synthetic oligonucleotide
tgaatccaccatgtcttacgtacatgagtggaagaatatcaaatccttcctaacggatca

SEQ ID NO: 465796 - DNA, 50 bp, Artificial
  Synthetic oligonucleotide
tgaatccatgatcgtgacagcccagtgcaatgaagtatgaacaaccacaa

SEQ ID NO: 465797 - DNA, 60 bp, Artificial
  Synthetic oligonucleotide
tgaatccatgctggtacttgcactcgttggttatgaacgctgagcagccgcaacctttcc

SEQ ID NO: 465798 - DNA, 60 bp, Artificial
  Synthetic oligonucleotide
tgaatccatgctggtacttgcaggcttgggtgatgaagactgaacagccgcaagctttcc

SEQ ID NO: 465799 - DNA, 55 bp, Artificial
  Synthetic oligonucleotide
tgaatccattacactggctactggacccctgaccactctctgggagggatctccg

SEQ ID NO: 465800 - DNA, 57 bp, Artificial
  Synthetic oligonucleotide
tgaatccccaatgctttccggaggttgtggttgaaccggatttgaattgataatatg

SEQ ID NO: 465801 - DNA, 54 bp, Artificial
  Synthetic oligonucleotide
tgaatcccgcggacgacccttctcggggtcgcttgggactctctcgtccccttc

SEQ ID NO: 465802 - DNA, 60 bp, Artificial
  Synthetic oligonucleotide
tgaatccggtatcatcacttcagacgcaccagtgcatgattgtgacacgaagtgtcaaac

SEQ ID NO: 465803 - DNA, 58 bp, Artificial
  Synthetic oligonucleotide
tgaatcctcttcagctgttacagccgcttccgggcggatcaaagggactaaattgtta

SEQ ID NO: 465804 - DNA, 58 bp, Artificial
  Synthetic oligonucleotide
tgaatcctgctttggtgggaaccgtgatagaggcgattttttcgcagactgccgggat

SEQ ID NO: 465805 - DNA, 60 bp, Artificial
  Synthetic oligonucleotide
tgaatcgaagtgagcactagggtggataggtcaagggacacatctaggcatcagaaatcc

SEQ ID NO: 465806 - DNA, 60 bp, Artificial
  Synthetic oligonucleotide
tgaatcgagcagaggtagcttctacctcagctcgtatgaaacttgagaactccatagtgt

SEQ ID NO: 465807 - DNA, 60 bp, Artificial
  Synthetic oligonucleotide
tgaatcgattcataacagtcagagatttgcacagtagcttaaagtcagctctggatgttg

SEQ ID NO: 465808 - DNA, 60 bp, Artificial
  Synthetic oligonucleotide
tgaatcgcaaaccgcgtctatatcgtatgtatcgctcacgcgatgtaccatatgggtgcg

SEQ ID NO: 465809 - DNA, 60 bp, Artificial
  Synthetic oligonucleotide
tgaatcgccaaaatgtctatatacgcgacgctcattggaggatatccataatggggcttc

SEQ ID NO: 465810 - DNA, 58 bp, Artificial
  Synthetic oligonucleotide
tgaatcgcgttcaaaagcgcatgactgaacacgtcgcgattgcgtgtggcgaagtacg

SEQ ID NO: 465811 - DNA, 59 bp, Artificial
  Synthetic oligonucleotide
tgaatcgtcagtcacgtcggagagtccgattgacttgacggttaagaagagtactggtc

SEQ ID NO: 465812 - DNA, 60 bp, Artificial
  Synthetic oligonucleotide
tgaatcgtctgatcgacaaaacaaatcaacagtttgagctgatagacaatgagtttaatg

SEQ ID NO: 465813 - DNA, 60 bp, Artificial
  Synthetic oligonucleotide
tgaatctaatcacagtgtatgtgataagaagacagtacctatcacatggacaggctacct

SEQ ID NO: 465814 - DNA, 57 bp, Artificial
  Synthetic oligonucleotide
tgaatctatgttcacattcctaaattttccaactattattcaattttcaaacggcgc

SEQ ID NO: 465815 - DNA, 56 bp, Artificial
  Synthetic oligonucleotide
tgaatctcacacccttgttaaacacctgtttgggaggcaatggttagttaggactg

SEQ ID NO: 465816 - DNA, 51 bp, Artificial
  Synthetic oligonucleotide
tgaatctcatgcacctatggtgctgggattctgcggatcgtcagtatagat

SEQ ID NO: 465817 - DNA, 60 bp, Artificial
  Synthetic oligonucleotide
tgaatctcccaggtaaacacgccattctctgcttgagctgcagtgatgagttcccctgtg

SEQ ID NO: 465818 - DNA, 55 bp, Artificial
  Synthetic oligonucleotide
tgaatctcgattacatcatcgataagccatccgacctatcgaggctaactccgag

SEQ ID NO: 465819 - DNA, 60 bp, Artificial
  Synthetic oligonucleotide
tgaatctgagctggttaacattccaagatggctgcgagtgtcctccttctatggtgagta

SEQ ID NO: 465820 - DNA, 58 bp, Artificial
  Synthetic oligonucleotide
tgaatctgccaattacaggttcgatggataccgtatatgcgaactctacgcaaagtga

SEQ ID NO: 465821 - DNA, 55 bp, Artificial
  Synthetic oligonucleotide
tgaatcttaaccccaaccttgaactcgtagactttgaagaatacggtgatggagc

SEQ ID NO: 465822 - DNA, 55 bp, Artificial
  Synthetic oligonucleotide
tgaatcttcactgttggtgcacggaatgggatgtctacagagtgtttagctgttg

SEQ ID NO: 465823 - DNA, 60 bp, Artificial
  Synthetic oligonucleotide
tgaatcttccgtatcaattgttccttctaatacattgtacaatacatgagacattgctct

SEQ ID NO: 465824 - DNA, 57 bp, Artificial
  Synthetic oligonucleotide
tgaatcttgcagcaccaaaaatcgatatctcccctgaagcataactctcgggggacc

SEQ ID NO: 465825 - DNA, 60 bp, Artificial
  Synthetic oligonucleotide
tgaatcttgctcaactaaatgccagtctgaaattggagggatcaacactaatagaagctt

SEQ ID NO: 465826 - DNA, 55 bp, Artificial
  Synthetic oligonucleotide
tgaatgaaatgttaaaatcccagacagcaggtgaaatccctgtgcaggcttacgc

SEQ ID NO: 465827 - DNA, 55 bp, Artificial
  Synthetic oligonucleotide
tgaatgaacgacagtaggtgttctttgggtatagaacacttcgggtatgtgagaa

SEQ ID NO: 465828 - DNA, 52 bp, Artificial
  Synthetic oligonucleotide
tgaatgaattagtgtacaagacgttagatgataaggtcattcgcgactatac

SEQ ID NO: 465829 - DNA, 50 bp, Artificial
  Synthetic oligonucleotide
tgaatgagattcctggcgaggaaacaaaaaatacatgcgctttaagtctt

SEQ ID NO: 465830 - DNA, 60 bp, Artificial
  Synthetic oligonucleotide
tgaatgagggtgtgatgaatacaagcaaacctttccagaacactagtaaacactatattg

SEQ ID NO: 465831 - DNA, 60 bp, Artificial
  Synthetic oligonucleotide
tgaatgatcacattagagttgctgttgcacattactcagctcaattagccactttagata

SEQ ID NO: 465832 - DNA, 55 bp, Artificial
  Synthetic oligonucleotide
tgaatgatcgggccggtacagacgagccgatcgtatgcctcgcatcgctcgtgat

SEQ ID NO: 465833 - DNA, 60 bp, Artificial
  Synthetic oligonucleotide
tgaatgatgccacatatcagagaacaagagctctcgtgcgtactggaatggaccccagaa

SEQ ID NO: 465834 - DNA, 52 bp, Artificial
  Synthetic oligonucleotide
tgaatgattatctcaggcagttccactattggaagattccaaggctgcctga

SEQ ID NO: 465835 - DNA, 59 bp, Artificial
  Synthetic oligonucleotide
tgaatgattgggactttgtggtgacgactgacatttcagaaatgggggccaatttcaaa

SEQ ID NO: 465836 - DNA, 56 bp, Artificial
  Synthetic oligonucleotide
tgaatgcataaccaaacggagatgaaagtgcgagccgtcgtcaaggaatttgccgt

SEQ ID NO: 465837 - DNA, 59 bp, Artificial
  Synthetic oligonucleotide
tgaatgcatatgaccagagtggaaggcttgttgctaaacttgttgctactgatgatctt

SEQ ID NO: 465838 - DNA, 60 bp, Artificial
  Synthetic oligonucleotide
tgaatgccagaattgaaccgttcctgaagacaacaccacaacctctcagattacctgatg

SEQ ID NO: 465839 - DNA, 60 bp, Artificial
  Synthetic oligonucleotide
tgaatgccatgtctgatgacgatattaggtccgtctttgagaatttgatcaggcccactt

SEQ ID NO: 465840 - DNA, 55 bp, Artificial
  Synthetic oligonucleotide
tgaatgcgatgctggaggacacgagcagcatccggcacgcagtgttgcagaatcg

SEQ ID NO: 465841 - DNA, 60 bp, Artificial
  Synthetic oligonucleotide
tgaatgcgtgtgccacaacggtgtctgcccggtagtgttcacagatgggtctgccactgg

SEQ ID NO: 465842 - DNA, 55 bp, Artificial
  Synthetic oligonucleotide
tgaatgctacaacccgtgcttttacgtggagctaattagaggaaggcctgaagag

SEQ ID NO: 465843 - DNA, 51 bp, Artificial
  Synthetic oligonucleotide
tgaatgctccgaaggtagatgccagaataagttttgcaatctactatgaac

SEQ ID NO: 465844 - DNA, 55 bp, Artificial
  Synthetic oligonucleotide
tgaatgctggtattttagaacagtggaactttgggttgtcgccgcccccaaatgg

SEQ ID NO: 465845 - DNA, 60 bp, Artificial
  Synthetic oligonucleotide
tgaatgcttcacctgattctactcaggcctaaattcatgttgaccacacaaggcagatgg

SEQ ID NO: 465846 - DNA, 60 bp, Artificial
  Synthetic oligonucleotide
tgaatgcttgagtctctgcataaaaccgcctaaagcaatcagttcccaatccaataagct

SEQ ID NO: 465847 - DNA, 60 bp, Artificial
  Synthetic oligonucleotide
tgaatgctttggtccgatacacttcggtcgggtcagtcatgtcagtatcggacaacttga

SEQ ID NO: 465848 - DNA, 60 bp, Artificial
  Synthetic oligonucleotide
tgaatggatgtcaatccgactctacttttcctaaaggttccagcgcaaaatgccataagc

SEQ ID NO: 465849 - DNA, 60 bp, Artificial
  Synthetic oligonucleotide
tgaatggatgtcaatccgactttactcttcttgaaagtgccagcgcaaaatgctataagc

SEQ ID NO: 465850 - DNA, 60 bp, Artificial
  Synthetic oligonucleotide
tgaatggcccatgatttgtgcttggttggtaaagaatggttaccaatctaccatggcaag

SEQ ID NO: 465851 - DNA, 52 bp, Artificial
  Synthetic oligonucleotide
tgaatggccctcggcgctccgtgtgggatcacgaagctcagccgatcgagat

SEQ ID NO: 465852 - DNA, 60 bp, Artificial
  Synthetic oligonucleotide
tgaatgggaatctcttgccgatcgatcaagtccacagcttcacttctgagccctctcgcg

SEQ ID NO: 465853 - DNA, 60 bp, Artificial
  Synthetic oligonucleotide
tgaatgggcaactcaaagaaccagtttactctaccaagctgtgcaggcattactggatgg

SEQ ID NO: 465854 - DNA, 55 bp, Artificial
  Synthetic oligonucleotide
tgaatgggctaaagacagaagtatacaattggaattcagtactccttaccacccc

SEQ ID NO: 465855 - DNA, 58 bp, Artificial
  Synthetic oligonucleotide
tgaatggtattcgaaagcccaaacatctctatgtgtccttgcctaatgcacagtctag

SEQ ID NO: 465856 - DNA, 60 bp, Artificial
  Synthetic oligonucleotide
tgaatggttcagaaatgtcttgagcattgcccctataatgttctcaaataagatggcaag

SEQ ID NO: 465857 - DNA, 55 bp, Artificial
  Synthetic oligonucleotide
tgaatggttggttcacaggtgttgggttcagacgtaaacgtccagttagtaagta

SEQ ID NO: 465858 - DNA, 60 bp, Artificial
  Synthetic oligonucleotide
tgaatggtttagaaatgtcttgagtattgctcctataatgttctcaaacaaaatggcgag

SEQ ID NO: 465859 - DNA, 60 bp, Artificial
  Synthetic oligonucleotide
tgaatgtaaccatatcagctaagctcaggccaagttataatactaataacgttatgccca

SEQ ID NO: 465860 - DNA, 60 bp, Artificial
  Synthetic oligonucleotide
tgaatgtaatcataagcacaatcactggcatgtataatcacgggtatacgggtggttttc

SEQ ID NO: 465861 - DNA, 60 bp, Artificial
  Synthetic oligonucleotide
tgaatgtacattcagaaagctttgtgagccattcgctgatttggcccgtgagtttcttca

SEQ ID NO: 465862 - DNA, 60 bp, Artificial
  Synthetic oligonucleotide
tgaatgtaccatgctctcactctttggaccttttgtagaaaaagcaaatccaatatttgc

SEQ ID NO: 465863 - DNA, 60 bp, Artificial
  Synthetic oligonucleotide
tgaatgtaccggaatggtcatatattgtggaaaaggacaatccagccaatggcctgtgtt

SEQ ID NO: 465864 - DNA, 60 bp, Artificial
  Synthetic oligonucleotide
tgaatgtactgcttcgctcattgatccgtttgcagcctttgttaagggttctttgcctca

SEQ ID NO: 465865 - DNA, 58 bp, Artificial
  Synthetic oligonucleotide
tgaatgtagcaccagccggagtgcatgctcgagatcttctgctagaaagtgcagagac

SEQ ID NO: 465866 - DNA, 60 bp, Artificial
  Synthetic oligonucleotide
tgaatgtatctggaaaggattacaagaaaggtgcatttgaccctgataaccgcaagctgg

SEQ ID NO: 465867 - DNA, 52 bp, Artificial
  Synthetic oligonucleotide
tgaatgtatgctcgatggtagccggtataccgggaacaaccgtctaagttac

SEQ ID NO: 465868 - DNA, 52 bp, Artificial
  Synthetic oligonucleotide
tgaatgtatttagacacgtgaatagtatttaggtgaatagtcaccctcccaa

SEQ ID NO: 465869 - DNA, 60 bp, Artificial
  Synthetic oligonucleotide
tgaatgtgatcttcgtcttgctccacctacagagagcaatgctcgatcattctcaatgct

SEQ ID NO: 465870 - DNA, 55 bp, Artificial
  Synthetic oligonucleotide
tgaatgttcattgtgtatatacaacttcgactccggctgatctgagccgtcacac

SEQ ID NO: 465871 - DNA, 60 bp, Artificial
  Synthetic oligonucleotide
tgaatgttcggatggaaatgtgctgacctacttggggagaccaggtcgaagaatctgtta

SEQ ID NO: 465872 - DNA, 56 bp, Artificial
  Synthetic oligonucleotide
tgaattaagtgtgttagaaatcgcagcgcctggaaagatgggatcggtagaaaaga

SEQ ID NO: 465873 - DNA, 55 bp, Artificial
  Synthetic oligonucleotide
tgaattacaccggcaaccaacagtcccggtggggcctcgggagcccgaactgcca

SEQ ID NO: 465874 - DNA, 52 bp, Artificial
  Synthetic oligonucleotide
tgaattaccattgttataatgaaatgttgaggatgttagttgctgcgggtaa

SEQ ID NO: 465875 - DNA, 54 bp, Artificial
  Synthetic oligonucleotide
tgaattacgtcggaatgacgaggtaaacgaggaaaagacaactggttactttga

SEQ ID NO: 465876 - DNA, 55 bp, Artificial
  Synthetic oligonucleotide
tgaattactcgggcaggaagctgactatttaccgagaagcagttgatagtttgtc

SEQ ID NO: 465877 - DNA, 55 bp, Artificial
  Synthetic oligonucleotide
tgaattagaacttggcccggagctgaacccatacctagcccacttacaccagatg

SEQ ID NO: 465878 - DNA, 60 bp, Artificial
  Synthetic oligonucleotide
tgaattatccattttgaaatccactgatcgcatccttgttgtacccacagcacgtgtata

SEQ ID NO: 465879 - DNA, 59 bp, Artificial
  Synthetic oligonucleotide
tgaattatgtacacagtacattaataatggactgccaccaattcaaaacactagaaacg

SEQ ID NO: 465880 - DNA, 53 bp, Artificial
  Synthetic oligonucleotide
tgaattattctcggatagtttacttggatcgaggtactggtattatgtaccgt

SEQ ID NO: 465881 - DNA, 59 bp, Artificial
  Synthetic oligonucleotide
tgaattcaacctcagattcagaggcataacttttctttgggttcaatgttatacagtaa

SEQ ID NO: 465882 - DNA, 60 bp, Artificial
  Synthetic oligonucleotide
tgaattcatatgcaccaatatcacttgagaagagacgtgcacagatatcggcattactga

SEQ ID NO: 465883 - DNA, 59 bp, Artificial
  Synthetic oligonucleotide
tgaattccagcactcttgaattgagaagtagatactgggcaataaggacccgaagtggg

SEQ ID NO: 465884 - DNA, 59 bp, Artificial
  Synthetic oligonucleotide
tgaattcgaacaacctgttcaccctgtgccacgagacaaacactacctacgcgcactac

SEQ ID NO: 465885 - DNA, 55 bp, Artificial
  Synthetic oligonucleotide
tgaattcggaactcttatagattgggcacctcgaggtcaattctaccacaattgc

SEQ ID NO: 465886 - DNA, 55 bp, Artificial
  Synthetic oligonucleotide
tgaattcggaaggaattatgatgtaacccggcaggctgtcacaatctacacgcgt

SEQ ID NO: 465887 - DNA, 58 bp, Artificial
  Synthetic oligonucleotide
tgaattcggttattattagcagagctaacaatttattgaaggcggatcgcgatcgtct

SEQ ID NO: 465888 - DNA, 60 bp, Artificial
  Synthetic oligonucleotide
tgaattctatcacaagtgtgatgatacatgcatggagagcgtcaaaaatgggacttatga

SEQ ID NO: 465889 - DNA, 60 bp, Artificial
  Synthetic oligonucleotide
tgaattctcatggcgttagaattttacgtggtactattatgtttgatggtgccatgttgt

SEQ ID NO: 465890 - DNA, 60 bp, Artificial
  Synthetic oligonucleotide
tgaattctgcgtttcagaacctacaagcacaatgtgcaatactatcaatgtacttgaacc

SEQ ID NO: 465891 - DNA, 58 bp, Artificial
  Synthetic oligonucleotide
tgaattcttttcgttggatatgttattcatagctgtatgtgtacccggaacttagcgt

SEQ ID NO: 465892 - DNA, 60 bp, Artificial
  Synthetic oligonucleotide
tgaattgaaatcaactggtacattcaaaccgtatgcagcaactagtggcagttccattgc

SEQ ID NO: 465893 - DNA, 60 bp, Artificial
  Synthetic oligonucleotide
tgaattgaaatgaggacttctcaccctcatggacattcggcctcttcacgggtggcaccc

SEQ ID NO: 465894 - DNA, 60 bp, Artificial
  Synthetic oligonucleotide
tgaattgaagggagcgcacgcagaactatctaaaggtcgtcgtatccacatcgtagacca

SEQ ID NO: 465895 - DNA, 60 bp, Artificial
  Synthetic oligonucleotide
tgaattgaccgattcaagctggatagagcttgatgaaataggggaagatatcgccccaat

SEQ ID NO: 465896 - DNA, 60 bp, Artificial
  Synthetic oligonucleotide
tgaattgaggagcagatattgggctataaggaccagaagcggagggaacactaatcaaca

SEQ ID NO: 465897 - DNA, 51 bp, Artificial
  Synthetic oligonucleotide
tgaattggacacatctagcttcaagatatgttcccagaactcctatgagta

SEQ ID NO: 465898 - DNA, 60 bp, Artificial
  Synthetic oligonucleotide
tgaattggaccgtaataccttgcgctcccactggccatagtccacatgggagaagtccac

SEQ ID NO: 465899 - DNA, 57 bp, Artificial
  Synthetic oligonucleotide
tgaattgggcaagtcagatttatccagggattaaagtaaggcaattatgtaaactcc

SEQ ID NO: 465900 - DNA, 56 bp, Artificial
  Synthetic oligonucleotide
tgaattggggacactcaaaactctgaggaatgggggactcgggggacgcatttata

SEQ ID NO: 465901 - DNA, 54 bp, Artificial
  Synthetic oligonucleotide
tgaattggggtaatgggttacaatatatactataaccctcatttacggatttgc

SEQ ID NO: 465902 - DNA, 58 bp, Artificial
  Synthetic oligonucleotide
tgaattgggtgctggaagttctattacaggagccatagctatcacggcgccacatatc

SEQ ID NO: 465903 - DNA, 58 bp, Artificial
  Synthetic oligonucleotide
tgaattggtggaagaattcctctcccacgcttgagctaccacaacccatcaaccctaa

SEQ ID NO: 465904 - DNA, 55 bp, Artificial
  Synthetic oligonucleotide
tgaattgtgctgaatgtcaggtaatatgtgatccaccaagaattcgaagcgctcc

SEQ ID NO: 465905 - DNA, 60 bp, Artificial
  Synthetic oligonucleotide
tgaatttagcgaaatgggtcatttgatgcacgtttgagtctgatactcgataatataact

SEQ ID NO: 465906 - DNA, 60 bp, Artificial
  Synthetic oligonucleotide
tgaatttcatgaaggtgaagatatatggcatcttcgggtttgctggatctgggaagagtc

SEQ ID NO: 465907 - DNA, 59 bp, Artificial
  Synthetic oligonucleotide
tgaatttcccagaatttgatttgcagcctgtgcccaagagccaaccaactgttcgtact

SEQ ID NO: 465908 - DNA, 56 bp, Artificial
  Synthetic oligonucleotide
tgaatttcggtggctggaggattcctatcgttaatactcattttccggggaatcga

SEQ ID NO: 465909 - DNA, 60 bp, Artificial
  Synthetic oligonucleotide
tgaatttctatttgaaacatgggacccgctagatactccatattcatccatacaccataa

SEQ ID NO: 465910 - DNA, 55 bp, Artificial
  Synthetic oligonucleotide
tgaatttctcgctgaaggtgcagagttatttgacctaactattgagaagtacgct

SEQ ID NO: 465911 - DNA, 58 bp, Artificial
  Synthetic oligonucleotide
tgaatttgaaccacacctcccacaagactgtgcttatatcaaaggacaaaaagaacga

SEQ ID NO: 465912 - DNA, 60 bp, Artificial
  Synthetic oligonucleotide
tgaatttggcgaagtgagtccgttgatgaacatttgtatcgcaaacgcgatagtacaact

SEQ ID NO: 465913 - DNA, 60 bp, Artificial
  Synthetic oligonucleotide
tgaattttaccacaaatgtgatgacacgtgcatggagagcatcaaaaatgggacttatga

SEQ ID NO: 465914 - DNA, 55 bp, Artificial
  Synthetic oligonucleotide
tgaattttataataacggtcagctagttgacatggtcaggaacatgggagtggtc

SEQ ID NO: 465915 - DNA, 55 bp, Artificial
  Synthetic oligonucleotide
tgacaaaaacgaggtcgaaggggaggtacaggtggtctccacggctactcaatcc

SEQ ID NO: 465916 - DNA, 60 bp, Artificial
  Synthetic oligonucleotide
tgacaaaagacgctgaaagaggcaaattaaagagaagagcaattgcaacacccgggatgc

SEQ ID NO: 465917 - DNA, 53 bp, Artificial
  Synthetic oligonucleotide
tgacaaacacagagatgaagtcgacaagacaagtgctgacaacatggtgacaa

SEQ ID NO: 465918 - DNA, 57 bp, Artificial
  Synthetic oligonucleotide
tgacaaagaaagggtcgaattacccagttgccaaaggatcatacaataatacaagtg

SEQ ID NO: 465919 - DNA, 60 bp, Artificial
  Synthetic oligonucleotide
tgacaaagaagagatcagaaggatttggcgtcaggcgaacaatggagaagacgcaactgc

SEQ ID NO: 465920 - DNA, 55 bp, Artificial
  Synthetic oligonucleotide
tgacaaaggatgggtctgtgtttattcatctgagcaaggtgagacacgggccctg

SEQ ID NO: 465921 - DNA, 55 bp, Artificial
  Synthetic oligonucleotide
tgacaaatagaggtatgtcagagctccatgagtatattcagttgcaatgccaaag

SEQ ID NO: 465922 - DNA, 57 bp, Artificial
  Synthetic oligonucleotide
tgacaaatcaccgtcaacaaccgggtgaacccgaatggtcaatgtctgactataacc

SEQ ID NO: 465923 - DNA, 53 bp, Artificial
  Synthetic oligonucleotide
tgacaaatccatatgtggggattgggtggtgtgcgcctttggggtgtactatg

SEQ ID NO: 465924 - DNA, 60 bp, Artificial
  Synthetic oligonucleotide
tgacaaatgatcagattccaacgtgtgcgaacattatgagctctgtgtcaactaatgcat

SEQ ID NO: 465925 - DNA, 54 bp, Artificial
  Synthetic oligonucleotide
tgacaaatggcaccttggaacaaaacggaacgggtgtcgcttggaaatttgaag

SEQ ID NO: 465926 - DNA, 60 bp, Artificial
  Synthetic oligonucleotide
tgacaaatgttcggcacccacatctgtcgaccaggacgaacttgtgaccttattttagca

SEQ ID NO: 465927 - DNA, 60 bp, Artificial
  Synthetic oligonucleotide
tgacaaattatttcttatgtttaaaggattgatacagagatgtaattatcaatattcatt

SEQ ID NO: 465928 - DNA, 59 bp, Artificial
  Synthetic oligonucleotide
tgacaaattcaacccagtccccgatcaactccagggacctgatcaagccagatctatgt

SEQ ID NO: 465929 - DNA, 59 bp, Artificial
  Synthetic oligonucleotide
tgacaacacttgtgtaaacttccaggtgttgagcaaacgtttcaacactatgctaagta

SEQ ID NO: 465930 - DNA, 55 bp, Artificial
  Synthetic oligonucleotide
tgacaaccacagatgtatttgaggacttgtccacagttaatggtcaccctactgt

SEQ ID NO: 465931 - DNA, 60 bp, Artificial
  Synthetic oligonucleotide
tgacaacccttgcatcacattccaagttctgcattccttgtacaacgacttcctctccat

SEQ ID NO: 465932 - DNA, 59 bp, Artificial
  Synthetic oligonucleotide
tgacaacccttgcgtcaacttcctagttcttgcaggagtgtataacggcaaacttagca

SEQ ID NO: 465933 - DNA, 60 bp, Artificial
  Synthetic oligonucleotide
tgacaaccgtgacatggactgaaaagctcgcatctactgccggaaataaacctgttgcaa

SEQ ID NO: 465934 - DNA, 56 bp, Artificial
  Synthetic oligonucleotide
tgacaacctccaacacacaggccccacgacccgcccccactatataaaacacacca

SEQ ID NO: 465935 - DNA, 53 bp, Artificial
  Synthetic oligonucleotide
tgacaacctcttaaacactgaatccaacctatgtgagcggttccactttcact

SEQ ID NO: 465936 - DNA, 60 bp, Artificial
  Synthetic oligonucleotide
tgacaacgaccacaccttcgatgcgctccaagcaactcgtggtgcagtcgtcgccaaatg

SEQ ID NO: 465937 - DNA, 60 bp, Artificial
  Synthetic oligonucleotide
tgacaacgagaaaatgctgggcaccagagagcgcaagcttacgtatggctgcttgtgggc

SEQ ID NO: 465938 - DNA, 60 bp, Artificial
  Synthetic oligonucleotide
tgacaacgagcccagtacagctactgtgaagaacgatcttcgtgatcgttatcaagtctt

SEQ ID NO: 465939 - DNA, 60 bp, Artificial
  Synthetic oligonucleotide
tgacaacgccacgtccttggcggttgcgtcatcccacgcagaactattagcagcagtact

SEQ ID NO: 465940 - DNA, 60 bp, Artificial
  Synthetic oligonucleotide
tgacaacgcctgatgacagtcagagccctgaaccgccagtgagcacagccttacctgtca

SEQ ID NO: 465941 - DNA, 55 bp, Artificial
  Synthetic oligonucleotide
tgacaacgggagtcgctcacttgaggaggtccccttcagggccgcagactacacc

SEQ ID NO: 465942 - DNA, 59 bp, Artificial
  Synthetic oligonucleotide
tgacaacgtatgcaggttactcgtgttgggttctggatgttatgatgacgagtcgtcgg

SEQ ID NO: 465943 - DNA, 60 bp, Artificial
  Synthetic oligonucleotide
tgacaacgttaacaacaaaccaacttcgagcactgaatagtaagaatgagctcatagatg

SEQ ID NO: 465944 - DNA, 60 bp, Artificial
  Synthetic oligonucleotide
tgacaacgtttgcatcaccttccaggtactagccgcagagtacaacaacttcctctctac

SEQ ID NO: 465945 - DNA, 56 bp, Artificial
  Synthetic oligonucleotide
tgacaactatgctgtactgcaatttaatacggaagtgacaaaacaaatggtgcaag

SEQ ID NO: 465946 - DNA, 54 bp, Artificial
  Synthetic oligonucleotide
tgacaacttcattgccaatagcgaggctgtcgaaccgtgtatttagagacaaac

SEQ ID NO: 465947 - DNA, 59 bp, Artificial
  Synthetic oligonucleotide
tgacaagaccgaatcggctgcagctaagatcatcaaagatctatctgaccgaatagaga

SEQ ID NO: 465948 - DNA, 60 bp, Artificial
  Synthetic oligonucleotide
tgacaagacggtcagtactcaatgagtttgagaggtttagaagagctattgagtcgccaa

SEQ ID NO: 465949 - DNA, 53 bp, Artificial
  Synthetic oligonucleotide
tgacaagactggtgaggcaggtcacactctcaaatggcttttaaatgagctac

SEQ ID NO: 465950 - DNA, 60 bp, Artificial
  Synthetic oligonucleotide
tgacaagagataaggttatatacttggttgtggttcagccacgtcgcatatttaatagtg

SEQ ID NO: 465951 - DNA, 53 bp, Artificial
  Synthetic oligonucleotide
tgacaagagatggtagtactaataacacggctaacgagaccttcagacctaga

SEQ ID NO: 465952 - DNA, 55 bp, Artificial
  Synthetic oligonucleotide
tgacaagagatggtggtcatcctgataatcatgactgggaatcggactgagacct

SEQ ID NO: 465953 - DNA, 60 bp, Artificial
  Synthetic oligonucleotide
tgacaagagatggtggtgctaataatgcgagtaacgagaccttcagacctggaggaggag

SEQ ID NO: 465954 - DNA, 60 bp, Artificial
  Synthetic oligonucleotide
tgacaagaggagccgccctcagcgtggagggggccacatcaggaccatactgggcggatg

SEQ ID NO: 465955 - DNA, 60 bp, Artificial
  Synthetic oligonucleotide
tgacaagaggctctggatctggtattatcatttcagatacaccagtccacgattgcaata

SEQ ID NO: 465956 - DNA, 57 bp, Artificial
  Synthetic oligonucleotide
tgacaagagtttgccggtccccaaccctactgttgttatcaatgacccatcacccac

SEQ ID NO: 465957 - DNA, 60 bp, Artificial
  Synthetic oligonucleotide
tgacaagatagatcaatgcgaatgcactgataaactctttgatagactcaagggtaaagg

SEQ ID NO: 465958 - DNA, 55 bp, Artificial
  Synthetic oligonucleotide
tgacaaggaacatagtgagcttgagatcaatgtgcttatacctcaggttgctgtc

SEQ ID NO: 465959 - DNA, 60 bp, Artificial
  Synthetic oligonucleotide
tgacaaggaagcagaacttgagcaggctctagaagggagccttgacagacctgatcttcg

SEQ ID NO: 465960 - DNA, 59 bp, Artificial
  Synthetic oligonucleotide
tgacaagggaccccactgtctccgaacatgcatctttagtcggtcttctcctgagtctg

SEQ ID NO: 465961 - DNA, 57 bp, Artificial
  Synthetic oligonucleotide
tgacaagggttcaatctctacaactaaacccttccaaaacatctcgaggatatcaat

SEQ ID NO: 465962 - DNA, 52 bp, Artificial
  Synthetic oligonucleotide
tgacaaggttcctgcaatgttgcgacactggatggatgagacctccttctcg

SEQ ID NO: 465963 - DNA, 58 bp, Artificial
  Synthetic oligonucleotide
tgacaaggttcgactacagcttagagataatgcaaaggagttgggtaatggttgtttc

SEQ ID NO: 465964 - DNA, 60 bp, Artificial
  Synthetic oligonucleotide
tgacaaggtttatgatgatggagctccaccgtgttctataaaatgctggtttgcaaagtc

SEQ ID NO: 465965 - DNA, 55 bp, Artificial
  Synthetic oligonucleotide
tgacaagtactcgaaatggtatattgactcacgactgctccccagagaccacccc

SEQ ID NO: 465966 - DNA, 55 bp, Artificial
  Synthetic oligonucleotide
tgacaagtggtactttagcaaagacgtttgtgacacaactttggttaacttagac

SEQ ID NO: 465967 - DNA, 59 bp, Artificial
  Synthetic oligonucleotide
tgacaagttcgctcaggggtggggtcccatcactcatgtcgtgcctaacatctcggacc

SEQ ID NO: 465968 - DNA, 58 bp, Artificial
  Synthetic oligonucleotide
tgacaagttcgctcaggggtggggtcccatcacttacgctaagccggccagcttggac

SEQ ID NO: 465969 - DNA, 60 bp, Artificial
  Synthetic oligonucleotide
tgacaagttgtggtccctataaatgtagatgacaacgacagcacatgaactctttaattt

SEQ ID NO: 465970 - DNA, 60 bp, Artificial
  Synthetic oligonucleotide
tgacaataccattcattactgatctatacctacttgacaccgttctttcggatcctaatg

SEQ ID NO: 465971 - DNA, 57 bp, Artificial
  Synthetic oligonucleotide
tgacaatacctcgcgcacttatgatatctctgaccgtacgtacccgaagtttgtgaa

SEQ ID NO: 465972 - DNA, 60 bp, Artificial
  Synthetic oligonucleotide
tgacaatactagtgtgtctactgattgctcaaaacaccatcctaatagtcgcagcatcgg

SEQ ID NO: 465973 - DNA, 59 bp, Artificial
  Synthetic oligonucleotide
tgacaataggcgaatgccccaaatatgtaaaatcggagaaattggtcctagcaacagga

SEQ ID NO: 465974 - DNA, 52 bp, Artificial
  Synthetic oligonucleotide
tgacaatagtacccctcactaacaagataataacgatagtacccctgggaac

SEQ ID NO: 465975 - DNA, 55 bp, Artificial
  Synthetic oligonucleotide
tgacaatatgtgacagctatgcacaagtacgaacatccacaaggttgatcaactc

SEQ ID NO: 465976 - DNA, 56 bp, Artificial
  Synthetic oligonucleotide
tgacaatcgtgctgtaccagcctgtagcagccgagaatataactcaatggaacctg

SEQ ID NO: 465977 - DNA, 51 bp, Artificial
  Synthetic oligonucleotide
tgacaatctcacatccactcatttgggcaagactccaggcatctacagtac

SEQ ID NO: 465978 - DNA, 60 bp, Artificial
  Synthetic oligonucleotide
tgacaatgaacccagtactgctacggtcaagaacgatcttcgtgatcgttatcaagttat

SEQ ID NO: 465979 - DNA, 60 bp, Artificial
  Synthetic oligonucleotide
tgacaatgatccagaatttgaatcagggcgagatcgtatacaccactacggatagggtaa

SEQ ID NO: 465980 - DNA, 55 bp, Artificial
  Synthetic oligonucleotide
tgacaattacggaataacgaaaacgcaggctatggagttgttgcagtcaaatccg

SEQ ID NO: 465981 - DNA, 60 bp, Artificial
  Synthetic oligonucleotide
tgacaattggaatttccggcccagacaatggggctgtggctgtattgaagtacaatggca

SEQ ID NO: 465982 - DNA, 60 bp, Artificial
  Synthetic oligonucleotide
tgacaattgttgtgatttgtgaactttacatctagctcttgcataacgccttgtttcatc

SEQ ID NO: 465983 - DNA, 60 bp, Artificial
  Synthetic oligonucleotide
tgacacaagagggcactataacttttcttttaaatgtcaaaatgcagctacggacgatga

SEQ ID NO: 465984 - DNA, 59 bp, Artificial
  Synthetic oligonucleotide
tgacacaagccgccccaatgaccccactaatgggaactgtgatgcgccaataacagggg

SEQ ID NO: 465985 - DNA, 60 bp, Artificial
  Synthetic oligonucleotide
tgacacaaggccgacagacctatgactggactctgaatagaaaccagcctgctgctacag

SEQ ID NO: 465986 - DNA, 55 bp, Artificial
  Synthetic oligonucleotide
tgacacaatgaacagtttaactctgcctactgacgttaacttatgcaacactgac

SEQ ID NO: 465987 - DNA, 60 bp, Artificial
  Synthetic oligonucleotide
tgacacacgccaaagaattactccacacagagcacaatggaatgctgtgtgcaacaaatc

SEQ ID NO: 465988 - DNA, 53 bp, Artificial
  Synthetic oligonucleotide
tgacacactccggaggttggttccgcgcgtaatttccacaggtgctcggaatc

SEQ ID NO: 465989 - DNA, 60 bp, Artificial
  Synthetic oligonucleotide
tgacacactgttagaaaacgatgttccggttacaagctctgttgatctggttgagactaa

SEQ ID NO: 465990 - DNA, 55 bp, Artificial
  Synthetic oligonucleotide
tgacacagaacaatttgatagaatgctgttctcgggtgatgattcactcgctttc

SEQ ID NO: 465991 - DNA, 59 bp, Artificial
  Synthetic oligonucleotide
tgacacagtaccacaccaagacgtctgtgatcgactcaatctcctgtaattcggtgacc

SEQ ID NO: 465992 - DNA, 58 bp, Artificial
  Synthetic oligonucleotide
tgacacagtgccaatttgaaataagtcaaactgagaccctcccgtcatagaaactttc

SEQ ID NO: 465993 - DNA, 59 bp, Artificial
  Synthetic oligonucleotide
tgacacagtggtcgattttcatgcagctacggctgagcctagcggttaactgcgacgcc

SEQ ID NO: 465994 - DNA, 58 bp, Artificial
  Synthetic oligonucleotide
tgacacattgttgttcttagggcccctagagcaaggtggtgttatattaaagcaatgg

SEQ ID NO: 465995 - DNA, 55 bp, Artificial
  Synthetic oligonucleotide
tgacaccaactattcaggcttcatgcccaactgtagcaaagtagtagtatcctct

SEQ ID NO: 465996 - DNA, 58 bp, Artificial
  Synthetic oligonucleotide
tgacaccaccatctcctgcgagtcgatgagcagcgttgcgctgcagtcgattgaatac

SEQ ID NO: 465997 - DNA, 60 bp, Artificial
  Synthetic oligonucleotide
tgacaccagcggtagcggcgttatttccaaacgcgcagccatttgagcatcatgctacag

SEQ ID NO: 465998 - DNA, 59 bp, Artificial
  Synthetic oligonucleotide
tgacaccagtactacaaggactgctgacaccgagtttgctacaagggactttccgctgg

SEQ ID NO: 465999 - DNA, 60 bp, Artificial
  Synthetic oligonucleotide
tgacacccagtcagagattgacgacattggctgggctaagacacaagcgtatttggtcac

SEQ ID NO: 466000 - DNA, 57 bp, Artificial
  Synthetic oligonucleotide
tgacaccccacactatctactgtaaaaccaaatcatcgaaattctcaaacggaggtg

SEQ ID NO: 466001 - DNA, 57 bp, Artificial
  Synthetic oligonucleotide
tgacacccggtaatacgaatacgcgtgtttcccgttattcgagtagcgcgcgccaca

SEQ ID NO: 466002 - DNA, 59 bp, Artificial
  Synthetic oligonucleotide
tgacacccttcccgtgagtgtcaatcagctgagtaacttgaaagggtatgttactggtc

SEQ ID NO: 466003 - DNA, 60 bp, Artificial
  Synthetic oligonucleotide
tgacaccgaaaattatcccgaatagagtctctcccagttgggtcaatgacgtcatatgtg

SEQ ID NO: 466004 - DNA, 54 bp, Artificial
  Synthetic oligonucleotide
tgacaccgactcaaaacccagtataccacaagaaaaggtggtagaacctttgcc

SEQ ID NO: 466005 - DNA, 55 bp, Artificial
  Synthetic oligonucleotide
tgacaccgtccgctagaaatacccgacaccgtcagcaataacgcgccatcgcggc

SEQ ID NO: 466006 - DNA, 56 bp, Artificial
  Synthetic oligonucleotide
tgacaccttaaacgtagatagaccagttccagcgactataaccttccacgctaaag

SEQ ID NO: 466007 - DNA, 58 bp, Artificial
  Synthetic oligonucleotide
tgacacgagtcggctgtacagctgtgcctgccctcaccgtgtcaaaagctaaggcatg

SEQ ID NO: 466008 - DNA, 55 bp, Artificial
  Synthetic oligonucleotide
tgacacgatggagtcctctgccaagagaaagatggaccctgacaaccctgacgag

SEQ ID NO: 466009 - DNA, 55 bp, Artificial
  Synthetic oligonucleotide
tgacacgcacaggcccgagtcatgcagtacaccacccacacacgagctcgtaggc

SEQ ID NO: 466010 - DNA, 55 bp, Artificial
  Synthetic oligonucleotide
tgacacgccggggtttacgtaaagctgataagccatgtccattaaccacgtgtgc

SEQ ID NO: 466011 - DNA, 60 bp, Artificial
  Synthetic oligonucleotide
tgacacggtgtttgatatgactgggtgagctaaaaacttaacacactggtcacgatgtga

SEQ ID NO: 466012 - DNA, 59 bp, Artificial
  Synthetic oligonucleotide
tgacacgtagcaaaccgtttcctagacgccctccttaacctgcacagatagctcctcta

SEQ ID NO: 466013 - DNA, 60 bp, Artificial
  Synthetic oligonucleotide
tgacacgtatgcgctggaagatttggtgcagttgcctttctgtgtcgttggcccaaccgt

SEQ ID NO: 466014 - DNA, 50 bp, Artificial
  Synthetic oligonucleotide
tgacacgtggaaacgtgagagggctgtcttcgaagaggtgaaatcttgca

SEQ ID NO: 466015 - DNA, 55 bp, Artificial
  Synthetic oligonucleotide
tgacacgtgtaatcgcactaagtctgtcggccaataatggagggaacacgtggag

SEQ ID NO: 466016 - DNA, 60 bp, Artificial
  Synthetic oligonucleotide
tgacacgtgtcgcccagcgaagcctaaagctaagcgaggcggcaacgcatatatgtcaga

SEQ ID NO: 466017 - DNA, 60 bp, Artificial
  Synthetic oligonucleotide
tgacactacatttcaagcagaatgaatgcagcaacccatcgaataatcaagtagtgccat

SEQ ID NO: 466018 - DNA, 56 bp, Artificial
  Synthetic oligonucleotide
tgacactagaaattggtatggcggagaaataccaacaaccggacccaccttcatcc

SEQ ID NO: 466019 - DNA, 57 bp, Artificial
  Synthetic oligonucleotide
tgacactatcggtagtaagcctcctgataggaattgccaacttaggtttaaacatcg

SEQ ID NO: 466020 - DNA, 59 bp, Artificial
  Synthetic oligonucleotide
tgacactatgatgcaagttaatatcagaggggtcaacacagtgaaccttaactctgctt

SEQ ID NO: 466021 - DNA, 55 bp, Artificial
  Synthetic oligonucleotide
tgacactcatatgctatcatggatgctttcacaagttacaactatagcttcactt

SEQ ID NO: 466022 - DNA, 60 bp, Artificial
  Synthetic oligonucleotide
tgacactcgtgcgttggtgattcgagccatgaatgacttcttcccggccaaggttggaga

SEQ ID NO: 466023 - DNA, 59 bp, Artificial
  Synthetic oligonucleotide
tgacactctcatgtcgctggcctgtgagtacgatgaagactgcccccaccattcttcta

SEQ ID NO: 466024 - DNA, 58 bp, Artificial
  Synthetic oligonucleotide
tgacactctccttggcgggttaccgacagaattgatttcgtcggctggaggtcaactg

SEQ ID NO: 466025 - DNA, 59 bp, Artificial
  Synthetic oligonucleotide
tgacactctgcatcttgagcgagctgtgccggctaccattacctttcatggtaaggctg

SEQ ID NO: 466026 - DNA, 60 bp, Artificial
  Synthetic oligonucleotide
tgacactgatactggtactcaaacactggtgacaggctaaggatgcccttcaggtacccc

SEQ ID NO: 466027 - DNA, 55 bp, Artificial
  Synthetic oligonucleotide
tgacactggatccaaaggtctctttacctttgccacgtgtagccacggatgctac

SEQ ID NO: 466028 - DNA, 55 bp, Artificial
  Synthetic oligonucleotide
tgacactgttctacgagaaggcgcccgtttcggggctagaaaacgcagacgcctc

SEQ ID NO: 466029 - DNA, 60 bp, Artificial
  Synthetic oligonucleotide
tgacacttacaaggaagtttgatcttgcgaggacgcttcttgattgttatcaaagagagg

SEQ ID NO: 466030 - DNA, 55 bp, Artificial
  Synthetic oligonucleotide
tgacacttacgaaacatctactagcgtaccaaaactgttggagtccatacccggt

SEQ ID NO: 466031 - DNA, 56 bp, Artificial
  Synthetic oligonucleotide
tgacacttcaaagttacacttccaaagaagtgctaggctttgaacttttctttgaa

SEQ ID NO: 466032 - DNA, 52 bp, Artificial
  Synthetic oligonucleotide
tgacacttggtacttccctaacggtgctgatggtctatctgagtctgttcta

SEQ ID NO: 466033 - DNA, 60 bp, Artificial
  Synthetic oligonucleotide
tgacagaatgctctacattcttgacctcaatcaaagcttgtgacaaggcaatctgttatg

SEQ ID NO: 466034 - DNA, 58 bp, Artificial
  Synthetic oligonucleotide
tgacagacagacagcgattcgataagatagcgtcacggttgcagcgaaagcagcgact

SEQ ID NO: 466035 - DNA, 60 bp, Artificial
  Synthetic oligonucleotide
tgacagacatacagaaagagcattagctagatctcaatctaggatgctaggtttaaggcc

SEQ ID NO: 466036 - DNA, 60 bp, Artificial
  Synthetic oligonucleotide
tgacagactcagatgatagccttgcagcttttactcccaatcaacctgttgtcaatacat

SEQ ID NO: 466037 - DNA, 60 bp, Artificial
  Synthetic oligonucleotide
tgacagactgaagttgtagccagagatgttaatagagctctcgtctttggtcacgatttg

SEQ ID NO: 466038 - DNA, 60 bp, Artificial
  Synthetic oligonucleotide
tgacagagccgaccagctactcaatatgcggctccgggtcgttacccataggtgtggcca

SEQ ID NO: 466039 - DNA, 60 bp, Artificial
  Synthetic oligonucleotide
tgacagaggggaccagtggatcggaaattcacagatttagagacaccagtttaaagcatg

SEQ ID NO: 466040 - DNA, 57 bp, Artificial
  Synthetic oligonucleotide
tgacagaggggttgcttgctagaattcccgaagttagcaagaaagacattccttggg

SEQ ID NO: 466041 - DNA, 60 bp, Artificial
  Synthetic oligonucleotide
tgacagatacgcagaaattcctgaggacgctgtctgtcacaatactttccagacatgtga

SEQ ID NO: 466042 - DNA, 56 bp, Artificial
  Synthetic oligonucleotide
tgacagatgatagatcaaaacctactcaaggtcagacaattgtgttaaacacagac

SEQ ID NO: 466043 - DNA, 60 bp, Artificial
  Synthetic oligonucleotide
tgacagattatacatttgacgttaaaatgatacgggttgatggagatgacaattatgcta

SEQ ID NO: 466044 - DNA, 60 bp, Artificial
  Synthetic oligonucleotide
tgacagcaccccttacctgaagacctttctatctgtcgtaagggagcatgcacttaagga

SEQ ID NO: 466045 - DNA, 60 bp, Artificial
  Synthetic oligonucleotide
tgacagcagagatatttaacgtttatagctttagagatcatacttggcatggattaagaa

SEQ ID NO: 466046 - DNA, 60 bp, Artificial
  Synthetic oligonucleotide
tgacagcagtcactccagtacatatcaccaattatggaatatcccttgaggatttattcc

SEQ ID NO: 466047 - DNA, 60 bp, Artificial
  Synthetic oligonucleotide
tgacagcagtgcgtgacatgtggtatcaggaggccagctaacagtggttagcagtgctaa

SEQ ID NO: 466048 - DNA, 55 bp, Artificial
  Synthetic oligonucleotide
tgacagcataatcacggttcagggcaaatcagcagagaccctcggaaagagcgca

SEQ ID NO: 466049 - DNA, 60 bp, Artificial
  Synthetic oligonucleotide
tgacagcatgtcagggagtgggaggacctggccataaggcaagggtgttggctgaggcaa

SEQ ID NO: 466050 - DNA, 53 bp, Artificial
  Synthetic oligonucleotide
tgacagccacctggcattcgagcacatagcccgagagctgcatccggagttct

SEQ ID NO: 466051 - DNA, 60 bp, Artificial
  Synthetic oligonucleotide
tgacagcccaactgattctcttgggccagcactcaacatgtggacctacctgcaaactgt

SEQ ID NO: 466052 - DNA, 60 bp, Artificial
  Synthetic oligonucleotide
tgacagcccatggctattgcggctccgttatggttgcagatgctggagtctggaaaggca

SEQ ID NO: 466053 - DNA, 60 bp, Artificial
  Synthetic oligonucleotide
tgacagccggcagaatcagtgagatgggtgtctgctttggaacaatccctgtggccgatc

SEQ ID NO: 466054 - DNA, 55 bp, Artificial
  Synthetic oligonucleotide
tgacagcctagtgcgacgaagtacgaacatccacagggtagatcaaccctcctcc

SEQ ID NO: 466055 - DNA, 60 bp, Artificial
  Synthetic oligonucleotide
tgacagcgcagaacctgcctgccagctacaactactgcaggctagtgagcaggagtctaa

SEQ ID NO: 466056 - DNA, 55 bp, Artificial
  Synthetic oligonucleotide
tgacagctatggacttagagcttcccatatctgcaaaactattacaccatccaac

SEQ ID NO: 466057 - DNA, 60 bp, Artificial
  Synthetic oligonucleotide
tgacagctatttccaacaggccgactactgcgataaggtctcagccatgctccgacgcct

SEQ ID NO: 466058 - DNA, 60 bp, Artificial
  Synthetic oligonucleotide
tgacaggaccttacaccgatcagtcaaagctggatatgtgcagggattttatcactagct

SEQ ID NO: 466059 - DNA, 60 bp, Artificial
  Synthetic oligonucleotide
tgacaggattagactgcataagaccttgtttctgggttgagctaatcagagggcggccca

SEQ ID NO: 466060 - DNA, 55 bp, Artificial
  Synthetic oligonucleotide
tgacagggacaacgaccctctcccaggggcgacagcaagcccccaaggacaaaac

SEQ ID NO: 466061 - DNA, 55 bp, Artificial
  Synthetic oligonucleotide
tgacagggacccacgggccgaaagccacgtcctaacggacccaccatgtgtgcaa

SEQ ID NO: 466062 - DNA, 58 bp, Artificial
  Synthetic oligonucleotide
tgacagggcaagtttcttcaaaggagaatcactaggagtccagagtgaggttccttta

SEQ ID NO: 466063 - DNA, 56 bp, Artificial
  Synthetic oligonucleotide
tgacagggcccgatttgattgggccgacggggttgggttgagcagccttcgtcgtg

SEQ ID NO: 466064 - DNA, 55 bp, Artificial
  Synthetic oligonucleotide
tgacaggggctgttcatatgaaagggcaccccgcgtttctgttgtcagggcgtag

SEQ ID NO: 466065 - DNA, 55 bp, Artificial
  Synthetic oligonucleotide
tgacagggtgatgcagctaaccctaggcaattcaacgatcaccacccaagaagcg

SEQ ID NO: 466066 - DNA, 50 bp, Artificial
  Synthetic oligonucleotide
tgacaggtgatattgacttgagctctaaggcgagtaactctcatcgttat

SEQ ID NO: 466067 - DNA, 60 bp, Artificial
  Synthetic oligonucleotide
tgacaggtggagaaaagcgcaggctagcactctcaatatatctaatctaagaggactatg

SEQ ID NO: 466068 - DNA, 51 bp, Artificial
  Synthetic oligonucleotide
tgacaggtgggcagtgctaccgcgccacgccaaacccgggccatccatcct

SEQ ID NO: 466069 - DNA, 55 bp, Artificial
  Synthetic oligonucleotide
tgacaggttgtgattatgttgtttgggttgctaatgaattgtcacgcctagttaa

SEQ ID NO: 466070 - DNA, 52 bp, Artificial
  Synthetic oligonucleotide
tgacagtcaactagcacgcagacacatggcccgcgagctacatccggagttt

SEQ ID NO: 466071 - DNA, 52 bp, Artificial
  Synthetic oligonucleotide
tgacagtcattcggtttccttccggttgttgtaaccgggggtgtatagaccc

SEQ ID NO: 466072 - DNA, 55 bp, Artificial
  Synthetic oligonucleotide
tgacagtcgcgatattgtcactgagacatggagatgtccgcaagatgttatttcc

SEQ ID NO: 466073 - DNA, 60 bp, Artificial
  Synthetic oligonucleotide
tgacagtgacagcaagccccaaggcgagccacaactactagccaaagggcatacagttga

SEQ ID NO: 466074 - DNA, 55 bp, Artificial
  Synthetic oligonucleotide
tgacagtggaaacaaggccaagtgaagactttgagttcgtgatgattcgagcccc

SEQ ID NO: 466075 - DNA, 60 bp, Artificial
  Synthetic oligonucleotide
tgacagtggatcaataactatgaatgacttgtactgggaagaaagattttggagagctcg

SEQ ID NO: 466076 - DNA, 55 bp, Artificial
  Synthetic oligonucleotide
tgacagtggatgttctagtatgttctcgatagtgggtttaaccaactcactacgg

SEQ ID NO: 466077 - DNA, 55 bp, Artificial
  Synthetic oligonucleotide
tgacagttagcggatcaatcgatgttccagttcaaacgttgacagttgaagctgg

SEQ ID NO: 466078 - DNA, 55 bp, Artificial
  Synthetic oligonucleotide
tgacagttatcatgagcggtctgatggtctggtgcattgaaaatggttgctcacc

SEQ ID NO: 466079 - DNA, 55 bp, Artificial
  Synthetic oligonucleotide
tgacagttcacggaggtgaggaggcgcgatggacgccgcatcccattacgtcgct

SEQ ID NO: 466080 - DNA, 60 bp, Artificial
  Synthetic oligonucleotide
tgacataacattctcagtagggctctctacttacgtagtaggctctcagcttccctgcga

SEQ ID NO: 466081 - DNA, 52 bp, Artificial
  Synthetic oligonucleotide
tgacataataggagacataagaaacgcatattgtaacattactcaaagagac

SEQ ID NO: 466082 - DNA, 60 bp, Artificial
  Synthetic oligonucleotide
tgacataataggagacataagacgggcgtattgtaacattagtgaggctgcctggaataa

SEQ ID NO: 466083 - DNA, 60 bp, Artificial
  Synthetic oligonucleotide
tgacataataggagacataagagaagcacattgtaacattaatagaactcaatggaacag

SEQ ID NO: 466084 - DNA, 50 bp, Artificial
  Synthetic oligonucleotide
tgacataccccaccaatttaaagatgtgtctaagctcatagccacagatg

SEQ ID NO: 466085 - DNA, 59 bp, Artificial
  Synthetic oligonucleotide
tgacatacgagtgtgtggaagggaagtagtcaccgaaatctcagtttcgaacacgccaa

SEQ ID NO: 466086 - DNA, 51 bp, Artificial
  Synthetic oligonucleotide
tgacatacgtgataagattgtcagatggcaagacgtgtctgtcctggtggt

SEQ ID NO: 466087 - DNA, 60 bp, Artificial
  Synthetic oligonucleotide
tgacatatatggggactcctgttttttttatgccagacgggaacaatgttatgctagaca

SEQ ID NO: 466088 - DNA, 55 bp, Artificial
  Synthetic oligonucleotide
tgacatatcagtaggtacaacaatactaggggtagatgcaaatactaatgcggtt

SEQ ID NO: 466089 - DNA, 60 bp, Artificial
  Synthetic oligonucleotide
tgacatatgctctgtcagactcattcaagccaagacaggatgtagcagaaggtgaggcat

SEQ ID NO: 466090 - DNA, 60 bp, Artificial
  Synthetic oligonucleotide
tgacatatggatccactttcgatgaaggcgttattcatgtgcagtatcaatttgttactc

SEQ ID NO: 466091 - DNA, 55 bp, Artificial
  Synthetic oligonucleotide
tgacatatgtgccagatcaagttgatatctcgaataggagggcaacacatagtca

SEQ ID NO: 466092 - DNA, 60 bp, Artificial
  Synthetic oligonucleotide
tgacatatgtgcgctttcaatccaccaatcgtgtcgcacttaccctaggggctattgtca

SEQ ID NO: 466093 - DNA, 60 bp, Artificial
  Synthetic oligonucleotide
tgacatcaatgcagtattttcgcggcaaggcgaagacatcgtgtttacttttctagaaga

SEQ ID NO: 466094 - DNA, 58 bp, Artificial
  Synthetic oligonucleotide
tgacatcactaagctactgatagcagtactgggcccactatatttaatacaggccgcc

SEQ ID NO: 466095 - DNA, 58 bp, Artificial
  Synthetic oligonucleotide
tgacatcactacccccagtggatacgattccgccatttcgatcgttaacaacaccaat

SEQ ID NO: 466096 - DNA, 60 bp, Artificial
  Synthetic oligonucleotide
tgacatcagactcttggtccactgttagcggatcggaggacgtcgtgtgctgttcgatgt

SEQ ID NO: 466097 - DNA, 60 bp, Artificial
  Synthetic oligonucleotide
tgacatcaggaccaggtatgtttaaagcagtaactgagtcaactactgaagtgggcaatt

SEQ ID NO: 466098 - DNA, 59 bp, Artificial
  Synthetic oligonucleotide
tgacatcagtaaaatttacgaagagggtcttcacgatatggaagaatacttaagcacaa

SEQ ID NO: 466099 - DNA, 59 bp, Artificial
  Synthetic oligonucleotide
tgacatcatgtggataccgtgcagtagtcgtgtcctggctccctacggggatttccgga

SEQ ID NO: 466100 - DNA, 60 bp, Artificial
  Synthetic oligonucleotide
tgacatccaggtggagctagaaagggcttactacgccgctccagtgtcagaagcagagct

SEQ ID NO: 466101 - DNA, 60 bp, Artificial
  Synthetic oligonucleotide
tgacatcccggagacacgtcgtgatgcaatgcttggtacacatgtcgtgtgggacttagg

SEQ ID NO: 466102 - DNA, 60 bp, Artificial
  Synthetic oligonucleotide
tgacatccgtgttgaggagtcaatctaccaatgttgtgacttggcccccgaagccaggca

SEQ ID NO: 466103 - DNA, 60 bp, Artificial
  Synthetic oligonucleotide
tgacatccttcttactcggtgccctaaagcagtcaggcggtcagttaatggagcactatc

SEQ ID NO: 466104 - DNA, 60 bp, Artificial
  Synthetic oligonucleotide
tgacatccttttcatcctgaaggtctccagatacacattagcgtactcggatatcgttct

SEQ ID NO: 466105 - DNA, 60 bp, Artificial
  Synthetic oligonucleotide
tgacatcgaccaaagtctaatcattgcggctagaaacattgtcagaagggcaacagtctc

SEQ ID NO: 466106 - DNA, 60 bp, Artificial
  Synthetic oligonucleotide
tgacatcggagtcaacctccttcatgatgtaatcacgaacttggttgcagtctttggcag

SEQ ID NO: 466107 - DNA, 55 bp, Artificial
  Synthetic oligonucleotide
tgacatcgtaacgcgcaccgagtctatcagaagtgacaaggcagtggacccggac

SEQ ID NO: 466108 - DNA, 55 bp, Artificial
  Synthetic oligonucleotide
tgacatcgtgatgcgactgcgtgaccaagcggatgcctcgccggtagtcgctcag

SEQ ID NO: 466109 - DNA, 58 bp, Artificial
  Synthetic oligonucleotide
tgacatctacgcctcaatttccgacgctagatcgaacaccccatgcctcacagaccaa

SEQ ID NO: 466110 - DNA, 55 bp, Artificial
  Synthetic oligonucleotide
tgacatctcaagcgaactcgggaaagtcaaccaaagtctatctaatgtcgaagat

SEQ ID NO: 466111 - DNA, 60 bp, Artificial
  Synthetic oligonucleotide
tgacatctgacgagctcttagctccctgaatgtttggatggaaatgtgctgacctagttg

SEQ ID NO: 466112 - DNA, 60 bp, Artificial
  Synthetic oligonucleotide
tgacatctgacgagcttttagccgcctgaatgttcggatggaaatgtgctgacctgtttg

SEQ ID NO: 466113 - DNA, 60 bp, Artificial
  Synthetic oligonucleotide
tgacatctggcacttgtaaagtgggatcactggaaaacagggattgcaaaagagacatca

SEQ ID NO: 466114 - DNA, 60 bp, Artificial
  Synthetic oligonucleotide
tgacatctgttagacaagaatatgcgataccagttggaccagtctttccgccgggtatga

SEQ ID NO: 466115 - DNA, 53 bp, Artificial
  Synthetic oligonucleotide
tgacatctttagttgcatccctactacattatcatcacaatatactgcattca

SEQ ID NO: 466116 - DNA, 60 bp, Artificial
  Synthetic oligonucleotide
tgacatgaaagaacttgcaagtgagggcaccaaatatggcttatctatcacgccagctga

SEQ ID NO: 466117 - DNA, 60 bp, Artificial
  Synthetic oligonucleotide
tgacatgaagatagagtgcccgcatacagtcaactttggtgaaaacagtgtgataggcta

SEQ ID NO: 466118 - DNA, 51 bp, Artificial
  Synthetic oligonucleotide
tgacatgacatacagtagaatccctactgtgctgacaaacatgcttgagaa

SEQ ID NO: 466119 - DNA, 56 bp, Artificial
  Synthetic oligonucleotide
tgacatgcaacagcattgcagcggccctgaaaatagcacagttcgggccctgcgtc

SEQ ID NO: 466120 - DNA, 59 bp, Artificial
  Synthetic oligonucleotide
tgacatgcatatatatttggccgaaataggaaatgagctcattattacgtggtatacag

SEQ ID NO: 466121 - DNA, 60 bp, Artificial
  Synthetic oligonucleotide
tgacatgcatgctggtctgcaaaatcagattaggatagaaaaggacaaggcacaccagat

SEQ ID NO: 466122 - DNA, 58 bp, Artificial
  Synthetic oligonucleotide
tgacatgcgtagtgtgacacctgcccctaggtcaatgggggtagggggcgggctaaga

SEQ ID NO: 466123 - DNA, 57 bp, Artificial
  Synthetic oligonucleotide
tgacatgcgtgagcgagtttcgactttgacgacagctgattctacgagacgtattcg

SEQ ID NO: 466124 - DNA, 60 bp, Artificial
  Synthetic oligonucleotide
tgacatggactaagataatactagcaacattgttaattctattaattggtcaaaacacgc

SEQ ID NO: 466125 - DNA, 60 bp, Artificial
  Synthetic oligonucleotide
tgacatggagagaaacctaatccaaaatgcacatgctgtggaaagaattctattggctgc

SEQ ID NO: 466126 - DNA, 60 bp, Artificial
  Synthetic oligonucleotide
tgacatggagttgcataccaagaaagttgaaatatcaggcttgaaatttgcaagtctggc

SEQ ID NO: 466127 - DNA, 60 bp, Artificial
  Synthetic oligonucleotide
tgacatggccggcccaactggatatgccccggctacgtctcagcaaggactattaggctc

SEQ ID NO: 466128 - DNA, 52 bp, Artificial
  Synthetic oligonucleotide
tgacatgggtttcaaagacctgtgtcactccatgcgtagtcatggcgttagg

SEQ ID NO: 466129 - DNA, 59 bp, Artificial
  Synthetic oligonucleotide
tgacatgtacgccacagtgtttggaatgtgggtcaaacctgaaaaagtgaaaatctcaa

SEQ ID NO: 466130 - DNA, 60 bp, Artificial
  Synthetic oligonucleotide
tgacatgtgcaattctctcatcggctgcgtctaccaggccaagagagagtgctttgacat

SEQ ID NO: 466131 - DNA, 60 bp, Artificial
  Synthetic oligonucleotide
tgacatgttccactacggtgtgtacttgtcacatggttacattctagatactgtgggtgt

SEQ ID NO: 466132 - DNA, 56 bp, Artificial
  Synthetic oligonucleotide
tgacatgttggaagtgtggaacaaagtgtggatccaagacaacgaatggatgctgg

SEQ ID NO: 466133 - DNA, 50 bp, Artificial
  Synthetic oligonucleotide
tgacattacctcttatggtgatgcatctgtctctctagtcaccgctggtg

SEQ ID NO: 466134 - DNA, 60 bp, Artificial
  Synthetic oligonucleotide
tgacattatatacaaccctttcacagacaagggcacaggcaacataatctggatagacta

SEQ ID NO: 466135 - DNA, 55 bp, Artificial
  Synthetic oligonucleotide
tgacattatcactgcacaacgtttcatgtgtgttgccgcaatagctcgtgaactc

SEQ ID NO: 466136 - DNA, 60 bp, Artificial
  Synthetic oligonucleotide
tgacattcacccatactcgtacaccaccaacttggcgataagtctggcccacagtgacag

SEQ ID NO: 466137 - DNA, 60 bp, Artificial
  Synthetic oligonucleotide
tgacattccttgcacgagtttacctcgatccctggtcgtcaccggcttctgtgcagtcac

SEQ ID NO: 466138 - DNA, 60 bp, Artificial
  Synthetic oligonucleotide
tgacattcgagcgatggttcgagactcggatcacatctggccagcaaggatatgcaccac

SEQ ID NO: 466139 - DNA, 60 bp, Artificial
  Synthetic oligonucleotide
tgacattcgtgcattttcagagcacaaatagggtcgcgctcactatgggagcagtggttg

SEQ ID NO: 466140 - DNA, 58 bp, Artificial
  Synthetic oligonucleotide
tgacattgaacgttacaacgttcccgacttagcagtgcgttgtcacgcagcctggttt

SEQ ID NO: 466141 - DNA, 55 bp, Artificial
  Synthetic oligonucleotide
tgacattgcatcacacccacttgcaaccacattgattggtgagatagctagctat

SEQ ID NO: 466142 - DNA, 55 bp, Artificial
  Synthetic oligonucleotide
tgacattgctacatggtatgctacccctatggattcagcagctaactgccattgg

SEQ ID NO: 466143 - DNA, 55 bp, Artificial
  Synthetic oligonucleotide
tgacattgtaagttgcgttagcaactaagttgaggaagtcgacgctgtgttgcca

SEQ ID NO: 466144 - DNA, 56 bp, Artificial
  Synthetic oligonucleotide
tgacatttagtggggactgtactatgttgaataattacgttagaggtattggtagg

SEQ ID NO: 466145 - DNA, 59 bp, Artificial
  Synthetic oligonucleotide
tgacatttccacccccagagccggagtggacataccctcgtttatcttgccagggctca

SEQ ID NO: 466146 - DNA, 59 bp, Artificial
  Synthetic oligonucleotide
tgacatttgtaatagtgcaacgattaccggactcgatgaatttatcgttatttttgtga

SEQ ID NO: 466147 - DNA, 60 bp, Artificial
  Synthetic oligonucleotide
tgaccaaaccaacaaggccacacgttgcaaaattgtacagacctttcagcactgctagta

SEQ ID NO: 466148 - DNA, 58 bp, Artificial
  Synthetic oligonucleotide
tgaccaaaccacgcataagcacttctggcttcagaaggggtcagttgttattaacctc

SEQ ID NO: 466149 - DNA, 51 bp, Artificial
  Synthetic oligonucleotide
tgaccaaaggcaagagagcactcacacctccagtgaatgatctgaaatatt

SEQ ID NO: 466150 - DNA, 57 bp, Artificial
  Synthetic oligonucleotide
tgaccaaattttaattgagaacgcagccggccatcgtgttgctatttccacctacac

SEQ ID NO: 466151 - DNA, 53 bp, Artificial
  Synthetic oligonucleotide
tgaccaactggtccactttgccatagtcgcgtttgcccaccacgccgtacgtg

SEQ ID NO: 466152 - DNA, 60 bp, Artificial
  Synthetic oligonucleotide
tgaccaagatctacgacaatgacgttgagctgtgttatccgtattggtcatcggtagtga

SEQ ID NO: 466153 - DNA, 55 bp, Artificial
  Synthetic oligonucleotide
tgaccaagcggagtttcgatacagcattctcttcgccgatgtcgaacgtacggag

SEQ ID NO: 466154 - DNA, 55 bp, Artificial
  Synthetic oligonucleotide
tgaccaagcttgacaagtcataaatgtttgtacagtgtccacagatggatccttc

SEQ ID NO: 466155 - DNA, 55 bp, Artificial
  Synthetic oligonucleotide
tgaccaaggatcagataatctaaaagctttggtagggacagtctgtgttgtagcc

SEQ ID NO: 466156 - DNA, 60 bp, Artificial
  Synthetic oligonucleotide
tgaccaatgtgactgcatcattagcgcgactagatcagtgcttagggtcttcggttcatt

SEQ ID NO: 466157 - DNA, 56 bp, Artificial
  Synthetic oligonucleotide
tgaccaattgactaatcttttaacacaattgaagacaaaatatcccggtaatgctt

SEQ ID NO: 466158 - DNA, 57 bp, Artificial
  Synthetic oligonucleotide
tgaccaattgggcatcccttggagacgaaggccgtggtctggaggtacgcttaccgc

SEQ ID NO: 466159 - DNA, 60 bp, Artificial
  Synthetic oligonucleotide
tgaccaatttgttcaagcacagggtagtggagccaattgtgacattcttaagaaggggca

SEQ ID NO: 466160 - DNA, 60 bp, Artificial
  Synthetic oligonucleotide
tgaccacaatcccaccatgggacccctcaagagcgtgcctaactacaaactcaatgatcc

SEQ ID NO: 466161 - DNA, 56 bp, Artificial
  Synthetic oligonucleotide
tgaccacagaactaaatgataagacgcaggaggtccatgcacttttttatgagctt

SEQ ID NO: 466162 - DNA, 60 bp, Artificial
  Synthetic oligonucleotide
tgaccacatctaccccactggttctgcaacatactgccctggagcgattgcgaatgcgat

SEQ ID NO: 466163 - DNA, 55 bp, Artificial
  Synthetic oligonucleotide
tgaccacccggttggcagtcgacagacgcttccggaccactagaacctcctcgag

SEQ ID NO: 466164 - DNA, 60 bp, Artificial
  Synthetic oligonucleotide
tgaccacgacaatctcgctacgagagtggatacagcggaacgtaacgttggatcattgac

SEQ ID NO: 466165 - DNA, 52 bp, Artificial
  Synthetic oligonucleotide
tgaccactaagtactactcaactacaaattatgattcagtaaacatgacagc

SEQ ID NO: 466166 - DNA, 60 bp, Artificial
  Synthetic oligonucleotide
tgaccactacctgtgcagaaattgtctgaatctcctgctatcggtctctgatagatgtcc

SEQ ID NO: 466167 - DNA, 55 bp, Artificial
  Synthetic oligonucleotide
tgaccactcaaataattatgggcccctaatgcacgtgcccacatcgtctttcccg

SEQ ID NO: 466168 - DNA, 50 bp, Artificial
  Synthetic oligonucleotide
tgaccactctcagattgaagctggccattaaagcgtgactggtcacggag

SEQ ID NO: 466169 - DNA, 56 bp, Artificial
  Synthetic oligonucleotide
tgaccactctgagtatttttacgttgatgcggttaatagagttaggcgtaaacagg

SEQ ID NO: 466170 - DNA, 60 bp, Artificial
  Synthetic oligonucleotide
tgaccactgagatagcgcaaccagtagtggctgtcacttctatgagcaatgtttgcggaa

SEQ ID NO: 466171 - DNA, 60 bp, Artificial
  Synthetic oligonucleotide
tgaccactgcaatctcctttgtgcttatcctccgtggctcttccataattacaccctccc

SEQ ID NO: 466172 - DNA, 55 bp, Artificial
  Synthetic oligonucleotide
tgaccacttatggttttggacaccaaaacaaggcagtgtacgtggccggttacaa

SEQ ID NO: 466173 - DNA, 58 bp, Artificial
  Synthetic oligonucleotide
tgaccaggaaaggcttgtatggggcctacgaggtgttgagatatcccgtggtcagccc

SEQ ID NO: 466174 - DNA, 55 bp, Artificial
  Synthetic oligonucleotide
tgaccagggtaaccctcgccgaggcgtcgcattctctgactatcactggcagccg

SEQ ID NO: 466175 - DNA, 60 bp, Artificial
  Synthetic oligonucleotide
tgaccaggtcagcgagttgtttaactacgtccagactgtgccaactcaggcaatcaagtc

SEQ ID NO: 466176 - DNA, 51 bp, Artificial
  Synthetic oligonucleotide
tgaccagtacaagcgaggcgcccttatgttacatgatatacatcgcactct

SEQ ID NO: 466177 - DNA, 56 bp, Artificial
  Synthetic oligonucleotide
tgaccagttgcaactcaacagtgattacccaggattgtaataaggcctccacagat

SEQ ID NO: 466178 - DNA, 60 bp, Artificial
  Synthetic oligonucleotide
tgaccagtttgtggccaagattaggagtgttagcgctggtcgtgcactctatataccacc

SEQ ID NO: 466179 - DNA, 60 bp, Artificial
  Synthetic oligonucleotide
tgaccatactcatcagaacgggattgttggtgatctcaggagtctttccagtatcgatac

SEQ ID NO: 466180 - DNA, 55 bp, Artificial
  Synthetic oligonucleotide
tgaccataggggtcctgggagatggacagtccggggccctcctccgcataaaagc

SEQ ID NO: 466181 - DNA, 59 bp, Artificial
  Synthetic oligonucleotide
tgaccatagtaagaatcggggtcaagagttgacaaatgccgctgaaaggtatgaggcca

SEQ ID NO: 466182 - DNA, 60 bp, Artificial
  Synthetic oligonucleotide
tgaccatctgagtatcccggacagggtatctttggacgacctgaataggataattgatgt

SEQ ID NO: 466183 - DNA, 56 bp, Artificial
  Synthetic oligonucleotide
tgaccatgaataggtgcataccgtaccttctcatacatgtcccaactatcccacat

SEQ ID NO: 466184 - DNA, 55 bp, Artificial
  Synthetic oligonucleotide
tgaccatgaggcaacacaagtagcagttccaccagcgatattgacattcgagcga

SEQ ID NO: 466185 - DNA, 55 bp, Artificial
  Synthetic oligonucleotide
tgaccatgcaggcgtggtaggtgcgcgcgagggcccgggccttgacgaggcgcct

SEQ ID NO: 466186 - DNA, 55 bp, Artificial
  Synthetic oligonucleotide
tgaccatgcctccgcaggaggggaagtcgaccatgtgcgcggtctggacaccgat

SEQ ID NO: 466187 - DNA, 59 bp, Artificial
  Synthetic oligonucleotide
tgaccatggacctttggtgtcattttagaggtgcacttcctccctctagtgggtgattc

SEQ ID NO: 466188 - DNA, 55 bp, Artificial
  Synthetic oligonucleotide
tgaccatgttccgaggaagggcttctatcactgcactggttaacccaggttgggc

SEQ ID NO: 466189 - DNA, 60 bp, Artificial
  Synthetic oligonucleotide
tgaccattggtgaatgccccaaatatgtaaaatcggagagattagtcttagcaacaggat

SEQ ID NO: 466190 - DNA, 58 bp, Artificial
  Synthetic oligonucleotide
tgacccaaaggattgcgatgttcttaaggaaatacttgtcacttatggttgtgtagaa

SEQ ID NO: 466191 - DNA, 57 bp, Artificial
  Synthetic oligonucleotide
tgacccaaagggtaatgacatgccaggtggttactgtcttgaaaggtggatgttggt

SEQ ID NO: 466192 - DNA, 56 bp, Artificial
  Synthetic oligonucleotide
tgacccaagagaggtagaagaggccaacgaaggagaaagcaacagtttactacacc

SEQ ID NO: 466193 - DNA, 55 bp, Artificial
  Synthetic oligonucleotide
tgacccaaggtcgtcaaacctatgattggacattgaacagaaatcaaccggccgc

SEQ ID NO: 466194 - DNA, 55 bp, Artificial
  Synthetic oligonucleotide
tgacccagccacagaagtatgcaatgcgcttcgcgattataaaggcaatgtaacg

SEQ ID NO: 466195 - DNA, 55 bp, Artificial
  Synthetic oligonucleotide
tgacccagctagcatcgccgctcggggttatattgcaaccaaggtggaactgggg

SEQ ID NO: 466196 - DNA, 55 bp, Artificial
  Synthetic oligonucleotide
tgacccagcttttgaggcggctacaccagtggataagctcggattgcaccactcc

SEQ ID NO: 466197 - DNA, 53 bp, Artificial
  Synthetic oligonucleotide
tgacccaggatcggaggggagcacgtatccaagtccagacttgtcagggccca

SEQ ID NO: 466198 - DNA, 60 bp, Artificial
  Synthetic oligonucleotide
tgacccaggcaatttacaagactcagttcgtgactccacgtggtggctcaagtgcggctt

SEQ ID NO: 466199 - DNA, 51 bp, Artificial
  Synthetic oligonucleotide
tgacccagtatacgggaaagtgttcaacccccccaggacgaatcttcccgg

SEQ ID NO: 466200 - DNA, 57 bp, Artificial
  Synthetic oligonucleotide
tgacccagtcaaattaagcagcggctacaaagaggtgatactttggtttagcttcgg

SEQ ID NO: 466201 - DNA, 60 bp, Artificial
  Synthetic oligonucleotide
tgacccataaggtaggccaagtatttgttactcctgagcttgttattgtgacacatacag

SEQ ID NO: 466202 - DNA, 54 bp, Artificial
  Synthetic oligonucleotide
tgacccataccttggaaacctatagttttgccccgttagaaaatctcccgcata

SEQ ID NO: 466203 - DNA, 57 bp, Artificial
  Synthetic oligonucleotide
tgacccatataactttatggctgcgaaggccattggaggtaagacattattcattac

SEQ ID NO: 466204 - DNA, 51 bp, Artificial
  Synthetic oligonucleotide
tgacccatgataagaacggtgataactacatgtctcccatggagtatgccc

SEQ ID NO: 466205 - DNA, 60 bp, Artificial
  Synthetic oligonucleotide
tgaccccaagtcaaatcctgaggtccccgagagtgatgcaactggagaggcaggattatc

SEQ ID NO: 466206 - DNA, 57 bp, Artificial
  Synthetic oligonucleotide
tgaccccaatttgggtaaattttagtgaatccagttgtccagcaggcctttcattga

SEQ ID NO: 466207 - DNA, 60 bp, Artificial
  Synthetic oligonucleotide
tgaccccaccatcaaattgatagcaatgttgtacacaccacttagggctaataatgctgg

SEQ ID NO: 466208 - DNA, 54 bp, Artificial
  Synthetic oligonucleotide
tgaccccagccgattccaatactgaaactggttccacgaaaatgaaggacccgt

SEQ ID NO: 466209 - DNA, 53 bp, Artificial
  Synthetic oligonucleotide
tgaccccaggtatgaagaatcgctgcacaatccgtaccctgattaccactggc

SEQ ID NO: 466210 - DNA, 56 bp, Artificial
  Synthetic oligonucleotide
tgaccccatcacggttactatcgatccagaatcgacggtcaacgtggtgggttacg

SEQ ID NO: 466211 - DNA, 60 bp, Artificial
  Synthetic oligonucleotide
tgaccccattgcatacttgcgcccgcggaagtcacaaaagtagacgaaatagattgctgg

SEQ ID NO: 466212 - DNA, 54 bp, Artificial
  Synthetic oligonucleotide
tgacccccacggtggccactaaggacggcaaactccccacaacgcaacttcggc

SEQ ID NO: 466213 - DNA, 56 bp, Artificial
  Synthetic oligonucleotide
tgaccccgcatgcttctcttcccgaaagaccaacagggtaccgtggcccgacaaga

SEQ ID NO: 466214 - DNA, 60 bp, Artificial
  Synthetic oligonucleotide
tgaccccgccgcgcaatcgtttaccggcgtggtgtatggcacacacaccactgccgtgtc

SEQ ID NO: 466215 - DNA, 55 bp, Artificial
  Synthetic oligonucleotide
tgaccccgcgcgtaagccgccgatccggtacgtccaatgcaaggaatgcgacgag

SEQ ID NO: 466216 - DNA, 60 bp, Artificial
  Synthetic oligonucleotide
tgaccccggattctacctcgatcaagcatgatctgccacccttgcccgagttgcctcttg

SEQ ID NO: 466217 - DNA, 58 bp, Artificial
  Synthetic oligonucleotide
tgacccctcattagggggtgtgtctggaatgtctcttgggaggtttcacatacgccag

SEQ ID NO: 466218 - DNA, 55 bp, Artificial
  Synthetic oligonucleotide
tgacccctgccgagaactcagagggtcgtcggaagacggagagtgagcccgacga

SEQ ID NO: 466219 - DNA, 60 bp, Artificial
  Synthetic oligonucleotide
tgacccgaagtacaacacaccagagctcacaatccacgcgtgggatttcagacgtggctt

SEQ ID NO: 466220 - DNA, 55 bp, Artificial
  Synthetic oligonucleotide
tgacccgacgcagccatacggcgggcaccggaggcaaacccgcacgccggagcgt

SEQ ID NO: 466221 - DNA, 51 bp, Artificial
  Synthetic oligonucleotide
tgacccgaggcagtcaacccaccacgaagcaaacgaggaggcgctcatctc

SEQ ID NO: 466222 - DNA, 60 bp, Artificial
  Synthetic oligonucleotide
tgacccgcatttgcgcttggtagcgattactaggcacaggaagcttctcagtatccgcgc

SEQ ID NO: 466223 - DNA, 54 bp, Artificial
  Synthetic oligonucleotide
tgacccggcccaattctggaaatttcgttgggccttcctggataaagttagcca

SEQ ID NO: 466224 - DNA, 56 bp, Artificial
  Synthetic oligonucleotide
tgaccctaactttggtcgtcgggtacgcaatcgccgccagttaaatagcttgcaaa

SEQ ID NO: 466225 - DNA, 55 bp, Artificial
  Synthetic oligonucleotide
tgaccctaagcgcaccataggccccgagaacgggtttaccgggctggtgtggcaa

SEQ ID NO: 466226 - DNA, 58 bp, Artificial
  Synthetic oligonucleotide
tgaccctaccttcaccattgagacaaccacgctcccccaggatgccgtctcccgcacc

SEQ ID NO: 466227 - DNA, 58 bp, Artificial
  Synthetic oligonucleotide
tgaccctatcactcattggagccacggacaaaatcagtggcccctatcatgcccccag

SEQ ID NO: 466228 - DNA, 60 bp, Artificial
  Synthetic oligonucleotide
tgaccctattcataattgccaatggacgccaattggatgctattccaacttcttcgttat

SEQ ID NO: 466229 - DNA, 60 bp, Artificial
  Synthetic oligonucleotide
tgaccctcaacacagctaaacatgggttcacaggtatctacacagcgctccggttctcac

SEQ ID NO: 466230 - DNA, 55 bp, Artificial
  Synthetic oligonucleotide
tgaccctcaacacagttaaacatgggttcacaagtgtctactcagcggtccggct

SEQ ID NO: 466231 - DNA, 53 bp, Artificial
  Synthetic oligonucleotide
tgaccctcttggccagtatagtggttatgatccgcgcgactcacaagagacag

SEQ ID NO: 466232 - DNA, 55 bp, Artificial
  Synthetic oligonucleotide
tgaccctgacgccacccattacccttccttgcgaatcgtcgccagtagactggcg

SEQ ID NO: 466233 - DNA, 60 bp, Artificial
  Synthetic oligonucleotide
tgaccgaacacgacatactgatgcacaggtacacacagtggtacaaagggatgcgtgtaa

SEQ ID NO: 466234 - DNA, 60 bp, Artificial
  Synthetic oligonucleotide
tgaccgaatagtaagttgttgttatgcatgtgcctttcttaatgttgttcagtatcatag

SEQ ID NO: 466235 - DNA, 59 bp, Artificial
  Synthetic oligonucleotide
tgaccgacatggctaacttcgccctcagcgacccaaacgcgcataggatgaaaaacttc

SEQ ID NO: 466236 - DNA, 58 bp, Artificial
  Synthetic oligonucleotide
tgaccgaggcagtgcaaaaaataaccacagaaagcatagtaatatggggaaggattcc

SEQ ID NO: 466237 - DNA, 59 bp, Artificial
  Synthetic oligonucleotide
tgaccgagggtggagttcgactcggtcgcaagcccggaagcactgtgacgatcaacgtg

SEQ ID NO: 466238 - DNA, 58 bp, Artificial
  Synthetic oligonucleotide
tgaccgatacagacgttgtagttggtatctgttactgatgatagagttagagttccta

SEQ ID NO: 466239 - DNA, 60 bp, Artificial
  Synthetic oligonucleotide
tgaccgatccctaccacgccaagttgatacgcgttgtgtttaagttctgctacatgaaca

SEQ ID NO: 466240 - DNA, 60 bp, Artificial
  Synthetic oligonucleotide
tgaccgatgatgggggagtattgaccgttgacgggatggtgccgagtgggtcattatgga

SEQ ID NO: 466241 - DNA, 55 bp, Artificial
  Synthetic oligonucleotide
tgaccgatttttaagagtccgggaccaacgggggaatgtgctattgtcacctgaa

SEQ ID NO: 466242 - DNA, 52 bp, Artificial
  Synthetic oligonucleotide
tgaccgatttttgagggttcgggaccaacaagggaacgtactattgtctccc

SEQ ID NO: 466243 - DNA, 52 bp, Artificial
  Synthetic oligonucleotide
tgaccgcacaaaggacaaggatgttaatactggcacgagcggtacatttagc

SEQ ID NO: 466244 - DNA, 55 bp, Artificial
  Synthetic oligonucleotide
tgaccgcagctggccgtgcgacatcctcttttaattagttgctaggcaactgccc

SEQ ID NO: 466245 - DNA, 57 bp, Artificial
  Synthetic oligonucleotide
tgaccgcataagtaattatgaggccctaatgacctagcccacattgttttacccgta

SEQ ID NO: 466246 - DNA, 50 bp, Artificial
  Synthetic oligonucleotide
tgaccgcatccctaagggatgtgttggtccctgtaagatccaggactatg

SEQ ID NO: 466247 - DNA, 60 bp, Artificial
  Synthetic oligonucleotide
tgaccgccactccaagtgcctttaacttcgagcagtgtgaggcatcagtcgaactcaaca

SEQ ID NO: 466248 - DNA, 59 bp, Artificial
  Synthetic oligonucleotide
tgaccgcctctcgccgatcttccgtccacctggaaagtgccccattcgcagaacactcc

SEQ ID NO: 466249 - DNA, 51 bp, Artificial
  Synthetic oligonucleotide
tgaccgctttttaagggttagggatcaacgggggaacgtactattgtcacc

SEQ ID NO: 466250 - DNA, 51 bp, Artificial
  Synthetic oligonucleotide
tgaccggcggtacgttccctaagaccgtcaccgttacgggctaatccccta

SEQ ID NO: 466251 - DNA, 60 bp, Artificial
  Synthetic oligonucleotide
tgaccggtgcgggtgcagcacatcctcctgcctttacaagtcctggccacacagccgtaa

SEQ ID NO: 466252 - DNA, 60 bp, Artificial
  Synthetic oligonucleotide
tgaccggttacgataagacgtgggcgaccacttctatcgctatctcggacatcacgacga

SEQ ID NO: 466253 - DNA, 56 bp, Artificial
  Synthetic oligonucleotide
tgaccgtaacagaacacaacggcaagggtctggtgaagaccacggtcatccctacc

SEQ ID NO: 466254 - DNA, 60 bp, Artificial
  Synthetic oligonucleotide
tgaccgtacatgcagcagatagttctacgcccagtcgtaagataataggagagacatcac

SEQ ID NO: 466255 - DNA, 53 bp, Artificial
  Synthetic oligonucleotide
tgaccgtcttcattacccattactgcataagtttcaaacatcggatggtcagg

SEQ ID NO: 466256 - DNA, 56 bp, Artificial
  Synthetic oligonucleotide
tgaccgttaaacacatcagttatccgcccctaacagtcgccgctgttacgcccaat

SEQ ID NO: 466257 - DNA, 55 bp, Artificial
  Synthetic oligonucleotide
tgaccgttcccacgccacgtcattttcccacgcgacgtcacgttcccacgctacg

SEQ ID NO: 466258 - DNA, 60 bp, Artificial
  Synthetic oligonucleotide
tgaccgttgctttgtaatcattgcacccagttatcgatccgatttgcaacacgtgtattc

SEQ ID NO: 466259 - DNA, 60 bp, Artificial
  Synthetic oligonucleotide
tgacctaacgattgggagagtagatcctacgagtggatctattggagcgttggtcgcacc

SEQ ID NO: 466260 - DNA, 60 bp, Artificial
  Synthetic oligonucleotide
tgacctaattaacaggaggacacagagggtggatgggcagcctatgattggaatgtcctc

SEQ ID NO: 466261 - DNA, 56 bp, Artificial
  Synthetic oligonucleotide
tgacctagcccacattgttttccccgtacgactatcaccctcaatgacgatacttt

SEQ ID NO: 466262 - DNA, 55 bp, Artificial
  Synthetic oligonucleotide
tgacctaggtgcccttctccgtattcacgtgttgctgctagatacagcagggacc

SEQ ID NO: 466263 - DNA, 60 bp, Artificial
  Synthetic oligonucleotide
tgacctagtaaaaatatctcaactcttttctgtgatgagtgactctaccaccccttcagc

SEQ ID NO: 466264 - DNA, 60 bp, Artificial
  Synthetic oligonucleotide
tgacctagtaggggtctctgtcacaccaagagtaccactaagagaattgacacatagatt

SEQ ID NO: 466265 - DNA, 50 bp, Artificial
  Synthetic oligonucleotide
tgacctatattcagctcctagatcccggctagacggctagattttgcccg

SEQ ID NO: 466266 - DNA, 51 bp, Artificial
  Synthetic oligonucleotide
tgacctatgagggggacactagtgcgggttataaccacgatgtgtctatac

SEQ ID NO: 466267 - DNA, 60 bp, Artificial
  Synthetic oligonucleotide
tgacctcacaccacacaatccattacgtgtgagtgacaaagcaagttcaatcatgaaata

SEQ ID NO: 466268 - DNA, 60 bp, Artificial
  Synthetic oligonucleotide
tgacctcagacgtgacatgtttagcggctcgagtcttaaaagagtctcagaacaacaaga

SEQ ID NO: 466269 - DNA, 60 bp, Artificial
  Synthetic oligonucleotide
tgacctcagattgaacggagaacacacagaattcgtgaggcaattcgccagagtccattc

SEQ ID NO: 466270 - DNA, 53 bp, Artificial
  Synthetic oligonucleotide
tgacctcagctttgatgaggacgatgatctacagagcgtcgacttggaggaag

SEQ ID NO: 466271 - DNA, 60 bp, Artificial
  Synthetic oligonucleotide
tgacctcatcaacacatatgcccgaggttcagatgagggcaaccgacacaccagcgaaac

SEQ ID NO: 466272 - DNA, 60 bp, Artificial
  Synthetic oligonucleotide
tgacctccactgggtggattaaggtcaaggtatgaagtcctattcgctcctgataggatc

SEQ ID NO: 466273 - DNA, 58 bp, Artificial
  Synthetic oligonucleotide
tgacctctaggttgacctgggtcactcaaggtagtgcaaacagcgatcagttaattcg

SEQ ID NO: 466274 - DNA, 55 bp, Artificial
  Synthetic oligonucleotide
tgacctctcataggatccacgaaaaccaatatgggcctgacttcgtattgggcca

SEQ ID NO: 466275 - DNA, 60 bp, Artificial
  Synthetic oligonucleotide
tgacctctgcagcatcatttgtgagcgcatattctacgcgatccgattctatgtaccctc

SEQ ID NO: 466276 - DNA, 60 bp, Artificial
  Synthetic oligonucleotide
tgacctctgtgtcagctaaaataagcagtcccaagaggacttcaggacgggtcaatagcc

SEQ ID NO: 466277 - DNA, 60 bp, Artificial
  Synthetic oligonucleotide
tgacctgaaaccccacctggagaaacagcgagctcgtaagacagacgaagcttgcgacta

SEQ ID NO: 466278 - DNA, 56 bp, Artificial
  Synthetic oligonucleotide
tgacctgaagccctctccgggtcaagctctatcctcagatagggctttcggtcatg

SEQ ID NO: 466279 - DNA, 56 bp, Artificial
  Synthetic oligonucleotide
tgacctgagagaggactattgttttttgttctgtgtaggcttcttcgtcgggaacc

SEQ ID NO: 466280 - DNA, 57 bp, Artificial
  Synthetic oligonucleotide
tgacctgctattaggagggaaagaatggtcctacatcgtcgaaagaccaacggctgt

SEQ ID NO: 466281 - DNA, 55 bp, Artificial
  Synthetic oligonucleotide
tgacctggaacagggaaattctttggaactatttcaccaacaggagtgtaagcag

SEQ ID NO: 466282 - DNA, 55 bp, Artificial
  Synthetic oligonucleotide
tgacctggataaccacatacagatcagaacgatcggagaggtcggttcttatgcc

SEQ ID NO: 466283 - DNA, 60 bp, Artificial
  Synthetic oligonucleotide
tgacctggcccacattgtcttgcccgttctactatcgccctctatcacaatacttatggg

SEQ ID NO: 466284 - DNA, 60 bp, Artificial
  Synthetic oligonucleotide
tgacctggcgtcaccgccccttcctcttcggtgactgcggcagcgtgggcctgctccaac

SEQ ID NO: 466285 - DNA, 55 bp, Artificial
  Synthetic oligonucleotide
tgacctggttcttaaccctctaggactcaattatccaggagcccaggatttaacc

SEQ ID NO: 466286 - DNA, 60 bp, Artificial
  Synthetic oligonucleotide
tgacctgtggaacccaaaaactggacctacaatagagttgatggctgagataaatcgcta

SEQ ID NO: 466287 - DNA, 60 bp, Artificial
  Synthetic oligonucleotide
tgaccttaagcctgacagctaaatcagcctgcctaccatgcaaaggtaatcccgctttat

SEQ ID NO: 466288 - DNA, 60 bp, Artificial
  Synthetic oligonucleotide
tgaccttagctaatatgatggttggcttcgagacaatccctatggataatcagatctaca

SEQ ID NO: 466289 - DNA, 54 bp, Artificial
  Synthetic oligonucleotide
tgaccttagttacttggcccccaagaatcctgggaccggaccggcattcacaat

SEQ ID NO: 466290 - DNA, 55 bp, Artificial
  Synthetic oligonucleotide
tgaccttcgccagaccatccagcgccgctgcactcgcgtttgtgtgggcaggttt

SEQ ID NO: 466291 - DNA, 59 bp, Artificial
  Synthetic oligonucleotide
tgaccttctaacactcctaaccaaattacacagagaaccaaccacagtctcacttgaca

SEQ ID NO: 466292 - DNA, 53 bp, Artificial
  Synthetic oligonucleotide
tgaccttctttgtgactaaaccgaacaagtcaacaccagtaaccgcgcccggt

SEQ ID NO: 466293 - DNA, 55 bp, Artificial
  Synthetic oligonucleotide
tgaccttgacgctgcaaggattaagggacttcctcctccacgggagcaacccccg

SEQ ID NO: 466294 - DNA, 55 bp, Artificial
  Synthetic oligonucleotide
tgaccttggtcctgggctatgcggagggaacaattttttcctacatgaaaagtca

SEQ ID NO: 466295 - DNA, 50 bp, Artificial
  Synthetic oligonucleotide
tgaccttgtaaagcccaaaagaataagtcctctagtttggacgcttctga

SEQ ID NO: 466296 - DNA, 60 bp, Artificial
  Synthetic oligonucleotide
tgaccttgttttgtcaaatggtatcaagtgtgactttcataccacctatggcagatttac

SEQ ID NO: 466297 - DNA, 58 bp, Artificial
  Synthetic oligonucleotide
tgacctttacgctaacacacaggtcgtttcaatcacctctactgctctaaagtgggtg

SEQ ID NO: 466298 - DNA, 60 bp, Artificial
  Synthetic oligonucleotide
tgacctttcctgtaacagcacctactgtaagcccaccctgtacatgattgtaccaattca

SEQ ID NO: 466299 - DNA, 60 bp, Artificial
  Synthetic oligonucleotide
tgaccttttgacaaccgacccatttgagtggctccaagataagattatgaattgcatttc

SEQ ID NO: 466300 - DNA, 60 bp, Artificial
  Synthetic oligonucleotide
tgaccttttgatctgctcctctacttcaggcttcaatgttgtcagcacaggtgagccacc

SEQ ID NO: 466301 - DNA, 50 bp, Artificial
  Synthetic oligonucleotide
tgacgaaaccctaatggtaatactctatggagactcaaagcctcaaaagt

SEQ ID NO: 466302 - DNA, 55 bp, Artificial
  Synthetic oligonucleotide
tgacgaaagtccgagttggactgagtggcggctacataacgatgagacgaattcg

SEQ ID NO: 466303 - DNA, 60 bp, Artificial
  Synthetic oligonucleotide
tgacgaaatgtatcgagaatacacaatgctaataagagacgaggttgtgaaaatgcttga

SEQ ID NO: 466304 - DNA, 59 bp, Artificial
  Synthetic oligonucleotide
tgacgaacaaggagaaatcgagtttattgagagttctaaggacgcgggatatccagtca

SEQ ID NO: 466305 - DNA, 60 bp, Artificial
  Synthetic oligonucleotide
tgacgaacttatctgtcttcgaatgctcaaatttccagaatacatcgtcgagacaggcgc

SEQ ID NO: 466306 - DNA, 55 bp, Artificial
  Synthetic oligonucleotide
tgacgaagaaccggcaaacaacacaagtttgaagcttggctttctagtgaagtac

SEQ ID NO: 466307 - DNA, 60 bp, Artificial
  Synthetic oligonucleotide
tgacgaagcaggaagtcaaagagttcttccgctgggccagtgatcacgtgaccgaggtgg

SEQ ID NO: 466308 - DNA, 60 bp, Artificial
  Synthetic oligonucleotide
tgacgaaggcacaacgcagcgctctgctcaggttattctgctttgtgtgctacggatatg

SEQ ID NO: 466309 - DNA, 60 bp, Artificial
  Synthetic oligonucleotide
tgacgaagggatgatagaaactagacatgtgattaacaccaatactgtatctgaatctag

SEQ ID NO: 466310 - DNA, 60 bp, Artificial
  Synthetic oligonucleotide
tgacgaataggcgacccattgccgtcgatgtatcataaacttctgtggcacttctgaaag

SEQ ID NO: 466311 - DNA, 55 bp, Artificial
  Synthetic oligonucleotide
tgacgaatccaacgagtccctaatagtccaaaaaatcgagtgggaagggactgag

SEQ ID NO: 466312 - DNA, 59 bp, Artificial
  Synthetic oligonucleotide
tgacgacaccctttcctgtggtgtcggccgttatatccatcacgtccatgttgacaagg

SEQ ID NO: 466313 - DNA, 60 bp, Artificial
  Synthetic oligonucleotide
tgacgacagtgtatacatttaccccatactgccgctctgatattctccaggttcctgtct

SEQ ID NO: 466314 - DNA, 60 bp, Artificial
  Synthetic oligonucleotide
tgacgacccatactgcggaactcctagccgcctgttttgctcgcagcaggtctggagcga

SEQ ID NO: 466315 - DNA, 58 bp, Artificial
  Synthetic oligonucleotide
tgacgacccctggttcaaatacgtcggcttgggtgacatacctacatcaaccagacga

SEQ ID NO: 466316 - DNA, 56 bp, Artificial
  Synthetic oligonucleotide
tgacgaccgcactatcttttgggtgtatgggcccgatgggggagaaggaaaatcga

SEQ ID NO: 466317 - DNA, 57 bp, Artificial
  Synthetic oligonucleotide
tgacgacggaaattgaagagtaattggagtttcgttgtttgtcagacggtattcgca

SEQ ID NO: 466318 - DNA, 60 bp, Artificial
  Synthetic oligonucleotide
tgacgagaactgggctgaggtgccacaagaggatgaggaggtaggctttccagtcaggcc

SEQ ID NO: 466319 - DNA, 59 bp, Artificial
  Synthetic oligonucleotide
tgacgagagaaccctatgtctcctgtgagccagatgagtgcaggttctatgctctcagc

SEQ ID NO: 466320 - DNA, 60 bp, Artificial
  Synthetic oligonucleotide
tgacgagagaaggggacaacttacaaaaacagctgcagatagaatacaaaaagactggca

SEQ ID NO: 466321 - DNA, 57 bp, Artificial
  Synthetic oligonucleotide
tgacgagaggagaaacaaatacctggaagaacatcccagtgcggggaaggatccaaa

SEQ ID NO: 466322 - DNA, 60 bp, Artificial
  Synthetic oligonucleotide
tgacgagatctacactgccacacgtgggtgacttgcaacatagtctaccgcacggaggtc

SEQ ID NO: 466323 - DNA, 60 bp, Artificial
  Synthetic oligonucleotide
tgacgagcagccaataacaaacttggatatggtagcagcacactttagggaacaaaggca

SEQ ID NO: 466324 - DNA, 60 bp, Artificial
  Synthetic oligonucleotide
tgacgagctcgccgcaaagttgtcaggcctcggactcaatgctgtagcgtactaccgggg

SEQ ID NO: 466325 - DNA, 50 bp, Artificial
  Synthetic oligonucleotide
tgacgagtactcgcatgtttctgaagattcgggagacgaacacaacggaa

SEQ ID NO: 466326 - DNA, 60 bp, Artificial
  Synthetic oligonucleotide
tgacgagttcgctcaggggtggggtcccatcagttacgctgagcctagcagctcggacca

SEQ ID NO: 466327 - DNA, 60 bp, Artificial
  Synthetic oligonucleotide
tgacgagttggttattgggcgcgactggcaatcgcgcaccactgtcgaagtcgatgacac

SEQ ID NO: 466328 - DNA, 57 bp, Artificial
  Synthetic oligonucleotide
tgacgatagcgctaacggcctgttggcaaggttttttcgtataaatcgtgtggccgc

SEQ ID NO: 466329 - DNA, 53 bp, Artificial
  Synthetic oligonucleotide
tgacgatatgctgggtgcatctggagtagggtctaccatcagtaatgatggta

SEQ ID NO: 466330 - DNA, 60 bp, Artificial
  Synthetic oligonucleotide
tgacgatcaaaggcctcaatccaacagccatttttctaacaaccctctcaagaactagca

SEQ ID NO: 466331 - DNA, 60 bp, Artificial
  Synthetic oligonucleotide
tgacgatcccgcaaaagcggcctttgactccctgcaagcctcagcgaccgaatatatcgg

SEQ ID NO: 466332 - DNA, 60 bp, Artificial
  Synthetic oligonucleotide
tgacgatggtaattgtggttcaagcgagtgttcgcatgttgagttagtccagttaggagt

SEQ ID NO: 466333 - DNA, 58 bp, Artificial
  Synthetic oligonucleotide
tgacgatgtagaagtgcagacagtaaaacgaaagtttgctcccagtccgtattttagc

SEQ ID NO: 466334 - DNA, 53 bp, Artificial
  Synthetic oligonucleotide
tgacgcaacaacccagttgcgttttgaccaagtacttctgttaccccggactg

SEQ ID NO: 466335 - DNA, 58 bp, Artificial
  Synthetic oligonucleotide
tgacgcaacgagtcgtgattgccctactggtcttggctgttggtccggcctactcagc

SEQ ID NO: 466336 - DNA, 60 bp, Artificial
  Synthetic oligonucleotide
tgacgcaagcaaacgtctctaatgtattatcacgagtagtatcaataaggcatttagaaa

SEQ ID NO: 466337 - DNA, 60 bp, Artificial
  Synthetic oligonucleotide
tgacgcaagtgctaaggttggtgttacgtgtagtgaagcgtggtttggcgcacgtgatgc

SEQ ID NO: 466338 - DNA, 60 bp, Artificial
  Synthetic oligonucleotide
tgacgcacactagtcaatacatatgcagccctgtcctcacagacaatccacgtcccaatg

SEQ ID NO: 466339 - DNA, 56 bp, Artificial
  Synthetic oligonucleotide
tgacgcatataccggtctacctctaaatctagaatcaattgaccttgaacatgttc

SEQ ID NO: 466340 - DNA, 60 bp, Artificial
  Synthetic oligonucleotide
tgacgcatcagatgtgtccagggtattgatcgacgaggttgtcctgttacatttcggaca

SEQ ID NO: 466341 - DNA, 60 bp, Artificial
  Synthetic oligonucleotide
tgacgcatctaatgtacttggaccaaattgttatgctacaacagccgaaccagaaaacaa

SEQ ID NO: 466342 - DNA, 55 bp, Artificial
  Synthetic oligonucleotide
tgacgcatggtcgattttcatacagctacgactgagtctggaagctaattgcgac

SEQ ID NO: 466343 - DNA, 60 bp, Artificial
  Synthetic oligonucleotide
tgacgccacgtatcaaagaactagagcactagtgcgcacagggatggatcccaggatgtg

SEQ ID NO: 466344 - DNA, 55 bp, Artificial
  Synthetic oligonucleotide
tgacgccagggaaagaccggagacactccttgattctcacctttctcgccctaaa

SEQ ID NO: 466345 - DNA, 55 bp, Artificial
  Synthetic oligonucleotide
tgacgccagttttgccaccctcccctaacatgtaacttagaagtttgaacgataa

SEQ ID NO: 466346 - DNA, 60 bp, Artificial
  Synthetic oligonucleotide
tgacgcccgctaccacagcctcctgtgccacatgtcagcatgctactacaattacgcgcc

SEQ ID NO: 466347 - DNA, 60 bp, Artificial
  Synthetic oligonucleotide
tgacgccgctccatcgaatgatggtgctgccaacctcgtaccagaggccaacaatgaggt

SEQ ID NO: 466348 - DNA, 60 bp, Artificial
  Synthetic oligonucleotide
tgacgcggagtgtatttataccctctgatctcgtcaagaggccactcttgagtgccagcg

SEQ ID NO: 466349 - DNA, 55 bp, Artificial
  Synthetic oligonucleotide
tgacgcgggctgtgcatggtacgagcttacgcccgccgagacctcagttagggta

SEQ ID NO: 466350 - DNA, 60 bp, Artificial
  Synthetic oligonucleotide
tgacgcgggtcgaccctgatattgtgatgcaagaatctgagttctccttctatggtgatg

SEQ ID NO: 466351 - DNA, 60 bp, Artificial
  Synthetic oligonucleotide
tgacgctaacatatgatatcacatcgatgacgaacgttaatggcaaacgtgtatatagaa

SEQ ID NO: 466352 - DNA, 55 bp, Artificial
  Synthetic oligonucleotide
tgacgctaataacatcaaatacggtggggattaccaagtgttaagtaccgctaaa

SEQ ID NO: 466353 - DNA, 60 bp, Artificial
  Synthetic oligonucleotide
tgacgctagtagcttctacacagcaagtggtgcattctacctcggtagtcaggcaggttc

SEQ ID NO: 466354 - DNA, 60 bp, Artificial
  Synthetic oligonucleotide
tgacgctagttcgaatggactccaaggttaggcgcgttgttgcgagtggattcggtgagc

SEQ ID NO: 466355 - DNA, 60 bp, Artificial
  Synthetic oligonucleotide
tgacgctcaatcatatagtactgaaaaacataatgtctgggccacacatgcttgtgtacc

SEQ ID NO: 466356 - DNA, 59 bp, Artificial
  Synthetic oligonucleotide
tgacgctttgttcggcttcacattagctcaaaacgctcgcccacgtttcgacgaccaca

SEQ ID NO: 466357 - DNA, 60 bp, Artificial
  Synthetic oligonucleotide
tgacggaaactgcagaacgatctcagttaggtcatgggaaagctgatattcatccctctg

SEQ ID NO: 466358 - DNA, 55 bp, Artificial
  Synthetic oligonucleotide
tgacggaagcatacatccagaaatccacaaacttctcaaacctttcaagctgagg

SEQ ID NO: 466359 - DNA, 53 bp, Artificial
  Synthetic oligonucleotide
tgacggactccgccacgaaggcacggtaagactctgcgagtttgcgcaccagc

SEQ ID NO: 466360 - DNA, 57 bp, Artificial
  Synthetic oligonucleotide
tgacggacttcgttcttgataggacgaggttgggcgtgggatcaaagaaggatccca

SEQ ID NO: 466361 - DNA, 55 bp, Artificial
  Synthetic oligonucleotide
tgacggagtactttctagtatggctgtcacctttaaacgagccctcggggcgcgg

SEQ ID NO: 466362 - DNA, 56 bp, Artificial
  Synthetic oligonucleotide
tgacggataaaactggtcccgataggggcacccacaataggatggcaggaggggac

SEQ ID NO: 466363 - DNA, 55 bp, Artificial
  Synthetic oligonucleotide
tgacggcagggtgacaagaggacacatcacctccaacgtgaactcactcaactac

SEQ ID NO: 466364 - DNA, 60 bp, Artificial
  Synthetic oligonucleotide
tgacggcatcggacggatgaccatttgtgtgcagggaaataatgataacgcaacagctac

SEQ ID NO: 466365 - DNA, 55 bp, Artificial
  Synthetic oligonucleotide
tgacggcccagctgagacaacgtatgacaacggttatatgtgtaagacggagcgg

SEQ ID NO: 466366 - DNA, 60 bp, Artificial
  Synthetic oligonucleotide
tgacggccccgccaataggcaggcacagtatagaatatacaaagcaaatcaaggcagaat

SEQ ID NO: 466367 - DNA, 59 bp, Artificial
  Synthetic oligonucleotide
tgacggcgtatactcgttttggacatcacactttgccttttcgccactcattggtggag

SEQ ID NO: 466368 - DNA, 60 bp, Artificial
  Synthetic oligonucleotide
tgacgggacctgtgttgtcgctgttacagatggccctgcggctaatagtgcggaccatcg

SEQ ID NO: 466369 - DNA, 60 bp, Artificial
  Synthetic oligonucleotide
tgacgggcagttttcagctgttgtgttggatgacatgcccaaattcattaaggcaatgac

SEQ ID NO: 466370 - DNA, 60 bp, Artificial
  Synthetic oligonucleotide
tgacgggcggaggatatgttaacggcctatgggttgatggcatgacaaccaccgaagcgc

SEQ ID NO: 466371 - DNA, 55 bp, Artificial
  Synthetic oligonucleotide
tgacggggactttcagagttgctgacaagggactttccactggggactttccgcg

SEQ ID NO: 466372 - DNA, 58 bp, Artificial
  Synthetic oligonucleotide
tgacgggtcagaacactctgactgcggtaactgggttgactcggaaccaggtgttgtc

SEQ ID NO: 466373 - DNA, 58 bp, Artificial
  Synthetic oligonucleotide
tgacgggtcgctcttcgccacgaacactgacctgccggtgactgtatttggtcccgac

SEQ ID NO: 466374 - DNA, 60 bp, Artificial
  Synthetic oligonucleotide
tgacgggtggtttaacagggcactatggtatacactatatgattgcactcaattatgtta

SEQ ID NO: 466375 - DNA, 58 bp, Artificial
  Synthetic oligonucleotide
tgacggtaacgagtactggttggctatccccccattgcagaactcagctctagggacg

SEQ ID NO: 466376 - DNA, 57 bp, Artificial
  Synthetic oligonucleotide
tgacggtactacagggaaagatggatatagaaactggttagataagttggttggaca

SEQ ID NO: 466377 - DNA, 60 bp, Artificial
  Synthetic oligonucleotide
tgacggtagatgacccatcgaagttgcacgatttggacgatgaagttccgcagttgcaat

SEQ ID NO: 466378 - DNA, 60 bp, Artificial
  Synthetic oligonucleotide
tgacggtcgatgggtcgatgtagcagaagcgttcttagtatcagcaggtcaattcacctc

SEQ ID NO: 466379 - DNA, 60 bp, Artificial
  Synthetic oligonucleotide
tgacggtcgtagacgttcaacgttttattgtcgacatctcgatcgtccgtcatcaatcta

SEQ ID NO: 466380 - DNA, 50 bp, Artificial
  Synthetic oligonucleotide
tgacggttatttggccctcagactggacacatgtgcatcgtggtagagta

SEQ ID NO: 466381 - DNA, 55 bp, Artificial
  Synthetic oligonucleotide
tgacggttgtaccaaatgatatgtttataagggaatcgttagtcgcgtgccaact

SEQ ID NO: 466382 - DNA, 55 bp, Artificial
  Synthetic oligonucleotide
tgacgtaaaacaatattccgatttgaaatttgaaacgtgggacccattggataca

SEQ ID NO: 466383 - DNA, 53 bp, Artificial
  Synthetic oligonucleotide
tgacgtaaaacgaggtgtggtttgaacacggaagtagacagttttcccacgct

SEQ ID NO: 466384 - DNA, 55 bp, Artificial
  Synthetic oligonucleotide
tgacgtaacttttgtgggaggagttatgttgcaagttatcgcggtaaaggtgacg

SEQ ID NO: 466385 - DNA, 58 bp, Artificial
  Synthetic oligonucleotide
tgacgtaagtttacacttcgccataccattagtaactaagaatctaagtcaatctata

SEQ ID NO: 466386 - DNA, 60 bp, Artificial
  Synthetic oligonucleotide
tgacgtaatccaaaagatacacaccaatgaacacgatcctcatagtctattcgctgaagt

SEQ ID NO: 466387 - DNA, 55 bp, Artificial
  Synthetic oligonucleotide
tgacgtacctgtgcaactcaaaactggagcccatgttttctgagtcaggcctgag

SEQ ID NO: 466388 - DNA, 60 bp, Artificial
  Synthetic oligonucleotide
tgacgtacgcgatgttgataacttggccccggatcatcacaaactggcccagcgacctga

SEQ ID NO: 466389 - DNA, 57 bp, Artificial
  Synthetic oligonucleotide
tgacgtacgcttttgtttttatatacgtcagccctaatttgaacggtgtgagatgtg

SEQ ID NO: 466390 - DNA, 55 bp, Artificial
  Synthetic oligonucleotide
tgacgtacgggtatgcaacggccgaggaccttgtgagcgggcccaacacctctgg

SEQ ID NO: 466391 - DNA, 60 bp, Artificial
  Synthetic oligonucleotide
tgacgtactgctctgatacctttagctcaagacggttgatcttttcgaaggttgtatcaa

SEQ ID NO: 466392 - DNA, 60 bp, Artificial
  Synthetic oligonucleotide
tgacgtagtcactaacgacaatgagcttattcatgcaattaaccaaaatctggtaccaga

SEQ ID NO: 466393 - DNA, 60 bp, Artificial
  Synthetic oligonucleotide
tgacgtataaccatcaagaggctgcgaagtatgataaccacacagagaatgctttgttat

SEQ ID NO: 466394 - DNA, 60 bp, Artificial
  Synthetic oligonucleotide
tgacgtatccatccacttttgaggagggggtagtctatcttcagtatagatggtggactc

SEQ ID NO: 466395 - DNA, 56 bp, Artificial
  Synthetic oligonucleotide
tgacgtatgatatcggcggtaactttgctgcgcacctttttaagggtcgtgactac

SEQ ID NO: 466396 - DNA, 58 bp, Artificial
  Synthetic oligonucleotide
tgacgtatggttacgccttgaatcatttccaccataatccgaaaaatcttgcacagtt

SEQ ID NO: 466397 - DNA, 55 bp, Artificial
  Synthetic oligonucleotide
tgacgtattccacctacggtaggttcctagccaaccctaggcagatgctacgggg

SEQ ID NO: 466398 - DNA, 59 bp, Artificial
  Synthetic oligonucleotide
tgacgtcaagcataccggtgttgtgcgttgtgttagtgatgttactaggggttctggta

SEQ ID NO: 466399 - DNA, 60 bp, Artificial
  Synthetic oligonucleotide
tgacgtcaaggcctgctacgctggagatgacctcgcacgcgaccgcaactgccccgagcg

SEQ ID NO: 466400 - DNA, 56 bp, Artificial
  Synthetic oligonucleotide
tgacgtcaatgctcaaatgcaccaccttctgggtgttaagggggtgtaggtatgga

SEQ ID NO: 466401 - DNA, 60 bp, Artificial
  Synthetic oligonucleotide
tgacgtcaccaatactagctataaaagtctggagaagcgggccaggctctcatttgttcc

SEQ ID NO: 466402 - DNA, 59 bp, Artificial
  Synthetic oligonucleotide
tgacgtcacccaacaaccgtcgcgagttgttatgtacggctcactgataaagtggataa

SEQ ID NO: 466403 - DNA, 55 bp, Artificial
  Synthetic oligonucleotide
tgacgtcagggaagacgttgtgtgctatggtggagcatggagtcttgagagccgg

SEQ ID NO: 466404 - DNA, 60 bp, Artificial
  Synthetic oligonucleotide
tgacgtcatagacataacagcagatccaacaacgatcccacaaactgaaagaatgatgcg

SEQ ID NO: 466405 - DNA, 55 bp, Artificial
  Synthetic oligonucleotide
tgacgtcatgggcaaatccggcgcgctacatcacgcctcgcacggcgaaacagga

SEQ ID NO: 466406 - DNA, 57 bp, Artificial
  Synthetic oligonucleotide
tgacgtcggggcgtccaagagtggtaccctgctcggtctctgccttacgaaacctga

SEQ ID NO: 466407 - DNA, 60 bp, Artificial
  Synthetic oligonucleotide
tgacgtcggtcagcaagtttgtcctaattatgtcatgctgcggtcctctgtcacaacaaa

SEQ ID NO: 466408 - DNA, 60 bp, Artificial
  Synthetic oligonucleotide
tgacgtcggtgagatcgttagatagttggtattcagtacgatcggaggtcgtatatgcta

SEQ ID NO: 466409 - DNA, 50 bp, Artificial
  Synthetic oligonucleotide
tgacgtctccggacactttgttctttatcaaagggatacggtgtcaagtg

SEQ ID NO: 466410 - DNA, 60 bp, Artificial
  Synthetic oligonucleotide
tgacgtctgacgctgatttagctccctgaatgttcggatggaaatgtgctgaccgacttg

SEQ ID NO: 466411 - DNA, 55 bp, Artificial
  Synthetic oligonucleotide
tgacgtctgggatggcgtcaaggcaacctacatcccgattggtgtgcatggagtc

SEQ ID NO: 466412 - DNA, 57 bp, Artificial
  Synthetic oligonucleotide
tgacgtgaaccgcgctactatatcaaggtggaaagctaacgataaatttagagaagg

SEQ ID NO: 466413 - DNA, 55 bp, Artificial
  Synthetic oligonucleotide
tgacgtgaatgtctggcccgatgcatgggatggagttacaacattgacgccactc

SEQ ID NO: 466414 - DNA, 55 bp, Artificial
  Synthetic oligonucleotide
tgacgtgacccgtggtaacggtataacacatcgtgtaggcaagcgtttctgcgtc

SEQ ID NO: 466415 - DNA, 60 bp, Artificial
  Synthetic oligonucleotide
tgacgtgcgccgagttctttggcatgctacccaggatcaggaggaatctatgcgcctggt

SEQ ID NO: 466416 - DNA, 58 bp, Artificial
  Synthetic oligonucleotide
tgacgtggacttagacgttttctacagcccctacaggttgcactacaacttcaacgca

SEQ ID NO: 466417 - DNA, 55 bp, Artificial
  Synthetic oligonucleotide
tgacgtggatgatttggccggggttgattcacgtgctgagctgatgggttggttg

SEQ ID NO: 466418 - DNA, 51 bp, Artificial
  Synthetic oligonucleotide
tgacgtgggggggaacctacttaaacacggaagtaggccccgacacgtcac

SEQ ID NO: 466419 - DNA, 54 bp, Artificial
  Synthetic oligonucleotide
tgacgtgtagtgatcatgggaggcagttgtagttgtcaaggcgctgaacaacaa

SEQ ID NO: 466420 - DNA, 55 bp, Artificial
  Synthetic oligonucleotide
tgacgtgtccgtctcctcctttggagtgacgctgtcctggtccgcaaactacccc

SEQ ID NO: 466421 - DNA, 60 bp, Artificial
  Synthetic oligonucleotide
tgacgttactcgtggtattgggcttactcatcgagttggcaagcgtttctgtgtcaagtc

SEQ ID NO: 466422 - DNA, 60 bp, Artificial
  Synthetic oligonucleotide
tgacgttagcataaggctgttagaggttgtccagagcgaccagtcacaatctggccttac

SEQ ID NO: 466423 - DNA, 55 bp, Artificial
  Synthetic oligonucleotide
tgacgttataccaagcctcattactgtatactcttgggcttagatcaagatgtcc

SEQ ID NO: 466424 - DNA, 60 bp, Artificial
  Synthetic oligonucleotide
tgacgttatactgcacgtcgtttgaatagaccctggtattgaagtccaaatgtccactca

SEQ ID NO: 466425 - DNA, 60 bp, Artificial
  Synthetic oligonucleotide
tgacgttcatccagttgtcaaagcaattcagttagcatacgatcatcaatatcgtgtcac

SEQ ID NO: 466426 - DNA, 60 bp, Artificial
  Synthetic oligonucleotide
tgacgttcgatgcagcattccaacagttagtgagagtccttaccagaagtacagctaatg

SEQ ID NO: 466427 - DNA, 55 bp, Artificial
  Synthetic oligonucleotide
tgacgttcgcacacggtcagccaggcacaggcgacagcgcgacggtaaagggcag

SEQ ID NO: 466428 - DNA, 55 bp, Artificial
  Synthetic oligonucleotide
tgacgttcgccctgtgggacccaggccgtccaaaagcacactcgtgttcagcctg

SEQ ID NO: 466429 - DNA, 55 bp, Artificial
  Synthetic oligonucleotide
tgacgttcgccggttctacggtgtcgatcccgggctactcggtgacggccaacaa

SEQ ID NO: 466430 - DNA, 50 bp, Artificial
  Synthetic oligonucleotide
tgacgttgaaaacgatgtcagagtagccattgctgctttcggctactact

SEQ ID NO: 466431 - DNA, 55 bp, Artificial
  Synthetic oligonucleotide
tgacgttgaaccaagcatcattactgtacacctttggactcagatccaaatgacc

SEQ ID NO: 466432 - DNA, 50 bp, Artificial
  Synthetic oligonucleotide
tgacgttgaacgacatgagagaatatcttacggatgggctggcaaacgac

SEQ ID NO: 466433 - DNA, 60 bp, Artificial
  Synthetic oligonucleotide
tgacgttgatgccagcgacgttaacaagacaacaaaaccggacacatcagcatgtagatt

SEQ ID NO: 466434 - DNA, 60 bp, Artificial
  Synthetic oligonucleotide
tgacgttgcggcatactattaataacgtaacgagatagtctgacttctttctctatgaac

SEQ ID NO: 466435 - DNA, 55 bp, Artificial
  Synthetic oligonucleotide
tgacgttgctaacttcgttaggtgcaacaatacgtttcaagactgcaactgcaga

SEQ ID NO: 466436 - DNA, 60 bp, Artificial
  Synthetic oligonucleotide
tgacgttgtaccaagcatcattactgtagacctttgggctcaggtccaggtgtccacata

SEQ ID NO: 466437 - DNA, 55 bp, Artificial
  Synthetic oligonucleotide
tgacgttgtaccaggcgtcattgttgtataccttggggctcaagtctagatgtcc

SEQ ID NO: 466438 - DNA, 55 bp, Artificial
  Synthetic oligonucleotide
tgacgttgtaccatgcctcgttactgtacaccttggggctcaagtcaaggtgacc

SEQ ID NO: 466439 - DNA, 59 bp, Artificial
  Synthetic oligonucleotide
tgacgttgtagtcactgttggcccaccggccgacttggagctggtttatccagctcttg

SEQ ID NO: 466440 - DNA, 60 bp, Artificial
  Synthetic oligonucleotide
tgacgtttggctggctatggaaactagtaccagtcacggtctctgatgaggcacaggagg

SEQ ID NO: 466441 - DNA, 60 bp, Artificial
  Synthetic oligonucleotide
tgactaaacagatggtccaagatgtatcaaatgatgtaagagaaacttatgcacgtatga

SEQ ID NO: 466442 - DNA, 52 bp, Artificial
  Synthetic oligonucleotide
tgactaaacggtcacccagccaagtagtgatcatgctcgatgctacttaact

SEQ ID NO: 466443 - DNA, 55 bp, Artificial
  Synthetic oligonucleotide
tgactaaactacccctgcttttatgttattcaggcgcgttggagtgcgctgaaaa

SEQ ID NO: 466444 - DNA, 60 bp, Artificial
  Synthetic oligonucleotide
tgactaaagggctctgtactataaattcatggcacatatatggaaaagacaatgcagtaa

SEQ ID NO: 466445 - DNA, 57 bp, Artificial
  Synthetic oligonucleotide
tgactaaatttaacaagaccgcatattcgaacatgatcaacgaattactaaatgggg

SEQ ID NO: 466446 - DNA, 57 bp, Artificial
  Synthetic oligonucleotide
tgactaacccagtggacgcctatggaaccctggtcaggaccctcaccggggctgcta

SEQ ID NO: 466447 - DNA, 51 bp, Artificial
  Synthetic oligonucleotide
tgactaagcatcctaagattcgtgacgcttatcttgcacagcagactccac

SEQ ID NO: 466448 - DNA, 52 bp, Artificial
  Synthetic oligonucleotide
tgactaagtacactatgatggaccttgttcatgcacttcgcaacttcgatga

SEQ ID NO: 466449 - DNA, 60 bp, Artificial
  Synthetic oligonucleotide
tgactaatctggagagtttcccccacaagctcgtgcagtttgctgaaattcaggggcgta

SEQ ID NO: 466450 - DNA, 60 bp, Artificial
  Synthetic oligonucleotide
tgactaatgccatcagtctcgccttgggagacatggaaagaattgggaagcctgagtacc

SEQ ID NO: 466451 - DNA, 50 bp, Artificial
  Synthetic oligonucleotide
tgactaattcatataagtacgatgacctaaagtcaatgaccagtaaggtg

SEQ ID NO: 466452 - DNA, 53 bp, Artificial
  Synthetic oligonucleotide
tgactacaaccccccgctggtggaaccgtggaaaaagcctgactacgaaccac

SEQ ID NO: 466453 - DNA, 60 bp, Artificial
  Synthetic oligonucleotide
tgactacactcttcaccattccgcacgtgaatcaaagtatgcgacagccatgcacgttgg

SEQ ID NO: 466454 - DNA, 54 bp, Artificial
  Synthetic oligonucleotide
tgactaccccggaagtaaattctacaagatgaagggtgaatggtgggacgggta

SEQ ID NO: 466455 - DNA, 55 bp, Artificial
  Synthetic oligonucleotide
tgactacgaaccacctgtggtccatggctgcccgctaccacctccacggcctact

SEQ ID NO: 466456 - DNA, 60 bp, Artificial
  Synthetic oligonucleotide
tgactacgagcataaggatctaactaaaatatctgcgcaggaggtgtcgagtgatgggcg

SEQ ID NO: 466457 - DNA, 60 bp, Artificial
  Synthetic oligonucleotide
tgactacggtcactgacatgcttgcaccccaaaagtacgctgatcccataatatggaagt

SEQ ID NO: 466458 - DNA, 52 bp, Artificial
  Synthetic oligonucleotide
tgactactcccagttacaggtcccggacttttatgtttgtcccggacaggga

SEQ ID NO: 466459 - DNA, 60 bp, Artificial
  Synthetic oligonucleotide
tgactactggcagtattcagcaactaatcagttcagacaacaatgtgtcgatcagccgtt

SEQ ID NO: 466460 - DNA, 60 bp, Artificial
  Synthetic oligonucleotide
tgactacttatgccatttagctagtaggaaggaagtaatcattaggaaatgctttgacaa

SEQ ID NO: 466461 - DNA, 56 bp, Artificial
  Synthetic oligonucleotide
tgactacttgtgcaactcccatcacctgtacagggacaagcattactttgtgaggg

SEQ ID NO: 466462 - DNA, 55 bp, Artificial
  Synthetic oligonucleotide
tgactagctaagtttttacgaacatttttgcttgtttagactacacaaagcttag

SEQ ID NO: 466463 - DNA, 56 bp, Artificial
  Synthetic oligonucleotide
tgactaggatcggtgggtcttatatggtactctccaaaacagggtatcttaggaaa

SEQ ID NO: 466464 - DNA, 55 bp, Artificial
  Synthetic oligonucleotide
tgactaggcaattgtctggaagtttcatacatgtggtcatgagtcaatatggagt

SEQ ID NO: 466465 - DNA, 57 bp, Artificial
  Synthetic oligonucleotide
tgactataagaagtgttcagctggtacagatgtagctgacctaatttgtgcccagta

SEQ ID NO: 466466 - DNA, 60 bp, Artificial
  Synthetic oligonucleotide
tgactatattcccacaccagtggatcaacctgaggacaaacaatagtgctaccattgtaa

SEQ ID NO: 466467 - DNA, 59 bp, Artificial
  Synthetic oligonucleotide
tgactatccccccactggaatatgacttaagtaccaccagtgcttacaagagtgtgtcc

SEQ ID NO: 466468 - DNA, 60 bp, Artificial
  Synthetic oligonucleotide
tgactatctatgtaactcatatcacttatacaaagacaagcactattttgttagaggggg

SEQ ID NO: 466469 - DNA, 60 bp, Artificial
  Synthetic oligonucleotide
tgactatctgcaggaaccgcatacattgaagccgactaaagttgaagttgatgaagatag

SEQ ID NO: 466470 - DNA, 60 bp, Artificial
  Synthetic oligonucleotide
tgactatgaagggaggctgattcagaacagcatcacaatagagagaatggtcctctcggc

SEQ ID NO: 466471 - DNA, 55 bp, Artificial
  Synthetic oligonucleotide
tgactatgagtatcacaccataaccgttgacacgattggacaagacagtgcgaac

SEQ ID NO: 466472 - DNA, 60 bp, Artificial
  Synthetic oligonucleotide
tgactatgattgactgggtaaatcgaaggagaagagatcattggagagagtgagttgagt

SEQ ID NO: 466473 - DNA, 55 bp, Artificial
  Synthetic oligonucleotide
tgactattggatgctaattgcgcctactcaaataggtagagtagcggagggtaca

SEQ ID NO: 466474 - DNA, 60 bp, Artificial
  Synthetic oligonucleotide
tgactattgtattgtaccaaacaaaggcggcacaagtatcggatcatggcatataagaaa

SEQ ID NO: 466475 - DNA, 55 bp, Artificial
  Synthetic oligonucleotide
tgactattgtgcaaaaatgatttcggaggtaccctacgaaagtagcttcgtaggg

SEQ ID NO: 466476 - DNA, 60 bp, Artificial
  Synthetic oligonucleotide
tgactcaaaggatagccatgtgtcagcgaggttgttgatggttcggtaagtcgttgtcgt

SEQ ID NO: 466477 - DNA, 58 bp, Artificial
  Synthetic oligonucleotide
tgactcaaataacaaactacatagttttgtaccagggcctgataagctttgtgtaaca

SEQ ID NO: 466478 - DNA, 59 bp, Artificial
  Synthetic oligonucleotide
tgactcaaatgttaagaacctctacgacaaggtccgactacagcttagggataatgcaa

SEQ ID NO: 466479 - DNA, 60 bp, Artificial
  Synthetic oligonucleotide
tgactcaatctattcgggagtctatgggactttgtaatccgagaactcgcatcagtgtga

SEQ ID NO: 466480 - DNA, 59 bp, Artificial
  Synthetic oligonucleotide
tgactcaattgagagagtctaggagcacctccatttcgaacaggtgggtggttggggcc

SEQ ID NO: 466481 - DNA, 60 bp, Artificial
  Synthetic oligonucleotide
tgactcaatttccccacttctccagtgtagtattaggcaatgctgctggcttaggcataa

SEQ ID NO: 466482 - DNA, 60 bp, Artificial
  Synthetic oligonucleotide
tgactcaccgagcacttaatcgtaatgcttccagtagtcgtgctattcctacccaacgcc

SEQ ID NO: 466483 - DNA, 55 bp, Artificial
  Synthetic oligonucleotide
tgactcagatgaatggtaagcaagcacgagagataacagagctgcgtgaatcagc

SEQ ID NO: 466484 - DNA, 59 bp, Artificial
  Synthetic oligonucleotide
tgactcaggtatcagttcctgcgagagaaacttcgtacggcattaatgaaaccagggga

SEQ ID NO: 466485 - DNA, 57 bp, Artificial
  Synthetic oligonucleotide
tgactcagtcattacagtacctaaatgagcgtgacgaactgctacacgaggtggatg

SEQ ID NO: 466486 - DNA, 60 bp, Artificial
  Synthetic oligonucleotide
tgactcagtctctacagtacttaaacgagcgtgacgaattactccacgaagtggacgagc

SEQ ID NO: 466487 - DNA, 60 bp, Artificial
  Synthetic oligonucleotide
tgactcagtttatattggcatgtatgcaatatgtacacttgaactatatggacagggcag

SEQ ID NO: 466488 - DNA, 60 bp, Artificial
  Synthetic oligonucleotide
tgactcatacgagtaaatacttgtgttcaaagattctgactgacacaagtcggcctaatg

SEQ ID NO: 466489 - DNA, 60 bp, Artificial
  Synthetic oligonucleotide
tgactcatcaggttcctctatcaaagcagtaagtagtatatgtaatgcctttatacatat

SEQ ID NO: 466490 - DNA, 60 bp, Artificial
  Synthetic oligonucleotide
tgactcatgccaaggacatccttgagaagacccataacggaaagctatgcaaactaaacg

SEQ ID NO: 466491 - DNA, 60 bp, Artificial
  Synthetic oligonucleotide
tgactcattattctggtttagatttgagagctctcatcatcaatcttggcggtttaccaa

SEQ ID NO: 466492 - DNA, 55 bp, Artificial
  Synthetic oligonucleotide
tgactcattcgctgaggctgagaccgacaggcttctggctaagctggcctacatg

SEQ ID NO: 466493 - DNA, 60 bp, Artificial
  Synthetic oligonucleotide
tgactcatttgcattcggatcgcgttcatctggtttcgccagtagtcgtattgctgcacc

SEQ ID NO: 466494 - DNA, 57 bp, Artificial
  Synthetic oligonucleotide
tgactccaataatactagccggcaattcccctctttgcccaataagtgggtgggcta

SEQ ID NO: 466495 - DNA, 56 bp, Artificial
  Synthetic oligonucleotide
tgactccaattccggccggaaacaattggcagttacctccgacccgctagacatct

SEQ ID NO: 466496 - DNA, 55 bp, Artificial
  Synthetic oligonucleotide
tgactcccgcaggccaaccgagtgctatgtcgtgcacttcctgggcggagtctac

SEQ ID NO: 466497 - DNA, 60 bp, Artificial
  Synthetic oligonucleotide
tgactccgacctctcagacctcccttcattcagaagctcatgttacttccatcagcgact

SEQ ID NO: 466498 - DNA, 60 bp, Artificial
  Synthetic oligonucleotide
tgactcctacactcaagtgtgtgaccaccggctaatgtcagctgccatcaaggatagcaa

SEQ ID NO: 466499 - DNA, 57 bp, Artificial
  Synthetic oligonucleotide
tgactcctgaaaccttcccgacggtgtcacagttcctctttgagctagggaaacagc

SEQ ID NO: 466500 - DNA, 60 bp, Artificial
  Synthetic oligonucleotide
tgactccttgtttgtttgttccgcttctcgtcatcttgctgtttgatggagtatatcgtt

SEQ ID NO: 466501 - DNA, 55 bp, Artificial
  Synthetic oligonucleotide
tgactcgacgtaaatacgttaaacagcgtctggatatatttaatgtcgggcgagt

SEQ ID NO: 466502 - DNA, 58 bp, Artificial
  Synthetic oligonucleotide
tgactcgctactgcgtcggggctagtagctcccagtatttagaccccaaaggtgagga

SEQ ID NO: 466503 - DNA, 57 bp, Artificial
  Synthetic oligonucleotide
tgactcggacactattcccgatcttgatgatccagtacgggcagttcgtcttacgcc

SEQ ID NO: 466504 - DNA, 58 bp, Artificial
  Synthetic oligonucleotide
tgactcgtggacggacagtaaggaagactcggtattcatcaccacttacggattcatc

SEQ ID NO: 466505 - DNA, 60 bp, Artificial
  Synthetic oligonucleotide
tgactcgttgtcattcatgcgtgtgtcatgaatctcgacaattactgagccagaagcgtt

SEQ ID NO: 466506 - DNA, 60 bp, Artificial
  Synthetic oligonucleotide
tgactcgttgtccgtcattctcttgtcatgaatttctactatgacggacccattcgcgtt

SEQ ID NO: 466507 - DNA, 60 bp, Artificial
  Synthetic oligonucleotide
tgactctaacagcggcagtacttttgctaattacacattatgctattataggtccaggac

SEQ ID NO: 466508 - DNA, 60 bp, Artificial
  Synthetic oligonucleotide
tgactctagacaaagtgtatatcatgagtccaacaatgaagcttacattgcctctcttga

SEQ ID NO: 466509 - DNA, 55 bp, Artificial
  Synthetic oligonucleotide
tgactctaggcggggttgcggctatggcgtgtcccgctttcttcggggggctagt

SEQ ID NO: 466510 - DNA, 59 bp, Artificial
  Synthetic oligonucleotide
tgactctatagtggttgttgaaggacaaggaggctctggggttggctggcggtttatga

SEQ ID NO: 466511 - DNA, 51 bp, Artificial
  Synthetic oligonucleotide
tgactctcctgcttctaaacttgtcgtttcatcttttatggctcgatactc

SEQ ID NO: 466512 - DNA, 58 bp, Artificial
  Synthetic oligonucleotide
tgactctcttttttcatttagacatgctgatatcttattgaagagattgtttcctagg

SEQ ID NO: 466513 - DNA, 59 bp, Artificial
  Synthetic oligonucleotide
tgactctgaagtgacattagttccctcaatagcagcccagggcgaggacgtgggtcatg

SEQ ID NO: 466514 - DNA, 55 bp, Artificial
  Synthetic oligonucleotide
tgactctgattgttcatctgagggattaatggcatctgcaccccatcttgagagg

SEQ ID NO: 466515 - DNA, 59 bp, Artificial
  Synthetic oligonucleotide
tgactctggggtacctcttagccaatccttaatatacccacatcagtggatcaacttaa

SEQ ID NO: 466516 - DNA, 60 bp, Artificial
  Synthetic oligonucleotide
tgactctgtcgtgctctgcagtgactaccggcagagccgcaatgcggccgcattaattgc

SEQ ID NO: 466517 - DNA, 59 bp, Artificial
  Synthetic oligonucleotide
tgactcttcgcggaccttcaagccaggagattcgccgagggacagctaacaaggtagga

SEQ ID NO: 466518 - DNA, 60 bp, Artificial
  Synthetic oligonucleotide
tgactcttctgagtaaaagcacaggttctttaaggcagcactcatgcattttgtcaatga

SEQ ID NO: 466519 - DNA, 58 bp, Artificial
  Synthetic oligonucleotide
tgactcttggatcattcaatctccctttcttcgaaggatttttccagtaggcagtagg

SEQ ID NO: 466520 - DNA, 60 bp, Artificial
  Synthetic oligonucleotide
tgactcttgtatatatgagtgtggtccagaatacattaggctaacctcaactggttttga

SEQ ID NO: 466521 - DNA, 56 bp, Artificial
  Synthetic oligonucleotide
tgactgaaatgatgaaggggaatccagacttgaactcaagaagggaatggacaatt

SEQ ID NO: 466522 - DNA, 60 bp, Artificial
  Synthetic oligonucleotide
tgactgagatgtttagggaatataaccacaggcacagtgtaggggccacccttgaggcac

SEQ ID NO: 466523 - DNA, 55 bp, Artificial
  Synthetic oligonucleotide
tgactgagattaggcttttgcgctgtttcgcgatgtacgggtcaggagtgagtag

SEQ ID NO: 466524 - DNA, 55 bp, Artificial
  Synthetic oligonucleotide
tgactgatgagagcacaattttccaagcattgaacatgaaatcagcagttggggc

SEQ ID NO: 466525 - DNA, 57 bp, Artificial
  Synthetic oligonucleotide
tgactgattccaaaactgatgcgagattagacgaagatgtgaataaacttagactgt

SEQ ID NO: 466526 - DNA, 60 bp, Artificial
  Synthetic oligonucleotide
tgactgcactcaatcagaggtttctcaccctacaacctactttgctggagctctttcaac

SEQ ID NO: 466527 - DNA, 60 bp, Artificial
  Synthetic oligonucleotide
tgactgcagcactgtgttgcataccaggggctcgcgcggaccaaccctacttggacatca

SEQ ID NO: 466528 - DNA, 60 bp, Artificial
  Synthetic oligonucleotide
tgactgcagttcgtcaagagtatgctataccggtagggccagtgttcccaccaggtatga

SEQ ID NO: 466529 - DNA, 55 bp, Artificial
  Synthetic oligonucleotide
tgactgcgataataatctcatacaactgcttaaggtgttcaacctcatggattgc

SEQ ID NO: 466530 - DNA, 53 bp, Artificial
  Synthetic oligonucleotide
tgactgcttctcttggacctgacgccgcattctattgcccgcggtccggaaaa

SEQ ID NO: 466531 - DNA, 59 bp, Artificial
  Synthetic oligonucleotide
tgactggactgttattgtgggttcacgcgttatatgttctcctagtactgtcgaagggc

SEQ ID NO: 466532 - DNA, 59 bp, Artificial
  Synthetic oligonucleotide
tgactggagccatagactagtccttgaaatcacagatttcaatgggaaaaaggagaagg

SEQ ID NO: 466533 - DNA, 60 bp, Artificial
  Synthetic oligonucleotide
tgactggatacagaatccatccattggaggtcagaaattgcatcctcgagggtataacag

SEQ ID NO: 466534 - DNA, 55 bp, Artificial
  Synthetic oligonucleotide
tgactggcaacgaatcacaaatgctggcgatttagctactaaattgtcattatct

SEQ ID NO: 466535 - DNA, 60 bp, Artificial
  Synthetic oligonucleotide
tgactggctacactggtgactttgactcggtgatagactgcaacacgtctgtcatacaga

SEQ ID NO: 466536 - DNA, 60 bp, Artificial
  Synthetic oligonucleotide
tgactggcttagtcttcgctatgcggtgttgtattttgattggcagttgagaacagtggc

SEQ ID NO: 466537 - DNA, 59 bp, Artificial
  Synthetic oligonucleotide
tgactgggatcaagtggctaaagacagtgtctttgggtcgacgtactcaacttaagcaa

SEQ ID NO: 466538 - DNA, 60 bp, Artificial
  Synthetic oligonucleotide
tgactgggctgccactgcagcacacttagtagataatacctgcgcagctgatggggctat

SEQ ID NO: 466539 - DNA, 60 bp, Artificial
  Synthetic oligonucleotide
tgactgggttatttacctcacagaagcatcgtgtaatggacattctatctagtcccttac

SEQ ID NO: 466540 - DNA, 60 bp, Artificial
  Synthetic oligonucleotide
tgactggtccgttcaggattgggaactctgggctgacgtatctatgaggattgagctagg

SEQ ID NO: 466541 - DNA, 56 bp, Artificial
  Synthetic oligonucleotide
tgactggtgaaaacgatttacccccaaaccagttacctcatgacgatgatctttta

SEQ ID NO: 466542 - DNA, 60 bp, Artificial
  Synthetic oligonucleotide
tgactggtgaggtgcaggtactatccacatccactcagaccttcctaggtacaactgtgg

SEQ ID NO: 466543 - DNA, 57 bp, Artificial
  Synthetic oligonucleotide
tgactggtgagtacgccgaaaatttttattttgactagcggaggctagaaggagaga

SEQ ID NO: 466544 - DNA, 56 bp, Artificial
  Synthetic oligonucleotide
tgactggttataatttctcgtctaatgatccgtgtttattttctaagcaattacgt

SEQ ID NO: 466545 - DNA, 55 bp, Artificial
  Synthetic oligonucleotide
tgactggttgtcagaccggcctgaggctaccttcagagctcggctggatttaggc

SEQ ID NO: 466546 - DNA, 60 bp, Artificial
  Synthetic oligonucleotide
tgactggtttcaatgttcacccgcatcctcacttcctcagaccagagggaatcaagggga

SEQ ID NO: 466547 - DNA, 53 bp, Artificial
  Synthetic oligonucleotide
tgactgtaaggataaataatacgttcaaagatgaaccaaaagtggggtttaaa

SEQ ID NO: 466548 - DNA, 55 bp, Artificial
  Synthetic oligonucleotide
tgactgtaattctcatccgttgatggatcttactcttttcggcaacccaaaagtc

SEQ ID NO: 466549 - DNA, 60 bp, Artificial
  Synthetic oligonucleotide
tgactgtacggcagcgcataactaccatgtacagcattacctgacatgaaacgggggcaa

SEQ ID NO: 466550 - DNA, 60 bp, Artificial
  Synthetic oligonucleotide
tgactgtagcgcgtccatctgctaggagtcaaatttgttgctacgtcaacagttgctacg

SEQ ID NO: 466551 - DNA, 55 bp, Artificial
  Synthetic oligonucleotide
tgactgtcaatgctatccttagagagttgaaagtcacatgtcctacactaccgga

SEQ ID NO: 466552 - DNA, 52 bp, Artificial
  Synthetic oligonucleotide
tgactgtgaatcaaaatgcttttggaaaggtgggtccattaatactaaactc

SEQ ID NO: 466553 - DNA, 57 bp, Artificial
  Synthetic oligonucleotide
tgactgtgactcattcagtcaatttactcgaaagcagccataatggaaaactctgca

SEQ ID NO: 466554 - DNA, 50 bp, Artificial
  Synthetic oligonucleotide
tgactgtggatatcattcgggcggtaatcaggtatggggccaaatatgct

SEQ ID NO: 466555 - DNA, 57 bp, Artificial
  Synthetic oligonucleotide
tgactgtggtagccttaacagtatatccgaaggtgcgggagaggcgggcgttgaaaa

SEQ ID NO: 466556 - DNA, 60 bp, Artificial
  Synthetic oligonucleotide
tgactgtggtggataccacacgtagtactaatatgacattgtgtgtttctactgaaacct

SEQ ID NO: 466557 - DNA, 50 bp, Artificial
  Synthetic oligonucleotide
tgactgttaagggcacttcgctcgactccatcattcctgctgatttggtc

SEQ ID NO: 466558 - DNA, 60 bp, Artificial
  Synthetic oligonucleotide
tgactgttgtgccaaacgatatgttcataagagaatcactagtcgcatgtcagctagcca

SEQ ID NO: 466559 - DNA, 52 bp, Artificial
  Synthetic oligonucleotide
tgacttaaacactaggagaaacggtgtcctatggtgtcagtcgttcaatgca

SEQ ID NO: 466560 - DNA, 55 bp, Artificial
  Synthetic oligonucleotide
tgacttacgagataaatttacagctgatttgtctcaaacgtctttgggtcgtcgc

SEQ ID NO: 466561 - DNA, 60 bp, Artificial
  Synthetic oligonucleotide
tgacttagtcatataccgcacaaacacaataggagatgactatatcccaacatgtgattg

SEQ ID NO: 466562 - DNA, 60 bp, Artificial
  Synthetic oligonucleotide
tgacttataatgtctttgcacaatatggaacaacttcagctagtgaatttggaaagactg

SEQ ID NO: 466563 - DNA, 50 bp, Artificial
  Synthetic oligonucleotide
tgacttattggcgatgcaaattgcataaagtttagagggtgttcatttaa

SEQ ID NO: 466564 - DNA, 58 bp, Artificial
  Synthetic oligonucleotide
tgacttcaacgacgggaagataactgttcagtacaacttgagtcattcaacaccagtt

SEQ ID NO: 466565 - DNA, 58 bp, Artificial
  Synthetic oligonucleotide
tgacttcaataacactagctggcaactcctctctttgcccaatcagtggatgggctat

SEQ ID NO: 466566 - DNA, 60 bp, Artificial
  Synthetic oligonucleotide
tgacttcatagaatcagagctaggtccctttgtagattcacagacagtaggcctcgtctg

SEQ ID NO: 466567 - DNA, 53 bp, Artificial
  Synthetic oligonucleotide
tgacttcatctaagcgtgaagtctatctcaccacccatataggcataaagact

SEQ ID NO: 466568 - DNA, 55 bp, Artificial
  Synthetic oligonucleotide
tgacttccagtcgccctgtgccttacctaattttgatgttactccaccgatacac

SEQ ID NO: 466569 - DNA, 56 bp, Artificial
  Synthetic oligonucleotide
tgacttccccggagtcgtcgtctgtaagcaggcgtacggataccgcgccgcgacct

SEQ ID NO: 466570 - DNA, 60 bp, Artificial
  Synthetic oligonucleotide
tgacttcctctcgattgcatccaggactgtgaaacttctgggacacatcattctcaaggg

SEQ ID NO: 466571 - DNA, 59 bp, Artificial
  Synthetic oligonucleotide
tgacttcgatcatcccttggctaaaggagagccctcaagaaaccttaacaagctcgcca

SEQ ID NO: 466572 - DNA, 56 bp, Artificial
  Synthetic oligonucleotide
tgacttcggattatccgcatttttggaaccgttccgaattgggttgcgcgcttcag

SEQ ID NO: 466573 - DNA, 58 bp, Artificial
  Synthetic oligonucleotide
tgacttcgtgatgtacacccgatcgtcaggattgaagacgttaaaactcgacgacctg

SEQ ID NO: 466574 - DNA, 60 bp, Artificial
  Synthetic oligonucleotide
tgacttctacgcacactatgctcaggagcttcacgaaaaacggttaatgtcagacatttc

SEQ ID NO: 466575 - DNA, 55 bp, Artificial
  Synthetic oligonucleotide
tgacttctctggtgactcagttcgccgtgggatttgtaaggagtgggacctcgga

SEQ ID NO: 466576 - DNA, 56 bp, Artificial
  Synthetic oligonucleotide
tgacttcttaaaatcatttccgacaatgatgttcacaagaaatcacatctcaaaac

SEQ ID NO: 466577 - DNA, 58 bp, Artificial
  Synthetic oligonucleotide
tgacttcttctcgaagtatatggggttctacaaacctagcaagctaaacagagaggct

SEQ ID NO: 466578 - DNA, 55 bp, Artificial
  Synthetic oligonucleotide
tgacttgagtgtcgtcaatgctagacttcgtgcaaaacactacgtctatattggc

SEQ ID NO: 466579 - DNA, 60 bp, Artificial
  Synthetic oligonucleotide
tgacttgattttgtatcaatgtccgtgttttgattttaacgcacttcgtgagtcttgcgc

SEQ ID NO: 466580 - DNA, 57 bp, Artificial
  Synthetic oligonucleotide
tgacttgcaggtatgacaaaaataccgacgttaacgtggtcacccaggctaggaata

SEQ ID NO: 466581 - DNA, 56 bp, Artificial
  Synthetic oligonucleotide
tgacttggagataacaattgtcaccaacaacaagggattgatgcaaattatgtttg

SEQ ID NO: 466582 - DNA, 56 bp, Artificial
  Synthetic oligonucleotide
tgacttggatcgcctgcgcatcattgcgtacggtgatgacgtgattatatcttacc

SEQ ID NO: 466583 - DNA, 60 bp, Artificial
  Synthetic oligonucleotide
tgacttggcaagttgcacagagttttctcacaaatgctggtcttctgatgaccagtccgg

SEQ ID NO: 466584 - DNA, 57 bp, Artificial
  Synthetic oligonucleotide
tgacttggctcacggcctgattcacatgaacggtaagcccgttactgaattctggtt

SEQ ID NO: 466585 - DNA, 60 bp, Artificial
  Synthetic oligonucleotide
tgacttgggtgcccaacggcgcccctgaggctgccctcctgaacacgagcaatcccacag

SEQ ID NO: 466586 - DNA, 59 bp, Artificial
  Synthetic oligonucleotide
tgacttggtcaattggtgtctctcaaacttctctatgtatcggtgtgttggggtcttat

SEQ ID NO: 466587 - DNA, 57 bp, Artificial
  Synthetic oligonucleotide
tgacttggtgggtgcaaaacagttctacatacactatcatcagacagatttcaatag

SEQ ID NO: 466588 - DNA, 60 bp, Artificial
  Synthetic oligonucleotide
tgacttggttgaagagacactggctggatgattgagagatcgatctgatttctaggaaac

SEQ ID NO: 466589 - DNA, 58 bp, Artificial
  Synthetic oligonucleotide
tgacttgtcctacgtgaaggtagggaacccacgagatgacttaaggatggtcactgtg

SEQ ID NO: 466590 - DNA, 60 bp, Artificial
  Synthetic oligonucleotide
tgacttgtttcgcaatcttcggatgtaagccaacggctcgaggtagatatattgattggg

SEQ ID NO: 466591 - DNA, 60 bp, Artificial
  Synthetic oligonucleotide
tgactttaaatttgagacgtgggatccgttagatacaccatattctgatttacatcataa

SEQ ID NO: 466592 - DNA, 55 bp, Artificial
  Synthetic oligonucleotide
tgactttaagatgttcagtgaggataagccatatggggcccctgtattcctatct

SEQ ID NO: 466593 - DNA, 52 bp, Artificial
  Synthetic oligonucleotide
tgactttaatggtaagtgacatgtttgagggacggatgaatgttgccgcgct

SEQ ID NO: 466594 - DNA, 60 bp, Artificial
  Synthetic oligonucleotide
tgactttcaatgcaccagaatgtgatgaaggtgcagttatgaatatcgctcaggcaatgg

SEQ ID NO: 466595 - DNA, 57 bp, Artificial
  Synthetic oligonucleotide
tgactttccccccgcgctcagctgattcttcttgttctcgagggctttccttcttcg

SEQ ID NO: 466596 - DNA, 60 bp, Artificial
  Synthetic oligonucleotide
tgactttctgcgaaagttaacgaatgtggctcaggtctgtgtggatgttgtttcgcaggt

SEQ ID NO: 466597 - DNA, 57 bp, Artificial
  Synthetic oligonucleotide
tgactttgagagtcccgttaacagttagcgtttcagaaacctgaataacagcaccga

SEQ ID NO: 466598 - DNA, 56 bp, Artificial
  Synthetic oligonucleotide
tgactttgcgcttgagattgagttccggaatttgactccggggaacactaacaccc

SEQ ID NO: 466599 - DNA, 60 bp, Artificial
  Synthetic oligonucleotide
tgactttggctatgttcacaaatcgaacggccgcgtaattctctcatgtactccatcttc

SEQ ID NO: 466600 - DNA, 55 bp, Artificial
  Synthetic oligonucleotide
tgactttgggtttcatagtcccgcacttccagcctgtcaacctggcggtccggag

SEQ ID NO: 466601 - DNA, 60 bp, Artificial
  Synthetic oligonucleotide
tgacttttcacgtccctgatgtaattagagttggcaatgcgtattgttgctctcaatgtt

SEQ ID NO: 466602 - DNA, 55 bp, Artificial
  Synthetic oligonucleotide
tgacttttggtcgcgcaggtggttatggtgcgtaaatggttctcacaccaacgct

SEQ ID NO: 466603 - DNA, 60 bp, Artificial
  Synthetic oligonucleotide
tgactttttgggcaacagactatacatgcatcctgcagttctgactcctggtcgaatgag

SEQ ID NO: 466604 - DNA, 51 bp, Artificial
  Synthetic oligonucleotide
tgagaaaatcctagaagttgcttgtaagatcccttctccaaaggcgacttc

SEQ ID NO: 466605 - DNA, 55 bp, Artificial
  Synthetic oligonucleotide
tgagaaaccggcgtgattgtaccgcagttttaaaggagcttcaaaccctcccagc

SEQ ID NO: 466606 - DNA, 60 bp, Artificial
  Synthetic oligonucleotide
tgagaaagcgctcaaatggtctgagcttgaggaaccagcttacacataccaacaactttc

SEQ ID NO: 466607 - DNA, 60 bp, Artificial
  Synthetic oligonucleotide
tgagaaagctgatactcgtctcggtgagactctatgtaattgaatgcgttaggaggatta

SEQ ID NO: 466608 - DNA, 55 bp, Artificial
  Synthetic oligonucleotide
tgagaaaggactacataaagagacaagggagcacccccttagcattaatggacct

SEQ ID NO: 466609 - DNA, 52 bp, Artificial
  Synthetic oligonucleotide
tgagaaaggtggattatcatatgcgacaattaagtatgctactgagaccaca

SEQ ID NO: 466610 - DNA, 56 bp, Artificial
  Synthetic oligonucleotide
tgagaaagtgagtggtttaaataacgtgaattgaattagaagttagattgagttgt

SEQ ID NO: 466611 - DNA, 60 bp, Artificial
  Synthetic oligonucleotide
tgagaaatacgatttacctcggctgtctatgtggaagaatgcggccaaccattcactgcc

SEQ ID NO: 466612 - DNA, 55 bp, Artificial
  Synthetic oligonucleotide
tgagaaatgatcatgaccctcatgtcgtggaggtgatataccgtgattctgatcc

SEQ ID NO: 466613 - DNA, 58 bp, Artificial
  Synthetic oligonucleotide
tgagaaattataataatacgagcggacaaattgagattcgaatataaaaagccgcgtg

SEQ ID NO: 466614 - DNA, 60 bp, Artificial
  Synthetic oligonucleotide
tgagaacaaagtgctagacataccaattgttccacagcatttgttgactagtacaaatat

SEQ ID NO: 466615 - DNA, 55 bp, Artificial
  Synthetic oligonucleotide
tgagaacagagttccgggtgggcagatacaggagctcgtttatacgttgatgggg

SEQ ID NO: 466616 - DNA, 59 bp, Artificial
  Synthetic oligonucleotide
tgagaacatcaagactaagaatcatacgaatagtgttatgtttttccttgttagggatc

SEQ ID NO: 466617 - DNA, 60 bp, Artificial
  Synthetic oligonucleotide
tgagaaccagtttggcccagaattcatgatggttcagaatacagcaatttctacttacat

SEQ ID NO: 466618 - DNA, 59 bp, Artificial
  Synthetic oligonucleotide
tgagaaccccagtaatgaaacttggaggatgacgtgattgttccatcttgaccgttcaa

SEQ ID NO: 466619 - DNA, 54 bp, Artificial
  Synthetic oligonucleotide
tgagaaccggttccgggtcaaggctcccgacgatcagaacgagaaggctcatcg

SEQ ID NO: 466620 - DNA, 59 bp, Artificial
  Synthetic oligonucleotide
tgagaaccgttaccagagcgagaaggctaagtatctcggtaagaaattaatcttgcata

SEQ ID NO: 466621 - DNA, 55 bp, Artificial
  Synthetic oligonucleotide
tgagaaccgttcgagttaagtttttcgattcgcggccccctgaggagatactaca

SEQ ID NO: 466622 - DNA, 55 bp, Artificial
  Synthetic oligonucleotide
tgagaacgaccaacacacggaatacgaagatagagatagacaccaccggtagtac

SEQ ID NO: 466623 - DNA, 55 bp, Artificial
  Synthetic oligonucleotide
tgagaacgagcttctcccacttagcgacatctttccctcagcggtagatgagatg

SEQ ID NO: 466624 - DNA, 60 bp, Artificial
  Synthetic oligonucleotide
tgagaacgctctactattgtacatggcatgtactcatgcctctaaccctgtatatgcaac

SEQ ID NO: 466625 - DNA, 55 bp, Artificial
  Synthetic oligonucleotide
tgagaacgtacttaaaacggagcacatgtccaaagtatttaaaggctgtcctcgg

SEQ ID NO: 466626 - DNA, 59 bp, Artificial
  Synthetic oligonucleotide
tgagaacgtacttcaatttatcgatactcaaccaaattcacaacttctgatcaacaaaa

SEQ ID NO: 466627 - DNA, 50 bp, Artificial
  Synthetic oligonucleotide
tgagaacgtgatatatgcaccttacatgggtagcgaccgtcatggtgtta

SEQ ID NO: 466628 - DNA, 50 bp, Artificial
  Synthetic oligonucleotide
tgagaactcgaaggacgcgggattcccaatcattaacacgccaagtaaaa

SEQ ID NO: 466629 - DNA, 60 bp, Artificial
  Synthetic oligonucleotide
tgagaagaagacccgcatacgtaggccccagctggggcggttcacgcatcggcggcgcaa

SEQ ID NO: 466630 - DNA, 55 bp, Artificial
  Synthetic oligonucleotide
tgagaagataatggcgcagccatgtcatcgaagaattatttgggtttatgggcca

SEQ ID NO: 466631 - DNA, 55 bp, Artificial
  Synthetic oligonucleotide
tgagaagatggaaacacttcaaaggcgatatggaggtggccttgtgagaaacccc

SEQ ID NO: 466632 - DNA, 55 bp, Artificial
  Synthetic oligonucleotide
tgagaagattgcgcaaccctttagctggttacgtttacacaggattcatctcgga

SEQ ID NO: 466633 - DNA, 55 bp, Artificial
  Synthetic oligonucleotide
tgagaagcacaatgggaagttccaaacaaccactgtcctgttcgtgcgtgatcgg

SEQ ID NO: 466634 - DNA, 60 bp, Artificial
  Synthetic oligonucleotide
tgagaagccatcgaaattggacgtttatctattgaagcatgtgtgtgtaaatgcgaagcc

SEQ ID NO: 466635 - DNA, 60 bp, Artificial
  Synthetic oligonucleotide
tgagaagcgaattggagtatggcaactgcgataccaagtgtcagaccccactgggtgcta

SEQ ID NO: 466636 - DNA, 59 bp, Artificial
  Synthetic oligonucleotide
tgagaaggatgttcgggtggctgcttaagcgcttctatacttaagtaccgaatgttata

SEQ ID NO: 466637 - DNA, 51 bp, Artificial
  Synthetic oligonucleotide
tgagaaggcagcacactgcatccatgctgagtgggacacagggctgaattc

SEQ ID NO: 466638 - DNA, 60 bp, Artificial
  Synthetic oligonucleotide
tgagaagtatgagatcaaaatagagtgcgaaggtgattgtgggctcatagagtgcgggtg

SEQ ID NO: 466639 - DNA, 50 bp, Artificial
  Synthetic oligonucleotide
tgagaagtggtatgagggagtgaggaatgattatggccttaatgataacg

SEQ ID NO: 466640 - DNA, 60 bp, Artificial
  Synthetic oligonucleotide
tgagaagtgtgtaattctgatctagtgtaactgggacactagtggtagcttcactatggg

SEQ ID NO: 466641 - DNA, 60 bp, Artificial
  Synthetic oligonucleotide
tgagaagttagtatcgatgcttgattatatcatctatagcgcagaagaggtgcactacgt

SEQ ID NO: 466642 - DNA, 60 bp, Artificial
  Synthetic oligonucleotide
tgagaatactgcccttaggtatgctgtccagtcgttgaccacttctacccggatattgca

SEQ ID NO: 466643 - DNA, 57 bp, Artificial
  Synthetic oligonucleotide
tgagaatagtagtggtactgagacctttagacctgcaggaggagacatgagggacaa

SEQ ID NO: 466644 - DNA, 60 bp, Artificial
  Synthetic oligonucleotide
tgagaatcactcaaacgatgtgagacagtgtatgtatgcgataggctacggttcatattt

SEQ ID NO: 466645 - DNA, 60 bp, Artificial
  Synthetic oligonucleotide
tgagaatcagtaaaatgggagtggacgaatattctagcactgaaagagtggtcgtaagta

SEQ ID NO: 466646 - DNA, 60 bp, Artificial
  Synthetic oligonucleotide
tgagaatcatacggagaatgctttactattgtatatggcatgtacccatgcgtcaaaccc

SEQ ID NO: 466647 - DNA, 55 bp, Artificial
  Synthetic oligonucleotide
tgagaatcctctatacagtggcacaactcagaacatctgatgaggttgcttggac

SEQ ID NO: 466648 - DNA, 60 bp, Artificial
  Synthetic oligonucleotide
tgagaatgataaatgatggttgggaattcggtataacgctcggtaagatgtcaatacgag

SEQ ID NO: 466649 - DNA, 56 bp, Artificial
  Synthetic oligonucleotide
tgagaattcagtgtccccactcagtcaactttggggaaacaagtgtgtcaggctat

SEQ ID NO: 466650 - DNA, 60 bp, Artificial
  Synthetic oligonucleotide
tgagaattgtcatggtagtgcttaatctagtgagaaacattaggcagggatatcaacccc

SEQ ID NO: 466651 - DNA, 56 bp, Artificial
  Synthetic oligonucleotide
tgagacaaaatgactaaacctatcaaaatttcggtcacaaattttagcaaactcaa

SEQ ID NO: 466652 - DNA, 55 bp, Artificial
  Synthetic oligonucleotide
tgagacaaacatattaaacttgcgttttgccccgagaactgcttttaggagttcc

SEQ ID NO: 466653 - DNA, 57 bp, Artificial
  Synthetic oligonucleotide
tgagacaaacgactcaacaacggttgaaccagtgttagacggaccatatcaacaaac

SEQ ID NO: 466654 - DNA, 60 bp, Artificial
  Synthetic oligonucleotide
tgagacaaagagtacaagccgatcgaaatgtggttaactatccatcaatattacatccaa

SEQ ID NO: 466655 - DNA, 53 bp, Artificial
  Synthetic oligonucleotide
tgagacaagcagctgctaatatcagccacacaaaagcacctaatgctgaaaca

SEQ ID NO: 466656 - DNA, 50 bp, Artificial
  Synthetic oligonucleotide
tgagacaatgtatcatgcgattgaaccttcaacgagagcagagccagagg

SEQ ID NO: 466657 - DNA, 60 bp, Artificial
  Synthetic oligonucleotide
tgagacacaacggcagtggttggatgatccatatagggaacggactgtacatctccaaca

SEQ ID NO: 466658 - DNA, 60 bp, Artificial
  Synthetic oligonucleotide
tgagacacccaggattcacggtgatagccctttttctagcacatgccataggaacatcca

SEQ ID NO: 466659 - DNA, 58 bp, Artificial
  Synthetic oligonucleotide
tgagacaccgatacatcggtgcctctattggtacccaataaagaaattgactaaacta

SEQ ID NO: 466660 - DNA, 55 bp, Artificial
  Synthetic oligonucleotide
tgagacactttggcgaattggcgtacaagtgggttcagttctcggttcgtagggg

SEQ ID NO: 466661 - DNA, 51 bp, Artificial
  Synthetic oligonucleotide
tgagacagcaccacgtaccgagattcggtacataccgtcgaggacggtata

SEQ ID NO: 466662 - DNA, 60 bp, Artificial
  Synthetic oligonucleotide
tgagacaggatggatcaaaatcttccactaaatgaaacgatagctctgataaaatgacct

SEQ ID NO: 466663 - DNA, 53 bp, Artificial
  Synthetic oligonucleotide
tgagacatgcttgtcaaatgtttttgcatgcagcaacaagtcaatcgtattgt

SEQ ID NO: 466664 - DNA, 60 bp, Artificial
  Synthetic oligonucleotide
tgagaccaacagccacatggagatttggcatgtgagtgacgcttggctacgcaggacgcg

SEQ ID NO: 466665 - DNA, 60 bp, Artificial
  Synthetic oligonucleotide
tgagaccacactgcccaaatggcttccgtgcctctcactatctagatgatgagggtaaac

SEQ ID NO: 466666 - DNA, 51 bp, Artificial
  Synthetic oligonucleotide
tgagaccaccaaatatgacaccagctgttgcggcactatttccaaacgctc

SEQ ID NO: 466667 - DNA, 60 bp, Artificial
  Synthetic oligonucleotide
tgagaccagtttcacgagtgccgaaagctcttctgagggagatggatcgtctgatgacca

SEQ ID NO: 466668 - DNA, 50 bp, Artificial
  Synthetic oligonucleotide
tgagacccaaacgtgtcatgtggttgactcatttggctcgcagacaaccg

SEQ ID NO: 466669 - DNA, 55 bp, Artificial
  Synthetic oligonucleotide
tgagaccctacgtgtgtgaacacggtgtcatgaacgtctctttggaagaacgtcc

SEQ ID NO: 466670 - DNA, 60 bp, Artificial
  Synthetic oligonucleotide
tgagaccggggacgaggatccagtcaagtcgagagccagtagcatagtgtacagctatag

SEQ ID NO: 466671 - DNA, 54 bp, Artificial
  Synthetic oligonucleotide
tgagacctcagtcggcatcataccacgtgccgacgtggatcactgggacgcata

SEQ ID NO: 466672 - DNA, 58 bp, Artificial
  Synthetic oligonucleotide
tgagacctctgctcgaggagagccctgttccaggtaggaacgttgtggtctaacttaa

SEQ ID NO: 466673 - DNA, 60 bp, Artificial
  Synthetic oligonucleotide
tgagacctgagtttgcgattcacggtgtaaatccaatgcctggtccgcttacacgtgcga

SEQ ID NO: 466674 - DNA, 53 bp, Artificial
  Synthetic oligonucleotide
tgagacctgctcccgcctcggtactgccgcttacccactgctgggctcgggta

SEQ ID NO: 466675 - DNA, 51 bp, Artificial
  Synthetic oligonucleotide
tgagacgaagttgtaccgtctcgtttttgggtttgttgccgaatccgacgg

SEQ ID NO: 466676 - DNA, 56 bp, Artificial
  Synthetic oligonucleotide
tgagacgatgggctactataagggaactgatccaacagcagatagggtgagagcga

SEQ ID NO: 466677 - DNA, 60 bp, Artificial
  Synthetic oligonucleotide
tgagacgcagagtgatagaagctctcaaccctgacgaattattcgaacagtactcacata

SEQ ID NO: 466678 - DNA, 57 bp, Artificial
  Synthetic oligonucleotide
tgagacggaaattagagtttttcacttattctagatttgacttagagatgacttttg

SEQ ID NO: 466679 - DNA, 60 bp, Artificial
  Synthetic oligonucleotide
tgagacggcatgcctttcaaaagcttacgggcagatgtggttgctgagttacttccatcg

SEQ ID NO: 466680 - DNA, 60 bp, Artificial
  Synthetic oligonucleotide
tgagacggctctccaactgatcgtcacgtcgttcaatgagctatacgcgtcctgcatgac

SEQ ID NO: 466681 - DNA, 55 bp, Artificial
  Synthetic oligonucleotide
tgagacgtccttttcagacgagcatgtcgtcacacagtttgtaaccccaggtggt

SEQ ID NO: 466682 - DNA, 58 bp, Artificial
  Synthetic oligonucleotide
tgagactagacctttctcggtctagtcggccttcagcatgcctcttaccgccgggaaa

SEQ ID NO: 466683 - DNA, 55 bp, Artificial
  Synthetic oligonucleotide
tgagactgcgtcggaggaggtaccaatcttcggcgctggggcggcgaacgttatc

SEQ ID NO: 466684 - DNA, 57 bp, Artificial
  Synthetic oligonucleotide
tgagactggggtgggaagcactcaaacttctgggggatcttctgttatactggggtc

SEQ ID NO: 466685 - DNA, 55 bp, Artificial
  Synthetic oligonucleotide
tgagactgggttgggaagccctcaaatatctggggaatcttctgacatactgggg

SEQ ID NO: 466686 - DNA, 60 bp, Artificial
  Synthetic oligonucleotide
tgagactgtgacactgggcgagagaggagttccaaagagggagcctcttgtagttgtgat

SEQ ID NO: 466687 - DNA, 60 bp, Artificial
  Synthetic oligonucleotide
tgagacttatgtcagcagcattgctcaaggggaagctgaaaaaagccgacccaacctacc

SEQ ID NO: 466688 - DNA, 58 bp, Artificial
  Synthetic oligonucleotide
tgagagaaagtcggaacccagggaacgctgaaattgaggatctcattttcctggcacg

SEQ ID NO: 466689 - DNA, 60 bp, Artificial
  Synthetic oligonucleotide
tgagagaagcgctatctttcggctgacttgttatgcaatctttggatgtaagccaacagc

SEQ ID NO: 466690 - DNA, 60 bp, Artificial
  Synthetic oligonucleotide
tgagagaagtatccctcagagcggcctccgtaaccttatgggcaattatcagcatttggt

SEQ ID NO: 466691 - DNA, 55 bp, Artificial
  Synthetic oligonucleotide
tgagagaagtccataggtggtcttcttctcgtcattgtgtctctaaccatcatag

SEQ ID NO: 466692 - DNA, 58 bp, Artificial
  Synthetic oligonucleotide
tgagagaatagcgtatatactttcaccgtaacgctccttactttgctcctccgtccag

SEQ ID NO: 466693 - DNA, 60 bp, Artificial
  Synthetic oligonucleotide
tgagagaatatgcctggtaatcttggtacccttatatacttggactcaatggcaggattg

SEQ ID NO: 466694 - DNA, 60 bp, Artificial
  Synthetic oligonucleotide
tgagagactaggccagttctcatttattggcaaagtccagtggaaagtgttcactccaaa

SEQ ID NO: 466695 - DNA, 51 bp, Artificial
  Synthetic oligonucleotide
tgagagacttaacatcaatactgagcaggatcctacaacttctgtacagac

SEQ ID NO: 466696 - DNA, 55 bp, Artificial
  Synthetic oligonucleotide
tgagagacttactattaattgctgcgaggattgtgggcaagggactgacgagggg

SEQ ID NO: 466697 - DNA, 60 bp, Artificial
  Synthetic oligonucleotide
tgagagagaagtgttacagtggaagttcgacagccgtctagcatttcatcatgtagcccg

SEQ ID NO: 466698 - DNA, 60 bp, Artificial
  Synthetic oligonucleotide
tgagagagcaattcattcaggcattatccgactatttgatgcagaatccggaattaaagt

SEQ ID NO: 466699 - DNA, 60 bp, Artificial
  Synthetic oligonucleotide
tgagagagctgatcctgtatgacaaagaggagatcaggagaatttggcgccaagcgaaca

SEQ ID NO: 466700 - DNA, 55 bp, Artificial
  Synthetic oligonucleotide
tgagagaggtacctagaccgtacaggccggggtttatcccccggccgatacagca

SEQ ID NO: 466701 - DNA, 60 bp, Artificial
  Synthetic oligonucleotide
tgagagaggtgatgaatgaggttttattaggaggtgaaaacgtgattgtaatatttgaga

SEQ ID NO: 466702 - DNA, 60 bp, Artificial
  Synthetic oligonucleotide
tgagagaggtggaggccacatcagtggagcactcgctaacggactctttaatgtcgcacc

SEQ ID NO: 466703 - DNA, 59 bp, Artificial
  Synthetic oligonucleotide
tgagagatagtattcaggccaccaaccaggcagttttcgaaatttcacaaggactcgag

SEQ ID NO: 466704 - DNA, 52 bp, Artificial
  Synthetic oligonucleotide
tgagagatttacatatatagcacatcaagatacaggaagatatccagaagga

SEQ ID NO: 466705 - DNA, 60 bp, Artificial
  Synthetic oligonucleotide
tgagagcaacatcctggacatagatctacgtcctgcatcagcttggactctatatgccgt

SEQ ID NO: 466706 - DNA, 60 bp, Artificial
  Synthetic oligonucleotide
tgagagccaaacacaagatactgatccccagcagactgaccagaccgcggggcaagaaat

SEQ ID NO: 466707 - DNA, 51 bp, Artificial
  Synthetic oligonucleotide
tgagagccagacctgcctatctcctgtcaatgaccctcgctttgtagctgg

SEQ ID NO: 466708 - DNA, 57 bp, Artificial
  Synthetic oligonucleotide
tgagagcctcggtatgcagtgtgaccactagcgctggggtagagttcccttgggcgc

SEQ ID NO: 466709 - DNA, 60 bp, Artificial
  Synthetic oligonucleotide
tgagagcgagaactctgaaaatttacaatagaggttcgatggacactttaattctgatct

SEQ ID NO: 466710 - DNA, 55 bp, Artificial
  Synthetic oligonucleotide
tgagagcgtcgcagctatacggaagcctagagcattatagcgcagctaacgcagc

SEQ ID NO: 466711 - DNA, 50 bp, Artificial
  Synthetic oligonucleotide
tgagagctacaatgcaccagctaatataatttattatcaacaggtggtga

SEQ ID NO: 466712 - DNA, 58 bp, Artificial
  Synthetic oligonucleotide
tgagagctgagctagcctggttattatcggggctcgttactaattccgtgcaaaaccg

SEQ ID NO: 466713 - DNA, 55 bp, Artificial
  Synthetic oligonucleotide
tgagagcttggagacatcgggcaagagcagtcagagctaggcttatcgcccaggg

SEQ ID NO: 466714 - DNA, 60 bp, Artificial
  Synthetic oligonucleotide
tgagaggagcccgagataaccaataggagatggtctggagaactggcagtggtcttccca

SEQ ID NO: 466715 - DNA, 60 bp, Artificial
  Synthetic oligonucleotide
tgagaggccagccgtcgcttgtgccgacggttctcgtcctgttccagatccgtctccgtc

SEQ ID NO: 466716 - DNA, 60 bp, Artificial
  Synthetic oligonucleotide
tgagagggaggacgaattgcgtcagacaggattgccacaagtggtttccaaatcagatgt

SEQ ID NO: 466717 - DNA, 57 bp, Artificial
  Synthetic oligonucleotide
tgagaggtccgaatgtgcctccccgaattcctaaggggtttgtagcacacaatcacc

SEQ ID NO: 466718 - DNA, 60 bp, Artificial
  Synthetic oligonucleotide
tgagaggttgcgcatcgactacaaaaacatgactggcaggtatgcggtctatagtatctt

SEQ ID NO: 466719 - DNA, 60 bp, Artificial
  Synthetic oligonucleotide
tgagaggttgcgctcagccacatacccagtggtagctctggaagatggggctcgcactcc

SEQ ID NO: 466720 - DNA, 60 bp, Artificial
  Synthetic oligonucleotide
tgagagtaagtaagatgggagtggatgaatattctagtactgagagagtggtagtgagta

SEQ ID NO: 466721 - DNA, 60 bp, Artificial
  Synthetic oligonucleotide
tgagagtactgataagagtgcctgcctctgtagaatagaggcggagcaaccaggtagtgc

SEQ ID NO: 466722 - DNA, 60 bp, Artificial
  Synthetic oligonucleotide
tgagagtatcctcccttctgggggagtgagagtgtgttacagcttcctcaatacacaata

SEQ ID NO: 466723 - DNA, 53 bp, Artificial
  Synthetic oligonucleotide
tgagagtatgattgagacgcgatgtgttcttaattcacatagcacagctgaga

SEQ ID NO: 466724 - DNA, 55 bp, Artificial
  Synthetic oligonucleotide
tgagagtcatcttaggagggaaaacttaggacaagaccaagctgaatcagttctc

SEQ ID NO: 466725 - DNA, 58 bp, Artificial
  Synthetic oligonucleotide
tgagagtcattcacctagagtcttatttgaagaactactttttcagaaagactttagc

SEQ ID NO: 466726 - DNA, 55 bp, Artificial
  Synthetic oligonucleotide
tgagagtgaggactgtctttcagctgcataattgatcgaaaatgttgttggtggt

SEQ ID NO: 466727 - DNA, 55 bp, Artificial
  Synthetic oligonucleotide
tgagagtgattttagaaatgagtggatcctggaaagtgatcacctaatagcagag

SEQ ID NO: 466728 - DNA, 53 bp, Artificial
  Synthetic oligonucleotide
tgagagtgtcacaatcctttctgtccctgaagcgacagtcagtcctcgtgaag

SEQ ID NO: 466729 - DNA, 60 bp, Artificial
  Synthetic oligonucleotide
tgagagttactccttgctctcttcggaagttctttaacgagaacgtgcagtggctgtcat

SEQ ID NO: 466730 - DNA, 56 bp, Artificial
  Synthetic oligonucleotide
tgagagttccgaaatccgcttcgtactcatccttcggattttagtaggaagcaccg

SEQ ID NO: 466731 - DNA, 60 bp, Artificial
  Synthetic oligonucleotide
tgagagtttcgagtttcatcagagggaccagagtagttcccagaggacagctggcaacca

SEQ ID NO: 466732 - DNA, 59 bp, Artificial
  Synthetic oligonucleotide
tgagagtttcgcgaaaatactatccggactttcgcagcagcaagacttatactttccta

SEQ ID NO: 466733 - DNA, 57 bp, Artificial
  Synthetic oligonucleotide
tgagagtttgcttgccaaacaacataatttcattcataacgatggcgcagtatgcgc

SEQ ID NO: 466734 - DNA, 60 bp, Artificial
  Synthetic oligonucleotide
tgagataaacgacaattcctggactgatacactttcgcagttatttctgacaaaaggatg

SEQ ID NO: 466735 - DNA, 56 bp, Artificial
  Synthetic oligonucleotide
tgagataacacccatattatccaagtatttaattacttggtatctaaagaccctta

SEQ ID NO: 466736 - DNA, 58 bp, Artificial
  Synthetic oligonucleotide
tgagataaccattgatcaaatggttgcttactcttcagatgtttacaacggggttggt

SEQ ID NO: 466737 - DNA, 60 bp, Artificial
  Synthetic oligonucleotide
tgagataagaggcgcgtgcaattgcgctgaaaaagttaacattctctctcctatttccgg

SEQ ID NO: 466738 - DNA, 60 bp, Artificial
  Synthetic oligonucleotide
tgagataaggaggttctacgcatgggtgttggagcaaagtccatacaatgcacttgctac

SEQ ID NO: 466739 - DNA, 55 bp, Artificial
  Synthetic oligonucleotide
tgagatagctggacggttctcactcatttcactagtgccttcgaatgatgactat

SEQ ID NO: 466740 - DNA, 56 bp, Artificial
  Synthetic oligonucleotide
tgagatagctggacgtttctctctaatttcactggtaccatcaaatgatgattacc

SEQ ID NO: 466741 - DNA, 60 bp, Artificial
  Synthetic oligonucleotide
tgagataggagatatgttactaagaagtgccataggccaaatttcaaggcctatgttctt

SEQ ID NO: 466742 - DNA, 55 bp, Artificial
  Synthetic oligonucleotide
tgagatagtgcagaacagaataactgctctgtacagcaatagcaacgaaggcccc

SEQ ID NO: 466743 - DNA, 60 bp, Artificial
  Synthetic oligonucleotide
tgagatcaacagttaaacatgaattgttcagctcaaacgtatatctatcagtgaagaagg

SEQ ID NO: 466744 - DNA, 60 bp, Artificial
  Synthetic oligonucleotide
tgagatccactgatttgtttacctatatggacaggccgagtggttagtcacaaatttaca

SEQ ID NO: 466745 - DNA, 60 bp, Artificial
  Synthetic oligonucleotide
tgagatcctgggcgtcgatgtcaaaagcatattaccggtgctaacggctgagcatagagc

SEQ ID NO: 466746 - DNA, 55 bp, Artificial
  Synthetic oligonucleotide
tgagatcgaatccaaggtttgagagtaaggatcttcctcagggcaactagttgtt

SEQ ID NO: 466747 - DNA, 57 bp, Artificial
  Synthetic oligonucleotide
tgagatctaccaaaagaacggtacgtaccgtaaatcgttctacagtgtcatgtgttg

SEQ ID NO: 466748 - DNA, 55 bp, Artificial
  Synthetic oligonucleotide
tgagatgaaagtctgtgtgtaacctttcttttcgcgacacgctttcaatctttcg

SEQ ID NO: 466749 - DNA, 55 bp, Artificial
  Synthetic oligonucleotide
tgagatgaataaagatgggcagtttataagtaaatatccagacgggaatgaccac

SEQ ID NO: 466750 - DNA, 54 bp, Artificial
  Synthetic oligonucleotide
tgagatgcagctccctcctggagacaacaccatctacgtaggtaagatccacca

SEQ ID NO: 466751 - DNA, 60 bp, Artificial
  Synthetic oligonucleotide
tgagatgcatggagtaatgaactccctggagaaattccagatttacttcatggacaaagg

SEQ ID NO: 466752 - DNA, 55 bp, Artificial
  Synthetic oligonucleotide
tgagatgctcgagattgctccgctaatcgaatccgtttatgcgtctgagttgtct

SEQ ID NO: 466753 - DNA, 60 bp, Artificial
  Synthetic oligonucleotide
tgagatggattcagacaatcgcatgattcggtactcgaagcaagcaatcagttttggaga

SEQ ID NO: 466754 - DNA, 60 bp, Artificial
  Synthetic oligonucleotide
tgagatggcacaagcatcgaaccatgtcctcgaaatcgcgcgatatttcaagaaccggac

SEQ ID NO: 466755 - DNA, 50 bp, Artificial
  Synthetic oligonucleotide
tgagatggctctttctaccaataacaattcttctcacgttggtgctgacg

SEQ ID NO: 466756 - DNA, 60 bp, Artificial
  Synthetic oligonucleotide
tgagatgggggttgtcttcccctacacgcagtatgcgcgtgtgttgccgctcgcggcaat

SEQ ID NO: 466757 - DNA, 60 bp, Artificial
  Synthetic oligonucleotide
tgagatgggtgaacacaagtctcgattgttatgcaatatagaggcgaaattgcgagtact

SEQ ID NO: 466758 - DNA, 60 bp, Artificial
  Synthetic oligonucleotide
tgagatgggttatgaatgctttaggagtgaaggatgattggttacttgtgccttctcatg

SEQ ID NO: 466759 - DNA, 60 bp, Artificial
  Synthetic oligonucleotide
tgagatggttgactcaaaagaacaatgcttaccctatccaagacgcccaatacacaaata

SEQ ID NO: 466760 - DNA, 60 bp, Artificial
  Synthetic oligonucleotide
tgagatgtcataccaatttcgtggctgaagaaaatatcataaagagacaagatagagtcg

SEQ ID NO: 466761 - DNA, 60 bp, Artificial
  Synthetic oligonucleotide
tgagatgtctagatgttactacagtttggtagcagtgactcgacatactggtcagtttac

SEQ ID NO: 466762 - DNA, 55 bp, Artificial
  Synthetic oligonucleotide
tgagattactgaacgatcctggtgtgtcgctcggtgtttgggcctttcgaactgg

SEQ ID NO: 466763 - DNA, 60 bp, Artificial
  Synthetic oligonucleotide
tgagattcaagataattgaaggcgctaggagcactcgccaacccagcttccatatctgaa

SEQ ID NO: 466764 - DNA, 57 bp, Artificial
  Synthetic oligonucleotide
tgagattcctctacagttttctgaaggatttcgcgggacctcggatcctcgaagagg

SEQ ID NO: 466765 - DNA, 60 bp, Artificial
  Synthetic oligonucleotide
tgagattcgtgctattgtgacatcaaagaatgatggagaagccctaatgacaagaccctg

SEQ ID NO: 466766 - DNA, 60 bp, Artificial
  Synthetic oligonucleotide
tgagattcttcgaggacagattgccgtgttacgacaggagcaagtcaccactccgcggtt

SEQ ID NO: 466767 - DNA, 60 bp, Artificial
  Synthetic oligonucleotide
tgagattgaagatctcatcttcctgacacgatctgcactcatcctgagaggatcagtagc

SEQ ID NO: 466768 - DNA, 57 bp, Artificial
  Synthetic oligonucleotide
tgagattgagttccggaatctgactccggggaacaccaatacacgtgtctcccggta

SEQ ID NO: 466769 - DNA, 57 bp, Artificial
  Synthetic oligonucleotide
tgagattggagctagaaagacgacaaatgttacggttaatcccggaccctttgcgca

SEQ ID NO: 466770 - DNA, 51 bp, Artificial
  Synthetic oligonucleotide
tgagattggtatccccaccaggactatcgatactcgagtgaccccaggcaa

SEQ ID NO: 466771 - DNA, 53 bp, Artificial
  Synthetic oligonucleotide
tgagatttgcagttccatttgaccaattgtcaaatagagtaactcgatctcgc

SEQ ID NO: 466772 - DNA, 60 bp, Artificial
  Synthetic oligonucleotide
tgagatttggaacaacatgacatgggtagagtgggagaaagaaattagcaattacacaaa

SEQ ID NO: 466773 - DNA, 60 bp, Artificial
  Synthetic oligonucleotide
tgagcaaaataccctgtatggttctggtgatagatatgttagaatgggtactgagagcat

SEQ ID NO: 466774 - DNA, 60 bp, Artificial
  Synthetic oligonucleotide
tgagcaaagagtatgaggagagacaaggacggacacccttgtccttagtggacatctgct

SEQ ID NO: 466775 - DNA, 60 bp, Artificial
  Synthetic oligonucleotide
tgagcaaccaacagaacctgcacagcaggccatgtacagggtggtaacagagtgtagtaa

SEQ ID NO: 466776 - DNA, 58 bp, Artificial
  Synthetic oligonucleotide
tgagcaaccggacatcacttttggttcttttaataaggtgtgataggtgtgtatacta

SEQ ID NO: 466777 - DNA, 52 bp, Artificial
  Synthetic oligonucleotide
tgagcaaccgtgaccaaccgatccacatgctccggtactggatcaatgataa

SEQ ID NO: 466778 - DNA, 55 bp, Artificial
  Synthetic oligonucleotide
tgagcaactcactgggaatcttaaggcaattgcacactgtcctagtcagctcgta

SEQ ID NO: 466779 - DNA, 60 bp, Artificial
  Synthetic oligonucleotide
tgagcaagatggaagcaaccgccttcaatgctaccgacaacctactatcaaagtcaaggg

SEQ ID NO: 466780 - DNA, 60 bp, Artificial
  Synthetic oligonucleotide
tgagcaagccgtgctgcctgtggctccatcgtggggatgtaaaaacccgggaggctgcga

SEQ ID NO: 466781 - DNA, 60 bp, Artificial
  Synthetic oligonucleotide
tgagcaaggacaaactctatggagtaaaatgagtgatgccgggtcagatcgagtaatggt

SEQ ID NO: 466782 - DNA, 60 bp, Artificial
  Synthetic oligonucleotide
tgagcaaggcctaccgttactacctccattgaggaatgcctacgcacctcgtggtctatg

SEQ ID NO: 466783 - DNA, 51 bp, Artificial
  Synthetic oligonucleotide
tgagcaaggctatgataagtatatcatccggaagaatccaaatggggaacg

SEQ ID NO: 466784 - DNA, 60 bp, Artificial
  Synthetic oligonucleotide
tgagcaaggggcagcagatataatggagacagtggcccgatggtatcggaaggaactctg

SEQ ID NO: 466785 - DNA, 60 bp, Artificial
  Synthetic oligonucleotide
tgagcaaggtacacaggatgtaaagaattggatgacagaaaccttgttggtccaaaatgc

SEQ ID NO: 466786 - DNA, 55 bp, Artificial
  Synthetic oligonucleotide
tgagcaagtccacaaattctcgagtgagtttcccgtggttgacggatgggcctaa

SEQ ID NO: 466787 - DNA, 60 bp, Artificial
  Synthetic oligonucleotide
tgagcaagtcctatgtgaacaacaaagagaaagaagtccttgtgctatggggtgtccacc

SEQ ID NO: 466788 - DNA, 60 bp, Artificial
  Synthetic oligonucleotide
tgagcaagtgagctttaagtcacctttctggaggagggccgtgaagacaaagcgcacaaa

SEQ ID NO: 466789 - DNA, 57 bp, Artificial
  Synthetic oligonucleotide
tgagcaataattttgaatttgcgggatttacggctccgacgccccacaacattcgaa

SEQ ID NO: 466790 - DNA, 60 bp, Artificial
  Synthetic oligonucleotide
tgagcaatgatgcatacctaattgggagagaaaaggcactccgagaatcacacctggctg

SEQ ID NO: 466791 - DNA, 60 bp, Artificial
  Synthetic oligonucleotide
tgagcaatgtaagcagcacaattgtcttccacatcaaacgagattgatcatgagtatagc

SEQ ID NO: 466792 - DNA, 55 bp, Artificial
  Synthetic oligonucleotide
tgagcacaggctcacggccgcatgcaacttcactcgtggggatcgctgcgacttg

SEQ ID NO: 466793 - DNA, 55 bp, Artificial
  Synthetic oligonucleotide
tgagcacatcctcatgcatcttgactgataatttgaaacacaactccaaaattct

SEQ ID NO: 466794 - DNA, 60 bp, Artificial
  Synthetic oligonucleotide
tgagcacccgcacgttagatcaactctcctcctgcgaactggtttcttcttggctattct

SEQ ID NO: 466795 - DNA, 54 bp, Artificial
  Synthetic oligonucleotide
tgagcacccttccactaattttaaccgtacctgtcagacgatatcagtgctgta

SEQ ID NO: 466796 - DNA, 58 bp, Artificial
  Synthetic oligonucleotide
tgagcaccgatgtatcggggacgcataacgacaaaatagaggggaaatgactaaacta

SEQ ID NO: 466797 - DNA, 55 bp, Artificial
  Synthetic oligonucleotide
tgagcacctcaaacactactccccgcctgccgaagggaattgtggttggcactgt

SEQ ID NO: 466798 - DNA, 55 bp, Artificial
  Synthetic oligonucleotide
tgagcacgagcctcataagtaattgtacagtgcagcaagctcgaaccatggcgct

SEQ ID NO: 466799 - DNA, 55 bp, Artificial
  Synthetic oligonucleotide
tgagcacgtgatgcctaagttcatcacgcgtttctcaccctttgcttgagtgaca

SEQ ID NO: 466800 - DNA, 60 bp, Artificial
  Synthetic oligonucleotide
tgagcactccagtcggaatgaagtgccctgagttaaatggttcattcagaaaaaaatgcg

SEQ ID NO: 466801 - DNA, 52 bp, Artificial
  Synthetic oligonucleotide
tgagcactgacctcctaaaataccagaaatacaaacatctgccactatagtt

SEQ ID NO: 466802 - DNA, 60 bp, Artificial
  Synthetic oligonucleotide
tgagcacttaccgattgaatatcagcatggccgaaagctctttgggctcgtctcgacaag

SEQ ID NO: 466803 - DNA, 55 bp, Artificial
  Synthetic oligonucleotide
tgagcagacatccattcgcacgcgtcgccagcacaagaaagatcttcacgctagc

SEQ ID NO: 466804 - DNA, 60 bp, Artificial
  Synthetic oligonucleotide
tgagcagagctacgaccgtcactcaggcagtcccttgagtcgccaccgagtccaagcagc

SEQ ID NO: 466805 - DNA, 58 bp, Artificial
  Synthetic oligonucleotide
tgagcagagggcaaagaagttggtcaacagcttccaagagggcttcacaggagtatgt

SEQ ID NO: 466806 - DNA, 55 bp, Artificial
  Synthetic oligonucleotide
tgagcagagggttcaagagacatgctctgggctaccatatggcaccgcttaagtg

SEQ ID NO: 466807 - DNA, 57 bp, Artificial
  Synthetic oligonucleotide
tgagcagatggtcgtaatgagcaattgtgggatgggaccgactactttgggtgtccg

SEQ ID NO: 466808 - DNA, 60 bp, Artificial
  Synthetic oligonucleotide
tgagcagcaaagtatatatcagaacgctgacgcatatgtttcagttggatcgtcgaaata

SEQ ID NO: 466809 - DNA, 59 bp, Artificial
  Synthetic oligonucleotide
tgagcagcacaaaccatattgagaaaattcgaataatccctagaaactcttggtccgaa

SEQ ID NO: 466810 - DNA, 60 bp, Artificial
  Synthetic oligonucleotide
tgagcagcacaaatcactttgagaaaattcagatatttcctaggagctcttggtccgacc

SEQ ID NO: 466811 - DNA, 55 bp, Artificial
  Synthetic oligonucleotide
tgagcagcagctctaattacatcgttaatggagataacacctatagtatccaagt

SEQ ID NO: 466812 - DNA, 60 bp, Artificial
  Synthetic oligonucleotide
tgagcagccacagtttaggtctattctcttgcgacgaatcctggactttgcaatcttgtg

SEQ ID NO: 466813 - DNA, 60 bp, Artificial
  Synthetic oligonucleotide
tgagcaggagcctaaccgtgcggtcaagcacactccctggtggcgtttatgctctaaatg

SEQ ID NO: 466814 - DNA, 55 bp, Artificial
  Synthetic oligonucleotide
tgagcagggatcaggatatgcagcagaccgaaagagcacacagaatgccatagac

SEQ ID NO: 466815 - DNA, 60 bp, Artificial
  Synthetic oligonucleotide
tgagcaggtgtacaaaatagtcaaggtaccaagtatatcttttaggcacatcgttatgca

SEQ ID NO: 466816 - DNA, 55 bp, Artificial
  Synthetic oligonucleotide
tgagcagtgaagagctggaaagatccgttattgagagcgtcataagattcggttc

SEQ ID NO: 466817 - DNA, 55 bp, Artificial
  Synthetic oligonucleotide
tgagcagttgggacatggagttagtatagaatggcagtacaagaggtataaaaca

SEQ ID NO: 466818 - DNA, 60 bp, Artificial
  Synthetic oligonucleotide
tgagcagttgtatgcacgacactattttaccagaagtggtgttgtaggtgatagcatccc

SEQ ID NO: 466819 - DNA, 60 bp, Artificial
  Synthetic oligonucleotide
tgagcagttgttgtcttcaaagaataacatagtgtccagaggaatagcattgactgagaa

SEQ ID NO: 466820 - DNA, 60 bp, Artificial
  Synthetic oligonucleotide
tgagcataacgtcatcaagtaatgatgatccctgggacaaaaaaaccgcagatagtatca

SEQ ID NO: 466821 - DNA, 60 bp, Artificial
  Synthetic oligonucleotide
tgagcatattaaggatttggaccatcacttggcatcgataagaacatgtgcagtttatat

SEQ ID NO: 466822 - DNA, 60 bp, Artificial
  Synthetic oligonucleotide
tgagcatcaacgaaccagcatacgctcaggcccttgcaaagaccaagaccatctttggtg

SEQ ID NO: 466823 - DNA, 55 bp, Artificial
  Synthetic oligonucleotide
tgagcatcacttgtccctccccttgaacacgttcaacagccggtcgggcgcgtcg

SEQ ID NO: 466824 - DNA, 60 bp, Artificial
  Synthetic oligonucleotide
tgagcatctgttggaccaatatgctgttgcgctggagtctattgctgatcactatgatga

SEQ ID NO: 466825 - DNA, 55 bp, Artificial
  Synthetic oligonucleotide
tgagcatgagtttaagcgatacgttcgtgtcgcgcttgaggtcttagctaggcac

SEQ ID NO: 466826 - DNA, 60 bp, Artificial
  Synthetic oligonucleotide
tgagcatgatgagctagtcacagattttaacgaccttatactcgaggtgaactcttgtcg

SEQ ID NO: 466827 - DNA, 55 bp, Artificial
  Synthetic oligonucleotide
tgagcatgttgtcacgcagtttgtcacacctggtggtgttgtcatccttgagtcg

SEQ ID NO: 466828 - DNA, 60 bp, Artificial
  Synthetic oligonucleotide
tgagcattgcccctataatgttctcaaacaaaatggcaagattaggaaaaggatacatgt

SEQ ID NO: 466829 - DNA, 60 bp, Artificial
  Synthetic oligonucleotide
tgagccaaccatggttgcgacaacgttagagcatagattcaaagaaataccggataaaga

SEQ ID NO: 466830 - DNA, 60 bp, Artificial
  Synthetic oligonucleotide
tgagccaatcccccactaacgcaaggagatacgagtcatggccgcaggcactgacttcgc

SEQ ID NO: 466831 - DNA, 59 bp, Artificial
  Synthetic oligonucleotide
tgagccaatgcagggttgttatcgaacattatctctatttaggtaccgcagtagatttt

SEQ ID NO: 466832 - DNA, 57 bp, Artificial
  Synthetic oligonucleotide
tgagccacgcacttgaagtactgctcaccgtttaggtcggagaacgttaaccagtcg

SEQ ID NO: 466833 - DNA, 60 bp, Artificial
  Synthetic oligonucleotide
tgagccagatacgtggtcttatcgccacagcagtattaattgctggtgggcacgcctgtt

SEQ ID NO: 466834 - DNA, 56 bp, Artificial
  Synthetic oligonucleotide
tgagccagatccaaatgaagtgacattccaggtatttcagagtatttcagatgcac

SEQ ID NO: 466835 - DNA, 52 bp, Artificial
  Synthetic oligonucleotide
tgagccagcaaacaagaagaggaagttctgcctcacaagcgcagctctggag

SEQ ID NO: 466836 - DNA, 60 bp, Artificial
  Synthetic oligonucleotide
tgagccagcagagggggtgggagcagtatctcgagacctggcaagacatggagcaatcac

SEQ ID NO: 466837 - DNA, 60 bp, Artificial
  Synthetic oligonucleotide
tgagccagcagtggcagacacggtgcgatttgcagaaggatgcggattcgtccatcacgc

SEQ ID NO: 466838 - DNA, 59 bp, Artificial
  Synthetic oligonucleotide
tgagccagcccagttagccctgcgcaaccggggtaactctagatcgctagaaaacattc

SEQ ID NO: 466839 - DNA, 54 bp, Artificial
  Synthetic oligonucleotide
tgagccagcggagggagtaggaccagcatctcaagacttagctagacatggagc

SEQ ID NO: 466840 - DNA, 55 bp, Artificial
  Synthetic oligonucleotide
tgagccagtagagagaccgttggtccataatgttttgtgtgagaagcaacatggt

SEQ ID NO: 466841 - DNA, 58 bp, Artificial
  Synthetic oligonucleotide
tgagccagtcaaacccgtggagaaaccacaagctgaaggaccctacgctggccctctc

SEQ ID NO: 466842 - DNA, 56 bp, Artificial
  Synthetic oligonucleotide
tgagccagtcatgtgttcagctcttcctataacatcacactctgtcttatgtacca

SEQ ID NO: 466843 - DNA, 60 bp, Artificial
  Synthetic oligonucleotide
tgagccatatagaccatatacatgttttaccatgttaagtccaaataatttgggaccatg

SEQ ID NO: 466844 - DNA, 59 bp, Artificial
  Synthetic oligonucleotide
tgagccattagacctacctccaataattgaaagactccatggcttaggcgcgttttcac

SEQ ID NO: 466845 - DNA, 59 bp, Artificial
  Synthetic oligonucleotide
tgagccatttgttcctctagaaccagctttgttatctgatatatttagtacggattttg

SEQ ID NO: 466846 - DNA, 60 bp, Artificial
  Synthetic oligonucleotide
tgagcccacgcccgatcattcatgccgtggcccctgattatagggttgagcagaacccaa

SEQ ID NO: 466847 - DNA, 60 bp, Artificial
  Synthetic oligonucleotide
tgagcccatgtttgcctctgatattcaatagacaaggcctgaacggttatggttgtggcc

SEQ ID NO: 466848 - DNA, 57 bp, Artificial
  Synthetic oligonucleotide
tgagccccccaatcgggaggactttcggctcactcccgctcggagtaggacgatcga

SEQ ID NO: 466849 - DNA, 55 bp, Artificial
  Synthetic oligonucleotide
tgagcccgacaagagcaatggatgcagcgagggtgctgacgccttccgtcagtgg

SEQ ID NO: 466850 - DNA, 60 bp, Artificial
  Synthetic oligonucleotide
tgagccctggagaggtgagcccggaaaccagcagtcagcactcagccatgagcagaatac

SEQ ID NO: 466851 - DNA, 55 bp, Artificial
  Synthetic oligonucleotide
tgagccctgtacgggtaacagcgcaacgttcgaacggactcgccgcgagggtggt

SEQ ID NO: 466852 - DNA, 55 bp, Artificial
  Synthetic oligonucleotide
tgagccctttatagaccatgtgtgtcgtttgtatgggcatgaacatctgtgtatg

SEQ ID NO: 466853 - DNA, 55 bp, Artificial
  Synthetic oligonucleotide
tgagccgaagagaggttgtcatcgagcactgtcaatctttagatataggagccgt

SEQ ID NO: 466854 - DNA, 60 bp, Artificial
  Synthetic oligonucleotide
tgagccgcaaggatgcaatgttgggcacacatgtagtgtgggacgtgggtttgcaatcca

SEQ ID NO: 466855 - DNA, 56 bp, Artificial
  Synthetic oligonucleotide
tgagccgccacgtcacttcccgtcgccatctgataaaagtaagtgcacattcgaat

SEQ ID NO: 466856 - DNA, 60 bp, Artificial
  Synthetic oligonucleotide
tgagccgtgttgctgcccccactgtcctcgtcaccaacaaaagaaggacatggaccaaca

SEQ ID NO: 466857 - DNA, 59 bp, Artificial
  Synthetic oligonucleotide
tgagcctcggggagccgttcgtacaaagtagatgcttttctagtcacatctgacttttc

SEQ ID NO: 466858 - DNA, 59 bp, Artificial
  Synthetic oligonucleotide
tgagcctgaacagatgctcaccgatgaactctggttctagtggacacttgctgtaggtg

SEQ ID NO: 466859 - DNA, 59 bp, Artificial
  Synthetic oligonucleotide
tgagcgaactgttgtgatagacaacaacggccaacgtagaactgtaagtgtagataatt

SEQ ID NO: 466860 - DNA, 50 bp, Artificial
  Synthetic oligonucleotide
tgagcgaatttaaagcagggacgttcatgggagtagcgagcagcattgta

SEQ ID NO: 466861 - DNA, 55 bp, Artificial
  Synthetic oligonucleotide
tgagcgacgaggacgatggctcgggcatctcatcagccgacattgaggcgagcct

SEQ ID NO: 466862 - DNA, 55 bp, Artificial
  Synthetic oligonucleotide
tgagcgactgcctctccacccgaacttcaatgatcggtgggcggtcctcgtgcat

SEQ ID NO: 466863 - DNA, 55 bp, Artificial
  Synthetic oligonucleotide
tgagcgagtcccgcctggagggcggttcgctggtcaaggccgtggaggcatcgtt

SEQ ID NO: 466864 - DNA, 58 bp, Artificial
  Synthetic oligonucleotide
tgagcgatagcattaacaacaaatgtgagagtaacgcgaactaataatttaattggga

SEQ ID NO: 466865 - DNA, 60 bp, Artificial
  Synthetic oligonucleotide
tgagcgatcctgcctgctcgtgccagctcgtcgtagccacgtgcttcggctcagagctgg

SEQ ID NO: 466866 - DNA, 54 bp, Artificial
  Synthetic oligonucleotide
tgagcgatttactagaggagggtaaactaagcgaagaagaatatgacgaaatgc

SEQ ID NO: 466867 - DNA, 56 bp, Artificial
  Synthetic oligonucleotide
tgagcgccgcctacctccggaagtgccaattttcgcgcgcttttcaccggatatcg

SEQ ID NO: 466868 - DNA, 60 bp, Artificial
  Synthetic oligonucleotide
tgagcgctggtgacttggtggatactagcctcatgtgaatgaagatcttcatgttgtcca

SEQ ID NO: 466869 - DNA, 55 bp, Artificial
  Synthetic oligonucleotide
tgagcgcttgcacaacatcattgagtggtgtttgtgactgcttagtcatgcaggc

SEQ ID NO: 466870 - DNA, 58 bp, Artificial
  Synthetic oligonucleotide
tgagcgcttttttcacgtccgcgaaatgagttgagcgcattttttgagttccgtggac

SEQ ID NO: 466871 - DNA, 60 bp, Artificial
  Synthetic oligonucleotide
tgagcggattcttgacgcttgcctgggacgatctacggagcctgtgcatcttcagctacc

SEQ ID NO: 466872 - DNA, 55 bp, Artificial
  Synthetic oligonucleotide
tgagcggccggtgtatcgggagtcgtcccttaatctgtgcaataccagagcggct

SEQ ID NO: 466873 - DNA, 55 bp, Artificial
  Synthetic oligonucleotide
tgagcggcttgtggagaacatgtcccctgaggacgttcgtcgtgaggtgttcggc

SEQ ID NO: 466874 - DNA, 56 bp, Artificial
  Synthetic oligonucleotide
tgagcggtctagcgggcgccacggttggaagcattgggctcgggagggtgttggtt

SEQ ID NO: 466875 - DNA, 55 bp, Artificial
  Synthetic oligonucleotide
tgagcggttcgcacgaatccggccaacataccacgaggtacgtcacgaaggagcg

SEQ ID NO: 466876 - DNA, 52 bp, Artificial
  Synthetic oligonucleotide
tgagcgtcagaaacctctgaaagtgcgcaccaaactgccacaacaagaggga

SEQ ID NO: 466877 - DNA, 60 bp, Artificial
  Synthetic oligonucleotide
tgagcgtcttaacacattaaccgcttacgatcagcgagttattgaaatgacaactgagct

SEQ ID NO: 466878 - DNA, 56 bp, Artificial
  Synthetic oligonucleotide
tgagcgtgaaggattaatcaaacgtatctattcagatactaaaaagagaaaccgca

SEQ ID NO: 466879 - DNA, 60 bp, Artificial
  Synthetic oligonucleotide
tgagcgtgatatgacgcgcgcctttattggatctgcttccacattcttagggaatgggtt

SEQ ID NO: 466880 - DNA, 59 bp, Artificial
  Synthetic oligonucleotide
tgagcgtgttgctggtgatatgaatatggacggtttagttccgaaagttgaaggtgtat

SEQ ID NO: 466881 - DNA, 55 bp, Artificial
  Synthetic oligonucleotide
tgagcgttggtataccggtcgtgttgagaccgacgtctacataccagttgcccag

SEQ ID NO: 466882 - DNA, 60 bp, Artificial
  Synthetic oligonucleotide
tgagcgttgtagacctggatacacgttcacatctattaccctgaagccaccgaaaataga

SEQ ID NO: 466883 - DNA, 60 bp, Artificial
  Synthetic oligonucleotide
tgagcgtttgcttggtcagaggaatctggaacgtatatcgactagggatatccttcagac

SEQ ID NO: 466884 - DNA, 60 bp, Artificial
  Synthetic oligonucleotide
tgagctacatgagattcctccggcccctgaatgcggctaatcctaaccgcggagcaggta

SEQ ID NO: 466885 - DNA, 52 bp, Artificial
  Synthetic oligonucleotide
tgagctacgaatagcaatttgtaaacggtcaagcggttcgccaagtattccc

SEQ ID NO: 466886 - DNA, 60 bp, Artificial
  Synthetic oligonucleotide
tgagctactcaagagtcctccggcccctgaatgcggctaatcctaaccatggagcaggtg

SEQ ID NO: 466887 - DNA, 60 bp, Artificial
  Synthetic oligonucleotide
tgagctagatgagtatgtagacacaccaaatacagggggtgtttatccttctgatggttt

SEQ ID NO: 466888 - DNA, 60 bp, Artificial
  Synthetic oligonucleotide
tgagctagtctacctagtcagttacatggagtttctagccgccctacaggctaccacctg

SEQ ID NO: 466889 - DNA, 59 bp, Artificial
  Synthetic oligonucleotide
tgagctatcgtccgaaaggaacaagcagctcaaggtaggtagagttttattatggcttg

SEQ ID NO: 466890 - DNA, 60 bp, Artificial
  Synthetic oligonucleotide
tgagctattggttagatacagctacattaagatttgccaacaagcgcgtgtgccagccac

SEQ ID NO: 466891 - DNA, 60 bp, Artificial
  Synthetic oligonucleotide
tgagctcaaagaagttatcgactgtcctgatgtgatgaaataccgcattagaacggtcga

SEQ ID NO: 466892 - DNA, 60 bp, Artificial
  Synthetic oligonucleotide
tgagctcacagtacatgtaaagagcagtgatccagatgtggttgcagctagcacaagtct

SEQ ID NO: 466893 - DNA, 55 bp, Artificial
  Synthetic oligonucleotide
tgagctcacccctgctggtttgcaggttaggatatcctccaacggcttagactgc

SEQ ID NO: 466894 - DNA, 55 bp, Artificial
  Synthetic oligonucleotide
tgagctcactgcgtagtcttctaggggagccttagtcataagtgctacgttagtc

SEQ ID NO: 466895 - DNA, 60 bp, Artificial
  Synthetic oligonucleotide
tgagctcatagaggctaacctcctgtggagacaggagatgggcggtaacatcaccagggt

SEQ ID NO: 466896 - DNA, 60 bp, Artificial
  Synthetic oligonucleotide
tgagctcattgctgcatatggatctacagaccacggtgttgttgcaggcacctctgttat

SEQ ID NO: 466897 - DNA, 60 bp, Artificial
  Synthetic oligonucleotide
tgagctcggtcccattagtgttaccacctgcgagctctatgagctcgtggaggccatggt

SEQ ID NO: 466898 - DNA, 60 bp, Artificial
  Synthetic oligonucleotide
tgagctcgtgaaccagttcactgagtatcaccaatccacggcctgtaaccctgaaatctg

SEQ ID NO: 466899 - DNA, 59 bp, Artificial
  Synthetic oligonucleotide
tgagctctcacacatgtctaaattcctacgggaagttcccgagtcccaggtgtggcgag

SEQ ID NO: 466900 - DNA, 56 bp, Artificial
  Synthetic oligonucleotide
tgagctcttaagttcaaccatctgaactcaagcaccttatcaattgtactttcatc

SEQ ID NO: 466901 - DNA, 55 bp, Artificial
  Synthetic oligonucleotide
tgagctcttttctaacaccagctgtatactccaaaaatggcttagaaaaccaatg

SEQ ID NO: 466902 - DNA, 60 bp, Artificial
  Synthetic oligonucleotide
tgagctgaaagttgaggtccctaaaatagagcagcttgccaattaccaacaggctgctct

SEQ ID NO: 466903 - DNA, 55 bp, Artificial
  Synthetic oligonucleotide
tgagctgagttcaacctgaacaaggaaggaattgtctgcttccaatttgacatct

SEQ ID NO: 466904 - DNA, 60 bp, Artificial
  Synthetic oligonucleotide
tgagctgcaagagcttgtccaacccactgacctgcattgctacgaagaattgacagaaga

SEQ ID NO: 466905 - DNA, 60 bp, Artificial
  Synthetic oligonucleotide
tgagctgcagtgatgggttcccctgtgcgacaatccatggttgtggcagtctgacattga

SEQ ID NO: 466906 - DNA, 60 bp, Artificial
  Synthetic oligonucleotide
tgagctgcagtgatgggttcccctgtgcgtgaatccatgattgtggcagttgattgacag

SEQ ID NO: 466907 - DNA, 54 bp, Artificial
  Synthetic oligonucleotide
tgagctgcctccggtcacattccgtagtgggaccgattgctggtacgctatgga

SEQ ID NO: 466908 - DNA, 59 bp, Artificial
  Synthetic oligonucleotide
tgagctgcttaacgttagacatggtgtttacaaaggaaacgtctgatatgttgtttgaa

SEQ ID NO: 466909 - DNA, 55 bp, Artificial
  Synthetic oligonucleotide
tgagctggtgggaaggatgagaactctgagtgtggctgttagcgagggacccgtg

SEQ ID NO: 466910 - DNA, 53 bp, Artificial
  Synthetic oligonucleotide
tgagctggtttcgagagctcgcgaacctagacacgcctatagacttgcccctt

SEQ ID NO: 466911 - DNA, 60 bp, Artificial
  Synthetic oligonucleotide
tgagctgtggagcaagactagtagcattaacaatataacaccctgcactacatgtgaaat

SEQ ID NO: 466912 - DNA, 60 bp, Artificial
  Synthetic oligonucleotide
tgagcttacaatacacacaactatagaggccagttgtccagttactagtccttgcacttt

SEQ ID NO: 466913 - DNA, 60 bp, Artificial
  Synthetic oligonucleotide
tgagcttagagctatgtctagagaacgttggagggataataactcttcagttggcctgct

SEQ ID NO: 466914 - DNA, 60 bp, Artificial
  Synthetic oligonucleotide
tgagcttagcagcacagttgttcctctcagagacgaatcgggtattcaacaccctcatat

SEQ ID NO: 466915 - DNA, 51 bp, Artificial
  Synthetic oligonucleotide
tgagcttaggtgcagcgtgcgctagtgctcagattacgatgatagaaggaa

SEQ ID NO: 466916 - DNA, 60 bp, Artificial
  Synthetic oligonucleotide
tgagcttcccagagtttgatttgcaacctgtgcccaagagccaacctattgttcgcactt

SEQ ID NO: 466917 - DNA, 60 bp, Artificial
  Synthetic oligonucleotide
tgagcttccgaacgaggtctggaagctaccgcagtacgcctacttccaatatcaggcaga

SEQ ID NO: 466918 - DNA, 60 bp, Artificial
  Synthetic oligonucleotide
tgagctttacctgactgaacccgctgcagcctggtttgaagctaacaagccggcgcagcc

SEQ ID NO: 466919 - DNA, 53 bp, Artificial
  Synthetic oligonucleotide
tgagctttgtcgatcgattgaagtttctggacagaatgactcaatcctgcatc

SEQ ID NO: 466920 - DNA, 55 bp, Artificial
  Synthetic oligonucleotide
tgaggaaacgagtaacgagttacagaaaaccaattatgccaaatgggccacaggg

SEQ ID NO: 466921 - DNA, 60 bp, Artificial
  Synthetic oligonucleotide
tgaggaaacgccattaaagaatcttctcgtagccgcgccagtgacagacgattttgcgat

SEQ ID NO: 466922 - DNA, 60 bp, Artificial
  Synthetic oligonucleotide
tgaggaaagctatatagctgctaccttcccctggattgcacagcacaattgatggtatcc

SEQ ID NO: 466923 - DNA, 54 bp, Artificial
  Synthetic oligonucleotide
tgaggaaatagtttttggcgttaataaggaatttcctaggagcggatggcattt

SEQ ID NO: 466924 - DNA, 60 bp, Artificial
  Synthetic oligonucleotide
tgaggaaatcaacgtttatcataccatacaacttcgctgatgtctccatcccattcgact

SEQ ID NO: 466925 - DNA, 60 bp, Artificial
  Synthetic oligonucleotide
tgaggaaatccacaatcaacttatatgtggtgaataatggtagagacgttcacatccttt

SEQ ID NO: 466926 - DNA, 60 bp, Artificial
  Synthetic oligonucleotide
tgaggaacaagacagcggatatggcaatactgaagtggaaacgtacgagagacaggtacc

SEQ ID NO: 466927 - DNA, 52 bp, Artificial
  Synthetic oligonucleotide
tgaggaactactgttactcagccactatcacggaggtatcaacagtgtccaa

SEQ ID NO: 466928 - DNA, 60 bp, Artificial
  Synthetic oligonucleotide
tgaggaactgagggagcaattgagctcagtatcatcattcgagagattcgaaatattccc

SEQ ID NO: 466929 - DNA, 55 bp, Artificial
  Synthetic oligonucleotide
tgaggaactgcaaatgcatatactaaggggacctttgcacttccagcgtcgagct

SEQ ID NO: 466930 - DNA, 56 bp, Artificial
  Synthetic oligonucleotide
tgaggaagaccaggaacaagttcattggttaaagcgaaagtatatcagcccaaaaa

SEQ ID NO: 466931 - DNA, 60 bp, Artificial
  Synthetic oligonucleotide
tgaggaagcaggtacgcctgtgagagatgcaggtacccctgtcagggaaggctcctcatg

SEQ ID NO: 466932 - DNA, 51 bp, Artificial
  Synthetic oligonucleotide
tgaggaagcatgtagcctcactcctccgcactcagctcgatcgaagtttgg

SEQ ID NO: 466933 - DNA, 55 bp, Artificial
  Synthetic oligonucleotide
tgaggaagctgcagaatgggacagattacatccagtgcatgcaggacctatccca

SEQ ID NO: 466934 - DNA, 60 bp, Artificial
  Synthetic oligonucleotide
tgaggaagttccatgccacggtggtaggtggtccgtcagggatgaaggagcagtgtctgt

SEQ ID NO: 466935 - DNA, 60 bp, Artificial
  Synthetic oligonucleotide
tgaggaatgcactcatttcaaagtgtccaaggaatgcactagcaaacgaggagaaaattt

SEQ ID NO: 466936 - DNA, 56 bp, Artificial
  Synthetic oligonucleotide
tgaggaatgtaccagagaagcagaccagaggtttgttcggtgcaatagcagggttt

SEQ ID NO: 466937 - DNA, 51 bp, Artificial
  Synthetic oligonucleotide
tgaggaatgtgccagaggttgcccaaggaagaggcctgtttggagcaatag

SEQ ID NO: 466938 - DNA, 55 bp, Artificial
  Synthetic oligonucleotide
tgaggacaaagggaatggatgctttgaaattttccatcagtgtgacaacaactgc

SEQ ID NO: 466939 - DNA, 50 bp, Artificial
  Synthetic oligonucleotide
tgaggacaatacaagaagtcaaatctgtcatgcagatcctcaaaactttt

SEQ ID NO: 466940 - DNA, 59 bp, Artificial
  Synthetic oligonucleotide
tgaggacatctctttcgtacactcatatgttttaacccctgcccagctagggggactga

SEQ ID NO: 466941 - DNA, 60 bp, Artificial
  Synthetic oligonucleotide
tgaggacattaatggtatcagacgaccgaaacacctttatgtgtctatgcctactgctca

SEQ ID NO: 466942 - DNA, 58 bp, Artificial
  Synthetic oligonucleotide
tgaggaccaagctaaacacttggtatccgactttagtaagtatgtagctataccaagc

SEQ ID NO: 466943 - DNA, 52 bp, Artificial
  Synthetic oligonucleotide
tgaggacccagggggcccccgtgacccaccgccttatggcggtgggtcacgg

SEQ ID NO: 466944 - DNA, 56 bp, Artificial
  Synthetic oligonucleotide
tgaggaccgggatgggcacatataaaagctgctaaaaccagactttgtaaacgcag

SEQ ID NO: 466945 - DNA, 57 bp, Artificial
  Synthetic oligonucleotide
tgaggacgctttaggaaattcctgctttttttatgcaagaagggagcaggtatatgt

SEQ ID NO: 466946 - DNA, 60 bp, Artificial
  Synthetic oligonucleotide
tgaggactatggattcggaattttcacgacaaacatatggctgaaattgcgtgactccta

SEQ ID NO: 466947 - DNA, 58 bp, Artificial
  Synthetic oligonucleotide
tgaggactatttggaaagacaccggtggtgggaagtatgaagacgtgaaggagaatgc

SEQ ID NO: 466948 - DNA, 51 bp, Artificial
  Synthetic oligonucleotide
tgaggactctagtattattcagtctgggtctcctatacctacctttactgg

SEQ ID NO: 466949 - DNA, 60 bp, Artificial
  Synthetic oligonucleotide
tgaggactctggttaagccctctagtagtatgtcacatgtttccggtgtcatgtggtagt

SEQ ID NO: 466950 - DNA, 52 bp, Artificial
  Synthetic oligonucleotide
tgaggactgcaagagcctccgacttacttccgcagttaattgcctttgcgta

SEQ ID NO: 466951 - DNA, 60 bp, Artificial
  Synthetic oligonucleotide
tgaggactgcagacctgccagtgtggcttgcctacaaagtggcttcaaatggtatacagt

SEQ ID NO: 466952 - DNA, 60 bp, Artificial
  Synthetic oligonucleotide
tgaggactggacaatgcagcaaacaagtcttgaactgtatttaacggcacctacagggtg

SEQ ID NO: 466953 - DNA, 55 bp, Artificial
  Synthetic oligonucleotide
tgaggacttagtcttagtaccaggaaaggaagccgcggcaatgataagaaagagg

SEQ ID NO: 466954 - DNA, 60 bp, Artificial
  Synthetic oligonucleotide
tgaggacttccttaagtggcacaacgttgattacaaattgccctgccaggtgagaggagc

SEQ ID NO: 466955 - DNA, 54 bp, Artificial
  Synthetic oligonucleotide
tgaggagaagaatttaacagtggacttcgaattacagagtggggaacacccaac

SEQ ID NO: 466956 - DNA, 54 bp, Artificial
  Synthetic oligonucleotide
tgaggagaagcgctacttgataactgggggtctgccctctggttgtgcagcgac

SEQ ID NO: 466957 - DNA, 60 bp, Artificial
  Synthetic oligonucleotide
tgaggagactaagacgagggtgaatgtcctgagccacaccatcaatgctctgatctcaga

SEQ ID NO: 466958 - DNA, 60 bp, Artificial
  Synthetic oligonucleotide
tgaggagatgatagctaacgccacgcataggcaacttgcgatcgatagaaactcgagaaa

SEQ ID NO: 466959 - DNA, 52 bp, Artificial
  Synthetic oligonucleotide
tgaggagccaacaggacagactgctgactggttgacaatcattgtttacctg

SEQ ID NO: 466960 - DNA, 52 bp, Artificial
  Synthetic oligonucleotide
tgaggagcgcctcggtgggcgtccagaccgctcccgagacccgctcccaggg

SEQ ID NO: 466961 - DNA, 58 bp, Artificial
  Synthetic oligonucleotide
tgaggagcggatacgcagtgttagcgctggtcgtgcactgtacattcctccttacgat

SEQ ID NO: 466962 - DNA, 60 bp, Artificial
  Synthetic oligonucleotide
tgaggagcgtggagctcgaagttccgagagggaactgaagcatatcgtgaggatatgcgt

SEQ ID NO: 466963 - DNA, 60 bp, Artificial
  Synthetic oligonucleotide
tgaggaggaactattttacagcggaagtgtcccattgtagggctacagaatacataatga

SEQ ID NO: 466964 - DNA, 60 bp, Artificial
  Synthetic oligonucleotide
tgaggaggattgcctatatgaaccaagcatcaagtcttcagaaccaagtggaaatcggac

SEQ ID NO: 466965 - DNA, 59 bp, Artificial
  Synthetic oligonucleotide
tgaggaggctgggtacgaaatacctagccacgaacgcctcagtgaggagtggcatgaaa

SEQ ID NO: 466966 - DNA, 50 bp, Artificial
  Synthetic oligonucleotide
tgaggagggcggatttgatgtgtatacagaagggatagtaacgcataggg

SEQ ID NO: 466967 - DNA, 60 bp, Artificial
  Synthetic oligonucleotide
tgaggaggtccatagaggatgtgcacagtggtgcgaatatgcagttggctaaccagggtc

SEQ ID NO: 466968 - DNA, 58 bp, Artificial
  Synthetic oligonucleotide
tgaggaggtgtaaaaaacctgggaggccacaaaccatggaagctgtacgcatggcgta

SEQ ID NO: 466969 - DNA, 60 bp, Artificial
  Synthetic oligonucleotide
tgaggagtatgagaccgaccagatactcccagacctagcatggatgcggcagatagaggg

SEQ ID NO: 466970 - DNA, 56 bp, Artificial
  Synthetic oligonucleotide
tgaggagtcacgtactactactcaattcaacggaggttcgattttattccccacca

SEQ ID NO: 466971 - DNA, 60 bp, Artificial
  Synthetic oligonucleotide
tgaggagtctgtggcatgacgcgggtactcctagcgctactgctcggtctgagcgtcttg

SEQ ID NO: 466972 - DNA, 59 bp, Artificial
  Synthetic oligonucleotide
tgaggagtggtggtttgtgggttgtgtgtcccaatttagtccatgtgtttgtgcttata

SEQ ID NO: 466973 - DNA, 55 bp, Artificial
  Synthetic oligonucleotide
tgaggagttcatccgtaaaattagaagcgtcccagtcggacgttgcttaaccctc

SEQ ID NO: 466974 - DNA, 59 bp, Artificial
  Synthetic oligonucleotide
tgaggagttccatcttcgtggaattctctacagatgcggataaatagtttatttactgg

SEQ ID NO: 466975 - DNA, 55 bp, Artificial
  Synthetic oligonucleotide
tgaggagttgatcagggccgttcgacttggacgctgcaaacgtcactaccgtact

SEQ ID NO: 466976 - DNA, 55 bp, Artificial
  Synthetic oligonucleotide
tgaggagttgtggccagtactggacggctaggcgtgtggtttgtccacgtttggc

SEQ ID NO: 466977 - DNA, 55 bp, Artificial
  Synthetic oligonucleotide
tgaggataaatacgttggacgactcccgatattttcgtctttaattcgaaatgcc

SEQ ID NO: 466978 - DNA, 55 bp, Artificial
  Synthetic oligonucleotide
tgaggataacggctatcgttatgacccgctcccggcaatgaatggtgctatcgct

SEQ ID NO: 466979 - DNA, 52 bp, Artificial
  Synthetic oligonucleotide
tgaggataccactacagtactggccactttagcactcctcggatgtgatgtg

SEQ ID NO: 466980 - DNA, 60 bp, Artificial
  Synthetic oligonucleotide
tgaggatatcatggcagcggagatgatgaggacggatgttatgcgtagcagacgcaagga

SEQ ID NO: 466981 - DNA, 60 bp, Artificial
  Synthetic oligonucleotide
tgaggatcagattcaaggatgacagctcatatgaagatgtcaatgggatcagaaagccta

SEQ ID NO: 466982 - DNA, 51 bp, Artificial
  Synthetic oligonucleotide
tgaggatcgtcggcccaaggacttgtagtaacacctggcaagggacctttc

SEQ ID NO: 466983 - DNA, 55 bp, Artificial
  Synthetic oligonucleotide
tgaggatctgagagtgtcaagtttcatccggggaacaagggtgctaccaagggga

SEQ ID NO: 466984 - DNA, 60 bp, Artificial
  Synthetic oligonucleotide
tgaggatgaacagatgtaccaaaagtgctgcaatctattcgagaagtttttccctagcag

SEQ ID NO: 466985 - DNA, 60 bp, Artificial
  Synthetic oligonucleotide
tgaggatgacaagccctgggtgccactcacaagagtgccgtcaaggatgctagtgctgac

SEQ ID NO: 466986 - DNA, 60 bp, Artificial
  Synthetic oligonucleotide
tgaggatgagagggttaagcaagttcggatcgagcaacatagttgttatgacgagtggat

SEQ ID NO: 466987 - DNA, 60 bp, Artificial
  Synthetic oligonucleotide
tgaggatgagcatatgtaccagaaatgctgcagtctattcgagaaattcttccccagtag

SEQ ID NO: 466988 - DNA, 55 bp, Artificial
  Synthetic oligonucleotide
tgaggatgattccggtggggaaagtgatgttgcccggggagaggagccagaacct

SEQ ID NO: 466989 - DNA, 54 bp, Artificial
  Synthetic oligonucleotide
tgaggatgatttgtattcgctgtgataagccgttgaagagtcgtgtaccgtcac

SEQ ID NO: 466990 - DNA, 60 bp, Artificial
  Synthetic oligonucleotide
tgaggattgcgtttgagatctgaaggaccaggactcccagtcaagagtaaggcttggtag

SEQ ID NO: 466991 - DNA, 53 bp, Artificial
  Synthetic oligonucleotide
tgaggcaaaccgctctaagagtgaggctgaccgtgctaagtctgaggccgaca

SEQ ID NO: 466992 - DNA, 60 bp, Artificial
  Synthetic oligonucleotide
tgaggcaaactgcactcgccaacacatgcaagccgcaatgtactatatcctcaccagagg

SEQ ID NO: 466993 - DNA, 60 bp, Artificial
  Synthetic oligonucleotide
tgaggcaacgcacctcggggttgaggaatcaccgtctcgtgaaggacaacgtgcaagtca

SEQ ID NO: 466994 - DNA, 53 bp, Artificial
  Synthetic oligonucleotide
tgaggcaagctcccttccaacaaaatccaacacttcggatgagagggctaaca

SEQ ID NO: 466995 - DNA, 60 bp, Artificial
  Synthetic oligonucleotide
tgaggcactgcatagcacaacatactcagagattattcgacaatgtttaaaaaatccaga

SEQ ID NO: 466996 - DNA, 60 bp, Artificial
  Synthetic oligonucleotide
tgaggcagaaaataatggagagtggaggaatcagcaaaataagcactggcttcacttatg

SEQ ID NO: 466997 - DNA, 59 bp, Artificial
  Synthetic oligonucleotide
tgaggcagacatatcggggtttgactggtccgttcaggactgggagttgtggtcagacc

SEQ ID NO: 466998 - DNA, 56 bp, Artificial
  Synthetic oligonucleotide
tgaggcagtagaccatgaattctcaaatctcgaaagaagagtagacaatctaaaca

SEQ ID NO: 466999 - DNA, 60 bp, Artificial
  Synthetic oligonucleotide
tgaggcatgcaactttgactatacagttgcattccgcatggttatgggtgaaatctattc

SEQ ID NO: 467000 - DNA, 59 bp, Artificial
  Synthetic oligonucleotide
tgaggcatgcggttatagtgatcgtgtggctcagcttaccattgggaactctaccatta

SEQ ID NO: 467001 - DNA, 60 bp, Artificial
  Synthetic oligonucleotide
tgaggcatggcgacctgacgtgaaccccggatattccaaagaagacgtggcagcagccac

SEQ ID NO: 467002 - DNA, 60 bp, Artificial
  Synthetic oligonucleotide
tgaggcatggtattacgcagagttatgggctaatactcccctagatacgagtggaactgg

SEQ ID NO: 467003 - DNA, 60 bp, Artificial
  Synthetic oligonucleotide
tgaggcattgaattcaattaaggttactcaatctgatgttgcaaatgtcctttcaagagt

SEQ ID NO: 467004 - DNA, 60 bp, Artificial
  Synthetic oligonucleotide
tgaggccactatgttggcgtaccccaagagccctacatccatttactgggatggttatgc

SEQ ID NO: 467005 - DNA, 60 bp, Artificial
  Synthetic oligonucleotide
tgaggcccctcattctgaaggattgcagcgtggctggatggcttcttggaaacccaatgt

SEQ ID NO: 467006 - DNA, 59 bp, Artificial
  Synthetic oligonucleotide
tgaggcccgcttcctctgggagacccactccgcgtgcaagccctacactctctttgcgg

SEQ ID NO: 467007 - DNA, 50 bp, Artificial
  Synthetic oligonucleotide
tgaggccctcggattcctaaatgaagatcactggatgagccgcgagaact

SEQ ID NO: 467008 - DNA, 60 bp, Artificial
  Synthetic oligonucleotide
tgaggccgacgtgctaagactgaggggtatgcagattacgtcgaagacagtagattcggt

SEQ ID NO: 467009 - DNA, 55 bp, Artificial
  Synthetic oligonucleotide
tgaggccgtcgagacggcaccccaggatggatacctcgccgatgggtccgaccta

SEQ ID NO: 467010 - DNA, 51 bp, Artificial
  Synthetic oligonucleotide
tgaggcctctcgtttagagttatcggcggaagaccatgagtttgacgatac

SEQ ID NO: 467011 - DNA, 55 bp, Artificial
  Synthetic oligonucleotide
tgaggcctcttcctaggtccggaatctacctccatctcgtccgtccgggccctct

SEQ ID NO: 467012 - DNA, 60 bp, Artificial
  Synthetic oligonucleotide
tgaggccttgcttctgggttgaattaatcagggggctacctgaggaggacgcaatctgga

SEQ ID NO: 467013 - DNA, 58 bp, Artificial
  Synthetic oligonucleotide
tgaggccttttctgaaggcgggattttcaacataacctaccccatgtgcttagtgtca

SEQ ID NO: 467014 - DNA, 60 bp, Artificial
  Synthetic oligonucleotide
tgaggcgactacaccagtggataagctcggagtgcaccactccatgctccggttcctggc

SEQ ID NO: 467015 - DNA, 60 bp, Artificial
  Synthetic oligonucleotide
tgaggcgggagctgagttggcagtactgctataaactgtctgaagtcactaaacgctttg

SEQ ID NO: 467016 - DNA, 55 bp, Artificial
  Synthetic oligonucleotide
tgaggcggttgcgaaaggaattgcccatagaagcaaagcggacaagggtgcagcg

SEQ ID NO: 467017 - DNA, 60 bp, Artificial
  Synthetic oligonucleotide
tgaggcgtcgtcaactctagacgaccagatacgagggtacagacagaccgccagactaag

SEQ ID NO: 467018 - DNA, 59 bp, Artificial
  Synthetic oligonucleotide
tgaggcgtgcatcctccttaatccagtcttggttaaggacgctactgggagtactcaat

SEQ ID NO: 467019 - DNA, 60 bp, Artificial
  Synthetic oligonucleotide
tgaggctaccaagtactgtgctcccatatatgaatgtgcctgggttagctccacaggtat

SEQ ID NO: 467020 - DNA, 55 bp, Artificial
  Synthetic oligonucleotide
tgaggctagacattccccaccagcgatggtggtctagcctgcgtggctgcctgca

SEQ ID NO: 467021 - DNA, 55 bp, Artificial
  Synthetic oligonucleotide
tgaggctatcgccgcgtggatggctgcgaacgcgaacggagccgagcatgtttga

SEQ ID NO: 467022 - DNA, 60 bp, Artificial
  Synthetic oligonucleotide
tgaggctcaaatatttgcggacagattgtctcgcaagtatgctgctctcaccgctcgggt

SEQ ID NO: 467023 - DNA, 56 bp, Artificial
  Synthetic oligonucleotide
tgaggctcggaatacgacggcgaccctgctactggaatcgggtgtcgacgttaggg

SEQ ID NO: 467024 - DNA, 55 bp, Artificial
  Synthetic oligonucleotide
tgaggctctcagccaggacaaccccgcatgtggatgacggctggttgggtgcaca

SEQ ID NO: 467025 - DNA, 53 bp, Artificial
  Synthetic oligonucleotide
tgaggctgctaagccttttcaaaacgcctagtaaagttcctgtatgttttgca

SEQ ID NO: 467026 - DNA, 60 bp, Artificial
  Synthetic oligonucleotide
tgaggctggcgtgcggtcatagtactggacggggggctgcatacaacgcgagactagctt

SEQ ID NO: 467027 - DNA, 60 bp, Artificial
  Synthetic oligonucleotide
tgaggctggggctatgattgagaccaggtcagtgtctactatgtactctgccgcagagac

SEQ ID NO: 467028 - DNA, 60 bp, Artificial
  Synthetic oligonucleotide
tgaggcttaccgtaggttgctgcgactaagtaacattgaaatcccgcctttagagcatga

SEQ ID NO: 467029 - DNA, 54 bp, Artificial
  Synthetic oligonucleotide
tgaggcttatcccggggaactcgacttatcgtccccatctagcgggaccccgga

SEQ ID NO: 467030 - DNA, 54 bp, Artificial
  Synthetic oligonucleotide
tgaggcttatcccggggatcgggcgtcgcccccacatagcagaccccgggtccc

SEQ ID NO: 467031 - DNA, 60 bp, Artificial
  Synthetic oligonucleotide
tgaggctttccctgtagcgggacgttgagtcccacagatatttcctctgcgattcgctta

SEQ ID NO: 467032 - DNA, 60 bp, Artificial
  Synthetic oligonucleotide
tgaggcttttgatgcgtctcaagatcattatatcatggcgtttgaggttagcttaatgcg

SEQ ID NO: 467033 - DNA, 60 bp, Artificial
  Synthetic oligonucleotide
tgagggaaaaaacattctattcatgtggggcatacatcatccacctactgacactgaaca

SEQ ID NO: 467034 - DNA, 55 bp, Artificial
  Synthetic oligonucleotide
tgagggaacatcacagatcttagtgaagtcttcagagatccaggggtactccgag

SEQ ID NO: 467035 - DNA, 53 bp, Artificial
  Synthetic oligonucleotide
tgagggaagaaaagttatctggggtgactctgattgtctccaacatatttcca

SEQ ID NO: 467036 - DNA, 60 bp, Artificial
  Synthetic oligonucleotide
tgagggaaggctaatccaaaacagtatcacaatagaaagaatggtcctgtctgcgtttga

SEQ ID NO: 467037 - DNA, 59 bp, Artificial
  Synthetic oligonucleotide
tgagggacggacgatacgcggcggggtcagagcgtagtgacccaatatgtagtgttagc

SEQ ID NO: 467038 - DNA, 56 bp, Artificial
  Synthetic oligonucleotide
tgagggagacgcactggtcgtttctgttagcgccggtaaggactttgagtttcgcc

SEQ ID NO: 467039 - DNA, 60 bp, Artificial
  Synthetic oligonucleotide
tgagggagcgatgtctctgagatttcaaggaaagattgataccatgttcttctcggaaaa

SEQ ID NO: 467040 - DNA, 60 bp, Artificial
  Synthetic oligonucleotide
tgagggaggtagcattgcataaggagatgatcagtaaacttcagaggaacatcacagatg

SEQ ID NO: 467041 - DNA, 57 bp, Artificial
  Synthetic oligonucleotide
tgagggaggttcactagtggagttaaactggcttcaggttgatccaaattcaatgtt

SEQ ID NO: 467042 - DNA, 55 bp, Artificial
  Synthetic oligonucleotide
tgagggcacttaccaggcactgtcaggggacaggccagaaagtcctaggctgggg

SEQ ID NO: 467043 - DNA, 60 bp, Artificial
  Synthetic oligonucleotide
tgagggcagccaattccgcgtcaggtacacgggcttaccagctcgggcgcggcgtgtata

SEQ ID NO: 467044 - DNA, 51 bp, Artificial
  Synthetic oligonucleotide
tgagggccttagtgacctagcggtggcacttgagccggtcgtgtttacggc

SEQ ID NO: 467045 - DNA, 57 bp, Artificial
  Synthetic oligonucleotide
tgagggcgaaattcctattttgccctttaatgaaagcgttcagtacgcttgttggca

SEQ ID NO: 467046 - DNA, 60 bp, Artificial
  Synthetic oligonucleotide
tgagggctagagagagagctaggacgttgtcacccccgagacaaaatgaagcagtggaag

SEQ ID NO: 467047 - DNA, 60 bp, Artificial
  Synthetic oligonucleotide
tgagggctcatattgataagctgctgcaattgaaagtgatcagaccctcatccagtcgac

SEQ ID NO: 467048 - DNA, 60 bp, Artificial
  Synthetic oligonucleotide
tgagggctgaggggcctgaaatgagccttgggactgtgaatcaatgcctgtttcatgccc

SEQ ID NO: 467049 - DNA, 58 bp, Artificial
  Synthetic oligonucleotide
tgaggggaaccaaaaacaagtgtgttctgctaagatcttctagtgatacgcctttgtg

SEQ ID NO: 467050 - DNA, 60 bp, Artificial
  Synthetic oligonucleotide
tgaggggaccaatgcatggcaaacgcgccttcgatggctgaagacgtggcgccatgtact

SEQ ID NO: 467051 - DNA, 60 bp, Artificial
  Synthetic oligonucleotide
tgaggggagagatcgaacaatggcatggacagtggtaaacagcatctgcaacaccacaag

SEQ ID NO: 467052 - DNA, 60 bp, Artificial
  Synthetic oligonucleotide
tgaggggatcagtggctcacaaatcctgtttgcctgcttgtgtatatggacttgctgtgg

SEQ ID NO: 467053 - DNA, 55 bp, Artificial
  Synthetic oligonucleotide
tgaggggcgagatgacttcttgtcatccaatggagtcattaccataccagctgga

SEQ ID NO: 467054 - DNA, 60 bp, Artificial
  Synthetic oligonucleotide
tgaggggcgattctgcctcccgtgccgcgttcatgaaggcaatgggagagtccggcctgc

SEQ ID NO: 467055 - DNA, 55 bp, Artificial
  Synthetic oligonucleotide
tgaggggcgggagtttaaggagagagtgaattgggaggaagtgccgatgggacca

SEQ ID NO: 467056 - DNA, 51 bp, Artificial
  Synthetic oligonucleotide
tgaggggctgctattaactatcacgtcaaataacaaggttcggggtggagc

SEQ ID NO: 467057 - DNA, 55 bp, Artificial
  Synthetic oligonucleotide
tgaggggcttattggcctctttgccccgttttcgcccgggcatgtctgggagtcg

SEQ ID NO: 467058 - DNA, 53 bp, Artificial
  Synthetic oligonucleotide
tgaggggggatcccaagccccacaaggtggatcaaacagatcacaagggcaac

SEQ ID NO: 467059 - DNA, 60 bp, Artificial
  Synthetic oligonucleotide
tgaggggtatgtcactaatgtcactgcttgcaacatcaccgatttagccaaccaaacagc

SEQ ID NO: 467060 - DNA, 56 bp, Artificial
  Synthetic oligonucleotide
tgaggggtcggtggggaataacgcggattgggttgtggacccgtcgcattctcgca

SEQ ID NO: 467061 - DNA, 54 bp, Artificial
  Synthetic oligonucleotide
tgaggggtgggttgacaacccccttccatgcccgcgtgaacggcggggagtgtc

SEQ ID NO: 467062 - DNA, 55 bp, Artificial
  Synthetic oligonucleotide
tgaggggttcaatagcgaattcgagtgatgctactaaagatttacttaattcgcg

SEQ ID NO: 467063 - DNA, 52 bp, Artificial
  Synthetic oligonucleotide
tgaggggttctacataataaaagaggtagagggattcattatgtctctaatt

SEQ ID NO: 467064 - DNA, 60 bp, Artificial
  Synthetic oligonucleotide
tgagggtactaataatacagatgtatgggtagctatcatatctattgaaccaaatgttaa

SEQ ID NO: 467065 - DNA, 60 bp, Artificial
  Synthetic oligonucleotide
tgagggtagccctccgtgcttttagtattattcgagttctctgagtctccatacagtgtg

SEQ ID NO: 467066 - DNA, 60 bp, Artificial
  Synthetic oligonucleotide
tgagggtcccaatgctggctttgaaaactgggagactcatctaagcaatcaaacgagttg

SEQ ID NO: 467067 - DNA, 59 bp, Artificial
  Synthetic oligonucleotide
tgagggtgaacgccataccaacgagactctgacgtacaaggtcgctctggactaccact

SEQ ID NO: 467068 - DNA, 56 bp, Artificial
  Synthetic oligonucleotide
tgagggtgaggctagggcttgcgggctgagcgctattgatgcaatcgagatagtgc

SEQ ID NO: 467069 - DNA, 60 bp, Artificial
  Synthetic oligonucleotide
tgagggtgtgagtgtaacaccgatggcaacacgggtgcaacataatggagtgatggttga

SEQ ID NO: 467070 - DNA, 60 bp, Artificial
  Synthetic oligonucleotide
tgagggtgttagcgtgacgccaatggctacgcgggtacagtataatggtgtgatggttga

SEQ ID NO: 467071 - DNA, 57 bp, Artificial
  Synthetic oligonucleotide
tgagggttcaggttctggacttggacttctagcttgactttgacttggaggttgact

SEQ ID NO: 467072 - DNA, 55 bp, Artificial
  Synthetic oligonucleotide
tgaggtaacaccattctacacaagccaagtagtacggtatgacggttcaatgcac

SEQ ID NO: 467073 - DNA, 60 bp, Artificial
  Synthetic oligonucleotide
tgaggtacataccatgaccaacgcaatctccaaaaccgtaatcgcattccgtggcacaga

SEQ ID NO: 467074 - DNA, 57 bp, Artificial
  Synthetic oligonucleotide
tgaggtaccatttattctctgtgttcagggcgaagtttgtgtatagttattcctttg

SEQ ID NO: 467075 - DNA, 55 bp, Artificial
  Synthetic oligonucleotide
tgaggtagagggctgcaaaagtatcctcatagccatggccaccttggcgagggac

SEQ ID NO: 467076 - DNA, 60 bp, Artificial
  Synthetic oligonucleotide
tgaggtagctttacagttatctatgcaggaacgtgcaaggctagtaccagcagaggtact

SEQ ID NO: 467077 - DNA, 60 bp, Artificial
  Synthetic oligonucleotide
tgaggtagtgagaactgccgattctgctatcatgcatgggctaccgaaatgttcccgcct

SEQ ID NO: 467078 - DNA, 57 bp, Artificial
  Synthetic oligonucleotide
tgaggtataaacacacctgggggtttgaatcggatacagcgtacttgtacgagttca

SEQ ID NO: 467079 - DNA, 58 bp, Artificial
  Synthetic oligonucleotide
tgaggtatatgctagccctttatgcaggggctagctgggccgttactatgggggacga

SEQ ID NO: 467080 - DNA, 60 bp, Artificial
  Synthetic oligonucleotide
tgaggtatgctgcagacactactcctttggtcccaatcaccgtaaccattgcaccgatgg

SEQ ID NO: 467081 - DNA, 60 bp, Artificial
  Synthetic oligonucleotide
tgaggtatgggtggcgttatgtctgcttagcaggaagtcttgctagtggatgttccttct

SEQ ID NO: 467082 - DNA, 60 bp, Artificial
  Synthetic oligonucleotide
tgaggtatgtgaagagagtgattgagacatcaactgcggagaacgcaagtctacagacat

SEQ ID NO: 467083 - DNA, 60 bp, Artificial
  Synthetic oligonucleotide
tgaggtattgcacttgactcagggtacttgctgggaacagatgtacaccccgggaggaga

SEQ ID NO: 467084 - DNA, 60 bp, Artificial
  Synthetic oligonucleotide
tgaggtattgcatttgactcaaggaacctgctgggaacagatgtacaccccaggcggaga

SEQ ID NO: 467085 - DNA, 60 bp, Artificial
  Synthetic oligonucleotide
tgaggtatttggtgcaaggatccatagccatggtacgttggctgttactccgtctcttaa

SEQ ID NO: 467086 - DNA, 54 bp, Artificial
  Synthetic oligonucleotide
tgaggtcaaagtaagacctatcaaggaagtggcgccaggtttgggagtacaaac

SEQ ID NO: 467087 - DNA, 60 bp, Artificial
  Synthetic oligonucleotide
tgaggtcacatcacgaacaccagtgagggctagggaagcgcacattcaaatgaaggccgc

SEQ ID NO: 467088 - DNA, 55 bp, Artificial
  Synthetic oligonucleotide
tgaggtcagatgtgcccattgatacttgtgtttctgaatgcatcactccaaatgg

SEQ ID NO: 467089 - DNA, 55 bp, Artificial
  Synthetic oligonucleotide
tgaggtcatctcgaatgttctagacgtgtttcgaggtcgaatagcggttagtgcg

SEQ ID NO: 467090 - DNA, 55 bp, Artificial
  Synthetic oligonucleotide
tgaggtcatgaatgtgtccggcttgccagtgggtgctcccttcaagtattccacg

SEQ ID NO: 467091 - DNA, 60 bp, Artificial
  Synthetic oligonucleotide
tgaggtccaggacagcgggtatggcaatacacaagtggatactgagccgttatcaagcca

SEQ ID NO: 467092 - DNA, 60 bp, Artificial
  Synthetic oligonucleotide
tgaggtcccagcacagattatcgaagtagaacgcagtctccagaaagagctggggatttc

SEQ ID NO: 467093 - DNA, 56 bp, Artificial
  Synthetic oligonucleotide
tgaggtcccggtgggcctcattctcaagggcgttatggcccaatatcggtccctcc

SEQ ID NO: 467094 - DNA, 55 bp, Artificial
  Synthetic oligonucleotide
tgaggtccgcaaatgagttgagcgcttattttgagttccgctaacggaaggctgc

SEQ ID NO: 467095 - DNA, 60 bp, Artificial
  Synthetic oligonucleotide
tgaggtcgttgccctatgtttgactctcctggcaaacatagtgatcatgatccgcgagac

SEQ ID NO: 467096 - DNA, 57 bp, Artificial
  Synthetic oligonucleotide
tgaggtctcggaatccgggccgagaacttcgcagttggcgcccgaacaggacttgat

SEQ ID NO: 467097 - DNA, 60 bp, Artificial
  Synthetic oligonucleotide
tgaggtcttacgcgtcgactaagggattaaccttagttgcagatcaagatatgagaagcg

SEQ ID NO: 467098 - DNA, 54 bp, Artificial
  Synthetic oligonucleotide
tgaggtcttgcgtcatcggcacctccccttaccttaaagggtactactaaagcc

SEQ ID NO: 467099 - DNA, 58 bp, Artificial
  Synthetic oligonucleotide
tgaggtcttgtctcccatgcatatcaaacagttttctaatgtcatctgacccttgtgc

SEQ ID NO: 467100 - DNA, 56 bp, Artificial
  Synthetic oligonucleotide
tgaggtgcaaatcgctatagctgaatcgaaccatgatactgaatcacttgggtttc

SEQ ID NO: 467101 - DNA, 55 bp, Artificial
  Synthetic oligonucleotide
tgaggtgcagatagctctgcacacaataaattaacaataacacaggcaaagcaac

SEQ ID NO: 467102 - DNA, 60 bp, Artificial
  Synthetic oligonucleotide
tgaggtgcatgtaagcacaagattgtacatacctgtataggcggaacaccggtgttttta

SEQ ID NO: 467103 - DNA, 60 bp, Artificial
  Synthetic oligonucleotide
tgaggtggaggtaccggctctagactctcagccggttgctgaggcacaaataggaacagt

SEQ ID NO: 467104 - DNA, 57 bp, Artificial
  Synthetic oligonucleotide
tgaggtggaggtaccggctttagattctcagccggtagctggggaacaatcagggga

SEQ ID NO: 467105 - DNA, 60 bp, Artificial
  Synthetic oligonucleotide
tgaggtgggtgagaactcgctggctagacagaacactcagacgagaccgactaagctgac

SEQ ID NO: 467106 - DNA, 60 bp, Artificial
  Synthetic oligonucleotide
tgaggtggtgctcaattacacaggatcggcaaagattaaggaccatggctcacagagatt

SEQ ID NO: 467107 - DNA, 55 bp, Artificial
  Synthetic oligonucleotide
tgaggtgtcattcaaagtaggactacacgattacccggtagggtcgcaattacct

SEQ ID NO: 467108 - DNA, 51 bp, Artificial
  Synthetic oligonucleotide
tgaggtgtgggaatactcggaacctggtgcagagttcgaaaccaagttcgg

SEQ ID NO: 467109 - DNA, 50 bp, Artificial
  Synthetic oligonucleotide
tgaggttaacttaaagggaacatgtgcattgagtcataggatggttgaag

SEQ ID NO: 467110 - DNA, 59 bp, Artificial
  Synthetic oligonucleotide
tgaggttaagaaacaggtggaagattatttaggtcagattaaacctatcatagatgcag

SEQ ID NO: 467111 - DNA, 60 bp, Artificial
  Synthetic oligonucleotide
tgaggttacatcagagggcagagcaagtgtgacattgagagttcacaaaagggacttcag

SEQ ID NO: 467112 - DNA, 55 bp, Artificial
  Synthetic oligonucleotide
tgaggttacccttgagggtagccccgtgtctgtaatctgtatgcactgcgataag

SEQ ID NO: 467113 - DNA, 59 bp, Artificial
  Synthetic oligonucleotide
tgaggttcaattcctcttactccctgttgagccccttactttctcatggatgcttctcc

SEQ ID NO: 467114 - DNA, 59 bp, Artificial
  Synthetic oligonucleotide
tgaggttgaaatcaccacgcgtgtgtatcataaggccaagcatgtaaaggcttggtgtc

SEQ ID NO: 467115 - DNA, 50 bp, Artificial
  Synthetic oligonucleotide
tgaggttgaattctctaccctgtatcctgtgacaataagtacagaagacg

SEQ ID NO: 467116 - DNA, 59 bp, Artificial
  Synthetic oligonucleotide
tgaggttgtggttgaaccgtatctggatgtggtacactctggtcgccgtgtaccgtaga

SEQ ID NO: 467117 - DNA, 55 bp, Artificial
  Synthetic oligonucleotide
tgagtaaaataaccgactatgccaagacaactgccaaaggcaacagtgttgcgct

SEQ ID NO: 467118 - DNA, 57 bp, Artificial
  Synthetic oligonucleotide
tgagtaaacgcaaacctattaccaccgccagcgaagcaaaatgcgcggtcaaggtta

SEQ ID NO: 467119 - DNA, 60 bp, Artificial
  Synthetic oligonucleotide
tgagtaagccggaagaaccattgcaatagcgagggcatgcagagtgattctatcatgtgt

SEQ ID NO: 467120 - DNA, 60 bp, Artificial
  Synthetic oligonucleotide
tgagtaagctcaggctaagttttgtgtttattatcaggtgaaaccattccatgctagtcc

SEQ ID NO: 467121 - DNA, 60 bp, Artificial
  Synthetic oligonucleotide
tgagtaatacgcgacatgagtcactaaagcaaaagtatacgaatggcgttggttcaatag

SEQ ID NO: 467122 - DNA, 55 bp, Artificial
  Synthetic oligonucleotide
tgagtaatctcaggagacatgacgcaatctgccctggacttaacccactccttcc

SEQ ID NO: 467123 - DNA, 57 bp, Artificial
  Synthetic oligonucleotide
tgagtaatcttatagactaacaaggtttatgggtaagaacagatagaacaagacgaa

SEQ ID NO: 467124 - DNA, 60 bp, Artificial
  Synthetic oligonucleotide
tgagtaatttaacgacgggatggagtcgatttggtttcaattgcatagcagaagagccag

SEQ ID NO: 467125 - DNA, 60 bp, Artificial
  Synthetic oligonucleotide
tgagtacaatcaaactgagaaggcattgacagagtcatctcagaaactgattcaagagat

SEQ ID NO: 467126 - DNA, 58 bp, Artificial
  Synthetic oligonucleotide
tgagtacataatgaagggagtgtacataaacacagccttgctcaatgcgtcttgcgca

SEQ ID NO: 467127 - DNA, 58 bp, Artificial
  Synthetic oligonucleotide
tgagtacattctgtcaaatggtatcatcagttaactatgtagttcctatggctgacct

SEQ ID NO: 467128 - DNA, 60 bp, Artificial
  Synthetic oligonucleotide
tgagtaccagccagtgtcaggacaatggtttgacttgcttcagtacccgagatgggctaa

SEQ ID NO: 467129 - DNA, 55 bp, Artificial
  Synthetic oligonucleotide
tgagtaccgattgaccaagatttgcacttatcccttgtatatcggtactcaatat

SEQ ID NO: 467130 - DNA, 60 bp, Artificial
  Synthetic oligonucleotide
tgagtaccttcgttctaaagggatcaaggctatagacgccatgaagtactcaacaggaca

SEQ ID NO: 467131 - DNA, 60 bp, Artificial
  Synthetic oligonucleotide
tgagtacgaactaactggactgtctgcacttagaaaaggagtcgatggcaattctgtatc

SEQ ID NO: 467132 - DNA, 60 bp, Artificial
  Synthetic oligonucleotide
tgagtacgagcacacacagggaagtcgcagtcatagcagcaaggatgggagtcggaagga

SEQ ID NO: 467133 - DNA, 59 bp, Artificial
  Synthetic oligonucleotide
tgagtacgaggtaatgaaagataaaccatactatttagtgacgtgggcaaattcatcaa

SEQ ID NO: 467134 - DNA, 56 bp, Artificial
  Synthetic oligonucleotide
tgagtactgagccattagtagagttgggtaatgttatagctagtcttggaccgagt

SEQ ID NO: 467135 - DNA, 60 bp, Artificial
  Synthetic oligonucleotide
tgagtactgccctgacacagatgcaactgccgtggataaaccaactcgcccggacgtgtc

SEQ ID NO: 467136 - DNA, 60 bp, Artificial
  Synthetic oligonucleotide
tgagtactgtattaagccaattgtgctgctgagcttgtaaaccgccaacattctgctgtt

SEQ ID NO: 467137 - DNA, 58 bp, Artificial
  Synthetic oligonucleotide
tgagtactgtgaacctaaatctgtactgtcagcgttgcaggttattggtgacgtagta

SEQ ID NO: 467138 - DNA, 60 bp, Artificial
  Synthetic oligonucleotide
tgagtactgttccggggagtgctattaatggagtcattgacgctgctgcttgtgattccg

SEQ ID NO: 467139 - DNA, 55 bp, Artificial
  Synthetic oligonucleotide
tgagtacttcatggaggtgaacgggcgcaactctccactgcacactggcggcgcg

SEQ ID NO: 467140 - DNA, 55 bp, Artificial
  Synthetic oligonucleotide
tgagtacttcatggaggtggacgggcgaatctctcccctgcaaattggaggcgcg

SEQ ID NO: 467141 - DNA, 55 bp, Artificial
  Synthetic oligonucleotide
tgagtacttgtcaggtgacagacaagtggaggaatggccaaaggcaacttgcaca

SEQ ID NO: 467142 - DNA, 60 bp, Artificial
  Synthetic oligonucleotide
tgagtagagacatgtgaacaccgtcgtttctgtaatgatactctcataaacaacgcgacg

SEQ ID NO: 467143 - DNA, 59 bp, Artificial
  Synthetic oligonucleotide
tgagtagcccccagagggagaaaaccacaccgagagtgtcagagaaatcacctccagag

SEQ ID NO: 467144 - DNA, 60 bp, Artificial
  Synthetic oligonucleotide
tgagtaggaacgatttttcagacaatcttatggaggacagacatagtccaatatcgctaa

SEQ ID NO: 467145 - DNA, 60 bp, Artificial
  Synthetic oligonucleotide
tgagtaggtgttttgcacttaacattgtggagtgctgctgagacaaattttgtgagtaag

SEQ ID NO: 467146 - DNA, 58 bp, Artificial
  Synthetic oligonucleotide
tgagtagtaacggcggcggaatatcgttgcgtcagagtttaacaacgcagaagtaatc

SEQ ID NO: 467147 - DNA, 60 bp, Artificial
  Synthetic oligonucleotide
tgagtagtaatgcaaattgcagttgcattttatcggaatcgtgaactcagcttgtttggt

SEQ ID NO: 467148 - DNA, 52 bp, Artificial
  Synthetic oligonucleotide
tgagtagtgatcagagatttacaagtgatcaagcacatgatgggtctaggtc

SEQ ID NO: 467149 - DNA, 60 bp, Artificial
  Synthetic oligonucleotide
tgagtatagaacccataggagtagcaccaggtaaagctaaaagacgcacagtgagtagag

SEQ ID NO: 467150 - DNA, 60 bp, Artificial
  Synthetic oligonucleotide
tgagtatatcgcacgtcacgctgacgaggaaaacaactcattcttcaatccagtttcacc

SEQ ID NO: 467151 - DNA, 57 bp, Artificial
  Synthetic oligonucleotide
tgagtatcaatagactgcttacgcggttgaaggagaaaacgttcgttatccggctaa

SEQ ID NO: 467152 - DNA, 51 bp, Artificial
  Synthetic oligonucleotide
tgagtatctattagaatggtataatcatctgctatttccacttactttgca

SEQ ID NO: 467153 - DNA, 60 bp, Artificial
  Synthetic oligonucleotide
tgagtatgaatcctgtaagcagtgggacaggccagctagacaaagccttacagacacccc

SEQ ID NO: 467154 - DNA, 54 bp, Artificial
  Synthetic oligonucleotide
tgagtatgcacgacttggcgctaatgttgaagataggcgtgacgtgcgaatccc

SEQ ID NO: 467155 - DNA, 55 bp, Artificial
  Synthetic oligonucleotide
tgagtatgcaggcagtcatgcagtagacgaaggtagccttacgggaggggtaccc

SEQ ID NO: 467156 - DNA, 60 bp, Artificial
  Synthetic oligonucleotide
tgagtatggctttctctgggtctagtcggactttaacacaacagtcctcggcggcatcaa

SEQ ID NO: 467157 - DNA, 53 bp, Artificial
  Synthetic oligonucleotide
tgagtattgttgtttacctaacgtcctttgtggttccaatactcctaaaggcc

SEQ ID NO: 467158 - DNA, 58 bp, Artificial
  Synthetic oligonucleotide
tgagtcaacaaaaatattgttgaactcgacatttgaagagttgctttctgtggagaac

SEQ ID NO: 467159 - DNA, 60 bp, Artificial
  Synthetic oligonucleotide
tgagtcaatcttatgggctgctagtgcatcagaacttgtactggagccaaattggaatga

SEQ ID NO: 467160 - DNA, 55 bp, Artificial
  Synthetic oligonucleotide
tgagtcacctgaggactcctagaatcgaacctcaaacgctagaagtgatcctacg

SEQ ID NO: 467161 - DNA, 53 bp, Artificial
  Synthetic oligonucleotide
tgagtcactacggagcaccaatctccagaaatgatgtcgacatcttatcttcc

SEQ ID NO: 467162 - DNA, 55 bp, Artificial
  Synthetic oligonucleotide
tgagtcagagacaaaaactctttgaatcccaacaagggtggtttgaagggctgtt

SEQ ID NO: 467163 - DNA, 60 bp, Artificial
  Synthetic oligonucleotide
tgagtcagagagttcaagtcaatcacaagagctggtagcggtcggtagcgtacctctcag

SEQ ID NO: 467164 - DNA, 60 bp, Artificial
  Synthetic oligonucleotide
tgagtcagcctgtgaatgcaggagtaggataggacccataaccttttctgtaatgtccgt

SEQ ID NO: 467165 - DNA, 55 bp, Artificial
  Synthetic oligonucleotide
tgagtcaggcaatctggcaaacaacaatccaaatgctagcttaagagcggtaacc

SEQ ID NO: 467166 - DNA, 55 bp, Artificial
  Synthetic oligonucleotide
tgagtcaggccaagagataagaccagctctggctaagcggtggccaagagtgtgg

SEQ ID NO: 467167 - DNA, 60 bp, Artificial
  Synthetic oligonucleotide
tgagtcatcatctgacactgtttggcaagtcttgaacacagctgtttcagcagccgagct

SEQ ID NO: 467168 - DNA, 60 bp, Artificial
  Synthetic oligonucleotide
tgagtcatctttaaggaccagagttgggactatattctcgcctattccagcactggggga

SEQ ID NO: 467169 - DNA, 59 bp, Artificial
  Synthetic oligonucleotide
tgagtcatttgatgcacgttggagtcgcaaaccttataatacagtttccaggggacagg

SEQ ID NO: 467170 - DNA, 55 bp, Artificial
  Synthetic oligonucleotide
tgagtccaacgagccctcatccatcttggaatacctgcgggaagtgcctgagtgg

SEQ ID NO: 467171 - DNA, 55 bp, Artificial
  Synthetic oligonucleotide
tgagtccaagagacaaaggttttttatgccctgagtttccaggtagtttcaggaa

SEQ ID NO: 467172 - DNA, 52 bp, Artificial
  Synthetic oligonucleotide
tgagtccaagcagaggccatcgcgagttccactgcattagaccaggtagaga

SEQ ID NO: 467173 - DNA, 52 bp, Artificial
  Synthetic oligonucleotide
tgagtccaggcacgatatctctcatattggtaaagtcatgtgtattagcgac

SEQ ID NO: 467174 - DNA, 58 bp, Artificial
  Synthetic oligonucleotide
tgagtccgaatatggagtcaaaaccgactcagggtgtccggagggagccagatgttac

SEQ ID NO: 467175 - DNA, 51 bp, Artificial
  Synthetic oligonucleotide
tgagtccgctaaccgtgtttatgataagaccaaggcattgagcctaggtgt

SEQ ID NO: 467176 - DNA, 60 bp, Artificial
  Synthetic oligonucleotide
tgagtccgtaaacaatgccgtggtaatgccagctcatggcccatccaagagtatggaata

SEQ ID NO: 467177 - DNA, 60 bp, Artificial
  Synthetic oligonucleotide
tgagtccgtcaacaatgctgtagtaatgccagctcatggtccagccaagagcatggaata

SEQ ID NO: 467178 - DNA, 60 bp, Artificial
  Synthetic oligonucleotide
tgagtccgtgtatgcttcggagctctcagttatgaaggctgatatgagacacttgtcatt

SEQ ID NO: 467179 - DNA, 57 bp, Artificial
  Synthetic oligonucleotide
tgagtcctaaagactttcaacaaatgaaaacactgtgtagtgagattagtttggtta

SEQ ID NO: 467180 - DNA, 53 bp, Artificial
  Synthetic oligonucleotide
tgagtcctgtagggtcatcagatctgacggggcattatgccatggcttgagta

SEQ ID NO: 467181 - DNA, 54 bp, Artificial
  Synthetic oligonucleotide
tgagtcgactggttattataacaccagcgcccctagtcaagttgcaactagtga

SEQ ID NO: 467182 - DNA, 55 bp, Artificial
  Synthetic oligonucleotide
tgagtcgcaacgcgccaaaaccgcgttgatatttgacttagccctatgcacgggc

SEQ ID NO: 467183 - DNA, 60 bp, Artificial
  Synthetic oligonucleotide
tgagtcggcaactttatttaaagagattgccagtccacattctgtttgggtatttgcatg

SEQ ID NO: 467184 - DNA, 52 bp, Artificial
  Synthetic oligonucleotide
tgagtcggggacccaatagcaattacagatcgacacagtgttcaaagggaca

SEQ ID NO: 467185 - DNA, 60 bp, Artificial
  Synthetic oligonucleotide
tgagtcggtaaacaatgccgttgtaatgccagcccatggtccagcaaagagcatagagta

SEQ ID NO: 467186 - DNA, 55 bp, Artificial
  Synthetic oligonucleotide
tgagtcggtaaccggtcccctgtgcgctactggctaggcgcaaaccttacgccag

SEQ ID NO: 467187 - DNA, 59 bp, Artificial
  Synthetic oligonucleotide
tgagtcggttccccttctcaagcggcttgcgtgctcgacgcgctagcaacacggctccg

SEQ ID NO: 467188 - DNA, 60 bp, Artificial
  Synthetic oligonucleotide
tgagtctaaattaacaccctatacactcacaacaactcaccagattgaaactgtgactat

SEQ ID NO: 467189 - DNA, 50 bp, Artificial
  Synthetic oligonucleotide
tgagtctacagattagcgacacgtaacgactatgtcaagcacgtagacga

SEQ ID NO: 467190 - DNA, 60 bp, Artificial
  Synthetic oligonucleotide
tgagtctacgcttgctcgcgtggatgaggcgattaacaagacatacacgcgccggaacgg

SEQ ID NO: 467191 - DNA, 60 bp, Artificial
  Synthetic oligonucleotide
tgagtctcaggttttagctgatctcacaattcttctgggtgagaacgttgcggattggct

SEQ ID NO: 467192 - DNA, 54 bp, Artificial
  Synthetic oligonucleotide
tgagtctcattggagggttcgttcgttcgaaccagccaatcaggggagggggaa

SEQ ID NO: 467193 - DNA, 60 bp, Artificial
  Synthetic oligonucleotide
tgagtctcgagttggtaatctcgaggtctcattgtcaaggctcgtcggtctatggatcgg

SEQ ID NO: 467194 - DNA, 55 bp, Artificial
  Synthetic oligonucleotide
tgagtctgtactagctgatgcaagtgaaaccctgttagcaaacgtaacatccgtc

SEQ ID NO: 467195 - DNA, 60 bp, Artificial
  Synthetic oligonucleotide
tgagtctgtataacaagtatcgttattttagtggcaaaatggatactgccgcctatagag

SEQ ID NO: 467196 - DNA, 59 bp, Artificial
  Synthetic oligonucleotide
tgagtctttggattcggtaacctctagagccatccaaccagtccttcacgtcagagttg

SEQ ID NO: 467197 - DNA, 60 bp, Artificial
  Synthetic oligonucleotide
tgagtcttttgccatctcatagatgaggactggggctcctgatttgctgccatctatcgc

SEQ ID NO: 467198 - DNA, 52 bp, Artificial
  Synthetic oligonucleotide
tgagtgaacctaatgtctacatctagtggtgtgtgggacctaagggatacta

SEQ ID NO: 467199 - DNA, 60 bp, Artificial
  Synthetic oligonucleotide
tgagtgaacctttcgatgtcagctcgaattactacgtcatgccaggttgtccgtgctata

SEQ ID NO: 467200 - DNA, 55 bp, Artificial
  Synthetic oligonucleotide
tgagtgaaggcacgtacagctgagaagacgtcggacgcgaaggaaggcgcggggt

SEQ ID NO: 467201 - DNA, 60 bp, Artificial
  Synthetic oligonucleotide
tgagtgacaacggcactaatggtattcagcgagccatgtatcttagaagggttaacagga

SEQ ID NO: 467202 - DNA, 60 bp, Artificial
  Synthetic oligonucleotide
tgagtgactggatcccacctgcccaaaatgttgccgatagagagagcgattggttccgag

SEQ ID NO: 467203 - DNA, 56 bp, Artificial
  Synthetic oligonucleotide
tgagtgagggcagtaagggcggcaggaatcaaccacgacggagagctcctgtaaaa

SEQ ID NO: 467204 - DNA, 55 bp, Artificial
  Synthetic oligonucleotide
tgagtgagtggggaaagtctgaactcaagagagtgatgaatatggagaggatgac

SEQ ID NO: 467205 - DNA, 60 bp, Artificial
  Synthetic oligonucleotide
tgagtgatccaacgtaggcaagctcgtgaaatatggtatttcctaggatgccgtttcgac

SEQ ID NO: 467206 - DNA, 60 bp, Artificial
  Synthetic oligonucleotide
tgagtgcaggatacccaacaacgatcacacgcatagggaagggcaagactatagggagat

SEQ ID NO: 467207 - DNA, 60 bp, Artificial
  Synthetic oligonucleotide
tgagtgcccccacacagtcagctttggtgaaaacagcgtgataggttatgtggaattgcc

SEQ ID NO: 467208 - DNA, 55 bp, Artificial
  Synthetic oligonucleotide
tgagtgccgtgcgctcggtctccagggctgcgcttttcaatcgactgtcgctgag

SEQ ID NO: 467209 - DNA, 60 bp, Artificial
  Synthetic oligonucleotide
tgagtgcgtcgaatttgctatctataagcgctgggttcacctggaccacttgccagagtt

SEQ ID NO: 467210 - DNA, 60 bp, Artificial
  Synthetic oligonucleotide
tgagtgcgtgtgtcaggatgagttttgctacactctaattacagacggaccatccgatgc

SEQ ID NO: 467211 - DNA, 60 bp, Artificial
  Synthetic oligonucleotide
tgagtgctatgacgcaggctgtgcttggtatgagctcacacccgccgagaccacagttag

SEQ ID NO: 467212 - DNA, 60 bp, Artificial
  Synthetic oligonucleotide
tgagtgctccttgctctggtttgtctagccagagtttaaatgaggaaccctctcctggat

SEQ ID NO: 467213 - DNA, 58 bp, Artificial
  Synthetic oligonucleotide
tgagtggacaagtacgctgtcgcaactgttcttaacaaagggacggccaactggatcc

SEQ ID NO: 467214 - DNA, 60 bp, Artificial
  Synthetic oligonucleotide
tgagtggatactattctcaccaactctgaatcaaagttcaaccagttgatcatttcttca

SEQ ID NO: 467215 - DNA, 55 bp, Artificial
  Synthetic oligonucleotide
tgagtggccagacattgtcttggtctccggggtccggcaaaccctgcctcatgat

SEQ ID NO: 467216 - DNA, 60 bp, Artificial
  Synthetic oligonucleotide
tgagtggccttcctactgctcggattctgacgccacagcagtggataaaccaacgcgccc

SEQ ID NO: 467217 - DNA, 58 bp, Artificial
  Synthetic oligonucleotide
tgagtggctcttggaagccttcaggcggtacaccccttttgatcccacctcagaggcc

SEQ ID NO: 467218 - DNA, 57 bp, Artificial
  Synthetic oligonucleotide
tgagtgggattgcataataggcgcaccaagggaatccgttttaacggcccacttgga

SEQ ID NO: 467219 - DNA, 58 bp, Artificial
  Synthetic oligonucleotide
tgagtgggtaaattagacagactccaataggtaaattgagtaccgatagctaaattga

SEQ ID NO: 467220 - DNA, 58 bp, Artificial
  Synthetic oligonucleotide
tgagtgggtcaggagggcggtggtatgagcgaaaggaggttcaggtgatccgcagaca

SEQ ID NO: 467221 - DNA, 60 bp, Artificial
  Synthetic oligonucleotide
tgagtggtaaaattgatggtatcatatttaaagagcgtattaatcgtcgtactcacgatg

SEQ ID NO: 467222 - DNA, 55 bp, Artificial
  Synthetic oligonucleotide
tgagtggtacactagctgtgacggtgcacggaggcaactaccctggggctctccg

SEQ ID NO: 467223 - DNA, 55 bp, Artificial
  Synthetic oligonucleotide
tgagtggtcaaaggaggatcctgatgcaatcaaatttggcaggctcgtcagcacc

SEQ ID NO: 467224 - DNA, 52 bp, Artificial
  Synthetic oligonucleotide
tgagtggtcatatgttatatatactactcggaagcattttgggtttgcctta

SEQ ID NO: 467225 - DNA, 50 bp, Artificial
  Synthetic oligonucleotide
tgagtggtggtgcagtgaccttaacatctgctggcgtaacactatcaacc

SEQ ID NO: 467226 - DNA, 57 bp, Artificial
  Synthetic oligonucleotide
tgagtggttatttgatgtttgagtttgaataaaaaggcgtaggtcactagcctccca

SEQ ID NO: 467227 - DNA, 56 bp, Artificial
  Synthetic oligonucleotide
tgagtggtttgtcgtaatgcgcaagtctgtggcggaaccgactactttgggcgtcc

SEQ ID NO: 467228 - DNA, 51 bp, Artificial
  Synthetic oligonucleotide
tgagtgtaatatgtcatctgacaacggtagtgtgctctataagggtaagat

SEQ ID NO: 467229 - DNA, 58 bp, Artificial
  Synthetic oligonucleotide
tgagtgtatggaaactataaagaacggaacttacgatcataaggaatatgaagaggag

SEQ ID NO: 467230 - DNA, 57 bp, Artificial
  Synthetic oligonucleotide
tgagtgtcagaaatgtctgtactgggatgatttctatagacagcacttggcgggtgt

SEQ ID NO: 467231 - DNA, 59 bp, Artificial
  Synthetic oligonucleotide
tgagtgtcccctactgcaattacacaaaattttggtatgtcaaccacacactttcagga

SEQ ID NO: 467232 - DNA, 50 bp, Artificial
  Synthetic oligonucleotide
tgagtgtgtaaattctattggttgtgaatcggcgtctgcggaagtatcta

SEQ ID NO: 467233 - DNA, 59 bp, Artificial
  Synthetic oligonucleotide
tgagtgttagtccttattgcatgtccgataaggcccgacttctcttggatgaatctgga

SEQ ID NO: 467234 - DNA, 55 bp, Artificial
  Synthetic oligonucleotide
tgagtgttctttacacaatggaagaatgcacctggactttcaaacctcatgaggt

SEQ ID NO: 467235 - DNA, 60 bp, Artificial
  Synthetic oligonucleotide
tgagtgttgccaactaactgaattaactttctgtcacgggtgctcactagctcatgtttg

SEQ ID NO: 467236 - DNA, 58 bp, Artificial
  Synthetic oligonucleotide
tgagttaaacaaggggagacaacacagccaatggaattggccgattgagagacgttgg

SEQ ID NO: 467237 - DNA, 59 bp, Artificial
  Synthetic oligonucleotide
tgagttaaccgattcaagctggatagaactcgatgaaataggggaggacgttgctccaa

SEQ ID NO: 467238 - DNA, 55 bp, Artificial
  Synthetic oligonucleotide
tgagttaatcagaggacaacccaaggagagcacaatctggactagtgggagcagc

SEQ ID NO: 467239 - DNA, 54 bp, Artificial
  Synthetic oligonucleotide
tgagttaatccgtggtgcgtacccaaagattcagactgcgagccgcgtactccg

SEQ ID NO: 467240 - DNA, 60 bp, Artificial
  Synthetic oligonucleotide
tgagttaatgtaaatggcgtatgtcacaccgctcaaaagtacttcagtcgcccgcttgtg

SEQ ID NO: 467241 - DNA, 59 bp, Artificial
  Synthetic oligonucleotide
tgagttacacattcgaaagttaccgaatagcgaatgcgttccaatatggagctgtaaac

SEQ ID NO: 467242 - DNA, 51 bp, Artificial
  Synthetic oligonucleotide
tgagttacgcagacgtttcagacgggtggtgctatagatatcatagacaac

SEQ ID NO: 467243 - DNA, 58 bp, Artificial
  Synthetic oligonucleotide
tgagttactttcaccggcgtgacctgaggacacttgggttcgccatcagcccagcagt

SEQ ID NO: 467244 - DNA, 60 bp, Artificial
  Synthetic oligonucleotide
tgagttagcggctctcctcgcggatcctttgattaccgatgctatcgataatctgaatcc

SEQ ID NO: 467245 - DNA, 58 bp, Artificial
  Synthetic oligonucleotide
tgagttattgggagtccagtggggttgaccctcagacacaggtccttgtcgaacgata

SEQ ID NO: 467246 - DNA, 54 bp, Artificial
  Synthetic oligonucleotide
tgagttcactgatgtagtgcagagcgccggacttatggcagatcgggtgcaaga

SEQ ID NO: 467247 - DNA, 60 bp, Artificial
  Synthetic oligonucleotide
tgagttcgaagatctcacctttctagcacggtctgcgctcatattgagagggtcagttgc

SEQ ID NO: 467248 - DNA, 60 bp, Artificial
  Synthetic oligonucleotide
tgagttcgcttagtttagtgaatgattccactgggtcaccagacaagtaaatagctgtga

SEQ ID NO: 467249 - DNA, 54 bp, Artificial
  Synthetic oligonucleotide
tgagttctaagcgagggtggccctccgaattcccagttgtggttaaggtcgtag

SEQ ID NO: 467250 - DNA, 50 bp, Artificial
  Synthetic oligonucleotide
tgagttctaggagatgtcatcttgttagtgagtgttatgggaacaactgt

SEQ ID NO: 467251 - DNA, 50 bp, Artificial
  Synthetic oligonucleotide
tgagttctttcacgattacctaggtagatacccctatatctatggtaagg

SEQ ID NO: 467252 - DNA, 60 bp, Artificial
  Synthetic oligonucleotide
tgagttggcagttattgctttaaactgtctgaagtcactaaacagtatatactggtgaac

SEQ ID NO: 467253 - DNA, 60 bp, Artificial
  Synthetic oligonucleotide
tgagttgtaaggctgacatgctgtgcatcttactcgcaatagccagctatgtttgggtac

SEQ ID NO: 467254 - DNA, 55 bp, Artificial
  Synthetic oligonucleotide
tgagttgtataaaaggaccgacattgtggaggtggatcgtgatacggcacgcagg

SEQ ID NO: 467255 - DNA, 60 bp, Artificial
  Synthetic oligonucleotide
tgagttgtcaataagaccagcaaagctaggatgcatcattgccctagggtaccctggaga

SEQ ID NO: 467256 - DNA, 56 bp, Artificial
  Synthetic oligonucleotide
tgagttgtcgacttcgttgatgtcttttaacgagtcctccttggtggggtcgactc

SEQ ID NO: 467257 - DNA, 59 bp, Artificial
  Synthetic oligonucleotide
tgagttgtctaagatgacctatcttgctcagggccgtcctattcgtatccccacgccgt

SEQ ID NO: 467258 - DNA, 60 bp, Artificial
  Synthetic oligonucleotide
tgagtttagaacacacgcgtccgccactacgtcgggcgctatgtttattgagctcgacac

SEQ ID NO: 467259 - DNA, 50 bp, Artificial
  Synthetic oligonucleotide
tgagtttatacaactcagcaatgaagcaagatctgatctgtctctgaggt

SEQ ID NO: 467260 - DNA, 55 bp, Artificial
  Synthetic oligonucleotide
tgagtttctcggcgttagcggtttagaaaggttcaagagtgtactcactcaaccc

SEQ ID NO: 467261 - DNA, 55 bp, Artificial
  Synthetic oligonucleotide
tgagtttcttgaattgtgataagataaagtagctctgttctcaaggttgcctccg

SEQ ID NO: 467262 - DNA, 60 bp, Artificial
  Synthetic oligonucleotide
tgagttttgttcccatactcccgtgccagtcagatgggcagataacaccagtagttacat

SEQ ID NO: 467263 - DNA, 51 bp, Artificial
  Synthetic oligonucleotide
tgagttttttggtcgtatgagacccgaaattactgatgcattttttgcggc

SEQ ID NO: 467264 - DNA, 54 bp, Artificial
  Synthetic oligonucleotide
tgataaaaccgctacgactgttcccagcccgtttgaccgcattaacgttcgtcg

SEQ ID NO: 467265 - DNA, 55 bp, Artificial
  Synthetic oligonucleotide
tgataaaattagttgatgccaccgtgacagaacttgctctcagccacgggctctc

SEQ ID NO: 467266 - DNA, 58 bp, Artificial
  Synthetic oligonucleotide
tgataaacacagaaacttaacatctgaggaatccaaaacagttaataatatctataaa

SEQ ID NO: 467267 - DNA, 60 bp, Artificial
  Synthetic oligonucleotide
tgataaacgttgatttcctcagatatgcctcctttgttgccgttacctctatcctgcatt

SEQ ID NO: 467268 - DNA, 56 bp, Artificial
  Synthetic oligonucleotide
tgataaactccacgattttatctcgttcatggaacgctactgcctcaaacgatgga

SEQ ID NO: 467269 - DNA, 60 bp, Artificial
  Synthetic oligonucleotide
tgataaagaaccagccgttcttagtaagcatgatccaagactagagactgatttccacac

SEQ ID NO: 467270 - DNA, 60 bp, Artificial
  Synthetic oligonucleotide
tgataaagaagagatcagaaggatttggcgtcaagcaaataatggagaagatgcaaccgc

SEQ ID NO: 467271 - DNA, 53 bp, Artificial
  Synthetic oligonucleotide
tgataaaggtgtggtagtacgtaatttaattgtgggaaccaaggtttacgcca

SEQ ID NO: 467272 - DNA, 59 bp, Artificial
  Synthetic oligonucleotide
tgataaatctaccgtatcgagagagttgagtttgaaagagtactccaattattgccaac

SEQ ID NO: 467273 - DNA, 60 bp, Artificial
  Synthetic oligonucleotide
tgataaattggaccagagattctatgacagagctgtggtcctataatgctgaactcttgg

SEQ ID NO: 467274 - DNA, 60 bp, Artificial
  Synthetic oligonucleotide
tgataacaatgtctttagactaacatctgacagcgttggttggtttcattctggtttaga

SEQ ID NO: 467275 - DNA, 60 bp, Artificial
  Synthetic oligonucleotide
tgataacagcaataagtgatctttagctgaactcggcggtgtcatttcaacgaagcagca

SEQ ID NO: 467276 - DNA, 60 bp, Artificial
  Synthetic oligonucleotide
tgataacagtcccctccggaggagtatgtgacctcatcaacacctatgcccgaggatccg

SEQ ID NO: 467277 - DNA, 55 bp, Artificial
  Synthetic oligonucleotide
tgataacatcccctacatcccgagtcactatggccaaggccagttcgtcatgccg

SEQ ID NO: 467278 - DNA, 60 bp, Artificial
  Synthetic oligonucleotide
tgataacattaatgccatactcacagaagtaaatgaactacttgacactacacagttgca

SEQ ID NO: 467279 - DNA, 60 bp, Artificial
  Synthetic oligonucleotide
tgataacattgatgtctacaactccgatcactggaagctaatgttaaatcatcgaccaat

SEQ ID NO: 467280 - DNA, 58 bp, Artificial
  Synthetic oligonucleotide
tgataaccgccttgaccgggattgacctaagtcatatgacaactccaaagatccaacc

SEQ ID NO: 467281 - DNA, 58 bp, Artificial
  Synthetic oligonucleotide
tgataacgaggagtattgtagtaaggaaaacgacgtgatactcaccattggggagcca

SEQ ID NO: 467282 - DNA, 60 bp, Artificial
  Synthetic oligonucleotide
tgataacgaggcttatgaggggtctgaggtcgaccctgctgagcccgccccgtctgatgt

SEQ ID NO: 467283 - DNA, 55 bp, Artificial
  Synthetic oligonucleotide
tgataacgatcccgcagtcgtcacatggtacctatcttctgagtcatgcctcatg

SEQ ID NO: 467284 - DNA, 55 bp, Artificial
  Synthetic oligonucleotide
tgataactgatggctcagcttcagggattagtgaatgcagatttctcaagattcg

SEQ ID NO: 467285 - DNA, 54 bp, Artificial
  Synthetic oligonucleotide
tgataactgcggggttagtggaactagggatgctgcgagggtggatcctaggtc

SEQ ID NO: 467286 - DNA, 60 bp, Artificial
  Synthetic oligonucleotide
tgataactggtggtgctctatgctggacctagacacttctgactgggagccactaaccca

SEQ ID NO: 467287 - DNA, 53 bp, Artificial
  Synthetic oligonucleotide
tgataactggttaaattttgatggtaccttgttaggtaatgcccttatatttc

SEQ ID NO: 467288 - DNA, 58 bp, Artificial
  Synthetic oligonucleotide
tgataacttgtgcacacaaatagaatcactgtgtagtgtaccatctttcatgttacag

SEQ ID NO: 467289 - DNA, 55 bp, Artificial
  Synthetic oligonucleotide
tgataactttgtaacaaaggccaatgccctaacctatgacccctatgtaaactac

SEQ ID NO: 467290 - DNA, 55 bp, Artificial
  Synthetic oligonucleotide
tgataagaaattggctaaacaggcgaccaccaaggccgctaatccccaacctcgc

SEQ ID NO: 467291 - DNA, 60 bp, Artificial
  Synthetic oligonucleotide
tgataagaaggattatctgcaatatagtttaattgagatgtttaaggatagattaatagt

SEQ ID NO: 467292 - DNA, 55 bp, Artificial
  Synthetic oligonucleotide
tgataagaagtttatacaagcgttacctactgataacccgcatttaccagcatca

SEQ ID NO: 467293 - DNA, 60 bp, Artificial
  Synthetic oligonucleotide
tgataagaatgcaactgctagtttcatttatgacggaaagcttgctgacagcattggttc

SEQ ID NO: 467294 - DNA, 59 bp, Artificial
  Synthetic oligonucleotide
tgataagactaaatgtcctattcaagccgtgatagtcgttcctcgtgcttagtaactaa

SEQ ID NO: 467295 - DNA, 51 bp, Artificial
  Synthetic oligonucleotide
tgataagagaaaggagttgctggataatagacaggacccagcggtgatcga

SEQ ID NO: 467296 - DNA, 60 bp, Artificial
  Synthetic oligonucleotide
tgataagataagaccgtgagtttgaatatccacgttatacgcataagtagtacaccatga

SEQ ID NO: 467297 - DNA, 59 bp, Artificial
  Synthetic oligonucleotide
tgataagattccaagtgtgttaaccactactgatgagagattggttggcacagagcatg

SEQ ID NO: 467298 - DNA, 54 bp, Artificial
  Synthetic oligonucleotide
tgataagcaaatgtagaactaaagagggaaggcgaaagaccaatttgtacggtt

SEQ ID NO: 467299 - DNA, 60 bp, Artificial
  Synthetic oligonucleotide
tgataagcaagaacgattctattagttggagcgacgaattcgaagttagcagtaaatcca

SEQ ID NO: 467300 - DNA, 58 bp, Artificial
  Synthetic oligonucleotide
tgataagctagatgctgtgaggcaaatacttaatttcgcctttgtacctagggctcat

SEQ ID NO: 467301 - DNA, 59 bp, Artificial
  Synthetic oligonucleotide
tgataagctcagcggggaacttaagaagtcggccgcaattgaagccgtgaagaacagtc

SEQ ID NO: 467302 - DNA, 50 bp, Artificial
  Synthetic oligonucleotide
tgataagcttaatcgccctggatggttgcacggcagtggagatggttcta

SEQ ID NO: 467303 - DNA, 60 bp, Artificial
  Synthetic oligonucleotide
tgataaggactgtgcaggtacaggtttgtcggcatctgcacctcatttagagagggttac

SEQ ID NO: 467304 - DNA, 53 bp, Artificial
  Synthetic oligonucleotide
tgataagggttggtcagtcagtgattcgataaagcaagattttgtataccgga

SEQ ID NO: 467305 - DNA, 56 bp, Artificial
  Synthetic oligonucleotide
tgataaggtcctctacacggcgttatcacgagcagtgcattccatccacttcatta

SEQ ID NO: 467306 - DNA, 55 bp, Artificial
  Synthetic oligonucleotide
tgataagtagcattcttaagttaccacttggtatttgggaaagtactgtagggcg

SEQ ID NO: 467307 - DNA, 57 bp, Artificial
  Synthetic oligonucleotide
tgataagtgttgacgttcaatattaacgtttgagagttgttctaatacattaccttg

SEQ ID NO: 467308 - DNA, 50 bp, Artificial
  Synthetic oligonucleotide
tgataataaagattcttctatcatgtatctatattttccatctatcaccg

SEQ ID NO: 467309 - DNA, 57 bp, Artificial
  Synthetic oligonucleotide
tgataataatgtgtaaggccgcagaaaacttgtgggtcacggtatactatggggtac

SEQ ID NO: 467310 - DNA, 56 bp, Artificial
  Synthetic oligonucleotide
tgataatacaccgcaatttgaacttactaaccaaagctggaaatctttctttgaaa

SEQ ID NO: 467311 - DNA, 60 bp, Artificial
  Synthetic oligonucleotide
tgataatagtactgaaaaaatcgtactcccatgcagaataagacaaattgtaagcatgtg

SEQ ID NO: 467312 - DNA, 54 bp, Artificial
  Synthetic oligonucleotide
tgataatccatataacactccagtatttgccataagaaagaaggacagtactaa

SEQ ID NO: 467313 - DNA, 56 bp, Artificial
  Synthetic oligonucleotide
tgataatgaaccctcgaccgccactatcaaaaacgacctacgtgatcgttaccaag

SEQ ID NO: 467314 - DNA, 60 bp, Artificial
  Synthetic oligonucleotide
tgataatgaatacccatggaggcttctgctaatgggttatcacatgatgaaaatgcgaca

SEQ ID NO: 467315 - DNA, 59 bp, Artificial
  Synthetic oligonucleotide
tgataatgaggttacttgtagagaggactgaccaattagattcaattgtaatgcgaacc

SEQ ID NO: 467316 - DNA, 57 bp, Artificial
  Synthetic oligonucleotide
tgataatggaccaatttgtaagtgcgcagttttttcagtatctacgcagacaactct

SEQ ID NO: 467317 - DNA, 60 bp, Artificial
  Synthetic oligonucleotide
tgataatggtgacaggaggaaatgcctgctccaatacagtagtggccaattcgaagcaaa

SEQ ID NO: 467318 - DNA, 50 bp, Artificial
  Synthetic oligonucleotide
tgataatgttctatgatgatagtttcggtaaagctagagaagctagcatc

SEQ ID NO: 467319 - DNA, 56 bp, Artificial
  Synthetic oligonucleotide
tgataattattgatactttagagttcaaatggagagttgcgaaaccgcccggtaac

SEQ ID NO: 467320 - DNA, 58 bp, Artificial
  Synthetic oligonucleotide
tgataattcaagaggaatgaactatgaaacttcaatgtttaataaagtggcggcgtta

SEQ ID NO: 467321 - DNA, 60 bp, Artificial
  Synthetic oligonucleotide
tgatacaacacaggctgcatcaacaacctttgaagcacaaacaaagacagtaaacatcag

SEQ ID NO: 467322 - DNA, 60 bp, Artificial
  Synthetic oligonucleotide
tgatacaacagcgttcactaggatcactgactctccattgacgtattttacctacgggag

SEQ ID NO: 467323 - DNA, 50 bp, Artificial
  Synthetic oligonucleotide
tgatacaatcatggaaaagaatgtgacggtcacacatgctcaggacatac

SEQ ID NO: 467324 - DNA, 51 bp, Artificial
  Synthetic oligonucleotide
tgatacacgtgacgagttctacttgattctccgatacacatctgtaaaact

SEQ ID NO: 467325 - DNA, 60 bp, Artificial
  Synthetic oligonucleotide
tgatacactcttgtactgtagatctaacgatgtcgtttaattgggccattgacatcgtaa

SEQ ID NO: 467326 - DNA, 57 bp, Artificial
  Synthetic oligonucleotide
tgatacagacagcagaatgcttagcacaacaaagacaagcatcaattatggggagcg

SEQ ID NO: 467327 - DNA, 60 bp, Artificial
  Synthetic oligonucleotide
tgatacagtagcaagtggccctgcaaactctgagagcgtgcctgctctcactgcggtaga

SEQ ID NO: 467328 - DNA, 54 bp, Artificial
  Synthetic oligonucleotide
tgatacagtatcaacgcaaactgctactattgctaagcggttacgattgaaaga

SEQ ID NO: 467329 - DNA, 60 bp, Artificial
  Synthetic oligonucleotide
tgatacatcaccaaaaggtgccacaccagcatccaaattcttctagaccgcacacgacct

SEQ ID NO: 467330 - DNA, 58 bp, Artificial
  Synthetic oligonucleotide
tgatacatttcgactacatgaaatacctaatcagagtatcgcgggagaattatacgat

SEQ ID NO: 467331 - DNA, 60 bp, Artificial
  Synthetic oligonucleotide
tgataccacggtgtctaatttgagacgtatttggaacatggcgggcggtgatgacaagag

SEQ ID NO: 467332 - DNA, 60 bp, Artificial
  Synthetic oligonucleotide
tgataccatccgggcgtcttcaaacacctgggtgcgtgagagagagaagtaccacgctga

SEQ ID NO: 467333 - DNA, 60 bp, Artificial
  Synthetic oligonucleotide
tgatacccagctttggatcttggttggcaaacattgctgatctttactctaagtggagat

SEQ ID NO: 467334 - DNA, 53 bp, Artificial
  Synthetic oligonucleotide
tgataccccaagtattggacgtcgaataaaaatttaccacgttacagagtaag

SEQ ID NO: 467335 - DNA, 57 bp, Artificial
  Synthetic oligonucleotide
tgataccccgaacgggaccgaggtcttcagacctggaggaggagatatgagggacaa

SEQ ID NO: 467336 - DNA, 60 bp, Artificial
  Synthetic oligonucleotide
tgatacccgctgctttgactcaacagtcactgagagcgacatccgcacggaggaggcaat

SEQ ID NO: 467337 - DNA, 55 bp, Artificial
  Synthetic oligonucleotide
tgataccgaagttcgcacctctaccccgatagctgagtagcggtctgtctaccgc

SEQ ID NO: 467338 - DNA, 60 bp, Artificial
  Synthetic oligonucleotide
tgataccgaattcgttggattacagataagagtaagcgcaagacaatgtcatattcaggg

SEQ ID NO: 467339 - DNA, 55 bp, Artificial
  Synthetic oligonucleotide
tgataccgaattgcagatacatgtgttgcgagggccgaagcatttccagaggcgc

SEQ ID NO: 467340 - DNA, 60 bp, Artificial
  Synthetic oligonucleotide
tgataccgagaggtacgttaattagagacgtgagagcggaagcagctgaatacccaagag

SEQ ID NO: 467341 - DNA, 60 bp, Artificial
  Synthetic oligonucleotide
tgataccgcatttgagactggaattgatggcacattttatgcatatagagttgatacttt

SEQ ID NO: 467342 - DNA, 60 bp, Artificial
  Synthetic oligonucleotide
tgataccggaccagggcacttacaacagaagtcagtacggcaacacgcactaccgtgcga

SEQ ID NO: 467343 - DNA, 54 bp, Artificial
  Synthetic oligonucleotide
tgataccgggtcgttccgcgcttcaacagaaactgcgcgacgtgagtggcgtcg

SEQ ID NO: 467344 - DNA, 55 bp, Artificial
  Synthetic oligonucleotide
tgataccttcagggtgcaagatgggctccagatcttctaccaagatcccagtacc

SEQ ID NO: 467345 - DNA, 58 bp, Artificial
  Synthetic oligonucleotide
tgatacggtaggttacgatttaatccgcgatctaatatcaatattgcgttctaggaat

SEQ ID NO: 467346 - DNA, 55 bp, Artificial
  Synthetic oligonucleotide
tgatactaggagccttctgggcgacactggaactttacaacatcccatccaaagt

SEQ ID NO: 467347 - DNA, 60 bp, Artificial
  Synthetic oligonucleotide
tgatactcattttcttaatcaggtcaagattttcctgacagaaagtcttgaagttgaatg

SEQ ID NO: 467348 - DNA, 56 bp, Artificial
  Synthetic oligonucleotide
tgatactgacaaagaccttagtcataggacagtgcatatataccattacaagtcta

SEQ ID NO: 467349 - DNA, 60 bp, Artificial
  Synthetic oligonucleotide
tgatactgggacacatgtcaatgttcacataattgtgtccccgcattgtacagtctggat

SEQ ID NO: 467350 - DNA, 57 bp, Artificial
  Synthetic oligonucleotide
tgatactgttgacgttcttaaaacgaaactgaggaatcagggttggccactcgttga

SEQ ID NO: 467351 - DNA, 56 bp, Artificial
  Synthetic oligonucleotide
tgatacttaatttccacacactgtccattatccaacacggcggaaatgcttagtgt

SEQ ID NO: 467352 - DNA, 55 bp, Artificial
  Synthetic oligonucleotide
tgatacttgcgaacagtggctcgtagagggtgacgaagattgcattcttgagagc

SEQ ID NO: 467353 - DNA, 60 bp, Artificial
  Synthetic oligonucleotide
tgatacttgttgtccgtgccaaaaattatggcgaagcgagccggagatataatcatttcc

SEQ ID NO: 467354 - DNA, 60 bp, Artificial
  Synthetic oligonucleotide
tgatagaaacatgaatacctatgcagagaggttacctcgagatatagaggtgtatgcagc

SEQ ID NO: 467355 - DNA, 55 bp, Artificial
  Synthetic oligonucleotide
tgatagaagaccgtatgggaattccccgttggattttggtcaagttttcaacatg

SEQ ID NO: 467356 - DNA, 55 bp, Artificial
  Synthetic oligonucleotide
tgatagacggtctttgtcagttctgaatacagggtcggggtgaatggtagtagcg

SEQ ID NO: 467357 - DNA, 60 bp, Artificial
  Synthetic oligonucleotide
tgatagactcggagcgaggacgaacctattgtggagtgaagttgaagacagtacacgact

SEQ ID NO: 467358 - DNA, 60 bp, Artificial
  Synthetic oligonucleotide
tgatagactgaggttgtaaccagatatgttattagcgctttcctctttggtgatgaactc

SEQ ID NO: 467359 - DNA, 59 bp, Artificial
  Synthetic oligonucleotide
tgatagactttatggatactacgcttgacctagctccattatttaacgttccgaaatgc

SEQ ID NO: 467360 - DNA, 60 bp, Artificial
  Synthetic oligonucleotide
tgatagagaaaatatggattggagagagtggagaaaagtggtagaacaacagactattag

SEQ ID NO: 467361 - DNA, 60 bp, Artificial
  Synthetic oligonucleotide
tgatagaggaagattggacatgtcaaagtgcttaccctgcaaagattgtaaaccaactaa

SEQ ID NO: 467362 - DNA, 55 bp, Artificial
  Synthetic oligonucleotide
tgatagatcccgttgatacgttcttaaacaaactaaaggctaaaggggctccaga

SEQ ID NO: 467363 - DNA, 53 bp, Artificial
  Synthetic oligonucleotide
tgatagatgactttgagcttaactacatcatgacttatcccttagttgagagg

SEQ ID NO: 467364 - DNA, 54 bp, Artificial
  Synthetic oligonucleotide
tgatagatggatggtacggctaccatcatgagaattcacagggatcgggctacg

SEQ ID NO: 467365 - DNA, 57 bp, Artificial
  Synthetic oligonucleotide
tgatagatgtaatttcatgcttcgtccagcttggtttgactctgatgtcatacctgc

SEQ ID NO: 467366 - DNA, 54 bp, Artificial
  Synthetic oligonucleotide
tgatagattacgagattcgaccggcgacaaacgacgacttctacgtgcctccca

SEQ ID NO: 467367 - DNA, 55 bp, Artificial
  Synthetic oligonucleotide
tgatagattctgaccctctgctgtttgcattcgccaacggtatctacgactttag

SEQ ID NO: 467368 - DNA, 60 bp, Artificial
  Synthetic oligonucleotide
tgatagcaaggcaggtatgggagattattatgtaatggatattatacaaggcggtcaggg

SEQ ID NO: 467369 - DNA, 60 bp, Artificial
  Synthetic oligonucleotide
tgatagcaatgttgtacacaccactcagagctaataatgccggggatgatgtctttacag

SEQ ID NO: 467370 - DNA, 60 bp, Artificial
  Synthetic oligonucleotide
tgatagcaccattgaatgatagagattttttacttagtcagctgttcatgtacacaagcc

SEQ ID NO: 467371 - DNA, 54 bp, Artificial
  Synthetic oligonucleotide
tgatagcagaccctgggtgagaggacaaagcggcagaataagtttctactggac

SEQ ID NO: 467372 - DNA, 60 bp, Artificial
  Synthetic oligonucleotide
tgatagcagttttttcagtaggctgaactggttgtacaaatcaggtaacacatatccgat

SEQ ID NO: 467373 - DNA, 60 bp, Artificial
  Synthetic oligonucleotide
tgatagcattcttaatatcaacggtactaatgggtctcaatggtatgattggcttatgat

SEQ ID NO: 467374 - DNA, 60 bp, Artificial
  Synthetic oligonucleotide
tgatagcggaaggtgggtctcagacccacaaggtgacggcttgtctcgcgacgcacgtcc

SEQ ID NO: 467375 - DNA, 60 bp, Artificial
  Synthetic oligonucleotide
tgatagctgctgtaggggtatccgaggtgctgtacactgcaagctttgaattgctatgca

SEQ ID NO: 467376 - DNA, 55 bp, Artificial
  Synthetic oligonucleotide
tgatagcttacgaacattttgaatacaagaacgctatttgcacgagcgggaccgc

SEQ ID NO: 467377 - DNA, 58 bp, Artificial
  Synthetic oligonucleotide
tgataggaacttctggagaggcgaaaatgggcggaggacgagaattgcttacgaaaga

SEQ ID NO: 467378 - DNA, 60 bp, Artificial
  Synthetic oligonucleotide
tgataggaacttttggaccatgtgcctcacaattcttctttatgctacagcagttcgaca

SEQ ID NO: 467379 - DNA, 57 bp, Artificial
  Synthetic oligonucleotide
tgataggaatttcaaatgttggactgaatgtgtctctacacttaaaaggagaggggg

SEQ ID NO: 467380 - DNA, 60 bp, Artificial
  Synthetic oligonucleotide
tgataggagcccattcagagccctcataagctgggaaatgggtcaagcacccagtccata

SEQ ID NO: 467381 - DNA, 60 bp, Artificial
  Synthetic oligonucleotide
tgataggctaagacgtgacggtgttatgactcaggctcagcagaatcaagtcgaggcgtt

SEQ ID NO: 467382 - DNA, 60 bp, Artificial
  Synthetic oligonucleotide
tgatagggatggataattatctttcgatgatgcggttgtcattatgttaatcatcctatt

SEQ ID NO: 467383 - DNA, 60 bp, Artificial
  Synthetic oligonucleotide
tgatagggggaggcgaaagacgtgaggagatcacacgcgcgcgggagacttcggtcatgt

SEQ ID NO: 467384 - DNA, 59 bp, Artificial
  Synthetic oligonucleotide
tgataggtgaccgtcctagggcggatggcatcaggctatttgactactttgtaggtttg

SEQ ID NO: 467385 - DNA, 59 bp, Artificial
  Synthetic oligonucleotide
tgataggtgtccaccaacatgtttgtttgtcggagggatggctgagttaggtgccttct

SEQ ID NO: 467386 - DNA, 60 bp, Artificial
  Synthetic oligonucleotide
tgataggtgtgtgtattgcatcatgtatactactccgagacgcgggtatagatcatcgta

SEQ ID NO: 467387 - DNA, 55 bp, Artificial
  Synthetic oligonucleotide
tgataggtttggtcaaggtggtcatcgggctaaccctgtctgggagtccagtccc

SEQ ID NO: 467388 - DNA, 54 bp, Artificial
  Synthetic oligonucleotide
tgatagtaagctggaagcggtaaacttgtgtatgcgagctattggtcgtgaggg

SEQ ID NO: 467389 - DNA, 55 bp, Artificial
  Synthetic oligonucleotide
tgatagtacagacctacgtgaccatatagactattggaaacacatgcgcctagaa

SEQ ID NO: 467390 - DNA, 58 bp, Artificial
  Synthetic oligonucleotide
tgatagtcatcgccttagtcctagaaaataatgggtgtttggaatatggtcgtaaaca

SEQ ID NO: 467391 - DNA, 60 bp, Artificial
  Synthetic oligonucleotide
tgatagtctaaatgtagggatgaagttccagtctatgataacacaaatcataaagttacc

SEQ ID NO: 467392 - DNA, 58 bp, Artificial
  Synthetic oligonucleotide
tgatagtcttaagaccaatcgtcagcggagttttaatatcgagaacaaatacgttgaa

SEQ ID NO: 467393 - DNA, 60 bp, Artificial
  Synthetic oligonucleotide
tgatagtgatgagcctgagttaaggtcactttcaagttggatccagaatgagttcaacaa

SEQ ID NO: 467394 - DNA, 57 bp, Artificial
  Synthetic oligonucleotide
tgatagtgttaggttggatgaactacccgccaatcaacatgtggtaaccgttaattc

SEQ ID NO: 467395 - DNA, 55 bp, Artificial
  Synthetic oligonucleotide
tgatagttcagaagatgtgaacgaatacgatcagtgggcggagaatcaggccgct

SEQ ID NO: 467396 - DNA, 58 bp, Artificial
  Synthetic oligonucleotide
tgatagttgccaactatcatgttacatccttttatagcgaccgggaacggtatataaa

SEQ ID NO: 467397 - DNA, 60 bp, Artificial
  Synthetic oligonucleotide
tgatataacactacgtgcgtatgatgatcggaaggcaacgaagaatgcgaaaggggtaga

SEQ ID NO: 467398 - DNA, 60 bp, Artificial
  Synthetic oligonucleotide
tgatataatgtcaacaactagtggaatgagatgccccgaacatactgggtccttccgaaa

SEQ ID NO: 467399 - DNA, 60 bp, Artificial
  Synthetic oligonucleotide
tgatatactagaagggctgaaagggcgcactagccctgcgtaatagttcaggtgcacatc

SEQ ID NO: 467400 - DNA, 52 bp, Artificial
  Synthetic oligonucleotide
tgatataggacaggtccttttgactggggcaattgggaatgtatatgtcagt

SEQ ID NO: 467401 - DNA, 57 bp, Artificial
  Synthetic oligonucleotide
tgatatatataaagtcttccaacaagcttagttataactttagcttagattataact

SEQ ID NO: 467402 - DNA, 57 bp, Artificial
  Synthetic oligonucleotide
tgatatattatattttaagtgactcagctgttaaccacgtttaaatcgttagcctta

SEQ ID NO: 467403 - DNA, 52 bp, Artificial
  Synthetic oligonucleotide
tgatatcacccgtggcaacggacttaatcaccgtgttgggaagagatttggt

SEQ ID NO: 467404 - DNA, 55 bp, Artificial
  Synthetic oligonucleotide
tgatatcatataaggaatctgctggtgcgcatacgtgtgtaaccgcggaggctgg

SEQ ID NO: 467405 - DNA, 51 bp, Artificial
  Synthetic oligonucleotide
tgatatccactatgatgatcgaattttgtgatagacttcagttgctcacta

SEQ ID NO: 467406 - DNA, 60 bp, Artificial
  Synthetic oligonucleotide
tgatatccgcataagggtatttgtgtaacttaccacaccgctgctgcacgcctttaatat

SEQ ID NO: 467407 - DNA, 60 bp, Artificial
  Synthetic oligonucleotide
tgatatcgtcatctgcattaaacataggtgacattttaacaaatggtgcaccgttatata

SEQ ID NO: 467408 - DNA, 58 bp, Artificial
  Synthetic oligonucleotide
tgatatctaaatacacttaagaaacgccaggtctgaggacgtaaacgagtccagatcc

SEQ ID NO: 467409 - DNA, 55 bp, Artificial
  Synthetic oligonucleotide
tgatatcttggaatggattaaatcttgtatcctctgcaccaaaaggcgccttcaa

SEQ ID NO: 467410 - DNA, 60 bp, Artificial
  Synthetic oligonucleotide
tgatatgactccaagcacagagatgtcactaagaggggtgagggtcagtaaagcgggagt

SEQ ID NO: 467411 - DNA, 57 bp, Artificial
  Synthetic oligonucleotide
tgatatgcgtagccgcttcccggttaactctgccgttcgttattcaggagcgaaccc

SEQ ID NO: 467412 - DNA, 60 bp, Artificial
  Synthetic oligonucleotide
tgatatgctcgagcagactcggccagctctatcggtcaacgttgacgtagtcgacgggtt

SEQ ID NO: 467413 - DNA, 60 bp, Artificial
  Synthetic oligonucleotide
tgatatggagaaccagcaggccagttggataggaccctatgaaggagaggccctactgga

SEQ ID NO: 467414 - DNA, 60 bp, Artificial
  Synthetic oligonucleotide
tgatatggggatgtatcctgctgaggataattgagatacaagggggacgaaatgtcaaat

SEQ ID NO: 467415 - DNA, 57 bp, Artificial
  Synthetic oligonucleotide
tgatatgtcgttgttacagtcacttttttccgacaaatccagggaggagtttgctaa

SEQ ID NO: 467416 - DNA, 60 bp, Artificial
  Synthetic oligonucleotide
tgatatgtgtatccgacgtgacacggggcaatggtattacgcatcgtgtgggtaagcgtt

SEQ ID NO: 467417 - DNA, 60 bp, Artificial
  Synthetic oligonucleotide
tgatattaagcatactggtattgttcgttgtgttagcgatgttactcgtggatccggaat

SEQ ID NO: 467418 - DNA, 51 bp, Artificial
  Synthetic oligonucleotide
tgatattatgatggtggcatgggacgtatataatggtttaccaactgacac

SEQ ID NO: 467419 - DNA, 60 bp, Artificial
  Synthetic oligonucleotide
tgatattcatggctcgaagtatccagatcaattcttactccaggtcagacggcacagaag

SEQ ID NO: 467420 - DNA, 60 bp, Artificial
  Synthetic oligonucleotide
tgatattcgacgcgaagttgttgttggtgaaggacggaatgcaactgatgacttaaggga

SEQ ID NO: 467421 - DNA, 58 bp, Artificial
  Synthetic oligonucleotide
tgatattcgattcttggtacaaaaccggtggtagtgtaatggtatcttctcgccctga

SEQ ID NO: 467422 - DNA, 60 bp, Artificial
  Synthetic oligonucleotide
tgatattcgctcttgtggcgatcatcccaacaaatgcagacaaaatttgccttgggcatc

SEQ ID NO: 467423 - DNA, 53 bp, Artificial
  Synthetic oligonucleotide
tgatattcttctaaaggaaggctatacgattgaatctgtaatcaatggagaag

SEQ ID NO: 467424 - DNA, 60 bp, Artificial
  Synthetic oligonucleotide
tgatattgaagagccgagtggccaaactgcagattggtatactattggagtctatgtaat

SEQ ID NO: 467425 - DNA, 60 bp, Artificial
  Synthetic oligonucleotide
tgatattgtcaccattcattaaagcacagaactatggtattaatcttcctattacaggtt

SEQ ID NO: 467426 - DNA, 54 bp, Artificial
  Synthetic oligonucleotide
tgatattgttaaagggcacagcaaattcgttgaaatgttggagatataggaaac

SEQ ID NO: 467427 - DNA, 60 bp, Artificial
  Synthetic oligonucleotide
tgatcaaacgtggaatcaatgacagaaacttctggagaggtgagaatggacgaaggacaa

SEQ ID NO: 467428 - DNA, 60 bp, Artificial
  Synthetic oligonucleotide
tgatcaaactgactctgctaacacttatggaagataaagcagtcactgaagagattcaga

SEQ ID NO: 467429 - DNA, 60 bp, Artificial
  Synthetic oligonucleotide
tgatcaaataactgagctgaaaattgagagctcttgcaattttgatcatcatgcccctcc

SEQ ID NO: 467430 - DNA, 55 bp, Artificial
  Synthetic oligonucleotide
tgatcaacctcgtccaactcactcagcccaatgtgaaccaagcagcagtaggtgg

SEQ ID NO: 467431 - DNA, 60 bp, Artificial
  Synthetic oligonucleotide
tgatcaacgctacgttagttgtatatgcagagaaaggtgctggtaaaacatcattcttat

SEQ ID NO: 467432 - DNA, 60 bp, Artificial
  Synthetic oligonucleotide
tgatcaactgaatgctcatttgtgcttcagctttcaacctttgaatggcttgtttgttga

SEQ ID NO: 467433 - DNA, 58 bp, Artificial
  Synthetic oligonucleotide
tgatcaactgagtagaattgtgccaaagaagatctctaataacatggccacagctgag

SEQ ID NO: 467434 - DNA, 60 bp, Artificial
  Synthetic oligonucleotide
tgatcaagcaacgttcaaaaacactgtgtctaaacaaactgactctcgaagtgcattccc

SEQ ID NO: 467435 - DNA, 60 bp, Artificial
  Synthetic oligonucleotide
tgatcaagcgaggcatcaatgatcgaaatttctggagaggcgaaaatggacggaggacac

SEQ ID NO: 467436 - DNA, 60 bp, Artificial
  Synthetic oligonucleotide
tgatcaagcttatctaccagagcagtaagtagtacatgtaatgtcacctttagtaatagc

SEQ ID NO: 467437 - DNA, 59 bp, Artificial
  Synthetic oligonucleotide
tgatcaaggacgtctccgtctttttccatgtatgttttaacatctgttgagcttttagc

SEQ ID NO: 467438 - DNA, 55 bp, Artificial
  Synthetic oligonucleotide
tgatcaaggtgaagatatagtgagtctttgtccttcagagcagataagacacttg

SEQ ID NO: 467439 - DNA, 60 bp, Artificial
  Synthetic oligonucleotide
tgatcaagtgcggatgggaatgcgagaacgtgagaatcgagtacaataacaagactcgga

SEQ ID NO: 467440 - DNA, 57 bp, Artificial
  Synthetic oligonucleotide
tgatcaagtggcgccatagttttcacgtgacaaattagaaaaattcgtttgtctttg

SEQ ID NO: 467441 - DNA, 54 bp, Artificial
  Synthetic oligonucleotide
tgatcaatgcatggagacaattaggaacgggacctacaacaggcgaaagtatca

SEQ ID NO: 467442 - DNA, 59 bp, Artificial
  Synthetic oligonucleotide
tgatcaatggtgggtaacagtatactatggggttccagtctggaaggaggctactacac

SEQ ID NO: 467443 - DNA, 50 bp, Artificial
  Synthetic oligonucleotide
tgatcacaacctggaattttgtggtgttgttggagaccctgtatatcacc

SEQ ID NO: 467444 - DNA, 60 bp, Artificial
  Synthetic oligonucleotide
tgatcacaatcagatctccaaagtagtgtgcaaactcgaaaatgaatcagactcttatgt

SEQ ID NO: 467445 - DNA, 55 bp, Artificial
  Synthetic oligonucleotide
tgatcacacatgttattcagggctagatgtcactgagtgtggcgaagtcgcagcc

SEQ ID NO: 467446 - DNA, 60 bp, Artificial
  Synthetic oligonucleotide
tgatcacacctggctctggccaatttttgaccacagatgactttcaatcacccagtgctc

SEQ ID NO: 467447 - DNA, 60 bp, Artificial
  Synthetic oligonucleotide
tgatcacactcaatacagagccgaatcgctacagaacagaatacagatagacccagtgaa

SEQ ID NO: 467448 - DNA, 60 bp, Artificial
  Synthetic oligonucleotide
tgatcacagaaatgctgagaaaggactacataaaaaggcaaggaagcacccctctagcct

SEQ ID NO: 467449 - DNA, 53 bp, Artificial
  Synthetic oligonucleotide
tgatcacccctttccttatgaaaagggcgccactgggattattttcgcggtgt

SEQ ID NO: 467450 - DNA, 55 bp, Artificial
  Synthetic oligonucleotide
tgatcacggagctgaatatctcgtaagataatgacatcgctgatatatgcgctgg

SEQ ID NO: 467451 - DNA, 60 bp, Artificial
  Synthetic oligonucleotide
tgatcactatgttgaataattatgtgcagggtattggtgatagtcagagatctactaatg

SEQ ID NO: 467452 - DNA, 60 bp, Artificial
  Synthetic oligonucleotide
tgatcactcgtttatcactaagactgacggaatatctcggagctttatgagagattacgg

SEQ ID NO: 467453 - DNA, 60 bp, Artificial
  Synthetic oligonucleotide
tgatcacttctatctcggcgcatacaagtgaacagcgctggataactgcactcagccgct

SEQ ID NO: 467454 - DNA, 60 bp, Artificial
  Synthetic oligonucleotide
tgatcagaaatattatactcgactatgacagaatatttttaatgttcaaaggattaatga

SEQ ID NO: 467455 - DNA, 58 bp, Artificial
  Synthetic oligonucleotide
tgatcagaatatctcagggtagggaaaggttagaggtgattgagaggttcttcccgaa

SEQ ID NO: 467456 - DNA, 55 bp, Artificial
  Synthetic oligonucleotide
tgatcagagctcttggaccaccgaagctgatggtaggcgtcgacaggcaccggcc

SEQ ID NO: 467457 - DNA, 60 bp, Artificial
  Synthetic oligonucleotide
tgatcagaggattattctcttatatatgcttgaatggggaaaagagatggttgaccactt

SEQ ID NO: 467458 - DNA, 60 bp, Artificial
  Synthetic oligonucleotide
tgatcagagtttgattattgctgctagaaatattgttaggagagcaacagtatcagcaga

SEQ ID NO: 467459 - DNA, 54 bp, Artificial
  Synthetic oligonucleotide
tgatcagcaaagttctaaagagactccgacttcgcttaaagtagataaggataa

SEQ ID NO: 467460 - DNA, 60 bp, Artificial
  Synthetic oligonucleotide
tgatcagcagtgacagggaaatgagatcgttattgagaagtcgtgcctcaattgatattg

SEQ ID NO: 467461 - DNA, 60 bp, Artificial
  Synthetic oligonucleotide
tgatcaggacgacaagcgattgatgaaaattaagattcagccgtatatgggtgaaatgta

SEQ ID NO: 467462 - DNA, 59 bp, Artificial
  Synthetic oligonucleotide
tgatcaggcccacttacgtaggctgtatagaggtggggagtttccaggacaaactgaca

SEQ ID NO: 467463 - DNA, 55 bp, Artificial
  Synthetic oligonucleotide
tgatcagttaccatgttacgtatccgctaacattagctactggcacgttcgtgcg

SEQ ID NO: 467464 - DNA, 60 bp, Artificial
  Synthetic oligonucleotide
tgatcagtttcggtacagtcgagctcttggccgcgcgctggggtttgtctgcgaccgtcg

SEQ ID NO: 467465 - DNA, 59 bp, Artificial
  Synthetic oligonucleotide
tgatcagtttgatcgcatgctgttttctggggatgactctctagccttttccttgaacc

SEQ ID NO: 467466 - DNA, 51 bp, Artificial
  Synthetic oligonucleotide
tgatcataacgaatcagcatttgttcaggcacaataatggagaactgacca

SEQ ID NO: 467467 - DNA, 60 bp, Artificial
  Synthetic oligonucleotide
tgatcatagagtctggtgatccaaatgctcttttgaagcacagatttgaaatcattgaag

SEQ ID NO: 467468 - DNA, 60 bp, Artificial
  Synthetic oligonucleotide
tgatcatatatacaagaaacattatttgccacctcagtcggcagcattggttcatacgct

SEQ ID NO: 467469 - DNA, 60 bp, Artificial
  Synthetic oligonucleotide
tgatcatcaattaagtagaggcgtgctgaagagctgcatcatggtgccatgttctataag

SEQ ID NO: 467470 - DNA, 57 bp, Artificial
  Synthetic oligonucleotide
tgatcatccccacattctgaagctacttggagtgtgtctgttaaatgaacctcagta

SEQ ID NO: 467471 - DNA, 60 bp, Artificial
  Synthetic oligonucleotide
tgatcatcgccggagctcttgtggaggagaactgtaccttgaccattacaaacttcggtc

SEQ ID NO: 467472 - DNA, 59 bp, Artificial
  Synthetic oligonucleotide
tgatcatctgcagaatttcttccgcagctctcattcgacacgcctctgcttcggtgagt

SEQ ID NO: 467473 - DNA, 60 bp, Artificial
  Synthetic oligonucleotide
tgatcatcttcttcaggattctgagttagcagggctactttcaatgtcgtcagcatcaaa

SEQ ID NO: 467474 - DNA, 60 bp, Artificial
  Synthetic oligonucleotide
tgatcatggcagtggatcgagcagtaatacgtacacccacactgcagatcaactcgcctc

SEQ ID NO: 467475 - DNA, 60 bp, Artificial
  Synthetic oligonucleotide
tgatcatggcagttgatcgatatgtaatacgaacacccacacggcagatcaactcgcctc

SEQ ID NO: 467476 - DNA, 52 bp, Artificial
  Synthetic oligonucleotide
tgatcatggtatgttctggtggagacagcttgggttatacatgttataggac

SEQ ID NO: 467477 - DNA, 60 bp, Artificial
  Synthetic oligonucleotide
tgatcattttaaaccagataggggatcatatgataactttggttcattgctaggacataa

SEQ ID NO: 467478 - DNA, 60 bp, Artificial
  Synthetic oligonucleotide
tgatccaaaaccgaatcatggcaccaacataccctgaggccactcagtatgaaggacgtg

SEQ ID NO: 467479 - DNA, 56 bp, Artificial
  Synthetic oligonucleotide
tgatccaaaacggacttgtgaaggtaacacttcggccaataaacagtaatacacga

SEQ ID NO: 467480 - DNA, 51 bp, Artificial
  Synthetic oligonucleotide
tgatccaaaacttcccccagatgtgttgtcaacaatttgcgacgcattcag

SEQ ID NO: 467481 - DNA, 60 bp, Artificial
  Synthetic oligonucleotide
tgatccaacagggattgagcctgatgaccatctgaaggagaaatcatcactaagatatgg

SEQ ID NO: 467482 - DNA, 54 bp, Artificial
  Synthetic oligonucleotide
tgatccaagaagggttagtcagccagtgggggcggattccggtaagcggtaccg

SEQ ID NO: 467483 - DNA, 60 bp, Artificial
  Synthetic oligonucleotide
tgatccaatagcaccggaatcttcagatccaaacgttatagttcataatgttatggtgga

SEQ ID NO: 467484 - DNA, 55 bp, Artificial
  Synthetic oligonucleotide
tgatccacaaggctgcagaatgtttgctctaagccaaggcacaacactcaggggc

SEQ ID NO: 467485 - DNA, 60 bp, Artificial
  Synthetic oligonucleotide
tgatccacaagtcaaaacctggatgacacaaactttgctcatccagaatgctaacccaga

SEQ ID NO: 467486 - DNA, 52 bp, Artificial
  Synthetic oligonucleotide
tgatccacaatggtgcatcaaaagacttgtgaaaggagtgtacagaccaaag

SEQ ID NO: 467487 - DNA, 59 bp, Artificial
  Synthetic oligonucleotide
tgatccagaatttgaatcaaggcgagatcgtgtacaccacgacggacagggtaattggg

SEQ ID NO: 467488 - DNA, 60 bp, Artificial
  Synthetic oligonucleotide
tgatccagacgcgccggaagttgtgacggctcagcactccgcggcgcggccccacgaaga

SEQ ID NO: 467489 - DNA, 55 bp, Artificial
  Synthetic oligonucleotide
tgatccagcgccagactgcccacagcagtcggggaaataggggaccatgggagca

SEQ ID NO: 467490 - DNA, 60 bp, Artificial
  Synthetic oligonucleotide
tgatccagttgattaaagcttgcgaaacatgccacaacaatgactctatattaaacttag

SEQ ID NO: 467491 - DNA, 59 bp, Artificial
  Synthetic oligonucleotide
tgatcccaaatcctgaactagcaaagaacctggtcacagaatacggccgatttgaccca

SEQ ID NO: 467492 - DNA, 60 bp, Artificial
  Synthetic oligonucleotide
tgatcccatactgacgctcccgctctgcgcgcgctcttttatatcctcgcttcccccacc

SEQ ID NO: 467493 - DNA, 57 bp, Artificial
  Synthetic oligonucleotide
tgatccccctgttattgaggccccacaaacaggcgaggtgtctggcaatattttaat

SEQ ID NO: 467494 - DNA, 60 bp, Artificial
  Synthetic oligonucleotide
tgatcccctcttctagctgattgaagttgaagggagcgatgatgccctggtgtctgtatg

SEQ ID NO: 467495 - DNA, 60 bp, Artificial
  Synthetic oligonucleotide
tgatcccgactcaaccatcctggatataggtagtgcgccagcaaggaggatgatgtcgga

SEQ ID NO: 467496 - DNA, 55 bp, Artificial
  Synthetic oligonucleotide
tgatcccgccgagtttatcatgtcggacgggtttgcagcctacaccctaactccc

SEQ ID NO: 467497 - DNA, 55 bp, Artificial
  Synthetic oligonucleotide
tgatcccgctgacgggctcatcagacaacccaacacccgggagatccaagcccac

SEQ ID NO: 467498 - DNA, 60 bp, Artificial
  Synthetic oligonucleotide
tgatcccggtgttccatggaaggtttgggtcctgcgtatgtcttgcattggcttagccgc

SEQ ID NO: 467499 - DNA, 58 bp, Artificial
  Synthetic oligonucleotide
tgatccctcgtccatcagggacccaggcgtgttgcctcacgctttcgttgatgctcgc

SEQ ID NO: 467500 - DNA, 55 bp, Artificial
  Synthetic oligonucleotide
tgatccctgaggttatcgagattcatcatccctaatcccgtaggtagcccactac

SEQ ID NO: 467501 - DNA, 60 bp, Artificial
  Synthetic oligonucleotide
tgatccctgatgtcagagcagtggactaccataggatggatggtgctgaacccacgtgtt

SEQ ID NO: 467502 - DNA, 60 bp, Artificial
  Synthetic oligonucleotide
tgatccgaaatacattgatctaccagccactgatgcagacaggatgtacatagctaaaga

SEQ ID NO: 467503 - DNA, 54 bp, Artificial
  Synthetic oligonucleotide
tgatccgaactacaacaagataattgcgcatgaactactttctgtgcacacaaa

SEQ ID NO: 467504 - DNA, 55 bp, Artificial
  Synthetic oligonucleotide
tgatccgaaggtaacttcggcacaatggaagttcttggaggacatggctgatatg

SEQ ID NO: 467505 - DNA, 55 bp, Artificial
  Synthetic oligonucleotide
tgatccgcgagactcgcaagagacaacaaatggtggacgacgcagtgaatgagta

SEQ ID NO: 467506 - DNA, 54 bp, Artificial
  Synthetic oligonucleotide
tgatccgctgtggttggggcctttctaaccgtacttatatgaccttgttcgggt

SEQ ID NO: 467507 - DNA, 60 bp, Artificial
  Synthetic oligonucleotide
tgatccggactgttatcacctggcgacaacactgcgtgatccgatgcctgatcactacca

SEQ ID NO: 467508 - DNA, 60 bp, Artificial
  Synthetic oligonucleotide
tgatccggcctaagcgtgctgacatcgtgatgcgactgcgtgaccaagcggatgcctcgc

SEQ ID NO: 467509 - DNA, 60 bp, Artificial
  Synthetic oligonucleotide
tgatcctaacatcaggactggggtaaggacaattactactggcagctccatcacatactc

SEQ ID NO: 467510 - DNA, 55 bp, Artificial
  Synthetic oligonucleotide
tgatcctaggcctagcaaacctggtgttgtacttccgctggatgggcccacagcg

SEQ ID NO: 467511 - DNA, 53 bp, Artificial
  Synthetic oligonucleotide
tgatcctagttggcctaggtgttgccgcgtacttcctactgaagagctctggt

SEQ ID NO: 467512 - DNA, 50 bp, Artificial
  Synthetic oligonucleotide
tgatcctccgcacagctaagaggactgaaccagttggggtgctctttcat

SEQ ID NO: 467513 - DNA, 60 bp, Artificial
  Synthetic oligonucleotide
tgatcctctgaacattgctgacctcagagaagtccaacccattcagaaggttggttgcat

SEQ ID NO: 467514 - DNA, 60 bp, Artificial
  Synthetic oligonucleotide
tgatcctgaacatcaggttctaactgtgaactattgtgggagtgcaactttttgcattgg

SEQ ID NO: 467515 - DNA, 59 bp, Artificial
  Synthetic oligonucleotide
tgatcctgctcctcgggttatacaacccaggagccctcgctacaatgtggagttgggcc

SEQ ID NO: 467516 - DNA, 55 bp, Artificial
  Synthetic oligonucleotide
tgatcctgggtctagctaacctggtgttgtattttcgatggatgggcccacaacg

SEQ ID NO: 467517 - DNA, 60 bp, Artificial
  Synthetic oligonucleotide
tgatcctgtacgtagtacatgtcgtgcatggagtggtgcggttgatactacacatgtaac

SEQ ID NO: 467518 - DNA, 60 bp, Artificial
  Synthetic oligonucleotide
tgatccttaccttcgttcatattttagacgaccattcgaactaactgcatcaaatctagc

SEQ ID NO: 467519 - DNA, 58 bp, Artificial
  Synthetic oligonucleotide
tgatccttacgctcacttgtgacaaaattcttgatggacggggaaacgctgtctttct

SEQ ID NO: 467520 - DNA, 60 bp, Artificial
  Synthetic oligonucleotide
tgatccttaggttgagtgtgtatgccagcacctttaacagaggccggctgagaatgggat

SEQ ID NO: 467521 - DNA, 54 bp, Artificial
  Synthetic oligonucleotide
tgatccttgatcatgtgattgtggattaaagggttaaagatatgatggagatgt

SEQ ID NO: 467522 - DNA, 60 bp, Artificial
  Synthetic oligonucleotide
tgatcctttgcaacatagggtcagtacatctgtggcccccggtagggcgcaatggatctc

SEQ ID NO: 467523 - DNA, 60 bp, Artificial
  Synthetic oligonucleotide
tgatcgaaatagatatgagtgccatggagcatacaagtcagtatctgtgtacaggggtcc

SEQ ID NO: 467524 - DNA, 55 bp, Artificial
  Synthetic oligonucleotide
tgatcgaacaaccgagtcagcaagaggttatggatatgcaagcgacagcaacagt

SEQ ID NO: 467525 - DNA, 60 bp, Artificial
  Synthetic oligonucleotide
tgatcgacacacacctttccggcgagaattcgactctcatcgctaactcgatgcataaca

SEQ ID NO: 467526 - DNA, 60 bp, Artificial
  Synthetic oligonucleotide
tgatcgacggttgagggaaacagcagagtcacctctgtcttctcattggacagctgaaat

SEQ ID NO: 467527 - DNA, 60 bp, Artificial
  Synthetic oligonucleotide
tgatcgagggtggagtgacgattacgccgagacaagctgtgacgctagaagagatctatc

SEQ ID NO: 467528 - DNA, 60 bp, Artificial
  Synthetic oligonucleotide
tgatcgcaacttttggagaggcgaaaatggacggagaacaagaattgcatacgagaggat

SEQ ID NO: 467529 - DNA, 55 bp, Artificial
  Synthetic oligonucleotide
tgatcgcaataacgcgtccgaagcacacgaaaagccgtgtgaccatgatcggaaa

SEQ ID NO: 467530 - DNA, 60 bp, Artificial
  Synthetic oligonucleotide
tgatcgcgtgcggtcgataacactggggaactccaccattacaactcaagagagcgctaa

SEQ ID NO: 467531 - DNA, 51 bp, Artificial
  Synthetic oligonucleotide
tgatcggcacgacttccatgccggacaggtgctcccacttctcgcactcgt

SEQ ID NO: 467532 - DNA, 52 bp, Artificial
  Synthetic oligonucleotide
tgatcggctcgtacaggtcggcgtccttttcgaagaacggtgccaggaactc

SEQ ID NO: 467533 - DNA, 53 bp, Artificial
  Synthetic oligonucleotide
tgatcgggaccaggtggttcggacatggcgccgcatggggctgaagtgccttc

SEQ ID NO: 467534 - DNA, 55 bp, Artificial
  Synthetic oligonucleotide
tgatcgggctttcggatgtggcggctaatcacgcttaggcgaactgtaccgccgc

SEQ ID NO: 467535 - DNA, 60 bp, Artificial
  Synthetic oligonucleotide
tgatcggggcgttgaagcactcaggtggtcaactcatggagcactaccgatgtgatgcgg

SEQ ID NO: 467536 - DNA, 53 bp, Artificial
  Synthetic oligonucleotide
tgatcgggtttacaccgtaattatccaaccggtatctccgaagcccgtctacc

SEQ ID NO: 467537 - DNA, 58 bp, Artificial
  Synthetic oligonucleotide
tgatcgtcgagacgcaacgtgattggaagaccggggtcatcgttctgattggtccgcc

SEQ ID NO: 467538 - DNA, 60 bp, Artificial
  Synthetic oligonucleotide
tgatcgtgaaaatgtcttattgctgatattactttcagctctagcagatgcttttagcgt

SEQ ID NO: 467539 - DNA, 57 bp, Artificial
  Synthetic oligonucleotide
tgatcgttttcaagttatgcacaagttctatgctaaggtcacaggtggacaatacgc

SEQ ID NO: 467540 - DNA, 57 bp, Artificial
  Synthetic oligonucleotide
tgatctaaaacagtatgacagtgatgagcccaaaatgagatcaccagcaagctggat

SEQ ID NO: 467541 - DNA, 58 bp, Artificial
  Synthetic oligonucleotide
tgatctaattcctttttgtctgtaaataagtgaaattatcgaagcatgtggcgtaaaa

SEQ ID NO: 467542 - DNA, 60 bp, Artificial
  Synthetic oligonucleotide
tgatctacaagaagacatgatcttggcatgaaatcccgtctggagttagtgtcttcccct

SEQ ID NO: 467543 - DNA, 54 bp, Artificial
  Synthetic oligonucleotide
tgatctacaccgttctttgtacactactccgggaactccgattcgcgcgctgtt

SEQ ID NO: 467544 - DNA, 57 bp, Artificial
  Synthetic oligonucleotide
tgatctacagaacgtggtgtaaggggtaccaggcgttgcgtcaacgggtggtgcgga

SEQ ID NO: 467545 - DNA, 60 bp, Artificial
  Synthetic oligonucleotide
tgatctacatagtgttcgtatcatcacgggaccttctgagggcagtgaggctatgattca

SEQ ID NO: 467546 - DNA, 60 bp, Artificial
  Synthetic oligonucleotide
tgatctacatgccgcttataggctagcagagatggctcataatacaatgctggacagaga

SEQ ID NO: 467547 - DNA, 60 bp, Artificial
  Synthetic oligonucleotide
tgatctagcatgtaatagcacattctgtaaaccaacagtatatatgatagtcccaattca

SEQ ID NO: 467548 - DNA, 60 bp, Artificial
  Synthetic oligonucleotide
tgatctagtcatttaccgcacaaatactataggtgatgactatatcccaacatgtgactg

SEQ ID NO: 467549 - DNA, 55 bp, Artificial
  Synthetic oligonucleotide
tgatctagtcccccaagcccacggttcgaaagtcctcaacctgttcagaacggaa

SEQ ID NO: 467550 - DNA, 60 bp, Artificial
  Synthetic oligonucleotide
tgatctagttagcctcagtttaatcagaattctcttataggttcaatctgataattcctt

SEQ ID NO: 467551 - DNA, 55 bp, Artificial
  Synthetic oligonucleotide
tgatctatcttcacgcatctattcctcaactggctaagcttttgctcgaacgtgg

SEQ ID NO: 467552 - DNA, 60 bp, Artificial
  Synthetic oligonucleotide
tgatctcaacgactatcattacatcgggtttgctattcttcttcacacgaaattaaaata

SEQ ID NO: 467553 - DNA, 52 bp, Artificial
  Synthetic oligonucleotide
tgatctcacgcggcgttgaagttttacgaccgaagaagggtgtgtttgagcc

SEQ ID NO: 467554 - DNA, 54 bp, Artificial
  Synthetic oligonucleotide
tgatctcaggcttatatgcagggaataagtacgatctgctgtttccatctgtct

SEQ ID NO: 467555 - DNA, 56 bp, Artificial
  Synthetic oligonucleotide
tgatctcaggtatgtggctactaactgtagtgccaaacgatatgtttataagagaa

SEQ ID NO: 467556 - DNA, 58 bp, Artificial
  Synthetic oligonucleotide
tgatctcgagcctcgattactgcatgatatcgtaggatcaacgatacccggttttgta

SEQ ID NO: 467557 - DNA, 60 bp, Artificial
  Synthetic oligonucleotide
tgatctcgctgtcaccctcaaggtagtcacgatacagagtagctactacgttgtcacttc

SEQ ID NO: 467558 - DNA, 60 bp, Artificial
  Synthetic oligonucleotide
tgatctctctcgctggtttggctggctaaaaataggtttcctggtcatagcaggcattat

SEQ ID NO: 467559 - DNA, 60 bp, Artificial
  Synthetic oligonucleotide
tgatctgaaatctgttgtcaggcagggtggattcgcggtgagcatggatcattcaaaatg

SEQ ID NO: 467560 - DNA, 60 bp, Artificial
  Synthetic oligonucleotide
tgatctgaactttgtcaatagggcaaaccagcggctgaaccctatgcatcaactcttgag

SEQ ID NO: 467561 - DNA, 60 bp, Artificial
  Synthetic oligonucleotide
tgatctgactgattctgaaatgaacaaattgtttgaaaagacaaggagacaactgaggga

SEQ ID NO: 467562 - DNA, 59 bp, Artificial
  Synthetic oligonucleotide
tgatctgagtgcgtcagagcacaacaaaatggtaaataggttgagggaacatttaaggt

SEQ ID NO: 467563 - DNA, 58 bp, Artificial
  Synthetic oligonucleotide
tgatctgcaagaacggttttcttcagatttaagccagcatgctttaggtaggaaattt

SEQ ID NO: 467564 - DNA, 55 bp, Artificial
  Synthetic oligonucleotide
tgatctgctcaagttggcaggggacgtggagtccaaccctgggcccttcttcttc

SEQ ID NO: 467565 - DNA, 60 bp, Artificial
  Synthetic oligonucleotide
tgatctgctttataatcgattgtattttcgagaagcgtgtacaaatacgtggagttggag

SEQ ID NO: 467566 - DNA, 52 bp, Artificial
  Synthetic oligonucleotide
tgatctggaggaagaaagggtgcgggagttgtcctgcaagtcatcagacccc

SEQ ID NO: 467567 - DNA, 60 bp, Artificial
  Synthetic oligonucleotide
tgatctggagttatatgaggagacagatgtagcggatgacatgctaggctaagacctata

SEQ ID NO: 467568 - DNA, 60 bp, Artificial
  Synthetic oligonucleotide
tgatctggtgaagtcatctgaaagtcgggaagaatgtctagaggcacatgcggagatcat

SEQ ID NO: 467569 - DNA, 60 bp, Artificial
  Synthetic oligonucleotide
tgatctggtgctttgacagcagtctatcaagaagacacatagccagagagagatatccgg

SEQ ID NO: 467570 - DNA, 52 bp, Artificial
  Synthetic oligonucleotide
tgatctgtaagctttactaacgctaacgctggcattgctactaacccatact

SEQ ID NO: 467571 - DNA, 55 bp, Artificial
  Synthetic oligonucleotide
tgatctgtcaggtcttgagacaacaggggatggttttaccactgtcagttcgatg

SEQ ID NO: 467572 - DNA, 60 bp, Artificial
  Synthetic oligonucleotide
tgatcttaagaacatgggtggcgtcgctaaagctattgatgtgttcactggtggtaagtt

SEQ ID NO: 467573 - DNA, 60 bp, Artificial
  Synthetic oligonucleotide
tgatcttacaagcttctctaggagagggttgccaaatgtcctgaaagctcttagctggcc

SEQ ID NO: 467574 - DNA, 59 bp, Artificial
  Synthetic oligonucleotide
tgatcttagagaccgatatcaggtgttacgtaaattccatacgactgttgttggtggac

SEQ ID NO: 467575 - DNA, 60 bp, Artificial
  Synthetic oligonucleotide
tgatcttagtaagaattgcagtaagagagccagcaaactttgagtatgtgagagggttca

SEQ ID NO: 467576 - DNA, 60 bp, Artificial
  Synthetic oligonucleotide
tgatcttattattgtgaggattcccaggaatacacagccttggacgtcatttgataagtt

SEQ ID NO: 467577 - DNA, 52 bp, Artificial
  Synthetic oligonucleotide
tgatcttcaaatggtcgaaaccatcaataggtatatatctagtttggacaag

SEQ ID NO: 467578 - DNA, 55 bp, Artificial
  Synthetic oligonucleotide
tgatcttcgagatcgttatcaagtcttaaggaaatttacttcgacagtcacaggt

SEQ ID NO: 467579 - DNA, 60 bp, Artificial
  Synthetic oligonucleotide
tgatcttctcagggctagtgatgctcacagtatagggatttgcaaagtttgatttagtta

SEQ ID NO: 467580 - DNA, 60 bp, Artificial
  Synthetic oligonucleotide
tgatcttgcagcctcaggagatcccacaccacctgactcaataaaatcaccacaggcacc

SEQ ID NO: 467581 - DNA, 53 bp, Artificial
  Synthetic oligonucleotide
tgatcttgctatgtgttatggatcaacagtagcaaaccttgccaggggctcta

SEQ ID NO: 467582 - DNA, 56 bp, Artificial
  Synthetic oligonucleotide
tgatcttgggcgggagccgaaggtgagtgaaaccaccgaagtctaggggcaattcg

SEQ ID NO: 467583 - DNA, 60 bp, Artificial
  Synthetic oligonucleotide
tgatcttggtccagcaactgctcaaatggcccttcagttattcatcaaagattacaggta

SEQ ID NO: 467584 - DNA, 52 bp, Artificial
  Synthetic oligonucleotide
tgatctttctaggaaaaaggtaccatctaataaaacctcttgggcaggtcgt

SEQ ID NO: 467585 - DNA, 54 bp, Artificial
  Synthetic oligonucleotide
tgatgaaatggattttgccggggggaaatttttgaatcaatgtggtgatgtgga

SEQ ID NO: 467586 - DNA, 53 bp, Artificial
  Synthetic oligonucleotide
tgatgaacaatatcccctgtgaatcatcgatcagtgtgcaagcctcatacgat

SEQ ID NO: 467587 - DNA, 52 bp, Artificial
  Synthetic oligonucleotide
tgatgaacatagtgttaatcacactgtcgctcttggctatattgaagggcat

SEQ ID NO: 467588 - DNA, 55 bp, Artificial
  Synthetic oligonucleotide
tgatgaacctcggtaggcgtatagaaacgtaattgtccgatcgtataaaatcccc

SEQ ID NO: 467589 - DNA, 53 bp, Artificial
  Synthetic oligonucleotide
tgatgaacctgtccgaccctggacccctcgtcatccctgttccgatgccccgt

SEQ ID NO: 467590 - DNA, 60 bp, Artificial
  Synthetic oligonucleotide
tgatgaacggagggaggttaaaaaggtctcacataaagagatatgtctcagtgagtgcaa

SEQ ID NO: 467591 - DNA, 58 bp, Artificial
  Synthetic oligonucleotide
tgatgaacgggtttctgatatagcgatagcgatttacgtttacattagaaagcacgct

SEQ ID NO: 467592 - DNA, 56 bp, Artificial
  Synthetic oligonucleotide
tgatgaacgttcactacattagtagtttgtttttcaattagcattagtttaagtac

SEQ ID NO: 467593 - DNA, 60 bp, Artificial
  Synthetic oligonucleotide
tgatgaactcaagacagggatgatctttgctcaacttgtctaaatcatctagattggggt

SEQ ID NO: 467594 - DNA, 55 bp, Artificial
  Synthetic oligonucleotide
tgatgaagagatgcgcacagtggatttcaatccaaacaaaccagctcttccatat

SEQ ID NO: 467595 - DNA, 60 bp, Artificial
  Synthetic oligonucleotide
tgatgaagagttttgtgacatgctgcgtctaattgattacaacaaggccgctttaagtaa

SEQ ID NO: 467596 - DNA, 60 bp, Artificial
  Synthetic oligonucleotide
tgatgaagcctggacaggagatagataacagcgcgtcttacatgccatacctgattgata

SEQ ID NO: 467597 - DNA, 60 bp, Artificial
  Synthetic oligonucleotide
tgatgaagcgctccgatggaataggatcggtatcaccgacgagttagttaaggcggtcga

SEQ ID NO: 467598 - DNA, 53 bp, Artificial
  Synthetic oligonucleotide
tgatgaagggaaccaagtctattactatccgccccctaaaccagagggtttta

SEQ ID NO: 467599 - DNA, 60 bp, Artificial
  Synthetic oligonucleotide
tgatgaatctggccacctgggtgggcagtaatttggaagacccagcatccagggaattag

SEQ ID NO: 467600 - DNA, 55 bp, Artificial
  Synthetic oligonucleotide
tgatgaatctgtgacatgcgacatttcactagtccaggatgaaattagcgaggcg

SEQ ID NO: 467601 - DNA, 57 bp, Artificial
  Synthetic oligonucleotide
tgatgaatgatttcgaaaaacgattatctgacttggaaaaattttgcgccttcctcg

SEQ ID NO: 467602 - DNA, 55 bp, Artificial
  Synthetic oligonucleotide
tgatgacaacgcgctgaatgaatcattatgtactgaacaacaggatgacgagacc

SEQ ID NO: 467603 - DNA, 53 bp, Artificial
  Synthetic oligonucleotide
tgatgacacatacaggtacataacctcactggctactaaatgtcctaccaatg

SEQ ID NO: 467604 - DNA, 55 bp, Artificial
  Synthetic oligonucleotide
tgatgacacatgtgaaagtttgcaggcagtggaagaggcacctggggcgttgttt

SEQ ID NO: 467605 - DNA, 55 bp, Artificial
  Synthetic oligonucleotide
tgatgacatcactagcgacatttgcgagaatccttatatgtccctcactatggtt

SEQ ID NO: 467606 - DNA, 60 bp, Artificial
  Synthetic oligonucleotide
tgatgaccaggagtccagttgtgtacttcatcatgtctatgtcctttgtcagaccacgct

SEQ ID NO: 467607 - DNA, 60 bp, Artificial
  Synthetic oligonucleotide
tgatgaccgatgatagaagaacgatacaaagggggcaaagtggagaggcacttgatttta

SEQ ID NO: 467608 - DNA, 55 bp, Artificial
  Synthetic oligonucleotide
tgatgacgagcccgaaccaggtccagagctacacgatgtcgctcacggagcgcga

SEQ ID NO: 467609 - DNA, 56 bp, Artificial
  Synthetic oligonucleotide
tgatgacgaggacttttacccgtggacgcctgacccatcggacgtcttggtatttg

SEQ ID NO: 467610 - DNA, 55 bp, Artificial
  Synthetic oligonucleotide
tgatgacgcgcgctacgcgcgctgccttcggcagtcacacgtcacttacgtctca

SEQ ID NO: 467611 - DNA, 60 bp, Artificial
  Synthetic oligonucleotide
tgatgacgtcaatgtacagtgggttgaacatgagttaagagattttttgatgcatgaggg

SEQ ID NO: 467612 - DNA, 60 bp, Artificial
  Synthetic oligonucleotide
tgatgactaatgcactactacagacgcccagtcaaattgtatcaccgagagccttctaca

SEQ ID NO: 467613 - DNA, 60 bp, Artificial
  Synthetic oligonucleotide
tgatgacttcaatgctttagcgagttcagttgcattaggtgatatactttccctcgctat

SEQ ID NO: 467614 - DNA, 54 bp, Artificial
  Synthetic oligonucleotide
tgatgactttagatccatggaggcattttcaggtattttcaggtcgccgcatgg

SEQ ID NO: 467615 - DNA, 60 bp, Artificial
  Synthetic oligonucleotide
tgatgagagctaaggatgaggaaatcacgaatgagatattatcggagttgttcgtgaatg

SEQ ID NO: 467616 - DNA, 60 bp, Artificial
  Synthetic oligonucleotide
tgatgagaggaggagaagatataacatcaagagtgatagactttgaatctatatgggaaa

SEQ ID NO: 467617 - DNA, 54 bp, Artificial
  Synthetic oligonucleotide
tgatgagaggcccgatctcgatgagttgcccgacccctctgagcgagttcgtga

SEQ ID NO: 467618 - DNA, 60 bp, Artificial
  Synthetic oligonucleotide
tgatgagcagaatgtatgatgacggcccacagaaaacatttgctatcaaagtgaacccat

SEQ ID NO: 467619 - DNA, 57 bp, Artificial
  Synthetic oligonucleotide
tgatgagccaactgacgagaagttagtatcgatgcttgattatatcgtttacagcgc

SEQ ID NO: 467620 - DNA, 60 bp, Artificial
  Synthetic oligonucleotide
tgatgagccaagtggacagacagctgactggtttgcaattggtcagtacatcatagggtt

SEQ ID NO: 467621 - DNA, 60 bp, Artificial
  Synthetic oligonucleotide
tgatgagcctggtcattggcaacgcaatttacttcgtgtgaatgccccaattcaacctgg

SEQ ID NO: 467622 - DNA, 60 bp, Artificial
  Synthetic oligonucleotide
tgatgagcggttccagtgcacttctgacatcggccatggatactcttgccgcgaagaatc

SEQ ID NO: 467623 - DNA, 60 bp, Artificial
  Synthetic oligonucleotide
tgatgaggacaggagactatgcacaaattactaacatgctactgaataatcaaccagtgg

SEQ ID NO: 467624 - DNA, 60 bp, Artificial
  Synthetic oligonucleotide
tgatgaggagcaaagaacactgtaccagaatgtagggacatatatttctgtaggcacctc

SEQ ID NO: 467625 - DNA, 56 bp, Artificial
  Synthetic oligonucleotide
tgatgaggaggtctgagggacgaaccaatttagacttcaattaaggagaatcagga

SEQ ID NO: 467626 - DNA, 55 bp, Artificial
  Synthetic oligonucleotide
tgatgaggggacttatcacctcggaacacattctcgctattattcagcaacttgg

SEQ ID NO: 467627 - DNA, 60 bp, Artificial
  Synthetic oligonucleotide
tgatgaggttccaattaccaaagaagactgcttagcagcaatcactttagttgattcagg

SEQ ID NO: 467628 - DNA, 54 bp, Artificial
  Synthetic oligonucleotide
tgatgagtattcaactggtttcaattgcttgttctccgacccttatcaaaacca

SEQ ID NO: 467629 - DNA, 60 bp, Artificial
  Synthetic oligonucleotide
tgatgagtattgtctaagcccaaattgtgacttagattgctacccttattacccagccaa

SEQ ID NO: 467630 - DNA, 59 bp, Artificial
  Synthetic oligonucleotide
tgatgagtcaaatacgccacaagggtactacccgatatgggacgggtatgagacaaata

SEQ ID NO: 467631 - DNA, 60 bp, Artificial
  Synthetic oligonucleotide
tgatgagttcccctgtgcgtgaatccattgtctctgcacgtgaaggctacgtataccgtg

SEQ ID NO: 467632 - DNA, 56 bp, Artificial
  Synthetic oligonucleotide
tgatgatacaaagatgtcactccagcgtattcatgaggatcagtttggaccagaat

SEQ ID NO: 467633 - DNA, 60 bp, Artificial
  Synthetic oligonucleotide
tgatgatcacccagatcattaaaggtcaagcacttctgtttccccggtcaatgttgatat

SEQ ID NO: 467634 - DNA, 60 bp, Artificial
  Synthetic oligonucleotide
tgatgatcctgacgtcttacgtctgatgaagtctctgaccattcagagaaactacgtgtg

SEQ ID NO: 467635 - DNA, 60 bp, Artificial
  Synthetic oligonucleotide
tgatgatctggcattccaatttgaatgacgccacataccagagaactagggcactagtgc

SEQ ID NO: 467636 - DNA, 55 bp, Artificial
  Synthetic oligonucleotide
tgatgatgaactggtcccctacggcggcgttagtagtagcgcagctgctccggat

SEQ ID NO: 467637 - DNA, 60 bp, Artificial
  Synthetic oligonucleotide
tgatgatgctcaccgccctcaactttttttctctcaccgaaatcgaacatgtcaccatct

SEQ ID NO: 467638 - DNA, 60 bp, Artificial
  Synthetic oligonucleotide
tgatgatgttggccctggattgcaaaggaagattgttgggataccacctctaatttgaat

SEQ ID NO: 467639 - DNA, 60 bp, Artificial
  Synthetic oligonucleotide
tgatgattagcttcccatgctctaatgaagatgaactaatgaaatgtaagattgccgctg

SEQ ID NO: 467640 - DNA, 60 bp, Artificial
  Synthetic oligonucleotide
tgatgattggtctttaatttcaaagcttatcattactagcgttttacctaatatcattca

SEQ ID NO: 467641 - DNA, 60 bp, Artificial
  Synthetic oligonucleotide
tgatgatttcttggctgatcgctgccctttcctacctgagcctagagatcccaaagatgc

SEQ ID NO: 467642 - DNA, 55 bp, Artificial
  Synthetic oligonucleotide
tgatgatttgctgagaattaccgaccgttacccgctacgggttgaatttaaaggc

SEQ ID NO: 467643 - DNA, 55 bp, Artificial
  Synthetic oligonucleotide
tgatgcaaaaacaatgcacctgtcgatcgtcattgatcggcggctgttgtttgac

SEQ ID NO: 467644 - DNA, 55 bp, Artificial
  Synthetic oligonucleotide
tgatgcaacgcagcggctgccaccagtacccgatgcggaaggtgttcaaccgggt

SEQ ID NO: 467645 - DNA, 50 bp, Artificial
  Synthetic oligonucleotide
tgatgcaagatccgttgccctagattttatgcatggcgtggttttgggag

SEQ ID NO: 467646 - DNA, 60 bp, Artificial
  Synthetic oligonucleotide
tgatgcaagggctgagggcgcaccaacagaatcgaccctcattggcgataagcattaccc

SEQ ID NO: 467647 - DNA, 55 bp, Artificial
  Synthetic oligonucleotide
tgatgcaatgaacaaggccaagaggatgtacgaaacagtggtggacagaaatcct

SEQ ID NO: 467648 - DNA, 58 bp, Artificial
  Synthetic oligonucleotide
tgatgcacccactgaacctgatgcttcagctaatagattctatacactagagagcatc

SEQ ID NO: 467649 - DNA, 58 bp, Artificial
  Synthetic oligonucleotide
tgatgcactaacctacggtttgaatgaccgcatcagaatggataggcaagcagagtta

SEQ ID NO: 467650 - DNA, 51 bp, Artificial
  Synthetic oligonucleotide
tgatgcacttagctcgtgaagggaatgcgacacgggatggtgttcgggcaa

SEQ ID NO: 467651 - DNA, 55 bp, Artificial
  Synthetic oligonucleotide
tgatgcagccccggcagcttgttttccggcccgaggttttgtggaatcacccaat

SEQ ID NO: 467652 - DNA, 55 bp, Artificial
  Synthetic oligonucleotide
tgatgcagccgcccgcgtcactgccatactcggtagcctcactgtaacccagctc

SEQ ID NO: 467653 - DNA, 60 bp, Artificial
  Synthetic oligonucleotide
tgatgcatcaacgcagatatcaaatgttagtagaagtttacggttgcgtgaatttactac

SEQ ID NO: 467654 - DNA, 60 bp, Artificial
  Synthetic oligonucleotide
tgatgcatcctggagtctttctggttgggtctcaggactcttttcatggctaggtggaac

SEQ ID NO: 467655 - DNA, 56 bp, Artificial
  Synthetic oligonucleotide
tgatgcattccaggggcgccccacccgagataaaccgccgcgcgaccatttcccgg

SEQ ID NO: 467656 - DNA, 60 bp, Artificial
  Synthetic oligonucleotide
tgatgccaacaaccggaccggcgtccattccggacgacaccctggagaagcacactctca

SEQ ID NO: 467657 - DNA, 60 bp, Artificial
  Synthetic oligonucleotide
tgatgccaatgcaagacattcatgaatccatccgatggacgcgcgatccaaaaaacacac

SEQ ID NO: 467658 - DNA, 60 bp, Artificial
  Synthetic oligonucleotide
tgatgccacacgcgttcgggtggttaaatgtgattaagcgatcacagtcactaagctttc

SEQ ID NO: 467659 - DNA, 54 bp, Artificial
  Synthetic oligonucleotide
tgatgccagcctgagccctgtgtggttcgcttgtctaaaactgctactcgaaaa

SEQ ID NO: 467660 - DNA, 55 bp, Artificial
  Synthetic oligonucleotide
tgatgccaggcaatgtcctacgttacgttggtgggccgagatgatccatcgtgtg

SEQ ID NO: 467661 - DNA, 55 bp, Artificial
  Synthetic oligonucleotide
tgatgcccgcgttttcggtgggtggtttgtcccatacggtaccgactcagcggga

SEQ ID NO: 467662 - DNA, 60 bp, Artificial
  Synthetic oligonucleotide
tgatgccgacactgtcagtgggtggtttgtctcatagagttccaactcagcgtgaaacgt

SEQ ID NO: 467663 - DNA, 60 bp, Artificial
  Synthetic oligonucleotide
tgatgccgctcgccgtttaatcgacgaggctatatcatctgtcggaggatctaaatttga

SEQ ID NO: 467664 - DNA, 60 bp, Artificial
  Synthetic oligonucleotide
tgatgcctgctgtaatttggcactcagtgaggaccaattaaaagggttgcccatcgggaa

SEQ ID NO: 467665 - DNA, 60 bp, Artificial
  Synthetic oligonucleotide
tgatgcgcagtgatgagttcccctgtgcgcaaatccattcaatgcgcagtcgatgtgcag

SEQ ID NO: 467666 - DNA, 60 bp, Artificial
  Synthetic oligonucleotide
tgatgcgcctgtgtctaaggcctcgactgtgactggatttggacgcgggaccaatgatgt

SEQ ID NO: 467667 - DNA, 56 bp, Artificial
  Synthetic oligonucleotide
tgatgcgctgacgtcatggcgtgcaatcgtgaccgtttaaatgtcccgctgacgta

SEQ ID NO: 467668 - DNA, 60 bp, Artificial
  Synthetic oligonucleotide
tgatgcgctttcattaatgtattcgaccagtacgggcgggcctgcaagtattgcggccaa

SEQ ID NO: 467669 - DNA, 55 bp, Artificial
  Synthetic oligonucleotide
tgatgcggtctgtagtggtggtgattatacgttcgcattgccagtaggggcatgg

SEQ ID NO: 467670 - DNA, 53 bp, Artificial
  Synthetic oligonucleotide
tgatgctaaaagacttgttcctgtcaagattcaactcattgctcatacttgtg

SEQ ID NO: 467671 - DNA, 58 bp, Artificial
  Synthetic oligonucleotide
tgatgctaattttcggaccacgaagtcttactattagacttatgacgcaacactactg

SEQ ID NO: 467672 - DNA, 56 bp, Artificial
  Synthetic oligonucleotide
tgatgctacccgctgtcctagggccaaccctccaaaggaacctgaggacccctatg

SEQ ID NO: 467673 - DNA, 60 bp, Artificial
  Synthetic oligonucleotide
tgatgctagtcttagtccatttatgattagggaggcgggtagaatcatgagtgaattatc

SEQ ID NO: 467674 - DNA, 60 bp, Artificial
  Synthetic oligonucleotide
tgatgctatcgtggtagagctgtcgtggacaaataagtcggtgattagggtcagggaaag

SEQ ID NO: 467675 - DNA, 51 bp, Artificial
  Synthetic oligonucleotide
tgatgctatgcttggctggaccaaaggtcgtgctttggttggtggtcatcg

SEQ ID NO: 467676 - DNA, 60 bp, Artificial
  Synthetic oligonucleotide
tgatgctcaagatggagtctacacagcagatggctagttcgattattaacacttctttcg

SEQ ID NO: 467677 - DNA, 60 bp, Artificial
  Synthetic oligonucleotide
tgatgctcaagatggagtctactcagcagatggtcagttctatcattaacacctcttttg

SEQ ID NO: 467678 - DNA, 55 bp, Artificial
  Synthetic oligonucleotide
tgatgctcaggagatgggagaggaatgggagatcacaaacactggttcagatgcg

SEQ ID NO: 467679 - DNA, 58 bp, Artificial
  Synthetic oligonucleotide
tgatgctccttggcgattaacggcggggaccgccaagattagtcgaactggcaatagt

SEQ ID NO: 467680 - DNA, 60 bp, Artificial
  Synthetic oligonucleotide
tgatgctgaatcacctgggtccaaaacacttccgcctaactgatgaagatctttatacgg

SEQ ID NO: 467681 - DNA, 60 bp, Artificial
  Synthetic oligonucleotide
tgatgctgaatccccggggtctaatgcgctagttcctagcaggttgagttctctatatgg

SEQ ID NO: 467682 - DNA, 60 bp, Artificial
  Synthetic oligonucleotide
tgatgctgactttaggtccacaagggaatacacagtttggttgaggcttctgagcctctg

SEQ ID NO: 467683 - DNA, 60 bp, Artificial
  Synthetic oligonucleotide
tgatgctgcatgggccttacatctgctttgaagacgaatccggccctggttttgctgaac

SEQ ID NO: 467684 - DNA, 59 bp, Artificial
  Synthetic oligonucleotide
tgatgctgcccctattattgacaaacgtcaacccgctcctggcctcaaattagtccctc

SEQ ID NO: 467685 - DNA, 60 bp, Artificial
  Synthetic oligonucleotide
tgatgctgcttcgtgtgaatatgacagctgccctaagatggttaaagattttgaccagac

SEQ ID NO: 467686 - DNA, 60 bp, Artificial
  Synthetic oligonucleotide
tgatgctggatctagaaggatccacgtgcctgtctaatcggcgttttaattgttggtcca

SEQ ID NO: 467687 - DNA, 51 bp, Artificial
  Synthetic oligonucleotide
tgatgctgtagctgagattacgttggttaaacctaatccaattactcgaaa

SEQ ID NO: 467688 - DNA, 55 bp, Artificial
  Synthetic oligonucleotide
tgatgctgtggtggttatttttgctctcattggtgggggctggatgttatgggag

SEQ ID NO: 467689 - DNA, 60 bp, Artificial
  Synthetic oligonucleotide
tgatgcttataaccggataactagtagaattactgctagtgcggatcctgtatacacctt

SEQ ID NO: 467690 - DNA, 60 bp, Artificial
  Synthetic oligonucleotide
tgatgcttgactacgacaactttaactcgcatcactccaacagcgtccagagtatgatct

SEQ ID NO: 467691 - DNA, 60 bp, Artificial
  Synthetic oligonucleotide
tgatgcttgctcgcacatagtcatagagttcatgcgagggggcgagtagacccgagccca

SEQ ID NO: 467692 - DNA, 60 bp, Artificial
  Synthetic oligonucleotide
tgatgcttttcccgagagaagcatacacaagatcattcttgcctaacatatcagaagcca

SEQ ID NO: 467693 - DNA, 58 bp, Artificial
  Synthetic oligonucleotide
tgatggaacccgcagtaccatacatttgttcgaagttcttactctctgacgagttcgg

SEQ ID NO: 467694 - DNA, 59 bp, Artificial
  Synthetic oligonucleotide
tgatggaactaattcggatgataaagcgagggattaacgataggaatttctggagaggc

SEQ ID NO: 467695 - DNA, 60 bp, Artificial
  Synthetic oligonucleotide
tgatggaagacgacggtgtgtgtagaccaattggatatcttccaattggtgggtatctgt

SEQ ID NO: 467696 - DNA, 57 bp, Artificial
  Synthetic oligonucleotide
tgatggaagcacttgcagaccgtttaagtgcgtgccaggacaaaatattaactctgt

SEQ ID NO: 467697 - DNA, 55 bp, Artificial
  Synthetic oligonucleotide
tgatggaagcattacttcgagcgtgtcatgtcgcggaaaagaattatttacaact

SEQ ID NO: 467698 - DNA, 59 bp, Artificial
  Synthetic oligonucleotide
tgatggaatcgtgaacaggaagaatgtcaaagtgtgtgttggttttgaccccctgtaca

SEQ ID NO: 467699 - DNA, 60 bp, Artificial
  Synthetic oligonucleotide
tgatggaatggtttggctacgcagaatttgacttgactacttttgatatttgcgatcccg

SEQ ID NO: 467700 - DNA, 60 bp, Artificial
  Synthetic oligonucleotide
tgatggacaaccagttgatgcagtggaccaacgtcaatatcaagatgaacgcaaatcagt

SEQ ID NO: 467701 - DNA, 53 bp, Artificial
  Synthetic oligonucleotide
tgatggacaagaacactagacaaagatataccattgatgagattaccacgctc

SEQ ID NO: 467702 - DNA, 56 bp, Artificial
  Synthetic oligonucleotide
tgatggacatgatccgagctgctcatggggacactccgagaatcctcactgacaag

SEQ ID NO: 467703 - DNA, 60 bp, Artificial
  Synthetic oligonucleotide
tgatggacattggtgctctaaacacagttattcaccaaggaatggacgctacggctgctt

SEQ ID NO: 467704 - DNA, 58 bp, Artificial
  Synthetic oligonucleotide
tgatggaccaggattgcagaggaagatagtgggaattccacctttaatttgaatgggt

SEQ ID NO: 467705 - DNA, 59 bp, Artificial
  Synthetic oligonucleotide
tgatggacctaagtctattaaatgtgttagtaagtatcgtattagcgtgtacaagactc

SEQ ID NO: 467706 - DNA, 51 bp, Artificial
  Synthetic oligonucleotide
tgatggacgctgtggacttatctacaacacgatgcgcgcaaatccgctcgg

SEQ ID NO: 467707 - DNA, 55 bp, Artificial
  Synthetic oligonucleotide
tgatggacggaaggtcgggtctaagaccgttgaccaacgctacaactgggtagtc

SEQ ID NO: 467708 - DNA, 53 bp, Artificial
  Synthetic oligonucleotide
tgatggactcattcttgctgcaatttactcatcctttagcatctctgaacttg

SEQ ID NO: 467709 - DNA, 60 bp, Artificial
  Synthetic oligonucleotide
tgatggactcccctgtgcgtgaatccgtgatcatggcagtggatcgagcagtaatacgta

SEQ ID NO: 467710 - DNA, 55 bp, Artificial
  Synthetic oligonucleotide
tgatggactcgttcttgctgcaatttactcatcctgcagtgtgtcagaactcgtg

SEQ ID NO: 467711 - DNA, 54 bp, Artificial
  Synthetic oligonucleotide
tgatggagaagttactactgccattaggcatagagataatgttagagccatcca

SEQ ID NO: 467712 - DNA, 57 bp, Artificial
  Synthetic oligonucleotide
tgatggagggagaattcgagaacagaccatttattaaaagtgaaccagggaaaagca

SEQ ID NO: 467713 - DNA, 59 bp, Artificial
  Synthetic oligonucleotide
tgatggagtaacaggcgatgtcattcctgacccaccagtcgtaggacggttgggtttca

SEQ ID NO: 467714 - DNA, 57 bp, Artificial
  Synthetic oligonucleotide
tgatggagtgaggagtgaaggttacgagcaacctttgagcgggggttatttattgca

SEQ ID NO: 467715 - DNA, 60 bp, Artificial
  Synthetic oligonucleotide
tgatggagtggttgtgccgagattgctagatataacactacacgcttatgacaagaggaa

SEQ ID NO: 467716 - DNA, 60 bp, Artificial
  Synthetic oligonucleotide
tgatggagtgttgatcgtgaacactagtaagtaccccaacatgtatattcctgtcggagc

SEQ ID NO: 467717 - DNA, 60 bp, Artificial
  Synthetic oligonucleotide
tgatggatatgttttgaatgcaagagcctctggagatcagattttcgacgttgtcactcc

SEQ ID NO: 467718 - DNA, 59 bp, Artificial
  Synthetic oligonucleotide
tgatggatcaagtgagagaaagccggaacccaggaaacgccgaaattgaagatctcatt

SEQ ID NO: 467719 - DNA, 59 bp, Artificial
  Synthetic oligonucleotide
tgatggatctaaaagcagtgagaactttgagattatacattcccctttcgtacgcctgt

SEQ ID NO: 467720 - DNA, 60 bp, Artificial
  Synthetic oligonucleotide
tgatggatgcatctgcaatggcgttccggtgtctgctacatacataccatgcaacttgta

SEQ ID NO: 467721 - DNA, 60 bp, Artificial
  Synthetic oligonucleotide
tgatggatgcgggtcaagagggcagcctgcctccttttcccaacgacgtctttatggtgc

SEQ ID NO: 467722 - DNA, 60 bp, Artificial
  Synthetic oligonucleotide
tgatggatgttgcaactgcagcatatattctaggtgtgttccatcctgaaacgcgatgtg

SEQ ID NO: 467723 - DNA, 55 bp, Artificial
  Synthetic oligonucleotide
tgatggcaagtctagatcgaacattctggcaatattgcaaagttatgtgtatcag

SEQ ID NO: 467724 - DNA, 60 bp, Artificial
  Synthetic oligonucleotide
tgatggcaatgcaaaaatatatgcgtggatcgaaagacaaaccgttacgcttgttaagcc

SEQ ID NO: 467725 - DNA, 60 bp, Artificial
  Synthetic oligonucleotide
tgatggcatctcgtcaactccttgagggactgagacttgtagccgaactttcaactggag

SEQ ID NO: 467726 - DNA, 60 bp, Artificial
  Synthetic oligonucleotide
tgatggcattacactgaacaatgctgtcattcatgctgacatctttagttgcaaccctac

SEQ ID NO: 467727 - DNA, 58 bp, Artificial
  Synthetic oligonucleotide
tgatggcccaaccaggcacaaacctcctgattggacggccgttacatacacccctctc

SEQ ID NO: 467728 - DNA, 54 bp, Artificial
  Synthetic oligonucleotide
tgatggccgcgccctcctttgaaagtggttccccacctttttcactttcctaca

SEQ ID NO: 467729 - DNA, 56 bp, Artificial
  Synthetic oligonucleotide
tgatggcgggaacctcaaaggtttcccgcactggcaattattcgtctaatggtggt

SEQ ID NO: 467730 - DNA, 56 bp, Artificial
  Synthetic oligonucleotide
tgatggcttttcgatgcggaactatgcgtcacaggtgtgtaagcttcaacaggtaa

SEQ ID NO: 467731 - DNA, 60 bp, Artificial
  Synthetic oligonucleotide
tgatgggacgagcgttatctaaagagcaggaagggtcggctatagcgagtaaagtggctg

SEQ ID NO: 467732 - DNA, 60 bp, Artificial
  Synthetic oligonucleotide
tgatgggatgtacataccaatgttggaaagggaacgcatctgtgctatattggaatggag

SEQ ID NO: 467733 - DNA, 57 bp, Artificial
  Synthetic oligonucleotide
tgatgggcaatgtgggctaccgttagttgacgttaagaataaacacattgtcggaat

SEQ ID NO: 467734 - DNA, 58 bp, Artificial
  Synthetic oligonucleotide
tgatgggcgcccacttactactatccagcagtactctaagaccttctttgtcctaccc

SEQ ID NO: 467735 - DNA, 55 bp, Artificial
  Synthetic oligonucleotide
tgatgggtgcgtaccaaaagagtcgattgaacaaggaagcgtatgtgaaggattt

SEQ ID NO: 467736 - DNA, 60 bp, Artificial
  Synthetic oligonucleotide
tgatgggttacagagtaactcctgctgtgataaagttcatgttcactggactaataaaca

SEQ ID NO: 467737 - DNA, 58 bp, Artificial
  Synthetic oligonucleotide
tgatgggttatagaatcacacccgctgtaataaaattcatattcacgggacttataaa

SEQ ID NO: 467738 - DNA, 58 bp, Artificial
  Synthetic oligonucleotide
tgatgggtttggacaaaatgagcagagtcgcaaaagggaacctagaagtagtgaggga

SEQ ID NO: 467739 - DNA, 55 bp, Artificial
  Synthetic oligonucleotide
tgatggtaccgaggcaaaagaaagcttcagtttaatgcccggtatggccatcccc

SEQ ID NO: 467740 - DNA, 58 bp, Artificial
  Synthetic oligonucleotide
tgatggtagacgttgaaggatccactttgcttccatcgcggcgttttaattgttggtc

SEQ ID NO: 467741 - DNA, 60 bp, Artificial
  Synthetic oligonucleotide
tgatggtatcacctctagctgtaacatggtggaataggaacggaccaacaacaagcacag

SEQ ID NO: 467742 - DNA, 52 bp, Artificial
  Synthetic oligonucleotide
tgatggtcaagaagatgctagtggcgcagaggctacaaatgatatggacgaa

SEQ ID NO: 467743 - DNA, 59 bp, Artificial
  Synthetic oligonucleotide
tgatggtcattatgtttctttagattgcaaacataaagcaccgatacaaactaaatttc

SEQ ID NO: 467744 - DNA, 54 bp, Artificial
  Synthetic oligonucleotide
tgatggtcttaccgtaatgcttcggcatgttagttacagaggccagtggcatga

SEQ ID NO: 467745 - DNA, 60 bp, Artificial
  Synthetic oligonucleotide
tgatggtgaagggctaaacaaagggatggcaactgtggatgtcaaaaagctaagtgagat

SEQ ID NO: 467746 - DNA, 60 bp, Artificial
  Synthetic oligonucleotide
tgatggtgacccctgtgcgtgaatccatggtttgcacaacccaatgcgacgtaaatagaa

SEQ ID NO: 467747 - DNA, 60 bp, Artificial
  Synthetic oligonucleotide
tgatggtgaggttttacctcgcatcttagacatgtcaatcgcgtgttatgacatgaggaa

SEQ ID NO: 467748 - DNA, 60 bp, Artificial
  Synthetic oligonucleotide
tgatggtgcttggagtcttactaactgctgtagctggatttcctcggagtgttcatgagc

SEQ ID NO: 467749 - DNA, 55 bp, Artificial
  Synthetic oligonucleotide
tgatggtgggtgcttattcgggtataacaccgcctagtatcccgccagaacccag

SEQ ID NO: 467750 - DNA, 55 bp, Artificial
  Synthetic oligonucleotide
tgatggtgtcaagacacgtattagggttaaatcaatcgtgtatgcgcagtgtgtc

SEQ ID NO: 467751 - DNA, 59 bp, Artificial
  Synthetic oligonucleotide
tgatggtgtcagaataaggactactggatttaaggtggggtctctggtcgcgtgttcta

SEQ ID NO: 467752 - DNA, 51 bp, Artificial
  Synthetic oligonucleotide
tgatggttacaaaggcaaaaggggtaaaacccctcgcctacgtaagcgtta

SEQ ID NO: 467753 - DNA, 60 bp, Artificial
  Synthetic oligonucleotide
tgatggttatgatggagacacttcaagctccagatatggtacatcagttacaaaccacat

SEQ ID NO: 467754 - DNA, 60 bp, Artificial
  Synthetic oligonucleotide
tgatggttatggtgggcgctaccatgacggatgacataggtatgggagtgacttatcttg

SEQ ID NO: 467755 - DNA, 53 bp, Artificial
  Synthetic oligonucleotide
tgatggttccaacattgggtttatgcccaagtaacagaaaaaagcaccttgtt

SEQ ID NO: 467756 - DNA, 51 bp, Artificial
  Synthetic oligonucleotide
tgatggttgcccttatttgtgtgctatggtacatgattcaacagccagtac

SEQ ID NO: 467757 - DNA, 60 bp, Artificial
  Synthetic oligonucleotide
tgatggttggactgatactgcacatggatcaggaataatacctatgaaggctgatcttga

SEQ ID NO: 467758 - DNA, 52 bp, Artificial
  Synthetic oligonucleotide
tgatggttgggattattacgatggtatggagctgagcacttcatgtggttat

SEQ ID NO: 467759 - DNA, 60 bp, Artificial
  Synthetic oligonucleotide
tgatgtaaatgccattgacatcgaagaaccaagtggtcagacagcagattggtatactat

SEQ ID NO: 467760 - DNA, 56 bp, Artificial
  Synthetic oligonucleotide
tgatgtaacgtgtggtgacctaactatggcgcagacacaatcagctagttcgtcag

SEQ ID NO: 467761 - DNA, 55 bp, Artificial
  Synthetic oligonucleotide
tgatgtacatcgttatgtagactcgtttctcgtccatactaattgctcagctggg

SEQ ID NO: 467762 - DNA, 60 bp, Artificial
  Synthetic oligonucleotide
tgatgtaccctgcgtcgtgacaccctttaagatagtaggaggtcataagcgcatagtgca

SEQ ID NO: 467763 - DNA, 59 bp, Artificial
  Synthetic oligonucleotide
tgatgtacgacgtccacatgaggatcgttgccgcttaaacgttgagcggccttctccgt

SEQ ID NO: 467764 - DNA, 59 bp, Artificial
  Synthetic oligonucleotide
tgatgtatacagagacgaagcattaaacaaccggtttcagatcaaaggtgtcgaattga

SEQ ID NO: 467765 - DNA, 60 bp, Artificial
  Synthetic oligonucleotide
tgatgtatacagagacgaggcattaaacaatcggttccagatcaaaggtgttcagctgaa

SEQ ID NO: 467766 - DNA, 60 bp, Artificial
  Synthetic oligonucleotide
tgatgtatatactgtgctacgaccggtatttgctatacatggggtaaatccaatgcctgg

SEQ ID NO: 467767 - DNA, 60 bp, Artificial
  Synthetic oligonucleotide
tgatgtatgttcaacgtagagagtggacaacagcgataggcggtaacatccagttagtag

SEQ ID NO: 467768 - DNA, 58 bp, Artificial
  Synthetic oligonucleotide
tgatgtcaagggctttgcacctttctccaaagacaatgggataagaattggttccagg

SEQ ID NO: 467769 - DNA, 60 bp, Artificial
  Synthetic oligonucleotide
tgatgtcacaatcccgcactcgcgagatactaacgagaaccactgtggaccatatggcca

SEQ ID NO: 467770 - DNA, 58 bp, Artificial
  Synthetic oligonucleotide
tgatgtcacacgtggcaatggtataacccaccgtgtcggtaagcgtttctgcgttaag

SEQ ID NO: 467771 - DNA, 60 bp, Artificial
  Synthetic oligonucleotide
tgatgtcaccctcacagggacccgacgctccgtgaagctagagacagcgcatgcagccca

SEQ ID NO: 467772 - DNA, 60 bp, Artificial
  Synthetic oligonucleotide
tgatgtcatacaggatatgcgtgaaacgcacaaacggcctatggagtatttatatgagtg

SEQ ID NO: 467773 - DNA, 55 bp, Artificial
  Synthetic oligonucleotide
tgatgtcatcatggaggactgcagtacaccctctctctgtgggagtagccgagag

SEQ ID NO: 467774 - DNA, 60 bp, Artificial
  Synthetic oligonucleotide
tgatgtcatttgcggggacgctcgaagtccacaccctcgggcgcacaatgtcaacgtacc

SEQ ID NO: 467775 - DNA, 56 bp, Artificial
  Synthetic oligonucleotide
tgatgtccctaacaacgaacccccaggacaaagtcaacaaccagctggtgaccaaa

SEQ ID NO: 467776 - DNA, 51 bp, Artificial
  Synthetic oligonucleotide
tgatgtcgaaaattgatttcaccatcgcttacgataagctgatgactgttg

SEQ ID NO: 467777 - DNA, 50 bp, Artificial
  Synthetic oligonucleotide
tgatgtcgcaacatgtcgtttctacactcttgaatcagtaaagtgggaga

SEQ ID NO: 467778 - DNA, 60 bp, Artificial
  Synthetic oligonucleotide
tgatgtcggaatttggagtggatctctgaaggctgaactgcgtccagttgagaaagtgag

SEQ ID NO: 467779 - DNA, 55 bp, Artificial
  Synthetic oligonucleotide
tgatgtcggatctgcgtcagctcataaggagagagattctagctcttgtagcgac

SEQ ID NO: 467780 - DNA, 60 bp, Artificial
  Synthetic oligonucleotide
tgatgtcggtaaatatattgatcagcgatataagcagaacatcatgcgagatattcgccc

SEQ ID NO: 467781 - DNA, 55 bp, Artificial
  Synthetic oligonucleotide
tgatgtcggttgcattatgtgctgtttcgtactatccgcgactacgcgagatcgg

SEQ ID NO: 467782 - DNA, 60 bp, Artificial
  Synthetic oligonucleotide
tgatgtcgtagaggggaggttaatgacagagaccgctatgaccattgatgctaggtatgc

SEQ ID NO: 467783 - DNA, 55 bp, Artificial
  Synthetic oligonucleotide
tgatgtcgtagtcgattttggaatgaaagtatcaccattcttggacgtggataac

SEQ ID NO: 467784 - DNA, 55 bp, Artificial
  Synthetic oligonucleotide
tgatgtcgtggctgtaaagacagatggttcaaatatatctactcaatggcctagt

SEQ ID NO: 467785 - DNA, 59 bp, Artificial
  Synthetic oligonucleotide
tgatgtcgtgggtcatgttccctggcctcttgtcgtggttggtgatttcgaaatagagg

SEQ ID NO: 467786 - DNA, 52 bp, Artificial
  Synthetic oligonucleotide
tgatgtcgttgatggagtcaatcataagcttgatgtcactacaactacttgc

SEQ ID NO: 467787 - DNA, 60 bp, Artificial
  Synthetic oligonucleotide
tgatgtctgaaagttacacctagtatcgatcgtaattcggtccgatcgtgtatgttgcca

SEQ ID NO: 467788 - DNA, 59 bp, Artificial
  Synthetic oligonucleotide
tgatgtctgtagttgtagtccgtgataaatctccaaagatttattctgcgacccaaccc

SEQ ID NO: 467789 - DNA, 51 bp, Artificial
  Synthetic oligonucleotide
tgatgtcttgccttcccaacgagtgttggtagtcacggatcgaagagatcg

SEQ ID NO: 467790 - DNA, 60 bp, Artificial
  Synthetic oligonucleotide
tgatgtgacaactcttgtggtggacactgacaacgttgctaatcccacaaacattagcaa

SEQ ID NO: 467791 - DNA, 60 bp, Artificial
  Synthetic oligonucleotide
tgatgtgacactagagggactataccaggaacacttactatggagaaattcctggtcaaa

SEQ ID NO: 467792 - DNA, 60 bp, Artificial
  Synthetic oligonucleotide
tgatgtgactaatcttaaacgtgacgtatcgaatcagggtcttcaaatgacgagtctcga

SEQ ID NO: 467793 - DNA, 54 bp, Artificial
  Synthetic oligonucleotide
tgatgtgactgaagctactagggtaaggcctgcacaagttggattttgtcaacc

SEQ ID NO: 467794 - DNA, 60 bp, Artificial
  Synthetic oligonucleotide
tgatgtgagcgccgttaaggccgctatgaggccggactatagccatatcaacttcatctt

SEQ ID NO: 467795 - DNA, 55 bp, Artificial
  Synthetic oligonucleotide
tgatgtgcaaaagctggtagggaaattaaattgggcagcacaagcatacccaggt

SEQ ID NO: 467796 - DNA, 51 bp, Artificial
  Synthetic oligonucleotide
tgatgtgcaaattcaacaatctatatgttgatgaggggattgtgggtgaag

SEQ ID NO: 467797 - DNA, 60 bp, Artificial
  Synthetic oligonucleotide
tgatgtgcacccgatcgtcaggattgaagacgttaaaactcaacgacctagtgcaagtcg

SEQ ID NO: 467798 - DNA, 55 bp, Artificial
  Synthetic oligonucleotide
tgatgtgcttggttctgagtttgctccagctgtctccgcaccgggagtgggcgag

SEQ ID NO: 467799 - DNA, 60 bp, Artificial
  Synthetic oligonucleotide
tgatgtggagtttgttcacgaagtggggcaacacaaatgtatctcatcaaggaaagaata

SEQ ID NO: 467800 - DNA, 55 bp, Artificial
  Synthetic oligonucleotide
tgatgtggcgcagtacaagtacagaaacgttcccatcaccaagcgagcttgggca

SEQ ID NO: 467801 - DNA, 55 bp, Artificial
  Synthetic oligonucleotide
tgatgtggctggtgtacgacactactcccggcggaaacgcacccaccacccagga

SEQ ID NO: 467802 - DNA, 60 bp, Artificial
  Synthetic oligonucleotide
tgatgtgggagattaatggcccggagtcggtgctagtcaatacctatcaatggatcatca

SEQ ID NO: 467803 - DNA, 60 bp, Artificial
  Synthetic oligonucleotide
tgatgtggtcgtgtgtgccaccgacgccctcatgactggctacacgggtgactttgactc

SEQ ID NO: 467804 - DNA, 60 bp, Artificial
  Synthetic oligonucleotide
tgatgtggttgtggagcaggccaagcactctgcatggatgtatgaagctttgacaggaaa

SEQ ID NO: 467805 - DNA, 60 bp, Artificial
  Synthetic oligonucleotide
tgatgtgtctgcattatatcggagaattaatcagtatctgatattaaccccagacggata

SEQ ID NO: 467806 - DNA, 55 bp, Artificial
  Synthetic oligonucleotide
tgatgtgtttccaggtagtaaagaaccagcagtcctctctgatcatgatcccagg

SEQ ID NO: 467807 - DNA, 55 bp, Artificial
  Synthetic oligonucleotide
tgatgttacgctcaacctcatcaaccctgtcgaaagcagggttgcccgtgttgtg

SEQ ID NO: 467808 - DNA, 58 bp, Artificial
  Synthetic oligonucleotide
tgatgttagagtgaaacttagtggtgggattctcttgactaagactaaccgtggaggc

SEQ ID NO: 467809 - DNA, 50 bp, Artificial
  Synthetic oligonucleotide
tgatgttatcggggcaaaattttcccctagtatatggtattattagggga

SEQ ID NO: 467810 - DNA, 60 bp, Artificial
  Synthetic oligonucleotide
tgatgttatttgggctggatcatagagggcctcagcagttggacatttctgacactaaag

SEQ ID NO: 467811 - DNA, 60 bp, Artificial
  Synthetic oligonucleotide
tgatgttccgcgtggctgtgaaggcccatgtaaggttcaatcttatgaacagcgagatga

SEQ ID NO: 467812 - DNA, 55 bp, Artificial
  Synthetic oligonucleotide
tgatgttgatcctggggacccgtagactccagctgacggcggaatgggccggagt

SEQ ID NO: 467813 - DNA, 54 bp, Artificial
  Synthetic oligonucleotide
tgatgttgatggttacgggagagggtttgacatcggattcactgaggaatccta

SEQ ID NO: 467814 - DNA, 58 bp, Artificial
  Synthetic oligonucleotide
tgatgttgctccttatttaccaagtataccattatcacctctttacccaactgaagta

SEQ ID NO: 467815 - DNA, 60 bp, Artificial
  Synthetic oligonucleotide
tgatgttgtccgccgcgggaattaacctcggccctatatcgccagattatcaacagcata

SEQ ID NO: 467816 - DNA, 50 bp, Artificial
  Synthetic oligonucleotide
tgatgttgtgattccgtcatagcagtgattgcagatctcaatcaggagac

SEQ ID NO: 467817 - DNA, 60 bp, Artificial
  Synthetic oligonucleotide
tgatgtttactggactctaaggcacacttacgactggagtgttagaatgacatactcgcc

SEQ ID NO: 467818 - DNA, 60 bp, Artificial
  Synthetic oligonucleotide
tgatgtttattcattgcctccagatcctaaatattttgatggttatgatcagcaaagtgt

SEQ ID NO: 467819 - DNA, 60 bp, Artificial
  Synthetic oligonucleotide
tgatgtttctggattcagcttagattatggattctctgtgatgggaaaaactacttccta

SEQ ID NO: 467820 - DNA, 52 bp, Artificial
  Synthetic oligonucleotide
tgatgttttccgtgcctctttcccgtttgacggtcaacctatacaccccgcc

SEQ ID NO: 467821 - DNA, 60 bp, Artificial
  Synthetic oligonucleotide
tgatgttttgatccctatgcttgggcaatggccttcgttgatggatgttgcaactgcagc

SEQ ID NO: 467822 - DNA, 55 bp, Artificial
  Synthetic oligonucleotide
tgatgtttttaagcggtatggtcccaacgcgaaaggtggacgtggagaaaagatc

SEQ ID NO: 467823 - DNA, 60 bp, Artificial
  Synthetic oligonucleotide
tgattaaagcttgtgaaacatgccacaacaatgactctatattaaacttagcaagtttaa

SEQ ID NO: 467824 - DNA, 56 bp, Artificial
  Synthetic oligonucleotide
tgattaactcaaaaaagtcatcgcttgagggcaagcaattgagccttggccagtcc

SEQ ID NO: 467825 - DNA, 50 bp, Artificial
  Synthetic oligonucleotide
tgattaagcgttgggagaccatgtcagagtcgatcgaaaggagagttaca

SEQ ID NO: 467826 - DNA, 55 bp, Artificial
  Synthetic oligonucleotide
tgattaaggccgtgggcagtgctcacgccagagcgatgggttgggtagcgccgtt

SEQ ID NO: 467827 - DNA, 58 bp, Artificial
  Synthetic oligonucleotide
tgattaataacgccgatgtcgggagactgattttctctggtgaggcccttacctacaa

SEQ ID NO: 467828 - DNA, 50 bp, Artificial
  Synthetic oligonucleotide
tgattaattccaagattgatgatcaaataactgacatatgggcatacaat

SEQ ID NO: 467829 - DNA, 55 bp, Artificial
  Synthetic oligonucleotide
tgattacacggtcataccaagaggagcgttgagcagcggcagaagagattactcg

SEQ ID NO: 467830 - DNA, 58 bp, Artificial
  Synthetic oligonucleotide
tgattacactaattattggtctaatctgtctgagcgaaagggttaaaacaagctcgag

SEQ ID NO: 467831 - DNA, 60 bp, Artificial
  Synthetic oligonucleotide
tgattacatgcaatcattgaggaggtatgaagaggcaacaatatgtgaagacagagtgct

SEQ ID NO: 467832 - DNA, 60 bp, Artificial
  Synthetic oligonucleotide
tgattaccaaccatcctgttgaagcaaccgttctgcgaggattgccggcatattccaata

SEQ ID NO: 467833 - DNA, 60 bp, Artificial
  Synthetic oligonucleotide
tgattacccattttgcagactcattcatagattcattatctaggtcagcctttttgcagt

SEQ ID NO: 467834 - DNA, 50 bp, Artificial
  Synthetic oligonucleotide
tgattaccgttcttaatgagaacggattagacactcagtgtgatctaaag

SEQ ID NO: 467835 - DNA, 60 bp, Artificial
  Synthetic oligonucleotide
tgattacctacttatgtttgtgtactattgttggcttatgcgatactttcgttgagactc

SEQ ID NO: 467836 - DNA, 58 bp, Artificial
  Synthetic oligonucleotide
tgattacgagggtgatctaacatgtgtcagtgacatcagaaaagtgatgaccgactac

SEQ ID NO: 467837 - DNA, 50 bp, Artificial
  Synthetic oligonucleotide
tgattactatccagacagataccaatcacacgtcctactcggtgttggac

SEQ ID NO: 467838 - DNA, 60 bp, Artificial
  Synthetic oligonucleotide
tgattactatgctgaataattatgtccagggtattggtgatagtcagagagcgaacaacg

SEQ ID NO: 467839 - DNA, 51 bp, Artificial
  Synthetic oligonucleotide
tgattactctagatgggactcaacacagcagagggctgtactgagtgcagc

SEQ ID NO: 467840 - DNA, 58 bp, Artificial
  Synthetic oligonucleotide
tgattactttcgagagtaacggtggacttttagctccaagatatgggtacataattga

SEQ ID NO: 467841 - DNA, 59 bp, Artificial
  Synthetic oligonucleotide
tgattagaccaaacatagtggttgaacctgtaggaccttcagaattggtgccaatagac

SEQ ID NO: 467842 - DNA, 60 bp, Artificial
  Synthetic oligonucleotide
tgattagcctagtgaaacccctcaatctggcaatgatcattgacaatcacgaaaattcgc

SEQ ID NO: 467843 - DNA, 60 bp, Artificial
  Synthetic oligonucleotide
tgattaggggtgcagttggctcagggaaatcaacaggtttaccacatcatctctcgaaga

SEQ ID NO: 467844 - DNA, 57 bp, Artificial
  Synthetic oligonucleotide
tgattagtactgaacctgatgtctattacatcgggaagctagctggtacttttgttc

SEQ ID NO: 467845 - DNA, 60 bp, Artificial
  Synthetic oligonucleotide
tgattatattaacacaattatacaaacgatgacgcccagacatcgggctatataccctga

SEQ ID NO: 467846 - DNA, 60 bp, Artificial
  Synthetic oligonucleotide
tgattatcccaagtattcagaagagtccaagttgaatcgagaggagatagatggagtgaa

SEQ ID NO: 467847 - DNA, 51 bp, Artificial
  Synthetic oligonucleotide
tgattatcccgttggtaccgctacgtccaggttctagtggcattaattctg

SEQ ID NO: 467848 - DNA, 57 bp, Artificial
  Synthetic oligonucleotide
tgattatcggtcagctgaggttctgtcacgaatggcttttgcaccacatggcgaaga

SEQ ID NO: 467849 - DNA, 60 bp, Artificial
  Synthetic oligonucleotide
tgattatctgtcaactagaatgtttagctatgacagtgtgataacaatggaactagacaa

SEQ ID NO: 467850 - DNA, 55 bp, Artificial
  Synthetic oligonucleotide
tgattatgctacgactgatgtcgtaactatgcgtcctccgacttacctctccgct

SEQ ID NO: 467851 - DNA, 60 bp, Artificial
  Synthetic oligonucleotide
tgattatgggcctgaacagacacatatggatatgaaagcgctaggtaaattgatgtctga

SEQ ID NO: 467852 - DNA, 55 bp, Artificial
  Synthetic oligonucleotide
tgattattatgggagtaccgacaagatgtcgggagtgtcaagacacgacacttag

SEQ ID NO: 467853 - DNA, 60 bp, Artificial
  Synthetic oligonucleotide
tgattattcgaagagcaaaccaggcaggcattgtgagagctgacaaggataacgtaagga

SEQ ID NO: 467854 - DNA, 59 bp, Artificial
  Synthetic oligonucleotide
tgattattgtggtaaagacggcgaaatacttaccatgatcggtactccgagtgataata

SEQ ID NO: 467855 - DNA, 58 bp, Artificial
  Synthetic oligonucleotide
tgattcaagaagcttctttatgtcttcggacccttggcaagtgataaccatattccgg

SEQ ID NO: 467856 - DNA, 60 bp, Artificial
  Synthetic oligonucleotide
tgattcaagaataccgaagcgactggcgagacagactttcccaccatgagagatatggcg

SEQ ID NO: 467857 - DNA, 55 bp, Artificial
  Synthetic oligonucleotide
tgattcaagaggtagacttcagacacgaggaagagcgaaagtaagcctaggcagt

SEQ ID NO: 467858 - DNA, 55 bp, Artificial
  Synthetic oligonucleotide
tgattcaatatcagtattgggagtcaaaatcatgccgcgcgcacatgtagttgac

SEQ ID NO: 467859 - DNA, 60 bp, Artificial
  Synthetic oligonucleotide
tgattcaatccttaggatgggatagagaaatagtacctgtatatgtcaatgatactagcc

SEQ ID NO: 467860 - DNA, 59 bp, Artificial
  Synthetic oligonucleotide
tgattcagcatctttcgaagctatataaacgtggattttcttatagagtaaacgactct

SEQ ID NO: 467861 - DNA, 60 bp, Artificial
  Synthetic oligonucleotide
tgattcaggtagatacattaataccgatgaataacaccactgctacagatgaggttggaa

SEQ ID NO: 467862 - DNA, 59 bp, Artificial
  Synthetic oligonucleotide
tgattcagtatagcagagtaataacataactcaagcgaaaaattgtaggtaggaaaata

SEQ ID NO: 467863 - DNA, 60 bp, Artificial
  Synthetic oligonucleotide
tgattcagtctcaccaccaattcatcagccagtctgactcgacccacaatgtagatcacg

SEQ ID NO: 467864 - DNA, 59 bp, Artificial
  Synthetic oligonucleotide
tgattcatatgacttgtataataagaatggtgttaaactagagataacagttgttaagt

SEQ ID NO: 467865 - DNA, 58 bp, Artificial
  Synthetic oligonucleotide
tgattcatgcaacatgcccggatgtggggtttccgtccgcctcacgtaaggggcgggc

SEQ ID NO: 467866 - DNA, 60 bp, Artificial
  Synthetic oligonucleotide
tgattcattgacacacaaaacgctcaacttttcatcgtgaatgctatcatcatccatcgt

SEQ ID NO: 467867 - DNA, 60 bp, Artificial
  Synthetic oligonucleotide
tgattcattgatggatccagcaattctaacttcattgtcatcaaatttaaatgcagttat

SEQ ID NO: 467868 - DNA, 59 bp, Artificial
  Synthetic oligonucleotide
tgattccaaacagatacctttcattaatagggttgagtcaattaaacttgaatatgcca

SEQ ID NO: 467869 - DNA, 60 bp, Artificial
  Synthetic oligonucleotide
tgattccgaacaaatagcgttctgttctcgtgatgcatcctttgatatgcgtcattcaac

SEQ ID NO: 467870 - DNA, 60 bp, Artificial
  Synthetic oligonucleotide
tgattccgcatctgactgggccgttcctattgtacttctggaagcccatgattcaccagg

SEQ ID NO: 467871 - DNA, 58 bp, Artificial
  Synthetic oligonucleotide
tgattccgtgttcccagaaccctccctccgaatttctgtggcgggagctgagttggca

SEQ ID NO: 467872 - DNA, 56 bp, Artificial
  Synthetic oligonucleotide
tgattccgtgttcccaggatcctccctccgatttctgtggcgggagctgagttggc

SEQ ID NO: 467873 - DNA, 51 bp, Artificial
  Synthetic oligonucleotide
tgattcgaaagaacgttgggaataacagcgggcagccaagcacggtcgtag

SEQ ID NO: 467874 - DNA, 55 bp, Artificial
  Synthetic oligonucleotide
tgattcgaacgatgaagatggattcacgctaatacagatccggaatcccttagcc

SEQ ID NO: 467875 - DNA, 53 bp, Artificial
  Synthetic oligonucleotide
tgattcgaacttgacacgtaacgcgcttagcacctaactgctgcgcttaccac

SEQ ID NO: 467876 - DNA, 50 bp, Artificial
  Synthetic oligonucleotide
tgattcgcactgaattggcagctctactggcggatccactgattgtcgat

SEQ ID NO: 467877 - DNA, 53 bp, Artificial
  Synthetic oligonucleotide
tgattcggaccaaagttcggtatcccttgtggaccaaaaacgcacaaagggac

SEQ ID NO: 467878 - DNA, 60 bp, Artificial
  Synthetic oligonucleotide
tgattcggtggtcctctgcagcgactaccgacagagccgcaatgcagctgccttaatcgc

SEQ ID NO: 467879 - DNA, 53 bp, Artificial
  Synthetic oligonucleotide
tgattcgtagaagggacaataataagcgagcattctatgttgttcaattccta

SEQ ID NO: 467880 - DNA, 60 bp, Artificial
  Synthetic oligonucleotide
tgattctacacctcagtctaaggtggagtgcttgaacgaatattgggcttgtgagtcagt

SEQ ID NO: 467881 - DNA, 60 bp, Artificial
  Synthetic oligonucleotide
tgattctaccaccatgagtgacgttttcaatagtccacaggcgcgaagcaagatatcagc

SEQ ID NO: 467882 - DNA, 60 bp, Artificial
  Synthetic oligonucleotide
tgattctatattagcagccattagtgttggcactttgcgccagcacattggttcgcttca

SEQ ID NO: 467883 - DNA, 60 bp, Artificial
  Synthetic oligonucleotide
tgattctcgctgcagaactcaagtgttttgggaacacagctgttgcaaagtgcaatgtca

SEQ ID NO: 467884 - DNA, 60 bp, Artificial
  Synthetic oligonucleotide
tgattctcttgggccagcactcaacatgtggacctacctgcaaactgtcaatgcactcca

SEQ ID NO: 467885 - DNA, 58 bp, Artificial
  Synthetic oligonucleotide
tgattctgagtctcaactaactctcctacaggtttgcgaatcgaaatccgacctcccg

SEQ ID NO: 467886 - DNA, 60 bp, Artificial
  Synthetic oligonucleotide
tgattctggcagaatggcggatcacaatgcagatgtgtgggttaagaagcggttggaaga

SEQ ID NO: 467887 - DNA, 60 bp, Artificial
  Synthetic oligonucleotide
tgattgaattgtatctggacggttatgatgtctttctccgacaggaatggccggttgtgg

SEQ ID NO: 467888 - DNA, 55 bp, Artificial
  Synthetic oligonucleotide
tgattgaattgtctctggtgattttcacgtcgatggtaaactccatccccttctc

SEQ ID NO: 467889 - DNA, 60 bp, Artificial
  Synthetic oligonucleotide
tgattgacagaccctatgttctgctagctgttctgttcgtcatgtttctgagcttgatcg

SEQ ID NO: 467890 - DNA, 60 bp, Artificial
  Synthetic oligonucleotide
tgattgacagataatagctacaccccgcatcaagatctactctcctcctcctgatgcgtc

SEQ ID NO: 467891 - DNA, 56 bp, Artificial
  Synthetic oligonucleotide
tgattgaccagaagctgccggcctggaactaccaaggcaccgagttggcgctatgg

SEQ ID NO: 467892 - DNA, 59 bp, Artificial
  Synthetic oligonucleotide
tgattgacctacagagtgcgagactcccggtgtataccaggaagactttcgaacgtgaa

SEQ ID NO: 467893 - DNA, 56 bp, Artificial
  Synthetic oligonucleotide
tgattgacggtggagtagagtggttcctcaatggagacgtagacggcgtttttttg

SEQ ID NO: 467894 - DNA, 54 bp, Artificial
  Synthetic oligonucleotide
tgattgagaggtttgtgtcattagcaattgacgcctacccacttacaaagcacc

SEQ ID NO: 467895 - DNA, 60 bp, Artificial
  Synthetic oligonucleotide
tgattgataagaaatatgagcagccgcactccaaatctatccttcgtcgtctactacgtt

SEQ ID NO: 467896 - DNA, 59 bp, Artificial
  Synthetic oligonucleotide
tgattgatccgggagaggtttttgacgaccccatcgatcctattgagtcggaagcagag

SEQ ID NO: 467897 - DNA, 55 bp, Artificial
  Synthetic oligonucleotide
tgattgatgattcggtgattacaccaaaattgcctgctaatgaggatcctgtgga

SEQ ID NO: 467898 - DNA, 60 bp, Artificial
  Synthetic oligonucleotide
tgattgatggcgcgtacatatcaactgatgctgagtacggaaccgtagcgcattgggtgg

SEQ ID NO: 467899 - DNA, 60 bp, Artificial
  Synthetic oligonucleotide
tgattgcaaaaacagagagttttgacatttgtagtagacacactactcatcatttttgta

SEQ ID NO: 467900 - DNA, 55 bp, Artificial
  Synthetic oligonucleotide
tgattgcaattattagggttcttaggatataaataacacgtcaccgaggctggca

SEQ ID NO: 467901 - DNA, 60 bp, Artificial
  Synthetic oligonucleotide
tgattgccagtctctctgggcccccatgaattctttgaaatgctttagataatgggggtc

SEQ ID NO: 467902 - DNA, 60 bp, Artificial
  Synthetic oligonucleotide
tgattgccatgcactctgtaagagagggcggtgtcgtgatcatcaaagtactgtatgcaa

SEQ ID NO: 467903 - DNA, 56 bp, Artificial
  Synthetic oligonucleotide
tgattgccccctcctacacaaaagaggagtcatgttcacctgcaatcgcacccaga

SEQ ID NO: 467904 - DNA, 59 bp, Artificial
  Synthetic oligonucleotide
tgattgccccgggagttgaagccgtgaccacacgcgttgagaaaaacgtggatcagatc

SEQ ID NO: 467905 - DNA, 57 bp, Artificial
  Synthetic oligonucleotide
tgattgcggctttcctccttaaggaggttaagcttaaggcgccctctgtagatgggc

SEQ ID NO: 467906 - DNA, 57 bp, Artificial
  Synthetic oligonucleotide
tgattgctcatgtacgaaataaatgagccgtttggaactcgataatttcccttagct

SEQ ID NO: 467907 - DNA, 60 bp, Artificial
  Synthetic oligonucleotide
tgattgctgtccacctcttgcacttctcccatcgatctggaattctccccagtcggagaa

SEQ ID NO: 467908 - DNA, 53 bp, Artificial
  Synthetic oligonucleotide
tgattggaccgaagacagcgatggtggtaacatgaaacaatataaccaaaagg

SEQ ID NO: 467909 - DNA, 60 bp, Artificial
  Synthetic oligonucleotide
tgattggacggtgtctggaatgtccaggtacgagatttatgccgctgccggtgaaatata

SEQ ID NO: 467910 - DNA, 55 bp, Artificial
  Synthetic oligonucleotide
tgattggatagtacaactaagcacagcagtgaatctgacgtgtaagagggtaggg

SEQ ID NO: 467911 - DNA, 60 bp, Artificial
  Synthetic oligonucleotide
tgattggcagattctgtgcacaaatgcactcgaacaacggaccgcaaattggctcggcgg

SEQ ID NO: 467912 - DNA, 54 bp, Artificial
  Synthetic oligonucleotide
tgattggcgctggtcttctcattggcggtgccacctctatttatatgtgtgcta

SEQ ID NO: 467913 - DNA, 60 bp, Artificial
  Synthetic oligonucleotide
tgattgggctgtacggcaatggcattcttgttggtgacaactccttcgtgtccgccatat

SEQ ID NO: 467914 - DNA, 57 bp, Artificial
  Synthetic oligonucleotide
tgattggggtgcgtcagtgaactcagtagaatgagctaattgacaagttggagaacg

SEQ ID NO: 467915 - DNA, 55 bp, Artificial
  Synthetic oligonucleotide
tgattgggtgcacagagtttcttttgaggtaaaaggtcctgatggtgaaacagag

SEQ ID NO: 467916 - DNA, 60 bp, Artificial
  Synthetic oligonucleotide
tgattgggttatcttaacgatctagggccgtaggcccgtgagcaatgaacggcgagatca

SEQ ID NO: 467917 - DNA, 60 bp, Artificial
  Synthetic oligonucleotide
tgattggtatctgagtagagtggcctgtcgagggtgatgaatgttgcattcttgagcgtc

SEQ ID NO: 467918 - DNA, 57 bp, Artificial
  Synthetic oligonucleotide
tgattggtcagaaaactgggcagagccgaaggtaccgactcctataaattcactagg

SEQ ID NO: 467919 - DNA, 60 bp, Artificial
  Synthetic oligonucleotide
tgattggtcaggatatagtgggagttttgtccaacatccagaactaacaggactggactg

SEQ ID NO: 467920 - DNA, 60 bp, Artificial
  Synthetic oligonucleotide
tgattggtgcaaggcctttaatgctagacaaaaggggtaaaggccctccaatgcatagca

SEQ ID NO: 467921 - DNA, 60 bp, Artificial
  Synthetic oligonucleotide
tgattggtggagcaatcaactgaatatgggtcgaaccatacctcactacagaacagaagg

SEQ ID NO: 467922 - DNA, 60 bp, Artificial
  Synthetic oligonucleotide
tgattggtggtgtggagaggaagatggctccgataggggcgcgagagagcgcggttatgt

SEQ ID NO: 467923 - DNA, 57 bp, Artificial
  Synthetic oligonucleotide
tgattggtttagggacgccaagcaaggcccctacccagaggattatggcgatattcc

SEQ ID NO: 467924 - DNA, 55 bp, Artificial
  Synthetic oligonucleotide
tgattggtttgacattagatacatgaggcacacaccaatgactacgtttacggtt

SEQ ID NO: 467925 - DNA, 60 bp, Artificial
  Synthetic oligonucleotide
tgattgtacaaaactgccaatcgtattgtggttcaggtaatgctggacattatctctgca

SEQ ID NO: 467926 - DNA, 58 bp, Artificial
  Synthetic oligonucleotide
tgattgtaccgtaaaagtatgtccacttaatacgcagacgttaggaataggatgcaaa

SEQ ID NO: 467927 - DNA, 56 bp, Artificial
  Synthetic oligonucleotide
tgattgtagggaactatgtactcgttagcgacaaattgtttgttcgcactgaggac

SEQ ID NO: 467928 - DNA, 60 bp, Artificial
  Synthetic oligonucleotide
tgattgtaggtgcaagcaatacagatgtcaaggattgcttggaccaagaagaaataacct

SEQ ID NO: 467929 - DNA, 57 bp, Artificial
  Synthetic oligonucleotide
tgattgtctaggccagtttccacttgaagaccctgttattgatttcggcggttcttg

SEQ ID NO: 467930 - DNA, 58 bp, Artificial
  Synthetic oligonucleotide
tgattgtgggggtatattgagatgccagcacggagtcatcggaataattacagctggg

SEQ ID NO: 467931 - DNA, 60 bp, Artificial
  Synthetic oligonucleotide
tgattgttactgtaggaatgtcacaaatgtgttggttgagtattcaacgtgcaatccaac

SEQ ID NO: 467932 - DNA, 57 bp, Artificial
  Synthetic oligonucleotide
tgattgttccaatccaataactggaagtcctggcgctccgggagtgaagggattcgg

SEQ ID NO: 467933 - DNA, 57 bp, Artificial
  Synthetic oligonucleotide
tgatttaacaccacataacccacttaaggtttgtgataccaaattgacaattgcagg

SEQ ID NO: 467934 - DNA, 54 bp, Artificial
  Synthetic oligonucleotide
tgatttaaccttgactcaattgtcgaatgtcgatgaattggccactatagtgtc

SEQ ID NO: 467935 - DNA, 57 bp, Artificial
  Synthetic oligonucleotide
tgatttacaagatagtccggaccactcggtttgtggggaacaccaatgaactctcta

SEQ ID NO: 467936 - DNA, 58 bp, Artificial
  Synthetic oligonucleotide
tgatttaccaaagagatgcagtctcaagtgctcttgaaggggaattaacgttccgaat

SEQ ID NO: 467937 - DNA, 60 bp, Artificial
  Synthetic oligonucleotide
tgatttagcgcgagtagtgatggaaatgggctgtggtttaagagtaattgataccagtag

SEQ ID NO: 467938 - DNA, 55 bp, Artificial
  Synthetic oligonucleotide
tgatttagctccctgaatgttcggatggaaatttactgacctgcttggggagacc

SEQ ID NO: 467939 - DNA, 56 bp, Artificial
  Synthetic oligonucleotide
tgatttaggagtctactctaagggatgcggaaatgtccaaaaggtaaatgggacag

SEQ ID NO: 467940 - DNA, 56 bp, Artificial
  Synthetic oligonucleotide
tgatttaggagtttactcaaagggatgtggtaatgtccaaaaggtgaatgggacag

SEQ ID NO: 467941 - DNA, 56 bp, Artificial
  Synthetic oligonucleotide
tgatttagtaggagactactgggacgacccagatggagttggttgccgctctcccg

SEQ ID NO: 467942 - DNA, 60 bp, Artificial
  Synthetic oligonucleotide
tgatttatcatctgttaaacttgaaccaccattggaagcagagttaatcaatcttgtctc

SEQ ID NO: 467943 - DNA, 55 bp, Artificial
  Synthetic oligonucleotide
tgatttatctcatttgcgtacaccgaagatagagcccacgatggttgcaaccacg

SEQ ID NO: 467944 - DNA, 55 bp, Artificial
  Synthetic oligonucleotide
tgatttatgcagtctaagtgaatgtaataagagcagccacagtctagatctaccc

SEQ ID NO: 467945 - DNA, 60 bp, Artificial
  Synthetic oligonucleotide
tgatttcacaaggagattgattaacctcaagcctctatcctttgacataagagccgatca

SEQ ID NO: 467946 - DNA, 60 bp, Artificial
  Synthetic oligonucleotide
tgatttcacctttggccacttagctgacaagactgacagactgttaatgcgtgagtttcc

SEQ ID NO: 467947 - DNA, 56 bp, Artificial
  Synthetic oligonucleotide
tgatttcagatcaactactgatgaggaaccacttgagagatctgatgggggtgcca

SEQ ID NO: 467948 - DNA, 60 bp, Artificial
  Synthetic oligonucleotide
tgatttccctacacgagaatgaaatacagctatacttgatctcactaggcataccgaaaa

SEQ ID NO: 467949 - DNA, 60 bp, Artificial
  Synthetic oligonucleotide
tgatttccgatcagctgttgatgaggaatcatctaagagatctaatgggggtaccatact

SEQ ID NO: 467950 - DNA, 57 bp, Artificial
  Synthetic oligonucleotide
tgatttcgaagtcaactctctggttgctctagtgcgtaacgttaagtccttcggagt

SEQ ID NO: 467951 - DNA, 54 bp, Artificial
  Synthetic oligonucleotide
tgatttcgcaaaccaaatcaacgaccgctattagttcgttacgacttgggcaat

SEQ ID NO: 467952 - DNA, 54 bp, Artificial
  Synthetic oligonucleotide
tgatttcgggttatcggcatttttggtgcctacgatgaccgccctaacgaacgt

SEQ ID NO: 467953 - DNA, 60 bp, Artificial
  Synthetic oligonucleotide
tgatttcgtgcaaattacgagctgtgaagtgacattcttgaacaccacatatacgacatt

SEQ ID NO: 467954 - DNA, 59 bp, Artificial
  Synthetic oligonucleotide
tgatttctacttagttgcgaattatgattggataccaacttcaaccacaaaagtatata

SEQ ID NO: 467955 - DNA, 54 bp, Artificial
  Synthetic oligonucleotide
tgatttctctttatgaagtgattagtaaggtgcccagatataaaaagagtgatg

SEQ ID NO: 467956 - DNA, 56 bp, Artificial
  Synthetic oligonucleotide
tgatttgaagaagttatccgctccagtccgcgaaaaactaactaacattggaatta

SEQ ID NO: 467957 - DNA, 60 bp, Artificial
  Synthetic oligonucleotide
tgatttgatcaccaattattcaccatctagagaggataacttgcagcgtgtattcacagt

SEQ ID NO: 467958 - DNA, 52 bp, Artificial
  Synthetic oligonucleotide
tgatttgatcatcgctagatgtgtacgcttccggtctttcaccaaatattac

SEQ ID NO: 467959 - DNA, 60 bp, Artificial
  Synthetic oligonucleotide
tgatttgatcgcgaaagatgtcactctcataagattctacgacaaattctcacctagcgc

SEQ ID NO: 467960 - DNA, 60 bp, Artificial
  Synthetic oligonucleotide
tgatttgcaacataacttacctcacggcggaacatatagggacggcacaaagtgtgtgca

SEQ ID NO: 467961 - DNA, 59 bp, Artificial
  Synthetic oligonucleotide
tgatttgcgagtcaccgaggcaacgagaagtggccctcaccgtcattcacggagcgggg

SEQ ID NO: 467962 - DNA, 55 bp, Artificial
  Synthetic oligonucleotide
tgatttgctcttcatcatagattgccgtttctccgctaacagggttgcgccatgc

SEQ ID NO: 467963 - DNA, 55 bp, Artificial
  Synthetic oligonucleotide
tgatttgcttacaagcaatcaagctgcctttgggttttactccttgaacccttca

SEQ ID NO: 467964 - DNA, 60 bp, Artificial
  Synthetic oligonucleotide
tgatttggaagtgccatatgttaacatttgtcctacatcctcgtggacccaacacgctaa

SEQ ID NO: 467965 - DNA, 51 bp, Artificial
  Synthetic oligonucleotide
tgatttggctcttagtggctttaccagcggggttggcgccagtaacggtag

SEQ ID NO: 467966 - DNA, 60 bp, Artificial
  Synthetic oligonucleotide
tgatttgtagtggtgcgtgtgccaaaacagtgtggtccaagctaggagtgaaagcgactc

SEQ ID NO: 467967 - DNA, 55 bp, Artificial
  Synthetic oligonucleotide
tgatttgtagtgtgttggggaacctgtgggtcacagtctactatggggtacctgt

SEQ ID NO: 467968 - DNA, 55 bp, Artificial
  Synthetic oligonucleotide
tgatttgtatgagatgaccaagtgggcacatggcctcaagggtcttgctgacgga

SEQ ID NO: 467969 - DNA, 57 bp, Artificial
  Synthetic oligonucleotide
tgatttgtttagtaatccaatcaaatacctcggatttttaatcttcatgcccgatgt

SEQ ID NO: 467970 - DNA, 59 bp, Artificial
  Synthetic oligonucleotide
tgattttggtccatctccaggcactaagagcattagatttagtgctggttattaatatg

SEQ ID NO: 467971 - DNA, 59 bp, Artificial
  Synthetic oligonucleotide
tgattttgttcgcgtcacaaacttcgatcagctccaacgatcagccgcattcatctacg

SEQ ID NO: 467972 - DNA, 57 bp, Artificial
  Synthetic oligonucleotide
tgatttttcgaaggacattactaccattcgcccatctcccgcgcaatttaatattta

SEQ ID NO: 467973 - DNA, 58 bp, Artificial
  Synthetic oligonucleotide
tgatttttctaagcaaaaaacgctcgaattgctacgcatgtggggcgacccattgagc

SEQ ID NO: 467974 - DNA, 57 bp, Artificial
  Synthetic oligonucleotide
tgcaaaacatgctgacaggtactatccagtaacactagtagctcatgattggtatga

SEQ ID NO: 467975 - DNA, 60 bp, Artificial
  Synthetic oligonucleotide
tgcaaaaccgacattgctccacgggtgttacgtgcgggcgtgtatgtgcgaatccgacaa

SEQ ID NO: 467976 - DNA, 55 bp, Artificial
  Synthetic oligonucleotide
tgcaaaacgagctgaaggccagagttcgaggatattcagacaacaacacttgacg

SEQ ID NO: 467977 - DNA, 57 bp, Artificial
  Synthetic oligonucleotide
tgcaaaactgaggtcgttggtgttaacactttaacaacctgtcatggatataagaaa

SEQ ID NO: 467978 - DNA, 57 bp, Artificial
  Synthetic oligonucleotide
tgcaaaagatagccatggaaagcatagtaatatggggaaagacccctaaatttagac

SEQ ID NO: 467979 - DNA, 60 bp, Artificial
  Synthetic oligonucleotide
tgcaaaagcaggacagacacttgcctgttttcagcattctgtactttgcagatttgcgcc

SEQ ID NO: 467980 - DNA, 57 bp, Artificial
  Synthetic oligonucleotide
tgcaaaaggggcgtttgggtcacagaaccgtcgaagaaacatcacacatggggcgtc

SEQ ID NO: 467981 - DNA, 60 bp, Artificial
  Synthetic oligonucleotide
tgcaaaagtagcgcgtattgtgactatcgctgctagtccaggtcttaatgctacaggtca

SEQ ID NO: 467982 - DNA, 56 bp, Artificial
  Synthetic oligonucleotide
tgcaaaagtgctttttcaaaattggggaattgaacccatagacaatgtaatgggaa

SEQ ID NO: 467983 - DNA, 55 bp, Artificial
  Synthetic oligonucleotide
tgcaaaatgggcgaaaacgtcaccgctatttacggaagtgttatggcaaacggct

SEQ ID NO: 467984 - DNA, 60 bp, Artificial
  Synthetic oligonucleotide
tgcaaacacggatacccgtttttgtgccctctttgcactgctattgacaccactcatgac

SEQ ID NO: 467985 - DNA, 60 bp, Artificial
  Synthetic oligonucleotide
tgcaaacatcgttgtggcttacggtaggtggccatctggcctgagggatactgacgccac

SEQ ID NO: 467986 - DNA, 54 bp, Artificial
  Synthetic oligonucleotide
tgcaaaccactattatctggcacccactcggggaagattgaggtttatttgagt

SEQ ID NO: 467987 - DNA, 56 bp, Artificial
  Synthetic oligonucleotide
tgcaaaccaggcatgtagtgaatgtcaagtccagatctgagtccactatcgagtcg

SEQ ID NO: 467988 - DNA, 55 bp, Artificial
  Synthetic oligonucleotide
tgcaaaccccggtagttctgtatactgcccctctcccagcggttccatggtaacc

SEQ ID NO: 467989 - DNA, 60 bp, Artificial
  Synthetic oligonucleotide
tgcaaaccctcccctattttgtgcatcagatgctaaagcatataaggtagaaatgcataa

SEQ ID NO: 467990 - DNA, 53 bp, Artificial
  Synthetic oligonucleotide
tgcaaacctggacaagcaagcctgttacagctgcgtaatccacgctgtagaat

SEQ ID NO: 467991 - DNA, 60 bp, Artificial
  Synthetic oligonucleotide
tgcaaacggatgggtttcaacagacaagaactcaaatggcgtgcaggatattatagacaa

SEQ ID NO: 467992 - DNA, 52 bp, Artificial
  Synthetic oligonucleotide
tgcaaacgttgtcgcaacaacgcgcgcagttcagggaggtttgaagcttaag

SEQ ID NO: 467993 - DNA, 57 bp, Artificial
  Synthetic oligonucleotide
tgcaaacgttttcacctaaatcaagcacacccttaagctctgtaatacgtggacaaa

SEQ ID NO: 467994 - DNA, 60 bp, Artificial
  Synthetic oligonucleotide
tgcaaactagttgggatcaatatgagcaaaaagaagtcctacataaatcgaacagggaca

SEQ ID NO: 467995 - DNA, 52 bp, Artificial
  Synthetic oligonucleotide
tgcaaagactgctagatacctacggtattaacctacctttagtcacctatgt

SEQ ID NO: 467996 - DNA, 56 bp, Artificial
  Synthetic oligonucleotide
tgcaaagatgtcaatgatctgaagcaatatgacagtagtgaaccagagcataggtc

SEQ ID NO: 467997 - DNA, 55 bp, Artificial
  Synthetic oligonucleotide
tgcaaagcccctcattccgactcgggagggtccctagcacgtaggctggagagga

SEQ ID NO: 467998 - DNA, 55 bp, Artificial
  Synthetic oligonucleotide
tgcaaagcggcgtctatatgacacagcggtcgatgaatttaatgctagggaccgc

SEQ ID NO: 467999 - DNA, 60 bp, Artificial
  Synthetic oligonucleotide
tgcaaagctaggatgcatcatagcccgtgggtacatcacaccagcaatggcatccattgt

SEQ ID NO: 468000 - DNA, 53 bp, Artificial
  Synthetic oligonucleotide
tgcaaagctgcaatgggcttaaggattagttcatctttcagctttggcggatt

SEQ ID NO: 468001 - DNA, 55 bp, Artificial
  Synthetic oligonucleotide
tgcaaaggacctccctgggtatttagaggactacaatgacgaagtttttcaccaa

SEQ ID NO: 468002 - DNA, 55 bp, Artificial
  Synthetic oligonucleotide
tgcaaaggacggtataaaggacatttcagcgactccggacatacttttcaagggg

SEQ ID NO: 468003 - DNA, 54 bp, Artificial
  Synthetic oligonucleotide
tgcaaaggattactcggttcaaaaccttagcgttctccatgcagcgcgggcaca

SEQ ID NO: 468004 - DNA, 60 bp, Artificial
  Synthetic oligonucleotide
tgcaaagggacaagctcatatgaacctagcagactacaaaaggactttctatcctgtagc

SEQ ID NO: 468005 - DNA, 59 bp, Artificial
  Synthetic oligonucleotide
tgcaaaggtagggaatcttccctgtgaagaagaagagattctttctcagcatgtgtata

SEQ ID NO: 468006 - DNA, 57 bp, Artificial
  Synthetic oligonucleotide
tgcaaaggttatgtagtcagaattccaaattacgttgccaggacttgtagtgtttgc

SEQ ID NO: 468007 - DNA, 58 bp, Artificial
  Synthetic oligonucleotide
tgcaaagtgcagtccaatcgagtattttgtgacactatgaacagtttgacattaccaa

SEQ ID NO: 468008 - DNA, 59 bp, Artificial
  Synthetic oligonucleotide
tgcaaagttgaaggatgggtagtggtggctaaggacaatgccataagattcggtgaaag

SEQ ID NO: 468009 - DNA, 54 bp, Artificial
  Synthetic oligonucleotide
tgcaaagttgcgtcgcgcatctatggaacaagcacttagagaggaggctgctaa

SEQ ID NO: 468010 - DNA, 60 bp, Artificial
  Synthetic oligonucleotide
tgcaaataccaaccaattttactattgggcaccatgaggagttcattcaaactagatctc

SEQ ID NO: 468011 - DNA, 60 bp, Artificial
  Synthetic oligonucleotide
tgcaaataccttcagtcatggcagtcttgacattgcggcccatttgaaggaccggtacta

SEQ ID NO: 468012 - DNA, 60 bp, Artificial
  Synthetic oligonucleotide
tgcaaatgaggagtcccatcctcgtgaccttctctgcagattctaatgaatttcttggaa

SEQ ID NO: 468013 - DNA, 59 bp, Artificial
  Synthetic oligonucleotide
tgcaaatggctcttataaatcagctcacgttgtttacttcactatttttgaggctttaa

SEQ ID NO: 468014 - DNA, 55 bp, Artificial
  Synthetic oligonucleotide
tgcaaatggggatgatctactgatagctatgagaccagacacagcccatcttttg

SEQ ID NO: 468015 - DNA, 60 bp, Artificial
  Synthetic oligonucleotide
tgcaaatgtctatatgggtattcctcgttcaattggttcacgactgtgcttgcggaagcc

SEQ ID NO: 468016 - DNA, 50 bp, Artificial
  Synthetic oligonucleotide
tgcaaatgtgatcccattcactccatctctccctgcagcgaagaaattgg

SEQ ID NO: 468017 - DNA, 51 bp, Artificial
  Synthetic oligonucleotide
tgcaaattcagttgatcggccaagttcaatagtgattaatactcaaatggg

SEQ ID NO: 468018 - DNA, 53 bp, Artificial
  Synthetic oligonucleotide
tgcaaattctaaaagccaattttggctgcaaccattagctgatgcaaagatcg

SEQ ID NO: 468019 - DNA, 60 bp, Artificial
  Synthetic oligonucleotide
tgcaaattcttgactcattgccccatgttgatttcacattttcatcaggttccaagagca

SEQ ID NO: 468020 - DNA, 58 bp, Artificial
  Synthetic oligonucleotide
tgcaaattgaacggaatccctccacttgaattaggggattgtagcattgccgggtggc

SEQ ID NO: 468021 - DNA, 53 bp, Artificial
  Synthetic oligonucleotide
tgcaaattgagcttgataatgcagtgggcagccctcctgttataatctctgtc

SEQ ID NO: 468022 - DNA, 54 bp, Artificial
  Synthetic oligonucleotide
tgcaaatttaatatgcaaagcaaggactcatgggtactcaatggggctactttt

SEQ ID NO: 468023 - DNA, 55 bp, Artificial
  Synthetic oligonucleotide
tgcaacaacagcttcctaaaaaatccagcactatacacacaagaggtcactcctc

SEQ ID NO: 468024 - DNA, 60 bp, Artificial
  Synthetic oligonucleotide
tgcaacaaccctcatagaatccttgatggaagggactgtacactgatagatgccctactg

SEQ ID NO: 468025 - DNA, 60 bp, Artificial
  Synthetic oligonucleotide
tgcaacaaccgccacaagcacgtcaggcacagacaacatgaattccaccacacagatgac

SEQ ID NO: 468026 - DNA, 60 bp, Artificial
  Synthetic oligonucleotide
tgcaacaatcctcacaggatccttgatggaagggcctgcacattaatagatgctctactg

SEQ ID NO: 468027 - DNA, 50 bp, Artificial
  Synthetic oligonucleotide
tgcaacaatggcacctcagacaagcatgctgagaatcaagtaatgcaaat

SEQ ID NO: 468028 - DNA, 59 bp, Artificial
  Synthetic oligonucleotide
tgcaacacatggcactggtacagaacctattagtagtacacctatacctggggttagtc

SEQ ID NO: 468029 - DNA, 60 bp, Artificial
  Synthetic oligonucleotide
tgcaacaccccattcagtctgggtgtttgcatgtgcgcctgaccggtgccctccgactgc

SEQ ID NO: 468030 - DNA, 60 bp, Artificial
  Synthetic oligonucleotide
tgcaacacccgggatgcagatcagagggttcgtgtactttgtcgaaacactagcgagaag

SEQ ID NO: 468031 - DNA, 60 bp, Artificial
  Synthetic oligonucleotide
tgcaacacgtgtatcccattaacagactttatgcaaataaacgtctcatatccgcgtcac

SEQ ID NO: 468032 - DNA, 55 bp, Artificial
  Synthetic oligonucleotide
tgcaacacgttcagactttaacgacggagaaattacagctgacttcagtcacatc

SEQ ID NO: 468033 - DNA, 53 bp, Artificial
  Synthetic oligonucleotide
tgcaacactcctatataagtggggtagcatctacctcccctgatgctaagtct

SEQ ID NO: 468034 - DNA, 57 bp, Artificial
  Synthetic oligonucleotide
tgcaacagacataataggggatataagacaagcacattgtaatgttactagaacagc

SEQ ID NO: 468035 - DNA, 58 bp, Artificial
  Synthetic oligonucleotide
tgcaacagagtgtggatgtagatgaacccttaactttaagcactgacaaaaatttaac

SEQ ID NO: 468036 - DNA, 60 bp, Artificial
  Synthetic oligonucleotide
tgcaacaggaatgaggaacattcctgagaaagcatcgagagggctctttggagcaatagc

SEQ ID NO: 468037 - DNA, 59 bp, Artificial
  Synthetic oligonucleotide
tgcaacaggcagcaacgggtgaaggaaacagcggccaagtcagccaaaattatcctata

SEQ ID NO: 468038 - DNA, 55 bp, Artificial
  Synthetic oligonucleotide
tgcaacatcaacatatctaccaccaactacccatgcaaagtcagcacaggaagac

SEQ ID NO: 468039 - DNA, 58 bp, Artificial
  Synthetic oligonucleotide
tgcaacatgatcttttcggggaaccgatcgagcgtgtgtgtcgcctaaaagatccgtt

SEQ ID NO: 468040 - DNA, 60 bp, Artificial
  Synthetic oligonucleotide
tgcaacattaagggcggacttccaataatcatatgcggagagcacagggcagcctttaac

SEQ ID NO: 468041 - DNA, 59 bp, Artificial
  Synthetic oligonucleotide
tgcaaccaaacttaacgaagcacctattatacatgagtgtcaacaggagcttattaacg

SEQ ID NO: 468042 - DNA, 52 bp, Artificial
  Synthetic oligonucleotide
tgcaaccaaagggtcagcactgtcgtacattgcagcttgagtctcaagagca

SEQ ID NO: 468043 - DNA, 55 bp, Artificial
  Synthetic oligonucleotide
tgcaaccacagaactaaaagataagaaagagggggtgtatgcacttttttataaa

SEQ ID NO: 468044 - DNA, 55 bp, Artificial
  Synthetic oligonucleotide
tgcaaccacatctcgaacgagtctagtaagtctcgagcgtagtcgtccatcttac

SEQ ID NO: 468045 - DNA, 60 bp, Artificial
  Synthetic oligonucleotide
tgcaaccacccaccaataccgcgtggaatatcaccacacagtatattcggactgaatttg

SEQ ID NO: 468046 - DNA, 54 bp, Artificial
  Synthetic oligonucleotide
tgcaaccacgtttacttctggtagcgtcacgctgtccggtacagaactgcgagc

SEQ ID NO: 468047 - DNA, 55 bp, Artificial
  Synthetic oligonucleotide
tgcaaccagaagatccactagcccagtagaaaggctagacgaccagatccgcggc

SEQ ID NO: 468048 - DNA, 59 bp, Artificial
  Synthetic oligonucleotide
tgcaaccagccgtcagtaaaccagctttactggaaaccgtattcacactcgatatatgg

SEQ ID NO: 468049 - DNA, 60 bp, Artificial
  Synthetic oligonucleotide
tgcaaccagtcctggatcacagtctcatcaatggcctgttctccaaactcaacggcaatt

SEQ ID NO: 468050 - DNA, 57 bp, Artificial
  Synthetic oligonucleotide
tgcaaccattgccggataaccaacctcctcgcggaggttccctgccaaaccttgcca

SEQ ID NO: 468051 - DNA, 51 bp, Artificial
  Synthetic oligonucleotide
tgcaacctagtactgcaagagaattttcccaccgtagccagctataacata

SEQ ID NO: 468052 - DNA, 60 bp, Artificial
  Synthetic oligonucleotide
tgcaacctatcagatgctcacaagaaagacctatatgatcacgcactcatgagcataatc

SEQ ID NO: 468053 - DNA, 60 bp, Artificial
  Synthetic oligonucleotide
tgcaacctctctgatgcacacaagaggaatttgtacgaccacaccttaatgtccatagta

SEQ ID NO: 468054 - DNA, 56 bp, Artificial
  Synthetic oligonucleotide
tgcaacgcaaaatggggatacacagtgcctggacattttgcatagtaacaacaggc

SEQ ID NO: 468055 - DNA, 52 bp, Artificial
  Synthetic oligonucleotide
tgcaacgcgtattgtttagcggcaaccgcgggtttcatctgtggctccggtt

SEQ ID NO: 468056 - DNA, 60 bp, Artificial
  Synthetic oligonucleotide
tgcaacgcttagtttccagaaggggtatgcaggtatctctggttcaactagatctgataa

SEQ ID NO: 468057 - DNA, 55 bp, Artificial
  Synthetic oligonucleotide
tgcaacggggctcaggaatatccctcaaagagaaacaagaggactatttggagct

SEQ ID NO: 468058 - DNA, 54 bp, Artificial
  Synthetic oligonucleotide
tgcaacggggtctgcaccgcttggccagaatttgggtacgtgggatctctcatt

SEQ ID NO: 468059 - DNA, 54 bp, Artificial
  Synthetic oligonucleotide
tgcaacgttacccaaatgcgggaactacctgttttagattcggcggcatttaac

SEQ ID NO: 468060 - DNA, 60 bp, Artificial
  Synthetic oligonucleotide
tgcaacgttgaaggatgggttgtaatagcaaaggacaatgcgattagatttggagaaagc

SEQ ID NO: 468061 - DNA, 60 bp, Artificial
  Synthetic oligonucleotide
tgcaactacgcattcatggattcctaaaaggaatcgttccattctcaatacgagtcaaag

SEQ ID NO: 468062 - DNA, 51 bp, Artificial
  Synthetic oligonucleotide
tgcaactactcaaaattttggtatctggagcatgcaaagaccggtgagact

SEQ ID NO: 468063 - DNA, 60 bp, Artificial
  Synthetic oligonucleotide
tgcaactagtagagaatacatactctcctgatacattaggctacgacctaatacgtgatc

SEQ ID NO: 468064 - DNA, 53 bp, Artificial
  Synthetic oligonucleotide
tgcaactcccaccacctgtacagagataagcattactttgtgaggggtggcat

SEQ ID NO: 468065 - DNA, 59 bp, Artificial
  Synthetic oligonucleotide
tgcaactccctcctcaacgcctgtgtccactgaaagcttttgacttctttggacaaaga

SEQ ID NO: 468066 - DNA, 55 bp, Artificial
  Synthetic oligonucleotide
tgcaactgagacccatgcagcccaacagatgttacaagtttaccatgcaatacgc

SEQ ID NO: 468067 - DNA, 60 bp, Artificial
  Synthetic oligonucleotide
tgcaactgatcgtgttgatgttaatctagttcaagccatttgtgactcaactctgcccac

SEQ ID NO: 468068 - DNA, 55 bp, Artificial
  Synthetic oligonucleotide
tgcaactgctagctttatttacgacgggaagcttgtagacagtattggttcatgg

SEQ ID NO: 468069 - DNA, 60 bp, Artificial
  Synthetic oligonucleotide
tgcaactgctttggccaacacaatagaggtcttcaggatgaacagtctaacagccaatga

SEQ ID NO: 468070 - DNA, 55 bp, Artificial
  Synthetic oligonucleotide
tgcaactggattgagaaatgttccacagattgaaaccagaggacttttcggagcc

SEQ ID NO: 468071 - DNA, 60 bp, Artificial
  Synthetic oligonucleotide
tgcaactggtgttgcgatcaaaggaggtggaactttagtggctgaagccattcgatttat

SEQ ID NO: 468072 - DNA, 59 bp, Artificial
  Synthetic oligonucleotide
tgcaactgtcaccggtggacaatacgcgtcaaaggaacaagctctcgtgaagaagttta

SEQ ID NO: 468073 - DNA, 59 bp, Artificial
  Synthetic oligonucleotide
tgcaactgtcactggtggacagtatggagcaaaggaacaggctttggttaagaagtttg

SEQ ID NO: 468074 - DNA, 55 bp, Artificial
  Synthetic oligonucleotide
tgcaactgtgacaggtggtcagtatgccagtagagaacagacattagtcaggaga

SEQ ID NO: 468075 - DNA, 60 bp, Artificial
  Synthetic oligonucleotide
tgcaactgttcgtgtacttaagaatggtacttgtgcgtaccgatacaagactgatgctca

SEQ ID NO: 468076 - DNA, 56 bp, Artificial
  Synthetic oligonucleotide
tgcaacttgtaaggtattaaaggtttctgctacacctcctgggcgtgaggtagagt

SEQ ID NO: 468077 - DNA, 55 bp, Artificial
  Synthetic oligonucleotide
tgcaactttcatgagcttattcaatgcagtgcgatccaagtacgcccaagactac

SEQ ID NO: 468078 - DNA, 55 bp, Artificial
  Synthetic oligonucleotide
tgcaagaacactttggagaaatcaggagggaagctatacttgctgatgcaatgtc

SEQ ID NO: 468079 - DNA, 50 bp, Artificial
  Synthetic oligonucleotide
tgcaagaaggttaccgaacatgagaagtgctccacgtctataatggataa

SEQ ID NO: 468080 - DNA, 60 bp, Artificial
  Synthetic oligonucleotide
tgcaagaatcctcatcgaattcttgatggggcaaattgcacactgatagactctctattg

SEQ ID NO: 468081 - DNA, 60 bp, Artificial
  Synthetic oligonucleotide
tgcaagagcaaagatcttctcaaagtttgatttgaagagcgggtttcatcaagtcgccat

SEQ ID NO: 468082 - DNA, 60 bp, Artificial
  Synthetic oligonucleotide
tgcaagaggctgctattctcatggatgacaagctaccctcagcaggtcgtgcgcgtatgg

SEQ ID NO: 468083 - DNA, 60 bp, Artificial
  Synthetic oligonucleotide
tgcaagatacgcagtgttagtgctggtcgcgcactgtatatccctccatttgaagtgctc

SEQ ID NO: 468084 - DNA, 60 bp, Artificial
  Synthetic oligonucleotide
tgcaagataggacttaagaagtacaaggactgcgatgtgtaccacaccgaagttaagcat

SEQ ID NO: 468085 - DNA, 59 bp, Artificial
  Synthetic oligonucleotide
tgcaagatatataatcatggagggctttgtctcgcccccggaaatcccaaaacctcaca

SEQ ID NO: 468086 - DNA, 60 bp, Artificial
  Synthetic oligonucleotide
tgcaagatctatgtgcaaatcaaaaggaccagctcccatactatcgttattgagtgcagt

SEQ ID NO: 468087 - DNA, 60 bp, Artificial
  Synthetic oligonucleotide
tgcaagatctggttagctgtacacaagtatatgttactagacagggtattcaaaaagcta

SEQ ID NO: 468088 - DNA, 60 bp, Artificial
  Synthetic oligonucleotide
tgcaagatgcacaaattagaggtcttgaaggacaattgagagggctacgaggcaatttac

SEQ ID NO: 468089 - DNA, 60 bp, Artificial
  Synthetic oligonucleotide
tgcaagattcaggatcagaagtaaacatagtaacagactcacagtatgcattaggaatca

SEQ ID NO: 468090 - DNA, 55 bp, Artificial
  Synthetic oligonucleotide
tgcaagattccctgtcccatatcaatgaggctggatatgtgggatggtaccactc

SEQ ID NO: 468091 - DNA, 55 bp, Artificial
  Synthetic oligonucleotide
tgcaagatttccaagccgggataaagacgctcatttactatcaacggaagtctgg

SEQ ID NO: 468092 - DNA, 60 bp, Artificial
  Synthetic oligonucleotide
tgcaagcaaggcaacaaacagtgtcagcattggaggacaaactcgcagactttaagcgaa

SEQ ID NO: 468093 - DNA, 59 bp, Artificial
  Synthetic oligonucleotide
tgcaagcaaggcaacagacagtgtcagcactggaagataaacttgcagacttcaagcga

SEQ ID NO: 468094 - DNA, 60 bp, Artificial
  Synthetic oligonucleotide
tgcaagcagtgtgaaacactcatcaggatctgattgcatagatgatattaaatactcctc

SEQ ID NO: 468095 - DNA, 57 bp, Artificial
  Synthetic oligonucleotide
tgcaagcagttggaaaaagtcaaagccagttagttacaaaacatgtagtgaaaggaa

SEQ ID NO: 468096 - DNA, 60 bp, Artificial
  Synthetic oligonucleotide
tgcaagcgctactgagtggtctaagtacgtagatactagcctgaccattcctggtgtgat

SEQ ID NO: 468097 - DNA, 57 bp, Artificial
  Synthetic oligonucleotide
tgcaagcgtggaagtccaagaaaaccccaatggggttctcgtatgatactcgctgtt

SEQ ID NO: 468098 - DNA, 57 bp, Artificial
  Synthetic oligonucleotide
tgcaagctacattagctggcctaatgtgctgtaatatgggaatgaaacctgagacat

SEQ ID NO: 468099 - DNA, 55 bp, Artificial
  Synthetic oligonucleotide
tgcaagctacgcctcatacatccgagttcctgttaattctacggtgtatttggac

SEQ ID NO: 468100 - DNA, 60 bp, Artificial
  Synthetic oligonucleotide
tgcaagctggacccggaagccagagaggctatagtgtccctcacagaaaggctctacgtg

SEQ ID NO: 468101 - DNA, 60 bp, Artificial
  Synthetic oligonucleotide
tgcaagctggattcagagtgagttcaataaggcgtgtgaactgactgattcaagctggat

SEQ ID NO: 468102 - DNA, 60 bp, Artificial
  Synthetic oligonucleotide
tgcaagctgttggtgagtgcggtatgagcataaatggtggaatacctgtcatgcagaatt

SEQ ID NO: 468103 - DNA, 60 bp, Artificial
  Synthetic oligonucleotide
tgcaaggaatagcatttgctggagcaccaatgtatagcacttttgcaaccttagtaagga

SEQ ID NO: 468104 - DNA, 57 bp, Artificial
  Synthetic oligonucleotide
tgcaaggactacgagagagactcttgcgagcgcgtggagagacttgtggggggcaat

SEQ ID NO: 468105 - DNA, 60 bp, Artificial
  Synthetic oligonucleotide
tgcaaggagagacgtacagtgatgtgtctcttgtgaggttgacccctactcctgtctcga

SEQ ID NO: 468106 - DNA, 60 bp, Artificial
  Synthetic oligonucleotide
tgcaaggagatgccgacagtctgccacgaagggcagctcaggtacgtccggaacgttgca

SEQ ID NO: 468107 - DNA, 60 bp, Artificial
  Synthetic oligonucleotide
tgcaaggatccatagccatggtaatctcagcataacaccctctttgaaagaccgattcta

SEQ ID NO: 468108 - DNA, 54 bp, Artificial
  Synthetic oligonucleotide
tgcaaggatttaaatgctaaactgtgtggtaagtttaaggaactttttggagtg

SEQ ID NO: 468109 - DNA, 56 bp, Artificial
  Synthetic oligonucleotide
tgcaaggcaaatttagttcattagtatcatcagttgagtggtatctaagatctatg

SEQ ID NO: 468110 - DNA, 60 bp, Artificial
  Synthetic oligonucleotide
tgcaaggcagaaaggaagagtcatttgtgcttcgctggtgtgcgtttgcaacgctctttc

SEQ ID NO: 468111 - DNA, 60 bp, Artificial
  Synthetic oligonucleotide
tgcaaggcgatgattcaatcatccgcctcaacgttctcgtaccctccgaacgccatgatc

SEQ ID NO: 468112 - DNA, 60 bp, Artificial
  Synthetic oligonucleotide
tgcaaggcgattgttgttcaccttatgtactgtttaattcagcatcgagggctaagattg

SEQ ID NO: 468113 - DNA, 52 bp, Artificial
  Synthetic oligonucleotide
tgcaaggcgtttggcacctgtcctccagatgtacttaataaagtggaacaaa

SEQ ID NO: 468114 - DNA, 55 bp, Artificial
  Synthetic oligonucleotide
tgcaaggcttaccgttcacgtacagtacgaatgacagcggtgggttgtcttatgc

SEQ ID NO: 468115 - DNA, 59 bp, Artificial
  Synthetic oligonucleotide
tgcaagggacgtaaatcagaatatgcacactttgttaggtatgggtccaccgcagtaaa

SEQ ID NO: 468116 - DNA, 55 bp, Artificial
  Synthetic oligonucleotide
tgcaagggaggagtgagtgcgggacatcccgtgtaataactacccggctttgcgg

SEQ ID NO: 468117 - DNA, 59 bp, Artificial
  Synthetic oligonucleotide
tgcaagggattgcttttgcaggtgtcccaatgtacagttctttatcgacgctagtaaaa

SEQ ID NO: 468118 - DNA, 58 bp, Artificial
  Synthetic oligonucleotide
tgcaaggtcccgttccgaaaagtgccctttgcactcttacaccgcgctgaggcggcag

SEQ ID NO: 468119 - DNA, 58 bp, Artificial
  Synthetic oligonucleotide
tgcaaggtccgcaggagtccaccgctccgctgaaactcacgccggggttgtggacttc

SEQ ID NO: 468120 - DNA, 55 bp, Artificial
  Synthetic oligonucleotide
tgcaaggttcatatggaactggtaaaagccacctagcatacgctatcgcaaaagc

SEQ ID NO: 468121 - DNA, 60 bp, Artificial
  Synthetic oligonucleotide
tgcaagtaagcggagacggagcgctgcagtttaacattcaagcgggaggcgggctctctc

SEQ ID NO: 468122 - DNA, 60 bp, Artificial
  Synthetic oligonucleotide
tgcaagtagagggctcaggtcgacccctcgtatatgccgatatggcacaagcagtcggcg

SEQ ID NO: 468123 - DNA, 60 bp, Artificial
  Synthetic oligonucleotide
tgcaagtagcgccgtgctgtatcgacttggactccctcgtcaatgtgctcattcgtcata

SEQ ID NO: 468124 - DNA, 60 bp, Artificial
  Synthetic oligonucleotide
tgcaagtatcagctgtgcctcacggcatatgtaggagcatgttaggctctgcgtgctcgc

SEQ ID NO: 468125 - DNA, 60 bp, Artificial
  Synthetic oligonucleotide
tgcaagtcacgccacaggagcatgactgtcatcatcaatgggagtattatatcctgaaca

SEQ ID NO: 468126 - DNA, 60 bp, Artificial
  Synthetic oligonucleotide
tgcaagtcctcggcccagatagacccgactcccgtgatcgtcacctccaacaccaacatg

SEQ ID NO: 468127 - DNA, 55 bp, Artificial
  Synthetic oligonucleotide
tgcaagtcgggctactctggcatgcggaaatgcgctctcagataccgtcctgtgg

SEQ ID NO: 468128 - DNA, 55 bp, Artificial
  Synthetic oligonucleotide
tgcaagtgcaggacccacttcagctcgcgatggaataagagatgctatggttggt

SEQ ID NO: 468129 - DNA, 60 bp, Artificial
  Synthetic oligonucleotide
tgcaagtgctgtcaaatgaatccaatcttactgtgaacttgctggtccgtcctctccaag

SEQ ID NO: 468130 - DNA, 57 bp, Artificial
  Synthetic oligonucleotide
tgcaagtgttgaaacccctcaaccaacaacgaagcctgtcgcgcggcgtgtatgggt

SEQ ID NO: 468131 - DNA, 60 bp, Artificial
  Synthetic oligonucleotide
tgcaagttacaatgaagttgacacactgtctaagctcttgacagagcgacactacaaagt

SEQ ID NO: 468132 - DNA, 60 bp, Artificial
  Synthetic oligonucleotide
tgcaagttgaatcacaattcttggcaggaattagtgcacggtcgtaatgaagcatttaag

SEQ ID NO: 468133 - DNA, 60 bp, Artificial
  Synthetic oligonucleotide
tgcaagtttgacgaactgacaaagggagagggttcatcttggcattttcatgccctagta

SEQ ID NO: 468134 - DNA, 57 bp, Artificial
  Synthetic oligonucleotide
tgcaagtttggaattatttctacttaaatacgctatacgaatacgtatatgtattta

SEQ ID NO: 468135 - DNA, 58 bp, Artificial
  Synthetic oligonucleotide
tgcaataaacgacttgttggaactggactctgtcccggcgatgtttgttcagggctca

SEQ ID NO: 468136 - DNA, 60 bp, Artificial
  Synthetic oligonucleotide
tgcaataaactccagcatgccatttcacaacatacaccctctcaccattggggaatgccc

SEQ ID NO: 468137 - DNA, 60 bp, Artificial
  Synthetic oligonucleotide
tgcaataaagagcatgatgaggagttctgtgacatgttgaggctatttgactacaacaaa

SEQ ID NO: 468138 - DNA, 59 bp, Artificial
  Synthetic oligonucleotide
tgcaataagcgtagaagttggtccctgaaccctgaaagtgtgtggacttgtgtatgccc

SEQ ID NO: 468139 - DNA, 60 bp, Artificial
  Synthetic oligonucleotide
tgcaatacatcacaactgtttaatagtacttggacttggaatgatactagtacttggaat

SEQ ID NO: 468140 - DNA, 53 bp, Artificial
  Synthetic oligonucleotide
tgcaataccaatcatcttaaaggccctttatatgctatcaaccaggggtcgtc

SEQ ID NO: 468141 - DNA, 60 bp, Artificial
  Synthetic oligonucleotide
tgcaatagccaaaaccataaggcttgagagtgaagtgaatgcaatcaaaggtgctctcaa

SEQ ID NO: 468142 - DNA, 60 bp, Artificial
  Synthetic oligonucleotide
tgcaatagcgattgggttgtggcggtgtttggggtgcatgagagcgtgtgtgagggaagc

SEQ ID NO: 468143 - DNA, 50 bp, Artificial
  Synthetic oligonucleotide
tgcaatagtgtctaaaggtatagctgtaacggagaaagcgaagttaaatt

SEQ ID NO: 468144 - DNA, 60 bp, Artificial
  Synthetic oligonucleotide
tgcaatatgggcgcacggaagtacaaatcgcaatagtgccaggaaggcgattcatcggct

SEQ ID NO: 468145 - DNA, 60 bp, Artificial
  Synthetic oligonucleotide
tgcaatcaataggtataatggtttaacaaatcattcggtatcgatgaggccacaaaccca

SEQ ID NO: 468146 - DNA, 55 bp, Artificial
  Synthetic oligonucleotide
tgcaatcactgaattgaacaaccccacaatcacagctgacatcgatgcagtcatc

SEQ ID NO: 468147 - DNA, 55 bp, Artificial
  Synthetic oligonucleotide
tgcaatcagtcgagctcgtcctcggtttccggagcggtcgcctcgaagtcgtctt

SEQ ID NO: 468148 - DNA, 60 bp, Artificial
  Synthetic oligonucleotide
tgcaatcatacaacccaattctgaggaatttgatgtcaacattagatggggttatgacat

SEQ ID NO: 468149 - DNA, 60 bp, Artificial
  Synthetic oligonucleotide
tgcaatccactcccagctgattctccctctgtggtcctgtcccgcgactagacctcaccc

SEQ ID NO: 468150 - DNA, 55 bp, Artificial
  Synthetic oligonucleotide
tgcaatcgatattgatgagcccagtggacaaacagcagattggttttcgatcggt

SEQ ID NO: 468151 - DNA, 55 bp, Artificial
  Synthetic oligonucleotide
tgcaatcgctgtcgccgaacgcgcagcaagccgcactgtcgatccgcgagcttat

SEQ ID NO: 468152 - DNA, 59 bp, Artificial
  Synthetic oligonucleotide
tgcaatcggtagcctctagaaccatcaacccagtctttaacgtcagtctcttccaaaca

SEQ ID NO: 468153 - DNA, 50 bp, Artificial
  Synthetic oligonucleotide
tgcaatcgtgagtcggaaagactatcgttttcccaaccaacaatcgtagg

SEQ ID NO: 468154 - DNA, 60 bp, Artificial
  Synthetic oligonucleotide
tgcaatctattattgaagctatatctaggtcaattggaagattcttcccttcagacacat

SEQ ID NO: 468155 - DNA, 60 bp, Artificial
  Synthetic oligonucleotide
tgcaatctggcaatactaatgggattgttcgggaacggaaattgtggcatccaatgaacc

SEQ ID NO: 468156 - DNA, 60 bp, Artificial
  Synthetic oligonucleotide
tgcaatctggcacttgtggctaaccaaccagaacccactataataggtgttggagacgta

SEQ ID NO: 468157 - DNA, 60 bp, Artificial
  Synthetic oligonucleotide
tgcaatgagcacgatagcattgcatctccactcaaggtccggttagagtccctggcaggt

SEQ ID NO: 468158 - DNA, 52 bp, Artificial
  Synthetic oligonucleotide
tgcaatggcggagctgggctgcttcgtaaatgtggttgaatctgattcgacg

SEQ ID NO: 468159 - DNA, 55 bp, Artificial
  Synthetic oligonucleotide
tgcaatgggcgcagcggcgacagccctgactgtccagtcccggcatttgcttgca

SEQ ID NO: 468160 - DNA, 55 bp, Artificial
  Synthetic oligonucleotide
tgcaatggtcgtggaccccaacagtgagctggaacgctcactggctcaccgggca

SEQ ID NO: 468161 - DNA, 60 bp, Artificial
  Synthetic oligonucleotide
tgcaatggttaaggttaatgtagcatgtgctgctgtaggcttaacatcaagttacactcc

SEQ ID NO: 468162 - DNA, 55 bp, Artificial
  Synthetic oligonucleotide
tgcaatgtagatgtcgttcgctccactatctgtagagtttactaactccatacca

SEQ ID NO: 468163 - DNA, 60 bp, Artificial
  Synthetic oligonucleotide
tgcaatgtcagctgcagcctccagatcctaggtatcctcaacgcgatcaatccatacagt

SEQ ID NO: 468164 - DNA, 55 bp, Artificial
  Synthetic oligonucleotide
tgcaatgtgattatgtcgtggttcctgaggaatggcctctgttggtgtttggtta

SEQ ID NO: 468165 - DNA, 51 bp, Artificial
  Synthetic oligonucleotide
tgcaatgtgggtctatgcctaaataagtcgtgtgggttgccgcctacaagg

SEQ ID NO: 468166 - DNA, 59 bp, Artificial
  Synthetic oligonucleotide
tgcaatgttaagtctcttttgataattgctcggttcatagggtactgaccaccaaagac

SEQ ID NO: 468167 - DNA, 60 bp, Artificial
  Synthetic oligonucleotide
tgcaattactccctacctccagggtggatctgcctatgttggacgtggtgcttctaccaa

SEQ ID NO: 468168 - DNA, 57 bp, Artificial
  Synthetic oligonucleotide
tgcaattagtatattgctcctggtgacaaaaatttttaagaaggaagactcaaagga

SEQ ID NO: 468169 - DNA, 58 bp, Artificial
  Synthetic oligonucleotide
tgcaattatggccccggggctcggtatgcctggactgtccttccacaaggattcaaaa

SEQ ID NO: 468170 - DNA, 60 bp, Artificial
  Synthetic oligonucleotide
tgcaattcaactcacaatcagacattctctggcagtccgcattttcttagtcagtgagct

SEQ ID NO: 468171 - DNA, 57 bp, Artificial
  Synthetic oligonucleotide
tgcaattcacaagtgaagaacttttgggtatgtacaccaataaccgttgcttaggat

SEQ ID NO: 468172 - DNA, 59 bp, Artificial
  Synthetic oligonucleotide
tgcaattgaccctgaacagatagttggatacgaagaacttgaaaattttgcaacgcttg

SEQ ID NO: 468173 - DNA, 60 bp, Artificial
  Synthetic oligonucleotide
tgcaattgagtactatagggaatctgtatgataccaggccagcggtgatgggatcaaccc

SEQ ID NO: 468174 - DNA, 51 bp, Artificial
  Synthetic oligonucleotide
tgcaattggcggccactacttcactccgcgcgctatgagaggtggcgcaaa

SEQ ID NO: 468175 - DNA, 60 bp, Artificial
  Synthetic oligonucleotide
tgcaatttcgtcgcatcttgtgtgagaaatagggttgggcgattcgatcgagctcaaatg

SEQ ID NO: 468176 - DNA, 59 bp, Artificial
  Synthetic oligonucleotide
tgcaatttggagtcaagcttgaaacactaccgcgtcggaggaacagaatgggaggacac

SEQ ID NO: 468177 - DNA, 52 bp, Artificial
  Synthetic oligonucleotide
tgcaatttggccgaggtctatccagaatgcaccgacccgatgattggagacg

SEQ ID NO: 468178 - DNA, 60 bp, Artificial
  Synthetic oligonucleotide
tgcaattttggcctattggttgtgcccattagcccgctagactatgaccaaggagcgacg

SEQ ID NO: 468179 - DNA, 55 bp, Artificial
  Synthetic oligonucleotide
tgcacaaagttcctcccctcaaagagagcacccactctcacagtcaagggcacag

SEQ ID NO: 468180 - DNA, 58 bp, Artificial
  Synthetic oligonucleotide
tgcacaaatattacgtgttttctacccttgttggcgcataacttgtacgaagtgcatt

SEQ ID NO: 468181 - DNA, 60 bp, Artificial
  Synthetic oligonucleotide
tgcacaacaagttgcggtgtccacatcatctaaccccgcacccatctcagagattgacat

SEQ ID NO: 468182 - DNA, 60 bp, Artificial
  Synthetic oligonucleotide
tgcacaacgcgtccggggcgtaccatgtcacgaacgactgctccaactcaagcattgtgt

SEQ ID NO: 468183 - DNA, 60 bp, Artificial
  Synthetic oligonucleotide
tgcacaacgtggttgagtgcaacagctagctaatagcttttaggctggcacagcaaggcg

SEQ ID NO: 468184 - DNA, 60 bp, Artificial
  Synthetic oligonucleotide
tgcacaactgtgcactgcccaaaacagagcatgagcactaatatagtgcgcccaagtgat

SEQ ID NO: 468185 - DNA, 60 bp, Artificial
  Synthetic oligonucleotide
tgcacaagcagtgcgtgccttaaaacgaaagtatacagacagcagtggcgacactagacc

SEQ ID NO: 468186 - DNA, 55 bp, Artificial
  Synthetic oligonucleotide
tgcacaagggcaaatggtacaccaggctgtatcacctaggacattgaatgcatgg

SEQ ID NO: 468187 - DNA, 55 bp, Artificial
  Synthetic oligonucleotide
tgcacaagggcagatgacacatcagtccatgtcacctaggactttgaatgcatgg

SEQ ID NO: 468188 - DNA, 55 bp, Artificial
  Synthetic oligonucleotide
tgcacaagttcaatgccaaagtgacaggtggacaatacgccagcaacgagcaagc

SEQ ID NO: 468189 - DNA, 58 bp, Artificial
  Synthetic oligonucleotide
tgcacaagttgatacactaatacctttaaataatacaaccaacacaactggcttagga

SEQ ID NO: 468190 - DNA, 60 bp, Artificial
  Synthetic oligonucleotide
tgcacaatagaatgggaggtcgagcgatttatgaccaagaactggagacccgagtcaaag

SEQ ID NO: 468191 - DNA, 59 bp, Artificial
  Synthetic oligonucleotide
tgcacaatcagtgcgtgccttaaaacgaaagtatggagggagcaatctaaataaaagtc

SEQ ID NO: 468192 - DNA, 60 bp, Artificial
  Synthetic oligonucleotide
tgcacaatccaagcaaggagcgcctggtttgggctgtaataggggttcaagtatctcgtg

SEQ ID NO: 468193 - DNA, 60 bp, Artificial
  Synthetic oligonucleotide
tgcacaattaaagtatgtccattaaatacgcagacactgggaattggatgtcttacaacc

SEQ ID NO: 468194 - DNA, 55 bp, Artificial
  Synthetic oligonucleotide
tgcacaccaccaattagtcatactgatctatatcctgcgacctgccctgtcacgc

SEQ ID NO: 468195 - DNA, 60 bp, Artificial
  Synthetic oligonucleotide
tgcacaccactggttgtctagtgggctctagttggtagagaaagctatgcttttgcccaa

SEQ ID NO: 468196 - DNA, 51 bp, Artificial
  Synthetic oligonucleotide
tgcacaccatgcttggtgttcgtatttagagtatccgtctttaaattctct

SEQ ID NO: 468197 - DNA, 60 bp, Artificial
  Synthetic oligonucleotide
tgcacacccgtccatcctcgaccgtacatggccacgccaaccactattttgtcagcggac

SEQ ID NO: 468198 - DNA, 54 bp, Artificial
  Synthetic oligonucleotide
tgcacaccctaacgggtgtgaagcccagtattggacaaggtgtgaagagccccg

SEQ ID NO: 468199 - DNA, 60 bp, Artificial
  Synthetic oligonucleotide
tgcacacccttctgggtgtgaagccaaatactagacaaggtgtgaagagccccgtgtgct

SEQ ID NO: 468200 - DNA, 55 bp, Artificial
  Synthetic oligonucleotide
tgcacaccggcgatgacgtgtatatgcgacttcgtaccctccgtgatgcctccac

SEQ ID NO: 468201 - DNA, 56 bp, Artificial
  Synthetic oligonucleotide
tgcacactccggggtgtgtcccttgcgtccgcgagggtaacacctcgaggtgttgg

SEQ ID NO: 468202 - DNA, 60 bp, Artificial
  Synthetic oligonucleotide
tgcacacttatagatgccctattgggggaccctcattgtgatggtttccaagatgagaca

SEQ ID NO: 468203 - DNA, 52 bp, Artificial
  Synthetic oligonucleotide
tgcacactttcaagaccaatggtgattatgcctggtcccatgctgatgactg

SEQ ID NO: 468204 - DNA, 52 bp, Artificial
  Synthetic oligonucleotide
tgcacagaaagagagtatgaatatcagatcaacgcaaccacggttcaaaaca

SEQ ID NO: 468205 - DNA, 50 bp, Artificial
  Synthetic oligonucleotide
tgcacagattgagggtgtaggattaactgttgatgttacaactaacggtg

SEQ ID NO: 468206 - DNA, 53 bp, Artificial
  Synthetic oligonucleotide
tgcacagcttgggtttcaccggagtgtctgctattctttaatggacattaacc

SEQ ID NO: 468207 - DNA, 58 bp, Artificial
  Synthetic oligonucleotide
tgcacaggcccatgtacaggaagcccaggatctaccgaacgctgaggacgcccgatgt

SEQ ID NO: 468208 - DNA, 55 bp, Artificial
  Synthetic oligonucleotide
tgcacaggtggctagtcctagaccagcgaatggcgagctctcctacgtcccgcag

SEQ ID NO: 468209 - DNA, 60 bp, Artificial
  Synthetic oligonucleotide
tgcacaggttctacgcgaaggtcactggtggtcagtatgcgagcaacgagcaagccttgg

SEQ ID NO: 468210 - DNA, 60 bp, Artificial
  Synthetic oligonucleotide
tgcacagtcgatatggagaaatatggaacagccgcagttcaagtcaatccgtcgtcgacg

SEQ ID NO: 468211 - DNA, 60 bp, Artificial
  Synthetic oligonucleotide
tgcacagtgtggtgtcacttcttctttgccacctctcttcttcttttgcgttacaatccc

SEQ ID NO: 468212 - DNA, 60 bp, Artificial
  Synthetic oligonucleotide
tgcacagtgtggttcaccactgttgccacccttcttctttctactcagcacaactccatt

SEQ ID NO: 468213 - DNA, 60 bp, Artificial
  Synthetic oligonucleotide
tgcacatcagccgttgcataagaccagatctatgcgaattggcactacctcttttactgg

SEQ ID NO: 468214 - DNA, 58 bp, Artificial
  Synthetic oligonucleotide
tgcacatcgcgaacgcagcttgactgcgcccggtcggaaacccccagaaacgcgaaaa

SEQ ID NO: 468215 - DNA, 60 bp, Artificial
  Synthetic oligonucleotide
tgcacatcgtttgagtagacctttgaattgaaatcgaggtgaccactcaaggaattatgg

SEQ ID NO: 468216 - DNA, 60 bp, Artificial
  Synthetic oligonucleotide
tgcacatctcgatgtgtcggggacctatgctgtccacgggcaccaactcgaggccctcta

SEQ ID NO: 468217 - DNA, 55 bp, Artificial
  Synthetic oligonucleotide
tgcacatgcacgtgaggtcgtggggtgggtccgcgatcctggccgatatggaggc

SEQ ID NO: 468218 - DNA, 57 bp, Artificial
  Synthetic oligonucleotide
tgcacatgtgggctgcaatctgtaacaagggcgttagcgttccccacggaacacgga

SEQ ID NO: 468219 - DNA, 60 bp, Artificial
  Synthetic oligonucleotide
tgcacatgttgtctgagtttgattaaggcctctggtgtttcaaagggatctgaagacttt

SEQ ID NO: 468220 - DNA, 60 bp, Artificial
  Synthetic oligonucleotide
tgcacattaaacaggggcaatgcactgaaggattagtggcacaattaggccattccttgc

SEQ ID NO: 468221 - DNA, 60 bp, Artificial
  Synthetic oligonucleotide
tgcacattcgcttacatttcatggaagaatgggagttgggagctcagatgttgcgaaatt

SEQ ID NO: 468222 - DNA, 59 bp, Artificial
  Synthetic oligonucleotide
tgcaccaaatccaaagtgaacatcgtccctcctaaggtagagacacacccaatcagagg

SEQ ID NO: 468223 - DNA, 60 bp, Artificial
  Synthetic oligonucleotide
tgcaccaagcacatccaatcaacagaacatggaggtatcaaatgatatacctaacgacga

SEQ ID NO: 468224 - DNA, 55 bp, Artificial
  Synthetic oligonucleotide
tgcaccaatacctaaaactagagatgattttgcatggcaatctggaacaaatgcc

SEQ ID NO: 468225 - DNA, 60 bp, Artificial
  Synthetic oligonucleotide
tgcaccaatattaccaactaatttaactgcgacatctcctagttttgctagagagtctat

SEQ ID NO: 468226 - DNA, 60 bp, Artificial
  Synthetic oligonucleotide
tgcaccaatgatgacactcagaagtgtgttgacacaaagctcgaacatccacaaagcata

SEQ ID NO: 468227 - DNA, 59 bp, Artificial
  Synthetic oligonucleotide
tgcaccacaaagtgccaaactcctcatggggccttgaaaagcaatcttccttttcagaa

SEQ ID NO: 468228 - DNA, 60 bp, Artificial
  Synthetic oligonucleotide
tgcaccacgtaggctgacattgattgttttggaaaacatatacaagaataacttgtgagc

SEQ ID NO: 468229 - DNA, 60 bp, Artificial
  Synthetic oligonucleotide
tgcaccactgatgtgccttgggatactagttggagtaataaaactctggatgatatttgg

SEQ ID NO: 468230 - DNA, 60 bp, Artificial
  Synthetic oligonucleotide
tgcaccagaggtgtagcaaaagccctacagttcataccagttgaaaccctcagtacacag

SEQ ID NO: 468231 - DNA, 60 bp, Artificial
  Synthetic oligonucleotide
tgcaccagctaatacgcaacagtttgaacacatagtcccactacgtagagtgttgactac

SEQ ID NO: 468232 - DNA, 59 bp, Artificial
  Synthetic oligonucleotide
tgcaccaggtaagagatgagtacttatttactatcagaataaaggataaactgtaccca

SEQ ID NO: 468233 - DNA, 60 bp, Artificial
  Synthetic oligonucleotide
tgcaccatgctcgtgtgtggcgacgacctagtcgttatctgtgaaagtcagggagtccca

SEQ ID NO: 468234 - DNA, 60 bp, Artificial
  Synthetic oligonucleotide
tgcaccatgctcgtgtgtggcgacgacttagtcgttatctgtgaaagtgcgggggttcag

SEQ ID NO: 468235 - DNA, 55 bp, Artificial
  Synthetic oligonucleotide
tgcaccattgtggtaccatggatagctcagggatactaccgtcataccaaagctg

SEQ ID NO: 468236 - DNA, 54 bp, Artificial
  Synthetic oligonucleotide
tgcacccacactaccaaaggtgatacctgacggttacaggttcttcaataagac

SEQ ID NO: 468237 - DNA, 57 bp, Artificial
  Synthetic oligonucleotide
tgcacccaggggagtcaatcagtttcgaaagcaatggaggattattggcacccagat

SEQ ID NO: 468238 - DNA, 60 bp, Artificial
  Synthetic oligonucleotide
tgcacccatagtaaaatgggtagagataatgttcattcatgttgcccgatattggacgtt

SEQ ID NO: 468239 - DNA, 52 bp, Artificial
  Synthetic oligonucleotide
tgcacccctgtcggacttagtctctggtgcgggcccgagtcacggacggagt

SEQ ID NO: 468240 - DNA, 57 bp, Artificial
  Synthetic oligonucleotide
tgcacccgaccatgagggaattcaagccggagtcgataggttttatcgaacctgtaa

SEQ ID NO: 468241 - DNA, 55 bp, Artificial
  Synthetic oligonucleotide
tgcacccgcctcatcaatgcagaaccacatgactcaacatctagtggctctgggc

SEQ ID NO: 468242 - DNA, 54 bp, Artificial
  Synthetic oligonucleotide
tgcacccggggggttgcgaaggcggtggactttatacccgtcgagtccatggaa

SEQ ID NO: 468243 - DNA, 54 bp, Artificial
  Synthetic oligonucleotide
tgcacccggggggttgcgaaggcggtggactttgtaccggttgagtctatggaa

SEQ ID NO: 468244 - DNA, 55 bp, Artificial
  Synthetic oligonucleotide
tgcacccggggggttgcgaaggcggtggatttcatacccgttgaatcaatggaaa

SEQ ID NO: 468245 - DNA, 55 bp, Artificial
  Synthetic oligonucleotide
tgcacccgttagaccacaacacatgccagtagaacccgtccctgtcccgacagtg

SEQ ID NO: 468246 - DNA, 60 bp, Artificial
  Synthetic oligonucleotide
tgcaccctggcatgtcaagaccatgttctttggcaggctttcaattacagcgctcgtcag

SEQ ID NO: 468247 - DNA, 60 bp, Artificial
  Synthetic oligonucleotide
tgcaccctggctcggggaagacccatcgggtcctccctgagctcatccgtcaatgtgtgg

SEQ ID NO: 468248 - DNA, 60 bp, Artificial
  Synthetic oligonucleotide
tgcaccgaacagttgtgtgtgtgagtccagggtccgctagagcaagcgagaccgccgagg

SEQ ID NO: 468249 - DNA, 60 bp, Artificial
  Synthetic oligonucleotide
tgcaccgacttggtccaatgggatcctcaattcgacagatctattactaataagacttgg

SEQ ID NO: 468250 - DNA, 60 bp, Artificial
  Synthetic oligonucleotide
tgcaccgcaatgaagaaattctcagttcgtaactgcatcccgcgcacctactctacctgg

SEQ ID NO: 468251 - DNA, 60 bp, Artificial
  Synthetic oligonucleotide
tgcaccggagtacagatgaatggttttcgcttgcgttgtatccagagtcgagcgtgttat

SEQ ID NO: 468252 - DNA, 55 bp, Artificial
  Synthetic oligonucleotide
tgcaccggtgctttctcagaccggtcggtagggatgttcagcgctggtattctgc

SEQ ID NO: 468253 - DNA, 53 bp, Artificial
  Synthetic oligonucleotide
tgcaccgtactgagtgactttaagacgtggctgaaggctaagctactgcctcg

SEQ ID NO: 468254 - DNA, 50 bp, Artificial
  Synthetic oligonucleotide
tgcaccgtagcgtctgcagagatcgacccagagtcactcgcccgattccc

SEQ ID NO: 468255 - DNA, 60 bp, Artificial
  Synthetic oligonucleotide
tgcaccgttactagttgcacatactctacagactatggcggagtgctcgtgttgacatac

SEQ ID NO: 468256 - DNA, 55 bp, Artificial
  Synthetic oligonucleotide
tgcaccgttttctttcagatgtccttgtggcggcctagcgattccaaggtgtatt

SEQ ID NO: 468257 - DNA, 60 bp, Artificial
  Synthetic oligonucleotide
tgcacctaacgatgcgaagcgagctccacaagccctctatataagaaggccttgtattca

SEQ ID NO: 468258 - DNA, 54 bp, Artificial
  Synthetic oligonucleotide
tgcacctacagtaacgccttataatcctgttacgcctgctttacctacaggtcc

SEQ ID NO: 468259 - DNA, 58 bp, Artificial
  Synthetic oligonucleotide
tgcacctaccgtgagtatctgttcagtgatgcagtcaagtatcctatatacaaacgtg

SEQ ID NO: 468260 - DNA, 60 bp, Artificial
  Synthetic oligonucleotide
tgcacctatatacgagtgtgcttgggctagctccactggcattgttaagaaggggctgga

SEQ ID NO: 468261 - DNA, 60 bp, Artificial
  Synthetic oligonucleotide
tgcacctatcacggcctactcccaacagacacggggtctacttggctgcatcatcactag

SEQ ID NO: 468262 - DNA, 53 bp, Artificial
  Synthetic oligonucleotide
tgcacctatttcgttccaaagataagtgcagaagccaaccgaatctactgctt

SEQ ID NO: 468263 - DNA, 55 bp, Artificial
  Synthetic oligonucleotide
tgcacctcacttccaatgctcaggttggtggactcatagtcagtggaccatcccc

SEQ ID NO: 468264 - DNA, 60 bp, Artificial
  Synthetic oligonucleotide
tgcacctcccagatatagacgccactcctgagttgagctgcagtgatgtactcccctgtg

SEQ ID NO: 468265 - DNA, 60 bp, Artificial
  Synthetic oligonucleotide
tgcacctcgcagttccaagctggtcacattcttgcgtccctcaaattcctccccgacatg

SEQ ID NO: 468266 - DNA, 60 bp, Artificial
  Synthetic oligonucleotide
tgcacctctgcctccgacggcacatcacatgccgcaacgtgctcctaggattgctggtgc

SEQ ID NO: 468267 - DNA, 57 bp, Artificial
  Synthetic oligonucleotide
tgcaccttaccttggaagaggacactgaaggcttgttggaatggtgtaagagaaacc

SEQ ID NO: 468268 - DNA, 50 bp, Artificial
  Synthetic oligonucleotide
tgcacgaactttttgtaagaatgcgtgcgctgtccggaacaactacagca

SEQ ID NO: 468269 - DNA, 52 bp, Artificial
  Synthetic oligonucleotide
tgcacgaatttggcgacacaagcaatgggtgcacgtcggcaggcgaacactt

SEQ ID NO: 468270 - DNA, 60 bp, Artificial
  Synthetic oligonucleotide
tgcacgactcctgctcaaggaacctctatgttcccctcatgttgctgtacaaaacctacg

SEQ ID NO: 468271 - DNA, 60 bp, Artificial
  Synthetic oligonucleotide
tgcacgagttcgaaagatggtaattatgtgtatccctgctgttgcacaacacttgacgat

SEQ ID NO: 468272 - DNA, 60 bp, Artificial
  Synthetic oligonucleotide
tgcacgatagagatgtacctgtgaacgctcataacagtgacgaaaaacattccactgtaa

SEQ ID NO: 468273 - DNA, 60 bp, Artificial
  Synthetic oligonucleotide
tgcacgatccgcagtgatgtattcccctgtgcgtgaatccgtgatcatggcagttgatcg

SEQ ID NO: 468274 - DNA, 60 bp, Artificial
  Synthetic oligonucleotide
tgcacgatggtgggcagtttctgtcctacgacgagatcaacaacgggcttcaagtgtcat

SEQ ID NO: 468275 - DNA, 60 bp, Artificial
  Synthetic oligonucleotide
tgcacgatgttattgagactgcaatcagtaaaggcttttctgcgagagaggcccttgaaa

SEQ ID NO: 468276 - DNA, 50 bp, Artificial
  Synthetic oligonucleotide
tgcacgcaaatacttcaacccctactacaccgatttcagtcttttgactt

SEQ ID NO: 468277 - DNA, 50 bp, Artificial
  Synthetic oligonucleotide
tgcacgcaattggacagttctggcttcggtatgggtacacaatgaacacg

SEQ ID NO: 468278 - DNA, 60 bp, Artificial
  Synthetic oligonucleotide
tgcacgcacaagctcattcacactaaaagctaacttcgtgaacaaacatgggtggtccaa

SEQ ID NO: 468279 - DNA, 58 bp, Artificial
  Synthetic oligonucleotide
tgcacgcagggaacaatgttatgccagacacttttttgttagagggggtaagacagga

SEQ ID NO: 468280 - DNA, 55 bp, Artificial
  Synthetic oligonucleotide
tgcacgcagtgcttgagagcctgttaggttaggacgaccacgggcaatcttaggc

SEQ ID NO: 468281 - DNA, 60 bp, Artificial
  Synthetic oligonucleotide
tgcacgcgggttgtaaacgctaagaattatatggagctgataaactctgcatatactgaa

SEQ ID NO: 468282 - DNA, 60 bp, Artificial
  Synthetic oligonucleotide
tgcacgctaggcaaggaaaggagacctatctttcgtcgcaattcagtgctattctaacga

SEQ ID NO: 468283 - DNA, 60 bp, Artificial
  Synthetic oligonucleotide
tgcacgctcagcgctatatacgatattgtggcatcgactcgcgagagttgatcaatccga

SEQ ID NO: 468284 - DNA, 60 bp, Artificial
  Synthetic oligonucleotide
tgcacggaagctttagacactattatgtgttatttgctgatgatgctcgtagatatagca

SEQ ID NO: 468285 - DNA, 55 bp, Artificial
  Synthetic oligonucleotide
tgcacggctatgtaatatgccaccgtgttgggcgttttgatggggtaatttggct

SEQ ID NO: 468286 - DNA, 60 bp, Artificial
  Synthetic oligonucleotide
tgcacgggctgcgtgggagacagctagacacactccagttaactcctggctaggcaacat

SEQ ID NO: 468287 - DNA, 53 bp, Artificial
  Synthetic oligonucleotide
tgcacgggtacgcagactacatcatctcacaaataaagtacggagacccctta

SEQ ID NO: 468288 - DNA, 54 bp, Artificial
  Synthetic oligonucleotide
tgcacgggttttgtccaaattttgtcaaccctgttagttttacaggctggtgta

SEQ ID NO: 468289 - DNA, 60 bp, Artificial
  Synthetic oligonucleotide
tgcacggtacagcgtgagccctttagcacacgtgatgaataatgatgtaatgccaattaa

SEQ ID NO: 468290 - DNA, 56 bp, Artificial
  Synthetic oligonucleotide
tgcacggtcaccgctttcattagtgtcgcgtcggttcttatgctgataaagtacgc

SEQ ID NO: 468291 - DNA, 60 bp, Artificial
  Synthetic oligonucleotide
tgcacggttagcaccggaagatgtaaatgcattagcttggctagcgcacaacagtcaggc

SEQ ID NO: 468292 - DNA, 60 bp, Artificial
  Synthetic oligonucleotide
tgcacgtagcattaggtgtggacagctataaattagctgacctttgctcacttaattggt

SEQ ID NO: 468293 - DNA, 60 bp, Artificial
  Synthetic oligonucleotide
tgcacgtgcagaggcaattagagtcttttcctgtgtcgactgggtccacaagctaacttt

SEQ ID NO: 468294 - DNA, 60 bp, Artificial
  Synthetic oligonucleotide
tgcacgtgctttcacgtataagatcctatctgaggatcagtatggatcggaatttactat

SEQ ID NO: 468295 - DNA, 60 bp, Artificial
  Synthetic oligonucleotide
tgcacgttatatgcgcgataatgtacaaatatacgataatactccgcattaggttcattg

SEQ ID NO: 468296 - DNA, 60 bp, Artificial
  Synthetic oligonucleotide
tgcacgttggagctattgaagtcatttttgatagctttgcgtccccttctagtgacatag

SEQ ID NO: 468297 - DNA, 58 bp, Artificial
  Synthetic oligonucleotide
tgcactaaatgtttttgtaaacggtgttgctttcattgttaccactgctttgcaacga

SEQ ID NO: 468298 - DNA, 58 bp, Artificial
  Synthetic oligonucleotide
tgcactaagaccaagctttaagatgatcgaacaaaagctcaccttgaggtccaaaccc

SEQ ID NO: 468299 - DNA, 60 bp, Artificial
  Synthetic oligonucleotide
tgcactaagacctcccagtgccgtgcgtatcgcttacagaatgacaagtgggtgtacaat

SEQ ID NO: 468300 - DNA, 52 bp, Artificial
  Synthetic oligonucleotide
tgcactaagcaatagggcagactgtgtcttccctgaagacgcccattaccga

SEQ ID NO: 468301 - DNA, 58 bp, Artificial
  Synthetic oligonucleotide
tgcactaatgctgttggagggagcgggacgaacaattacggagtgaaaggatttggct

SEQ ID NO: 468302 - DNA, 50 bp, Artificial
  Synthetic oligonucleotide
tgcactaccagaacctttcgaggttaaaactgattactggattcctgctc

SEQ ID NO: 468303 - DNA, 59 bp, Artificial
  Synthetic oligonucleotide
tgcactacgttgggtgtggtgacctgcgtaccttaatgcagtttaagaaacgatcacca

SEQ ID NO: 468304 - DNA, 53 bp, Artificial
  Synthetic oligonucleotide
tgcactagagctgcagcgtggataagtaaggaagacatatttggtttggagtc

SEQ ID NO: 468305 - DNA, 58 bp, Artificial
  Synthetic oligonucleotide
tgcactaggaccttatagggtccaggttgtttatgaaagaacctattgcatgacaggg

SEQ ID NO: 468306 - DNA, 55 bp, Artificial
  Synthetic oligonucleotide
tgcactagtaaagttgagagattatacggcactgcagatgggatggttaatagtc

SEQ ID NO: 468307 - DNA, 60 bp, Artificial
  Synthetic oligonucleotide
tgcactagtgaactcaactctactggagaccagaacaaccaatcagttcctagctgtctc

SEQ ID NO: 468308 - DNA, 60 bp, Artificial
  Synthetic oligonucleotide
tgcactatagatcacgcagtcgcactaaaagttcatacagctgctctgaaagtcggcctg

SEQ ID NO: 468309 - DNA, 51 bp, Artificial
  Synthetic oligonucleotide
tgcactattatcacaatatgctacatctaatctgcttcattgtacccacaa

SEQ ID NO: 468310 - DNA, 55 bp, Artificial
  Synthetic oligonucleotide
tgcactattccgctttttcctgctactaatgtgtgtgcgcatgcttggctacttg

SEQ ID NO: 468311 - DNA, 60 bp, Artificial
  Synthetic oligonucleotide
tgcactattgaaggttggattcttggaaatccccaatgtgacatcttgcttggagaccaa

SEQ ID NO: 468312 - DNA, 60 bp, Artificial
  Synthetic oligonucleotide
tgcactcatagtgaatgcaccgaatcatgagggaatacaagcaggagtagacagattcta

SEQ ID NO: 468313 - DNA, 60 bp, Artificial
  Synthetic oligonucleotide
tgcactcatatgtcctgacccctgctcaactagggggactgagcaacctccaatactcaa

SEQ ID NO: 468314 - DNA, 59 bp, Artificial
  Synthetic oligonucleotide
tgcactcatgcaagtaatcctgtatatgcgactctgaaagttcgcatctacttttatga

SEQ ID NO: 468315 - DNA, 60 bp, Artificial
  Synthetic oligonucleotide
tgcactccaaatgtgccactcaagaccatgaagtcactgaagactgtaccttttgtagga

SEQ ID NO: 468316 - DNA, 56 bp, Artificial
  Synthetic oligonucleotide
tgcactcgacctcccggtctggttagctcactttccctagaacgcggacccggcga

SEQ ID NO: 468317 - DNA, 56 bp, Artificial
  Synthetic oligonucleotide
tgcactctaaaacgacgtggtttggatggcatttttgtaaataaggctggtactcc

SEQ ID NO: 468318 - DNA, 59 bp, Artificial
  Synthetic oligonucleotide
tgcactctacactcacgtctgtgtgcgcgcggggaccgttggactaccgttcacccacc

SEQ ID NO: 468319 - DNA, 60 bp, Artificial
  Synthetic oligonucleotide
tgcactcttcacaggacaaatattaacaggctagattatagtggattttaccaagtgcct

SEQ ID NO: 468320 - DNA, 60 bp, Artificial
  Synthetic oligonucleotide
tgcactgacctcgcaataacaaaagcttgacacaatgcccgataagtcgttacgattgcc

SEQ ID NO: 468321 - DNA, 60 bp, Artificial
  Synthetic oligonucleotide
tgcactgagcaactcgttgttgcgtcaccacaatttggtatactccactacctcgcgcag

SEQ ID NO: 468322 - DNA, 60 bp, Artificial
  Synthetic oligonucleotide
tgcactggaattctcacagacaccagcagacctggggacaaatctagtggtgattgttcc

SEQ ID NO: 468323 - DNA, 55 bp, Artificial
  Synthetic oligonucleotide
tgcactggaatttcccttcgaattgaatgagcacatggagatgagggctcctatc

SEQ ID NO: 468324 - DNA, 56 bp, Artificial
  Synthetic oligonucleotide
tgcactgtacaaattgatgtgtatagcacaaggcccctataccggcttaccacaac

SEQ ID NO: 468325 - DNA, 57 bp, Artificial
  Synthetic oligonucleotide
tgcactgtgactataggagcttttttaaatggggaggggcacaacctccattacaaa

SEQ ID NO: 468326 - DNA, 60 bp, Artificial
  Synthetic oligonucleotide
tgcactgttatcgttttgatgggttggctgtggccgcatttaagggtgacgactctatcg

SEQ ID NO: 468327 - DNA, 60 bp, Artificial
  Synthetic oligonucleotide
tgcactgttatggatggccagtgtggagccccattggatagcggcctctatcatactgga

SEQ ID NO: 468328 - DNA, 57 bp, Artificial
  Synthetic oligonucleotide
tgcacttaaagacatgggcattttcggtcaaaacatgttttaccactcacaaggtag

SEQ ID NO: 468329 - DNA, 55 bp, Artificial
  Synthetic oligonucleotide
tgcacttagctctcgagtgaatgtctggccgcctgccccatcccgctatgtgggc

SEQ ID NO: 468330 - DNA, 55 bp, Artificial
  Synthetic oligonucleotide
tgcacttctggatgcttatgctggtcccattagtggcctcccacgtctgacgaca

SEQ ID NO: 468331 - DNA, 55 bp, Artificial
  Synthetic oligonucleotide
tgcacttcttggtgatggctcagggcctagccctgtaccgggtcctaatccggac

SEQ ID NO: 468332 - DNA, 60 bp, Artificial
  Synthetic oligonucleotide
tgcacttgagcaggattacaaaacacacgacgcacgcgatgcattactcacagctctaca

SEQ ID NO: 468333 - DNA, 60 bp, Artificial
  Synthetic oligonucleotide
tgcacttggcaactagacacccaacaaagtgatggaactaatgcatggcaagacgcttgg

SEQ ID NO: 468334 - DNA, 57 bp, Artificial
  Synthetic oligonucleotide
tgcacttgtctgggatgaaatggcgaaagacagtgtctttgggtcgacgtattcaac

SEQ ID NO: 468335 - DNA, 60 bp, Artificial
  Synthetic oligonucleotide
tgcactttggtcaattacgtgccgtcatgtccaaactgaaggctgtgagagccatatgtt

SEQ ID NO: 468336 - DNA, 54 bp, Artificial
  Synthetic oligonucleotide
tgcactttgtaagggcagacggatatcacgtcgaatatgcttatgacaccaagt

SEQ ID NO: 468337 - DNA, 58 bp, Artificial
  Synthetic oligonucleotide
tgcacttttttatagatctgatgtagtaccacttaataatgggactgggaatgactct

SEQ ID NO: 468338 - DNA, 60 bp, Artificial
  Synthetic oligonucleotide
tgcagaaaagcagtatgagaaagaccctgatgatctgaacaaaagggcattgagtgaccg

SEQ ID NO: 468339 - DNA, 53 bp, Artificial
  Synthetic oligonucleotide
tgcagaaaatagccacagaaagcatagtaatatggggaagaactcctaaattt

SEQ ID NO: 468340 - DNA, 55 bp, Artificial
  Synthetic oligonucleotide
tgcagaaacaccaaactctgagaatggagcatgttacccaggagatttcgccgac

SEQ ID NO: 468341 - DNA, 60 bp, Artificial
  Synthetic oligonucleotide
tgcagaaactggtcataccagccaaacacaaccagaagatgtgattgaaaccaggtatgt

SEQ ID NO: 468342 - DNA, 60 bp, Artificial
  Synthetic oligonucleotide
tgcagaaagaggtaaattaaagagaagagcaattgcaacacccggaatgcaaatcagagg

SEQ ID NO: 468343 - DNA, 60 bp, Artificial
  Synthetic oligonucleotide
tgcagaaattagatttcgaggggtcgtcacctgagacggacatcaatttagcgctgaccg

SEQ ID NO: 468344 - DNA, 58 bp, Artificial
  Synthetic oligonucleotide
tgcagaacaactataccacaataattgaaccctcagcccccaatgtggttcactactc

SEQ ID NO: 468345 - DNA, 50 bp, Artificial
  Synthetic oligonucleotide
tgcagaacgcccaacctgtgcgcctgtccacattacggtattagtttcaa

SEQ ID NO: 468346 - DNA, 55 bp, Artificial
  Synthetic oligonucleotide
tgcagaagaggtagggtttaagttcctatccacgccacttccgcctatccaacct

SEQ ID NO: 468347 - DNA, 55 bp, Artificial
  Synthetic oligonucleotide
tgcagaaggattcaaagaaccaatgactcatacttacttatccggaatttgcaac

SEQ ID NO: 468348 - DNA, 60 bp, Artificial
  Synthetic oligonucleotide
tgcagaagtaccacttagaggtagttcgtcacgttctagcgaaagtgaggtgcgcactga

SEQ ID NO: 468349 - DNA, 60 bp, Artificial
  Synthetic oligonucleotide
tgcagaagtgaaccctgccccagatattcctagagttgacacatctgttgtgacaacaag

SEQ ID NO: 468350 - DNA, 60 bp, Artificial
  Synthetic oligonucleotide
tgcagaataggatgcaattttcttctctaaccgtgaatgtgaggggctcaggaatgagaa

SEQ ID NO: 468351 - DNA, 60 bp, Artificial
  Synthetic oligonucleotide
tgcagaatatatgcagcggataattcagggaccatggattgagaaagatggaattgggat

SEQ ID NO: 468352 - DNA, 60 bp, Artificial
  Synthetic oligonucleotide
tgcagaatgtttgctctcagccaaggtacaacactaaggggtcgacatgcaaatgggacc

SEQ ID NO: 468353 - DNA, 55 bp, Artificial
  Synthetic oligonucleotide
tgcagaattactcaataaccaatttggaaccatgccaagcctcaccttggcgtgc

SEQ ID NO: 468354 - DNA, 54 bp, Artificial
  Synthetic oligonucleotide
tgcagaatttgcatttaaatttgtgagttcagattgtagttaaaaacacccttg

SEQ ID NO: 468355 - DNA, 55 bp, Artificial
  Synthetic oligonucleotide
tgcagacaacgccttataatttggtgggaagaatgtttaatgcatcaagattggg

SEQ ID NO: 468356 - DNA, 60 bp, Artificial
  Synthetic oligonucleotide
tgcagacacaatatgtataggctaccatgcgaacaactcaaccgacactgttgacacagt

SEQ ID NO: 468357 - DNA, 60 bp, Artificial
  Synthetic oligonucleotide
tgcagacacattatgtataggttatcatgcaaataattcaactgacactgttgatacggt

SEQ ID NO: 468358 - DNA, 58 bp, Artificial
  Synthetic oligonucleotide
tgcagacactcagtaccatgttccagtccgataaagattgagaacgtgtgggacgaat

SEQ ID NO: 468359 - DNA, 60 bp, Artificial
  Synthetic oligonucleotide
tgcagacagatataatcagtctctgggaccaaagcctaaagccatgtgtaaagttaaccc

SEQ ID NO: 468360 - DNA, 58 bp, Artificial
  Synthetic oligonucleotide
tgcagaccaaaaaaagtctcagggggtcatataaatgttatagaagttggagatgact

SEQ ID NO: 468361 - DNA, 55 bp, Artificial
  Synthetic oligonucleotide
tgcagacccttcggagcggctgtggcagaaacagcggcgagtggacagtggtcag

SEQ ID NO: 468362 - DNA, 60 bp, Artificial
  Synthetic oligonucleotide
tgcagacctatccagcttcgccgtttggtcatcatgatgtgctctctcacgatctaaagt

SEQ ID NO: 468363 - DNA, 60 bp, Artificial
  Synthetic oligonucleotide
tgcagacctctcctgagggacgaagtgtcgttttctgtcggcctccatagctatgttatg

SEQ ID NO: 468364 - DNA, 60 bp, Artificial
  Synthetic oligonucleotide
tgcagacgatcaggttcttcgttctatgcagagatgaagtggttgctatctaagtcagac

SEQ ID NO: 468365 - DNA, 55 bp, Artificial
  Synthetic oligonucleotide
tgcagacgccagctgagtatctggctagctatacgccgcgcgttgcggggttgca

SEQ ID NO: 468366 - DNA, 59 bp, Artificial
  Synthetic oligonucleotide
tgcagactaggacatggtcatcgtatgggagcatgcgattaccgtaaagtagatctgta

SEQ ID NO: 468367 - DNA, 58 bp, Artificial
  Synthetic oligonucleotide
tgcagactcagaaatgaacaaactttacgagcgtgttaggaaacaactaagagagaat

SEQ ID NO: 468368 - DNA, 60 bp, Artificial
  Synthetic oligonucleotide
tgcagacttacagctcataacggctgcaatcgaagcactctgtattcctatgtagtaaaa

SEQ ID NO: 468369 - DNA, 60 bp, Artificial
  Synthetic oligonucleotide
tgcagacttgataggtagctacactcccgaatccttaaatgcctcacttccgaatgatgc

SEQ ID NO: 468370 - DNA, 60 bp, Artificial
  Synthetic oligonucleotide
tgcagagaacagtgactcgaataaggttctgcacggcaatggtttccttgatttgaacga

SEQ ID NO: 468371 - DNA, 60 bp, Artificial
  Synthetic oligonucleotide
tgcagagacaactggaaaggctctaacaggccatggatgcgcataaacaacgaaactata

SEQ ID NO: 468372 - DNA, 53 bp, Artificial
  Synthetic oligonucleotide
tgcagagaggcaatttcaggaacaaccaaagaaggactgttaagtgtttcaat

SEQ ID NO: 468373 - DNA, 57 bp, Artificial
  Synthetic oligonucleotide
tgcagagaggcaattttaggaaccaaagaaaaattgttaagtgtttcaattgtggca

SEQ ID NO: 468374 - DNA, 60 bp, Artificial
  Synthetic oligonucleotide
tgcagagatcagatattcagctcgtacacgacggattttgcactctaaacatggagatgc

SEQ ID NO: 468375 - DNA, 55 bp, Artificial
  Synthetic oligonucleotide
tgcagagcagaccaagttatatgggagtggagacaaactaataacagtcgggagt

SEQ ID NO: 468376 - DNA, 60 bp, Artificial
  Synthetic oligonucleotide
tgcagagccctataacacccgtcgatggtatttatcggagcatgaaatacatccgtctaa

SEQ ID NO: 468377 - DNA, 58 bp, Artificial
  Synthetic oligonucleotide
tgcagaggatcttcattcacctcaccaaagaccccccctcccttctccagaaagcgaa

SEQ ID NO: 468378 - DNA, 53 bp, Artificial
  Synthetic oligonucleotide
tgcagaggcaccaagcgcaccacccctctgaagacccgcagcgaaacccaacc

SEQ ID NO: 468379 - DNA, 60 bp, Artificial
  Synthetic oligonucleotide
tgcagagggtgcgctctataccatgtatgtcagtggtgcagtcagtataacaggtgtttc

SEQ ID NO: 468380 - DNA, 58 bp, Artificial
  Synthetic oligonucleotide
tgcagagggtttgtcttgggataaacattggttttggcagccgagtaggatagcgtgg

SEQ ID NO: 468381 - DNA, 60 bp, Artificial
  Synthetic oligonucleotide
tgcagaggttaacattagcgcgtttctatgacatccgtcctgctataatggggcaggcgc

SEQ ID NO: 468382 - DNA, 60 bp, Artificial
  Synthetic oligonucleotide
tgcagaggttcctgaatgggacacttcctcttgtatccagaagggagattggacatcgca

SEQ ID NO: 468383 - DNA, 57 bp, Artificial
  Synthetic oligonucleotide
tgcagagtttaataatgtagagtgtactggcggagattatagtttttcattaccggt

SEQ ID NO: 468384 - DNA, 60 bp, Artificial
  Synthetic oligonucleotide
tgcagatacatcccccgtcacgctcacgcttcaaggctcgctgatactcgacatgctcta

SEQ ID NO: 468385 - DNA, 57 bp, Artificial
  Synthetic oligonucleotide
tgcagataccatttattacgactattacccattggaaaatggagcgaaaaaatgtaa

SEQ ID NO: 468386 - DNA, 55 bp, Artificial
  Synthetic oligonucleotide
tgcagatactcaagtctacgaacatgacgttgacaaagattattacgaaaacgcc

SEQ ID NO: 468387 - DNA, 53 bp, Artificial
  Synthetic oligonucleotide
tgcagatcagggggtttgtgtactctgtcgaaacactggcaaggagcatctgt

SEQ ID NO: 468388 - DNA, 60 bp, Artificial
  Synthetic oligonucleotide
tgcagatctaaagagcactcaagcagccattgaccagatcaatgggaaattgaacagagt

SEQ ID NO: 468389 - DNA, 57 bp, Artificial
  Synthetic oligonucleotide
tgcagatctagatcagtttcctttgggacgaaagtttttattacaatcaggccttaa

SEQ ID NO: 468390 - DNA, 60 bp, Artificial
  Synthetic oligonucleotide
tgcagatcttattcgtgaacagcagagccagaccatttcgaggcagcaggcaggaggttc

SEQ ID NO: 468391 - DNA, 60 bp, Artificial
  Synthetic oligonucleotide
tgcagatcttccatcgatctgaaactcaccccagtcgatgtaatcactgtccttctcgat

SEQ ID NO: 468392 - DNA, 50 bp, Artificial
  Synthetic oligonucleotide
tgcagatcttccatcgatctggaattctccccattcgagggtgtctccgt

SEQ ID NO: 468393 - DNA, 60 bp, Artificial
  Synthetic oligonucleotide
tgcagatgacgatgcttatgcagtaatccattatggggggatgccaacagatgtggtgag

SEQ ID NO: 468394 - DNA, 60 bp, Artificial
  Synthetic oligonucleotide
tgcagatgcatattagaacagaaagagtgcgataatacgaaagtagatgcagcaaaaact

SEQ ID NO: 468395 - DNA, 60 bp, Artificial
  Synthetic oligonucleotide
tgcagatgctaaagttcaagcaggagaattaattttaagaagattatcaggcaagattag

SEQ ID NO: 468396 - DNA, 60 bp, Artificial
  Synthetic oligonucleotide
tgcagatgggcaatgttgaaatcaacacaatgggttctgaaggtaaaccacactttgttg

SEQ ID NO: 468397 - DNA, 60 bp, Artificial
  Synthetic oligonucleotide
tgcagatgtggtgatccatcttcgtggagctctctaacagtagcgatgtagaggggctca

SEQ ID NO: 468398 - DNA, 54 bp, Artificial
  Synthetic oligonucleotide
tgcagattcgtataaataatttattagtgggggttgataggtttaatatttggg

SEQ ID NO: 468399 - DNA, 60 bp, Artificial
  Synthetic oligonucleotide
tgcagatttgtggcgtgaactatgtgcagtcatcgcttcgttggatgtatggtatcaaac

SEQ ID NO: 468400 - DNA, 51 bp, Artificial
  Synthetic oligonucleotide
tgcagattttggtctgtacggaaccggggggtttcgcggcttccccgaaat

SEQ ID NO: 468401 - DNA, 60 bp, Artificial
  Synthetic oligonucleotide
tgcagcagatggctctattacagcgccgtttcccggatgttttaatcgaagcccgtccga

SEQ ID NO: 468402 - DNA, 60 bp, Artificial
  Synthetic oligonucleotide
tgcagcagcacttatatctctggtctacttgattggtttctctgtgattggcatgtttat

SEQ ID NO: 468403 - DNA, 60 bp, Artificial
  Synthetic oligonucleotide
tgcagcagcgccaccggagcagagcaggatgcagttctcttccctaactgtaaatgtaag

SEQ ID NO: 468404 - DNA, 60 bp, Artificial
  Synthetic oligonucleotide
tgcagcatcatagccagcatactcgatctgaccagcaaaagtcacaacatcagctttatg

SEQ ID NO: 468405 - DNA, 56 bp, Artificial
  Synthetic oligonucleotide
tgcagcatcatggagactccacattggcaacaaagaacacgccatggttagacacc

SEQ ID NO: 468406 - DNA, 51 bp, Artificial
  Synthetic oligonucleotide
tgcagcatgtgcttcgctatgagcgagaagccataacaacatccccggaga

SEQ ID NO: 468407 - DNA, 57 bp, Artificial
  Synthetic oligonucleotide
tgcagcatttacagcgttatagtagacgtcgtctttatttgctttggaccccccgga

SEQ ID NO: 468408 - DNA, 52 bp, Artificial
  Synthetic oligonucleotide
tgcagccaggcaactcctgccatatattgttctagtacagcatttccatgag

SEQ ID NO: 468409 - DNA, 60 bp, Artificial
  Synthetic oligonucleotide
tgcagccattatgtgatgcaaaaataggattaatagacgatgtgacaccccagtgctgga

SEQ ID NO: 468410 - DNA, 60 bp, Artificial
  Synthetic oligonucleotide
tgcagccccatcccaccaggatcacagtgccatgggctttgggccggagctgtggtgccc

SEQ ID NO: 468411 - DNA, 60 bp, Artificial
  Synthetic oligonucleotide
tgcagccccccgtttttcgcgctcgattgcagtgccagtacgagcaccatcactggtaca

SEQ ID NO: 468412 - DNA, 59 bp, Artificial
  Synthetic oligonucleotide
tgcagccccggcagcttgttttccggcctgaagtcttgtggaaccacccaattcagcgc

SEQ ID NO: 468413 - DNA, 59 bp, Artificial
  Synthetic oligonucleotide
tgcagcctacattctcagtgcagcggaatctcccttttgaaagagcaaccgttatggca

SEQ ID NO: 468414 - DNA, 60 bp, Artificial
  Synthetic oligonucleotide
tgcagcctactttctcggtacagagaaatcttcccttcgaaagagcaaccattatggcag

SEQ ID NO: 468415 - DNA, 58 bp, Artificial
  Synthetic oligonucleotide
tgcagcctcattgttcccccagaatcccatttcaccaacctttctctctatccctccg

SEQ ID NO: 468416 - DNA, 59 bp, Artificial
  Synthetic oligonucleotide
tgcagcctgggttggtaaaactaatgagggttattatgtatccctatcctcactcagga

SEQ ID NO: 468417 - DNA, 53 bp, Artificial
  Synthetic oligonucleotide
tgcagccttatgaagcactttgattggaatttgtgaagagtggctcccagagg

SEQ ID NO: 468418 - DNA, 55 bp, Artificial
  Synthetic oligonucleotide
tgcagccttgcaacttaatctaccagatttcgcaattaagaggcttggacagttc

SEQ ID NO: 468419 - DNA, 60 bp, Artificial
  Synthetic oligonucleotide
tgcagcctttaggtcagcattccggtgacacaggtattattgatgcagcaacagcacaat

SEQ ID NO: 468420 - DNA, 60 bp, Artificial
  Synthetic oligonucleotide
tgcagcgacccaagcgattcagtagcatacgaaaactatttaaagagcgagcgcacattg

SEQ ID NO: 468421 - DNA, 55 bp, Artificial
  Synthetic oligonucleotide
tgcagcgactaccgacagagccgcaatgcagctgccttaatcgcaggctgtgggc

SEQ ID NO: 468422 - DNA, 60 bp, Artificial
  Synthetic oligonucleotide
tgcagcgatgtagagaggctcatatttggccaagagagtgcgaagagagtccaaggcgta

SEQ ID NO: 468423 - DNA, 55 bp, Artificial
  Synthetic oligonucleotide
tgcagcgccagcactcacagcgacagagactggtaagactcagatagaccaagga

SEQ ID NO: 468424 - DNA, 60 bp, Artificial
  Synthetic oligonucleotide
tgcagcgccttacaagaagttcgctgaacaagcaaccgttaccccccgcgctctgagagc

SEQ ID NO: 468425 - DNA, 55 bp, Artificial
  Synthetic oligonucleotide
tgcagcgttatcgtgatgttatctccagctttggcggttcaacctcctatgatgc

SEQ ID NO: 468426 - DNA, 60 bp, Artificial
  Synthetic oligonucleotide
tgcagcgttgactcgtccgctgcgtgtatttttctctagtgctgtccacgcgctgttccc

SEQ ID NO: 468427 - DNA, 60 bp, Artificial
  Synthetic oligonucleotide
tgcagcgtttagcagcaataggcgcattatatcccaatgaattcactgagaacgtattgg

SEQ ID NO: 468428 - DNA, 51 bp, Artificial
  Synthetic oligonucleotide
tgcagctacgtgtcgtgggcaattacaagggttaccagcacgattacaaaa

SEQ ID NO: 468429 - DNA, 60 bp, Artificial
  Synthetic oligonucleotide
tgcagctatcacgacaacagtttccaaccatgccagttgattataagagatcaatccaac

SEQ ID NO: 468430 - DNA, 60 bp, Artificial
  Synthetic oligonucleotide
tgcagctccctccttagcgcttgtgtccattgaaagcttttgacctccttggacaaagac

SEQ ID NO: 468431 - DNA, 60 bp, Artificial
  Synthetic oligonucleotide
tgcagctctgtaaagtgtctcttactcccgatgtattggcacacatacacttaatgaatc

SEQ ID NO: 468432 - DNA, 60 bp, Artificial
  Synthetic oligonucleotide
tgcagctcttggggtggacccaatacttcatagcgcggctagaagccatgctacacgtat

SEQ ID NO: 468433 - DNA, 55 bp, Artificial
  Synthetic oligonucleotide
tgcagctgaagcatacattgagatgagaaattccgagagaccgtacatgcctagg

SEQ ID NO: 468434 - DNA, 60 bp, Artificial
  Synthetic oligonucleotide
tgcagctgatgattggatagatccaaatctatttggagttagaggacagcaccaccagat

SEQ ID NO: 468435 - DNA, 50 bp, Artificial
  Synthetic oligonucleotide
tgcagctgcaaaattgtgtaagaccgttatcgttccctgtaaccttggca

SEQ ID NO: 468436 - DNA, 60 bp, Artificial
  Synthetic oligonucleotide
tgcagctggcgctgaagcggtaagtggaatagttggatggggaaacatggacacgatcgt

SEQ ID NO: 468437 - DNA, 58 bp, Artificial
  Synthetic oligonucleotide
tgcagctgtgacagattacccatatacagcccttgggaacctgactcagtcctcttta

SEQ ID NO: 468438 - DNA, 55 bp, Artificial
  Synthetic oligonucleotide
tgcagcttcatctatcgcaagaagtacatcaatacgatcagtaggatcaacggca

SEQ ID NO: 468439 - DNA, 52 bp, Artificial
  Synthetic oligonucleotide
tgcaggaaaaaaggctaattgggacgggcccaaatcgtggggactgagactg

SEQ ID NO: 468440 - DNA, 55 bp, Artificial
  Synthetic oligonucleotide
tgcaggaaacataacatgtaactcaagcatcacaggactactattagtacgtgat

SEQ ID NO: 468441 - DNA, 60 bp, Artificial
  Synthetic oligonucleotide
tgcaggaaacataatatgtaaatcgaatatcacaggacttctattgctacgtgatggagg

SEQ ID NO: 468442 - DNA, 54 bp, Artificial
  Synthetic oligonucleotide
tgcaggaacaattaactgcaattcaaatattacaggtctactattgacaagaga

SEQ ID NO: 468443 - DNA, 54 bp, Artificial
  Synthetic oligonucleotide
tgcaggacaggaattaaataaatggattggtatgtatgggttgtttactcatct

SEQ ID NO: 468444 - DNA, 51 bp, Artificial
  Synthetic oligonucleotide
tgcaggacatgaggaacacaattatggcatctaaaacagtgggaacatctg

SEQ ID NO: 468445 - DNA, 51 bp, Artificial
  Synthetic oligonucleotide
tgcaggactgatcaattgttcatcaaatattacaggactagtgttgacaag

SEQ ID NO: 468446 - DNA, 57 bp, Artificial
  Synthetic oligonucleotide
tgcaggactgggagacttttatggtgagagaagggtatatgaccatggatcttccaa

SEQ ID NO: 468447 - DNA, 52 bp, Artificial
  Synthetic oligonucleotide
tgcaggactttcagagggagagtcctggatatgttcagaactgcttttgggg

SEQ ID NO: 468448 - DNA, 55 bp, Artificial
  Synthetic oligonucleotide
tgcaggagactcctacagtgagtggaaagattccatcgacgccttctatgaagcg

SEQ ID NO: 468449 - DNA, 60 bp, Artificial
  Synthetic oligonucleotide
tgcaggaggacattattaataggtgtgaacaatttgtgggacccctcacagtaaatgaga

SEQ ID NO: 468450 - DNA, 50 bp, Artificial
  Synthetic oligonucleotide
tgcaggaggaccattcaggtgtacccttggacattgtagcttctaaatgt

SEQ ID NO: 468451 - DNA, 60 bp, Artificial
  Synthetic oligonucleotide
tgcaggagtgcaattcaactcacaatcagacattctctggcagtccgcattttcttagtt

SEQ ID NO: 468452 - DNA, 55 bp, Artificial
  Synthetic oligonucleotide
tgcaggatcatgaggtgacgctcggatggagtgttgttctccttagtgagatgga

SEQ ID NO: 468453 - DNA, 55 bp, Artificial
  Synthetic oligonucleotide
tgcaggattatgtgcaagtgtaactgcaaacggtactccatggttctctcccgca

SEQ ID NO: 468454 - DNA, 60 bp, Artificial
  Synthetic oligonucleotide
tgcaggattatttatgaatgcctatggttcagggcaagtaatgctaagatggggagttct

SEQ ID NO: 468455 - DNA, 55 bp, Artificial
  Synthetic oligonucleotide
tgcaggcaatgaggaccattggaactcatcctagcacaagtgctggtctaaaaga

SEQ ID NO: 468456 - DNA, 51 bp, Artificial
  Synthetic oligonucleotide
tgcaggccaaagttgttaaaggagctactaatggatcatccgtatcttata

SEQ ID NO: 468457 - DNA, 55 bp, Artificial
  Synthetic oligonucleotide
tgcaggcctaaaagactgcaccatgctggtctgtggtgacgacttagtcgttatc

SEQ ID NO: 468458 - DNA, 60 bp, Artificial
  Synthetic oligonucleotide
tgcaggcctaccagaaacggatgggggtgcaaatgcagcgattcaagtgatcctctcgtt

SEQ ID NO: 468459 - DNA, 60 bp, Artificial
  Synthetic oligonucleotide
tgcaggcgatttcgctcagcacatccccagtgtagatcaggtcgatgagtcaccgcgttc

SEQ ID NO: 468460 - DNA, 58 bp, Artificial
  Synthetic oligonucleotide
tgcaggctagaaaacatttgtgtatccccaacgctttcctcaggttgtagttgaactg

SEQ ID NO: 468461 - DNA, 58 bp, Artificial
  Synthetic oligonucleotide
tgcaggctatccaacaacaattacacggattggcaaaggcaagacgcaaggaagatcg

SEQ ID NO: 468462 - DNA, 60 bp, Artificial
  Synthetic oligonucleotide
tgcaggctgtagcagaaacaatcttgggcccatgggtctttataacaatcttgttcttct

SEQ ID NO: 468463 - DNA, 59 bp, Artificial
  Synthetic oligonucleotide
tgcaggcttgccctcactgcaattccgccccagctataggttcgggagtcaacccccga

SEQ ID NO: 468464 - DNA, 58 bp, Artificial
  Synthetic oligonucleotide
tgcagggaatttgtcaaaggcacgtacatcatggctttcaacccgccctggggggaca

SEQ ID NO: 468465 - DNA, 59 bp, Artificial
  Synthetic oligonucleotide
tgcagggccagggaggagatatgtatggtgcagtttaccacaggggtgggttctaagtc

SEQ ID NO: 468466 - DNA, 55 bp, Artificial
  Synthetic oligonucleotide
tgcagggcttaccctttagctatgacactaacgaaaagggtgggttagcatatgc

SEQ ID NO: 468467 - DNA, 57 bp, Artificial
  Synthetic oligonucleotide
tgcaggggtatctccaattgaagggtcagaggaccttaaaccaggtgaaggctatat

SEQ ID NO: 468468 - DNA, 60 bp, Artificial
  Synthetic oligonucleotide
tgcagggtatcgaggacggatggggtgacggcgccttctggtgccagacagtcgtaggta

SEQ ID NO: 468469 - DNA, 59 bp, Artificial
  Synthetic oligonucleotide
tgcagggtttaagacaaactgttctaatgtttcagtggtgcattgtactaacttgataa

SEQ ID NO: 468470 - DNA, 57 bp, Artificial
  Synthetic oligonucleotide
tgcaggtaattggactaacattaaaccgtaagtaaattatcaatcttcggacatatg

SEQ ID NO: 468471 - DNA, 55 bp, Artificial
  Synthetic oligonucleotide
tgcaggtacacactaatactcttgcgcacgggattgtgcgagaattgtatgtgtt

SEQ ID NO: 468472 - DNA, 60 bp, Artificial
  Synthetic oligonucleotide
tgcaggtgtggataatagagaatgtatatctatggattacaaacaaacacaattgtgttt

SEQ ID NO: 468473 - DNA, 59 bp, Artificial
  Synthetic oligonucleotide
tgcaggttttacacactagatagtaaagattggagtccatcctcaaagggatggtgttg

SEQ ID NO: 468474 - DNA, 60 bp, Artificial
  Synthetic oligonucleotide
tgcaggttttatgctctcagccaagggacaacgatcagagggaaacactcaaatggaaca

SEQ ID NO: 468475 - DNA, 60 bp, Artificial
  Synthetic oligonucleotide
tgcagtaactgacatatggtcgtacaatgctaaacttcttgtactgcttgaaaatgggag

SEQ ID NO: 468476 - DNA, 55 bp, Artificial
  Synthetic oligonucleotide
tgcagtactggcaggctttcttgttagtggcaaatatgacccagatcttggagat

SEQ ID NO: 468477 - DNA, 60 bp, Artificial
  Synthetic oligonucleotide
tgcagtagaagcggattcttgccgattcttaagctcacgactcgtgatgctaaaaaatct

SEQ ID NO: 468478 - DNA, 58 bp, Artificial
  Synthetic oligonucleotide
tgcagtagaagtgttcagacttattaagaaatatgtctcaggaattaagattaacacc

SEQ ID NO: 468479 - DNA, 52 bp, Artificial
  Synthetic oligonucleotide
tgcagtagcagtcctctggtgcgtgcaccaaaggatagaagtaaaaggcacc

SEQ ID NO: 468480 - DNA, 60 bp, Artificial
  Synthetic oligonucleotide
tgcagtagcatggctagcacataatcaacaagctaaatttgtaagagagtgtgcagcaat

SEQ ID NO: 468481 - DNA, 60 bp, Artificial
  Synthetic oligonucleotide
tgcagtagcggcactctttcctcaggcagcaccatttccaaatcatgcgacagtcggctt

SEQ ID NO: 468482 - DNA, 52 bp, Artificial
  Synthetic oligonucleotide
tgcagtagtgtcagagaaggcgccatacttctgcgggggatttatcttacac

SEQ ID NO: 468483 - DNA, 59 bp, Artificial
  Synthetic oligonucleotide
tgcagtcaaaggaaacacatacaagatctttgaacaggttaaaaagtcatttgaatcta

SEQ ID NO: 468484 - DNA, 59 bp, Artificial
  Synthetic oligonucleotide
tgcagtcatcgtgtgtcttatgtgtgccttggattagtcaaactcactataggttggtg

SEQ ID NO: 468485 - DNA, 60 bp, Artificial
  Synthetic oligonucleotide
tgcagtcccagagctttccgagtgttgtagttgaactggatcctgatcgtgagtatgtcc

SEQ ID NO: 468486 - DNA, 59 bp, Artificial
  Synthetic oligonucleotide
tgcagtccgtggagcctttggtcccggacattaactcgttcgagacgaatcagttgcac

SEQ ID NO: 468487 - DNA, 58 bp, Artificial
  Synthetic oligonucleotide
tgcagtcgagccttggtttagggagctagggtttacaatgaaggtcgaggagccagtc

SEQ ID NO: 468488 - DNA, 55 bp, Artificial
  Synthetic oligonucleotide
tgcagtctcacgacatgcttttgaagagagaagagtattagttaggggtggcctc

SEQ ID NO: 468489 - DNA, 60 bp, Artificial
  Synthetic oligonucleotide
tgcagtcttgctttccaacgaagggataataaacagtgaagatgagcatctcttggcact

SEQ ID NO: 468490 - DNA, 55 bp, Artificial
  Synthetic oligonucleotide
tgcagtcttggtcgccaagtatggatttgtgggaccctttgcagaatccactccc

SEQ ID NO: 468491 - DNA, 60 bp, Artificial
  Synthetic oligonucleotide
tgcagtgaaaggtgttgggacaatagcaatggagttaatcagaatgatcaaacgtggaat

SEQ ID NO: 468492 - DNA, 60 bp, Artificial
  Synthetic oligonucleotide
tgcagtgagcacaattcctgctggtaggttttttatgatgaatgagatcaggccgggctg

SEQ ID NO: 468493 - DNA, 60 bp, Artificial
  Synthetic oligonucleotide
tgcagtgataaggtccatgtcgttgtactcagtaactttctgccccagatcgatctggaa

SEQ ID NO: 468494 - DNA, 55 bp, Artificial
  Synthetic oligonucleotide
tgcagtgatagaggctctccccagaaacatggtcatcacctgtcaggggtcagag

SEQ ID NO: 468495 - DNA, 60 bp, Artificial
  Synthetic oligonucleotide
tgcagtgatgagttcccctgtgcgtgaatccatgcgatgcgcagttaattccaaaatagt

SEQ ID NO: 468496 - DNA, 60 bp, Artificial
  Synthetic oligonucleotide
tgcagtgatgggttccccggtgcgaaaatccatgattgtggcagcctatagctatgaaat

SEQ ID NO: 468497 - DNA, 60 bp, Artificial
  Synthetic oligonucleotide
tgcagtgatgggttcccctgtgcgtgaatccatggttgtggcagttgattgacagataat

SEQ ID NO: 468498 - DNA, 55 bp, Artificial
  Synthetic oligonucleotide
tgcagtgattaccgacagagtcgtaatgcggcagccttaatcgcaggctgcgggc

SEQ ID NO: 468499 - DNA, 60 bp, Artificial
  Synthetic oligonucleotide
tgcagtgcacaatcgcctaattagatcatcgacatagaagctgacatggaataaacgatc

SEQ ID NO: 468500 - DNA, 55 bp, Artificial
  Synthetic oligonucleotide
tgcagtgccagtacgagcaccatcactggtacaagcttacaactggctgcggaac

SEQ ID NO: 468501 - DNA, 53 bp, Artificial
  Synthetic oligonucleotide
tgcagtgcggctcaatccaagtaatcaatggatcaactatcggaactggcagc

SEQ ID NO: 468502 - DNA, 60 bp, Artificial
  Synthetic oligonucleotide
tgcagtgctacaatttaacactgatgtcactaaacaaatggtccaagatgtatcaaacga

SEQ ID NO: 468503 - DNA, 59 bp, Artificial
  Synthetic oligonucleotide
tgcagtgctatatccggagactcgaaacgctgaactcccaaggatacttgttgatcacg

SEQ ID NO: 468504 - DNA, 55 bp, Artificial
  Synthetic oligonucleotide
tgcagtggatgaaccggttgatagcgttcgcttcgcggggtaaccacgtctcccc

SEQ ID NO: 468505 - DNA, 55 bp, Artificial
  Synthetic oligonucleotide
tgcagtggtaacaagatggaacctggacatagccggattgctgttgcagtgcgtc

SEQ ID NO: 468506 - DNA, 60 bp, Artificial
  Synthetic oligonucleotide
tgcagtggtagacaaccctcacacttgggatcctttatatcaggctattcttcgctccca

SEQ ID NO: 468507 - DNA, 53 bp, Artificial
  Synthetic oligonucleotide
tgcagtggttgaaaagcccaagtttcttccggatctatatgactataaggaga

SEQ ID NO: 468508 - DNA, 60 bp, Artificial
  Synthetic oligonucleotide
tgcagtgtaaagtgttgtcgaccaacatcatgcagcctcctcgtttgcgagcacaggcac

SEQ ID NO: 468509 - DNA, 55 bp, Artificial
  Synthetic oligonucleotide
tgcagtgtaatgcaaccaaattccatagcgggtgcttgttagtagtagtaatacc

SEQ ID NO: 468510 - DNA, 59 bp, Artificial
  Synthetic oligonucleotide
tgcagtgtcagactgagaaaggtggcctaaatacgaccttgccgtttcacaatgtcagc

SEQ ID NO: 468511 - DNA, 60 bp, Artificial
  Synthetic oligonucleotide
tgcagtgtcgataccatttgtaaagatcttattgggttcattatcagatctgccaggctt

SEQ ID NO: 468512 - DNA, 60 bp, Artificial
  Synthetic oligonucleotide
tgcagtgtggataggtaaggaagaattgcttgctgttccaacgtggtgttggatggtttg

SEQ ID NO: 468513 - DNA, 58 bp, Artificial
  Synthetic oligonucleotide
tgcagttaaaattctggtccttagacagaaatatcagaccctagataacgaagataac

SEQ ID NO: 468514 - DNA, 58 bp, Artificial
  Synthetic oligonucleotide
tgcagttaaagacaacttaaggattgctcgtagtaatcgacgtaccaagtgaagcgta

SEQ ID NO: 468515 - DNA, 58 bp, Artificial
  Synthetic oligonucleotide
tgcagttaacttacgattgccccccctccaagacgttgcaggattattcctcgcacga

SEQ ID NO: 468516 - DNA, 60 bp, Artificial
  Synthetic oligonucleotide
tgcagttaattgtgccgccgtggaaggaaactgaagaataatctcagttagatcatgaga

SEQ ID NO: 468517 - DNA, 60 bp, Artificial
  Synthetic oligonucleotide
tgcagttagcgtgctgtcgaaaaatcgcgcgattcaagaaaatcataaggagttaatgca

SEQ ID NO: 468518 - DNA, 51 bp, Artificial
  Synthetic oligonucleotide
tgcagttagggcgtccctcatctcccatggggggagagcggccatttgcgg

SEQ ID NO: 468519 - DNA, 60 bp, Artificial
  Synthetic oligonucleotide
tgcagttatctagacaacaatttccgaccatgccagttgattacaaaagatcaatccaaa

SEQ ID NO: 468520 - DNA, 60 bp, Artificial
  Synthetic oligonucleotide
tgcagttccgaatggctgagtttatgccgccagcggtagacagaactgtctagcgactgg

SEQ ID NO: 468521 - DNA, 60 bp, Artificial
  Synthetic oligonucleotide
tgcagttcctcgtgttgagataccggctgatgtgcttcgaactgaagcgttaccggtcga

SEQ ID NO: 468522 - DNA, 60 bp, Artificial
  Synthetic oligonucleotide
tgcagttctcctcactgactgtgaatgtgagaggatcagggttgaggatactggtaagag

SEQ ID NO: 468523 - DNA, 53 bp, Artificial
  Synthetic oligonucleotide
tgcagttgaggcgtatggacggtattcgtgcacaacgagatgtgagtagctcg

SEQ ID NO: 468524 - DNA, 60 bp, Artificial
  Synthetic oligonucleotide
tgcagttgccagaccctaataggtttgcattaattgatcctgctatctacaaccctgata

SEQ ID NO: 468525 - DNA, 60 bp, Artificial
  Synthetic oligonucleotide
tgcagttgggaaacaaaattggcaatctcttagatgctagagtgcaaatgtgtaatacag

SEQ ID NO: 468526 - DNA, 60 bp, Artificial
  Synthetic oligonucleotide
tgcagttgtcgcgacaacaatttccaaccatgccagttgattataagaggtcaattcaac

SEQ ID NO: 468527 - DNA, 60 bp, Artificial
  Synthetic oligonucleotide
tgcagtttagtaaaccagacacgagcatgcgaatctgtctggtcggtgcgcaattccaaa

SEQ ID NO: 468528 - DNA, 58 bp, Artificial
  Synthetic oligonucleotide
tgcagtttgattgccaatcccgttgggcccccatgaactctttaaagtgtttcagata

SEQ ID NO: 468529 - DNA, 60 bp, Artificial
  Synthetic oligonucleotide
tgcataaccctacacaacagaatgcgatggtgcagatacaggttgtgttctatatatcta

SEQ ID NO: 468530 - DNA, 59 bp, Artificial
  Synthetic oligonucleotide
tgcataagaccccacaacaatacaagaagaagtatacatttgggaccagggagagcatt

SEQ ID NO: 468531 - DNA, 60 bp, Artificial
  Synthetic oligonucleotide
tgcataagaggcttgagacctctgtcctgtatgtaagtgaccctcattgcccccccgacc

SEQ ID NO: 468532 - DNA, 56 bp, Artificial
  Synthetic oligonucleotide
tgcataagctcaccccttaaggttacgcccatgaagtctgttttattggattcctt

SEQ ID NO: 468533 - DNA, 50 bp, Artificial
  Synthetic oligonucleotide
tgcataaggagtctctgtctgacttctacattcttggcctcctaccattc

SEQ ID NO: 468534 - DNA, 60 bp, Artificial
  Synthetic oligonucleotide
tgcataatatggctattggaaccttgatacagcgagaagttcggagggagcagccaggga

SEQ ID NO: 468535 - DNA, 58 bp, Artificial
  Synthetic oligonucleotide
tgcataatcaccagtctaactggccgggataaaaaccaagtggagggtgaggtccaga

SEQ ID NO: 468536 - DNA, 60 bp, Artificial
  Synthetic oligonucleotide
tgcataatgacctcttccgcagatcttaacacgacgttatagatacgatcaacgggccat

SEQ ID NO: 468537 - DNA, 55 bp, Artificial
  Synthetic oligonucleotide
tgcatacaaactaacagagtcaaggactatcaatcgtgaaataattggcatcgcg

SEQ ID NO: 468538 - DNA, 55 bp, Artificial
  Synthetic oligonucleotide
tgcatacacaagctattgaaggggcttggggttctggtgttgggtttacattgac

SEQ ID NO: 468539 - DNA, 57 bp, Artificial
  Synthetic oligonucleotide
tgcatacacgtaattaatcttaaactaatacgtaattacaactacatcatggaaaac

SEQ ID NO: 468540 - DNA, 60 bp, Artificial
  Synthetic oligonucleotide
tgcatacagggtgattgctactgggtgatgactgacggccctgccaataggcaggcgcag

SEQ ID NO: 468541 - DNA, 59 bp, Artificial
  Synthetic oligonucleotide
tgcataccaatacaggtataaaatcagcctttagtgtcaatgatctggcgagaaatgaa

SEQ ID NO: 468542 - DNA, 60 bp, Artificial
  Synthetic oligonucleotide
tgcataccttatgtggactgtgggcctattactgatgttactgtccactgtccttgggcc

SEQ ID NO: 468543 - DNA, 59 bp, Artificial
  Synthetic oligonucleotide
tgcatacgactggcatagtaagacaccggatttgcgaaaaaacgatacttaacttcaga

SEQ ID NO: 468544 - DNA, 60 bp, Artificial
  Synthetic oligonucleotide
tgcatacggttttcgagcggtgaaaatttctgcgattgcgcaggtcagataggcaaaacg

SEQ ID NO: 468545 - DNA, 60 bp, Artificial
  Synthetic oligonucleotide
tgcatacgttagcacgcgcgttacaacgagaagctactgagagaactgagactgaatcca

SEQ ID NO: 468546 - DNA, 55 bp, Artificial
  Synthetic oligonucleotide
tgcatactcgacgagtacctttctggtgaattcggcacagggttcgactgctttt

SEQ ID NO: 468547 - DNA, 60 bp, Artificial
  Synthetic oligonucleotide
tgcatacttgtggagaggaaatgttcttttgtaatgtaactaggatattccaagaatgga

SEQ ID NO: 468548 - DNA, 60 bp, Artificial
  Synthetic oligonucleotide
tgcatactttggaggagcactagcagtaggaatcataggttgatctgattggaacgcagt

SEQ ID NO: 468549 - DNA, 59 bp, Artificial
  Synthetic oligonucleotide
tgcatagcactctcttatggattgactactatgattacatgaatgcatagcatcctcct

SEQ ID NO: 468550 - DNA, 57 bp, Artificial
  Synthetic oligonucleotide
tgcatagcgcactacttaaggagtcgaaagcacgttccctcttagcagcaggatacg

SEQ ID NO: 468551 - DNA, 60 bp, Artificial
  Synthetic oligonucleotide
tgcatagtgtgtgctcatggcctgataaattaccagtgtcacactgctctcagtgccttt

SEQ ID NO: 468552 - DNA, 52 bp, Artificial
  Synthetic oligonucleotide
tgcatagttccaaagtctcaagatctgttccacataatgttccacgatagca

SEQ ID NO: 468553 - DNA, 60 bp, Artificial
  Synthetic oligonucleotide
tgcatatagtgatcgcttattaactgttggtcatccatattttaatgtctatgacgtcaa

SEQ ID NO: 468554 - DNA, 60 bp, Artificial
  Synthetic oligonucleotide
tgcatatcaatccatgcctacagtaggacctaaagcttatctgttcccagaacgcttacc

SEQ ID NO: 468555 - DNA, 58 bp, Artificial
  Synthetic oligonucleotide
tgcatatcacaatcagggtgggtgaatgaaaccagcccttttacggaagaatacctcc

SEQ ID NO: 468556 - DNA, 56 bp, Artificial
  Synthetic oligonucleotide
tgcatatcaggacgggagtagacccgatgttcggcaacaaatgcgtgaatccgtag

SEQ ID NO: 468557 - DNA, 60 bp, Artificial
  Synthetic oligonucleotide
tgcatatccaggcaccaacagacccccagtaactatgttaacctgtaatgactcctggta

SEQ ID NO: 468558 - DNA, 60 bp, Artificial
  Synthetic oligonucleotide
tgcatatctaaagaattttcatacatacgtgctaaataaaacgtaagccctggtgctcca

SEQ ID NO: 468559 - DNA, 60 bp, Artificial
  Synthetic oligonucleotide
tgcatatgcacaaatatcgaatgcggctcgacaggcatggaaaaaacttcctagctccag

SEQ ID NO: 468560 - DNA, 60 bp, Artificial
  Synthetic oligonucleotide
tgcatatgcaccaacaatgggacagcaactaagtgctgctacaactaatgaattttgaca

SEQ ID NO: 468561 - DNA, 55 bp, Artificial
  Synthetic oligonucleotide
tgcatatgggcatgttcccgcatttattatgggctccactctggtgcgtcccagt

SEQ ID NO: 468562 - DNA, 55 bp, Artificial
  Synthetic oligonucleotide
tgcatatggtgatgacttggtcctagcctcagactttgattacgacatcaacctc

SEQ ID NO: 468563 - DNA, 60 bp, Artificial
  Synthetic oligonucleotide
tgcatatgtagattcgaagggtcgcttcgatacttcgcgtgtattttgcgattgtatgtc

SEQ ID NO: 468564 - DNA, 60 bp, Artificial
  Synthetic oligonucleotide
tgcatatgttaattctacacaagagaacatttttctaacatctacactatgcttatatta

SEQ ID NO: 468565 - DNA, 60 bp, Artificial
  Synthetic oligonucleotide
tgcatatgttgacatcaaatcttacattcactgtttactcagatctacttgcattcgtat

SEQ ID NO: 468566 - DNA, 60 bp, Artificial
  Synthetic oligonucleotide
tgcatattctgagaggaccattgcattttcaacgtcgagctatattgggggcgttgaagt

SEQ ID NO: 468567 - DNA, 60 bp, Artificial
  Synthetic oligonucleotide
tgcatattctggtctagacagttgatataatcgagttctgatagttacaggaccctgacc

SEQ ID NO: 468568 - DNA, 60 bp, Artificial
  Synthetic oligonucleotide
tgcatattctggtgctcctaagcaggcactcaagaagcctgtcctgcgcacagcaacggt

SEQ ID NO: 468569 - DNA, 60 bp, Artificial
  Synthetic oligonucleotide
tgcatcaaaacatcctgaattcagagggggatggtgaggagattccacatggtgtgcacg

SEQ ID NO: 468570 - DNA, 58 bp, Artificial
  Synthetic oligonucleotide
tgcatcaatagatgcttttacgtggagttgataaggggaagggaacaggagactaaag

SEQ ID NO: 468571 - DNA, 58 bp, Artificial
  Synthetic oligonucleotide
tgcatcaataggtgtttttatgtggagttgataaggggaagaccacaggaaactagag

SEQ ID NO: 468572 - DNA, 55 bp, Artificial
  Synthetic oligonucleotide
tgcatcacatgatgggcgttaggcaaggttaattctgtacctcgttctatggata

SEQ ID NO: 468573 - DNA, 50 bp, Artificial
  Synthetic oligonucleotide
tgcatcacgatgaacatgcaacacgtccaaaccttaacgacagaaaagtt

SEQ ID NO: 468574 - DNA, 60 bp, Artificial
  Synthetic oligonucleotide
tgcatcagatagagggttgtttggtgccatagctggattcatagaaggaggttggcctgg

SEQ ID NO: 468575 - DNA, 57 bp, Artificial
  Synthetic oligonucleotide
tgcatcagattgactcaaacgcgccatcttccgaaccgcgcatagcttctaatggtg

SEQ ID NO: 468576 - DNA, 59 bp, Artificial
  Synthetic oligonucleotide
tgcatcagcaaatgtgccaaacacgaagcaatggaccagcattcaagctggactcatta

SEQ ID NO: 468577 - DNA, 60 bp, Artificial
  Synthetic oligonucleotide
tgcatcagcagtgatttggtacaatgggcggcccaccacagaaattaatacatgggcacg

SEQ ID NO: 468578 - DNA, 58 bp, Artificial
  Synthetic oligonucleotide
tgcatcagcattatagttcgtgaaatctacttggctgttgtagtagttgtggatccct

SEQ ID NO: 468579 - DNA, 56 bp, Artificial
  Synthetic oligonucleotide
tgcatcagccgcctacccaaaagggctcgagaacaagacccttgccagaaaacccg

SEQ ID NO: 468580 - DNA, 58 bp, Artificial
  Synthetic oligonucleotide
tgcatcaggagggtgcaattattgtggtcttcgagcacttgtaggcgagggtcgtgag

SEQ ID NO: 468581 - DNA, 60 bp, Artificial
  Synthetic oligonucleotide
tgcatcaggatttaaaagctatagagccactggaatgcatgctgttgagctaatggcaaa

SEQ ID NO: 468582 - DNA, 60 bp, Artificial
  Synthetic oligonucleotide
tgcatcaggccatctcacccagaaccttgaatgcatgggtaaaagtggtagaggaaaagg

SEQ ID NO: 468583 - DNA, 55 bp, Artificial
  Synthetic oligonucleotide
tgcatcatacccatattcaatagatgcaggcctacttgctaaggcggggaaggag

SEQ ID NO: 468584 - DNA, 60 bp, Artificial
  Synthetic oligonucleotide
tgcatcattgcactagggccttatagagtacaagtggtttacgagaggacatattgcatg

SEQ ID NO: 468585 - DNA, 60 bp, Artificial
  Synthetic oligonucleotide
tgcatccaaggtgattgctattgggtaatgactgacggccccgccaataggcaggcacag

SEQ ID NO: 468586 - DNA, 55 bp, Artificial
  Synthetic oligonucleotide
tgcatccagcgggtcctggtaggtaaagcggcctgggagcccttgcctattcagc

SEQ ID NO: 468587 - DNA, 60 bp, Artificial
  Synthetic oligonucleotide
tgcatccatcatgttacaagaagcaataggtaacctccacactgctgctaggtcatatgc

SEQ ID NO: 468588 - DNA, 60 bp, Artificial
  Synthetic oligonucleotide
tgcatccggagtacttcaagaactgaactgctgacactgagctatctacaagggactttc

SEQ ID NO: 468589 - DNA, 53 bp, Artificial
  Synthetic oligonucleotide
tgcatcctacaaaagtgaacaccattgaccacgttagtgtcgtccaccctgta

SEQ ID NO: 468590 - DNA, 60 bp, Artificial
  Synthetic oligonucleotide
tgcatcctgtgccaacagacaatttggatattgatactcctgtagttacaggaggccggg

SEQ ID NO: 468591 - DNA, 59 bp, Artificial
  Synthetic oligonucleotide
tgcatccttgatgacttgcactttaacattggagcaaaaacccgacagttcccttctaa

SEQ ID NO: 468592 - DNA, 53 bp, Artificial
  Synthetic oligonucleotide
tgcatcgaacgtcactggttctccgctggtctctcactctcctgcgcatctat

SEQ ID NO: 468593 - DNA, 60 bp, Artificial
  Synthetic oligonucleotide
tgcatcgacatacatatatcagaacctcctcgttggacgtaataggggcgaggagatact

SEQ ID NO: 468594 - DNA, 54 bp, Artificial
  Synthetic oligonucleotide
tgcatcgccgaagaccctcgctattacgccggtccgcaaaacatgagccaagtg

SEQ ID NO: 468595 - DNA, 60 bp, Artificial
  Synthetic oligonucleotide
tgcatcgcgaggagacatctgggcccaggtccagtatcatgcgtacctggcagacgagac

SEQ ID NO: 468596 - DNA, 60 bp, Artificial
  Synthetic oligonucleotide
tgcatcgcgtgggtattcctcgtcatctcattgacctccacatctatctcaaaaccaacg

SEQ ID NO: 468597 - DNA, 60 bp, Artificial
  Synthetic oligonucleotide
tgcatcgtatgcgtttggcggggtaaccaacactgcagcgcaaggctacccggtgcctct

SEQ ID NO: 468598 - DNA, 55 bp, Artificial
  Synthetic oligonucleotide
tgcatctacagagcgccaaataattataggaaatccctactttaaggttgtaggt

SEQ ID NO: 468599 - DNA, 60 bp, Artificial
  Synthetic oligonucleotide
tgcatctagagaggcggtgaagcaaactacgaagcgtatatccggtatttatagacttat

SEQ ID NO: 468600 - DNA, 60 bp, Artificial
  Synthetic oligonucleotide
tgcatctagatgcaggcggcgagggaaacttcgaagcatatatcgggtatttatagactt

SEQ ID NO: 468601 - DNA, 55 bp, Artificial
  Synthetic oligonucleotide
tgcatctccactcaaggtccggttagagtccctggcaggtgtgggctacaggagc

SEQ ID NO: 468602 - DNA, 60 bp, Artificial
  Synthetic oligonucleotide
tgcatctccgaatcccttgaaggcccacttgtacccacagtacacctagaagcccatgac

SEQ ID NO: 468603 - DNA, 60 bp, Artificial
  Synthetic oligonucleotide
tgcatctccttactgtgtgcaaactgctctagagaggtctactctaaccgcagaccccaa

SEQ ID NO: 468604 - DNA, 60 bp, Artificial
  Synthetic oligonucleotide
tgcatctccttgaatcagtattcctgggaaagcattgtgattactataaaactttcgaac

SEQ ID NO: 468605 - DNA, 55 bp, Artificial
  Synthetic oligonucleotide
tgcatctgatcgggaacgtccaggacgcttgtaaggattgatcgtccgtcatccg

SEQ ID NO: 468606 - DNA, 60 bp, Artificial
  Synthetic oligonucleotide
tgcatctgcatattatatgttttatgatggttatgatggagattctgaaataacgcgcta

SEQ ID NO: 468607 - DNA, 60 bp, Artificial
  Synthetic oligonucleotide
tgcatctggtttaaatattaattctaaggattgtcatctctactactctcaactccgcaa

SEQ ID NO: 468608 - DNA, 54 bp, Artificial
  Synthetic oligonucleotide
tgcatcttctgggtcaggtacggaacccattagtagtacccccctccctactgt

SEQ ID NO: 468609 - DNA, 60 bp, Artificial
  Synthetic oligonucleotide
tgcatcttgcatagccagccatatttgtcccagactttgtcctcatattctcttgaagct

SEQ ID NO: 468610 - DNA, 55 bp, Artificial
  Synthetic oligonucleotide
tgcatcttgtacatccagaagtggttcctaaccttgattcagtttgtgagccccg

SEQ ID NO: 468611 - DNA, 55 bp, Artificial
  Synthetic oligonucleotide
tgcatgaaggagattctgcaaattggctgaaacagctttctaaagccacagagga

SEQ ID NO: 468612 - DNA, 60 bp, Artificial
  Synthetic oligonucleotide
tgcatgacctcaactgcagttacaatatatgtccgtattgcgcatctagattaacctcag

SEQ ID NO: 468613 - DNA, 60 bp, Artificial
  Synthetic oligonucleotide
tgcatgactccattttagtttcttactcatcagatttagtcatataccgaacaaacaccc

SEQ ID NO: 468614 - DNA, 60 bp, Artificial
  Synthetic oligonucleotide
tgcatgagtcatctgccgactgctatcagtatttttgtgtgccagagtatggtacacagc

SEQ ID NO: 468615 - DNA, 55 bp, Artificial
  Synthetic oligonucleotide
tgcatgataaaagcagttagaggtgacctgaatttcgttaacagggcaaatcagc

SEQ ID NO: 468616 - DNA, 60 bp, Artificial
  Synthetic oligonucleotide
tgcatgatcggactgtactttcccgacacgcaatgtgcagcactgccaccgattttagtg

SEQ ID NO: 468617 - DNA, 60 bp, Artificial
  Synthetic oligonucleotide
tgcatgatgcaagagcacagctcacacttgaagtgcaactactcagagtgttctggccat

SEQ ID NO: 468618 - DNA, 60 bp, Artificial
  Synthetic oligonucleotide
tgcatgatgctaatgttagaaatctgcatgatcaagtacgtagagcgctaaagaccaatg

SEQ ID NO: 468619 - DNA, 60 bp, Artificial
  Synthetic oligonucleotide
tgcatgattcaatggccccgctacagaacatgcacgacattgttctgtcggttgttggca

SEQ ID NO: 468620 - DNA, 55 bp, Artificial
  Synthetic oligonucleotide
tgcatgcaacatgatgaaaagctgtttgattggtcttggtccttacagagtccag

SEQ ID NO: 468621 - DNA, 60 bp, Artificial
  Synthetic oligonucleotide
tgcatgcagagatccagaacctaggacattggatggatggcacattcaacataaaaactg

SEQ ID NO: 468622 - DNA, 59 bp, Artificial
  Synthetic oligonucleotide
tgcatgccgcttactgcgtactatcaaaggtatatttgccaaggtttaagtataaacat

SEQ ID NO: 468623 - DNA, 51 bp, Artificial
  Synthetic oligonucleotide
tgcatgccgttgatttgcggaaaggccctccagctaaaatcgcgcaagggc

SEQ ID NO: 468624 - DNA, 60 bp, Artificial
  Synthetic oligonucleotide
tgcatgctctgacatgtcggttcgcatgttacgggacacacctatgatgagacaggatga

SEQ ID NO: 468625 - DNA, 60 bp, Artificial
  Synthetic oligonucleotide
tgcatgctgacatgggttattggatagagagctcaaaaaaccagacctggcagatagaga

SEQ ID NO: 468626 - DNA, 60 bp, Artificial
  Synthetic oligonucleotide
tgcatgctgctagacacgtaggattacacgaatcagactgtattagttgtagaaagtaca

SEQ ID NO: 468627 - DNA, 60 bp, Artificial
  Synthetic oligonucleotide
tgcatgcttcaaccagcatatgtcctgtgtaagattcttacatagaaccatattacctgg

SEQ ID NO: 468628 - DNA, 55 bp, Artificial
  Synthetic oligonucleotide
tgcatgcttcgcttcacgcggctcctttcaccctaagacaggtccccgcgttgac

SEQ ID NO: 468629 - DNA, 60 bp, Artificial
  Synthetic oligonucleotide
tgcatggaaatcattgctagaacctccacgtgagcggaggtgcgtacctgctaattttcc

SEQ ID NO: 468630 - DNA, 57 bp, Artificial
  Synthetic oligonucleotide
tgcatggaaatgcccgtttgtactttaagagcgttggtaatcagtgattgccagcga

SEQ ID NO: 468631 - DNA, 59 bp, Artificial
  Synthetic oligonucleotide
tgcatggaagccaccatgtggatagtcgtaacgggcaactgtgggacggaaccgactac

SEQ ID NO: 468632 - DNA, 60 bp, Artificial
  Synthetic oligonucleotide
tgcatggacaagtagactgtagtccaggcatatggcaactagattgtacacatttagaag

SEQ ID NO: 468633 - DNA, 60 bp, Artificial
  Synthetic oligonucleotide
tgcatggattccgctgcatgttagcagtgaagtacttgcacttagtgctgtcaacatatc

SEQ ID NO: 468634 - DNA, 51 bp, Artificial
  Synthetic oligonucleotide
tgcatggcagacgtctacgaacccgagtatattctggactgagggaaacgc

SEQ ID NO: 468635 - DNA, 55 bp, Artificial
  Synthetic oligonucleotide
tgcatggcagtccgccacaaatccgtccgtgtttgtcaaagcatctgatcctccc

SEQ ID NO: 468636 - DNA, 53 bp, Artificial
  Synthetic oligonucleotide
tgcatggcgagtacatcttcgcacgtaaggagctcacatgaagctatctgacc

SEQ ID NO: 468637 - DNA, 60 bp, Artificial
  Synthetic oligonucleotide
tgcatggcgagtacatcttcgcacgtaaggggaacacatgagcgcactcacacctggaac

SEQ ID NO: 468638 - DNA, 60 bp, Artificial
  Synthetic oligonucleotide
tgcatggggagtcgtcgagactcaagagaggtcgtatcatgttgcacttctggagtacaa

SEQ ID NO: 468639 - DNA, 60 bp, Artificial
  Synthetic oligonucleotide
tgcatggggttctggggttggtttcactctcacttgtcaaatctcactgacagagtgttc

SEQ ID NO: 468640 - DNA, 55 bp, Artificial
  Synthetic oligonucleotide
tgcatgggttccaggtgagacgaatggtgactgaattttgtgacaggttgagacg

SEQ ID NO: 468641 - DNA, 60 bp, Artificial
  Synthetic oligonucleotide
tgcatggtaattggaatagtaagtctggtgctacaaattggaaatataatctcaatatgg

SEQ ID NO: 468642 - DNA, 60 bp, Artificial
  Synthetic oligonucleotide
tgcatggtagactacccatacaggttgtggcactatccatgcacagtcaacttcacaaaa

SEQ ID NO: 468643 - DNA, 56 bp, Artificial
  Synthetic oligonucleotide
tgcatggtatctgaggggtaagtgggtgcccggagtggcctacgccgtctacgggg

SEQ ID NO: 468644 - DNA, 54 bp, Artificial
  Synthetic oligonucleotide
tgcatggtatgttgcaatttaggaagaactgttgttgttattccagtgcgacat

SEQ ID NO: 468645 - DNA, 54 bp, Artificial
  Synthetic oligonucleotide
tgcatggtgccaaaaagttatccgacccgcttaaaaccttggccgcaattttgt

SEQ ID NO: 468646 - DNA, 55 bp, Artificial
  Synthetic oligonucleotide
tgcatgtaaccgatttcggttgctggcacaaacgtgtttttttcaaactacaatt

SEQ ID NO: 468647 - DNA, 60 bp, Artificial
  Synthetic oligonucleotide
tgcatgtactaccatatacaatgtttatcatgtgattggggcaccattgtattaatgcta

SEQ ID NO: 468648 - DNA, 55 bp, Artificial
  Synthetic oligonucleotide
tgcatgtcgattcgaggaaagcggataccacatcatacaatatactcgctctcga

SEQ ID NO: 468649 - DNA, 54 bp, Artificial
  Synthetic oligonucleotide
tgcatgtcggctgacctagaagtcgtcactagcacctgggtgctagtaggcgga

SEQ ID NO: 468650 - DNA, 60 bp, Artificial
  Synthetic oligonucleotide
tgcatgtctcccgttctttaatgcaagatgtattctgtttacagacgtgggtataagacg

SEQ ID NO: 468651 - DNA, 60 bp, Artificial
  Synthetic oligonucleotide
tgcatgtgatcccaaccgtaaacgagggtggcccgcaactgaagtgatgactgctgtcgg

SEQ ID NO: 468652 - DNA, 53 bp, Artificial
  Synthetic oligonucleotide
tgcatgtgatttaggatgtatattgctgtttatcaccttatctaaacatagag

SEQ ID NO: 468653 - DNA, 60 bp, Artificial
  Synthetic oligonucleotide
tgcatgtggctttcaatggaagagagggaagtgcaagttttatgccctatcatgctagtt

SEQ ID NO: 468654 - DNA, 60 bp, Artificial
  Synthetic oligonucleotide
tgcatgttaaggaacttatcgctgaattgagatggcagtataatagatttgctgtaataa

SEQ ID NO: 468655 - DNA, 60 bp, Artificial
  Synthetic oligonucleotide
tgcatgttgctccgtaacttggagtgtgtttagtaatacatcgtacataacatgatcaac

SEQ ID NO: 468656 - DNA, 60 bp, Artificial
  Synthetic oligonucleotide
tgcatgtttcaaagaaagcccaaaaatggttttatagacatcactttgaaagcagacatc

SEQ ID NO: 468657 - DNA, 57 bp, Artificial
  Synthetic oligonucleotide
tgcatgtttcaaagaaagctaacagatggtgttatagacatcactttgaaagtagaa

SEQ ID NO: 468658 - DNA, 54 bp, Artificial
  Synthetic oligonucleotide
tgcatgtttcaaagaaagctaaggactggttttatagacatcactatgaaagta

SEQ ID NO: 468659 - DNA, 60 bp, Artificial
  Synthetic oligonucleotide
tgcatgtttccgtacgtgtacttgacgatcccttcatacttgatgagcgttggtgacttg

SEQ ID NO: 468660 - DNA, 60 bp, Artificial
  Synthetic oligonucleotide
tgcattacaacctaagaaatcgtcagacacgttagcattatccgaggctgtatatcgtac

SEQ ID NO: 468661 - DNA, 60 bp, Artificial
  Synthetic oligonucleotide
tgcattacactattatgcaaacaacttgcagcagttacaggaaatccgatatatcattat

SEQ ID NO: 468662 - DNA, 51 bp, Artificial
  Synthetic oligonucleotide
tgcattacagcttggtcattgaccactcaggtaatctgctgctctgtatgt

SEQ ID NO: 468663 - DNA, 60 bp, Artificial
  Synthetic oligonucleotide
tgcattaccttgaatgatgttgctacgtcgctatgccaggattggtaacaggaatatttc

SEQ ID NO: 468664 - DNA, 54 bp, Artificial
  Synthetic oligonucleotide
tgcattacgaaggcaaaatgcgcactacgaatgagtacaacatgccgattgtag

SEQ ID NO: 468665 - DNA, 59 bp, Artificial
  Synthetic oligonucleotide
tgcattacggcagatgcacgcgcatgggacattcaaggcgtagccgacggtcaatctct

SEQ ID NO: 468666 - DNA, 55 bp, Artificial
  Synthetic oligonucleotide
tgcattactttgattgttttacagactctgccatcaggacagccatattaggata

SEQ ID NO: 468667 - DNA, 57 bp, Artificial
  Synthetic oligonucleotide
tgcattagcaacaagtgaaattccatatacaacgtcggcaatgacaagagttgtacg

SEQ ID NO: 468668 - DNA, 60 bp, Artificial
  Synthetic oligonucleotide
tgcattatagaaatggagatccacagacaccatttcaaatagcagaacaacagatacaaa

SEQ ID NO: 468669 - DNA, 60 bp, Artificial
  Synthetic oligonucleotide
tgcattatctggagtggcaatagcacttagtgtactgaacttattgataggaatctcaaa

SEQ ID NO: 468670 - DNA, 58 bp, Artificial
  Synthetic oligonucleotide
tgcattatgaacgagataggcaacatgatagctaggctcatgaaggttgatgaagtgt

SEQ ID NO: 468671 - DNA, 60 bp, Artificial
  Synthetic oligonucleotide
tgcattatggataggaattcgtttgcacagtttggtggttgtgatatcccaaaatatgtg

SEQ ID NO: 468672 - DNA, 60 bp, Artificial
  Synthetic oligonucleotide
tgcattatgggggaattcccactgatgtagtcaactcctgggcaggagatattctaagaa

SEQ ID NO: 468673 - DNA, 59 bp, Artificial
  Synthetic oligonucleotide
tgcattatgggggagttccctctgatgtaattaattcctgggccggagatattctaaga

SEQ ID NO: 468674 - DNA, 60 bp, Artificial
  Synthetic oligonucleotide
tgcattcaacgagtctgttgctgagctcggccccactgagtctataggtactagcccacc

SEQ ID NO: 468675 - DNA, 60 bp, Artificial
  Synthetic oligonucleotide
tgcattcagcgtgttttatccgctgtgcaacattggaatacttcctcgtctagtacggga

SEQ ID NO: 468676 - DNA, 55 bp, Artificial
  Synthetic oligonucleotide
tgcattcaggaaccgctctcctctaacggctcagcctcctgagaacgtgcctagc

SEQ ID NO: 468677 - DNA, 55 bp, Artificial
  Synthetic oligonucleotide
tgcattcatcctaaccgttattaatggacacgcgtcagccgttaaggaactcact

SEQ ID NO: 468678 - DNA, 56 bp, Artificial
  Synthetic oligonucleotide
tgcattccgggcttgagattgttcgcccaagactgcaccgtgcattggttagctat

SEQ ID NO: 468679 - DNA, 60 bp, Artificial
  Synthetic oligonucleotide
tgcattcgaaagacacatactcttgtggatcgttaggttcgaaacagatgccagcatgtt

SEQ ID NO: 468680 - DNA, 50 bp, Artificial
  Synthetic oligonucleotide
tgcattcgcatacttatgttctaaatataacacagattcgaaattcagga

SEQ ID NO: 468681 - DNA, 60 bp, Artificial
  Synthetic oligonucleotide
tgcattcggcgtacaatggagctctggcgaacgcgttttggaagtggaaacgcattggaa

SEQ ID NO: 468682 - DNA, 60 bp, Artificial
  Synthetic oligonucleotide
tgcattctacattccacctgtgaataatcaggcacagaacaacctaggtaattcaatgta

SEQ ID NO: 468683 - DNA, 60 bp, Artificial
  Synthetic oligonucleotide
tgcattctcgctccgtggcgcagcatgatacggcaaatcttatcttgcggtacaaacggc

SEQ ID NO: 468684 - DNA, 55 bp, Artificial
  Synthetic oligonucleotide
tgcattctgccgtcccatgcgcttctatccctcagacaacccaacttacccgtgg

SEQ ID NO: 468685 - DNA, 55 bp, Artificial
  Synthetic oligonucleotide
tgcattgaacagagtgcagtgcattgcaatatcatttcgcgaggctacccgcccc

SEQ ID NO: 468686 - DNA, 59 bp, Artificial
  Synthetic oligonucleotide
tgcattgaagtaccccgtgtcccgtagactttcatacgagcgtattgagagaccgctaa

SEQ ID NO: 468687 - DNA, 60 bp, Artificial
  Synthetic oligonucleotide
tgcattgacagacgatagatcaaagcccactcaaggtcagactatcgtattaaacactga

SEQ ID NO: 468688 - DNA, 58 bp, Artificial
  Synthetic oligonucleotide
tgcattgacgtgtcacttcctcattggacgaaaactatataaagaaccggggtgacga

SEQ ID NO: 468689 - DNA, 60 bp, Artificial
  Synthetic oligonucleotide
tgcattgatgagtgtgccattaggatcttcacccaatgcttatcaggccaagtttgagtc

SEQ ID NO: 468690 - DNA, 60 bp, Artificial
  Synthetic oligonucleotide
tgcattgcaagcagtactgtgctggtaggtctcatacttgcattcataatgtgggcatgc

SEQ ID NO: 468691 - DNA, 55 bp, Artificial
  Synthetic oligonucleotide
tgcattgcaagcagtctcgtattggcagcactcatcatgggtttcatcctctggg

SEQ ID NO: 468692 - DNA, 60 bp, Artificial
  Synthetic oligonucleotide
tgcattggatatcatgccaacaactcaacaacacaagtggatacaatactagagaaaaat

SEQ ID NO: 468693 - DNA, 60 bp, Artificial
  Synthetic oligonucleotide
tgcattggcattgttcttcctaaaggacatgaaggagataccctatcatcccgctatcct

SEQ ID NO: 468694 - DNA, 59 bp, Artificial
  Synthetic oligonucleotide
tgcattggggctccttgattttgcattagagcttgagtttaggaacttgacacccggga

SEQ ID NO: 468695 - DNA, 59 bp, Artificial
  Synthetic oligonucleotide
tgcatttatactattacaagtctcttttcactgttaccaggggttgcccattctattgc

SEQ ID NO: 468696 - DNA, 60 bp, Artificial
  Synthetic oligonucleotide
tgcatttccaaaagtcgttcaatgtcatcacttccctgtgccgtgaggacaattccagca

SEQ ID NO: 468697 - DNA, 58 bp, Artificial
  Synthetic oligonucleotide
tgcatttccatagcaaccctcttattaggcatcttaagtgtatacttagactgttgac

SEQ ID NO: 468698 - DNA, 60 bp, Artificial
  Synthetic oligonucleotide
tgcatttcctgggcatggtctataggctgatataactaagtgcacttccgaatggctgag

SEQ ID NO: 468699 - DNA, 60 bp, Artificial
  Synthetic oligonucleotide
tgcatttcggacgtgacacgtggtaacggcattactcatcgtgtgggcaagcgtttctgc

SEQ ID NO: 468700 - DNA, 60 bp, Artificial
  Synthetic oligonucleotide
tgcatttctagacaagcagggtaacatacttgggttccatgtggcagggaatgcgcgact

SEQ ID NO: 468701 - DNA, 60 bp, Artificial
  Synthetic oligonucleotide
tgcatttgacattcatgctacagacagaccaaattctgtgcacttcttatttggatcaac

SEQ ID NO: 468702 - DNA, 59 bp, Artificial
  Synthetic oligonucleotide
tgcatttgacgagaggagaaacaaatacctggaagaacatcccagtgcggggaaggatc

SEQ ID NO: 468703 - DNA, 60 bp, Artificial
  Synthetic oligonucleotide
tgcatttgatgaaaggaggaacaaatacctggaagagcatcccagtgcagggaaggaccc

SEQ ID NO: 468704 - DNA, 59 bp, Artificial
  Synthetic oligonucleotide
tgcattttcctttgttgtacaggatgtttcaaagtttagtggcatttactatgatttca

SEQ ID NO: 468705 - DNA, 57 bp, Artificial
  Synthetic oligonucleotide
tgcattttttgttcggtagttacctgtacttcaaagagaccatgagcgattttcacc

SEQ ID NO: 468706 - DNA, 57 bp, Artificial
  Synthetic oligonucleotide
tgccaaaaacagacttactattgtaaaacttatgggtcaaattttgaattgcactga

SEQ ID NO: 468707 - DNA, 50 bp, Artificial
  Synthetic oligonucleotide
tgccaaaatagcaaaaaggaagtgatttaatgtacttaaatagattagaa

SEQ ID NO: 468708 - DNA, 60 bp, Artificial
  Synthetic oligonucleotide
tgccaaacagtgacgatttcaataaattgtacatctggggggttcatcatccgagcaccg

SEQ ID NO: 468709 - DNA, 60 bp, Artificial
  Synthetic oligonucleotide
tgccaaaccaacatttcgccagataatgcatcatttcagtgacgttgcagttgcttacat

SEQ ID NO: 468710 - DNA, 60 bp, Artificial
  Synthetic oligonucleotide
tgccaaacggaacgctagtgaaaacaataacgaatgatcagattgaagtgactaatgcta

SEQ ID NO: 468711 - DNA, 57 bp, Artificial
  Synthetic oligonucleotide
tgccaaacgggccgagacccccggaaactcctctccatggacatgacgggccgcatc

SEQ ID NO: 468712 - DNA, 57 bp, Artificial
  Synthetic oligonucleotide
tgccaaagcccggtacatggtagcctacatccctcctggcatgacaccgcccacgga

SEQ ID NO: 468713 - DNA, 55 bp, Artificial
  Synthetic oligonucleotide
tgccaaaggattttcctccgtttgcaaagcgcaacttcttcagacaaccaaaacg

SEQ ID NO: 468714 - DNA, 55 bp, Artificial
  Synthetic oligonucleotide
tgccaaagtcagcccaactggtgagcgtagaatgaacaggcaagattgggcccta

SEQ ID NO: 468715 - DNA, 52 bp, Artificial
  Synthetic oligonucleotide
tgccaaagttcgtgaaacaatttacgcttcattacaagccacacactagaac

SEQ ID NO: 468716 - DNA, 60 bp, Artificial
  Synthetic oligonucleotide
tgccaaatcccgtgattgtttatgtgttcttaacttagcacttgtctaactgctctcatc

SEQ ID NO: 468717 - DNA, 60 bp, Artificial
  Synthetic oligonucleotide
tgccaaatgcaacctgtctatgatggtcaaacttatgtcatggtccgtaagccctatatc

SEQ ID NO: 468718 - DNA, 60 bp, Artificial
  Synthetic oligonucleotide
tgccaaatgcttgtactacttgcgcggcgctatagcgccgcgctagtgggcccccgcgcg

SEQ ID NO: 468719 - DNA, 60 bp, Artificial
  Synthetic oligonucleotide
tgccaaatgttttgaaagctctcagctggccactaggtatccccgactgtgagatcttca

SEQ ID NO: 468720 - DNA, 52 bp, Artificial
  Synthetic oligonucleotide
tgccaaattagaagtaagcaagtgtgtgtgttcccatctctcctagtcgccg

SEQ ID NO: 468721 - DNA, 52 bp, Artificial
  Synthetic oligonucleotide
tgccaacagcaacaacgacaccgcaaaatcttcaagtgacggagtgctttct

SEQ ID NO: 468722 - DNA, 53 bp, Artificial
  Synthetic oligonucleotide
tgccaacatttattcatctcagggctattctgcactaatcaatgggtgggatt

SEQ ID NO: 468723 - DNA, 60 bp, Artificial
  Synthetic oligonucleotide
tgccaactctatctcgtaatccaaccatgaatagcccatgaataaatcatatctatacat

SEQ ID NO: 468724 - DNA, 60 bp, Artificial
  Synthetic oligonucleotide
tgccaagaaacatagcatggatggttcaaagatccttagcccaagagcatggaatagaga

SEQ ID NO: 468725 - DNA, 57 bp, Artificial
  Synthetic oligonucleotide
tgccaagacgacggcagcgactgcccctacgccccctactgccgaggtgggggcggc

SEQ ID NO: 468726 - DNA, 60 bp, Artificial
  Synthetic oligonucleotide
tgccaagagacaggatgtgacagtactgggatctcaggaaggagccatgcattctgccct

SEQ ID NO: 468727 - DNA, 59 bp, Artificial
  Synthetic oligonucleotide
tgccaagagacgtggcgtggtctacacagttgaggactatcctgatgacattggtgcct

SEQ ID NO: 468728 - DNA, 50 bp, Artificial
  Synthetic oligonucleotide
tgccaagatagcagaacgtgaccgcttacactttatggcaatccgtaggg

SEQ ID NO: 468729 - DNA, 60 bp, Artificial
  Synthetic oligonucleotide
tgccaagcacttatgccttgttgcagaatcacgtgcacagtgtgcgcaagagcacacgct

SEQ ID NO: 468730 - DNA, 60 bp, Artificial
  Synthetic oligonucleotide
tgccaaggagccactgactggaacaatcctggagatgtgggacggggaaatctaccatta

SEQ ID NO: 468731 - DNA, 50 bp, Artificial
  Synthetic oligonucleotide
tgccaaggccattaactcctctgacaatgccaccaattctactcccttgc

SEQ ID NO: 468732 - DNA, 60 bp, Artificial
  Synthetic oligonucleotide
tgccaaggtctaccgtcatgctaaacgggtcgtatcgtgatataagagtcttggatggca

SEQ ID NO: 468733 - DNA, 55 bp, Artificial
  Synthetic oligonucleotide
tgccaagtatacattgttgtaaaggcactctattgtcttgagggtagagcctgtt

SEQ ID NO: 468734 - DNA, 55 bp, Artificial
  Synthetic oligonucleotide
tgccaagtggagccaatcaattcatgacaacagaagatgagcaatcacccaacat

SEQ ID NO: 468735 - DNA, 57 bp, Artificial
  Synthetic oligonucleotide
tgccaagtgtcaaaaagttaacagaggacagatggaacgagccccagaagaccaggg

SEQ ID NO: 468736 - DNA, 58 bp, Artificial
  Synthetic oligonucleotide
tgccaagttactcacagattcagggatgatctaaagaaaactgttactcctcaaaatt

SEQ ID NO: 468737 - DNA, 56 bp, Artificial
  Synthetic oligonucleotide
tgccaatacaactattccttttagtacctcatggaatatgcctgtaaatactggtc

SEQ ID NO: 468738 - DNA, 50 bp, Artificial
  Synthetic oligonucleotide
tgccaatagatgatagcaataaaactaataccagctataggttaataaat

SEQ ID NO: 468739 - DNA, 60 bp, Artificial
  Synthetic oligonucleotide
tgccaatatatagagcaaatggagagagggaattgcgtaatagatggtattggaaactga

SEQ ID NO: 468740 - DNA, 59 bp, Artificial
  Synthetic oligonucleotide
tgccaatcggaagagctttattgctccccgagtactcgacactgtaccgccgttggctc

SEQ ID NO: 468741 - DNA, 60 bp, Artificial
  Synthetic oligonucleotide
tgccaatctacccgatgctaattgggtcttgtcgctccgggtcagcgactcagaagtgac

SEQ ID NO: 468742 - DNA, 52 bp, Artificial
  Synthetic oligonucleotide
tgccaatgagaatgccattaataagagtggacgaatagttcagtctcatatt

SEQ ID NO: 468743 - DNA, 60 bp, Artificial
  Synthetic oligonucleotide
tgccaatgcagcccattgtgatagctaaggaacacatccactttccggatagtgattatc

SEQ ID NO: 468744 - DNA, 60 bp, Artificial
  Synthetic oligonucleotide
tgccaatgcatgcacgcgtagagataattcaaactgaaaagattggagatgtatatcgga

SEQ ID NO: 468745 - DNA, 60 bp, Artificial
  Synthetic oligonucleotide
tgccaatgcctgtaagagagaggccaacgttgtatcggcggtatatcgttccattcactc

SEQ ID NO: 468746 - DNA, 60 bp, Artificial
  Synthetic oligonucleotide
tgccaatgtagtggtcgcatatggacgctggcctgaatacctgagtgacaaggaagcaac

SEQ ID NO: 468747 - DNA, 54 bp, Artificial
  Synthetic oligonucleotide
tgccaattagaaactggacctttgactttggattactcggtactactttactta

SEQ ID NO: 468748 - DNA, 59 bp, Artificial
  Synthetic oligonucleotide
tgccaattccaacggtgaggtccgagggctggcgagagatttggtatgtttagctgtgg

SEQ ID NO: 468749 - DNA, 54 bp, Artificial
  Synthetic oligonucleotide
tgccaattctgaacgaaatgtctgagctatttgattacaattggaaatcggact

SEQ ID NO: 468750 - DNA, 55 bp, Artificial
  Synthetic oligonucleotide
tgccaattggcatagcacctacagatgtgaaaagacacactttacctgaacatca

SEQ ID NO: 468751 - DNA, 59 bp, Artificial
  Synthetic oligonucleotide
tgccaatttcaaagtcttgtcgcaacaactttcgcgacttaataggacgttggcagctg

SEQ ID NO: 468752 - DNA, 55 bp, Artificial
  Synthetic oligonucleotide
tgccaatttggccctctcacgtgcatgcgcatcaccggtgaaccaggcacctacg

SEQ ID NO: 468753 - DNA, 58 bp, Artificial
  Synthetic oligonucleotide
tgccacaaacattcctatacgaccccctgtaactgtggaaagtataccattagacaca

SEQ ID NO: 468754 - DNA, 60 bp, Artificial
  Synthetic oligonucleotide
tgccacaacaacgaataaccgttcatatggtcatccgtccttcaagtttgcgcttccaca

SEQ ID NO: 468755 - DNA, 58 bp, Artificial
  Synthetic oligonucleotide
tgccacaacatctcgcagtgcaggcctacggcagaagaaggtcacttttgacagactg

SEQ ID NO: 468756 - DNA, 55 bp, Artificial
  Synthetic oligonucleotide
tgccacaatgctaccacatcaataggcgttaaatgcgtcattaacggtcagtgtc

SEQ ID NO: 468757 - DNA, 55 bp, Artificial
  Synthetic oligonucleotide
tgccacacaggaacttccaaccttcgggtggcgaggtagggcagaagagtgactg

SEQ ID NO: 468758 - DNA, 58 bp, Artificial
  Synthetic oligonucleotide
tgccacacgagatggtggtgcattactaccacaggtaccccacgccaaccatcgtggg

SEQ ID NO: 468759 - DNA, 60 bp, Artificial
  Synthetic oligonucleotide
tgccacagaaactgtagagaccacaaacatagagagaatttgcacaaaagggaagagatc

SEQ ID NO: 468760 - DNA, 55 bp, Artificial
  Synthetic oligonucleotide
tgccacagcagatgctcgcgggctaattcaatcctccagggcccacgctatcgtc

SEQ ID NO: 468761 - DNA, 60 bp, Artificial
  Synthetic oligonucleotide
tgccacagccatttttagatcaatgtcttaacgaagaacgtggcactgttgttgaatacc

SEQ ID NO: 468762 - DNA, 60 bp, Artificial
  Synthetic oligonucleotide
tgccacagtcatgactctactgtgttgttgggaatcgggcgagtgagggagctggcacgt

SEQ ID NO: 468763 - DNA, 51 bp, Artificial
  Synthetic oligonucleotide
tgccacagtcgcctatgtagccttgcagtctggctacgattgcgtccgctg

SEQ ID NO: 468764 - DNA, 60 bp, Artificial
  Synthetic oligonucleotide
tgccacagttagtgaatctcaagggatgaccattagcaagagagtgttgatatgcctaga

SEQ ID NO: 468765 - DNA, 59 bp, Artificial
  Synthetic oligonucleotide
tgccacatgcaaacctgtgacatatgctggggcatgtagcagttttgatgtcttgcttg

SEQ ID NO: 468766 - DNA, 60 bp, Artificial
  Synthetic oligonucleotide
tgccacatgtaccaagacacccacacttcattgcgggatgtccaagtcaagtgcgctact

SEQ ID NO: 468767 - DNA, 60 bp, Artificial
  Synthetic oligonucleotide
tgccaccatgagtgacgtattcaacagtccacaggcgcgaacgaagatatcagcagcgtt

SEQ ID NO: 468768 - DNA, 55 bp, Artificial
  Synthetic oligonucleotide
tgccaccgcacttgctgtctactacatggcccgtgcagaaaatccaatcgtcatg

SEQ ID NO: 468769 - DNA, 60 bp, Artificial
  Synthetic oligonucleotide
tgccaccggtcgattcagtccaagtgcgtcatggctcccaagtcgccgtccgactacgcg

SEQ ID NO: 468770 - DNA, 58 bp, Artificial
  Synthetic oligonucleotide
tgccacctcccgcggaggttaatacacctgtggtcttagatgccctaccttcagagat

SEQ ID NO: 468771 - DNA, 60 bp, Artificial
  Synthetic oligonucleotide
tgccaccttcacggagaccacaattatagccacggctgacgccaggggccttattcagtc

SEQ ID NO: 468772 - DNA, 55 bp, Artificial
  Synthetic oligonucleotide
tgccacgcaactctcacgtacaggatgctagaaccaacaagagttgtcaactggg

SEQ ID NO: 468773 - DNA, 60 bp, Artificial
  Synthetic oligonucleotide
tgccacgctggtcctaccctacgttaattcattgtccattgattgcatggctagacacaa

SEQ ID NO: 468774 - DNA, 57 bp, Artificial
  Synthetic oligonucleotide
tgccacggatctacctgttaactccagcgagaacatgattgcagagtatccttctgc

SEQ ID NO: 468775 - DNA, 55 bp, Artificial
  Synthetic oligonucleotide
tgccacggcagatgcccggggccttattcagtcgtcacgggctcatgccatcgtt

SEQ ID NO: 468776 - DNA, 60 bp, Artificial
  Synthetic oligonucleotide
tgccacggtgactgatgtaatgtgccaactgcggttgaacaacagattctttatcagcgt

SEQ ID NO: 468777 - DNA, 59 bp, Artificial
  Synthetic oligonucleotide
tgccacgtaattattcagctgacgaaattaacgtagacggaccttcacatataacatac

SEQ ID NO: 468778 - DNA, 60 bp, Artificial
  Synthetic oligonucleotide
tgccacgtatgcgttattagtacttcgtctcgaagttatgagtgagggccctatgtgtgg

SEQ ID NO: 468779 - DNA, 55 bp, Artificial
  Synthetic oligonucleotide
tgccacgtcgtcgagttctgcggatcggaaacgttgttattcgtcgtcgatcgat

SEQ ID NO: 468780 - DNA, 57 bp, Artificial
  Synthetic oligonucleotide
tgccacgtctggaggaggtgtatgaggagatgtatccgggggaggcaaggcaacgag

SEQ ID NO: 468781 - DNA, 60 bp, Artificial
  Synthetic oligonucleotide
tgccacgtgtagccacagacgctactccaacacatggcgcaatatcccatatcaccggcg

SEQ ID NO: 468782 - DNA, 60 bp, Artificial
  Synthetic oligonucleotide
tgccacgttaactgctttggcagagctgtattatggcatcatgccattaacagaaacact

SEQ ID NO: 468783 - DNA, 54 bp, Artificial
  Synthetic oligonucleotide
tgccactagaatgtcaccaactatcatacttggacaatatgactcgtatcgttc

SEQ ID NO: 468784 - DNA, 60 bp, Artificial
  Synthetic oligonucleotide
tgccactatcggaagctgaaatcttagccttaaacgagagtcataaatattctctcttta

SEQ ID NO: 468785 - DNA, 57 bp, Artificial
  Synthetic oligonucleotide
tgccactcatagacccgcggtctttagaggtacaggcgcgtacgatactaccatcca

SEQ ID NO: 468786 - DNA, 60 bp, Artificial
  Synthetic oligonucleotide
tgccactcctagcctccttcgaggatatacacgctctatctcccactgagatggtagaga

SEQ ID NO: 468787 - DNA, 60 bp, Artificial
  Synthetic oligonucleotide
tgccactgaatgtattcgctcccacgtccaagcaggcttaattgatcaggcaaagggtca

SEQ ID NO: 468788 - DNA, 53 bp, Artificial
  Synthetic oligonucleotide
tgccactgtacatagaaactatgcattgtgctttcctcccacatcctgtttca

SEQ ID NO: 468789 - DNA, 60 bp, Artificial
  Synthetic oligonucleotide
tgccactgtgacaggaggaacatacgcatcaagggagcaagcattagttaggaagtttgt

SEQ ID NO: 468790 - DNA, 55 bp, Artificial
  Synthetic oligonucleotide
tgccactgtggagcatgttttatggctatgtagattttatagagtcagaactagg

SEQ ID NO: 468791 - DNA, 60 bp, Artificial
  Synthetic oligonucleotide
tgccacttacaccgccccgtgatttcacgaaagtttacatcgctgcatccgtcggagcta

SEQ ID NO: 468792 - DNA, 60 bp, Artificial
  Synthetic oligonucleotide
tgccacttaccagaggacaagagcccttgtgcgtactgggatggatcctagaatgtgctc

SEQ ID NO: 468793 - DNA, 60 bp, Artificial
  Synthetic oligonucleotide
tgccacttatttaatcatctcaggattctctaatgtgattaatacgggttgatcataagg

SEQ ID NO: 468794 - DNA, 60 bp, Artificial
  Synthetic oligonucleotide
tgccacttcgttctcttgctcacggcagccccggagccatcacctatgccttatgtccct

SEQ ID NO: 468795 - DNA, 60 bp, Artificial
  Synthetic oligonucleotide
tgccacttgtgagcagattgcagattcacagcatcggtctcacagacagatggcaactgc

SEQ ID NO: 468796 - DNA, 55 bp, Artificial
  Synthetic oligonucleotide
tgccacttgtgagcagattgctgatgcccaacatcggtctcacaggcagatggcg

SEQ ID NO: 468797 - DNA, 60 bp, Artificial
  Synthetic oligonucleotide
tgccactttgggggatgccatcactgcatttcatgagcacaatgatgcctcacctgccac

SEQ ID NO: 468798 - DNA, 55 bp, Artificial
  Synthetic oligonucleotide
tgccacttttggcagtgttgagttttaccagggtgatgttaaggcgttgtctgca

SEQ ID NO: 468799 - DNA, 53 bp, Artificial
  Synthetic oligonucleotide
tgccagaaaaaggtctgcccacactaatgatgtaagacagttaacagaagtgg

SEQ ID NO: 468800 - DNA, 55 bp, Artificial
  Synthetic oligonucleotide
tgccagaaagacgaagaacgtagaaggcgtttctatgtcagaaatacagaaggcc

SEQ ID NO: 468801 - DNA, 60 bp, Artificial
  Synthetic oligonucleotide
tgccagaatttctatcattgccagtagattacagtgattacgatgttgtggaatgcggga

SEQ ID NO: 468802 - DNA, 56 bp, Artificial
  Synthetic oligonucleotide
tgccagacaaaggtcagcacacacaaatgacatcaggcaactggcggaagcagtac

SEQ ID NO: 468803 - DNA, 60 bp, Artificial
  Synthetic oligonucleotide
tgccagagggacacgcaatacccgtccaggactttcaagctctgagcgaaagtgctacca

SEQ ID NO: 468804 - DNA, 60 bp, Artificial
  Synthetic oligonucleotide
tgccagagtacaagtagcacatttgctcggaaagcgggcacaacgcgacctgttgactgg

SEQ ID NO: 468805 - DNA, 57 bp, Artificial
  Synthetic oligonucleotide
tgccagatagtgtacagtggttgcacctatacacttgagtctgatggcaagggcagt

SEQ ID NO: 468806 - DNA, 60 bp, Artificial
  Synthetic oligonucleotide
tgccagatgatatgttcaacgcattattacctgacctaattgccggagcgcatcagaatg

SEQ ID NO: 468807 - DNA, 60 bp, Artificial
  Synthetic oligonucleotide
tgccagcaggacaacttagggaccccagaggatcagatatagcgggaaccaccagcacag

SEQ ID NO: 468808 - DNA, 52 bp, Artificial
  Synthetic oligonucleotide
tgccagcctggagaactgctcttggatacagggagaaggacgggagcagtac

SEQ ID NO: 468809 - DNA, 60 bp, Artificial
  Synthetic oligonucleotide
tgccaggaccatttggagttctgggagagtgtctttacaggcctcacccacatagatgct

SEQ ID NO: 468810 - DNA, 60 bp, Artificial
  Synthetic oligonucleotide
tgccaggaggcgaggcattatgcgtttggggtacactcctgttcctagtttagcagcttc

SEQ ID NO: 468811 - DNA, 58 bp, Artificial
  Synthetic oligonucleotide
tgccaggatccacagtcatggtaatttggccataacaccgtctttgaaggaccgattt

SEQ ID NO: 468812 - DNA, 60 bp, Artificial
  Synthetic oligonucleotide
tgccaggcacttctttgttagaggtggtaatgtaggggatgcgatacccaatactgctgt

SEQ ID NO: 468813 - DNA, 57 bp, Artificial
  Synthetic oligonucleotide
tgccaggcaggtaccccacctccgggtgggatctgagcctgggctaattgtctacgg

SEQ ID NO: 468814 - DNA, 52 bp, Artificial
  Synthetic oligonucleotide
tgccaggtgggtattgtctggaaaagtggatgttaatctcatctgagctaaa

SEQ ID NO: 468815 - DNA, 60 bp, Artificial
  Synthetic oligonucleotide
tgccaggtggttactgtctcacaaggtctatgctaatagggcttgatctgaaatgctttg

SEQ ID NO: 468816 - DNA, 55 bp, Artificial
  Synthetic oligonucleotide
tgccagtcaacatgggaggaatctatacccgcaagattgtcccactcccgagcgg

SEQ ID NO: 468817 - DNA, 60 bp, Artificial
  Synthetic oligonucleotide
tgccagtcacacatcccaacagaagcttgattatttttgtagtggcggacgataagataa

SEQ ID NO: 468818 - DNA, 55 bp, Artificial
  Synthetic oligonucleotide
tgccagtcacccaaacaatggagctcgtagaaacaaagaaacatcccgcttattg

SEQ ID NO: 468819 - DNA, 55 bp, Artificial
  Synthetic oligonucleotide
tgccagtgggaaagaggcaaaggtttgcactattagtcccataatgggctactca

SEQ ID NO: 468820 - DNA, 55 bp, Artificial
  Synthetic oligonucleotide
tgccataaatacctcctatcagcttttaacgtggttcaggtttgcacgtattggg

SEQ ID NO: 468821 - DNA, 60 bp, Artificial
  Synthetic oligonucleotide
tgccataagattcggtgaaagtgaacaaataatagtaacaagggagccgtatgtgtcatg

SEQ ID NO: 468822 - DNA, 60 bp, Artificial
  Synthetic oligonucleotide
tgccataatggatgaagcccattggaccgatccacatagcatcgcggcgagagggcatct

SEQ ID NO: 468823 - DNA, 60 bp, Artificial
  Synthetic oligonucleotide
tgccataccactcatatggactgggatgattgatttacctggatactacgaagctgtcca

SEQ ID NO: 468824 - DNA, 60 bp, Artificial
  Synthetic oligonucleotide
tgccatactaacttgtaggttcatacgtatggcaacggttttcattggcactagatttga

SEQ ID NO: 468825 - DNA, 60 bp, Artificial
  Synthetic oligonucleotide
tgccatatacatctatgtggcgtgttgtaccagtcttttacaatggttggggttcaccta

SEQ ID NO: 468826 - DNA, 57 bp, Artificial
  Synthetic oligonucleotide
tgccatcaatgtttgtccctgttggggacgttaccgaatatggcttccttaacctca

SEQ ID NO: 468827 - DNA, 59 bp, Artificial
  Synthetic oligonucleotide
tgccatcacaaatgatggtatgattactatgctgaacaactatgttcagggcattggtg

SEQ ID NO: 468828 - DNA, 60 bp, Artificial
  Synthetic oligonucleotide
tgccatccaaagatagctatgttccactatacatgagaggtaagtggtatccctctatct

SEQ ID NO: 468829 - DNA, 52 bp, Artificial
  Synthetic oligonucleotide
tgccatcccatgagcgtagggagcggcaccggagtgttcatggctctctggt

SEQ ID NO: 468830 - DNA, 55 bp, Artificial
  Synthetic oligonucleotide
tgccatccgatagggatggtaatagggactccagcctgtgacctacacctcaccg

SEQ ID NO: 468831 - DNA, 60 bp, Artificial
  Synthetic oligonucleotide
tgccatccttgtgtactcatgaaatatgaggaggtgcatgataaggttctcaccgaccac

SEQ ID NO: 468832 - DNA, 60 bp, Artificial
  Synthetic oligonucleotide
tgccatcgatatcccgaatgatgccgtcagagatgacgctaaacctgaaaaggagcctaa

SEQ ID NO: 468833 - DNA, 60 bp, Artificial
  Synthetic oligonucleotide
tgccatcgcgcgtaagtccaagggaatacagatcttcccaggagtctgtacgggaagtga

SEQ ID NO: 468834 - DNA, 60 bp, Artificial
  Synthetic oligonucleotide
tgccatcgtcagcctcacccgggcctccgacgcactctaccttcacgagctcgaggacgg

SEQ ID NO: 468835 - DNA, 60 bp, Artificial
  Synthetic oligonucleotide
tgccatctcaacagggtcagtggctggtccttcaatgtcgagccaaagggtgttggtggg

SEQ ID NO: 468836 - DNA, 60 bp, Artificial
  Synthetic oligonucleotide
tgccatcttatgggcggttgacattacctctagatccaagcattgaccttcaacttaaca

SEQ ID NO: 468837 - DNA, 60 bp, Artificial
  Synthetic oligonucleotide
tgccatcttgtcggggaatgtcatgtgaataggtgtctgtcttggagggacaatgaaact

SEQ ID NO: 468838 - DNA, 53 bp, Artificial
  Synthetic oligonucleotide
tgccatgatggcaaagccaggatgtcaatatgtgtgtcagggccgaacaacaa

SEQ ID NO: 468839 - DNA, 60 bp, Artificial
  Synthetic oligonucleotide
tgccatgatgggaagaagtggatgacaattggtgtaacagggccggattccaaggcagta

SEQ ID NO: 468840 - DNA, 60 bp, Artificial
  Synthetic oligonucleotide
tgccatgcaaccttcacttcaaggctcatgcaacctcatagagttccaaattacaatctg

SEQ ID NO: 468841 - DNA, 55 bp, Artificial
  Synthetic oligonucleotide
tgccatgcagcttataacctccaatatccacacccaggttgtgagagccaggagg

SEQ ID NO: 468842 - DNA, 60 bp, Artificial
  Synthetic oligonucleotide
tgccatgccctgaaggtaaatcccttgactctgcaccagtgccttttacatcctcaaata

SEQ ID NO: 468843 - DNA, 51 bp, Artificial
  Synthetic oligonucleotide
tgccatgcgcgcgtccatgattgccgcgaagggcggccccgaactgttcaa

SEQ ID NO: 468844 - DNA, 60 bp, Artificial
  Synthetic oligonucleotide
tgccatggacgtgggtgaaatgtgtgaggacaccgtcacatataaatgccccctactggt

SEQ ID NO: 468845 - DNA, 55 bp, Artificial
  Synthetic oligonucleotide
tgccatgtacgacaattggtcccatgcgtggcgatgtgaagaaatgtccgagcgc

SEQ ID NO: 468846 - DNA, 60 bp, Artificial
  Synthetic oligonucleotide
tgccatgtactacatcctcaccagaggatggtcggacaacggcgaccccatgttcaacca

SEQ ID NO: 468847 - DNA, 60 bp, Artificial
  Synthetic oligonucleotide
tgccatgtcacagccgagttactggcgttcaggtttatcgcccactgaccatgcacctaa

SEQ ID NO: 468848 - DNA, 55 bp, Artificial
  Synthetic oligonucleotide
tgccatgtcttatagcggttggctcccgtatttagagagaatatgtcacgaaaca

SEQ ID NO: 468849 - DNA, 60 bp, Artificial
  Synthetic oligonucleotide
tgccatgtgacctccacgcctacaccagaggtgttgcagtgcactaccttctcatgtgtc

SEQ ID NO: 468850 - DNA, 60 bp, Artificial
  Synthetic oligonucleotide
tgccatgtgagtttgtgttttacacatggcccctgtgagtcttgacaacttgcaggttca

SEQ ID NO: 468851 - DNA, 60 bp, Artificial
  Synthetic oligonucleotide
tgccatgtgctgtctcccctcggtttcatcctgcctgacgctgcctacgtgtaccgcgtt

SEQ ID NO: 468852 - DNA, 55 bp, Artificial
  Synthetic oligonucleotide
tgccatgtgtgctaacgcctgtgttccttttagtattgctgcgggaattatctct

SEQ ID NO: 468853 - DNA, 58 bp, Artificial
  Synthetic oligonucleotide
tgccattaacggaattacaaacaaggtgaattctgtaatcgagaaaatgaacactcaa

SEQ ID NO: 468854 - DNA, 58 bp, Artificial
  Synthetic oligonucleotide
tgccattacacggcagttttgtctcggttcgatccctttcaccccaagagacagcggc

SEQ ID NO: 468855 - DNA, 55 bp, Artificial
  Synthetic oligonucleotide
tgccattattgttgcgactgaggtcgccgagagttcgtggcacatcacaccgtct

SEQ ID NO: 468856 - DNA, 55 bp, Artificial
  Synthetic oligonucleotide
tgccattcaccgaagatgggaggatataggcgtcaagaatttggcgacgaacctc

SEQ ID NO: 468857 - DNA, 60 bp, Artificial
  Synthetic oligonucleotide
tgccattctggtgggcacgcagacgcaagccatggtatggaagattcaggcgccgctaca

SEQ ID NO: 468858 - DNA, 52 bp, Artificial
  Synthetic oligonucleotide
tgccattcttccttctccagcggtaacagtggcgggggtggaccaaccaagg

SEQ ID NO: 468859 - DNA, 60 bp, Artificial
  Synthetic oligonucleotide
tgccattgagtctgctacagagactatgcgcctattatttagtggatatgcaagcattcc

SEQ ID NO: 468860 - DNA, 55 bp, Artificial
  Synthetic oligonucleotide
tgccattggaactgacccggatgtcgattggacacgctacgccgctgagctgagc

SEQ ID NO: 468861 - DNA, 60 bp, Artificial
  Synthetic oligonucleotide
tgccattgtgtcatcgttgcattacgaaggcaaaatgcgcactacgaatgagtacaacat

SEQ ID NO: 468862 - DNA, 60 bp, Artificial
  Synthetic oligonucleotide
tgccatttctcaaggcacacgtcgattgcacaaaaggttccgacgcgaccaattccagca

SEQ ID NO: 468863 - DNA, 55 bp, Artificial
  Synthetic oligonucleotide
tgccatttgcgttttggagaccgtcgcgagcagaactccgtcgttttcggcctgt

SEQ ID NO: 468864 - DNA, 60 bp, Artificial
  Synthetic oligonucleotide
tgccattttcccgcctactggccgatttgcatgattttcaacatcgtgtcaagattgctt

SEQ ID NO: 468865 - DNA, 54 bp, Artificial
  Synthetic oligonucleotide
tgcccaaacaacccactatggagccgggaacttatccgtcccgtgtagtacaag

SEQ ID NO: 468866 - DNA, 59 bp, Artificial
  Synthetic oligonucleotide
tgcccaaactatatgcaaaatctgtgtccattgaacaaacgataaatgcgcagaagcaa

SEQ ID NO: 468867 - DNA, 60 bp, Artificial
  Synthetic oligonucleotide
tgcccaaataatatatgcagggaaaatgacagactccattaaatcatggagaagagacat

SEQ ID NO: 468868 - DNA, 53 bp, Artificial
  Synthetic oligonucleotide
tgcccaaatctaaacaaactcctagttctactccggttcgacccaccgcgtcc

SEQ ID NO: 468869 - DNA, 52 bp, Artificial
  Synthetic oligonucleotide
tgcccaagacgctactagcatactgggtatcggcacggtcttagatcaagct

SEQ ID NO: 468870 - DNA, 58 bp, Artificial
  Synthetic oligonucleotide
tgcccaagcctaggctacacaacatattatgaggtgaagaacacgcttgaaaagtcca

SEQ ID NO: 468871 - DNA, 55 bp, Artificial
  Synthetic oligonucleotide
tgcccaagctccgagcaggactcggcgttggccacgtgggagccagcattccgct

SEQ ID NO: 468872 - DNA, 50 bp, Artificial
  Synthetic oligonucleotide
tgcccaatacgcccactaccacaatacgtcatcgttgtcaagcatattca

SEQ ID NO: 468873 - DNA, 60 bp, Artificial
  Synthetic oligonucleotide
tgcccaatcttctcagaggatacgaacatatcaggttatcaacccataacgttatcaacg

SEQ ID NO: 468874 - DNA, 57 bp, Artificial
  Synthetic oligonucleotide
tgcccaatgtattggcctgtattttgtttataagctatccgattgaataaaaacgaa

SEQ ID NO: 468875 - DNA, 50 bp, Artificial
  Synthetic oligonucleotide
tgcccaattgcatccctttgaacctgtgatgagcaggtcagagattgcta

SEQ ID NO: 468876 - DNA, 58 bp, Artificial
  Synthetic oligonucleotide
tgcccacaaaggacttttgggaatacagaataggcatgtactccccaatattcctcag

SEQ ID NO: 468877 - DNA, 55 bp, Artificial
  Synthetic oligonucleotide
tgcccacactaatgatgtaagacagttagtagaggcagtgcaaagaataactatg

SEQ ID NO: 468878 - DNA, 55 bp, Artificial
  Synthetic oligonucleotide
tgcccacagcatggtacaaccccaaagcggcttgaaccccgccggaggttctggt

SEQ ID NO: 468879 - DNA, 59 bp, Artificial
  Synthetic oligonucleotide
tgcccaccgtgcatgatagagatatttggggtactttaggagaaataacaggatcttta

SEQ ID NO: 468880 - DNA, 59 bp, Artificial
  Synthetic oligonucleotide
tgcccacgatgtcccaggacaagagggcctgtggtaccgatcagtttttacttctcatg

SEQ ID NO: 468881 - DNA, 60 bp, Artificial
  Synthetic oligonucleotide
tgcccactactggatgcaccagttcaagctaacagcttcaaaccttcaatttggggcgcc

SEQ ID NO: 468882 - DNA, 58 bp, Artificial
  Synthetic oligonucleotide
tgcccactggaacccggtatcaccgatccactgcatggccaaaactgctcccagaaga

SEQ ID NO: 468883 - DNA, 56 bp, Artificial
  Synthetic oligonucleotide
tgcccactggtggcagctcactctgggcgctatttgcgccctcctactcgctggct

SEQ ID NO: 468884 - DNA, 55 bp, Artificial
  Synthetic oligonucleotide
tgcccagaattttggttgaccatgacacacaaacgtgtcacgtggttgactcctt

SEQ ID NO: 468885 - DNA, 59 bp, Artificial
  Synthetic oligonucleotide
tgcccagacaccactaaaatgtctttattcgtacttcatgaagaaggttagacatggct

SEQ ID NO: 468886 - DNA, 54 bp, Artificial
  Synthetic oligonucleotide
tgcccagacctttaccccgtcttgttcaaccaaacccgagttcacgcgtcagga

SEQ ID NO: 468887 - DNA, 54 bp, Artificial
  Synthetic oligonucleotide
tgcccagacggtgtccggttaccggcttgccccggatttgcttactgggccgtc

SEQ ID NO: 468888 - DNA, 60 bp, Artificial
  Synthetic oligonucleotide
tgcccagagagaagagcactggtacaaagcaattcttgagtcgcactctactttttgcgg

SEQ ID NO: 468889 - DNA, 60 bp, Artificial
  Synthetic oligonucleotide
tgcccagcagacgaggggcctcttgggatgcataattaccagcttgaccggccgggacaa

SEQ ID NO: 468890 - DNA, 57 bp, Artificial
  Synthetic oligonucleotide
tgcccagccttagaacaaagcctaaaggcaggcgctccataaaaattagaataaagc

SEQ ID NO: 468891 - DNA, 60 bp, Artificial
  Synthetic oligonucleotide
tgcccagcgcattgtagaacaggatccggatcaggatagggagctggagtgcttggaggt

SEQ ID NO: 468892 - DNA, 60 bp, Artificial
  Synthetic oligonucleotide
tgcccagctgatgtctgtgagttaatccgcggtgcgtacccaaagatccagactgcaagc

SEQ ID NO: 468893 - DNA, 54 bp, Artificial
  Synthetic oligonucleotide
tgcccaggtacaaggctcaggtatccgatggaaagggccttacccgtaccgtat

SEQ ID NO: 468894 - DNA, 60 bp, Artificial
  Synthetic oligonucleotide
tgcccagtatcgtgttgtccgcgccaccattcggtatcgccccctggtgccgaatgctgt

SEQ ID NO: 468895 - DNA, 55 bp, Artificial
  Synthetic oligonucleotide
tgcccagttggcacaagagggtaaggcaccatacatatctgaattggcgctcaag

SEQ ID NO: 468896 - DNA, 58 bp, Artificial
  Synthetic oligonucleotide
tgcccatacaccgaacccatgctaatagaccactcagacccaaacaaaggcttcgtac

SEQ ID NO: 468897 - DNA, 55 bp, Artificial
  Synthetic oligonucleotide
tgcccatactgttgagcaattcacgttcattataaatgtcgttcgcgggcgcaac

SEQ ID NO: 468898 - DNA, 60 bp, Artificial
  Synthetic oligonucleotide
tgcccatagagggttatacctaggaggaactgtgtcttgcgcttcctcagtgcctgcaaa

SEQ ID NO: 468899 - DNA, 59 bp, Artificial
  Synthetic oligonucleotide
tgcccatatccgtacatatatatacttttgactaaaacaccctcaaaaagctgagataa

SEQ ID NO: 468900 - DNA, 53 bp, Artificial
  Synthetic oligonucleotide
tgcccatattgcatgactttaactgaggcaacacagagtgcccttcaagcaca

SEQ ID NO: 468901 - DNA, 60 bp, Artificial
  Synthetic oligonucleotide
tgcccattcgattccgaatgaggacaggactcatgttaatggatctgaagttcacaggcg

SEQ ID NO: 468902 - DNA, 60 bp, Artificial
  Synthetic oligonucleotide
tgcccattgatttgtggaaaggctattcaattcagagatcgcagaactaatgcaagatcc

SEQ ID NO: 468903 - DNA, 59 bp, Artificial
  Synthetic oligonucleotide
tgcccattgggtctttcctgtccttgaaggaccgcagatgtagagacttcggggtctga

SEQ ID NO: 468904 - DNA, 60 bp, Artificial
  Synthetic oligonucleotide
tgccccaacattccactattaggcaaaatggccatctacatttgtagaatgtcaaatcat

SEQ ID NO: 468905 - DNA, 60 bp, Artificial
  Synthetic oligonucleotide
tgccccaagattggaggacatggtagtaagaagtgcactggggacgcagcattttgctct

SEQ ID NO: 468906 - DNA, 60 bp, Artificial
  Synthetic oligonucleotide
tgccccaatgttcaatgcgaaattacgcatctctgagactgtaatcgcgaaagcacactc

SEQ ID NO: 468907 - DNA, 60 bp, Artificial
  Synthetic oligonucleotide
tgccccaattgagcacattgcaagtatgaggaggaactatttcacagcggaagtgtccca

SEQ ID NO: 468908 - DNA, 55 bp, Artificial
  Synthetic oligonucleotide
tgccccaattgcgccgcgtaaattcaaaacctacgtatactactattggggccca

SEQ ID NO: 468909 - DNA, 57 bp, Artificial
  Synthetic oligonucleotide
tgccccacagcatttattggcacctggcttctatattccagtacaacatgatcgatt

SEQ ID NO: 468910 - DNA, 55 bp, Artificial
  Synthetic oligonucleotide
tgccccactataccaaaccctacagggaaacttgtggttgccctagttgatccca

SEQ ID NO: 468911 - DNA, 60 bp, Artificial
  Synthetic oligonucleotide
tgccccagggaattgaggaaatcattcaacaggtcgccagcaatgcactgcaattgtccc

SEQ ID NO: 468912 - DNA, 60 bp, Artificial
  Synthetic oligonucleotide
tgccccatcctcactttgactagggccattggctgctgagtcccatatggatgctgatct

SEQ ID NO: 468913 - DNA, 57 bp, Artificial
  Synthetic oligonucleotide
tgccccatgccgtatacgccttacccgtcctcaagcaccgtgtacgtcaggaatgtt

SEQ ID NO: 468914 - DNA, 60 bp, Artificial
  Synthetic oligonucleotide
tgccccatggtgtaaaaacaaaggcttgcgtagcaggtgtagatcaagcacattgtagcg

SEQ ID NO: 468915 - DNA, 57 bp, Artificial
  Synthetic oligonucleotide
tgccccatgtacgttggagtaaaaagtctcaaactggcagtcggtctaaggaatgta

SEQ ID NO: 468916 - DNA, 55 bp, Artificial
  Synthetic oligonucleotide
tgccccattttaacccgctcccctaagttctctcgctcccattgcgccatggcgg

SEQ ID NO: 468917 - DNA, 57 bp, Artificial
  Synthetic oligonucleotide
tgcccccactgtccgcgtcaccagaagcaaattatgggccaacagacccatgtatcg

SEQ ID NO: 468918 - DNA, 53 bp, Artificial
  Synthetic oligonucleotide
tgccccccaattgccccccgattcaatcggggggcacttatccgtacaattta

SEQ ID NO: 468919 - DNA, 59 bp, Artificial
  Synthetic oligonucleotide
tgcccccccgatgtcatccccaaagtggagggcaccactgtggcagaccaaatactgcg

SEQ ID NO: 468920 - DNA, 53 bp, Artificial
  Synthetic oligonucleotide
tgcccccccgcggttctcgccccagctggggccaaaatgacccccggcgtaga

SEQ ID NO: 468921 - DNA, 54 bp, Artificial
  Synthetic oligonucleotide
tgccccccgattcaatcggggggcacttatccgtacaatttaattggacaacaa

SEQ ID NO: 468922 - DNA, 57 bp, Artificial
  Synthetic oligonucleotide
tgcccccctgaggacccgattcctgcaatcccgcaggggtcacagcctgtccccttg

SEQ ID NO: 468923 - DNA, 51 bp, Artificial
  Synthetic oligonucleotide
tgccccgcagggcttatgcttacaatggagaggaggcagcctcacttggaa

SEQ ID NO: 468924 - DNA, 55 bp, Artificial
  Synthetic oligonucleotide
tgccccgcatgatgacaggaagcatgaaggaggttcctcattggttgtcaacccc

SEQ ID NO: 468925 - DNA, 55 bp, Artificial
  Synthetic oligonucleotide
tgccccgctgccaatgcctggaaataagcggtgtgtattttacatgtggtacagg

SEQ ID NO: 468926 - DNA, 54 bp, Artificial
  Synthetic oligonucleotide
tgccccggcctgtacggtaaaacggtagggtacgccgtgacgcatcacgcggag

SEQ ID NO: 468927 - DNA, 55 bp, Artificial
  Synthetic oligonucleotide
tgcccctacagtctcggacagtcgagcactggccaggagattccactttgacatg

SEQ ID NO: 468928 - DNA, 58 bp, Artificial
  Synthetic oligonucleotide
tgcccctatcttatcaacacttccggaaactgctgttgttagaccaagaggcaggtcc

SEQ ID NO: 468929 - DNA, 58 bp, Artificial
  Synthetic oligonucleotide
tgcccctatcttatcaacacttccggagtgtgctgttgttagtcgaaggggcaggtcc

SEQ ID NO: 468930 - DNA, 52 bp, Artificial
  Synthetic oligonucleotide
tgcccctccgactctgtcaccagcacaacaccgcccgcaaacctttgtgtca

SEQ ID NO: 468931 - DNA, 56 bp, Artificial
  Synthetic oligonucleotide
tgcccctcggggcacgctgtgggcatctttcgggccgctgtgtgcacccggggggt

SEQ ID NO: 468932 - DNA, 59 bp, Artificial
  Synthetic oligonucleotide
tgcccctgagttttacagtagtaggcgtttaggatgcatagggctgcgttaaagtctga

SEQ ID NO: 468933 - DNA, 58 bp, Artificial
  Synthetic oligonucleotide
tgcccctttttatgctaacctatgggtacctagactatgtactaaaatgcgcaggctc

SEQ ID NO: 468934 - DNA, 60 bp, Artificial
  Synthetic oligonucleotide
tgcccgaagacaatgaaccgagcggttatgctcaaacagactgtgtgttggaagcaatgg

SEQ ID NO: 468935 - DNA, 54 bp, Artificial
  Synthetic oligonucleotide
tgcccgacaactgccgccacttgcggtacccctccgtctcgccctatttttggg

SEQ ID NO: 468936 - DNA, 60 bp, Artificial
  Synthetic oligonucleotide
tgcccgatatatctttgtgtagatttatcggactgcgcgttgaatcatctgtgttgaggg

SEQ ID NO: 468937 - DNA, 57 bp, Artificial
  Synthetic oligonucleotide
tgcccgcataaatagttatgtgggcctaaagacctagcccacattgttttgcccgtc

SEQ ID NO: 468938 - DNA, 60 bp, Artificial
  Synthetic oligonucleotide
tgcccgcctcttgcattagttaatacacctatagaggatggggacatgataggcacagga

SEQ ID NO: 468939 - DNA, 57 bp, Artificial
  Synthetic oligonucleotide
tgcccgcgtaaatagttgtgtgggcctaaagacctagcccacattgtcttcccagta

SEQ ID NO: 468940 - DNA, 55 bp, Artificial
  Synthetic oligonucleotide
tgcccgctccctctcacgcgcgctcccctggtgtggtgctgccactcgccctctt

SEQ ID NO: 468941 - DNA, 58 bp, Artificial
  Synthetic oligonucleotide
tgcccgctgaggattacaaatggggcgttcgtgtcgctaacttaaaatctatctggac

SEQ ID NO: 468942 - DNA, 60 bp, Artificial
  Synthetic oligonucleotide
tgcccgctgctgcccatttatttgtggaaaagcagtggttttcagagatcggaacacatg

SEQ ID NO: 468943 - DNA, 54 bp, Artificial
  Synthetic oligonucleotide
tgcccgctggacatcgcgaccacgttcgtggccccgaacttctacttcggtggt

SEQ ID NO: 468944 - DNA, 55 bp, Artificial
  Synthetic oligonucleotide
tgcccggagtgccgtaccctcggtttgcagggttgtgcattccagtctactatcg

SEQ ID NO: 468945 - DNA, 56 bp, Artificial
  Synthetic oligonucleotide
tgcccggggagaggagccagaacctgaggctggaggaggtactagtcgacccggtg

SEQ ID NO: 468946 - DNA, 56 bp, Artificial
  Synthetic oligonucleotide
tgcccggtcaggcaaaaggttttaaaacctatggtgtgtatgattgtgctaccaaa

SEQ ID NO: 468947 - DNA, 53 bp, Artificial
  Synthetic oligonucleotide
tgcccgtacccggtttaccaacttcattgtggacgaccgggggagagttcatc

SEQ ID NO: 468948 - DNA, 55 bp, Artificial
  Synthetic oligonucleotide
tgcccgtaccggttctacgcggagcgcttccctgcgctgaagccgtacctggaac

SEQ ID NO: 468949 - DNA, 54 bp, Artificial
  Synthetic oligonucleotide
tgcccgtcaccagtcccgatgatgccgcccaagggtccgggcacacaaaggcag

SEQ ID NO: 468950 - DNA, 51 bp, Artificial
  Synthetic oligonucleotide
tgcccgtgctaacggctgaacacagagcaatgatacagaatgctttagatg

SEQ ID NO: 468951 - DNA, 55 bp, Artificial
  Synthetic oligonucleotide
tgcccgtgttgtgcgaacaactagcaacggcgatggactgtgaaggtacagagga

SEQ ID NO: 468952 - DNA, 55 bp, Artificial
  Synthetic oligonucleotide
tgcccgttctactatcaccctctatcactatacttatgggcctcaaaggccgcgc

SEQ ID NO: 468953 - DNA, 60 bp, Artificial
  Synthetic oligonucleotide
tgccctaaaaagatggctctgggaactccagggtgtatttgctgcgcatgacgcctttgt

SEQ ID NO: 468954 - DNA, 57 bp, Artificial
  Synthetic oligonucleotide
tgccctaactcgagtattgtgtacgagacggccgataccatcctacactctccgggg

SEQ ID NO: 468955 - DNA, 55 bp, Artificial
  Synthetic oligonucleotide
tgccctaactcgagtattgtgtacgaggcgcccgatgctatcctgcacactccgg

SEQ ID NO: 468956 - DNA, 58 bp, Artificial
  Synthetic oligonucleotide
tgccctaatcccagcttacataacgcattggtagcggttgaacgtagagtgttcaccg

SEQ ID NO: 468957 - DNA, 60 bp, Artificial
  Synthetic oligonucleotide
tgccctagtacttactaatgtttcaaagtcccatgtgcagtcagctagacgtgtcatgct

SEQ ID NO: 468958 - DNA, 60 bp, Artificial
  Synthetic oligonucleotide
tgccctcacgcggaacgtgcctcttacagcaccttaatatgtcagcctgtcgtatcggcg

SEQ ID NO: 468959 - DNA, 55 bp, Artificial
  Synthetic oligonucleotide
tgccctcagcaggtcgtgctcgtatggctctacgaacgcttctcctagctcgtcg

SEQ ID NO: 468960 - DNA, 60 bp, Artificial
  Synthetic oligonucleotide
tgccctcaggagccccatgtacaactgtgctaaattctatatgcaatctgctggtttgta

SEQ ID NO: 468961 - DNA, 54 bp, Artificial
  Synthetic oligonucleotide
tgccctccaggggacgaactaaaggtccagttccaagatgcagaatcgcacacc

SEQ ID NO: 468962 - DNA, 55 bp, Artificial
  Synthetic oligonucleotide
tgccctccaggttgagtatcgcaatttgacccctggcaacacgaacacccgtgtt

SEQ ID NO: 468963 - DNA, 54 bp, Artificial
  Synthetic oligonucleotide
tgccctccgcaccatctggacaagaccagggagttcggagacaacaccgctggc

SEQ ID NO: 468964 - DNA, 57 bp, Artificial
  Synthetic oligonucleotide
tgccctccggaatattctgtacccaattttgggactcattctataactgtattatgg

SEQ ID NO: 468965 - DNA, 55 bp, Artificial
  Synthetic oligonucleotide
tgccctcctacgtgatcgcgagacacgttacagtcctttcctgcgtgacgcagat

SEQ ID NO: 468966 - DNA, 57 bp, Artificial
  Synthetic oligonucleotide
tgccctcctccgacgaaagcggagagagcgatatcagttcttcgagcgacacatcga

SEQ ID NO: 468967 - DNA, 55 bp, Artificial
  Synthetic oligonucleotide
tgccctcgaattggatgagggcatgcaagtgaggttccccattctgatgcagctc

SEQ ID NO: 468968 - DNA, 60 bp, Artificial
  Synthetic oligonucleotide
tgccctcgagtatgcatcaactgtcgcaacgatagtggagactctgaaatttgtagttag

SEQ ID NO: 468969 - DNA, 60 bp, Artificial
  Synthetic oligonucleotide
tgccctcggatcctattcgcttacaagtaccttgaaggcgagtgtaaagatgcagcgttc

SEQ ID NO: 468970 - DNA, 59 bp, Artificial
  Synthetic oligonucleotide
tgccctcggcctactcgacttcgcacttgagctcgagttccgtaatttgacacctggta

SEQ ID NO: 468971 - DNA, 53 bp, Artificial
  Synthetic oligonucleotide
tgccctcttgggagacccccactgtgatgtgttccaagatgaaacctgggacc

SEQ ID NO: 468972 - DNA, 60 bp, Artificial
  Synthetic oligonucleotide
tgccctgaaactaagcattgaagacccaagtcacgagggagagggaataccactatatga

SEQ ID NO: 468973 - DNA, 50 bp, Artificial
  Synthetic oligonucleotide
tgccctgacagcgtgtgaggagccagtggcaaagggtttctgggtgcaga

SEQ ID NO: 468974 - DNA, 55 bp, Artificial
  Synthetic oligonucleotide
tgccctgaccctctcctacatcgcgcctggcctctccgatggcctggaacctgtc

SEQ ID NO: 468975 - DNA, 55 bp, Artificial
  Synthetic oligonucleotide
tgccctgatccttctcgctgagctgtttgatatcttctggacccctcctgacgtc

SEQ ID NO: 468976 - DNA, 60 bp, Artificial
  Synthetic oligonucleotide
tgccctgcaccctcgcagactgtggctcccatcttatggccaccccaagtgtccgccttc

SEQ ID NO: 468977 - DNA, 60 bp, Artificial
  Synthetic oligonucleotide
tgccctgcagacagtttccgttgaccggatttcaatgtgcacacaacgaccacatttaga

SEQ ID NO: 468978 - DNA, 60 bp, Artificial
  Synthetic oligonucleotide
tgccctgcgtgcacaaggagcacaaatagacactcctttctcagcctattattgggcttg

SEQ ID NO: 468979 - DNA, 60 bp, Artificial
  Synthetic oligonucleotide
tgccctgctaagtgtgatgttggattcggaacgcgcagctgcaaccagtgatgccgagtc

SEQ ID NO: 468980 - DNA, 59 bp, Artificial
  Synthetic oligonucleotide
tgccctgctttggagcagggtaagctttacacccctttcaacatgtccggccgtgagca

SEQ ID NO: 468981 - DNA, 60 bp, Artificial
  Synthetic oligonucleotide
tgccctggaaatcaactgcttatcgctatcttgctattaagtgcttgcttgacctattgc

SEQ ID NO: 468982 - DNA, 55 bp, Artificial
  Synthetic oligonucleotide
tgccctgtaagataggacgacttgcttcacggctagaatctgccgcaaatgctac

SEQ ID NO: 468983 - DNA, 53 bp, Artificial
  Synthetic oligonucleotide
tgcccttagctttctaaagtttgcttgcggttcccaaggtttaagtaagttca

SEQ ID NO: 468984 - DNA, 53 bp, Artificial
  Synthetic oligonucleotide
tgcccttcaatgattttggagcatagaaaatacaagttagcggttcagctgat

SEQ ID NO: 468985 - DNA, 60 bp, Artificial
  Synthetic oligonucleotide
tgcccttgcatatagtatggaggctagcacacctagcgaccttataggcataccgactgc

SEQ ID NO: 468986 - DNA, 55 bp, Artificial
  Synthetic oligonucleotide
tgccctttaatgaaagcgttcagtacgcttgttggcagcatgagagagtgggaca

SEQ ID NO: 468987 - DNA, 60 bp, Artificial
  Synthetic oligonucleotide
tgcccttttatgggcttgggagccaagaccgctgatgtgcggtgtcaggccactctgatg

SEQ ID NO: 468988 - DNA, 60 bp, Artificial
  Synthetic oligonucleotide
tgccgaaaaactgtctagagtcttgggatgccacgacactatctcatatgagtcagctgt

SEQ ID NO: 468989 - DNA, 55 bp, Artificial
  Synthetic oligonucleotide
tgccgaaacatggggcacgaagagggacatcgttcatatcatcactgtgcatcac

SEQ ID NO: 468990 - DNA, 60 bp, Artificial
  Synthetic oligonucleotide
tgccgaaaccacctcatctgccgttccttctcttcagctgagtcctggcgtcttgaatcc

SEQ ID NO: 468991 - DNA, 56 bp, Artificial
  Synthetic oligonucleotide
tgccgaaaggagttggggccaagggagacagcggacgacccattctggataaccag

SEQ ID NO: 468992 - DNA, 60 bp, Artificial
  Synthetic oligonucleotide
tgccgaacttggacagatttgtgtatcagatggccagtgcaaccgatgatgcacagaagg

SEQ ID NO: 468993 - DNA, 50 bp, Artificial
  Synthetic oligonucleotide
tgccgaatctatataagatagaacgaactcacgaacattagcacccgcac

SEQ ID NO: 468994 - DNA, 56 bp, Artificial
  Synthetic oligonucleotide
tgccgaattccagcataagcgtacgttaacttcgagtacaaaactagtcggtattc

SEQ ID NO: 468995 - DNA, 55 bp, Artificial
  Synthetic oligonucleotide
tgccgacaagattgtatttaaagtcaataatcaggtggtctccctgaaacccgag

SEQ ID NO: 468996 - DNA, 55 bp, Artificial
  Synthetic oligonucleotide
tgccgacaatgaaggtatcgtgtgctgctcgatgtcttattcctggacaggcgca

SEQ ID NO: 468997 - DNA, 57 bp, Artificial
  Synthetic oligonucleotide
tgccgacattgacagagaagggggttgtttaatcctgacctctaataggaattcggc

SEQ ID NO: 468998 - DNA, 60 bp, Artificial
  Synthetic oligonucleotide
tgccgacatttaatgagttgttcggggaatatgaatccgtgtatggcatgcctaggttga

SEQ ID NO: 468999 - DNA, 55 bp, Artificial
  Synthetic oligonucleotide
tgccgaccctcagtggaaaggaccagcgcgcctactctggaaaggtgaaggtgcc

SEQ ID NO: 469000 - DNA, 55 bp, Artificial
  Synthetic oligonucleotide
tgccgaccgctcgcggttgtacagactgcttcgttctttggagcaggccatcccg

SEQ ID NO: 469001 - DNA, 59 bp, Artificial
  Synthetic oligonucleotide
tgccgacgaaaaacacacacatagtgcagcctcgggctaaagaccgagtctcaaacgac

SEQ ID NO: 469002 - DNA, 60 bp, Artificial
  Synthetic oligonucleotide
tgccgacgtagacggtcctgctgacgtagacggtcctgctgacgtagacggtcctgctga

SEQ ID NO: 469003 - DNA, 58 bp, Artificial
  Synthetic oligonucleotide
tgccgactcctataaattcactaggttcggcacgctcaccattcacgacaccgaaaag

SEQ ID NO: 469004 - DNA, 60 bp, Artificial
  Synthetic oligonucleotide
tgccgacttaacagacacggtcgcatctctggtgaatgtcaagtagtcgagcgactactt

SEQ ID NO: 469005 - DNA, 60 bp, Artificial
  Synthetic oligonucleotide
tgccgagattaagtattgcaaagggatgggaattgtgcaaccatatatgcggaatgattt

SEQ ID NO: 469006 - DNA, 55 bp, Artificial
  Synthetic oligonucleotide
tgccgaggaagacgcgctgtgcgcatacgtagccttccgcgcgtggcagtctaac

SEQ ID NO: 469007 - DNA, 55 bp, Artificial
  Synthetic oligonucleotide
tgccgaggcttgtcccgctacttttattcgttatgggcggggtctacgtgattac

SEQ ID NO: 469008 - DNA, 60 bp, Artificial
  Synthetic oligonucleotide
tgccgatatcggggtatcgcccgagtcagtaggtcgattcgctgctctggtagccagtat

SEQ ID NO: 469009 - DNA, 50 bp, Artificial
  Synthetic oligonucleotide
tgccgatgaccagagaactatgcaagaggctcgagattccccatgaacta

SEQ ID NO: 469010 - DNA, 60 bp, Artificial
  Synthetic oligonucleotide
tgccgatggacctggatcaattgcggattcatctaatccgctgaggtttttattcggtct

SEQ ID NO: 469011 - DNA, 55 bp, Artificial
  Synthetic oligonucleotide
tgccgatgtgcaatcgttgaggttgaatagtgcaccatgttttaaagaaaccgca

SEQ ID NO: 469012 - DNA, 60 bp, Artificial
  Synthetic oligonucleotide
tgccgattgggatttacaacacccgcagccaggtccactaccagcagggcaacttagaga

SEQ ID NO: 469013 - DNA, 60 bp, Artificial
  Synthetic oligonucleotide
tgccgatttcgaattatacgaacgcaaggagatgtcgcgtgatagcttcaaacgagctaa

SEQ ID NO: 469014 - DNA, 58 bp, Artificial
  Synthetic oligonucleotide
tgccgcaaccatcagcggtggggattgggtcttcttggccagtgcctctttccaaacc

SEQ ID NO: 469015 - DNA, 54 bp, Artificial
  Synthetic oligonucleotide
tgccgcaacgtgctcctaggattgctggtgctgtcgtaccgcccggtggaccta

SEQ ID NO: 469016 - DNA, 60 bp, Artificial
  Synthetic oligonucleotide
tgccgcacctcatctagataaagttaacgggatctcagagatggaaaacagcaaagtcta

SEQ ID NO: 469017 - DNA, 55 bp, Artificial
  Synthetic oligonucleotide
tgccgcagaagaatgtctcggaaacctctaccgactctgagatagtttggcgtga

SEQ ID NO: 469018 - DNA, 55 bp, Artificial
  Synthetic oligonucleotide
tgccgcatccccaacactagccgacaccccccggtcggtaaagaatacgcggctc

SEQ ID NO: 469019 - DNA, 60 bp, Artificial
  Synthetic oligonucleotide
tgccgcatgcaattggacccgaggagagcgctgtgacttggaggacagggatagatcaga

SEQ ID NO: 469020 - DNA, 51 bp, Artificial
  Synthetic oligonucleotide
tgccgccaagagacggcacggtatcccgcagttctcgcacgagttcgcagt

SEQ ID NO: 469021 - DNA, 53 bp, Artificial
  Synthetic oligonucleotide
tgccgccacaaaagaattctaggaagagaactgaagctagccgagaaacacgt

SEQ ID NO: 469022 - DNA, 60 bp, Artificial
  Synthetic oligonucleotide
tgccgccacgacgactgtctacaccgtctgccaagccggttttggaacgagcacgatgac

SEQ ID NO: 469023 - DNA, 52 bp, Artificial
  Synthetic oligonucleotide
tgccgccactaaagcagcatttgtaaccttatgctatgcaagtatagagcaa

SEQ ID NO: 469024 - DNA, 55 bp, Artificial
  Synthetic oligonucleotide
tgccgcccgcgtaggagagaagttaccccagttaggtggctttgggtatctgacg

SEQ ID NO: 469025 - DNA, 58 bp, Artificial
  Synthetic oligonucleotide
tgccgcccggagacttctacgcagcatacagagtggcgaacttccccttcacctccgg

SEQ ID NO: 469026 - DNA, 55 bp, Artificial
  Synthetic oligonucleotide
tgccgccgatgccccatgtggtagttggtaggcagcttttgggccggtttgtggc

SEQ ID NO: 469027 - DNA, 60 bp, Artificial
  Synthetic oligonucleotide
tgccgccgcatacaatgtcagcaacgaggattggaaaacagcagattatatttactgaaa

SEQ ID NO: 469028 - DNA, 55 bp, Artificial
  Synthetic oligonucleotide
tgccgcctgcccatgcaacctagagtgcgcgggagaagagttctacggagcctct

SEQ ID NO: 469029 - DNA, 55 bp, Artificial
  Synthetic oligonucleotide
tgccgcctttgaaacgagttaagcgtgcaaatgtgtatgatttataccgcacttg

SEQ ID NO: 469030 - DNA, 58 bp, Artificial
  Synthetic oligonucleotide
tgccgcgcacgaacgcgcctcaacagccgttcccgcccgatgcgtgcactcacgggtg

SEQ ID NO: 469031 - DNA, 57 bp, Artificial
  Synthetic oligonucleotide
tgccgcgcattccaagaaacacacctattccggtcgcaatctctactatgtggttta

SEQ ID NO: 469032 - DNA, 60 bp, Artificial
  Synthetic oligonucleotide
tgccgcgtacacatgtggttgactcagatgaagtgggcgagcagatggagcctacatttg

SEQ ID NO: 469033 - DNA, 58 bp, Artificial
  Synthetic oligonucleotide
tgccgcgtacgctttctggtaccacacgccaatgaccgacgatctttcggaggttgtc

SEQ ID NO: 469034 - DNA, 60 bp, Artificial
  Synthetic oligonucleotide
tgccgcgtggatgcgagggaccatgcaaagtacagtcattcgaaaagagacatgatgtca

SEQ ID NO: 469035 - DNA, 55 bp, Artificial
  Synthetic oligonucleotide
tgccgctaggacaccaactgattacaattttggaactagcagagacaagagtgcc

SEQ ID NO: 469036 - DNA, 51 bp, Artificial
  Synthetic oligonucleotide
tgccgctattgtgagggtcagtcatatggctgatttctccaatcagtatag

SEQ ID NO: 469037 - DNA, 60 bp, Artificial
  Synthetic oligonucleotide
tgccgctcgaacctcctgaaaatcagtgagtatggtgctgagctggagtatatgcgttac

SEQ ID NO: 469038 - DNA, 59 bp, Artificial
  Synthetic oligonucleotide
tgccgctgcccccactgtcctcgtcacaaacagaaggcgggcttggacgtacaggccca

SEQ ID NO: 469039 - DNA, 55 bp, Artificial
  Synthetic oligonucleotide
tgccgctgctgctaatacgggtgcattaaatcagttgaaatttgtagaagtgcaa

SEQ ID NO: 469040 - DNA, 60 bp, Artificial
  Synthetic oligonucleotide
tgccgctgtcaagcagtctgactgggctgcgtcagctagaatagacttgattaacaacct

SEQ ID NO: 469041 - DNA, 59 bp, Artificial
  Synthetic oligonucleotide
tgccgctgttaagtgccgcggcgtaagcgtcgtttgcagattgttgaccccctctggcc

SEQ ID NO: 469042 - DNA, 58 bp, Artificial
  Synthetic oligonucleotide
tgccgctgttaccgggagtccctttcttctcatgccagcgcgggtataagggagtctg

SEQ ID NO: 469043 - DNA, 60 bp, Artificial
  Synthetic oligonucleotide
tgccgcttcatcaatttcgaggaacccttctataagatcggtcggatcatctatatcagc

SEQ ID NO: 469044 - DNA, 55 bp, Artificial
  Synthetic oligonucleotide
tgccgcttgtgaagggtgcattgaatctcatcacccagaagtggtcaggcatcgc

SEQ ID NO: 469045 - DNA, 54 bp, Artificial
  Synthetic oligonucleotide
tgccggaggttaatacagctgaccccttacccatggaacccgtggccgggccaa

SEQ ID NO: 469046 - DNA, 55 bp, Artificial
  Synthetic oligonucleotide
tgccggagtgcaggtaagaggcgcctgcgggcccgagtcaccctcgggcggtgta

SEQ ID NO: 469047 - DNA, 60 bp, Artificial
  Synthetic oligonucleotide
tgccggatacggcgctttggcgatctgacatgcacggatgcaattttgccggcggtagct

SEQ ID NO: 469048 - DNA, 60 bp, Artificial
  Synthetic oligonucleotide
tgccggatcagaccgagtaatggtatcacctctagctgtgacatggtggaataggaatgg

SEQ ID NO: 469049 - DNA, 60 bp, Artificial
  Synthetic oligonucleotide
tgccggatggcttttaggaaacccagaatgtgaattactattcacagtgagctcatggtc

SEQ ID NO: 469050 - DNA, 51 bp, Artificial
  Synthetic oligonucleotide
tgccggccccttgccacgccggcctcaatgacagctgcggcggcttcttgt

SEQ ID NO: 469051 - DNA, 58 bp, Artificial
  Synthetic oligonucleotide
tgccggcttgtgaacaatggggatgactgcgtgttgttttgcgaatctagggatctcg

SEQ ID NO: 469052 - DNA, 60 bp, Artificial
  Synthetic oligonucleotide
tgccggctttacgagaggcacttactgtggaagcgaagttcacacgaaggttgatggatg

SEQ ID NO: 469053 - DNA, 56 bp, Artificial
  Synthetic oligonucleotide
tgccgggagcttatccgggaatcctgtaaaccgtgattacatccgacaaaggcaag

SEQ ID NO: 469054 - DNA, 50 bp, Artificial
  Synthetic oligonucleotide
tgccggtgttacgggtttcttctactacttgtggaaggttttttgggtta

SEQ ID NO: 469055 - DNA, 55 bp, Artificial
  Synthetic oligonucleotide
tgccgtaaactcgcgggaactcgtggttgctatcgactgccgagcgaagccacgc

SEQ ID NO: 469056 - DNA, 60 bp, Artificial
  Synthetic oligonucleotide
tgccgtaaagatggatgtgtataatcttggagaccagactagtgtcatgttgaaatcact

SEQ ID NO: 469057 - DNA, 60 bp, Artificial
  Synthetic oligonucleotide
tgccgtaagtgcgtttgacatcatgtggataccgtgcagtagtcgtgtcctggctcccta

SEQ ID NO: 469058 - DNA, 54 bp, Artificial
  Synthetic oligonucleotide
tgccgtaatcctgaacgttgcgggggtccaccagaccgtaccagacccgttgaa

SEQ ID NO: 469059 - DNA, 60 bp, Artificial
  Synthetic oligonucleotide
tgccgtacaaacttaaaaactagaatcaatgtcataaacttgttcatgcagctactatct

SEQ ID NO: 469060 - DNA, 60 bp, Artificial
  Synthetic oligonucleotide
tgccgtagtcctgtcggaagctttagtgtgagcctctcacggataagctcgagattagac

SEQ ID NO: 469061 - DNA, 50 bp, Artificial
  Synthetic oligonucleotide
tgccgtatacgctgctcggctgttactggacaagactgcagatctaattt

SEQ ID NO: 469062 - DNA, 56 bp, Artificial
  Synthetic oligonucleotide
tgccgtattggaatgggggaacttacatgaacaataccgaggcaatatgtgatgtc

SEQ ID NO: 469063 - DNA, 54 bp, Artificial
  Synthetic oligonucleotide
tgccgtcaaccgccgatgtttgccaatcaaggcgttattaaccaggcacagaac

SEQ ID NO: 469064 - DNA, 56 bp, Artificial
  Synthetic oligonucleotide
tgccgtcagtcagaattcaatagacatcatgagcgaacctttagattctctcaggc

SEQ ID NO: 469065 - DNA, 60 bp, Artificial
  Synthetic oligonucleotide
tgccgtccttctatgcaacacacccagatgtgttgcttttgacaccaatcctaacaggct

SEQ ID NO: 469066 - DNA, 60 bp, Artificial
  Synthetic oligonucleotide
tgccgtctcatgtgccggaccgtgtgcacttcgcttcacctctgcacgtcgcatggagac

SEQ ID NO: 469067 - DNA, 56 bp, Artificial
  Synthetic oligonucleotide
tgccgtctgatgttgtcacgcctacttcgtacggttggccgcctaaccagttaaac

SEQ ID NO: 469068 - DNA, 60 bp, Artificial
  Synthetic oligonucleotide
tgccgtctgcccagtgcttgtggagtcaattgtcgcatgcccgctgctttggttttggtg

SEQ ID NO: 469069 - DNA, 60 bp, Artificial
  Synthetic oligonucleotide
tgccgtgaggaaatttatttcttacgatcaattctcagctcagttaagaaactggcgcga

SEQ ID NO: 469070 - DNA, 60 bp, Artificial
  Synthetic oligonucleotide
tgccgtgagggttgcccatgtagccaagtctaaggtgggattgctcgccaataccaaggc

SEQ ID NO: 469071 - DNA, 59 bp, Artificial
  Synthetic oligonucleotide
tgccgtggaactggtttacctagtaagctatatggagttcctggctgatttacaagcta

SEQ ID NO: 469072 - DNA, 58 bp, Artificial
  Synthetic oligonucleotide
tgccgtggagtactacggaccaggggtagattacaaggcaaacacattgacacctctc

SEQ ID NO: 469073 - DNA, 59 bp, Artificial
  Synthetic oligonucleotide
tgccgtggagtcctcaaggccacgtaaactgcagaggactgctcccattaagaccggga

SEQ ID NO: 469074 - DNA, 55 bp, Artificial
  Synthetic oligonucleotide
tgccgtgtcaaacggaactaaagtaaacacgctaactgaaagaggagtggaagtc

SEQ ID NO: 469075 - DNA, 53 bp, Artificial
  Synthetic oligonucleotide
tgccgtgtcgaggtgccccgccttagggaggagtaaatggcgccgttaaacgg

SEQ ID NO: 469076 - DNA, 57 bp, Artificial
  Synthetic oligonucleotide
tgccgtgttaaaatgggctctaggttagtgcgtggtacgcgtgataaacgtataata

SEQ ID NO: 469077 - DNA, 58 bp, Artificial
  Synthetic oligonucleotide
tgccgttacatggtctacaacgctcccggtactacaagccctgtagttcagaatctgg

SEQ ID NO: 469078 - DNA, 52 bp, Artificial
  Synthetic oligonucleotide
tgccgttattttgtgtccataagtcataccatccttgactgcacgcaatttt

SEQ ID NO: 469079 - DNA, 58 bp, Artificial
  Synthetic oligonucleotide
tgccgttcatgaacgtcccctcatccacccaatacgatcgtcgcaatccagccgctcc

SEQ ID NO: 469080 - DNA, 54 bp, Artificial
  Synthetic oligonucleotide
tgccgttgattgggcaagaattcgtcgagaggagaataggcttagtgatcgcct

SEQ ID NO: 469081 - DNA, 57 bp, Artificial
  Synthetic oligonucleotide
tgcctaaagctgccagaggccagtatagtggatttgtgaggacgctattccagcaaa

SEQ ID NO: 469082 - DNA, 55 bp, Artificial
  Synthetic oligonucleotide
tgcctaaagtttctccaaatcagtatagagtctttcgtgttagatttccagatcc

SEQ ID NO: 469083 - DNA, 60 bp, Artificial
  Synthetic oligonucleotide
tgcctaacttcgatgttagacgtgcagatactgaattgcttagcgtcgatgcatcaggcg

SEQ ID NO: 469084 - DNA, 60 bp, Artificial
  Synthetic oligonucleotide
tgcctaagcgcgatgccccatggcgcttgatggcgggaaccagtaaggttagccgctcat

SEQ ID NO: 469085 - DNA, 57 bp, Artificial
  Synthetic oligonucleotide
tgcctaagcggggtccctcatggcgcccaatggtggggacctcaaaggtaagccgca

SEQ ID NO: 469086 - DNA, 58 bp, Artificial
  Synthetic oligonucleotide
tgcctaagcgtgatgctccttggcgattaacggcggggaccgccaagattagccgaac

SEQ ID NO: 469087 - DNA, 55 bp, Artificial
  Synthetic oligonucleotide
tgcctaaggtttctggacatcaatacagggtatttagggtacgtttgcctgaccc

SEQ ID NO: 469088 - DNA, 60 bp, Artificial
  Synthetic oligonucleotide
tgcctaagtgttgcagtgtatcggatcaaacgccgagttcttgagtgacggcccagggct

SEQ ID NO: 469089 - DNA, 60 bp, Artificial
  Synthetic oligonucleotide
tgcctaccacataggccacttccaaaaccaatattcaacactgctaactgattttgacca

SEQ ID NO: 469090 - DNA, 50 bp, Artificial
  Synthetic oligonucleotide
tgcctaccactggcagcaggcacacacgacaccagggaggggatgagatg

SEQ ID NO: 469091 - DNA, 55 bp, Artificial
  Synthetic oligonucleotide
tgcctacccaactaaaacaggacaatgtggtggtgtcatttgtaaagcaggacaa

SEQ ID NO: 469092 - DNA, 60 bp, Artificial
  Synthetic oligonucleotide
tgcctacccgcttgtgtgtacggacttgctgtagccagcggatacgattttgaaagagag

SEQ ID NO: 469093 - DNA, 60 bp, Artificial
  Synthetic oligonucleotide
tgcctacgttacctgataacgttcaatatgttatacaatgcataggatcacggacgtacc

SEQ ID NO: 469094 - DNA, 57 bp, Artificial
  Synthetic oligonucleotide
tgcctactaatgtggcatttgagctgtgggcgaagcgatctgtaaatgtggtcccag

SEQ ID NO: 469095 - DNA, 55 bp, Artificial
  Synthetic oligonucleotide
tgcctactatacaggcatccgtatcgggctctaggatagttagagacgggctgta

SEQ ID NO: 469096 - DNA, 60 bp, Artificial
  Synthetic oligonucleotide
tgcctactccgcagccactgtgttgaagctaaatcgttggccgaaattcgtggtcagact

SEQ ID NO: 469097 - DNA, 60 bp, Artificial
  Synthetic oligonucleotide
tgcctactcctactcagcgtaggggtaggcatattcctgctgcctgctcggtaggcagta

SEQ ID NO: 469098 - DNA, 58 bp, Artificial
  Synthetic oligonucleotide
tgcctactcctactctcggtaggggtaggcatctacctgctccccaatcgatgaacgg

SEQ ID NO: 469099 - DNA, 60 bp, Artificial
  Synthetic oligonucleotide
tgcctacttgcatgttttgagtggacacatagccagtaatgagacgagaggttggttttt

SEQ ID NO: 469100 - DNA, 52 bp, Artificial
  Synthetic oligonucleotide
tgcctaggggacctcggggccgcgcgctgcaacgtggcggcgcccaactttt

SEQ ID NO: 469101 - DNA, 51 bp, Artificial
  Synthetic oligonucleotide
tgcctataacattcagaaggttgtggagtacctcaactccaaaggtgtgaa

SEQ ID NO: 469102 - DNA, 58 bp, Artificial
  Synthetic oligonucleotide
tgcctatcctcagatgaagtggtagcaaaggattttttgcgtgggatgaaagtacctt

SEQ ID NO: 469103 - DNA, 60 bp, Artificial
  Synthetic oligonucleotide
tgcctatcgcctcttgccgctcactgtgctgatagaacccttcgccgtgacaacgtgaaa

SEQ ID NO: 469104 - DNA, 60 bp, Artificial
  Synthetic oligonucleotide
tgcctatgcacacgaaccctggacattgcgggacacatcacgtgaaatgtgggacactgc

SEQ ID NO: 469105 - DNA, 54 bp, Artificial
  Synthetic oligonucleotide
tgcctatgtaccgggagtggtgaccgggagtggtgttcacagacattaacaatg

SEQ ID NO: 469106 - DNA, 55 bp, Artificial
  Synthetic oligonucleotide
tgcctattactgacgcgattggttggtttcagtacgtctcaaagcatgctgcgcg

SEQ ID NO: 469107 - DNA, 59 bp, Artificial
  Synthetic oligonucleotide
tgcctattggcagccccataatatccaggacaccctctctgcttcttatatgattaggt

SEQ ID NO: 469108 - DNA, 60 bp, Artificial
  Synthetic oligonucleotide
tgcctattgtactccttgaagcccatgactcaccaggcctgatctcaattgggcctctaa

SEQ ID NO: 469109 - DNA, 60 bp, Artificial
  Synthetic oligonucleotide
tgcctattgttatccaggcgcaactgtgaacgaggaggcattaagacagaaaatcatgga

SEQ ID NO: 469110 - DNA, 57 bp, Artificial
  Synthetic oligonucleotide
tgcctcaaccgtgatgtggcggatgtggcagccattaccagtctatctcggcttatg

SEQ ID NO: 469111 - DNA, 60 bp, Artificial
  Synthetic oligonucleotide
tgcctcaagaactgcacccaagatctccatactccgcggcaccgcagctttcagcgtgga

SEQ ID NO: 469112 - DNA, 58 bp, Artificial
  Synthetic oligonucleotide
tgcctcaatgtggttggtggaatcaaaacgcacgttataactcatgttggtgggaaca

SEQ ID NO: 469113 - DNA, 60 bp, Artificial
  Synthetic oligonucleotide
tgcctcacattttaccgactattgttggttcatgtgtgagatgcggattccgcccacgga

SEQ ID NO: 469114 - DNA, 60 bp, Artificial
  Synthetic oligonucleotide
tgcctcacctgagtctttccaagcctctgatgtcgcaaagcgctttgccattaaaccagg

SEQ ID NO: 469115 - DNA, 53 bp, Artificial
  Synthetic oligonucleotide
tgcctcaggcttaggcataataggtatgtatcgagggagagtgccaaacacag

SEQ ID NO: 469116 - DNA, 54 bp, Artificial
  Synthetic oligonucleotide
tgcctcagggtaactttgtaatggtatcaggatgggattttatattgcatccta

SEQ ID NO: 469117 - DNA, 60 bp, Artificial
  Synthetic oligonucleotide
tgcctcatgatgaagatcggtctgatctcctgaccacgttggaccttctgtacgcagatg

SEQ ID NO: 469118 - DNA, 55 bp, Artificial
  Synthetic oligonucleotide
tgcctcatggcacaggttggctcacatttgctaaggagaggacaagctcctgggg

SEQ ID NO: 469119 - DNA, 54 bp, Artificial
  Synthetic oligonucleotide
tgcctcccaaagaacgtgtagatagatatgggcaattcaagttctgggatgttg

SEQ ID NO: 469120 - DNA, 60 bp, Artificial
  Synthetic oligonucleotide
tgcctcccacatgctcaggtatcactaatgtttcccctgaaacgtaccctgcatcctgag

SEQ ID NO: 469121 - DNA, 55 bp, Artificial
  Synthetic oligonucleotide
tgcctccctcagatccctctttaagacagaccaatagtcacagcaagagttgggg

SEQ ID NO: 469122 - DNA, 60 bp, Artificial
  Synthetic oligonucleotide
tgcctccgggcggtaggctatgcgagcattgagtcagaagatagtggcgacctagacgct

SEQ ID NO: 469123 - DNA, 60 bp, Artificial
  Synthetic oligonucleotide
tgcctccggtgattggcattgcgattccacttggtcagagagccacgtcaccaccacctc

SEQ ID NO: 469124 - DNA, 60 bp, Artificial
  Synthetic oligonucleotide
tgcctccgtatccatcgtgagctacgagcagaagtggggcgacgctacggtgtcgttcgt

SEQ ID NO: 469125 - DNA, 59 bp, Artificial
  Synthetic oligonucleotide
tgcctcctaatcgattaaggtctcgatatgggtgtattgcgttttccacttctgagtcc

SEQ ID NO: 469126 - DNA, 55 bp, Artificial
  Synthetic oligonucleotide
tgcctcctcttttagtttcacaccagaagctgtgtacacattacagagctcagac

SEQ ID NO: 469127 - DNA, 57 bp, Artificial
  Synthetic oligonucleotide
tgcctcctggaactccgtgaaagaagtatccctcaaagcggcctccgtgaccttatg

SEQ ID NO: 469128 - DNA, 60 bp, Artificial
  Synthetic oligonucleotide
tgcctcgaaaaccactgcgacacacctcctccctgttggcacagtccaaggctactccta

SEQ ID NO: 469129 - DNA, 53 bp, Artificial
  Synthetic oligonucleotide
tgcctcgattccaagtccattactagcgctttcagagattgcttagtgtagga

SEQ ID NO: 469130 - DNA, 58 bp, Artificial
  Synthetic oligonucleotide
tgcctcgtacatccgtgttcctgtaaactctacggtgtacttggacccctgcatgggc

SEQ ID NO: 469131 - DNA, 60 bp, Artificial
  Synthetic oligonucleotide
tgcctcgtgctttgaatcgtctagcgactttggtgacaacagtaaatggaacaccaatgt

SEQ ID NO: 469132 - DNA, 60 bp, Artificial
  Synthetic oligonucleotide
tgcctctaaccctgtgtatgctactttgaaagtcaggagttatttctatgactcagtgac

SEQ ID NO: 469133 - DNA, 60 bp, Artificial
  Synthetic oligonucleotide
tgcctctactccctcctctactgatggggcttcacaaacctcagtcgctaagcagacgaa

SEQ ID NO: 469134 - DNA, 54 bp, Artificial
  Synthetic oligonucleotide
tgcctctattggtacccaaacaagaaattgactaaactacccttgcttttatgt

SEQ ID NO: 469135 - DNA, 56 bp, Artificial
  Synthetic oligonucleotide
tgcctctattggtgactaataaagtaattgactaaactacccctgcttttatgtta

SEQ ID NO: 469136 - DNA, 60 bp, Artificial
  Synthetic oligonucleotide
tgcctctcaccacagagctatcaacgaatttatgacgttgataaatccgggtttgagcgc

SEQ ID NO: 469137 - DNA, 60 bp, Artificial
  Synthetic oligonucleotide
tgcctctcgggcacatatgatatactttggggtccaacgaccaacgagctcccaaatcat

SEQ ID NO: 469138 - DNA, 58 bp, Artificial
  Synthetic oligonucleotide
tgcctctgacctcacttttgagaatggctataaacataagggtaggactgcccttttc

SEQ ID NO: 469139 - DNA, 60 bp, Artificial
  Synthetic oligonucleotide
tgcctcttcagttaccgccgcttgagagacttaatattactgacagcgagaggggcggaa

SEQ ID NO: 469140 - DNA, 60 bp, Artificial
  Synthetic oligonucleotide
tgcctgaacacttcgcgggaaaaacacgagaagctctagacacaatgtacctggtcgcca

SEQ ID NO: 469141 - DNA, 56 bp, Artificial
  Synthetic oligonucleotide
tgcctgaagtgggagctaatggacgaagactatcaaggaaggctttgtaaccctca

SEQ ID NO: 469142 - DNA, 52 bp, Artificial
  Synthetic oligonucleotide
tgcctgaataagtggcaaggctcggcgttcacggatttgctgaattgcaatc

SEQ ID NO: 469143 - DNA, 55 bp, Artificial
  Synthetic oligonucleotide
tgcctgacaggcagccaccatttgattctgttatatctaaagcgcagacaaccca

SEQ ID NO: 469144 - DNA, 55 bp, Artificial
  Synthetic oligonucleotide
tgcctgaccgaattaggtctgagttcgctacacgcatagttctgtactgtagtcg

SEQ ID NO: 469145 - DNA, 60 bp, Artificial
  Synthetic oligonucleotide
tgcctgagacgcagtgatgttctccccggtgcgtgaatccattatccgcgcagttaatgt

SEQ ID NO: 469146 - DNA, 60 bp, Artificial
  Synthetic oligonucleotide
tgcctgagagcgcaggaagcaaaatgggagagacttcaagtttccttgcgcgcaaactct

SEQ ID NO: 469147 - DNA, 60 bp, Artificial
  Synthetic oligonucleotide
tgcctgagagctcttgtagcatggataaccaccagtccctaaacacaatcacgaagtaca

SEQ ID NO: 469148 - DNA, 55 bp, Artificial
  Synthetic oligonucleotide
tgcctgagcaaatcttatgctcagatgtggttactcatgtacttccataggcggg

SEQ ID NO: 469149 - DNA, 60 bp, Artificial
  Synthetic oligonucleotide
tgcctgagcagaaagaccctagagatgctgcattggcaactaatagagcctattttataa

SEQ ID NO: 469150 - DNA, 54 bp, Artificial
  Synthetic oligonucleotide
tgcctgaggataatgagccgagtgggtatgcacaaacggattgtgtattggagg

SEQ ID NO: 469151 - DNA, 52 bp, Artificial
  Synthetic oligonucleotide
tgcctgatacaattacatatcttgaatgtgatccattatatattgagtcatt

SEQ ID NO: 469152 - DNA, 55 bp, Artificial
  Synthetic oligonucleotide
tgcctgatgagcctgaagctcatggcttctttgaggatatgatggagcgcgctcc

SEQ ID NO: 469153 - DNA, 60 bp, Artificial
  Synthetic oligonucleotide
tgcctgccattcgcatgctggtgtgatgcgatttttaatcgatatagcttcctccaccag

SEQ ID NO: 469154 - DNA, 54 bp, Artificial
  Synthetic oligonucleotide
tgcctgcctttaaaccacaaacgcatgagcgggctaaaacgtttgtctttaaac

SEQ ID NO: 469155 - DNA, 57 bp, Artificial
  Synthetic oligonucleotide
tgcctgctaggttttatccaaaggttaccaaatatttgccattggataagggtatca

SEQ ID NO: 469156 - DNA, 60 bp, Artificial
  Synthetic oligonucleotide
tgcctgctctcaactctccgtcagcagaggagtgcggttacagtgatagggtgagatcca

SEQ ID NO: 469157 - DNA, 60 bp, Artificial
  Synthetic oligonucleotide
tgcctgctggcaagaagaggagtctccgacgacgaaacgtcgccacctgcaaggctatct

SEQ ID NO: 469158 - DNA, 52 bp, Artificial
  Synthetic oligonucleotide
tgcctgctttagtgctgattgtcccctcctacacaagagaggagttatgttc

SEQ ID NO: 469159 - DNA, 55 bp, Artificial
  Synthetic oligonucleotide
tgcctggagttaggttttggggtgctatcataggtggggttgctcttggggtcgc

SEQ ID NO: 469160 - DNA, 59 bp, Artificial
  Synthetic oligonucleotide
tgcctggcgaacgatatttatggtttgtatgcgtgggtgaagacaaccggcctaagatc

SEQ ID NO: 469161 - DNA, 50 bp, Artificial
  Synthetic oligonucleotide
tgcctggctataaatactggatgtgtttatgggtcatgtcaggatgtgat

SEQ ID NO: 469162 - DNA, 55 bp, Artificial
  Synthetic oligonucleotide
tgcctggctggaagcacaagaggaaaacgaggaggtaggctttccagtcagaccg

SEQ ID NO: 469163 - DNA, 60 bp, Artificial
  Synthetic oligonucleotide
tgcctgggaccaattccacatgccagttgctgttggatttgacatgagtcgattcgacca

SEQ ID NO: 469164 - DNA, 59 bp, Artificial
  Synthetic oligonucleotide
tgcctgggcaacttgacgcttttgaggagctaatcataaaaaatgcctcgaattaccaa

SEQ ID NO: 469165 - DNA, 60 bp, Artificial
  Synthetic oligonucleotide
tgcctgggcctagcaatgcacaacagacagaggctatcaccaccgacagaggaatattgt

SEQ ID NO: 469166 - DNA, 59 bp, Artificial
  Synthetic oligonucleotide
tgcctggtaccatattggaaatgtgggacggagagatctaccactacggattgtacgtg

SEQ ID NO: 469167 - DNA, 56 bp, Artificial
  Synthetic oligonucleotide
tgcctggtagccttagggtgcacgatttgcactgaccgatgctggccactgtatca

SEQ ID NO: 469168 - DNA, 60 bp, Artificial
  Synthetic oligonucleotide
tgcctggtgactttggtttggttgacaagaatgaatggcccatgatttgtgcttggttgg

SEQ ID NO: 469169 - DNA, 60 bp, Artificial
  Synthetic oligonucleotide
tgcctggtggcgcgtggcatacatcccgcgcgaccccccacctcgagaccagctcttgtc

SEQ ID NO: 469170 - DNA, 60 bp, Artificial
  Synthetic oligonucleotide
tgcctggtgtagacttggtcgccaagtatggctgaattgtgggaccctctgcaaaaccca

SEQ ID NO: 469171 - DNA, 53 bp, Artificial
  Synthetic oligonucleotide
tgcctggttgccttaactcggcataaggtgtctttcaggtatgaattctgtgg

SEQ ID NO: 469172 - DNA, 55 bp, Artificial
  Synthetic oligonucleotide
tgcctggtttctcatcaataaacatgccttctcttcgtttaacttgaatggttga

SEQ ID NO: 469173 - DNA, 56 bp, Artificial
  Synthetic oligonucleotide
tgcctgtaaagttactgaacccctgaaaacgttggcttcaatattgctagttggcc

SEQ ID NO: 469174 - DNA, 60 bp, Artificial
  Synthetic oligonucleotide
tgcctgtagagattcgttgtctgtcattcttttgtcgtggatctccactaccaccgaccc

SEQ ID NO: 469175 - DNA, 53 bp, Artificial
  Synthetic oligonucleotide
tgcctgtagcggggttgttttaccgccccagctggccaaagttttccacgacg

SEQ ID NO: 469176 - DNA, 55 bp, Artificial
  Synthetic oligonucleotide
tgcctgtgaacctggagtccgtataaggtgttcgtaaaccaagggtgagtaccgc

SEQ ID NO: 469177 - DNA, 55 bp, Artificial
  Synthetic oligonucleotide
tgcctgtgtatacaggtcctgatattgacccgtccgtgggccctggtatgggacc

SEQ ID NO: 469178 - DNA, 60 bp, Artificial
  Synthetic oligonucleotide
tgcctgttttaagcaccacatgtcttgtattagattctttcatggcactattcttcctgg

SEQ ID NO: 469179 - DNA, 55 bp, Artificial
  Synthetic oligonucleotide
tgccttaacaccaaattttatcaagatacagaatggggtgcaactaagcaatacc

SEQ ID NO: 469180 - DNA, 58 bp, Artificial
  Synthetic oligonucleotide
tgccttaagcgggatagatctaacacatttacgtacgccgaaaattgagccgagtgta

SEQ ID NO: 469181 - DNA, 55 bp, Artificial
  Synthetic oligonucleotide
tgccttaatagcagttagcatcatatcaattctaaagggcctcatcaacatatgg

SEQ ID NO: 469182 - DNA, 57 bp, Artificial
  Synthetic oligonucleotide
tgccttacacggcgccacaccgcgtgttggctactgtttacaacgggaactgcaagt

SEQ ID NO: 469183 - DNA, 56 bp, Artificial
  Synthetic oligonucleotide
tgccttacagaaagtaagctcggaatgattaagaaaacgttcaagaatccttatcg

SEQ ID NO: 469184 - DNA, 52 bp, Artificial
  Synthetic oligonucleotide
tgccttacgcccccgtattccacctaggtgcctaccgcctgtaggtctaccc

SEQ ID NO: 469185 - DNA, 60 bp, Artificial
  Synthetic oligonucleotide
tgccttagcggctttacatgcctgaaatggtattggcttagcatatattggcgggtcaat

SEQ ID NO: 469186 - DNA, 60 bp, Artificial
  Synthetic oligonucleotide
tgccttagtagtgctgataagaagaagttgtgtgaggtgttcccagatttaagtctcgaa

SEQ ID NO: 469187 - DNA, 58 bp, Artificial
  Synthetic oligonucleotide
tgccttagtgtcatgcgcgaggcatgtgatgcgactaagcttgatgaccctgctacgc

SEQ ID NO: 469188 - DNA, 58 bp, Artificial
  Synthetic oligonucleotide
tgccttcaaaccagtaggtagcttgtcgtaacgcgcaagtctgtggcggaaccgacta

SEQ ID NO: 469189 - DNA, 60 bp, Artificial
  Synthetic oligonucleotide
tgccttcagtaaatcctatacaactgagacaacagtatagaagtagaggagagctacccc

SEQ ID NO: 469190 - DNA, 55 bp, Artificial
  Synthetic oligonucleotide
tgccttccagggaggtcacatgatctttgatctgggcgaccgtcccctggccggt

SEQ ID NO: 469191 - DNA, 54 bp, Artificial
  Synthetic oligonucleotide
tgccttccgggaccacgaaggttagtcgcaacgctaactactcccctcgtggag

SEQ ID NO: 469192 - DNA, 60 bp, Artificial
  Synthetic oligonucleotide
tgccttcgaactggatgaggacatgcaggtgaggagacccatcttcgtgtagttccctgc

SEQ ID NO: 469193 - DNA, 54 bp, Artificial
  Synthetic oligonucleotide
tgccttcgaaggtcggcccgagctactcgccttagcgtacccaggacgtgccgt

SEQ ID NO: 469194 - DNA, 55 bp, Artificial
  Synthetic oligonucleotide
tgccttcgcatggcaagggataccaacttgcataaacaaagtggggttatagcac

SEQ ID NO: 469195 - DNA, 55 bp, Artificial
  Synthetic oligonucleotide
tgccttcgtaagctttctcaaggaatattcatttgacggcaagctcattaaagtg

SEQ ID NO: 469196 - DNA, 60 bp, Artificial
  Synthetic oligonucleotide
tgccttcgtctactgtgaaagcaatacaaattggatcagaacttgcaaagcaagctacag

SEQ ID NO: 469197 - DNA, 60 bp, Artificial
  Synthetic oligonucleotide
tgccttgaggtgggtgcccacccatggtctattaatgacaaccctaatgtcctgcaccgc

SEQ ID NO: 469198 - DNA, 59 bp, Artificial
  Synthetic oligonucleotide
tgccttgaggttcacccacggcgtgtacagaaggttcgtcaagagctcggagtttgaca

SEQ ID NO: 469199 - DNA, 60 bp, Artificial
  Synthetic oligonucleotide
tgccttgctgtccagtcttttgagaccctcgagaatctgttcttctttagcatgactaag

SEQ ID NO: 469200 - DNA, 52 bp, Artificial
  Synthetic oligonucleotide
tgccttgcttgtgcatccatgctatgactccagaaagagtacaacgcctaaa

SEQ ID NO: 469201 - DNA, 59 bp, Artificial
  Synthetic oligonucleotide
tgccttggagtcaatcatgacaacaaagtccataagttttagacgcctcagccatcttc

SEQ ID NO: 469202 - DNA, 54 bp, Artificial
  Synthetic oligonucleotide
tgccttggcaaacgatctactactatccgcaagtgaccatccaggatgttcccg

SEQ ID NO: 469203 - DNA, 60 bp, Artificial
  Synthetic oligonucleotide
tgccttgtggctttaggctgcacaatttgtaccgaccgctgctggccactgtatcaggcg

SEQ ID NO: 469204 - DNA, 58 bp, Artificial
  Synthetic oligonucleotide
tgccttgtgtatttgagtatgtttaaccgtaattatcgtactccatcaaaattgcgta

SEQ ID NO: 469205 - DNA, 60 bp, Artificial
  Synthetic oligonucleotide
tgccttgttgtagaataacatgcattcaatgcgcaaacgagtacgcaacgaagagtgtgg

SEQ ID NO: 469206 - DNA, 59 bp, Artificial
  Synthetic oligonucleotide
tgcctttaaaccaagaccattagcaccccttctgcgtcttgaaccatctgataccagaa

SEQ ID NO: 469207 - DNA, 60 bp, Artificial
  Synthetic oligonucleotide
tgcctttattacccagcagaagctgaaacagagattgctgatagctcgtggaaagataca

SEQ ID NO: 469208 - DNA, 54 bp, Artificial
  Synthetic oligonucleotide
tgcctttcaaatgatcaacgcaatcacagacgtcgcggaaaatcccagctatcg

SEQ ID NO: 469209 - DNA, 60 bp, Artificial
  Synthetic oligonucleotide
tgcctttcacgtgctctctctcttctgtgttcttaatcgaagatgcctactattcagtca

SEQ ID NO: 469210 - DNA, 58 bp, Artificial
  Synthetic oligonucleotide
tgcctttccacattggtgttgcagacaaggttttggcattaggttcctctaggtctcg

SEQ ID NO: 469211 - DNA, 58 bp, Artificial
  Synthetic oligonucleotide
tgcctttcgtgcaattcccgaacttgtttgaaatcagtaaattcgcaagacaaggcaa

SEQ ID NO: 469212 - DNA, 56 bp, Artificial
  Synthetic oligonucleotide
tgcctttcttctaatgtctgatgaattggggctggccaatatgactgagggaaggt

SEQ ID NO: 469213 - DNA, 56 bp, Artificial
  Synthetic oligonucleotide
tgcctttgaaaaatgtcccggggctggtaagttccgctacgaggcgttagctgaga

SEQ ID NO: 469214 - DNA, 52 bp, Artificial
  Synthetic oligonucleotide
tgcctttgagtgattctgacagcctaatatactctgactcttccaacatcgc

SEQ ID NO: 469215 - DNA, 56 bp, Artificial
  Synthetic oligonucleotide
tgcctttgccgacaaacagtggcgcaaacactacaacttcctcgaggatacccggg

SEQ ID NO: 469216 - DNA, 55 bp, Artificial
  Synthetic oligonucleotide
tgcctttgcgcatgagataaagacatctaaagataagatacatctagcaacaggg

SEQ ID NO: 469217 - DNA, 57 bp, Artificial
  Synthetic oligonucleotide
tgccttttcccttagtatattgagggccgaagctttggaccctgaattgattgcctc

SEQ ID NO: 469218 - DNA, 59 bp, Artificial
  Synthetic oligonucleotide
tgccttttccttgagaaagctgggctccagttcagagataaccgaactaaagagatcat

SEQ ID NO: 469219 - DNA, 60 bp, Artificial
  Synthetic oligonucleotide
tgccttttgacttctggcgaggggtgatgagcctgacacctctgttggtgtgtgttgcgg

SEQ ID NO: 469220 - DNA, 52 bp, Artificial
  Synthetic oligonucleotide
tgcgaaaagggccacagggcccctccttatcagattgaacataggctttcgc

SEQ ID NO: 469221 - DNA, 51 bp, Artificial
  Synthetic oligonucleotide
tgcgaaacaaggggtatacattggacaagacagaatgatgttcatttcatc

SEQ ID NO: 469222 - DNA, 60 bp, Artificial
  Synthetic oligonucleotide
tgcgaaagagtactttagtgtcgacacactcatcttggcattggaatgtgttgcacacgt

SEQ ID NO: 469223 - DNA, 53 bp, Artificial
  Synthetic oligonucleotide
tgcgaaatcaccaaccaaagcggggctgttagccaccgcctcagtatagtttt

SEQ ID NO: 469224 - DNA, 59 bp, Artificial
  Synthetic oligonucleotide
tgcgaaatcacctaacgattggtacttcgcctgccaacaactcgtccgctcatcgatct

SEQ ID NO: 469225 - DNA, 59 bp, Artificial
  Synthetic oligonucleotide
tgcgaaatctacggggcctgttactccattgaaccactggacctacctccaatcattca

SEQ ID NO: 469226 - DNA, 60 bp, Artificial
  Synthetic oligonucleotide
tgcgaacaacatttggatacgctgttagtcccgcaaaagctggacaacttgtcacagtcg

SEQ ID NO: 469227 - DNA, 54 bp, Artificial
  Synthetic oligonucleotide
tgcgaacactacaggcaaagagggtgagtacgtcacattcactgcgccgtcggg

SEQ ID NO: 469228 - DNA, 59 bp, Artificial
  Synthetic oligonucleotide
tgcgaaccggagcagtatgagcgcctgtttgagccctttgttgggatgtattttgttcc

SEQ ID NO: 469229 - DNA, 60 bp, Artificial
  Synthetic oligonucleotide
tgcgaacctatagagtgatggataatgatactgcgtttgagactggaattgatggtacat

SEQ ID NO: 469230 - DNA, 60 bp, Artificial
  Synthetic oligonucleotide
tgcgaacgattaatgatactacacaagcaatgagagacaggcaacggagtggtgtagtac

SEQ ID NO: 469231 - DNA, 60 bp, Artificial
  Synthetic oligonucleotide
tgcgaacgtgcttgcacaggcaatctccacccacttcacgggcagaaccgactctgtgtg

SEQ ID NO: 469232 - DNA, 58 bp, Artificial
  Synthetic oligonucleotide
tgcgaacgttacagttaatccaggaccgtttgcacagactggatatgccccagttaac

SEQ ID NO: 469233 - DNA, 55 bp, Artificial
  Synthetic oligonucleotide
tgcgaactggagtaagcggacgactaagaagaagccctcttcagcagggctgaag

SEQ ID NO: 469234 - DNA, 58 bp, Artificial
  Synthetic oligonucleotide
tgcgaagaaaagacttttgtttggtcagggtgattatcatctttacagatcttgtccc

SEQ ID NO: 469235 - DNA, 57 bp, Artificial
  Synthetic oligonucleotide
tgcgaagaacactaaaggccaatgcaattgatgaagggaatgggtgctttgagctcc

SEQ ID NO: 469236 - DNA, 60 bp, Artificial
  Synthetic oligonucleotide
tgcgaagatactgatcaacacaataattaatcgcgcagaaggtacctgtgcgaccagcac

SEQ ID NO: 469237 - DNA, 53 bp, Artificial
  Synthetic oligonucleotide
tgcgaagcgacgtcgatttaggcggcagatacagcgagtcagtcatatcctct

SEQ ID NO: 469238 - DNA, 56 bp, Artificial
  Synthetic oligonucleotide
tgcgaaggcccgtgcaaagttcagtcgtacgaacaacgagacgacgttaaacacac

SEQ ID NO: 469239 - DNA, 57 bp, Artificial
  Synthetic oligonucleotide
tgcgaaggtttcaagatgaacttggcataccagtcggctctgatgctgctaacacgc

SEQ ID NO: 469240 - DNA, 55 bp, Artificial
  Synthetic oligonucleotide
tgcgaagtgatacgctagtatcaatgcgtgaaagcgtaacgaacgaaatcatggc

SEQ ID NO: 469241 - DNA, 50 bp, Artificial
  Synthetic oligonucleotide
tgcgaatagcggtactgcaccattcgcacccagtttgtgaagtcaaaagg

SEQ ID NO: 469242 - DNA, 58 bp, Artificial
  Synthetic oligonucleotide
tgcgaataggaaattcgctatgatattcccttcaaagccgttgaagtcgaatggaacg

SEQ ID NO: 469243 - DNA, 60 bp, Artificial
  Synthetic oligonucleotide
tgcgaatcaataaagaaggaccagaagatataaagcgggaacatcgtcatgtgctacctc

SEQ ID NO: 469244 - DNA, 58 bp, Artificial
  Synthetic oligonucleotide
tgcgaatcttgagccctctcccttcttcggcgaatttacaccacagattaaatgacgg

SEQ ID NO: 469245 - DNA, 55 bp, Artificial
  Synthetic oligonucleotide
tgcgaatggttggtcccctggcatgggaaaacgttgaagaaccaggccagacttt

SEQ ID NO: 469246 - DNA, 53 bp, Artificial
  Synthetic oligonucleotide
tgcgaatgttatgcgactgaaggggtcaatatatataaggtaaaacatcccat

SEQ ID NO: 469247 - DNA, 60 bp, Artificial
  Synthetic oligonucleotide
tgcgaattcacaatgccaaaatggtggcctattataatcagaggatgctctatgtttaca

SEQ ID NO: 469248 - DNA, 57 bp, Artificial
  Synthetic oligonucleotide
tgcgaatttgggttctagtttgggacgcctgctaggtattcaacattacaagtggaa

SEQ ID NO: 469249 - DNA, 59 bp, Artificial
  Synthetic oligonucleotide
tgcgaattttccgtatccatcacatttcgcgcaactacagtacgattcggtagaaaaga

SEQ ID NO: 469250 - DNA, 60 bp, Artificial
  Synthetic oligonucleotide
tgcgacaagttcattctaaaacacaagtgcaaggtgatattagtgaggatgccggggtac

SEQ ID NO: 469251 - DNA, 60 bp, Artificial
  Synthetic oligonucleotide
tgcgacaatgtgtttactcattcagattgccatcttagcaatgactatgacactacattt

SEQ ID NO: 469252 - DNA, 58 bp, Artificial
  Synthetic oligonucleotide
tgcgacacaaagtgtcaaacaccccagggagctataaacagtagtcttcctttccaga

SEQ ID NO: 469253 - DNA, 60 bp, Artificial
  Synthetic oligonucleotide
tgcgacacacctcctccctgttggcacagtccaaggctactcctacaacctccttgctgg

SEQ ID NO: 469254 - DNA, 60 bp, Artificial
  Synthetic oligonucleotide
tgcgacacgcgcggcggtgtgtaccccggtaccactacgctacgcagcagccttagctac

SEQ ID NO: 469255 - DNA, 59 bp, Artificial
  Synthetic oligonucleotide
tgcgacacgcgcggcggtgtgtacccctgggagggtagaaaccactacgctacgcagca

SEQ ID NO: 469256 - DNA, 51 bp, Artificial
  Synthetic oligonucleotide
tgcgacacttaaagtatgagtcaggcagaatgttacgtaaggaccatcctt

SEQ ID NO: 469257 - DNA, 55 bp, Artificial
  Synthetic oligonucleotide
tgcgacacttccggtgatcaatttgcgacacgcgcggcggtgtgtacccctggga

SEQ ID NO: 469258 - DNA, 55 bp, Artificial
  Synthetic oligonucleotide
tgcgacatccgctgtgctcgctggtctcccgctgactgacgttgcccggaagtat

SEQ ID NO: 469259 - DNA, 60 bp, Artificial
  Synthetic oligonucleotide
tgcgacatggaggaccgggctctttccaacaggaaagagaggtgcaagtggatgcaccta

SEQ ID NO: 469260 - DNA, 60 bp, Artificial
  Synthetic oligonucleotide
tgcgacattcactgagactacgattattgccacggcagacgctcgtgggctgatccagtc

SEQ ID NO: 469261 - DNA, 60 bp, Artificial
  Synthetic oligonucleotide
tgcgacattcgagctgggtcatacacaacacgagtccagtcctgttccacagcgtggtcg

SEQ ID NO: 469262 - DNA, 58 bp, Artificial
  Synthetic oligonucleotide
tgcgaccacaaccccacggagcactttgtttatcaacgcttcacacctgagaggaaag

SEQ ID NO: 469263 - DNA, 52 bp, Artificial
  Synthetic oligonucleotide
tgcgacccctcgttccagaaaccacgtccaatctactgacgcggtggttcgt

SEQ ID NO: 469264 - DNA, 58 bp, Artificial
  Synthetic oligonucleotide
tgcgacctcttgtagttcggtccctcgttgtattcgtatatctgcggaggcgagatat

SEQ ID NO: 469265 - DNA, 60 bp, Artificial
  Synthetic oligonucleotide
tgcgacgacgatgactaatgcgttgtctcagaaggcttccctcgattctccgacgttcac

SEQ ID NO: 469266 - DNA, 60 bp, Artificial
  Synthetic oligonucleotide
tgcgacgattgttgagaagggcaaagccgtgtgcgatgatgacgttcaagtagtgctgtg

SEQ ID NO: 469267 - DNA, 60 bp, Artificial
  Synthetic oligonucleotide
tgcgacgcgccgagcattcatgcttgtgcttgtacagacggccgcagtagtcgcagcgtt

SEQ ID NO: 469268 - DNA, 60 bp, Artificial
  Synthetic oligonucleotide
tgcgacgctgagttttatttgataccaagatcacaaactgaattgtgtgagcagtacata

SEQ ID NO: 469269 - DNA, 54 bp, Artificial
  Synthetic oligonucleotide
tgcgacgttaggcaaagatactgaagttatcaacatgccaaatagttcaccacc

SEQ ID NO: 469270 - DNA, 54 bp, Artificial
  Synthetic oligonucleotide
tgcgactaaatacgatctgggaagtgcctctacgttttacattaaggatacggg

SEQ ID NO: 469271 - DNA, 60 bp, Artificial
  Synthetic oligonucleotide
tgcgactagaaaagagtctattttaagacatcacttgatacttggttcaatcgactggat

SEQ ID NO: 469272 - DNA, 60 bp, Artificial
  Synthetic oligonucleotide
tgcgactataaacgtagacacatctctagtggagttgggcgctgatatccgtgcagttaa

SEQ ID NO: 469273 - DNA, 60 bp, Artificial
  Synthetic oligonucleotide
tgcgactccacttagtcgactattccgtactctgacgatgttttcacaaatgatggccta

SEQ ID NO: 469274 - DNA, 60 bp, Artificial
  Synthetic oligonucleotide
tgcgactccctttgttgtgttagtggtgtatagtccatagacgaagtgctaagcttggtg

SEQ ID NO: 469275 - DNA, 51 bp, Artificial
  Synthetic oligonucleotide
tgcgactgaagttaacggttcttgtgttgctaaatggaaaggcggtgtagt

SEQ ID NO: 469276 - DNA, 59 bp, Artificial
  Synthetic oligonucleotide
tgcgactgaccgtctggggaacaaagaacctccagactagggtcactgccatcgagaag

SEQ ID NO: 469277 - DNA, 60 bp, Artificial
  Synthetic oligonucleotide
tgcgactggtggctatgctatataccccattgcgcacaggcggtgggtctggaggcactg

SEQ ID NO: 469278 - DNA, 60 bp, Artificial
  Synthetic oligonucleotide
tgcgacttagacacgaagtggccgttaggatttaattgctgcaatgagtattcgacgtgt

SEQ ID NO: 469279 - DNA, 53 bp, Artificial
  Synthetic oligonucleotide
tgcgagaaagtgggaaatacatcacggtgttggattccggtctcgccaaatgt

SEQ ID NO: 469280 - DNA, 55 bp, Artificial
  Synthetic oligonucleotide
tgcgagaagcctagtaacgccttagaaatgctcaagcgttgcgctcagcacaacc

SEQ ID NO: 469281 - DNA, 50 bp, Artificial
  Synthetic oligonucleotide
tgcgagaatccatggttgtggcatttgatggacagataataagaacaccc

SEQ ID NO: 469282 - DNA, 60 bp, Artificial
  Synthetic oligonucleotide
tgcgagagggatctagcatgtgcattctgccgtcccatgcgcttctatccctcagacaac

SEQ ID NO: 469283 - DNA, 60 bp, Artificial
  Synthetic oligonucleotide
tgcgagatctacggagcctgctactccatagaacccttggacctacctccaatcattcaa

SEQ ID NO: 469284 - DNA, 51 bp, Artificial
  Synthetic oligonucleotide
tgcgagcaattgacccccgtttccctgattgccgaggtccccgcgagagtc

SEQ ID NO: 469285 - DNA, 55 bp, Artificial
  Synthetic oligonucleotide
tgcgagcacttcatgtcaaccacagcccctaattccagtctccatctgggaccga

SEQ ID NO: 469286 - DNA, 60 bp, Artificial
  Synthetic oligonucleotide
tgcgagcaggaggagccattccaacaccggagctgccagcgtggttgtaccatgagtgct

SEQ ID NO: 469287 - DNA, 53 bp, Artificial
  Synthetic oligonucleotide
tgcgagcccaaccatctacgccagcccacaagcccacatatccagtccacgaa

SEQ ID NO: 469288 - DNA, 60 bp, Artificial
  Synthetic oligonucleotide
tgcgagcccatagtgattaactttctggggaaacaagctgttgcctgatacctgcagtgg

SEQ ID NO: 469289 - DNA, 55 bp, Artificial
  Synthetic oligonucleotide
tgcgagcccgagccggacgtgtccatattgacatctatgctcactgatccctccc

SEQ ID NO: 469290 - DNA, 53 bp, Artificial
  Synthetic oligonucleotide
tgcgagcgatctaaaactcgccagtgattcctcgaactgtgaaattgaggaag

SEQ ID NO: 469291 - DNA, 60 bp, Artificial
  Synthetic oligonucleotide
tgcgagcgcttttagatagacaaactatttgggcttgtgtcatcaagaatgcggattacg

SEQ ID NO: 469292 - DNA, 60 bp, Artificial
  Synthetic oligonucleotide
tgcgagctatccgcacttgtgcacgggatgttttggacgctcaggagccgaactggcaca

SEQ ID NO: 469293 - DNA, 52 bp, Artificial
  Synthetic oligonucleotide
tgcgagctgccaatgtttatccttaccccttgcatatggcgaatttgagtga

SEQ ID NO: 469294 - DNA, 60 bp, Artificial
  Synthetic oligonucleotide
tgcgagctgggcgggtgcgccgagcgctacacggagtattgccgaggctcaaggggccta

SEQ ID NO: 469295 - DNA, 54 bp, Artificial
  Synthetic oligonucleotide
tgcgagcttgtggggagtaccttcccttgaataaggaaggttgaaagtttctgg

SEQ ID NO: 469296 - DNA, 60 bp, Artificial
  Synthetic oligonucleotide
tgcgaggacaaggctttaccccagatgtcaaaagtttgcatgatgacattgcaatgaagt

SEQ ID NO: 469297 - DNA, 60 bp, Artificial
  Synthetic oligonucleotide
tgcgaggattacgcatgacacccttgcatttgacttcagtgcatatagcacctctgggta

SEQ ID NO: 469298 - DNA, 60 bp, Artificial
  Synthetic oligonucleotide
tgcgaggcatatcatacttgtgttagcacatgtcaaaatcttgaagtcagttttcttcat

SEQ ID NO: 469299 - DNA, 58 bp, Artificial
  Synthetic oligonucleotide
tgcgaggcctatcgccgtagccatgctttcgggagaatatccagtcgatccacctctc

SEQ ID NO: 469300 - DNA, 57 bp, Artificial
  Synthetic oligonucleotide
tgcgaggggcggtaacacagtcgtctgcgccactcagggtcctgatggtgaggccac

SEQ ID NO: 469301 - DNA, 58 bp, Artificial
  Synthetic oligonucleotide
tgcgaggtcatccaaccgactcttccaataatccgggtccttgctactagatcctaag

SEQ ID NO: 469302 - DNA, 60 bp, Artificial
  Synthetic oligonucleotide
tgcgaggtctgaggatgtaaacgagtccagatttggcaggttagaaaacatttgtgtatc

SEQ ID NO: 469303 - DNA, 55 bp, Artificial
  Synthetic oligonucleotide
tgcgagtgaactggaaaaaatggtggcaggtattttatacggttgtagattacgt

SEQ ID NO: 469304 - DNA, 60 bp, Artificial
  Synthetic oligonucleotide
tgcgagtgcccaaataatatatgcagggagaatgacagactccattaaatcatggagaaa

SEQ ID NO: 469305 - DNA, 55 bp, Artificial
  Synthetic oligonucleotide
tgcgagtgggtggcgcccccacagtggtccgccccggggtgatacctgaagtaat

SEQ ID NO: 469306 - DNA, 55 bp, Artificial
  Synthetic oligonucleotide
tgcgagtgttgcaggttggtgacggcattaccaaactttgctaggtgcgagtgct

SEQ ID NO: 469307 - DNA, 58 bp, Artificial
  Synthetic oligonucleotide
tgcgagttaggctttcctcataacgtgcttgattgtcaaatcattccgttatcttggg

SEQ ID NO: 469308 - DNA, 57 bp, Artificial
  Synthetic oligonucleotide
tgcgataagtgtgttgatggacccaagaacgttgtatgtgttagtaaataccgtcat

SEQ ID NO: 469309 - DNA, 60 bp, Artificial
  Synthetic oligonucleotide
tgcgatacagtcctaaatgtagcgacagtgagtgtgggttgaccatagcttactctagcg

SEQ ID NO: 469310 - DNA, 60 bp, Artificial
  Synthetic oligonucleotide
tgcgatacgttaagacaactgtctgaagcgaataatatcaggcatactatgcaattggtg

SEQ ID NO: 469311 - DNA, 60 bp, Artificial
  Synthetic oligonucleotide
tgcgatatacagcggaactatgccgttcgccccaatcgcatcgctgtccgattattctca

SEQ ID NO: 469312 - DNA, 60 bp, Artificial
  Synthetic oligonucleotide
tgcgatatatctgtctgtccattagatactacaagtaatggaatcggatgttcaccagct

SEQ ID NO: 469313 - DNA, 57 bp, Artificial
  Synthetic oligonucleotide
tgcgatatcacaccacggaccctggtacgagttggattggggcatcggtacgccgaa

SEQ ID NO: 469314 - DNA, 60 bp, Artificial
  Synthetic oligonucleotide
tgcgatatgtacacatctggaagtgtgtttcatgtattcagatttccacttcattgatga

SEQ ID NO: 469315 - DNA, 60 bp, Artificial
  Synthetic oligonucleotide
tgcgatatgttccttgcggggctccatcagacttatctgaccaaaccatgccacaaacac

SEQ ID NO: 469316 - DNA, 60 bp, Artificial
  Synthetic oligonucleotide
tgcgatatttgatcgccatcacctggattcacaattactaatactgaacgaggagtttca

SEQ ID NO: 469317 - DNA, 60 bp, Artificial
  Synthetic oligonucleotide
tgcgatcaataggtatgtcagcagtgccgacaagattcgatacggcaatgaatttgtcgt

SEQ ID NO: 469318 - DNA, 60 bp, Artificial
  Synthetic oligonucleotide
tgcgatcagaactcggattcgatcagacatcagtggtagatccccctcacggtgcgagaa

SEQ ID NO: 469319 - DNA, 60 bp, Artificial
  Synthetic oligonucleotide
tgcgatccaatgttcgttgacatagtcaaggacaacatgagagtatatatgcaggaaggt

SEQ ID NO: 469320 - DNA, 60 bp, Artificial
  Synthetic oligonucleotide
tgcgatcccgttctctatgtagagatagtggatcggtacaagatcattcaaaaagggcga

SEQ ID NO: 469321 - DNA, 55 bp, Artificial
  Synthetic oligonucleotide
tgcgatcgttatccgcagagcaactacgcaaagcttagtaccactttcaatggtg

SEQ ID NO: 469322 - DNA, 55 bp, Artificial
  Synthetic oligonucleotide
tgcgatctatccttccgcgcagagtgctttgccgcgggtacccattgcagctccg

SEQ ID NO: 469323 - DNA, 59 bp, Artificial
  Synthetic oligonucleotide
tgcgatctgtttaagaaattcgagtattgtttggtcgctgttactcgtcataagtctac

SEQ ID NO: 469324 - DNA, 56 bp, Artificial
  Synthetic oligonucleotide
tgcgatgaaggtttcattcgagttgataacaatggaacgactgacggtaaaacgtc

SEQ ID NO: 469325 - DNA, 60 bp, Artificial
  Synthetic oligonucleotide
tgcgatgagggtagctcaatgcaagttcttaatgggccaatgagtattctgatgccagag

SEQ ID NO: 469326 - DNA, 59 bp, Artificial
  Synthetic oligonucleotide
tgcgatgatgtttgacgaccagggtgttatacccgaacttaagtgccagtggaggaaga

SEQ ID NO: 469327 - DNA, 55 bp, Artificial
  Synthetic oligonucleotide
tgcgatgcagaaaatggatgcggaactcaaagggaatgcaaaactgcaaacccgg

SEQ ID NO: 469328 - DNA, 50 bp, Artificial
  Synthetic oligonucleotide
tgcgatgccgtgtatagcggcggtccgtctccaaatctgtgtgtgccgta

SEQ ID NO: 469329 - DNA, 60 bp, Artificial
  Synthetic oligonucleotide
tgcgatggatatacgacaccctggtcctgtcaagttctctctactgcatgaatcgaccct

SEQ ID NO: 469330 - DNA, 60 bp, Artificial
  Synthetic oligonucleotide
tgcgatgggccacaatacagcgatatccacttatatcacatttcctccccttgggaaaac

SEQ ID NO: 469331 - DNA, 60 bp, Artificial
  Synthetic oligonucleotide
tgcgatggtgtatactggtccgctaaaagttcaacaatgcaagaactatttagacagcct

SEQ ID NO: 469332 - DNA, 60 bp, Artificial
  Synthetic oligonucleotide
tgcgatgtattgtgaggaatgcgatatgtatcatgagaaatctggtttgacacactgggg

SEQ ID NO: 469333 - DNA, 60 bp, Artificial
  Synthetic oligonucleotide
tgcgatgtgtcatgtctttgtgcaccacacccggtcgcgttggcagagtatccctataaa

SEQ ID NO: 469334 - DNA, 55 bp, Artificial
  Synthetic oligonucleotide
tgcgatgtgttatgggtctaccacgactaacctaatgagagggcagaacacagtc

SEQ ID NO: 469335 - DNA, 60 bp, Artificial
  Synthetic oligonucleotide
tgcgattagtgaacggattattagcacttatctgggacgacctgaggagcctgtgcattt

SEQ ID NO: 469336 - DNA, 60 bp, Artificial
  Synthetic oligonucleotide
tgcgattagtgagcggattcttcgctcttgcctgggacgacttgaggaacctgtgcctct

SEQ ID NO: 469337 - DNA, 54 bp, Artificial
  Synthetic oligonucleotide
tgcgattctaaagtgtaaggatgagacattcaatggaacaggaccatgttctaa

SEQ ID NO: 469338 - DNA, 60 bp, Artificial
  Synthetic oligonucleotide
tgcgattgagcgaagaatcgactatattcgatgttgagcagctagcttccgggctgaatg

SEQ ID NO: 469339 - DNA, 58 bp, Artificial
  Synthetic oligonucleotide
tgcgattgagttgtcgaatgcgggaacgatgctctgcatccagcttccattcgggtca

SEQ ID NO: 469340 - DNA, 60 bp, Artificial
  Synthetic oligonucleotide
tgcgattgccattctggatgagtacagagttgtctttcatcatccgaatgaccgcaatca

SEQ ID NO: 469341 - DNA, 60 bp, Artificial
  Synthetic oligonucleotide
tgcgatttgatgcatgttgttgcaccacaatgcagccagttagtgttgacaaagcaatac

SEQ ID NO: 469342 - DNA, 60 bp, Artificial
  Synthetic oligonucleotide
tgcgatttgcattattggacactttggcctttatctaatacatataccgttcaaggatca

SEQ ID NO: 469343 - DNA, 55 bp, Artificial
  Synthetic oligonucleotide
tgcgcaaaactatggagtaaatttgccaattacaggttcaatggatactgcgtat

SEQ ID NO: 469344 - DNA, 55 bp, Artificial
  Synthetic oligonucleotide
tgcgcaaaagagccagcgtaatgatcaggatcggttctatgtgctgatggtgata

SEQ ID NO: 469345 - DNA, 55 bp, Artificial
  Synthetic oligonucleotide
tgcgcaaaggactggtcgaaggagtagtcatctctaaggaaggttccgaatcatg

SEQ ID NO: 469346 - DNA, 60 bp, Artificial
  Synthetic oligonucleotide
tgcgcaaatggtatgcaactgtcaccggtggacaatacgcttcaaaggaacaagctctcg

SEQ ID NO: 469347 - DNA, 57 bp, Artificial
  Synthetic oligonucleotide
tgcgcaacgtatccggggtgtaccatgtcacgaacgactgctccaacacaagtatcg

SEQ ID NO: 469348 - DNA, 60 bp, Artificial
  Synthetic oligonucleotide
tgcgcaactccacagggctttaccacgtcaccaatgattgccctaactcgagtattgtgt

SEQ ID NO: 469349 - DNA, 59 bp, Artificial
  Synthetic oligonucleotide
tgcgcaagtggcaggagcaaggtaataaaagggtccttgcctttaattggcgaagcaga

SEQ ID NO: 469350 - DNA, 58 bp, Artificial
  Synthetic oligonucleotide
tgcgcaagttggtatttgaattaaagatgtgggatcctctgcagaacccgtttcccca

SEQ ID NO: 469351 - DNA, 60 bp, Artificial
  Synthetic oligonucleotide
tgcgcacacggctggctatgtcctatcatagccgggggctccggagtgcgaaaccctctt

SEQ ID NO: 469352 - DNA, 51 bp, Artificial
  Synthetic oligonucleotide
tgcgcacccctcgatcggctgtcccctaggatcaactttcatagtcgggga

SEQ ID NO: 469353 - DNA, 59 bp, Artificial
  Synthetic oligonucleotide
tgcgcacctgtgccagggaccgggagcggtctatagataaggtcgtgtcccaactcgga

SEQ ID NO: 469354 - DNA, 60 bp, Artificial
  Synthetic oligonucleotide
tgcgcacgtcgtggcgtggggctctgcgcacgtcgtggcgtgggactctgcgcacgtcgt

SEQ ID NO: 469355 - DNA, 60 bp, Artificial
  Synthetic oligonucleotide
tgcgcacgttatctatccatacgatacaaacagacgatgaatcgcaatgtagtgctagtg

SEQ ID NO: 469356 - DNA, 60 bp, Artificial
  Synthetic oligonucleotide
tgcgcagaatccggaacgcgacggcagaaccgatgagcgccaagcactcgccaagtttga

SEQ ID NO: 469357 - DNA, 55 bp, Artificial
  Synthetic oligonucleotide
tgcgcagactcagtggagccgcgccgtagcttctcgcgcagtatcattttcgcgg

SEQ ID NO: 469358 - DNA, 59 bp, Artificial
  Synthetic oligonucleotide
tgcgcagcaacttaatgatgttaggaagatctacttagcgctaatgtttcctggacaga

SEQ ID NO: 469359 - DNA, 57 bp, Artificial
  Synthetic oligonucleotide
tgcgcagcgtgtacaacgagttgggtggtaacctgaagaagggcggtgtgtctcgtc

SEQ ID NO: 469360 - DNA, 60 bp, Artificial
  Synthetic oligonucleotide
tgcgcaggctgtgactgccgtggtgtgtggcccagatatgatccaagtgtcattgaatgc

SEQ ID NO: 469361 - DNA, 60 bp, Artificial
  Synthetic oligonucleotide
tgcgcaggtacttgcgtgattataatttccaatttgatgaatgggaaagcgtggttgact

SEQ ID NO: 469362 - DNA, 55 bp, Artificial
  Synthetic oligonucleotide
tgcgcaggtgagacggtactccatagatccgttcacaatggagatgccccgctag

SEQ ID NO: 469363 - DNA, 59 bp, Artificial
  Synthetic oligonucleotide
tgcgcaggttggagtggcatagttgttagaaatggaactctaacccagaaacggagcag

SEQ ID NO: 469364 - DNA, 52 bp, Artificial
  Synthetic oligonucleotide
tgcgcagtaaacgtgaataaaattaacccatgggttaattttgttgtacacc

SEQ ID NO: 469365 - DNA, 58 bp, Artificial
  Synthetic oligonucleotide
tgcgcagtagaactgctgacaagggactttctaagggactttccaagggggaggctca

SEQ ID NO: 469366 - DNA, 57 bp, Artificial
  Synthetic oligonucleotide
tgcgcagtgacttgaaggtattttggggacgtgacagtttaaagagcgatgcggata

SEQ ID NO: 469367 - DNA, 60 bp, Artificial
  Synthetic oligonucleotide
tgcgcagtttccatgacatttcgtgcctcctgtaatcgtctggttatttctgcaactagg

SEQ ID NO: 469368 - DNA, 59 bp, Artificial
  Synthetic oligonucleotide
tgcgcataaactttgacaaaacaacgccatctccagtaaatgacatacgattcctcgga

SEQ ID NO: 469369 - DNA, 60 bp, Artificial
  Synthetic oligonucleotide
tgcgcatctcgcgtcacctgctcaacaagaaccacactgaaatgcccgggacggaacgcg

SEQ ID NO: 469370 - DNA, 55 bp, Artificial
  Synthetic oligonucleotide
tgcgcatgctggggattttatggcacgccgtagccggcactgtaagaagccccgt

SEQ ID NO: 469371 - DNA, 60 bp, Artificial
  Synthetic oligonucleotide
tgcgcattaccgcagctacttcgtgtttctctggtattgtgttaggtgcgtgtcttgacg

SEQ ID NO: 469372 - DNA, 55 bp, Artificial
  Synthetic oligonucleotide
tgcgcattagaatttatctacggcaatgggcgggattaaccgagatgagaggatg

SEQ ID NO: 469373 - DNA, 60 bp, Artificial
  Synthetic oligonucleotide
tgcgcattatcgacagtggtcggtatcaacctaattggaatcagtctattcgcgcgtcta

SEQ ID NO: 469374 - DNA, 58 bp, Artificial
  Synthetic oligonucleotide
tgcgcatttagtgggtttcccaactcacagacaccttataggtgagggctgcccaaaa

SEQ ID NO: 469375 - DNA, 60 bp, Artificial
  Synthetic oligonucleotide
tgcgccaaacatataagtggagtttgcgttcagaatatggtcaacgtgagaggccgctag

SEQ ID NO: 469376 - DNA, 53 bp, Artificial
  Synthetic oligonucleotide
tgcgccaaccgccgtgcgaaaactccagtgcgagatgtaacaaacctggttgc

SEQ ID NO: 469377 - DNA, 58 bp, Artificial
  Synthetic oligonucleotide
tgcgccaacgtcaccaactccgtggaaacttcaaccaggagacgatccactactggaa

SEQ ID NO: 469378 - DNA, 60 bp, Artificial
  Synthetic oligonucleotide
tgcgccaagacacttgagacagtgcgcatgcgtgattcagcgcatgcgtactgtccaaaa

SEQ ID NO: 469379 - DNA, 58 bp, Artificial
  Synthetic oligonucleotide
tgcgccacccaacccgtcagtgtttttcactttgcgtgactataacacggttcacaca

SEQ ID NO: 469380 - DNA, 58 bp, Artificial
  Synthetic oligonucleotide
tgcgccacggaagctgtacgcgtggtatattggactagcggttagaggagacccctcc

SEQ ID NO: 469381 - DNA, 60 bp, Artificial
  Synthetic oligonucleotide
tgcgccagcgattctcaactattctaatccgcaagatgcattcaatagtgtatttgtagc

SEQ ID NO: 469382 - DNA, 55 bp, Artificial
  Synthetic oligonucleotide
tgcgccagctaaaaccaaattagaacctagtgtcttccatgaagtatttgaggga

SEQ ID NO: 469383 - DNA, 60 bp, Artificial
  Synthetic oligonucleotide
tgcgccagctcaagttttaaaagtcccgcaatttgttgctgattggattgagcagagaga

SEQ ID NO: 469384 - DNA, 60 bp, Artificial
  Synthetic oligonucleotide
tgcgccagtagtgcgctgagtcagggaatcttatcccttatgtcttttagccacactttc

SEQ ID NO: 469385 - DNA, 59 bp, Artificial
  Synthetic oligonucleotide
tgcgccccaatactccttctggaagaaatccatggaccacttcatatctgaccggtttg

SEQ ID NO: 469386 - DNA, 57 bp, Artificial
  Synthetic oligonucleotide
tgcgccccaggtgagtaccacctcgcccgactcgcaggctggtccgacccctgggcc

SEQ ID NO: 469387 - DNA, 60 bp, Artificial
  Synthetic oligonucleotide
tgcgccctcctacttgctggcttacttgcttgctgtgccaaatgcttatactacttgcgc

SEQ ID NO: 469388 - DNA, 60 bp, Artificial
  Synthetic oligonucleotide
tgcgccctcgttattagtgtgtaaagtgtcttgcaatgtaattgtatgttggagtatgtt

SEQ ID NO: 469389 - DNA, 57 bp, Artificial
  Synthetic oligonucleotide
tgcgcccttttagctgtagcggagacacttgggcgaaccaagagggaggttacagag

SEQ ID NO: 469390 - DNA, 56 bp, Artificial
  Synthetic oligonucleotide
tgcgccgaaaaagtgaaaattctctctcctgttttggtctctaatgcaatttcccg

SEQ ID NO: 469391 - DNA, 55 bp, Artificial
  Synthetic oligonucleotide
tgcgccgatgacggccaaggaatacgtggcgagttatgtgcctcgtgtgcctggc

SEQ ID NO: 469392 - DNA, 58 bp, Artificial
  Synthetic oligonucleotide
tgcgccgcaaacgtctgaaaaatggctgaaggtacagaccctttagagggtagcagtg

SEQ ID NO: 469393 - DNA, 55 bp, Artificial
  Synthetic oligonucleotide
tgcgccgcactcagcaagcccgtgggcgcggtaaccgccttgcggatgtcgtagt

SEQ ID NO: 469394 - DNA, 55 bp, Artificial
  Synthetic oligonucleotide
tgcgccgccagggcgcacgatcagcctcctcgcaggggattggtagggcaaacac

SEQ ID NO: 469395 - DNA, 53 bp, Artificial
  Synthetic oligonucleotide
tgcgccgcttgcaagggaatcggtcagacgttgcttcgggggaagtgtactgt

SEQ ID NO: 469396 - DNA, 57 bp, Artificial
  Synthetic oligonucleotide
tgcgccgtgtcgttaaagtatatcgtattgggtctttatataggcgttaataagtga

SEQ ID NO: 469397 - DNA, 53 bp, Artificial
  Synthetic oligonucleotide
tgcgcctagggtcgtgcggctctagtgcgtacctcttgcccatgtcgaccgct

SEQ ID NO: 469398 - DNA, 59 bp, Artificial
  Synthetic oligonucleotide
tgcgcctatagtgcatttaaaaggtgatgccaacgggttaaagtgccttagatacagac

SEQ ID NO: 469399 - DNA, 60 bp, Artificial
  Synthetic oligonucleotide
tgcgcctgtgtcactctaaccacggctctatgcacttccgtaaggcaagcgccaaaggca

SEQ ID NO: 469400 - DNA, 60 bp, Artificial
  Synthetic oligonucleotide
tgcgcctgttgagtcgtggctagatttactgcagcgcttatagaatgtggaagttctgag

SEQ ID NO: 469401 - DNA, 57 bp, Artificial
  Synthetic oligonucleotide
tgcgcgaacatagtcgtatagttcgtgcgaaggcgccaaaaggttagggcctaaatg

SEQ ID NO: 469402 - DNA, 60 bp, Artificial
  Synthetic oligonucleotide
tgcgcgaactgtctagtgaggtaactaggctgcagatggagttgagtcgtgctcagtccc

SEQ ID NO: 469403 - DNA, 59 bp, Artificial
  Synthetic oligonucleotide
tgcgcgaggggcctatttattcgaccacatgggctctttctcgcgggcagtcaaggaac

SEQ ID NO: 469404 - DNA, 60 bp, Artificial
  Synthetic oligonucleotide
tgcgcgatcgcaatggctgagttttatatgaacaccgatatccacagtgggagtgtgatg

SEQ ID NO: 469405 - DNA, 53 bp, Artificial
  Synthetic oligonucleotide
tgcgcgcagctcatgtttatgctcaacgggtctttgcccgtattggatttgac

SEQ ID NO: 469406 - DNA, 60 bp, Artificial
  Synthetic oligonucleotide
tgcgcgcatattttaaacgcccatttgaactgacagcgtcgaatttggccgtacctcaga

SEQ ID NO: 469407 - DNA, 60 bp, Artificial
  Synthetic oligonucleotide
tgcgcgcatcactgtatagcttcactttcaacgttgggactggcgctttcggatcgtcta

SEQ ID NO: 469408 - DNA, 60 bp, Artificial
  Synthetic oligonucleotide
tgcgcgcattttggtttcggtctgttccgggctgatcgctctgtgagcgacgtgtgagta

SEQ ID NO: 469409 - DNA, 57 bp, Artificial
  Synthetic oligonucleotide
tgcgcgcctacacaattttaacaactcctcttggtgcaacgattgaggttcgcagtg

SEQ ID NO: 469410 - DNA, 50 bp, Artificial
  Synthetic oligonucleotide
tgcgcgccttaagtgcttcacgggctggcttagtgcgtgtccgcacctcc

SEQ ID NO: 469411 - DNA, 60 bp, Artificial
  Synthetic oligonucleotide
tgcgcgcgttacaattatctccaccacagtcccgaatacagggacaagaacgtagccaga

SEQ ID NO: 469412 - DNA, 60 bp, Artificial
  Synthetic oligonucleotide
tgcgcgctgatataggcgacatgagaaagtacgccgtcctcgtgtattcaaaagacgatg

SEQ ID NO: 469413 - DNA, 55 bp, Artificial
  Synthetic oligonucleotide
tgcgcggacgtcaccctaagcgtattatcatggatgacccggtaacggacgagga

SEQ ID NO: 469414 - DNA, 60 bp, Artificial
  Synthetic oligonucleotide
tgcgcggcaagtagagtgtataatggcatcgttggcgcgaggaaaggtccagagggcggt

SEQ ID NO: 469415 - DNA, 56 bp, Artificial
  Synthetic oligonucleotide
tgcgcggtaaatgtgaataaaattaaccacaagcagaatttggagtccccaatagg

SEQ ID NO: 469416 - DNA, 54 bp, Artificial
  Synthetic oligonucleotide
tgcgcggtccgacactcgcgcctaccctagataggacggccactcacacagtga

SEQ ID NO: 469417 - DNA, 60 bp, Artificial
  Synthetic oligonucleotide
tgcgcgtaaacgacatgcacaaacgtctcacgcttccacagcaaccgggccaaccaagaa

SEQ ID NO: 469418 - DNA, 50 bp, Artificial
  Synthetic oligonucleotide
tgcgcgtacggcaaccgcgaaggcttgaagtcgattcgccgctgcacttg

SEQ ID NO: 469419 - DNA, 60 bp, Artificial
  Synthetic oligonucleotide
tgcgcgtcccttacttcgtgagagcgcacgcgctaatcaagatatgcagcctagttcgtg

SEQ ID NO: 469420 - DNA, 60 bp, Artificial
  Synthetic oligonucleotide
tgcgcgtgatgtatttagtaagtatcgtggattgattgaccgatcttattacaaggacaa

SEQ ID NO: 469421 - DNA, 60 bp, Artificial
  Synthetic oligonucleotide
tgcgcgtggggcctatttgttcgaccacatgggctctttctcgcgtgcagtcaaggagcg

SEQ ID NO: 469422 - DNA, 55 bp, Artificial
  Synthetic oligonucleotide
tgcgcgttcacttatgatctatccctccacaaccttacccggctgatcgagttgg

SEQ ID NO: 469423 - DNA, 60 bp, Artificial
  Synthetic oligonucleotide
tgcgcgtttgttctgatgacagctactccaccgggcaagagtgaggcattccccgagtcc

SEQ ID NO: 469424 - DNA, 52 bp, Artificial
  Synthetic oligonucleotide
tgcgctaaagcgatccgcagaagaacgattcatacatgatacatctagaatc

SEQ ID NO: 469425 - DNA, 55 bp, Artificial
  Synthetic oligonucleotide
tgcgctaatacattttcgttgcacagatttaatcgagtgccttcgaatgggtcgt

SEQ ID NO: 469426 - DNA, 60 bp, Artificial
  Synthetic oligonucleotide
tgcgctacaggaatggagccagctgaatgtgaatctcgtctgaggggacatgctcgcact

SEQ ID NO: 469427 - DNA, 60 bp, Artificial
  Synthetic oligonucleotide
tgcgctagttcctagctggttgagttctctatatggatgtagcgcattctccacttctga

SEQ ID NO: 469428 - DNA, 60 bp, Artificial
  Synthetic oligonucleotide
tgcgctcacatatagtctggtgtgtcgttggatttacagtctggttcataattaatggcc

SEQ ID NO: 469429 - DNA, 60 bp, Artificial
  Synthetic oligonucleotide
tgcgctccttggagcagtgagaggccttgacaaaatctgcctaggacaccatgcagttgc

SEQ ID NO: 469430 - DNA, 60 bp, Artificial
  Synthetic oligonucleotide
tgcgctctacgtgggtgatatgtgcggagccgtctttctcgtgggacaagccttcacgtt

SEQ ID NO: 469431 - DNA, 60 bp, Artificial
  Synthetic oligonucleotide
tgcgctgaccctgctgatatgtgacgaccatcgactctggtatctggactacgtcgcgaa

SEQ ID NO: 469432 - DNA, 60 bp, Artificial
  Synthetic oligonucleotide
tgcgctggagatcttatcgaactatgagaagcttacgccggacttacatgaagggctgga

SEQ ID NO: 469433 - DNA, 55 bp, Artificial
  Synthetic oligonucleotide
tgcgctggtttcaaatgtcgcgttcccgcctatttagttgcttgccctgcaagca

SEQ ID NO: 469434 - DNA, 55 bp, Artificial
  Synthetic oligonucleotide
tgcgctgtaccatacatttaggcttaaggcggggtatgtttagaccttcccaatg

SEQ ID NO: 469435 - DNA, 60 bp, Artificial
  Synthetic oligonucleotide
tgcgctgttatggcaaccttaagaagattcgagtcgactcgctacagccagagtccattg

SEQ ID NO: 469436 - DNA, 52 bp, Artificial
  Synthetic oligonucleotide
tgcgcttctatgtcatatttcgcattcactcctgttgtgttgtccggtttcc

SEQ ID NO: 469437 - DNA, 59 bp, Artificial
  Synthetic oligonucleotide
tgcgcttggaggaggaactaattgtgaacccatcttattattagctcgatctaacaatt

SEQ ID NO: 469438 - DNA, 60 bp, Artificial
  Synthetic oligonucleotide
tgcgcttggtaactttatctacagtaggtatggagatacccttgcaggggcaggagagct

SEQ ID NO: 469439 - DNA, 60 bp, Artificial
  Synthetic oligonucleotide
tgcgcttgttcgtcaagaacgagccacacccacagaagaaattgcgtgaacgtcgattca

SEQ ID NO: 469440 - DNA, 60 bp, Artificial
  Synthetic oligonucleotide
tgcgctttacaaagttcactcaacactgatgaattatatagaaacgggacagactgcggc

SEQ ID NO: 469441 - DNA, 56 bp, Artificial
  Synthetic oligonucleotide
tgcgctttcacaagggcgagcttcgcgtaacgcaattgctgtctctgctacagcac

SEQ ID NO: 469442 - DNA, 59 bp, Artificial
  Synthetic oligonucleotide
tgcgctttccagtctactattgctgagcttcagcgccttaaaatgaaggtaggtaaaac

SEQ ID NO: 469443 - DNA, 55 bp, Artificial
  Synthetic oligonucleotide
tgcgctttgacgctgagttcacatttgtcgtagccaaacccaatggtgagttagt

SEQ ID NO: 469444 - DNA, 55 bp, Artificial
  Synthetic oligonucleotide
tgcggaaaacagtttcgataatatctttaccgtcggtgcccggaacggtatatca

SEQ ID NO: 469445 - DNA, 50 bp, Artificial
  Synthetic oligonucleotide
tgcggaaaactaattatcagggcgctcgctttcgtgcgagaataatagga

SEQ ID NO: 469446 - DNA, 60 bp, Artificial
  Synthetic oligonucleotide
tgcggaaacctaactggtttagcaatgctgcataacgcaagacaatgcagatatcatggt

SEQ ID NO: 469447 - DNA, 54 bp, Artificial
  Synthetic oligonucleotide
tgcggaaacctctcacgtgtgacgttgaagtttctatgggcagtaattctgcaa

SEQ ID NO: 469448 - DNA, 60 bp, Artificial
  Synthetic oligonucleotide
tgcggaactcctagccgcttgttttgctcgcagcaggtctggggcgaaactcatcgggac

SEQ ID NO: 469449 - DNA, 60 bp, Artificial
  Synthetic oligonucleotide
tgcggaagcctggagctctcatcttttaaatgagactagtgccacgtcatcggtgtatcg

SEQ ID NO: 469450 - DNA, 52 bp, Artificial
  Synthetic oligonucleotide
tgcggaaggactaaaactgaaaatatgtccgtacgattaaaaacacggaggg

SEQ ID NO: 469451 - DNA, 55 bp, Artificial
  Synthetic oligonucleotide
tgcggaatggaagctagaagaggcaggcttcctcccaagagacaagcaattcttg

SEQ ID NO: 469452 - DNA, 60 bp, Artificial
  Synthetic oligonucleotide
tgcggacaactcagtattgacccatcaaatcatgtatgtgccacctggaggcccaatccc

SEQ ID NO: 469453 - DNA, 55 bp, Artificial
  Synthetic oligonucleotide
tgcggacagttccgctccctctagcacacagaggtccatttgggtgcgactcccc

SEQ ID NO: 469454 - DNA, 59 bp, Artificial
  Synthetic oligonucleotide
tgcggacatcctattttggcgggctctcagtatgttcgcgaggcctctatctacgacgg

SEQ ID NO: 469455 - DNA, 58 bp, Artificial
  Synthetic oligonucleotide
tgcggacgacgagattgctgaagcattgtcctcggatgtacaatctattgttactgaa

SEQ ID NO: 469456 - DNA, 50 bp, Artificial
  Synthetic oligonucleotide
tgcggacgggttggcgtggcacaggcgggacaccagaaccaggagcggcc

SEQ ID NO: 469457 - DNA, 60 bp, Artificial
  Synthetic oligonucleotide
tgcggacggtaattttatcccgctacgcggaaaatggatcatgcccctgcgactatggca

SEQ ID NO: 469458 - DNA, 58 bp, Artificial
  Synthetic oligonucleotide
tgcggacgtaaacaaagtgagtcattgcagttgtcggcacgtttaacgcaaattgacg

SEQ ID NO: 469459 - DNA, 60 bp, Artificial
  Synthetic oligonucleotide
tgcggactacatgggccttgtgcgaatccatcacactggctactggacctctgaccacgc

SEQ ID NO: 469460 - DNA, 60 bp, Artificial
  Synthetic oligonucleotide
tgcggactggtggaatatgcattacttaggatctttcaaatatgctcccgtggtggttat

SEQ ID NO: 469461 - DNA, 60 bp, Artificial
  Synthetic oligonucleotide
tgcggagacagataatcaatcaggtcctgttgcgcatcaggtgatagtaaacaatcaaaa

SEQ ID NO: 469462 - DNA, 60 bp, Artificial
  Synthetic oligonucleotide
tgcggagcgcctccttgtgtcatcggaggggtgacaggtaacaacaccttgcactgcccc

SEQ ID NO: 469463 - DNA, 58 bp, Artificial
  Synthetic oligonucleotide
tgcggaggcgggagctttggaataggcaaactcaagagcttgtgtaaagagtttagcg

SEQ ID NO: 469464 - DNA, 58 bp, Artificial
  Synthetic oligonucleotide
tgcggaggtacctgagtcggctgattggcgtcagacgtcgcctgttcatgccgtcgac

SEQ ID NO: 469465 - DNA, 52 bp, Artificial
  Synthetic oligonucleotide
tgcggatctgctatggcgactggcaagttcctagtcgcatactcaccccctg

SEQ ID NO: 469466 - DNA, 60 bp, Artificial
  Synthetic oligonucleotide
tgcggatgaatttagaggcagtacctctagctaatcccgctgataaagactacatacttc

SEQ ID NO: 469467 - DNA, 60 bp, Artificial
  Synthetic oligonucleotide
tgcggatgcgcaaattggcgagttgcaagagtatctcaaggtcctcgacctcacatacaa

SEQ ID NO: 469468 - DNA, 60 bp, Artificial
  Synthetic oligonucleotide
tgcggatgggccatttatggacgaatctactgacgagaaattagtttcgatgcttgatta

SEQ ID NO: 469469 - DNA, 60 bp, Artificial
  Synthetic oligonucleotide
tgcggatgtgttagaggcggcatcagaagaggtccctttgattggagcaggtatggccac

SEQ ID NO: 469470 - DNA, 60 bp, Artificial
  Synthetic oligonucleotide
tgcggattcctgtataacctgattgggaggaacagctcacttgctgtgaggcataatcta

SEQ ID NO: 469471 - DNA, 55 bp, Artificial
  Synthetic oligonucleotide
tgcggattgacgttagccaggttaaacggtgaagtgccaatcgacacaacgtcat

SEQ ID NO: 469472 - DNA, 55 bp, Artificial
  Synthetic oligonucleotide
tgcggatttaggtgcaacttctcctgtgacgatcaattctcttcgtgaagccttc

SEQ ID NO: 469473 - DNA, 55 bp, Artificial
  Synthetic oligonucleotide
tgcggcaaccccattgccgtagtcctctcccatggccaacaaggaactcgaactc

SEQ ID NO: 469474 - DNA, 59 bp, Artificial
  Synthetic oligonucleotide
tgcggcaacgttctgtgcagctcgcatcaagtccctacaccgcaccgggtagctattga

SEQ ID NO: 469475 - DNA, 53 bp, Artificial
  Synthetic oligonucleotide
tgcggcaaggagggggacgttatactcaccattggggttccttcaaagggtaa

SEQ ID NO: 469476 - DNA, 60 bp, Artificial
  Synthetic oligonucleotide
tgcggcaattgatatatcacaagtaaaatcgagtaaagatctgaatgttcgggaaaagtc

SEQ ID NO: 469477 - DNA, 60 bp, Artificial
  Synthetic oligonucleotide
tgcggcacccattgcgtatgtggtgctagatacgagacatcggataggatgaaattgcac

SEQ ID NO: 469478 - DNA, 58 bp, Artificial
  Synthetic oligonucleotide
tgcggcacggttggtggttggtgctccagccacgcgtgttgtggattggaacggcacc

SEQ ID NO: 469479 - DNA, 58 bp, Artificial
  Synthetic oligonucleotide
tgcggcataacgtaatcattcaaagccccaacgctccgaacgtagtttgtgatactaa

SEQ ID NO: 469480 - DNA, 57 bp, Artificial
  Synthetic oligonucleotide
tgcggcatataaacgtcgcgttgactcggcacacaaacgccctatatatcagggacg

SEQ ID NO: 469481 - DNA, 53 bp, Artificial
  Synthetic oligonucleotide
tgcggcatccaaaaacttaccgtttcattttccgtaacaaacgtcgccgcaaa

SEQ ID NO: 469482 - DNA, 55 bp, Artificial
  Synthetic oligonucleotide
tgcggcattcgaggctaaccgtatcgccctagtagaactacccgaacccaccgag

SEQ ID NO: 469483 - DNA, 57 bp, Artificial
  Synthetic oligonucleotide
tgcggccccgaacagggaccttgaaagcgaaagagaaaccagaggagatctctcggc

SEQ ID NO: 469484 - DNA, 59 bp, Artificial
  Synthetic oligonucleotide
tgcggcccctagcaccaccgtctctgcgccttttgggttcgaatcttccccatgcagct

SEQ ID NO: 469485 - DNA, 59 bp, Artificial
  Synthetic oligonucleotide
tgcggccctgtttactgcttcacgcccagccctgttgtggtaggaaccactgacaggcg

SEQ ID NO: 469486 - DNA, 60 bp, Artificial
  Synthetic oligonucleotide
tgcggcctgcgaatacctttgctatcactgataccaatgatatgtcgcatagtctggcgc

SEQ ID NO: 469487 - DNA, 60 bp, Artificial
  Synthetic oligonucleotide
tgcggctaggcctgctgtgaatggtcaaagaggcagaatcgattattactggtctgtttt

SEQ ID NO: 469488 - DNA, 60 bp, Artificial
  Synthetic oligonucleotide
tgcggctcggcaggcatggaaaaaacttcctagctccagtactaagacagaggatctttc

SEQ ID NO: 469489 - DNA, 60 bp, Artificial
  Synthetic oligonucleotide
tgcgggaaagtcgaaatcctgggaatgctgagatagaggatcttatctttcttgcacgat

SEQ ID NO: 469490 - DNA, 55 bp, Artificial
  Synthetic oligonucleotide
tgcgggaagacttgtctgtgcatagaattggcgggatctggaggggaacttgtgt

SEQ ID NO: 469491 - DNA, 59 bp, Artificial
  Synthetic oligonucleotide
tgcgggaatacacaaaatggaggctcacaaaacagtacctatagtaacaatagtgagga

SEQ ID NO: 469492 - DNA, 50 bp, Artificial
  Synthetic oligonucleotide
tgcgggacaggaatgtgtcgtcattgacgagttccgcggtgcgatttcta

SEQ ID NO: 469493 - DNA, 55 bp, Artificial
  Synthetic oligonucleotide
tgcgggagatactgtactccctgatacgtcaagacaaaggtaacgtaggtacact

SEQ ID NO: 469494 - DNA, 60 bp, Artificial
  Synthetic oligonucleotide
tgcgggagttgtcctgcaagtcatcagacccccacgtagttgcctcagtgaatgcactac

SEQ ID NO: 469495 - DNA, 55 bp, Artificial
  Synthetic oligonucleotide
tgcgggatgcagcgccgtttaagaagatcgctgggcaagcaaccgttacagctcc

SEQ ID NO: 469496 - DNA, 58 bp, Artificial
  Synthetic oligonucleotide
tgcgggattctagagtgttcggctcaacagcgagccgactatgcctgtagagttttcg

SEQ ID NO: 469497 - DNA, 51 bp, Artificial
  Synthetic oligonucleotide
tgcgggcaaggcagttcaagggtttactagcctgttccgacttggggccaa

SEQ ID NO: 469498 - DNA, 59 bp, Artificial
  Synthetic oligonucleotide
tgcgggccaagcgatagccgccggtcgctaagtgcggcggcgcatgtttcaagggttgg

SEQ ID NO: 469499 - DNA, 52 bp, Artificial
  Synthetic oligonucleotide
tgcgggccattcagcctcctgccttcctcaaacgcgttgcttcccgagcttt

SEQ ID NO: 469500 - DNA, 52 bp, Artificial
  Synthetic oligonucleotide
tgcgggcggaggattaggcagcaccatacctcaaataacacccgtcctagac

SEQ ID NO: 469501 - DNA, 60 bp, Artificial
  Synthetic oligonucleotide
tgcgggcgtatgttgagagctagggaagtgatctgtcagggtgattctaaacagatccct

SEQ ID NO: 469502 - DNA, 54 bp, Artificial
  Synthetic oligonucleotide
tgcgggctcacgcccgtgcacctgtacgcgagctacgcggacgtagacgtagcg

SEQ ID NO: 469503 - DNA, 57 bp, Artificial
  Synthetic oligonucleotide
tgcggggcacttaaaatgcagacttaagatggacaaattggaactcaaggggatgag

SEQ ID NO: 469504 - DNA, 60 bp, Artificial
  Synthetic oligonucleotide
tgcggggcatgtcctgcgtgtagtcagctgaaacagtgatattgtcactaaagccataga

SEQ ID NO: 469505 - DNA, 52 bp, Artificial
  Synthetic oligonucleotide
tgcgggggagccgtccttgctaaggatggagctgacacattcatcgttggca

SEQ ID NO: 469506 - DNA, 59 bp, Artificial
  Synthetic oligonucleotide
tgcgggggcgagactggttgtgctcgccaccgctacccctccgggctccgtcactgtgc

SEQ ID NO: 469507 - DNA, 55 bp, Artificial
  Synthetic oligonucleotide
tgcggggtgtgaaagagcatgttagacatgtattatggcttttctcaatacgcag

SEQ ID NO: 469508 - DNA, 60 bp, Artificial
  Synthetic oligonucleotide
tgcgggtacagtgacagggtgagatccatcacccttggcaattccaccataaccactcaa

SEQ ID NO: 469509 - DNA, 52 bp, Artificial
  Synthetic oligonucleotide
tgcgggtacgaaatccaacattacatgagaccgcagacgaattgaagcgcat

SEQ ID NO: 469510 - DNA, 54 bp, Artificial
  Synthetic oligonucleotide
tgcgggtagtccctagccgaagccaacgcgtggagggccgtaaactttacctgc

SEQ ID NO: 469511 - DNA, 55 bp, Artificial
  Synthetic oligonucleotide
tgcgggtcacgagacctggcggtcgttctatcccgaccgtatccgcacggtgcac

SEQ ID NO: 469512 - DNA, 60 bp, Artificial
  Synthetic oligonucleotide
tgcgggtcagatcagcgtgcaacctacattctcagtgcaacggaatcttccgtttgagag

SEQ ID NO: 469513 - DNA, 50 bp, Artificial
  Synthetic oligonucleotide
tgcgggttgcttgaacacgttgaaccagtgttcgcgtaaacttttgggcg

SEQ ID NO: 469514 - DNA, 59 bp, Artificial
  Synthetic oligonucleotide
tgcgggttgtctgatcagacaatgcgacggtttgttacctgtgctgatggaaattgcca

SEQ ID NO: 469515 - DNA, 55 bp, Artificial
  Synthetic oligonucleotide
tgcgggtttagtgaacagattacgcagtaagtggatggtggatcacagcagtgag

SEQ ID NO: 469516 - DNA, 54 bp, Artificial
  Synthetic oligonucleotide
tgcgggtttttacgctttcctcaacggtcctgtgttgaggcctatcttcgtttc

SEQ ID NO: 469517 - DNA, 60 bp, Artificial
  Synthetic oligonucleotide
tgcggtaaggccattcagttaagggataggcgcactaaggttagatatagtgtggactca

SEQ ID NO: 469518 - DNA, 60 bp, Artificial
  Synthetic oligonucleotide
tgcggtaatagggtatggtaatccgcaggaaggaactctcatgactgacacattcctcgc

SEQ ID NO: 469519 - DNA, 50 bp, Artificial
  Synthetic oligonucleotide
tgcggtacttggatgggtaccggagtacaagggttgggtgagaaagagga

SEQ ID NO: 469520 - DNA, 60 bp, Artificial
  Synthetic oligonucleotide
tgcggtagtgtgcggtccggatatgattcaagtgtcactgaatgctggagcgagaggaga

SEQ ID NO: 469521 - DNA, 60 bp, Artificial
  Synthetic oligonucleotide
tgcggtatagagtctacgcttgttagtgacgtgcaaggaaaagagtacaacactgtgact

SEQ ID NO: 469522 - DNA, 60 bp, Artificial
  Synthetic oligonucleotide
tgcggtatatgcgcatctcgcgtcacctgctcaacaagaatcacaccgagatgcccggga

SEQ ID NO: 469523 - DNA, 55 bp, Artificial
  Synthetic oligonucleotide
tgcggtcacaagccctctgactacccaacaaaccctcctattcaacatcttgggg

SEQ ID NO: 469524 - DNA, 55 bp, Artificial
  Synthetic oligonucleotide
tgcggtcagaagcgggcgtcgtgtggctctgcttgtccgacagatgggcgtagca

SEQ ID NO: 469525 - DNA, 55 bp, Artificial
  Synthetic oligonucleotide
tgcggtcagttttccgagcgtcgcctccttaggcgtgtcctaggaaaacaacaac

SEQ ID NO: 469526 - DNA, 53 bp, Artificial
  Synthetic oligonucleotide
tgcggtcatgtacctagtatgcaccccgcgtcgttacgagtcaagtcgaaccg

SEQ ID NO: 469527 - DNA, 51 bp, Artificial
  Synthetic oligonucleotide
tgcggtccagtgtattgtttcaccccaagccctgtcgtggtgggtacgacc

SEQ ID NO: 469528 - DNA, 50 bp, Artificial
  Synthetic oligonucleotide
tgcggtcggcaacccagagagcgcctgaagaggcttggatgacagcgcgg

SEQ ID NO: 469529 - DNA, 59 bp, Artificial
  Synthetic oligonucleotide
tgcggtctatggatgggcggcgttttacatggctcatccgaagacagagttttaccctc

SEQ ID NO: 469530 - DNA, 60 bp, Artificial
  Synthetic oligonucleotide
tgcggtctctcacgagctcgtcgcaatcacgacgttgagctgagaattatgagtttttct

SEQ ID NO: 469531 - DNA, 55 bp, Artificial
  Synthetic oligonucleotide
tgcggtgacctatcacaagagcacccagaagtcttagaaatactagagctagtgt

SEQ ID NO: 469532 - DNA, 59 bp, Artificial
  Synthetic oligonucleotide
tgcggtgagaaggtttattgcggaaatgaggcaacgcgtacaggctgacagaaacgttg

SEQ ID NO: 469533 - DNA, 58 bp, Artificial
  Synthetic oligonucleotide
tgcggtgcgacgtcatcaatgacgttatactccatttcgtttgagaagacccgggaat

SEQ ID NO: 469534 - DNA, 60 bp, Artificial
  Synthetic oligonucleotide
tgcggtggcaagaagtcgagtccacgaccggtgcattccgactcttggcacacacgtcat

SEQ ID NO: 469535 - DNA, 54 bp, Artificial
  Synthetic oligonucleotide
tgcggtggttagggcaggagtgcacctgtttcttagaaccagctgagggcctaa

SEQ ID NO: 469536 - DNA, 60 bp, Artificial
  Synthetic oligonucleotide
tgcggtgtaaatgaggcccagatctacacaggcttggacactatcattcagatctaccct

SEQ ID NO: 469537 - DNA, 54 bp, Artificial
  Synthetic oligonucleotide
tgcggtgtctagggcttttagttggtgaagggtttcctcttttgtaagcgaaca

SEQ ID NO: 469538 - DNA, 60 bp, Artificial
  Synthetic oligonucleotide
tgcggtgtgtaatcgtcaaaatcatgtgtagcacctagcgcccgcgcatacatgtgtcga

SEQ ID NO: 469539 - DNA, 59 bp, Artificial
  Synthetic oligonucleotide
tgcggtgttcagcctatgactggccctactggtcaggtgttcgctctccgtgctgtcta

SEQ ID NO: 469540 - DNA, 60 bp, Artificial
  Synthetic oligonucleotide
tgcggtgtttatttcctcgcttgtggcatcgaacttcatcgctcgcgtgcgctccctaag

SEQ ID NO: 469541 - DNA, 60 bp, Artificial
  Synthetic oligonucleotide
tgcggtgtttgaagcgacggctaggagtggaagacacagttgatcctacggtcgacatct

SEQ ID NO: 469542 - DNA, 60 bp, Artificial
  Synthetic oligonucleotide
tgcggttaagctacatcctgagactgtgtaccaacggacttagcaaccatgctaatgaac

SEQ ID NO: 469543 - DNA, 60 bp, Artificial
  Synthetic oligonucleotide
tgcggttatgaatatcgcacaggcaatggctaacatgtgggacaactgagaatgatatgt

SEQ ID NO: 469544 - DNA, 60 bp, Artificial
  Synthetic oligonucleotide
tgcggttattagaaggcacatgttggcgcccaatgccaacgccgagactatattgggccg

SEQ ID NO: 469545 - DNA, 60 bp, Artificial
  Synthetic oligonucleotide
tgcggttccaccttatatccgcaatatttgaacgatatcagcatgatgcacgacggagct

SEQ ID NO: 469546 - DNA, 55 bp, Artificial
  Synthetic oligonucleotide
tgcggttcgattccattcccaagcagcaaagggtgcgcaactagtacggcgcccc

SEQ ID NO: 469547 - DNA, 55 bp, Artificial
  Synthetic oligonucleotide
tgcggttctttagcagccgcactcctttgtcctataagatgctcctcggagtgcg

SEQ ID NO: 469548 - DNA, 50 bp, Artificial
  Synthetic oligonucleotide
tgcggttgcaaacgctgcacttgtaaaactccttatcgaacacaatactc

SEQ ID NO: 469549 - DNA, 60 bp, Artificial
  Synthetic oligonucleotide
tgcggtttgccccctatccgctcctcatggccccaggttagagagcttttgcatttgcga

SEQ ID NO: 469550 - DNA, 55 bp, Artificial
  Synthetic oligonucleotide
tgcggttttctagtccggctaaggagaagtgcaagctactagatgcaagcgtcta

SEQ ID NO: 469551 - DNA, 52 bp, Artificial
  Synthetic oligonucleotide
tgcgtaaactatcatcggtttaatagattcaccgaagtaagatagtttggct

SEQ ID NO: 469552 - DNA, 59 bp, Artificial
  Synthetic oligonucleotide
tgcgtaaaggtacaaagattgggtatagagggcagccgtacgaacgattcatatccagc

SEQ ID NO: 469553 - DNA, 60 bp, Artificial
  Synthetic oligonucleotide
tgcgtaacatcagttggtgccaagaacagtttttgttgaaggcttacatgtcgcaagatg

SEQ ID NO: 469554 - DNA, 55 bp, Artificial
  Synthetic oligonucleotide
tgcgtaagcctgcagcacgagacatccattacagcgtacttggtccggctatccc

SEQ ID NO: 469555 - DNA, 60 bp, Artificial
  Synthetic oligonucleotide
tgcgtaagctaatcgacatcttctctaactgcctcgtcccagacattgtattttccgttc

SEQ ID NO: 469556 - DNA, 55 bp, Artificial
  Synthetic oligonucleotide
tgcgtaccaaactaaaatcacaaatcatgaaacacttgttcatggcggttctcag

SEQ ID NO: 469557 - DNA, 58 bp, Artificial
  Synthetic oligonucleotide
tgcgtaccagaaatccgcatggtaggagcgtcctacatggaccgaagccccggaggcc

SEQ ID NO: 469558 - DNA, 60 bp, Artificial
  Synthetic oligonucleotide
tgcgtacccaataatgagtggtggtgcggtgacactatcaccagctggagtcacgttgtc

SEQ ID NO: 469559 - DNA, 60 bp, Artificial
  Synthetic oligonucleotide
tgcgtacctgaggctgaaatgggctgtgcaactttagacaacacgccgtcaagtgcggag

SEQ ID NO: 469560 - DNA, 55 bp, Artificial
  Synthetic oligonucleotide
tgcgtacgaaaacgcatagtgtttaccgatccacttaaatagaatcggggacaac

SEQ ID NO: 469561 - DNA, 60 bp, Artificial
  Synthetic oligonucleotide
tgcgtacgatctctcagagaatacgaaatcgtcattgttgatgattcctgtgttttctca

SEQ ID NO: 469562 - DNA, 60 bp, Artificial
  Synthetic oligonucleotide
tgcgtacgctagacttaaatattactcaggcactggaagtgaacaggactacattcaagc

SEQ ID NO: 469563 - DNA, 53 bp, Artificial
  Synthetic oligonucleotide
tgcgtacgctagtgggagccatacaagataaatgcagggacacggttagccgc

SEQ ID NO: 469564 - DNA, 58 bp, Artificial
  Synthetic oligonucleotide
tgcgtacgtcgactgtgaacctgactccctgcttggttgtcccgctccttgtcatttt

SEQ ID NO: 469565 - DNA, 60 bp, Artificial
  Synthetic oligonucleotide
tgcgtactaaccagaagcttgcagctcgcgcttttgtggggtctagtgctccgagtgttg

SEQ ID NO: 469566 - DNA, 59 bp, Artificial
  Synthetic oligonucleotide
tgcgtactacacacagttggacgacgctgtatgggaggttcataagaccgcccctccag

SEQ ID NO: 469567 - DNA, 60 bp, Artificial
  Synthetic oligonucleotide
tgcgtactgcccattctaagggctggtatgtcgtattcgatactcttactctagccgatg

SEQ ID NO: 469568 - DNA, 60 bp, Artificial
  Synthetic oligonucleotide
tgcgtactgggatggatcccaggatgtgttctctgatgcaaggctcaactctcccgagga

SEQ ID NO: 469569 - DNA, 59 bp, Artificial
  Synthetic oligonucleotide
tgcgtactttgctcaaaggtgaatttccggctgtttgtgctttggccaatcctgcctta

SEQ ID NO: 469570 - DNA, 59 bp, Artificial
  Synthetic oligonucleotide
tgcgtagacggaagtgacccttctcagcgtcatccatccatgatacgatcccaccatta

SEQ ID NO: 469571 - DNA, 57 bp, Artificial
  Synthetic oligonucleotide
tgcgtagatccgtcgaagggcggacgcaagccggcacgcctaatagtttacccagac

SEQ ID NO: 469572 - DNA, 60 bp, Artificial
  Synthetic oligonucleotide
tgcgtagcagggagaaccattacaatgccggagttgtttgtagtgtgatttcatcacggt

SEQ ID NO: 469573 - DNA, 50 bp, Artificial
  Synthetic oligonucleotide
tgcgtagcattattaatggtcgtctgcttaatggcttgaaacgtgtggaa

SEQ ID NO: 469574 - DNA, 51 bp, Artificial
  Synthetic oligonucleotide
tgcgtagcctatcagcgcttacacaggccacagggctggcatcgtctggac

SEQ ID NO: 469575 - DNA, 60 bp, Artificial
  Synthetic oligonucleotide
tgcgtagcgtttcgctccacacaaccccagtgtagatcaggtcgatgagtcaccgcgttc

SEQ ID NO: 469576 - DNA, 59 bp, Artificial
  Synthetic oligonucleotide
tgcgtagggaactgtgcgtactcgtatggcagctattggaccggggcgaagcctggggc

SEQ ID NO: 469577 - DNA, 59 bp, Artificial
  Synthetic oligonucleotide
tgcgtagtttcccccaactgcgtctactaggtgccataatccgtgaccctatcatgacc

SEQ ID NO: 469578 - DNA, 60 bp, Artificial
  Synthetic oligonucleotide
tgcgtatactaacgtcaacgttacgtgagactgaagagattgcaatgaggtgctataatg

SEQ ID NO: 469579 - DNA, 60 bp, Artificial
  Synthetic oligonucleotide
tgcgtatcgagtctgcggtttgcgagtcagtgcttgctgatgctagtgagacgatgttgg

SEQ ID NO: 469580 - DNA, 60 bp, Artificial
  Synthetic oligonucleotide
tgcgtatctgtgcaatagcaggactgatattagcactgattctagcaatagttgtatgga

SEQ ID NO: 469581 - DNA, 58 bp, Artificial
  Synthetic oligonucleotide
tgcgtattactagggtaacagaacggctcgtggtactagctggatccgaacgtgctta

SEQ ID NO: 469582 - DNA, 60 bp, Artificial
  Synthetic oligonucleotide
tgcgtattgcctttccacgggctgcgtggtcatagtgggcaggattatcttgtccgggaa

SEQ ID NO: 469583 - DNA, 60 bp, Artificial
  Synthetic oligonucleotide
tgcgtattgcttgtcaacaggttgcgtagtcatagtgggcagggttgtcttgtccgggaa

SEQ ID NO: 469584 - DNA, 55 bp, Artificial
  Synthetic oligonucleotide
tgcgtcaactaattcaaacacacttagccctccaacaattttaaatccagaagct

SEQ ID NO: 469585 - DNA, 60 bp, Artificial
  Synthetic oligonucleotide
tgcgtcaagcggtgcatcaaaacttgaattctcacaagatcctagcaagtttactgaccc

SEQ ID NO: 469586 - DNA, 54 bp, Artificial
  Synthetic oligonucleotide
tgcgtcaccactgaaaacaaatcgcagtgttgggtcccggtttcccccaccttg

SEQ ID NO: 469587 - DNA, 55 bp, Artificial
  Synthetic oligonucleotide
tgcgtcacccacttcacagtttccttccggtgtgttttatgtgtggtctcgtgag

SEQ ID NO: 469588 - DNA, 59 bp, Artificial
  Synthetic oligonucleotide
tgcgtcaccgagtcaataactaacgttttgtagtcgtgctcttcgtgaactagcgcgcc

SEQ ID NO: 469589 - DNA, 51 bp, Artificial
  Synthetic oligonucleotide
tgcgtcacctgtggagtcgcctacggcggttggcggagggcacctcacgaa

SEQ ID NO: 469590 - DNA, 60 bp, Artificial
  Synthetic oligonucleotide
tgcgtcagatgtacgatcaagccccactctgacggacctagatgagattgcttacgaagt

SEQ ID NO: 469591 - DNA, 60 bp, Artificial
  Synthetic oligonucleotide
tgcgtcagggcatcaatagggtgacgtgcttcagacggctcagggaacccatcaggagat

SEQ ID NO: 469592 - DNA, 58 bp, Artificial
  Synthetic oligonucleotide
tgcgtcattactactatacacactcatgctatgtgggcgtatcggcggagcaagctgc

SEQ ID NO: 469593 - DNA, 58 bp, Artificial
  Synthetic oligonucleotide
tgcgtccactcaagggcacggcacgtcagaatatcgccggtgcaatcccggaaggcgt

SEQ ID NO: 469594 - DNA, 56 bp, Artificial
  Synthetic oligonucleotide
tgcgtccatggcttggtacgcttccctctggccaccgggggacgaccatcgttaac

SEQ ID NO: 469595 - DNA, 60 bp, Artificial
  Synthetic oligonucleotide
tgcgtccgaagtgctcgtgttgtctagaatattgggcctgtcgttacttgtgtatcgcat

SEQ ID NO: 469596 - DNA, 60 bp, Artificial
  Synthetic oligonucleotide
tgcgtcctggccatcctgactgcgctactgtcgctgctattttagctagattgatcgatt

SEQ ID NO: 469597 - DNA, 60 bp, Artificial
  Synthetic oligonucleotide
tgcgtcgatgctatgaaatgctgcgatttaacgatgacaccaacttgataattaaaatgc

SEQ ID NO: 469598 - DNA, 55 bp, Artificial
  Synthetic oligonucleotide
tgcgtcgccagtaccgcctgtcccagccgcagatctaccagattattgcccgcca

SEQ ID NO: 469599 - DNA, 57 bp, Artificial
  Synthetic oligonucleotide
tgcgtcgcggggtaaccacgtatcccctacgcattacgtcccagagacagacgcttc

SEQ ID NO: 469600 - DNA, 58 bp, Artificial
  Synthetic oligonucleotide
tgcgtcggcggagcagtgtatcagcactccgttccctgacacttcaatggacgctgat

SEQ ID NO: 469601 - DNA, 55 bp, Artificial
  Synthetic oligonucleotide
tgcgtcggttggaggtcgagcatgcccagaagtttatcacgagactctacagctg

SEQ ID NO: 469602 - DNA, 57 bp, Artificial
  Synthetic oligonucleotide
tgcgtcgtgacgatagacgtcggtaggcctatcggactagcctccgggaagactaac

SEQ ID NO: 469603 - DNA, 56 bp, Artificial
  Synthetic oligonucleotide
tgcgtcgttgatggcttttacagctgccgtcaccagcccactaaccactagccaga

SEQ ID NO: 469604 - DNA, 60 bp, Artificial
  Synthetic oligonucleotide
tgcgtctaaggaacaagctatgatcaagcgtttctggaggttgaatcatcatgtcacata

SEQ ID NO: 469605 - DNA, 56 bp, Artificial
  Synthetic oligonucleotide
tgcgtctcctcgtttagacttacgtaggagtctttgaacttgagaaacttgtgtaa

SEQ ID NO: 469606 - DNA, 59 bp, Artificial
  Synthetic oligonucleotide
tgcgtctgatgacaagctgatcagtctggcttctaagaatcataagaacccagacgctg

SEQ ID NO: 469607 - DNA, 53 bp, Artificial
  Synthetic oligonucleotide
tgcgtctggcggcacgcttaatgacgttgaggcagtcattgagtcgctgacgg

SEQ ID NO: 469608 - DNA, 60 bp, Artificial
  Synthetic oligonucleotide
tgcgtgaaccagggtggacaactgaaggtgcattccatggggataacgagacatcggata

SEQ ID NO: 469609 - DNA, 57 bp, Artificial
  Synthetic oligonucleotide
tgcgtgaacctggtctccgatggaaggaaggttggatccaagacggtggactcccgc

SEQ ID NO: 469610 - DNA, 60 bp, Artificial
  Synthetic oligonucleotide
tgcgtgacgtattggggacatttgataccgttcagataataaaacttctgccatttgcag

SEQ ID NO: 469611 - DNA, 60 bp, Artificial
  Synthetic oligonucleotide
tgcgtgactccggactggaggacgtcgcgaaagtcatcattacgatgagacgtgatcatc

SEQ ID NO: 469612 - DNA, 60 bp, Artificial
  Synthetic oligonucleotide
tgcgtgactgtcaacgaacaaatcgcagtggcgcgcgagtgcttaacctgtatgacgtga

SEQ ID NO: 469613 - DNA, 60 bp, Artificial
  Synthetic oligonucleotide
tgcgtgagaactttgacccttcaaccatgcatcttgtgcgtaccaactcaactgcacaac

SEQ ID NO: 469614 - DNA, 60 bp, Artificial
  Synthetic oligonucleotide
tgcgtgagggcctcgcagcgtacaccttgaccccgcgccctattattcatgcagtggctc

SEQ ID NO: 469615 - DNA, 60 bp, Artificial
  Synthetic oligonucleotide
tgcgtgaggtgtggttatactcctaagtctctcattgatcagagagaatgggaatgttca

SEQ ID NO: 469616 - DNA, 60 bp, Artificial
  Synthetic oligonucleotide
tgcgtgagtatacatggtcacacatcttagaaggtagaccattgatcggagcaacattac

SEQ ID NO: 469617 - DNA, 60 bp, Artificial
  Synthetic oligonucleotide
tgcgtgataacaggtgatgttctgaatgggcaactcaaagaaccagtttactctacaaag

SEQ ID NO: 469618 - DNA, 60 bp, Artificial
  Synthetic oligonucleotide
tgcgtgatagtgagtgtatctttaggtttcgcaatcgcagcatatttttattcatcggga

SEQ ID NO: 469619 - DNA, 58 bp, Artificial
  Synthetic oligonucleotide
tgcgtgcaatgttgcatacacactcaaaacagatccactgtcaatcacacgaacaatt

SEQ ID NO: 469620 - DNA, 60 bp, Artificial
  Synthetic oligonucleotide
tgcgtgcattgaattattgtgctggctagacttcatggcgcctggcaccgaatcctgcct

SEQ ID NO: 469621 - DNA, 60 bp, Artificial
  Synthetic oligonucleotide
tgcgtgccacccgagagaccctccttcaagctgattgcaaaatcacttgccctggaggca

SEQ ID NO: 469622 - DNA, 55 bp, Artificial
  Synthetic oligonucleotide
tgcgtgcctggatgcgggatgtgtgagccgcgcggcggctagtggtttaatcatc

SEQ ID NO: 469623 - DNA, 60 bp, Artificial
  Synthetic oligonucleotide
tgcgtgcgcacacggctggctatgtcctatcatagctgggggccccggagtgcgaaaccc

SEQ ID NO: 469624 - DNA, 55 bp, Artificial
  Synthetic oligonucleotide
tgcgtggaacagggatgtacaaccaaacctctttcgagagtatggccggacttac

SEQ ID NO: 469625 - DNA, 58 bp, Artificial
  Synthetic oligonucleotide
tgcgtggattcgtacccggggatctgatcccctgtgtgctcgtggaggtaccgtgaga

SEQ ID NO: 469626 - DNA, 57 bp, Artificial
  Synthetic oligonucleotide
tgcgtggcgcttcctccctggatctttcagggtggtttacgtcaggctacagcgggg

SEQ ID NO: 469627 - DNA, 60 bp, Artificial
  Synthetic oligonucleotide
tgcgtggcggccaacccagctcttgctgggacgcccttttatagacatggtgtgaagact

SEQ ID NO: 469628 - DNA, 57 bp, Artificial
  Synthetic oligonucleotide
tgcgtgggatggacaggccgcattacaaattcacaaccctacacagcagaatgcgat

SEQ ID NO: 469629 - DNA, 60 bp, Artificial
  Synthetic oligonucleotide
tgcgtgggcccggacagaggtcatagtacgtcccatgatagcggactcagcatgagtcga

SEQ ID NO: 469630 - DNA, 57 bp, Artificial
  Synthetic oligonucleotide
tgcgtggtaacacggttgagggaacttatttcaacctaggacggcgcgatgtgcttg

SEQ ID NO: 469631 - DNA, 57 bp, Artificial
  Synthetic oligonucleotide
tgcgtggtccccaagcttcagtcgttgtcagtatgtgggacccacttgtaaacgagt

SEQ ID NO: 469632 - DNA, 60 bp, Artificial
  Synthetic oligonucleotide
tgcgtgtatgttactgatcctgatgagatatacgactccctgaatatgaaagctgcagtt

SEQ ID NO: 469633 - DNA, 60 bp, Artificial
  Synthetic oligonucleotide
tgcgtgtattggctcctgaagtggacacttcctcttgtatccagaaggggctgtcgacat

SEQ ID NO: 469634 - DNA, 55 bp, Artificial
  Synthetic oligonucleotide
tgcgtgtgagcacaccaggtgatggtaagtgcggtttgcacgcgattgctcaatc

SEQ ID NO: 469635 - DNA, 60 bp, Artificial
  Synthetic oligonucleotide
tgcgtgtggtggcttcagtacttcctgaccagagcagaagcgcaactgcacgtgtgggtt

SEQ ID NO: 469636 - DNA, 59 bp, Artificial
  Synthetic oligonucleotide
tgcgtgtgtgggcaccaacaagtgggtcggctggactcccaacggagcgccggagctta

SEQ ID NO: 469637 - DNA, 60 bp, Artificial
  Synthetic oligonucleotide
tgcgttaaggcactcgagcgtgatggagtgtacgctgtcctgagaggggaaacgagataa

SEQ ID NO: 469638 - DNA, 58 bp, Artificial
  Synthetic oligonucleotide
tgcgttaagtcatttaaatcgtcgatatggtctggaatagataatgcacgaccgtcgt

SEQ ID NO: 469639 - DNA, 60 bp, Artificial
  Synthetic oligonucleotide
tgcgttaatcgggacttgttgtctgtattctatgacgcagtggtctattttcatgcagct

SEQ ID NO: 469640 - DNA, 57 bp, Artificial
  Synthetic oligonucleotide
tgcgttaggctctaagtcaaccactaaggcacctatcgttgccgctaaaggaaccaa

SEQ ID NO: 469641 - DNA, 59 bp, Artificial
  Synthetic oligonucleotide
tgcgttagtaaatgccacaccgacaggggctcagtctctacaactaagccctttcagaa

SEQ ID NO: 469642 - DNA, 60 bp, Artificial
  Synthetic oligonucleotide
tgcgttagtgatgttactcgaggaactggactcacacatcgcgtaggaaagcgattttgt

SEQ ID NO: 469643 - DNA, 60 bp, Artificial
  Synthetic oligonucleotide
tgcgttcacagacgttgatgccacagtcccaaatctagaagcctatccccacaagttggt

SEQ ID NO: 469644 - DNA, 60 bp, Artificial
  Synthetic oligonucleotide
tgcgttcccctgtgcgtgaatccatgaccgtagcaatttatgtgtacgtaaattgtgcag

SEQ ID NO: 469645 - DNA, 55 bp, Artificial
  Synthetic oligonucleotide
tgcgttcctttaattccaggatacttaccctgaagttcttgtagtatcatcgcat

SEQ ID NO: 469646 - DNA, 57 bp, Artificial
  Synthetic oligonucleotide
tgcgttcgagtttgattcgttgtaaaaattactcagtaagcgtgattttcattatag

SEQ ID NO: 469647 - DNA, 60 bp, Artificial
  Synthetic oligonucleotide
tgcgttcgcaagtgcaaacgatgataacaaaggtgagtagaggattttgtcatgatttgg

SEQ ID NO: 469648 - DNA, 60 bp, Artificial
  Synthetic oligonucleotide
tgcgttcgccatctattccaagtgcacgcagcccatgccccctcagagccttcacgattc

SEQ ID NO: 469649 - DNA, 60 bp, Artificial
  Synthetic oligonucleotide
tgcgttctccaattctgactctgtgtccgcttgattcagtccaactgtacttctggaagc

SEQ ID NO: 469650 - DNA, 60 bp, Artificial
  Synthetic oligonucleotide
tgcgttgaccgaagatcctgatgaaggcacagctggagttgagtccgctgttctgagagg

SEQ ID NO: 469651 - DNA, 60 bp, Artificial
  Synthetic oligonucleotide
tgcgttgagcaactccttgctgcgtcaccataacatggtctacgccacaacaacccgcag

SEQ ID NO: 469652 - DNA, 60 bp, Artificial
  Synthetic oligonucleotide
tgcgttgataatgactaaggtaagtactttaactgattcagggttagcagataacgcatc

SEQ ID NO: 469653 - DNA, 60 bp, Artificial
  Synthetic oligonucleotide
tgcgttgattggcttcctcctcttagctggtaggtcttgtggctcgaccaccaatgtcaa

SEQ ID NO: 469654 - DNA, 60 bp, Artificial
  Synthetic oligonucleotide
tgcgttgattggtggaatatgcattacctaggttctagcaaattttcaccagtgctagca

SEQ ID NO: 469655 - DNA, 60 bp, Artificial
  Synthetic oligonucleotide
tgcgttgcacacttgcaacctttgagaagtcaagaccagacaaaagggctctggtatcat

SEQ ID NO: 469656 - DNA, 60 bp, Artificial
  Synthetic oligonucleotide
tgcgttgcgctcagcactcaaccccagagtgtagcttaggtcgatgagtctggacgatcc

SEQ ID NO: 469657 - DNA, 60 bp, Artificial
  Synthetic oligonucleotide
tgcgttgggtgaacgccgtgtgcggcgacgcataatccctcagatgtcacaattggcaga

SEQ ID NO: 469658 - DNA, 60 bp, Artificial
  Synthetic oligonucleotide
tgcgttgtctctgaggcgcgagacctgagagactcgtaagtcacggacgcgacagcagac

SEQ ID NO: 469659 - DNA, 55 bp, Artificial
  Synthetic oligonucleotide
tgcgttgtgtcaccagtagactctgacgtcttgggtgcactgtcctgcctaacag

SEQ ID NO: 469660 - DNA, 60 bp, Artificial
  Synthetic oligonucleotide
tgcgtttaacgccttggcatatgaatcattagcagattggcagcctcctctagcacttct

SEQ ID NO: 469661 - DNA, 56 bp, Artificial
  Synthetic oligonucleotide
tgcgtttagctcatagattcaggaccgcaaacactccggtaagagggtttaagtta

SEQ ID NO: 469662 - DNA, 52 bp, Artificial
  Synthetic oligonucleotide
tgcgtttcaaaaggttaagacatttaactgaaagtcgtaaatcggaattagg

SEQ ID NO: 469663 - DNA, 60 bp, Artificial
  Synthetic oligonucleotide
tgcgtttcacggacagcatactgacaatcgtcaacatacggtggttaatttcttgcaacg

SEQ ID NO: 469664 - DNA, 60 bp, Artificial
  Synthetic oligonucleotide
tgcgtttcgtttctctctatatgcacgacatgctcttttgccacgtatcctgattaaacg

SEQ ID NO: 469665 - DNA, 60 bp, Artificial
  Synthetic oligonucleotide
tgcgttttattatatctgatgaatgctgaaagcttacattgatatgtcgtgggatgacac

SEQ ID NO: 469666 - DNA, 54 bp, Artificial
  Synthetic oligonucleotide
tgctaaaaacagaaagggtttcctcataaagagaataccgatgaaagtaaaaga

SEQ ID NO: 469667 - DNA, 59 bp, Artificial
  Synthetic oligonucleotide
tgctaaaacgcctctttaactgccctacaatgcatgttgaaaagcgccgtggcacccaa

SEQ ID NO: 469668 - DNA, 57 bp, Artificial
  Synthetic oligonucleotide
tgctaaaagaccccgcattactgcaaatacagacaatgttactagtgaaaccgggga

SEQ ID NO: 469669 - DNA, 55 bp, Artificial
  Synthetic oligonucleotide
tgctaaaagattccacaatgggcagtggaatattgagccatcaaaggttgtagtt

SEQ ID NO: 469670 - DNA, 58 bp, Artificial
  Synthetic oligonucleotide
tgctaaaatcaacgaagttgtattttcttagcaatgacgaacatagttttataatgcc

SEQ ID NO: 469671 - DNA, 55 bp, Artificial
  Synthetic oligonucleotide
tgctaaaatcccgatcgctaaggctaacgtaggaaaaactcgactattcaccgct

SEQ ID NO: 469672 - DNA, 60 bp, Artificial
  Synthetic oligonucleotide
tgctaaacagcgagatattgacagaaaacagagccacgctggaccgcctcaaaactctcg

SEQ ID NO: 469673 - DNA, 51 bp, Artificial
  Synthetic oligonucleotide
tgctaaacccgagggtgttttgggcctctccgggaggggtacccagccact

SEQ ID NO: 469674 - DNA, 60 bp, Artificial
  Synthetic oligonucleotide
tgctaaactccccaaacattgaggcgtgtggttatagtgacagggtaatgcagctaactc

SEQ ID NO: 469675 - DNA, 50 bp, Artificial
  Synthetic oligonucleotide
tgctaaactctaacacggatcactacaaacgatactgcgactactatctc

SEQ ID NO: 469676 - DNA, 53 bp, Artificial
  Synthetic oligonucleotide
tgctaaagtgcccagttttgttactgtggcaaacagtgacacgactagcgagc

SEQ ID NO: 469677 - DNA, 54 bp, Artificial
  Synthetic oligonucleotide
tgctaaatcaattagcaggccgcatgatcccaaaaggggctgtaacatggtcag

SEQ ID NO: 469678 - DNA, 54 bp, Artificial
  Synthetic oligonucleotide
tgctaaatgaaaactactgtgtattgtcttcttcggggggggggcagttgaggt

SEQ ID NO: 469679 - DNA, 60 bp, Artificial
  Synthetic oligonucleotide
tgctaaatgaaaatattgctggggggcctgtacctcacaggaaccgagatgcggctctga

SEQ ID NO: 469680 - DNA, 60 bp, Artificial
  Synthetic oligonucleotide
tgctaaatggaaatttcaatattgctcagtgtcgtgccttcccggtcaatcagtatgggc

SEQ ID NO: 469681 - DNA, 60 bp, Artificial
  Synthetic oligonucleotide
tgctaacaagtatctccgtaagggtgccgtgtatgataaactcgaagcatggaagttggc

SEQ ID NO: 469682 - DNA, 54 bp, Artificial
  Synthetic oligonucleotide
tgctaacacagtatcacaggcctgattacatatggttttctgagttttgctgtc

SEQ ID NO: 469683 - DNA, 56 bp, Artificial
  Synthetic oligonucleotide
tgctaacaccaactgtcattacgcgtatgctacacgacgatctgtatgtgaaggcg

SEQ ID NO: 469684 - DNA, 60 bp, Artificial
  Synthetic oligonucleotide
tgctaacatgccgtcagcagaaccaagcagaaagactctgatgtcctccacagcaggccc

SEQ ID NO: 469685 - DNA, 60 bp, Artificial
  Synthetic oligonucleotide
tgctaacatggctaggattaaactcaaggagcacgtccctttcgatgacgtgcattgcag

SEQ ID NO: 469686 - DNA, 58 bp, Artificial
  Synthetic oligonucleotide
tgctaaccactgcagtgatgcgatgaacattatgtttgaggaggtgtttaacacggac

SEQ ID NO: 469687 - DNA, 60 bp, Artificial
  Synthetic oligonucleotide
tgctaaccatgaattcgaagagttggcttgtgaacagagactggttccatgacctaaacc

SEQ ID NO: 469688 - DNA, 55 bp, Artificial
  Synthetic oligonucleotide
tgctaacccaagggtagatgtaggggccatctatcgaagatggatcatcctaggg

SEQ ID NO: 469689 - DNA, 60 bp, Artificial
  Synthetic oligonucleotide
tgctaaccccgagtcaggagttcatgactcagaggcatatgaacggcgaagacatgcggt

SEQ ID NO: 469690 - DNA, 58 bp, Artificial
  Synthetic oligonucleotide
tgctaaccctccttatatttatactattaagcatactgagtaaaacttacatatgtta

SEQ ID NO: 469691 - DNA, 57 bp, Artificial
  Synthetic oligonucleotide
tgctaacctacgagttaaaaatgctccgccggtagtatggaagttctctgatcttat

SEQ ID NO: 469692 - DNA, 56 bp, Artificial
  Synthetic oligonucleotide
tgctaacgagttatgccaaaggtgatgtggtatgtccccattcgggtggtgcgttg

SEQ ID NO: 469693 - DNA, 60 bp, Artificial
  Synthetic oligonucleotide
tgctaacgctggaccctgcgcatactccagtattggagtaggtgtcttgtggttggtgta

SEQ ID NO: 469694 - DNA, 57 bp, Artificial
  Synthetic oligonucleotide
tgctaacttttcccctcgtggaggtatgggcccaaaattcaacaaggccgctgcatg

SEQ ID NO: 469695 - DNA, 52 bp, Artificial
  Synthetic oligonucleotide
tgctaacttttgctacgtgggcaccccaagtgggtcgcttgtaacaagtgat

SEQ ID NO: 469696 - DNA, 52 bp, Artificial
  Synthetic oligonucleotide
tgctaagacacagcagttaagaggggttcaattcccccccgaaccggagggt

SEQ ID NO: 469697 - DNA, 60 bp, Artificial
  Synthetic oligonucleotide
tgctaagacttttgtatgaagcatcggatttgagagtagtaaatcaagttttagcgctgg

SEQ ID NO: 469698 - DNA, 50 bp, Artificial
  Synthetic oligonucleotide
tgctaagcaaagagtattcggacaggcagggcaaaactcccttgacttta

SEQ ID NO: 469699 - DNA, 60 bp, Artificial
  Synthetic oligonucleotide
tgctaagcgacagcgactcggaggggacacagttcagcagcccgactctacacaaggaca

SEQ ID NO: 469700 - DNA, 59 bp, Artificial
  Synthetic oligonucleotide
tgctaaggaacaggcgataattagaggattttatcgtgtaaataattatgtagtgtaca

SEQ ID NO: 469701 - DNA, 59 bp, Artificial
  Synthetic oligonucleotide
tgctaaggacatagttgcactgcgagtgtgtttgcgacccaaatctataaagttttggg

SEQ ID NO: 469702 - DNA, 60 bp, Artificial
  Synthetic oligonucleotide
tgctaaggcccaaatctcagccatgcatcgaggggtacaatccgtatggccaacaactgg

SEQ ID NO: 469703 - DNA, 54 bp, Artificial
  Synthetic oligonucleotide
tgctaaggcgctcgaagaccaagcgggcaccaatttggaaatcacaattgttac

SEQ ID NO: 469704 - DNA, 57 bp, Artificial
  Synthetic oligonucleotide
tgctaaggctctggatgatcttactaagggtgaattgcaggtgttgtctaaccagta

SEQ ID NO: 469705 - DNA, 55 bp, Artificial
  Synthetic oligonucleotide
tgctaagggttttgcacccttttccaaagacaacggaataagaatcggatcgaga

SEQ ID NO: 469706 - DNA, 58 bp, Artificial
  Synthetic oligonucleotide
tgctaagttccaccaaaacccaggaataataacaggttcagcagtaggatgtgaccca

SEQ ID NO: 469707 - DNA, 55 bp, Artificial
  Synthetic oligonucleotide
tgctaatacatatgtttgtcggttttgcatacaagtacacatatgtgtccgcatg

SEQ ID NO: 469708 - DNA, 50 bp, Artificial
  Synthetic oligonucleotide
tgctaatagatttcagagaactaaacaaggtaacccaagaatttacagag

SEQ ID NO: 469709 - DNA, 51 bp, Artificial
  Synthetic oligonucleotide
tgctaatagggatggacctgaagtgctttggcaacactgctgttgcgaagt

SEQ ID NO: 469710 - DNA, 60 bp, Artificial
  Synthetic oligonucleotide
tgctaatgatgttttatggctctctcttaccgctgccgagtatgaccagactacgtatgg

SEQ ID NO: 469711 - DNA, 54 bp, Artificial
  Synthetic oligonucleotide
tgctaatgcgatgtattccgctggtatcaacgcggcaaaaggtttgataaacgg

SEQ ID NO: 469712 - DNA, 51 bp, Artificial
  Synthetic oligonucleotide
tgctaatgcttatcattatcacttaggaggtatagagggacttcagcagaa

SEQ ID NO: 469713 - DNA, 60 bp, Artificial
  Synthetic oligonucleotide
tgctaatgtggaagtttgacagccgcttagcattccatcacacggcccgagagctgcatc

SEQ ID NO: 469714 - DNA, 60 bp, Artificial
  Synthetic oligonucleotide
tgctaattccaagtcacagaccaatagacaagtcatagttgacaataacaattggtctgg

SEQ ID NO: 469715 - DNA, 60 bp, Artificial
  Synthetic oligonucleotide
tgctaattccgaatccacaatggcattagcctatcttgggatgtatgacgacttttctaa

SEQ ID NO: 469716 - DNA, 54 bp, Artificial
  Synthetic oligonucleotide
tgctaattgatggccttatcgaatttggctctactgacgccgaaattgatgaca

SEQ ID NO: 469717 - DNA, 55 bp, Artificial
  Synthetic oligonucleotide
tgctacaaatatcggcaccttaagatgaaaaacgaattctaccatttcaaatggc

SEQ ID NO: 469718 - DNA, 51 bp, Artificial
  Synthetic oligonucleotide
tgctacaaatgcccgaggtaccatcaccttcattccattctcgctgaccca

SEQ ID NO: 469719 - DNA, 60 bp, Artificial
  Synthetic oligonucleotide
tgctacaactgaagttactgatgtaacttatgctgctactgctactccaaatcaagctgt

SEQ ID NO: 469720 - DNA, 60 bp, Artificial
  Synthetic oligonucleotide
tgctacaattgcgcgtacagataccaccattttgttgcgaacgattaatgatactacaca

SEQ ID NO: 469721 - DNA, 60 bp, Artificial
  Synthetic oligonucleotide
tgctacacacagagcacaatggaatgctgtgtgcaacaaacctggggcaccctctcatcc

SEQ ID NO: 469722 - DNA, 52 bp, Artificial
  Synthetic oligonucleotide
tgctacacatcctgtagcagcctttatgagccacagggtaacggcagcaata

SEQ ID NO: 469723 - DNA, 59 bp, Artificial
  Synthetic oligonucleotide
tgctacacccagaatgctcactcccgcctggtgtcggggggacggagtggtgcgattta

SEQ ID NO: 469724 - DNA, 53 bp, Artificial
  Synthetic oligonucleotide
tgctacagtttggcgcgactgtacgacatgagcgtctacgtcgagaacctaaa

SEQ ID NO: 469725 - DNA, 55 bp, Artificial
  Synthetic oligonucleotide
tgctacatatacgtatgatctggtcccgaatctacgagactgctccattgcagtc

SEQ ID NO: 469726 - DNA, 52 bp, Artificial
  Synthetic oligonucleotide
tgctaccaacccagattatgctcctcttaacattcgagtatctctttatgac

SEQ ID NO: 469727 - DNA, 51 bp, Artificial
  Synthetic oligonucleotide
tgctaccaatcgccagtcagccgcctcctgctgctaccaatcgccagtcag

SEQ ID NO: 469728 - DNA, 60 bp, Artificial
  Synthetic oligonucleotide
tgctaccaccgattgagggacttcatattgattgcagtgagagcggtggagcttctggga

SEQ ID NO: 469729 - DNA, 52 bp, Artificial
  Synthetic oligonucleotide
tgctaccatacaaagctgtgacggctcacggctattgtggctctgttatggt

SEQ ID NO: 469730 - DNA, 60 bp, Artificial
  Synthetic oligonucleotide
tgctacccatatgacgtgccagactatgcatcactcagatctctagtggcctcatcagga

SEQ ID NO: 469731 - DNA, 60 bp, Artificial
  Synthetic oligonucleotide
tgctaccgacggtcattacgtcaacaacgtcacgactgtcaatgattcaacactgaaagt

SEQ ID NO: 469732 - DNA, 60 bp, Artificial
  Synthetic oligonucleotide
tgctacctgcaccgtgcaggcgtaccactgggagaggtagacttgaactcaaagcaggac

SEQ ID NO: 469733 - DNA, 60 bp, Artificial
  Synthetic oligonucleotide
tgctacgacaataggctaatgcatatgcaaagcgatcccgattctaagaaatcgcgtaaa

SEQ ID NO: 469734 - DNA, 55 bp, Artificial
  Synthetic oligonucleotide
tgctacgagcgatagcagcaatcaagatattgtatcaaagcagtgagtacattgg

SEQ ID NO: 469735 - DNA, 60 bp, Artificial
  Synthetic oligonucleotide
tgctacgaggatttagcagctgaagtgccagctgaacaacactcagaggaggagcttatt

SEQ ID NO: 469736 - DNA, 60 bp, Artificial
  Synthetic oligonucleotide
tgctacgagggatgacccacggcaggtatttccagatggcccttctcaagcttggagccc

SEQ ID NO: 469737 - DNA, 60 bp, Artificial
  Synthetic oligonucleotide
tgctacgcaggagtggctctctcgcatgtgggatagggttgacatgctgacttggcgcaa

SEQ ID NO: 469738 - DNA, 55 bp, Artificial
  Synthetic oligonucleotide
tgctacgggagaacttttgtcaatccttcgtagtcttggtaacgatgcgaacgtg

SEQ ID NO: 469739 - DNA, 54 bp, Artificial
  Synthetic oligonucleotide
tgctacgtaggtggtgtaaggtagaccggaacaaattacctgagcggtgaatcc

SEQ ID NO: 469740 - DNA, 60 bp, Artificial
  Synthetic oligonucleotide
tgctacgtcactaacccacgtgtcctctacaggccaatcgcagtctatgtcgtgcacttc

SEQ ID NO: 469741 - DNA, 55 bp, Artificial
  Synthetic oligonucleotide
tgctacgtcgtataatgtgaggacattcgactcattcctcattaatcgcgtgccg

SEQ ID NO: 469742 - DNA, 57 bp, Artificial
  Synthetic oligonucleotide
tgctacgttaccacgaaatttaaacgcgtcgcagatttcttttatacacgatcggca

SEQ ID NO: 469743 - DNA, 54 bp, Artificial
  Synthetic oligonucleotide
tgctactactaataccagtagtactaataccagtagtataatggagggaggaga

SEQ ID NO: 469744 - DNA, 55 bp, Artificial
  Synthetic oligonucleotide
tgctactagcacccggattagttaagccggataatgttaatttcgatctattatc

SEQ ID NO: 469745 - DNA, 55 bp, Artificial
  Synthetic oligonucleotide
tgctactatggaatagaggagatgccagaaacctaaatgaacttaaaatggagtg

SEQ ID NO: 469746 - DNA, 60 bp, Artificial
  Synthetic oligonucleotide
tgctactattagtaggagacttaggctgaaagaaatgacaacacaaactgaagggatgaa

SEQ ID NO: 469747 - DNA, 60 bp, Artificial
  Synthetic oligonucleotide
tgctactctaaccttgattggctgttcaggatcaccatggcgtttcctgaaggagaaatt

SEQ ID NO: 469748 - DNA, 53 bp, Artificial
  Synthetic oligonucleotide
tgctactctgaaaaatggataatgggtgagaggttgatgaaaccaatatggat

SEQ ID NO: 469749 - DNA, 60 bp, Artificial
  Synthetic oligonucleotide
tgctactcttgtgattatggagcacatgtctgtgtgaaagtaaagtcttcggagtcagcc

SEQ ID NO: 469750 - DNA, 60 bp, Artificial
  Synthetic oligonucleotide
tgctactgctttcagtgtgcgagctttatttgctcacttcctccgtcgataaaatcccga

SEQ ID NO: 469751 - DNA, 60 bp, Artificial
  Synthetic oligonucleotide
tgctactgggctatattcaaacacgcttcgaaatgctattcttatatattatgtgtggtt

SEQ ID NO: 469752 - DNA, 60 bp, Artificial
  Synthetic oligonucleotide
tgctactgtgacgggaggaacatatgcatctaaggagcaagcattagttagcaagtttgt

SEQ ID NO: 469753 - DNA, 58 bp, Artificial
  Synthetic oligonucleotide
tgctacttcaacccagaagaaacaaccagtatagttgctcacggggatacgcaggtta

SEQ ID NO: 469754 - DNA, 60 bp, Artificial
  Synthetic oligonucleotide
tgctacttccacttgtatcaacggcatattcacgaccgtccttgtgtgcgacaagaggcc

SEQ ID NO: 469755 - DNA, 60 bp, Artificial
  Synthetic oligonucleotide
tgctagaattccacgtgcggggcgacagtacacaccacttgattatgcgaggcaggccac

SEQ ID NO: 469756 - DNA, 60 bp, Artificial
  Synthetic oligonucleotide
tgctagacattgtggacgggcgtccgcagattgttctcccatctcacactgttgaggaaa

SEQ ID NO: 469757 - DNA, 55 bp, Artificial
  Synthetic oligonucleotide
tgctagacctacccaggtatctgctttttgtccccgtcctattgtttcccttgcc

SEQ ID NO: 469758 - DNA, 59 bp, Artificial
  Synthetic oligonucleotide
tgctagacgtttgtggagattcagactttggttggtaggtctggccatgcggcgttacg

SEQ ID NO: 469759 - DNA, 59 bp, Artificial
  Synthetic oligonucleotide
tgctagagaacctaagacagcaaagttcttgctaattgggtagcgaacctctacctcaa

SEQ ID NO: 469760 - DNA, 55 bp, Artificial
  Synthetic oligonucleotide
tgctagagaccttcgcgccttaacttctcaattgaaccgtttggtggccctcacg

SEQ ID NO: 469761 - DNA, 51 bp, Artificial
  Synthetic oligonucleotide
tgctagagacggagctaggctcacggagaggatattgtctctaaagtcgta

SEQ ID NO: 469762 - DNA, 55 bp, Artificial
  Synthetic oligonucleotide
tgctagagaggataatagagcatgaaccattcgtgctagtgttagccatgcagtc

SEQ ID NO: 469763 - DNA, 60 bp, Artificial
  Synthetic oligonucleotide
tgctagagagtgtggcactcccccccctgtcgcgttcgctcgttcgctggctcgattggg

SEQ ID NO: 469764 - DNA, 60 bp, Artificial
  Synthetic oligonucleotide
tgctagagcagcagccacacgggtgagtgtcagcccatttcgtcctggttttccctcaac

SEQ ID NO: 469765 - DNA, 60 bp, Artificial
  Synthetic oligonucleotide
tgctagagccacatgaaactttgacatcgtatggacgtttgtcagaggccatcgaaaatc

SEQ ID NO: 469766 - DNA, 55 bp, Artificial
  Synthetic oligonucleotide
tgctagagtgggacgcggcgcttgaacccctgtcattcaccaggacggactgtcg

SEQ ID NO: 469767 - DNA, 53 bp, Artificial
  Synthetic oligonucleotide
tgctagagttaagacgttaaaaatatccttaagttatcctcgtacgatttgtt

SEQ ID NO: 469768 - DNA, 52 bp, Artificial
  Synthetic oligonucleotide
tgctagatccaatgacctatgtgcctagatgtaaccttaagggtcgagatat

SEQ ID NO: 469769 - DNA, 60 bp, Artificial
  Synthetic oligonucleotide
tgctagatggcattatattcgtgtctctcgcaagaactgatatcctgtttcaatataaaa

SEQ ID NO: 469770 - DNA, 60 bp, Artificial
  Synthetic oligonucleotide
tgctagcatgttatgatgctacacttggtcccgcaataaattattacaattctggtctaa

SEQ ID NO: 469771 - DNA, 60 bp, Artificial
  Synthetic oligonucleotide
tgctagccagcacaacggctaaagcaatggaacaaatggctgggtcaagtgaacaagctg

SEQ ID NO: 469772 - DNA, 60 bp, Artificial
  Synthetic oligonucleotide
tgctagcctatgttcttctaaatgtaccaatgatctcaccgtcgattttagtcacaactt

SEQ ID NO: 469773 - DNA, 60 bp, Artificial
  Synthetic oligonucleotide
tgctagcgacgataaggttgctagttacatccacggagatcataaaatatgagcgggagg

SEQ ID NO: 469774 - DNA, 60 bp, Artificial
  Synthetic oligonucleotide
tgctagcgacgcgctacgtcatcaccagcaatgaagctccggaggcctggtatgcgtcgg

SEQ ID NO: 469775 - DNA, 60 bp, Artificial
  Synthetic oligonucleotide
tgctagcgagagtgctactacgctgggaattatcaacgcaagcacgctccatcatgttca

SEQ ID NO: 469776 - DNA, 60 bp, Artificial
  Synthetic oligonucleotide
tgctagcggtttatgagcgcggttattctgtgccagtgctagataggcgcgtactaattc

SEQ ID NO: 469777 - DNA, 55 bp, Artificial
  Synthetic oligonucleotide
tgctagcgtgtccccatccctcgtcacggtccttttgggggccgtgggaggatgg

SEQ ID NO: 469778 - DNA, 51 bp, Artificial
  Synthetic oligonucleotide
tgctagctaaggaggatcgagaattccgaattggggacatcaccacagaac

SEQ ID NO: 469779 - DNA, 55 bp, Artificial
  Synthetic oligonucleotide
tgctagctatgcctcgtacatccgtgttcctttaaactccacggtgtacctggac

SEQ ID NO: 469780 - DNA, 59 bp, Artificial
  Synthetic oligonucleotide
tgctagctcttcgccttcgcttcgagttagaattttggagattcgtccaggaacactta

SEQ ID NO: 469781 - DNA, 52 bp, Artificial
  Synthetic oligonucleotide
tgctagctttagggtacgggcatcccccccattattatgggggtcctttaaa

SEQ ID NO: 469782 - DNA, 57 bp, Artificial
  Synthetic oligonucleotide
tgctaggaaactagcatcgggccgcccacgagggtttctgaactcaacggagtagaa

SEQ ID NO: 469783 - DNA, 60 bp, Artificial
  Synthetic oligonucleotide
tgctaggaattgtgatacttggacttgaatcatttacgtggttgattgttgttcatatgg

SEQ ID NO: 469784 - DNA, 55 bp, Artificial
  Synthetic oligonucleotide
tgctagggaagtgttgcgacccgttaccagtaggaatacaggaggtcttagttgc

SEQ ID NO: 469785 - DNA, 57 bp, Artificial
  Synthetic oligonucleotide
tgctagggcctcaattatagactcgtttcgaccatgaccttcttgaagtttacgagt

SEQ ID NO: 469786 - DNA, 51 bp, Artificial
  Synthetic oligonucleotide
tgctaggggttattgaaaagcaaccgggttagagaggctcatataagatac

SEQ ID NO: 469787 - DNA, 55 bp, Artificial
  Synthetic oligonucleotide
tgctagtaaaatcggatcacatatgcataacacattgtgtgaagatgctacagcg

SEQ ID NO: 469788 - DNA, 55 bp, Artificial
  Synthetic oligonucleotide
tgctagtaaatttcaccagggtacactaatagttgctgctataccagaacatcag

SEQ ID NO: 469789 - DNA, 60 bp, Artificial
  Synthetic oligonucleotide
tgctagtaacactcactttgcttcgtagcggagcgcatgagcggtgggaacacccccatg

SEQ ID NO: 469790 - DNA, 55 bp, Artificial
  Synthetic oligonucleotide
tgctagtagcaaagggacagatagccaaggaaggatcccgctctacccactgggg

SEQ ID NO: 469791 - DNA, 55 bp, Artificial
  Synthetic oligonucleotide
tgctagtagtagagagtcagacgaaagtaattcagatgtaccgttcgttcaggca

SEQ ID NO: 469792 - DNA, 57 bp, Artificial
  Synthetic oligonucleotide
tgctagtcttgaacccgtctgtcgccgccaccctagggtttggggcgtacatgtcca

SEQ ID NO: 469793 - DNA, 55 bp, Artificial
  Synthetic oligonucleotide
tgctagttggagtaataaatctttcgaacacatttgggagaacatgacctggatg

SEQ ID NO: 469794 - DNA, 55 bp, Artificial
  Synthetic oligonucleotide
tgctagttggagtaatagaactctaactgagatttgggataacctaacctggatg

SEQ ID NO: 469795 - DNA, 58 bp, Artificial
  Synthetic oligonucleotide
tgctagttgggtgatgcgtataatgacatggcttgaattggccgacactagcctgtct

SEQ ID NO: 469796 - DNA, 52 bp, Artificial
  Synthetic oligonucleotide
tgctagtttagagtacgggcatccccccgttttgcgggggtctctaaaagga

SEQ ID NO: 469797 - DNA, 54 bp, Artificial
  Synthetic oligonucleotide
tgctagtttagagtacgggtgtcccccactttcgtggggctttcgcaaggagac

SEQ ID NO: 469798 - DNA, 51 bp, Artificial
  Synthetic oligonucleotide
tgctagtttcagggtacgggcaccccccccacttcgtggggggcctccaaa

SEQ ID NO: 469799 - DNA, 56 bp, Artificial
  Synthetic oligonucleotide
tgctataaaatgggaaacaagggatcaaagagtaaagtagctaaatggcctgaggt

SEQ ID NO: 469800 - DNA, 60 bp, Artificial
  Synthetic oligonucleotide
tgctataagcacaacattcccttacaccggagatcctccttacagccatggaacaggaac

SEQ ID NO: 469801 - DNA, 60 bp, Artificial
  Synthetic oligonucleotide
tgctataatgtctcaatgacatcatatacctctagtgatgatgagatcatgttatcaacc

SEQ ID NO: 469802 - DNA, 60 bp, Artificial
  Synthetic oligonucleotide
tgctatacaataagatggagtttgagccgttccaatccttgatacctaaagctgcccgag

SEQ ID NO: 469803 - DNA, 57 bp, Artificial
  Synthetic oligonucleotide
tgctatacaataaggtggaatttgaaccgttccaatccttggtacctaaagctgcta

SEQ ID NO: 469804 - DNA, 60 bp, Artificial
  Synthetic oligonucleotide
tgctataccaatgggcacatactcttatatggtgtctattgagcaacttaagtatatgat

SEQ ID NO: 469805 - DNA, 59 bp, Artificial
  Synthetic oligonucleotide
tgctataggaaactgcccgaaatatgtaaagcaagggtccctgatgttagcaactggaa

SEQ ID NO: 469806 - DNA, 60 bp, Artificial
  Synthetic oligonucleotide
tgctataggggtctgtgtcgctctttgtttgtacactctaactcgctcaacgttgccaca

SEQ ID NO: 469807 - DNA, 60 bp, Artificial
  Synthetic oligonucleotide
tgctatatatattgggcctctttaagttcctaatgaaattatctgaggagacattccaac

SEQ ID NO: 469808 - DNA, 60 bp, Artificial
  Synthetic oligonucleotide
tgctatatgaggcactgtaatacatcagtcattcaggaatcatgtgataaacattattgg

SEQ ID NO: 469809 - DNA, 51 bp, Artificial
  Synthetic oligonucleotide
tgctatattcaagtttttgcctgtatcgttttcgtatcatgtgaataatat

SEQ ID NO: 469810 - DNA, 53 bp, Artificial
  Synthetic oligonucleotide
tgctatattctctatgactccatcggaattagttcagaacggtatctgtgatg

SEQ ID NO: 469811 - DNA, 60 bp, Artificial
  Synthetic oligonucleotide
tgctatcacttcctgctgatgtctgtagagaactaataatacgattaagagttgctaatc

SEQ ID NO: 469812 - DNA, 59 bp, Artificial
  Synthetic oligonucleotide
tgctatccgtcgccgattctttatggattgcgacattgaggtgaccgactcttacaaga

SEQ ID NO: 469813 - DNA, 58 bp, Artificial
  Synthetic oligonucleotide
tgctatcgatagtgtgtttagatcccccactgtgctttctggctatgacaacttcact

SEQ ID NO: 469814 - DNA, 54 bp, Artificial
  Synthetic oligonucleotide
tgctatcggtaagctttttgccgaagaggcaaaaagattggttacccagagttt

SEQ ID NO: 469815 - DNA, 59 bp, Artificial
  Synthetic oligonucleotide
tgctatctaaacgaacccgtgacgaagatctcttggttgaatatattccagaaagtgaa

SEQ ID NO: 469816 - DNA, 58 bp, Artificial
  Synthetic oligonucleotide
tgctatgaaccaactgatctacgacgacgagacgagtgacaggctgatcgcatgggcg

SEQ ID NO: 469817 - DNA, 55 bp, Artificial
  Synthetic oligonucleotide
tgctatgacgcgggttgcgcttggtacgagctcactcccgctgagacctcagtta

SEQ ID NO: 469818 - DNA, 59 bp, Artificial
  Synthetic oligonucleotide
tgctatgacggcttttagagtcccctatgaagtatatagccatagacctttagggtgga

SEQ ID NO: 469819 - DNA, 60 bp, Artificial
  Synthetic oligonucleotide
tgctatgatattctgtggaaatagtaacagatcaactgttgacaggttcgtcaaccaggt

SEQ ID NO: 469820 - DNA, 55 bp, Artificial
  Synthetic oligonucleotide
tgctatgatcactatttatgtctgaactgtctcaccctgcttcacacagtgtccg

SEQ ID NO: 469821 - DNA, 59 bp, Artificial
  Synthetic oligonucleotide
tgctatgcaaaagagcgtgtcgttttggtatcggtgtacaccgattacttctctagccc

SEQ ID NO: 469822 - DNA, 58 bp, Artificial
  Synthetic oligonucleotide
tgctatgccgcctaaacgacagaatcttccggttgaggccatgttagcgttgaaaaaa

SEQ ID NO: 469823 - DNA, 55 bp, Artificial
  Synthetic oligonucleotide
tgctatgcgtggtatgtcaggctttactgatgacgcatttaacgctgtaggccac

SEQ ID NO: 469824 - DNA, 60 bp, Artificial
  Synthetic oligonucleotide
tgctatgctcacgcctagcgctcggtccgacttccagaccactgttggtctcctcaacgg

SEQ ID NO: 469825 - DNA, 60 bp, Artificial
  Synthetic oligonucleotide
tgctatggaatagagatctcatgatcgtcagtagtagggcgcaggggtccgacacaattg

SEQ ID NO: 469826 - DNA, 60 bp, Artificial
  Synthetic oligonucleotide
tgctatggatcccgattctgtggaatggacagctttcctagttccacaaggtttatatga

SEQ ID NO: 469827 - DNA, 55 bp, Artificial
  Synthetic oligonucleotide
tgctatggggtgtccaccacccgcctaacatagagaatcaaagggccatctatcg

SEQ ID NO: 469828 - DNA, 60 bp, Artificial
  Synthetic oligonucleotide
tgctatggttcgcttgtatttcagagccgaaatgcaggaaatgtctatatctgcatggat

SEQ ID NO: 469829 - DNA, 55 bp, Artificial
  Synthetic oligonucleotide
tgctatggttgcgaagggtgttgttggtgttctcacacttgataaccaggacctc

SEQ ID NO: 469830 - DNA, 57 bp, Artificial
  Synthetic oligonucleotide
tgctatgtatcccctacctttagttcctggtggccatgattctttagttcaaaccga

SEQ ID NO: 469831 - DNA, 60 bp, Artificial
  Synthetic oligonucleotide
tgctatgtcggatgattctgtcagaaccgtctttgtagagttgatcaggcccacttacgt

SEQ ID NO: 469832 - DNA, 58 bp, Artificial
  Synthetic oligonucleotide
tgctatgtgtgtactttgtgtttctaagtgtgagtcgtgtgaatcctgtacctatgtc

SEQ ID NO: 469833 - DNA, 60 bp, Artificial
  Synthetic oligonucleotide
tgctatgttggcttagtttggtgtgtgttattgacatgtgagctcattgtatgggctgct

SEQ ID NO: 469834 - DNA, 55 bp, Artificial
  Synthetic oligonucleotide
tgctattaagaacggatcttggattagtttattttgtaactacccaaaatctgaa

SEQ ID NO: 469835 - DNA, 60 bp, Artificial
  Synthetic oligonucleotide
tgctattaatccttttggaatgccaggtaatccaactgatcttactgtcgttgcaacata

SEQ ID NO: 469836 - DNA, 57 bp, Artificial
  Synthetic oligonucleotide
tgctattaggaatttacttttgttgccaggcacttatagttatgagtggtggtttag

SEQ ID NO: 469837 - DNA, 60 bp, Artificial
  Synthetic oligonucleotide
tgctattgataaacctacccagccagacacctcatcaaatagattttacaccttggagag

SEQ ID NO: 469838 - DNA, 52 bp, Artificial
  Synthetic oligonucleotide
tgctatttatattgggggccagttgataatgaagtcgtttccgccatattcc

SEQ ID NO: 469839 - DNA, 60 bp, Artificial
  Synthetic oligonucleotide
tgctatttccacctataccactagcctaggtgccggtcctacctcgatctctgcagtcgg

SEQ ID NO: 469840 - DNA, 60 bp, Artificial
  Synthetic oligonucleotide
tgctcaaaaaatggcattcgactgtgacgggaggaacatacgcgtcgaaggaacaagcat

SEQ ID NO: 469841 - DNA, 55 bp, Artificial
  Synthetic oligonucleotide
tgctcaaaggtgaaagccatggcagaataatccaaaacgaggatatacccattgg

SEQ ID NO: 469842 - DNA, 56 bp, Artificial
  Synthetic oligonucleotide
tgctcaacaaaacggtagacttaagaatgaatacgttacaaagggtcttataatga

SEQ ID NO: 469843 - DNA, 55 bp, Artificial
  Synthetic oligonucleotide
tgctcaacatttattagaagctgctctggaaaggaaggcagagtaagcttctttt

SEQ ID NO: 469844 - DNA, 60 bp, Artificial
  Synthetic oligonucleotide
tgctcaactctcttcaaagaccaaagccactattgtggccaatgctgaacggtcagaccc

SEQ ID NO: 469845 - DNA, 60 bp, Artificial
  Synthetic oligonucleotide
tgctcaagaactaaacacttacttacatgccaaatcccaagtcatggcaagcaacattat

SEQ ID NO: 469846 - DNA, 60 bp, Artificial
  Synthetic oligonucleotide
tgctcaagacccagagagaaatatcgcgttcgatgttcccaggtgttcttcggagatgat

SEQ ID NO: 469847 - DNA, 55 bp, Artificial
  Synthetic oligonucleotide
tgctcaaggaaactctacgtttccctcttgttgctgtacaaaaccttcggacgga

SEQ ID NO: 469848 - DNA, 54 bp, Artificial
  Synthetic oligonucleotide
tgctcaaggccattatcccaaccaatagcattgtttgtagccctaatggctgtt

SEQ ID NO: 469849 - DNA, 60 bp, Artificial
  Synthetic oligonucleotide
tgctcaagtaccatcctagttgcttcgcgagtttcactcgcggcgaccaggcatggcacg

SEQ ID NO: 469850 - DNA, 54 bp, Artificial
  Synthetic oligonucleotide
tgctcaatgccaaagctgtgtcttactttatggtgggcactgacgataaaatcg

SEQ ID NO: 469851 - DNA, 58 bp, Artificial
  Synthetic oligonucleotide
tgctcacaggaccaacacccctgttgtacaggcttggggcggtacagaatgacatcat

SEQ ID NO: 469852 - DNA, 60 bp, Artificial
  Synthetic oligonucleotide
tgctcaccgctagctgccacgttagtggctcctcttcttgatgattctgccaccatgagt

SEQ ID NO: 469853 - DNA, 59 bp, Artificial
  Synthetic oligonucleotide
tgctcacctgcttgctaatatttttcctcctggccataaagatagggatctctcaatta

SEQ ID NO: 469854 - DNA, 58 bp, Artificial
  Synthetic oligonucleotide
tgctcactcaaaccacaaagggagatggttcgacccgtggccataaagctacagttta

SEQ ID NO: 469855 - DNA, 55 bp, Artificial
  Synthetic oligonucleotide
tgctcacttttaccaacaagcaacttgaggaggttaaagggcttagatcatggct

SEQ ID NO: 469856 - DNA, 54 bp, Artificial
  Synthetic oligonucleotide
tgctcagaaatggtttcgcatattgcgaaaggtttgtccatccttgcctccttg

SEQ ID NO: 469857 - DNA, 55 bp, Artificial
  Synthetic oligonucleotide
tgctcagaaggattatatacttggaacgtctgtccatttggtatagctaacgctc

SEQ ID NO: 469858 - DNA, 55 bp, Artificial
  Synthetic oligonucleotide
tgctcagaagtcgttacatgctcacctaccactgacctgtgtctagtcaagggcg

SEQ ID NO: 469859 - DNA, 60 bp, Artificial
  Synthetic oligonucleotide
tgctcagacaatgtgctctacacagccctatttagacccagcccgagtgcgacgcccgaa

SEQ ID NO: 469860 - DNA, 60 bp, Artificial
  Synthetic oligonucleotide
tgctcagagaggtgtcaatactgtgagggaccaacagcctttaagagacggttccttgca

SEQ ID NO: 469861 - DNA, 55 bp, Artificial
  Synthetic oligonucleotide
tgctcagagtgtgcaaggattggggcgttgttactgcccacgtacacggcaatgt

SEQ ID NO: 469862 - DNA, 55 bp, Artificial
  Synthetic oligonucleotide
tgctcagattgcatccggcatggcctatgtggagaggatgaactacgtgcaccga

SEQ ID NO: 469863 - DNA, 60 bp, Artificial
  Synthetic oligonucleotide
tgctcagcaagagacacatactaataccctctctaaagacccggcccagcagaaaacaca

SEQ ID NO: 469864 - DNA, 59 bp, Artificial
  Synthetic oligonucleotide
tgctcagcccgttctatatataaatatggcagattatagtattgagtccagttatgtgt

SEQ ID NO: 469865 - DNA, 55 bp, Artificial
  Synthetic oligonucleotide
tgctcagctatgggaatgtgctggacttgaaccatcttgacattgatgagccaac

SEQ ID NO: 469866 - DNA, 53 bp, Artificial
  Synthetic oligonucleotide
tgctcaggatcacgttagctgctatttgttacaagagtttgagtaatagtgat

SEQ ID NO: 469867 - DNA, 57 bp, Artificial
  Synthetic oligonucleotide
tgctcagggtacgcttggcattggggacccaatttcgtttcctcggcaagagattct

SEQ ID NO: 469868 - DNA, 60 bp, Artificial
  Synthetic oligonucleotide
tgctcagtagaccaggctaaagcatataaggtgcacacaggaacagtgcaagccgtcgtt

SEQ ID NO: 469869 - DNA, 60 bp, Artificial
  Synthetic oligonucleotide
tgctcagtcactttgaagtccctcatgaatgtgggccactggtatttgaggcgtcaactg

SEQ ID NO: 469870 - DNA, 60 bp, Artificial
  Synthetic oligonucleotide
tgctcagtcataacatagacaatcctggttatgacgagttgctcgaagcagtactgaaat

SEQ ID NO: 469871 - DNA, 60 bp, Artificial
  Synthetic oligonucleotide
tgctcataagtcatgacgacggttcacacgcaggttatgcaacttgcgtgactttacacg

SEQ ID NO: 469872 - DNA, 60 bp, Artificial
  Synthetic oligonucleotide
tgctcatatactagttacaagggagccctacttgtcctgcgatccacaaggctgcagaat

SEQ ID NO: 469873 - DNA, 60 bp, Artificial
  Synthetic oligonucleotide
tgctcatcacggacgaatgtccgatctccgatctgcttgcccatgattcgttcggaccta

SEQ ID NO: 469874 - DNA, 60 bp, Artificial
  Synthetic oligonucleotide
tgctcatcagagcaattacgatgctacggatccagaatgtcatcaactatgattccatac

SEQ ID NO: 469875 - DNA, 60 bp, Artificial
  Synthetic oligonucleotide
tgctcatcatacttcttaagtgagatggaactagcagtaccagggttgctttcactaagc

SEQ ID NO: 469876 - DNA, 60 bp, Artificial
  Synthetic oligonucleotide
tgctcatcttgagtcctccggcccctgaatgtggctaaccttaaccccgcagccaatgca

SEQ ID NO: 469877 - DNA, 59 bp, Artificial
  Synthetic oligonucleotide
tgctcatgtctctactgatgtccgacgacgtaaccctcacggggactagacggtcggta

SEQ ID NO: 469878 - DNA, 60 bp, Artificial
  Synthetic oligonucleotide
tgctcatgtgactataagtttcaataacgtaaaagaacgagcatatggaggatcgctgcc

SEQ ID NO: 469879 - DNA, 60 bp, Artificial
  Synthetic oligonucleotide
tgctcattataatcacgagcatcaaagctgtgtataactttgccacctgtggagtacttg

SEQ ID NO: 469880 - DNA, 55 bp, Artificial
  Synthetic oligonucleotide
tgctcattgcgagaacgttatggtatgcattctcgtgaacgtcgtggctgagctc

SEQ ID NO: 469881 - DNA, 55 bp, Artificial
  Synthetic oligonucleotide
tgctcattgctcaggaccccaggtggcgacgtcctcttctacacctcaggacagg

SEQ ID NO: 469882 - DNA, 60 bp, Artificial
  Synthetic oligonucleotide
tgctccaaacataggcttctgttctgcacgaactgcttctcactacagttgggatgacga

SEQ ID NO: 469883 - DNA, 60 bp, Artificial
  Synthetic oligonucleotide
tgctccaaccgccttagcccagtagggtgcatcattccatgatacaccaaagtaaacgta

SEQ ID NO: 469884 - DNA, 60 bp, Artificial
  Synthetic oligonucleotide
tgctccacacagagcacaatggaatgttatgtgcaacaaacctggggaaccctcttatcc

SEQ ID NO: 469885 - DNA, 60 bp, Artificial
  Synthetic oligonucleotide
tgctccacttgcagatcatgctcgccgttgctcaattaagcccatgtccattgttcgacg

SEQ ID NO: 469886 - DNA, 60 bp, Artificial
  Synthetic oligonucleotide
tgctccagaccattgctgatggtaaggcgcactttactgaaacagtcaaaccagtccttg

SEQ ID NO: 469887 - DNA, 58 bp, Artificial
  Synthetic oligonucleotide
tgctccagatttggtacccttgttcgaaaacacacacgttagttacgcctgctggcaa

SEQ ID NO: 469888 - DNA, 60 bp, Artificial
  Synthetic oligonucleotide
tgctccagcctttactgcagctgagagactgaagttgtaaccagaaatgttgatggagct

SEQ ID NO: 469889 - DNA, 53 bp, Artificial
  Synthetic oligonucleotide
tgctccaggcctattacggggcctttatccgtaattccaccggagttgacact

SEQ ID NO: 469890 - DNA, 60 bp, Artificial
  Synthetic oligonucleotide
tgctccagtaattacggaaatgccatgagtaccgatagctggtaccaatatatcggtact

SEQ ID NO: 469891 - DNA, 57 bp, Artificial
  Synthetic oligonucleotide
tgctccagtgattaatgcggaaacagcgccccctagagatcaagaggtcagaaacag

SEQ ID NO: 469892 - DNA, 56 bp, Artificial
  Synthetic oligonucleotide
tgctccatacacctggtaactgttccacgtcatgtgtcgaggtaatgagtttcaag

SEQ ID NO: 469893 - DNA, 55 bp, Artificial
  Synthetic oligonucleotide
tgctccatctgtctatagggaggattgagccctgtattttcctttgttgtggtgc

SEQ ID NO: 469894 - DNA, 55 bp, Artificial
  Synthetic oligonucleotide
tgctccatgcacaagaggattctgggaatatgacatatatagactgcaattcaca

SEQ ID NO: 469895 - DNA, 60 bp, Artificial
  Synthetic oligonucleotide
tgctccatggtatggacacatcctctcaggagaaagccatgggagaatcctgaagaccga

SEQ ID NO: 469896 - DNA, 57 bp, Artificial
  Synthetic oligonucleotide
tgctccccaagttgtccgccataactatgtgccgggatccgttattgaacgacttcc

SEQ ID NO: 469897 - DNA, 60 bp, Artificial
  Synthetic oligonucleotide
tgctcccctctcctggattgcacagcacgattgatggtatgccacctttaatttgaactg

SEQ ID NO: 469898 - DNA, 60 bp, Artificial
  Synthetic oligonucleotide
tgctcccgctccaggtggtgggggagtcgtgcgtccaaacgcttgagtctgacttcatta

SEQ ID NO: 469899 - DNA, 60 bp, Artificial
  Synthetic oligonucleotide
tgctccgaaccagtttaccgtatatataacagattgcaaggctacatagaagctgtacag

SEQ ID NO: 469900 - DNA, 59 bp, Artificial
  Synthetic oligonucleotide
tgctccgagccccgcttccgatcatacgggttttgactcagataattcaccacccctca

SEQ ID NO: 469901 - DNA, 57 bp, Artificial
  Synthetic oligonucleotide
tgctccgatggggtaccatgctccttgggatattaatgatctgtagtgctgcagaac

SEQ ID NO: 469902 - DNA, 54 bp, Artificial
  Synthetic oligonucleotide
tgctccgcctaaccgaccggtacccgcataaagtacctgtcaagggggcttatg

SEQ ID NO: 469903 - DNA, 52 bp, Artificial
  Synthetic oligonucleotide
tgctccgggttccaaccggaccaaaagtgagaaatattgttcatcttttcac

SEQ ID NO: 469904 - DNA, 60 bp, Artificial
  Synthetic oligonucleotide
tgctcctacaattgatgctgaatctcccgggtccaggacgcttgttccgagcctgtttag

SEQ ID NO: 469905 - DNA, 55 bp, Artificial
  Synthetic oligonucleotide
tgctcctagaaaggcgcgggtcggtaccagacggcgtgaggagcgggagagaaga

SEQ ID NO: 469906 - DNA, 52 bp, Artificial
  Synthetic oligonucleotide
tgctcctagtatacaagataggaccttcccatgcggcagaagatgcgacgaa

SEQ ID NO: 469907 - DNA, 52 bp, Artificial
  Synthetic oligonucleotide
tgctcctcccgattccgtccgaccccacccccgagaggtccccccaggaatg

SEQ ID NO: 469908 - DNA, 60 bp, Artificial
  Synthetic oligonucleotide
tgctcctctgagggtctacttgcatcagccccacaccttgagagagtgacaggcttcaat

SEQ ID NO: 469909 - DNA, 55 bp, Artificial
  Synthetic oligonucleotide
tgctcctgagacgtagacggtcctgccgacgtagacggtcctgctgacgtagacg

SEQ ID NO: 469910 - DNA, 55 bp, Artificial
  Synthetic oligonucleotide
tgctcctgagccctctcaaggaccagtaaatagcgggcgcggacgtcagtgccct

SEQ ID NO: 469911 - DNA, 50 bp, Artificial
  Synthetic oligonucleotide
tgctcctgttcttgttgtggtcgccgactatcgtgtttgcgtttagatcc

SEQ ID NO: 469912 - DNA, 54 bp, Artificial
  Synthetic oligonucleotide
tgctccttatgctgatgcctacagccttggcgttccatttgactacacgagggg

SEQ ID NO: 469913 - DNA, 60 bp, Artificial
  Synthetic oligonucleotide
tgctccttgaaccaactagaccactagcagaaaatgttagcaaacaactgtcgcaagagc

SEQ ID NO: 469914 - DNA, 60 bp, Artificial
  Synthetic oligonucleotide
tgctcctttgattcaggatcatccacggaatcagactgcacgggtgttggcattttacat

SEQ ID NO: 469915 - DNA, 56 bp, Artificial
  Synthetic oligonucleotide
tgctcgaggtggtcgataaagggagcccggagtccgtttatataagttcacgccga

SEQ ID NO: 469916 - DNA, 53 bp, Artificial
  Synthetic oligonucleotide
tgctcgcagccggtctggagcaaacattctcgggacggacaactcggttgttc

SEQ ID NO: 469917 - DNA, 55 bp, Artificial
  Synthetic oligonucleotide
tgctcgcatcgtacaccatcactcactttggcaaaacctccaatccgcttgtgag

SEQ ID NO: 469918 - DNA, 50 bp, Artificial
  Synthetic oligonucleotide
tgctcgccaaactgaacccgtgatcttcaccattccagacataaggaaga

SEQ ID NO: 469919 - DNA, 60 bp, Artificial
  Synthetic oligonucleotide
tgctcgccaaattattctgttcaactcacggatcctaggctctccacctgtctatcaact

SEQ ID NO: 469920 - DNA, 55 bp, Artificial
  Synthetic oligonucleotide
tgctcgcctccctttgctccttagcgagcagctacaaggggacttccgttatgtc

SEQ ID NO: 469921 - DNA, 55 bp, Artificial
  Synthetic oligonucleotide
tgctcgcctgtgttgccaactggatcctacgcgggacgtccttctgctacgtccc

SEQ ID NO: 469922 - DNA, 60 bp, Artificial
  Synthetic oligonucleotide
tgctcgcgactaacgtcccaattgaaccattaatcgctccttcacatggtgttccgagac

SEQ ID NO: 469923 - DNA, 60 bp, Artificial
  Synthetic oligonucleotide
tgctcgcgcgatcgaatctaaatacggtacgaagattgatgtttacagggatgaggttcc

SEQ ID NO: 469924 - DNA, 60 bp, Artificial
  Synthetic oligonucleotide
tgctcgcggtgtacattggatcctccactctgtttatcttgaaatagaggggatttgata

SEQ ID NO: 469925 - DNA, 60 bp, Artificial
  Synthetic oligonucleotide
tgctcgctacgcaaggtcttacgaccgcatccatcatggaaattctcactggttttgtgg

SEQ ID NO: 469926 - DNA, 55 bp, Artificial
  Synthetic oligonucleotide
tgctcgctactgctacccctccgggctccgtcactgtgccgcatcctaacatcga

SEQ ID NO: 469927 - DNA, 60 bp, Artificial
  Synthetic oligonucleotide
tgctcgctcagcacgagatctgatcaggagtccctcccagtgtgctttacacctggcgag

SEQ ID NO: 469928 - DNA, 55 bp, Artificial
  Synthetic oligonucleotide
tgctcgctcgatgacatgcctcgcacacgtcgcgggtgtccctttcacgttgcct

SEQ ID NO: 469929 - DNA, 54 bp, Artificial
  Synthetic oligonucleotide
tgctcgctcgtacgggatcgggaaccctccaacagtcgtggtgcctcgcactac

SEQ ID NO: 469930 - DNA, 55 bp, Artificial
  Synthetic oligonucleotide
tgctcggacgcgtgttgctgagatgggagctgacgaaggcacaacgcagcgctct

SEQ ID NO: 469931 - DNA, 52 bp, Artificial
  Synthetic oligonucleotide
tgctcggattagctatgctaattggactagcgagttcattgcaattgtcaac

SEQ ID NO: 469932 - DNA, 55 bp, Artificial
  Synthetic oligonucleotide
tgctcggccaagggactcgtcgtggcgcgctcggacgtaacttacgtgctcaaca

SEQ ID NO: 469933 - DNA, 60 bp, Artificial
  Synthetic oligonucleotide
tgctcggggtgcatgacaatgtagctgtgttaccaactcacgcttcaccaggagagacaa

SEQ ID NO: 469934 - DNA, 56 bp, Artificial
  Synthetic oligonucleotide
tgctcggggttttacaataccacactatagaacagaagggaggtttatggagttca

SEQ ID NO: 469935 - DNA, 57 bp, Artificial
  Synthetic oligonucleotide
tgctcggtcgaccggtaagcctcgtgcgccatggaagcgcaaactgggctatgaggg

SEQ ID NO: 469936 - DNA, 55 bp, Artificial
  Synthetic oligonucleotide
tgctcggtcgcgtcggtcgccagatcttcacgaatcgacacgtgcagcccgaagt

SEQ ID NO: 469937 - DNA, 60 bp, Artificial
  Synthetic oligonucleotide
tgctcggtgtactaggctgctttctcagtacacttcagcatgcagcaacattgaatcagc

SEQ ID NO: 469938 - DNA, 60 bp, Artificial
  Synthetic oligonucleotide
tgctcggtgtggtggagaaatgtggctatgagccatatgtcatttcaccatcaccccgtg

SEQ ID NO: 469939 - DNA, 56 bp, Artificial
  Synthetic oligonucleotide
tgctcgtaaaagccggggaaggaaaacttaaatctgcgatacgccaaatgcttgac

SEQ ID NO: 469940 - DNA, 50 bp, Artificial
  Synthetic oligonucleotide
tgctcgtaatgagcatgtattctttaactacgtgggacagcaccagcaga

SEQ ID NO: 469941 - DNA, 59 bp, Artificial
  Synthetic oligonucleotide
tgctcgtacgcttaaatatttcgttggattattggttagttgtgctcatggcctttcga

SEQ ID NO: 469942 - DNA, 57 bp, Artificial
  Synthetic oligonucleotide
tgctcgtccacggttgtatgtttacaaacacgtttacgggatcccatgctctagtgg

SEQ ID NO: 469943 - DNA, 57 bp, Artificial
  Synthetic oligonucleotide
tgctcgtcgggatttatgttaccgcggtgggttcttgtggttctggcactaacgatc

SEQ ID NO: 469944 - DNA, 60 bp, Artificial
  Synthetic oligonucleotide
tgctcgtgaaggcgagaggtgcacgaactaggctgctggcaccgttcttctctggcagtg

SEQ ID NO: 469945 - DNA, 53 bp, Artificial
  Synthetic oligonucleotide
tgctcgtgactcatgggcaacaggacaggaccttcatcctaccagagtcatac

SEQ ID NO: 469946 - DNA, 60 bp, Artificial
  Synthetic oligonucleotide
tgctcgtgccagcaacacacgaagagcttagtacttggttcacagattctctcacgaact

SEQ ID NO: 469947 - DNA, 58 bp, Artificial
  Synthetic oligonucleotide
tgctcgtgttacaggcggggtttttcttgttgacaagaatcctcacaataccacagag

SEQ ID NO: 469948 - DNA, 50 bp, Artificial
  Synthetic oligonucleotide
tgctcgttatgagcatgtactctttaacaacgtgggacagctccagtagg

SEQ ID NO: 469949 - DNA, 60 bp, Artificial
  Synthetic oligonucleotide
tgctcgttctggctctaccacaacgcgccttcgcctacaatcaagaagtagcgggctcta

SEQ ID NO: 469950 - DNA, 58 bp, Artificial
  Synthetic oligonucleotide
tgctcgttgcactacttttagcctttattttgtgggcttgtcagaatggaaacatccg

SEQ ID NO: 469951 - DNA, 60 bp, Artificial
  Synthetic oligonucleotide
tgctcgttgtatttgtctcgaggagacaaatcttatgctccacaagagtccaagaatttt

SEQ ID NO: 469952 - DNA, 60 bp, Artificial
  Synthetic oligonucleotide
tgctctactacctaactccatcgtgaattgacacgtgaaggacggaagcctccgccataa

SEQ ID NO: 469953 - DNA, 53 bp, Artificial
  Synthetic oligonucleotide
tgctctagacaaaggtctgatccgccctgaggtgtatcagcaacatgccctta

SEQ ID NO: 469954 - DNA, 60 bp, Artificial
  Synthetic oligonucleotide
tgctctagatccactcttcacgcgagcagtaacagatttccgatacacccaaaatgaaat

SEQ ID NO: 469955 - DNA, 60 bp, Artificial
  Synthetic oligonucleotide
tgctctagatcgagttttctcagagatacctatgtttacctgtgaagatttatctaatga

SEQ ID NO: 469956 - DNA, 55 bp, Artificial
  Synthetic oligonucleotide
tgctctagtctgttttcaccttttgtaggtgtgaatagttttattgaccctaaat

SEQ ID NO: 469957 - DNA, 55 bp, Artificial
  Synthetic oligonucleotide
tgctctataaatgctgaagtgccagccgaaacagtctgccattgcaaaacaaact

SEQ ID NO: 469958 - DNA, 60 bp, Artificial
  Synthetic oligonucleotide
tgctctattaggggaccctcattgtgatgtatttcaagatgaaacatgggacctttatgt

SEQ ID NO: 469959 - DNA, 60 bp, Artificial
  Synthetic oligonucleotide
tgctctcaagtggaggaaggacataggtttccgtgtcaatgcaaatacgacagccttaag

SEQ ID NO: 469960 - DNA, 60 bp, Artificial
  Synthetic oligonucleotide
tgctctcatagtaaatgcaccgaatcatggggggatacaggcaggagtagatagattcta

SEQ ID NO: 469961 - DNA, 60 bp, Artificial
  Synthetic oligonucleotide
tgctctcatagtgaatgcaccgaatcacgaggggatacaagcaggagtagatcgatttta

SEQ ID NO: 469962 - DNA, 60 bp, Artificial
  Synthetic oligonucleotide
tgctctcatcctgtgctcgtgcagtctctatagcaacagctcacccgcctttgtctagtc

SEQ ID NO: 469963 - DNA, 60 bp, Artificial
  Synthetic oligonucleotide
tgctctcccctgtgcgtgaatccatggttgacacaatcgatgtgctggtagaatgagcag

SEQ ID NO: 469964 - DNA, 57 bp, Artificial
  Synthetic oligonucleotide
tgctctccgagaagcaacaggagctccaccaattaaccgttagaactctggttaagt

SEQ ID NO: 469965 - DNA, 56 bp, Artificial
  Synthetic oligonucleotide
tgctctcctactgggggctgcgggtactgctctggggacccccgtggttggtctaa

SEQ ID NO: 469966 - DNA, 60 bp, Artificial
  Synthetic oligonucleotide
tgctctcgcagtcctcttcctgtctgcgggccttgcccacacgcatccgaaacaacaatc

SEQ ID NO: 469967 - DNA, 60 bp, Artificial
  Synthetic oligonucleotide
tgctctcgccatagcaactgaatctaacataggtttggttaacaataatgccgtgatatc

SEQ ID NO: 469968 - DNA, 54 bp, Artificial
  Synthetic oligonucleotide
tgctctcggtgaatacgatacagcaagtaacaagtcggctgcagccgtgctttc

SEQ ID NO: 469969 - DNA, 59 bp, Artificial
  Synthetic oligonucleotide
tgctctcgtttttgccttctgactttttctcgtctgttcgtgatcttctcgacaccgct

SEQ ID NO: 469970 - DNA, 55 bp, Artificial
  Synthetic oligonucleotide
tgctctctactcacttgtagcgattagggtcttcctgacgcgctagggattccgt

SEQ ID NO: 469971 - DNA, 60 bp, Artificial
  Synthetic oligonucleotide
tgctctctcatgatcgattcacttgttgaatcggttcattgctatgaggacaagcgcatc

SEQ ID NO: 469972 - DNA, 60 bp, Artificial
  Synthetic oligonucleotide
tgctctcttctagcccgttgaagtcgaatggacctatcagtccctggtgtccgtatggta

SEQ ID NO: 469973 - DNA, 60 bp, Artificial
  Synthetic oligonucleotide
tgctctcttgcctgactgtacccgcttcggcctaccaagtgcgcaactcctcggggctgt

SEQ ID NO: 469974 - DNA, 59 bp, Artificial
  Synthetic oligonucleotide
tgctctcttgtctgactgtacccgcgtcagcctaccaagtacgcaactccacgggcctt

SEQ ID NO: 469975 - DNA, 60 bp, Artificial
  Synthetic oligonucleotide
tgctctgaactaccatctgagatcaaccgttcaacatcgatattgctacagcagcgacga

SEQ ID NO: 469976 - DNA, 55 bp, Artificial
  Synthetic oligonucleotide
tgctctgattttattgtctccactgatagatatagcctctgatgggtcactctga

SEQ ID NO: 469977 - DNA, 55 bp, Artificial
  Synthetic oligonucleotide
tgctctgccattggacaaatcgagcctgcatgcacttgtccaggtctgcggtttc

SEQ ID NO: 469978 - DNA, 59 bp, Artificial
  Synthetic oligonucleotide
tgctctgcccctcggggcacgctgtgggcatcttccgggctgccgtgtgcacccggggg

SEQ ID NO: 469979 - DNA, 60 bp, Artificial
  Synthetic oligonucleotide
tgctctgccggccccaccgagcgagcgagcgcgcatagagggagtggccaactccatcac

SEQ ID NO: 469980 - DNA, 60 bp, Artificial
  Synthetic oligonucleotide
tgctctgcgagagggtcaaggctcatcaggacgcgaccgtcacctgtctgacctatcgag

SEQ ID NO: 469981 - DNA, 60 bp, Artificial
  Synthetic oligonucleotide
tgctctgttgttgtatatggcatgtactcatgcttctaaccctgtgtatgctacgttgaa

SEQ ID NO: 469982 - DNA, 53 bp, Artificial
  Synthetic oligonucleotide
tgctcttaaggccttatttagtaatattactgattctgtccaggacaactatc

SEQ ID NO: 469983 - DNA, 55 bp, Artificial
  Synthetic oligonucleotide
tgctcttgaccggaaagttgtccagaaacatccctctgttaatcgtctagcttgg

SEQ ID NO: 469984 - DNA, 55 bp, Artificial
  Synthetic oligonucleotide
tgctcttgatactagaggccgaggagatggagccagagttcatgcagcaggaggt

SEQ ID NO: 469985 - DNA, 60 bp, Artificial
  Synthetic oligonucleotide
tgctcttgcgtaagcatcgtttgctgtctgctgtccccctcttgcagacctaccgtcaat

SEQ ID NO: 469986 - DNA, 60 bp, Artificial
  Synthetic oligonucleotide
tgctcttggcgctctgtatgttgggatggtaccgatctatgtcaaagtacctctcgtcac

SEQ ID NO: 469987 - DNA, 54 bp, Artificial
  Synthetic oligonucleotide
tgctcttggtgtccaacaggggcagagtgctttcttagcatgaaagatttggcc

SEQ ID NO: 469988 - DNA, 55 bp, Artificial
  Synthetic oligonucleotide
tgctctttatgcaaaccatactatttccaggatggttcacctatcccagcacaaa

SEQ ID NO: 469989 - DNA, 60 bp, Artificial
  Synthetic oligonucleotide
tgctgaaaatgacagtgactcgtcagaactttgatgtcatcgtggctgagatcgaaaggc

SEQ ID NO: 469990 - DNA, 55 bp, Artificial
  Synthetic oligonucleotide
tgctgaacgtttatgtcagaatctcgttagatctttcgacttttcgaggttgtat

SEQ ID NO: 469991 - DNA, 55 bp, Artificial
  Synthetic oligonucleotide
tgctgaactactggttactgtatcacttgcgatcactcacgttccgctatggcag

SEQ ID NO: 469992 - DNA, 60 bp, Artificial
  Synthetic oligonucleotide
tgctgaactcttagtggcaatggagaaccaacacactatcgatctggccgattcagaaat

SEQ ID NO: 469993 - DNA, 56 bp, Artificial
  Synthetic oligonucleotide
tgctgaagaaaatgaagacagaactatttaaaatggaaattagtactagttatacg

SEQ ID NO: 469994 - DNA, 55 bp, Artificial
  Synthetic oligonucleotide
tgctgaagtccgctgggaaattctctctagatctgaactttccggttcgatcggt

SEQ ID NO: 469995 - DNA, 55 bp, Artificial
  Synthetic oligonucleotide
tgctgaagtgttcatgtacaatcaagtctaaatatcttggattagttgctcgtcc

SEQ ID NO: 469996 - DNA, 60 bp, Artificial
  Synthetic oligonucleotide
tgctgaagttgttacagaggcgtgtggaacagtcagaaaggatgatcctgatgctccacc

SEQ ID NO: 469997 - DNA, 55 bp, Artificial
  Synthetic oligonucleotide
tgctgaatgcaattatcctagcatacacacaccaagcaagactaaattacaaccc

SEQ ID NO: 469998 - DNA, 60 bp, Artificial
  Synthetic oligonucleotide
tgctgaattgagatggcagtataacagatttgctgtaataacacatggtaaaggtcacta

SEQ ID NO: 469999 - DNA, 55 bp, Artificial
  Synthetic oligonucleotide
tgctgacaaacgctgtcctgcgggcgtcaacccaccagttacagctcttaaaaag

SEQ ID NO: 470000 - DNA, 55 bp, Artificial
  Synthetic oligonucleotide
tgctgacaagacatggcaaatgattttaaacgtttgcaactgatccgcggagacg

SEQ ID NO: 470001 - DNA, 60 bp, Artificial
  Synthetic oligonucleotide
tgctgacactgagctaaggactgctgacactgagctttctacaagggactttccgctggg

SEQ ID NO: 470002 - DNA, 57 bp, Artificial
  Synthetic oligonucleotide
tgctgacactgagctttctacaagggactttccgctggggactttccaggggaggcg

SEQ ID NO: 470003 - DNA, 55 bp, Artificial
  Synthetic oligonucleotide
tgctgacagagaagtttctaaccaggacttccgctggggactttccaggggaggt

SEQ ID NO: 470004 - DNA, 60 bp, Artificial
  Synthetic oligonucleotide
tgctgacaggattttgcaagttggagccagtgtcatttatttggggggtctcaacatagg

SEQ ID NO: 470005 - DNA, 60 bp, Artificial
  Synthetic oligonucleotide
tgctgacagtaagacggttatagctgtggttacagctgaattagaaggggcttacttgga

SEQ ID NO: 470006 - DNA, 58 bp, Artificial
  Synthetic oligonucleotide
tgctgacatagcgtccttctctgtaaatccacagttatactgtgattacaatatcgtg

SEQ ID NO: 470007 - DNA, 55 bp, Artificial
  Synthetic oligonucleotide
tgctgacatcgttgctaaagaccttgccaggtaccctctcgagactatctacccc

SEQ ID NO: 470008 - DNA, 60 bp, Artificial
  Synthetic oligonucleotide
tgctgacattcaggtattaggacactggatggatgcaatatttaacattaagacagcatt

SEQ ID NO: 470009 - DNA, 60 bp, Artificial
  Synthetic oligonucleotide
tgctgacattctatctttgcgagtattgggagtttgaccaattactcactgctgtactgg

SEQ ID NO: 470010 - DNA, 60 bp, Artificial
  Synthetic oligonucleotide
tgctgacattgaggactcagatataaagagaaaggtactgtttcaactgagtgagcgcga

SEQ ID NO: 470011 - DNA, 55 bp, Artificial
  Synthetic oligonucleotide
tgctgacccaattgacattatcccgttggctactaacgtttctagttggagacca

SEQ ID NO: 470012 - DNA, 58 bp, Artificial
  Synthetic oligonucleotide
tgctgacccctctacatccctcgttatccttctcggagatccactccaaggagagtac

SEQ ID NO: 470013 - DNA, 55 bp, Artificial
  Synthetic oligonucleotide
tgctgaccggattttgacatggggcagctctggggtatttttcggcgacctgggc

SEQ ID NO: 470014 - DNA, 60 bp, Artificial
  Synthetic oligonucleotide
tgctgacctatttagacaggcaatctcatactttgctatcttgttcctagctgcaagatc

SEQ ID NO: 470015 - DNA, 60 bp, Artificial
  Synthetic oligonucleotide
tgctgacgactagctgcggcaatacccttacatgttacttgaaggcctctgcggcctgtc

SEQ ID NO: 470016 - DNA, 55 bp, Artificial
  Synthetic oligonucleotide
tgctgacgccccagccctagaaccggccctagacgacggggcgatacatacgtta

SEQ ID NO: 470017 - DNA, 60 bp, Artificial
  Synthetic oligonucleotide
tgctgacggcccatctaggcataaaccgcctgattggacggctcttacatacacccctct

SEQ ID NO: 470018 - DNA, 60 bp, Artificial
  Synthetic oligonucleotide
tgctgacgttatctgggtggagccaagcccttaaattgtgcgtaacgtgacgattacagc

SEQ ID NO: 470019 - DNA, 51 bp, Artificial
  Synthetic oligonucleotide
tgctgactactctaggtgggactcaactcaacaaagaagcatcttgtccgc

SEQ ID NO: 470020 - DNA, 53 bp, Artificial
  Synthetic oligonucleotide
tgctgactggggttacgttttgactggggttgccaccccaggacttaggggag

SEQ ID NO: 470021 - DNA, 55 bp, Artificial
  Synthetic oligonucleotide
tgctgagagaatttaccccgacttcatctcagtaccgttgaacatgcaagtgacc

SEQ ID NO: 470022 - DNA, 60 bp, Artificial
  Synthetic oligonucleotide
tgctgagagcaatatcgatcaacttgatatccttccttccttgtgattcaaggagctttc

SEQ ID NO: 470023 - DNA, 58 bp, Artificial
  Synthetic oligonucleotide
tgctgagcgcgaggcgaccggaaccgcacgcggacatgttcctacggacggcggaaac

SEQ ID NO: 470024 - DNA, 59 bp, Artificial
  Synthetic oligonucleotide
tgctgagcgtcggagagggacgactcaggtagggtgagagcctacgagttttttgctac

SEQ ID NO: 470025 - DNA, 60 bp, Artificial
  Synthetic oligonucleotide
tgctgaggaagacggcactggttgtttcgaaatatttcacaagtgtgatgacgactgtat

SEQ ID NO: 470026 - DNA, 55 bp, Artificial
  Synthetic oligonucleotide
tgctgagggatactcccatactggactatatccggactgctttctgtgagggtcg

SEQ ID NO: 470027 - DNA, 60 bp, Artificial
  Synthetic oligonucleotide
tgctgagtcacttgtttttgactactgcgtgactgatcttgaaactaagaattcaagcat

SEQ ID NO: 470028 - DNA, 60 bp, Artificial
  Synthetic oligonucleotide
tgctgagtgcccatttctccctaaagctcaaggcagtgcagacaagttactgtctaccat

SEQ ID NO: 470029 - DNA, 55 bp, Artificial
  Synthetic oligonucleotide
tgctgatattactttcagctctagcagatgcttttagcgtactggcgccagattt

SEQ ID NO: 470030 - DNA, 56 bp, Artificial
  Synthetic oligonucleotide
tgctgatcaagttacccttggtaatctttacgatttggacccaattgggcagattg

SEQ ID NO: 470031 - DNA, 60 bp, Artificial
  Synthetic oligonucleotide
tgctgatccacgtattgacttcgtgctagttaaagtccccactgcggtgtgggctaagct

SEQ ID NO: 470032 - DNA, 60 bp, Artificial
  Synthetic oligonucleotide
tgctgatcctgttgactcccaatctactcttgagatagctggactagttaggaagaattt

SEQ ID NO: 470033 - DNA, 51 bp, Artificial
  Synthetic oligonucleotide
tgctgatcgaagcagtaaccaatcacttcaatacggccacactgctacctt

SEQ ID NO: 470034 - DNA, 51 bp, Artificial
  Synthetic oligonucleotide
tgctgatcgatgctatcgatcgactgaacccagcgtattgaacattgctca

SEQ ID NO: 470035 - DNA, 53 bp, Artificial
  Synthetic oligonucleotide
tgctgatcggtgccggcacgcgtatcgagacaggcgacggtgccgtctcattc

SEQ ID NO: 470036 - DNA, 55 bp, Artificial
  Synthetic oligonucleotide
tgctgatgaacaggggataactgattatatccatatgctaggggaagcttttggc

SEQ ID NO: 470037 - DNA, 60 bp, Artificial
  Synthetic oligonucleotide
tgctgatgcagatatagctcatagtaaattagctgacgtaacatctagccaagtcttaat

SEQ ID NO: 470038 - DNA, 60 bp, Artificial
  Synthetic oligonucleotide
tgctgatgtccccgaactgtcgggttccgttgatttgactcgcattagtaaagctgtcgc

SEQ ID NO: 470039 - DNA, 60 bp, Artificial
  Synthetic oligonucleotide
tgctgatgtgaacacagtaacccgactaaggcgggtaagtcaagcgcttctagcaggcaa

SEQ ID NO: 470040 - DNA, 60 bp, Artificial
  Synthetic oligonucleotide
tgctgattaaagaagcaaacatcgcaattgcacaaattcaagcggcttccgcttttaaaa

SEQ ID NO: 470041 - DNA, 58 bp, Artificial
  Synthetic oligonucleotide
tgctgattcaattggtgtattggggtaacttatatactagaaccctctatagaactat

SEQ ID NO: 470042 - DNA, 55 bp, Artificial
  Synthetic oligonucleotide
tgctgattcacagcatcggtctcacagacagatggctactaccaccaatccacta

SEQ ID NO: 470043 - DNA, 55 bp, Artificial
  Synthetic oligonucleotide
tgctgattcgagcgggtttcgtccgcctctactgcgctcaagcgcttcgcagcga

SEQ ID NO: 470044 - DNA, 59 bp, Artificial
  Synthetic oligonucleotide
tgctgattggtgagggaccttgtgaaccaggggattgtggaggaaaactcttgtgcaaa

SEQ ID NO: 470045 - DNA, 53 bp, Artificial
  Synthetic oligonucleotide
tgctgcaaagccatgtgcagatgctaggcaggatatgggtgcatgtcctcctt

SEQ ID NO: 470046 - DNA, 57 bp, Artificial
  Synthetic oligonucleotide
tgctgcaacctgttcgagaaatttttccctagtagttcatacaggagaccggttgga

SEQ ID NO: 470047 - DNA, 60 bp, Artificial
  Synthetic oligonucleotide
tgctgcaatctattcgagaaattcttccccagcagttcatatcggagtccagttggaatg

SEQ ID NO: 470048 - DNA, 60 bp, Artificial
  Synthetic oligonucleotide
tgctgcaatggaggcttgcttgatcatagaatgagagttccagatctctaaccagacaca

SEQ ID NO: 470049 - DNA, 60 bp, Artificial
  Synthetic oligonucleotide
tgctgcacatataaacctactaaagacataggtaagaaagctaattgctggttctggcac

SEQ ID NO: 470050 - DNA, 60 bp, Artificial
  Synthetic oligonucleotide
tgctgcagagagtttgttatctctgacgcgtctgtcgttcgcgtatcgtgcaccgacaat

SEQ ID NO: 470051 - DNA, 60 bp, Artificial
  Synthetic oligonucleotide
tgctgcagcatcgttctgtgttgtttctgtctgagcgtgtttttgtatttgtctgaaaat

SEQ ID NO: 470052 - DNA, 60 bp, Artificial
  Synthetic oligonucleotide
tgctgcaggctcgtatgtctttgagaatcctttatacgattcaaaggcgtacgaacctgc

SEQ ID NO: 470053 - DNA, 60 bp, Artificial
  Synthetic oligonucleotide
tgctgcaggttcagcgatgatcggtgtagtaacgttatttcgtatcaattgaacgcgata

SEQ ID NO: 470054 - DNA, 58 bp, Artificial
  Synthetic oligonucleotide
tgctgcataagacctacgcacgccgagacgctaggcgaatcacttggacacctctggc

SEQ ID NO: 470055 - DNA, 60 bp, Artificial
  Synthetic oligonucleotide
tgctgcatcagtctcttgttggaaagcagtctcctttccagaatgcctacaacgtcaaag

SEQ ID NO: 470056 - DNA, 60 bp, Artificial
  Synthetic oligonucleotide
tgctgcattcattggctgcgtgaacgtcgcagcaacctcctcctttgttctacctcggag

SEQ ID NO: 470057 - DNA, 60 bp, Artificial
  Synthetic oligonucleotide
tgctgcattttcctctttgtcgaggaagtctttatagctagccccctctccaggattgca

SEQ ID NO: 470058 - DNA, 60 bp, Artificial
  Synthetic oligonucleotide
tgctgccaccatacgatttatggtgaatcagcttgggctgttcgatgaacgaagtcctga

SEQ ID NO: 470059 - DNA, 58 bp, Artificial
  Synthetic oligonucleotide
tgctgccacctgacaatacaggttggcattcacgcctacaccaaacccctcgcggccc

SEQ ID NO: 470060 - DNA, 60 bp, Artificial
  Synthetic oligonucleotide
tgctgccagaaaaggacagctggactgtcaatgacatacagaaattagtgggaaagttaa

SEQ ID NO: 470061 - DNA, 59 bp, Artificial
  Synthetic oligonucleotide
tgctgccatagcaaatcttagtccatcttacggttgtgtgaattggacaaaccaaaatt

SEQ ID NO: 470062 - DNA, 59 bp, Artificial
  Synthetic oligonucleotide
tgctgcccccgtggcaggaaacattatctgtaactcaaatattacaggactactattaa

SEQ ID NO: 470063 - DNA, 60 bp, Artificial
  Synthetic oligonucleotide
tgctgccgtctggtttgccgtggctagatccgcgattgttagttgaggcctaggccttat

SEQ ID NO: 470064 - DNA, 60 bp, Artificial
  Synthetic oligonucleotide
tgctgcctccagtgtgaagagcaatgcatcaggcaataaaccttccagtttggtttgagg

SEQ ID NO: 470065 - DNA, 60 bp, Artificial
  Synthetic oligonucleotide
tgctgcctctctgctggcaataaagcctcggatcgagaaccacttcgtgctgacgtaccc

SEQ ID NO: 470066 - DNA, 60 bp, Artificial
  Synthetic oligonucleotide
tgctgcctgcgtctgtgggaggtgtccctaccaacatgaagagacgacgttggaccaacc

SEQ ID NO: 470067 - DNA, 54 bp, Artificial
  Synthetic oligonucleotide
tgctgcctgcttttggacagagctgtttgggtttgaaccttggagagcagtgga

SEQ ID NO: 470068 - DNA, 60 bp, Artificial
  Synthetic oligonucleotide
tgctgcctgtattcgatgacgcagtgatctatcttcatgcagctacgactgagtctagct

SEQ ID NO: 470069 - DNA, 60 bp, Artificial
  Synthetic oligonucleotide
tgctgccttagcctcataccctaaacggttagcagccgcccaaagatacgcaacgcaaga

SEQ ID NO: 470070 - DNA, 50 bp, Artificial
  Synthetic oligonucleotide
tgctgcgaatactaagagcggattaaatctgctcgcttagagaactctca

SEQ ID NO: 470071 - DNA, 60 bp, Artificial
  Synthetic oligonucleotide
tgctgcgcctggtcttggaagtgcattggctaaggccggcggaggtgctacgcaaagatt

SEQ ID NO: 470072 - DNA, 60 bp, Artificial
  Synthetic oligonucleotide
tgctgcgcgtatggggagtggccaaattatctcccagacaatgaggcgacagcaattgat

SEQ ID NO: 470073 - DNA, 57 bp, Artificial
  Synthetic oligonucleotide
tgctgcggaccaaaaaagcacacaaaatgccattaacgggattacaaacaaggtgaa

SEQ ID NO: 470074 - DNA, 55 bp, Artificial
  Synthetic oligonucleotide
tgctgcggatcaacttttgtcagtatgtgggatccattgcttaatgactttcccg

SEQ ID NO: 470075 - DNA, 60 bp, Artificial
  Synthetic oligonucleotide
tgctgcgtcatctgtatcgagaacgcagactatgaggtccgtgggatcaacggcttcagc

SEQ ID NO: 470076 - DNA, 55 bp, Artificial
  Synthetic oligonucleotide
tgctgcgtccactacctttgaagcacaaactaaaactgttaaccttagagggact

SEQ ID NO: 470077 - DNA, 58 bp, Artificial
  Synthetic oligonucleotide
tgctgcgttctattatagagtatagatatatcttagattagaattgtatgatgtgacc

SEQ ID NO: 470078 - DNA, 60 bp, Artificial
  Synthetic oligonucleotide
tgctgcgtttactagtcctgctctgttagtgaaggagagttgtcaggatatgataacgat

SEQ ID NO: 470079 - DNA, 55 bp, Artificial
  Synthetic oligonucleotide
tgctgctaattgccgccgctctgcgttgcgcggcctccctcctgtcgaccggact

SEQ ID NO: 470080 - DNA, 60 bp, Artificial
  Synthetic oligonucleotide
tgctgctaggaacatagtgagaagagcaacagtatcagcagacccattagcatccctatt

SEQ ID NO: 470081 - DNA, 54 bp, Artificial
  Synthetic oligonucleotide
tgctgctatgtgttatggttctactacaacgaatttagttcgagggcagaatac

SEQ ID NO: 470082 - DNA, 60 bp, Artificial
  Synthetic oligonucleotide
tgctgctcaatgtcttatacctggacaggcgcacttgtcaccccgtgcgccgcggaagaa

SEQ ID NO: 470083 - DNA, 60 bp, Artificial
  Synthetic oligonucleotide
tgctgctgaacgtgttaggagcgggggatgagattccagatccgttaagcccaggtgagc

SEQ ID NO: 470084 - DNA, 60 bp, Artificial
  Synthetic oligonucleotide
tgctgctgactacgcgtcacgtctgcactcggtacttggtacagcaaatgccccactgag

SEQ ID NO: 470085 - DNA, 60 bp, Artificial
  Synthetic oligonucleotide
tgctgctgtgatcaactatcctgtttccgtaccttgttataatctggagtctggtagatt

SEQ ID NO: 470086 - DNA, 59 bp, Artificial
  Synthetic oligonucleotide
tgctgcttaacacttggactaagacccctaagtattcctctgttacacttgctcctgcc

SEQ ID NO: 470087 - DNA, 60 bp, Artificial
  Synthetic oligonucleotide
tgctgcttgggcaggattctatcttggaaaagtgtctaaaggcactcattaagattgtta

SEQ ID NO: 470088 - DNA, 60 bp, Artificial
  Synthetic oligonucleotide
tgctgcttgttgatccgtatgggtcaatggcccatcctgtagttgatgtcctcacgattt

SEQ ID NO: 470089 - DNA, 55 bp, Artificial
  Synthetic oligonucleotide
tgctgctttccacaaactgaaccacgacacttcttgtgggccatatctaggtggt

SEQ ID NO: 470090 - DNA, 60 bp, Artificial
  Synthetic oligonucleotide
tgctggaacaagggattactgttcagtcttgcacttcaatagtccaagtgtggatgaaat

SEQ ID NO: 470091 - DNA, 55 bp, Artificial
  Synthetic oligonucleotide
tgctggaaccatggcatctgtgcaggatgacctgagaggacagggtgtctcctgg

SEQ ID NO: 470092 - DNA, 59 bp, Artificial
  Synthetic oligonucleotide
tgctggaacttcgatgttgcagatcgaagtaacgggcattacggatttggactttgccc

SEQ ID NO: 470093 - DNA, 55 bp, Artificial
  Synthetic oligonucleotide
tgctggaattcctagtgataccccaagaggggaagatgcccaatttacgggttct

SEQ ID NO: 470094 - DNA, 60 bp, Artificial
  Synthetic oligonucleotide
tgctggagcgcatcagaacgccgacccagtcgtactagatgttagctggatatcgctgtg

SEQ ID NO: 470095 - DNA, 60 bp, Artificial
  Synthetic oligonucleotide
tgctggaggcctccactatgaaatcgcgtagaggctttactattcagcgtttgatgaatg

SEQ ID NO: 470096 - DNA, 60 bp, Artificial
  Synthetic oligonucleotide
tgctggaggtgtcacggccacacccactggagggtgtgttaggttgatgggtctatctgc

SEQ ID NO: 470097 - DNA, 55 bp, Artificial
  Synthetic oligonucleotide
tgctggagtagatcaacaaacttgggcggataatctaccaaacccctgtatggct

SEQ ID NO: 470098 - DNA, 55 bp, Artificial
  Synthetic oligonucleotide
tgctggatgtcggataatatttccaaggcatcgacatttgtttcgtttgacctcg

SEQ ID NO: 470099 - DNA, 60 bp, Artificial
  Synthetic oligonucleotide
tgctggattagcagcattgctagaaataccgttggatgactgtttagtgccttgtaattt

SEQ ID NO: 470100 - DNA, 55 bp, Artificial
  Synthetic oligonucleotide
tgctggatttacatgcaaaggtccatcaatagtagaatgtatggaatgtcgcaag

SEQ ID NO: 470101 - DNA, 60 bp, Artificial
  Synthetic oligonucleotide
tgctggatttgactattcatgtgctattaatgcaccagctaatatacaacagttcgagca

SEQ ID NO: 470102 - DNA, 58 bp, Artificial
  Synthetic oligonucleotide
tgctggcactaccctccaaaaccctgcggtattgtgcccgcaaggggagtgtgtggcc

SEQ ID NO: 470103 - DNA, 60 bp, Artificial
  Synthetic oligonucleotide
tgctggcagatctatattcaaatatagacgaattcgaatcagtttcagacctcattgaga

SEQ ID NO: 470104 - DNA, 55 bp, Artificial
  Synthetic oligonucleotide
tgctggcagctctaggcttctaaccgttggacatccatactataaagttacctca

SEQ ID NO: 470105 - DNA, 60 bp, Artificial
  Synthetic oligonucleotide
tgctggcagggactcttctattcttgtaatgggagaccctgcacaaagtagctatgattc

SEQ ID NO: 470106 - DNA, 55 bp, Artificial
  Synthetic oligonucleotide
tgctggcaggtctcatggcagtgtcttacgtggtatcaggaaaagcaacagacat

SEQ ID NO: 470107 - DNA, 60 bp, Artificial
  Synthetic oligonucleotide
tgctggccgctgtggcagcttactgcctagcgaccggctgcgtttccatcattggccgcc

SEQ ID NO: 470108 - DNA, 60 bp, Artificial
  Synthetic oligonucleotide
tgctggcgagacaacttacagctaatacaagcgcacttagaatctctaagttgcttaagc

SEQ ID NO: 470109 - DNA, 54 bp, Artificial
  Synthetic oligonucleotide
tgctggcgagagtgctactacgctgggagctatcaacgcaggcacgttctatca

SEQ ID NO: 470110 - DNA, 60 bp, Artificial
  Synthetic oligonucleotide
tgctggcgttgactcactagatgatcttatcaagtgggtgctgaactcggatctcattcc

SEQ ID NO: 470111 - DNA, 60 bp, Artificial
  Synthetic oligonucleotide
tgctggctagcactacagctaaggctatggaacagatggctggatcgagtgaacaggcag

SEQ ID NO: 470112 - DNA, 59 bp, Artificial
  Synthetic oligonucleotide
tgctggcttctgcgggtgtaatcgatgcactgacatccgcggtcggtacatcagtccgt

SEQ ID NO: 470113 - DNA, 60 bp, Artificial
  Synthetic oligonucleotide
tgctgggaacagatgtacaccccaggtggggaagtaagaaatgatgatgttgaccagagt

SEQ ID NO: 470114 - DNA, 59 bp, Artificial
  Synthetic oligonucleotide
tgctgggagatttgaaaaggctaagaagtctaacttggttcagcctttgcggcctcata

SEQ ID NO: 470115 - DNA, 54 bp, Artificial
  Synthetic oligonucleotide
tgctgggctaacattcgctccaactactacaattgacggcactaagcaaatttt

SEQ ID NO: 470116 - DNA, 60 bp, Artificial
  Synthetic oligonucleotide
tgctggggcacttcccacacgaatattgtgacgtgccaggtatcattggcttggtctcgg

SEQ ID NO: 470117 - DNA, 56 bp, Artificial
  Synthetic oligonucleotide
tgctggggtgaccaaagggtcggatggttttcgtgatacaactctgagttgttgta

SEQ ID NO: 470118 - DNA, 60 bp, Artificial
  Synthetic oligonucleotide
tgctgggttgcggcactgtctcactattacaccctgtgtgacgtgaccaatcacgtgact

SEQ ID NO: 470119 - DNA, 55 bp, Artificial
  Synthetic oligonucleotide
tgctggtaaggctgagtgcgatagagcagcaagcaactggaacaagctgtactcg

SEQ ID NO: 470120 - DNA, 53 bp, Artificial
  Synthetic oligonucleotide
tgctggtcttactcatctgatgatttggcactccaatctcaatgacaccacct

SEQ ID NO: 470121 - DNA, 50 bp, Artificial
  Synthetic oligonucleotide
tgctggtgcgacaaacaagccgtgtatgtccagtatggacgttgcacgag

SEQ ID NO: 470122 - DNA, 55 bp, Artificial
  Synthetic oligonucleotide
tgctggtgtatgttgcaagttacaatgaagttgacacactgtctaagctcttgac

SEQ ID NO: 470123 - DNA, 52 bp, Artificial
  Synthetic oligonucleotide
tgctggtgtcagtgcttcattcagggggtagggtcacggcggcacgattcac

SEQ ID NO: 470124 - DNA, 60 bp, Artificial
  Synthetic oligonucleotide
tgctggttcgagcggcgcatgctgagtggggactgtcggcgccgatcgctacgttcggtg

SEQ ID NO: 470125 - DNA, 58 bp, Artificial
  Synthetic oligonucleotide
tgctggttctcacaaacgacgacaaagggaactcgtaattcgatctccggtgagaatg

SEQ ID NO: 470126 - DNA, 60 bp, Artificial
  Synthetic oligonucleotide
tgctggttgatgatgtctttaatgctagttgggttacagcatctacattctcgcctcata

SEQ ID NO: 470127 - DNA, 55 bp, Artificial
  Synthetic oligonucleotide
tgctggtttcccctgacgtccagtccatccccgtgtctggagaacggagactccg

SEQ ID NO: 470128 - DNA, 58 bp, Artificial
  Synthetic oligonucleotide
tgctgtaaacttttgggcttagatctaaatgcccacacaaataattgtgagggcccaa

SEQ ID NO: 470129 - DNA, 50 bp, Artificial
  Synthetic oligonucleotide
tgctgtaagatttggggaaagtgaacaaatcattgttaccagggagccat

SEQ ID NO: 470130 - DNA, 51 bp, Artificial
  Synthetic oligonucleotide
tgctgtaatcatatctccactgagtaaatgtgccgtagttagcaagggtcc

SEQ ID NO: 470131 - DNA, 60 bp, Artificial
  Synthetic oligonucleotide
tgctgtaatgcgtcccgaacttgttgcagcgctagatagatatttctcagaaatcataag

SEQ ID NO: 470132 - DNA, 60 bp, Artificial
  Synthetic oligonucleotide
tgctgtacaataagatggagtttgaaccatttcaatccttggtacctaaggctgccagag

SEQ ID NO: 470133 - DNA, 60 bp, Artificial
  Synthetic oligonucleotide
tgctgtacgaagtataacgtataagtataagctgtgctaagattgaaattgtcggccacg

SEQ ID NO: 470134 - DNA, 51 bp, Artificial
  Synthetic oligonucleotide
tgctgtacgacgagactgttaaggatgatgtcgtacaagatgttagtgccg

SEQ ID NO: 470135 - DNA, 55 bp, Artificial
  Synthetic oligonucleotide
tgctgtacgtgtgtataataaagttgcacccttgtgagtaactggtgtgctagtt

SEQ ID NO: 470136 - DNA, 55 bp, Artificial
  Synthetic oligonucleotide
tgctgtagagctttgtgttcctgggtttcatggttgggcaactgcagcactgcta

SEQ ID NO: 470137 - DNA, 55 bp, Artificial
  Synthetic oligonucleotide
tgctgtagcctactacagaggcttagacgtttcggtgattcccacttctggggac

SEQ ID NO: 470138 - DNA, 55 bp, Artificial
  Synthetic oligonucleotide
tgctgtatcaataccatttgttaaaatactcttaggttctctatcagacttacca

SEQ ID NO: 470139 - DNA, 55 bp, Artificial
  Synthetic oligonucleotide
tgctgtcaacccgtggaagacaggctgtgaaagacaacaaaggaaccaggataag

SEQ ID NO: 470140 - DNA, 60 bp, Artificial
  Synthetic oligonucleotide
tgctgtcaatgaatgttgagggacgtgatgcagatgtcaaaggaaatctactcaagatga

SEQ ID NO: 470141 - DNA, 60 bp, Artificial
  Synthetic oligonucleotide
tgctgtcactgagattcaattcgaccctccttcttttacggatgccgatttcaatcccta

SEQ ID NO: 470142 - DNA, 60 bp, Artificial
  Synthetic oligonucleotide
tgctgtccaattttagatgtgcgtgatggtgctaggcataccgatcgatatatatccttg

SEQ ID NO: 470143 - DNA, 55 bp, Artificial
  Synthetic oligonucleotide
tgctgtccagtcgttgaccacttctacccggacattgcatctgacctgccagtgc

SEQ ID NO: 470144 - DNA, 60 bp, Artificial
  Synthetic oligonucleotide
tgctgtccccctcttgcagatcgtccatcgatctgaaactctccccattcgagggtgtct

SEQ ID NO: 470145 - DNA, 60 bp, Artificial
  Synthetic oligonucleotide
tgctgtcgctcctagttcatacgagatggatacaggtacgttatctaggaatggtgattt

SEQ ID NO: 470146 - DNA, 55 bp, Artificial
  Synthetic oligonucleotide
tgctgtcgctcctggactcaacgatgcgtcgagctctgctccctcggtagaccag

SEQ ID NO: 470147 - DNA, 60 bp, Artificial
  Synthetic oligonucleotide
tgctgtctcgcatgaagctgaaggggtatccttcttaagccgaaaagtccgtgagcactg

SEQ ID NO: 470148 - DNA, 57 bp, Artificial
  Synthetic oligonucleotide
tgctgtgaggggttgttcacccggtagaatcagtgccactttccgtagggctaagat

SEQ ID NO: 470149 - DNA, 55 bp, Artificial
  Synthetic oligonucleotide
tgctgtgagtgcggtgtttgatttggaaaccgagcttgaaaggatgcacggtgtg

SEQ ID NO: 470150 - DNA, 55 bp, Artificial
  Synthetic oligonucleotide
tgctgtgatgcatctgcccgctgaggcgttgttgccggacggggtttataccacc

SEQ ID NO: 470151 - DNA, 60 bp, Artificial
  Synthetic oligonucleotide
tgctgtgattgattggcttcgaacttttgtccacatgttcccagacagtggatcattagt

SEQ ID NO: 470152 - DNA, 60 bp, Artificial
  Synthetic oligonucleotide
tgctgtgccaaatgcttatactacttgcgcggcgctatagcgccgcgctagtgggccccc

SEQ ID NO: 470153 - DNA, 60 bp, Artificial
  Synthetic oligonucleotide
tgctgtgctagccaaacaacttatgcagaacatacagttgtactttgtccccagtaaata

SEQ ID NO: 470154 - DNA, 60 bp, Artificial
  Synthetic oligonucleotide
tgctgtgctgcatctcgagtacgccgttggttccacccctctcatggtctccggcgatga

SEQ ID NO: 470155 - DNA, 60 bp, Artificial
  Synthetic oligonucleotide
tgctgtggagcgcaggaatgccctaaggtatataggcccgatgagcagtgcaaggtcttt

SEQ ID NO: 470156 - DNA, 58 bp, Artificial
  Synthetic oligonucleotide
tgctgtggccccccataaggggggtcgtaagccagcccgcctgattgtgtatcctgac

SEQ ID NO: 470157 - DNA, 60 bp, Artificial
  Synthetic oligonucleotide
tgctgtggtggcccctctaacttattcaactggagcgtccaccagcctggatataacagc

SEQ ID NO: 470158 - DNA, 60 bp, Artificial
  Synthetic oligonucleotide
tgctgtgtgcaacaaacctggggcaccctctcatcctagacacctgcaccatcgaaggac

SEQ ID NO: 470159 - DNA, 60 bp, Artificial
  Synthetic oligonucleotide
tgctgtgttaaattgaccgccatggatctagagcttccagtttccgcaaagttactacac

SEQ ID NO: 470160 - DNA, 52 bp, Artificial
  Synthetic oligonucleotide
tgctgtgttgtcttgccttgcggagtgttgcacagcactcctccgggatgag

SEQ ID NO: 470161 - DNA, 55 bp, Artificial
  Synthetic oligonucleotide
tgctgttaggttattcgatccaatgttctccgacgccgttgctaatctcccctcc

SEQ ID NO: 470162 - DNA, 60 bp, Artificial
  Synthetic oligonucleotide
tgctgttcgtgctaacactgaacgcacccatgtagaaactgaccgctcaaaacaggaggt

SEQ ID NO: 470163 - DNA, 60 bp, Artificial
  Synthetic oligonucleotide
tgctgttgcaggatcactgcagctacgtctttttaacacagatggggattgtcagcctga

SEQ ID NO: 470164 - DNA, 60 bp, Artificial
  Synthetic oligonucleotide
tgctgttgcccaatttttgagtgctccttgctctggtttgtccaaccagagtttaaatga

SEQ ID NO: 470165 - DNA, 55 bp, Artificial
  Synthetic oligonucleotide
tgctgttgcccctctgacgggcgacgaccgtgttggcaagacacgtcgaccgata

SEQ ID NO: 470166 - DNA, 59 bp, Artificial
  Synthetic oligonucleotide
tgctgttgcccctgactaccgggtcgaacataaccccaagaggctcgaggctgcttatc

SEQ ID NO: 470167 - DNA, 59 bp, Artificial
  Synthetic oligonucleotide
tgctgttgctaaagtgatagcatcatcagtgtatttcttgagtgcagcaattttccagg

SEQ ID NO: 470168 - DNA, 60 bp, Artificial
  Synthetic oligonucleotide
tgctgttggtaaacaaattggtaatttgctagatgctagattgcaaatgagcacgaccgg

SEQ ID NO: 470169 - DNA, 59 bp, Artificial
  Synthetic oligonucleotide
tgctgttgtccccactgtccacggcacaaacaggcgtcgttcatggacctaccggccca

SEQ ID NO: 470170 - DNA, 60 bp, Artificial
  Synthetic oligonucleotide
tgctgtttcaaaattggggagttgaacctatcgataatgtcatgggaatgattggaatat

SEQ ID NO: 470171 - DNA, 60 bp, Artificial
  Synthetic oligonucleotide
tgctgtttcgttgaacaattgtgcgtattacacacagttggacgacgctgtatgggaggt

SEQ ID NO: 470172 - DNA, 58 bp, Artificial
  Synthetic oligonucleotide
tgctgtttctgaggtcttatcatttaacaagaatatagtccctcctcctcctaaaaga

SEQ ID NO: 470173 - DNA, 51 bp, Artificial
  Synthetic oligonucleotide
tgcttaaattgcttttgatcagtgggttctctataaaagtgtatgaactgc

SEQ ID NO: 470174 - DNA, 60 bp, Artificial
  Synthetic oligonucleotide
tgcttaaccttgacgagtcggatataatgcacgacctcacgcagttcgcgctatgagcca

SEQ ID NO: 470175 - DNA, 56 bp, Artificial
  Synthetic oligonucleotide
tgcttaactgcgcccgcgtcggcctaccaagtacgcaactcctcgggcctttacca

SEQ ID NO: 470176 - DNA, 55 bp, Artificial
  Synthetic oligonucleotide
tgcttaagctgatgcacctcaccagggaagaagactccgagggtctgcttgagtg

SEQ ID NO: 470177 - DNA, 55 bp, Artificial
  Synthetic oligonucleotide
tgcttaagtttcgtgctggagctacccggctgtaaaacccgatagttaatcactc

SEQ ID NO: 470178 - DNA, 57 bp, Artificial
  Synthetic oligonucleotide
tgcttacaaacctccttcgtctaaggttgtaagtcatgtggaaactgttctgaataa

SEQ ID NO: 470179 - DNA, 58 bp, Artificial
  Synthetic oligonucleotide
tgcttacaagacttcggtctgtggttcacttaaatcgaaccattggagtgatccaacg

SEQ ID NO: 470180 - DNA, 60 bp, Artificial
  Synthetic oligonucleotide
tgcttacaagcaatcaagatacgtatcccggggctctctgccgggtgcaacaagataatc

SEQ ID NO: 470181 - DNA, 58 bp, Artificial
  Synthetic oligonucleotide
tgcttacactctaggttatggtggacatgagaaaccacgactagtggagaccctggga

SEQ ID NO: 470182 - DNA, 60 bp, Artificial
  Synthetic oligonucleotide
tgcttacaggcaacctccaaacattgaggattagaatacatgaggggtatgaggagttca

SEQ ID NO: 470183 - DNA, 60 bp, Artificial
  Synthetic oligonucleotide
tgcttacaggcaatctccaaacattgaaaataggagtacatgaggggtatgaggaattca

SEQ ID NO: 470184 - DNA, 56 bp, Artificial
  Synthetic oligonucleotide
tgcttaccagaaaagccgtcgaccatctaaacaagggaggtacctgtgttgcccta

SEQ ID NO: 470185 - DNA, 58 bp, Artificial
  Synthetic oligonucleotide
tgcttacccctaacctcttgcagccaatggacagcccgatgtcgggacctggtgaggg

SEQ ID NO: 470186 - DNA, 55 bp, Artificial
  Synthetic oligonucleotide
tgcttacctgtcagcacatcagtaccgatataagcgccacggagaatataacgca

SEQ ID NO: 470187 - DNA, 51 bp, Artificial
  Synthetic oligonucleotide
tgcttacgaccaacacccgtcgaataacccttatgagggctgggcgtgcca

SEQ ID NO: 470188 - DNA, 60 bp, Artificial
  Synthetic oligonucleotide
tgcttacgggcaacctccaaacactgagaatcagagtacatgagggatacgaggaattca

SEQ ID NO: 470189 - DNA, 58 bp, Artificial
  Synthetic oligonucleotide
tgcttacgggcctacgcggcccctcaaaccgcggctggagatgttagcaccgctccca

SEQ ID NO: 470190 - DNA, 57 bp, Artificial
  Synthetic oligonucleotide
tgcttagacccgggaccactgtggtctttacacctggcgagcgttccagcactactt

SEQ ID NO: 470191 - DNA, 60 bp, Artificial
  Synthetic oligonucleotide
tgcttagacgctggcagatagtgggcgactttcagtgggctaatacagtaacccctggca

SEQ ID NO: 470192 - DNA, 55 bp, Artificial
  Synthetic oligonucleotide
tgcttagccatagccacaagatctttcctcgcaactcgcagctctctagccaacg

SEQ ID NO: 470193 - DNA, 58 bp, Artificial
  Synthetic oligonucleotide
tgcttagcccgaatgttcatttgagtccttgacgaatgcgtcccgtctgtcccgacgg

SEQ ID NO: 470194 - DNA, 56 bp, Artificial
  Synthetic oligonucleotide
tgcttagctgtgagtcctccggcccctgaatgcggctaacctaaaccccggagcct

SEQ ID NO: 470195 - DNA, 55 bp, Artificial
  Synthetic oligonucleotide
tgcttagggtcttcggttcattatcgacgccgagtgacgacggctagggggaaaa

SEQ ID NO: 470196 - DNA, 54 bp, Artificial
  Synthetic oligonucleotide
tgcttagtgagtgttgagtttaacccaagcataacatcggcattgatgtcagaa

SEQ ID NO: 470197 - DNA, 53 bp, Artificial
  Synthetic oligonucleotide
tgcttatagcctacacaccgccaggaggcccattgcccaaggaccgagcgacc

SEQ ID NO: 470198 - DNA, 60 bp, Artificial
  Synthetic oligonucleotide
tgcttatcggaagctggtatactatatcgaacgcccgagctatgtcgataagagtgttgc

SEQ ID NO: 470199 - DNA, 60 bp, Artificial
  Synthetic oligonucleotide
tgcttatctcctctagctgctcattgtgccgataggactctccgtcgtgacaacgtgaag

SEQ ID NO: 470200 - DNA, 60 bp, Artificial
  Synthetic oligonucleotide
tgcttatgaggaccgccgtgtcctcatacgtgggggcctgccttcgggctgtgctgctac

SEQ ID NO: 470201 - DNA, 56 bp, Artificial
  Synthetic oligonucleotide
tgcttatgctccaaatacgtcatcccagaagaacattggaaagacgcagaaagaag

SEQ ID NO: 470202 - DNA, 57 bp, Artificial
  Synthetic oligonucleotide
tgcttatgtctcctcgtcttttagtgtcggcaccacagttaggtgccacgtttagtt

SEQ ID NO: 470203 - DNA, 50 bp, Artificial
  Synthetic oligonucleotide
tgcttattgactttcctagaatttcctaaacctacattattacactttga

SEQ ID NO: 470204 - DNA, 59 bp, Artificial
  Synthetic oligonucleotide
tgcttcaagcttacaggccccgacacctgaactagcagcttacgaaactcctttgcact

SEQ ID NO: 470205 - DNA, 60 bp, Artificial
  Synthetic oligonucleotide
tgcttcacctgcgcacaacattcgagcgtgagaccatcgctggcaagccttacatctatg

SEQ ID NO: 470206 - DNA, 59 bp, Artificial
  Synthetic oligonucleotide
tgcttcactacgttcataattcaagacaggttcaacccaccttattcagaccgtggtga

SEQ ID NO: 470207 - DNA, 54 bp, Artificial
  Synthetic oligonucleotide
tgcttcagcgtaaaaagaatacctggaaaatcgtcatctattgtcaaatgcacg

SEQ ID NO: 470208 - DNA, 60 bp, Artificial
  Synthetic oligonucleotide
tgcttcaggcaacataaatcatgcattcgttacttcaaaggatcaatcttgcctgaaatc

SEQ ID NO: 470209 - DNA, 55 bp, Artificial
  Synthetic oligonucleotide
tgcttcaggtgacccaactctgccagactctttagagaccccacacgctgcttgg

SEQ ID NO: 470210 - DNA, 60 bp, Artificial
  Synthetic oligonucleotide
tgcttcaggttggttgtactatggcttgtccaacgcttccacttgttactatctgaagca

SEQ ID NO: 470211 - DNA, 60 bp, Artificial
  Synthetic oligonucleotide
tgcttccaaaagtgtcagacgacggtcacatgcaccctgtccttaatacaggcagtgggc

SEQ ID NO: 470212 - DNA, 54 bp, Artificial
  Synthetic oligonucleotide
tgcttcctggctacaagtacctcggacccttcaacggactcgacaagggggagc

SEQ ID NO: 470213 - DNA, 60 bp, Artificial
  Synthetic oligonucleotide
tgcttcgaaagatgctccacctaaggcagtttcttctggaaatgtaagcgccagaggtat

SEQ ID NO: 470214 - DNA, 60 bp, Artificial
  Synthetic oligonucleotide
tgcttcgagttgtaccataaatgtgacgatcaatgcatggaaacgattagaaacgggacc

SEQ ID NO: 470215 - DNA, 60 bp, Artificial
  Synthetic oligonucleotide
tgcttcggcagattttcctatggacgaggtggatttggacactgccattaatggtttgga

SEQ ID NO: 470216 - DNA, 60 bp, Artificial
  Synthetic oligonucleotide
tgcttcggcagtggtctggtacaatggaaggccagtcaccgaaattgcttcgtgggcagg

SEQ ID NO: 470217 - DNA, 60 bp, Artificial
  Synthetic oligonucleotide
tgcttcggcatttcaccggggcaggcttcgcgtagtgtgggatcctgtactgtattctct

SEQ ID NO: 470218 - DNA, 52 bp, Artificial
  Synthetic oligonucleotide
tgcttcggctataaacagttcgggaagctacgcttcgcttcccggacatcca

SEQ ID NO: 470219 - DNA, 60 bp, Artificial
  Synthetic oligonucleotide
tgcttcgttactcgctaaacaatctatagctctcatcagagcctacactgctgcaaagcg

SEQ ID NO: 470220 - DNA, 60 bp, Artificial
  Synthetic oligonucleotide
tgcttctacgaactgcaataggccaagtttcaagacccatgttcctgtatgtaagaacca

SEQ ID NO: 470221 - DNA, 50 bp, Artificial
  Synthetic oligonucleotide
tgcttctccgcgagattgcgttattgtctactgactatttagagagtgta

SEQ ID NO: 470222 - DNA, 60 bp, Artificial
  Synthetic oligonucleotide
tgcttctcttttcgtgttgtagatatttgagtcgagttatggacaaatctgactcagcca

SEQ ID NO: 470223 - DNA, 60 bp, Artificial
  Synthetic oligonucleotide
tgcttctgagcctaaggcagtagcctttatcacggacgtggataatatgctcagccagcc

SEQ ID NO: 470224 - DNA, 56 bp, Artificial
  Synthetic oligonucleotide
tgcttctggcgtcaccgagttcaggtagcccagtgcatagccggtagctgcattac

SEQ ID NO: 470225 - DNA, 55 bp, Artificial
  Synthetic oligonucleotide
tgcttctgggatgagtaagtacgccaaggaggcaggcccttttgatgcagctagt

SEQ ID NO: 470226 - DNA, 58 bp, Artificial
  Synthetic oligonucleotide
tgcttctgggttgaactaatcagagggcaacccaaagagaaaacaatctggactagcg

SEQ ID NO: 470227 - DNA, 51 bp, Artificial
  Synthetic oligonucleotide
tgcttctgtgttgtacactgccccggagcctaccgggtcaacaaggctatc

SEQ ID NO: 470228 - DNA, 60 bp, Artificial
  Synthetic oligonucleotide
tgcttgaaagagaactggttgctcgaagaagattcttgccagtggcaggagcaacatcag

SEQ ID NO: 470229 - DNA, 60 bp, Artificial
  Synthetic oligonucleotide
tgcttgaaatgctatgtcagtaggccaggttagattccctaggtggattgaggtatgcgg

SEQ ID NO: 470230 - DNA, 59 bp, Artificial
  Synthetic oligonucleotide
tgcttgacaatgctctttgattctaggatgtggattgaaaattcagggttattaccacg

SEQ ID NO: 470231 - DNA, 60 bp, Artificial
  Synthetic oligonucleotide
tgcttgactaatactcaatcaccactctaatatgcctcccatcaaacggaggcttttcat

SEQ ID NO: 470232 - DNA, 55 bp, Artificial
  Synthetic oligonucleotide
tgcttgagcaggctccattcaatgaattagcgaagcagggcagggctccatatgt

SEQ ID NO: 470233 - DNA, 60 bp, Artificial
  Synthetic oligonucleotide
tgcttgagcggtctgtgccgtatctgatgtgggccgctacgatgtgggccagtaactcgc

SEQ ID NO: 470234 - DNA, 60 bp, Artificial
  Synthetic oligonucleotide
tgcttgagctgcagtgatgagttcccctgtgcgtgaatccatgatcgtgacaggctagtg

SEQ ID NO: 470235 - DNA, 60 bp, Artificial
  Synthetic oligonucleotide
tgcttgagctgcagtgatgggttcccctgtgcgtgaatccatagccgtggcagcgtaatg

SEQ ID NO: 470236 - DNA, 60 bp, Artificial
  Synthetic oligonucleotide
tgcttgagtggggaaaagagatggtggatcactttcatctcggggatgatatggatcctg

SEQ ID NO: 470237 - DNA, 60 bp, Artificial
  Synthetic oligonucleotide
tgcttgatgttaattctatagatttggaagaaccaagtgggcaaactgcagactggaagg

SEQ ID NO: 470238 - DNA, 57 bp, Artificial
  Synthetic oligonucleotide
tgcttgatttacctgaaaaattagattgtatctttaggggtgagtgtttccatcttg

SEQ ID NO: 470239 - DNA, 55 bp, Artificial
  Synthetic oligonucleotide
tgcttgcaacaaatgaaacttcctttaggtgtagaatggtcatatggccagtttg

SEQ ID NO: 470240 - DNA, 60 bp, Artificial
  Synthetic oligonucleotide
tgcttgcacaacgaccactcgcgcgcttggacggactctgcttgttttgtgccccgggac

SEQ ID NO: 470241 - DNA, 60 bp, Artificial
  Synthetic oligonucleotide
tgcttgcagagatgacaaggggaccaacagcttctatcgaaatttaatctggttcgtaaa

SEQ ID NO: 470242 - DNA, 55 bp, Artificial
  Synthetic oligonucleotide
tgcttgcatacctacgacgtgaatggcagtcttatggggaaactgtcatagctga

SEQ ID NO: 470243 - DNA, 60 bp, Artificial
  Synthetic oligonucleotide
tgcttgccgtgcattctggcaaacaggagtacgatcgactctttgccccgtttcgcgagg

SEQ ID NO: 470244 - DNA, 57 bp, Artificial
  Synthetic oligonucleotide
tgcttgcggcgagcgatacgagtcgaaagggctggtttttcttggttggctttagtc

SEQ ID NO: 470245 - DNA, 51 bp, Artificial
  Synthetic oligonucleotide
tgcttgcgtatggctccttgagaactcctcggatgggcatagtgagagact

SEQ ID NO: 470246 - DNA, 51 bp, Artificial
  Synthetic oligonucleotide
tgcttgcgtcgctaacggatggacgctttctaacggcattctttcgaagaa

SEQ ID NO: 470247 - DNA, 53 bp, Artificial
  Synthetic oligonucleotide
tgcttgctctgcaagcaacaacatctattataaataccaggatggaaggcagt

SEQ ID NO: 470248 - DNA, 60 bp, Artificial
  Synthetic oligonucleotide
tgcttggaactagcaaagactggtaaggagtatggtctaaccatgactcctgcagataag

SEQ ID NO: 470249 - DNA, 60 bp, Artificial
  Synthetic oligonucleotide
tgcttggacatcagaagttgagaagataatggcgcagccatgtcatcgaagaattatttg

SEQ ID NO: 470250 - DNA, 55 bp, Artificial
  Synthetic oligonucleotide
tgcttggatgagatttcatgatttgtctttgtgggaaggtagtcgcgacaccctt

SEQ ID NO: 470251 - DNA, 50 bp, Artificial
  Synthetic oligonucleotide
tgcttggcgtacactgtctgttcaagtacatcccataaaacataatttac

SEQ ID NO: 470252 - DNA, 57 bp, Artificial
  Synthetic oligonucleotide
tgcttggcttaactggatttgacttctaattgggctaatttaatgggcttgaaagtc

SEQ ID NO: 470253 - DNA, 60 bp, Artificial
  Synthetic oligonucleotide
tgcttgggattcattcgtgagtcccgtggcaatcgggtttgacatgaagcgatttgacca

SEQ ID NO: 470254 - DNA, 60 bp, Artificial
  Synthetic oligonucleotide
tgcttggggtttactctgaaaagatgggctcgacacacttcacctttggcaacacatgcg

SEQ ID NO: 470255 - DNA, 54 bp, Artificial
  Synthetic oligonucleotide
tgcttggtaaatgtgaataaaattaaccacaaggttaatttggagaccccgata

SEQ ID NO: 470256 - DNA, 60 bp, Artificial
  Synthetic oligonucleotide
tgcttggtcaagtagcagttgcttcgatggaaaggaatggatgcatgtttgcatgactgg

SEQ ID NO: 470257 - DNA, 60 bp, Artificial
  Synthetic oligonucleotide
tgcttggtcagcaagtgcatgtcatgatggaacgggatggctaacaatcgggatttccgg

SEQ ID NO: 470258 - DNA, 60 bp, Artificial
  Synthetic oligonucleotide
tgcttggttcagccccatcgtattggatttatgacattaagcagtattcagattttacgt

SEQ ID NO: 470259 - DNA, 55 bp, Artificial
  Synthetic oligonucleotide
tgcttggttcgacgcatgggacgccatcactactctgacgccactcacctccggt

SEQ ID NO: 470260 - DNA, 60 bp, Artificial
  Synthetic oligonucleotide
tgcttggtttatgcttgagcatctcgatacaaatactactggtatggtcagcttgaaaat

SEQ ID NO: 470261 - DNA, 55 bp, Artificial
  Synthetic oligonucleotide
tgcttgtaagcatagcaatacgcggcttagctcatgctgatctaactgttgttag

SEQ ID NO: 470262 - DNA, 60 bp, Artificial
  Synthetic oligonucleotide
tgcttgtaatctggggagtacaccaccctccgactagcaatgaccaacaaagcctctatc

SEQ ID NO: 470263 - DNA, 60 bp, Artificial
  Synthetic oligonucleotide
tgcttgtactacttgcgcggcgctatagcgccgcgctagtgggcccctgcgtgaaacccg

SEQ ID NO: 470264 - DNA, 60 bp, Artificial
  Synthetic oligonucleotide
tgcttgtagcaacgagatacgtattcgcctgccaattccagaattatcctacgatgtctg

SEQ ID NO: 470265 - DNA, 60 bp, Artificial
  Synthetic oligonucleotide
tgcttgtagctatgcacacaagtggaacgtttgagcttgctattgaacgatggctcgagg

SEQ ID NO: 470266 - DNA, 60 bp, Artificial
  Synthetic oligonucleotide
tgcttgtatataatcacgatttttaggatcacataacaaatcatcatcacgaaattctgg

SEQ ID NO: 470267 - DNA, 60 bp, Artificial
  Synthetic oligonucleotide
tgcttgtcaagctgctttgagaccttatcgaaaaaagggagatctatctgattttattcg

SEQ ID NO: 470268 - DNA, 60 bp, Artificial
  Synthetic oligonucleotide
tgcttgtccaaatgactagtgtgctgcagggcattgtcaacacagcaaggagagacaaag

SEQ ID NO: 470269 - DNA, 60 bp, Artificial
  Synthetic oligonucleotide
tgcttgtgcatggctggaagcacaagaggaagcaggggaggtaggctttccagtcaaacc

SEQ ID NO: 470270 - DNA, 60 bp, Artificial
  Synthetic oligonucleotide
tgcttgtgcgtatgcatcgttagctgtttgttgaccaccacgagcagatcgtccatcgat

SEQ ID NO: 470271 - DNA, 60 bp, Artificial
  Synthetic oligonucleotide
tgcttgttacggcacagagaacctagaagctatagatcttcacactagtgcaggataccc

SEQ ID NO: 470272 - DNA, 58 bp, Artificial
  Synthetic oligonucleotide
tgcttgtttaccatattgcccctacttttaagttatagcgcgattggtagtgcgctta

SEQ ID NO: 470273 - DNA, 55 bp, Artificial
  Synthetic oligonucleotide
tgcttgtttacccttttgcccccactttttaggtatatcgcgcgtcgtagtgcgc

SEQ ID NO: 470274 - DNA, 60 bp, Artificial
  Synthetic oligonucleotide
tgctttaaataggtacgttagtagcgcagataagattagatatggtaatgatttcgtcat

SEQ ID NO: 470275 - DNA, 51 bp, Artificial
  Synthetic oligonucleotide
tgctttacccccagccccgtggtagtgggtacgaccgataggtcgggcgcg

SEQ ID NO: 470276 - DNA, 53 bp, Artificial
  Synthetic oligonucleotide
tgctttacccctagtcccgtggtggtgggaacgaccgataagaagggcgcgcc

SEQ ID NO: 470277 - DNA, 59 bp, Artificial
  Synthetic oligonucleotide
tgctttaccttctgaattgagccctgtaaaacagcttgttaatcagttagagaattata

SEQ ID NO: 470278 - DNA, 55 bp, Artificial
  Synthetic oligonucleotide
tgctttactgtagttaaaacagactatgtaccagctaagttaccatggggagggg

SEQ ID NO: 470279 - DNA, 59 bp, Artificial
  Synthetic oligonucleotide
tgctttagaagcacaaggatcctccccagcgctgctccgttcttctcgggtaagccaac

SEQ ID NO: 470280 - DNA, 60 bp, Artificial
  Synthetic oligonucleotide
tgctttagatagtgggggtctacatcatcaacgacgttgtaccatgcgtcgttgctgtag

SEQ ID NO: 470281 - DNA, 60 bp, Artificial
  Synthetic oligonucleotide
tgctttagccaacactatagaggtcttcagatcgaacggtctaacagctaatgagtcggg

SEQ ID NO: 470282 - DNA, 55 bp, Artificial
  Synthetic oligonucleotide
tgctttagcgagcacaattttggatcaacgtgttaaagctcgtattctcggcgac

SEQ ID NO: 470283 - DNA, 58 bp, Artificial
  Synthetic oligonucleotide
tgctttagcgttggccctttttagtcaagaggaaaatcgcctgatgtcggactatgcg

SEQ ID NO: 470284 - DNA, 60 bp, Artificial
  Synthetic oligonucleotide
tgctttaggaagtgtgacaaaagtgcaaagaactgaagtatcaacatctggaaagcgcaa

SEQ ID NO: 470285 - DNA, 55 bp, Artificial
  Synthetic oligonucleotide
tgctttataggacagcactctgagccattaactgtcccgatgctcgaggactata

SEQ ID NO: 470286 - DNA, 58 bp, Artificial
  Synthetic oligonucleotide
tgctttatatggcttgtacccatgctagcaacccagtttatgctacgctgaagattag

SEQ ID NO: 470287 - DNA, 60 bp, Artificial
  Synthetic oligonucleotide
tgctttatgatcaagtctcctaatggccagaagtcccacatatctctcaagacagtctca

SEQ ID NO: 470288 - DNA, 60 bp, Artificial
  Synthetic oligonucleotide
tgctttatggttcacgctggggcgatcggagccattgttgaattcacctcttgtaaagcg

SEQ ID NO: 470289 - DNA, 59 bp, Artificial
  Synthetic oligonucleotide
tgctttcaaccaaaatttgagcctgctgtcctctctcgttatgaccccagaaccacgaa

SEQ ID NO: 470290 - DNA, 59 bp, Artificial
  Synthetic oligonucleotide
tgctttcaagtggccaaatttggtcagggacggcaacagtggagagtacaacatagtgg

SEQ ID NO: 470291 - DNA, 54 bp, Artificial
  Synthetic oligonucleotide
tgctttcatactctccgctcagagttgttgtggtggaaccgaggtcagctaggg

SEQ ID NO: 470292 - DNA, 58 bp, Artificial
  Synthetic oligonucleotide
tgctttcctcaggttgtagttgaattggatccttatctctatttcgtccctgttcgtg

SEQ ID NO: 470293 - DNA, 60 bp, Artificial
  Synthetic oligonucleotide
tgctttcgacgtgtacaaggatggtgcatttgaggtgctgctggaatataagggcaatgt

SEQ ID NO: 470294 - DNA, 60 bp, Artificial
  Synthetic oligonucleotide
tgctttcgctatgcgacacaatcgatggagaaacagaagacctgatattccctgcttcga

SEQ ID NO: 470295 - DNA, 50 bp, Artificial
  Synthetic oligonucleotide
tgctttcgtattttacatggggttgaggtgtctgtatgtctgatggaaaa

SEQ ID NO: 470296 - DNA, 60 bp, Artificial
  Synthetic oligonucleotide
tgctttcttcaacccgtggttgaacattatgcgtagcttggtgacaatcattctggaccc

SEQ ID NO: 470297 - DNA, 55 bp, Artificial
  Synthetic oligonucleotide
tgctttgaacaccttcacaaatatgattgtgcaactcactcgatgtgcagaggca

SEQ ID NO: 470298 - DNA, 54 bp, Artificial
  Synthetic oligonucleotide
tgctttgataggagctatcgcttcatctgtgggtgacttccttagcaaaggtgg

SEQ ID NO: 470299 - DNA, 60 bp, Artificial
  Synthetic oligonucleotide
tgctttgcatataacttgccagtgatgacaggaggcgtctcaactagtctgattggcaat

SEQ ID NO: 470300 - DNA, 60 bp, Artificial
  Synthetic oligonucleotide
tgctttgccccatgggaccttgaggccactggagcctgcatctgcgagatccccaccgat

SEQ ID NO: 470301 - DNA, 52 bp, Artificial
  Synthetic oligonucleotide
tgctttgcctgccctactcggtacggcggttacttggctggttgctcacaac

SEQ ID NO: 470302 - DNA, 57 bp, Artificial
  Synthetic oligonucleotide
tgctttgcgtagaggatttctctcctgttcactacatatcaggggtttgaaggcagg

SEQ ID NO: 470303 - DNA, 60 bp, Artificial
  Synthetic oligonucleotide
tgctttggatgaagagttagtttctacttgtggggctgctcttctaaatgaccttcgctc

SEQ ID NO: 470304 - DNA, 53 bp, Artificial
  Synthetic oligonucleotide
tgctttggcaacacagctgtcgccaagtgtaatctgaatcatgattctgagtt

SEQ ID NO: 470305 - DNA, 57 bp, Artificial
  Synthetic oligonucleotide
tgctttggcagtcacgctgggcccccatgaatactttaaagtgctttagatagaggg

SEQ ID NO: 470306 - DNA, 60 bp, Artificial
  Synthetic oligonucleotide
tgctttggcgttgtcaagctgcggtatgcttttgtctgaggatgccatggggtataagga

SEQ ID NO: 470307 - DNA, 60 bp, Artificial
  Synthetic oligonucleotide
tgctttgggagcttgatctgatgaattcactctgttctgacgaaaaaagagatgctagaa

SEQ ID NO: 470308 - DNA, 57 bp, Artificial
  Synthetic oligonucleotide
tgctttggggccctatgtctttcgttaaagcctgtatgtaataaggcgctttggatc

SEQ ID NO: 470309 - DNA, 60 bp, Artificial
  Synthetic oligonucleotide
tgctttgggtgcactcattcttggtgttttgtctcccagcagccggcgtcctctcactag

SEQ ID NO: 470310 - DNA, 52 bp, Artificial
  Synthetic oligonucleotide
tgctttggtcatcttgggttctcccaagacccatgcacccagttctattgca

SEQ ID NO: 470311 - DNA, 60 bp, Artificial
  Synthetic oligonucleotide
tgctttgtcgaaagccaaaaagtcggtgatgctgaaaggagccccatcaggtatagcagg

SEQ ID NO: 470312 - DNA, 60 bp, Artificial
  Synthetic oligonucleotide
tgctttgtgaagatttagtgctctcctgaggttgtggttgaatctgatctggatgtggaa

SEQ ID NO: 470313 - DNA, 58 bp, Artificial
  Synthetic oligonucleotide
tgcttttaacccgaacagaggaaccacatggatgacacttcaagaccgtgtagtagcc

SEQ ID NO: 470314 - DNA, 55 bp, Artificial
  Synthetic oligonucleotide
tgcttttaatgtatggcaatttgattgagctgagtgactttgatctgtgtatccg

SEQ ID NO: 470315 - DNA, 50 bp, Artificial
  Synthetic oligonucleotide
tgcttttgaggaatacggaccaaccacatggggcccacaagcttttatca

SEQ ID NO: 470316 - DNA, 60 bp, Artificial
  Synthetic oligonucleotide
tgcttttgcacagcactgaacaagcgacacacgcttgttgtgataattgattccacgctc

SEQ ID NO: 470317 - DNA, 50 bp, Artificial
  Synthetic oligonucleotide
tgcttttggaaggggttgaacgcgggtcgtagttcaacttttactagttt

SEQ ID NO: 470318 - DNA, 60 bp, Artificial
  Synthetic oligonucleotide
tggaaaaagcgaatattgagaacacaagagtctgaatgtgtctgtgtgaacgggtcatgt

SEQ ID NO: 470319 - DNA, 60 bp, Artificial
  Synthetic oligonucleotide
tggaaaaattgagcaatggtcggtgcggcagctacgcgcgcatagatttttgtttataag

SEQ ID NO: 470320 - DNA, 60 bp, Artificial
  Synthetic oligonucleotide
tggaaaaccagcacactattgatttggctgattcagagatgaacaggctgtatgagcgag

SEQ ID NO: 470321 - DNA, 59 bp, Artificial
  Synthetic oligonucleotide
tggaaaaccttggtgtgtatcaaattcttgccatttatagtacggtatcgagcagtcta

SEQ ID NO: 470322 - DNA, 55 bp, Artificial
  Synthetic oligonucleotide
tggaaaagacttggacggggagagtccggtataagagagtaacaactgtttatga

SEQ ID NO: 470323 - DNA, 52 bp, Artificial
  Synthetic oligonucleotide
tggaaaagcggaaggcttatcgtcgaaagctggaaaacctcgggtgccaact

SEQ ID NO: 470324 - DNA, 57 bp, Artificial
  Synthetic oligonucleotide
tggaaaaggacgcattcgtgaaatataattatcacgatttgatgggtaaactattaa

SEQ ID NO: 470325 - DNA, 60 bp, Artificial
  Synthetic oligonucleotide
tggaaaaggattacatattgcgggaagacttgtctgtgcatagaattggcgggatctgga

SEQ ID NO: 470326 - DNA, 57 bp, Artificial
  Synthetic oligonucleotide
tggaaaatatacaccaggagttattccaccagtcaatgttgataaaccgattccact

SEQ ID NO: 470327 - DNA, 55 bp, Artificial
  Synthetic oligonucleotide
tggaaaatggatggacatactacacctcataccaccttactgatgattatggcaa

SEQ ID NO: 470328 - DNA, 55 bp, Artificial
  Synthetic oligonucleotide
tggaaacaacaatttgcttaatagcatcctagtgccagcggaacaacatctggta

SEQ ID NO: 470329 - DNA, 56 bp, Artificial
  Synthetic oligonucleotide
tggaaacaagggaaaaacgcgaaaatccactacatcgagcggatggccgtggacat

SEQ ID NO: 470330 - DNA, 58 bp, Artificial
  Synthetic oligonucleotide
tggaaacaccaccatggcacttcaactgtggttgccacaagtttggtcttggggaggc

SEQ ID NO: 470331 - DNA, 60 bp, Artificial
  Synthetic oligonucleotide
tggaaacccgcagatgagccagacatatatccaatagtagcctattggacaagtgacgga

SEQ ID NO: 470332 - DNA, 55 bp, Artificial
  Synthetic oligonucleotide
tggaaaccgcatgtggccaccggactcgcaagaggccagatcgccgtggtagaca

SEQ ID NO: 470333 - DNA, 60 bp, Artificial
  Synthetic oligonucleotide
tggaaacctcggtggctgcaatcagcttgactttcatgctctccgctcagagatggatcg

SEQ ID NO: 470334 - DNA, 56 bp, Artificial
  Synthetic oligonucleotide
tggaaacctgggctctgaggtaggagatctcgagcacctaggctgggtgctacgag

SEQ ID NO: 470335 - DNA, 55 bp, Artificial
  Synthetic oligonucleotide
tggaaacgaactgatgaccctagaattgaacacgcaaaacactttgatcggtgtt

SEQ ID NO: 470336 - DNA, 57 bp, Artificial
  Synthetic oligonucleotide
tggaaacgccgtccaattattcctaataattccagcgatgatactaggattgtttcc

SEQ ID NO: 470337 - DNA, 60 bp, Artificial
  Synthetic oligonucleotide
tggaaacgcgcagcgtatagtatacgatgatgaattgcagatgcacatattacggggacc

SEQ ID NO: 470338 - DNA, 60 bp, Artificial
  Synthetic oligonucleotide
tggaaacgcgccaaacgagctgcttcgatgttcgcttccaaccccgcgctagctctccaa

SEQ ID NO: 470339 - DNA, 60 bp, Artificial
  Synthetic oligonucleotide
tggaaactcatgcttgcattcttgacattccagttgaagttggagttggacgcactggct

SEQ ID NO: 470340 - DNA, 60 bp, Artificial
  Synthetic oligonucleotide
tggaaactccaaataggatcaatacccccatggctcaagacacttcatcggctcggagca

SEQ ID NO: 470341 - DNA, 60 bp, Artificial
  Synthetic oligonucleotide
tggaaactgcaaccgggagacgatcctctcctcggaaatcattcgctgctggacacgcat

SEQ ID NO: 470342 - DNA, 60 bp, Artificial
  Synthetic oligonucleotide
tggaaacttgacataagcaacgatcaggaaacgttgagcatcgaacaattgcgggtggca

SEQ ID NO: 470343 - DNA, 57 bp, Artificial
  Synthetic oligonucleotide
tggaaagaagcaataacacatcctggcccagtcttaagctggcaggtgactaattca

SEQ ID NO: 470344 - DNA, 56 bp, Artificial
  Synthetic oligonucleotide
tggaaagaccctgatggaatgttaagggaccatataaacattctggtaactaagga

SEQ ID NO: 470345 - DNA, 58 bp, Artificial
  Synthetic oligonucleotide
tggaaagagatgcaatataacagggatataacaattagatttaagttcgctaactcaa

SEQ ID NO: 470346 - DNA, 60 bp, Artificial
  Synthetic oligonucleotide
tggaaagatcagatggcggaacgaccctggcatgtaaggaacgaccttattgctgcattg

SEQ ID NO: 470347 - DNA, 60 bp, Artificial
  Synthetic oligonucleotide
tggaaaggagatgaccattaccagcccatcatccgagatgatgtttacgtcggtcgtcgt

SEQ ID NO: 470348 - DNA, 59 bp, Artificial
  Synthetic oligonucleotide
tggaaaggattttgctataacatgggtggcaagtggtcaaaatgcagtttgggaggatg

SEQ ID NO: 470349 - DNA, 54 bp, Artificial
  Synthetic oligonucleotide
tggaaagggaactggtccgcaaaaccagattcctaccggtagcaggcggaacaa

SEQ ID NO: 470350 - DNA, 57 bp, Artificial
  Synthetic oligonucleotide
tggaaaggggctaccgcttacttccagctagaagggcttacttggtctgcattgccc

SEQ ID NO: 470351 - DNA, 55 bp, Artificial
  Synthetic oligonucleotide
tggaaaggtcatagacctaggctgtggaagaggaggctggtgctactacatggcg

SEQ ID NO: 470352 - DNA, 55 bp, Artificial
  Synthetic oligonucleotide
tggaaagtaaagatgcctccacgtctgcaacatctatagaccagttgtgcaagac

SEQ ID NO: 470353 - DNA, 50 bp, Artificial
  Synthetic oligonucleotide
tggaaagtatagggatgggactaggtctgcggactttaatagtaataatc

SEQ ID NO: 470354 - DNA, 59 bp, Artificial
  Synthetic oligonucleotide
tggaaagtcagttgtggactgctgaatccaaaggttggtggtggaaactacctgatgcc

SEQ ID NO: 470355 - DNA, 60 bp, Artificial
  Synthetic oligonucleotide
tggaaagtgcaagatgatgagcgatatcgttgccaagactgactgcagagaggtcaatgc

SEQ ID NO: 470356 - DNA, 58 bp, Artificial
  Synthetic oligonucleotide
tggaaatagaattagaggaaataccaagcagatacacatttgaaatagaagaacccac

SEQ ID NO: 470357 - DNA, 60 bp, Artificial
  Synthetic oligonucleotide
tggaaatagatatagatccattgtaataagacatcaatcctttgctaatatgactaatcc

SEQ ID NO: 470358 - DNA, 59 bp, Artificial
  Synthetic oligonucleotide
tggaaatcaaacagcaagaatgcttaagtacaattacccaaccaaatcaggatattgtg

SEQ ID NO: 470359 - DNA, 53 bp, Artificial
  Synthetic oligonucleotide
tggaaatcccacccctagtcttaaaccggtcactttgcagcaagtgttacccg

SEQ ID NO: 470360 - DNA, 58 bp, Artificial
  Synthetic oligonucleotide
tggaaatccttcctgtgacatactactaggaggaaaagaatggtcctacatcgttgaa

SEQ ID NO: 470361 - DNA, 60 bp, Artificial
  Synthetic oligonucleotide
tggaaatctaatagctccttggtatgcttacaagttcactagttcaagacacaaaggagc

SEQ ID NO: 470362 - DNA, 60 bp, Artificial
  Synthetic oligonucleotide
tggaaatctagtggtaccgagatatgcattcgcaatggaaaaaaatgctggatctggtat

SEQ ID NO: 470363 - DNA, 60 bp, Artificial
  Synthetic oligonucleotide
tggaaatgaggcgatgcccttttcaatcccttcaacagattgagagcatgattgaggccg

SEQ ID NO: 470364 - DNA, 55 bp, Artificial
  Synthetic oligonucleotide
tggaaatggggcatcatgctccttggaatgttgatgatctgtagtaccgcagaac

SEQ ID NO: 470365 - DNA, 60 bp, Artificial
  Synthetic oligonucleotide
tggaaatgtattgacctggttggggacaccagatcgaagaatctgttattcgtgcactgg

SEQ ID NO: 470366 - DNA, 60 bp, Artificial
  Synthetic oligonucleotide
tggaaattatgaggagtgtccagtgttagagtcggtagcaacctggaagacagattttca

SEQ ID NO: 470367 - DNA, 58 bp, Artificial
  Synthetic oligonucleotide
tggaaatttctttggggagtactgcagatctataaatgttcataaagttacctattgc

SEQ ID NO: 470368 - DNA, 51 bp, Artificial
  Synthetic oligonucleotide
tggaacaaatctatacataggtgatggtgtgttcaaaaccacacttctagg

SEQ ID NO: 470369 - DNA, 55 bp, Artificial
  Synthetic oligonucleotide
tggaacaacagtaccccatccatctgagatgttaatgttggtccccaagtcgtca

SEQ ID NO: 470370 - DNA, 58 bp, Artificial
  Synthetic oligonucleotide
tggaacaataatcatgatgggccagcactagaacaaccaggtcaatcattctggccag

SEQ ID NO: 470371 - DNA, 60 bp, Artificial
  Synthetic oligonucleotide
tggaacaatctgctgcctcacaagaggaccttgaagtcatgttcgggaatgtgtcgtacc

SEQ ID NO: 470372 - DNA, 52 bp, Artificial
  Synthetic oligonucleotide
tggaacaatgagctgtttgtaaccttagttgacaacacacgtaatgtgaatt

SEQ ID NO: 470373 - DNA, 60 bp, Artificial
  Synthetic oligonucleotide
tggaacacccggaatcctgatgaatgtgacaaggcatgacgtggggaagacgttcagaat

SEQ ID NO: 470374 - DNA, 60 bp, Artificial
  Synthetic oligonucleotide
tggaacacgctgagatatgagcgtcctgtagagtccaacactaatactccaaacagtctt

SEQ ID NO: 470375 - DNA, 54 bp, Artificial
  Synthetic oligonucleotide
tggaacactagggaagaggtttaagcaatatagagagttaaaaccccagacctg

SEQ ID NO: 470376 - DNA, 60 bp, Artificial
  Synthetic oligonucleotide
tggaacactcttcaggtcgacattatgacattcgactcaacggcgaacacgtatggtcgt

SEQ ID NO: 470377 - DNA, 55 bp, Artificial
  Synthetic oligonucleotide
tggaacacttggcaccattgtgtccctcataacaatgtgtattccattggctcgt

SEQ ID NO: 470378 - DNA, 60 bp, Artificial
  Synthetic oligonucleotide
tggaacagacactggaggccatcttcgcgaacatagcgatacaggggacctcggaacaaa

SEQ ID NO: 470379 - DNA, 59 bp, Artificial
  Synthetic oligonucleotide
tggaacagactggacaacaaatttcagtgatctatcacaaccaaacaaatgggctaacc

SEQ ID NO: 470380 - DNA, 59 bp, Artificial
  Synthetic oligonucleotide
tggaacagagaatttggaagcaattgaccttagcaccagtgcaggatacccttacaatg

SEQ ID NO: 470381 - DNA, 60 bp, Artificial
  Synthetic oligonucleotide
tggaacagatactggagtccatcttcgcgaacatagcgatacaaggaacgtcagagcaga

SEQ ID NO: 470382 - DNA, 59 bp, Artificial
  Synthetic oligonucleotide
tggaacagtattcctcaacttgtctcagatcatgaagaggcgaaaggcaagtttacgga

SEQ ID NO: 470383 - DNA, 60 bp, Artificial
  Synthetic oligonucleotide
tggaacagtgaaggataggagcccattcagaactctcatgagtgtcaaagtgggccaatc

SEQ ID NO: 470384 - DNA, 60 bp, Artificial
  Synthetic oligonucleotide
tggaacagtgagagatagaagcccattcagaactcttatgagtgtcgaagtgggtctgtc

SEQ ID NO: 470385 - DNA, 55 bp, Artificial
  Synthetic oligonucleotide
tggaacatactgctcattgaatggggtcagcccaattcatcttggtgactgtagc

SEQ ID NO: 470386 - DNA, 50 bp, Artificial
  Synthetic oligonucleotide
tggaacatcaaagactagtcgcaacgctaattattctcctcgtgctcgta

SEQ ID NO: 470387 - DNA, 60 bp, Artificial
  Synthetic oligonucleotide
tggaacatctgtgtccaactaacgatatctatctaggatcgggtgatccaaaagaaccaa

SEQ ID NO: 470388 - DNA, 58 bp, Artificial
  Synthetic oligonucleotide
tggaacatgagttagacgaactaaagaagagtaatgaacatacacgtccgtcaaatgc

SEQ ID NO: 470389 - DNA, 55 bp, Artificial
  Synthetic oligonucleotide
tggaacatgccaaaccaacattcaggcaaatcatggcacactttagcaacttggc

SEQ ID NO: 470390 - DNA, 60 bp, Artificial
  Synthetic oligonucleotide
tggaacattcctgacccagcatctacttcaaagtacgctgagatgtatgcatccgctggc

SEQ ID NO: 470391 - DNA, 55 bp, Artificial
  Synthetic oligonucleotide
tggaaccaacgcgctctctagaatgattgctgggctaatagaaatgagttgggct

SEQ ID NO: 470392 - DNA, 53 bp, Artificial
  Synthetic oligonucleotide
tggaaccaagagccagtgttaaatgacttagcaaagagcggaccgtttgcata

SEQ ID NO: 470393 - DNA, 56 bp, Artificial
  Synthetic oligonucleotide
tggaaccctggggtaccaccttaatcgctttcagacatccctttgcagtgggtatc

SEQ ID NO: 470394 - DNA, 55 bp, Artificial
  Synthetic oligonucleotide
tggaacccttcaaatcttacttcgctaagggcttcctttcaatagattcaggtta

SEQ ID NO: 470395 - DNA, 56 bp, Artificial
  Synthetic oligonucleotide
tggaacctcctgtcccgtatatctgctccaagtttttactgacggacgagttggga

SEQ ID NO: 470396 - DNA, 60 bp, Artificial
  Synthetic oligonucleotide
tggaacctgactgcgatattccagtaccacgtgatctattttcatgcatcgattcctcaa

SEQ ID NO: 470397 - DNA, 60 bp, Artificial
  Synthetic oligonucleotide
tggaacctgctaaatgcattctaggtggaactgaatgtagaattgatgttaaacataagg

SEQ ID NO: 470398 - DNA, 60 bp, Artificial
  Synthetic oligonucleotide
tggaacctgggaccttcgatcttggtgggctatatgaagcaatcgaggagtgcctgatta

SEQ ID NO: 470399 - DNA, 51 bp, Artificial
  Synthetic oligonucleotide
tggaaccttcggtcccgttcactttcgaaaccaggttaaaatacgccgcag

SEQ ID NO: 470400 - DNA, 52 bp, Artificial
  Synthetic oligonucleotide
tggaaccttcggtcccgttcatttccgaaaccaagttaagatacgccgccga

SEQ ID NO: 470401 - DNA, 60 bp, Artificial
  Synthetic oligonucleotide
tggaacctttgcggctcctctgccgatccatactgcggaactccttgcagcttgtttcgc

SEQ ID NO: 470402 - DNA, 55 bp, Artificial
  Synthetic oligonucleotide
tggaacgatggaagtagacttcactaatggtgcccaactagtctatgttgcgccc

SEQ ID NO: 470403 - DNA, 58 bp, Artificial
  Synthetic oligonucleotide
tggaacgcaagactttccagaaacctcccaccggctggcttcgctcgggcaaacatca

SEQ ID NO: 470404 - DNA, 58 bp, Artificial
  Synthetic oligonucleotide
tggaacgcaattaaatacatgtgtgacgtgtatttgcgaacgacgtaattatttttca

SEQ ID NO: 470405 - DNA, 58 bp, Artificial
  Synthetic oligonucleotide
tggaacgctgtgtagaagtaacggatacggacgtagttcaggaccaggctgtaatcaa

SEQ ID NO: 470406 - DNA, 55 bp, Artificial
  Synthetic oligonucleotide
tggaacggatctgagctgcggtattatcatctcgatcgaaatggggattggcgag

SEQ ID NO: 470407 - DNA, 59 bp, Artificial
  Synthetic oligonucleotide
tggaacggatgacccggagagagaagtgttacagtggaagtttgacagtagcctggcac

SEQ ID NO: 470408 - DNA, 54 bp, Artificial
  Synthetic oligonucleotide
tggaacggctgttacaagggataggagcgtacctctcagctgagtcgcaatcag

SEQ ID NO: 470409 - DNA, 55 bp, Artificial
  Synthetic oligonucleotide
tggaacgggaacaggctacacaatagacaccgtgattagaacacacgagtactca

SEQ ID NO: 470410 - DNA, 60 bp, Artificial
  Synthetic oligonucleotide
tggaacgtcaccttgcagtgttaacttggctttcatgaatctctttgatcttccacaagg

SEQ ID NO: 470411 - DNA, 60 bp, Artificial
  Synthetic oligonucleotide
tggaacgtccaggttgcgctgctaaatcagtagtcggatgatgttcctgtgtagtagaag

SEQ ID NO: 470412 - DNA, 52 bp, Artificial
  Synthetic oligonucleotide
tggaacgtctttaggaaactccctgatctatccgcaccagtggatcaacctt

SEQ ID NO: 470413 - DNA, 56 bp, Artificial
  Synthetic oligonucleotide
tggaacgtgcccagtcagttaaaatccccccaactgaggagcgggagcacgttata

SEQ ID NO: 470414 - DNA, 57 bp, Artificial
  Synthetic oligonucleotide
tggaacgtgtccccatcagcatcacgcacgacgacatccgtggggacgtcctggatt

SEQ ID NO: 470415 - DNA, 60 bp, Artificial
  Synthetic oligonucleotide
tggaactaatggatattcaacaggagtaggatattcaaatacaggagtgcgatcagttag

SEQ ID NO: 470416 - DNA, 58 bp, Artificial
  Synthetic oligonucleotide
tggaactaattcggatgataaagcgagggatcaacgaccggaatttctggagaggcga

SEQ ID NO: 470417 - DNA, 59 bp, Artificial
  Synthetic oligonucleotide
tggaactaattttgattggggcaccagggcactctgcatactaagacaaaacatgaaac

SEQ ID NO: 470418 - DNA, 60 bp, Artificial
  Synthetic oligonucleotide
tggaactagcagagacaagagtgccactgctttgcatgtcggagcaatagaggttgtaat

SEQ ID NO: 470419 - DNA, 52 bp, Artificial
  Synthetic oligonucleotide
tggaactcataaataggtttgtttgaaggtaggtgctggttttttcaaccgg

SEQ ID NO: 470420 - DNA, 60 bp, Artificial
  Synthetic oligonucleotide
tggaactccccactgaacacaaaggcgtgtacggcagtctcatggactcgtacgcctaca

SEQ ID NO: 470421 - DNA, 60 bp, Artificial
  Synthetic oligonucleotide
tggaactcctgataaccagtacgataacaccaagccttctatcgcctatagccagttcat

SEQ ID NO: 470422 - DNA, 53 bp, Artificial
  Synthetic oligonucleotide
tggaactctaaaagggtacctatgggtttcccgtatgacacccgctgctttga

SEQ ID NO: 470423 - DNA, 53 bp, Artificial
  Synthetic oligonucleotide
tggaactctcatccagcaggagttgccgggattgatgaaatccggctcttact

SEQ ID NO: 470424 - DNA, 59 bp, Artificial
  Synthetic oligonucleotide
tggaactggaacatgtaacagactttggaacagccttgggaatcctcgaatgcccaagc

SEQ ID NO: 470425 - DNA, 51 bp, Artificial
  Synthetic oligonucleotide
tggaactggcatagtaaatgcaaccataaatgacactatcatacttccatg

SEQ ID NO: 470426 - DNA, 55 bp, Artificial
  Synthetic oligonucleotide
tggaactgtagtatcaggagaaatgccacagtggatattaaaacaggttagcata

SEQ ID NO: 470427 - DNA, 54 bp, Artificial
  Synthetic oligonucleotide
tggaactgtcgtctacccacccgaactcttggttggtagtaaatcaagtttgaa

SEQ ID NO: 470428 - DNA, 55 bp, Artificial
  Synthetic oligonucleotide
tggaacttacacaggaggggaaaatgttcccccagtacttcatgttaccaacaca

SEQ ID NO: 470429 - DNA, 60 bp, Artificial
  Synthetic oligonucleotide
tggaacttattcgtggtgcgtgctacgagagacatctctatcaccacctagtcgcgtcgt

SEQ ID NO: 470430 - DNA, 57 bp, Artificial
  Synthetic oligonucleotide
tggaacttcatcagtggcatacagtacctggcgggactctccaccctaccgggaaat

SEQ ID NO: 470431 - DNA, 52 bp, Artificial
  Synthetic oligonucleotide
tggaacttccactcatttttccgggggaggagaggtagtacccccatcagaa

SEQ ID NO: 470432 - DNA, 53 bp, Artificial
  Synthetic oligonucleotide
tggaacttcccaccgaccacaagggtgtctacggacaacttgtggattcatac

SEQ ID NO: 470433 - DNA, 60 bp, Artificial
  Synthetic oligonucleotide
tggaacttcccagatatacacgccattctctgctcgatccgcagtgatgtactcccctgt

SEQ ID NO: 470434 - DNA, 57 bp, Artificial
  Synthetic oligonucleotide
tggaacttcctcaagccacctttctccgacaacccttgagacaccgtctggtgccca

SEQ ID NO: 470435 - DNA, 60 bp, Artificial
  Synthetic oligonucleotide
tggaacttcgatgctgctccccctactgggtcaaaggatgctatcactgtgacgaagttt

SEQ ID NO: 470436 - DNA, 57 bp, Artificial
  Synthetic oligonucleotide
tggaacttctaggacgcagcagtctcaggggattacagaacgggtgggaagccctta

SEQ ID NO: 470437 - DNA, 54 bp, Artificial
  Synthetic oligonucleotide
tggaacttctgggacgcagggggggggaagtcctcaggtattggtggagtctcc

SEQ ID NO: 470438 - DNA, 55 bp, Artificial
  Synthetic oligonucleotide
tggaacttgcacagtggtaatgactgatggaagcgcatcaggaagggccgatacc

SEQ ID NO: 470439 - DNA, 60 bp, Artificial
  Synthetic oligonucleotide
tggaacttggtcctgatttgaatccctatttagcccatcttcgccgcatgtataatggat

SEQ ID NO: 470440 - DNA, 55 bp, Artificial
  Synthetic oligonucleotide
tggaactttacatggccgctggaattgttatgctaaaacgcctctttaactgccc

SEQ ID NO: 470441 - DNA, 55 bp, Artificial
  Synthetic oligonucleotide
tggaactttatagagttggtggcacacataatcttgttaagcaatgttacgaggc

SEQ ID NO: 470442 - DNA, 50 bp, Artificial
  Synthetic oligonucleotide
tggaagaaagggataatactcccctctatgatgaccaaatcagagattat

SEQ ID NO: 470443 - DNA, 51 bp, Artificial
  Synthetic oligonucleotide
tggaagaaatccatggaccacttcacatccgaccggttcgtggaattccta

SEQ ID NO: 470444 - DNA, 55 bp, Artificial
  Synthetic oligonucleotide
tggaagaacagctttaaagattcatgaagtaagaaaagccagcacagcaatgaac

SEQ ID NO: 470445 - DNA, 53 bp, Artificial
  Synthetic oligonucleotide
tggaagaacatcccagtgcgggaaaggacccgaagaaaactggaggtccaatt

SEQ ID NO: 470446 - DNA, 59 bp, Artificial
  Synthetic oligonucleotide
tggaagaacatttggaacatgaggtgccaacgctaatagggatagagtgtccgaaagac

SEQ ID NO: 470447 - DNA, 57 bp, Artificial
  Synthetic oligonucleotide
tggaagaatcttctcgacatacgactgatggacgctctcatctccttgctaacaact

SEQ ID NO: 470448 - DNA, 56 bp, Artificial
  Synthetic oligonucleotide
tggaagaatgttcatgttacacagatgttgacatatattgcgtttgcagagacaac

SEQ ID NO: 470449 - DNA, 55 bp, Artificial
  Synthetic oligonucleotide
tggaagacgggagcaacaatttgctaggcatttgtgggcccgtgcagggactatg

SEQ ID NO: 470450 - DNA, 57 bp, Artificial
  Synthetic oligonucleotide
tggaagactgccacttattccttggaggtcaaggactacgttgagacgcgtagggac

SEQ ID NO: 470451 - DNA, 55 bp, Artificial
  Synthetic oligonucleotide
tggaagagaagactgtgaccgttaaggtcggcagttctggaagtgcttaagtgac

SEQ ID NO: 470452 - DNA, 60 bp, Artificial
  Synthetic oligonucleotide
tggaagagacgaacaatcaatcgctgaggcaatcattgtagcaatggtgttctcacagga

SEQ ID NO: 470453 - DNA, 60 bp, Artificial
  Synthetic oligonucleotide
tggaagagcaccaatgactgatgatgtcaacccaggttgtgcgttgaagagatcagtgag

SEQ ID NO: 470454 - DNA, 60 bp, Artificial
  Synthetic oligonucleotide
tggaagagcagagaccttttgtcagagaacatgggtcttgacgttgatgatgacatgttt

SEQ ID NO: 470455 - DNA, 60 bp, Artificial
  Synthetic oligonucleotide
tggaagaggatactggtgtaccattaattgacctgcgtatacgatgctatggatgctaca

SEQ ID NO: 470456 - DNA, 60 bp, Artificial
  Synthetic oligonucleotide
tggaagagtaatcatattcagtgatgacctcaccaacttcattgagttttggaaccacca

SEQ ID NO: 470457 - DNA, 55 bp, Artificial
  Synthetic oligonucleotide
tggaagatacgcttttgtagggccagaagtgtataaggttaactgtggtttgccc

SEQ ID NO: 470458 - DNA, 52 bp, Artificial
  Synthetic oligonucleotide
tggaagatagacacagtccaacttcattaatgcaagtaactcgtaattgcat

SEQ ID NO: 470459 - DNA, 59 bp, Artificial
  Synthetic oligonucleotide
tggaagataggtacagttgcagtgaacgtaccagttgtagatgactgctacccttttag

SEQ ID NO: 470460 - DNA, 60 bp, Artificial
  Synthetic oligonucleotide
tggaagatctgtgtccattgtcttcgttgctatcatcctactatctaccctcttttagaa

SEQ ID NO: 470461 - DNA, 57 bp, Artificial
  Synthetic oligonucleotide
tggaagatgttgggtttgagccaatcatctattgtctctttgcagtgcagctcaggc

SEQ ID NO: 470462 - DNA, 58 bp, Artificial
  Synthetic oligonucleotide
tggaagatttggttcgccctttgagcagaattttagagatttgtcacagattaacgaa

SEQ ID NO: 470463 - DNA, 59 bp, Artificial
  Synthetic oligonucleotide
tggaagcaagtcaggcctgtcagaggaagaggttagaagaaggctaaccgcaagaggcc

SEQ ID NO: 470464 - DNA, 50 bp, Artificial
  Synthetic oligonucleotide
tggaagcacgttctacaggcttacttcagagtgtgtgagacctttgtcag

SEQ ID NO: 470465 - DNA, 55 bp, Artificial
  Synthetic oligonucleotide
tggaagcactgtggaacactctgctggggagcctctgttctggactgagaaggac

SEQ ID NO: 470466 - DNA, 55 bp, Artificial
  Synthetic oligonucleotide
tggaagcagtggtgcattgcatgttgctcctcacaactatggttacttcccgctg

SEQ ID NO: 470467 - DNA, 59 bp, Artificial
  Synthetic oligonucleotide
tggaagcccagttatctagccttgcaactgttgagggcctaagtggagtggaagccttg

SEQ ID NO: 470468 - DNA, 59 bp, Artificial
  Synthetic oligonucleotide
tggaagcccattctatttggcccactgaagaggagcccatcattagtttctgtccgtac

SEQ ID NO: 470469 - DNA, 60 bp, Artificial
  Synthetic oligonucleotide
tggaagccctctccacgctattgcgctccgtgactcctctagtccttgatcccactgtgc

SEQ ID NO: 470470 - DNA, 58 bp, Artificial
  Synthetic oligonucleotide
tggaagcccttgccattcgtcgtggaaatgttctgaacaagagtgttaagattgggaa

SEQ ID NO: 470471 - DNA, 60 bp, Artificial
  Synthetic oligonucleotide
tggaagcccttgctgaaccttaccgccaatccttgagcacctacccatggcacattccaa

SEQ ID NO: 470472 - DNA, 58 bp, Artificial
  Synthetic oligonucleotide
tggaagccgtattgatttattgatggtcaaccaccttaagaagttcaacttgatattc

SEQ ID NO: 470473 - DNA, 55 bp, Artificial
  Synthetic oligonucleotide
tggaagccgtgcaagcgcaacatatacttccacaagttcacgagtgggttgggag

SEQ ID NO: 470474 - DNA, 55 bp, Artificial
  Synthetic oligonucleotide
tggaagcctgctactgctggtaatctctggctcgagtttaggtacggtttaactc

SEQ ID NO: 470475 - DNA, 56 bp, Artificial
  Synthetic oligonucleotide
tggaagcgcgtgtgaaaaggtcgggtgacgaaaattggcaaagctggttattacca

SEQ ID NO: 470476 - DNA, 53 bp, Artificial
  Synthetic oligonucleotide
tggaagctacagaagggagacttcacaggccccagggaaacctggtggcttac

SEQ ID NO: 470477 - DNA, 50 bp, Artificial
  Synthetic oligonucleotide
tggaagctatctctggatcccgtggcgcctcctaaaaaggggtatatgcc

SEQ ID NO: 470478 - DNA, 55 bp, Artificial
  Synthetic oligonucleotide
tggaagctccgaatcggtttctcggtatgaagtcaccgagggctctcgttgagag

SEQ ID NO: 470479 - DNA, 60 bp, Artificial
  Synthetic oligonucleotide
tggaagctggtgatctatatgaagagattgatggggtagtctactcaagaaatgaagcta

SEQ ID NO: 470480 - DNA, 60 bp, Artificial
  Synthetic oligonucleotide
tggaagctgtacgcacggtgtagcagactagcggttagaggagacccctcccataacaca

SEQ ID NO: 470481 - DNA, 60 bp, Artificial
  Synthetic oligonucleotide
tggaaggaaatgagagtgcagcacttggctccgatttaggcaggcttcttggaatacaac

SEQ ID NO: 470482 - DNA, 56 bp, Artificial
  Synthetic oligonucleotide
tggaaggaacttcagggcaagtggaagaagtcagaatttatcagggcactgaaggc

SEQ ID NO: 470483 - DNA, 59 bp, Artificial
  Synthetic oligonucleotide
tggaaggaagaattcaggaccttgagaaatatgtcgaagacaccaaaatagatctatgg

SEQ ID NO: 470484 - DNA, 55 bp, Artificial
  Synthetic oligonucleotide
tggaaggactcactaattttttggggattcaacacaaatatggaatcccattaaa

SEQ ID NO: 470485 - DNA, 58 bp, Artificial
  Synthetic oligonucleotide
tggaaggatagtaaagtatttggctgctgtagaccttgctgtgtggcgagtggttttt

SEQ ID NO: 470486 - DNA, 60 bp, Artificial
  Synthetic oligonucleotide
tggaaggatgctgaacattttgaacaggagacgcaggacagcgggcttcctcattatggt

SEQ ID NO: 470487 - DNA, 58 bp, Artificial
  Synthetic oligonucleotide
tggaaggatggtgagatcaccagggagacgtggagttctctttccaaatacgccgttg

SEQ ID NO: 470488 - DNA, 60 bp, Artificial
  Synthetic oligonucleotide
tggaaggcaggcaattcattaaagcatcttgccctcaaggggtcaatggtgtgtattacc

SEQ ID NO: 470489 - DNA, 57 bp, Artificial
  Synthetic oligonucleotide
tggaaggcctcaacagtgctaccacagttaactctagggtggtaaactttatcgtca

SEQ ID NO: 470490 - DNA, 58 bp, Artificial
  Synthetic oligonucleotide
tggaaggcgcgtggtaatgcgctgaaaaaggtgaccttctctctccagaaactcaccg

SEQ ID NO: 470491 - DNA, 60 bp, Artificial
  Synthetic oligonucleotide
tggaagggaatcctcttatcaagagaggagattggtcttcatattgcgaggtttccctga

SEQ ID NO: 470492 - DNA, 60 bp, Artificial
  Synthetic oligonucleotide
tggaagggacgaacagtcaatagccgaagcaataatcgtagccatggtgttttcacaaga

SEQ ID NO: 470493 - DNA, 57 bp, Artificial
  Synthetic oligonucleotide
tggaagggataatttactcccaacaaagacaagatatccttgacttgtgggtctaca

SEQ ID NO: 470494 - DNA, 60 bp, Artificial
  Synthetic oligonucleotide
tggaagggctaatttactcccaacaaagacgagatatacttgatctgtggatctacaaca

SEQ ID NO: 470495 - DNA, 56 bp, Artificial
  Synthetic oligonucleotide
tggaagggctaatttggtccaagaaaagacaagagatccttgatctttgggtctac

SEQ ID NO: 470496 - DNA, 56 bp, Artificial
  Synthetic oligonucleotide
tggaagggctagtttactcccagaaaagacaggatatccttgatctgtgggtttat

SEQ ID NO: 470497 - DNA, 55 bp, Artificial
  Synthetic oligonucleotide
tggaaggggaaagaggtcggatggaagagaggaggcgggctctccgattcgaggg

SEQ ID NO: 470498 - DNA, 52 bp, Artificial
  Synthetic oligonucleotide
tggaagggtgacgcgaccgcaaaacgtgccactgtcgtacgttcatcgggcg

SEQ ID NO: 470499 - DNA, 58 bp, Artificial
  Synthetic oligonucleotide
tggaagggttagtttggtccaggagaaggcaagagatcttagatctctgggtttatca

SEQ ID NO: 470500 - DNA, 57 bp, Artificial
  Synthetic oligonucleotide
tggaaggtcgttctttcacagttatgaaaggagatacaacagagttaaaggattaca

SEQ ID NO: 470501 - DNA, 58 bp, Artificial
  Synthetic oligonucleotide
tggaagtacataccataggtaagactatgagcacttataaaaatgaagtgttttccag

SEQ ID NO: 470502 - DNA, 55 bp, Artificial
  Synthetic oligonucleotide
tggaagtacggagaacctaacggcattagcaaggattggttggagaagaaacaac

SEQ ID NO: 470503 - DNA, 58 bp, Artificial
  Synthetic oligonucleotide
tggaagtagtaagagcacccacagcgtaaatcaattcgggttctgcgaattgctctgg

SEQ ID NO: 470504 - DNA, 58 bp, Artificial
  Synthetic oligonucleotide
tggaagtatcgttaactacgttcgcatccagtatctgttcttccgactcaccaacaac

SEQ ID NO: 470505 - DNA, 58 bp, Artificial
  Synthetic oligonucleotide
tggaagtcaaggggggcacgacccccctgagcgcgacgcgctacgtgttcacgagcaa

SEQ ID NO: 470506 - DNA, 60 bp, Artificial
  Synthetic oligonucleotide
tggaagtcatctaagtccacaaagcggtgataagagccggtgttaatggtgtacgtgcag

SEQ ID NO: 470507 - DNA, 60 bp, Artificial
  Synthetic oligonucleotide
tggaagtgggacctacattggacaagcaactcgacttgtggccatgaaggaggtcgccac

SEQ ID NO: 470508 - DNA, 55 bp, Artificial
  Synthetic oligonucleotide
tggaagtgggttaaccagcatagcggcaagtatgaaccggtgactgaggaagctc

SEQ ID NO: 470509 - DNA, 55 bp, Artificial
  Synthetic oligonucleotide
tggaagtggtacctgtacaaatagctgcaggaacaaccagcacattaatactgcc

SEQ ID NO: 470510 - DNA, 60 bp, Artificial
  Synthetic oligonucleotide
tggaagttacgaaatgtcttcgaagcaaaatacaatagatccaattgagagaatagattg

SEQ ID NO: 470511 - DNA, 50 bp, Artificial
  Synthetic oligonucleotide
tggaagttacgatttcagtatacctgtaggtgcatggccagttataactg

SEQ ID NO: 470512 - DNA, 60 bp, Artificial
  Synthetic oligonucleotide
tggaagttcaactcatccgccaaatggaagctgaaggagtcatcacacaagacgacatgc

SEQ ID NO: 470513 - DNA, 56 bp, Artificial
  Synthetic oligonucleotide
tggaagttcaggtaggctttgtggagacccaacgctttcctcaggttgtggttgta

SEQ ID NO: 470514 - DNA, 60 bp, Artificial
  Synthetic oligonucleotide
tggaagttcggatggaattgtgaggaggtgttgggatgcgtaatgtcaaagtgcctggga

SEQ ID NO: 470515 - DNA, 60 bp, Artificial
  Synthetic oligonucleotide
tggaagttgtccagcaaacgagagtggataagctgacccaaggtcgccagacttatgact

SEQ ID NO: 470516 - DNA, 60 bp, Artificial
  Synthetic oligonucleotide
tggaagtttgacagccaactggccttgaaacacagagccctagagctgcatccggagttc

SEQ ID NO: 470517 - DNA, 60 bp, Artificial
  Synthetic oligonucleotide
tggaagtttgacagctccctagcaaggagacacatagccagagagaaacatccggagttt

SEQ ID NO: 470518 - DNA, 57 bp, Artificial
  Synthetic oligonucleotide
tggaagtttgacatccaactggcacggagacacatagccagagagaaacatccggag

SEQ ID NO: 470519 - DNA, 58 bp, Artificial
  Synthetic oligonucleotide
tggaagttttgtccaacatcctgaattaacaggaatgaactgcataaggccttgtttc

SEQ ID NO: 470520 - DNA, 60 bp, Artificial
  Synthetic oligonucleotide
tggaataaccaggataaaccagcttatggccaatctcgctatttcgccgctgtgagatgt

SEQ ID NO: 470521 - DNA, 59 bp, Artificial
  Synthetic oligonucleotide
tggaataataccgtttgatataccattggtaccggagatatagcttccactggcacgaa

SEQ ID NO: 470522 - DNA, 60 bp, Artificial
  Synthetic oligonucleotide
tggaataatcgtgaaacagtggtgtactacaacatgtacctttggtgatccaggtgacat

SEQ ID NO: 470523 - DNA, 60 bp, Artificial
  Synthetic oligonucleotide
tggaataatgctgatatttgtggcgtggaccttgcagttaagtctcatatagcagtgggt

SEQ ID NO: 470524 - DNA, 55 bp, Artificial
  Synthetic oligonucleotide
tggaataccacgtactccctcatctagagacgatcaatcaagatgacccagcggt

SEQ ID NO: 470525 - DNA, 54 bp, Artificial
  Synthetic oligonucleotide
tggaataccttgcgagatataattcaattcatgggattccatgggaactagttg

SEQ ID NO: 470526 - DNA, 59 bp, Artificial
  Synthetic oligonucleotide
tggaatactaacgtatgcagatcaatacatacgaaaacttgccgaatggcgaaaacctc

SEQ ID NO: 470527 - DNA, 55 bp, Artificial
  Synthetic oligonucleotide
tggaatactgtctggaacatggcggttatagcacactgttatgagttccgtgact

SEQ ID NO: 470528 - DNA, 60 bp, Artificial
  Synthetic oligonucleotide
tggaatagccagcttgatattgcaaattggaaacataatctcaatatggattagccattc

SEQ ID NO: 470529 - DNA, 60 bp, Artificial
  Synthetic oligonucleotide
tggaataggtagacgctaatcagatataagagagctattcggggctgataagtagttacg

SEQ ID NO: 470530 - DNA, 60 bp, Artificial
  Synthetic oligonucleotide
tggaatagtactgaagattggaatagtactgaagattcaactaacgctgatggaaataac

SEQ ID NO: 470531 - DNA, 60 bp, Artificial
  Synthetic oligonucleotide
tggaatagtcagcttaatgttacaaattgggaacatgatctcaatatgggtcagtcattc

SEQ ID NO: 470532 - DNA, 60 bp, Artificial
  Synthetic oligonucleotide
tggaatataacagcattacgatcaccttatactagtgctaacttctttcaggattagagc

SEQ ID NO: 470533 - DNA, 60 bp, Artificial
  Synthetic oligonucleotide
tggaatatcagacgtctactcagatggaggctattcaaagaatgataaggtcgacagtgc

SEQ ID NO: 470534 - DNA, 60 bp, Artificial
  Synthetic oligonucleotide
tggaatatctctaccaggcgtgcgcggtatgtaatcgtctggatatgtatcgctgtctgt

SEQ ID NO: 470535 - DNA, 60 bp, Artificial
  Synthetic oligonucleotide
tggaatatgtgctcatcgtagggatgatctggaggtttagctaccgtcttgaattctatt

SEQ ID NO: 470536 - DNA, 59 bp, Artificial
  Synthetic oligonucleotide
tggaatcaaggtcggaacgttcacgatgcgtcgcaaggatttggaccatcccaactatc

SEQ ID NO: 470537 - DNA, 60 bp, Artificial
  Synthetic oligonucleotide
tggaatcaatatgagcaaaaagaagtcctacataaacaggacaggaacatttgaattcac

SEQ ID NO: 470538 - DNA, 60 bp, Artificial
  Synthetic oligonucleotide
tggaatcatatgtatataacctattatccatcaattacggatgttatcaattatttgact

SEQ ID NO: 470539 - DNA, 60 bp, Artificial
  Synthetic oligonucleotide
tggaatcatcggtggatgatcctagatcagaggaggacagaagatttgagagtcatatag

SEQ ID NO: 470540 - DNA, 60 bp, Artificial
  Synthetic oligonucleotide
tggaatcatgataccgtcacgactcacgcaaagcgtttgctattgggcgcagcgtggctg

SEQ ID NO: 470541 - DNA, 52 bp, Artificial
  Synthetic oligonucleotide
tggaatcccacagtggtaaaaaaatgcgtggtaaaaggttacctgcccctcc

SEQ ID NO: 470542 - DNA, 54 bp, Artificial
  Synthetic oligonucleotide
tggaatcctatcagcgttaatacctattctagttcataaagctgtatcaccggg

SEQ ID NO: 470543 - DNA, 60 bp, Artificial
  Synthetic oligonucleotide
tggaatccttctttgcacgaggtgcgtgtgtgacgataatgggggtagataactacaatg

SEQ ID NO: 470544 - DNA, 60 bp, Artificial
  Synthetic oligonucleotide
tggaatcgagggcacagactcgtgtgagcctagtgtcctagatttcgccgcagcatgacc

SEQ ID NO: 470545 - DNA, 58 bp, Artificial
  Synthetic oligonucleotide
tggaatcgcaactctgtgggttggaggcgagattttcggctatccggatttctcgtac

SEQ ID NO: 470546 - DNA, 53 bp, Artificial
  Synthetic oligonucleotide
tggaatcgccacgactaacccgtttaggaaactggttaacatcgccgcgaacc

SEQ ID NO: 470547 - DNA, 60 bp, Artificial
  Synthetic oligonucleotide
tggaatcggcaactacagcaaaatcgcacagttccacattacaggaccacaggaaaattc

SEQ ID NO: 470548 - DNA, 59 bp, Artificial
  Synthetic oligonucleotide
tggaatcgttgcaatagatttggaccctgtggtttatgatgcgaaatttgagaaacaac

SEQ ID NO: 470549 - DNA, 60 bp, Artificial
  Synthetic oligonucleotide
tggaatcgtttcacggtttctctgcgctgcggtacacagatacataggtatatcaagaga

SEQ ID NO: 470550 - DNA, 60 bp, Artificial
  Synthetic oligonucleotide
tggaatctccatagaatggaggcagggaaaatataacacacaaatagatcctgacctggc

SEQ ID NO: 470551 - DNA, 60 bp, Artificial
  Synthetic oligonucleotide
tggaatgatgtaacggagctaccagccgatcctaattggacagtggatcaggctgcaata

SEQ ID NO: 470552 - DNA, 60 bp, Artificial
  Synthetic oligonucleotide
tggaatgcaacaacagctattggcctttgtcacatcatgcgaggaggatgggtttcgtgt

SEQ ID NO: 470553 - DNA, 60 bp, Artificial
  Synthetic oligonucleotide
tggaatgcaggaggaagcaatacaagagatagctgggatgaccgccgatgtgttggaggc

SEQ ID NO: 470554 - DNA, 60 bp, Artificial
  Synthetic oligonucleotide
tggaatgcccgcatactgtgggactcggtcaagggataattgttggttctacagagcttg

SEQ ID NO: 470555 - DNA, 60 bp, Artificial
  Synthetic oligonucleotide
tggaatgctgaatcccggaggggtaccatggattgctattggagatgagacatctgtgac

SEQ ID NO: 470556 - DNA, 54 bp, Artificial
  Synthetic oligonucleotide
tggaatgctgaatcctgggggtgtgccatggatcgcaattggggatgagacatc

SEQ ID NO: 470557 - DNA, 55 bp, Artificial
  Synthetic oligonucleotide
tggaatggcgtgagagtgtctgctcccgagtcctctgctaccacattgagatccg

SEQ ID NO: 470558 - DNA, 60 bp, Artificial
  Synthetic oligonucleotide
tggaatgggatagaagagtgacagctatcactaacaatatgacaatcgatttacagaggg

SEQ ID NO: 470559 - DNA, 60 bp, Artificial
  Synthetic oligonucleotide
tggaatggtaatggactgcagaaaaactttacagaagacgcaatacgctacagagctcca

SEQ ID NO: 470560 - DNA, 55 bp, Artificial
  Synthetic oligonucleotide
tggaatggtactatttggaatggtactcggaatgatactaatatcacgctccctt

SEQ ID NO: 470561 - DNA, 55 bp, Artificial
  Synthetic oligonucleotide
tggaatgttactaatggtactagccagctggagtcaaatagcacagagttagccg

SEQ ID NO: 470562 - DNA, 60 bp, Artificial
  Synthetic oligonucleotide
tggaattaatttgccaataactgggtccatggatacaccatatgtgaattcaacgatgag

SEQ ID NO: 470563 - DNA, 59 bp, Artificial
  Synthetic oligonucleotide
tggaattaggtttagatccgacacatcgtcctaacaaggttcatagcctcatatcgaac

SEQ ID NO: 470564 - DNA, 60 bp, Artificial
  Synthetic oligonucleotide
tggaattatgttcagtacactgcgtcagattacagccacaagttatttcaactaccaaca

SEQ ID NO: 470565 - DNA, 59 bp, Artificial
  Synthetic oligonucleotide
tggaattcctctatataaggacgccctatcctatgtttgtagtcagagtgttttccata

SEQ ID NO: 470566 - DNA, 60 bp, Artificial
  Synthetic oligonucleotide
tggaattgcgcgaacttgcttgcttatcgcaaagtcgctcaattatgcctaggtgaccac

SEQ ID NO: 470567 - DNA, 60 bp, Artificial
  Synthetic oligonucleotide
tggaattgtatccgtcactatcgggcagaacagtcagttgagagttcatacatctggaat

SEQ ID NO: 470568 - DNA, 55 bp, Artificial
  Synthetic oligonucleotide
tggaatttacagcatcggagacaaagaactggattcgtattccacaaaccaaata

SEQ ID NO: 470569 - DNA, 60 bp, Artificial
  Synthetic oligonucleotide
tggaatttacgactttagtatacctgtaggtgcatggccagttatgaatggaggcgctgt

SEQ ID NO: 470570 - DNA, 59 bp, Artificial
  Synthetic oligonucleotide
tggaatttggttccttaactaatctccctcatgtgttgatgaacctggctgagaccacc

SEQ ID NO: 470571 - DNA, 60 bp, Artificial
  Synthetic oligonucleotide
tggacaaaactagcatagaggagcgccttcattggataagggagtgcgataatgacatcg

SEQ ID NO: 470572 - DNA, 57 bp, Artificial
  Synthetic oligonucleotide
tggacaaacacggtatagaatagccagtgcgttgtgggccgtaagactgtggttact

SEQ ID NO: 470573 - DNA, 60 bp, Artificial
  Synthetic oligonucleotide
tggacaaacgaggatggctctccgcggtacaatccgacatgggcaacattcgccatgaat

SEQ ID NO: 470574 - DNA, 60 bp, Artificial
  Synthetic oligonucleotide
tggacaaagatcttgtgggctggcccgctcctcagggcgcccgctcattgacaccttgca

SEQ ID NO: 470575 - DNA, 60 bp, Artificial
  Synthetic oligonucleotide
tggacaaaggccatggttctgcgccagctgtcacgacaagcttctgtgaaacttggtaaa

SEQ ID NO: 470576 - DNA, 59 bp, Artificial
  Synthetic oligonucleotide
tggacaaataatcttggaccagcaggaactacaagatatggtcaagaatttgttaataa

SEQ ID NO: 470577 - DNA, 60 bp, Artificial
  Synthetic oligonucleotide
tggacaaatatggcttaaacctccctatggttacctatgtgaaagatgagttgagatcag

SEQ ID NO: 470578 - DNA, 58 bp, Artificial
  Synthetic oligonucleotide
tggacaacaaggctcaagggcgtgccatcgccaagaaatggtctaagtacgagtcccc

SEQ ID NO: 470579 - DNA, 50 bp, Artificial
  Synthetic oligonucleotide
tggacaacacatgtgaagacctacatattacatgcggtcataaaaccctt

SEQ ID NO: 470580 - DNA, 58 bp, Artificial
  Synthetic oligonucleotide
tggacaactaaaagaagtctgttctggcggtctatattctacgcttttggatagaata

SEQ ID NO: 470581 - DNA, 55 bp, Artificial
  Synthetic oligonucleotide
tggacaactagacagcaggaacaggtaaatgtaggggcaatctataagcagtgga

SEQ ID NO: 470582 - DNA, 59 bp, Artificial
  Synthetic oligonucleotide
tggacaagcaagcgactgccgccaacgacgctacgacaggtcttaagaacctcgctaac

SEQ ID NO: 470583 - DNA, 52 bp, Artificial
  Synthetic oligonucleotide
tggacaagctgctcttcatgtgcataatccaacacaacagaatgcgatggtc

SEQ ID NO: 470584 - DNA, 59 bp, Artificial
  Synthetic oligonucleotide
tggacaaggatactatgatggtggacatcgaaggcgttacaaccctttctagcaggcgt

SEQ ID NO: 470585 - DNA, 60 bp, Artificial
  Synthetic oligonucleotide
tggacaaggatagtgaaactaataagctatctgatgttgagtcctcgtcagactctagtt

SEQ ID NO: 470586 - DNA, 52 bp, Artificial
  Synthetic oligonucleotide
tggacaaggatggtacaaatctagagctgacactactcaagctgaataggaa

SEQ ID NO: 470587 - DNA, 60 bp, Artificial
  Synthetic oligonucleotide
tggacaagtcttgacattcaatggattagaagatacaatacgaggcgactacattgtgga

SEQ ID NO: 470588 - DNA, 55 bp, Artificial
  Synthetic oligonucleotide
tggacaagtggagcaatctgtggacttggtttagcatatcaaactggctgtggta

SEQ ID NO: 470589 - DNA, 57 bp, Artificial
  Synthetic oligonucleotide
tggacaatatggtttctaactggagcggtaagatgtttaacggagttccagcagaaa

SEQ ID NO: 470590 - DNA, 55 bp, Artificial
  Synthetic oligonucleotide
tggacaatcaagaatgttcatcccacacattacacttagttttagcaacagacag

SEQ ID NO: 470591 - DNA, 60 bp, Artificial
  Synthetic oligonucleotide
tggacaatctcttgtaacttgtgctcagagtgtgactaaggccatttatgctaagttaac

SEQ ID NO: 470592 - DNA, 51 bp, Artificial
  Synthetic oligonucleotide
tggacacacgtgatgtgtcacagcttacgctcttcccacaccaatttatta

SEQ ID NO: 470593 - DNA, 59 bp, Artificial
  Synthetic oligonucleotide
tggacacagtggttcatcatttaagtgttgccatggagttgattgttcaagcaacggct

SEQ ID NO: 470594 - DNA, 60 bp, Artificial
  Synthetic oligonucleotide
tggacacatcatcggaccccatttactgtggtccatgctgtaatttaacaatccttctcg

SEQ ID NO: 470595 - DNA, 58 bp, Artificial
  Synthetic oligonucleotide
tggacaccaacgaaagcggagcagtactgtacgtatgcggaagactacgaccagtggg

SEQ ID NO: 470596 - DNA, 60 bp, Artificial
  Synthetic oligonucleotide
tggacaccgatacaccagagtccccaattgagacaccgatatattggtacctcggagaga

SEQ ID NO: 470597 - DNA, 52 bp, Artificial
  Synthetic oligonucleotide
tggacaccgtattgcaacgcgtcagtcgcttcaaacacccagcgcgtcggac

SEQ ID NO: 470598 - DNA, 56 bp, Artificial
  Synthetic oligonucleotide
tggacactacaatgtttgtaggagaccctttcaatcctccaagtgacccgaccgac

SEQ ID NO: 470599 - DNA, 51 bp, Artificial
  Synthetic oligonucleotide
tggacactacggatgcagatgttactatatactgcctggataagacctggg

SEQ ID NO: 470600 - DNA, 57 bp, Artificial
  Synthetic oligonucleotide
tggacactattggaccaaggagacaccataacgtttgaagccactgggaacttaata

SEQ ID NO: 470601 - DNA, 60 bp, Artificial
  Synthetic oligonucleotide
tggacacttcccgaactgatctgttggacgctgccaaagcagcgttaaacgagtctaatc

SEQ ID NO: 470602 - DNA, 60 bp, Artificial
  Synthetic oligonucleotide
tggacacttctcgaactgatctgttggacgccgctaaaacagcgttaaatgaatctaatc

SEQ ID NO: 470603 - DNA, 60 bp, Artificial
  Synthetic oligonucleotide
tggacagaaaatatggccaagaacgtactgcatacatgtgagggcaaaccagactcactt

SEQ ID NO: 470604 - DNA, 60 bp, Artificial
  Synthetic oligonucleotide
tggacagaacagaagagtatgctcttggtgtagttggagtgctagagagttatataggat

SEQ ID NO: 470605 - DNA, 59 bp, Artificial
  Synthetic oligonucleotide
tggacagactattggcaagtaacctggataccagattgggactttgtgtcaacacctcc

SEQ ID NO: 470606 - DNA, 55 bp, Artificial
  Synthetic oligonucleotide
tggacagagacaaagtggtacgcatcagcatcctacctgaaactggaacccgtgg

SEQ ID NO: 470607 - DNA, 60 bp, Artificial
  Synthetic oligonucleotide
tggacagatagagctatagaagtagtgcaaagaattggtagggctattatccatatacct

SEQ ID NO: 470608 - DNA, 60 bp, Artificial
  Synthetic oligonucleotide
tggacagatgcacagggtaagacaacatggtgcagccagacagactataattatcttatc

SEQ ID NO: 470609 - DNA, 60 bp, Artificial
  Synthetic oligonucleotide
tggacagattactggcaggtcacatgggtacctgagtgggaattcattaacaccccacca

SEQ ID NO: 470610 - DNA, 60 bp, Artificial
  Synthetic oligonucleotide
tggacagcgtcattgtggtaagtcgaacttcatgtcaacccttgacaatgctcttgccaa

SEQ ID NO: 470611 - DNA, 55 bp, Artificial
  Synthetic oligonucleotide
tggacagctggcgcgcactattaactatgttgacgtggcgttatgtgggtcgttg

SEQ ID NO: 470612 - DNA, 55 bp, Artificial
  Synthetic oligonucleotide
tggacagctgttcggctggaattatgacatcgactggtctgacaccgctgagtac

SEQ ID NO: 470613 - DNA, 60 bp, Artificial
  Synthetic oligonucleotide
tggacaggaaggtaattctccctagagttgcacatgatattctagataattctctcacag

SEQ ID NO: 470614 - DNA, 55 bp, Artificial
  Synthetic oligonucleotide
tggacagggatcaggatatgcagcggaccaaaagagcacacaaaacgccattgac

SEQ ID NO: 470615 - DNA, 54 bp, Artificial
  Synthetic oligonucleotide
tggacaggggcgagattggaaagtggccataaagagatgtagtaatgttgctgt

SEQ ID NO: 470616 - DNA, 50 bp, Artificial
  Synthetic oligonucleotide
tggacagggtagtttagagttagtagctgttaagatagataggcctgtta

SEQ ID NO: 470617 - DNA, 59 bp, Artificial
  Synthetic oligonucleotide
tggacaggtgtttaacatgtttgataacgagcccagtacagctacggtgaagaatgatt

SEQ ID NO: 470618 - DNA, 50 bp, Artificial
  Synthetic oligonucleotide
tggacagtcaagaatgtttattcctcatgtaacgttgagttttagtaatg

SEQ ID NO: 470619 - DNA, 55 bp, Artificial
  Synthetic oligonucleotide
tggacagtgatgtccacttgtgcttccgtgctacgtcatgtcagctataacagcc

SEQ ID NO: 470620 - DNA, 55 bp, Artificial
  Synthetic oligonucleotide
tggacagttatccggacagtggatatggcaatacacaagtggagactgtggaagc

SEQ ID NO: 470621 - DNA, 58 bp, Artificial
  Synthetic oligonucleotide
tggacataatgtttcattgatggatctgcttagttccttggttatgacagttgaaatt

SEQ ID NO: 470622 - DNA, 60 bp, Artificial
  Synthetic oligonucleotide
tggacatacattattctgagatggaacggtgcagtccgacccacagacatggggttggtg

SEQ ID NO: 470623 - DNA, 60 bp, Artificial
  Synthetic oligonucleotide
tggacatatgctacgtggcaatgtccaaagtgcaaacctagacacgcaaagaaagttatc

SEQ ID NO: 470624 - DNA, 60 bp, Artificial
  Synthetic oligonucleotide
tggacatcaattcccactttggctgctcagtttccatttaatgcttctgattcagttgga

SEQ ID NO: 470625 - DNA, 60 bp, Artificial
  Synthetic oligonucleotide
tggacatcactggcataaccaccgaatttccgctctgaagttgtgccctaaccataccat

SEQ ID NO: 470626 - DNA, 60 bp, Artificial
  Synthetic oligonucleotide
tggacatcactgtaagccaaattatatttcgtcaaatcattggcagccagcatcaaaagt

SEQ ID NO: 470627 - DNA, 55 bp, Artificial
  Synthetic oligonucleotide
tggacatctcatagcatttgattactccgggtatgatgctagcttaagtcctgtc

SEQ ID NO: 470628 - DNA, 53 bp, Artificial
  Synthetic oligonucleotide
tggacatctgtattcgaacctataacggaactacgcaaattggtagtgacgtc

SEQ ID NO: 470629 - DNA, 60 bp, Artificial
  Synthetic oligonucleotide
tggacatcttctacagggacggataggtggggtcgatctcgaatgcttctcacttttgca

SEQ ID NO: 470630 - DNA, 60 bp, Artificial
  Synthetic oligonucleotide
tggacatgctgacttgcaacacgtctgtttaccaggcgatttgcaccttagatggcaggt

SEQ ID NO: 470631 - DNA, 55 bp, Artificial
  Synthetic oligonucleotide
tggacatgggtagatgacgatggactaacaaggacatgctcacatcgcatctgtg

SEQ ID NO: 470632 - DNA, 60 bp, Artificial
  Synthetic oligonucleotide
tggacatgtatatgacgcaaacaagattgtgtacacagtcaaagttgagccacacacggg

SEQ ID NO: 470633 - DNA, 60 bp, Artificial
  Synthetic oligonucleotide
tggacatgttattaatcaactaatggaagccttaatgcagctgtcacgacaacagtttcc

SEQ ID NO: 470634 - DNA, 57 bp, Artificial
  Synthetic oligonucleotide
tggacattaatggaatcatcacctttcaaacggacattgacaacaaacaccaaccct

SEQ ID NO: 470635 - DNA, 60 bp, Artificial
  Synthetic oligonucleotide
tggacattccaactgcgtacagacggagaataccacagtacaactattctcccaccaaca

SEQ ID NO: 470636 - DNA, 51 bp, Artificial
  Synthetic oligonucleotide
tggacattggaaatggatgctggagttttgactggcaggttggtgagggtc

SEQ ID NO: 470637 - DNA, 60 bp, Artificial
  Synthetic oligonucleotide
tggacattgttgtctgattggttccagaggtagacctcagacacgaagaagagcgaatgt

SEQ ID NO: 470638 - DNA, 60 bp, Artificial
  Synthetic oligonucleotide
tggacatttatcattcggtactaacttgtcagaagttatcagatcaaaacacgagctgct

SEQ ID NO: 470639 - DNA, 60 bp, Artificial
  Synthetic oligonucleotide
tggacatttgacagccgcctggcactaagacacatagccagagagaaacatccggagtgc

SEQ ID NO: 470640 - DNA, 60 bp, Artificial
  Synthetic oligonucleotide
tggaccaaagaccctaaaaacacacaagatcatgttaggtcactgtgcatgatggcatgg

SEQ ID NO: 470641 - DNA, 55 bp, Artificial
  Synthetic oligonucleotide
tggaccaacaacaagcacagttcactacccaaaggtctataaaacctacttcgaa

SEQ ID NO: 470642 - DNA, 60 bp, Artificial
  Synthetic oligonucleotide
tggaccaaggatgcacgcaatactcaagaccatgtgcgttccctttgcttgttggcatgg

SEQ ID NO: 470643 - DNA, 60 bp, Artificial
  Synthetic oligonucleotide
tggaccaatcatgcagaattgcaagaggtgattaatcacaggcccatcgctcagagacga

SEQ ID NO: 470644 - DNA, 56 bp, Artificial
  Synthetic oligonucleotide
tggaccaattgggggtattaaatccatgggaattactaccttagttcaatatgcag

SEQ ID NO: 470645 - DNA, 60 bp, Artificial
  Synthetic oligonucleotide
tggaccaccagttgtacagatcattatcatattacctgtaagtcctgtctgagacccata

SEQ ID NO: 470646 - DNA, 51 bp, Artificial
  Synthetic oligonucleotide
tggaccaccgatctcgatcattgagaactcggtggattttttccagaatcc

SEQ ID NO: 470647 - DNA, 54 bp, Artificial
  Synthetic oligonucleotide
tggaccacgtcttcgttaactcggagaatgctaaagacgtagtggtaggttccg

SEQ ID NO: 470648 - DNA, 60 bp, Artificial
  Synthetic oligonucleotide
tggaccactgagtatgtaagaacagatgtgctggtctgtgttgagctaacagaccaagag

SEQ ID NO: 470649 - DNA, 54 bp, Artificial
  Synthetic oligonucleotide
tggaccacttaaactctgggaacttgagcgggggaggggttccgatgcacgcgt

SEQ ID NO: 470650 - DNA, 60 bp, Artificial
  Synthetic oligonucleotide
tggaccacttcatatctgaccggtttgtggaattcttagccatgcaggttttgcttgcta

SEQ ID NO: 470651 - DNA, 57 bp, Artificial
  Synthetic oligonucleotide
tggaccagctctttcgtcggggtgatcctttcgctcggcgttgggtcgagtctaggc

SEQ ID NO: 470652 - DNA, 60 bp, Artificial
  Synthetic oligonucleotide
tggaccagtatttccaccaggtatgaattggactgatctgatcactaattactcaccatc

SEQ ID NO: 470653 - DNA, 60 bp, Artificial
  Synthetic oligonucleotide
tggaccatactcaccaccactgacgtgacctgcggctcgcagcaagtgtactggtccctg

SEQ ID NO: 470654 - DNA, 55 bp, Artificial
  Synthetic oligonucleotide
tggaccatctactaactggcaatcgttatacacttcattaccacagcctaaccca

SEQ ID NO: 470655 - DNA, 60 bp, Artificial
  Synthetic oligonucleotide
tggaccatgattccccgtgatacgcgccaacgtacctactactctacaatcagcaatgaa

SEQ ID NO: 470656 - DNA, 60 bp, Artificial
  Synthetic oligonucleotide
tggaccatggcaatctaccctgttgggccagttgtgcgggtactacactcaatggtcagg

SEQ ID NO: 470657 - DNA, 60 bp, Artificial
  Synthetic oligonucleotide
tggaccatggcagtccactatggtcgggcaattatgcaggtactacacacagtggtcagg

SEQ ID NO: 470658 - DNA, 54 bp, Artificial
  Synthetic oligonucleotide
tggacccaacgacctagcccacaccgtctttcccgttcgactatcaccctctac

SEQ ID NO: 470659 - DNA, 60 bp, Artificial
  Synthetic oligonucleotide
tggacccaatccctgagtccaaaatcctccagctcattctcaaagttcgctgggcttctc

SEQ ID NO: 470660 - DNA, 60 bp, Artificial
  Synthetic oligonucleotide
tggacccaggggatacagtcacttttaccttcaatggtgcattcatagccccagatagag

SEQ ID NO: 470661 - DNA, 50 bp, Artificial
  Synthetic oligonucleotide
tggacccccgcagcccccctgtccacactccttcccccccgcggggcccc

SEQ ID NO: 470662 - DNA, 56 bp, Artificial
  Synthetic oligonucleotide
tggacccggtagatcttaacctagagccctggaatcatccgggaagtcggcctaca

SEQ ID NO: 470663 - DNA, 58 bp, Artificial
  Synthetic oligonucleotide
tggacccggttggttgacattaggaattactggccctgattctactgctgttgcggtg

SEQ ID NO: 470664 - DNA, 57 bp, Artificial
  Synthetic oligonucleotide
tggaccctacatttaccatagagaccaccactgtgccccaagactccgtttcgcgga

SEQ ID NO: 470665 - DNA, 56 bp, Artificial
  Synthetic oligonucleotide
tggaccctatttagttaaagatacaataaagcttaaacaagagagatggctcggta

SEQ ID NO: 470666 - DNA, 60 bp, Artificial
  Synthetic oligonucleotide
tggaccctcggatgaaaggccttatcagatgctgacctgtgctggaggacattgcaatat

SEQ ID NO: 470667 - DNA, 60 bp, Artificial
  Synthetic oligonucleotide
tggaccctgaactcaggacactagcacagagtctcattgatcagaaggtcaaagagattt

SEQ ID NO: 470668 - DNA, 59 bp, Artificial
  Synthetic oligonucleotide
tggaccctgcccaaggtcttacataagaggactattggactttcagcgatgtcaacgac

SEQ ID NO: 470669 - DNA, 60 bp, Artificial
  Synthetic oligonucleotide
tggaccgatgggacatggatctctttgggagggagggtaccgactcacatgagccgagta

SEQ ID NO: 470670 - DNA, 57 bp, Artificial
  Synthetic oligonucleotide
tggaccgctttcgcctttcaacttttacaatacaagtatgtctacgatgtagactat

SEQ ID NO: 470671 - DNA, 59 bp, Artificial
  Synthetic oligonucleotide
tggaccggaatttactatacgtaacaataattataagtcatcgtacatatctatgcctg

SEQ ID NO: 470672 - DNA, 54 bp, Artificial
  Synthetic oligonucleotide
tggaccgtgaaccttgttactgatggacggaaggtcgggtctaagaccgttgac

SEQ ID NO: 470673 - DNA, 55 bp, Artificial
  Synthetic oligonucleotide
tggaccgtgcgattgataccgtcactgccatggactacaattggagcctcgaaat

SEQ ID NO: 470674 - DNA, 56 bp, Artificial
  Synthetic oligonucleotide
tggaccgttccgagagtcgtgcggaaagcactactttttgggcgttgacgtcacac

SEQ ID NO: 470675 - DNA, 55 bp, Artificial
  Synthetic oligonucleotide
tggacctctcgagggtggcggcttaatattcaaacactggtgtacatctacctgc

SEQ ID NO: 470676 - DNA, 55 bp, Artificial
  Synthetic oligonucleotide
tggacctgaaatcatgtcgtctggtgttgtatctcttccgcccattggatcacgt

SEQ ID NO: 470677 - DNA, 59 bp, Artificial
  Synthetic oligonucleotide
tggacctgtccctggagttgccgtattcgccaactccctacatgtgagtgatagacctt

SEQ ID NO: 470678 - DNA, 55 bp, Artificial
  Synthetic oligonucleotide
tggacgaaaactgtttggaactatactgatgacactagcgaaacaggttactcag

SEQ ID NO: 470679 - DNA, 56 bp, Artificial
  Synthetic oligonucleotide
tggacgaacggcatagtcatttcagacgaacgtatgatgctcgatcccttaccgtc

SEQ ID NO: 470680 - DNA, 55 bp, Artificial
  Synthetic oligonucleotide
tggacgaagagcaacagccattctaagaaaagcaaccagaaggatgatccaactg

SEQ ID NO: 470681 - DNA, 60 bp, Artificial
  Synthetic oligonucleotide
tggacgaagtccaaaacacacaaaagtcatcagaacagtggaatataatgagctggcagt

SEQ ID NO: 470682 - DNA, 56 bp, Artificial
  Synthetic oligonucleotide
tggacgaccaatttaataaccgatttataacaagcgtatttggactgagcgattac

SEQ ID NO: 470683 - DNA, 58 bp, Artificial
  Synthetic oligonucleotide
tggacgacgcagggttgcaattgttctatctatcccggccacgtaacgggccaccgca

SEQ ID NO: 470684 - DNA, 60 bp, Artificial
  Synthetic oligonucleotide
tggacgactattatgggtggctaccttattgcgagatgctccgcctatgcgaccgttacc

SEQ ID NO: 470685 - DNA, 58 bp, Artificial
  Synthetic oligonucleotide
tggacgagaatatcaagttgaagaaccacacgaacagcgtcatgttttggttagttag

SEQ ID NO: 470686 - DNA, 60 bp, Artificial
  Synthetic oligonucleotide
tggacgagatggttagagagtctcagcgtaatggaattgcaccacagtctgatgctctaa

SEQ ID NO: 470687 - DNA, 58 bp, Artificial
  Synthetic oligonucleotide
tggacgagtctaaagagttctgccttgtaaacgccgcaaatgagcatatgtctcatgg

SEQ ID NO: 470688 - DNA, 54 bp, Artificial
  Synthetic oligonucleotide
tggacgatcccttcatatttgatgagcgatggtgacttggtggatactagcttc

SEQ ID NO: 470689 - DNA, 60 bp, Artificial
  Synthetic oligonucleotide
tggacgatgcaaggctgcaactgttctatctatcccggccatataacaggtcaccgcatg

SEQ ID NO: 470690 - DNA, 55 bp, Artificial
  Synthetic oligonucleotide
tggacgatttcctctatctttacgaacttgggaggaagttcgacggagaaggtga

SEQ ID NO: 470691 - DNA, 55 bp, Artificial
  Synthetic oligonucleotide
tggacgcataaggtgggaaactttactgggctttattcttctactgtacctgtct

SEQ ID NO: 470692 - DNA, 60 bp, Artificial
  Synthetic oligonucleotide
tggacgcatcccagactcagaacgtgacccaaattcgtaagatattgaatgacgctagcc

SEQ ID NO: 470693 - DNA, 55 bp, Artificial
  Synthetic oligonucleotide
tggacgccacactttcgtagcatagcgtcggtaggggagagtcgcaatccacaac

SEQ ID NO: 470694 - DNA, 54 bp, Artificial
  Synthetic oligonucleotide
tggacgccgctccgacatcgcaacacgctgtataagatggactacgacgagagt

SEQ ID NO: 470695 - DNA, 52 bp, Artificial
  Synthetic oligonucleotide
tggacgcggtttgacggtacaatcccaaaagcgctcttttaccgcataagac

SEQ ID NO: 470696 - DNA, 60 bp, Artificial
  Synthetic oligonucleotide
tggacgctagcaataataccagtagtgccattgggtacgcgtacaatgtcaagtatggtt

SEQ ID NO: 470697 - DNA, 60 bp, Artificial
  Synthetic oligonucleotide
tggacgctatgcatacagcttcgatctttggcaagacgtataacataggtcagttgtact

SEQ ID NO: 470698 - DNA, 59 bp, Artificial
  Synthetic oligonucleotide
tggacgctcacggaaatgctgaggtcatcccgaaggtccgacctggttttctctggaca

SEQ ID NO: 470699 - DNA, 60 bp, Artificial
  Synthetic oligonucleotide
tggacgctcatgctagagagctccgcgctttgaccgctcagctgaatcgtttggtagcca

SEQ ID NO: 470700 - DNA, 51 bp, Artificial
  Synthetic oligonucleotide
tggacgctggtttattgagtcaccacgacttgaacggcaaatggtattgtc

SEQ ID NO: 470701 - DNA, 60 bp, Artificial
  Synthetic oligonucleotide
tggacggatcctctccaagtagtggatgaccttgatactaagctggatcagtactggacg

SEQ ID NO: 470702 - DNA, 55 bp, Artificial
  Synthetic oligonucleotide
tggacggcgacctctcgaaggtgagcctggaggtcttccgggagatgcgcgtgaa

SEQ ID NO: 470703 - DNA, 60 bp, Artificial
  Synthetic oligonucleotide
tggacggctgatgatcggtctatcatatcagccatggaagtggacctagctgaaggcaat

SEQ ID NO: 470704 - DNA, 57 bp, Artificial
  Synthetic oligonucleotide
tggacgggtcgtcggtacaggctctgccgatcaacggcgcaaagatccggaccgatt

SEQ ID NO: 470705 - DNA, 55 bp, Artificial
  Synthetic oligonucleotide
tggacggtaaatcaaagaaaccgacatttaatgattggggcgagtgtgctacacg

SEQ ID NO: 470706 - DNA, 53 bp, Artificial
  Synthetic oligonucleotide
tggacggttattcccctaaggccgagggagtcttctccctggtcgttgttgtg

SEQ ID NO: 470707 - DNA, 55 bp, Artificial
  Synthetic oligonucleotide
tggacggttcaactccaaagatcgaaggagtcttttccctggtggtcgttgtgga

SEQ ID NO: 470708 - DNA, 55 bp, Artificial
  Synthetic oligonucleotide
tggacgtaagttccttgcacagtcaaatatttcaccaacgcgtaaacgtattcgg

SEQ ID NO: 470709 - DNA, 59 bp, Artificial
  Synthetic oligonucleotide
tggacgtataatgcagaattgttggttctgctggaaaatgaaaggactttggattttca

SEQ ID NO: 470710 - DNA, 60 bp, Artificial
  Synthetic oligonucleotide
tggacgtccgacaaaccgactggagctactggtccctgtttgaagcgcatcactatttga

SEQ ID NO: 470711 - DNA, 60 bp, Artificial
  Synthetic oligonucleotide
tggacgtgaagctgatgcacatagagccttccagcgggtcttagctcaagactatacatc

SEQ ID NO: 470712 - DNA, 52 bp, Artificial
  Synthetic oligonucleotide
tggacgtgtatcttctgcggagcgagtaaccatgcaagcagcgagcggtgtt

SEQ ID NO: 470713 - DNA, 59 bp, Artificial
  Synthetic oligonucleotide
tggacgtgttctacaaaccttcagagcccagtgacaccctgttctgcgacataggggaa

SEQ ID NO: 470714 - DNA, 59 bp, Artificial
  Synthetic oligonucleotide
tggacgttcaggatattggtatgggaatgggtcctgaaatgcccctcacagatagtttc

SEQ ID NO: 470715 - DNA, 60 bp, Artificial
  Synthetic oligonucleotide
tggacgttccccactggcgacagtggtccagcctgcgtggctgcctgctcacccatttgg

SEQ ID NO: 470716 - DNA, 56 bp, Artificial
  Synthetic oligonucleotide
tggacgtttaccatggagaccgacggtcgcattgggtcggatgtccctccggctaa

SEQ ID NO: 470717 - DNA, 53 bp, Artificial
  Synthetic oligonucleotide
tggactaaagatgagcggagatgcaccttcgcctgctgagggaaagatagggc

SEQ ID NO: 470718 - DNA, 55 bp, Artificial
  Synthetic oligonucleotide
tggactaaatggaatgtcaggaatctacaaggtctgcattgctgcctcttctgga

SEQ ID NO: 470719 - DNA, 55 bp, Artificial
  Synthetic oligonucleotide
tggactaaggatccaaagaatacccaagatcacgtgcgctcgttgtgcctattgg

SEQ ID NO: 470720 - DNA, 55 bp, Artificial
  Synthetic oligonucleotide
tggactaataccactgctgtgacgactgggaatgaagtaaatgatactatcacac

SEQ ID NO: 470721 - DNA, 60 bp, Artificial
  Synthetic oligonucleotide
tggactacaattggagcctcgaaatcattattgagattcgatgacgagccacgccaaatc

SEQ ID NO: 470722 - DNA, 58 bp, Artificial
  Synthetic oligonucleotide
tggactaggttataagtggtcggaaatatcatttaagcccatgaactatcaatatacg

SEQ ID NO: 470723 - DNA, 60 bp, Artificial
  Synthetic oligonucleotide
tggactagtcgatataccaaaaatgatacaagactggttaatagattgttcaattgataa

SEQ ID NO: 470724 - DNA, 60 bp, Artificial
  Synthetic oligonucleotide
tggactagtgtatcatccgttcacagaatgtgggacgcattgtgtatgcggtgcccgcta

SEQ ID NO: 470725 - DNA, 60 bp, Artificial
  Synthetic oligonucleotide
tggactatagttttatgtgaaaacaataatttctattattctgaagtgcatagagattat

SEQ ID NO: 470726 - DNA, 52 bp, Artificial
  Synthetic oligonucleotide
tggactattaattggacatttagtacgacaaatgcgttcccattgacgaata

SEQ ID NO: 470727 - DNA, 60 bp, Artificial
  Synthetic oligonucleotide
tggactcaaaaatgctccagcaatattccagcgcaagatggataattgtttcagaggaac

SEQ ID NO: 470728 - DNA, 58 bp, Artificial
  Synthetic oligonucleotide
tggactcaacacctgcttatccaaaattccaggagtttgataccgaagaagaatatct

SEQ ID NO: 470729 - DNA, 52 bp, Artificial
  Synthetic oligonucleotide
tggactcacgatctagacgcaaactatagactagaaaacctcacacagtggc

SEQ ID NO: 470730 - DNA, 60 bp, Artificial
  Synthetic oligonucleotide
tggactcagaggacgtgcaacggtaccgggcatggctgcaacttcgtgccatgcggctag

SEQ ID NO: 470731 - DNA, 60 bp, Artificial
  Synthetic oligonucleotide
tggactcagcacacaactactggtggttctcaggcctgtgcagcgtatggtggcccatcg

SEQ ID NO: 470732 - DNA, 60 bp, Artificial
  Synthetic oligonucleotide
tggactcaggtcaaggtgaccacacaggtaattatgtggtcctaatgatcgggcccacat

SEQ ID NO: 470733 - DNA, 55 bp, Artificial
  Synthetic oligonucleotide
tggactcaggtgattgctggtcagcatgtgaccaatcccaggttcaatatctccg

SEQ ID NO: 470734 - DNA, 59 bp, Artificial
  Synthetic oligonucleotide
tggactcatgagttggtttggagggccgcttaaaactatactcctcatttgcctgtatg

SEQ ID NO: 470735 - DNA, 60 bp, Artificial
  Synthetic oligonucleotide
tggactcattaagagaagaatcttgtgagacttgcaattatgagtgtgcagaagatggtg

SEQ ID NO: 470736 - DNA, 60 bp, Artificial
  Synthetic oligonucleotide
tggactccattactcttgagctgagaagcaaatactgggctataagaaccaggagtggag

SEQ ID NO: 470737 - DNA, 54 bp, Artificial
  Synthetic oligonucleotide
tggactcccgaagaagatcaaaaggcccgagaggcttttcgacgttaccaagaa

SEQ ID NO: 470738 - DNA, 55 bp, Artificial
  Synthetic oligonucleotide
tggactccctctcagttaaccaaattttgtacccggaggtgcaccttgatagccc

SEQ ID NO: 470739 - DNA, 55 bp, Artificial
  Synthetic oligonucleotide
tggactcctgcggaggaatcgtggtccgctgtcacattcgtaggcttggcccctg

SEQ ID NO: 470740 - DNA, 56 bp, Artificial
  Synthetic oligonucleotide
tggactccttatctaaagccacgacgctaccgcttcgcgcaaaattttcgcccttc

SEQ ID NO: 470741 - DNA, 57 bp, Artificial
  Synthetic oligonucleotide
tggactcgccattgtgaaaacgtggtcgcaaggagccctccgaagcttcctttgggc

SEQ ID NO: 470742 - DNA, 55 bp, Artificial
  Synthetic oligonucleotide
tggactcggaccgcgcagctgcaaccagtgatgccgagtcacctgggtctagcat

SEQ ID NO: 470743 - DNA, 60 bp, Artificial
  Synthetic oligonucleotide
tggactcggctcgcgatagcgcccacgttatcagggacgattctcggccttatgagatta

SEQ ID NO: 470744 - DNA, 55 bp, Artificial
  Synthetic oligonucleotide
tggactcgggccttatcgaattcaagttgtctacgagagaacctactgtacaact

SEQ ID NO: 470745 - DNA, 60 bp, Artificial
  Synthetic oligonucleotide
tggactcgtcgttatcggaatctgacgaagaagtcctatgtgagcggcccacattgtggt

SEQ ID NO: 470746 - DNA, 60 bp, Artificial
  Synthetic oligonucleotide
tggactcgttgcagtaggtgaagatatagtaaacgcatgggatgcttatgtaagggcagt

SEQ ID NO: 470747 - DNA, 55 bp, Artificial
  Synthetic oligonucleotide
tggactctatcctatgagaggatgggtcaaattatgacaatgtttgaggccctgc

SEQ ID NO: 470748 - DNA, 60 bp, Artificial
  Synthetic oligonucleotide
tggactctatcgttcctggaataccggatggatggccagatactaccatacctgagaagt

SEQ ID NO: 470749 - DNA, 60 bp, Artificial
  Synthetic oligonucleotide
tggactctcgtggtgctatattgcgccgccagtacaacttgtctacgtcaccgcttacat

SEQ ID NO: 470750 - DNA, 55 bp, Artificial
  Synthetic oligonucleotide
tggactgagttaattacaaattattctccatcacgagaggataacttgcaacgag

SEQ ID NO: 470751 - DNA, 50 bp, Artificial
  Synthetic oligonucleotide
tggactgattgggcgtaagaggcgtgaagcagtatctctaacaccagtcc

SEQ ID NO: 470752 - DNA, 55 bp, Artificial
  Synthetic oligonucleotide
tggactgcattatgtttgatgcagcagtctcgggagggctcgatgcaaaggtcct

SEQ ID NO: 470753 - DNA, 57 bp, Artificial
  Synthetic oligonucleotide
tggactgccaaggcttacacctggtggtcacgaattaaagcttttgtgaaggccgaa

SEQ ID NO: 470754 - DNA, 55 bp, Artificial
  Synthetic oligonucleotide
tggactgcctgcagctaatccaaataacgggagagaatattatgagatagctggc

SEQ ID NO: 470755 - DNA, 60 bp, Artificial
  Synthetic oligonucleotide
tggactggaacaaatagaccaattctggtaatatcttctgatctatcgtacacagtcgga

SEQ ID NO: 470756 - DNA, 52 bp, Artificial
  Synthetic oligonucleotide
tggactggaatgtatggctgccgcctttcggccgcctagaccctgtcgccct

SEQ ID NO: 470757 - DNA, 60 bp, Artificial
  Synthetic oligonucleotide
tggactggaggcggctcggatggtctgatggccaagtagggcaagctagacaggaaactg

SEQ ID NO: 470758 - DNA, 60 bp, Artificial
  Synthetic oligonucleotide
tggactggattcattcaaggcgtacgtgatggtatccgaaccaggtcgctgtccgcagga

SEQ ID NO: 470759 - DNA, 58 bp, Artificial
  Synthetic oligonucleotide
tggactggattgtttaaccctataacaggaagtgatcttaaggatgtgcaaccactaa

SEQ ID NO: 470760 - DNA, 59 bp, Artificial
  Synthetic oligonucleotide
tggactgtgagccaaggagtggactgaacactgaagcgttttacgtcatgaccgtgggg

SEQ ID NO: 470761 - DNA, 59 bp, Artificial
  Synthetic oligonucleotide
tggacttaagggattggcgtgcatggacatctcatatggatgtgaggtggacgcgaata

SEQ ID NO: 470762 - DNA, 53 bp, Artificial
  Synthetic oligonucleotide
tggacttaattgggcctcttttattgggccagtagcttcgagtctggcccgta

SEQ ID NO: 470763 - DNA, 57 bp, Artificial
  Synthetic oligonucleotide
tggacttacaatgccgaactgttggtcctattggagaatgaaagaaccttggatttc

SEQ ID NO: 470764 - DNA, 60 bp, Artificial
  Synthetic oligonucleotide
tggacttacaggccaatgtatcgcaagcccaagatgtacagaatgtatagaagccgtgat

SEQ ID NO: 470765 - DNA, 57 bp, Artificial
  Synthetic oligonucleotide
tggacttagctccctgaatgttcggatggaaatgtgttgatcggttgggggaaacca

SEQ ID NO: 470766 - DNA, 59 bp, Artificial
  Synthetic oligonucleotide
tggacttagctccctggaagtttggatggaattgggtggagctattagggtgagtgaca

SEQ ID NO: 470767 - DNA, 58 bp, Artificial
  Synthetic oligonucleotide
tggacttccacaagttcactagtgggttgggagtgaggacgcagtggaagaacgtcac

SEQ ID NO: 470768 - DNA, 60 bp, Artificial
  Synthetic oligonucleotide
tggacttccgatgtgatatgtggacagttggacttttgcaacgtcttgctcggacggaca

SEQ ID NO: 470769 - DNA, 56 bp, Artificial
  Synthetic oligonucleotide
tggactttagtatagcttagttagtaataaacgcttgtcttctcatacaaggaaaa

SEQ ID NO: 470770 - DNA, 55 bp, Artificial
  Synthetic oligonucleotide
tggactttatacccgtcgagtctatggaaaccaccatgcggtctccggtctttac

SEQ ID NO: 470771 - DNA, 60 bp, Artificial
  Synthetic oligonucleotide
tggactttcttgccaactgatttcgaaacaaaagagtcaataatcacatcgtatgatagt

SEQ ID NO: 470772 - DNA, 56 bp, Artificial
  Synthetic oligonucleotide
tggactttgaatgaaaaggctaactttctcaatttacctggagtaagctacataag

SEQ ID NO: 470773 - DNA, 56 bp, Artificial
  Synthetic oligonucleotide
tggactttggacataaagctagatttgggccattttgcgttaaaaagcctccagta

SEQ ID NO: 470774 - DNA, 58 bp, Artificial
  Synthetic oligonucleotide
tggactttgtcaggctagtgacggctaccgtctacgcctactttatagtgtcctcaat

SEQ ID NO: 470775 - DNA, 58 bp, Artificial
  Synthetic oligonucleotide
tggacttttcgcggcgaaacaccgcatgctacaactgattactcatcgacttcaaact

SEQ ID NO: 470776 - DNA, 52 bp, Artificial
  Synthetic oligonucleotide
tggagaaaccaacctatgacctaagtaaacattacttgagtccaaagggagg

SEQ ID NO: 470777 - DNA, 55 bp, Artificial
  Synthetic oligonucleotide
tggagaaactcttggtctaaaggaaacgatggaatggacctagtaagatactttg

SEQ ID NO: 470778 - DNA, 56 bp, Artificial
  Synthetic oligonucleotide
tggagaaactgtgtgcgcggctccgactgaccaagtatgcagtttcgacggggcat

SEQ ID NO: 470779 - DNA, 59 bp, Artificial
  Synthetic oligonucleotide
tggagaaaggaagatacaaattactcctgtcatgattataagaggtgagatagacccac

SEQ ID NO: 470780 - DNA, 55 bp, Artificial
  Synthetic oligonucleotide
tggagaaagggttagagaacgaagacaatcgtgcaatagaacagttaacactaca

SEQ ID NO: 470781 - DNA, 60 bp, Artificial
  Synthetic oligonucleotide
tggagaaatcacatgtgtgtgcagggataactggcatggctcaaatcggccatgggtatc

SEQ ID NO: 470782 - DNA, 60 bp, Artificial
  Synthetic oligonucleotide
tggagaaatcgcaacgcgcagagcaaacgacccatggaacaatcgggcggtgcatggata

SEQ ID NO: 470783 - DNA, 53 bp, Artificial
  Synthetic oligonucleotide
tggagaacaagctggtggtttagctaatcttactagtttaacattcaattggg

SEQ ID NO: 470784 - DNA, 60 bp, Artificial
  Synthetic oligonucleotide
tggagaacaatacattcatccatgctggacgagatccaacactaagcgtgccacagttat

SEQ ID NO: 470785 - DNA, 59 bp, Artificial
  Synthetic oligonucleotide
tggagaaccaacatacaattgatctgactgactcggaaatgaacaaactgtttgaaaaa

SEQ ID NO: 470786 - DNA, 56 bp, Artificial
  Synthetic oligonucleotide
tggagaaccgtttcatcagggtttcagagatttatcgaatcttgaggattttaacg

SEQ ID NO: 470787 - DNA, 60 bp, Artificial
  Synthetic oligonucleotide
tggagaactacgacatctcttcagtggagtgaactcctttagcagaacggagctaataag

SEQ ID NO: 470788 - DNA, 59 bp, Artificial
  Synthetic oligonucleotide
tggagaagaacgtcacttcgcccgtgaatgtccaaatgaccggcgaaatgtgaagcgag

SEQ ID NO: 470789 - DNA, 58 bp, Artificial
  Synthetic oligonucleotide
tggagaaggacacgactatggttgatcttgaagggacgactaatttatctagcaggcg

SEQ ID NO: 470790 - DNA, 60 bp, Artificial
  Synthetic oligonucleotide
tggagaagtggcgcttctatctcgtgccgcagaagtatcaggactgcctgtcgcaacgtt

SEQ ID NO: 470791 - DNA, 58 bp, Artificial
  Synthetic oligonucleotide
tggagaagtttcctttattcaaatgtggccctgtatctaccagattcctacaaataca

SEQ ID NO: 470792 - DNA, 60 bp, Artificial
  Synthetic oligonucleotide
tggagaatatcatggcgcagccatgtcatcggagaataatttgggtctatggcccaaatg

SEQ ID NO: 470793 - DNA, 55 bp, Artificial
  Synthetic oligonucleotide
tggagaatttgttcttgactagtgctggtgactttgttgaaaacacctctacgtc

SEQ ID NO: 470794 - DNA, 60 bp, Artificial
  Synthetic oligonucleotide
tggagacaaaagtggagccaagtatggtactacagtagttaatcgcatgggtgcactatg

SEQ ID NO: 470795 - DNA, 60 bp, Artificial
  Synthetic oligonucleotide
tggagacaattaagaatattgcagatatggcaactggagtagttagttcagttgattcaa

SEQ ID NO: 470796 - DNA, 60 bp, Artificial
  Synthetic oligonucleotide
tggagacaggacacagatatatctgggtgatcggaaaatgcattggatatgtgatgcaca

SEQ ID NO: 470797 - DNA, 60 bp, Artificial
  Synthetic oligonucleotide
tggagacaggtttatccaccgtctctacgataaatttttcagcaaatgagacactagcta

SEQ ID NO: 470798 - DNA, 60 bp, Artificial
  Synthetic oligonucleotide
tggagacagtaattcggacgcacgccgtaaggaattggcatatgccaaacttatggatag

SEQ ID NO: 470799 - DNA, 54 bp, Artificial
  Synthetic oligonucleotide
tggagacagttcaggagggggctcgcttttttctcctacgcgcccgccgcccta

SEQ ID NO: 470800 - DNA, 55 bp, Artificial
  Synthetic oligonucleotide
tggagacatacgtgaacaaactccatgaaggatcaacttacacagctgctgttca

SEQ ID NO: 470801 - DNA, 60 bp, Artificial
  Synthetic oligonucleotide
tggagacatgagagcgtcaagtagcacagtcctggagctataggcacaggtgtagttgtg

SEQ ID NO: 470802 - DNA, 57 bp, Artificial
  Synthetic oligonucleotide
tggagaccaccgtgaacgcccaccaccggaacttgcccaaggtcttgcataagagga

SEQ ID NO: 470803 - DNA, 60 bp, Artificial
  Synthetic oligonucleotide
tggagacccaatgctctcctgaggttgtggttgaaccttatctgtatgtgatacactctt

SEQ ID NO: 470804 - DNA, 59 bp, Artificial
  Synthetic oligonucleotide
tggagaccccttggaaatgcagggagtgctaatgaattacaggacaaagtacccagatg

SEQ ID NO: 470805 - DNA, 57 bp, Artificial
  Synthetic oligonucleotide
tggagaccgttggcggcagcttaccaagagcaactagaccggccggtagtacctcac

SEQ ID NO: 470806 - DNA, 60 bp, Artificial
  Synthetic oligonucleotide
tggagacgccagatggtaggtgccactttgtgtcatgttatgataagagtggtatactca

SEQ ID NO: 470807 - DNA, 58 bp, Artificial
  Synthetic oligonucleotide
tggagacgctttcccagcgtttaagtgtgtgtcaggacaaaatactagaacattacga

SEQ ID NO: 470808 - DNA, 60 bp, Artificial
  Synthetic oligonucleotide
tggagacggatcgagaacttctcaatgccgcagggtaactcacagcgtactttagctggt

SEQ ID NO: 470809 - DNA, 57 bp, Artificial
  Synthetic oligonucleotide
tggagacggggggtctggccaaataagttgcagcccagtgtttgcagtagaaagacc

SEQ ID NO: 470810 - DNA, 55 bp, Artificial
  Synthetic oligonucleotide
tggagacggttcgtaacccacgtggtctgtactggaactattactaccatgtgtg

SEQ ID NO: 470811 - DNA, 60 bp, Artificial
  Synthetic oligonucleotide
tggagacgtggcctaatatgttatcgggctccttggtcaatttcgctatgtcgtgttatg

SEQ ID NO: 470812 - DNA, 59 bp, Artificial
  Synthetic oligonucleotide
tggagactacttctcttgcgggatcgtatagagattggtcttattcaggacaacgtacg

SEQ ID NO: 470813 - DNA, 53 bp, Artificial
  Synthetic oligonucleotide
tggagactccaacagagaaaccgatagtactaccagatctgatcaaagtaatt

SEQ ID NO: 470814 - DNA, 55 bp, Artificial
  Synthetic oligonucleotide
tggagactccaataggtaaatgagtccccaattgaggtaccgttatatcggtgcc

SEQ ID NO: 470815 - DNA, 60 bp, Artificial
  Synthetic oligonucleotide
tggagactgtgtacgagcaaatcatggagagcatcacagtagggtgcacagcaaagtgcg

SEQ ID NO: 470816 - DNA, 60 bp, Artificial
  Synthetic oligonucleotide
tggagacttggagtcatcggtggatgatcctagatctgaggaggacagaagatttgagag

SEQ ID NO: 470817 - DNA, 55 bp, Artificial
  Synthetic oligonucleotide
tggagagaatcggaattcttgatagatgctcttaagatgaattttctcctgtggg

SEQ ID NO: 470818 - DNA, 60 bp, Artificial
  Synthetic oligonucleotide
tggagagacgcctaacgctaatactgggtattattcaacaacaaactatgatactgtgaa

SEQ ID NO: 470819 - DNA, 60 bp, Artificial
  Synthetic oligonucleotide
tggagagactctgatctggcgctttgacagcagcctagcaagaaggcacatagccagaga

SEQ ID NO: 470820 - DNA, 60 bp, Artificial
  Synthetic oligonucleotide
tggagagagtatcgcgtctggaatggcgaccgcgagaggtgtgatgcaagtttataagct

SEQ ID NO: 470821 - DNA, 60 bp, Artificial
  Synthetic oligonucleotide
tggagagcaatggctagtgagtttaacctgccacccatagtggcaaaagaaatagtagcc

SEQ ID NO: 470822 - DNA, 50 bp, Artificial
  Synthetic oligonucleotide
tggagagctaatgctcgacgtaggttgtggttgaaccggactacgatgtg

SEQ ID NO: 470823 - DNA, 55 bp, Artificial
  Synthetic oligonucleotide
tggagagctcttgacccaggaactgccaggactcatgaagtccgggtcgtactgt

SEQ ID NO: 470824 - DNA, 55 bp, Artificial
  Synthetic oligonucleotide
tggagaggaacagctgtgttatcttacccatacacaggacctatcatttggattc

SEQ ID NO: 470825 - DNA, 60 bp, Artificial
  Synthetic oligonucleotide
tggagaggattgatgaatttttggctgctcgctgtccatttttacctgagcaaaaagacc

SEQ ID NO: 470826 - DNA, 60 bp, Artificial
  Synthetic oligonucleotide
tggagaggcgaaaatgggcgaagaacaagaattgcctatgagagaatgtgcaacattctc

SEQ ID NO: 470827 - DNA, 55 bp, Artificial
  Synthetic oligonucleotide
tggagaggctcgagtcccacatgccaggctcgccgttgcggacggctcccaccga

SEQ ID NO: 470828 - DNA, 58 bp, Artificial
  Synthetic oligonucleotide
tggagagggctttgctataagatgggtggcaagtggtcaaaacgtaaggtggaatgga

SEQ ID NO: 470829 - DNA, 55 bp, Artificial
  Synthetic oligonucleotide
tggagagtcccccaaaggagtggaggaaggttccattgggaaggtctgcagaact

SEQ ID NO: 470830 - DNA, 54 bp, Artificial
  Synthetic oligonucleotide
tggagatacccttgccctattactcatatggaatttcacttcagatgtatttga

SEQ ID NO: 470831 - DNA, 55 bp, Artificial
  Synthetic oligonucleotide
tggagatagcagacagagcgtctaccatgaaactgctgaggacgcctccatcagg

SEQ ID NO: 470832 - DNA, 59 bp, Artificial
  Synthetic oligonucleotide
tggagatatggaagtggctagtaatggccagtttagtatggccagcttttacactgaga

SEQ ID NO: 470833 - DNA, 54 bp, Artificial
  Synthetic oligonucleotide
tggagatattttcccgtcacccgaacggtatactcggtacactattagcaaagg

SEQ ID NO: 470834 - DNA, 55 bp, Artificial
  Synthetic oligonucleotide
tggagatcaacctatggataatgacatttatcgccgcggaatgttcgtcatttcg

SEQ ID NO: 470835 - DNA, 53 bp, Artificial
  Synthetic oligonucleotide
tggagatccttttacaacactaagccctgcggttcctactgtatccaccatat

SEQ ID NO: 470836 - DNA, 60 bp, Artificial
  Synthetic oligonucleotide
tggagatctatcattcgtcactatgtggaggactttcagatgcggtcgtttatgtattgc

SEQ ID NO: 470837 - DNA, 60 bp, Artificial
  Synthetic oligonucleotide
tggagatctatgttacaccttatgggatatgtccatgatgcttgtaatgactcattatcc

SEQ ID NO: 470838 - DNA, 60 bp, Artificial
  Synthetic oligonucleotide
tggagatctatgttgcatcttaaaggaaaagtccatgaagcttgtaaagactcattgtct

SEQ ID NO: 470839 - DNA, 60 bp, Artificial
  Synthetic oligonucleotide
tggagatgaggttgcccatcttcgtgtagttctctcgagacacgaatgattaatttatta

SEQ ID NO: 470840 - DNA, 58 bp, Artificial
  Synthetic oligonucleotide
tggagatgatgggtcatgcgaacatagcgacaaccctaggatatggtcatgctaccga

SEQ ID NO: 470841 - DNA, 60 bp, Artificial
  Synthetic oligonucleotide
tggagatgcaacgctctcctcaggttgtggttgaaccgtatttgtacgtggtatactctg

SEQ ID NO: 470842 - DNA, 60 bp, Artificial
  Synthetic oligonucleotide
tggagatgccatgccgacccgaagaggaaagaaggattcggacacaaacctgtgagtgga

SEQ ID NO: 470843 - DNA, 55 bp, Artificial
  Synthetic oligonucleotide
tggagatgcctatgaaaatgagactcctgcagtcatgtttgccactctaaacccc

SEQ ID NO: 470844 - DNA, 59 bp, Artificial
  Synthetic oligonucleotide
tggagatggacatttatagtcgttctcttcattcaccaatgtttcccacagggaggtgt

SEQ ID NO: 470845 - DNA, 60 bp, Artificial
  Synthetic oligonucleotide
tggagatggataatcgacttgtgggtatctcgagtcaggtcacgcaattatctaactcag

SEQ ID NO: 470846 - DNA, 60 bp, Artificial
  Synthetic oligonucleotide
tggagatgggacatcatgctccttgggatgttaatgatgagtagtgctgcagaacaattg

SEQ ID NO: 470847 - DNA, 60 bp, Artificial
  Synthetic oligonucleotide
tggagatggggcaccatgctcctgtggagatggggcaccatgctccttggcctgttgatg

SEQ ID NO: 470848 - DNA, 55 bp, Artificial
  Synthetic oligonucleotide
tggagatggggcacgacgctccttgggatattaatgttctgtactgctgcaggac

SEQ ID NO: 470849 - DNA, 55 bp, Artificial
  Synthetic oligonucleotide
tggagatgtgggatggtgaattttaccactactccgtgtatgtcagcgatggcaa

SEQ ID NO: 470850 - DNA, 60 bp, Artificial
  Synthetic oligonucleotide
tggagatgtgtcacagcacacaaatcggtgggataaggatggtggacatccttaggcaaa

SEQ ID NO: 470851 - DNA, 56 bp, Artificial
  Synthetic oligonucleotide
tggagattctgcttcgctgggcctctagctaagctagtctatagggccaagcagga

SEQ ID NO: 470852 - DNA, 60 bp, Artificial
  Synthetic oligonucleotide
tggagattgcccaaattccgaccttcattgggaacaaagtgcccaatgctgtcccataca

SEQ ID NO: 470853 - DNA, 55 bp, Artificial
  Synthetic oligonucleotide
tggagattgtggtacgccatgacggcaacctaacctgggtacccaacggagcacc

SEQ ID NO: 470854 - DNA, 60 bp, Artificial
  Synthetic oligonucleotide
tggagcaaacggcgggattaacattgaccagacgcttgatggttcatgggcagtggctcc

SEQ ID NO: 470855 - DNA, 60 bp, Artificial
  Synthetic oligonucleotide
tggagcaaatggcagggtcaagtgaacaggcagcagaagctatggaggttgctagtcagg

SEQ ID NO: 470856 - DNA, 60 bp, Artificial
  Synthetic oligonucleotide
tggagcaacacttatgtatgaaaaatgattgcctatgataatagatgggctaaggtgtaa

SEQ ID NO: 470857 - DNA, 57 bp, Artificial
  Synthetic oligonucleotide
tggagcaataaaactccctagagttgcacacaatggggtttttataccaggtacata

SEQ ID NO: 470858 - DNA, 55 bp, Artificial
  Synthetic oligonucleotide
tggagcacaccaaatactcctgttgcgggcactgcagaaacccagaacactgggg

SEQ ID NO: 470859 - DNA, 52 bp, Artificial
  Synthetic oligonucleotide
tggagcacctatacacagaaataatctacactccaatatctactccggatgg

SEQ ID NO: 470860 - DNA, 57 bp, Artificial
  Synthetic oligonucleotide
tggagcactatcgatgtgacgcggctaacagatacggatctcctactgtcccggtct

SEQ ID NO: 470861 - DNA, 55 bp, Artificial
  Synthetic oligonucleotide
tggagcagataaccatagggagattaaagtgccactagactactcgcggttcgat

SEQ ID NO: 470862 - DNA, 55 bp, Artificial
  Synthetic oligonucleotide
tggagcagatggctggatcgagtgagcaagcagcggaagccatggaggttgctag

SEQ ID NO: 470863 - DNA, 59 bp, Artificial
  Synthetic oligonucleotide
tggagcagtaggcggcctccttggcaatcctctggttggagctaatgttggttcctccc

SEQ ID NO: 470864 - DNA, 55 bp, Artificial
  Synthetic oligonucleotide
tggagcataacgccgctcccggtagctacagtagctttgactactggaactggag

SEQ ID NO: 470865 - DNA, 54 bp, Artificial
  Synthetic oligonucleotide
tggagcatacaagccagtatctatgtacaggggttctcactgacacgagtagac

SEQ ID NO: 470866 - DNA, 51 bp, Artificial
  Synthetic oligonucleotide
tggagcatcttaggcttttggatgttaataatgggtaatgtagtgggaaac

SEQ ID NO: 470867 - DNA, 54 bp, Artificial
  Synthetic oligonucleotide
tggagcatcttaggcttttggatgttaatgatttgtagtagtgaggtggggaag

SEQ ID NO: 470868 - DNA, 60 bp, Artificial
  Synthetic oligonucleotide
tggagcatgataaaagagatgattgctgtcagtcagaattattcaagctggtagagctac

SEQ ID NO: 470869 - DNA, 60 bp, Artificial
  Synthetic oligonucleotide
tggagcattgggagcacaaggtggatacctgaaagcttatcatggcgaacaagtgtaccc

SEQ ID NO: 470870 - DNA, 57 bp, Artificial
  Synthetic oligonucleotide
tggagccaacagctccaccaatggagagcttcaggttcggggagacaacccccgctc

SEQ ID NO: 470871 - DNA, 57 bp, Artificial
  Synthetic oligonucleotide
tggagccacccgacagcacccaccacgggggattcccagcctcgcagacccccaaca

SEQ ID NO: 470872 - DNA, 60 bp, Artificial
  Synthetic oligonucleotide
tggagccagacgacccctacatccgtgacatagacttccttatgaagactcagcagaaag

SEQ ID NO: 470873 - DNA, 60 bp, Artificial
  Synthetic oligonucleotide
tggagccagctgaatgtgaatctcgtctgaggggacatgctcgcactatgcttggacgct

SEQ ID NO: 470874 - DNA, 60 bp, Artificial
  Synthetic oligonucleotide
tggagccaggagtatctaagaggcacagagtacatctgcaatgactacacctcctttgac

SEQ ID NO: 470875 - DNA, 54 bp, Artificial
  Synthetic oligonucleotide
tggagccagtagtcttctccaaaatggagaccaagctcatcacgtggggggcag

SEQ ID NO: 470876 - DNA, 60 bp, Artificial
  Synthetic oligonucleotide
tggagccatgtcagagtgggtagatgtattcgagacctcagacgcgttaactgtttctat

SEQ ID NO: 470877 - DNA, 60 bp, Artificial
  Synthetic oligonucleotide
tggagccggctgaatgcgagtctcgtttgagaggccacgctcgcaccatgctcggacggt

SEQ ID NO: 470878 - DNA, 50 bp, Artificial
  Synthetic oligonucleotide
tggagccgtgacactggattatcccactgggacatcaggatctcccatag

SEQ ID NO: 470879 - DNA, 60 bp, Artificial
  Synthetic oligonucleotide
tggagccgtgtacgtgtggagcggtcgacctgtatttggtcacgcggaacgctgatgtca

SEQ ID NO: 470880 - DNA, 56 bp, Artificial
  Synthetic oligonucleotide
tggagcctccatagaatggagaacaaggagatatagcacacaagtagaccctaact

SEQ ID NO: 470881 - DNA, 58 bp, Artificial
  Synthetic oligonucleotide
tggagcctcgtttgggagagtatttggttgcctgtcgatttgtggcacctcggtgtag

SEQ ID NO: 470882 - DNA, 60 bp, Artificial
  Synthetic oligonucleotide
tggagcctgcttctttaattcaaaatgcctaagcgggatgcaccgtggcgtttgatggcg

SEQ ID NO: 470883 - DNA, 55 bp, Artificial
  Synthetic oligonucleotide
tggagcctggaaagcttgccagaccctcgctctcatgcacgacgccgtcgttctg

SEQ ID NO: 470884 - DNA, 60 bp, Artificial
  Synthetic oligonucleotide
tggagcctggtacatccagtcgtgagcaatataaggctcgaccaggaattgcgtctgtac

SEQ ID NO: 470885 - DNA, 59 bp, Artificial
  Synthetic oligonucleotide
tggagccttgagggaacagtactcagagtcgtggcacgaagacaaagaacatccctacc

SEQ ID NO: 470886 - DNA, 60 bp, Artificial
  Synthetic oligonucleotide
tggagcgaggatccatagtcacggcaatttgacaatcactccttcgctgaaagatcgatt

SEQ ID NO: 470887 - DNA, 52 bp, Artificial
  Synthetic oligonucleotide
tggagcgatgcgtttactgtggttcgttaccgtggcttgcccgtactgccga

SEQ ID NO: 470888 - DNA, 55 bp, Artificial
  Synthetic oligonucleotide
tggagcgccaaataaccacaatgcatgtgtccaatcccacacaggaaaagagaga

SEQ ID NO: 470889 - DNA, 52 bp, Artificial
  Synthetic oligonucleotide
tggagcgccaatcgccgatagtttgatacgtatagtgcaagccactgtaact

SEQ ID NO: 470890 - DNA, 55 bp, Artificial
  Synthetic oligonucleotide
tggagcgcttaggtttaaacgtaggttttgatatatggatgtactagttaataag

SEQ ID NO: 470891 - DNA, 54 bp, Artificial
  Synthetic oligonucleotide
tggagcgtatgctctttgggcctcaaaaccagcttgaaatcgctgagtgggagc

SEQ ID NO: 470892 - DNA, 60 bp, Artificial
  Synthetic oligonucleotide
tggagcgtctgggcccaaattctgtcaagacctatgatgtgcttaatagactagtcacgg

SEQ ID NO: 470893 - DNA, 55 bp, Artificial
  Synthetic oligonucleotide
tggagcgtcttatggaggcgtataggaggtacacccctttcgatccctcgtcaga

SEQ ID NO: 470894 - DNA, 60 bp, Artificial
  Synthetic oligonucleotide
tggagcgtgaaccaaggctcaaggatcaagcttatagcttgattcacataccagtcattc

SEQ ID NO: 470895 - DNA, 60 bp, Artificial
  Synthetic oligonucleotide
tggagcgtgcactgaacccaaccatgattgcccacgctgcgttatctcgtagttctcaat

SEQ ID NO: 470896 - DNA, 55 bp, Artificial
  Synthetic oligonucleotide
tggagctaataacatcttgttcctcaaacgtgtctgtggcacttggcccacaggg

SEQ ID NO: 470897 - DNA, 51 bp, Artificial
  Synthetic oligonucleotide
tggagctatagtcatgagctccactctgaggtggggatcagtagagaagtt

SEQ ID NO: 470898 - DNA, 60 bp, Artificial
  Synthetic oligonucleotide
tggagctatagtgaagcaaaacccatctaaggaagcagtgacagaggtgtgcttaaagga

SEQ ID NO: 470899 - DNA, 59 bp, Artificial
  Synthetic oligonucleotide
tggagctcactacaggaacgcctctgttaatatcgatggttttgacaatacaggatatg

SEQ ID NO: 470900 - DNA, 60 bp, Artificial
  Synthetic oligonucleotide
tggagctcggcactatgtaaacaagagagtgataaaaaacgacacagcagatcataattg

SEQ ID NO: 470901 - DNA, 60 bp, Artificial
  Synthetic oligonucleotide
tggagctcgttctccacctctgagtccgcatctgactgggctgtacctatggtgctcctg

SEQ ID NO: 470902 - DNA, 59 bp, Artificial
  Synthetic oligonucleotide
tggagctgaacgggtacgatccgcagtacgcggcctccgtcttcctgggctgggcgcaa

SEQ ID NO: 470903 - DNA, 60 bp, Artificial
  Synthetic oligonucleotide
tggagctggctgtagaaattgcaaacaagactgtgatagatactgaacctttaaaatcat

SEQ ID NO: 470904 - DNA, 60 bp, Artificial
  Synthetic oligonucleotide
tggagctggtctgtattccgtgcgtttgtgcacgaagagggctttaagccctattgtgga

SEQ ID NO: 470905 - DNA, 55 bp, Artificial
  Synthetic oligonucleotide
tggagctgtaatccgccagactgtccaggggtaggtactggttgtactgcatgtg

SEQ ID NO: 470906 - DNA, 55 bp, Artificial
  Synthetic oligonucleotide
tggagctgtgctctgttgagattactgcacaaacactgtcacatctgcaaggact

SEQ ID NO: 470907 - DNA, 50 bp, Artificial
  Synthetic oligonucleotide
tggagcttaaccaaatggaaaaatgcgagagtggctcggtctacagtgcg

SEQ ID NO: 470908 - DNA, 60 bp, Artificial
  Synthetic oligonucleotide
tggagcttcctagttttggagtatctgggattaatgagtctgcagacatgagtattggag

SEQ ID NO: 470909 - DNA, 55 bp, Artificial
  Synthetic oligonucleotide
tggagcttctccattgactgaaggatacgtggttctattgggcggcgaggggccg

SEQ ID NO: 470910 - DNA, 58 bp, Artificial
  Synthetic oligonucleotide
tggaggaaaaatcaagagtgtatccttatcaatgttgaaactctattaccgatattcg

SEQ ID NO: 470911 - DNA, 55 bp, Artificial
  Synthetic oligonucleotide
tggaggaagacagccgggccctccgagccttcacggaagctatgacgaggtactc

SEQ ID NO: 470912 - DNA, 59 bp, Artificial
  Synthetic oligonucleotide
tggaggaagatgggtagttctaacggaagagattgctcgtgcgatcgagtctaaatacg

SEQ ID NO: 470913 - DNA, 57 bp, Artificial
  Synthetic oligonucleotide
tggaggaagtaccacatttattcctctgctacctaaggcattagcaggtaattttgt

SEQ ID NO: 470914 - DNA, 59 bp, Artificial
  Synthetic oligonucleotide
tggaggaatctctgcgtagtcttgttaggaatgttacttgcgagacatacgtggttgtt

SEQ ID NO: 470915 - DNA, 60 bp, Artificial
  Synthetic oligonucleotide
tggaggaatggatggctaatactgctcttaaagtgcaagacggtacggctaatgtcttcc

SEQ ID NO: 470916 - DNA, 59 bp, Artificial
  Synthetic oligonucleotide
tggaggaattctgtgaacgatgacgcaatgctcctgataacaactgggttttttagtta

SEQ ID NO: 470917 - DNA, 53 bp, Artificial
  Synthetic oligonucleotide
tggaggaattggtaatctaccaactagaaattggagttttgattttggtttac

SEQ ID NO: 470918 - DNA, 58 bp, Artificial
  Synthetic oligonucleotide
tggaggacaaactggcagatttcaagagacaacttgcagatctggtatcaagtcaaaa

SEQ ID NO: 470919 - DNA, 59 bp, Artificial
  Synthetic oligonucleotide
tggaggacatacggtctgctgaagttgttagtaggatgcttgtacaccctaggggagaa

SEQ ID NO: 470920 - DNA, 55 bp, Artificial
  Synthetic oligonucleotide
tggaggaccaaacttatacaatatcagaaatctccacataccagaggtctgcttg

SEQ ID NO: 470921 - DNA, 56 bp, Artificial
  Synthetic oligonucleotide
tggaggaccgaccacaagctgaagggccctacgccggaccacttgagcgtcagaaa

SEQ ID NO: 470922 - DNA, 52 bp, Artificial
  Synthetic oligonucleotide
tggaggagcacaacataaggcacgtctaatggcggaagctatgacagcggcc

SEQ ID NO: 470923 - DNA, 53 bp, Artificial
  Synthetic oligonucleotide
tggaggagccttcagaactctcttcggtggcatgtcctggatcacccagggtc

SEQ ID NO: 470924 - DNA, 60 bp, Artificial
  Synthetic oligonucleotide
tggaggatcactgccaactgactttagtgtatcaaggtatgaagtgattaaggagaattc

SEQ ID NO: 470925 - DNA, 60 bp, Artificial
  Synthetic oligonucleotide
tggaggatcgtaaatgagtacattacctagctattgccagcttattgtcgaagggtacag

SEQ ID NO: 470926 - DNA, 54 bp, Artificial
  Synthetic oligonucleotide
tggaggatctttgcatgagatcccttgtggactctgcaaggaggatcgtacgac

SEQ ID NO: 470927 - DNA, 57 bp, Artificial
  Synthetic oligonucleotide
tggaggatgggtacaaatggcatggggtaaaacccggtcattgcgattgggataagc

SEQ ID NO: 470928 - DNA, 55 bp, Artificial
  Synthetic oligonucleotide
tggaggcaacacgatgatcgacctagaccgtgcaagagaactcgtcggtgacggg

SEQ ID NO: 470929 - DNA, 60 bp, Artificial
  Synthetic oligonucleotide
tggaggcatcaagggaggatttgttcatcaaagaatggcatccaagattggaaggtggta

SEQ ID NO: 470930 - DNA, 53 bp, Artificial
  Synthetic oligonucleotide
tggaggcatgtgtcaccagtgtggagggtatgagaacggtcactaccagaacg

SEQ ID NO: 470931 - DNA, 55 bp, Artificial
  Synthetic oligonucleotide
tggaggccatggtgtctagggcccggattgatgccagggtcgacttcgagtctgg

SEQ ID NO: 470932 - DNA, 60 bp, Artificial
  Synthetic oligonucleotide
tggaggccgcaagcgttgtgaaaggaagggctatagatatatcaggtatatttcgaacgc

SEQ ID NO: 470933 - DNA, 60 bp, Artificial
  Synthetic oligonucleotide
tggaggccgcaataccaatgctatattggaagtggctgaccctcatccacccactagagc

SEQ ID NO: 470934 - DNA, 58 bp, Artificial
  Synthetic oligonucleotide
tggaggccggttcgcccaatttatattaacgttcttcaagcacatttggctcaatcat

SEQ ID NO: 470935 - DNA, 59 bp, Artificial
  Synthetic oligonucleotide
tggaggcgattctagatactccaaaggggaaagacatatctgatttacgattgaccgaa

SEQ ID NO: 470936 - DNA, 60 bp, Artificial
  Synthetic oligonucleotide
tggaggcgcggtccgatcagatcagtttgagtgatgtaaccgccctacactgtgatgtgt

SEQ ID NO: 470937 - DNA, 51 bp, Artificial
  Synthetic oligonucleotide
tggaggcgctggcattaggtcgccttctgccagttggagggctgaatcacg

SEQ ID NO: 470938 - DNA, 54 bp, Artificial
  Synthetic oligonucleotide
tggaggcggtaggtagtaccgcggatgtccccaggaggagagttcgtcaaaagg

SEQ ID NO: 470939 - DNA, 54 bp, Artificial
  Synthetic oligonucleotide
tggaggcgtgggcggtctacaagtgggagaccgggccgctgggctaccccacgg

SEQ ID NO: 470940 - DNA, 55 bp, Artificial
  Synthetic oligonucleotide
tggaggctacagcggagaggccaatgtttccaatgacgcaccttacgtccgctga

SEQ ID NO: 470941 - DNA, 55 bp, Artificial
  Synthetic oligonucleotide
tggaggctcaccctcacaccttttgccacgcaaattacaacgggcacgtggcaac

SEQ ID NO: 470942 - DNA, 58 bp, Artificial
  Synthetic oligonucleotide
tggaggctccttacgtgccaccgcggtacctggcgcctacagaggggcgaaacagcat

SEQ ID NO: 470943 - DNA, 60 bp, Artificial
  Synthetic oligonucleotide
tggaggctcgcgtccccgcatcggagattgagactgctgaggacatcaccggggtgtcag

SEQ ID NO: 470944 - DNA, 60 bp, Artificial
  Synthetic oligonucleotide
tggaggctgatttgacagtgaatgagctagactatgagaacaataaaatcacgtcagagc

SEQ ID NO: 470945 - DNA, 59 bp, Artificial
  Synthetic oligonucleotide
tggaggcttcactttcaaaagaacaagtggatcatcggtcaagaaggaagaggaagtgc

SEQ ID NO: 470946 - DNA, 55 bp, Artificial
  Synthetic oligonucleotide
tggagggaaagtgaacgggtctaacgggactgagatcttcagacctggaggagga

SEQ ID NO: 470947 - DNA, 60 bp, Artificial
  Synthetic oligonucleotide
tggagggaacaccaaccaacagagagcatctgcaggacaaatcagtgtacagccaacttt

SEQ ID NO: 470948 - DNA, 60 bp, Artificial
  Synthetic oligonucleotide
tggagggaacactaaccagcagagagcatctgcagggcaaatcagcgtacagcccacatt

SEQ ID NO: 470949 - DNA, 55 bp, Artificial
  Synthetic oligonucleotide
tggagggaggtctaatcctagcgttctagaccttgaagttaacggaataaatggc

SEQ ID NO: 470950 - DNA, 55 bp, Artificial
  Synthetic oligonucleotide
tggagggccgagagagggctactgtggcaaatggggctgtgagaccactggacag

SEQ ID NO: 470951 - DNA, 53 bp, Artificial
  Synthetic oligonucleotide
tggaggggaatttttctactgtaatacaagtcaactttttaatagtacttgga

SEQ ID NO: 470952 - DNA, 60 bp, Artificial
  Synthetic oligonucleotide
tggaggggaatttttctactgtgatacagcgaagctgttcaatagcacgtggatttggaa

SEQ ID NO: 470953 - DNA, 55 bp, Artificial
  Synthetic oligonucleotide
tggaggggacaacctgcttctaccgaaagggcggccatgtagaggtggaattccc

SEQ ID NO: 470954 - DNA, 60 bp, Artificial
  Synthetic oligonucleotide
tggaggggcttttgcaacttttgtgtgcggactgatgcggatttcccatgcataagatac

SEQ ID NO: 470955 - DNA, 60 bp, Artificial
  Synthetic oligonucleotide
tggaggggtgaaaatggacgaaagacaaggattgcatatgaaagaatgtgcaatattctc

SEQ ID NO: 470956 - DNA, 57 bp, Artificial
  Synthetic oligonucleotide
tggaggggtttcgtgcatccagacaagctatcagtacctcatcattcagaacacaac

SEQ ID NO: 470957 - DNA, 60 bp, Artificial
  Synthetic oligonucleotide
tggagggtcaacaatcatgtggtctacaatcatcaagaagccgggaagtatgagaatcac

SEQ ID NO: 470958 - DNA, 60 bp, Artificial
  Synthetic oligonucleotide
tggagggtcattttgctatgcatagtctacttcggaatacgttcttatagatggattccc

SEQ ID NO: 470959 - DNA, 55 bp, Artificial
  Synthetic oligonucleotide
tggagggtgaggttcagatcgtgtcaactgctgcccaaaccttcctagcaacgtg

SEQ ID NO: 470960 - DNA, 53 bp, Artificial
  Synthetic oligonucleotide
tggaggtaaacacttcggagtaaacctccctaaagtaccatacttatacaatg

SEQ ID NO: 470961 - DNA, 55 bp, Artificial
  Synthetic oligonucleotide
tggaggtacggaattaacgctccgcgcccaaaataacgcttctacgcctcaacac

SEQ ID NO: 470962 - DNA, 56 bp, Artificial
  Synthetic oligonucleotide
tggaggtccgatacgtcctaatccctagggatttaaggacgtgaactctgttgaga

SEQ ID NO: 470963 - DNA, 60 bp, Artificial
  Synthetic oligonucleotide
tggaggtcctcaacaacaagaattggtcaggatacagcggagctttcaccattccaatca

SEQ ID NO: 470964 - DNA, 52 bp, Artificial
  Synthetic oligonucleotide
tggaggtccttaagtgtgagtgcttcacttggagagattgacagagcagacg

SEQ ID NO: 470965 - DNA, 60 bp, Artificial
  Synthetic oligonucleotide
tggaggtgcaggagagtgaatactaccctaagagataccaatcacatgtgctgctcgcta

SEQ ID NO: 470966 - DNA, 60 bp, Artificial
  Synthetic oligonucleotide
tggaggttgttcagcaaacacgagtggacaagctgacacaaggccgacagacctatgact

SEQ ID NO: 470967 - DNA, 60 bp, Artificial
  Synthetic oligonucleotide
tggagtaaagagtctcaaactggcagtcggtctgaggaacgtacctgctagatcaagtag

SEQ ID NO: 470968 - DNA, 60 bp, Artificial
  Synthetic oligonucleotide
tggagtaaatagtgacactgtgggttggtcttggccagacggtgctgagttgccattcac

SEQ ID NO: 470969 - DNA, 60 bp, Artificial
  Synthetic oligonucleotide
tggagtaacaaatctcaagaacagatttggaatcacacgacttggatgcaatgggataag

SEQ ID NO: 470970 - DNA, 60 bp, Artificial
  Synthetic oligonucleotide
tggagtacagattaaccatttgctaccacagaggctttaagactgaatgcatttataaga

SEQ ID NO: 470971 - DNA, 60 bp, Artificial
  Synthetic oligonucleotide
tggagtacatagaaagatggggcagaataccgatgacaggagacacagaactgccaccag

SEQ ID NO: 470972 - DNA, 60 bp, Artificial
  Synthetic oligonucleotide
tggagtaccagtatggaaaaacagctcagtacaggctttctgcatgacacccaccaccag

SEQ ID NO: 470973 - DNA, 59 bp, Artificial
  Synthetic oligonucleotide
tggagtaccatgaaatgcctgagtctccctttgcccgtgcgtccccacaaggaagagga

SEQ ID NO: 470974 - DNA, 56 bp, Artificial
  Synthetic oligonucleotide
tggagtactgcaaagatgtcaccgtgctttacacggtttttgaaccccacaccggc

SEQ ID NO: 470975 - DNA, 60 bp, Artificial
  Synthetic oligonucleotide
tggagtagtaaggtgcttattgacttcttagacgtcatgcgtccagataagctacttggt

SEQ ID NO: 470976 - DNA, 56 bp, Artificial
  Synthetic oligonucleotide
tggagtagtccgctacgacaaacttcttacccttcgccggaataatgcacccacga

SEQ ID NO: 470977 - DNA, 55 bp, Artificial
  Synthetic oligonucleotide
tggagtagtctctaaagggtggaggttgctggcgcccatcacggcatacgcccag

SEQ ID NO: 470978 - DNA, 60 bp, Artificial
  Synthetic oligonucleotide
tggagtatactttggaattgaaatcgagatgaccgctcagataattatgtgggcctagcg

SEQ ID NO: 470979 - DNA, 58 bp, Artificial
  Synthetic oligonucleotide
tggagtatatattttggtctcctagaagagaagaaatagtgaacctttatgccttcaa

SEQ ID NO: 470980 - DNA, 60 bp, Artificial
  Synthetic oligonucleotide
tggagtcaatcataagcttgatgtcacaacgactacttgcactattagaaattgcaaaaa

SEQ ID NO: 470981 - DNA, 54 bp, Artificial
  Synthetic oligonucleotide
tggagtcactcagcgaacgtttcaatgcactgcaagagactttaatggacctgt

SEQ ID NO: 470982 - DNA, 58 bp, Artificial
  Synthetic oligonucleotide
tggagtcctccgacttagggtcgaatggagcgcaaggagaggaagccaccaggagccg

SEQ ID NO: 470983 - DNA, 53 bp, Artificial
  Synthetic oligonucleotide
tggagtcctcttctatcagtcttgcaagaaagacacgtgaacgttcattctcc

SEQ ID NO: 470984 - DNA, 51 bp, Artificial
  Synthetic oligonucleotide
tggagtcctgccagcctggaccgcattattttgggactccgggcacttttc

SEQ ID NO: 470985 - DNA, 56 bp, Artificial
  Synthetic oligonucleotide
tggagtcctggagtcccttatatacataaagcctcttggggactccaagggcaaaa

SEQ ID NO: 470986 - DNA, 51 bp, Artificial
  Synthetic oligonucleotide
tggagtcgagcgttactgtacaaaatgcgacacatgtatacgatacaggta

SEQ ID NO: 470987 - DNA, 58 bp, Artificial
  Synthetic oligonucleotide
tggagtcgccggctcactgtggtcactcccgaggctttcctgcctttcgaacctgttc

SEQ ID NO: 470988 - DNA, 55 bp, Artificial
  Synthetic oligonucleotide
tggagtcggggtagcaagcaatggcatccttaggtacaaagtagatggcaagaga

SEQ ID NO: 470989 - DNA, 55 bp, Artificial
  Synthetic oligonucleotide
tggagtcgtgggtgttactggaaccgtcgctatgacgcatgcttattggaatgct

SEQ ID NO: 470990 - DNA, 60 bp, Artificial
  Synthetic oligonucleotide
tggagtctccatagagtggaggcagagagaatatagcacacaaatagatcctgacctagc

SEQ ID NO: 470991 - DNA, 60 bp, Artificial
  Synthetic oligonucleotide
tggagtctgatggaagcccaatgctgggcttacatgggctttttacgtgtgtgttggttc

SEQ ID NO: 470992 - DNA, 60 bp, Artificial
  Synthetic oligonucleotide
tggagtctgtgtttcatgtagctgaaggccaccctgaattggttccgcagtatgtaccgc

SEQ ID NO: 470993 - DNA, 58 bp, Artificial
  Synthetic oligonucleotide
tggagtctttaaaactggaaagttcatgtaatttcgatctacataccagtacatcatc

SEQ ID NO: 470994 - DNA, 60 bp, Artificial
  Synthetic oligonucleotide
tggagtgaacatgaagagttgcggtcgtgggaagagtggaccaacatcgacatccagcct

SEQ ID NO: 470995 - DNA, 58 bp, Artificial
  Synthetic oligonucleotide
tggagtgcaagccacgctgacgcctcccctgatggcaccggagaccccctcgaccccc

SEQ ID NO: 470996 - DNA, 55 bp, Artificial
  Synthetic oligonucleotide
tggagtgcatagttgtttctgcgacctgggtggtagagattgttctagacaggct

SEQ ID NO: 470997 - DNA, 59 bp, Artificial
  Synthetic oligonucleotide
tggagtgctaaagatggtgtcaatctgggggttgatgccctaacaactgtccaaggccc

SEQ ID NO: 470998 - DNA, 59 bp, Artificial
  Synthetic oligonucleotide
tggagtggagaaatggtcctgttccttttggggatgcatgaaagattggttctttgaca

SEQ ID NO: 470999 - DNA, 57 bp, Artificial
  Synthetic oligonucleotide
tggagtggctaaagcggtggactttatccctgtggaaaacctagagacaactatgag

SEQ ID NO: 471000 - DNA, 55 bp, Artificial
  Synthetic oligonucleotide
tggagtgggccccagattcgattaccttaagagctggttcatggagatgggtcca

SEQ ID NO: 471001 - DNA, 60 bp, Artificial
  Synthetic oligonucleotide
tggagtgggccttcttggtacaccacctggagatggatgggactctgacctactgcgctg

SEQ ID NO: 471002 - DNA, 60 bp, Artificial
  Synthetic oligonucleotide
tggagtggggtgtaatggtctacgattattccgaactggagcatgatccattgaagggcc

SEQ ID NO: 471003 - DNA, 59 bp, Artificial
  Synthetic oligonucleotide
tggagtgggtaatgcctcaggaaattggcattacgattccgtttggatggacggcgctg

SEQ ID NO: 471004 - DNA, 58 bp, Artificial
  Synthetic oligonucleotide
tggagtgtctagaaaataattcgccgttctatttggtaaggtgtatttggagatcaga

SEQ ID NO: 471005 - DNA, 55 bp, Artificial
  Synthetic oligonucleotide
tggagtgttattgaaccacgaagggatggtggtacgtaaaggagcccctatcacc

SEQ ID NO: 471006 - DNA, 57 bp, Artificial
  Synthetic oligonucleotide
tggagtgttcatacacaatgatgtggaggcgtggatggaccggtacaagtactaccc

SEQ ID NO: 471007 - DNA, 60 bp, Artificial
  Synthetic oligonucleotide
tggagtgttgtgtgatggcaggtgagaaggccactaccatcaggctggtgtctaagatgt

SEQ ID NO: 471008 - DNA, 50 bp, Artificial
  Synthetic oligonucleotide
tggagttaacaccacaacctgaaattgacttgcaatgctacgagcaattt

SEQ ID NO: 471009 - DNA, 55 bp, Artificial
  Synthetic oligonucleotide
tggagttaatacgcggaaggcccaaggaggataaagtgtggtggaccagtaatag

SEQ ID NO: 471010 - DNA, 60 bp, Artificial
  Synthetic oligonucleotide
tggagttaccacagacgcatgtcgtgctcaggcgatgcaattcacatttggcagttttac

SEQ ID NO: 471011 - DNA, 56 bp, Artificial
  Synthetic oligonucleotide
tggagttactactgtgcaacattaaagcaggttcaggaagtgagaggttacacaaa

SEQ ID NO: 471012 - DNA, 59 bp, Artificial
  Synthetic oligonucleotide
tggagttcataccaactattctgaaacccaagtttgcacggcgcttcccagatatttca

SEQ ID NO: 471013 - DNA, 53 bp, Artificial
  Synthetic oligonucleotide
tggagttcggcctgggtacaatggacagaggagctggatgaagatctattggt

SEQ ID NO: 471014 - DNA, 52 bp, Artificial
  Synthetic oligonucleotide
tggagttctcggacttagacttatggatggaacatgggtcgcgatgcaaaca

SEQ ID NO: 471015 - DNA, 52 bp, Artificial
  Synthetic oligonucleotide
tggagttgagacaatagcagcgtttataataagatcagtgcttaatcctaac

SEQ ID NO: 471016 - DNA, 59 bp, Artificial
  Synthetic oligonucleotide
tggagttgatccggatgatcaaacgggggatcaatgatcggaatttctggaggggcgaa

SEQ ID NO: 471017 - DNA, 59 bp, Artificial
  Synthetic oligonucleotide
tggagttgcacattctattgccgttgaattgtgtgtccctggcttccatggctgggcca

SEQ ID NO: 471018 - DNA, 55 bp, Artificial
  Synthetic oligonucleotide
tggagttgcatacagatgcgtcaactctgcaaggtttttggaaaccaaaactggc

SEQ ID NO: 471019 - DNA, 57 bp, Artificial
  Synthetic oligonucleotide
tggagtttctagccgccctacaggctaccacctgcttctccgacactttatcgggcg

SEQ ID NO: 471020 - DNA, 57 bp, Artificial
  Synthetic oligonucleotide
tggagtttgaaccgttccaatccttggtacctaaagctgccagaggtcaatatagtg

SEQ ID NO: 471021 - DNA, 51 bp, Artificial
  Synthetic oligonucleotide
tggagtttgatgcgtcagcaactgacatcaactactttacagcagaggtca

SEQ ID NO: 471022 - DNA, 55 bp, Artificial
  Synthetic oligonucleotide
tggagtttggtgcctgttggctctgccagctgcaccatagccgcacttgggtcgt

SEQ ID NO: 471023 - DNA, 60 bp, Artificial
  Synthetic oligonucleotide
tggataaacagaaagaaactatacaaagccaatgtttacacttatgcaattcaattgata

SEQ ID NO: 471024 - DNA, 56 bp, Artificial
  Synthetic oligonucleotide
tggataaatcccctggccttccatacgttaagaaaggcttgcgccggactgacctg

SEQ ID NO: 471025 - DNA, 60 bp, Artificial
  Synthetic oligonucleotide
tggataaatgagaaacaatcgctagccatgatagctactatgttgtcgtcacttgcaact

SEQ ID NO: 471026 - DNA, 60 bp, Artificial
  Synthetic oligonucleotide
tggataaatggcatattctgaagagcaaattgtgtaaaaatgctcccagctatgtcacaa

SEQ ID NO: 471027 - DNA, 55 bp, Artificial
  Synthetic oligonucleotide
tggataacagattcaaaattctgacgctccaaaaagcggccatccgtataatatt

SEQ ID NO: 471028 - DNA, 60 bp, Artificial
  Synthetic oligonucleotide
tggataagcagacaaaccatgctggaacatagttttgcagatacacagtttagtttaact

SEQ ID NO: 471029 - DNA, 58 bp, Artificial
  Synthetic oligonucleotide
tggataatcagtagtaccgtgtggatagttagctaatcattagtaacgtgtggtaatt

SEQ ID NO: 471030 - DNA, 60 bp, Artificial
  Synthetic oligonucleotide
tggataatcctccagacagggagctcggctgtaattctactagggttcatggttcgacgc

SEQ ID NO: 471031 - DNA, 54 bp, Artificial
  Synthetic oligonucleotide
tggataatgaggccaaagagataattccgggaactagcgggttggaaaaactac

SEQ ID NO: 471032 - DNA, 54 bp, Artificial
  Synthetic oligonucleotide
tggataattccaacggaaaaacgctcattcttagatacacgtgaagaagaaaac

SEQ ID NO: 471033 - DNA, 60 bp, Artificial
  Synthetic oligonucleotide
tggatacaagaccttatcaactctgcatagattgaatgtatatgaccagagtggaaggct

SEQ ID NO: 471034 - DNA, 55 bp, Artificial
  Synthetic oligonucleotide
tggatacaccatatgcgaactcaacgcaagaagaagtattcctggcttcaacttt

SEQ ID NO: 471035 - DNA, 56 bp, Artificial
  Synthetic oligonucleotide
tggatacacctcatctagctttcgtgccttctgttccaaattacacatcaaacaca

SEQ ID NO: 471036 - DNA, 55 bp, Artificial
  Synthetic oligonucleotide
tggatacagaagacacagttaaccattctgggaggattgaagatcctgaatgctc

SEQ ID NO: 471037 - DNA, 52 bp, Artificial
  Synthetic oligonucleotide
tggatacagtcaaacaacatggagaatgtatctaagatcacatgactttgga

SEQ ID NO: 471038 - DNA, 60 bp, Artificial
  Synthetic oligonucleotide
tggatacagtcacgtctaatctcactggacgaacatccactttggaggcagatgttggaa

SEQ ID NO: 471039 - DNA, 60 bp, Artificial
  Synthetic oligonucleotide
tggatacataacatgctggtatcaaactaggctagtaattccacctcaaactccagccac

SEQ ID NO: 471040 - DNA, 60 bp, Artificial
  Synthetic oligonucleotide
tggatacatcccaaggcgcctgtgattagggcctgtggatgcagactatgtaacccgggg

SEQ ID NO: 471041 - DNA, 60 bp, Artificial
  Synthetic oligonucleotide
tggataccgactaactggaggatctctgatctcctggtcagttgtgttgtggtcagattc

SEQ ID NO: 471042 - DNA, 51 bp, Artificial
  Synthetic oligonucleotide
tggatacggctccttcattattactaatgggcacctattcaggagaaacaa

SEQ ID NO: 471043 - DNA, 55 bp, Artificial
  Synthetic oligonucleotide
tggatacgtttgtttagccggtctggtcgtcacaggcgagtggaacttgccagac

SEQ ID NO: 471044 - DNA, 58 bp, Artificial
  Synthetic oligonucleotide
tggatactaagcctactgacccgactgggattgagcctgatgaccacctcaaagagag

SEQ ID NO: 471045 - DNA, 60 bp, Artificial
  Synthetic oligonucleotide
tggatactcaagtgcattgcgcccgacgaccttacgtcctctgtgatgttaattacggct

SEQ ID NO: 471046 - DNA, 55 bp, Artificial
  Synthetic oligonucleotide
tggatactcgatcgcgcccagcgtgactggcgcggacaccgtgtcctccttaacc

SEQ ID NO: 471047 - DNA, 51 bp, Artificial
  Synthetic oligonucleotide
tggatactgacatacaggttgtttaccgtattgcacataggccgcaggttt

SEQ ID NO: 471048 - DNA, 55 bp, Artificial
  Synthetic oligonucleotide
tggatactgagagctcagggaatgaacaatggtgtatgctggaataataccctat

SEQ ID NO: 471049 - DNA, 57 bp, Artificial
  Synthetic oligonucleotide
tggatactgagtcggatggggtctgtgataccgagtcccctgggtccaattcgggtg

SEQ ID NO: 471050 - DNA, 60 bp, Artificial
  Synthetic oligonucleotide
tggatactgttgcaagtatgaagtcctctaaaacgtgatgcggtgttagacttccatagt

SEQ ID NO: 471051 - DNA, 60 bp, Artificial
  Synthetic oligonucleotide
tggatagacgcttacatactacagtgggatctggatcaagcgcaaaaggatctggagaac

SEQ ID NO: 471052 - DNA, 60 bp, Artificial
  Synthetic oligonucleotide
tggatagatcctgatagctcactacgagaccatatcaatgtagttgtaggtcgtgatcta

SEQ ID NO: 471053 - DNA, 60 bp, Artificial
  Synthetic oligonucleotide
tggatagcgtatgcctgctttgattcttccgatgcgcttttagtcactataaccttgata

SEQ ID NO: 471054 - DNA, 58 bp, Artificial
  Synthetic oligonucleotide
tggataggaagcatacgtgtcagctgtgctacctgaagcactcaaagcagatcccaac

SEQ ID NO: 471055 - DNA, 55 bp, Artificial
  Synthetic oligonucleotide
tggatagggaagctattgaggatcagcaagaccaccttgaggataagcaaggtgg

SEQ ID NO: 471056 - DNA, 57 bp, Artificial
  Synthetic oligonucleotide
tggatagggagaactaaaagcactagttcaaggagcggttttgagatgatttgggac

SEQ ID NO: 471057 - DNA, 60 bp, Artificial
  Synthetic oligonucleotide
tggatagggagaactaagagcactagttccaggagtggctttgagatggtttgggatcca

SEQ ID NO: 471058 - DNA, 57 bp, Artificial
  Synthetic oligonucleotide
tggataggggaatttactccaggagaagacaagaaatccttgatctgtgggtctaca

SEQ ID NO: 471059 - DNA, 56 bp, Artificial
  Synthetic oligonucleotide
tggatagggtaacagcggcgcatattggtgagttgttaagacaaaaacctttcaac

SEQ ID NO: 471060 - DNA, 60 bp, Artificial
  Synthetic oligonucleotide
tggatagtatcctcatgtgaatgaagatcttcatattctccatgatgcgaacgtcgacta

SEQ ID NO: 471061 - DNA, 51 bp, Artificial
  Synthetic oligonucleotide
tggatagtatgggagatgacttgcgggtggctaatgctgcccgtgtgtctt

SEQ ID NO: 471062 - DNA, 60 bp, Artificial
  Synthetic oligonucleotide
tggatagtccaattatgaacaacgaaacatgaatgttattgcaatgattttggctgagaa

SEQ ID NO: 471063 - DNA, 56 bp, Artificial
  Synthetic oligonucleotide
tggatagtgcttacccagatggttttcggagctactgggcggacttttcaccaaac

SEQ ID NO: 471064 - DNA, 51 bp, Artificial
  Synthetic oligonucleotide
tggatagtgttcctattcctgacagtgtacaaatattggtgggatacatga

SEQ ID NO: 471065 - DNA, 60 bp, Artificial
  Synthetic oligonucleotide
tggatataagcgcgtaacattatggaaatctcgtgcttgtaagcagtttttagttcatcg

SEQ ID NO: 471066 - DNA, 55 bp, Artificial
  Synthetic oligonucleotide
tggatataggtctgaaaggccgcgcagcggaatcggccacatttgttgtgaccca

SEQ ID NO: 471067 - DNA, 57 bp, Artificial
  Synthetic oligonucleotide
tggatataggttttggtaacataaataataaaaccttgtcagcaaataaatcagatg

SEQ ID NO: 471068 - DNA, 57 bp, Artificial
  Synthetic oligonucleotide
tggatatatgaagaattcgaccttcccacgcgtacgtgtaaacagggctaatcaccc

SEQ ID NO: 471069 - DNA, 58 bp, Artificial
  Synthetic oligonucleotide
tggatatatgcaaggcagcaatgggcttgaggatcagttcgtcctttagctttggagg

SEQ ID NO: 471070 - DNA, 60 bp, Artificial
  Synthetic oligonucleotide
tggatatattgagctatctacccttggtgagccgtcacttccagctatacgtgtatacga

SEQ ID NO: 471071 - DNA, 60 bp, Artificial
  Synthetic oligonucleotide
tggatatcgctttggtttgcctttaatcggtcatttgagccaacgcatcgtaatgagatg

SEQ ID NO: 471072 - DNA, 60 bp, Artificial
  Synthetic oligonucleotide
tggatatcgttctgatccatttgttcccgaaacttattggcctgctgaaactccatataa

SEQ ID NO: 471073 - DNA, 60 bp, Artificial
  Synthetic oligonucleotide
tggatatgctgcagacaaagaatctacacagaaagcaattaatgggatcactaataaagt

SEQ ID NO: 471074 - DNA, 59 bp, Artificial
  Synthetic oligonucleotide
tggatatgtagattccgttgtaaaattgcgtgatattacaggtttccataaatagctgt

SEQ ID NO: 471075 - DNA, 60 bp, Artificial
  Synthetic oligonucleotide
tggatatgtatacagtagtattacaaagacaggatcaactaatgcaagaagtttttgcta

SEQ ID NO: 471076 - DNA, 60 bp, Artificial
  Synthetic oligonucleotide
tggatatgttatcagttccattgatgtgtttaactcccaaatcttacacacttcaaggca

SEQ ID NO: 471077 - DNA, 56 bp, Artificial
  Synthetic oligonucleotide
tggatatgtttgtctcgctggtctagtggttacaggtgagtggaatctgcccgaca

SEQ ID NO: 471078 - DNA, 50 bp, Artificial
  Synthetic oligonucleotide
tggatattagctctatctcctcaaatgatggcattgagttacaaacactg

SEQ ID NO: 471079 - DNA, 60 bp, Artificial
  Synthetic oligonucleotide
tggatattaggtaatcccatgtgtgatgatctaattggtaagacttcatggtcctacatt

SEQ ID NO: 471080 - DNA, 55 bp, Artificial
  Synthetic oligonucleotide
tggatattgctaggtctgtgagtatgtctctctacatcaaccgtgctgacgaggc

SEQ ID NO: 471081 - DNA, 55 bp, Artificial
  Synthetic oligonucleotide
tggatattttaaccggttaggcgtggatgagtggggctgcgcagtgtgtgacgag

SEQ ID NO: 471082 - DNA, 54 bp, Artificial
  Synthetic oligonucleotide
tggatcaaagcgcaattcttttgatccgtccttgggcttttggcctcaatcgtt

SEQ ID NO: 471083 - DNA, 60 bp, Artificial
  Synthetic oligonucleotide
tggatcaacctgcgtaccaataattgtgccaccattgttatgccatacattaacagcgtg

SEQ ID NO: 471084 - DNA, 60 bp, Artificial
  Synthetic oligonucleotide
tggatcaaggggacatgtgtttgtcataagagaaccatttgtggcatgtggtcccaccga

SEQ ID NO: 471085 - DNA, 55 bp, Artificial
  Synthetic oligonucleotide
tggatcaagggttttgacggggcaagaaagttcatcggtagtcaagcaccaatga

SEQ ID NO: 471086 - DNA, 56 bp, Artificial
  Synthetic oligonucleotide
tggatcaagtgtcgttttctgacgacgcttggtagatcatactaaataaagccccc

SEQ ID NO: 471087 - DNA, 60 bp, Artificial
  Synthetic oligonucleotide
tggatcaatcacgttcgggccgagtctatcagactgcccagcattctctaatggaatact

SEQ ID NO: 471088 - DNA, 60 bp, Artificial
  Synthetic oligonucleotide
tggatcacatcgtcagactagccgatacatatttcaattcaattgtcaatgtcaagaagt

SEQ ID NO: 471089 - DNA, 55 bp, Artificial
  Synthetic oligonucleotide
tggatcacgttgtgcctcctcggccttcgtggcgggtgtgcccgccgtagggtta

SEQ ID NO: 471090 - DNA, 60 bp, Artificial
  Synthetic oligonucleotide
tggatcatatacccctgaagcgctgaacgcagctcttcccaacgacgcagcgaacattct

SEQ ID NO: 471091 - DNA, 59 bp, Artificial
  Synthetic oligonucleotide
tggatcatatggccataatcaagaaatacacatcgggaaggcaggagaagaaccctgca

SEQ ID NO: 471092 - DNA, 53 bp, Artificial
  Synthetic oligonucleotide
tggatcatatgtacgcctggcattacttgaccgaagggccctccgagcatgtc

SEQ ID NO: 471093 - DNA, 53 bp, Artificial
  Synthetic oligonucleotide
tggatcattcgaatacaaaaggtgtgagcaatccacttctaactttatgacca

SEQ ID NO: 471094 - DNA, 60 bp, Artificial
  Synthetic oligonucleotide
tggatcattctacaaaccgggagctcagcagtactcctgctggggttcatgatccggaag

SEQ ID NO: 471095 - DNA, 60 bp, Artificial
  Synthetic oligonucleotide
tggatccaaagtccgtgcaaatgttaatccttggctgtgcacctgctataggccagcatt

SEQ ID NO: 471096 - DNA, 60 bp, Artificial
  Synthetic oligonucleotide
tggatccagaatgaattcaataaggcgtgtgaattgaccgattcgagctggatagaactt

SEQ ID NO: 471097 - DNA, 60 bp, Artificial
  Synthetic oligonucleotide
tggatccagcgattaacacttcatgccaatcaaattgtcaggccatgatgttcacgatct

SEQ ID NO: 471098 - DNA, 60 bp, Artificial
  Synthetic oligonucleotide
tggatccattgcatactaatgaagtccactatgtatgtcgcagacccctttaaccctcca

SEQ ID NO: 471099 - DNA, 60 bp, Artificial
  Synthetic oligonucleotide
tggatccccagtagttgctgccatatgtgatagacatgataatgtagtcactctgcgctt

SEQ ID NO: 471100 - DNA, 60 bp, Artificial
  Synthetic oligonucleotide
tggatcccgagctaaggcagttagctcaagctctcattgaccaaaaggtcaaagagatat

SEQ ID NO: 471101 - DNA, 59 bp, Artificial
  Synthetic oligonucleotide
tggatccgacattgacaacaaaaggtactgttctaaggcaggcgagatatttgagacgg

SEQ ID NO: 471102 - DNA, 60 bp, Artificial
  Synthetic oligonucleotide
tggatcctccgactccatatatctgctcgaagttcttgctcacagatgacttaggtcaca

SEQ ID NO: 471103 - DNA, 59 bp, Artificial
  Synthetic oligonucleotide
tggatcctgcgcgggacgtcctttgtctacgtcccgtcggcactgaatcctgcggacga

SEQ ID NO: 471104 - DNA, 60 bp, Artificial
  Synthetic oligonucleotide
tggatcgacccatcatgcacgctggcactatggatagcatacgccaaaccaaacatttgg

SEQ ID NO: 471105 - DNA, 60 bp, Artificial
  Synthetic oligonucleotide
tggatcgagtgaacaggcagcggaggccatggaggttgctagtcaggctaggcagatggt

SEQ ID NO: 471106 - DNA, 56 bp, Artificial
  Synthetic oligonucleotide
tggatcgatcctaacttgtttggaattcgggggcaacataatcagataaaacggga

SEQ ID NO: 471107 - DNA, 59 bp, Artificial
  Synthetic oligonucleotide
tggatcggaagaacaaaaagcactagttccagaagcggctttgagatgatttgggatcc

SEQ ID NO: 471108 - DNA, 58 bp, Artificial
  Synthetic oligonucleotide
tggatcggatgggaagagtatatcctacgggaatccgtgttcccctctcgtgtccagc

SEQ ID NO: 471109 - DNA, 60 bp, Artificial
  Synthetic oligonucleotide
tggatcgtggatccatggtgtacgttcagtcacccaaactccatctacatagatcaggac

SEQ ID NO: 471110 - DNA, 55 bp, Artificial
  Synthetic oligonucleotide
tggatcgtggcctggtcaaccggcctgatcgagggatacgacgacgcgagctatc

SEQ ID NO: 471111 - DNA, 50 bp, Artificial
  Synthetic oligonucleotide
tggatcgtggttatgacgtcagctttgctgaggaatcaggaccaggcacc

SEQ ID NO: 471112 - DNA, 60 bp, Artificial
  Synthetic oligonucleotide
tggatctaccggacattagtcatcttactatcggggatcaaggagataacactcagcctg

SEQ ID NO: 471113 - DNA, 58 bp, Artificial
  Synthetic oligonucleotide
tggatctatggttacttccgaatctcagttatttaataagccatattggctacaacgt

SEQ ID NO: 471114 - DNA, 60 bp, Artificial
  Synthetic oligonucleotide
tggatctcattgaagacttctggcagactacacagggcatgcatgaaatagccgaatcat

SEQ ID NO: 471115 - DNA, 56 bp, Artificial
  Synthetic oligonucleotide
tggatctccaggtaaaggttcagttccctcataaattcttacttcctccacttgat

SEQ ID NO: 471116 - DNA, 55 bp, Artificial
  Synthetic oligonucleotide
tggatctccgagactatgtcgaagttgagtactcgcacgacttgtttcaggtccg

SEQ ID NO: 471117 - DNA, 55 bp, Artificial
  Synthetic oligonucleotide
tggatctctaattgtgccgctggattttgaacgcgctcggatggcattacagggc

SEQ ID NO: 471118 - DNA, 59 bp, Artificial
  Synthetic oligonucleotide
tggatctctgatagtgcccttgagtctagagcgtgcgagatcagctctacaaggcaaga

SEQ ID NO: 471119 - DNA, 60 bp, Artificial
  Synthetic oligonucleotide
tggatctctgcacaaatgtgcatatgagaaatgttggtatactcccgttccacaacatcg

SEQ ID NO: 471120 - DNA, 60 bp, Artificial
  Synthetic oligonucleotide
tggatctttagattggaggacttggacaattcctttacatctgatgcggacagcgaggtt

SEQ ID NO: 471121 - DNA, 60 bp, Artificial
  Synthetic oligonucleotide
tggatctttctgttcaatcaacgggaaagcaccgataagtcttggtgattgctcttttgc

SEQ ID NO: 471122 - DNA, 60 bp, Artificial
  Synthetic oligonucleotide
tggatgaaaagatggaagtggacactattgactggaaatcgcgctatgagcaattggaac

SEQ ID NO: 471123 - DNA, 56 bp, Artificial
  Synthetic oligonucleotide
tggatgaaccggctaatcgccttcgcctcccgggggaaccatgtctcccccacgca

SEQ ID NO: 471124 - DNA, 60 bp, Artificial
  Synthetic oligonucleotide
tggatgaagctgatccagaagagcgtaaagttattttgcgtaagctatctataactaaga

SEQ ID NO: 471125 - DNA, 58 bp, Artificial
  Synthetic oligonucleotide
tggatgaatggcactggattcaccaagacgtgtgggggccccccgtgtaacatcggag

SEQ ID NO: 471126 - DNA, 58 bp, Artificial
  Synthetic oligonucleotide
tggatgaattcttaatgaacatccgggatacctgcttagaaggtttggaaaactgcaa

SEQ ID NO: 471127 - DNA, 58 bp, Artificial
  Synthetic oligonucleotide
tggatgacaaacaaaccacctatccctgtaggagatatctataaaaggtggataatcc

SEQ ID NO: 471128 - DNA, 60 bp, Artificial
  Synthetic oligonucleotide
tggatgacagaacaaggtatcattactaaagaagttcagagagtccatcattctggaggc

SEQ ID NO: 471129 - DNA, 60 bp, Artificial
  Synthetic oligonucleotide
tggatgacgagatgtatcgagaatacacaatgctaataagagatgaagttgttaaaatgc

SEQ ID NO: 471130 - DNA, 60 bp, Artificial
  Synthetic oligonucleotide
tggatgacggacttaaggggttagcgtgcatggatatctcatatggatgtgaggtagatg

SEQ ID NO: 471131 - DNA, 55 bp, Artificial
  Synthetic oligonucleotide
tggatgacgttggggaggatcatacctaccactcccgttcctaccataagggatg

SEQ ID NO: 471132 - DNA, 56 bp, Artificial
  Synthetic oligonucleotide
tggatgactagacaacaaggcccaataaatgtaggagatatatataagaggtgggt

SEQ ID NO: 471133 - DNA, 55 bp, Artificial
  Synthetic oligonucleotide
tggatgactggaccaggtttactcagtgcacaaagagtaggtccagctacttcag

SEQ ID NO: 471134 - DNA, 60 bp, Artificial
  Synthetic oligonucleotide
tggatgagaaagtggataatctcagggctgatacaataagctcgcaaatagagcttgcag

SEQ ID NO: 471135 - DNA, 60 bp, Artificial
  Synthetic oligonucleotide
tggatgaggaggaggccatatccgacgacggaggatgaggctaggggatggcagactggg

SEQ ID NO: 471136 - DNA, 55 bp, Artificial
  Synthetic oligonucleotide
tggatgagggaactcgtcctttatgacaaaggagaaataaggcgaatctggcgcc

SEQ ID NO: 471137 - DNA, 60 bp, Artificial
  Synthetic oligonucleotide
tggatgagtgggccgcctacatttgggaagtggctcacactcaaacgactgtcagagata

SEQ ID NO: 471138 - DNA, 53 bp, Artificial
  Synthetic oligonucleotide
tggatgagttccttgagaaagttatagcgggaacaaaagtatcacatgcagcg

SEQ ID NO: 471139 - DNA, 56 bp, Artificial
  Synthetic oligonucleotide
tggatgataacgactgggtaaggtttggcggtgtgttacgcactgtacgcgttaaa

SEQ ID NO: 471140 - DNA, 53 bp, Artificial
  Synthetic oligonucleotide
tggatgatacgtcgagtcccaaaggatcactattagacacaagatttgcccaa

SEQ ID NO: 471141 - DNA, 60 bp, Artificial
  Synthetic oligonucleotide
tggatgataggtccaccccagctacaaggcgaatcacgctccgtagccccctagatgtgc

SEQ ID NO: 471142 - DNA, 60 bp, Artificial
  Synthetic oligonucleotide
tggatgatataccaatatctgatggacagatgcgatgaggttgttgaacaccaagggaag

SEQ ID NO: 471143 - DNA, 55 bp, Artificial
  Synthetic oligonucleotide
tggatgatgagctactacatgagtatggatttacaggagcattgttgcttataga

SEQ ID NO: 471144 - DNA, 55 bp, Artificial
  Synthetic oligonucleotide
tggatgatgtggttgaattggtgttggcagaggtgaagaaaaggtccctgggcct

SEQ ID NO: 471145 - DNA, 55 bp, Artificial
  Synthetic oligonucleotide
tggatgatttaaagaaccgggaaacgtgcctcgcttttacctgcacctctgccgg

SEQ ID NO: 471146 - DNA, 60 bp, Artificial
  Synthetic oligonucleotide
tggatgcagctgaaactggacacaccagttcagtgcagcctgaggaccttatagagacta

SEQ ID NO: 471147 - DNA, 57 bp, Artificial
  Synthetic oligonucleotide
tggatgcatctttgcacccagccttcatctgtcctcttcatgaagcctcaaaaattc

SEQ ID NO: 471148 - DNA, 60 bp, Artificial
  Synthetic oligonucleotide
tggatgccctgaagttaagcattgaagacccgagccatgatggggaggggataccgctat

SEQ ID NO: 471149 - DNA, 60 bp, Artificial
  Synthetic oligonucleotide
tggatgcgtttcgacccaaagtcccaatccatgtggctatgacgggagccctcaatgctt

SEQ ID NO: 471150 - DNA, 55 bp, Artificial
  Synthetic oligonucleotide
tggatgctcattataactgtgtgagattcattgtactgcataatcacctcctgaa

SEQ ID NO: 471151 - DNA, 60 bp, Artificial
  Synthetic oligonucleotide
tggatgcttctagatttgaccaacacatatctaaagatgctcttgagtttgagcacaaga

SEQ ID NO: 471152 - DNA, 59 bp, Artificial
  Synthetic oligonucleotide
tggatgctttaaaattgagcattgaagacccaagtcacgaaggagaagggatcccacta

SEQ ID NO: 471153 - DNA, 58 bp, Artificial
  Synthetic oligonucleotide
tggatggacgaaaacatcaagacaaagaaccacacaaacacggtcatgttttggctag

SEQ ID NO: 471154 - DNA, 60 bp, Artificial
  Synthetic oligonucleotide
tggatggacgagaatatcaagttgaggaaccatactaacagcgtcatgttctggctggtt

SEQ ID NO: 471155 - DNA, 60 bp, Artificial
  Synthetic oligonucleotide
tggatggacggaaactgatagtagtttctctattaagcaggatattatagcattaactga

SEQ ID NO: 471156 - DNA, 60 bp, Artificial
  Synthetic oligonucleotide
tggatggatgagaatatcaagaagcaaaatcatacgaaccatgttatgttcttccttgtt

SEQ ID NO: 471157 - DNA, 60 bp, Artificial
  Synthetic oligonucleotide
tggatggcatgtcattcagcagcgtttgaagacctgagagtatcaagtttcatccgaggg

SEQ ID NO: 471158 - DNA, 55 bp, Artificial
  Synthetic oligonucleotide
tggatggctgaagtaccaggaacgaagattgccggaatgctgctgctttccctcc

SEQ ID NO: 471159 - DNA, 59 bp, Artificial
  Synthetic oligonucleotide
tggatggcttaagccctgagtacagggtagtcgtcagtggttcgacgccttaacatgaa

SEQ ID NO: 471160 - DNA, 55 bp, Artificial
  Synthetic oligonucleotide
tggatgggaagtcatgaagtaaatgggacatggatgatccacaccttggaggcat

SEQ ID NO: 471161 - DNA, 60 bp, Artificial
  Synthetic oligonucleotide
tggatgggatatgaactacatcctgacaaatggacagtccagcctatacagctgccagac

SEQ ID NO: 471162 - DNA, 57 bp, Artificial
  Synthetic oligonucleotide
tggatggtaataaacgtaagagttgctttaacgaagctagaaaggtcacactatgac

SEQ ID NO: 471163 - DNA, 55 bp, Artificial
  Synthetic oligonucleotide
tggatggtatggttaccatcatcagaatggacagggatcaggctatgcagcggac

SEQ ID NO: 471164 - DNA, 54 bp, Artificial
  Synthetic oligonucleotide
tggatggtcccggttccccaaataacgcaacgtggcccaggatcgtcttttatc

SEQ ID NO: 471165 - DNA, 60 bp, Artificial
  Synthetic oligonucleotide
tggatggtcgccatgatggtggttattataccgtcaaggactgtgtgactattgacgtcc

SEQ ID NO: 471166 - DNA, 58 bp, Artificial
  Synthetic oligonucleotide
tggatggtttatctcctaagattgaaggcgtattttcgcttgttatagtgatcgaccg

SEQ ID NO: 471167 - DNA, 58 bp, Artificial
  Synthetic oligonucleotide
tggatggtttctgcggtgaaaaacatagaggttatgtggtttcaggggcatggcgtag

SEQ ID NO: 471168 - DNA, 58 bp, Artificial
  Synthetic oligonucleotide
tggatgtactctggtgtttcctataagtcccattgagactgtaccagtcaaattaaaa

SEQ ID NO: 471169 - DNA, 55 bp, Artificial
  Synthetic oligonucleotide
tggatgtcacatcctcatcagtgttgtcgccttcttgtaaggcactcatgcagtg

SEQ ID NO: 471170 - DNA, 60 bp, Artificial
  Synthetic oligonucleotide
tggatgtccaatggtctgtacgtggatcaagatgtcacacgagctcaaatctacatgttc

SEQ ID NO: 471171 - DNA, 60 bp, Artificial
  Synthetic oligonucleotide
tggatgtcctgcattgctgactcccatgacagttggtgtaactgcgatactccttttgct

SEQ ID NO: 471172 - DNA, 55 bp, Artificial
  Synthetic oligonucleotide
tggatgtctagtcggaattcacagtttggcaaataacaaacacaccacgaattac

SEQ ID NO: 471173 - DNA, 60 bp, Artificial
  Synthetic oligonucleotide
tggatgtgactacgagttatacgtatatgttatcagacgaaatctatgtagcaaacgtaa

SEQ ID NO: 471174 - DNA, 60 bp, Artificial
  Synthetic oligonucleotide
tggatgtgagcgtaggaccagcgccgagctcctttatggagatgatctggaggcaggagg

SEQ ID NO: 471175 - DNA, 55 bp, Artificial
  Synthetic oligonucleotide
tggatgtgcagggttcgagatgaagggttccaggtaatattggaaccgtttaaaa

SEQ ID NO: 471176 - DNA, 60 bp, Artificial
  Synthetic oligonucleotide
tggatgtggtgtacagttgcgacgggtactacaaagccatgtctatagctggaaccttag

SEQ ID NO: 471177 - DNA, 60 bp, Artificial
  Synthetic oligonucleotide
tggatgtgtcaccataacagctgaggggaagccttcaatggatgtgtggcttgatgccat

SEQ ID NO: 471178 - DNA, 60 bp, Artificial
  Synthetic oligonucleotide
tggatgtgttgcggagattgtgcctactcacagtacgcggctggcgatactcttgcgtgg

SEQ ID NO: 471179 - DNA, 55 bp, Artificial
  Synthetic oligonucleotide
tggatgtgttggacaccataaatttcgagagtactggtaatctaattgcaccgga

SEQ ID NO: 471180 - DNA, 60 bp, Artificial
  Synthetic oligonucleotide
tggatgttagagttgcagatgagtttactatgggtgttgagaggagtgatggctcttctg

SEQ ID NO: 471181 - DNA, 53 bp, Artificial
  Synthetic oligonucleotide
tggatgttcctccccccgagggtcccgagtgaggcttatcccggggatcggcc

SEQ ID NO: 471182 - DNA, 59 bp, Artificial
  Synthetic oligonucleotide
tggatgtttgacagcagcctagcacgtagacacctggcccgtgaaaaacatccggagtt

SEQ ID NO: 471183 - DNA, 60 bp, Artificial
  Synthetic oligonucleotide
tggattaacgatattcactgcacccacgatttatggtgttcctgtgaccacgtactcaaa

SEQ ID NO: 471184 - DNA, 60 bp, Artificial
  Synthetic oligonucleotide
tggattaacgcaactctgcagcttagtgtgtcgccttccgcacacaacatgctgagtaag

SEQ ID NO: 471185 - DNA, 55 bp, Artificial
  Synthetic oligonucleotide
tggattaccaggccccacgaaatcagtgccaggtaatactgcacctttgctactc

SEQ ID NO: 471186 - DNA, 56 bp, Artificial
  Synthetic oligonucleotide
tggattacctgttttttatttcagtctaactgttgctgcgaacgcgtgtttgttaa

SEQ ID NO: 471187 - DNA, 55 bp, Artificial
  Synthetic oligonucleotide
tggattacggccgtgtgaccgaatccggctgaagcaatggtgtagtgaccatttg

SEQ ID NO: 471188 - DNA, 53 bp, Artificial
  Synthetic oligonucleotide
tggattactattggggcattctgaaaagaggggagactctgaagatcaggacc

SEQ ID NO: 471189 - DNA, 60 bp, Artificial
  Synthetic oligonucleotide
tggattagggctggagacagctcggatggtctgatggccagataaggtgggcaagaaaac

SEQ ID NO: 471190 - DNA, 57 bp, Artificial
  Synthetic oligonucleotide
tggattagtacagggaagcgtacattcaatcataacgggcgaatcttacggcgaatc

SEQ ID NO: 471191 - DNA, 59 bp, Artificial
  Synthetic oligonucleotide
tggattagtagcaattcatgcagcagcttgcaactttaggtatccatggctagcctgct

SEQ ID NO: 471192 - DNA, 60 bp, Artificial
  Synthetic oligonucleotide
tggattatcctgggcttgcaaagatgtgtcaaaatgtataaccctgtaaacatcttagac

SEQ ID NO: 471193 - DNA, 60 bp, Artificial
  Synthetic oligonucleotide
tggattatgctgaagcaatttcaattgaagattcagcatcagtggctataatgcggaatg

SEQ ID NO: 471194 - DNA, 60 bp, Artificial
  Synthetic oligonucleotide
tggattatttcagggtaaagtaccttgaatcatctgtcaactcagagcatatcttctcag

SEQ ID NO: 471195 - DNA, 50 bp, Artificial
  Synthetic oligonucleotide
tggattcagtggcgtatgaattacgagacagaataccagacgttgttgac

SEQ ID NO: 471196 - DNA, 60 bp, Artificial
  Synthetic oligonucleotide
tggattcatcataaagggaaggtctcatctgagaaacgatactgatgtggtaaattttgt

SEQ ID NO: 471197 - DNA, 55 bp, Artificial
  Synthetic oligonucleotide
tggattcatcataaaggggaggtcccatctgaggaatgacactgatgtggtgaat

SEQ ID NO: 471198 - DNA, 59 bp, Artificial
  Synthetic oligonucleotide
tggattcccaagagaaatcgctccattctcaacactagccaaaggggaattcttgagga

SEQ ID NO: 471199 - DNA, 58 bp, Artificial
  Synthetic oligonucleotide
tggattcctccagtctggaccttacgggcaggcgaaggactactacaatcgtgccgtc

SEQ ID NO: 471200 - DNA, 60 bp, Artificial
  Synthetic oligonucleotide
tggattcgagacttggtctcggtgttagcgttgaggactcttttagcaatgttatacatg

SEQ ID NO: 471201 - DNA, 51 bp, Artificial
  Synthetic oligonucleotide
tggattcgcctaccgtattgatcgagtagctgaatacctcaggacgaaggg

SEQ ID NO: 471202 - DNA, 59 bp, Artificial
  Synthetic oligonucleotide
tggattctataacctctagaaccatctaaccagtccttcacatcagtattagtgtttaa

SEQ ID NO: 471203 - DNA, 55 bp, Artificial
  Synthetic oligonucleotide
tggattctgcggccgcgcggcaagatcggttcaacctcgaaggtcggcaagcctg

SEQ ID NO: 471204 - DNA, 53 bp, Artificial
  Synthetic oligonucleotide
tggattcttaataaagggaaggtcccatttaaggaatgacaccgacgtggtaa

SEQ ID NO: 471205 - DNA, 54 bp, Artificial
  Synthetic oligonucleotide
tggattgaaaagatcttctccgaccaccctggtcccacaatcctgtattcctca

SEQ ID NO: 471206 - DNA, 60 bp, Artificial
  Synthetic oligonucleotide
tggattgaaacgagtgctcttgttgagtccatatcctcctatatcgtagacagttttggt

SEQ ID NO: 471207 - DNA, 58 bp, Artificial
  Synthetic oligonucleotide
tggattgaaggtaacaattactatccaagcagataccaacagggggtaatgagaggtg

SEQ ID NO: 471208 - DNA, 60 bp, Artificial
  Synthetic oligonucleotide
tggattgaccgtgaagtcacgctgagctccgacgaagcacttccagttgggtgtgaactt

SEQ ID NO: 471209 - DNA, 53 bp, Artificial
  Synthetic oligonucleotide
tggattgatctatgcagcttggagactctggccaacatctgagcaaggagcat

SEQ ID NO: 471210 - DNA, 58 bp, Artificial
  Synthetic oligonucleotide
tggattgcagaggaagatagcgggaattccacctttaatttgcactggctttccgtat

SEQ ID NO: 471211 - DNA, 60 bp, Artificial
  Synthetic oligonucleotide
tggattgcgctggcacaaggagttaaaactagtctgcgtactaaaagtctatcagcggga

SEQ ID NO: 471212 - DNA, 60 bp, Artificial
  Synthetic oligonucleotide
tggattgcgtgttgaatcatctgttttgagggttcgaaatccaaccttacatgagacggc

SEQ ID NO: 471213 - DNA, 60 bp, Artificial
  Synthetic oligonucleotide
tggattggaatggcacaagatattttgctccaaatagcatgaaaacaaccagttattcgg

SEQ ID NO: 471214 - DNA, 60 bp, Artificial
  Synthetic oligonucleotide
tggattggacctacacgggcggatccaatctaatccgcatgatgatgacccccggatctc

SEQ ID NO: 471215 - DNA, 56 bp, Artificial
  Synthetic oligonucleotide
tggattgggtatctaatacatcactacccatgtttgtgggttagccgtgtgttggc

SEQ ID NO: 471216 - DNA, 60 bp, Artificial
  Synthetic oligonucleotide
tggattgggtgccattcgcggactcagtgcagattaatggtgcgctcaggtctgcgagga

SEQ ID NO: 471217 - DNA, 56 bp, Artificial
  Synthetic oligonucleotide
tggattggtattaaacttcgtgcttggcttctgtcaatagcttgcgacgcaaacgt

SEQ ID NO: 471218 - DNA, 55 bp, Artificial
  Synthetic oligonucleotide
tggattgtcgattacaaccttcccggggccgccgtgccgaagatctggcgcgaac

SEQ ID NO: 471219 - DNA, 57 bp, Artificial
  Synthetic oligonucleotide
tggattgttggtttgcttatttggcggaggacttgggctgtcccgcgaagccgataa

SEQ ID NO: 471220 - DNA, 58 bp, Artificial
  Synthetic oligonucleotide
tggattgttgtacccttcgggttaaaacaagctccatctatctttcaaagacacatga

SEQ ID NO: 471221 - DNA, 58 bp, Artificial
  Synthetic oligonucleotide
tggatttactgtctgtaggcgaggagcgtactttaagccaatctttattccagttaga

SEQ ID NO: 471222 - DNA, 57 bp, Artificial
  Synthetic oligonucleotide
tggatttagctccctgaatgtttggatggaaatgtactgaccgggttggggatacca

SEQ ID NO: 471223 - DNA, 59 bp, Artificial
  Synthetic oligonucleotide
tggatttagctccctggatgttggggtgaaaatgagatgacctggatggggataccagg

SEQ ID NO: 471224 - DNA, 60 bp, Artificial
  Synthetic oligonucleotide
tggatttagctccctggatgttggggtgaaagtgattcgatctgttcggtgagaccagat

SEQ ID NO: 471225 - DNA, 59 bp, Artificial
  Synthetic oligonucleotide
tggatttagctccctgtatgttcggatggaaatgtgctgacctggttggggatacgagg

SEQ ID NO: 471226 - DNA, 59 bp, Artificial
  Synthetic oligonucleotide
tggatttagctctctggatattagggtgaaagtgtgatgaccttgatggggaaacaagg

SEQ ID NO: 471227 - DNA, 59 bp, Artificial
  Synthetic oligonucleotide
tggatttaggatctaagtacatctcagaatggcattatagattgtcagctagggatcca

SEQ ID NO: 471228 - DNA, 60 bp, Artificial
  Synthetic oligonucleotide
tggatttatccactagatttcagtttaagttagatgagaagttcaacacatcggattctg

SEQ ID NO: 471229 - DNA, 60 bp, Artificial
  Synthetic oligonucleotide
tggatttcaggcccgcaaagggcgtagcgactcgtgaggagctccgtagagcttatgatc

SEQ ID NO: 471230 - DNA, 55 bp, Artificial
  Synthetic oligonucleotide
tggatttccccacccaagtgcgattacgcgaacgggacgaagattggttcagaag

SEQ ID NO: 471231 - DNA, 60 bp, Artificial
  Synthetic oligonucleotide
tggatttctgcagaagcacgccagtacatggtttatacagagacaagtcatacagaaagt

SEQ ID NO: 471232 - DNA, 60 bp, Artificial
  Synthetic oligonucleotide
tggatttgctacaacacctacatgtgaatatcaaggtaatacagtgtctggattccaacg

SEQ ID NO: 471233 - DNA, 60 bp, Artificial
  Synthetic oligonucleotide
tggatttgtagctaatttcagtatggagctgcccagttttggagtatctgggatcaacga

SEQ ID NO: 471234 - DNA, 58 bp, Artificial
  Synthetic oligonucleotide
tggatttgtgagacacagagtagattggagattagtcccaaggttcaaatctgatggt

SEQ ID NO: 471235 - DNA, 60 bp, Artificial
  Synthetic oligonucleotide
tggattttggacaggtgtttaatatgtttgataatgagcccagtacagctacggtgaaga

SEQ ID NO: 471236 - DNA, 57 bp, Artificial
  Synthetic oligonucleotide
tggcaaaaacacctgtggaactttgttagcgggatccaatacttggcgggcctgtca

SEQ ID NO: 471237 - DNA, 60 bp, Artificial
  Synthetic oligonucleotide
tggcaaaatctgtattcaacagtctatacgcatctccacaacttgagggattttcggctg

SEQ ID NO: 471238 - DNA, 53 bp, Artificial
  Synthetic oligonucleotide
tggcaaacaagttagtttggtaatcgaaaatacgtcacaaacgaaatggaaat

SEQ ID NO: 471239 - DNA, 50 bp, Artificial
  Synthetic oligonucleotide
tggcaaacatgtgcggtcccgtagggcgttgaggcgagggagtttcttgg

SEQ ID NO: 471240 - DNA, 59 bp, Artificial
  Synthetic oligonucleotide
tggcaaagaggaacatacttacggcaaccactagtaagggagaattcaccatgcttgga

SEQ ID NO: 471241 - DNA, 58 bp, Artificial
  Synthetic oligonucleotide
tggcaaagggcgtacttgtacgtgcttagcaagtaccttacaactcagagtccacgtg

SEQ ID NO: 471242 - DNA, 60 bp, Artificial
  Synthetic oligonucleotide
tggcaaaggtactagaccctttcagaaaagccaacaatgatgtcactataatccagtaca

SEQ ID NO: 471243 - DNA, 60 bp, Artificial
  Synthetic oligonucleotide
tggcaaatcaatggccacgctcgaaaatcatagtggaaggtctgacccagactgggaggt

SEQ ID NO: 471244 - DNA, 60 bp, Artificial
  Synthetic oligonucleotide
tggcaaatggattgcacccacctggagggaaaaatcattctagtagcagtccatgtggct

SEQ ID NO: 471245 - DNA, 59 bp, Artificial
  Synthetic oligonucleotide
tggcaaatgtagtagatggggtaggagtacctattctgtccacaatcgccaagcctgtt

SEQ ID NO: 471246 - DNA, 60 bp, Artificial
  Synthetic oligonucleotide
tggcaaatgtcgtgagaaagatgatgactaactcacaagacacagagctctccttcacaa

SEQ ID NO: 471247 - DNA, 50 bp, Artificial
  Synthetic oligonucleotide
tggcaaatttgacaaattgtacgtttggggggttcaccacccgatcacgg

SEQ ID NO: 471248 - DNA, 55 bp, Artificial
  Synthetic oligonucleotide
tggcaacaatcatgtttggagattttactgtgcagctgaatcacaacactaggat

SEQ ID NO: 471249 - DNA, 59 bp, Artificial
  Synthetic oligonucleotide
tggcaacacggaatgactgggacaaccttgtgtgggaggattacaaccgtgatctccta

SEQ ID NO: 471250 - DNA, 58 bp, Artificial
  Synthetic oligonucleotide
tggcaacattctcctaagtggaacccaaacagctagaatgcttaagtataactaccca

SEQ ID NO: 471251 - DNA, 57 bp, Artificial
  Synthetic oligonucleotide
tggcaaccagtacaaacgcctgagagacgtagtccgccggaagagggacgatgtggt

SEQ ID NO: 471252 - DNA, 60 bp, Artificial
  Synthetic oligonucleotide
tggcaacccctgcgaggttaagctgcaggaggaaggtgcacccatggcatatatgaacgc

SEQ ID NO: 471253 - DNA, 59 bp, Artificial
  Synthetic oligonucleotide
tggcaacccttcttgtgatctactgttgggaggaagagactggtcctacatcgtcgaaa

SEQ ID NO: 471254 - DNA, 53 bp, Artificial
  Synthetic oligonucleotide
tggcaactacaccccaagcgggtcggttactgttgataccgtgtaccctaccg

SEQ ID NO: 471255 - DNA, 53 bp, Artificial
  Synthetic oligonucleotide
tggcaactcaggcatcagtggatctaatcttgaagctctcatgttccacggcg

SEQ ID NO: 471256 - DNA, 60 bp, Artificial
  Synthetic oligonucleotide
tggcaactgcatgttatattctaacagtgttctatcccgaaactagaggagctgagttac

SEQ ID NO: 471257 - DNA, 60 bp, Artificial
  Synthetic oligonucleotide
tggcaactgcgcctaaagacgctcctcgacagggacccagatgaccgcactatcatctgg

SEQ ID NO: 471258 - DNA, 60 bp, Artificial
  Synthetic oligonucleotide
tggcaactgcgcctgtggacgctccttggtagggacccagatgaccgcactattttctgg

SEQ ID NO: 471259 - DNA, 60 bp, Artificial
  Synthetic oligonucleotide
tggcaactttagtacactcagctgtagcacgccctattggcagagatggaaagtacactc

SEQ ID NO: 471260 - DNA, 55 bp, Artificial
  Synthetic oligonucleotide
tggcaagaccccccaaccacaggctataaaccacaagacaacatgtggttttggg

SEQ ID NO: 471261 - DNA, 58 bp, Artificial
  Synthetic oligonucleotide
tggcaagacgataccaaatatcgcaaatttggaaactgggaagtcggtccagtgtgaa

SEQ ID NO: 471262 - DNA, 60 bp, Artificial
  Synthetic oligonucleotide
tggcaagactcgcaagctttgatcaactgtatcaagcctaataagttgaattctcctatc

SEQ ID NO: 471263 - DNA, 56 bp, Artificial
  Synthetic oligonucleotide
tggcaagagatcggccaccagggaagttagggttccatccgtaaggagcgaacctc

SEQ ID NO: 471264 - DNA, 60 bp, Artificial
  Synthetic oligonucleotide
tggcaagcaagtggctgttgaggactgggcagttcccgtgtcctccgaccaccagatgct

SEQ ID NO: 471265 - DNA, 56 bp, Artificial
  Synthetic oligonucleotide
tggcaagcacttccgcagtaacaggaggggggtcttcctcgagcgtttactcgagt

SEQ ID NO: 471266 - DNA, 57 bp, Artificial
  Synthetic oligonucleotide
tggcaagcagctagtggtaaggtttaccttccaccgtctacaccagttgccagggtc

SEQ ID NO: 471267 - DNA, 53 bp, Artificial
  Synthetic oligonucleotide
tggcaagccgaagtgaacatagtaatgtgataggcatgtggtgtttactgcac

SEQ ID NO: 471268 - DNA, 60 bp, Artificial
  Synthetic oligonucleotide
tggcaagcctaagttcttatcgtgctactggctgcccgatggccgtccaatccggcctgc

SEQ ID NO: 471269 - DNA, 60 bp, Artificial
  Synthetic oligonucleotide
tggcaagctggatggtgtgtcaccaccaattaaagtgacccagtttggttatgatgtcac

SEQ ID NO: 471270 - DNA, 58 bp, Artificial
  Synthetic oligonucleotide
tggcaaggaagttttactctcgagatagaaatgtttccatacccgagtatgagcgagg

SEQ ID NO: 471271 - DNA, 53 bp, Artificial
  Synthetic oligonucleotide
tggcaagggtcctttgtaggggtctcgccctagtccggatgccaaacttaaac

SEQ ID NO: 471272 - DNA, 59 bp, Artificial
  Synthetic oligonucleotide
tggcaagtaccagcctccgcacaagaggtcccaggcttccaagcctgtggcgccctccc

SEQ ID NO: 471273 - DNA, 60 bp, Artificial
  Synthetic oligonucleotide
tggcaagtacctacagcggaggctgcaagttaatggtctccgagcagtaactgacctaaa

SEQ ID NO: 471274 - DNA, 52 bp, Artificial
  Synthetic oligonucleotide
tggcaagtatgttcaggcctgcctattgaagctaggagcttggacgggcacc

SEQ ID NO: 471275 - DNA, 54 bp, Artificial
  Synthetic oligonucleotide
tggcaagtgttttatacaatagtcgattacgtaaatcagattgtacaagtgatg

SEQ ID NO: 471276 - DNA, 51 bp, Artificial
  Synthetic oligonucleotide
tggcaagttctgtggcaaagtctgttaatcgtgggatcaatgatttgaggt

SEQ ID NO: 471277 - DNA, 52 bp, Artificial
  Synthetic oligonucleotide
tggcaatacccccagaggatgcatacatagtcatagaaacggatggctctat

SEQ ID NO: 471278 - DNA, 59 bp, Artificial
  Synthetic oligonucleotide
tggcaataggcagtctaaccaggccactgctcctattaattgagttatttcaacacccc

SEQ ID NO: 471279 - DNA, 52 bp, Artificial
  Synthetic oligonucleotide
tggcaatcaagtccattttacacgccagtgcttggtagttgcagggcctttt

SEQ ID NO: 471280 - DNA, 60 bp, Artificial
  Synthetic oligonucleotide
tggcaatcgcgcctgaagacgctcctcgaacgggacccagatgaccgcactatcttctgg

SEQ ID NO: 471281 - DNA, 60 bp, Artificial
  Synthetic oligonucleotide
tggcaatcgtacgatgcactcccgcgccacctgccacctcagcagcttactctctaccca

SEQ ID NO: 471282 - DNA, 60 bp, Artificial
  Synthetic oligonucleotide
tggcaatgaaagcgagggggatgcagaggaattatcaacacttatggaggtgggggacta

SEQ ID NO: 471283 - DNA, 56 bp, Artificial
  Synthetic oligonucleotide
tggcaatgagagtgatggggacacagaagaactttacaccctgttggaaatggggt

SEQ ID NO: 471284 - DNA, 60 bp, Artificial
  Synthetic oligonucleotide
tggcaatgagagtgatggggatacagaggagttatccacccttatggagatggggtacga

SEQ ID NO: 471285 - DNA, 60 bp, Artificial
  Synthetic oligonucleotide
tggcaatgagagtgatggggatcaggaacaattgtcagcacttatggagagggggcatat

SEQ ID NO: 471286 - DNA, 55 bp, Artificial
  Synthetic oligonucleotide
tggcaatgatagtgacggggatcgggaagaattatcggcatgtatggggatgggg

SEQ ID NO: 471287 - DNA, 60 bp, Artificial
  Synthetic oligonucleotide
tggcaatgatatgggatcccgactctcaagactcggttccccagtcgcgacaggagatat

SEQ ID NO: 471288 - DNA, 60 bp, Artificial
  Synthetic oligonucleotide
tggcaatgctcctacggtcattagacctgcattggtccctgacaccattggcccgtctga

SEQ ID NO: 471289 - DNA, 50 bp, Artificial
  Synthetic oligonucleotide
tggcaattacacagaattaatatatagtctacttgaagaatcgcaggtcc

SEQ ID NO: 471290 - DNA, 55 bp, Artificial
  Synthetic oligonucleotide
tggcacaaacctcgagctgaccttactaaaacttaaccgcaatgagaagtttagg

SEQ ID NO: 471291 - DNA, 59 bp, Artificial
  Synthetic oligonucleotide
tggcacaaataggtggttagcaacaatattagtagagcctaacgtacagtcagtagaac

SEQ ID NO: 471292 - DNA, 55 bp, Artificial
  Synthetic oligonucleotide
tggcacaccatatacaaacgcagtgggttttatgcctaatctactggcctatcct

SEQ ID NO: 471293 - DNA, 60 bp, Artificial
  Synthetic oligonucleotide
tggcacagcgtttgctagtgatggcatcataaagtacaagaaggagggttgtcgtatgag

SEQ ID NO: 471294 - DNA, 60 bp, Artificial
  Synthetic oligonucleotide
tggcacatacgatgtttgggatgtgaatggcgactccacctacactttcaccataccctt

SEQ ID NO: 471295 - DNA, 55 bp, Artificial
  Synthetic oligonucleotide
tggcacatccggtccgtggtggttcacagcgggcacccctcagtgtatcccgtag

SEQ ID NO: 471296 - DNA, 60 bp, Artificial
  Synthetic oligonucleotide
tggcacatgcttttcatactatccgtgatgttcgctatcaagcagttgatgcagtaagta

SEQ ID NO: 471297 - DNA, 60 bp, Artificial
  Synthetic oligonucleotide
tggcacattaatcgcacggccttgaactgtaacacgagcctcgaggccggctggttagcg

SEQ ID NO: 471298 - DNA, 55 bp, Artificial
  Synthetic oligonucleotide
tggcacattctatccaaggacaatgcgattaggataggagaagatgcccacatcc

SEQ ID NO: 471299 - DNA, 56 bp, Artificial
  Synthetic oligonucleotide
tggcaccaacggtgcgtatagatgccggttctccaaagggtcttggagtcccgaaa

SEQ ID NO: 471300 - DNA, 60 bp, Artificial
  Synthetic oligonucleotide
tggcaccacaaaatatggtgcacagaattgttgttaatctagcccaatttccaaacttga

SEQ ID NO: 471301 - DNA, 55 bp, Artificial
  Synthetic oligonucleotide
tggcaccaggctctggccccatcttggttaacattttaggatcctgggtgaaacc

SEQ ID NO: 471302 - DNA, 55 bp, Artificial
  Synthetic oligonucleotide
tggcacccacttcgacaaaactcattattgtggtttcgattattcacaccttcca

SEQ ID NO: 471303 - DNA, 57 bp, Artificial
  Synthetic oligonucleotide
tggcaccgtaaagtgtagaataggtaacgtcacggtgcaagttatcgctactaacaa

SEQ ID NO: 471304 - DNA, 60 bp, Artificial
  Synthetic oligonucleotide
tggcaccgttgttataacatcaatggaggattgtggtgttcttgccgttgcggttacaga

SEQ ID NO: 471305 - DNA, 52 bp, Artificial
  Synthetic oligonucleotide
tggcacctcaaagttttgagacccgattcttttgagtcgagaaccttacccc

SEQ ID NO: 471306 - DNA, 58 bp, Artificial
  Synthetic oligonucleotide
tggcacctcaccgaatttcgacgaggaactcactatggaggttaatggcggtctcaac

SEQ ID NO: 471307 - DNA, 52 bp, Artificial
  Synthetic oligonucleotide
tggcacctgaagaggtgccagattctttccgggtggaaacacccgctgctat

SEQ ID NO: 471308 - DNA, 60 bp, Artificial
  Synthetic oligonucleotide
tggcacctgacgacagaattgttgtggatatcatgcttgcgcgttatttattaagtctca

SEQ ID NO: 471309 - DNA, 59 bp, Artificial
  Synthetic oligonucleotide
tggcacctgttccattggtccccgctgctgaactgttaacactgccggttgcgacgacc

SEQ ID NO: 471310 - DNA, 60 bp, Artificial
  Synthetic oligonucleotide
tggcaccttgaatgttggggtggaaattggtgctacagcttgggtgtacacaatcgaaga

SEQ ID NO: 471311 - DNA, 59 bp, Artificial
  Synthetic oligonucleotide
tggcacgacgtctactaggtctgcaaacgcaaaccgtagactctgcgcaaggtagtgag

SEQ ID NO: 471312 - DNA, 56 bp, Artificial
  Synthetic oligonucleotide
tggcacgactatgctattccagtatatgtaacaaaagacatatcaactattgaggg

SEQ ID NO: 471313 - DNA, 59 bp, Artificial
  Synthetic oligonucleotide
tggcacgcataaccacttgcgccaagttaagttccacaaagcgcgcaaacacaccgtag

SEQ ID NO: 471314 - DNA, 55 bp, Artificial
  Synthetic oligonucleotide
tggcacgcatatggctcaataaactagcaggagtctataaaagcgtggagacagt

SEQ ID NO: 471315 - DNA, 57 bp, Artificial
  Synthetic oligonucleotide
tggcacgcgctaaacttgacgcggccacactgaaaagacgtttcgccaactttcttc

SEQ ID NO: 471316 - DNA, 55 bp, Artificial
  Synthetic oligonucleotide
tggcactaattacggttcctcaacgtttacgcaagtcctcctgacttgcgtaccg

SEQ ID NO: 471317 - DNA, 58 bp, Artificial
  Synthetic oligonucleotide
tggcactacccacctcgaccgtgtggtatagtgcccgcgtcggaggtgtgtggtccag

SEQ ID NO: 471318 - DNA, 56 bp, Artificial
  Synthetic oligonucleotide
tggcactaccccccaaaaccttgcggtatcgtgcccgcaaagagcgtatgtggccc

SEQ ID NO: 471319 - DNA, 60 bp, Artificial
  Synthetic oligonucleotide
tggcactatccagaccacctgattacacgaaagtgctgcttgttagttctctggctgttg

SEQ ID NO: 471320 - DNA, 60 bp, Artificial
  Synthetic oligonucleotide
tggcactatgcacccaaaccgtgtggtatcgtacccgcgtcgcaggtgtgtggtccagtg

SEQ ID NO: 471321 - DNA, 56 bp, Artificial
  Synthetic oligonucleotide
tggcactattccctgccgtgacgaatgtcacacacgctaattctctgtcagcaacg

SEQ ID NO: 471322 - DNA, 55 bp, Artificial
  Synthetic oligonucleotide
tggcactcactccgcaggtggtaacggtataggatactgttcatgcgtctcccga

SEQ ID NO: 471323 - DNA, 52 bp, Artificial
  Synthetic oligonucleotide
tggcactcgggatcgcgtctcttgttggagcgaccccgacatctttaatcct

SEQ ID NO: 471324 - DNA, 58 bp, Artificial
  Synthetic oligonucleotide
tggcactctccgggcggagttgcagggggcgtatctgctcggtgcgtaggggcggttg

SEQ ID NO: 471325 - DNA, 59 bp, Artificial
  Synthetic oligonucleotide
tggcactggcaaaggattggacatcaaggattgaagattggctcggggccccatgcaag

SEQ ID NO: 471326 - DNA, 60 bp, Artificial
  Synthetic oligonucleotide
tggcacttaggtgaccagtaagactttgagaatccgagagcggtcagactcggacgccag

SEQ ID NO: 471327 - DNA, 52 bp, Artificial
  Synthetic oligonucleotide
tggcacttccttggattgagccattatggcgatcaaagcaaggatttcaaaa

SEQ ID NO: 471328 - DNA, 51 bp, Artificial
  Synthetic oligonucleotide
tggcagaaatacggtagtccgtaaaggctttcgttaaactttcagtaaacg

SEQ ID NO: 471329 - DNA, 54 bp, Artificial
  Synthetic oligonucleotide
tggcagaacatttcaccgataacggtaagattttatctttaaccgggtgcggtc

SEQ ID NO: 471330 - DNA, 50 bp, Artificial
  Synthetic oligonucleotide
tggcagaaccagcaggaggtgattcagaggtaaaatttatgtggactaac

SEQ ID NO: 471331 - DNA, 60 bp, Artificial
  Synthetic oligonucleotide
tggcagaattaacagtgctatggctggtaagatagcatacacattgcaaacagatcttca

SEQ ID NO: 471332 - DNA, 57 bp, Artificial
  Synthetic oligonucleotide
tggcagacatcctctaacccgtcggtgttttacacctatggggcgcccccagcaaga

SEQ ID NO: 471333 - DNA, 58 bp, Artificial
  Synthetic oligonucleotide
tggcagaccgacgatcttaaagtcaaccaaccagtcaaattcaccccagtcggtctca

SEQ ID NO: 471334 - DNA, 60 bp, Artificial
  Synthetic oligonucleotide
tggcagactcatttgatgtctacgggtactgattatggtggaaaacagacgtataaggcg

SEQ ID NO: 471335 - DNA, 60 bp, Artificial
  Synthetic oligonucleotide
tggcagagagtaggacaagcaatgtatgcccctcccatcccaggagtaataaggtgtgaa

SEQ ID NO: 471336 - DNA, 55 bp, Artificial
  Synthetic oligonucleotide
tggcagagggatggagaccctgaggtcactagcttctggttcaattgtcagggag

SEQ ID NO: 471337 - DNA, 60 bp, Artificial
  Synthetic oligonucleotide
tggcagagggcaacggtcctcagtactcttactctttcctataaagaggagactgctgga

SEQ ID NO: 471338 - DNA, 60 bp, Artificial
  Synthetic oligonucleotide
tggcagagggtaggacaagcaatatatgcccctcccctacaaggagtaatcagatgtgat

SEQ ID NO: 471339 - DNA, 53 bp, Artificial
  Synthetic oligonucleotide
tggcagaggtttgacagcttagtgaggtgccatgatcactacctctgcagaca

SEQ ID NO: 471340 - DNA, 55 bp, Artificial
  Synthetic oligonucleotide
tggcagagtatggtggtcaaacccttatccatgtttacgtggcgcgttaatcgcg

SEQ ID NO: 471341 - DNA, 55 bp, Artificial
  Synthetic oligonucleotide
tggcagatacggaaaatcctaatgtttatgcccctgcagaggtagatgacagtag

SEQ ID NO: 471342 - DNA, 52 bp, Artificial
  Synthetic oligonucleotide
tggcagatatgtgatcgcttagactttagtagagctacgtactacgttaaat

SEQ ID NO: 471343 - DNA, 55 bp, Artificial
  Synthetic oligonucleotide
tggcagatcttctcaattcgtgagaagagataacatattactgcaacgtccagct

SEQ ID NO: 471344 - DNA, 60 bp, Artificial
  Synthetic oligonucleotide
tggcagatggcttcgcctcagttaattctgatgtcaccatggcaggtgcgctttatgata

SEQ ID NO: 471345 - DNA, 60 bp, Artificial
  Synthetic oligonucleotide
tggcagatggttttgcctcagtcaattcggatgtgactatggctggagcactctatgata

SEQ ID NO: 471346 - DNA, 55 bp, Artificial
  Synthetic oligonucleotide
tggcagcaaataaccaaggggacactaaccagcttggtgatgatgaacctgtgtg

SEQ ID NO: 471347 - DNA, 59 bp, Artificial
  Synthetic oligonucleotide
tggcagcaacaaaaatttgttctaatacggatgaagatgttgttgttgcggaacacgaa

SEQ ID NO: 471348 - DNA, 55 bp, Artificial
  Synthetic oligonucleotide
tggcagcaccagtgctgtcaacactcttccccatggcggcaccactcatcggagc

SEQ ID NO: 471349 - DNA, 60 bp, Artificial
  Synthetic oligonucleotide
tggcagcactaatgtgtttggctatgttcccatgcggaaagataacctgccctgactgtg

SEQ ID NO: 471350 - DNA, 60 bp, Artificial
  Synthetic oligonucleotide
tggcagcagtctgctgattctggtgtagagctaggtccaagacccaagttcatccctcca

SEQ ID NO: 471351 - DNA, 55 bp, Artificial
  Synthetic oligonucleotide
tggcagccaaatctcatactagaattactatagcgctatacgattcttcgtggct

SEQ ID NO: 471352 - DNA, 60 bp, Artificial
  Synthetic oligonucleotide
tggcagccagaatgggaacccatgcaaccatgaagattcaagggcgcactgttgggggtc

SEQ ID NO: 471353 - DNA, 57 bp, Artificial
  Synthetic oligonucleotide
tggcagcggatagatctttacttaaggatatctgcaattggacatttctatattcct

SEQ ID NO: 471354 - DNA, 52 bp, Artificial
  Synthetic oligonucleotide
tggcagcggtgcgtgtgggaagattacaacagagatcttcttgtgagtacaa

SEQ ID NO: 471355 - DNA, 60 bp, Artificial
  Synthetic oligonucleotide
tggcagctagattgtacacacttagaaggaaaaattatcctggtagcagttcatgtagcc

SEQ ID NO: 471356 - DNA, 54 bp, Artificial
  Synthetic oligonucleotide
tggcagctcttcaacttccggtattacgggcgacaatacaacagcgtcctctgg

SEQ ID NO: 471357 - DNA, 60 bp, Artificial
  Synthetic oligonucleotide
tggcagctttcagcgggaacaatgagggacgaacatcagacatgcgaaccgaaatcataa

SEQ ID NO: 471358 - DNA, 60 bp, Artificial
  Synthetic oligonucleotide
tggcaggaagtgggacgagcaatgtatgccgctcccattgcaggaaatattacctgtaac

SEQ ID NO: 471359 - DNA, 54 bp, Artificial
  Synthetic oligonucleotide
tggcaggacccaagtcctagaacttgattggacgcgattcgatggcaccattcc

SEQ ID NO: 471360 - DNA, 58 bp, Artificial
  Synthetic oligonucleotide
tggcaggaggaggaatctccgactaccaagcgtcgtcacttacaggggtatcttcaat

SEQ ID NO: 471361 - DNA, 60 bp, Artificial
  Synthetic oligonucleotide
tggcaggatactcaagaataatttgcccatgggacagtgtgtgactgaatgtcaattgaa

SEQ ID NO: 471362 - DNA, 60 bp, Artificial
  Synthetic oligonucleotide
tggcaggattacacctcaggaccaggaattagatacccaaagacatttggctggctatgg

SEQ ID NO: 471363 - DNA, 58 bp, Artificial
  Synthetic oligonucleotide
tggcaggctttattcatttaaagccgtagcccgcgttttagtgttgcgcattgtggtc

SEQ ID NO: 471364 - DNA, 60 bp, Artificial
  Synthetic oligonucleotide
tggcagggcaatcagaagatgtatctgcacaggtcaagacagcaactcaactgcaacttg

SEQ ID NO: 471365 - DNA, 54 bp, Artificial
  Synthetic oligonucleotide
tggcaggggggtcagcagcccgcaacaccctggggtttacgaacctcttttcac

SEQ ID NO: 471366 - DNA, 60 bp, Artificial
  Synthetic oligonucleotide
tggcaggggtcacctcaacagtagaagaacaactagcctggactacagcagacactcctg

SEQ ID NO: 471367 - DNA, 60 bp, Artificial
  Synthetic oligonucleotide
tggcagggttcaaatagaccagtaattcaaatagatccaatggcaatgacacatactagt

SEQ ID NO: 471368 - DNA, 55 bp, Artificial
  Synthetic oligonucleotide
tggcagggtttgctacttatgcttttggaactaatatgcttttgtgtacgtcacg

SEQ ID NO: 471369 - DNA, 56 bp, Artificial
  Synthetic oligonucleotide
tggcaggtgagacgtcaacgtggggaccggcgcgccaggcttacggattcttccta

SEQ ID NO: 471370 - DNA, 60 bp, Artificial
  Synthetic oligonucleotide
tggcaggtggatctcagaacgtaccagcttactcgcattcaccttacgatggtcatccac

SEQ ID NO: 471371 - DNA, 51 bp, Artificial
  Synthetic oligonucleotide
tggcaggttcaaatacaactagaaagtctccctttatggtgttcttcacag

SEQ ID NO: 471372 - DNA, 60 bp, Artificial
  Synthetic oligonucleotide
tggcagtctagcagaaaagatagtagttagatctaaaaatttcacagacaatgctggaac

SEQ ID NO: 471373 - DNA, 60 bp, Artificial
  Synthetic oligonucleotide
tggcagtcttatgctgcataagacctacgcacgccgagacgctaggcgaatcacttggac

SEQ ID NO: 471374 - DNA, 60 bp, Artificial
  Synthetic oligonucleotide
tggcagtgatcatacaatggaatctggtgacaaaatgaacgggctattcgtgttatctat

SEQ ID NO: 471375 - DNA, 60 bp, Artificial
  Synthetic oligonucleotide
tggcagtgccggtgttggtcgtacggtctcgttttgtgtaatcattctgtgcatcgatct

SEQ ID NO: 471376 - DNA, 50 bp, Artificial
  Synthetic oligonucleotide
tggcagtttagcagaagaagaggtagtaattagatcagtcaatttcagtg

SEQ ID NO: 471377 - DNA, 60 bp, Artificial
  Synthetic oligonucleotide
tggcagtttagcagaagaagaggtagtaattagatctagcaattttacaaacaatgctag

SEQ ID NO: 471378 - DNA, 54 bp, Artificial
  Synthetic oligonucleotide
tggcagtttgacagccgcctggcatttaaacatgaagccagagagagacatccg

SEQ ID NO: 471379 - DNA, 60 bp, Artificial
  Synthetic oligonucleotide
tggcagtttgatagatcactaggcggcacccatgttgctatgataactcaccctcatctc

SEQ ID NO: 471380 - DNA, 54 bp, Artificial
  Synthetic oligonucleotide
tggcagtttttaccgttggttgtgtagaattgggaaagctaatactaaagtgac

SEQ ID NO: 471381 - DNA, 60 bp, Artificial
  Synthetic oligonucleotide
tggcataactacacaccagggccagggatcagatacccactgtgttttggatggtgcttc

SEQ ID NO: 471382 - DNA, 59 bp, Artificial
  Synthetic oligonucleotide
tggcataatgaatacataatgcgcgaaaacggtccaaaacctctttcggctcatataaa

SEQ ID NO: 471383 - DNA, 55 bp, Artificial
  Synthetic oligonucleotide
tggcatacaagtgtatgctcaaacaaggtcggatagatgggttcaagatagactg

SEQ ID NO: 471384 - DNA, 55 bp, Artificial
  Synthetic oligonucleotide
tggcatacagtatgggggccagtacgccgcacgacctcgcaggcatatcgactgt

SEQ ID NO: 471385 - DNA, 50 bp, Artificial
  Synthetic oligonucleotide
tggcatacatacatggcatggatgctggcattttagaggactggaatttt

SEQ ID NO: 471386 - DNA, 60 bp, Artificial
  Synthetic oligonucleotide
tggcatactccgaaagaggaagcctggaggagacttatgtggtaggacagccaaaatgga

SEQ ID NO: 471387 - DNA, 53 bp, Artificial
  Synthetic oligonucleotide
tggcatagaccccaatatacgtactggggttaggaccatcaccactggaggag

SEQ ID NO: 471388 - DNA, 60 bp, Artificial
  Synthetic oligonucleotide
tggcatatacttgaaaacgcttgggaggagccattgacttggtcaatcggtactcagcac

SEQ ID NO: 471389 - DNA, 60 bp, Artificial
  Synthetic oligonucleotide
tggcatatttgtaaatatgcgagtgtctccaaatgagtttgcgagtgtctccaattgagg

SEQ ID NO: 471390 - DNA, 60 bp, Artificial
  Synthetic oligonucleotide
tggcatccactctcacgggagatcaaagagtcggactcataccgagaaacggtgtggacc

SEQ ID NO: 471391 - DNA, 60 bp, Artificial
  Synthetic oligonucleotide
tggcatccctcaagacatctccctttgctgatgtggtgaagtgactcagtccccttctga

SEQ ID NO: 471392 - DNA, 56 bp, Artificial
  Synthetic oligonucleotide
tggcatcgactggattgttgagagcggagataccagtttgtgtaaccttgtctcag

SEQ ID NO: 471393 - DNA, 51 bp, Artificial
  Synthetic oligonucleotide
tggcatcggttacaactggtatccgtcgcccctcctcatctttgaccccgg

SEQ ID NO: 471394 - DNA, 60 bp, Artificial
  Synthetic oligonucleotide
tggcatcgttcacaatgcatcagtcacactagatagggtatttagtgttagcacgtccag

SEQ ID NO: 471395 - DNA, 60 bp, Artificial
  Synthetic oligonucleotide
tggcatctccaggaatcctgcgtggtgcccacaacctcgactgcgtgtcaaaagaaggag

SEQ ID NO: 471396 - DNA, 55 bp, Artificial
  Synthetic oligonucleotide
tggcatcttgagatgtgttcatggacctataggtcttctcactgcaggaggcagc

SEQ ID NO: 471397 - DNA, 60 bp, Artificial
  Synthetic oligonucleotide
tggcatgacaggaatttacaagaatcccactcttcacagtccggagcggggtcaaatgca

SEQ ID NO: 471398 - DNA, 55 bp, Artificial
  Synthetic oligonucleotide
tggcatgagggctcgggaaacccagccggaaggataaaactgcaaggaataggag

SEQ ID NO: 471399 - DNA, 59 bp, Artificial
  Synthetic oligonucleotide
tggcatgaggtgagcagtaatagccccctcgtgcctaagactggtggcctcgtgtgcac

SEQ ID NO: 471400 - DNA, 60 bp, Artificial
  Synthetic oligonucleotide
tggcatgatgaacaagggatgtcaacaagttacacaaagtatagatatttgtgcttaatg

SEQ ID NO: 471401 - DNA, 60 bp, Artificial
  Synthetic oligonucleotide
tggcatgattgtagacctaaaaaagtctcaggtgggcacatcaatgtaatagaagtcggt

SEQ ID NO: 471402 - DNA, 60 bp, Artificial
  Synthetic oligonucleotide
tggcatgccattccgccgcatttgaggatttgagagtgtcaagtttcatccggggaacaa

SEQ ID NO: 471403 - DNA, 52 bp, Artificial
  Synthetic oligonucleotide
tggcatgcccaaatatgaatgggacagaattgtgcaagaagttgaaagagtg

SEQ ID NO: 471404 - DNA, 60 bp, Artificial
  Synthetic oligonucleotide
tggcatgctaatggtacttggaatagtacttggaatgatactggagggtcaaatgacact

SEQ ID NO: 471405 - DNA, 60 bp, Artificial
  Synthetic oligonucleotide
tggcatgcttaacgtgtaccaacgtagtatacagatagtgggagctgattgtggttcgtc

SEQ ID NO: 471406 - DNA, 60 bp, Artificial
  Synthetic oligonucleotide
tggcatgcttcgaatcgaccatgggtctcttttgatcaaaatcttgattatcaaataggg

SEQ ID NO: 471407 - DNA, 60 bp, Artificial
  Synthetic oligonucleotide
tggcatggcatctacggcaatctcgacgcgcacgaagtccccggcgtcgtggtcaacaac

SEQ ID NO: 471408 - DNA, 55 bp, Artificial
  Synthetic oligonucleotide
tggcatgggcgttaaaacgaggaaatttgttgcgacatatggatttaaaccggag

SEQ ID NO: 471409 - DNA, 55 bp, Artificial
  Synthetic oligonucleotide
tggcatggggaaatcaagacgtgcttggtatgaggccactatgttggcgtacccc

SEQ ID NO: 471410 - DNA, 55 bp, Artificial
  Synthetic oligonucleotide
tggcatggttgacaacaagaggaggaacaaaggggtctccaacatggcgtacaac

SEQ ID NO: 471411 - DNA, 60 bp, Artificial
  Synthetic oligonucleotide
tggcatggttttcacagccactatttggctgttgacagtgctttattatacttgactact

SEQ ID NO: 471412 - DNA, 60 bp, Artificial
  Synthetic oligonucleotide
tggcatgtattacgatgaacatgcaacacgttcagactctaacaacagaaaagttgcaat

SEQ ID NO: 471413 - DNA, 55 bp, Artificial
  Synthetic oligonucleotide
tggcatgtcctggatcacccagggtctaatgggagctctgcttctatggatgggg

SEQ ID NO: 471414 - DNA, 60 bp, Artificial
  Synthetic oligonucleotide
tggcatgtttacagtctcatgtcctgtttctgtgtgatttattgtgactcattgcatgtc

SEQ ID NO: 471415 - DNA, 55 bp, Artificial
  Synthetic oligonucleotide
tggcattaccactttcgttactggctgcttgcctttgtaccgggagtggtaacac

SEQ ID NO: 471416 - DNA, 60 bp, Artificial
  Synthetic oligonucleotide
tggcattacccttgtactctcaactacaccatattcaaggtcaggatgtatgtgggagga

SEQ ID NO: 471417 - DNA, 60 bp, Artificial
  Synthetic oligonucleotide
tggcattagccgtggccgacaactcgaaagatgttgtcgctgctatgtaccccgaggcgt

SEQ ID NO: 471418 - DNA, 54 bp, Artificial
  Synthetic oligonucleotide
tggcattagtgacgatatcatatacaaattagtggcatctgacgctcctactat

SEQ ID NO: 471419 - DNA, 60 bp, Artificial
  Synthetic oligonucleotide
tggcattattcaactcataatgtttcttgcgttagcaggtagatcttgtgatggtgagtt

SEQ ID NO: 471420 - DNA, 60 bp, Artificial
  Synthetic oligonucleotide
tggcattccaacctgaatgatgccacatatcagagaacaagggcacttgtgcgtactggg

SEQ ID NO: 471421 - DNA, 57 bp, Artificial
  Synthetic oligonucleotide
tggcattccgtagtctactgagtgtctatcaccaagcgtgcaaagtgctaaaagttt

SEQ ID NO: 471422 - DNA, 60 bp, Artificial
  Synthetic oligonucleotide
tggcattccttggcacctcagtgttagaatcgggagaatgtgtggtgaatggcactgatt

SEQ ID NO: 471423 - DNA, 60 bp, Artificial
  Synthetic oligonucleotide
tggcattcgcctaggttcgacaggtggtgcggtcttggatgtgttcaatcactactcccc

SEQ ID NO: 471424 - DNA, 60 bp, Artificial
  Synthetic oligonucleotide
tggcattgctattccgactctggcacagcgtgggtcgtacatcagcggtcgtcagggtat

SEQ ID NO: 471425 - DNA, 60 bp, Artificial
  Synthetic oligonucleotide
tggcattggaagaagaagcttgggctgcggcgaatgattttgaagatttgatgctgactg

SEQ ID NO: 471426 - DNA, 60 bp, Artificial
  Synthetic oligonucleotide
tggcattggagcagtagcagcaacccacaatgccgtgcgatatggagcagtaaacgcata

SEQ ID NO: 471427 - DNA, 55 bp, Artificial
  Synthetic oligonucleotide
tggcatttcgagggtgggtatcatctttaaggctaccggccagctgtctggcacg

SEQ ID NO: 471428 - DNA, 60 bp, Artificial
  Synthetic oligonucleotide
tggcatttctgtaataagaagggtgtacaccagttgagctctctcaaacttgctgattca

SEQ ID NO: 471429 - DNA, 56 bp, Artificial
  Synthetic oligonucleotide
tggcatttttgtaataagagctggtactccagttgagttactccaattcccccctc

SEQ ID NO: 471430 - DNA, 60 bp, Artificial
  Synthetic oligonucleotide
tggcatttttgtaataataggtgtgtaccccgattgagctctctcaaacttgctgattca

SEQ ID NO: 471431 - DNA, 52 bp, Artificial
  Synthetic oligonucleotide
tggccaaaacagatggctatttccactctccagggtattggccaaactacca

SEQ ID NO: 471432 - DNA, 57 bp, Artificial
  Synthetic oligonucleotide
tggccaaagtggctcgacatgtatctagaactccaccgttcagaattgagtgagtat

SEQ ID NO: 471433 - DNA, 54 bp, Artificial
  Synthetic oligonucleotide
tggccaaatagggcaggccagacagctatttgtaactacgaaatacgcttttgc

SEQ ID NO: 471434 - DNA, 59 bp, Artificial
  Synthetic oligonucleotide
tggccaaattgaggcgtagacaatacaagaacaatacgatcacctgagttaagattacg

SEQ ID NO: 471435 - DNA, 55 bp, Artificial
  Synthetic oligonucleotide
tggccaacatgctattcaccttcttgcgctacaacattagagatagtgcgcacat

SEQ ID NO: 471436 - DNA, 60 bp, Artificial
  Synthetic oligonucleotide
tggccaaccctcagatgctgcatataagcagctgcttttcgcctgtactgggtctctcta

SEQ ID NO: 471437 - DNA, 60 bp, Artificial
  Synthetic oligonucleotide
tggccaactcatgtctctggacatcaatactgaacagatgtgcctcgaggatgccatgta

SEQ ID NO: 471438 - DNA, 55 bp, Artificial
  Synthetic oligonucleotide
tggccaagaataggcgctttaagcgacagagcaacagacttatgtactaccttac

SEQ ID NO: 471439 - DNA, 53 bp, Artificial
  Synthetic oligonucleotide
tggccaagagagtgcgaagagactccaaggcgaactgtggttcaaggatgcat

SEQ ID NO: 471440 - DNA, 55 bp, Artificial
  Synthetic oligonucleotide
tggccaagatggcgttctccggtctgtctgacggcgcgaaggcgtgggacaagtc

SEQ ID NO: 471441 - DNA, 60 bp, Artificial
  Synthetic oligonucleotide
tggccaaggccagttcgtcatgccgacgctcccgcccgtcaagtccctgatgcctgacct

SEQ ID NO: 471442 - DNA, 60 bp, Artificial
  Synthetic oligonucleotide
tggccaagtcgaccatgaatgtcgtcccacgtattgccgatgtgcccaagtatgtcggta

SEQ ID NO: 471443 - DNA, 60 bp, Artificial
  Synthetic oligonucleotide
tggccaatactcatgcatacatacgtctcagtgctcttttgagccaggtcgagacatggc

SEQ ID NO: 471444 - DNA, 59 bp, Artificial
  Synthetic oligonucleotide
tggccaattgttttcaaggagttgtacggggacagattcaattcatgtttagttcagca

SEQ ID NO: 471445 - DNA, 55 bp, Artificial
  Synthetic oligonucleotide
tggccacaacgtacaccggtacaacggcctacagcgctggtgtgcgtaggggaga

SEQ ID NO: 471446 - DNA, 58 bp, Artificial
  Synthetic oligonucleotide
tggccacaggattaaggaatgtcccgtctattcaatctagaggcctgtttggggccat

SEQ ID NO: 471447 - DNA, 53 bp, Artificial
  Synthetic oligonucleotide
tggccacatgaaatcattcagtactattatggactataccccgccgccactat

SEQ ID NO: 471448 - DNA, 60 bp, Artificial
  Synthetic oligonucleotide
tggccacattagctatgcgcgctcgctcactcactcggccctggagaccaaaggtctcca

SEQ ID NO: 471449 - DNA, 58 bp, Artificial
  Synthetic oligonucleotide
tggccacgcctgtcttttaaacaggcaattgtttccaaagtctcgtgatgcttctttg

SEQ ID NO: 471450 - DNA, 55 bp, Artificial
  Synthetic oligonucleotide
tggccactataggaatagtcctactctcccagagcgcactacccaatgacgtcct

SEQ ID NO: 471451 - DNA, 60 bp, Artificial
  Synthetic oligonucleotide
tggccactgatgtgcctgaactcgagcgaacaaccccagtcatgcagaaaaaagttggac

SEQ ID NO: 471452 - DNA, 55 bp, Artificial
  Synthetic oligonucleotide
tggccactgtcgttagtggacagaaacaggatagacagggaggagaacgaaggag

SEQ ID NO: 471453 - DNA, 56 bp, Artificial
  Synthetic oligonucleotide
tggccagaatcgtgaagaggaggactattccctcatttgtaatttgatttctagtg

SEQ ID NO: 471454 - DNA, 60 bp, Artificial
  Synthetic oligonucleotide
tggccagacagcagattggtatactatcggagtctatgtaatagggttcacaattcctat

SEQ ID NO: 471455 - DNA, 55 bp, Artificial
  Synthetic oligonucleotide
tggccagataagattgaggagttccttattaaaccatgtcccttcttgaaaaaac

SEQ ID NO: 471456 - DNA, 55 bp, Artificial
  Synthetic oligonucleotide
tggccaggaagtgatgcgcgtgcgggctgggctgccatctggttttgccttgaca

SEQ ID NO: 471457 - DNA, 55 bp, Artificial
  Synthetic oligonucleotide
tggccagggtctatatcggttcaatacagatgaggaagtgacatgtttgggacta

SEQ ID NO: 471458 - DNA, 55 bp, Artificial
  Synthetic oligonucleotide
tggccagtgatttcaatctaccacctgtagtggccaaagaaatagtagccagttg

SEQ ID NO: 471459 - DNA, 58 bp, Artificial
  Synthetic oligonucleotide
tggccagtgggtgatagtgagttatcaatattttacacaagttacggcacaactaacg

SEQ ID NO: 471460 - DNA, 60 bp, Artificial
  Synthetic oligonucleotide
tggccagttccacaggatcatttggtgtcccttcaatgtcaatccatgttgttgccttac

SEQ ID NO: 471461 - DNA, 54 bp, Artificial
  Synthetic oligonucleotide
tggccagtttccaaaacaggctcgctcgctcactcgggccccggccccaagggg

SEQ ID NO: 471462 - DNA, 55 bp, Artificial
  Synthetic oligonucleotide
tggccataatggatgaggcacattggacagacccacacagcatagctgcccgagg

SEQ ID NO: 471463 - DNA, 55 bp, Artificial
  Synthetic oligonucleotide
tggccatactttatggttgaggtatactaagatcagccgtgggcaggtgaactat

SEQ ID NO: 471464 - DNA, 60 bp, Artificial
  Synthetic oligonucleotide
tggccatagtggttcttcatttaaatgctgtcatgggaaagaatgttcatcaactggcct

SEQ ID NO: 471465 - DNA, 60 bp, Artificial
  Synthetic oligonucleotide
tggccatattgggagacaccgcatgggactttggttctataggaggagtgttcacgtctg

SEQ ID NO: 471466 - DNA, 59 bp, Artificial
  Synthetic oligonucleotide
tggccatcaagtctctcactgagaggctctacgtcgggggccccctcaccaattcaagg

SEQ ID NO: 471467 - DNA, 59 bp, Artificial
  Synthetic oligonucleotide
tggccatcacaactcataacaggctcccgtcactttagcgtcacacggaatccctcggg

SEQ ID NO: 471468 - DNA, 60 bp, Artificial
  Synthetic oligonucleotide
tggccatcctttgcttaacaaactagatgacactgaaaatgggcccaaagttgctgcagg

SEQ ID NO: 471469 - DNA, 55 bp, Artificial
  Synthetic oligonucleotide
tggccatgactgaccagttaactgtctggtgccccgggcgcacaagctcggtgta

SEQ ID NO: 471470 - DNA, 59 bp, Artificial
  Synthetic oligonucleotide
tggccatgagcacacaacccaccgactggggttccattgggttaatcctagattcagga

SEQ ID NO: 471471 - DNA, 51 bp, Artificial
  Synthetic oligonucleotide
tggccatgatgaaaagaaacgctagtaccgtgaaaactgagtacggcgagt

SEQ ID NO: 471472 - DNA, 60 bp, Artificial
  Synthetic oligonucleotide
tggccatgtttagcttctgttatgacactagacagtttgagaagatgctgtttgctggtg

SEQ ID NO: 471473 - DNA, 56 bp, Artificial
  Synthetic oligonucleotide
tggccattaagtctctcaccgagaggctttacgttgggggccctcttaccaattca

SEQ ID NO: 471474 - DNA, 60 bp, Artificial
  Synthetic oligonucleotide
tggccattccaatgactatcgcggggctcatgtttgctgctttcgtgatttctgggaaat

SEQ ID NO: 471475 - DNA, 59 bp, Artificial
  Synthetic oligonucleotide
tggccattggagtgattcggacctcggtccgcttgacctcagtattccgtcgtgctagg

SEQ ID NO: 471476 - DNA, 57 bp, Artificial
  Synthetic oligonucleotide
tggccattgtggtgtccggactagaggccgaattaacacaaagagcccacaaggtct

SEQ ID NO: 471477 - DNA, 59 bp, Artificial
  Synthetic oligonucleotide
tggcccaaaatatgaggaagacgttcacctaggttcaggaacaagagcggtgctgacga

SEQ ID NO: 471478 - DNA, 57 bp, Artificial
  Synthetic oligonucleotide
tggcccaaagttgaacagggcctcagaatgggttaacaggcccatgtataggaagcc

SEQ ID NO: 471479 - DNA, 55 bp, Artificial
  Synthetic oligonucleotide
tggcccaagagcatttcctactttcccgtacaggcaggggttaaagctaagtatc

SEQ ID NO: 471480 - DNA, 59 bp, Artificial
  Synthetic oligonucleotide
tggcccacattgttttgcctgtcctactatcaccctcaattacaatacttatgggtctc

SEQ ID NO: 471481 - DNA, 55 bp, Artificial
  Synthetic oligonucleotide
tggcccagtatattgtttcactcccagtcccgtggtggtgggaacgaccgacagg

SEQ ID NO: 471482 - DNA, 59 bp, Artificial
  Synthetic oligonucleotide
tggcccatcgttcttcaggaacatggtctggcttacaaagaaaggatccaactatccag

SEQ ID NO: 471483 - DNA, 55 bp, Artificial
  Synthetic oligonucleotide
tggcccatgccactatagttttagacaatgtgatggctgatgtagttatacaaca

SEQ ID NO: 471484 - DNA, 56 bp, Artificial
  Synthetic oligonucleotide
tggcccatttattacagcatgcaaacttagagtccgctaaacgggttcttaatgtt

SEQ ID NO: 471485 - DNA, 58 bp, Artificial
  Synthetic oligonucleotide
tggcccattttgagtgtttcagccccccgcgcctagccacgcatcttcgggccgtgac

SEQ ID NO: 471486 - DNA, 60 bp, Artificial
  Synthetic oligonucleotide
tggccccagccatgaataacatccaaggcatgggtaaatgactgtacaccagggaataat

SEQ ID NO: 471487 - DNA, 56 bp, Artificial
  Synthetic oligonucleotide
tggcccccattttgcccaccacctatcccgatggtaggctagtaccccaagtcaga

SEQ ID NO: 471488 - DNA, 56 bp, Artificial
  Synthetic oligonucleotide
tggcccccgaagccaaacaggctataaggtccctcacagagcggctttatatcggg

SEQ ID NO: 471489 - DNA, 57 bp, Artificial
  Synthetic oligonucleotide
tggccccgcctgcgctagcgccactgcaaccatcaagttcagcagaacgttgattgt

SEQ ID NO: 471490 - DNA, 53 bp, Artificial
  Synthetic oligonucleotide
tggcccctatatgggaatgaggggctcggctgggcaggatggctcctgtcccc

SEQ ID NO: 471491 - DNA, 56 bp, Artificial
  Synthetic oligonucleotide
tggcccctggaaggctcaaatcacgttccgaggaggccaatttgagctcgtggacg

SEQ ID NO: 471492 - DNA, 59 bp, Artificial
  Synthetic oligonucleotide
tggcccctgtgagtcttgacaacttgcaggttcagcggtactgttaaatgtctttcttc

SEQ ID NO: 471493 - DNA, 60 bp, Artificial
  Synthetic oligonucleotide
tggccccttcctcataccctatgggctccagatcttctaccaggatcccagtacctctca

SEQ ID NO: 471494 - DNA, 60 bp, Artificial
  Synthetic oligonucleotide
tggcccgagaaggagcatatgatacacgcgaatctgcacttccacaaaatagctgggaag

SEQ ID NO: 471495 - DNA, 56 bp, Artificial
  Synthetic oligonucleotide
tggcccgtatcacagttgataaaggggctctagccacttttaaccattcatgggca

SEQ ID NO: 471496 - DNA, 60 bp, Artificial
  Synthetic oligonucleotide
tggcccgtgctagttccgattatatgagctacagaaggacatcgcaattgactgtttcag

SEQ ID NO: 471497 - DNA, 55 bp, Artificial
  Synthetic oligonucleotide
tggcccgttgtcaggcaacgtggcgtggtgtgcactgtgtttgctgacgcaaccc

SEQ ID NO: 471498 - DNA, 57 bp, Artificial
  Synthetic oligonucleotide
tggccctacagcttcctattaatcctcaagtcatatgggacgtgccgcgtagcgcgg

SEQ ID NO: 471499 - DNA, 55 bp, Artificial
  Synthetic oligonucleotide
tggccctagcagaggccaggtcgacagcctcacaactcgcgacgcaaaccattgc

SEQ ID NO: 471500 - DNA, 55 bp, Artificial
  Synthetic oligonucleotide
tggccctatcttgctcagagtcactaatttccaattcaaaacaagtgcgatgcac

SEQ ID NO: 471501 - DNA, 55 bp, Artificial
  Synthetic oligonucleotide
tggccctgagcgggcggacgagctccgcctcgctgtgagtgattttcttcgcaag

SEQ ID NO: 471502 - DNA, 55 bp, Artificial
  Synthetic oligonucleotide
tggccctggactcccagcttgatattgcagtccggagatctgtccgcctcatcca

SEQ ID NO: 471503 - DNA, 57 bp, Artificial
  Synthetic oligonucleotide
tggcccttagatttgacttttccatttgaaggccatggttctttatcattattgttc

SEQ ID NO: 471504 - DNA, 60 bp, Artificial
  Synthetic oligonucleotide
tggcccttcaagctagtaccagttgatccacttgatgtagaagaagcttattaagggaga

SEQ ID NO: 471505 - DNA, 57 bp, Artificial
  Synthetic oligonucleotide
tggcccttcattgcaacaagttatgagggaccagctaaaaccattcacagaacccag

SEQ ID NO: 471506 - DNA, 60 bp, Artificial
  Synthetic oligonucleotide
tggccgaaaaagcagtcgagtacgaaggattgcatcttgagcccccttcttacagcacag

SEQ ID NO: 471507 - DNA, 57 bp, Artificial
  Synthetic oligonucleotide
tggccgaagatcctttctacataggtagtctcccctaccgcgccaggtacgccgata

SEQ ID NO: 471508 - DNA, 58 bp, Artificial
  Synthetic oligonucleotide
tggccgaatgccaagcttcgaaaacaccttccgaaacctcaacctcaatcagcgcgtg

SEQ ID NO: 471509 - DNA, 60 bp, Artificial
  Synthetic oligonucleotide
tggccgaattcaaagctgcatcgttccttggaatcacagattccctggtcagtctgttcc

SEQ ID NO: 471510 - DNA, 51 bp, Artificial
  Synthetic oligonucleotide
tggccgacggattttatctcatgtttcgagctcgattggcgataatacgtc

SEQ ID NO: 471511 - DNA, 57 bp, Artificial
  Synthetic oligonucleotide
tggccgacgtagaggagtgtccctaacaaatagaaggctagtacaacaagtgcaagt

SEQ ID NO: 471512 - DNA, 60 bp, Artificial
  Synthetic oligonucleotide
tggccgactatcccatgtaatatagtcaccgactccgcctttgcagcgaagcttttgtta

SEQ ID NO: 471513 - DNA, 52 bp, Artificial
  Synthetic oligonucleotide
tggccgactgcgaaggtaccaatgatggggacgatgtggaggagggacgggg

SEQ ID NO: 471514 - DNA, 59 bp, Artificial
  Synthetic oligonucleotide
tggccgagggcaatctaggaccatagagtttcctgagtatgcacgtgaggtccaaaagg

SEQ ID NO: 471515 - DNA, 55 bp, Artificial
  Synthetic oligonucleotide
tggccgatggataacccgagctgccagcatcaccggatcgacaacgagacgtgga

SEQ ID NO: 471516 - DNA, 59 bp, Artificial
  Synthetic oligonucleotide
tggccgatggtagtccacaaccttattgttatacagaggggcttatgcagaacgcttct

SEQ ID NO: 471517 - DNA, 60 bp, Artificial
  Synthetic oligonucleotide
tggccgatgtggagatttgccgatgtcaggatagtcaggaacctttgcttaatgttaccg

SEQ ID NO: 471518 - DNA, 55 bp, Artificial
  Synthetic oligonucleotide
tggccgccacttgcactagctgcattctcgggagagatagttaagatgaagagcc

SEQ ID NO: 471519 - DNA, 57 bp, Artificial
  Synthetic oligonucleotide
tggccgcgcagcggaatggaaggcagataaatcggcgaacaaagaaaaaaagcgaag

SEQ ID NO: 471520 - DNA, 56 bp, Artificial
  Synthetic oligonucleotide
tggccgcgcagcggattggaagtcagataaatcggggaacaaataaaaaaatcgaa

SEQ ID NO: 471521 - DNA, 60 bp, Artificial
  Synthetic oligonucleotide
tggccgctaatgaagcgacgatattcggacgcttcattaatacacttttccagactgctt

SEQ ID NO: 471522 - DNA, 60 bp, Artificial
  Synthetic oligonucleotide
tggccgctccacagaatggacctcggtgtgccgctgttagcaataggatgttattctcaa

SEQ ID NO: 471523 - DNA, 55 bp, Artificial
  Synthetic oligonucleotide
tggccgctgagctgaacaggcttaacattgatgctgtacacacggggccagtggc

SEQ ID NO: 471524 - DNA, 57 bp, Artificial
  Synthetic oligonucleotide
tggccggaaaacgccgtttgcgacacttccggtgatcaatttgcgacacgcgcggcg

SEQ ID NO: 471525 - DNA, 55 bp, Artificial
  Synthetic oligonucleotide
tggccggaccagtatcacagcacaattacaggcctggctactacacacaaaccgc

SEQ ID NO: 471526 - DNA, 59 bp, Artificial
  Synthetic oligonucleotide
tggccgggggccattacgtgcagatggccatcattaaggtgggggcgcttactggcacc

SEQ ID NO: 471527 - DNA, 60 bp, Artificial
  Synthetic oligonucleotide
tggccggtacagcaacgtatctaagaatgctctcatagtttattatatttggctatgtga

SEQ ID NO: 471528 - DNA, 58 bp, Artificial
  Synthetic oligonucleotide
tggccggtttccagggtgcatacacggggatgcccaatcagaagcctaaagtgcctac

SEQ ID NO: 471529 - DNA, 60 bp, Artificial
  Synthetic oligonucleotide
tggccgtaagttccactgagctggtcgaaactgactacagcaagttcgatggcacattct

SEQ ID NO: 471530 - DNA, 55 bp, Artificial
  Synthetic oligonucleotide
tggccgtacactatgtcagctataatggatgcccaaaagaatgtgttggcaggag

SEQ ID NO: 471531 - DNA, 59 bp, Artificial
  Synthetic oligonucleotide
tggccgtatgggatcaagaacttggtcttggcaagtgccggtgaccgtgtggataccaa

SEQ ID NO: 471532 - DNA, 58 bp, Artificial
  Synthetic oligonucleotide
tggccgtgctctactcctaccggagtattctactctacgcagacgctggctcgactct

SEQ ID NO: 471533 - DNA, 54 bp, Artificial
  Synthetic oligonucleotide
tggccgttgttgggggtgtgaccgtctttcctccgttccaagtccctatcactc

SEQ ID NO: 471534 - DNA, 56 bp, Artificial
  Synthetic oligonucleotide
tggcctaaccagagtgccgtactttgtacgcgcacaagggctcattcgtgcatgca

SEQ ID NO: 471535 - DNA, 56 bp, Artificial
  Synthetic oligonucleotide
tggcctaacccttcacagattcgttatggtgcaccgaacgttttcggctcggcaaa

SEQ ID NO: 471536 - DNA, 60 bp, Artificial
  Synthetic oligonucleotide
tggcctaggacaatatctcgaggatgaggccctcctgtatcgtcaaggtgtggctctaca

SEQ ID NO: 471537 - DNA, 51 bp, Artificial
  Synthetic oligonucleotide
tggcctagggttctctaccccagaggagaagttccaaaaagaccctccgtt

SEQ ID NO: 471538 - DNA, 60 bp, Artificial
  Synthetic oligonucleotide
tggcctattgtgttgctctgttatcttgaaatagaggggattttgaatctcccagataaa

SEQ ID NO: 471539 - DNA, 51 bp, Artificial
  Synthetic oligonucleotide
tggcctcaaagatccgacacccgtgcttgtcttgcagccacgtggccacgt

SEQ ID NO: 471540 - DNA, 60 bp, Artificial
  Synthetic oligonucleotide
tggcctcaattcaattgggcctgtgagcccaacacttgccattgaattggaccgtaatac

SEQ ID NO: 471541 - DNA, 53 bp, Artificial
  Synthetic oligonucleotide
tggcctcccaagcatatagtggatttggtaggtgatacctggcatagactccc

SEQ ID NO: 471542 - DNA, 54 bp, Artificial
  Synthetic oligonucleotide
tggcctcccactacgttctcaaagtgcccatgtttcggtctttccggtataagg

SEQ ID NO: 471543 - DNA, 60 bp, Artificial
  Synthetic oligonucleotide
tggcctcccttcaatgtccatccaggttttggcatttgggtccagttgcaacatagaatc

SEQ ID NO: 471544 - DNA, 58 bp, Artificial
  Synthetic oligonucleotide
tggcctcgaatggcatgataccagtgaagaccagtttaaggtccactacaaggggaac

SEQ ID NO: 471545 - DNA, 55 bp, Artificial
  Synthetic oligonucleotide
tggcctcggggcagcaaccgacgagggccgttgactggtctgggacgcggtatta

SEQ ID NO: 471546 - DNA, 60 bp, Artificial
  Synthetic oligonucleotide
tggcctctccttgtgcccagttcagaccctgtcattgccacgctactaaggactccctga

SEQ ID NO: 471547 - DNA, 55 bp, Artificial
  Synthetic oligonucleotide
tggcctcttaccaccatgtgacccagaccttcccttcggaccagccgtgtgggga

SEQ ID NO: 471548 - DNA, 57 bp, Artificial
  Synthetic oligonucleotide
tggcctgcttctggtccatgaagtgcccgacctcgaaaccggttagaaccttcgtgc

SEQ ID NO: 471549 - DNA, 55 bp, Artificial
  Synthetic oligonucleotide
tggcctggataccatatttcgggccagcagccgagggaatttacatagaggggct

SEQ ID NO: 471550 - DNA, 55 bp, Artificial
  Synthetic oligonucleotide
tggcctggttgaagagggtgctaagacggcccctaccggaaagcggatagacgac

SEQ ID NO: 471551 - DNA, 58 bp, Artificial
  Synthetic oligonucleotide
tggcctgtattttaaaacgcctggggggagtcatttatgcgagagcaattggagacac

SEQ ID NO: 471552 - DNA, 55 bp, Artificial
  Synthetic oligonucleotide
tggcctgtcgagggtgatgaatgttgcattcttgagcgtccagcttttgagtgcg

SEQ ID NO: 471553 - DNA, 60 bp, Artificial
  Synthetic oligonucleotide
tggcctgttgtgactcaacctctgtagcctctcgcaagattatctgaggcccatttttac

SEQ ID NO: 471554 - DNA, 55 bp, Artificial
  Synthetic oligonucleotide
tggccttaggaactatggatactcctagtaggtatgctataactattgtttcggg

SEQ ID NO: 471555 - DNA, 59 bp, Artificial
  Synthetic oligonucleotide
tggccttagtagtagtacaacaaaatgacagatcccagagagacagtaccaccaggaaa

SEQ ID NO: 471556 - DNA, 52 bp, Artificial
  Synthetic oligonucleotide
tggccttgcaaccggcgacatcacagcggagctggtagaacttgtgcgcgct

SEQ ID NO: 471557 - DNA, 60 bp, Artificial
  Synthetic oligonucleotide
tggccttgcagtggccagtggatatgattttgagagagaaggatactctctggtggggat

SEQ ID NO: 471558 - DNA, 52 bp, Artificial
  Synthetic oligonucleotide
tggccttgcatatcacccatttactaattgtgggtcattctgtgtatgtggt

SEQ ID NO: 471559 - DNA, 57 bp, Artificial
  Synthetic oligonucleotide
tggccttggcgagaccaaagtgtatggggaccataccttcggcaaaagcttcaatac

SEQ ID NO: 471560 - DNA, 52 bp, Artificial
  Synthetic oligonucleotide
tggccttggcggactcaggtccaaaagcaaatattgtggtagactcacaata

SEQ ID NO: 471561 - DNA, 60 bp, Artificial
  Synthetic oligonucleotide
tggccttggtgcccggaatgtaccctggagtgaaattctcagagaactcatgaccttgat

SEQ ID NO: 471562 - DNA, 60 bp, Artificial
  Synthetic oligonucleotide
tggccttgtcatgctttgtatccatggatctcctgtgaattcctatactaatacacccta

SEQ ID NO: 471563 - DNA, 56 bp, Artificial
  Synthetic oligonucleotide
tggcctttaaggtcatgagcggtgagatgccctctactgaggacctggtcaacttg

SEQ ID NO: 471564 - DNA, 58 bp, Artificial
  Synthetic oligonucleotide
tggccttttcacctatccaccgcttattcattgagcttcctacattgttaggacgcgg

SEQ ID NO: 471565 - DNA, 52 bp, Artificial
  Synthetic oligonucleotide
tggcgaaacacttctcatcttgataagtgtctcggggcggtagttatcgacc

SEQ ID NO: 471566 - DNA, 60 bp, Artificial
  Synthetic oligonucleotide
tggcgaaagctacaggacgctagttgtgaacaaggtgtgaagagtctattgagctatcaa

SEQ ID NO: 471567 - DNA, 60 bp, Artificial
  Synthetic oligonucleotide
tggcgaaatgcgttctctgatgtacgtttgtgtccatcactctgtagtatagcttccatg

SEQ ID NO: 471568 - DNA, 55 bp, Artificial
  Synthetic oligonucleotide
tggcgaacatgttgctatgctactcgacttaaagcgttatatctatggtaccgtg

SEQ ID NO: 471569 - DNA, 50 bp, Artificial
  Synthetic oligonucleotide
tggcgaaccagggacctatgatgacaatactgactacaaccttgcagtca

SEQ ID NO: 471570 - DNA, 52 bp, Artificial
  Synthetic oligonucleotide
tggcgaacttagcgtccgtcatcacacgctgagcggtgttaggagcaccata

SEQ ID NO: 471571 - DNA, 54 bp, Artificial
  Synthetic oligonucleotide
tggcgaagaaacgtaagaccaagccaaagagagtccgcgttgcgaaaacttccc

SEQ ID NO: 471572 - DNA, 60 bp, Artificial
  Synthetic oligonucleotide
tggcgaagaactaggaggcgtatccgcatgagcctgacaatggggccgaacactggctta

SEQ ID NO: 471573 - DNA, 55 bp, Artificial
  Synthetic oligonucleotide
tggcgaagggttttaaccgagtctcatgccctgtggtgcaactgcggggactgga

SEQ ID NO: 471574 - DNA, 54 bp, Artificial
  Synthetic oligonucleotide
tggcgaagtgtatacattcagcgcctatgttgcatctagtcttgcaagtgattc

SEQ ID NO: 471575 - DNA, 58 bp, Artificial
  Synthetic oligonucleotide
tggcgaatatagcgtattaactattcaaaacggtcctgctgcaaacttccgactcact

SEQ ID NO: 471576 - DNA, 60 bp, Artificial
  Synthetic oligonucleotide
tggcgaatgtgcgaggcccgtgaaccatcggttgatttgcgactaccattatgtgcgggt

SEQ ID NO: 471577 - DNA, 52 bp, Artificial
  Synthetic oligonucleotide
tggcgaattatgtacccgtagatacactcgtcgaggcagatgtgacattaat

SEQ ID NO: 471578 - DNA, 56 bp, Artificial
  Synthetic oligonucleotide
tggcgaattggctactggagattacggtacatccgaaaaagcttgtgatgtggtgt

SEQ ID NO: 471579 - DNA, 55 bp, Artificial
  Synthetic oligonucleotide
tggcgacacagaagcgagtccaagaggtaaaggggtacacgaaaggtggtccagg

SEQ ID NO: 471580 - DNA, 60 bp, Artificial
  Synthetic oligonucleotide
tggcgacaggagcctctgcggccaaaagccccgtggataagatccactgctgtgagcggt

SEQ ID NO: 471581 - DNA, 55 bp, Artificial
  Synthetic oligonucleotide
tggcgacccaggaatggcacgctctgaggcttgtggttacactcgcagtgcacgg

SEQ ID NO: 471582 - DNA, 60 bp, Artificial
  Synthetic oligonucleotide
tggcgacctgcgtcaacggcgtgtgttggactgtctatcatggcgccggctcaaagaccc

SEQ ID NO: 471583 - DNA, 59 bp, Artificial
  Synthetic oligonucleotide
tggcgacgaaagtatgcgacatgcttacgaacaaaacctggacctatattcagttatcg

SEQ ID NO: 471584 - DNA, 60 bp, Artificial
  Synthetic oligonucleotide
tggcgacgcaacgaaagactcagggaatgtattggtctttgttgcatcatataaggatgt

SEQ ID NO: 471585 - DNA, 59 bp, Artificial
  Synthetic oligonucleotide
tggcgacgcagacttaaatgactcggagtctagtggggtgggggctagttcagatgtaa

SEQ ID NO: 471586 - DNA, 60 bp, Artificial
  Synthetic oligonucleotide
tggcgacgttgagctcgggcttcatgacgccacctctcgcttcacgatccgccatacccc

SEQ ID NO: 471587 - DNA, 60 bp, Artificial
  Synthetic oligonucleotide
tggcgactcatcagacctggcgaggatggagatacccctatcacaagaaggcgataactg

SEQ ID NO: 471588 - DNA, 60 bp, Artificial
  Synthetic oligonucleotide
tggcgactgcatccgagtgtgggggcgcgttggtaacgcctcgcactccaaccaagatga

SEQ ID NO: 471589 - DNA, 52 bp, Artificial
  Synthetic oligonucleotide
tggcgagaaatgtcgattacggaaccaattgggcagatagaattgctaagaa

SEQ ID NO: 471590 - DNA, 55 bp, Artificial
  Synthetic oligonucleotide
tggcgagacagccggtcgaggttgaccatgcaggcgtggtaggtgcgcgccaggg

SEQ ID NO: 471591 - DNA, 59 bp, Artificial
  Synthetic oligonucleotide
tggcgagactagtgtccccaagtgctggcttgtcaccaatggttcttacttaaatgaaa

SEQ ID NO: 471592 - DNA, 55 bp, Artificial
  Synthetic oligonucleotide
tggcgagatctattaaatgatcgacacaattacttttctcgggaattttgcagag

SEQ ID NO: 471593 - DNA, 60 bp, Artificial
  Synthetic oligonucleotide
tggcgagatcttgtccgcgactggcgtaaagacatgacagtcaatgacttcctcatgcta

SEQ ID NO: 471594 - DNA, 51 bp, Artificial
  Synthetic oligonucleotide
tggcgagcaagacagagacacatccaggcgattagtaggcggattcttgac

SEQ ID NO: 471595 - DNA, 60 bp, Artificial
  Synthetic oligonucleotide
tggcgagcaagacagagacagatccgtgagattagtgaacggattcttaccagttgtctg

SEQ ID NO: 471596 - DNA, 60 bp, Artificial
  Synthetic oligonucleotide
tggcgagcaaggcagagacaggtccgtgcgcttagtgagcggattcttcgcacttatctg

SEQ ID NO: 471597 - DNA, 60 bp, Artificial
  Synthetic oligonucleotide
tggcgagccgaagagtgttcataaccttcgtgagtcatttcgccgaggcaagccgagcga

SEQ ID NO: 471598 - DNA, 58 bp, Artificial
  Synthetic oligonucleotide
tggcgaggtacatgctcaaggatataacccggaacggatacctcattaaaggctgcgg

SEQ ID NO: 471599 - DNA, 53 bp, Artificial
  Synthetic oligonucleotide
tggcgagtcatggtactacttcaatcgcgatggttcaatggtaaccggttgga

SEQ ID NO: 471600 - DNA, 60 bp, Artificial
  Synthetic oligonucleotide
tggcgagtcttctctcccagggagagtacctcacgcgtcgggacgatattaagtacagca

SEQ ID NO: 471601 - DNA, 54 bp, Artificial
  Synthetic oligonucleotide
tggcgagtgcataatgcattcgccttttttatttacattaaaaaacaattgtgg

SEQ ID NO: 471602 - DNA, 53 bp, Artificial
  Synthetic oligonucleotide
tggcgagttctggccccccgtcgggtgttgttgacacgtacaagtaaatggtc

SEQ ID NO: 471603 - DNA, 60 bp, Artificial
  Synthetic oligonucleotide
tggcgagttctgtgcatgctgctcaagtgcaaggcaccactttgagagctaccatgatgg

SEQ ID NO: 471604 - DNA, 51 bp, Artificial
  Synthetic oligonucleotide
tggcgagtttaattatgttgagttgaataatgtttgtgtatataacgaccg

SEQ ID NO: 471605 - DNA, 58 bp, Artificial
  Synthetic oligonucleotide
tggcgataagtaactgccacaaatttgtgatacatttaggactgtggaagttcgccct

SEQ ID NO: 471606 - DNA, 55 bp, Artificial
  Synthetic oligonucleotide
tggcgatagggctcaggaatgttccacaaattcaaaaccggggactctttggagc

SEQ ID NO: 471607 - DNA, 55 bp, Artificial
  Synthetic oligonucleotide
tggcgataggttcgggggcgtgtccttccgattgggttgttcaggcgacggaatg

SEQ ID NO: 471608 - DNA, 60 bp, Artificial
  Synthetic oligonucleotide
tggcgatatgatctgactaagccaatggatacgacttttgatgacggctatatgtgtgtg

SEQ ID NO: 471609 - DNA, 60 bp, Artificial
  Synthetic oligonucleotide
tggcgatgaaaatccacgaggcccggtgagccgtgaacatgtggagtggtgcagggagtt

SEQ ID NO: 471610 - DNA, 50 bp, Artificial
  Synthetic oligonucleotide
tggcgatttaacggtagtacatttcaccttgcgacacataaggcatgaac

SEQ ID NO: 471611 - DNA, 60 bp, Artificial
  Synthetic oligonucleotide
tggcgatttcaaatgcatttggcacgcaaatgcatacgagaagattggttaggtcaaaaa

SEQ ID NO: 471612 - DNA, 50 bp, Artificial
  Synthetic oligonucleotide
tggcgatttgataacgatatctaccttaagtttaaacacgacgaaaaaca

SEQ ID NO: 471613 - DNA, 60 bp, Artificial
  Synthetic oligonucleotide
tggcgcaaacgcatccgatttggacaatggtcacatggatgtttacacgcccgtttcgga

SEQ ID NO: 471614 - DNA, 58 bp, Artificial
  Synthetic oligonucleotide
tggcgcaatatcccatatcaccggcgggtgcgcagtgtttaccttttcaaaggttaga

SEQ ID NO: 471615 - DNA, 55 bp, Artificial
  Synthetic oligonucleotide
tggcgcacgctggtatggtgtacttttgtgctgatatactcggtgctaagaaggt

SEQ ID NO: 471616 - DNA, 60 bp, Artificial
  Synthetic oligonucleotide
tggcgcactaactcgggacatctggcccacaactaaagttgtcggccacatgcttatctc

SEQ ID NO: 471617 - DNA, 60 bp, Artificial
  Synthetic oligonucleotide
tggcgcagtatgtacctgacgcctacaaagtagaccctacaaacattgcaatgcctgaaa

SEQ ID NO: 471618 - DNA, 60 bp, Artificial
  Synthetic oligonucleotide
tggcgcatgcgcacaagaactgctgactctgcgggactttccaagggactttccggggag

SEQ ID NO: 471619 - DNA, 60 bp, Artificial
  Synthetic oligonucleotide
tggcgcattagtccaaacgttgcgaatcactagtgctggggtgcgaggacctgaagttgg

SEQ ID NO: 471620 - DNA, 53 bp, Artificial
  Synthetic oligonucleotide
tggcgcccagggggtttcccgctccttggactggtctaaagttaccctcgatg

SEQ ID NO: 471621 - DNA, 59 bp, Artificial
  Synthetic oligonucleotide
tggcgcccatctcaatccatttgccggtggccaagtcaccagccatcaaggtatcactt

SEQ ID NO: 471622 - DNA, 59 bp, Artificial
  Synthetic oligonucleotide
tggcgcccgaacagggacttgagagtggctgagagacctccgaggctaaggttcggcgc

SEQ ID NO: 471623 - DNA, 60 bp, Artificial
  Synthetic oligonucleotide
tggcgcctccaaggtgcaagatgggctccagatcttctaccaggatcccagtacctctga

SEQ ID NO: 471624 - DNA, 60 bp, Artificial
  Synthetic oligonucleotide
tggcgcgaacaagtttgtcaatattgtcggaatgccttcgaaagctagggcagctttgac

SEQ ID NO: 471625 - DNA, 55 bp, Artificial
  Synthetic oligonucleotide
tggcgcgactacttgactgcgcgtgccacctccgattacccacctcttaagcgtc

SEQ ID NO: 471626 - DNA, 60 bp, Artificial
  Synthetic oligonucleotide
tggcgcgagctaaagcgcaattgtcaccgggtattgcaccaatggtggcgacagggtaca

SEQ ID NO: 471627 - DNA, 60 bp, Artificial
  Synthetic oligonucleotide
tggcgcgatccatctagtggtggtgccataccgtttgacttcactcagtttgataagact

SEQ ID NO: 471628 - DNA, 55 bp, Artificial
  Synthetic oligonucleotide
tggcgcgatgcgcaagatcgcgcaggcgctggtgctggtcaccgaggacaacttc

SEQ ID NO: 471629 - DNA, 60 bp, Artificial
  Synthetic oligonucleotide
tggcgcgctctggtctcccctcgggcatgcctttcactagtgtcatcaattcaatcaacc

SEQ ID NO: 471630 - DNA, 60 bp, Artificial
  Synthetic oligonucleotide
tggcgcgcttgaggaaattcagaccccctacgcacgcgccaacctccacgacgctgatta

SEQ ID NO: 471631 - DNA, 60 bp, Artificial
  Synthetic oligonucleotide
tggcgcggaatgggcgctaagtcatccagcggcctgcccataccacgcgaccaatgatgt

SEQ ID NO: 471632 - DNA, 58 bp, Artificial
  Synthetic oligonucleotide
tggcgcgtaatcttaactcaggcgactcggttgctctcgttcttcgtcccacgtacac

SEQ ID NO: 471633 - DNA, 60 bp, Artificial
  Synthetic oligonucleotide
tggcgcgttgtgaacacccgcgaccgctgagatgtggtcgcgtttaaggcacgtgcgctc

SEQ ID NO: 471634 - DNA, 60 bp, Artificial
  Synthetic oligonucleotide
tggcgctaccgttgctcgtcgtgacatttctactgtcgcagacggggatattccactgga

SEQ ID NO: 471635 - DNA, 60 bp, Artificial
  Synthetic oligonucleotide
tggcgctaggatccacagtcatggtaatttggcaatagttccatctctggaggaacggtt

SEQ ID NO: 471636 - DNA, 59 bp, Artificial
  Synthetic oligonucleotide
tggcgctattccacacgtgaaaattgagcaaagtgtttttaacgccacagaggacagtg

SEQ ID NO: 471637 - DNA, 51 bp, Artificial
  Synthetic oligonucleotide
tggcgctccccgcgagtccatgacaaattcctcgtggattcgatcgagagg

SEQ ID NO: 471638 - DNA, 60 bp, Artificial
  Synthetic oligonucleotide
tggcgctcccgagattagaggtatggctagattcatgcaccggtttgataatgagtattt

SEQ ID NO: 471639 - DNA, 59 bp, Artificial
  Synthetic oligonucleotide
tggcgctctctccgccctcgatttatctttcctttcgttgattggcgtctctttattga

SEQ ID NO: 471640 - DNA, 60 bp, Artificial
  Synthetic oligonucleotide
tggcgctgcaaaaagaattcctcatccgccgactacttgagatcggcatagacgaataca

SEQ ID NO: 471641 - DNA, 58 bp, Artificial
  Synthetic oligonucleotide
tggcgctgtgtggtcgatacgcccttgtggggacacaggtttacaaagtgaactgcgg

SEQ ID NO: 471642 - DNA, 60 bp, Artificial
  Synthetic oligonucleotide
tggcgcttaggtccaagtggccgcacaaataattgtgccgaccgagcgacctcgcccaca

SEQ ID NO: 471643 - DNA, 59 bp, Artificial
  Synthetic oligonucleotide
tggcggaacatgtgtggccatagggtatggacttgctgatcgagcaaccgagaatatca

SEQ ID NO: 471644 - DNA, 56 bp, Artificial
  Synthetic oligonucleotide
tggcggaattcatctggcagcggcttgccaatggcatcgataacaatgcggtaata

SEQ ID NO: 471645 - DNA, 58 bp, Artificial
  Synthetic oligonucleotide
tggcggacccctaccacgtgttgataccaaccggtgtgaagactgataagatgcggag

SEQ ID NO: 471646 - DNA, 55 bp, Artificial
  Synthetic oligonucleotide
tggcggacccgtactctgctctaggggacatgtcgtgggcttgttcagagctgcc

SEQ ID NO: 471647 - DNA, 55 bp, Artificial
  Synthetic oligonucleotide
tggcggacgaaaacaaggaccttgacaagcctctcggtgaggcgggttaccgagc

SEQ ID NO: 471648 - DNA, 59 bp, Artificial
  Synthetic oligonucleotide
tggcggatccaatgcttatcgatgctatcgataacttgaatccggcgtactgaactgca

SEQ ID NO: 471649 - DNA, 60 bp, Artificial
  Synthetic oligonucleotide
tggcggcatttatggagatggggcacgatgctccttggaatgttgatgatctgtagggct

SEQ ID NO: 471650 - DNA, 60 bp, Artificial
  Synthetic oligonucleotide
tggcggccccttacccaaggatcgggctacagcaatgctgggcacacatgttatctggga

SEQ ID NO: 471651 - DNA, 56 bp, Artificial
  Synthetic oligonucleotide
tggcggcctggcgtcacttttatcggcagttagaacgtagggcgttaaggactcga

SEQ ID NO: 471652 - DNA, 60 bp, Artificial
  Synthetic oligonucleotide
tggcgggacaagcagcgtgtatatcgaggtattgcatttgactcaagggacctgttggga

SEQ ID NO: 471653 - DNA, 55 bp, Artificial
  Synthetic oligonucleotide
tggcgggacacacgttttaggatcaactgcagtgtggaggagctgctgacacgtg

SEQ ID NO: 471654 - DNA, 53 bp, Artificial
  Synthetic oligonucleotide
tggcgggaggagtagtttacgtaggggtcataggttagggctgtggacttagg

SEQ ID NO: 471655 - DNA, 55 bp, Artificial
  Synthetic oligonucleotide
tggcggggaagctttcatcagaagatctgtggtatgccatcccggtgctaaccag

SEQ ID NO: 471656 - DNA, 56 bp, Artificial
  Synthetic oligonucleotide
tggcggggaccactaaagttagtcgcaacgccaatttctcgccacgtggaggtatg

SEQ ID NO: 471657 - DNA, 56 bp, Artificial
  Synthetic oligonucleotide
tggcggggacctcaaaggtctcacgctctgctaacttttcccctcgtggaggtatg

SEQ ID NO: 471658 - DNA, 50 bp, Artificial
  Synthetic oligonucleotide
tggcgggggtttctctcgtcttttatgctttcctgactgtgatacagccc

SEQ ID NO: 471659 - DNA, 54 bp, Artificial
  Synthetic oligonucleotide
tggcgggtgcctgtgactgtgagactaatgcgtgtaaatgattggctgctgctg

SEQ ID NO: 471660 - DNA, 51 bp, Artificial
  Synthetic oligonucleotide
tggcgggttaccatttgtacggcactaagcggacgagcgagatacccgggc

SEQ ID NO: 471661 - DNA, 52 bp, Artificial
  Synthetic oligonucleotide
tggcggtcatacgtggtcctgattgcgggggcatgcccactggcactcgtta

SEQ ID NO: 471662 - DNA, 60 bp, Artificial
  Synthetic oligonucleotide
tggcggtccagcagtctcccggtttgtaacacttaaagctcagcaatggtcagcctcaca

SEQ ID NO: 471663 - DNA, 53 bp, Artificial
  Synthetic oligonucleotide
tggcggtgccacaaacaccgctttggaaggtacgaaggttaagtttcaaacca

SEQ ID NO: 471664 - DNA, 60 bp, Artificial
  Synthetic oligonucleotide
tggcggtggagtttatttgtctgctactcatgacgtaactccacactattcttctggtgg

SEQ ID NO: 471665 - DNA, 56 bp, Artificial
  Synthetic oligonucleotide
tggcggttatagcccactgttatgagttccgtgacctaaaagttgcggcgttcaag

SEQ ID NO: 471666 - DNA, 60 bp, Artificial
  Synthetic oligonucleotide
tggcggtttggcttcctgcacagaataagttttacctgccacctcagccaagcacgcgtg

SEQ ID NO: 471667 - DNA, 58 bp, Artificial
  Synthetic oligonucleotide
tggcggtttttgcagggattagaacgattatgggggagcgtgaataatgcaatttcta

SEQ ID NO: 471668 - DNA, 60 bp, Artificial
  Synthetic oligonucleotide
tggcgtaatgcgtgtacgcaatgacgatggttctacagaagtaatcccgtccatgacata

SEQ ID NO: 471669 - DNA, 55 bp, Artificial
  Synthetic oligonucleotide
tggcgtacgacgggtgcacgcaaaccacccacggtgactgtgggctaccgttgta

SEQ ID NO: 471670 - DNA, 57 bp, Artificial
  Synthetic oligonucleotide
tggcgtagtgctcaacttcgcactttaaatgctgagttggataagttggtcgccagg

SEQ ID NO: 471671 - DNA, 55 bp, Artificial
  Synthetic oligonucleotide
tggcgtatgtcaaacccttccttggacagacagcggttataacttcaaactgcat

SEQ ID NO: 471672 - DNA, 59 bp, Artificial
  Synthetic oligonucleotide
tggcgtatttatacggcgtacaaattatatggcattaggatagttgatacaaaactaca

SEQ ID NO: 471673 - DNA, 60 bp, Artificial
  Synthetic oligonucleotide
tggcgtcaagcaaacaacggagaagacgcaactgctggtctcactcatctgatgatctgg

SEQ ID NO: 471674 - DNA, 60 bp, Artificial
  Synthetic oligonucleotide
tggcgtcaagccaataacggagaggatgctactgctggtcttactcacatgatgatttgg

SEQ ID NO: 471675 - DNA, 55 bp, Artificial
  Synthetic oligonucleotide
tggcgtcattgaataccaaagttaccacagaggtgggagcgttatcgagtcgtat

SEQ ID NO: 471676 - DNA, 60 bp, Artificial
  Synthetic oligonucleotide
tggcgtccaggccatgaagatttggaattagacggctgcaaattcactaatggacagata

SEQ ID NO: 471677 - DNA, 57 bp, Artificial
  Synthetic oligonucleotide
tggcgtccggagatccgtgcagtcttcttccctcgttcttaaattcaatgaccccca

SEQ ID NO: 471678 - DNA, 58 bp, Artificial
  Synthetic oligonucleotide
tggcgtcctaaccagacgccaatgtgctgaacgcttcgatgacacctggggactctta

SEQ ID NO: 471679 - DNA, 57 bp, Artificial
  Synthetic oligonucleotide
tggcgtcgacgcaacaacctatgtcaccgggggaagtgccgctaagaccgcgtctgg

SEQ ID NO: 471680 - DNA, 60 bp, Artificial
  Synthetic oligonucleotide
tggcgtcgtgccaagcgtgctgcgtctatgttcgtctctaacccctccctggccttgcag

SEQ ID NO: 471681 - DNA, 60 bp, Artificial
  Synthetic oligonucleotide
tggcgtctcagaggcctggagattagtagaggtggccctctcgggataggcactactggc

SEQ ID NO: 471682 - DNA, 52 bp, Artificial
  Synthetic oligonucleotide
tggcgtctgcatgcaggagaaagagactggtacttgggtcatggggtctcca

SEQ ID NO: 471683 - DNA, 55 bp, Artificial
  Synthetic oligonucleotide
tggcgtcttcagttatcaaacaactcggttgtgctggcttccagcctacctgaca

SEQ ID NO: 471684 - DNA, 60 bp, Artificial
  Synthetic oligonucleotide
tggcgtgacaataccgtagaactctccgcagttgaaaagtggatggcacgggcagtaggc

SEQ ID NO: 471685 - DNA, 52 bp, Artificial
  Synthetic oligonucleotide
tggcgtgattcatcagcaaaacacatatcggacattctacttccaatgcaac

SEQ ID NO: 471686 - DNA, 55 bp, Artificial
  Synthetic oligonucleotide
tggcgtgcagagcgagggctatcagcagccattaaagggtggttacctactgggg

SEQ ID NO: 471687 - DNA, 59 bp, Artificial
  Synthetic oligonucleotide
tggcgtgccagggatgagactgtctgaaatagtagattggtttaacagttttcaaacca

SEQ ID NO: 471688 - DNA, 60 bp, Artificial
  Synthetic oligonucleotide
tggcgtgccgtatcttgatggatggttcatttatcaaccgagcggaattagcgcggatag

SEQ ID NO: 471689 - DNA, 53 bp, Artificial
  Synthetic oligonucleotide
tggcgtggacacaaaaacgctatcatctcctgcttgcatgaatgcgggggcaa

SEQ ID NO: 471690 - DNA, 58 bp, Artificial
  Synthetic oligonucleotide
tggcgtgtaagtatactcatccacggggtcaacgggcagacctaccaagttctcacga

SEQ ID NO: 471691 - DNA, 60 bp, Artificial
  Synthetic oligonucleotide
tggcgtgtgagtcggagagtgtagaccctattggttgtgaaacggcgcctgcggaagtgc

SEQ ID NO: 471692 - DNA, 51 bp, Artificial
  Synthetic oligonucleotide
tggcgttaaaaacaaccttttgggtaaagctataactattgggccggcgtg

SEQ ID NO: 471693 - DNA, 60 bp, Artificial
  Synthetic oligonucleotide
tggcgttaaacggaacctgattacgatactcgatcactatgtgatctattttcatgcact

SEQ ID NO: 471694 - DNA, 54 bp, Artificial
  Synthetic oligonucleotide
tggcgttaaatgaaagcggagtaaaccgacatcacctcaccaggttgggttaac

SEQ ID NO: 471695 - DNA, 60 bp, Artificial
  Synthetic oligonucleotide
tggcgttagagcgggcggatactgcgcgccactttcgggtcacgctggatgtagcctttg

SEQ ID NO: 471696 - DNA, 53 bp, Artificial
  Synthetic oligonucleotide
tggcgttcgtagaggtttctcgcgggaggaagaaaccttcgtcgattaacggc

SEQ ID NO: 471697 - DNA, 59 bp, Artificial
  Synthetic oligonucleotide
tggcgttctactctcgccaggggtccgctggtcctacccaggatatcctgttcagcagg

SEQ ID NO: 471698 - DNA, 57 bp, Artificial
  Synthetic oligonucleotide
tggcgttctcgttctcgttggacatggtggttgttcctcctggtggttgtggtggga

SEQ ID NO: 471699 - DNA, 60 bp, Artificial
  Synthetic oligonucleotide
tggcgttgatctgagggaagaacgttctgtagcagcaatcatcactggcttaacatgcac

SEQ ID NO: 471700 - DNA, 55 bp, Artificial
  Synthetic oligonucleotide
tggcgttgcatcgtcccgccctcacgtccagaaggggtactgtccgttttagtag

SEQ ID NO: 471701 - DNA, 51 bp, Artificial
  Synthetic oligonucleotide
tggcgttgcgtttggtacgacatttgagtacgaccgtatcgctattgttac

SEQ ID NO: 471702 - DNA, 53 bp, Artificial
  Synthetic oligonucleotide
tggcgttggtgcagttgagtaatgggaatggttgggaatctccaacataggga

SEQ ID NO: 471703 - DNA, 59 bp, Artificial
  Synthetic oligonucleotide
tggcgtttgcactaaaggagctaagcattgtgtggagacataactggccatttggagta

SEQ ID NO: 471704 - DNA, 50 bp, Artificial
  Synthetic oligonucleotide
tggctaaaaagcgagtgaggaactacaagcgtgagagagaactggctatt

SEQ ID NO: 471705 - DNA, 60 bp, Artificial
  Synthetic oligonucleotide
tggctaaaatatactcatggtcgtttcatgtgggttttagaaagcagaagatgttggatg

SEQ ID NO: 471706 - DNA, 55 bp, Artificial
  Synthetic oligonucleotide
tggctaaagctgacgttaatgggacgtttacacagcatggaccattactgtcaga

SEQ ID NO: 471707 - DNA, 58 bp, Artificial
  Synthetic oligonucleotide
tggctaaatggattcaaaatccccaacttgtaacggtacaatccacagctgcaaatta

SEQ ID NO: 471708 - DNA, 55 bp, Artificial
  Synthetic oligonucleotide
tggctaaatggttgtattacctctcacgattatatttgcggctgtgacgaccccg

SEQ ID NO: 471709 - DNA, 55 bp, Artificial
  Synthetic oligonucleotide
tggctaacaaatgttgttaaccagtcatactacccaccaaaaacagacttagatt

SEQ ID NO: 471710 - DNA, 60 bp, Artificial
  Synthetic oligonucleotide
tggctaacctgtgttgcactttgattggaacctgagtagaatggttcttcgagggtgatg

SEQ ID NO: 471711 - DNA, 60 bp, Artificial
  Synthetic oligonucleotide
tggctaaccttaaccctgcagctagtgcatgcaatccagcatgtagctagtcgtaatgag

SEQ ID NO: 471712 - DNA, 58 bp, Artificial
  Synthetic oligonucleotide
tggctaaccttctctcgtgaacatactagcacctggggttgtgaagaatggggttgct

SEQ ID NO: 471713 - DNA, 55 bp, Artificial
  Synthetic oligonucleotide
tggctaacgtagggacttccgtactgaatgctgctggcgtagtgactgccccaaa

SEQ ID NO: 471714 - DNA, 54 bp, Artificial
  Synthetic oligonucleotide
tggctaacttccttccgaaggaaggaatcttttctgaagatcgaataaagttgg

SEQ ID NO: 471715 - DNA, 58 bp, Artificial
  Synthetic oligonucleotide
tggctaagcgaaagatcattaaatcgcctgagttgttaagagcccactttgagtcctt

SEQ ID NO: 471716 - DNA, 60 bp, Artificial
  Synthetic oligonucleotide
tggctaagcgtagaatctcccgctcttaccaggaaagtatcgacttgctgagccgtcagt

SEQ ID NO: 471717 - DNA, 55 bp, Artificial
  Synthetic oligonucleotide
tggctaaggagtacagagaggtgcgcatgggagatatggtgtccgagcaattcac

SEQ ID NO: 471718 - DNA, 60 bp, Artificial
  Synthetic oligonucleotide
tggctaagtgaaccctgtaaactccttcctgacacagcagcagtcagcctccatggtggt

SEQ ID NO: 471719 - DNA, 55 bp, Artificial
  Synthetic oligonucleotide
tggctaagtgaaccttgtaagctactcccagatacagcagcagtaagtctccacg

SEQ ID NO: 471720 - DNA, 60 bp, Artificial
  Synthetic oligonucleotide
tggctaatgatttcgaagaattaatgctgactgatcaggtgtatatgtaccgtgatatgc

SEQ ID NO: 471721 - DNA, 59 bp, Artificial
  Synthetic oligonucleotide
tggctaatgcgggaactgtggcagtccgcaacagtgcaggcgcagacagccataacgcc

SEQ ID NO: 471722 - DNA, 55 bp, Artificial
  Synthetic oligonucleotide
tggctaatggaacatggactacatcgcagcatcgacagtctttggttgcatcgat

SEQ ID NO: 471723 - DNA, 60 bp, Artificial
  Synthetic oligonucleotide
tggctacacactagatgagagtccctatactgatatcagactaattcagagccaatttag

SEQ ID NO: 471724 - DNA, 55 bp, Artificial
  Synthetic oligonucleotide
tggctacaccccaatctgtcctctactttcacccacccatgggcccgcctgcgca

SEQ ID NO: 471725 - DNA, 60 bp, Artificial
  Synthetic oligonucleotide
tggctacacgacccaagttggagctcaaggtatcaccgctgcctctctcagagccatcag

SEQ ID NO: 471726 - DNA, 52 bp, Artificial
  Synthetic oligonucleotide
tggctaccaggtatccaaggatataaataacacgtgtcgacaggctggtgta

SEQ ID NO: 471727 - DNA, 51 bp, Artificial
  Synthetic oligonucleotide
tggctaccccgctttacaccacttgttaactttcaccttaattttaaattc

SEQ ID NO: 471728 - DNA, 57 bp, Artificial
  Synthetic oligonucleotide
tggctacccgtaacggcgtatcggcttgggtcttcgatgattaggctccggaatgta

SEQ ID NO: 471729 - DNA, 55 bp, Artificial
  Synthetic oligonucleotide
tggctaccttacaggcgtgagctttaccaaaagcgtcttatgcgtgagcacacgg

SEQ ID NO: 471730 - DNA, 57 bp, Artificial
  Synthetic oligonucleotide
tggctacgagtgggattggcccttctcggagtcttggtccccttgggggcgcgatca

SEQ ID NO: 471731 - DNA, 60 bp, Artificial
  Synthetic oligonucleotide
tggctacgctaactgaggatgatatttcttacgttaaggcgcgcactcttgagccccctc

SEQ ID NO: 471732 - DNA, 60 bp, Artificial
  Synthetic oligonucleotide
tggctacggtctgcacaaggacacaataatggcatactatggcataacgaggcttttgtg

SEQ ID NO: 471733 - DNA, 60 bp, Artificial
  Synthetic oligonucleotide
tggctactatttaactgaccatggtagagtatttagctacacacctcatacaggatatgt

SEQ ID NO: 471734 - DNA, 60 bp, Artificial
  Synthetic oligonucleotide
tggctactgagctgattacttcgaccgaaggcaaagcctgcagggagaaggacatccaac

SEQ ID NO: 471735 - DNA, 53 bp, Artificial
  Synthetic oligonucleotide
tggctagaatgttgacaaatgagagtgacatatattcgctcccaccagatcca

SEQ ID NO: 471736 - DNA, 54 bp, Artificial
  Synthetic oligonucleotide
tggctagacaggaagaggcctctaatctaatgacttcagtctcagaaggaggtg

SEQ ID NO: 471737 - DNA, 55 bp, Artificial
  Synthetic oligonucleotide
tggctagccgcaaacagcaaaacaggcgtgccacgcgcaacacgactaacatcgt

SEQ ID NO: 471738 - DNA, 58 bp, Artificial
  Synthetic oligonucleotide
tggctagcgaggcttatggggacagtttatttttcttcctgcgacgtgagcaaatgtt

SEQ ID NO: 471739 - DNA, 57 bp, Artificial
  Synthetic oligonucleotide
tggctagcggggcggtcccgcctgctgatgtgaacacagtaacccgccttagtcggg

SEQ ID NO: 471740 - DNA, 60 bp, Artificial
  Synthetic oligonucleotide
tggctaggaaatctttatagctggccccctctccaggattgcagagcacgattgatggga

SEQ ID NO: 471741 - DNA, 60 bp, Artificial
  Synthetic oligonucleotide
tggctagggctactgaaagtgcaacatggtatgtggttgagacacccgttagtacttata

SEQ ID NO: 471742 - DNA, 60 bp, Artificial
  Synthetic oligonucleotide
tggctaggtgatactatctactgtccgcgacatgttctaggcaagttctcaggtgaccaa

SEQ ID NO: 471743 - DNA, 59 bp, Artificial
  Synthetic oligonucleotide
tggctagtctggtcaaacgacagggcttgaccattgaagcggagcctactgaactttcc

SEQ ID NO: 471744 - DNA, 55 bp, Artificial
  Synthetic oligonucleotide
tggctagtgactttaatctgccacctataatagcaaaagagatagtggccagctg

SEQ ID NO: 471745 - DNA, 55 bp, Artificial
  Synthetic oligonucleotide
tggctataaccggtcgaggtacaaaacaaatcaatatgtctcgcagcacaaatgc

SEQ ID NO: 471746 - DNA, 58 bp, Artificial
  Synthetic oligonucleotide
tggctataacgtggtggaatagaaatggacaaacaacaagtacagttcactatccaaa

SEQ ID NO: 471747 - DNA, 56 bp, Artificial
  Synthetic oligonucleotide
tggctataatagtggcctcattgatggccttaagcgtgcttatggcacgggcagct

SEQ ID NO: 471748 - DNA, 58 bp, Artificial
  Synthetic oligonucleotide
tggctataattcgaggtgcttatcaattagtcgttaacgcatggaaaggtatatcagg

SEQ ID NO: 471749 - DNA, 50 bp, Artificial
  Synthetic oligonucleotide
tggctatatggtgagagtggacgtggtaagtcaggtatgacatggccctt

SEQ ID NO: 471750 - DNA, 56 bp, Artificial
  Synthetic oligonucleotide
tggctatcaaactttaagatgtttggtgggaatcaccccttgggagcacctgttta

SEQ ID NO: 471751 - DNA, 57 bp, Artificial
  Synthetic oligonucleotide
tggctatcaagtcccttactgagaggctttatgttgggggccctcttaccaattcaa

SEQ ID NO: 471752 - DNA, 60 bp, Artificial
  Synthetic oligonucleotide
tggctatcgcggcacggccaccgctggctatcgcggcacggccaccgctggctatcgcgg

SEQ ID NO: 471753 - DNA, 60 bp, Artificial
  Synthetic oligonucleotide
tggctatctcagcttgctgacagtcatgacaattggtgtaattgtgatttcccttttgct

SEQ ID NO: 471754 - DNA, 60 bp, Artificial
  Synthetic oligonucleotide
tggctatcttgtgcgctatcttgatagaggggggatgtgagggtgatgaagatcgcattt

SEQ ID NO: 471755 - DNA, 60 bp, Artificial
  Synthetic oligonucleotide
tggctatgaaccggcgaatcaggaagagccttttgaggagtggttgtatgagacccaggc

SEQ ID NO: 471756 - DNA, 60 bp, Artificial
  Synthetic oligonucleotide
tggctatgagccggaatgtggaaacgctgaggtacttgttaattacctgactgcatgctt

SEQ ID NO: 471757 - DNA, 59 bp, Artificial
  Synthetic oligonucleotide
tggctatggatcttctctgactttaggagcatgaagatgacttatctgaccttaataac

SEQ ID NO: 471758 - DNA, 55 bp, Artificial
  Synthetic oligonucleotide
tggctatggctctaaaggtgtcctacacacgatgtggcatgtgacgagaggggcg

SEQ ID NO: 471759 - DNA, 59 bp, Artificial
  Synthetic oligonucleotide
tggctatgggcgccaaaggtgacgactatcgttttaaagaccgtgctaaagatgcagga

SEQ ID NO: 471760 - DNA, 58 bp, Artificial
  Synthetic oligonucleotide
tggctatggggcgaaggacgtccgttgccatgccagaaaggccgtaaaccacatcaac

SEQ ID NO: 471761 - DNA, 55 bp, Artificial
  Synthetic oligonucleotide
tggctattctaaacttgggtggttggataggcggcatcagccgcataacagtgag

SEQ ID NO: 471762 - DNA, 58 bp, Artificial
  Synthetic oligonucleotide
tggctcaacttatctgaccctgctttcgctattcttatgacgaaagtttttacgttga

SEQ ID NO: 471763 - DNA, 60 bp, Artificial
  Synthetic oligonucleotide
tggctcaatgattagtgacaagtttatcgagttcctaaggcatgacatcccaatcgcgta

SEQ ID NO: 471764 - DNA, 60 bp, Artificial
  Synthetic oligonucleotide
tggctcaatggatgtcccatatgcaaactcgacgcaagaaaagacgttcctaacatcaac

SEQ ID NO: 471765 - DNA, 55 bp, Artificial
  Synthetic oligonucleotide
tggctcacaagtcctgtttgcctgcttgtgtctatgggcttgccgtagccagtgg

SEQ ID NO: 471766 - DNA, 60 bp, Artificial
  Synthetic oligonucleotide
tggctcacctgtgattgaccgcaccggtagagtggttgcagtccataccatgtcaacagg

SEQ ID NO: 471767 - DNA, 55 bp, Artificial
  Synthetic oligonucleotide
tggctcatatgtgtgctttgccaccccagcacgagtgccatatgttggtacgcca

SEQ ID NO: 471768 - DNA, 60 bp, Artificial
  Synthetic oligonucleotide
tggctcatgggatgctgtgaggagttcacagatccagctcttagagcacatgctctcgcc

SEQ ID NO: 471769 - DNA, 59 bp, Artificial
  Synthetic oligonucleotide
tggctcatgttagttacagcaacacacaagactcaccggggttcggaatgtttagagta

SEQ ID NO: 471770 - DNA, 60 bp, Artificial
  Synthetic oligonucleotide
tggctccagtgccgtgcttgaagtcgctcctgagcctacgcctcctacacgtgttagggt

SEQ ID NO: 471771 - DNA, 59 bp, Artificial
  Synthetic oligonucleotide
tggctccataacttaggacagtatatctatgcaacctatggggatacctggaggggagt

SEQ ID NO: 471772 - DNA, 55 bp, Artificial
  Synthetic oligonucleotide
tggctccatgggttgggacaacttatctatgaaacatatggggatacttggacag

SEQ ID NO: 471773 - DNA, 59 bp, Artificial
  Synthetic oligonucleotide
tggctcccaaactgtcctacgttgcggagactgtttaaggagacctctcttgtgcacta

SEQ ID NO: 471774 - DNA, 53 bp, Artificial
  Synthetic oligonucleotide
tggctcccacaccgtggatttctccatggtgcatgggccatttaatggcaatg

SEQ ID NO: 471775 - DNA, 52 bp, Artificial
  Synthetic oligonucleotide
tggctccccatctaatcaacccgttcatcgctagcccgagtgacgactacgg

SEQ ID NO: 471776 - DNA, 53 bp, Artificial
  Synthetic oligonucleotide
tggctccctacggggatttccggaggcacgaaggctctatcctaaaaatgggg

SEQ ID NO: 471777 - DNA, 57 bp, Artificial
  Synthetic oligonucleotide
tggctccgcgacagcacaaagtgcgccgcccaacaaggatggttcagagtatacata

SEQ ID NO: 471778 - DNA, 60 bp, Artificial
  Synthetic oligonucleotide
tggctccggatacatctattatcctacttggtgcagaaagagagcccgctgttaatatat

SEQ ID NO: 471779 - DNA, 60 bp, Artificial
  Synthetic oligonucleotide
tggctccgggagctggcccaatcgaggtctattacggaggagtctggatacagcccatgt

SEQ ID NO: 471780 - DNA, 60 bp, Artificial
  Synthetic oligonucleotide
tggctcctgaatgggacacttcctcttgtacccagaaaggggattggacatcgcagaata

SEQ ID NO: 471781 - DNA, 60 bp, Artificial
  Synthetic oligonucleotide
tggctcctgaatgggatacttcctcttgagtccagaagggagattggacatcgcagaata

SEQ ID NO: 471782 - DNA, 60 bp, Artificial
  Synthetic oligonucleotide
tggctcctgagattccgggtgtcgctcatgtgtatcaactcacgtccgatggggtgcgag

SEQ ID NO: 471783 - DNA, 53 bp, Artificial
  Synthetic oligonucleotide
tggctcctgtccccccgcggctctcggcctagttggggtccaacagacccccg

SEQ ID NO: 471784 - DNA, 55 bp, Artificial
  Synthetic oligonucleotide
tggctcctgtctccccgtggctctcggcctaactggggccccacagacccccggc

SEQ ID NO: 471785 - DNA, 53 bp, Artificial
  Synthetic oligonucleotide
tggctcgatagaatgtgtgatagggtggacatgaaaacttggcgctgcacctc

SEQ ID NO: 471786 - DNA, 60 bp, Artificial
  Synthetic oligonucleotide
tggctcgatgcactatgatgttacgtacgaggttcttaagaacaacgctcagcgtatcgt

SEQ ID NO: 471787 - DNA, 55 bp, Artificial
  Synthetic oligonucleotide
tggctcgctaataaaagttgtccaccattcaaatccgtaatcgtatcacgattcg

SEQ ID NO: 471788 - DNA, 55 bp, Artificial
  Synthetic oligonucleotide
tggctcgcttgtctttggtggtgggtttgaatgctatgctcacaatgctggcctg

SEQ ID NO: 471789 - DNA, 60 bp, Artificial
  Synthetic oligonucleotide
tggctcggaagaacaatatcatatagcagccggtcagggttcgaagtgatcaaagtttca

SEQ ID NO: 471790 - DNA, 60 bp, Artificial
  Synthetic oligonucleotide
tggctcggatgcgccggctattcgccaaagcttgagggctttggactctgttgcgcggaa

SEQ ID NO: 471791 - DNA, 60 bp, Artificial
  Synthetic oligonucleotide
tggctcgttcgtggaccaagcgacctattcaacacaagttgcctctgccattgcgcaagg

SEQ ID NO: 471792 - DNA, 55 bp, Artificial
  Synthetic oligonucleotide
tggctctatcgagacacacaagtcggttgcactattacacagtagtgcctgacta

SEQ ID NO: 471793 - DNA, 55 bp, Artificial
  Synthetic oligonucleotide
tggctctcatgaatctctttgatcttccacaaggggtaggctacgggtgaaacct

SEQ ID NO: 471794 - DNA, 55 bp, Artificial
  Synthetic oligonucleotide
tggctctccaacgcccgaatgacccactaccaggctctgcttctggacacggacc

SEQ ID NO: 471795 - DNA, 51 bp, Artificial
  Synthetic oligonucleotide
tggctctcgaacccactacggattgtggtgtcgaaaaaggacttacaactg

SEQ ID NO: 471796 - DNA, 60 bp, Artificial
  Synthetic oligonucleotide
tggctctgatgaagaggatagcaaaggtttctgggaggattgcaacaggggctaaaccaa

SEQ ID NO: 471797 - DNA, 60 bp, Artificial
  Synthetic oligonucleotide
tggctctggagcacggtatataggtaagttatctgttagagcgggtgatgaactcattcg

SEQ ID NO: 471798 - DNA, 58 bp, Artificial
  Synthetic oligonucleotide
tggctctgggattaattggcagaacaactccagaaccaacagggaccgctggtccacc

SEQ ID NO: 471799 - DNA, 57 bp, Artificial
  Synthetic oligonucleotide
tggctctgttaccaccctaaaggcgtccctctggcccgtactgtcaaggcgctattc

SEQ ID NO: 471800 - DNA, 60 bp, Artificial
  Synthetic oligonucleotide
tggctcttcacgtagaatgggagccaagaacatcagcaactgcttttcacatgttcaaaa

SEQ ID NO: 471801 - DNA, 59 bp, Artificial
  Synthetic oligonucleotide
tggctcttcgtcgtattatttgtacaagcagtattcttctacttgccgcatcacgtatg

SEQ ID NO: 471802 - DNA, 60 bp, Artificial
  Synthetic oligonucleotide
tggctctttggttgcagacagctggacaattgtatcttccaccaagcaagcctgttgctc

SEQ ID NO: 471803 - DNA, 58 bp, Artificial
  Synthetic oligonucleotide
tggctgaaatgagtggtgctgtgtttcgttttatgcctactcgtgattcttttaacta

SEQ ID NO: 471804 - DNA, 60 bp, Artificial
  Synthetic oligonucleotide
tggctgaagcgggcgaagatctctagagattcgcccttctacagccccgtccaggattgg

SEQ ID NO: 471805 - DNA, 57 bp, Artificial
  Synthetic oligonucleotide
tggctgaatcgtataataacgtagctctacctgatatgttgagttttacaacgtgta

SEQ ID NO: 471806 - DNA, 55 bp, Artificial
  Synthetic oligonucleotide
tggctgaatgcctggatcgcgtgcatttggtatgccggtcataagtggggatccg

SEQ ID NO: 471807 - DNA, 60 bp, Artificial
  Synthetic oligonucleotide
tggctgacgcggaattttcatggtataaaatggtactctggtaccatgaggtatccagaa

SEQ ID NO: 471808 - DNA, 51 bp, Artificial
  Synthetic oligonucleotide
tggctgacgctatccgcactggctcacctgacgtaatggcagcgcttcacc

SEQ ID NO: 471809 - DNA, 58 bp, Artificial
  Synthetic oligonucleotide
tggctgagaagccctacaattactattaatacactcttggacagttgtcctaactagt

SEQ ID NO: 471810 - DNA, 55 bp, Artificial
  Synthetic oligonucleotide
tggctgagacggatgacagggagacttcagtcgccgcagagatcctgaggccgac

SEQ ID NO: 471811 - DNA, 51 bp, Artificial
  Synthetic oligonucleotide
tggctgaggagctaggccaccgcccggctcctgttgccgccgttttgcccc

SEQ ID NO: 471812 - DNA, 60 bp, Artificial
  Synthetic oligonucleotide
tggctgaggcccatgactgtccaggtagtatcgcgggagttgtgtatctgctagactggg

SEQ ID NO: 471813 - DNA, 58 bp, Artificial
  Synthetic oligonucleotide
tggctgagtttatgctgcccgtccgcagagaggagccacggcgggggatccgaacgtc

SEQ ID NO: 471814 - DNA, 60 bp, Artificial
  Synthetic oligonucleotide
tggctgataacacacgtaacactaattttactattagtgttgccagtgatagtagcacag

SEQ ID NO: 471815 - DNA, 55 bp, Artificial
  Synthetic oligonucleotide
tggctgatcatgaacagactgtgaggactgtgagggctgaggggcctgaaatgag

SEQ ID NO: 471816 - DNA, 50 bp, Artificial
  Synthetic oligonucleotide
tggctgatcttgatagattatcagatcttagagtggatgatcagaatgaa

SEQ ID NO: 471817 - DNA, 51 bp, Artificial
  Synthetic oligonucleotide
tggctgatgggtgtccatatttgtatgctatggtacatgatagttcagtgt

SEQ ID NO: 471818 - DNA, 60 bp, Artificial
  Synthetic oligonucleotide
tggctgcaaatggttaataacaatcaattcagacaagtagttattgatggtgtattgaat

SEQ ID NO: 471819 - DNA, 55 bp, Artificial
  Synthetic oligonucleotide
tggctgcacatgctgtggactagatgtcaaagaactgttcacggatcacatgcta

SEQ ID NO: 471820 - DNA, 55 bp, Artificial
  Synthetic oligonucleotide
tggctgcaggcctacggagagtacaagcgtatagacttctcgcgatcgctgctca

SEQ ID NO: 471821 - DNA, 55 bp, Artificial
  Synthetic oligonucleotide
tggctgcatagtatacctgtacccactgcaggaccaagactactggttttggtgg

SEQ ID NO: 471822 - DNA, 60 bp, Artificial
  Synthetic oligonucleotide
tggctgccagtcatcaacgtcaggtccacgcgtaaggcgaacaccttcgatgtacaccgc

SEQ ID NO: 471823 - DNA, 52 bp, Artificial
  Synthetic oligonucleotide
tggctgcccaacccccctacattccccccaatttagaaccccacccaaatca

SEQ ID NO: 471824 - DNA, 60 bp, Artificial
  Synthetic oligonucleotide
tggctgcccttctgtgagctgctgcgtgtgaccgaccggtacccgcataaggtgcccgtg

SEQ ID NO: 471825 - DNA, 55 bp, Artificial
  Synthetic oligonucleotide
tggctgccgtgctgaggtgccctgcccctagggaggagcaaatggcgccgttata

SEQ ID NO: 471826 - DNA, 60 bp, Artificial
  Synthetic oligonucleotide
tggctgccgtgggatgatctactgagactttgtgatcgatatcctttgactgttgagact

SEQ ID NO: 471827 - DNA, 55 bp, Artificial
  Synthetic oligonucleotide
tggctgccttgccagtaacagcctcaggggccagtgcatgacccattcatcagcc

SEQ ID NO: 471828 - DNA, 60 bp, Artificial
  Synthetic oligonucleotide
tggctgcctttaaaggtgatgattcgatagtgctttgcagtgagtaccgtcagagtccag

SEQ ID NO: 471829 - DNA, 60 bp, Artificial
  Synthetic oligonucleotide
tggctgcgcaagcttagagcacgagagaagaacatcccatcgcagttttatccagatatg

SEQ ID NO: 471830 - DNA, 57 bp, Artificial
  Synthetic oligonucleotide
tggctgcggtagggagtattgccgacgctctcctttccggagggttaggatcgtggc

SEQ ID NO: 471831 - DNA, 53 bp, Artificial
  Synthetic oligonucleotide
tggctgcggttggacatgtctgatagggccatcttccgtcgctttccccatct

SEQ ID NO: 471832 - DNA, 60 bp, Artificial
  Synthetic oligonucleotide
tggctgctatcatgattggttcaatctctgttcccattattgggtctgctcaatgcgcaa

SEQ ID NO: 471833 - DNA, 55 bp, Artificial
  Synthetic oligonucleotide
tggctgctattaagcgtctatatatgggatttcaaggtcgtcaaatactaggaag

SEQ ID NO: 471834 - DNA, 58 bp, Artificial
  Synthetic oligonucleotide
tggctgctgaagagggttgtagacttacgaacgaacgactgtcgcaggttaagtacca

SEQ ID NO: 471835 - DNA, 60 bp, Artificial
  Synthetic oligonucleotide
tggctgctgacggttatcttccagattggctcgaggacaacctttctgaaggcattcgtg

SEQ ID NO: 471836 - DNA, 55 bp, Artificial
  Synthetic oligonucleotide
tggctgctgtgcacatcactctttcgagcgacgtgatccgcaggattccgtgggg

SEQ ID NO: 471837 - DNA, 60 bp, Artificial
  Synthetic oligonucleotide
tggctggaagcacaagaggaggacggagatgtaggctttccagtccgacctcaggtgcct

SEQ ID NO: 471838 - DNA, 60 bp, Artificial
  Synthetic oligonucleotide
tggctggacacctttctaggctgctcggtctccattaacaggcatactactgttaaagaa

SEQ ID NO: 471839 - DNA, 50 bp, Artificial
  Synthetic oligonucleotide
tggctggactagtgcgaccaactaaaagattacccgacattttatcgctg

SEQ ID NO: 471840 - DNA, 60 bp, Artificial
  Synthetic oligonucleotide
tggctggactcctatgcgtagactaaccctcgcgcatagtgggctctccttagaacccga

SEQ ID NO: 471841 - DNA, 60 bp, Artificial
  Synthetic oligonucleotide
tggctggagatccctggattaagactctcactgccagatacgttggcgacttcaccgcca

SEQ ID NO: 471842 - DNA, 58 bp, Artificial
  Synthetic oligonucleotide
tggctggcaaagacctagatctaattgaagccgacaccccgctccccgtgagcgtgtt

SEQ ID NO: 471843 - DNA, 60 bp, Artificial
  Synthetic oligonucleotide
tggctggcgaccccagatatgaagagtccctgcacaatccataccccgactaccattggc

SEQ ID NO: 471844 - DNA, 60 bp, Artificial
  Synthetic oligonucleotide
tggctgggactttgacatgttaacaggctctggtaactatgccaatactgatgcacaaat

SEQ ID NO: 471845 - DNA, 60 bp, Artificial
  Synthetic oligonucleotide
tggctgggcagaacagtgtcaactagtggtagatcaggttttgagatcatcaaagttaca

SEQ ID NO: 471846 - DNA, 60 bp, Artificial
  Synthetic oligonucleotide
tggctgggctcgtcacccctcctttgtgtctcacaaacgacgaatctgcgctcggcaaat

SEQ ID NO: 471847 - DNA, 59 bp, Artificial
  Synthetic oligonucleotide
tggctgggggatgcataggctttaccccatacgatagtccggctggtgtctacggatgg

SEQ ID NO: 471848 - DNA, 55 bp, Artificial
  Synthetic oligonucleotide
tggctgggttggaaacatgagagttaggattctccttgctgggaatgcattctca

SEQ ID NO: 471849 - DNA, 57 bp, Artificial
  Synthetic oligonucleotide
tggctggtaggtcctgtggcatgtacggccttaatggtcccgatatctataaagggg

SEQ ID NO: 471850 - DNA, 55 bp, Artificial
  Synthetic oligonucleotide
tggctggtccttcaatgtcgagccaaagggtattagtggggtcaagtttccccac

SEQ ID NO: 471851 - DNA, 60 bp, Artificial
  Synthetic oligonucleotide
tggctggtcgtgtagagctcgtcactggacccatgtttgcgggcaagtctacctacctga

SEQ ID NO: 471852 - DNA, 57 bp, Artificial
  Synthetic oligonucleotide
tggctggtgagtctcgcgctaaggcgttcggtcgtaagccaactcgtagtgtgacta

SEQ ID NO: 471853 - DNA, 60 bp, Artificial
  Synthetic oligonucleotide
tggctggttaccttgggatgatctactgagactgtgtgaccggtatccattgactgtaga

SEQ ID NO: 471854 - DNA, 60 bp, Artificial
  Synthetic oligonucleotide
tggctggttcaagacaaaggtctctatagatctggataacacctgtgaagacctacatat

SEQ ID NO: 471855 - DNA, 51 bp, Artificial
  Synthetic oligonucleotide
tggctggttggtatcgggttgagatcgcgttctcgctgaacagcttcgccg

SEQ ID NO: 471856 - DNA, 56 bp, Artificial
  Synthetic oligonucleotide
tggctgtaaaggttgcacaacctatcggccaaatgacgtgacaggctctgtcttgt

SEQ ID NO: 471857 - DNA, 55 bp, Artificial
  Synthetic oligonucleotide
tggctgtagagccagtcaccttttcccgaatggagaccaagctcatcacatgggg

SEQ ID NO: 471858 - DNA, 60 bp, Artificial
  Synthetic oligonucleotide
tggctgtatctgcaggattagtgttcacatgaccaaatctcacttttggctccagaaact

SEQ ID NO: 471859 - DNA, 60 bp, Artificial
  Synthetic oligonucleotide
tggctgtcaaattgaaatggaggcatccaactaaggacgttgcatatttcacattaccaa

SEQ ID NO: 471860 - DNA, 58 bp, Artificial
  Synthetic oligonucleotide
tggctgtcaaccaggagtcgatgaggtggtggcaaacacatctctcgcctcacacctg

SEQ ID NO: 471861 - DNA, 55 bp, Artificial
  Synthetic oligonucleotide
tggctgtcatactagagctttgcactgtccccttaactcctgaaactgtctccta

SEQ ID NO: 471862 - DNA, 60 bp, Artificial
  Synthetic oligonucleotide
tggctgtcatagacagcttttagactgcgggcaacgtcagttccataaggaactgataat

SEQ ID NO: 471863 - DNA, 60 bp, Artificial
  Synthetic oligonucleotide
tggctgtcccactacacatttaatgtcaatcatctaaaaggtgagaaaaatgtgttggct

SEQ ID NO: 471864 - DNA, 53 bp, Artificial
  Synthetic oligonucleotide
tggctgtgaagctaggcacaggtttaagttttgactctgccggtgccttaaca

SEQ ID NO: 471865 - DNA, 60 bp, Artificial
  Synthetic oligonucleotide
tggctgtgcacctgctataggccagcattgggataaagcagaggcttgtgcatctgacag

SEQ ID NO: 471866 - DNA, 60 bp, Artificial
  Synthetic oligonucleotide
tggctgtgtgcgtcaactttaccagctacgtccaacatgtcaaggagttcacccaacgct

SEQ ID NO: 471867 - DNA, 60 bp, Artificial
  Synthetic oligonucleotide
tggctgtgtgtggcgggatgccgatatacacgtcgttctaccggtggctagcacgggccg

SEQ ID NO: 471868 - DNA, 59 bp, Artificial
  Synthetic oligonucleotide
tggctgttacagaactctaggtgtatttagatacaagagccgttgttatgtcgggcttg

SEQ ID NO: 471869 - DNA, 57 bp, Artificial
  Synthetic oligonucleotide
tggcttaataatgttgtttactgtcctcgacatgtacttggtaagtaccgtggtgaa

SEQ ID NO: 471870 - DNA, 60 bp, Artificial
  Synthetic oligonucleotide
tggcttacccctacagattggaatacgcttgttagggcagtcctctcaggaggagatcac

SEQ ID NO: 471871 - DNA, 58 bp, Artificial
  Synthetic oligonucleotide
tggcttaggtgcccggaaacacctggatatcccagttggggtgtcacggacatggcac

SEQ ID NO: 471872 - DNA, 60 bp, Artificial
  Synthetic oligonucleotide
tggcttatagttatgtggaggaccccacaaggcatgtggtatttgatataccacgtgata

SEQ ID NO: 471873 - DNA, 60 bp, Artificial
  Synthetic oligonucleotide
tggcttatctagccaggatttaaatgaggatccttcgcctggattgcagaggaagatagt

SEQ ID NO: 471874 - DNA, 55 bp, Artificial
  Synthetic oligonucleotide
tggcttatgctttggtagacagatacaaacctgacatttgtccgaaagctgcctt

SEQ ID NO: 471875 - DNA, 58 bp, Artificial
  Synthetic oligonucleotide
tggcttattccctacacaaattcaagttcgaaatataatgagtccagtaatgggagta

SEQ ID NO: 471876 - DNA, 59 bp, Artificial
  Synthetic oligonucleotide
tggcttcactctacccggttcggttgtcgacgagcttacgcagaaactgcttgagcggc

SEQ ID NO: 471877 - DNA, 50 bp, Artificial
  Synthetic oligonucleotide
tggcttcagaccaatatggaaacaacctattcttttacattagacgtgaa

SEQ ID NO: 471878 - DNA, 55 bp, Artificial
  Synthetic oligonucleotide
tggcttcagtatttcctgaccagaacagaagcgctactacacatgtgggtacccc

SEQ ID NO: 471879 - DNA, 59 bp, Artificial
  Synthetic oligonucleotide
tggcttccatgattacttaacgagggaacatgagaacaacttcgacttggcgcagttgg

SEQ ID NO: 471880 - DNA, 59 bp, Artificial
  Synthetic oligonucleotide
tggcttcctgcaggcaacttggcagggtttgtttccttaacatgttcatcccacgcaag

SEQ ID NO: 471881 - DNA, 60 bp, Artificial
  Synthetic oligonucleotide
tggcttcctgccattgccgtgtccgggcaatcagccattgcggtatccgggcaatctgcc

SEQ ID NO: 471882 - DNA, 60 bp, Artificial
  Synthetic oligonucleotide
tggcttcgcctccgttaattctgatgttactatggcaggtgcgctctatgataagcgcca

SEQ ID NO: 471883 - DNA, 59 bp, Artificial
  Synthetic oligonucleotide
tggcttgaacatggagtgatgcctaaagtaaagaagggccttgccaagttggtgcctgg

SEQ ID NO: 471884 - DNA, 54 bp, Artificial
  Synthetic oligonucleotide
tggcttgagcggcgtggtcaggggtagcctttgggggtttttgccccttgggca

SEQ ID NO: 471885 - DNA, 60 bp, Artificial
  Synthetic oligonucleotide
tggcttgatagattcatccgtgtcggtgtccctccagtggacccagagatccagtgtgct

SEQ ID NO: 471886 - DNA, 55 bp, Artificial
  Synthetic oligonucleotide
tggcttggacgggaacgttgggacacaggaggaaaacacggagaggcacacagca

SEQ ID NO: 471887 - DNA, 58 bp, Artificial
  Synthetic oligonucleotide
tggcttggactggcgaccctgtttggctcgaagaagtcttgcgccccgcactggggga

SEQ ID NO: 471888 - DNA, 57 bp, Artificial
  Synthetic oligonucleotide
tggcttgggtacacaagagattttggcaacgacctgtgttggaatttgggcaatgtt

SEQ ID NO: 471889 - DNA, 54 bp, Artificial
  Synthetic oligonucleotide
tggcttgtactttaaaacgtttggggggagccattgactttggtcaattggaga

SEQ ID NO: 471890 - DNA, 60 bp, Artificial
  Synthetic oligonucleotide
tggcttgtgcgagataggagaccatatggtacccctatggatttcgggcaggtgttcaac

SEQ ID NO: 471891 - DNA, 53 bp, Artificial
  Synthetic oligonucleotide
tggcttgtggttgcaatcgcagcgcagagggattagcatcatcttggcctggt

SEQ ID NO: 471892 - DNA, 56 bp, Artificial
  Synthetic oligonucleotide
tggctttacaaggctggcgtatctccagaaaccttcccaactgtttcacagtttct

SEQ ID NO: 471893 - DNA, 58 bp, Artificial
  Synthetic oligonucleotide
tggctttacacaggccggcccttacctctcgcaggggtactgtgcggtatagcaggct

SEQ ID NO: 471894 - DNA, 60 bp, Artificial
  Synthetic oligonucleotide
tggctttagagccttggagcacaccaaatactcctgttgcgggcactgcagaaacccaga

SEQ ID NO: 471895 - DNA, 57 bp, Artificial
  Synthetic oligonucleotide
tggctttagggaaaatcctgcctcctcaacgttatcgatcctttctgagtcgagtac

SEQ ID NO: 471896 - DNA, 58 bp, Artificial
  Synthetic oligonucleotide
tggctttatgccgcaattgttagtgttaaggagagtagtttctcactgcctaaatggt

SEQ ID NO: 471897 - DNA, 60 bp, Artificial
  Synthetic oligonucleotide
tggctttcaagtaaggcgaatggtgactgagttctgcgataggctaagacgtgacggtgt

SEQ ID NO: 471898 - DNA, 60 bp, Artificial
  Synthetic oligonucleotide
tggctttcagttatatggatgatgtggtattgggggccaagtctgtacaacatcttgagt

SEQ ID NO: 471899 - DNA, 60 bp, Artificial
  Synthetic oligonucleotide
tggctttcatgaggctggccgcactgacaggcacgtacgtttatgaccatcttactccac

SEQ ID NO: 471900 - DNA, 58 bp, Artificial
  Synthetic oligonucleotide
tggctttccaaggcttgaaatgggcgtcccactccgtctacgccctcatgaactcgag

SEQ ID NO: 471901 - DNA, 60 bp, Artificial
  Synthetic oligonucleotide
tggctttgagggatgtggaacgctacaatgttgttgatctcgctgtgcgatgtcacgccg

SEQ ID NO: 471902 - DNA, 56 bp, Artificial
  Synthetic oligonucleotide
tggctttgcggtcccgttcctggaaaccccctccaacatcactgtgcactaaccaa

SEQ ID NO: 471903 - DNA, 60 bp, Artificial
  Synthetic oligonucleotide
tggctttgggtcctcagagatcttatcttgcttctgaaggctcagcgaggtagatccacg

SEQ ID NO: 471904 - DNA, 55 bp, Artificial
  Synthetic oligonucleotide
tggcttttaagcaaggggaacgcgtggcatattctttcgaagttaatttcggcaa

SEQ ID NO: 471905 - DNA, 55 bp, Artificial
  Synthetic oligonucleotide
tggcttttactaacaactcccttgcaattctatttactaaccctgtctctttgct

SEQ ID NO: 471906 - DNA, 55 bp, Artificial
  Synthetic oligonucleotide
tggcttttatggggtaattcccttagataggagcctaagggctctgctatgcttc

SEQ ID NO: 471907 - DNA, 57 bp, Artificial
  Synthetic oligonucleotide
tgggaaaacgggttgtgaccggacggtgtgctgaggataaacgacgtgtgcagctac

SEQ ID NO: 471908 - DNA, 57 bp, Artificial
  Synthetic oligonucleotide
tgggaaaagtagtagtctgtgttgaggggcacggcatgggcccgcgcataccccgat

SEQ ID NO: 471909 - DNA, 55 bp, Artificial
  Synthetic oligonucleotide
tgggaaaatcaagtgtgccataggaaaattagaccacataacatagcaactggtg

SEQ ID NO: 471910 - DNA, 55 bp, Artificial
  Synthetic oligonucleotide
tgggaaaatgacactgctaccgcgctagggtcaatgtattataactatccagctg

SEQ ID NO: 471911 - DNA, 60 bp, Artificial
  Synthetic oligonucleotide
tgggaaacagcaagacacactccagtcaattcctggctaggcaacataatcatgtttgcc

SEQ ID NO: 471912 - DNA, 59 bp, Artificial
  Synthetic oligonucleotide
tgggaaacagtccgacacactccggtgaactcttggctggggaacatcatactctacgc

SEQ ID NO: 471913 - DNA, 60 bp, Artificial
  Synthetic oligonucleotide
tgggaaactcttgtgcttccagttgttgatggcaaataacgctgatcacccattttatgg

SEQ ID NO: 471914 - DNA, 60 bp, Artificial
  Synthetic oligonucleotide
tgggaaactgtaaagatccagtggtcccaggatcctacaatgctatacaataagatggag

SEQ ID NO: 471915 - DNA, 59 bp, Artificial
  Synthetic oligonucleotide
tgggaaactgtgaaaattcaatggtcacaagaccccacgatgttatataacaagatgga

SEQ ID NO: 471916 - DNA, 57 bp, Artificial
  Synthetic oligonucleotide
tgggaaagacgtgacgatccttggcgcgaacacgctcgttggttccccaattgcgaa

SEQ ID NO: 471917 - DNA, 60 bp, Artificial
  Synthetic oligonucleotide
tgggaaagcacagaaactctcatgctgtgcttcggttgaaaacacgtccattggtgacca

SEQ ID NO: 471918 - DNA, 54 bp, Artificial
  Synthetic oligonucleotide
tgggaaagggacgcaaaccgtaaccgtcaacacaatgggtggccaaggtgcttc

SEQ ID NO: 471919 - DNA, 60 bp, Artificial
  Synthetic oligonucleotide
tgggaaaggtgaaagcagcttgtgctgcttgttcgtagcttagcctcgtgtcacgaattg

SEQ ID NO: 471920 - DNA, 56 bp, Artificial
  Synthetic oligonucleotide
tgggaaaggtgggtcaaaccaaccgagacccaggatgtgaatgagtccgagaagga

SEQ ID NO: 471921 - DNA, 53 bp, Artificial
  Synthetic oligonucleotide
tgggaaagtgcctcttctttggtcagggagcagtgtggatacgtgaggaagta

SEQ ID NO: 471922 - DNA, 58 bp, Artificial
  Synthetic oligonucleotide
tgggaaagtggaatgtgtatgtagggacaattggacagggaccaacagaccagtactg

SEQ ID NO: 471923 - DNA, 57 bp, Artificial
  Synthetic oligonucleotide
tgggaaatcgacttcagtgacctgcgtatgattttacttttgatatgtataattgtt

SEQ ID NO: 471924 - DNA, 53 bp, Artificial
  Synthetic oligonucleotide
tgggaaatgataaagattcaatggtcccaagatcctacaatgttatacaacaa

SEQ ID NO: 471925 - DNA, 55 bp, Artificial
  Synthetic oligonucleotide
tgggaaatgggtaaccatgatggtatcgaatagtacgcttccaacatcttgggcc

SEQ ID NO: 471926 - DNA, 54 bp, Artificial
  Synthetic oligonucleotide
tgggaaattcaccggtctgggtatatatgatagatacttaatcatacctacaca

SEQ ID NO: 471927 - DNA, 60 bp, Artificial
  Synthetic oligonucleotide
tgggaacaacgtagcagattctctgcaacagccaattccgattgccggggctctgacttg

SEQ ID NO: 471928 - DNA, 51 bp, Artificial
  Synthetic oligonucleotide
tgggaacagggactaccgccctagtggccactcagcagttccaacaactcc

SEQ ID NO: 471929 - DNA, 58 bp, Artificial
  Synthetic oligonucleotide
tgggaaccaaagctctggtgctttgttgcttgtaatccagaagtgggtagcttttagc

SEQ ID NO: 471930 - DNA, 58 bp, Artificial
  Synthetic oligonucleotide
tgggaaccaccggtactaaattagtaccactcatgatgcccaaagctggagataacag

SEQ ID NO: 471931 - DNA, 49 bp, Artificial
  Synthetic oligonucleotide
tgggaacccccccttggtaacaaggacccacggggccaaaagccacgtc

SEQ ID NO: 471932 - DNA, 58 bp, Artificial
  Synthetic oligonucleotide
tgggaacccctaccataacggcggctaacgaggcggtgataaggcacatgataagcaa

SEQ ID NO: 471933 - DNA, 55 bp, Artificial
  Synthetic oligonucleotide
tgggaacctgattgcacctgaatatggccacctaataaccgggaaatcacatggg

SEQ ID NO: 471934 - DNA, 60 bp, Artificial
  Synthetic oligonucleotide
tgggaacgcgtttgtgttcccacaccagatcattaacttgcgcacaaataactgcgccac

SEQ ID NO: 471935 - DNA, 57 bp, Artificial
  Synthetic oligonucleotide
tgggaactcgcgaggtaagtttcacacccaattaccaccgcctaagcagcactaaca

SEQ ID NO: 471936 - DNA, 60 bp, Artificial
  Synthetic oligonucleotide
tgggaactgtaaaatgtatccattcattaaaggaacggctaagctgaagacagtgcgcaa

SEQ ID NO: 471937 - DNA, 55 bp, Artificial
  Synthetic oligonucleotide
tgggaactgtggaatacgaagagcaaaagtctggcatgtgtgacacggtacccag

SEQ ID NO: 471938 - DNA, 60 bp, Artificial
  Synthetic oligonucleotide
tgggaagaacaatcagtagagattcgcgatcaggctatgagacctttaaggtcattggtg

SEQ ID NO: 471939 - DNA, 60 bp, Artificial
  Synthetic oligonucleotide
tgggaagaatacaccacgaacactaatcgtcgaaggacactttaatgcgcaagatgctac

SEQ ID NO: 471940 - DNA, 60 bp, Artificial
  Synthetic oligonucleotide
tgggaagagtggaccaacatcgacatccagcctgcacgctcctggggaacttacgtgctg

SEQ ID NO: 471941 - DNA, 60 bp, Artificial
  Synthetic oligonucleotide
tgggaagcaacatgacgcaacgagtcgtgattgccctactggtcttggctgttggtccgg

SEQ ID NO: 471942 - DNA, 60 bp, Artificial
  Synthetic oligonucleotide
tgggaagcaagagttcagcagcaacccatatgtgggaagcattgatgatcttggatgtct

SEQ ID NO: 471943 - DNA, 55 bp, Artificial
  Synthetic oligonucleotide
tgggaagcatcctcattggtttctcatttgaaactgaccctgatataacagcact

SEQ ID NO: 471944 - DNA, 58 bp, Artificial
  Synthetic oligonucleotide
tgggaagccagagctaggttgcccacgactggacctaagctagggccgacattgggaa

SEQ ID NO: 471945 - DNA, 57 bp, Artificial
  Synthetic oligonucleotide
tgggaagccaggacacttagcaaaagattgccgcagtggacaggccaattttttagg

SEQ ID NO: 471946 - DNA, 60 bp, Artificial
  Synthetic oligonucleotide
tgggaagctcgcagctattgttgtacctcctggggttgatccagtgcagagtacttcgat

SEQ ID NO: 471947 - DNA, 58 bp, Artificial
  Synthetic oligonucleotide
tgggaaggaatacccgttacgtctcgaaagcggtatgtacgtgccctggatgctcatg

SEQ ID NO: 471948 - DNA, 50 bp, Artificial
  Synthetic oligonucleotide
tgggaaggatgtgtcactattctgtcaaatggtatccagcgtggacttcg

SEQ ID NO: 471949 - DNA, 60 bp, Artificial
  Synthetic oligonucleotide
tgggaagggtgggcattctggctcaaaatttatgtgttgtcatgacacaaaatgctcgac

SEQ ID NO: 471950 - DNA, 55 bp, Artificial
  Synthetic oligonucleotide
tgggaaggtagtgcctgacggggcggcgtctcggagaagactcgtgtgcaagttg

SEQ ID NO: 471951 - DNA, 60 bp, Artificial
  Synthetic oligonucleotide
tgggaaggtatgcagaaccttgctggcaaaatctgtgttcaacagtctatacgcatctcc

SEQ ID NO: 471952 - DNA, 57 bp, Artificial
  Synthetic oligonucleotide
tgggaaggtgtaagaaaatccgggaggccacaaaccatggaagctgtacgcatggtg

SEQ ID NO: 471953 - DNA, 60 bp, Artificial
  Synthetic oligonucleotide
tgggaaggtgtgcaggaccttactagcaaagtctgtattcaatagcctatatgcatctcc

SEQ ID NO: 471954 - DNA, 60 bp, Artificial
  Synthetic oligonucleotide
tgggaagtaatttggaagatccagcatccagggacttagtagtcagctatgtcaatacta

SEQ ID NO: 471955 - DNA, 55 bp, Artificial
  Synthetic oligonucleotide
tgggaagtgcaacctccctagccgataacccctgaccgggtgtgtaggataggaa

SEQ ID NO: 471956 - DNA, 58 bp, Artificial
  Synthetic oligonucleotide
tgggaagtgcggatacgtctgtctcaagtgtgaccagtaaggttagacgtcgtgccgt

SEQ ID NO: 471957 - DNA, 60 bp, Artificial
  Synthetic oligonucleotide
tgggaataacttgcttgtgtatgtggcgagctacaatgaagttgatcagttatcacgact

SEQ ID NO: 471958 - DNA, 55 bp, Artificial
  Synthetic oligonucleotide
tgggaataagctttatagacctctcagaaccatgggtagaaggttggggaaatgc

SEQ ID NO: 471959 - DNA, 58 bp, Artificial
  Synthetic oligonucleotide
tgggaataattggatgactaatgatcaagggcctttactaagagcttagtaagaagta

SEQ ID NO: 471960 - DNA, 55 bp, Artificial
  Synthetic oligonucleotide
tgggaatagctgagccagccttccaagtgtgatagcattggcatttgtccccacc

SEQ ID NO: 471961 - DNA, 57 bp, Artificial
  Synthetic oligonucleotide
tgggaataggtactggtagtggcacagggggacgcacaggttatataccactgggac

SEQ ID NO: 471962 - DNA, 60 bp, Artificial
  Synthetic oligonucleotide
tgggaatcatagagacagattggacagcaagtcaaccgttcaaatcccaccatgggtaat

SEQ ID NO: 471963 - DNA, 60 bp, Artificial
  Synthetic oligonucleotide
tgggaatcctgtgaatcgtgattatatcagacagagacaaggtgcacttgcagggatgga

SEQ ID NO: 471964 - DNA, 60 bp, Artificial
  Synthetic oligonucleotide
tgggaatctaatcgctccatggtatgggcacattctttcaggagagagccacggaagaat

SEQ ID NO: 471965 - DNA, 60 bp, Artificial
  Synthetic oligonucleotide
tgggaatgactcgcgcttgacacgtaaccatgttacgagtaaagtcgtctgcaagagaac

SEQ ID NO: 471966 - DNA, 55 bp, Artificial
  Synthetic oligonucleotide
tgggaatgctcaacattgactgccaaaccaatcgaagaactttaatcgacgactg

SEQ ID NO: 471967 - DNA, 55 bp, Artificial
  Synthetic oligonucleotide
tgggaattagatgacaaccaaccttactttcctaaagtaacaggcacaattaaca

SEQ ID NO: 471968 - DNA, 60 bp, Artificial
  Synthetic oligonucleotide
tgggaattagtagctttgtaaatgttcacagtgctgccaaaaaggagacagactctcaag

SEQ ID NO: 471969 - DNA, 55 bp, Artificial
  Synthetic oligonucleotide
tgggaattgaaaggaagtaccgcaaggtacgacctactgggtccaatgtgacctc

SEQ ID NO: 471970 - DNA, 59 bp, Artificial
  Synthetic oligonucleotide
tgggacaacagtggtaaaagtcaagtatgagggtgctggagctccatgtaaagttccca

SEQ ID NO: 471971 - DNA, 60 bp, Artificial
  Synthetic oligonucleotide
tgggacaagacgctgccctcttcgacgacttctgtggcaagtacaccaagcttggaatgg

SEQ ID NO: 471972 - DNA, 60 bp, Artificial
  Synthetic oligonucleotide
tgggacaattgacatggaatgatctgatcaggctatgtatcatggttggagccaatgctt

SEQ ID NO: 471973 - DNA, 60 bp, Artificial
  Synthetic oligonucleotide
tgggacacaataaccacatcaaattacatattagcaagatcagtcgtgcctgatttgaga

SEQ ID NO: 471974 - DNA, 55 bp, Artificial
  Synthetic oligonucleotide
tgggacaccaagggcttattggcccctattttgcctaccacttatcccgatggta

SEQ ID NO: 471975 - DNA, 55 bp, Artificial
  Synthetic oligonucleotide
tgggacaccaatggtaaatgagaccccgatacatcggtgcctctattaggtcctt

SEQ ID NO: 471976 - DNA, 57 bp, Artificial
  Synthetic oligonucleotide
tgggacaccctcttattctagacacctgcaccattgaagggttggtgtacggcaacc

SEQ ID NO: 471977 - DNA, 56 bp, Artificial
  Synthetic oligonucleotide
tgggacacgccatccccgaaaccttgcttaaaaggagacaccactacaggagtcta

SEQ ID NO: 471978 - DNA, 51 bp, Artificial
  Synthetic oligonucleotide
tgggacacgcggccgattgcgtttcgatctgagacgaccctaccacggttg

SEQ ID NO: 471979 - DNA, 54 bp, Artificial
  Synthetic oligonucleotide
tgggacagaccccccagaaagctacactcagaccttcccttctacccctgggta

SEQ ID NO: 471980 - DNA, 55 bp, Artificial
  Synthetic oligonucleotide
tgggacagacgaacaaaaccaaaaatactgttcgaaatcaggcatattttttgaa

SEQ ID NO: 471981 - DNA, 60 bp, Artificial
  Synthetic oligonucleotide
tgggacagagtacatcccgtacaggcagggcctcatccaccaggccagctgagggaacca

SEQ ID NO: 471982 - DNA, 60 bp, Artificial
  Synthetic oligonucleotide
tgggacagcaggtgactgtcgtggcccctcatgccctggagagtattgtgcggcagccac

SEQ ID NO: 471983 - DNA, 55 bp, Artificial
  Synthetic oligonucleotide
tgggacagctggcgcgcactatgaattgtgggtacgtggcattgtgtggttcgtt

SEQ ID NO: 471984 - DNA, 60 bp, Artificial
  Synthetic oligonucleotide
tgggacagggccatgcaacaatgtcagtacagtacaatgcacacatggaattaagccagt

SEQ ID NO: 471985 - DNA, 60 bp, Artificial
  Synthetic oligonucleotide
tgggacaggttacatccagtacaagcagggcccattccaccaaaccagatgagagaacca

SEQ ID NO: 471986 - DNA, 56 bp, Artificial
  Synthetic oligonucleotide
tgggacagtaaaagaccggagtcccttccgcacattaatgagttgtcccataggag

SEQ ID NO: 471987 - DNA, 60 bp, Artificial
  Synthetic oligonucleotide
tgggacagtgaaagatagaagcccattcaggactctcatgagtgtcgaagtaggccaatc

SEQ ID NO: 471988 - DNA, 55 bp, Artificial
  Synthetic oligonucleotide
tgggacagtgtgtattatatgactgatgcaggaacatgggacaaaacagctacct

SEQ ID NO: 471989 - DNA, 52 bp, Artificial
  Synthetic oligonucleotide
tgggacagttgcaaccagctctccagacaggaacagaggagcttagatcatt

SEQ ID NO: 471990 - DNA, 55 bp, Artificial
  Synthetic oligonucleotide
tgggacagttgtaagcacgaagccggattggtatacaccggttaaggtctgcacc

SEQ ID NO: 471991 - DNA, 60 bp, Artificial
  Synthetic oligonucleotide
tgggacataagaacagtcccaaggcatatgatttacccaacactctctattgacccacga

SEQ ID NO: 471992 - DNA, 60 bp, Artificial
  Synthetic oligonucleotide
tgggacatatgtgcgagcttttgattttgtcatgtcacgtgctcgggatgaatgtcaggt

SEQ ID NO: 471993 - DNA, 60 bp, Artificial
  Synthetic oligonucleotide
tgggacatcaagagacagcaattgaaacggtacgatccaacacaattactagtcaatctc

SEQ ID NO: 471994 - DNA, 60 bp, Artificial
  Synthetic oligonucleotide
tgggacatctctgattcaacaggtcagcatgttccagggggttattgcttagaacagtgg

SEQ ID NO: 471995 - DNA, 54 bp, Artificial
  Synthetic oligonucleotide
tgggaccaagcagcggttttgtactctaactacatcgtaaacaggcttagagga

SEQ ID NO: 471996 - DNA, 57 bp, Artificial
  Synthetic oligonucleotide
tgggaccacaatggctctgtacttccgaagaagaaggaggtactggagaccaaagtg

SEQ ID NO: 471997 - DNA, 54 bp, Artificial
  Synthetic oligonucleotide
tgggaccgaattgttaagccgaagggtctaatcgtattcttcggccgtggcgag

SEQ ID NO: 471998 - DNA, 54 bp, Artificial
  Synthetic oligonucleotide
tgggaccgcctggttgtccacccactttccttgggtggtcgagacctttgtgct

SEQ ID NO: 471999 - DNA, 60 bp, Artificial
  Synthetic oligonucleotide
tgggaccgcgcagctttgccagaatacaggttagaggccatttgtgcagcaatgattgag

SEQ ID NO: 472000 - DNA, 51 bp, Artificial
  Synthetic oligonucleotide
tgggaccggctcatgctctttggcgctactttggatgaccaggcgttttgc

SEQ ID NO: 472001 - DNA, 56 bp, Artificial
  Synthetic oligonucleotide
tgggacctaaaaatgttcccagttggtcagacttaaaagaacaagtatccatcata

SEQ ID NO: 472002 - DNA, 53 bp, Artificial
  Synthetic oligonucleotide
tgggacctacccccaatcccttttggcgtagtctctctcctcgtttacgtggc

SEQ ID NO: 472003 - DNA, 55 bp, Artificial
  Synthetic oligonucleotide
tgggacctccagaatggagaatggaaatactaataactctggcaatactggagtg

SEQ ID NO: 472004 - DNA, 60 bp, Artificial
  Synthetic oligonucleotide
tgggacctcttcattgaaagaagcagtgctttcagcaattgctacccatatgacatccct

SEQ ID NO: 472005 - DNA, 60 bp, Artificial
  Synthetic oligonucleotide
tgggaccttggacttcaatcctcatgcaccatgctagccccttggatatccaacacagtc

SEQ ID NO: 472006 - DNA, 60 bp, Artificial
  Synthetic oligonucleotide
tgggacgacagcattatgctgtccaaagaccccatacctcctattgtgggaaacagtgga

SEQ ID NO: 472007 - DNA, 55 bp, Artificial
  Synthetic oligonucleotide
tgggacgacatgttgagttctaggagtcacgggattttgcgcctaggcgatgttc

SEQ ID NO: 472008 - DNA, 51 bp, Artificial
  Synthetic oligonucleotide
tgggacgagatattcttcaggacttaggtgcaaaattggttttggcacagc

SEQ ID NO: 472009 - DNA, 55 bp, Artificial
  Synthetic oligonucleotide
tgggacgcaacaccactataactttgtggatttctcgcaaagcgtgctcataccg

SEQ ID NO: 472010 - DNA, 60 bp, Artificial
  Synthetic oligonucleotide
tgggacgccaatttgttgacatggtgtgaagatcttaatgtgcttggttgtgagtcctcc

SEQ ID NO: 472011 - DNA, 53 bp, Artificial
  Synthetic oligonucleotide
tgggacggaccctacactgtagtcctcagtacccccaccgcggtaaaggtcgc

SEQ ID NO: 472012 - DNA, 51 bp, Artificial
  Synthetic oligonucleotide
tgggacggcattgagaagtacctaccggaagaattcgaagtgcagtcaacc

SEQ ID NO: 472013 - DNA, 58 bp, Artificial
  Synthetic oligonucleotide
tgggacggggagatctaccattatggcttatacgtggaacgaggattagtgctaggtg

SEQ ID NO: 472014 - DNA, 60 bp, Artificial
  Synthetic oligonucleotide
tgggacgggtataagggccaggaggtgatgctttgggatgactatggcatggccaatatt

SEQ ID NO: 472015 - DNA, 55 bp, Artificial
  Synthetic oligonucleotide
tgggacgtagtagactacatcataacacggcgaggaaatgttgtatacactccac

SEQ ID NO: 472016 - DNA, 57 bp, Artificial
  Synthetic oligonucleotide
tgggacgtattccttaacggtcaattgatcgatacagttttcttcgacgtgatggcg

SEQ ID NO: 472017 - DNA, 60 bp, Artificial
  Synthetic oligonucleotide
tgggacgtcgtctatctccctgagattagtgcggcagcggctggaagtattgagatgtgc

SEQ ID NO: 472018 - DNA, 54 bp, Artificial
  Synthetic oligonucleotide
tgggacgttagaagaggacgctggttacttaaacctaatgctaaaagtcacgcg

SEQ ID NO: 472019 - DNA, 60 bp, Artificial
  Synthetic oligonucleotide
tgggacgtttcgacagatagaggcgatatgagtgatagagaatgggaaaggcatagattt

SEQ ID NO: 472020 - DNA, 58 bp, Artificial
  Synthetic oligonucleotide
tgggactaattccctaattacattaagagcttctgacttactgccgctgttaagcgct

SEQ ID NO: 472021 - DNA, 60 bp, Artificial
  Synthetic oligonucleotide
tgggactaggtctgcggactttaatagtaataatcatcgtgcttatggctgtggaggttc

SEQ ID NO: 472022 - DNA, 60 bp, Artificial
  Synthetic oligonucleotide
tgggactatgatcgccgatcctgctatgttagtcgctacaagtggctatatccctgcgct

SEQ ID NO: 472023 - DNA, 51 bp, Artificial
  Synthetic oligonucleotide
tgggactcagcagtagccaccttatttattagaacccatggaacttttcca

SEQ ID NO: 472024 - DNA, 60 bp, Artificial
  Synthetic oligonucleotide
tgggactcatcctagttccagtgccggtctgaaagatgatcttcttgaaaatttacaggc

SEQ ID NO: 472025 - DNA, 60 bp, Artificial
  Synthetic oligonucleotide
tgggactcatctcaacacaatacacagccatttaggaaagggataattatgggattggac

SEQ ID NO: 472026 - DNA, 55 bp, Artificial
  Synthetic oligonucleotide
tgggactccctaccatgcatttgagagccccgccccaattggtttccccgatttg

SEQ ID NO: 472027 - DNA, 60 bp, Artificial
  Synthetic oligonucleotide
tgggactctgtactcctacatggaaggtactaagttccaccaggcggctcttgacatggc

SEQ ID NO: 472028 - DNA, 55 bp, Artificial
  Synthetic oligonucleotide
tgggactgcaaactgttaacaatcaagcggtgccaagccttgcagtatcacgatc

SEQ ID NO: 472029 - DNA, 55 bp, Artificial
  Synthetic oligonucleotide
tgggactgcctttagccttctgggatacttgaagcctatcttaataggtgtgggg

SEQ ID NO: 472030 - DNA, 52 bp, Artificial
  Synthetic oligonucleotide
tgggacttaatacacagaataagtaaagatgctttattgataacattgtgtg

SEQ ID NO: 472031 - DNA, 59 bp, Artificial
  Synthetic oligonucleotide
tgggacttctgggacacagggggcgggagggcctcaagtatctgtggaatctcctgata

SEQ ID NO: 472032 - DNA, 55 bp, Artificial
  Synthetic oligonucleotide
tgggactttctttcgaatcgacaaggttgaaagtcttcaacaaagtagtatcttc

SEQ ID NO: 472033 - DNA, 51 bp, Artificial
  Synthetic oligonucleotide
tgggacttttcactaggggcgttccaggaggggtggtttgggcgggacgag

SEQ ID NO: 472034 - DNA, 52 bp, Artificial
  Synthetic oligonucleotide
tgggacttttgggctttgcggcccctttcacccaatgtggttatcctgctct

SEQ ID NO: 472035 - DNA, 60 bp, Artificial
  Synthetic oligonucleotide
tgggagaaagtgttggagtagatgtcagagtaaacacagatggtgaaataggagacaagg

SEQ ID NO: 472036 - DNA, 55 bp, Artificial
  Synthetic oligonucleotide
tgggagaacagctctcgggacttgctcgtgtcatctaccaccgcccaaggttgtg

SEQ ID NO: 472037 - DNA, 57 bp, Artificial
  Synthetic oligonucleotide
tgggagaagtatggaagcaagggcacagaaaaaccaccctcaaggattataccgcag

SEQ ID NO: 472038 - DNA, 60 bp, Artificial
  Synthetic oligonucleotide
tgggagaagtgcaggtcctttaactattcctgcatagattcttaggcatttcttacagag

SEQ ID NO: 472039 - DNA, 52 bp, Artificial
  Synthetic oligonucleotide
tgggagaatggggccagttccgtatggaacgccacgaccgccattggactct

SEQ ID NO: 472040 - DNA, 60 bp, Artificial
  Synthetic oligonucleotide
tgggagacagctcgccatacccctgtcaattcgtggttgggcaacatcatcatgtacgcc

SEQ ID NO: 472041 - DNA, 53 bp, Artificial
  Synthetic oligonucleotide
tgggagacatcagactcgctaactctctccgtccgtgaaatgtggatgtcacg

SEQ ID NO: 472042 - DNA, 60 bp, Artificial
  Synthetic oligonucleotide
tgggagacatctatagaaggtggatccagctgggactccaaaaatgcgtcaggatgtata

SEQ ID NO: 472043 - DNA, 57 bp, Artificial
  Synthetic oligonucleotide
tgggagaccgttaagatacaatggtctcaagaccctactatgttgtacaataaaatg

SEQ ID NO: 472044 - DNA, 53 bp, Artificial
  Synthetic oligonucleotide
tgggagacgtcctccgactccggaaaggagtccactgggacccccgcctataa

SEQ ID NO: 472045 - DNA, 60 bp, Artificial
  Synthetic oligonucleotide
tgggagactgtgaagattcagtggtctcaagaccccacaatgttgtacaataaaatggag

SEQ ID NO: 472046 - DNA, 60 bp, Artificial
  Synthetic oligonucleotide
tgggagagacatcacgttctcccactttgagtgatacacaatgagaaccaactcgtttca

SEQ ID NO: 472047 - DNA, 60 bp, Artificial
  Synthetic oligonucleotide
tgggagagcaccgataactgaggaagtcaacccaggttgtgcattgaagagatcagcaag

SEQ ID NO: 472048 - DNA, 58 bp, Artificial
  Synthetic oligonucleotide
tgggagatactgagaatcctacaaagtaccaaacagggtcaaaggataataggcagaa

SEQ ID NO: 472049 - DNA, 56 bp, Artificial
  Synthetic oligonucleotide
tgggagatggattcccttctgggaagaagactttggtttaccaatggtctaccaga

SEQ ID NO: 472050 - DNA, 60 bp, Artificial
  Synthetic oligonucleotide
tgggagatgttacacccagcggtgtttctgatgttgtgctttctagtgctattagtagcg

SEQ ID NO: 472051 - DNA, 60 bp, Artificial
  Synthetic oligonucleotide
tgggagattgaaaatgacaatatttgaattggggcatcattgtcagcctaactatatagc

SEQ ID NO: 472052 - DNA, 51 bp, Artificial
  Synthetic oligonucleotide
tgggagcaagcaatatggcggaggtgcgaagctactgctacgctgcttcgg

SEQ ID NO: 472053 - DNA, 60 bp, Artificial
  Synthetic oligonucleotide
tgggagcacgctttctagagttcgaagctcttggtttcatgaacgaagaccactggttca

SEQ ID NO: 472054 - DNA, 52 bp, Artificial
  Synthetic oligonucleotide
tgggagcatgacgtcgtcaggaaaggcgaaaagaaagacaccgaaattattc

SEQ ID NO: 472055 - DNA, 55 bp, Artificial
  Synthetic oligonucleotide
tgggagcccacgggcatctggaacatggagcatgtgaatctaccgatggtgacct

SEQ ID NO: 472056 - DNA, 55 bp, Artificial
  Synthetic oligonucleotide
tgggagccctaaccggcacctacatttatgaccatcttaccccactgtcgggttg

SEQ ID NO: 472057 - DNA, 58 bp, Artificial
  Synthetic oligonucleotide
tgggagctccacgtattacaacttagttggggatgtagactcatacataaggaacacc

SEQ ID NO: 472058 - DNA, 60 bp, Artificial
  Synthetic oligonucleotide
tgggaggactacaacagggacctattggtcagcactaccacagctcacggatgtgatact

SEQ ID NO: 472059 - DNA, 59 bp, Artificial
  Synthetic oligonucleotide
tgggaggaggcctggttggaagctaccaagggctggcacgaccttgactgccgctgcgg

SEQ ID NO: 472060 - DNA, 55 bp, Artificial
  Synthetic oligonucleotide
tgggaggagtaatatagagtttgattagtagttatgagtttacagagaacctaca

SEQ ID NO: 472061 - DNA, 58 bp, Artificial
  Synthetic oligonucleotide
tgggaggatcagccaccggcgagggacgcgatgccaagagtggaggaaagttcggaag

SEQ ID NO: 472062 - DNA, 59 bp, Artificial
  Synthetic oligonucleotide
tgggaggattggaggtcctaaagaccctcagattgtgatgctcttaaacagaacattgt

SEQ ID NO: 472063 - DNA, 54 bp, Artificial
  Synthetic oligonucleotide
tgggaggcaaatggtcaaaaagtaggatgggtgggtggtctactataagggaaa

SEQ ID NO: 472064 - DNA, 60 bp, Artificial
  Synthetic oligonucleotide
tgggaggctgtgaaaattcaatggtcacaagatcccacaatgttgtacaataagatggaa

SEQ ID NO: 472065 - DNA, 55 bp, Artificial
  Synthetic oligonucleotide
tgggaggctgtgaccttaaaaactgaggttttaggggtgacaactttgatgaatg

SEQ ID NO: 472066 - DNA, 58 bp, Artificial
  Synthetic oligonucleotide
tgggagggtcgaatgcttccatttggacttgtgtgtttagcaccacaggggtctctac

SEQ ID NO: 472067 - DNA, 55 bp, Artificial
  Synthetic oligonucleotide
tgggaggtacatgtgggtagtcgggtaattgtatgtcctacatctatacctagtg

SEQ ID NO: 472068 - DNA, 60 bp, Artificial
  Synthetic oligonucleotide
tgggaggtagtaaccctatgacataactgagcacacctggcacagcatcctcaatgtcct

SEQ ID NO: 472069 - DNA, 52 bp, Artificial
  Synthetic oligonucleotide
tgggaggttggttgccaaaacctcgcaaaggcatggggacgaatctttctgt

SEQ ID NO: 472070 - DNA, 55 bp, Artificial
  Synthetic oligonucleotide
tgggaggttttagaaaatgaggatgtcccacttatacagggcagactatcctttg

SEQ ID NO: 472071 - DNA, 60 bp, Artificial
  Synthetic oligonucleotide
tgggagtactcaatttggcccagtgcaggcgctaggagcgcagtattcaatgtggaagct

SEQ ID NO: 472072 - DNA, 53 bp, Artificial
  Synthetic oligonucleotide
tgggagtcgcactatggctcgggcgactgccggcactgtaactgcctcaaccg

SEQ ID NO: 472073 - DNA, 54 bp, Artificial
  Synthetic oligonucleotide
tgggagtctgcgaatcccttctgtggtgagggaacgttatatactcgaacctgg

SEQ ID NO: 472074 - DNA, 60 bp, Artificial
  Synthetic oligonucleotide
tgggagtggtcaaccctcagatgctgcatataagcagctgcttttcgcctgtactgggtc

SEQ ID NO: 472075 - DNA, 55 bp, Artificial
  Synthetic oligonucleotide
tgggagttcaacagattttggcgatctactccacagtcgccagttccctggtctt

SEQ ID NO: 472076 - DNA, 54 bp, Artificial
  Synthetic oligonucleotide
tgggagttcataccggttcgaacaccagcggggttgcctacgtgactactccga

SEQ ID NO: 472077 - DNA, 53 bp, Artificial
  Synthetic oligonucleotide
tgggagttcgaataataacactcttatcagtgagattttctccgagaaggcca

SEQ ID NO: 472078 - DNA, 50 bp, Artificial
  Synthetic oligonucleotide
tgggataaagccaaagtgtgtgaaaaggatgctaataatcaactaggctt

SEQ ID NO: 472079 - DNA, 55 bp, Artificial
  Synthetic oligonucleotide
tgggataaggcggccaaaacacctgtatgtctcaatgcctactgcacagtctacc

SEQ ID NO: 472080 - DNA, 55 bp, Artificial
  Synthetic oligonucleotide
tgggataagtatgactcacttatctatggagatgacaggctaaccacaaccccta

SEQ ID NO: 472081 - DNA, 58 bp, Artificial
  Synthetic oligonucleotide
tgggataagtgaggaaataattcttagcatttatacggaatgactttggtctagtcat

SEQ ID NO: 472082 - DNA, 57 bp, Artificial
  Synthetic oligonucleotide
tgggataagtgaggaaataattcttggcatttatttgaaaaggcttgacccgtggca

SEQ ID NO: 472083 - DNA, 56 bp, Artificial
  Synthetic oligonucleotide
tgggataattaactcctttttcgttattagcttctatgggtcccagttcagatgct

SEQ ID NO: 472084 - DNA, 53 bp, Artificial
  Synthetic oligonucleotide
tgggataatttggtccaaaaggagacaagagatccttgatctttgggtctaca

SEQ ID NO: 472085 - DNA, 52 bp, Artificial
  Synthetic oligonucleotide
tgggatacaataactacatccaattatatactagccagatcagtcgtgcctg

SEQ ID NO: 472086 - DNA, 58 bp, Artificial
  Synthetic oligonucleotide
tgggataccgctcgtaatggttatcggtctcctgaagtatctcacgcctgccgttaag

SEQ ID NO: 472087 - DNA, 56 bp, Artificial
  Synthetic oligonucleotide
tgggatacctgggtcctactatgcgcgagggacaagcttatcccgcaaactacccc

SEQ ID NO: 472088 - DNA, 60 bp, Artificial
  Synthetic oligonucleotide
tgggatagaactcacccacaagcggcagggccattgcctccagggcagataagggaacca

SEQ ID NO: 472089 - DNA, 60 bp, Artificial
  Synthetic oligonucleotide
tgggatagagctgagcagccagaacatcggcttgaagctatttgtgcatctatgattgaa

SEQ ID NO: 472090 - DNA, 58 bp, Artificial
  Synthetic oligonucleotide
tgggatagcgcttaccttgtttaaccttgctgatacacttctcggcgggctcccgaca

SEQ ID NO: 472091 - DNA, 60 bp, Artificial
  Synthetic oligonucleotide
tgggatatgagctccacccagacaaatggacagtacagcccatccaattgcctgacaagg

SEQ ID NO: 472092 - DNA, 55 bp, Artificial
  Synthetic oligonucleotide
tgggatatgtaattggaagttgggggactttaccacaggaacatattgtactaaa

SEQ ID NO: 472093 - DNA, 50 bp, Artificial
  Synthetic oligonucleotide
tgggatattattgtcacaagttggggtcgacgtcgcaactcgagttggaa

SEQ ID NO: 472094 - DNA, 50 bp, Artificial
  Synthetic oligonucleotide
tgggatcaaactcgttctaaggctggattgttgatttccgatggaggccc

SEQ ID NO: 472095 - DNA, 54 bp, Artificial
  Synthetic oligonucleotide
tgggatcaaagcctaaaaccatgtataaagctaacccctctttgtgttacttta

SEQ ID NO: 472096 - DNA, 57 bp, Artificial
  Synthetic oligonucleotide
tgggatcaaagcctaaagccatgtgtaaagataaccccactctgtgtcactttaaat

SEQ ID NO: 472097 - DNA, 59 bp, Artificial
  Synthetic oligonucleotide
tgggatcaaagcctcaagccatgtgtaaagttgaccccagtctgtgtcactttaaactg

SEQ ID NO: 472098 - DNA, 53 bp, Artificial
  Synthetic oligonucleotide
tgggatcacaaagtttctactgttggtttatatcaacaaccaggaatggctgt

SEQ ID NO: 472099 - DNA, 60 bp, Artificial
  Synthetic oligonucleotide
tgggatcacaaggaccaggcaaatctgatggacatttaaatgatggtaattatgctcaga

SEQ ID NO: 472100 - DNA, 60 bp, Artificial
  Synthetic oligonucleotide
tgggatcaccttggtgtgaaagttgaggatgaccaaacatttttgatggatcatttaatc

SEQ ID NO: 472101 - DNA, 60 bp, Artificial
  Synthetic oligonucleotide
tgggatcactcacggacagtatatcggatctttctagccaagtgactactaacgcctctt

SEQ ID NO: 472102 - DNA, 60 bp, Artificial
  Synthetic oligonucleotide
tgggatcagaggacaggttgctagtatcagtgatagcgtcgcagccattgaacgtagatt

SEQ ID NO: 472103 - DNA, 51 bp, Artificial
  Synthetic oligonucleotide
tgggatcatgaatttctttttggctagtgctggtgacttggttgagataag

SEQ ID NO: 472104 - DNA, 55 bp, Artificial
  Synthetic oligonucleotide
tgggatccactattaaatgattttcctgaaaccgtacacgggtttaggtgtatgc

SEQ ID NO: 472105 - DNA, 52 bp, Artificial
  Synthetic oligonucleotide
tgggatccacttttatacgaattccctgatacagttcacgggtttcggtgta

SEQ ID NO: 472106 - DNA, 58 bp, Artificial
  Synthetic oligonucleotide
tgggatccagatgtgaactctgtttgttcctcccaagtgcgttagctaatcttctatc

SEQ ID NO: 472107 - DNA, 59 bp, Artificial
  Synthetic oligonucleotide
tgggatccattggtgaacgactttcccaaatccttgcatgggttccgttgtatgcttgc

SEQ ID NO: 472108 - DNA, 51 bp, Artificial
  Synthetic oligonucleotide
tgggatcccaacttaccacttttccgcctagaaggtgatagtgatagctcc

SEQ ID NO: 472109 - DNA, 58 bp, Artificial
  Synthetic oligonucleotide
tgggatccgatgaaagacgcagttaagaagtacggttcctatatcttgccattcccga

SEQ ID NO: 472110 - DNA, 58 bp, Artificial
  Synthetic oligonucleotide
tgggatcctgtgagagggggtccctccattgccagctggactgttctttggggcctta

SEQ ID NO: 472111 - DNA, 59 bp, Artificial
  Synthetic oligonucleotide
tgggatcgaccctaacatcaggaccggggtgagaacaattaccactggcagccccatca

SEQ ID NO: 472112 - DNA, 60 bp, Artificial
  Synthetic oligonucleotide
tgggatcggacttatagatagggataatttagattcaacagtactaatagacaacacagc

SEQ ID NO: 472113 - DNA, 55 bp, Artificial
  Synthetic oligonucleotide
tgggatcgtcaaattcaaatgggacacacgattccacactatagaactgaagggc

SEQ ID NO: 472114 - DNA, 55 bp, Artificial
  Synthetic oligonucleotide
tgggatctagtcttgaagaattgcttggaagatgtatactgtactcgcacctggt

SEQ ID NO: 472115 - DNA, 58 bp, Artificial
  Synthetic oligonucleotide
tgggatctgaaatggataacataaagtactgtacaaaagaggaccaagtaatcgtcga

SEQ ID NO: 472116 - DNA, 57 bp, Artificial
  Synthetic oligonucleotide
tgggatctttaacataacctctcctatgtgtctggtatcaaagcaaaacaggtttcg

SEQ ID NO: 472117 - DNA, 57 bp, Artificial
  Synthetic oligonucleotide
tgggatgaaagcctaaaaccatgtgtaaagttgacccaactctgtgtcacgttagag

SEQ ID NO: 472118 - DNA, 55 bp, Artificial
  Synthetic oligonucleotide
tgggatgaagtgtataaaatgcacctggctaacgtgtctccttctgaaacagaac

SEQ ID NO: 472119 - DNA, 55 bp, Artificial
  Synthetic oligonucleotide
tgggatgacagtggaatagagttgcagcatgaagctgacgtttctgttaaccagg

SEQ ID NO: 472120 - DNA, 60 bp, Artificial
  Synthetic oligonucleotide
tgggatgagtataggcaattgatagccgcaaacatcagctgtcatgagaatgtcctgggt

SEQ ID NO: 472121 - DNA, 58 bp, Artificial
  Synthetic oligonucleotide
tgggatgagtattggaaccctgaagaaatagaaagaatgcttatggactagggactgt

SEQ ID NO: 472122 - DNA, 60 bp, Artificial
  Synthetic oligonucleotide
tgggatgatgtttaccgtaagcacttagctcatgtctcttcacaggaatcagaggaggta

SEQ ID NO: 472123 - DNA, 60 bp, Artificial
  Synthetic oligonucleotide
tgggatgccatcaggttgctcgggtaccagcatattcaactccatgattaacaacatcat

SEQ ID NO: 472124 - DNA, 52 bp, Artificial
  Synthetic oligonucleotide
tgggatgcgtcattggccaactccatgctgtctatgtttgagaccactagtc

SEQ ID NO: 472125 - DNA, 59 bp, Artificial
  Synthetic oligonucleotide
tgggatgctgtgtgcaacaaatctgggacatcctctcattctagacacctgcaccatcg

SEQ ID NO: 472126 - DNA, 59 bp, Artificial
  Synthetic oligonucleotide
tgggatggaccaggtaaggaacgctactggcggatcggtgacactacagtcaccgtaga

SEQ ID NO: 472127 - DNA, 60 bp, Artificial
  Synthetic oligonucleotide
tgggatggcgggtctcaatccatcgcagcgaagagaggtcgtcagcttgatactgtcatt

SEQ ID NO: 472128 - DNA, 55 bp, Artificial
  Synthetic oligonucleotide
tgggatggtaaactctgctcctatggtgttaaattgtgacatgcttgagaacaag

SEQ ID NO: 472129 - DNA, 55 bp, Artificial
  Synthetic oligonucleotide
tgggatgtatcaggggtcctcgccaaaagtgagggtcctaggtacttctccccta

SEQ ID NO: 472130 - DNA, 55 bp, Artificial
  Synthetic oligonucleotide
tgggatgtcgggcttcaatcaactgtgtcgatggtggttccatgggtcagtgcta

SEQ ID NO: 472131 - DNA, 60 bp, Artificial
  Synthetic oligonucleotide
tgggatgtctttatagaacgacccactgccgtggacacttgttacccattcgatgtgcca

SEQ ID NO: 472132 - DNA, 60 bp, Artificial
  Synthetic oligonucleotide
tgggatgtgtgtcaaacaaaattttgaaagagcaatgattgcggcaactgatgctgagga

SEQ ID NO: 472133 - DNA, 60 bp, Artificial
  Synthetic oligonucleotide
tgggatgttctcatcagaagaaatgtgtatgccttatactctcagaaaatttggcagatt

SEQ ID NO: 472134 - DNA, 60 bp, Artificial
  Synthetic oligonucleotide
tgggattacgcatagagtagggaagcgtttttgcatcaagtcaatttacatcatagggaa

SEQ ID NO: 472135 - DNA, 57 bp, Artificial
  Synthetic oligonucleotide
tgggattagcctggcggttgacgtaacccacgtcaacaccgtggatgcctctacgga

SEQ ID NO: 472136 - DNA, 60 bp, Artificial
  Synthetic oligonucleotide
tgggattatcgggaccgacagtgtccattataagatcatgactaggcccagtcaccagta

SEQ ID NO: 472137 - DNA, 53 bp, Artificial
  Synthetic oligonucleotide
tgggattcagatgatgtgtttttctttcattgcgtttcgcactttcatatgaa

SEQ ID NO: 472138 - DNA, 54 bp, Artificial
  Synthetic oligonucleotide
tgggattccctttatgtcctgccaacgcgggtataagggggtctggcgagggga

SEQ ID NO: 472139 - DNA, 51 bp, Artificial
  Synthetic oligonucleotide
tgggattcgcctttagtttaaccgattcccaggaacgaaaaagccggagta

SEQ ID NO: 472140 - DNA, 55 bp, Artificial
  Synthetic oligonucleotide
tgggattcgtcgggattcatactcctgagggcaagttggtctacaatatgtggtc

SEQ ID NO: 472141 - DNA, 60 bp, Artificial
  Synthetic oligonucleotide
tgggattgggtgagtggagatgatacatctattcttcgtcgtttctgggaagatacatac

SEQ ID NO: 472142 - DNA, 60 bp, Artificial
  Synthetic oligonucleotide
tgggattgtgcgaaatagaaaatacggtatcaatcagtgatttcgtctataagcaaataa

SEQ ID NO: 472143 - DNA, 60 bp, Artificial
  Synthetic oligonucleotide
tgggatttctagtatggtggaagccatggtttctagggcccgaattgatgcgcgaattga

SEQ ID NO: 472144 - DNA, 55 bp, Artificial
  Synthetic oligonucleotide
tgggatttgtgaacaatgttttaatccctgcagaaggcagtaaatgttccgcgtt

SEQ ID NO: 472145 - DNA, 57 bp, Artificial
  Synthetic oligonucleotide
tgggcaacgcggtgtaatttaaaaagactctagggtgtgcgcgtgcaattattgagg

SEQ ID NO: 472146 - DNA, 51 bp, Artificial
  Synthetic oligonucleotide
tgggcaacggtcactttagcgcagcatatgagcacgcattgttaccgggca

SEQ ID NO: 472147 - DNA, 55 bp, Artificial
  Synthetic oligonucleotide
tgggcaacgtccagtacggcgaaggtgaaaccgtctgggaggcatacatcccggg

SEQ ID NO: 472148 - DNA, 60 bp, Artificial
  Synthetic oligonucleotide
tgggcaagcagcctgattcatacagtgagcagatatgtgtgggatgctatattacatgaa

SEQ ID NO: 472149 - DNA, 59 bp, Artificial
  Synthetic oligonucleotide
tgggcaagcagggagctagaacgattcgcagttaaccctggccttttggaaacatcaga

SEQ ID NO: 472150 - DNA, 55 bp, Artificial
  Synthetic oligonucleotide
tgggcaagcgccggttaatgtgaataacccaggtctaggacaaggtatgatcgag

SEQ ID NO: 472151 - DNA, 59 bp, Artificial
  Synthetic oligonucleotide
tgggcaagcggttcaatcgcttattggtacattagctcagagtggaccaactttaataa

SEQ ID NO: 472152 - DNA, 60 bp, Artificial
  Synthetic oligonucleotide
tgggcaataaagctcgattttatgcccgagtgtatgagaatatggcccaatataggagcc

SEQ ID NO: 472153 - DNA, 60 bp, Artificial
  Synthetic oligonucleotide
tgggcaatagatcgcctcttatgctaagaaaggttttcaaaacactctgtttatcagaca

SEQ ID NO: 472154 - DNA, 52 bp, Artificial
  Synthetic oligonucleotide
tgggcaattcaacgattaccacccaagaagcggccaattctgttgttgccta

SEQ ID NO: 472155 - DNA, 54 bp, Artificial
  Synthetic oligonucleotide
tgggcacacacgttatctgggactttggtttacaatcatcaatcaccctagtga

SEQ ID NO: 472156 - DNA, 60 bp, Artificial
  Synthetic oligonucleotide
tgggcaccatgccgtatcaaatggtaccaaagtgaacacactcacagagagaggtgtgga

SEQ ID NO: 472157 - DNA, 60 bp, Artificial
  Synthetic oligonucleotide
tgggcaccgatgactttgatgtatccatgtctgggctgacgatccgagtacgccactcgg

SEQ ID NO: 472158 - DNA, 55 bp, Artificial
  Synthetic oligonucleotide
tgggcacgagtccgagattttaaacgaaagccctcccatcgctatagggagtccg

SEQ ID NO: 472159 - DNA, 55 bp, Artificial
  Synthetic oligonucleotide
tgggcacggtagaaggagttccctgtctgaattctactccctgggtgaattgccg

SEQ ID NO: 472160 - DNA, 55 bp, Artificial
  Synthetic oligonucleotide
tgggcactcccgttgggggccgttcgatgcttcacggtttctacgcgtagcagac

SEQ ID NO: 472161 - DNA, 60 bp, Artificial
  Synthetic oligonucleotide
tgggcactcggtgagaacatggcaccggaaaaagtggactttgaggattgcaaagatgtc

SEQ ID NO: 472162 - DNA, 60 bp, Artificial
  Synthetic oligonucleotide
tgggcactgccgggctggtacctcgggctctgagctcagcaacgctggaggacacgttta

SEQ ID NO: 472163 - DNA, 60 bp, Artificial
  Synthetic oligonucleotide
tgggcactgggaggaatgacacgttcacatacgctggatgtcaggggctaactaagccga

SEQ ID NO: 472164 - DNA, 55 bp, Artificial
  Synthetic oligonucleotide
tgggcacttattacacaaccacttaccctcagaaccagtcagtgtttcaaccagg

SEQ ID NO: 472165 - DNA, 60 bp, Artificial
  Synthetic oligonucleotide
tgggcacttggtgagaacatggcaccagaaaaagtggactttgaggattgcaaggacatt

SEQ ID NO: 472166 - DNA, 57 bp, Artificial
  Synthetic oligonucleotide
tgggcagaagacgtagtagtagtagaacctaaaccactcacctcaggaccgactcaa

SEQ ID NO: 472167 - DNA, 60 bp, Artificial
  Synthetic oligonucleotide
tgggcagaagcgcttcgtcaaaatcccactgaagcacacactaggttacccgaagcgtga

SEQ ID NO: 472168 - DNA, 58 bp, Artificial
  Synthetic oligonucleotide
tgggcagacgaacgcaacttaaagcaagctgaccctaagattcagtggatgcgtatta

SEQ ID NO: 472169 - DNA, 60 bp, Artificial
  Synthetic oligonucleotide
tgggcagacttcacccaccaggccatacctcgcgcgtcacactatggagttctcaaacaa

SEQ ID NO: 472170 - DNA, 60 bp, Artificial
  Synthetic oligonucleotide
tgggcagcacagaaaacaccatgtttatccccataggcctagaattcatgaacggagaca

SEQ ID NO: 472171 - DNA, 54 bp, Artificial
  Synthetic oligonucleotide
tgggcagccctgtcttatacttagtggaaacgggaaccaaacgaagtgctttcg

SEQ ID NO: 472172 - DNA, 57 bp, Artificial
  Synthetic oligonucleotide
tgggcagggagaacagttagcatttcgtcccgaagtggttttgaaatcctattgata

SEQ ID NO: 472173 - DNA, 60 bp, Artificial
  Synthetic oligonucleotide
tgggcaggggatatattgagaacccaagaatcatcctgcacttgcatccaaggtgattgc

SEQ ID NO: 472174 - DNA, 53 bp, Artificial
  Synthetic oligonucleotide
tgggcagtgcccatactgtatgactattaccgaggcaactgagagtgctttac

SEQ ID NO: 472175 - DNA, 59 bp, Artificial
  Synthetic oligonucleotide
tgggcagtttgcgcacctttgggcgtataaatacgatggccaaccaggagattgcggag

SEQ ID NO: 472176 - DNA, 60 bp, Artificial
  Synthetic oligonucleotide
tgggcatacaatgcagaattgctagtactgcttgaaaatcagaagacactcgatgagcat

SEQ ID NO: 472177 - DNA, 55 bp, Artificial
  Synthetic oligonucleotide
tgggcatcattgcctaaggaagactggatcattaaccagacatggaacggaacgg

SEQ ID NO: 472178 - DNA, 60 bp, Artificial
  Synthetic oligonucleotide
tgggcatccagaattgcgttaaagtcttcctgatcaagagtgggatcaatcaggcctgca

SEQ ID NO: 472179 - DNA, 60 bp, Artificial
  Synthetic oligonucleotide
tgggcatctcaagtgcaagtggtgtcgatttcagcacacaggcagccagagacacctcaa

SEQ ID NO: 472180 - DNA, 55 bp, Artificial
  Synthetic oligonucleotide
tgggcatgagcctccaagtaagctcattgctgtaccgaagacgcagaagtctccg

SEQ ID NO: 472181 - DNA, 53 bp, Artificial
  Synthetic oligonucleotide
tgggcatggtacacaatgagtagatatgagatacccctagggcaacatggaag

SEQ ID NO: 472182 - DNA, 60 bp, Artificial
  Synthetic oligonucleotide
tgggcatggttgtcgccacaaccgacattgatccatccctgtaactctcgtaagctctca

SEQ ID NO: 472183 - DNA, 60 bp, Artificial
  Synthetic oligonucleotide
tgggcatgtttaacatgctgagcacggtattgggagtctcaattctgaatcttggacaaa

SEQ ID NO: 472184 - DNA, 60 bp, Artificial
  Synthetic oligonucleotide
tgggcatgtttaacatgctgagtacagtcctaggagtctcgatcttgaatcttgggcaaa

SEQ ID NO: 472185 - DNA, 56 bp, Artificial
  Synthetic oligonucleotide
tgggcatgtttaataacaccgtacgcattgatgacttattgtctccgctattaagt

SEQ ID NO: 472186 - DNA, 55 bp, Artificial
  Synthetic oligonucleotide
tgggcattacagttaccttgttgtttgcattcctaaccagacgaaggtgggtaac

SEQ ID NO: 472187 - DNA, 60 bp, Artificial
  Synthetic oligonucleotide
tgggcattctggatggtaacctccagccatctgaaagcgttaaagctgccgctaaagcat

SEQ ID NO: 472188 - DNA, 58 bp, Artificial
  Synthetic oligonucleotide
tgggcattgtgaaagtgtacttcatggtgtttatgcactttcactccctttttacatt

SEQ ID NO: 472189 - DNA, 55 bp, Artificial
  Synthetic oligonucleotide
tgggcattgtgtccacgcctcgaaggggcagaagcaggcgacttatttgtctagc

SEQ ID NO: 472190 - DNA, 55 bp, Artificial
  Synthetic oligonucleotide
tgggcatttcacgcacccgggcagtcatctccgctggaccgcctcgctggttcta

SEQ ID NO: 472191 - DNA, 60 bp, Artificial
  Synthetic oligonucleotide
tgggccaacaggcccatgaatcggaagcccatgttctacagaatgtatagaagccctgac

SEQ ID NO: 472192 - DNA, 55 bp, Artificial
  Synthetic oligonucleotide
tgggccaaggtgtttctcgtgttatgtctattctccggagtggacgctagcacga

SEQ ID NO: 472193 - DNA, 55 bp, Artificial
  Synthetic oligonucleotide
tgggccaagtccttacaagggcttgaggtactttatactatctactccggatagt

SEQ ID NO: 472194 - DNA, 60 bp, Artificial
  Synthetic oligonucleotide
tgggccaatcacccaatgtatatcaagccagatttgaagctgtggcgtggtcagcaacag

SEQ ID NO: 472195 - DNA, 60 bp, Artificial
  Synthetic oligonucleotide
tgggccacctataacagtccaatatgtctaagcgcgatggatcttggcgctccatcgcgg

SEQ ID NO: 472196 - DNA, 52 bp, Artificial
  Synthetic oligonucleotide
tgggccacgtgcgagcattacagcccggtgatcggacttgcccccggcgcgc

SEQ ID NO: 472197 - DNA, 60 bp, Artificial
  Synthetic oligonucleotide
tgggccactagttttccgcatttgctcattcgcacctcgcataggccgtcctactttcaa

SEQ ID NO: 472198 - DNA, 60 bp, Artificial
  Synthetic oligonucleotide
tgggccacttggtgtacgtcaggcttcaatgatctggcggtcctatcacattcttggaat

SEQ ID NO: 472199 - DNA, 55 bp, Artificial
  Synthetic oligonucleotide
tgggccaggagtaaggtatcccaaaacctttgggtggctgtggaagctagtgcca

SEQ ID NO: 472200 - DNA, 60 bp, Artificial
  Synthetic oligonucleotide
tgggccagtatcttcgagactggcttgtatctctgtcgctctcattttccgagaagcaaa

SEQ ID NO: 472201 - DNA, 59 bp, Artificial
  Synthetic oligonucleotide
tgggccagtatcttcgagcctggcccgtatttctgttggtctcattttccgagaagcaa

SEQ ID NO: 472202 - DNA, 59 bp, Artificial
  Synthetic oligonucleotide
tgggccagtctcgaagctactggcccgtatttctgttggtctcattttccgagaagcaa

SEQ ID NO: 472203 - DNA, 59 bp, Artificial
  Synthetic oligonucleotide
tgggcccagggagcgccacagtttaccagctgtagctgttgctcgggtggaaaatcctc

SEQ ID NO: 472204 - DNA, 59 bp, Artificial
  Synthetic oligonucleotide
tgggcccagtgctgaccacactggccccacagggaacctcctgaaatcccaggagaaca

SEQ ID NO: 472205 - DNA, 58 bp, Artificial
  Synthetic oligonucleotide
tgggccccacaacacacgtgctgacaaggacaagtgaaccaattagaaacgcccctca

SEQ ID NO: 472206 - DNA, 60 bp, Artificial
  Synthetic oligonucleotide
tgggccccagactgatgtctcccaaagcgatgtgcccggttatatcttcgaaccagggca

SEQ ID NO: 472207 - DNA, 55 bp, Artificial
  Synthetic oligonucleotide
tgggccccatttaaaaaagtgcaagtccgtacaccacttgttattgactgagtta

SEQ ID NO: 472208 - DNA, 58 bp, Artificial
  Synthetic oligonucleotide
tgggcccccaagactaaacagcctgcaatcctcgtccacaccccagggcccaagatgc

SEQ ID NO: 472209 - DNA, 54 bp, Artificial
  Synthetic oligonucleotide
tgggcccccaatgggtattccacacctttgactacagacgggggctatttggaa

SEQ ID NO: 472210 - DNA, 60 bp, Artificial
  Synthetic oligonucleotide
tgggccccttcaatctctgggtgcacagtatgcactatggaggctcaagtggctggaagt

SEQ ID NO: 472211 - DNA, 60 bp, Artificial
  Synthetic oligonucleotide
tgggcccgaaacatactaaggacacaagaatctgaatgcgtatgccacaacggtatctgc

SEQ ID NO: 472212 - DNA, 55 bp, Artificial
  Synthetic oligonucleotide
tgggcccggtctaccatagagcccctctagagttttttagcgaagcgcagttttg

SEQ ID NO: 472213 - DNA, 60 bp, Artificial
  Synthetic oligonucleotide
tgggccctcaactgaccgacatctatgctcgcacgaggaaggcgtacaaaatgctggcga

SEQ ID NO: 472214 - DNA, 55 bp, Artificial
  Synthetic oligonucleotide
tgggccctccctcttccgggttcagctgagtgaaagcacctatgtgttcacctgc

SEQ ID NO: 472215 - DNA, 56 bp, Artificial
  Synthetic oligonucleotide
tgggccctcgataccctgtggaccttggccgaatgggtaaggttgtgaccaatctc

SEQ ID NO: 472216 - DNA, 60 bp, Artificial
  Synthetic oligonucleotide
tgggccgaggagtgttggtggaggaccacgtctgatattgcgagcggacgtgagaatcac

SEQ ID NO: 472217 - DNA, 54 bp, Artificial
  Synthetic oligonucleotide
tgggccgcatttccattttagctaacttaattcggtagtcttcgaaatttagtg

SEQ ID NO: 472218 - DNA, 59 bp, Artificial
  Synthetic oligonucleotide
tgggccgcggtacccaactctcgacatggacgcacatctgatgggcttcctttcccatt

SEQ ID NO: 472219 - DNA, 56 bp, Artificial
  Synthetic oligonucleotide
tgggccgctaccggcaagaggggccgaaagtgtgaagggagagaccgctccgagag

SEQ ID NO: 472220 - DNA, 55 bp, Artificial
  Synthetic oligonucleotide
tgggccggcactggcatcatgaccacacggtgtccttgcggcgccaatatctctg

SEQ ID NO: 472221 - DNA, 57 bp, Artificial
  Synthetic oligonucleotide
tgggccgtatttcagttatacctctaacaacggctacacggctgaattagaaatggc

SEQ ID NO: 472222 - DNA, 57 bp, Artificial
  Synthetic oligonucleotide
tgggccgtgtccgacgggaaacaattgattcgtgagaaagagagagccttggaattg

SEQ ID NO: 472223 - DNA, 60 bp, Artificial
  Synthetic oligonucleotide
tgggcctaaaccacattggaatgcaagtggtgccagcattaacagtgtcacagacaaagg

SEQ ID NO: 472224 - DNA, 55 bp, Artificial
  Synthetic oligonucleotide
tgggcctacccaaagaacagcccgacttctcggaggacctctggaaccgatgcgc

SEQ ID NO: 472225 - DNA, 50 bp, Artificial
  Synthetic oligonucleotide
tgggcctaccgacgcgaaagctcggtacatggtggcgtacgtgccccctg

SEQ ID NO: 472226 - DNA, 60 bp, Artificial
  Synthetic oligonucleotide
tgggcctctgagcccaaccctggacatggatgcgcatctgatgggcttcctttcccattt

SEQ ID NO: 472227 - DNA, 60 bp, Artificial
  Synthetic oligonucleotide
tgggcctgaattaaaatgggcttggaccagtagattcgggactgtgccaatacaatgaga

SEQ ID NO: 472228 - DNA, 58 bp, Artificial
  Synthetic oligonucleotide
tgggcctgagccggaaccaatcttttcccagcaaaagctggatgaacgactttgtatg

SEQ ID NO: 472229 - DNA, 57 bp, Artificial
  Synthetic oligonucleotide
tgggcctggacagtctttgactgggatatgccctttttcgactcttactgttaccta

SEQ ID NO: 472230 - DNA, 50 bp, Artificial
  Synthetic oligonucleotide
tgggcctgggttataaattaaagagatattggcccaatctagttaaccca

SEQ ID NO: 472231 - DNA, 60 bp, Artificial
  Synthetic oligonucleotide
tgggcctgtctccaacgttttggatgtttatgttgtgcgcgatagcggagttagcgacaa

SEQ ID NO: 472232 - DNA, 58 bp, Artificial
  Synthetic oligonucleotide
tgggcctgtgtcggagttgaggtgggtcgtggccagcctctgggtgtagggatatccg

SEQ ID NO: 472233 - DNA, 52 bp, Artificial
  Synthetic oligonucleotide
tgggccttgcattatcagggtatacaggactatctggagtacccatatctgc

SEQ ID NO: 472234 - DNA, 54 bp, Artificial
  Synthetic oligonucleotide
tgggccttttgggttttgccgctccctttacacaatgtggttacccagcattaa

SEQ ID NO: 472235 - DNA, 55 bp, Artificial
  Synthetic oligonucleotide
tgggcgaagttgacccgagtaatcaggtggctcaaagacactcctgaggggacaa

SEQ ID NO: 472236 - DNA, 55 bp, Artificial
  Synthetic oligonucleotide
tgggcgaccgtgtcggtcggacgatccaggaccaccctgatccgcacatgatctt

SEQ ID NO: 472237 - DNA, 55 bp, Artificial
  Synthetic oligonucleotide
tgggcgacgatccaaagcgagttgaatttaattacctgcgttacagcgccatagg

SEQ ID NO: 472238 - DNA, 60 bp, Artificial
  Synthetic oligonucleotide
tgggcgacgtgagtttggtgtgccaccagtgtgctacatactaaacctgcaatggactgc

SEQ ID NO: 472239 - DNA, 60 bp, Artificial
  Synthetic oligonucleotide
tgggcgactgccactatgtggtaggggccactgctgaagggttgaagtgcccttgccagg

SEQ ID NO: 472240 - DNA, 60 bp, Artificial
  Synthetic oligonucleotide
tgggcgagatcacttgcctgctgtgggcgtctattcgggtgaagacttcagtaagcaatt

SEQ ID NO: 472241 - DNA, 50 bp, Artificial
  Synthetic oligonucleotide
tgggcgatctacaggccataattgccactgggaaatggtccactacgagt

SEQ ID NO: 472242 - DNA, 56 bp, Artificial
  Synthetic oligonucleotide
tgggcgcaaaagaagttcgggaagaggaacaccatctggctctttgggccggccac

SEQ ID NO: 472243 - DNA, 60 bp, Artificial
  Synthetic oligonucleotide
tgggcgcagcatcaataacgctgacggtacaggccagacaattattgtctggtatagtgc

SEQ ID NO: 472244 - DNA, 60 bp, Artificial
  Synthetic oligonucleotide
tgggcgcagcgtcaataacgctgacggtacaggcccggacattattatctgggatagtgc

SEQ ID NO: 472245 - DNA, 60 bp, Artificial
  Synthetic oligonucleotide
tgggcgcagtcatcgtcgtctggttagtagcactgactgtgtgtatggcttactcgctgc

SEQ ID NO: 472246 - DNA, 55 bp, Artificial
  Synthetic oligonucleotide
tgggcggaaccgccgcacaatcaatgatttctctctggttatacggtgcccactc

SEQ ID NO: 472247 - DNA, 55 bp, Artificial
  Synthetic oligonucleotide
tgggcggagagacaagcaaagccagccgacaaccgtgactctcggtgacggttcc

SEQ ID NO: 472248 - DNA, 54 bp, Artificial
  Synthetic oligonucleotide
tgggcggagttgggcggagctgggaggagtttgggcggagtttgggcgggacac

SEQ ID NO: 472249 - DNA, 59 bp, Artificial
  Synthetic oligonucleotide
tgggcggatacatgaccgataagtatgaaccgctagaggagttaggatatttagagcca

SEQ ID NO: 472250 - DNA, 50 bp, Artificial
  Synthetic oligonucleotide
tgggcgggcggcgtagcacacactaacgcgttttctggagcataccgagt

SEQ ID NO: 472251 - DNA, 55 bp, Artificial
  Synthetic oligonucleotide
tgggcggtaaccccgcccactctcatcacgcctaaagcgacgggctggtacagct

SEQ ID NO: 472252 - DNA, 56 bp, Artificial
  Synthetic oligonucleotide
tgggcggtttttctctcgtgagccatgacaccaacctgcccctcttcgctcgtctg

SEQ ID NO: 472253 - DNA, 60 bp, Artificial
  Synthetic oligonucleotide
tgggcgtaatggcccatggcaatctacaatggttgggcagatctgcagatattacactca

SEQ ID NO: 472254 - DNA, 60 bp, Artificial
  Synthetic oligonucleotide
tgggcgtacatgcggtagtagactagcgattcctcggtctgcgcttcgcccattcctagg

SEQ ID NO: 472255 - DNA, 55 bp, Artificial
  Synthetic oligonucleotide
tgggcgtgaatccatcatcaaccctggcactgctatggcctcacacaaagacgac

SEQ ID NO: 472256 - DNA, 55 bp, Artificial
  Synthetic oligonucleotide
tgggcgtgtgacggcttacgagacctagccgtcgccgttgagcccgttgtcttct

SEQ ID NO: 472257 - DNA, 60 bp, Artificial
  Synthetic oligonucleotide
tgggcgtgtggcaatcgcgttcactaacgatagtaatgatccactgcccaccaccaagtc

SEQ ID NO: 472258 - DNA, 54 bp, Artificial
  Synthetic oligonucleotide
tgggcgttccggtggatcgtatgtctagttgtattatatgtcgccaagagatga

SEQ ID NO: 472259 - DNA, 60 bp, Artificial
  Synthetic oligonucleotide
tgggcgttgaggtcccctctggtagggaccatcacactgcgttcgtgagatcttctcacg

SEQ ID NO: 472260 - DNA, 58 bp, Artificial
  Synthetic oligonucleotide
tgggctaaaagaagagccatatggctctggggcccagctagtacaggaaagactttac

SEQ ID NO: 472261 - DNA, 51 bp, Artificial
  Synthetic oligonucleotide
tgggctaaacaccatattggtcaagagttcacagagggcatatttggcccc

SEQ ID NO: 472262 - DNA, 60 bp, Artificial
  Synthetic oligonucleotide
tgggctaacgacaatgtaatgttagactgcgtcctttgtgccgcaacgattgaagctgat

SEQ ID NO: 472263 - DNA, 58 bp, Artificial
  Synthetic oligonucleotide
tgggctaactctagaaaggctagccacacttaaggccacaagcaactttaatgagaat

SEQ ID NO: 472264 - DNA, 53 bp, Artificial
  Synthetic oligonucleotide
tgggctaagatctagatgcccgcataaatagttatgtgggcctaaagacctag

SEQ ID NO: 472265 - DNA, 60 bp, Artificial
  Synthetic oligonucleotide
tgggctaatgccccgacggctcaacgtatctcagcacatcactactcactaggagcgcgt

SEQ ID NO: 472266 - DNA, 53 bp, Artificial
  Synthetic oligonucleotide
tgggctaatttactcacaacaaaggcaagatatccttgatctgtgggtctaca

SEQ ID NO: 472267 - DNA, 52 bp, Artificial
  Synthetic oligonucleotide
tgggctacaacaaagggaacagataacagtcctagacatagcagatgcctat

SEQ ID NO: 472268 - DNA, 56 bp, Artificial
  Synthetic oligonucleotide
tgggctacacttgtatacagggtgacttttctatgcccgtaccgtaccaaatacag

SEQ ID NO: 472269 - DNA, 55 bp, Artificial
  Synthetic oligonucleotide
tgggctacaggggatgagggctcagacagacaaggcaatggaactatcctaatca

SEQ ID NO: 472270 - DNA, 55 bp, Artificial
  Synthetic oligonucleotide
tgggctatagcgcatagatgcgcttcttgatatttgagatttagtggtccaagtt

SEQ ID NO: 472271 - DNA, 56 bp, Artificial
  Synthetic oligonucleotide
tgggctcaaattcctcctctcgttaggtatggtttatgtcctcgcaattacccaaa

SEQ ID NO: 472272 - DNA, 60 bp, Artificial
  Synthetic oligonucleotide
tgggctcaattcatttgtcgtcgggtctcagcttccctgtgaccctgaacccgacacaga

SEQ ID NO: 472273 - DNA, 60 bp, Artificial
  Synthetic oligonucleotide
tgggctcacaggtgtccacgcaacgctctggctcgcatgaaaactctaactcagctactg

SEQ ID NO: 472274 - DNA, 55 bp, Artificial
  Synthetic oligonucleotide
tgggctcagacacgctatcactcaaggtgttccaacataccttttaccaggctcg

SEQ ID NO: 472275 - DNA, 60 bp, Artificial
  Synthetic oligonucleotide
tgggctcatcaaccccctaggcactgacaccctgtcggtcacagtgcagctcgagaccag

SEQ ID NO: 472276 - DNA, 55 bp, Artificial
  Synthetic oligonucleotide
tgggctcatgggtgaagccacagtgtgttggttatgagaatgttctggttagaag

SEQ ID NO: 472277 - DNA, 60 bp, Artificial
  Synthetic oligonucleotide
tgggctcattgaccccaaacttcctccagatgtgctgtcaacaatttgtgacgcatttag

SEQ ID NO: 472278 - DNA, 60 bp, Artificial
  Synthetic oligonucleotide
tgggctccaccagggctcatacggcgtgggtgacaaggtgatcacgcccatcacccctga

SEQ ID NO: 472279 - DNA, 58 bp, Artificial
  Synthetic oligonucleotide
tgggctccttgaccacgacacacgtcgtggtcgggaacctgttcgtgcttcgccacaa

SEQ ID NO: 472280 - DNA, 60 bp, Artificial
  Synthetic oligonucleotide
tgggctctgtttggaacagaagagctcttcactatgaaagtcagctgtggagtaaaatcc

SEQ ID NO: 472281 - DNA, 59 bp, Artificial
  Synthetic oligonucleotide
tgggctcttaaagttggacaaatgcatctcagggaacgatcaattgtaacgcttcgcaa

SEQ ID NO: 472282 - DNA, 60 bp, Artificial
  Synthetic oligonucleotide
tgggctgatcaaattgtcttgtcaattagataccactatccgatctaaggatcttccgat

SEQ ID NO: 472283 - DNA, 60 bp, Artificial
  Synthetic oligonucleotide
tgggctgctatcggtagtgattgtgatgtatccgtctgtccattagatacgacaatgaat

SEQ ID NO: 472284 - DNA, 57 bp, Artificial
  Synthetic oligonucleotide
tgggctggggggatagtatctgcgccctggtactccgggtgagttacgaacatccca

SEQ ID NO: 472285 - DNA, 53 bp, Artificial
  Synthetic oligonucleotide
tgggcttaaaatacagatttaagtgggtgtggggtggcaaccccgtgtcccaa

SEQ ID NO: 472286 - DNA, 55 bp, Artificial
  Synthetic oligonucleotide
tgggcttacaaagagttcaaatcacatatgaaaagacatactgtgtgtcaggcca

SEQ ID NO: 472287 - DNA, 60 bp, Artificial
  Synthetic oligonucleotide
tgggcttacaatagtaaaatcaagtgctggtgcatatgttggtgttcccaatgtgaacaa

SEQ ID NO: 472288 - DNA, 56 bp, Artificial
  Synthetic oligonucleotide
tgggcttactatgtaaaatctaaagccggtgattactcaacagaagcacgtactga

SEQ ID NO: 472289 - DNA, 60 bp, Artificial
  Synthetic oligonucleotide
tgggcttaggtccagatgtccacacagatagttgtgtgggcctagagatcgtgcccacat

SEQ ID NO: 472290 - DNA, 55 bp, Artificial
  Synthetic oligonucleotide
tgggcttataccctctctttaaccgatgtggtttctgggcttgccttgcccaagt

SEQ ID NO: 472291 - DNA, 56 bp, Artificial
  Synthetic oligonucleotide
tgggcttcaattccggtttaataccgatcaattccagatagttaataataacttga

SEQ ID NO: 472292 - DNA, 58 bp, Artificial
  Synthetic oligonucleotide
tgggcttcatacaacacaaacacgacgaatagtgacgacgtgtataatttcagtaccg

SEQ ID NO: 472293 - DNA, 55 bp, Artificial
  Synthetic oligonucleotide
tgggcttggctacattgacattccagtggtgactttacttcattgggttggactt

SEQ ID NO: 472294 - DNA, 60 bp, Artificial
  Synthetic oligonucleotide
tgggcttgtcatgatttaatcggccgccgagaggcatttgccgaaatgactatagcccac

SEQ ID NO: 472295 - DNA, 56 bp, Artificial
  Synthetic oligonucleotide
tgggctttaggaaaatacctatgggagtgggcctcagcccgtttctcctggctcag

SEQ ID NO: 472296 - DNA, 60 bp, Artificial
  Synthetic oligonucleotide
tgggctttataccaacaccagataatccaatacatgatacataccgttatatagattctc

SEQ ID NO: 472297 - DNA, 59 bp, Artificial
  Synthetic oligonucleotide
tgggctttgtttgcacccactatcgaagccgaatcacctggatctagtacgctggttcc

SEQ ID NO: 472298 - DNA, 53 bp, Artificial
  Synthetic oligonucleotide
tggggaaacacacatcgtcgacttgtgggtcaaacataaacctatcgaagaat

SEQ ID NO: 472299 - DNA, 55 bp, Artificial
  Synthetic oligonucleotide
tggggaaagtccagttaactgctctgctagatacaggtgcaacaagatcctgtat

SEQ ID NO: 472300 - DNA, 53 bp, Artificial
  Synthetic oligonucleotide
tggggaaatcccttttttacaaattggttccatggtgaccaaagaatggtagc

SEQ ID NO: 472301 - DNA, 60 bp, Artificial
  Synthetic oligonucleotide
tggggaacgacatgggtccctcggctatgaccagcgatgattgttcgactgagggtgaac

SEQ ID NO: 472302 - DNA, 56 bp, Artificial
  Synthetic oligonucleotide
tggggaacggcaagctcttcggggtccacaatgcaagtttagtcaaccttcgaaga

SEQ ID NO: 472303 - DNA, 59 bp, Artificial
  Synthetic oligonucleotide
tggggaagcgtcgttatctgaccaaatcattgtacaatcaggttctggaggacaaaata

SEQ ID NO: 472304 - DNA, 59 bp, Artificial
  Synthetic oligonucleotide
tggggaaggggtgactgtcctaagtctaccaacctcatatgacctcagttatgtgaggc

SEQ ID NO: 472305 - DNA, 54 bp, Artificial
  Synthetic oligonucleotide
tggggaaggtattatgtttgtccgacgttacgaggggaactggtttgacgcatc

SEQ ID NO: 472306 - DNA, 55 bp, Artificial
  Synthetic oligonucleotide
tggggaatcaactgtgcgttttcatagttgtacccatgtctgttatatctacaga

SEQ ID NO: 472307 - DNA, 58 bp, Artificial
  Synthetic oligonucleotide
tggggaatcagggccggcgtcaacgcacatccagtcggttactactacctcgacatcc

SEQ ID NO: 472308 - DNA, 51 bp, Artificial
  Synthetic oligonucleotide
tggggaatcttaggcttttggatgttaataatttgtaatgcggtggggaac

SEQ ID NO: 472309 - DNA, 55 bp, Artificial
  Synthetic oligonucleotide
tggggaattcatcaccctaatgatgcagctgaacagataaaactctaccaaaact

SEQ ID NO: 472310 - DNA, 60 bp, Artificial
  Synthetic oligonucleotide
tggggaattcatcacccttccagcacacaggaaaagaatgacctatacggaacgcagtca

SEQ ID NO: 472311 - DNA, 57 bp, Artificial
  Synthetic oligonucleotide
tggggacaacgggtctgagtctgagaccttcagacctggaggaggaaatatgaggga

SEQ ID NO: 472312 - DNA, 55 bp, Artificial
  Synthetic oligonucleotide
tggggacaatatatatgcgagaagatatttgggttagattgtggtccctacaccc

SEQ ID NO: 472313 - DNA, 52 bp, Artificial
  Synthetic oligonucleotide
tggggacaattaagaagtttgtgaattgtacatcagggacattatatggtcc

SEQ ID NO: 472314 - DNA, 55 bp, Artificial
  Synthetic oligonucleotide
tggggacacttggccaggagtggaagcccataataagaactctgcaaccaactgc

SEQ ID NO: 472315 - DNA, 60 bp, Artificial
  Synthetic oligonucleotide
tggggacatgaacactagtttgggcaattgcatactcatgtgcgcaatggtctacggttt

SEQ ID NO: 472316 - DNA, 58 bp, Artificial
  Synthetic oligonucleotide
tggggaccaaagttggtcctacatagtggagagacctggagcccaacatgggatatgt

SEQ ID NO: 472317 - DNA, 60 bp, Artificial
  Synthetic oligonucleotide
tggggaccgtctacaacaatgatctgactgcaggcatgcacatcttctgcgacggggatc

SEQ ID NO: 472318 - DNA, 56 bp, Artificial
  Synthetic oligonucleotide
tggggacctcaaaggtaagccgcacttccaatttctctcctcgtggaggtataggc

SEQ ID NO: 472319 - DNA, 55 bp, Artificial
  Synthetic oligonucleotide
tggggacctggtgaaacgaatgactcaactacagttgaaccagtacttgatggac

SEQ ID NO: 472320 - DNA, 58 bp, Artificial
  Synthetic oligonucleotide
tggggacgaaagggtgtgaggtctcagaggaggaaatattcacggccagttgcttaca

SEQ ID NO: 472321 - DNA, 53 bp, Artificial
  Synthetic oligonucleotide
tggggacgactgacagggcgggagtccccacgtacacctggggggcaaacgac

SEQ ID NO: 472322 - DNA, 53 bp, Artificial
  Synthetic oligonucleotide
tggggacgatgtcttcacagtctcttgtcgagttctcacgagaccatcccccg

SEQ ID NO: 472323 - DNA, 55 bp, Artificial
  Synthetic oligonucleotide
tggggacgcaaacaatgaaatgttgtataccatgtggggctctgtgtaccgttgt

SEQ ID NO: 472324 - DNA, 54 bp, Artificial
  Synthetic oligonucleotide
tggggacgtgcgttgtacggttgactaaggcgggcgtccccctagtccgagtgc

SEQ ID NO: 472325 - DNA, 55 bp, Artificial
  Synthetic oligonucleotide
tggggacgttggcttttaagcaaggggagcgtgtggcttactcatttgaagtcaa

SEQ ID NO: 472326 - DNA, 52 bp, Artificial
  Synthetic oligonucleotide
tggggactttccaggggaggtgtggtttgggcggagttggggagtggccaac

SEQ ID NO: 472327 - DNA, 60 bp, Artificial
  Synthetic oligonucleotide
tggggagaagcgactgaacgctgaagactggagactcatcagggaagtcagaaccacaat

SEQ ID NO: 472328 - DNA, 60 bp, Artificial
  Synthetic oligonucleotide
tggggagacaaaccgatgtcgctctcaatgtctcacgatgggtcatccattcgttctgct

SEQ ID NO: 472329 - DNA, 55 bp, Artificial
  Synthetic oligonucleotide
tggggagacattagtttggagatttgaccctaagctggctcatgattacaaagcc

SEQ ID NO: 472330 - DNA, 56 bp, Artificial
  Synthetic oligonucleotide
tggggagcctagatatttgtgtttagacttggtcactaagttttatagtccctata

SEQ ID NO: 472331 - DNA, 53 bp, Artificial
  Synthetic oligonucleotide
tggggagcctgtgtatcaactaaccaaagtaaattggaaatccttttttacaa

SEQ ID NO: 472332 - DNA, 57 bp, Artificial
  Synthetic oligonucleotide
tggggaggcatactgcgcaaacgcggaagtaagccccgtcacgtgacggtcacgtgg

SEQ ID NO: 472333 - DNA, 50 bp, Artificial
  Synthetic oligonucleotide
tggggagggttacgaaatcttcgtaacccctatggataagaaaaaaggtg

SEQ ID NO: 472334 - DNA, 58 bp, Artificial
  Synthetic oligonucleotide
tggggaggtacacgaaggtggtgactcttacagttacgttgcggtcgcagtcgtgcga

SEQ ID NO: 472335 - DNA, 55 bp, Artificial
  Synthetic oligonucleotide
tggggagtcatacggcgaatcagtgaaacaagccgtgctactgaacgttctgggg

SEQ ID NO: 472336 - DNA, 57 bp, Artificial
  Synthetic oligonucleotide
tggggagtgcctggttccgtgttactaatatccttgatgataacttggtgtttaaca

SEQ ID NO: 472337 - DNA, 60 bp, Artificial
  Synthetic oligonucleotide
tggggagtggctaaccctcagatgctgcatataagcagctgctttctgcctgtacggggt

SEQ ID NO: 472338 - DNA, 56 bp, Artificial
  Synthetic oligonucleotide
tggggagttcaccacccgagtacaaatcaagaacaaaccgacctgtatgttcaagc

SEQ ID NO: 472339 - DNA, 55 bp, Artificial
  Synthetic oligonucleotide
tggggatacttggacaggagttgaagcactgataaggatactgcaacaactactg

SEQ ID NO: 472340 - DNA, 60 bp, Artificial
  Synthetic oligonucleotide
tggggatataaggatttgctccatgagatacgtaaattttatgcatggttgctcgaaatg

SEQ ID NO: 472341 - DNA, 59 bp, Artificial
  Synthetic oligonucleotide
tggggatcaatgcccgtgacaggtctattgctatgacgttccttgcggttggaggagtt

SEQ ID NO: 472342 - DNA, 59 bp, Artificial
  Synthetic oligonucleotide
tggggatcctcattgcgatgtctttcaaggtgaaacatgggacctttttgtggagcgaa

SEQ ID NO: 472343 - DNA, 60 bp, Artificial
  Synthetic oligonucleotide
tggggatcgctggtgaatatccaaaacgctatgctttcactgaatagaggatactcaccg

SEQ ID NO: 472344 - DNA, 60 bp, Artificial
  Synthetic oligonucleotide
tggggatctatcctggaaggagaccgctcggaaggctacgcagcgccgcgatatacgggc

SEQ ID NO: 472345 - DNA, 58 bp, Artificial
  Synthetic oligonucleotide
tggggatgcttctagttacataccggagtggttgatagacctctgtgtaaggaaacag

SEQ ID NO: 472346 - DNA, 58 bp, Artificial
  Synthetic oligonucleotide
tggggatggagcaccatgatgctccttgggatgttaatgatctgtagtgctacagaac

SEQ ID NO: 472347 - DNA, 56 bp, Artificial
  Synthetic oligonucleotide
tggggatggatttactagctactttcttacgcttgccgtactttggatttacaata

SEQ ID NO: 472348 - DNA, 60 bp, Artificial
  Synthetic oligonucleotide
tggggatggggcatgatgctccttggaatgttgatgacgtatagtgctacagaacagttg

SEQ ID NO: 472349 - DNA, 59 bp, Artificial
  Synthetic oligonucleotide
tggggatgtggaagtggctagtaatagccagtttagtatggcctgctttggcactgaga

SEQ ID NO: 472350 - DNA, 55 bp, Artificial
  Synthetic oligonucleotide
tggggattcaacacaaatatggaatcccattaaatccgcaaagtcaagcattagt

SEQ ID NO: 472351 - DNA, 59 bp, Artificial
  Synthetic oligonucleotide
tggggattgaaatatgcaccttggtgtgcctattcaaaagactgccctgtcgttagttg

SEQ ID NO: 472352 - DNA, 55 bp, Artificial
  Synthetic oligonucleotide
tggggattggcataggcgtagcgataggtttcggtatagctaacgcaaacttaac

SEQ ID NO: 472353 - DNA, 60 bp, Artificial
  Synthetic oligonucleotide
tggggatttcgcgtgagggagtggctgagcagacggagagattgagagatctgcggcgaa

SEQ ID NO: 472354 - DNA, 60 bp, Artificial
  Synthetic oligonucleotide
tggggcaaaagaggtggcactcagctattccactggtgcactagccagctgcatgggact

SEQ ID NO: 472355 - DNA, 60 bp, Artificial
  Synthetic oligonucleotide
tggggcaaatatgtcacgaaggaatccttgcaaatttgaaattcgaggtcattgcttgaa

SEQ ID NO: 472356 - DNA, 55 bp, Artificial
  Synthetic oligonucleotide
tggggcaatcacaagcaggaatacagccgctactaatgcagattgtgcctggctg

SEQ ID NO: 472357 - DNA, 60 bp, Artificial
  Synthetic oligonucleotide
tggggcaatcagcttaacactgcaattagggaacataatttctatatgggttagccactc

SEQ ID NO: 472358 - DNA, 55 bp, Artificial
  Synthetic oligonucleotide
tggggcaatctatccaagatagggattgttggaacagggagtgccagttacaggg

SEQ ID NO: 472359 - DNA, 53 bp, Artificial
  Synthetic oligonucleotide
tggggcacaaatccaatacttttcgtaaaatgcaaaaaaactccttgtttcta

SEQ ID NO: 472360 - DNA, 60 bp, Artificial
  Synthetic oligonucleotide
tggggcacaagttgcaggatgcagcgccttacaagaagttcgctgaacaagcaaccgtta

SEQ ID NO: 472361 - DNA, 58 bp, Artificial
  Synthetic oligonucleotide
tggggcacatatacgttcggcatgtaaataaagagaccccggcggatgttaccagcta

SEQ ID NO: 472362 - DNA, 55 bp, Artificial
  Synthetic oligonucleotide
tggggcaccaggcaacctccagcccaccaccaacacttcaggtgcacagactgtc

SEQ ID NO: 472363 - DNA, 59 bp, Artificial
  Synthetic oligonucleotide
tggggcaccccacctcaacccaattgatggaccactacctgaggataatgagccaagtg

SEQ ID NO: 472364 - DNA, 55 bp, Artificial
  Synthetic oligonucleotide
tggggcatccgttgccagacgattatgtcggttatgatgctatgagcattaccac

SEQ ID NO: 472365 - DNA, 60 bp, Artificial
  Synthetic oligonucleotide
tggggcatcgatcccatcgaagatctgttgcagctcatcccccttcgggatggctgtgtg

SEQ ID NO: 472366 - DNA, 60 bp, Artificial
  Synthetic oligonucleotide
tggggccaaagaagtggcactcagctactcaactggtgcacttgccagttgcatgggtct

SEQ ID NO: 472367 - DNA, 55 bp, Artificial
  Synthetic oligonucleotide
tggggccaatgctaaaggtatggacctgggtaccatcccaggtgattgtggtgcc

SEQ ID NO: 472368 - DNA, 60 bp, Artificial
  Synthetic oligonucleotide
tggggccagccgatgacatcagagaggcgggctggcgacttctcgcccctatcaccgcgt

SEQ ID NO: 472369 - DNA, 56 bp, Artificial
  Synthetic oligonucleotide
tggggccccaatgacccccggcataagtcgcgcaacgtgggtaaggtcatcgatac

SEQ ID NO: 472370 - DNA, 60 bp, Artificial
  Synthetic oligonucleotide
tggggccctatcagctatgccaatgggagtggccccgaccaacgcccttactgctggcac

SEQ ID NO: 472371 - DNA, 54 bp, Artificial
  Synthetic oligonucleotide
tggggccctatcggccacgccaacgggagcggtcccgaccaacgcccctactgc

SEQ ID NO: 472372 - DNA, 60 bp, Artificial
  Synthetic oligonucleotide
tggggccgagagagaacgtggcagtaatacaaattggcggtgctgacattcttgatataa

SEQ ID NO: 472373 - DNA, 53 bp, Artificial
  Synthetic oligonucleotide
tggggccgccggaggcgggtaaggagataccgaaggcgacgcgggggcaccaa

SEQ ID NO: 472374 - DNA, 60 bp, Artificial
  Synthetic oligonucleotide
tggggccgcgagagaatgtagctgtgattcaagtcggaggttctgacatacttgatataa

SEQ ID NO: 472375 - DNA, 60 bp, Artificial
  Synthetic oligonucleotide
tggggcctcaacattcgtgccaatcacagtgaccatagcaccaatgaacgctgaatacaa

SEQ ID NO: 472376 - DNA, 51 bp, Artificial
  Synthetic oligonucleotide
tggggcctcgggagcccaaactgtcacggccccgactgggcctccccggtt

SEQ ID NO: 472377 - DNA, 56 bp, Artificial
  Synthetic oligonucleotide
tggggcgctaagttggtagttatattactctaaactatctgaagtcgctaaacagt

SEQ ID NO: 472378 - DNA, 60 bp, Artificial
  Synthetic oligonucleotide
tggggcgggacatgaagaaccgatgctcatgcagagctacggctggaacttggtctccct

SEQ ID NO: 472379 - DNA, 55 bp, Artificial
  Synthetic oligonucleotide
tggggcggtcagttttgtcccggccagcaacaacaatccatttcaaaacttgcta

SEQ ID NO: 472380 - DNA, 55 bp, Artificial
  Synthetic oligonucleotide
tggggcgttcgtgtcgctaacttaaaatctatctggaccgcgccccttcctcctg

SEQ ID NO: 472381 - DNA, 51 bp, Artificial
  Synthetic oligonucleotide
tggggctaaccaacccatctccccctgccgctccggtagtaaactggacac

SEQ ID NO: 472382 - DNA, 60 bp, Artificial
  Synthetic oligonucleotide
tggggctaaggaggtcgcactcagttactcaaccggtgcacttgccagttgcatgggtct

SEQ ID NO: 472383 - DNA, 56 bp, Artificial
  Synthetic oligonucleotide
tggggctcacccaagatctattaatgacaaccccaatgttttgcaccggtgtttcc

SEQ ID NO: 472384 - DNA, 59 bp, Artificial
  Synthetic oligonucleotide
tggggctccaatcaagactttcaccctcgtgaactccaggctttctatcagaaattcac

SEQ ID NO: 472385 - DNA, 55 bp, Artificial
  Synthetic oligonucleotide
tggggctcctaaagaaagtccctacacacatgcaggcgcaagctctgtccttcgt

SEQ ID NO: 472386 - DNA, 60 bp, Artificial
  Synthetic oligonucleotide
tggggctctactatcaattttcgcgctgcaagagatcatgcaaaaagtcagacggaatca

SEQ ID NO: 472387 - DNA, 52 bp, Artificial
  Synthetic oligonucleotide
tggggctctttgaatatacaagcatcgcaaccatcaggcttgtttaaagtaa

SEQ ID NO: 472388 - DNA, 54 bp, Artificial
  Synthetic oligonucleotide
tggggcttaggttccactcgaatgtatggaggcgccaaaacaaggtccagccaa

SEQ ID NO: 472389 - DNA, 56 bp, Artificial
  Synthetic oligonucleotide
tggggcttttacatacactgtatagtttccagttgaaccagtactccaattatctg

SEQ ID NO: 472390 - DNA, 59 bp, Artificial
  Synthetic oligonucleotide
tgggggaaataaacaacatgaggactggacctacatctgtgaggcaatttctgaggagg

SEQ ID NO: 472391 - DNA, 60 bp, Artificial
  Synthetic oligonucleotide
tgggggaacttggatcgacccatcatgcacgctggcactatggatagcatacgccaaacc

SEQ ID NO: 472392 - DNA, 60 bp, Artificial
  Synthetic oligonucleotide
tgggggacgcttacggcttccaatactcacccaagcagcgagtggaacgcttgctcagga

SEQ ID NO: 472393 - DNA, 53 bp, Artificial
  Synthetic oligonucleotide
tgggggactccggggacgcatttatatggcgtcccccaatggctttttcgtaa

SEQ ID NO: 472394 - DNA, 60 bp, Artificial
  Synthetic oligonucleotide
tgggggaggcaaaggttatgatgattggtgtcgtctgcctccaaataaggaaatgtgtgc

SEQ ID NO: 472395 - DNA, 56 bp, Artificial
  Synthetic oligonucleotide
tgggggagtggtcttggttgatacggcacataaaaccgtggaaaatgcagtacgaa

SEQ ID NO: 472396 - DNA, 51 bp, Artificial
  Synthetic oligonucleotide
tgggggatactgaaaattccaacacatatagggcccaggcaaattccactg

SEQ ID NO: 472397 - DNA, 60 bp, Artificial
  Synthetic oligonucleotide
tgggggatggggcgttcatgacttccttcctgacatcggatcagacatccaatactacat

SEQ ID NO: 472398 - DNA, 59 bp, Artificial
  Synthetic oligonucleotide
tgggggcaaaattcaaagcaggccaaaccatctcatccttcaagcaggaggtcgtactc

SEQ ID NO: 472399 - DNA, 60 bp, Artificial
  Synthetic oligonucleotide
tgggggcaaccagcttttggatgtgttctaatgggtctttgcagtgcagaatatgcatct

SEQ ID NO: 472400 - DNA, 59 bp, Artificial
  Synthetic oligonucleotide
tgggggcaaggttaatgatatgatgtacatgtattgtaagaagccccagagtaatttag

SEQ ID NO: 472401 - DNA, 55 bp, Artificial
  Synthetic oligonucleotide
tgggggcataccagtgttgcagagtttttacagttgcatgatggcgcagagtgat

SEQ ID NO: 472402 - DNA, 50 bp, Artificial
  Synthetic oligonucleotide
tgggggcgatcacgtttcaaggggatggccagagtggcttacgttgtgga

SEQ ID NO: 472403 - DNA, 50 bp, Artificial
  Synthetic oligonucleotide
tgggggcgcttgcagttgtgcacttctccacgggacgtgtgttggcgcga

SEQ ID NO: 472404 - DNA, 53 bp, Artificial
  Synthetic oligonucleotide
tgggggctcaatgatgtagtagagtcgctatctcctgcgatcaggtatgcctt

SEQ ID NO: 472405 - DNA, 60 bp, Artificial
  Synthetic oligonucleotide
tgggggctgggcttgtcgcagccacgtgcattgtcacactgctggaaaaatttatggtgg

SEQ ID NO: 472406 - DNA, 60 bp, Artificial
  Synthetic oligonucleotide
tggggggacgcccgtccatgagctcaacttactaactaccgcgcaggaatgcatccggca

SEQ ID NO: 472407 - DNA, 59 bp, Artificial
  Synthetic oligonucleotide
tggggggagctgatagagacttcaacaatttgaccaaagggctatgtacaataaattca

SEQ ID NO: 472408 - DNA, 54 bp, Artificial
  Synthetic oligonucleotide
tggggggatgtaacgaatctagccacctgggtgggtactaatttggaagatccg

SEQ ID NO: 472409 - DNA, 56 bp, Artificial
  Synthetic oligonucleotide
tggggggcgaatggtcaagaagtagcatagttgggtggtctactataagggaaaga

SEQ ID NO: 472410 - DNA, 59 bp, Artificial
  Synthetic oligonucleotide
tgggggggacataggggttcacatggcacacgacgatcagtcagttagctccaaaatag

SEQ ID NO: 472411 - DNA, 51 bp, Artificial
  Synthetic oligonucleotide
tgggggggaggctttagaattacagggggtgctttttaattacagaacaaa

SEQ ID NO: 472412 - DNA, 60 bp, Artificial
  Synthetic oligonucleotide
tggggggtgcatcatcctccaactaccaatgagcaacaaagcctctatcagaatgctgat

SEQ ID NO: 472413 - DNA, 60 bp, Artificial
  Synthetic oligonucleotide
tggggggttcaccacccgagcacggacagagaacaaaccagcctatatattcgagcatca

SEQ ID NO: 472414 - DNA, 56 bp, Artificial
  Synthetic oligonucleotide
tggggggttttacgaacctctggtgcggcggtgttcagagctgatgggtcggcgga

SEQ ID NO: 472415 - DNA, 55 bp, Artificial
  Synthetic oligonucleotide
tgggggtacgatagttagttccctgccattccaaaacatcaaccctagaactgtg

SEQ ID NO: 472416 - DNA, 50 bp, Artificial
  Synthetic oligonucleotide
tgggggtagtctgcccatactgggtggctagatcccggggctcgcagatg

SEQ ID NO: 472417 - DNA, 60 bp, Artificial
  Synthetic oligonucleotide
tgggggtcacttcagagccgggttgataggagaaggtgccaatgaaatgaccgtagagca

SEQ ID NO: 472418 - DNA, 55 bp, Artificial
  Synthetic oligonucleotide
tgggggtctaatagcaccgagtcgagttagcaaactgactggaaggggactggga

SEQ ID NO: 472419 - DNA, 59 bp, Artificial
  Synthetic oligonucleotide
tgggggtctgctgctaccagggttgagacagacgagaaggtgataatactggactcttt

SEQ ID NO: 472420 - DNA, 58 bp, Artificial
  Synthetic oligonucleotide
tgggggtgacctacggttatgcagcatcagacaagtttctcccagggccaaataccaa

SEQ ID NO: 472421 - DNA, 55 bp, Artificial
  Synthetic oligonucleotide
tgggggtttttacgacacgggtttttatggatgctgtctttgactactcagtgga

SEQ ID NO: 472422 - DNA, 54 bp, Artificial
  Synthetic oligonucleotide
tggggtaacaagcttggaattaaacgggatcaacacttaagctatcggacccca

SEQ ID NO: 472423 - DNA, 60 bp, Artificial
  Synthetic oligonucleotide
tggggtaacacatcgacgcatgcgggagctcgcggctaggattatgaaatgtcgcatgac

SEQ ID NO: 472424 - DNA, 58 bp, Artificial
  Synthetic oligonucleotide
tggggtaagagctgaaggctatatacagcctgccggttgcgtttaccttttgaccaca

SEQ ID NO: 472425 - DNA, 55 bp, Artificial
  Synthetic oligonucleotide
tggggtacgtgttttatgacagaaactttggtgacggaaagtggactgacggaca

SEQ ID NO: 472426 - DNA, 55 bp, Artificial
  Synthetic oligonucleotide
tggggtacttttcacgcaacaagacggccaagtggtggtacaattcccaagacag

SEQ ID NO: 472427 - DNA, 60 bp, Artificial
  Synthetic oligonucleotide
tggggtagacgtcagagtagcgagatacgactatcagtcgacggaccagaatgagttacc

SEQ ID NO: 472428 - DNA, 50 bp, Artificial
  Synthetic oligonucleotide
tggggtagagatccctcagatttgtagtggctaagtaaaaatctctacca

SEQ ID NO: 472429 - DNA, 60 bp, Artificial
  Synthetic oligonucleotide
tggggtagcacattcaattgcaatcgaattatgtgtaccagggttccatggctgggcaac

SEQ ID NO: 472430 - DNA, 50 bp, Artificial
  Synthetic oligonucleotide
tggggtatgcgcagttgcggaggaaactagagatgttcacatacatgagg

SEQ ID NO: 472431 - DNA, 55 bp, Artificial
  Synthetic oligonucleotide
tggggtattcttctaacatttgaaattgttgtctgggcagcaagcgcagagactc

SEQ ID NO: 472432 - DNA, 60 bp, Artificial
  Synthetic oligonucleotide
tggggtatttgacagtgtagagaagaccaagtgatgttagtgcctgcacaacattgttca

SEQ ID NO: 472433 - DNA, 58 bp, Artificial
  Synthetic oligonucleotide
tggggtcaccttggatattgactgtgtagtcgattttggtttgaaagtggttgcagtc

SEQ ID NO: 472434 - DNA, 51 bp, Artificial
  Synthetic oligonucleotide
tggggtcatctggaactgtggtacgacctacaataccattggatcctttgg

SEQ ID NO: 472435 - DNA, 60 bp, Artificial
  Synthetic oligonucleotide
tggggtcatgtcatctaccaattgaacatgatgtgcatttgctaccccgtgaatggcatg

SEQ ID NO: 472436 - DNA, 55 bp, Artificial
  Synthetic oligonucleotide
tggggtccgctaccggatgggccgcagtcgaccagccggctcgatgatccggtgt

SEQ ID NO: 472437 - DNA, 58 bp, Artificial
  Synthetic oligonucleotide
tggggtcgattcatttatcgcctatacattagtgtcctatatatattgtgacaccaat

SEQ ID NO: 472438 - DNA, 58 bp, Artificial
  Synthetic oligonucleotide
tggggtcgggaattgaaaattagtgctagtagtttgcttgataccatagcaatagtag

SEQ ID NO: 472439 - DNA, 58 bp, Artificial
  Synthetic oligonucleotide
tggggtctatatgggaaccgtaccagctaggcgtctcaagatccacccttatgaggct

SEQ ID NO: 472440 - DNA, 59 bp, Artificial
  Synthetic oligonucleotide
tggggtcttgatcgtgaacactagtaagtaccccaacatgtatgtcccagttggtgctg

SEQ ID NO: 472441 - DNA, 60 bp, Artificial
  Synthetic oligonucleotide
tggggtgagcgaggttatcattcgaagagattctttgcgaattacttcgacataattgat

SEQ ID NO: 472442 - DNA, 57 bp, Artificial
  Synthetic oligonucleotide
tggggtgaggaactacctcaatgattagtttttttccgtcaaagctagagatgatta

SEQ ID NO: 472443 - DNA, 60 bp, Artificial
  Synthetic oligonucleotide
tggggtgatgcgtacttacacgacttccacacatggctcgcctacctactggtgaggaac

SEQ ID NO: 472444 - DNA, 60 bp, Artificial
  Synthetic oligonucleotide
tggggtgcggttgcacaggtatgctccggcgtgcaaacctctcctgcgggatgaggtcac

SEQ ID NO: 472445 - DNA, 55 bp, Artificial
  Synthetic oligonucleotide
tggggtgctcccagtttgaatccgtgttttcccagaaccctccctccagtcctgc

SEQ ID NO: 472446 - DNA, 58 bp, Artificial
  Synthetic oligonucleotide
tggggtgtgatcctgaagtgttttggtcaactataccattaatgttagatggagagtg

SEQ ID NO: 472447 - DNA, 56 bp, Artificial
  Synthetic oligonucleotide
tggggtgttattggacacgaagagggaggcccaggcggaagctaatgtgtacggga

SEQ ID NO: 472448 - DNA, 51 bp, Artificial
  Synthetic oligonucleotide
tggggttagttcgacgctctacggtatcccccgcgttacgaactacggtgt

SEQ ID NO: 472449 - DNA, 55 bp, Artificial
  Synthetic oligonucleotide
tggggttcaggtgaagtaaatgactcaacaacagttgaaccgactcttgatggac

SEQ ID NO: 472450 - DNA, 54 bp, Artificial
  Synthetic oligonucleotide
tggggttcaggtgtaggttttacacttacatgcctagtttcattgacagagtgc

SEQ ID NO: 472451 - DNA, 60 bp, Artificial
  Synthetic oligonucleotide
tggggttcaggtgtcgggtttacactcacatgccaggtgtctctcacagaatgcccaaca

SEQ ID NO: 472452 - DNA, 59 bp, Artificial
  Synthetic oligonucleotide
tggggttgaacaattgttggctcggatccatataggggatgaccatctcggtacctatg

SEQ ID NO: 472453 - DNA, 60 bp, Artificial
  Synthetic oligonucleotide
tggggttgtaatccccctgattgtcctggtgtagggacaggctgcactgcttgcggtgta

SEQ ID NO: 472454 - DNA, 59 bp, Artificial
  Synthetic oligonucleotide
tggggtttaaagtcaaggtagcctcacagctagaattttgctcacacgtctttgagcag

SEQ ID NO: 472455 - DNA, 55 bp, Artificial
  Synthetic oligonucleotide
tggggtttcggaacttggatttacctttgaactggatgagggcatggatatgcag

SEQ ID NO: 472456 - DNA, 53 bp, Artificial
  Synthetic oligonucleotide
tgggtaaaatggctatttatatttgcagaatgtcgaatcaccccaaaacaact

SEQ ID NO: 472457 - DNA, 60 bp, Artificial
  Synthetic oligonucleotide
tgggtaaataaattcaggtcagagcgtcatcacctcacgtgtctcatcagggatgcgtat

SEQ ID NO: 472458 - DNA, 52 bp, Artificial
  Synthetic oligonucleotide
tgggtaaattcacttcgtttttgaagcgcgcgggaaccgcgacaaaaagggc

SEQ ID NO: 472459 - DNA, 60 bp, Artificial
  Synthetic oligonucleotide
tgggtaacaaatgccagtcatggcgagatgatcagctatccagggagttttcaggagtaa

SEQ ID NO: 472460 - DNA, 59 bp, Artificial
  Synthetic oligonucleotide
tgggtaacaagagaaccctatgtgtcatgcgacaccagtaaatgttaccaatttgcact

SEQ ID NO: 472461 - DNA, 56 bp, Artificial
  Synthetic oligonucleotide
tgggtaagactcaaccgaaccgaagcaggtcgtatatcaagttgaaacggctgcgt

SEQ ID NO: 472462 - DNA, 55 bp, Artificial
  Synthetic oligonucleotide
tgggtaagatatggatggacgaaaatattaagaccaagaaccacactaacagtgt

SEQ ID NO: 472463 - DNA, 55 bp, Artificial
  Synthetic oligonucleotide
tgggtaaggtggtatgtttgtccgatgtaactaggggaatgggtttgactcatcg

SEQ ID NO: 472464 - DNA, 56 bp, Artificial
  Synthetic oligonucleotide
tgggtaaggtttggcggtgtgctacgcactgtacgcgttaaattcttcgacgcgcg

SEQ ID NO: 472465 - DNA, 60 bp, Artificial
  Synthetic oligonucleotide
tgggtaagtgtcgaggtgtcaaaccgaatgaccctgcttgacaagttgcgtggcactgaa

SEQ ID NO: 472466 - DNA, 58 bp, Artificial
  Synthetic oligonucleotide
tgggtaatactggcccagcgaacgttcgcacgccagttgagtgaatgaccaagatttt

SEQ ID NO: 472467 - DNA, 52 bp, Artificial
  Synthetic oligonucleotide
tgggtaatatgccgtctgtgaagggtccggatgattttcgtgtgggcactac

SEQ ID NO: 472468 - DNA, 55 bp, Artificial
  Synthetic oligonucleotide
tgggtaatgctaacaatttagaatttacgatagcttacgaccaggaaactaggac

SEQ ID NO: 472469 - DNA, 59 bp, Artificial
  Synthetic oligonucleotide
tgggtaattttgtaacgtaattctgaatctccacgctccagaaagcggccatccataca

SEQ ID NO: 472470 - DNA, 50 bp, Artificial
  Synthetic oligonucleotide
tgggtacaaaaacccaaggagttcgatcacgaattcggatgggatggctc

SEQ ID NO: 472471 - DNA, 60 bp, Artificial
  Synthetic oligonucleotide
tgggtacaaagcataaattcattatgtccatcacgccgtatgtgtgtagctataatggtt

SEQ ID NO: 472472 - DNA, 55 bp, Artificial
  Synthetic oligonucleotide
tgggtacaaccttctgactgattgtaacacatgattcaagctgattttgtcctct

SEQ ID NO: 472473 - DNA, 60 bp, Artificial
  Synthetic oligonucleotide
tgggtacaagggcatctggcggggagacggcatcatgcaaaccacctgcccgtgtggagc

SEQ ID NO: 472474 - DNA, 59 bp, Artificial
  Synthetic oligonucleotide
tgggtacaatgtggttaaacgcaggttcggagattcaagttgcaggatttgactactca

SEQ ID NO: 472475 - DNA, 55 bp, Artificial
  Synthetic oligonucleotide
tgggtacacgtacacttcgttggatgttaagccggctaaaactgagaagggtcaa

SEQ ID NO: 472476 - DNA, 55 bp, Artificial
  Synthetic oligonucleotide
tgggtacatatcatttcaggccaatagcattggtgaagcaaccttcaccttagtg

SEQ ID NO: 472477 - DNA, 60 bp, Artificial
  Synthetic oligonucleotide
tgggtacatcgacctagatgcaaccgccatgcagtctgatgatttcgtattgtcaggccg

SEQ ID NO: 472478 - DNA, 57 bp, Artificial
  Synthetic oligonucleotide
tgggtacatgtttgggtacaccgctacgagcacggtgcttctgacctgcggttttac

SEQ ID NO: 472479 - DNA, 52 bp, Artificial
  Synthetic oligonucleotide
tgggtaccaacgttccccgccttgcggccccaaccgttgccgtggccactcc

SEQ ID NO: 472480 - DNA, 53 bp, Artificial
  Synthetic oligonucleotide
tgggtaccaccttactaaatttggatgctaattatgttgagacagctagaacc

SEQ ID NO: 472481 - DNA, 60 bp, Artificial
  Synthetic oligonucleotide
tgggtaccactatggattgccctctaagtagtagacacaagtcactctatgcgtatatca

SEQ ID NO: 472482 - DNA, 55 bp, Artificial
  Synthetic oligonucleotide
tgggtacccacggccccttgcgcgcgcatttggaacggcacacagcgcgcgtgca

SEQ ID NO: 472483 - DNA, 56 bp, Artificial
  Synthetic oligonucleotide
tgggtacctcaggtaggggtagatatgtcgctaaggggcttaacttgtctcaacga

SEQ ID NO: 472484 - DNA, 60 bp, Artificial
  Synthetic oligonucleotide
tgggtacctgctgcctgtactctatgacgcaatggtcgatcttcatacagctacgactga

SEQ ID NO: 472485 - DNA, 51 bp, Artificial
  Synthetic oligonucleotide
tgggtacgagttaatacgggatttaatttgtattttacgctcccgtaatta

SEQ ID NO: 472486 - DNA, 54 bp, Artificial
  Synthetic oligonucleotide
tgggtactgggttcccaagtctccggagaagaagtatgttccgaagaatcttcc

SEQ ID NO: 472487 - DNA, 55 bp, Artificial
  Synthetic oligonucleotide
tgggtacttcaagaataaggaggaggaaaccgaaccatctgccttatctagactt

SEQ ID NO: 472488 - DNA, 60 bp, Artificial
  Synthetic oligonucleotide
tgggtagaacaatcagtagggactcgcggtcaggctatgagacatttagggtcattggtg

SEQ ID NO: 472489 - DNA, 54 bp, Artificial
  Synthetic oligonucleotide
tgggtagaagctaacatgacagacgaagaacgtacacagcaagctcgtcgcaag

SEQ ID NO: 472490 - DNA, 54 bp, Artificial
  Synthetic oligonucleotide
tgggtagacagttgttgggaaagtttgcatcaaagttccagacccaaccgggtc

SEQ ID NO: 472491 - DNA, 52 bp, Artificial
  Synthetic oligonucleotide
tgggtagaccaagccgaacctttaagacttattatcactggttttggttaca

SEQ ID NO: 472492 - DNA, 59 bp, Artificial
  Synthetic oligonucleotide
tgggtagagccggctaagtgtctgatgggaggaacgagcttcagggtagataggaaaca

SEQ ID NO: 472493 - DNA, 60 bp, Artificial
  Synthetic oligonucleotide
tgggtagatatatatccaacaggccaaggtcacgtgtccctgccatgccgtacgcccatc

SEQ ID NO: 472494 - DNA, 57 bp, Artificial
  Synthetic oligonucleotide
tgggtaggttaagaacgtgttcacgttcctgtgtgagaactgacggttggatgagga

SEQ ID NO: 472495 - DNA, 59 bp, Artificial
  Synthetic oligonucleotide
tgggtagttctaacagaagagattgctcgcgcgatcgaatctaaatacggtacgaagat

SEQ ID NO: 472496 - DNA, 60 bp, Artificial
  Synthetic oligonucleotide
tgggtataagactccgtataggagtccgtatggcgctcgtgtaacaccatatgtatatcg

SEQ ID NO: 472497 - DNA, 54 bp, Artificial
  Synthetic oligonucleotide
tgggtataggtactggcaggggctccgggggatctatgggatatacccctgtag

SEQ ID NO: 472498 - DNA, 54 bp, Artificial
  Synthetic oligonucleotide
tgggtatcaactacaccgttaccgggagtgaagccaccaagtaatttcttggtg

SEQ ID NO: 472499 - DNA, 60 bp, Artificial
  Synthetic oligonucleotide
tgggtatcccaattcacatatacacccggctcagcttaggtcacgatcggttcgctaggc

SEQ ID NO: 472500 - DNA, 55 bp, Artificial
  Synthetic oligonucleotide
tgggtatgaaatgttgaaagtgcctaatgcattaacagatgacagatcaaagcct

SEQ ID NO: 472501 - DNA, 53 bp, Artificial
  Synthetic oligonucleotide
tgggtatgcactgtcaaagggtatagaattaccaggtacatgttggacgtaca

SEQ ID NO: 472502 - DNA, 50 bp, Artificial
  Synthetic oligonucleotide
tgggtatggcaatacgcagatggttgttggaacgccagaggaggtaacgg

SEQ ID NO: 472503 - DNA, 56 bp, Artificial
  Synthetic oligonucleotide
tgggtatgtgagacttggtgaccccatacccgctatagggctcgacccaaaaatgg

SEQ ID NO: 472504 - DNA, 55 bp, Artificial
  Synthetic oligonucleotide
tgggtcaacgctatatacagaaagtagacgtcttcttaagagttggcatcttccc

SEQ ID NO: 472505 - DNA, 58 bp, Artificial
  Synthetic oligonucleotide
tgggtcaactcggcgtacgtcagcaactttcctgcgttgggccaatcgcaggggttgc

SEQ ID NO: 472506 - DNA, 60 bp, Artificial
  Synthetic oligonucleotide
tgggtcaagaacctatcaaatagaagacgatggatctaagtcagctatttcgagactgat

SEQ ID NO: 472507 - DNA, 55 bp, Artificial
  Synthetic oligonucleotide
tgggtcaaggttcctcttacgcctgtggcgggacagcgcacggtccacaggtgtt

SEQ ID NO: 472508 - DNA, 60 bp, Artificial
  Synthetic oligonucleotide
tgggtcaatggcccatcctgtagttgatgtcctcacgatttgcccgtccttgtcaatgat

SEQ ID NO: 472509 - DNA, 50 bp, Artificial
  Synthetic oligonucleotide
tgggtcacaccgttttgatgctgcgagtgatgaccaccaaacaagtgtta

SEQ ID NO: 472510 - DNA, 56 bp, Artificial
  Synthetic oligonucleotide
tgggtcacacctgcaaggagtacttcccgtgtaaaaccaggggccgtgagctcgtg

SEQ ID NO: 472511 - DNA, 60 bp, Artificial
  Synthetic oligonucleotide
tgggtcacaggccattggtggggattgcgcctatacgtctctggacatgacccagggctc

SEQ ID NO: 472512 - DNA, 60 bp, Artificial
  Synthetic oligonucleotide
tgggtcagagagtacctgcctaagcaatgagtcaccacttgagggtctcatatattactg

SEQ ID NO: 472513 - DNA, 60 bp, Artificial
  Synthetic oligonucleotide
tgggtcaggcaagacgcatagtatgttaaacacatatggaaatataccaatagtaacaac

SEQ ID NO: 472514 - DNA, 60 bp, Artificial
  Synthetic oligonucleotide
tgggtcaggcacgcggagatgtccccgccgtggtcgtgcatggccaggaactggagcatg

SEQ ID NO: 472515 - DNA, 60 bp, Artificial
  Synthetic oligonucleotide
tgggtcagtgacaactgggtaccatatactcaaggctgggactgttaagcaactcatcga

SEQ ID NO: 472516 - DNA, 55 bp, Artificial
  Synthetic oligonucleotide
tgggtcagtgcaagtcattttagattcactaccccagatacatactcagcagctg

SEQ ID NO: 472517 - DNA, 54 bp, Artificial
  Synthetic oligonucleotide
tgggtcagttaatccgttgtgggtgggtttagttcctggctgccttaagtagcc

SEQ ID NO: 472518 - DNA, 55 bp, Artificial
  Synthetic oligonucleotide
tgggtcataacccctcgtccatactgccttctgagcttagcttttgcatggtcac

SEQ ID NO: 472519 - DNA, 60 bp, Artificial
  Synthetic oligonucleotide
tgggtcatacaatccactgttagcacagagcagtggagtgaaggtgagtggtgcgcacac

SEQ ID NO: 472520 - DNA, 59 bp, Artificial
  Synthetic oligonucleotide
tgggtcatgatggacggtgatgaacaggttgaatacccaatcaaacctttattggaaca

SEQ ID NO: 472521 - DNA, 56 bp, Artificial
  Synthetic oligonucleotide
tgggtcattctccttagctgcaatgatccagcaagctcagtgcactctccattaca

SEQ ID NO: 472522 - DNA, 58 bp, Artificial
  Synthetic oligonucleotide
tgggtccagacatacgccattccggcccttaaatgcaacacggaatcgactccttcgc

SEQ ID NO: 472523 - DNA, 57 bp, Artificial
  Synthetic oligonucleotide
tgggtccagccactgaggtatttgcgaagtactgtaggtactacttgaatgccacac

SEQ ID NO: 472524 - DNA, 60 bp, Artificial
  Synthetic oligonucleotide
tgggtccattccttctgacctgatccctcgatcctcctcgctctggattggaaatcgtca

SEQ ID NO: 472525 - DNA, 51 bp, Artificial
  Synthetic oligonucleotide
tgggtccgaatgatatattatattcgaggtgactcagcagccaattacgtt

SEQ ID NO: 472526 - DNA, 55 bp, Artificial
  Synthetic oligonucleotide
tgggtcctaaagagtctgggctatagctgctagccctagggaagaaagcaaacag

SEQ ID NO: 472527 - DNA, 60 bp, Artificial
  Synthetic oligonucleotide
tgggtcctccttgtagtgggatccagccggttctgacgctgttcagccacaatgctgcag

SEQ ID NO: 472528 - DNA, 55 bp, Artificial
  Synthetic oligonucleotide
tgggtcctggattgcaaaggaagatagcgggtataccacctttaatttgaactgg

SEQ ID NO: 472529 - DNA, 56 bp, Artificial
  Synthetic oligonucleotide
tgggtcgaactatcagcaaggattcacgcttgggttacgaaaccttcaaagttgtc

SEQ ID NO: 472530 - DNA, 59 bp, Artificial
  Synthetic oligonucleotide
tgggtcgagcccacttctctgctgccccccgacttcttagggacggcggcagagctcaa

SEQ ID NO: 472531 - DNA, 54 bp, Artificial
  Synthetic oligonucleotide
tgggtcgatgcattatgatatatcctacgctaccttgaagagtaacgcacagcg

SEQ ID NO: 472532 - DNA, 60 bp, Artificial
  Synthetic oligonucleotide
tgggtcgcccgttctgtgcgacgaggggcacgcagtaggaatgctcgtgtccgtgcttca

SEQ ID NO: 472533 - DNA, 60 bp, Artificial
  Synthetic oligonucleotide
tgggtcgtccgtgacgggaattgagatgattagcattgagaatcctggcttttcgaatat

SEQ ID NO: 472534 - DNA, 58 bp, Artificial
  Synthetic oligonucleotide
tgggtcgtctgtacctcgtagacatgtcagcaattctgttcgtcggaacttgttttcc

SEQ ID NO: 472535 - DNA, 60 bp, Artificial
  Synthetic oligonucleotide
tgggtcgttgaagatactactgacgggtatggtgagtatcggcactctgatgaagacgct

SEQ ID NO: 472536 - DNA, 54 bp, Artificial
  Synthetic oligonucleotide
tgggtctaacatggtggtgcccaacctatgcagccctcgatacgggtgtgctgc

SEQ ID NO: 472537 - DNA, 55 bp, Artificial
  Synthetic oligonucleotide
tgggtctagtaatatcactgtgatgacaagcggatttgcttttcactattacgtg

SEQ ID NO: 472538 - DNA, 60 bp, Artificial
  Synthetic oligonucleotide
tgggtctcaggattgatcaaattcttaggagggccattgaaaactgctatgatagttata

SEQ ID NO: 472539 - DNA, 55 bp, Artificial
  Synthetic oligonucleotide
tgggtctgcctcctagtcctagagtcaatactttgggctgccagtgcttcagaag

SEQ ID NO: 472540 - DNA, 51 bp, Artificial
  Synthetic oligonucleotide
tgggtctggaaagaccaaattgactcgtttgtgcaggaaaagatcagatgg

SEQ ID NO: 472541 - DNA, 57 bp, Artificial
  Synthetic oligonucleotide
tgggtctggatggggtttctgggtcagccctacagtcttcataaccacaacgcacgt

SEQ ID NO: 472542 - DNA, 57 bp, Artificial
  Synthetic oligonucleotide
tgggtctggtgatagatacgttagaatgggaactgaaagcatgaattttgccaagag

SEQ ID NO: 472543 - DNA, 55 bp, Artificial
  Synthetic oligonucleotide
tgggtctgtattctgatgcggacacgcctctcattttagaggtattacgggtcgc

SEQ ID NO: 472544 - DNA, 60 bp, Artificial
  Synthetic oligonucleotide
tgggtctgtcacccaatgtatatcaagccaggtttgaagctgtagcgtggtcagcaactg

SEQ ID NO: 472545 - DNA, 60 bp, Artificial
  Synthetic oligonucleotide
tgggtctgtgtgcgcattgcataccttagacaccatcctcaatacagagacacggccata

SEQ ID NO: 472546 - DNA, 58 bp, Artificial
  Synthetic oligonucleotide
tgggtcttagttagaggaccaggtctgagcccgggagctccctggcctctagctgaac

SEQ ID NO: 472547 - DNA, 59 bp, Artificial
  Synthetic oligonucleotide
tgggtcttattatggtaagaggttgttattacctgattcagtcacggaatatgataaga

SEQ ID NO: 472548 - DNA, 58 bp, Artificial
  Synthetic oligonucleotide
tgggtgaaaacaaggacgtaatagtcacaagggaaccttatgtgagttgcgacaatga

SEQ ID NO: 472549 - DNA, 52 bp, Artificial
  Synthetic oligonucleotide
tgggtgaacaaaggcgaatcaacgtcccacgcggccctagctctggcaatgg

SEQ ID NO: 472550 - DNA, 59 bp, Artificial
  Synthetic oligonucleotide
tgggtgaactaaattcatctgttgcggcaaggtcggctagctgatcactagctgaggag

SEQ ID NO: 472551 - DNA, 54 bp, Artificial
  Synthetic oligonucleotide
tgggtgaagggcctggggtacgcgtaggtggcgcccccactatagttcgccctg

SEQ ID NO: 472552 - DNA, 55 bp, Artificial
  Synthetic oligonucleotide
tgggtgaatccaaaggtactcttaagtacatgcagtatttgtatcacacgaatac

SEQ ID NO: 472553 - DNA, 55 bp, Artificial
  Synthetic oligonucleotide
tgggtgagcggttgggataaagcagccaacggtcgtactttcacttctctggcat

SEQ ID NO: 472554 - DNA, 56 bp, Artificial
  Synthetic oligonucleotide
tgggtgagtaagaagtgcacgagctcgaaggatggaaactacgtgtatcccagttg

SEQ ID NO: 472555 - DNA, 60 bp, Artificial
  Synthetic oligonucleotide
tgggtgatgatatgagccctgagctcagaacacttgcacaaagtctcattgatcagaagg

SEQ ID NO: 472556 - DNA, 60 bp, Artificial
  Synthetic oligonucleotide
tgggtgcactacttatgctccaggttttctatccgatggtgtgtgcaaggaacatcctaa

SEQ ID NO: 472557 - DNA, 60 bp, Artificial
  Synthetic oligonucleotide
tgggtgcataagtcctcagtttggtattccaattggtaaccttacagcatgtggtgactc

SEQ ID NO: 472558 - DNA, 55 bp, Artificial
  Synthetic oligonucleotide
tgggtgccacccacatcatgtaaattaggtcacggagccggaatcctaccccgtg

SEQ ID NO: 472559 - DNA, 60 bp, Artificial
  Synthetic oligonucleotide
tgggtgccattcgcggactcagtgcagattaacggtgcactcaggtctgcgaggaggtca

SEQ ID NO: 472560 - DNA, 53 bp, Artificial
  Synthetic oligonucleotide
tgggtgcccactccaccaatgtgaatgagggaccaaagtctgaggggattagg

SEQ ID NO: 472561 - DNA, 57 bp, Artificial
  Synthetic oligonucleotide
tgggtgcccggaaagggatatctacagagtgtttagctgtggatagttttaacttgc

SEQ ID NO: 472562 - DNA, 59 bp, Artificial
  Synthetic oligonucleotide
tgggtgcgagagcgtcagtgttaagtgggggaagattagatgcatgggagaaaattcgg

SEQ ID NO: 472563 - DNA, 51 bp, Artificial
  Synthetic oligonucleotide
tgggtgcggccccaatcgcatggaagtataggcgcggacttgcggctaatg

SEQ ID NO: 472564 - DNA, 60 bp, Artificial
  Synthetic oligonucleotide
tgggtgctcaagatatggaagtaactcttgttcctgcagaggaactggagataacggaaa

SEQ ID NO: 472565 - DNA, 58 bp, Artificial
  Synthetic oligonucleotide
tgggtgctcggaatggggtgtctacagagtgtttcgccgtggacaatttgagtttgcc

SEQ ID NO: 472566 - DNA, 53 bp, Artificial
  Synthetic oligonucleotide
tgggtgctcgtccgtcagtagttcccgaagttcttccgcgcccacccgtcaca

SEQ ID NO: 472567 - DNA, 60 bp, Artificial
  Synthetic oligonucleotide
tgggtgctgagagatcttatcttccttgttaaggctcgccgcgggatctcaacggaggag

SEQ ID NO: 472568 - DNA, 57 bp, Artificial
  Synthetic oligonucleotide
tgggtggacatcgccagtctcgtatacaccggggagagagacgacacccaactaggg

SEQ ID NO: 472569 - DNA, 57 bp, Artificial
  Synthetic oligonucleotide
tgggtggagaccccttggaaatgcagggagtgctaatgaattacagaacaaagtacc

SEQ ID NO: 472570 - DNA, 60 bp, Artificial
  Synthetic oligonucleotide
tgggtggattatctgtacgcgtgtcagccattgaatcgggagttagtgagaacggcaatc

SEQ ID NO: 472571 - DNA, 60 bp, Artificial
  Synthetic oligonucleotide
tgggtggattgtaaccctcacagcattgcgtgagttgtatgggtttgacacgagtgacat

SEQ ID NO: 472572 - DNA, 60 bp, Artificial
  Synthetic oligonucleotide
tgggtggcaaatggtcaaaacctagcattagaggatggcaggctgtaagggaaagaatga

SEQ ID NO: 472573 - DNA, 60 bp, Artificial
  Synthetic oligonucleotide
tgggtggctaccttattgcgagatgctccgcctatgcgaccgttacccacacaaagtgcc

SEQ ID NO: 472574 - DNA, 59 bp, Artificial
  Synthetic oligonucleotide
tgggtggctttggggcatggacattgacccttataaagaatgtggagctactgtggagt

SEQ ID NO: 472575 - DNA, 54 bp, Artificial
  Synthetic oligonucleotide
tgggtgggaatcattattcaaagggtgggtcagttaatctactgtgggcgggtt

SEQ ID NO: 472576 - DNA, 60 bp, Artificial
  Synthetic oligonucleotide
tgggtgggataatgtgagtggtgtgtcgattcgcgaagcacttagttcgaattggcagtc

SEQ ID NO: 472577 - DNA, 54 bp, Artificial
  Synthetic oligonucleotide
tgggtgggcttcgatgcagaaggtgctcatgcgacgcgtgatagcattgggaca

SEQ ID NO: 472578 - DNA, 56 bp, Artificial
  Synthetic oligonucleotide
tgggtggggaactagtctaaaattctttggcacgactctggtcgccctgattttga

SEQ ID NO: 472579 - DNA, 56 bp, Artificial
  Synthetic oligonucleotide
tgggtgggtacggcttcgattccggaaatgttcccatgggccgctcaccgacgcga

SEQ ID NO: 472580 - DNA, 56 bp, Artificial
  Synthetic oligonucleotide
tgggtgggttgaagacaagaaactccttccgatattggctcgtctcaccttcaacc

SEQ ID NO: 472581 - DNA, 55 bp, Artificial
  Synthetic oligonucleotide
tgggtggtcaggacgttgaaagggccagaattaccgggtgtgagtgagagcatgg

SEQ ID NO: 472582 - DNA, 55 bp, Artificial
  Synthetic oligonucleotide
tgggtggtccccagatatgctggtgctctaaaccttaacacaaaccttgcccctt

SEQ ID NO: 472583 - DNA, 54 bp, Artificial
  Synthetic oligonucleotide
tgggtggtgcctattacgtcgtgtatcgtgcacaatcgaccgatgctatcacac

SEQ ID NO: 472584 - DNA, 55 bp, Artificial
  Synthetic oligonucleotide
tgggtggttgcggctagcgttgcagtaatccggtagggcgccgattcggtgggaa

SEQ ID NO: 472585 - DNA, 55 bp, Artificial
  Synthetic oligonucleotide
tgggtgtcaaaagatcatagaggtcatcctccccttagaaccagcagggtccgag

SEQ ID NO: 472586 - DNA, 51 bp, Artificial
  Synthetic oligonucleotide
tgggtgtcatctaacttgttcattacatcaactcatgtcatccccccaaac

SEQ ID NO: 472587 - DNA, 60 bp, Artificial
  Synthetic oligonucleotide
tgggtgtccgtgtttccttttatcacataatggctgcttatggtgacaatcacagattgt

SEQ ID NO: 472588 - DNA, 60 bp, Artificial
  Synthetic oligonucleotide
tgggtgtgcctgagacaagttctaaccacaaggatgagtcacatcctgagaagaacaaca

SEQ ID NO: 472589 - DNA, 55 bp, Artificial
  Synthetic oligonucleotide
tgggtgtggaacactatgtggggcgaaaaccccatatagtaaacgtggcctcgcg

SEQ ID NO: 472590 - DNA, 55 bp, Artificial
  Synthetic oligonucleotide
tgggtgttccgtttcatttggcaaccaaacaagtgtgtatagcatggtccagctc

SEQ ID NO: 472591 - DNA, 51 bp, Artificial
  Synthetic oligonucleotide
tgggtgttcttccccccgagaggggacgagtgaggcttatcccggggaacc

SEQ ID NO: 472592 - DNA, 53 bp, Artificial
  Synthetic oligonucleotide
tgggtgttgagaaactctttcactgggatgtgcactgagtctgactatgaagc

SEQ ID NO: 472593 - DNA, 60 bp, Artificial
  Synthetic oligonucleotide
tgggtgttgtacgttgtgcattgagggtgtctgaatcaaaacacgcactgaaggtgtagt

SEQ ID NO: 472594 - DNA, 60 bp, Artificial
  Synthetic oligonucleotide
tgggtgtttgcctgtgctccagatcgatgtccacctacatgcatttatgttgcaggtatg

SEQ ID NO: 472595 - DNA, 56 bp, Artificial
  Synthetic oligonucleotide
tgggttaacaggcccatgtacaggaagcccaggatatatcggacctttagaagccc

SEQ ID NO: 472596 - DNA, 60 bp, Artificial
  Synthetic oligonucleotide
tgggttaactgacatacctaagatgatacaggactggttggtcgattgctctattgaaag

SEQ ID NO: 472597 - DNA, 59 bp, Artificial
  Synthetic oligonucleotide
tgggttaagacatctggagagttggattctttagtgagagcctgtggggggcgtatagc

SEQ ID NO: 472598 - DNA, 54 bp, Artificial
  Synthetic oligonucleotide
tgggttaatttactccaggagaaggcgagagatccttgatttgtgggtctatca

SEQ ID NO: 472599 - DNA, 54 bp, Artificial
  Synthetic oligonucleotide
tgggttaatttactccgagaaaaggaaagagatccttgacttatgggtctacca

SEQ ID NO: 472600 - DNA, 54 bp, Artificial
  Synthetic oligonucleotide
tgggttaatttactctaagaaaagggcagaaatccttgatttatgggtttatca

SEQ ID NO: 472601 - DNA, 55 bp, Artificial
  Synthetic oligonucleotide
tgggttacatggattaaggataggttagcgtgtttgcgggacattttactgcaac

SEQ ID NO: 472602 - DNA, 59 bp, Artificial
  Synthetic oligonucleotide
tgggttaccggtaagatttggatggatgagaacatcaagacaaagaatcacacgaatac

SEQ ID NO: 472603 - DNA, 55 bp, Artificial
  Synthetic oligonucleotide
tgggttacggtctatcagttctagtgaattcgttagatccgtcaatggtcgctca

SEQ ID NO: 472604 - DNA, 53 bp, Artificial
  Synthetic oligonucleotide
tgggttagggagccctcctagcgacggccgaaccgtgttaaccatacacgtag

SEQ ID NO: 472605 - DNA, 59 bp, Artificial
  Synthetic oligonucleotide
tgggttagtgcaagtcattttagaaataccacccctgatacattctcatcagcagggtt

SEQ ID NO: 472606 - DNA, 60 bp, Artificial
  Synthetic oligonucleotide
tgggttcagctggtggagcattaagaagtatgatatcaggagcttggagtggtattcgct

SEQ ID NO: 472607 - DNA, 55 bp, Artificial
  Synthetic oligonucleotide
tgggttccaaattaggaggctttgcgataatgaggtttactggagaagccagcac

SEQ ID NO: 472608 - DNA, 51 bp, Artificial
  Synthetic oligonucleotide
tgggttccacagccggttacatggtgttcccgtccgtttacgaaggtttaa

SEQ ID NO: 472609 - DNA, 60 bp, Artificial
  Synthetic oligonucleotide
tgggttcccctgtgcgtgaatccatggtcgttgcaggctaatgctatgaagtatgaacag

SEQ ID NO: 472610 - DNA, 60 bp, Artificial
  Synthetic oligonucleotide
tgggttcccctgtgcgtgaatccatggttgtggcagttgattgacagataataagaacac

SEQ ID NO: 472611 - DNA, 60 bp, Artificial
  Synthetic oligonucleotide
tgggttcgacacagcgatgggtcagtcagtgtacgaaccgagcgcagaattaccaacaga

SEQ ID NO: 472612 - DNA, 55 bp, Artificial
  Synthetic oligonucleotide
tgggttcgataccaactattgatcgtgtgacgccagtgtctgtaccggtgggtcc

SEQ ID NO: 472613 - DNA, 57 bp, Artificial
  Synthetic oligonucleotide
tgggttcgctgagcccatatcgaaagggttccgctacaagggaccaggagctccgaa

SEQ ID NO: 472614 - DNA, 55 bp, Artificial
  Synthetic oligonucleotide
tgggttcggaggtgcgttacccgtgacctctgcgcaagctagtgctggtaccagc

SEQ ID NO: 472615 - DNA, 55 bp, Artificial
  Synthetic oligonucleotide
tgggttctctctcagccacgatacgtcttggaatttgaccaccatgtctgagaac

SEQ ID NO: 472616 - DNA, 55 bp, Artificial
  Synthetic oligonucleotide
tgggttgaacgggattgtagaagggtacgttagcgacgagaccggtgctgtcgaa

SEQ ID NO: 472617 - DNA, 55 bp, Artificial
  Synthetic oligonucleotide
tgggttgactcaccgtgtgggtaagaggttctgtattaaatctgtatacgttttg

SEQ ID NO: 472618 - DNA, 58 bp, Artificial
  Synthetic oligonucleotide
tgggttgagaaacatcaccctgcctcgactgcaggggctccccgtcatgaataccccc

SEQ ID NO: 472619 - DNA, 55 bp, Artificial
  Synthetic oligonucleotide
tgggttgccgagtcgaacacgacggtcacacgaactcagcccgccttgcagtggc

SEQ ID NO: 472620 - DNA, 55 bp, Artificial
  Synthetic oligonucleotide
tgggttgcgaaaggccttgtggtactgcctgatacggtgcttgcgagtgccccgg

SEQ ID NO: 472621 - DNA, 58 bp, Artificial
  Synthetic oligonucleotide
tgggttgctggtgcggattgtgtcgaatcgtccgacgcagtggcagtagtcgtacatg

SEQ ID NO: 472622 - DNA, 57 bp, Artificial
  Synthetic oligonucleotide
tgggttggatgggtgcatagttacccccctccaccatatgatgggtacgatgttccg

SEQ ID NO: 472623 - DNA, 60 bp, Artificial
  Synthetic oligonucleotide
tgggttgggattatccaaagtgtgatcgtgctatgccaaacatactacgtattgttagta

SEQ ID NO: 472624 - DNA, 60 bp, Artificial
  Synthetic oligonucleotide
tgggttgtgagaaagctgttgcaggtatcagagtccactggtgtggcattgaaaaggagc

SEQ ID NO: 472625 - DNA, 60 bp, Artificial
  Synthetic oligonucleotide
tgggttgtgtctcaattatgtccatttgattgtgataacgtaattgtggtgtgtgtcttg

SEQ ID NO: 472626 - DNA, 58 bp, Artificial
  Synthetic oligonucleotide
tgggttgttgggaagctctgggatttgatcaattgggtcagagaaaagttgttgccaa

SEQ ID NO: 472627 - DNA, 55 bp, Artificial
  Synthetic oligonucleotide
tgggtttacaaaattagacgcactttaatatttcaatgggcagactcatcaggcc

SEQ ID NO: 472628 - DNA, 56 bp, Artificial
  Synthetic oligonucleotide
tgggtttactactcagatagatctgacttaattggattgtggagagatcaaatata

SEQ ID NO: 472629 - DNA, 58 bp, Artificial
  Synthetic oligonucleotide
tgggtttactatgtagtcgcgttgggcacctacgagtgccttccactgtggacagtac

SEQ ID NO: 472630 - DNA, 60 bp, Artificial
  Synthetic oligonucleotide
tgggtttagtcgaatatgtactgatgatagatgttctgtcagttcgtagtagttcggcta

SEQ ID NO: 472631 - DNA, 57 bp, Artificial
  Synthetic oligonucleotide
tgggtttataatacacaaggcttcttccctgattggcaaaactacacaccaggacca

SEQ ID NO: 472632 - DNA, 60 bp, Artificial
  Synthetic oligonucleotide
tgggtttcaccgacgtgtattgcgaagcaaggaggctgtttgagctaggtgttcagagag

SEQ ID NO: 472633 - DNA, 53 bp, Artificial
  Synthetic oligonucleotide
tgggtttggggctaaggaggtccgcagcttgtccgggagggccgttaaccaca

SEQ ID NO: 472634 - DNA, 60 bp, Artificial
  Synthetic oligonucleotide
tgggtttggtcttgtgtatctcatgcttgtatagcgcccaattgtggattttgtagccca

SEQ ID NO: 472635 - DNA, 55 bp, Artificial
  Synthetic oligonucleotide
tgggttttaaaactaggaaattcgtgaatgtgtatggttttgacccatgcgagta

SEQ ID NO: 472636 - DNA, 53 bp, Artificial
  Synthetic oligonucleotide
tgggttttactccttgaacccttcagaagaattcttcggagttcgtaccagta

SEQ ID NO: 472637 - DNA, 58 bp, Artificial
  Synthetic oligonucleotide
tgggttttcataaaacgattggtgtacgtcgaagcgatatgtagcttccgacataata

SEQ ID NO: 472638 - DNA, 55 bp, Artificial
  Synthetic oligonucleotide
tggtaaaaagcctcattgtaatttgaatttcgaaatccaaaagcggccatccgta

SEQ ID NO: 472639 - DNA, 55 bp, Artificial
  Synthetic oligonucleotide
tggtaaaagtaaagaccctttggaacgtgcaaagataattgctgacggtataaca

SEQ ID NO: 472640 - DNA, 59 bp, Artificial
  Synthetic oligonucleotide
tggtaaacaagcatagttccatacaatccacaaagaagaatggtttgaccttgcgtcgc

SEQ ID NO: 472641 - DNA, 56 bp, Artificial
  Synthetic oligonucleotide
tggtaaacattgtaggacgtgatggtacaaaaattagcgggcagatggcgctcggg

SEQ ID NO: 472642 - DNA, 58 bp, Artificial
  Synthetic oligonucleotide
tggtaaactttgtgagcatggaattttctcttacagacccgagattggaaccacacaa

SEQ ID NO: 472643 - DNA, 52 bp, Artificial
  Synthetic oligonucleotide
tggtaaaggagggttaaaaaatagagacaccgataggtaaattgggcaccga

SEQ ID NO: 472644 - DNA, 50 bp, Artificial
  Synthetic oligonucleotide
tggtaaaggagttactagctgcttctcaccatatttcacggcttgtttcg

SEQ ID NO: 472645 - DNA, 49 bp, Artificial
  Synthetic oligonucleotide
tggtaaatagtaaatggggggggaaattaggccggccccgatagggaaa

SEQ ID NO: 472646 - DNA, 53 bp, Artificial
  Synthetic oligonucleotide
tggtaaatggctttctaagaactgtgggaaattggatagtgggttttaccgcc

SEQ ID NO: 472647 - DNA, 58 bp, Artificial
  Synthetic oligonucleotide
tggtaaattttgtgagtatggaattttctcttactgacccgaggctggagccacacaa

SEQ ID NO: 472648 - DNA, 59 bp, Artificial
  Synthetic oligonucleotide
tggtaacaccatctgtatactgaatagccagggtttcgtgccacctcaggattgggacg

SEQ ID NO: 472649 - DNA, 53 bp, Artificial
  Synthetic oligonucleotide
tggtaacacgcgggttgcgcataagctacgcttgtttccgaagtttgcgtgta

SEQ ID NO: 472650 - DNA, 56 bp, Artificial
  Synthetic oligonucleotide
tggtaacagtttcgttctaaacgattacgattcagttacaatgcgtttggccgata

SEQ ID NO: 472651 - DNA, 55 bp, Artificial
  Synthetic oligonucleotide
tggtaacatacataacaagaaaccaacctgaatggtttaggaatgttttgagcgt

SEQ ID NO: 472652 - DNA, 60 bp, Artificial
  Synthetic oligonucleotide
tggtaaccagacagctagaatgctcaagtacaactatccaacaaaatctgggtactgtgg

SEQ ID NO: 472653 - DNA, 53 bp, Artificial
  Synthetic oligonucleotide
tggtaaccaggttatcatacctgttctgcgaaatttccctgcattcaactaca

SEQ ID NO: 472654 - DNA, 60 bp, Artificial
  Synthetic oligonucleotide
tggtaacgttcattgtcaggcagctcaaaacacggcaggtggtgatttgcaagctacgtc

SEQ ID NO: 472655 - DNA, 58 bp, Artificial
  Synthetic oligonucleotide
tggtaactgtgataccaaatgtcaaaccccagtgggtgctataaattccagtatgcct

SEQ ID NO: 472656 - DNA, 55 bp, Artificial
  Synthetic oligonucleotide
tggtaactgttaattcagtttttgatttggcctgggctcttcgccgtcacctcac

SEQ ID NO: 472657 - DNA, 54 bp, Artificial
  Synthetic oligonucleotide
tggtaagaatgcctacttccgtcgtgtatgggttaaaggtctgtaattcaaaag

SEQ ID NO: 472658 - DNA, 57 bp, Artificial
  Synthetic oligonucleotide
tggtaagaggttttgtgttaaatctatttacgtcattgggaagatatggatggacga

SEQ ID NO: 472659 - DNA, 56 bp, Artificial
  Synthetic oligonucleotide
tggtaagcaaacagtacgtgaaggtaagataatcaaagcaagttacgatccattaa

SEQ ID NO: 472660 - DNA, 53 bp, Artificial
  Synthetic oligonucleotide
tggtaagcattgatcgctttttaagagtaagagaccaacaagggaacgtgcta

SEQ ID NO: 472661 - DNA, 55 bp, Artificial
  Synthetic oligonucleotide
tggtaagctcaaatgggcctccaacgcggtttactccatgctctcagccactgcc

SEQ ID NO: 472662 - DNA, 60 bp, Artificial
  Synthetic oligonucleotide
tggtaagctccgggaggctcaccacagacagtgctttcacatgggggtcacctgacaagc

SEQ ID NO: 472663 - DNA, 50 bp, Artificial
  Synthetic oligonucleotide
tggtaaggatggcaagaactctaatacaacgacgcggtacacttctatct

SEQ ID NO: 472664 - DNA, 50 bp, Artificial
  Synthetic oligonucleotide
tggtaaggattggcgtaaatatcgtgctagaattactgtacatccagagg

SEQ ID NO: 472665 - DNA, 60 bp, Artificial
  Synthetic oligonucleotide
tggtaaggcactggagacaattcgggtttcagtgtgaactcgagtgcgacgcagaaatct

SEQ ID NO: 472666 - DNA, 58 bp, Artificial
  Synthetic oligonucleotide
tggtaaggtaggtcatactagatttactcgtgagattggggtagcaccagtaagtgac

SEQ ID NO: 472667 - DNA, 58 bp, Artificial
  Synthetic oligonucleotide
tggtaaggtgatgtgtatatccgacgtgactcgtggtaacggtataacccatcgtgtg

SEQ ID NO: 472668 - DNA, 60 bp, Artificial
  Synthetic oligonucleotide
tggtaaggtggatgcaactgtagctgtgtctgaggcccctctggatgtggtgagtgcatg

SEQ ID NO: 472669 - DNA, 53 bp, Artificial
  Synthetic oligonucleotide
tggtaagtacctcttcaactgggcagtaaggaccaagcttaaactcactccaa

SEQ ID NO: 472670 - DNA, 55 bp, Artificial
  Synthetic oligonucleotide
tggtaagtctgcaagtgatggattggctgatacatttcctcctggcatgcaagcc

SEQ ID NO: 472671 - DNA, 55 bp, Artificial
  Synthetic oligonucleotide
tggtaagtttacaggccttggaatttatgacaggacaataattataccaacacat

SEQ ID NO: 472672 - DNA, 55 bp, Artificial
  Synthetic oligonucleotide
tggtaatagccgactgaggaatctcagggtacgtgtgatgcaccacacccatacg

SEQ ID NO: 472673 - DNA, 60 bp, Artificial
  Synthetic oligonucleotide
tggtaatcttagcataacaccttctctcaaggatcgcttctatataagacatgtgttcaa

SEQ ID NO: 472674 - DNA, 60 bp, Artificial
  Synthetic oligonucleotide
tggtaatgatgacgtgtaggggtgtcccgatgtaatataacatagctatgtgaagagata

SEQ ID NO: 472675 - DNA, 57 bp, Artificial
  Synthetic oligonucleotide
tggtaatgcgctgaaaaaggtgaccttctctctcctagaactcaccggaaccgccaa

SEQ ID NO: 472676 - DNA, 60 bp, Artificial
  Synthetic oligonucleotide
tggtaatgtccttgatgtaaactccattgacctagaagaaccgaacggccagacagctga

SEQ ID NO: 472677 - DNA, 60 bp, Artificial
  Synthetic oligonucleotide
tggtaatgtgatgtgtgctgatgcaaaacatagagcaccacaacaattacacttacctcc

SEQ ID NO: 472678 - DNA, 55 bp, Artificial
  Synthetic oligonucleotide
tggtacaacagagagaaaccttcagaagatcccagaattggtcgctacagaagca

SEQ ID NO: 472679 - DNA, 50 bp, Artificial
  Synthetic oligonucleotide
tggtacaacgccgcgagagtgcagggccccggtcccatcaaggacgactc

SEQ ID NO: 472680 - DNA, 60 bp, Artificial
  Synthetic oligonucleotide
tggtacaacgttgatgaagaagaacaaagcacccgcacatgcttatatggtaataacgga

SEQ ID NO: 472681 - DNA, 60 bp, Artificial
  Synthetic oligonucleotide
tggtacaagaatttggcacatcaccactagcgggtctgactaggtcgtatgtgagtgagc

SEQ ID NO: 472682 - DNA, 59 bp, Artificial
  Synthetic oligonucleotide
tggtacaatgcgcacattcaaacggtaccaaacgatcgacctcgctgaactcggatgga

SEQ ID NO: 472683 - DNA, 59 bp, Artificial
  Synthetic oligonucleotide
tggtacaattcccaagggttcatcggataccaagcttgcgcaatcatttcccaacactg

SEQ ID NO: 472684 - DNA, 54 bp, Artificial
  Synthetic oligonucleotide
tggtacacagtatgatggaaatcttactgcaagagtgtctcgtcttgaacgcag

SEQ ID NO: 472685 - DNA, 57 bp, Artificial
  Synthetic oligonucleotide
tggtacactgacaagttggaacaagttcggcctgatttccttgcccaccccatcaat

SEQ ID NO: 472686 - DNA, 58 bp, Artificial
  Synthetic oligonucleotide
tggtacagccaacactactgttaaactcttactagcctatacaccgcctggtattaga

SEQ ID NO: 472687 - DNA, 59 bp, Artificial
  Synthetic oligonucleotide
tggtacagcctgggtggagtaccctatcactataatggcgggtcgcacacctctctagg

SEQ ID NO: 472688 - DNA, 56 bp, Artificial
  Synthetic oligonucleotide
tggtacagggtcgggtacaggtggcaggactggatatgtgccccttggtagtaccc

SEQ ID NO: 472689 - DNA, 59 bp, Artificial
  Synthetic oligonucleotide
tggtacaggttcggacactttctcacgcatagtgtactctgcgaaaggcaccaccaaaa

SEQ ID NO: 472690 - DNA, 52 bp, Artificial
  Synthetic oligonucleotide
tggtacaggttttcggaacgcgccagaactattctgacgtttaaccaacccc

SEQ ID NO: 472691 - DNA, 59 bp, Artificial
  Synthetic oligonucleotide
tggtacagtatacatatgaagtggcaaggttacaagcgaatatgggtcaattacgggcg

SEQ ID NO: 472692 - DNA, 59 bp, Artificial
  Synthetic oligonucleotide
tggtacatctgcctatttcaccaacaaaagtttatagacaacattgtaagcagcgggcc

SEQ ID NO: 472693 - DNA, 53 bp, Artificial
  Synthetic oligonucleotide
tggtacatttgatcagttgaagcctttagatcgattacatgaactatctacac

SEQ ID NO: 472694 - DNA, 55 bp, Artificial
  Synthetic oligonucleotide
tggtaccaaacagattttataccatctaatggcacatcagctggatccattgtgg

SEQ ID NO: 472695 - DNA, 60 bp, Artificial
  Synthetic oligonucleotide
tggtaccaatcagtgatgacagtactcgtgatagcaatgtcagtagtaatggcactagac

SEQ ID NO: 472696 - DNA, 54 bp, Artificial
  Synthetic oligonucleotide
tggtaccagataaagtcatgtctgtgtcgaacgtaatgaaagagactgggtttc

SEQ ID NO: 472697 - DNA, 60 bp, Artificial
  Synthetic oligonucleotide
tggtacccaaagctgccagaggccaatatagtggatttgtgagaacactattccaacaaa

SEQ ID NO: 472698 - DNA, 59 bp, Artificial
  Synthetic oligonucleotide
tggtaccccacagtactacaccagcaacaggtaatggaggacataagcaggagcgggcc

SEQ ID NO: 472699 - DNA, 54 bp, Artificial
  Synthetic oligonucleotide
tggtacccgccataaagaggatgaattgattcctatcaataataaggtagggct

SEQ ID NO: 472700 - DNA, 50 bp, Artificial
  Synthetic oligonucleotide
tggtacccttaccattgggaactctctgaccgtggacgagaagactatgg

SEQ ID NO: 472701 - DNA, 60 bp, Artificial
  Synthetic oligonucleotide
tggtaccgacgggcaaatactccgatgtataccagacggagatattcatccgtgcctgtg

SEQ ID NO: 472702 - DNA, 55 bp, Artificial
  Synthetic oligonucleotide
tggtaccgcaaagcacttggtcggcacccaacagccactgatccgggaggtcttg

SEQ ID NO: 472703 - DNA, 52 bp, Artificial
  Synthetic oligonucleotide
tggtaccgtacctgtctcccctttaggcggttgaatggactagtattcccgg

SEQ ID NO: 472704 - DNA, 56 bp, Artificial
  Synthetic oligonucleotide
tggtacctcccaaataaaaacgccgttctccgcctgagttgcagtgatgatttccc

SEQ ID NO: 472705 - DNA, 55 bp, Artificial
  Synthetic oligonucleotide
tggtacctggtgacgaaccactttctaaccgtagcggtcatcgtctttctgtact

SEQ ID NO: 472706 - DNA, 53 bp, Artificial
  Synthetic oligonucleotide
tggtacgacgctttgtttccgggaaattcgttaagagactcaagcctagacgg

SEQ ID NO: 472707 - DNA, 60 bp, Artificial
  Synthetic oligonucleotide
tggtacgagtccgtgcatcgtagccatgctgctgtttgtagctgtggggatcctgtacgc

SEQ ID NO: 472708 - DNA, 60 bp, Artificial
  Synthetic oligonucleotide
tggtacgatagcagagtttttgagagttgatatgcgtgcaaaaaatagtactggcagtca

SEQ ID NO: 472709 - DNA, 55 bp, Artificial
  Synthetic oligonucleotide
tggtacgatcaggtagggttgtgaatgagccatatttacttacagcttcttgtca

SEQ ID NO: 472710 - DNA, 60 bp, Artificial
  Synthetic oligonucleotide
tggtacgccattaatgagtgtatacaataccacacgtgatggtgcaacatatggtggtac

SEQ ID NO: 472711 - DNA, 57 bp, Artificial
  Synthetic oligonucleotide
tggtacggttataggactttaccctgtcactatgcgttctaatgggactattagagc

SEQ ID NO: 472712 - DNA, 55 bp, Artificial
  Synthetic oligonucleotide
tggtacgtgatggaggcggagataataacacagaaacattcagacctggaggagg

SEQ ID NO: 472713 - DNA, 55 bp, Artificial
  Synthetic oligonucleotide
tggtacgttcaagtccatcacgcttactgggttcttggctggtgcgttgtctaag

SEQ ID NO: 472714 - DNA, 55 bp, Artificial
  Synthetic oligonucleotide
tggtactaatactgcacgaatgattaagtaccactacccaacaaaagctggatac

SEQ ID NO: 472715 - DNA, 54 bp, Artificial
  Synthetic oligonucleotide
tggtactacgtatactttaattagacccactagctcttatacaagagtttacct

SEQ ID NO: 472716 - DNA, 60 bp, Artificial
  Synthetic oligonucleotide
tggtactagggagcgtaacacattactacgtatgcttaccaagaaggtcatcgaatgata

SEQ ID NO: 472717 - DNA, 60 bp, Artificial
  Synthetic oligonucleotide
tggtactcaagtgtacttagctcccacgctgctatgtgcgggtgtcccgacgctgtcgct

SEQ ID NO: 472718 - DNA, 60 bp, Artificial
  Synthetic oligonucleotide
tggtactcaattgacctagagaagggtgaggcaaactgcactcgccaacacatgcaagcc

SEQ ID NO: 472719 - DNA, 51 bp, Artificial
  Synthetic oligonucleotide
tggtactcactacagtctttatggtgtgtgtctggggacgcttcttttata

SEQ ID NO: 472720 - DNA, 57 bp, Artificial
  Synthetic oligonucleotide
tggtactcctccacacaacagtataggaaaattcagttattatccagttcctagtgg

SEQ ID NO: 472721 - DNA, 60 bp, Artificial
  Synthetic oligonucleotide
tggtactctcaagcagtgtctcgaggtcctttcgggatactgagtcggatggggtctgtg

SEQ ID NO: 472722 - DNA, 60 bp, Artificial
  Synthetic oligonucleotide
tggtactctcgaatctgaagaagcccgtcatgagactgacgttaaatctatctgttcatt

SEQ ID NO: 472723 - DNA, 60 bp, Artificial
  Synthetic oligonucleotide
tggtactctcttaggcaactcgaccatcttcccacaccaatttatcaatctcaggagtaa

SEQ ID NO: 472724 - DNA, 60 bp, Artificial
  Synthetic oligonucleotide
tggtactgataaatattttaaattggaccaatttgcaaatcatatgagtatatcacgacg

SEQ ID NO: 472725 - DNA, 60 bp, Artificial
  Synthetic oligonucleotide
tggtactgcttggattctgcgcaacttgcacctcaagctacgcattatatgtgtaacagt

SEQ ID NO: 472726 - DNA, 59 bp, Artificial
  Synthetic oligonucleotide
tggtacttcccagataaaaacggaactctctgcttgttccgcagtgatgctctcccctg

SEQ ID NO: 472727 - DNA, 55 bp, Artificial
  Synthetic oligonucleotide
tggtacttttcctttcgggagagatacattatgcagtctcgatatgttcgtgcac

SEQ ID NO: 472728 - DNA, 51 bp, Artificial
  Synthetic oligonucleotide
tggtagaaacgcctgttgagtggcatttggatacgccgtgtgacaagtacc

SEQ ID NO: 472729 - DNA, 60 bp, Artificial
  Synthetic oligonucleotide
tggtagaataggaggacagattcacctagccatcatggcagtgttcaagatgtcaccagg

SEQ ID NO: 472730 - DNA, 55 bp, Artificial
  Synthetic oligonucleotide
tggtagaatatccgcccggcgtctaggttgtcacttcgctcggccggccagagag

SEQ ID NO: 472731 - DNA, 60 bp, Artificial
  Synthetic oligonucleotide
tggtagagacgccacctcgtttcgagctcctcgtctcgctaccagtcgtcagagattgca

SEQ ID NO: 472732 - DNA, 60 bp, Artificial
  Synthetic oligonucleotide
tggtagagcgactgaatgccttagcctcggttgacccccgccagcataactggacaccca

SEQ ID NO: 472733 - DNA, 60 bp, Artificial
  Synthetic oligonucleotide
tggtagagctggtaaccaattgcatgggttccaggtgagacgaatggtgactgaattttg

SEQ ID NO: 472734 - DNA, 57 bp, Artificial
  Synthetic oligonucleotide
tggtagagggggtaactcggctgagctccgagagacttgtgtcgaccgagtcttcgt

SEQ ID NO: 472735 - DNA, 54 bp, Artificial
  Synthetic oligonucleotide
tggtagatcaacctccctccgccaggatcctaaccttttagagggacaaggtcc

SEQ ID NO: 472736 - DNA, 60 bp, Artificial
  Synthetic oligonucleotide
tggtagatcagggtatacagtgcatgtgcaatgtaatgcaagcagatttcaccagggaac

SEQ ID NO: 472737 - DNA, 58 bp, Artificial
  Synthetic oligonucleotide
tggtagatcgggctttgaaattatcaaagtcacagaggggtggatcaactctcctaac

SEQ ID NO: 472738 - DNA, 53 bp, Artificial
  Synthetic oligonucleotide
tggtagatgactgtgtatgcgaagatgtgattattgcgtatactgcacacaga

SEQ ID NO: 472739 - DNA, 52 bp, Artificial
  Synthetic oligonucleotide
tggtagattaccaatggtcggaaccattaacaatctgatctggtttgtcgcc

SEQ ID NO: 472740 - DNA, 60 bp, Artificial
  Synthetic oligonucleotide
tggtagattctgtgcccagatgcactcaaacaacggaccgcaaattggctcagcggtcgg

SEQ ID NO: 472741 - DNA, 60 bp, Artificial
  Synthetic oligonucleotide
tggtagcacagggacctgaagaagaatttggccgttcattgatcaaacataatacatgtg

SEQ ID NO: 472742 - DNA, 60 bp, Artificial
  Synthetic oligonucleotide
tggtagcaccatggatatccaatagtgtgtaccgcagatgtgttaaggatgattacacgg

SEQ ID NO: 472743 - DNA, 60 bp, Artificial
  Synthetic oligonucleotide
tggtagcactgaatgtaactcagggacacagctaattgaaggaaagtccatagaggtcca

SEQ ID NO: 472744 - DNA, 60 bp, Artificial
  Synthetic oligonucleotide
tggtagcatacatgctagaaagagagttagtccgcaagacgagattcctcccagtggctg

SEQ ID NO: 472745 - DNA, 60 bp, Artificial
  Synthetic oligonucleotide
tggtagcccaacgcattcatgagaatcaatatagtccagagtttgttatgacacagaact

SEQ ID NO: 472746 - DNA, 55 bp, Artificial
  Synthetic oligonucleotide
tggtagcctcccacggctcttcaggacttatagcttcagccctcgttgataaggt

SEQ ID NO: 472747 - DNA, 50 bp, Artificial
  Synthetic oligonucleotide
tggtagccttaacccccttgggaggtttagtatcatgttatgaaggtgtg

SEQ ID NO: 472748 - DNA, 55 bp, Artificial
  Synthetic oligonucleotide
tggtagcgaagatttataaggcgtgtgcagcttcaaagttgtctatacagctgcc

SEQ ID NO: 472749 - DNA, 60 bp, Artificial
  Synthetic oligonucleotide
tggtagctggcttggaaacatcgcgtatgatgtatcccagcgcggttggaatattgggaa

SEQ ID NO: 472750 - DNA, 59 bp, Artificial
  Synthetic oligonucleotide
tggtaggactactggtgggcaaaccattgcccaagaagctgatcctattaatcataggg

SEQ ID NO: 472751 - DNA, 54 bp, Artificial
  Synthetic oligonucleotide
tggtaggagctacaagtttaatatcttgagtcagaggttccgaaacccagtttt

SEQ ID NO: 472752 - DNA, 60 bp, Artificial
  Synthetic oligonucleotide
tggtaggcgcgactgtcgcacacttcgtgaggtgactatgttagctttcgtagcgcgagc

SEQ ID NO: 472753 - DNA, 50 bp, Artificial
  Synthetic oligonucleotide
tggtagggaaactctacacgcttgattgtgggtcgtatgggaaattcctt

SEQ ID NO: 472754 - DNA, 60 bp, Artificial
  Synthetic oligonucleotide
tggtagggaatctgtcacattcaggcgtacagcacagcagagtgtgaccacggggagcga

SEQ ID NO: 472755 - DNA, 54 bp, Artificial
  Synthetic oligonucleotide
tggtaggttctaaaaaaatactggatgaggttaggtctctagactttaagagaa

SEQ ID NO: 472756 - DNA, 60 bp, Artificial
  Synthetic oligonucleotide
tggtaggttgcacgcctgccacaggtgaatactgggacaaagcggaggcctgtcaaccag

SEQ ID NO: 472757 - DNA, 57 bp, Artificial
  Synthetic oligonucleotide
tggtagtaaaaataccaaacctcgccatagatttcgagctgcaggagttcaccaacc

SEQ ID NO: 472758 - DNA, 57 bp, Artificial
  Synthetic oligonucleotide
tggtagtaatcagtctgtatcggtgctctgtctgaatgcttcctacaatcataacca

SEQ ID NO: 472759 - DNA, 60 bp, Artificial
  Synthetic oligonucleotide
tggtagtatgcatccaaagattcatgaactactcaagccttttaagttgagagagtctga

SEQ ID NO: 472760 - DNA, 51 bp, Artificial
  Synthetic oligonucleotide
tggtagtcttacatcgtcagtgttatctcttcagacgatccgtggtaacag

SEQ ID NO: 472761 - DNA, 55 bp, Artificial
  Synthetic oligonucleotide
tggtagtgaacgttgtaaacctggttacacgttcacacctattaccttgaagcca

SEQ ID NO: 472762 - DNA, 51 bp, Artificial
  Synthetic oligonucleotide
tggtagtgacccagaacctagttcagactcgggaccatcaatagccagtcg

SEQ ID NO: 472763 - DNA, 51 bp, Artificial
  Synthetic oligonucleotide
tggtagtgttgggtcaacaagaccagcaaagctgggatgcatcagtgccct

SEQ ID NO: 472764 - DNA, 57 bp, Artificial
  Synthetic oligonucleotide
tggtagtgtttgctgtgtgtcgcatcgtcgcaggtcaagaggggtaggggggttccc

SEQ ID NO: 472765 - DNA, 57 bp, Artificial
  Synthetic oligonucleotide
tggtagttgtaccccttccgtacgtagtcctcaatcgcgctgagggtcagtggaatc

SEQ ID NO: 472766 - DNA, 55 bp, Artificial
  Synthetic oligonucleotide
tggtagtttacaataaaggtgaggctggtgacgtgattgagaaggctcttaaggc

SEQ ID NO: 472767 - DNA, 59 bp, Artificial
  Synthetic oligonucleotide
tggtataaaattatcatctagaataacagcactggatccaactcccctgtcaccctggg

SEQ ID NO: 472768 - DNA, 51 bp, Artificial
  Synthetic oligonucleotide
tggtataagtcgagattggatgggctagctgtgaaatacggccgacggtat

SEQ ID NO: 472769 - DNA, 56 bp, Artificial
  Synthetic oligonucleotide
tggtataagttagtcggatacagtgccctgattaaggattaattggttggattccg

SEQ ID NO: 472770 - DNA, 60 bp, Artificial
  Synthetic oligonucleotide
tggtatagacacctatgtcttgcaaaattcaaagaactattgtatagattggatccgttg

SEQ ID NO: 472771 - DNA, 60 bp, Artificial
  Synthetic oligonucleotide
tggtatagccaggatagcaactctgaagaaaggcattcatattccagttccaaccaagac

SEQ ID NO: 472772 - DNA, 59 bp, Artificial
  Synthetic oligonucleotide
tggtatatgattaggtatcctaacgatctagggccgaaggcccgtgagcaatatgcgtc

SEQ ID NO: 472773 - DNA, 53 bp, Artificial
  Synthetic oligonucleotide
tggtatatggtttgcgattgacgtcccacgctgatcaatggtatcgttctcca

SEQ ID NO: 472774 - DNA, 55 bp, Artificial
  Synthetic oligonucleotide
tggtatattaactcttgggaccttatctccctttggcagactgtttgtaccaacc

SEQ ID NO: 472775 - DNA, 58 bp, Artificial
  Synthetic oligonucleotide
tggtatcaaccagcacccaataatgccccgactggaagtcgtggaggccgtcgtcaac

SEQ ID NO: 472776 - DNA, 55 bp, Artificial
  Synthetic oligonucleotide
tggtatcagagcaaagtttgttttaatggctttcatggggtaaaactcttaggta

SEQ ID NO: 472777 - DNA, 57 bp, Artificial
  Synthetic oligonucleotide
tggtatcagagcagggttcactgtaagtaaatttatggctttcatggggtaattccc

SEQ ID NO: 472778 - DNA, 50 bp, Artificial
  Synthetic oligonucleotide
tggtatcagagcgagtatcagtcaatctgtaagtacttgctctacgttgt

SEQ ID NO: 472779 - DNA, 60 bp, Artificial
  Synthetic oligonucleotide
tggtatcagagctatggtgatgttttctatggctatggcagcgtaaacttcttctgctca

SEQ ID NO: 472780 - DNA, 54 bp, Artificial
  Synthetic oligonucleotide
tggtatcagagcttggtttgcttattcttgtttaatggctaactaaatatcgaa

SEQ ID NO: 472781 - DNA, 60 bp, Artificial
  Synthetic oligonucleotide
tggtatcagagcttggtttggttatcagaatgatgagtgagtagtctctcactaggggga

SEQ ID NO: 472782 - DNA, 60 bp, Artificial
  Synthetic oligonucleotide
tggtatcagagcttggttttagcaatggtcatgtccggctaagttagtcagtctaggttc

SEQ ID NO: 472783 - DNA, 60 bp, Artificial
  Synthetic oligonucleotide
tggtatcagatacgggtgacgatggtaaatcgtaagacgatgacagctagggcgacactg

SEQ ID NO: 472784 - DNA, 60 bp, Artificial
  Synthetic oligonucleotide
tggtatcagcctaaaggtggcactgagatgttctgccatccgcgaacaggtaagccacta

SEQ ID NO: 472785 - DNA, 59 bp, Artificial
  Synthetic oligonucleotide
tggtatcagcctacaatgtgtaacggtaatgctcctcagaatagaagggcgcttatccc

SEQ ID NO: 472786 - DNA, 60 bp, Artificial
  Synthetic oligonucleotide
tggtatcatagttggagaatatgtgtaccaattagactcagatgatatctttaaaaccgc

SEQ ID NO: 472787 - DNA, 55 bp, Artificial
  Synthetic oligonucleotide
tggtatcatctagtcaatgttgttcgtacaaaccatccgcggtttagaacgaata

SEQ ID NO: 472788 - DNA, 60 bp, Artificial
  Synthetic oligonucleotide
tggtatccaatcttagttagcatgtagctatatcaagtcattcagactcttcaagtaagg

SEQ ID NO: 472789 - DNA, 57 bp, Artificial
  Synthetic oligonucleotide
tggtatccgtaaggcccgtggagtcgattctgtgaatgagttcgctggaccagcact

SEQ ID NO: 472790 - DNA, 55 bp, Artificial
  Synthetic oligonucleotide
tggtatccgtcgggatggatgagtcagatgtatcagacatctactctatctcgga

SEQ ID NO: 472791 - DNA, 60 bp, Artificial
  Synthetic oligonucleotide
tggtatctaaatgacacaagaacaggtagagtctctctgcctaagtgctggatgatcagc

SEQ ID NO: 472792 - DNA, 60 bp, Artificial
  Synthetic oligonucleotide
tggtatctccgggtttgaggtagccggctgctaggaacgcctctagcactggtgctccta

SEQ ID NO: 472793 - DNA, 55 bp, Artificial
  Synthetic oligonucleotide
tggtatcttgacgtcgctttcaagattgttgtgtaaacctacggtgttaaccgag

SEQ ID NO: 472794 - DNA, 53 bp, Artificial
  Synthetic oligonucleotide
tggtatcttgacgttgctttcaagtttgtcgtgtaaaactacggtgttaacgg

SEQ ID NO: 472795 - DNA, 55 bp, Artificial
  Synthetic oligonucleotide
tggtatgacaactatgcctactacccggagacaccgggggcccttgcatcagcca

SEQ ID NO: 472796 - DNA, 50 bp, Artificial
  Synthetic oligonucleotide
tggtatgacttcgtagagaatcctgacattttacgcgtatatgctaactt

SEQ ID NO: 472797 - DNA, 60 bp, Artificial
  Synthetic oligonucleotide
tggtatgagtccacttttgggtctgtttactatcataattctatggattgccctattgta

SEQ ID NO: 472798 - DNA, 55 bp, Artificial
  Synthetic oligonucleotide
tggtatgataaccagcccctgttagctcaggctgttgagatgcttgcctctgagg

SEQ ID NO: 472799 - DNA, 60 bp, Artificial
  Synthetic oligonucleotide
tggtatgataactctcgacgagcagatctttcctatcttgacctagccaccactacaaaa

SEQ ID NO: 472800 - DNA, 60 bp, Artificial
  Synthetic oligonucleotide
tggtatgatgatatggtagagacagatagggtcaatcaggagattgatgaggccatagag

SEQ ID NO: 472801 - DNA, 60 bp, Artificial
  Synthetic oligonucleotide
tggtatgcacaaaatagccccgtcagcagctataaacagcctgcagctggcgccttaaaa

SEQ ID NO: 472802 - DNA, 60 bp, Artificial
  Synthetic oligonucleotide
tggtatgcatttacatcatcaatgaaacagggtaatacacttgacgtgtgtaaaaggttg

SEQ ID NO: 472803 - DNA, 60 bp, Artificial
  Synthetic oligonucleotide
tggtatgcatttacatcttctatgaaacaaggcaatactcttgatgtatgtaagaaacta

SEQ ID NO: 472804 - DNA, 60 bp, Artificial
  Synthetic oligonucleotide
tggtatgcctgcggcgtttgttctggtgaaaggacatccagagttgtccatggatggttt

SEQ ID NO: 472805 - DNA, 55 bp, Artificial
  Synthetic oligonucleotide
tggtatgcgacggaacagcccgagtcggctgagttcggcggcgtatgggtcatgt

SEQ ID NO: 472806 - DNA, 57 bp, Artificial
  Synthetic oligonucleotide
tggtatggcaccgacggtgcgtatagatgccggttctccaaagggtcttggagttcc

SEQ ID NO: 472807 - DNA, 60 bp, Artificial
  Synthetic oligonucleotide
tggtatgggtggatggcctagtgtaagggaaggaataagacgagctgagccacgagctga

SEQ ID NO: 472808 - DNA, 60 bp, Artificial
  Synthetic oligonucleotide
tggtatggtcgatgtagatgagctggtgtcccgtgctgagcacgaccaatatgttgagat

SEQ ID NO: 472809 - DNA, 60 bp, Artificial
  Synthetic oligonucleotide
tggtatgtcaggaatctactcaatcggtatgttatgatgccgagtggtgaagtcactaag

SEQ ID NO: 472810 - DNA, 57 bp, Artificial
  Synthetic oligonucleotide
tggtattacccatcgcgttggtaagcgtttctgtgtgaagtctgtgtatatcctagg

SEQ ID NO: 472811 - DNA, 60 bp, Artificial
  Synthetic oligonucleotide
tggtattatatacagacgtttcgcaatgggattcatcacaacacaatacacaaccattcc

SEQ ID NO: 472812 - DNA, 60 bp, Artificial
  Synthetic oligonucleotide
tggtattcaactataagaggttgaatgacaacacagagaaggatcaatacagtttgcccg

SEQ ID NO: 472813 - DNA, 60 bp, Artificial
  Synthetic oligonucleotide
tggtattcatctctatgtgattctatatagttaaatgcgctcggaggattcgccaaccta

SEQ ID NO: 472814 - DNA, 55 bp, Artificial
  Synthetic oligonucleotide
tggtattcccgaagatttagaccagttggacctagtcgatttcagtaagtaccgc

SEQ ID NO: 472815 - DNA, 60 bp, Artificial
  Synthetic oligonucleotide
tggtattcgatcctggatatcacacagactggagtgttgtttgccaaagcaattgcaggc

SEQ ID NO: 472816 - DNA, 60 bp, Artificial
  Synthetic oligonucleotide
tggtattcgcccttgtggcagtcattcacacaaatgcagacaaaatttgccttggacatc

SEQ ID NO: 472817 - DNA, 53 bp, Artificial
  Synthetic oligonucleotide
tggtattcgtgggctacgatggtgctggtctagagcttcggatgcttgcatcc

SEQ ID NO: 472818 - DNA, 58 bp, Artificial
  Synthetic oligonucleotide
tggtattgaatctaggagcgatcaacgtatgacccgtgatgcggctgaaatgagctct

SEQ ID NO: 472819 - DNA, 58 bp, Artificial
  Synthetic oligonucleotide
tggtattgcaccaccgccacaattcaaaaaacgttataacacaagtgacaattcaaga

SEQ ID NO: 472820 - DNA, 56 bp, Artificial
  Synthetic oligonucleotide
tggtattgcgccaccaccgcaatttaaaaaacgttataatacaaatgacaattcca

SEQ ID NO: 472821 - DNA, 54 bp, Artificial
  Synthetic oligonucleotide
tggtatttcccctcgaaccaaataagcacgtggagatgagggttcccattttgg

SEQ ID NO: 472822 - DNA, 60 bp, Artificial
  Synthetic oligonucleotide
tggtatttgacaagaggtcatcccttacagtcaatcacactcaacagccctttatgatta

SEQ ID NO: 472823 - DNA, 60 bp, Artificial
  Synthetic oligonucleotide
tggtcaaaaagcaatgacgggatggacttggtcagatactttggctgtagaattagacta

SEQ ID NO: 472824 - DNA, 54 bp, Artificial
  Synthetic oligonucleotide
tggtcaaaaggatgggctgctgtaagggaaagaatgcaacgagctgagccaaca

SEQ ID NO: 472825 - DNA, 58 bp, Artificial
  Synthetic oligonucleotide
tggtcaaagccacaatgtaaaattacaggatttgcacctttctctaaggacaattcaa

SEQ ID NO: 472826 - DNA, 58 bp, Artificial
  Synthetic oligonucleotide
tggtcaaagttcaacgaccaactccaaagggcacggtaatggacatcatatctaggaa

SEQ ID NO: 472827 - DNA, 59 bp, Artificial
  Synthetic oligonucleotide
tggtcaaatccaagtccaaaaacagtttatgtcaaggaggctattgatcgtagactcca

SEQ ID NO: 472828 - DNA, 56 bp, Artificial
  Synthetic oligonucleotide
tggtcaaattataaatacctaccaagcgagatttggtaccattacagccaggaact

SEQ ID NO: 472829 - DNA, 60 bp, Artificial
  Synthetic oligonucleotide
tggtcaacacggcagtgtccctcttgagttcctctggagaccctcacgagagtctcaccc

SEQ ID NO: 472830 - DNA, 55 bp, Artificial
  Synthetic oligonucleotide
tggtcaacacgtggagttttatactaaacgtgcagtacgccaagcttaaggaccg

SEQ ID NO: 472831 - DNA, 51 bp, Artificial
  Synthetic oligonucleotide
tggtcaacaggttctctataaaagtgtatgaattgcccattttgtggttgg

SEQ ID NO: 472832 - DNA, 55 bp, Artificial
  Synthetic oligonucleotide
tggtcaacggcaagtggtggaccggtcgtgtcgacaagtgccgcaagcgccgaaa

SEQ ID NO: 472833 - DNA, 54 bp, Artificial
  Synthetic oligonucleotide
tggtcaacggccggaacctgagtgacccggacagccgcaccgtcaaccttccct

SEQ ID NO: 472834 - DNA, 60 bp, Artificial
  Synthetic oligonucleotide
tggtcaactgtgtgctgtcatgtctaaactgaaagctgtccgagctatatgttttgggga

SEQ ID NO: 472835 - DNA, 60 bp, Artificial
  Synthetic oligonucleotide
tggtcaaggcagcgggaatgcagccacgttcatcaataaccacctcttgagcacgctagt

SEQ ID NO: 472836 - DNA, 56 bp, Artificial
  Synthetic oligonucleotide
tggtcaagggcgaggggaacggactaatttggatcgcttaaagggcttggctgatg

SEQ ID NO: 472837 - DNA, 55 bp, Artificial
  Synthetic oligonucleotide
tggtcaagttcatggaggagtggcgcgacgttccgtgggtggacctgcgctggta

SEQ ID NO: 472838 - DNA, 60 bp, Artificial
  Synthetic oligonucleotide
tggtcaatactaccagaagctcagaaacttttcgccattgctgaagcacatgcagaaata

SEQ ID NO: 472839 - DNA, 60 bp, Artificial
  Synthetic oligonucleotide
tggtcaatgtacaccgattgacttggatttcatttggtgcctgcaatcggtgtaatgggg

SEQ ID NO: 472840 - DNA, 60 bp, Artificial
  Synthetic oligonucleotide
tggtcaatgtggtggtattatcacatgtactggcaaagtgatagggatgcatgttggagg

SEQ ID NO: 472841 - DNA, 55 bp, Artificial
  Synthetic oligonucleotide
tggtcaattccaatggtgctgtttgacgatacgatcaagttaatacccgtagagg

SEQ ID NO: 472842 - DNA, 60 bp, Artificial
  Synthetic oligonucleotide
tggtcacaatataagtaatatattgtgatcatgggtgcacaagtgtctactcaaaagagc

SEQ ID NO: 472843 - DNA, 60 bp, Artificial
  Synthetic oligonucleotide
tggtcacatcagctccaaacggcaatatacgcaacactccagaacaggccaaccccacag

SEQ ID NO: 472844 - DNA, 60 bp, Artificial
  Synthetic oligonucleotide
tggtcacatttcactcagaatggggtgtacgggttcaacactctgaacaatatgggcaaa

SEQ ID NO: 472845 - DNA, 60 bp, Artificial
  Synthetic oligonucleotide
tggtcaccacagacaatggaaagtttacaggcttaggtatctatgacagggtcatgatac

SEQ ID NO: 472846 - DNA, 58 bp, Artificial
  Synthetic oligonucleotide
tggtcacccaaggtccagaggaagagtttggtcgttcactgcttaaacataactgctg

SEQ ID NO: 472847 - DNA, 55 bp, Artificial
  Synthetic oligonucleotide
tggtcaccggactcatcgacccctcgcggctcccgctgatcccatttagccacat

SEQ ID NO: 472848 - DNA, 60 bp, Artificial
  Synthetic oligonucleotide
tggtcacctacaacagccctagtggtatcgcagatactccggatcccacaagctgtcgtg

SEQ ID NO: 472849 - DNA, 58 bp, Artificial
  Synthetic oligonucleotide
tggtcacgagggaggccgatgttatccccgcgaggcgcaggggtgacagtcgtgcagc

SEQ ID NO: 472850 - DNA, 58 bp, Artificial
  Synthetic oligonucleotide
tggtcacggccaggtcaacacaccagttaagatacccagatggtatatcccctgggcc

SEQ ID NO: 472851 - DNA, 56 bp, Artificial
  Synthetic oligonucleotide
tggtcacggctaatcgtaagtctgctgacgacgtgagggccgccatttttcccgaa

SEQ ID NO: 472852 - DNA, 60 bp, Artificial
  Synthetic oligonucleotide
tggtcacgtgaccatgattgagagaggcttctatgaactatgtgggggagagaattggaa

SEQ ID NO: 472853 - DNA, 58 bp, Artificial
  Synthetic oligonucleotide
tggtcactgtgtctaccgccggatttgttcacgggcggtatgttttgagtagcattta

SEQ ID NO: 472854 - DNA, 60 bp, Artificial
  Synthetic oligonucleotide
tggtcactttggactatctcattattcgagagcaaccactccgattcttggaaagatgcc

SEQ ID NO: 472855 - DNA, 60 bp, Artificial
  Synthetic oligonucleotide
tggtcagaaacccccgtgtgagcctctccaaggacagctacagcaccacacaatgggcga

SEQ ID NO: 472856 - DNA, 60 bp, Artificial
  Synthetic oligonucleotide
tggtcagaaatccactctcacggaattccacgcacgagatgtattgggtaagtcgagctt

SEQ ID NO: 472857 - DNA, 60 bp, Artificial
  Synthetic oligonucleotide
tggtcagacactctttagaaacttctatttactacgatgtaatatttcagctgatggccg

SEQ ID NO: 472858 - DNA, 57 bp, Artificial
  Synthetic oligonucleotide
tggtcagcacaactacagctcatgggtgcgacaccatagctaggtgccagtgcacga

SEQ ID NO: 472859 - DNA, 55 bp, Artificial
  Synthetic oligonucleotide
tggtcagcctataggtattggggttacgggtcatcctcttttgagcaggtttacg

SEQ ID NO: 472860 - DNA, 57 bp, Artificial
  Synthetic oligonucleotide
tggtcagcctccaaccacgacctcgaactctgcagatacaagggtaccaccctaaaa

SEQ ID NO: 472861 - DNA, 60 bp, Artificial
  Synthetic oligonucleotide
tggtcagctacggaaggggatgcggatgatgcaccttccaggtcacatcttcctccttct

SEQ ID NO: 472862 - DNA, 60 bp, Artificial
  Synthetic oligonucleotide
tggtcaggatacagcggagccttcaccatcccaaccacaatgactagtaaacaatgctta

SEQ ID NO: 472863 - DNA, 55 bp, Artificial
  Synthetic oligonucleotide
tggtcaggatccgatgtcagggcagttgcctacgcccgctaaagcggatcaggtg

SEQ ID NO: 472864 - DNA, 50 bp, Artificial
  Synthetic oligonucleotide
tggtcaggcagctgatgatgtacccgcgtctgatcccgtttcccctgccg

SEQ ID NO: 472865 - DNA, 60 bp, Artificial
  Synthetic oligonucleotide
tggtcaggccattgcagggatacggccccgcgacccgatctgtgctttggacggacatgg

SEQ ID NO: 472866 - DNA, 55 bp, Artificial
  Synthetic oligonucleotide
tggtcaggcctgttcaacccactaactggaaatacacttagagacttacagccgc

SEQ ID NO: 472867 - DNA, 53 bp, Artificial
  Synthetic oligonucleotide
tggtcagggacggcaacagtggagagtacaacatagtggggcttttccatagt

SEQ ID NO: 472868 - DNA, 60 bp, Artificial
  Synthetic oligonucleotide
tggtcagggtacagcggaagtttcgttcaacatcctgagctaacaggattggactgtatg

SEQ ID NO: 472869 - DNA, 60 bp, Artificial
  Synthetic oligonucleotide
tggtcaggttctatcaggatctccctaatgtacacaggtcctgcactatcaagtgccaaa

SEQ ID NO: 472870 - DNA, 58 bp, Artificial
  Synthetic oligonucleotide
tggtcaggttgacatttaacttggtaggagatcctataccaggcacagagacctttta

SEQ ID NO: 472871 - DNA, 53 bp, Artificial
  Synthetic oligonucleotide
tggtcataaggaaaaatgaaacggacatgagaagaagaactgttaaaacgagg

SEQ ID NO: 472872 - DNA, 59 bp, Artificial
  Synthetic oligonucleotide
tggtcatacaaaggacaatagggaagaagaagcagcggttaaacaagagaagctatcta

SEQ ID NO: 472873 - DNA, 55 bp, Artificial
  Synthetic oligonucleotide
tggtcataccagtggttccactagaacacgcaacaggtactacaccattcgttgc

SEQ ID NO: 472874 - DNA, 60 bp, Artificial
  Synthetic oligonucleotide
tggtcatacgggtacattattatgtgtgtcggatgttactcgtggaaatgggttgactca

SEQ ID NO: 472875 - DNA, 60 bp, Artificial
  Synthetic oligonucleotide
tggtcatagcgaatttcatacgaaaacgaattgggttcagtggatgattgatgacgcaat

SEQ ID NO: 472876 - DNA, 60 bp, Artificial
  Synthetic oligonucleotide
tggtcatcacaggtacacaccaatgtgcctttagatcaagacggatgtccttatttgtac

SEQ ID NO: 472877 - DNA, 60 bp, Artificial
  Synthetic oligonucleotide
tggtcatcgcctacacctctaaggtcttgggtctgtacgctgatttgacgcaaggtgtgc

SEQ ID NO: 472878 - DNA, 54 bp, Artificial
  Synthetic oligonucleotide
tggtcatgagtcgattcagaccacgatctcgttgtatacgcatttggaccggtc

SEQ ID NO: 472879 - DNA, 53 bp, Artificial
  Synthetic oligonucleotide
tggtcatgtccggctaaaaacctagtgttaggttcggggaaagaggtctactg

SEQ ID NO: 472880 - DNA, 59 bp, Artificial
  Synthetic oligonucleotide
tggtcattgaccatgagaacaatcaggcgtatctaacccgaacttgcaataccgatcag

SEQ ID NO: 472881 - DNA, 60 bp, Artificial
  Synthetic oligonucleotide
tggtcattgtagtttcggtggactcgatgtaacttcatgattcatcgttttttggaatga

SEQ ID NO: 472882 - DNA, 55 bp, Artificial
  Synthetic oligonucleotide
tggtcattgtgggtaggatcattttgtccgggaggccggctgttgttcccgacag

SEQ ID NO: 472883 - DNA, 59 bp, Artificial
  Synthetic oligonucleotide
tggtccaaacctaactccaaattgcagataaataggcaagtcatagttgacagaggtaa

SEQ ID NO: 472884 - DNA, 60 bp, Artificial
  Synthetic oligonucleotide
tggtccaaagccacaggacgctagttgtgaacaaggtgcgaagagcctactgagctaatt

SEQ ID NO: 472885 - DNA, 58 bp, Artificial
  Synthetic oligonucleotide
tggtccaacttttccaacatcaacaagcgaaagacgagacactcttctgggctacaat

SEQ ID NO: 472886 - DNA, 52 bp, Artificial
  Synthetic oligonucleotide
tggtccaaggcccccccccccccggaagagcggcaggagagccgctcccaga

SEQ ID NO: 472887 - DNA, 52 bp, Artificial
  Synthetic oligonucleotide
tggtccacaaagcgcgggctctcgaagttttgaattgactgactggtttgcg

SEQ ID NO: 472888 - DNA, 60 bp, Artificial
  Synthetic oligonucleotide
tggtccactgttagcggatcggaggacgtcgtgtgttgctcaatgtcatattcatggacc

SEQ ID NO: 472889 - DNA, 58 bp, Artificial
  Synthetic oligonucleotide
tggtccagaaaccttaagacaagtcagagaagcaatcgcaaccctgcaatacgggtcc

SEQ ID NO: 472890 - DNA, 58 bp, Artificial
  Synthetic oligonucleotide
tggtccataaggtttgaagggcacagtcctgttaaggaggcaatcacttgtccattta

SEQ ID NO: 472891 - DNA, 50 bp, Artificial
  Synthetic oligonucleotide
tggtccattgctttccgtttttgcactgcaggaaattcttgataagatta

SEQ ID NO: 472892 - DNA, 55 bp, Artificial
  Synthetic oligonucleotide
tggtcccacggatagtctggaattcagccccccaagcgagtccttcgggacgtgg

SEQ ID NO: 472893 - DNA, 52 bp, Artificial
  Synthetic oligonucleotide
tggtcccagtgcgagatctgccccggtcgctttgttggccaaaaggcctgtt

SEQ ID NO: 472894 - DNA, 58 bp, Artificial
  Synthetic oligonucleotide
tggtccccactattcgaaggcaacttgcaataagaagagtggaacaaggatgcttaaa

SEQ ID NO: 472895 - DNA, 55 bp, Artificial
  Synthetic oligonucleotide
tggtcccccccactaagttttgtcggccaatgagaacgctctctcaaatgttagt

SEQ ID NO: 472896 - DNA, 52 bp, Artificial
  Synthetic oligonucleotide
tggtcccccctcccgggggaacaaagtcgttaatattaaatctcatcctgtc

SEQ ID NO: 472897 - DNA, 54 bp, Artificial
  Synthetic oligonucleotide
tggtcccctatttaaacttcctcagcaagtagaaaccctaaaatgtgggatcca

SEQ ID NO: 472898 - DNA, 55 bp, Artificial
  Synthetic oligonucleotide
tggtcccctatttaaagattgctcactaagttgtttcccaaacatgtgggatccg

SEQ ID NO: 472899 - DNA, 59 bp, Artificial
  Synthetic oligonucleotide
tggtccccttcttggctaacctgtgctgcactttgattggaacctgagtagagtggttc

SEQ ID NO: 472900 - DNA, 55 bp, Artificial
  Synthetic oligonucleotide
tggtcccgctatggacaagccctactgctggcattactcgcccaggccatgcgag

SEQ ID NO: 472901 - DNA, 58 bp, Artificial
  Synthetic oligonucleotide
tggtcccggacctacccctgacatacctacacatctgcctgcgttgctagttttggtc

SEQ ID NO: 472902 - DNA, 56 bp, Artificial
  Synthetic oligonucleotide
tggtcccgtgtactgcttcactccgagccccgttgtggtggggacgaccgatctct

SEQ ID NO: 472903 - DNA, 57 bp, Artificial
  Synthetic oligonucleotide
tggtccctgtggccacgtactctgttctcggcttgtggtcctttctcctcttagtct

SEQ ID NO: 472904 - DNA, 60 bp, Artificial
  Synthetic oligonucleotide
tggtccgcagatgtagaggctggggactctagctccagtccttctcggttcctggttaga

SEQ ID NO: 472905 - DNA, 58 bp, Artificial
  Synthetic oligonucleotide
tggtccgcccctacgcttgatggattagttgtagccccacctcaggtcttagctcaac

SEQ ID NO: 472906 - DNA, 60 bp, Artificial
  Synthetic oligonucleotide
tggtccggccatgtgggatctagctcgtgcatatgctgatgtgcagagttctaaatcggc

SEQ ID NO: 472907 - DNA, 60 bp, Artificial
  Synthetic oligonucleotide
tggtccggttatgatgtcagtccagtaaactgcgcacgctctggattcgataagatagga

SEQ ID NO: 472908 - DNA, 52 bp, Artificial
  Synthetic oligonucleotide
tggtccgtatacgatcactatggtgaggttaaagctggtctcgcacgaggcg

SEQ ID NO: 472909 - DNA, 56 bp, Artificial
  Synthetic oligonucleotide
tggtccgtgtcccttgtgcaaggacccttcccattggaaacgagattgtccacagt

SEQ ID NO: 472910 - DNA, 54 bp, Artificial
  Synthetic oligonucleotide
tggtccgttcttcttattacaacaggatgcttagccttatccattgttagcata

SEQ ID NO: 472911 - DNA, 56 bp, Artificial
  Synthetic oligonucleotide
tggtcctacacgtcccccagtggttattgaacctgtgggccccacagacccatcta

SEQ ID NO: 472912 - DNA, 53 bp, Artificial
  Synthetic oligonucleotide
tggtcctacagagctctctgggcaacgaccttagggtagatggggccagcatc

SEQ ID NO: 472913 - DNA, 55 bp, Artificial
  Synthetic oligonucleotide
tggtcctacaggcggtcttctctttctcaggccctaaagttgtcgccgctaaagt

SEQ ID NO: 472914 - DNA, 53 bp, Artificial
  Synthetic oligonucleotide
tggtcctacataatagaaacttccaattcggaaaacggaacatgctaccccgg

SEQ ID NO: 472915 - DNA, 55 bp, Artificial
  Synthetic oligonucleotide
tggtcctacatagtggagaaaccaaatcccaccaatggaatatgttacccgggta

SEQ ID NO: 472916 - DNA, 60 bp, Artificial
  Synthetic oligonucleotide
tggtcctacattgcagaagcaccaaactctgagtatggagtatgttacccagggtatttc

SEQ ID NO: 472917 - DNA, 56 bp, Artificial
  Synthetic oligonucleotide
tggtcctacccaaacacacagctggacctagccaggtacaggggggtcaccttctg

SEQ ID NO: 472918 - DNA, 58 bp, Artificial
  Synthetic oligonucleotide
tggtcctacggtaactttgataggctctaacatgttttaacatactaacttgcttgca

SEQ ID NO: 472919 - DNA, 54 bp, Artificial
  Synthetic oligonucleotide
tggtcctaggcgccagtggacaaactaatacccagttcaaactcctccaaaccc

SEQ ID NO: 472920 - DNA, 55 bp, Artificial
  Synthetic oligonucleotide
tggtcctatatagtggaaagggaaaacccagtaaatggtctgtgctacccaggca

SEQ ID NO: 472921 - DNA, 59 bp, Artificial
  Synthetic oligonucleotide
tggtcctctccgcatttgatgaaaggaggaacagatacctggaagaaagtcccagtgcg

SEQ ID NO: 472922 - DNA, 59 bp, Artificial
  Synthetic oligonucleotide
tggtcctgtctcatgggtccctcgctgatttggacaggaggctagacaacgcccctaag

SEQ ID NO: 472923 - DNA, 59 bp, Artificial
  Synthetic oligonucleotide
tggtccttctcataatttggttgctctttcgagacatagaaaaacactacgatattaca

SEQ ID NO: 472924 - DNA, 60 bp, Artificial
  Synthetic oligonucleotide
tggtcgaaaaatcagctctatcgttgggttctgccccgctatgacacgcagtgaattctg

SEQ ID NO: 472925 - DNA, 60 bp, Artificial
  Synthetic oligonucleotide
tggtcgaacctcgctcttaatgatgaggacgtcaatgagctagtatttagatttcgatta

SEQ ID NO: 472926 - DNA, 51 bp, Artificial
  Synthetic oligonucleotide
tggtcgacaaattgtactaaacagacagttaacctcaagatactacttcac

SEQ ID NO: 472927 - DNA, 55 bp, Artificial
  Synthetic oligonucleotide
tggtcgagcgaatcttgatgaactacatcgagtcaaactcataccgtgtgacact

SEQ ID NO: 472928 - DNA, 60 bp, Artificial
  Synthetic oligonucleotide
tggtcgatattactacagaaaatgaactatcaatacagcaattcgtccaaggccaaggaa

SEQ ID NO: 472929 - DNA, 60 bp, Artificial
  Synthetic oligonucleotide
tggtcgatctcaggaagcagttacagctcgacagcgacagaagagtattcggagagcagg

SEQ ID NO: 472930 - DNA, 59 bp, Artificial
  Synthetic oligonucleotide
tggtcgattgggatggtggaagaagcccaaccgtcattatttgaagtacgctctcgcga

SEQ ID NO: 472931 - DNA, 54 bp, Artificial
  Synthetic oligonucleotide
tggtcgattttaaaaccaggggaaaccttgaatgttgaatctaatggaaatcta

SEQ ID NO: 472932 - DNA, 60 bp, Artificial
  Synthetic oligonucleotide
tggtcgcatcaattactctaccgcaggcattttggcccaatcaagattttccagcatggg

SEQ ID NO: 472933 - DNA, 60 bp, Artificial
  Synthetic oligonucleotide
tggtcgcgcgctttatataccaccatatgaactcttgcgccacgaatggtatgaaaaatt

SEQ ID NO: 472934 - DNA, 60 bp, Artificial
  Synthetic oligonucleotide
tggtcgctatcaaatgtcatggtaccctctctctaatggagaacagactcttgcccagtg

SEQ ID NO: 472935 - DNA, 52 bp, Artificial
  Synthetic oligonucleotide
tggtcggaatatcgctgtttggactacggctattgacgattaactgttttag

SEQ ID NO: 472936 - DNA, 54 bp, Artificial
  Synthetic oligonucleotide
tggtcggaggccattacgtgcagatggctatcatcaagttgggggcgctcactg

SEQ ID NO: 472937 - DNA, 58 bp, Artificial
  Synthetic oligonucleotide
tggtcggcaagtgggagcctagtagtgacgatccatggtggcaactacccaggggccc

SEQ ID NO: 472938 - DNA, 60 bp, Artificial
  Synthetic oligonucleotide
tggtcggccgatcaagaacctgctggcatctgtgaagccactcaacattcttaacatcgt

SEQ ID NO: 472939 - DNA, 55 bp, Artificial
  Synthetic oligonucleotide
tggtcggcggcctagagtgatacagatggttggtactgagggtcaattgtccgca

SEQ ID NO: 472940 - DNA, 57 bp, Artificial
  Synthetic oligonucleotide
tggtcggctgtctgaaaagaattggggccccggcccggaacgtgctgagcagctacg

SEQ ID NO: 472941 - DNA, 53 bp, Artificial
  Synthetic oligonucleotide
tggtcgggggaaaacttccgggaggtggacatacttatggcggagcaacttac

SEQ ID NO: 472942 - DNA, 54 bp, Artificial
  Synthetic oligonucleotide
tggtcgggtctgtttaatcccttaacagggaattccctgagagagttgcaacca

SEQ ID NO: 472943 - DNA, 55 bp, Artificial
  Synthetic oligonucleotide
tggtcgggttgttgatagtttattgaaaattcataaaagtaaagttcgtgatata

SEQ ID NO: 472944 - DNA, 60 bp, Artificial
  Synthetic oligonucleotide
tggtcggtagaggacgccagctacatgggtgtctcaggaagtcagaacattacctctatc

SEQ ID NO: 472945 - DNA, 53 bp, Artificial
  Synthetic oligonucleotide
tggtcggtggagttagacctgctgagggcatacaacatacacaacgaccccaa

SEQ ID NO: 472946 - DNA, 60 bp, Artificial
  Synthetic oligonucleotide
tggtcgtataatgctgagctgttggtggcaatggagaatcagcatacaatagatcttgcg

SEQ ID NO: 472947 - DNA, 54 bp, Artificial
  Synthetic oligonucleotide
tggtcgtcctcagattgtcctgccgtctcataccgtagaagaaatgttgaccaa

SEQ ID NO: 472948 - DNA, 60 bp, Artificial
  Synthetic oligonucleotide
tggtcgtctcgcgaacttcattaggcgacagttaaccaaaccagcatatggtcgtatgga

SEQ ID NO: 472949 - DNA, 60 bp, Artificial
  Synthetic oligonucleotide
tggtcgtgaacatggcaagctttgctatactcctagattcgttcatgctgggagcataca

SEQ ID NO: 472950 - DNA, 55 bp, Artificial
  Synthetic oligonucleotide
tggtcgtgctcgccacagctacccctccgggttccgtcaccgtgccccatcctaa

SEQ ID NO: 472951 - DNA, 56 bp, Artificial
  Synthetic oligonucleotide
tggtcgtgtgtttcctttcaatggtgctataccaaagatcggtaactggttagtcg

SEQ ID NO: 472952 - DNA, 60 bp, Artificial
  Synthetic oligonucleotide
tggtcgttagagtagtaaatgatagaaatgagttgttaaacgctacaaatcacatcacca

SEQ ID NO: 472953 - DNA, 52 bp, Artificial
  Synthetic oligonucleotide
tggtcgttcctcctgacctgagcgttgcctccagtaagggggattacccgga

SEQ ID NO: 472954 - DNA, 60 bp, Artificial
  Synthetic oligonucleotide
tggtcgttcgcacaagcttgcgcgtcccttgacaagaccacctccagtggccatccgcat

SEQ ID NO: 472955 - DNA, 57 bp, Artificial
  Synthetic oligonucleotide
tggtctaaagtaaattttccgcatggaatgttagatcttgaggagattgctgctaat

SEQ ID NO: 472956 - DNA, 53 bp, Artificial
  Synthetic oligonucleotide
tggtctacaacccgaaatgacaattccacggtaaacacacacattaatacacc

SEQ ID NO: 472957 - DNA, 59 bp, Artificial
  Synthetic oligonucleotide
tggtctacaatcaccaggaagctgccaagtacgagaaccataccgagaacgccctatta

SEQ ID NO: 472958 - DNA, 52 bp, Artificial
  Synthetic oligonucleotide
tggtctacccccatcgagttcgagctctggcatccgccggtggttcaacagc

SEQ ID NO: 472959 - DNA, 58 bp, Artificial
  Synthetic oligonucleotide
tggtctagagggcaacgggggacgtagcagggactttattaagctgatgaacgtgcgc

SEQ ID NO: 472960 - DNA, 60 bp, Artificial
  Synthetic oligonucleotide
tggtctatctttctggatgtgctccaatggatcattgcagtgcagaatttgcatttaatc

SEQ ID NO: 472961 - DNA, 60 bp, Artificial
  Synthetic oligonucleotide
tggtctcacccatttgatgatttggcactccaatctgaatgatgccacataccagagaac

SEQ ID NO: 472962 - DNA, 59 bp, Artificial
  Synthetic oligonucleotide
tggtctccaccgcaacacaatcttttctagcgacctgtgtcaacggcgtgtgttggacc

SEQ ID NO: 472963 - DNA, 55 bp, Artificial
  Synthetic oligonucleotide
tggtctccatgctccttggaccttctacctccaagttctctcaccactcaacccc

SEQ ID NO: 472964 - DNA, 58 bp, Artificial
  Synthetic oligonucleotide
tggtctcccaacagacaatcagaaacccctgcaagactgacggacaacttgccccctc

SEQ ID NO: 472965 - DNA, 60 bp, Artificial
  Synthetic oligonucleotide
tggtctcgacaatggtgctcatcggagtagagccttccgaaccatggtcacatcttcgcg

SEQ ID NO: 472966 - DNA, 59 bp, Artificial
  Synthetic oligonucleotide
tggtctcgatggaaatgttgtaagtgtggattgcaaacataaaacccctatgcaaatta

SEQ ID NO: 472967 - DNA, 56 bp, Artificial
  Synthetic oligonucleotide
tggtctcggcgcgactcgcgttaggcaacttgaccctaacgcggtactacatcccg

SEQ ID NO: 472968 - DNA, 55 bp, Artificial
  Synthetic oligonucleotide
tggtctctacgtcgtatacacaaagacggttaggactgatgttgtttggccaacg

SEQ ID NO: 472969 - DNA, 55 bp, Artificial
  Synthetic oligonucleotide
tggtctgaacatgtgtttgatgcagattgggctacaaggctacacatttgtcccc

SEQ ID NO: 472970 - DNA, 60 bp, Artificial
  Synthetic oligonucleotide
tggtctgacaataaggattcagaggagccaatagggaaagtcttgttgtttgcaggagta

SEQ ID NO: 472971 - DNA, 53 bp, Artificial
  Synthetic oligonucleotide
tggtctgagaaatgttccacaggtaaaaacaagaggattgtttggagcaatag

SEQ ID NO: 472972 - DNA, 54 bp, Artificial
  Synthetic oligonucleotide
tggtctgataagactgcccacccaagctgaaagagtagccaatgccacgagcaa

SEQ ID NO: 472973 - DNA, 55 bp, Artificial
  Synthetic oligonucleotide
tggtctgccaaacctcgaaaaggcatggggacaaatctttccgtccccaatcctc

SEQ ID NO: 472974 - DNA, 55 bp, Artificial
  Synthetic oligonucleotide
tggtctgccgaatgccgcggaggacaccctcgaaccgctgatacaggcgtggtgc

SEQ ID NO: 472975 - DNA, 52 bp, Artificial
  Synthetic oligonucleotide
tggtctgcttagacgaggcgtgcgtcaccccttgctacacgggtttaagcac

SEQ ID NO: 472976 - DNA, 60 bp, Artificial
  Synthetic oligonucleotide
tggtctggagatttgacagccgcctggcattcaaacacctagctcgagagctgcaccctg

SEQ ID NO: 472977 - DNA, 57 bp, Artificial
  Synthetic oligonucleotide
tggtctggcatacttggcaaaagcaaacccaaagatccggcgttctatgggacgtac

SEQ ID NO: 472978 - DNA, 51 bp, Artificial
  Synthetic oligonucleotide
tggtctggctgatacatcaatcgggaacataccctgtaataaagaggacct

SEQ ID NO: 472979 - DNA, 60 bp, Artificial
  Synthetic oligonucleotide
tggtctgtacaatgtgatggacagggcataactgattgtgcacttgtatctagcaccagc

SEQ ID NO: 472980 - DNA, 55 bp, Artificial
  Synthetic oligonucleotide
tggtctgttttgaaaccaggggaaaccttgaatgtggagtccaatgggaatctaa

SEQ ID NO: 472981 - DNA, 56 bp, Artificial
  Synthetic oligonucleotide
tggtcttaacgactactacggcccactactccctgtttggttagagattgtgtgcc

SEQ ID NO: 472982 - DNA, 54 bp, Artificial
  Synthetic oligonucleotide
tggtcttacaccaccgccttcaggtactttagaagaaacatatagatatgttac

SEQ ID NO: 472983 - DNA, 55 bp, Artificial
  Synthetic oligonucleotide
tggtcttagcgcgttctctctccatagctactctccaggtgagatcaatagggtg

SEQ ID NO: 472984 - DNA, 60 bp, Artificial
  Synthetic oligonucleotide
tggtcttcgatgtgaaccatgagggtgtattagcacctaagacttatgcctgtagagcta

SEQ ID NO: 472985 - DNA, 60 bp, Artificial
  Synthetic oligonucleotide
tggtcttgacgtctgtgtttatcacactcactttcaccagcattgtccagtcatgatctg

SEQ ID NO: 472986 - DNA, 60 bp, Artificial
  Synthetic oligonucleotide
tggtcttggccagacggtgctgagttgccattcaccattgacaagtagtttgttcaaaaa

SEQ ID NO: 472987 - DNA, 58 bp, Artificial
  Synthetic oligonucleotide
tggtcttgtatacggatgtatctcagtgggattcgtctcagcataatacacagccatt

SEQ ID NO: 472988 - DNA, 51 bp, Artificial
  Synthetic oligonucleotide
tggtctttatccacaatgtgggaccctttagtaaacgagtttcccgaaacc

SEQ ID NO: 472989 - DNA, 60 bp, Artificial
  Synthetic oligonucleotide
tggtcttttcacaagaggactgcatgataaaagcagtacgaggtgatctaaatttcgtaa

SEQ ID NO: 472990 - DNA, 60 bp, Artificial
  Synthetic oligonucleotide
tggtgaaaaagcgcttcaattctagagagagaagctctcgtttagcgcttctagagagag

SEQ ID NO: 472991 - DNA, 60 bp, Artificial
  Synthetic oligonucleotide
tggtgaaaagatatgaaagctggatgaacacaggatttaaccatcatgttaatgtcctca

SEQ ID NO: 472992 - DNA, 57 bp, Artificial
  Synthetic oligonucleotide
tggtgaaaccatgtacggcgttactaagcgagtagcgcaagcacacggttattttgg

SEQ ID NO: 472993 - DNA, 60 bp, Artificial
  Synthetic oligonucleotide
tggtgaaagcagcattcggaccgctggagagaacaagtggtagcatcctcaatcatgcca

SEQ ID NO: 472994 - DNA, 60 bp, Artificial
  Synthetic oligonucleotide
tggtgaaaggttggctgataggaaaattgctgagctgttctccacaaaaacacacattgg

SEQ ID NO: 472995 - DNA, 60 bp, Artificial
  Synthetic oligonucleotide
tggtgaaagtgaacaagtaatagtgacaagggagccgtatgtgtcatgtgacccattagg

SEQ ID NO: 472996 - DNA, 52 bp, Artificial
  Synthetic oligonucleotide
tggtgaaataaatgagagattgacataaacaagctttttaacgttacaagat

SEQ ID NO: 472997 - DNA, 59 bp, Artificial
  Synthetic oligonucleotide
tggtgaaataccataagtacaggtctaggaagaccaaggactggtattacagacatcat

SEQ ID NO: 472998 - DNA, 58 bp, Artificial
  Synthetic oligonucleotide
tggtgaaccgaatctatagtgtatataaatgtagagtcctagtatagtttcactggag

SEQ ID NO: 472999 - DNA, 58 bp, Artificial
  Synthetic oligonucleotide
tggtgaactagatgaaactgcagagcaacaaacctatctgagcggtaaacccaggggg

SEQ ID NO: 473000 - DNA, 52 bp, Artificial
  Synthetic oligonucleotide
tggtgaactcctaacaaaacactcaagaatcatcagtacattcccattcaat

SEQ ID NO: 473001 - DNA, 55 bp, Artificial
  Synthetic oligonucleotide
tggtgaactgtcctcagcaagtcgtgtcggttggaatttagtagacctggattcg

SEQ ID NO: 473002 - DNA, 60 bp, Artificial
  Synthetic oligonucleotide
tggtgaactttgtgagtatggagttctctcttactgacccgaggctggaatcacacaagt

SEQ ID NO: 473003 - DNA, 60 bp, Artificial
  Synthetic oligonucleotide
tggtgaagatgcaacagccggccttacacatattatgatttggcactccaatctgaatga

SEQ ID NO: 473004 - DNA, 60 bp, Artificial
  Synthetic oligonucleotide
tggtgaagctccctctccatacaactcaaggtttgagtcagttgcttggtcggcaagtgc

SEQ ID NO: 473005 - DNA, 60 bp, Artificial
  Synthetic oligonucleotide
tggtgaaggccctgattgatagcatcggcaatagtttcttccctgggctttccatatgca

SEQ ID NO: 473006 - DNA, 58 bp, Artificial
  Synthetic oligonucleotide
tggtgaatagatggttgtttcggcatctgtccagggagaagaaccctaggttgtgcac

SEQ ID NO: 473007 - DNA, 55 bp, Artificial
  Synthetic oligonucleotide
tggtgaatggccggactcggtgcgtcaacgcggagagttgttgggagaacccgtc

SEQ ID NO: 473008 - DNA, 57 bp, Artificial
  Synthetic oligonucleotide
tggtgacaacgctataagcggaggatccaacgaagggtccacggacacaacttccac

SEQ ID NO: 473009 - DNA, 57 bp, Artificial
  Synthetic oligonucleotide
tggtgacactgaacaaatctcttttaaatctcgtgatgctacatttcgcatgaaata

SEQ ID NO: 473010 - DNA, 57 bp, Artificial
  Synthetic oligonucleotide
tggtgacaggctaaggatgcccttcaggtaccccgaggtaacacgcgacactcggga

SEQ ID NO: 473011 - DNA, 50 bp, Artificial
  Synthetic oligonucleotide
tggtgacatcgatttaaagatggcgccatgcgctaatcttgcggaagcaa

SEQ ID NO: 473012 - DNA, 55 bp, Artificial
  Synthetic oligonucleotide
tggtgacccagtgacgcccagccttcggtactggaacgggtcagccttcgtctca

SEQ ID NO: 473013 - DNA, 60 bp, Artificial
  Synthetic oligonucleotide
tggtgaccgttgcagagcaccaccctgtcacggtcgtaagaaatttacgcaggctgcctg

SEQ ID NO: 473014 - DNA, 59 bp, Artificial
  Synthetic oligonucleotide
tggtgaccttcctccgaggagcaaggtggacatgtacaacattggcacgaagtttgagg

SEQ ID NO: 473015 - DNA, 50 bp, Artificial
  Synthetic oligonucleotide
tggtgacgataggcacactgatatcaatagccgaccctacaaagcaagga

SEQ ID NO: 473016 - DNA, 55 bp, Artificial
  Synthetic oligonucleotide
tggtgacgtaaaagacaaagttcctcaatggagtatgaagtacgtcgaaagttgg

SEQ ID NO: 473017 - DNA, 60 bp, Artificial
  Synthetic oligonucleotide
tggtgacgtacgagggtgacactagtgctggttataaccatgatgtttccaacctgcgct

SEQ ID NO: 473018 - DNA, 55 bp, Artificial
  Synthetic oligonucleotide
tggtgactgagttctgcgataggctaagacgtgacggtgttatgactcaggctca

SEQ ID NO: 473019 - DNA, 60 bp, Artificial
  Synthetic oligonucleotide
tggtgagaagtacaaagaaacagcgcgcgctttagctgcgatcttcagcaagaaaggtat

SEQ ID NO: 473020 - DNA, 55 bp, Artificial
  Synthetic oligonucleotide
tggtgagacattacctgcgtgctgaggtacaggccctgacaatgtcaggttatat

SEQ ID NO: 473021 - DNA, 60 bp, Artificial
  Synthetic oligonucleotide
tggtgagactagtgtacccaagtgttggcttgtcactaatggctcctacttgaatgagac

SEQ ID NO: 473022 - DNA, 60 bp, Artificial
  Synthetic oligonucleotide
tggtgagagaccctgtcattattctggtcagtaacatgctcggcgctaatcggggtagag

SEQ ID NO: 473023 - DNA, 55 bp, Artificial
  Synthetic oligonucleotide
tggtgagagcgattcgcccacccagtccgctgtccccgctgtcgctgacctgaac

SEQ ID NO: 473024 - DNA, 60 bp, Artificial
  Synthetic oligonucleotide
tggtgagcacaaatgcatatgataggatatgcattggataccaatcaaacaactccactg

SEQ ID NO: 473025 - DNA, 60 bp, Artificial
  Synthetic oligonucleotide
tggtgagcacggaagacgctgtctactcgagccgccaacgcaggtcgaaagtcacctgta

SEQ ID NO: 473026 - DNA, 58 bp, Artificial
  Synthetic oligonucleotide
tggtgagctagctaaagacatggcgaagcaaggctcagatgggagaaagggatacccc

SEQ ID NO: 473027 - DNA, 55 bp, Artificial
  Synthetic oligonucleotide
tggtgagctgatgagtggcggtgcgaaaagacaaaatgtcttcaagacccgcaac

SEQ ID NO: 473028 - DNA, 58 bp, Artificial
  Synthetic oligonucleotide
tggtgaggcacctcgcagggggtaagtacgtccagatggcgctattagcccttggtag

SEQ ID NO: 473029 - DNA, 51 bp, Artificial
  Synthetic oligonucleotide
tggtgaggccactctcacgaagctgtcagggctcgatatagtcactcattt

SEQ ID NO: 473030 - DNA, 60 bp, Artificial
  Synthetic oligonucleotide
tggtgagggaaaaactctcatggatgtttttatgcattctactattggaatcaagccagc

SEQ ID NO: 473031 - DNA, 59 bp, Artificial
  Synthetic oligonucleotide
tggtgaggggccaatgcacactggaaagactatgctctactctctctttgatggtagcg

SEQ ID NO: 473032 - DNA, 60 bp, Artificial
  Synthetic oligonucleotide
tggtgagggtaatgataatggaacatacaggctaataaattgtaatacctcagccattac

SEQ ID NO: 473033 - DNA, 60 bp, Artificial
  Synthetic oligonucleotide
tggtgaggtaatgtgtgtatgcagagacaactggcatggttcgaatcgaccatgggtgtc

SEQ ID NO: 473034 - DNA, 55 bp, Artificial
  Synthetic oligonucleotide
tggtgaggttaccgtgcagacacggggcaacccatctggacagttctcaacaacc

SEQ ID NO: 473035 - DNA, 58 bp, Artificial
  Synthetic oligonucleotide
tggtgagtacgccaaaaaatttttgactagcggaggctagaaggagagagatgggtgc

SEQ ID NO: 473036 - DNA, 58 bp, Artificial
  Synthetic oligonucleotide
tggtgagtatgtagctgtatcaagctgtgtgaactctgtaagtaaggaagcgtatacg

SEQ ID NO: 473037 - DNA, 57 bp, Artificial
  Synthetic oligonucleotide
tggtgagtgccccaaatatgtaaaatcggagaggttagtcctggcgacagggttgag

SEQ ID NO: 473038 - DNA, 57 bp, Artificial
  Synthetic oligonucleotide
tggtgagtggaaattggttaagcgagtcattgagagacaacaccccaattttagtcc

SEQ ID NO: 473039 - DNA, 59 bp, Artificial
  Synthetic oligonucleotide
tggtgagtggtggaccgaaatattatgtcggctccggctggcaaagctgggcctaaggc

SEQ ID NO: 473040 - DNA, 60 bp, Artificial
  Synthetic oligonucleotide
tggtgagttcgtgattaagaacacgactcagctacacttgctaccgattccggacaggga

SEQ ID NO: 473041 - DNA, 55 bp, Artificial
  Synthetic oligonucleotide
tggtgagtttctggaattcactagagaaactgcagcattcattgctagccaaatc

SEQ ID NO: 473042 - DNA, 58 bp, Artificial
  Synthetic oligonucleotide
tggtgatataaagaccctttgtggaccctaagccatgtagttgctgctccctctttcc

SEQ ID NO: 473043 - DNA, 60 bp, Artificial
  Synthetic oligonucleotide
tggtgatataatgagtccgagagataaaggatttctatgtcctgaattcccaggcagctt

SEQ ID NO: 473044 - DNA, 60 bp, Artificial
  Synthetic oligonucleotide
tggtgatccaaatgcactcctgaagcaccgatttgaaataattgaaggaagagaccgcac

SEQ ID NO: 473045 - DNA, 53 bp, Artificial
  Synthetic oligonucleotide
tggtgatcgatccctggtcaaagacacggcagtactgaaacatgcatatcagg

SEQ ID NO: 473046 - DNA, 57 bp, Artificial
  Synthetic oligonucleotide
tggtgatgacggcttcttaataactgagaaagggttgggactaaggtttgccagcaa

SEQ ID NO: 473047 - DNA, 60 bp, Artificial
  Synthetic oligonucleotide
tggtgatgatgtgttcacagtttcatgtagggtgctaactagaccctcccctgattttga

SEQ ID NO: 473048 - DNA, 55 bp, Artificial
  Synthetic oligonucleotide
tggtgatgccaactctagcaaggtcatcttttaatgacatgagtttgctcatatc

SEQ ID NO: 473049 - DNA, 55 bp, Artificial
  Synthetic oligonucleotide
tggtgatgtgtagacttgtattgaatctggccgaacggaaccaaagtaggaacgt

SEQ ID NO: 473050 - DNA, 60 bp, Artificial
  Synthetic oligonucleotide
tggtgattaacactactcgtttggagtataagcaatagacctcatgatgtctaactcatg

SEQ ID NO: 473051 - DNA, 60 bp, Artificial
  Synthetic oligonucleotide
tggtgattagtgctactgcagcgacacgtatccaagtacctctggctttcaacaaggctt

SEQ ID NO: 473052 - DNA, 59 bp, Artificial
  Synthetic oligonucleotide
tggtgattctaacacactccggagattggtcccacgtgtaatttccacaggtgccagga

SEQ ID NO: 473053 - DNA, 52 bp, Artificial
  Synthetic oligonucleotide
tggtgcaactccacatccacgtgggtaacctatgggacttgtaccaccacgg

SEQ ID NO: 473054 - DNA, 59 bp, Artificial
  Synthetic oligonucleotide
tggtgcaaggatccacagtcacggtaacctggctataactccaggtatgaaggagcggt

SEQ ID NO: 473055 - DNA, 60 bp, Artificial
  Synthetic oligonucleotide
tggtgcaaggatccatagccatggtcaattgtcaatcatcccagctttgaaagaccgatt

SEQ ID NO: 473056 - DNA, 59 bp, Artificial
  Synthetic oligonucleotide
tggtgcaagtttatgaagaaggagcttccatcccatggcaccgggacaacgaaaggtgc

SEQ ID NO: 473057 - DNA, 55 bp, Artificial
  Synthetic oligonucleotide
tggtgcaatgccacggacacatgggtgacctatggaacgtgttctcaaaccggtg

SEQ ID NO: 473058 - DNA, 60 bp, Artificial
  Synthetic oligonucleotide
tggtgcaatgggccctagataataatttgacagaagaaagctcgatagcactaaaatatg

SEQ ID NO: 473059 - DNA, 55 bp, Artificial
  Synthetic oligonucleotide
tggtgcaatggtgcaggccatgcaagccagcagtgccctccaattgagctcaaaa

SEQ ID NO: 473060 - DNA, 60 bp, Artificial
  Synthetic oligonucleotide
tggtgcaattgcaggcttcatagaaggggggtggcctggtctaatcaatggatggtatgg

SEQ ID NO: 473061 - DNA, 60 bp, Artificial
  Synthetic oligonucleotide
tggtgcacatctacatgccagtttggagaccctggagatatcatgagcccaagagacaaa

SEQ ID NO: 473062 - DNA, 60 bp, Artificial
  Synthetic oligonucleotide
tggtgcaccgggggctatagcaggcattgctgctttggtacaaacagttagtggtgttag

SEQ ID NO: 473063 - DNA, 60 bp, Artificial
  Synthetic oligonucleotide
tggtgcacgaatacacagtcatggcaatttagctataaccgcatctctgaaagaccgatt

SEQ ID NO: 473064 - DNA, 59 bp, Artificial
  Synthetic oligonucleotide
tggtgcactggggctccttgattttgcattagagcttgaatttaggaatttgacacccg

SEQ ID NO: 473065 - DNA, 60 bp, Artificial
  Synthetic oligonucleotide
tggtgcacttgccagttgcatgggcctaatatacaacagaatgggaacggtgaccacgga

SEQ ID NO: 473066 - DNA, 60 bp, Artificial
  Synthetic oligonucleotide
tggtgcagaagcgcaaagatcttcggcgttctgatgccggttctgccgttcgggccaaac

SEQ ID NO: 473067 - DNA, 55 bp, Artificial
  Synthetic oligonucleotide
tggtgcagacagcatactgggatgtatcaggggtcctcgccaaaagtgagggtcc

SEQ ID NO: 473068 - DNA, 57 bp, Artificial
  Synthetic oligonucleotide
tggtgcagacccaaaacgtcttcagacgctattttcgaagactttaaccagcctcaa

SEQ ID NO: 473069 - DNA, 51 bp, Artificial
  Synthetic oligonucleotide
tggtgcaggagaaatttctattattactgagtctgaccctatttcagatgt

SEQ ID NO: 473070 - DNA, 58 bp, Artificial
  Synthetic oligonucleotide
tggtgcaggcaatgaggacaattggaactcaccctagctccagtgccggtctgaaaga

SEQ ID NO: 473071 - DNA, 52 bp, Artificial
  Synthetic oligonucleotide
tggtgcagtagtcatgtacactaggagtcaccttgaacaggacattcacact

SEQ ID NO: 473072 - DNA, 54 bp, Artificial
  Synthetic oligonucleotide
tggtgcatcgaaactaaccaattccagcgagacgtccgtggtcaacatgctttc

SEQ ID NO: 473073 - DNA, 60 bp, Artificial
  Synthetic oligonucleotide
tggtgcatttactaatttaccacatgtgttaatgaacttggcagagacaacacaagctga

SEQ ID NO: 473074 - DNA, 54 bp, Artificial
  Synthetic oligonucleotide
tggtgccaagcataccgttgaactatctaacgtaaccggtagcggtaacgggac

SEQ ID NO: 473075 - DNA, 60 bp, Artificial
  Synthetic oligonucleotide
tggtgccacggacttaggaagcatacgtgtgtttgtaacacatcccttatcaagtgccac

SEQ ID NO: 473076 - DNA, 55 bp, Artificial
  Synthetic oligonucleotide
tggtgccacgtaataacgaggaacaggaccaacgtcagaggccacgttaaaaagc

SEQ ID NO: 473077 - DNA, 56 bp, Artificial
  Synthetic oligonucleotide
tggtgccactatctccgctccgacacagacctctgttgacgtaagtctcattctag

SEQ ID NO: 473078 - DNA, 59 bp, Artificial
  Synthetic oligonucleotide
tggtgccagcttcaccagttgcatccaacgccgaggatttccctctttgggcttgttgg

SEQ ID NO: 473079 - DNA, 60 bp, Artificial
  Synthetic oligonucleotide
tggtgccaggagcagtccaagaaggcacctctatcaacacactgcagaggtacgggcgag

SEQ ID NO: 473080 - DNA, 55 bp, Artificial
  Synthetic oligonucleotide
tggtgccatggcgttccgagcgtgtacgtgacatacgggaagtgcaaggccgacg

SEQ ID NO: 473081 - DNA, 60 bp, Artificial
  Synthetic oligonucleotide
tggtgcccaacttcatgatgagagatccatccaatgcgttcaatggtgtgaagttggaag

SEQ ID NO: 473082 - DNA, 60 bp, Artificial
  Synthetic oligonucleotide
tggtgccccctctacgtggtgcctctctattggcgctctccgtttatgatgggccatatt

SEQ ID NO: 473083 - DNA, 59 bp, Artificial
  Synthetic oligonucleotide
tggtgccctaacgggttcatttaatcatgcgatgagggttgctataccgcatccattct

SEQ ID NO: 473084 - DNA, 55 bp, Artificial
  Synthetic oligonucleotide
tggtgcccttgttcgagaacacgcacgttagttacgcttgctggcaggaggaaga

SEQ ID NO: 473085 - DNA, 60 bp, Artificial
  Synthetic oligonucleotide
tggtgccgaactttatgatgagggatccgtcccatgcgttcaatggtgtgaagttggagg

SEQ ID NO: 473086 - DNA, 60 bp, Artificial
  Synthetic oligonucleotide
tggtgccgcgggtacgagtggacaagtactcacatcgagtggtggtggtgcaatgtcttg

SEQ ID NO: 473087 - DNA, 60 bp, Artificial
  Synthetic oligonucleotide
tggtgccggcgtcatagtgttcatcatgatgttgacgctgtccccgtggtacaagcggtg

SEQ ID NO: 473088 - DNA, 56 bp, Artificial
  Synthetic oligonucleotide
tggtgccggtgccacccctcgttagatgggctgcgtatttataatgggccggcggg

SEQ ID NO: 473089 - DNA, 60 bp, Artificial
  Synthetic oligonucleotide
tggtgcctattgttgacatgtgaaattgttatttgggctgcaagtgcagagactccacta

SEQ ID NO: 473090 - DNA, 60 bp, Artificial
  Synthetic oligonucleotide
tggtgcctgttttgttgcactttggctcccttggaatgtctgatgacgaatacactgccg

SEQ ID NO: 473091 - DNA, 58 bp, Artificial
  Synthetic oligonucleotide
tggtgccttccgactccagtagattcaagcgggacgtacaagttgttagcccgctcac

SEQ ID NO: 473092 - DNA, 60 bp, Artificial
  Synthetic oligonucleotide
tggtgccttcttttcaatcttgcaggatatgagaaatacaataatggcatctaagaccgt

SEQ ID NO: 473093 - DNA, 52 bp, Artificial
  Synthetic oligonucleotide
tggtgcgaatttcacaaaacgcacgcttaccgcgggccgcgcgatattagcg

SEQ ID NO: 473094 - DNA, 60 bp, Artificial
  Synthetic oligonucleotide
tggtgcgatacgtcgttgcggtggggatcacattccatctcgagttggggccagagattg

SEQ ID NO: 473095 - DNA, 60 bp, Artificial
  Synthetic oligonucleotide
tggtgcgatggactttagaaacctctccagaaacaggtccgatgcacctttggacatcat

SEQ ID NO: 473096 - DNA, 60 bp, Artificial
  Synthetic oligonucleotide
tggtgcgattacagtacatgaggcccagggtgctacattcaccgagactacaattattgc

SEQ ID NO: 473097 - DNA, 57 bp, Artificial
  Synthetic oligonucleotide
tggtgcgcacaaccgcgagacgaagatgagctcagggaatacgaaagacaagcatcg

SEQ ID NO: 473098 - DNA, 57 bp, Artificial
  Synthetic oligonucleotide
tggtgcgcggacccttttgacgtggtgcgttctctaccgttggataaagcttatcgc

SEQ ID NO: 473099 - DNA, 55 bp, Artificial
  Synthetic oligonucleotide
tggtgcgctaaggtctcaagttgccttgtacctcgagacacggtacggaattacc

SEQ ID NO: 473100 - DNA, 60 bp, Artificial
  Synthetic oligonucleotide
tggtgcgcttgatttccgcactagttatagtagtgagaaaccatcaagacctagtcaccg

SEQ ID NO: 473101 - DNA, 60 bp, Artificial
  Synthetic oligonucleotide
tggtgcgcttgccagttgcatgggtctcatatataacaggatggggacggtgaccacaga

SEQ ID NO: 473102 - DNA, 51 bp, Artificial
  Synthetic oligonucleotide
tggtgcggtgagtgctcggacaggtggcgctgaggcgacgcctagtagctg

SEQ ID NO: 473103 - DNA, 60 bp, Artificial
  Synthetic oligonucleotide
tggtgcgtatcgttgatgaccaatttgacaaattgattcaagcactaagctccattaatg

SEQ ID NO: 473104 - DNA, 60 bp, Artificial
  Synthetic oligonucleotide
tggtgcgttttccagtgcattgattaaacataggataccaaattcaagagacgagtatca

SEQ ID NO: 473105 - DNA, 50 bp, Artificial
  Synthetic oligonucleotide
tggtgctactcctgtctgttgaacgtctggatcgttcttaaatatacggt

SEQ ID NO: 473106 - DNA, 55 bp, Artificial
  Synthetic oligonucleotide
tggtgctagatacgagacatcggataggatgaaattgcacagggcatctgggttg

SEQ ID NO: 473107 - DNA, 60 bp, Artificial
  Synthetic oligonucleotide
tggtgctattcctttcaatcaaacctactcgactattgttgatatctctgaaaataggga

SEQ ID NO: 473108 - DNA, 60 bp, Artificial
  Synthetic oligonucleotide
tggtgctccaccatgttccgtcaaatgttggtttacgaaatctggagagtggctgcttag

SEQ ID NO: 473109 - DNA, 60 bp, Artificial
  Synthetic oligonucleotide
tggtgctccaggctagcataatcaaagtgccgtactttgtacgtgcccacgggctcattc

SEQ ID NO: 473110 - DNA, 51 bp, Artificial
  Synthetic oligonucleotide
tggtgctccgtgggtgtcaagcgccatcaagcggttgcatcacctcgatgg

SEQ ID NO: 473111 - DNA, 55 bp, Artificial
  Synthetic oligonucleotide
tggtgctctggggagtccaggttgtgatcatttgaatggtgcagaatgggatgtc

SEQ ID NO: 473112 - DNA, 58 bp, Artificial
  Synthetic oligonucleotide
tggtgctctgttatcttgaaatagaggggattttgaatttcccagataaacacgccat

SEQ ID NO: 473113 - DNA, 55 bp, Artificial
  Synthetic oligonucleotide
tggtgctgacgggggacgtagacggcgactttgaggttgaagattaccttcccaa

SEQ ID NO: 473114 - DNA, 52 bp, Artificial
  Synthetic oligonucleotide
tggtgctgccgctcgtgcacacttcctcccctacgatacatgggagaagacg

SEQ ID NO: 473115 - DNA, 55 bp, Artificial
  Synthetic oligonucleotide
tggtgctgcgcttaaaaccaccagcagggcgcacgcgtaaatgtaaacagctgag

SEQ ID NO: 473116 - DNA, 52 bp, Artificial
  Synthetic oligonucleotide
tggtgctttccaagccaaatgagagctcactcttttgagccgctatttaatg

SEQ ID NO: 473117 - DNA, 60 bp, Artificial
  Synthetic oligonucleotide
tggtggaacatcaattaggactcgataaattggtgactgtgcttttcaatgggagaccag

SEQ ID NO: 473118 - DNA, 55 bp, Artificial
  Synthetic oligonucleotide
tggtggaagtccataaggatccatcaacaactctgcgttagaatcgataccgaag

SEQ ID NO: 473119 - DNA, 60 bp, Artificial
  Synthetic oligonucleotide
tggtggaagtctcatcagatgcccgctatccagaaattccactcatgagatgtattgggt

SEQ ID NO: 473120 - DNA, 51 bp, Artificial
  Synthetic oligonucleotide
tggtggaattgaatcagatgagactattccattttatgataggtttacagc

SEQ ID NO: 473121 - DNA, 59 bp, Artificial
  Synthetic oligonucleotide
tggtggaattgggacacagcctcagaaagaatggacttttcaactgccacaactaggta

SEQ ID NO: 473122 - DNA, 60 bp, Artificial
  Synthetic oligonucleotide
tggtggaattgggagattctacatacaaatgtgcactgaacttaaactcagtgactacga

SEQ ID NO: 473123 - DNA, 55 bp, Artificial
  Synthetic oligonucleotide
tggtggaccctgttgtttgtgtaacaagcagtacatacgcgcgtgtggtcggtac

SEQ ID NO: 473124 - DNA, 53 bp, Artificial
  Synthetic oligonucleotide
tggtggactaggaaacccttaataggggctagagcaattatcgcagcctcact

SEQ ID NO: 473125 - DNA, 58 bp, Artificial
  Synthetic oligonucleotide
tggtggagacctatcgctaaactttgtcacagggctgttgccaccgctactaattggg

SEQ ID NO: 473126 - DNA, 60 bp, Artificial
  Synthetic oligonucleotide
tggtggagatcaggaggattcagcttcgggaaggcatacgaatatgggcccaatccatac

SEQ ID NO: 473127 - DNA, 55 bp, Artificial
  Synthetic oligonucleotide
tggtggaggcaacacgattctgtgctccaatctatgaatgtgcttggacctgcag

SEQ ID NO: 473128 - DNA, 58 bp, Artificial
  Synthetic oligonucleotide
tggtggagggtataccatagaagggtcccatatacatttcttctctgtgggaggtgag

SEQ ID NO: 473129 - DNA, 57 bp, Artificial
  Synthetic oligonucleotide
tggtggatcgtcgtacgacgcggcgggttcgtacccgatcgacgtcatggcaatccc

SEQ ID NO: 473130 - DNA, 55 bp, Artificial
  Synthetic oligonucleotide
tggtggatggatggtatggttaccatcatcagaatgagcagggatctggctatgc

SEQ ID NO: 473131 - DNA, 57 bp, Artificial
  Synthetic oligonucleotide
tggtggatgtttccaaccgtgcttttatgttgaactcatacgagggagacctaataa

SEQ ID NO: 473132 - DNA, 55 bp, Artificial
  Synthetic oligonucleotide
tggtggattgtaacggcctgaactattagcagactattaatcacggaaaatctca

SEQ ID NO: 473133 - DNA, 57 bp, Artificial
  Synthetic oligonucleotide
tggtggattgtcaccaattttgaaacgttcctgagctagttgtctaataacatcttt

SEQ ID NO: 473134 - DNA, 55 bp, Artificial
  Synthetic oligonucleotide
tggtggcacaactgtattcacccgagcgtgacaaaacatttaccatggatgggga

SEQ ID NO: 473135 - DNA, 59 bp, Artificial
  Synthetic oligonucleotide
tggtggcaccactaatgccgctactgctggaggggttgttactatagcagagggttttg

SEQ ID NO: 473136 - DNA, 56 bp, Artificial
  Synthetic oligonucleotide
tggtggcacgttacgcaccggtgtcccgcggacgtctgcgagcttatacgtggggc

SEQ ID NO: 473137 - DNA, 55 bp, Artificial
  Synthetic oligonucleotide
tggtggcagacactactaaagtgtatgtgaccaatccagacaatgtgggtaggag

SEQ ID NO: 473138 - DNA, 60 bp, Artificial
  Synthetic oligonucleotide
tggtggcagctcactctgggcgccatttgcaccctcctactcgctggcttacttgcttgc

SEQ ID NO: 473139 - DNA, 55 bp, Artificial
  Synthetic oligonucleotide
tggtggcaggtattttatacggttgtagattacgttaaccagataattcaagcga

SEQ ID NO: 473140 - DNA, 60 bp, Artificial
  Synthetic oligonucleotide
tggtggcatacatgttggaaagagaactggtccgcaaaacaagattcctcccagtggctg

SEQ ID NO: 473141 - DNA, 60 bp, Artificial
  Synthetic oligonucleotide
tggtggccagctaatggaacattaccggtgcgacgcagccaacagatatggatcgcctac

SEQ ID NO: 473142 - DNA, 60 bp, Artificial
  Synthetic oligonucleotide
tggtggccccagctccatttggcagatctaggtcaataatcccagcaaagctggggtgca

SEQ ID NO: 473143 - DNA, 60 bp, Artificial
  Synthetic oligonucleotide
tggtggcccctcagacttgtctggagggtcatcatcatgggagtgctgtgggtcaccagg

SEQ ID NO: 473144 - DNA, 59 bp, Artificial
  Synthetic oligonucleotide
tggtggcttcagtatttcctgactagggcagaagcgcacctgcacgtgtgggttccccc

SEQ ID NO: 473145 - DNA, 55 bp, Artificial
  Synthetic oligonucleotide
tggtgggaaaaccatatttaagggtatgagcgtggaagctatgggacacgagatc

SEQ ID NO: 473146 - DNA, 60 bp, Artificial
  Synthetic oligonucleotide
tggtgggagaacaagggaaatcagctattgttatctctggtgtgggactgttctctattg

SEQ ID NO: 473147 - DNA, 56 bp, Artificial
  Synthetic oligonucleotide
tggtgggagcgactgacaaacgtggagcccccacttacacctggggggagaatgaa

SEQ ID NO: 473148 - DNA, 60 bp, Artificial
  Synthetic oligonucleotide
tggtgggatgagcccatggtgcctgtacgggatcaagaatttcttcttggctagtgctgg

SEQ ID NO: 473149 - DNA, 60 bp, Artificial
  Synthetic oligonucleotide
tggtgggatggccttcaatcctcagatgattttgctctaattgtgaatgcacctaatcat

SEQ ID NO: 473150 - DNA, 57 bp, Artificial
  Synthetic oligonucleotide
tggtggggaacctttggagctgcagggtgtgttagcaaactacaggaccaaatatcc

SEQ ID NO: 473151 - DNA, 60 bp, Artificial
  Synthetic oligonucleotide
tggtggggctattcgtcctgctggttccggtgattcggctttgactgaagatgcattttc

SEQ ID NO: 473152 - DNA, 52 bp, Artificial
  Synthetic oligonucleotide
tggtggggctggtaggcggggtggtagggtaccctaggggtgtggtagtgag

SEQ ID NO: 473153 - DNA, 58 bp, Artificial
  Synthetic oligonucleotide
tggtggggtaatatagagcacaccactggaataccttataacccacagtcacagggta

SEQ ID NO: 473154 - DNA, 60 bp, Artificial
  Synthetic oligonucleotide
tggtgggtaatccatcacggttgtccgcaacgagcactacctgatgtagactacactgta

SEQ ID NO: 473155 - DNA, 60 bp, Artificial
  Synthetic oligonucleotide
tggtgggtacgcgtcgagactgtacaatcgacagtaggcacgtgccgatttgatggccgt

SEQ ID NO: 473156 - DNA, 55 bp, Artificial
  Synthetic oligonucleotide
tggtggtaaccagactgagtttaataatactgagatcttcagacctggaggagga

SEQ ID NO: 473157 - DNA, 55 bp, Artificial
  Synthetic oligonucleotide
tggtggtaacgagagcgagtctgagatcttcaggcctggaggaggagatatgagg

SEQ ID NO: 473158 - DNA, 56 bp, Artificial
  Synthetic oligonucleotide
tggtggtacgattttgcacacggggcgaactcccgtttcggccgtgacatctacac

SEQ ID NO: 473159 - DNA, 53 bp, Artificial
  Synthetic oligonucleotide
tggtggtagggttaccgcggctcggttcactaggccgtggacccaagttccaa

SEQ ID NO: 473160 - DNA, 60 bp, Artificial
  Synthetic oligonucleotide
tggtggtcacaatactttatcaccagagccgaggcgcatttgcaagtgtggatccccccc

SEQ ID NO: 473161 - DNA, 60 bp, Artificial
  Synthetic oligonucleotide
tggtggtcattgccatgtactactcgtgttgtaagcaagggtggtcagatgaggacatcc

SEQ ID NO: 473162 - DNA, 55 bp, Artificial
  Synthetic oligonucleotide
tggtggtccatgtgttgttgtcatgaactgtgcccattcgattccgaatgaggac

SEQ ID NO: 473163 - DNA, 55 bp, Artificial
  Synthetic oligonucleotide
tggtggtcgtcagaatgatactaatgctactgacaccttaacagctggaggagga

SEQ ID NO: 473164 - DNA, 60 bp, Artificial
  Synthetic oligonucleotide
tggtggtctgtgttgcctcatcaatggtaggtgcccctcttgccgaaggttggctttgcg

SEQ ID NO: 473165 - DNA, 60 bp, Artificial
  Synthetic oligonucleotide
tggtggtgatgtgttattggatgagtatctctatgatgtggtcaatggacaagattttag

SEQ ID NO: 473166 - DNA, 57 bp, Artificial
  Synthetic oligonucleotide
tggtggtggccgttccctaaagtctcaccgagcagagactgtaaacttgcccaaaca

SEQ ID NO: 473167 - DNA, 55 bp, Artificial
  Synthetic oligonucleotide
tggtggtgggctgacccaccgaacaggcaagaggttctgcgtaaagtccgtttac

SEQ ID NO: 473168 - DNA, 59 bp, Artificial
  Synthetic oligonucleotide
tggtggtgtactcgtagctcaaataggagggaatttgaagatccttgggatacacacaa

SEQ ID NO: 473169 - DNA, 55 bp, Artificial
  Synthetic oligonucleotide
tggtggtgttgacaatggtactaatgggaccgagaccttcagacctggaggagga

SEQ ID NO: 473170 - DNA, 56 bp, Artificial
  Synthetic oligonucleotide
tggtggttacagtgtgtataatgatatgttacctagtaaaataggtgggaaaagtg

SEQ ID NO: 473171 - DNA, 55 bp, Artificial
  Synthetic oligonucleotide
tggtggttaccactttgaagtggtgcgatccttttgctaatcccaacgtcactgg

SEQ ID NO: 473172 - DNA, 60 bp, Artificial
  Synthetic oligonucleotide
tggtggttatacagacattgtccaagtggctgaacgccccaaaggtggatgctagaatta

SEQ ID NO: 473173 - DNA, 60 bp, Artificial
  Synthetic oligonucleotide
tggtggttattgtcttgaaagatggatgctagtgacgtcagatcttaagtgctttggaaa

SEQ ID NO: 473174 - DNA, 55 bp, Artificial
  Synthetic oligonucleotide
tggtggttcttctggactatcaaggtatgttgcccgtttgtcctctacttccagg

SEQ ID NO: 473175 - DNA, 60 bp, Artificial
  Synthetic oligonucleotide
tggtggttgcagtggcgctggtccacgctgatctacgcggactatctcgaccacgtcctt

SEQ ID NO: 473176 - DNA, 58 bp, Artificial
  Synthetic oligonucleotide
tggtggttgcctccgagcgaggccgctggaagtgcgaagtgtcgggggtctggacgcg

SEQ ID NO: 473177 - DNA, 56 bp, Artificial
  Synthetic oligonucleotide
tggtggtttgggccaatcctccaacaaaaacgcttgggtgaacaggcccatgtaca

SEQ ID NO: 473178 - DNA, 55 bp, Artificial
  Synthetic oligonucleotide
tggtgtaacgcattccgacctgaacttcaaatgcctttatgcagacagttggatc

SEQ ID NO: 473179 - DNA, 59 bp, Artificial
  Synthetic oligonucleotide
tggtgtaactggtacaatatagacccctggattcagttgatgaatagaacccaagcgaa

SEQ ID NO: 473180 - DNA, 55 bp, Artificial
  Synthetic oligonucleotide
tggtgtacccacccgaactgctattcggatctaatcgaagcttgaacccatggtg

SEQ ID NO: 473181 - DNA, 60 bp, Artificial
  Synthetic oligonucleotide
tggtgtacttgttgtaatacaacatcattatttgcgattaaagatggaactcatttaggc

SEQ ID NO: 473182 - DNA, 60 bp, Artificial
  Synthetic oligonucleotide
tggtgtagaacacgaatgtgagtcatgttcataatagtgcttataaacgagcactatttt

SEQ ID NO: 473183 - DNA, 55 bp, Artificial
  Synthetic oligonucleotide
tggtgtagccagcgctatttgccaactcacaaacaactcaaatggtcgatccacc

SEQ ID NO: 473184 - DNA, 55 bp, Artificial
  Synthetic oligonucleotide
tggtgtataatcaccaggaagctgggaagtacgaaaaccacactgtactcatgcc

SEQ ID NO: 473185 - DNA, 60 bp, Artificial
  Synthetic oligonucleotide
tggtgtatatgcgaatataagcaagaacgccatattagtgtattattgctggatgtcgga

SEQ ID NO: 473186 - DNA, 60 bp, Artificial
  Synthetic oligonucleotide
tggtgtatctaaacgcgtactacagcttcctgtgccgtcctcttgcaacggtggcatgta

SEQ ID NO: 473187 - DNA, 58 bp, Artificial
  Synthetic oligonucleotide
tggtgtattctacaatatacctgaacgactggttgtatcggttaagtgtggtaaggca

SEQ ID NO: 473188 - DNA, 58 bp, Artificial
  Synthetic oligonucleotide
tggtgtattgtcaacttattttaagttatacaatatgttctataggaatcatattacg

SEQ ID NO: 473189 - DNA, 60 bp, Artificial
  Synthetic oligonucleotide
tggtgtcatgaacatgtacaaatgggtacctgaaagtatccgcgattctggcgaggggca

SEQ ID NO: 473190 - DNA, 60 bp, Artificial
  Synthetic oligonucleotide
tggtgtcccatggcaatgcaggcatgttcctggatatctaatatttgggacaaggttact

SEQ ID NO: 473191 - DNA, 60 bp, Artificial
  Synthetic oligonucleotide
tggtgtcccttatgaggacttaccaacagagaggggtgccgtggtgttacatgatggctc

SEQ ID NO: 473192 - DNA, 57 bp, Artificial
  Synthetic oligonucleotide
tggtgtcctatccatttccacttgacccagaggcattagcaagggctggaaaggtgt

SEQ ID NO: 473193 - DNA, 57 bp, Artificial
  Synthetic oligonucleotide
tggtgtcggactgtcgtagcgtggcttcttcctcgacgtgccccccgttgcttccca

SEQ ID NO: 473194 - DNA, 58 bp, Artificial
  Synthetic oligonucleotide
tggtgtcgtcacccgtgatggacgagtccaaactcaacatcaccaacacacaaacccc

SEQ ID NO: 473195 - DNA, 50 bp, Artificial
  Synthetic oligonucleotide
tggtgtcgtctgcctccaaacaaggaaatgtgctccagactttttgactg

SEQ ID NO: 473196 - DNA, 51 bp, Artificial
  Synthetic oligonucleotide
tggtgtcgttataagctctcaactgaatttgtctgccagcgttaacttcat

SEQ ID NO: 473197 - DNA, 60 bp, Artificial
  Synthetic oligonucleotide
tggtgtctagattgctgtcagcatacaaatttgacttattgcagaggatgtgctctatac

SEQ ID NO: 473198 - DNA, 60 bp, Artificial
  Synthetic oligonucleotide
tggtgtctagattgttgccaatatacaaatctaacatactgtaggggatgtgctctatat

SEQ ID NO: 473199 - DNA, 60 bp, Artificial
  Synthetic oligonucleotide
tggtgtctagggccagaattgatgcacggattgatttcgaatctggacggattaagaagg

SEQ ID NO: 473200 - DNA, 57 bp, Artificial
  Synthetic oligonucleotide
tggtgtctcaacattttggatgaagttaacctgaaagatggtgtatacttagtaccg

SEQ ID NO: 473201 - DNA, 60 bp, Artificial
  Synthetic oligonucleotide
tggtgtcttgacatcaaaagatgatcctgtctacatttgggctcctggaatcataatgga

SEQ ID NO: 473202 - DNA, 60 bp, Artificial
  Synthetic oligonucleotide
tggtgtgaactacatttataataatagcctcagagctttagaaaatgagatcttagttgt

SEQ ID NO: 473203 - DNA, 60 bp, Artificial
  Synthetic oligonucleotide
tggtgtgaagagcctattgagctagctggtagtcctccggcccctgaatgcggctaatcc

SEQ ID NO: 473204 - DNA, 58 bp, Artificial
  Synthetic oligonucleotide
tggtgtgacgctagacgttgatgtcgttgtcgactttggacttaaagtaacagccgaa

SEQ ID NO: 473205 - DNA, 55 bp, Artificial
  Synthetic oligonucleotide
tggtgtgagggcaatcgaggacgggattaactatgcaacagggaatcttcctggt

SEQ ID NO: 473206 - DNA, 60 bp, Artificial
  Synthetic oligonucleotide
tggtgtgattaggtgtggtgtaactttgttacgtatcctttcacatttgattatgagata

SEQ ID NO: 473207 - DNA, 58 bp, Artificial
  Synthetic oligonucleotide
tggtgtgcaacccaccagtaatctacaatggaagattcacaaggtacagacggggagg

SEQ ID NO: 473208 - DNA, 57 bp, Artificial
  Synthetic oligonucleotide
tggtgtgcctaatgcacgtcgcaacttgttttccgttcatccggaaacaaggagaaa

SEQ ID NO: 473209 - DNA, 57 bp, Artificial
  Synthetic oligonucleotide
tggtgtggattccaaactaggttccgacagatacgcaggtaagaggcaacttgaagt

SEQ ID NO: 473210 - DNA, 54 bp, Artificial
  Synthetic oligonucleotide
tggtgtggcaatcccaggacacgttaccgtagaactggtaaacccaaacgtgga

SEQ ID NO: 473211 - DNA, 54 bp, Artificial
  Synthetic oligonucleotide
tggtgtgggtgtaccgatgctctcgatattgttcatgttataaacaatatctag

SEQ ID NO: 473212 - DNA, 55 bp, Artificial
  Synthetic oligonucleotide
tggtgtggtgaggtccatgtctctcggccgctgcgttaagcattttggcagccgg

SEQ ID NO: 473213 - DNA, 60 bp, Artificial
  Synthetic oligonucleotide
tggtgtgtatcaaattctcgccatctatagtacggtatcgagcagtctagtcttggtagg

SEQ ID NO: 473214 - DNA, 56 bp, Artificial
  Synthetic oligonucleotide
tggtgtgtatttagataagctaaaatccgtgggtaaagcattcaaaattgtgtctt

SEQ ID NO: 473215 - DNA, 57 bp, Artificial
  Synthetic oligonucleotide
tggtgtgtctgccactgtcaaaggaaattggcttcaaggtaacttaaataaatgttc

SEQ ID NO: 473216 - DNA, 57 bp, Artificial
  Synthetic oligonucleotide
tggtgtgtgcaagtggaagaagctcaagaaagacttccgaaggaatgaaagggtttg

SEQ ID NO: 473217 - DNA, 60 bp, Artificial
  Synthetic oligonucleotide
tggtgtgttcagaacagaagatgcttccttgacaatgaacctcatttgcttaagcttaga

SEQ ID NO: 473218 - DNA, 54 bp, Artificial
  Synthetic oligonucleotide
tggtgttaaaaacaatcttttgggtaaagctataactattgatcaggcgttaaa

SEQ ID NO: 473219 - DNA, 54 bp, Artificial
  Synthetic oligonucleotide
tggtgttaaccttagttttgctggtacctcatacccgattgttggtattgttcg

SEQ ID NO: 473220 - DNA, 57 bp, Artificial
  Synthetic oligonucleotide
tggtgttaaggatttgagcccattaactttcgattcctggtatgaatcttggttgga

SEQ ID NO: 473221 - DNA, 60 bp, Artificial
  Synthetic oligonucleotide
tggtgttctcacaagaggattgcatgataaaggcagtccgaggtgatctgaatttcgtta

SEQ ID NO: 473222 - DNA, 57 bp, Artificial
  Synthetic oligonucleotide
tggtgttcttccctggctcgaatgctgagatagttaagaacgttcctaaggactccg

SEQ ID NO: 473223 - DNA, 60 bp, Artificial
  Synthetic oligonucleotide
tggtgttgaacggcctctcgtggtgcttgattatcttgaaatataggggattgttgattg

SEQ ID NO: 473224 - DNA, 56 bp, Artificial
  Synthetic oligonucleotide
tggtgttgagaggaaggcggcaccgataggggcgcgagagagtgccgttatgttag

SEQ ID NO: 473225 - DNA, 50 bp, Artificial
  Synthetic oligonucleotide
tggtgttgtataccttcgtcaagttcgtgatacgagtatgaaaatgctca

SEQ ID NO: 473226 - DNA, 55 bp, Artificial
  Synthetic oligonucleotide
tggtgtttattcaactatcaatcagcaaggttcttcccgtgtttctggtatttca

SEQ ID NO: 473227 - DNA, 53 bp, Artificial
  Synthetic oligonucleotide
tggtgtttggtcacttgtacgatccggcgcccgtaattcaaatcgcgcctggc

SEQ ID NO: 473228 - DNA, 51 bp, Artificial
  Synthetic oligonucleotide
tggttaaatcacaacaatcaggctaaatatgttagagattgtgcttatatg

SEQ ID NO: 473229 - DNA, 58 bp, Artificial
  Synthetic oligonucleotide
tggttaaatccgatgttaaaccagtggtagctgacaccctgaacgtcgatagcactgt

SEQ ID NO: 473230 - DNA, 56 bp, Artificial
  Synthetic oligonucleotide
tggttaagcacaaacttctctattactggaaactaactgggctaccgctccctgac

SEQ ID NO: 473231 - DNA, 55 bp, Artificial
  Synthetic oligonucleotide
tggttaatcatatacccgctccgcctatataggtagcataccgggacaggttccc

SEQ ID NO: 473232 - DNA, 55 bp, Artificial
  Synthetic oligonucleotide
tggttaatgcaaacttgcttagtctatgatactgacgaataccgtgttggaaaca

SEQ ID NO: 473233 - DNA, 58 bp, Artificial
  Synthetic oligonucleotide
tggttaattactgatagtatgacaattgaggggctaagagcgcgtttgactttcactt

SEQ ID NO: 473234 - DNA, 55 bp, Artificial
  Synthetic oligonucleotide
tggttaattttggagacaccaataggtaaattggacaccaatatatcggtatccc

SEQ ID NO: 473235 - DNA, 60 bp, Artificial
  Synthetic oligonucleotide
tggttacaaatacaatttgtaatcatgggtgcacaggtttcaacacagaagagcggctct

SEQ ID NO: 473236 - DNA, 60 bp, Artificial
  Synthetic oligonucleotide
tggttacagcggaagcttcagcattagatgggagacaacaggcaggaattgcactgtccc

SEQ ID NO: 473237 - DNA, 53 bp, Artificial
  Synthetic oligonucleotide
tggttacagtaaaacgaaagttttatgccaccccggaaaagctcgcctctgat

SEQ ID NO: 473238 - DNA, 50 bp, Artificial
  Synthetic oligonucleotide
tggttacagtgatcgtgtggctcaactcaccattgggaactctaccatca

SEQ ID NO: 473239 - DNA, 56 bp, Artificial
  Synthetic oligonucleotide
tggttacatgtttgtgttaccggagatgatagaaatgcgactgccagtctcattta

SEQ ID NO: 473240 - DNA, 49 bp, Artificial
  Synthetic oligonucleotide
tggttaccaaaactaacaccccttgtaaactttcaccttaactacaaat

SEQ ID NO: 473241 - DNA, 60 bp, Artificial
  Synthetic oligonucleotide
tggttaccagagaagttagcatcaggctcgttgtagagtgcttctgcgccgcttctgttg

SEQ ID NO: 473242 - DNA, 57 bp, Artificial
  Synthetic oligonucleotide
tggttacccaacaatggctactcggagtctcaagggcaaaactggcgtcagagactt

SEQ ID NO: 473243 - DNA, 60 bp, Artificial
  Synthetic oligonucleotide
tggttacccactgtttgttccgatcagacttcaaggatggcatgatgttaaactagatac

SEQ ID NO: 473244 - DNA, 54 bp, Artificial
  Synthetic oligonucleotide
tggttacctgtgcaagatcaagagatcatcaggcttgttccatgtggtgcagac

SEQ ID NO: 473245 - DNA, 57 bp, Artificial
  Synthetic oligonucleotide
tggttacgaccaagtgcgacttggttctgacaacttcgtcggtgacgatcctctaaa

SEQ ID NO: 473246 - DNA, 51 bp, Artificial
  Synthetic oligonucleotide
tggttacgctcaaattagtaattaccatgaccatgtgcattcttttagcgc

SEQ ID NO: 473247 - DNA, 55 bp, Artificial
  Synthetic oligonucleotide
tggttacggtccaatcgtctttatgacgaaagagttccagccagttatgggtgaa

SEQ ID NO: 473248 - DNA, 51 bp, Artificial
  Synthetic oligonucleotide
tggttacgtcatctcttagcatttcactggatcgaggtcgatgggtggcag

SEQ ID NO: 473249 - DNA, 55 bp, Artificial
  Synthetic oligonucleotide
tggttactaattgtagctatttaaatgggtgctgctgcaagtatccagactacag

SEQ ID NO: 473250 - DNA, 60 bp, Artificial
  Synthetic oligonucleotide
tggttactacaagcaatccaaactttccatggactgactgtggcaatagaaacatcattt

SEQ ID NO: 473251 - DNA, 59 bp, Artificial
  Synthetic oligonucleotide
tggttactgtcgaattcagacaatgcggcatttccccaaatgactaagtcgtataggaa

SEQ ID NO: 473252 - DNA, 56 bp, Artificial
  Synthetic oligonucleotide
tggttagaagatcaagttacggtagcaatgcgtgaaaagccgggagttatttcgac

SEQ ID NO: 473253 - DNA, 55 bp, Artificial
  Synthetic oligonucleotide
tggttagaccgcctttcaatatgctgaaacgcgagagaaaccgcgtatcaacccc

SEQ ID NO: 473254 - DNA, 59 bp, Artificial
  Synthetic oligonucleotide
tggttagagggtcttgacaagctgatcgaagcatgcggtgaaaaacctaccacctacaa

SEQ ID NO: 473255 - DNA, 60 bp, Artificial
  Synthetic oligonucleotide
tggttagatgcacgtgtgtacgctgaccccatggctctgaaggatttcaaagagtttgcc

SEQ ID NO: 473256 - DNA, 60 bp, Artificial
  Synthetic oligonucleotide
tggttagcaagagtagggcgcgaaaggttatcaagaatggccatcagtggagatgattgt

SEQ ID NO: 473257 - DNA, 58 bp, Artificial
  Synthetic oligonucleotide
tggttagcacgatcacctttgtgccgtggatgttgacgggccgtgctccgtaacgcgg

SEQ ID NO: 473258 - DNA, 55 bp, Artificial
  Synthetic oligonucleotide
tggttagcgagcttaagaggggccgtaacacggcaggtgggacctctacctacta

SEQ ID NO: 473259 - DNA, 60 bp, Artificial
  Synthetic oligonucleotide
tggttaggtaaaaggatatcacagtttgacattggtcagtacaagaatatgctgaatgtc

SEQ ID NO: 473260 - DNA, 60 bp, Artificial
  Synthetic oligonucleotide
tggttaggttgacgccgacaccagtgtcgatcattgcaagggaaagtccgcatgtgttgg

SEQ ID NO: 473261 - DNA, 60 bp, Artificial
  Synthetic oligonucleotide
tggttagtcgtgattctgattttgatgagggtttcacgctggccaatatctcagcacgta

SEQ ID NO: 473262 - DNA, 57 bp, Artificial
  Synthetic oligonucleotide
tggttagttgattgttccatcgaaaaatttccactaatggctaaaatatactcatgg

SEQ ID NO: 473263 - DNA, 57 bp, Artificial
  Synthetic oligonucleotide
tggttataaccacgatgtctccaacctgcgctcctggattagaaccaccaaggttac

SEQ ID NO: 473264 - DNA, 56 bp, Artificial
  Synthetic oligonucleotide
tggttataatgaatcagtcaaagatagacaactattacgagatccgcaaattagac

SEQ ID NO: 473265 - DNA, 59 bp, Artificial
  Synthetic oligonucleotide
tggttatataatggttgcgtccagacgtacttgtctgaggattcctatccgagtagtgg

SEQ ID NO: 473266 - DNA, 60 bp, Artificial
  Synthetic oligonucleotide
tggttatatggggtatacatcaccctgtttctacagacgaagcgagaaaactatatgtca

SEQ ID NO: 473267 - DNA, 51 bp, Artificial
  Synthetic oligonucleotide
tggttatcccccggtaccctctaagttagcccaaagtaaccataggccacc

SEQ ID NO: 473268 - DNA, 55 bp, Artificial
  Synthetic oligonucleotide
tggttatcttggggttaggattggtgccgcttggtgccgccgtactcccggaata

SEQ ID NO: 473269 - DNA, 59 bp, Artificial
  Synthetic oligonucleotide
tggttatgaaggctgaacagccgcaacccttccacactatcctcgtccttgtttcagga

SEQ ID NO: 473270 - DNA, 60 bp, Artificial
  Synthetic oligonucleotide
tggttatgatgtgtgtttgacgtctatcagtggtaggataactgttcactggcatcttag

SEQ ID NO: 473271 - DNA, 60 bp, Artificial
  Synthetic oligonucleotide
tggttatgcagtcgaaaataccttttgaatctcggactgtcgcttctcatatcactggta

SEQ ID NO: 473272 - DNA, 60 bp, Artificial
  Synthetic oligonucleotide
tggttatgctaggcaagcatgtgtgaaagttgacgatttttatgcaattgagcagacccc

SEQ ID NO: 473273 - DNA, 57 bp, Artificial
  Synthetic oligonucleotide
tggttatgctttgcatccatggttcccctgttaactcttatactaacacgccctata

SEQ ID NO: 473274 - DNA, 55 bp, Artificial
  Synthetic oligonucleotide
tggttatggagttctggaaatggttaaggttgatactggttcagtgcagccagta

SEQ ID NO: 473275 - DNA, 57 bp, Artificial
  Synthetic oligonucleotide
tggttattaccctgtagatgggtccatgtatagaaacatggctctaacgggaattaa

SEQ ID NO: 473276 - DNA, 56 bp, Artificial
  Synthetic oligonucleotide
tggttattcggttcaggcaaagagtgtccactcggtcccttatccagcggataagg

SEQ ID NO: 473277 - DNA, 57 bp, Artificial
  Synthetic oligonucleotide
tggttattgacctgttgagtaggtcaaaccccataggtgttaaagacagtgatggga

SEQ ID NO: 473278 - DNA, 54 bp, Artificial
  Synthetic oligonucleotide
tggttcaaaaccaagacgggacaagctttgctttcccggtgaaggtgactgccc

SEQ ID NO: 473279 - DNA, 56 bp, Artificial
  Synthetic oligonucleotide
tggttcaaacggtgctaacgctggcttctacaataactggttacctaatcataacc

SEQ ID NO: 473280 - DNA, 55 bp, Artificial
  Synthetic oligonucleotide
tggttcaacctgcccactgctaatgcgaggcaagcatcgatattcgtcatgcctc

SEQ ID NO: 473281 - DNA, 58 bp, Artificial
  Synthetic oligonucleotide
tggttcaacggactccacgtcacatggcaactactctgagcaaattgggaaaaaccaa

SEQ ID NO: 473282 - DNA, 55 bp, Artificial
  Synthetic oligonucleotide
tggttcaagaatcgaaaggaaggcattgaatctggttcagttgcagcattccgca

SEQ ID NO: 473283 - DNA, 55 bp, Artificial
  Synthetic oligonucleotide
tggttcaaggagattctctcattaatagaacagagcatatggtatgctgggaagg

SEQ ID NO: 473284 - DNA, 52 bp, Artificial
  Synthetic oligonucleotide
tggttcaatcacgactggatatcatattctgaaagccaataccgtgacacaa

SEQ ID NO: 473285 - DNA, 60 bp, Artificial
  Synthetic oligonucleotide
tggttcaatgatgcagagagtgtgtcaatttatccacattgctagtgcatgatttggact

SEQ ID NO: 473286 - DNA, 60 bp, Artificial
  Synthetic oligonucleotide
tggttcacacattgatgaagtcagtgtcaatcacagccagcacctccacaactttaggtc

SEQ ID NO: 473287 - DNA, 50 bp, Artificial
  Synthetic oligonucleotide
tggttcacatgtctggccgacattttagcaactacaaagaattcgcgtat

SEQ ID NO: 473288 - DNA, 55 bp, Artificial
  Synthetic oligonucleotide
tggttcacccatggattttggtcaagtgttcaacatatatgacagcgagcctagt

SEQ ID NO: 473289 - DNA, 60 bp, Artificial
  Synthetic oligonucleotide
tggttcacttagcgcatggaacttggacaactaatcagcacagacaggcattggttgcat

SEQ ID NO: 473290 - DNA, 60 bp, Artificial
  Synthetic oligonucleotide
tggttcagagttcctcaacaggtagaatatgcaacagtcctcaccaaatccttgatggga

SEQ ID NO: 473291 - DNA, 54 bp, Artificial
  Synthetic oligonucleotide
tggttcaggagaaaggcccaccaactaaaaggtggggagaatgtcccgatgacg

SEQ ID NO: 473292 - DNA, 52 bp, Artificial
  Synthetic oligonucleotide
tggttcagttggctacggtttcagaagtccgcgcgggtactattcgcgacgg

SEQ ID NO: 473293 - DNA, 56 bp, Artificial
  Synthetic oligonucleotide
tggttcataggtggtacagtacctgacccagtgggttacactgaaggaacccacaa

SEQ ID NO: 473294 - DNA, 60 bp, Artificial
  Synthetic oligonucleotide
tggttcattaatcaacaactaatcggagtagagcgtatgctcatactagcctcacagttc

SEQ ID NO: 473295 - DNA, 55 bp, Artificial
  Synthetic oligonucleotide
tggttccaagagggaagctttccacaagaggggtccagattgcttcaagtgagac

SEQ ID NO: 473296 - DNA, 53 bp, Artificial
  Synthetic oligonucleotide
tggttccacactttgcacttggttgcgtaaacatgacaaaccaattaggcact

SEQ ID NO: 473297 - DNA, 60 bp, Artificial
  Synthetic oligonucleotide
tggttcccctcttggctatcctgtgttgcaccttgattggaacctgagtagagtgggcat

SEQ ID NO: 473298 - DNA, 55 bp, Artificial
  Synthetic oligonucleotide
tggttccccttttgtggataatgggagcgatgctcgttctatcattaggagacca

SEQ ID NO: 473299 - DNA, 55 bp, Artificial
  Synthetic oligonucleotide
tggttccctccgtgatcgagtaaaccatgttaaggaccagcgatcgcagctcggc

SEQ ID NO: 473300 - DNA, 55 bp, Artificial
  Synthetic oligonucleotide
tggttccgaagtggacagcgcactactctcaatgagtgggagtgctgtcaaggtg

SEQ ID NO: 473301 - DNA, 60 bp, Artificial
  Synthetic oligonucleotide
tggttcctaaggcagctagaggtcaatacagtggattcgtgaggacactgttccaacaga

SEQ ID NO: 473302 - DNA, 54 bp, Artificial
  Synthetic oligonucleotide
tggttcctagtttgtattctggttgtaaagacttcgtgaaaactgttggggaca

SEQ ID NO: 473303 - DNA, 55 bp, Artificial
  Synthetic oligonucleotide
tggttcctcaattgggtagaggataggaatacgagcagcccaaggtggacaactc

SEQ ID NO: 473304 - DNA, 57 bp, Artificial
  Synthetic oligonucleotide
tggttcgagtctccttacagcaggtctggggagattgcgaaacctttaagtaagtca

SEQ ID NO: 473305 - DNA, 60 bp, Artificial
  Synthetic oligonucleotide
tggttcgcacgctctcttagtcgcctagctgactctgcaactcacagaactcaccttcgc

SEQ ID NO: 473306 - DNA, 60 bp, Artificial
  Synthetic oligonucleotide
tggttcgcttgcgacgatagacttatcgtctgcatccgattccatctccgatcgcctggt

SEQ ID NO: 473307 - DNA, 59 bp, Artificial
  Synthetic oligonucleotide
tggttcggctgtacatggatgaatagcactgggtacaccaagacatgcgggggcccccc

SEQ ID NO: 473308 - DNA, 52 bp, Artificial
  Synthetic oligonucleotide
tggttcggtgttgccgaaaacaaccgctcaactcttgttccgggtccacccg

SEQ ID NO: 473309 - DNA, 51 bp, Artificial
  Synthetic oligonucleotide
tggttctatagagactatgagatagtgctggggggcttctctgctggaacc

SEQ ID NO: 473310 - DNA, 59 bp, Artificial
  Synthetic oligonucleotide
tggttctatggtgatctaaatgaatgggggtacaatggtatggtcttagtgtcagggaa

SEQ ID NO: 473311 - DNA, 57 bp, Artificial
  Synthetic oligonucleotide
tggttctcagcactcctcgcgatggaaacctaaggtgtcccaggtcaagccggaccc

SEQ ID NO: 473312 - DNA, 55 bp, Artificial
  Synthetic oligonucleotide
tggttctcataaacgccggcaaagggaaagtgtaattcgaagtccggtgagaatg

SEQ ID NO: 473313 - DNA, 57 bp, Artificial
  Synthetic oligonucleotide
tggttctcgggctgagtggtcaataacactagaggatcttaaacggtcttggagttg

SEQ ID NO: 473314 - DNA, 60 bp, Artificial
  Synthetic oligonucleotide
tggttctctctgcatttgatgaaaggaggaacaaatacctagaagagcatcccagcgctg

SEQ ID NO: 473315 - DNA, 60 bp, Artificial
  Synthetic oligonucleotide
tggttctctctggaccgggtggttagataccgcaatgaatatcctctatattcgcgcagc

SEQ ID NO: 473316 - DNA, 60 bp, Artificial
  Synthetic oligonucleotide
tggttctgagagcagttctagctcttgtgctaccgcgcctattttacgtaatctttcgcg

SEQ ID NO: 473317 - DNA, 55 bp, Artificial
  Synthetic oligonucleotide
tggttctgcccatgccatccaccaagcacaccgcgagtgcagcgcccgaaatcgt

SEQ ID NO: 473318 - DNA, 56 bp, Artificial
  Synthetic oligonucleotide
tggttctgtacagggaacactggattctttaagcgggttttccgacagcataggtg

SEQ ID NO: 473319 - DNA, 58 bp, Artificial
  Synthetic oligonucleotide
tggttctgtttttcgaacagatgtaaatcgaaggcgtcgtgcagtacggtaaactgca

SEQ ID NO: 473320 - DNA, 60 bp, Artificial
  Synthetic oligonucleotide
tggttcttcatttaaatgctgtcatggggaagaatgttcatcaactggccttcaagccag

SEQ ID NO: 473321 - DNA, 60 bp, Artificial
  Synthetic oligonucleotide
tggttgaaagctctatcgaaacgctgtggaaatcctaagctggcaagattcagaccagaa

SEQ ID NO: 473322 - DNA, 58 bp, Artificial
  Synthetic oligonucleotide
tggttgacaattggtatttccgggccagacaacggggcagtggctgtattgaaataca

SEQ ID NO: 473323 - DNA, 60 bp, Artificial
  Synthetic oligonucleotide
tggttgacagttgacggtagtacatgcgttgtcgatggtcggccttcattctttgtgcct

SEQ ID NO: 473324 - DNA, 55 bp, Artificial
  Synthetic oligonucleotide
tggttgacattagtagcctgagcagctccaagtattttagccctgacaccatcta

SEQ ID NO: 473325 - DNA, 55 bp, Artificial
  Synthetic oligonucleotide
tggttgacgaggcatattggtgtccctctaaactctacggaattggtgtctttgg

SEQ ID NO: 473326 - DNA, 60 bp, Artificial
  Synthetic oligonucleotide
tggttgacgggtatagaagcgaatagatgcgtttcatatattaaaactggtatgcctggc

SEQ ID NO: 473327 - DNA, 60 bp, Artificial
  Synthetic oligonucleotide
tggttgactaaatcaggaagcagctacccagtgctgaacgtgactatgccaaacaatgac

SEQ ID NO: 473328 - DNA, 60 bp, Artificial
  Synthetic oligonucleotide
tggttgactaagtcaggaaacgcatatccattgttgaacgtgactatgccaaacaatgac

SEQ ID NO: 473329 - DNA, 58 bp, Artificial
  Synthetic oligonucleotide
tggttgactcaaaagaacaacgcataccctattcaagacgcccaatacacaaataatc

SEQ ID NO: 473330 - DNA, 60 bp, Artificial
  Synthetic oligonucleotide
tggttgagactaggtatgtaatcacagatcagacccgtgatgaaatgagtatagagagtt

SEQ ID NO: 473331 - DNA, 60 bp, Artificial
  Synthetic oligonucleotide
tggttgagcgggccaagagatcgctgaacatctacgagtactgcagagcggctggcgttg

SEQ ID NO: 473332 - DNA, 57 bp, Artificial
  Synthetic oligonucleotide
tggttgagtatatcatgaattacaccggcaaccaacagtcccggtggggcctcggga

SEQ ID NO: 473333 - DNA, 59 bp, Artificial
  Synthetic oligonucleotide
tggttgatgcggagataaagtattgtaaagggatgggaattgttacgccgtacatgcga

SEQ ID NO: 473334 - DNA, 60 bp, Artificial
  Synthetic oligonucleotide
tggttgatggctggtatgggtatcatcacagtaacgatcaggggtctggatatgcggccg

SEQ ID NO: 473335 - DNA, 60 bp, Artificial
  Synthetic oligonucleotide
tggttgatggggcttacagaatggtgcgcaatctacaccagggcatgtcgaaggacctac

SEQ ID NO: 473336 - DNA, 55 bp, Artificial
  Synthetic oligonucleotide
tggttgattttggtcaactgattttcgctacttactctagtgtcagttctgtccc

SEQ ID NO: 473337 - DNA, 59 bp, Artificial
  Synthetic oligonucleotide
tggttgcacgcagaccacccacggggactgtgggctaccgttgtatgactccagtggga

SEQ ID NO: 473338 - DNA, 57 bp, Artificial
  Synthetic oligonucleotide
tggttgcccctcgagggaactctcctccaatatacaatctgcagtctatactgtatc

SEQ ID NO: 473339 - DNA, 51 bp, Artificial
  Synthetic oligonucleotide
tggttgccgagttacgaaaggcggcttagctgtggcgagtggccctacaaa

SEQ ID NO: 473340 - DNA, 60 bp, Artificial
  Synthetic oligonucleotide
tggttgccgtcttcactatctgcccgtctttgtctatcacggttgatccctgtgtcttgc

SEQ ID NO: 473341 - DNA, 55 bp, Artificial
  Synthetic oligonucleotide
tggttgcgcagtgtttccacatgcacggcgctcaaacaaccatgctgtctacgcc

SEQ ID NO: 473342 - DNA, 57 bp, Artificial
  Synthetic oligonucleotide
tggttgcgccacgaaaacggcaatctgcgcacgtcatttgaaaaggctaaccgggtc

SEQ ID NO: 473343 - DNA, 51 bp, Artificial
  Synthetic oligonucleotide
tggttgctccatttgaaaggaggacatcccgatggagcctccaactttact

SEQ ID NO: 473344 - DNA, 58 bp, Artificial
  Synthetic oligonucleotide
tggttgcttacatgctagaaagagaattggtccgcaaaacgaggttcctcccagtggc

SEQ ID NO: 473345 - DNA, 60 bp, Artificial
  Synthetic oligonucleotide
tggttggatacggggtgtggcctcattatctaacatctcaagatgctacagccatagata

SEQ ID NO: 473346 - DNA, 58 bp, Artificial
  Synthetic oligonucleotide
tggttggatgataaggtctactgtccaagacatgtgatatgttctgcttcagatatga

SEQ ID NO: 473347 - DNA, 57 bp, Artificial
  Synthetic oligonucleotide
tggttggattgaatggaatgtccggaatctacaaggtctgcattgcagcaacatctg

SEQ ID NO: 473348 - DNA, 60 bp, Artificial
  Synthetic oligonucleotide
tggttggcatggagggttgcttgtacatgggagctggtctcgttgcaggcacttgcattg

SEQ ID NO: 473349 - DNA, 53 bp, Artificial
  Synthetic oligonucleotide
tggttggcatggattgcgaactcccgcaaacgaagggcttgcaacgcgtccta

SEQ ID NO: 473350 - DNA, 60 bp, Artificial
  Synthetic oligonucleotide
tggttggccttactaatcacatggatgatctctctgctaagagagatcttctgcaaactc

SEQ ID NO: 473351 - DNA, 55 bp, Artificial
  Synthetic oligonucleotide
tggttggggatgttatgcgtcatgagtataatatattcggtttgtgccgtggaga

SEQ ID NO: 473352 - DNA, 55 bp, Artificial
  Synthetic oligonucleotide
tggttggggtgttggtattcctgcctgaaacggcgggcatacttgatgacattcc

SEQ ID NO: 473353 - DNA, 60 bp, Artificial
  Synthetic oligonucleotide
tggttgggtgtcagtgtcgttcgcctgtactcggtgtacagcccactactacacgagtga

SEQ ID NO: 473354 - DNA, 59 bp, Artificial
  Synthetic oligonucleotide
tggttggtaccagaggtcagttccactctccaaattgagaagcatgttagtcgtgcttt

SEQ ID NO: 473355 - DNA, 55 bp, Artificial
  Synthetic oligonucleotide
tggttggtcagagaccggagaccttatggaacccccatggactttggccaagtgt

SEQ ID NO: 473356 - DNA, 53 bp, Artificial
  Synthetic oligonucleotide
tggttggtccggtggatggctttgcttccatgggctggaatgtgcgtggtaac

SEQ ID NO: 473357 - DNA, 58 bp, Artificial
  Synthetic oligonucleotide
tggttggtcctgtggatggttttgcatctatgggttggaacgtgcgtgggagtaagaa

SEQ ID NO: 473358 - DNA, 55 bp, Artificial
  Synthetic oligonucleotide
tggttggtcgtccaatcaacgacgtggttattcacgtaatcctgtgtttaagcgt

SEQ ID NO: 473359 - DNA, 55 bp, Artificial
  Synthetic oligonucleotide
tggttggtcgtctaatcagcgacgaggttacacacgtaatcccgtgtttaagcgt

SEQ ID NO: 473360 - DNA, 59 bp, Artificial
  Synthetic oligonucleotide
tggttggtctatcgacagccgagaatgccctgctagtagccttgtttggctacgtaggg

SEQ ID NO: 473361 - DNA, 60 bp, Artificial
  Synthetic oligonucleotide
tggttggtgggatcggaagattctacatccaaatgtgcactgaactcaaactcagtgatt

SEQ ID NO: 473362 - DNA, 57 bp, Artificial
  Synthetic oligonucleotide
tggttggtggtataccgatacctccaatggggttcagaattctgcaggtcctaccat

SEQ ID NO: 473363 - DNA, 56 bp, Artificial
  Synthetic oligonucleotide
tggttggtgtcccaaggttattgtgatccagtgagagtctttgttaaacaagaacc

SEQ ID NO: 473364 - DNA, 60 bp, Artificial
  Synthetic oligonucleotide
tggttgtacttggagaacgtgtcttcatgaaaaccatataagacataagtgggctgagtc

SEQ ID NO: 473365 - DNA, 55 bp, Artificial
  Synthetic oligonucleotide
tggttgtatcggttaagtgtggtaaggcatgggaaacctggcggtggtgcagctc

SEQ ID NO: 473366 - DNA, 55 bp, Artificial
  Synthetic oligonucleotide
tggttgtcaacaacgggtaaggtctatttaccaccatcaacaccagttgccaggg

SEQ ID NO: 473367 - DNA, 60 bp, Artificial
  Synthetic oligonucleotide
tggttgtccgagacaagaagccttgcgagttctcctctgtggatcccctcattccatttg

SEQ ID NO: 473368 - DNA, 54 bp, Artificial
  Synthetic oligonucleotide
tggttgtccttatttgtatgctgtggttcacgacagtgttggctcgacaatatc

SEQ ID NO: 473369 - DNA, 59 bp, Artificial
  Synthetic oligonucleotide
tggttgtctgagtttcatgtaaacatcgcggacttcatcatctggggaatcacgaagac

SEQ ID NO: 473370 - DNA, 60 bp, Artificial
  Synthetic oligonucleotide
tggttgtgaagggccatgtaaggtccagtcgtatgagcagagggatgatgtcaagcacac

SEQ ID NO: 473371 - DNA, 60 bp, Artificial
  Synthetic oligonucleotide
tggttgtgacttagactatttctgcaatatgggggactggccctcctgcacatacaccgg

SEQ ID NO: 473372 - DNA, 58 bp, Artificial
  Synthetic oligonucleotide
tggttgtgatcgaggaacagtataaaagatggcaattggatccaaacttctttctaac

SEQ ID NO: 473373 - DNA, 55 bp, Artificial
  Synthetic oligonucleotide
tggttgtgccgccgtgcaagcgtcgaaaggcggcatgattcgacagggtctcctg

SEQ ID NO: 473374 - DNA, 50 bp, Artificial
  Synthetic oligonucleotide
tggttgtgctaacgtttcatccttaagtgatctacgagcagtcgcccgat

SEQ ID NO: 473375 - DNA, 58 bp, Artificial
  Synthetic oligonucleotide
tggttgtggattctctcggactttagaagttccaaaatgacgtacctaactctcatca

SEQ ID NO: 473376 - DNA, 60 bp, Artificial
  Synthetic oligonucleotide
tggttgtggcatcgggagatgattcgttgattgggtcatatcgtcctcttgatagatcaa

SEQ ID NO: 473377 - DNA, 60 bp, Artificial
  Synthetic oligonucleotide
tggttgttcccgtaggtgctccatctacatgccagattgctgttttggcgtctgtaacta

SEQ ID NO: 473378 - DNA, 58 bp, Artificial
  Synthetic oligonucleotide
tggttgttgacgcgcatcggactaatttccgctcccatgtcccgtaaccaacatgggc

SEQ ID NO: 473379 - DNA, 55 bp, Artificial
  Synthetic oligonucleotide
tggttgttgagtcacgtgcacaagggatagacaccattgcgcggtgctgttgtaa

SEQ ID NO: 473380 - DNA, 57 bp, Artificial
  Synthetic oligonucleotide
tggttgttgccaaggttggaaatcacaaacaaattgttggtttccatgttgctggaa

SEQ ID NO: 473381 - DNA, 60 bp, Artificial
  Synthetic oligonucleotide
tggttgtttcaagatataccacaaatgtgacaatacttgcatagaatcaattagaaacgg

SEQ ID NO: 473382 - DNA, 60 bp, Artificial
  Synthetic oligonucleotide
tggtttaaatctcaacttgagcattatgttgggactcatggtatcgaggaagtgttcgcc

SEQ ID NO: 473383 - DNA, 58 bp, Artificial
  Synthetic oligonucleotide
tggtttaacaaatcattcggtatcgatgaggccacaaacccaagcagaacgaaatgaa

SEQ ID NO: 473384 - DNA, 55 bp, Artificial
  Synthetic oligonucleotide
tggtttaacgctagagctcactacgaggccgctaaaggcacggatctacaaaacg

SEQ ID NO: 473385 - DNA, 51 bp, Artificial
  Synthetic oligonucleotide
tggtttaactgatagaaggacgcattgtcaatacttgatcaatccttcgag

SEQ ID NO: 473386 - DNA, 60 bp, Artificial
  Synthetic oligonucleotide
tggtttacacgagctcaaccgagtgatgatttatacgatacgatgagagtagatataggt

SEQ ID NO: 473387 - DNA, 52 bp, Artificial
  Synthetic oligonucleotide
tggtttaccgacagaattgatttcgtcggccgggggtcaactgttttactcc

SEQ ID NO: 473388 - DNA, 57 bp, Artificial
  Synthetic oligonucleotide
tggtttacctctctcgagacgcttgtgatatccccgagcactccggtacgtgccggt

SEQ ID NO: 473389 - DNA, 54 bp, Artificial
  Synthetic oligonucleotide
tggtttacgataatcgcgtgggttatttttcgtactttgacaatccgttcacta

SEQ ID NO: 473390 - DNA, 55 bp, Artificial
  Synthetic oligonucleotide
tggtttagatgggaattgggttagtgttgattgcaaacataaagctcccatacag

SEQ ID NO: 473391 - DNA, 59 bp, Artificial
  Synthetic oligonucleotide
tggtttagcgccggcccatcgatgattagtcatgtttacggaattagagacttacgcaa

SEQ ID NO: 473392 - DNA, 55 bp, Artificial
  Synthetic oligonucleotide
tggtttaggaccaacgacctaagcacttatcacgagactgtgcacgatgacacgg

SEQ ID NO: 473393 - DNA, 54 bp, Artificial
  Synthetic oligonucleotide
tggtttaggagatgcactggacaagactattggggccaaaattgacgaagcagg

SEQ ID NO: 473394 - DNA, 58 bp, Artificial
  Synthetic oligonucleotide
tggtttatacggagtgatgtctatagttgtagtccgcgataaatctccaaagatttat

SEQ ID NO: 473395 - DNA, 55 bp, Artificial
  Synthetic oligonucleotide
tggtttatttcctgcacaagtcaaagcaaggaatatcatcagcccagtcatgggg

SEQ ID NO: 473396 - DNA, 54 bp, Artificial
  Synthetic oligonucleotide
tggtttcaagagtatctgagactggtgacacgcctgtggcaaggtaagtgaaaa

SEQ ID NO: 473397 - DNA, 55 bp, Artificial
  Synthetic oligonucleotide
tggtttcaagcttatttgaatggagaagtccaaggagacggtgcagcatccgcag

SEQ ID NO: 473398 - DNA, 55 bp, Artificial
  Synthetic oligonucleotide
tggtttcacataattcgttcaagactgtaccgagcattgacgagctattccgcgt

SEQ ID NO: 473399 - DNA, 55 bp, Artificial
  Synthetic oligonucleotide
tggtttcacatttcctgtcttactttcggaagagaaactgttcttgagtatttgg

SEQ ID NO: 473400 - DNA, 59 bp, Artificial
  Synthetic oligonucleotide
tggtttcaggtgtatgctagcaattaagtatttgcaactggtagaaaatacgtactctc

SEQ ID NO: 473401 - DNA, 55 bp, Artificial
  Synthetic oligonucleotide
tggtttccaaaagtcagatttcaccttgaacacgggctcacctaggacccaggga

SEQ ID NO: 473402 - DNA, 55 bp, Artificial
  Synthetic oligonucleotide
tggtttccgctaatgtgattaacgctacattagttgtatatgcagaaaagggtgc

SEQ ID NO: 473403 - DNA, 55 bp, Artificial
  Synthetic oligonucleotide
tggtttccggagctcgtctcatccgaattgaacttaggaacctataacctcacgg

SEQ ID NO: 473404 - DNA, 55 bp, Artificial
  Synthetic oligonucleotide
tggtttcggtctgaggaggcgtttgaatcccctgctaaggtaccattttctggcc

SEQ ID NO: 473405 - DNA, 53 bp, Artificial
  Synthetic oligonucleotide
tggtttctaagcccccaccatcagctatatctgacttgcttaaggctgtagac

SEQ ID NO: 473406 - DNA, 60 bp, Artificial
  Synthetic oligonucleotide
tggtttctctgtcttccgaaaaatggtaacagacatcatgagtgtcattcggatcaaaac

SEQ ID NO: 473407 - DNA, 57 bp, Artificial
  Synthetic oligonucleotide
tggtttctgacaagcatggttacggactcgcaatgctggttccacataatgtggaac

SEQ ID NO: 473408 - DNA, 56 bp, Artificial
  Synthetic oligonucleotide
tggtttctttggttagagaaccaggttgctgccgtctggtttgccgtggctaaatc

SEQ ID NO: 473409 - DNA, 56 bp, Artificial
  Synthetic oligonucleotide
tggtttgatagaggggggagttgaggaagacgaattgcgcatttcgaagggtccaa

SEQ ID NO: 473410 - DNA, 60 bp, Artificial
  Synthetic oligonucleotide
tggtttgatattcaaacactggtgtacatctacatgccagtttggagacccaggagatat

SEQ ID NO: 473411 - DNA, 53 bp, Artificial
  Synthetic oligonucleotide
tggtttgcacgtagcttctctgcaatacattcgtaatttctcaggcaacgtaa

SEQ ID NO: 473412 - DNA, 60 bp, Artificial
  Synthetic oligonucleotide
tggtttgcgcagcgatactgcgccgacacgttggcccaggcgagggggcagtgcagtgga

SEQ ID NO: 473413 - DNA, 57 bp, Artificial
  Synthetic oligonucleotide
tggtttgctattactaaaaccaagaggggaggacaaaataagaccgtgactgcagca

SEQ ID NO: 473414 - DNA, 60 bp, Artificial
  Synthetic oligonucleotide
tggtttggcgccgatagtctttgtgaacgaggcaaagcaaacaatgaactatctggtgtc

SEQ ID NO: 473415 - DNA, 55 bp, Artificial
  Synthetic oligonucleotide
tggtttggggagtaccacagtttactagttacataatttcctggctacctatgga

SEQ ID NO: 473416 - DNA, 60 bp, Artificial
  Synthetic oligonucleotide
tggtttgtaagtcaagtgtgcaagcagaaaaggcattcatctacctaatactagggttgc

SEQ ID NO: 473417 - DNA, 55 bp, Artificial
  Synthetic oligonucleotide
tggtttgttccagcgttcgtggttcgaggaccggcgtctcaccggaacgccgatc

SEQ ID NO: 473418 - DNA, 57 bp, Artificial
  Synthetic oligonucleotide
tggttttacataaacgatgcacgtttggcctggttgtcgtctctaggtatcttgaac

SEQ ID NO: 473419 - DNA, 54 bp, Artificial
  Synthetic oligonucleotide
tggttttaccactgtcagttcgatgtcaagcagactctggtctgaagaaatgag

SEQ ID NO: 473420 - DNA, 52 bp, Artificial
  Synthetic oligonucleotide
tggttttacctcccgttccccagcccagaaggaactttattggccaacaatc

SEQ ID NO: 473421 - DNA, 55 bp, Artificial
  Synthetic oligonucleotide
tggttttatatacagacgtttcacaatgggactcgtcgcagcataacacacagcc

SEQ ID NO: 473422 - DNA, 55 bp, Artificial
  Synthetic oligonucleotide
tggttttattaatggtactctaccgttctggaatgaaacagaagcggataaacga

SEQ ID NO: 473423 - DNA, 60 bp, Artificial
  Synthetic oligonucleotide
tggttttcaggaggcattcaatatgtttgagaatgagcccagtacggccactgtcaaaca

SEQ ID NO: 473424 - DNA, 60 bp, Artificial
  Synthetic oligonucleotide
tggttttcagggacaatcggtggcaaggagaccagtcaatattcgctaccatggagcttg

SEQ ID NO: 473425 - DNA, 60 bp, Artificial
  Synthetic oligonucleotide
tggttttccttatacgagcgcaccaccgggagcaactgtcggcaacattggtgtcattca

SEQ ID NO: 473426 - DNA, 51 bp, Artificial
  Synthetic oligonucleotide
tggttttctatcggtcagtacataatgggatttgcacttgcaatcgtgctt

SEQ ID NO: 473427 - DNA, 60 bp, Artificial
  Synthetic oligonucleotide
tggttttctttgcgaatggagacgatatcatactctctatacaagaagtggacttgtggg

SEQ ID NO: 473428 - DNA, 58 bp, Artificial
  Synthetic oligonucleotide
tggttttgctctttgaggtaccgaagtatattaagcagctcgtgaggtatttggtaga

SEQ ID NO: 473429 - DNA, 57 bp, Artificial
  Synthetic oligonucleotide
tggttttgtaaatttaccaaagtagatacctatattctgtacaagagtgtcagacaa

SEQ ID NO: 473430 - DNA, 60 bp, Artificial
  Synthetic oligonucleotide
tggttttgtctcagaagtgactccgaagcacctgcgaatgtcccgtcatgatcgcaagtc

SEQ ID NO: 473431 - DNA, 53 bp, Artificial
  Synthetic oligonucleotide
tggtttttttcacaggtgcttcgggtacagggaaaacctcggttgtgcagagg

SEQ ID NO: 473432 - DNA, 60 bp, Artificial
  Synthetic oligonucleotide
tgtaaaaaggcagaaagagccttatgtgttgtgtctggagagtacagaagagtgatttca

SEQ ID NO: 473433 - DNA, 47 bp, Artificial
  Synthetic oligonucleotide
tgtaaaaagtagggtgtaaccgaaaagggttatgaccgaaaacggtt

SEQ ID NO: 473434 - DNA, 57 bp, Artificial
  Synthetic oligonucleotide
tgtaaaaagttgggaccacgtgagaatgtcgcagtcattcaagtaggcgggtcgaat

SEQ ID NO: 473435 - DNA, 51 bp, Artificial
  Synthetic oligonucleotide
tgtaaaacctggaggccattaaaagtacgcgtgttagccaggagggcgttg

SEQ ID NO: 473436 - DNA, 55 bp, Artificial
  Synthetic oligonucleotide
tgtaaaacgcaggcggcgtgcagccgagggagacctttatgcaggctgcaggcgt

SEQ ID NO: 473437 - DNA, 60 bp, Artificial
  Synthetic oligonucleotide
tgtaaaacggttgttagagatatgttaccagcatggtattaaagctgtagataccactga

SEQ ID NO: 473438 - DNA, 55 bp, Artificial
  Synthetic oligonucleotide
tgtaaaactctggagaaccaccttttatttaatgttgtagctagttatattagta

SEQ ID NO: 473439 - DNA, 58 bp, Artificial
  Synthetic oligonucleotide
tgtaaaactgaccctcactgaaataactttgcagtgcgctcacaacctaggacccaaa

SEQ ID NO: 473440 - DNA, 60 bp, Artificial
  Synthetic oligonucleotide
tgtaaaaggggaagctaggcatggacaagtagattgcagcccaggtatctggcagttgga

SEQ ID NO: 473441 - DNA, 50 bp, Artificial
  Synthetic oligonucleotide
tgtaaaattgaccccactctgtgtcactttaaactgtacaaatgcaactg

SEQ ID NO: 473442 - DNA, 58 bp, Artificial
  Synthetic oligonucleotide
tgtaaaattgcccccctaatggtagcatacatgctagaaagagagttggtccgcaaaa

SEQ ID NO: 473443 - DNA, 56 bp, Artificial
  Synthetic oligonucleotide
tgtaaacacgtcagacccaaatttgaaatcattggtcgcgctggccaaggttattt

SEQ ID NO: 473444 - DNA, 57 bp, Artificial
  Synthetic oligonucleotide
tgtaaacgatcatgtagaaaagaaaaacggattaacctacctagcatggtcatacgc

SEQ ID NO: 473445 - DNA, 55 bp, Artificial
  Synthetic oligonucleotide
tgtaaacgctgttcagttatatgggtgtgtaaatcaccaaaataagaactttgtt

SEQ ID NO: 473446 - DNA, 56 bp, Artificial
  Synthetic oligonucleotide
tgtaaacttaacaactcacattcgtagacttaaccctatcttccacattgttccaa

SEQ ID NO: 473447 - DNA, 55 bp, Artificial
  Synthetic oligonucleotide
tgtaaacttaggcaagctttgtgcaaacctgttaaacataccaggtgcactgatg

SEQ ID NO: 473448 - DNA, 60 bp, Artificial
  Synthetic oligonucleotide
tgtaaagaatctatatgacaaagtcagaatgcaactgagggacaatgcaaaagaactagg

SEQ ID NO: 473449 - DNA, 58 bp, Artificial
  Synthetic oligonucleotide
tgtaaagaattggatgacagaaacactcttagtacaaaatgcaaacccagattgtaaa

SEQ ID NO: 473450 - DNA, 57 bp, Artificial
  Synthetic oligonucleotide
tgtaaagactcgttgtccgtcattctcttgtcgtgtatctccacaaccaccgtcccg

SEQ ID NO: 473451 - DNA, 55 bp, Artificial
  Synthetic oligonucleotide
tgtaaagcacgtgctgacgtgagataaagtccggcaggccctgacgttgcgcgtg

SEQ ID NO: 473452 - DNA, 56 bp, Artificial
  Synthetic oligonucleotide
tgtaaaggactgggttgataagattgaggactttctaaaggctgagtgccctttcc

SEQ ID NO: 473453 - DNA, 55 bp, Artificial
  Synthetic oligonucleotide
tgtaaaggctgcccgcgcaactcatttcgcgtttggccctggtctgagttccccg

SEQ ID NO: 473454 - DNA, 54 bp, Artificial
  Synthetic oligonucleotide
tgtaaagtacccgggtctgtcgtggtaaccatctgtacttccggagcctcagac

SEQ ID NO: 473455 - DNA, 54 bp, Artificial
  Synthetic oligonucleotide
tgtaaagttaacctttctttgtgtcactttaaactgtattgatgtaaagaatag

SEQ ID NO: 473456 - DNA, 57 bp, Artificial
  Synthetic oligonucleotide
tgtaaagtttgagagagtttaataccgtctcttgatcaaagatcccaccaaagtgtc

SEQ ID NO: 473457 - DNA, 59 bp, Artificial
  Synthetic oligonucleotide
tgtaaataagagcctcactaccggtagtagctcctctcaaaactctatatgaatcggta

SEQ ID NO: 473458 - DNA, 55 bp, Artificial
  Synthetic oligonucleotide
tgtaaatccagcaatggatccaatttatgatgagccgacgacgactactagcgtg

SEQ ID NO: 473459 - DNA, 57 bp, Artificial
  Synthetic oligonucleotide
tgtaaatccgcggttggggacagcatcggctgttattgggacaaaccactttgactc

SEQ ID NO: 473460 - DNA, 60 bp, Artificial
  Synthetic oligonucleotide
tgtaaatctggcatagcatacaggttactcttgttgggttctggatgttaggatgacgag

SEQ ID NO: 473461 - DNA, 59 bp, Artificial
  Synthetic oligonucleotide
tgtaaattggatagcacaggctgaggcttctgaagtcggtaatctttggttacaagtgt

SEQ ID NO: 473462 - DNA, 59 bp, Artificial
  Synthetic oligonucleotide
tgtaaatttcgttccgttaatagtacatgacactaatgcttgctttgctactaattgat

SEQ ID NO: 473463 - DNA, 58 bp, Artificial
  Synthetic oligonucleotide
tgtaaatttgatcactgacctttgtaacacctgggagagcgccaaaacaacattgtcc

SEQ ID NO: 473464 - DNA, 57 bp, Artificial
  Synthetic oligonucleotide
tgtaacaagttaggtccaagagagaacgtcgcaataatccaagtaggtggttcagac

SEQ ID NO: 473465 - DNA, 55 bp, Artificial
  Synthetic oligonucleotide
tgtaacacttggtcgattctggactgtacttgatgaccatagaccatttattgcg

SEQ ID NO: 473466 - DNA, 52 bp, Artificial
  Synthetic oligonucleotide
tgtaacagggagggcacttgtaacccccgtaggagggtgcccgcttccgtcc

SEQ ID NO: 473467 - DNA, 60 bp, Artificial
  Synthetic oligonucleotide
tgtaacatatatggctcacaacaagtactgtgaacaccctgtatcagtacataactgcat

SEQ ID NO: 473468 - DNA, 60 bp, Artificial
  Synthetic oligonucleotide
tgtaacatgatgaagagctgcctaatagcattagggccctatagagttcaagttgtctat

SEQ ID NO: 473469 - DNA, 58 bp, Artificial
  Synthetic oligonucleotide
tgtaacccagacgatcgaactcttacgtcataggattaagaatacgacattcgacatg

SEQ ID NO: 473470 - DNA, 56 bp, Artificial
  Synthetic oligonucleotide
tgtaacccccgggcttatttggactttcactgatggcagccccatgatttccggcc

SEQ ID NO: 473471 - DNA, 55 bp, Artificial
  Synthetic oligonucleotide
tgtaaccctgacggcgcgaaccagcacaggaacatcagtgtcggtcacggtgcac

SEQ ID NO: 473472 - DNA, 59 bp, Artificial
  Synthetic oligonucleotide
tgtaaccgaaccgctctaaactaaccaaagagagattgaccacatctgtgcagaaccta

SEQ ID NO: 473473 - DNA, 55 bp, Artificial
  Synthetic oligonucleotide
tgtaaccgctgatggtgattgggtacgtagccgtactggtactaatattacttgg

SEQ ID NO: 473474 - DNA, 55 bp, Artificial
  Synthetic oligonucleotide
tgtaaccggaggatgcgtaggctttagaccaggaggggtcccctggtatctagga

SEQ ID NO: 473475 - DNA, 60 bp, Artificial
  Synthetic oligonucleotide
tgtaaccttaggtgtgtactatagattccatcagctagggcgagatactcttaggaggtc

SEQ ID NO: 473476 - DNA, 60 bp, Artificial
  Synthetic oligonucleotide
tgtaacctttgctctgtatgtaaattcaataaagctcatatgcagatttcaaaaagactg

SEQ ID NO: 473477 - DNA, 54 bp, Artificial
  Synthetic oligonucleotide
tgtaacgattggttaactcactttgtgagttaatagctcgttttgtttaccaat

SEQ ID NO: 473478 - DNA, 58 bp, Artificial
  Synthetic oligonucleotide
tgtaacggaccctgtccttatggacacgattacacatttactatacaagggtcatata

SEQ ID NO: 473479 - DNA, 60 bp, Artificial
  Synthetic oligonucleotide
tgtaacggctcaagctaaatatagcggtgttcgtgggaatgacatcacagtaacggtcaa

SEQ ID NO: 473480 - DNA, 51 bp, Artificial
  Synthetic oligonucleotide
tgtaacgggactctggaggattatctaagtttaccggacttcgagaacata

SEQ ID NO: 473481 - DNA, 60 bp, Artificial
  Synthetic oligonucleotide
tgtaacggggttgcttccaccgctgctcactggggatactgagcccgcatttcacactga

SEQ ID NO: 473482 - DNA, 54 bp, Artificial
  Synthetic oligonucleotide
tgtaacggtaccggctgactataactcctttaaacgaagcttcgttgttgaggc

SEQ ID NO: 473483 - DNA, 60 bp, Artificial
  Synthetic oligonucleotide
tgtaacggtcacacatgctcaggacatactggaaaaagagcacaacgggaaactctgcag

SEQ ID NO: 473484 - DNA, 60 bp, Artificial
  Synthetic oligonucleotide
tgtaacggtgtttacgctaacatcagcaagaacgccatattagtttatcattgttggatg

SEQ ID NO: 473485 - DNA, 55 bp, Artificial
  Synthetic oligonucleotide
tgtaacgtgattatgtcgtggttcctctggaatggtctctctaggtgcctggtta

SEQ ID NO: 473486 - DNA, 59 bp, Artificial
  Synthetic oligonucleotide
tgtaacgttatcaacacaatttactgactatgtgtcgttgaactcactaaggttcagat

SEQ ID NO: 473487 - DNA, 60 bp, Artificial
  Synthetic oligonucleotide
tgtaactagtaagaacttgcctctattacatgacaaagtgatggatatagtcacaacgca

SEQ ID NO: 473488 - DNA, 60 bp, Artificial
  Synthetic oligonucleotide
tgtaactcaaagcatatttacagagactcatactatgaggttgaagggggagtgccatca

SEQ ID NO: 473489 - DNA, 60 bp, Artificial
  Synthetic oligonucleotide
tgtaactcccgccccaagccatcctcatgaaggtctgcaaaacaccatttgccactgtgc

SEQ ID NO: 473490 - DNA, 54 bp, Artificial
  Synthetic oligonucleotide
tgtaactgaaggtgtatctaagattggaaatgattcgggtggtgagattcttac

SEQ ID NO: 473491 - DNA, 60 bp, Artificial
  Synthetic oligonucleotide
tgtaactgatcactccgtgatcaaggctagagagtatgagtcttttctccctgtcgagtt

SEQ ID NO: 473492 - DNA, 60 bp, Artificial
  Synthetic oligonucleotide
tgtaactgcagcgggcataggatcggcactacagctcagagagtcgagataacgttgtgt

SEQ ID NO: 473493 - DNA, 60 bp, Artificial
  Synthetic oligonucleotide
tgtaactggtggtagtgctattgctcagttgggatatagatttttggctgactgggatca

SEQ ID NO: 473494 - DNA, 59 bp, Artificial
  Synthetic oligonucleotide
tgtaacttttgtcactattacaacagtagggggcagatcgtacagcgatatcttggttg

SEQ ID NO: 473495 - DNA, 56 bp, Artificial
  Synthetic oligonucleotide
tgtaagaactgtcaccaaccagcaaatttcaagagatgttgcccattagtgtgtgg

SEQ ID NO: 473496 - DNA, 55 bp, Artificial
  Synthetic oligonucleotide
tgtaagaatgatccaacatacgccatgtcagaggtccttactaattgtttcagag

SEQ ID NO: 473497 - DNA, 60 bp, Artificial
  Synthetic oligonucleotide
tgtaagaatgcgtgcgctgtccggaacaactacagcatggaaagccctgatgaatagtga

SEQ ID NO: 473498 - DNA, 57 bp, Artificial
  Synthetic oligonucleotide
tgtaagactacgaacaatataggaaggtttgagatggctgttcacgtggaaagcgta

SEQ ID NO: 473499 - DNA, 59 bp, Artificial
  Synthetic oligonucleotide
tgtaagactgaaccgaatcggagcaggtcctatatcaagttgaaacgactgcgtttcaa

SEQ ID NO: 473500 - DNA, 55 bp, Artificial
  Synthetic oligonucleotide
tgtaagagatatggagtcgcgcctgcagctaacagaaaagggtgttagcatatct

SEQ ID NO: 473501 - DNA, 51 bp, Artificial
  Synthetic oligonucleotide
tgtaagaggccagggaataagacagtgaaacaaataatgcttatgtcagga

SEQ ID NO: 473502 - DNA, 60 bp, Artificial
  Synthetic oligonucleotide
tgtaagagtgcttgcgcatctttaatgacctgcactttgacatttgaacaaaatcctgac

SEQ ID NO: 473503 - DNA, 60 bp, Artificial
  Synthetic oligonucleotide
tgtaagatacagtcatttgagcaaagggatgatgttaagcatgttggtatagttcgttgt

SEQ ID NO: 473504 - DNA, 55 bp, Artificial
  Synthetic oligonucleotide
tgtaagcacagtcttaaaaggaggaagatgtgcaagtaccgtttgcccactcgag

SEQ ID NO: 473505 - DNA, 60 bp, Artificial
  Synthetic oligonucleotide
tgtaagcacggggtgattggaatagtcactgctggtggtgagggtcatgtggcttttatt

SEQ ID NO: 473506 - DNA, 60 bp, Artificial
  Synthetic oligonucleotide
tgtaagcacgtgccatggaaacaactcacagcaaatgagtgcaataagttaggacagcaa

SEQ ID NO: 473507 - DNA, 59 bp, Artificial
  Synthetic oligonucleotide
tgtaagcagagctggtaaacgcactagaccacctgcttacatttttataaaccaagcca

SEQ ID NO: 473508 - DNA, 55 bp, Artificial
  Synthetic oligonucleotide
tgtaagccaggaacacttaaggagaaactgatgtccattgctcttctggccgttc

SEQ ID NO: 473509 - DNA, 56 bp, Artificial
  Synthetic oligonucleotide
tgtaagcccctcacgaaccgtctcggaaggaggacccccacatgtaagccctcaga

SEQ ID NO: 473510 - DNA, 60 bp, Artificial
  Synthetic oligonucleotide
tgtaagccgcccatacatgagcatgatgagagacccacaggcgactttcatgatccatat

SEQ ID NO: 473511 - DNA, 57 bp, Artificial
  Synthetic oligonucleotide
tgtaagccgccctagcgagacctacagcgcacaggcctcaccagtggccgtgaacgc

SEQ ID NO: 473512 - DNA, 55 bp, Artificial
  Synthetic oligonucleotide
tgtaagccgtgatttgtcctttcaggatttaagtgaaacaccttgtcaagtggat

SEQ ID NO: 473513 - DNA, 57 bp, Artificial
  Synthetic oligonucleotide
tgtaagccgttcgtatttatgggtgaaattgcggactgtcctaatgcttaattattc

SEQ ID NO: 473514 - DNA, 55 bp, Artificial
  Synthetic oligonucleotide
tgtaagcgcgctaaacgtagacgcgccgcgcgatgtcgaacgcgggttgtccgaa

SEQ ID NO: 473515 - DNA, 57 bp, Artificial
  Synthetic oligonucleotide
tgtaagcgtgtatagggcgtaaatgtaatgggcattattatcgtacccctctgcagt

SEQ ID NO: 473516 - DNA, 55 bp, Artificial
  Synthetic oligonucleotide
tgtaagctcgcaccttgtcggtgctcttggcgctctgaatgttggggtggtatcg

SEQ ID NO: 473517 - DNA, 59 bp, Artificial
  Synthetic oligonucleotide
tgtaagcttggggactgacctggtatatgttaggttgcaaccaatctttgattgattcg

SEQ ID NO: 473518 - DNA, 54 bp, Artificial
  Synthetic oligonucleotide
tgtaaggaacaagccatggtgaatcgttttttcaaggttaataattatgttgtt

SEQ ID NO: 473519 - DNA, 60 bp, Artificial
  Synthetic oligonucleotide
tgtaaggaagactacaggtatgcgatatcatcaaccaatgagatagggccgctaggggct

SEQ ID NO: 473520 - DNA, 58 bp, Artificial
  Synthetic oligonucleotide
tgtaaggaatggggtgtggtcacctcccaatgtcacaacaacgttgcacttgcgttaa

SEQ ID NO: 473521 - DNA, 60 bp, Artificial
  Synthetic oligonucleotide
tgtaaggattcattgtcagtcattcttttgtcatgaatctccacgaccacggatcctgtt

SEQ ID NO: 473522 - DNA, 60 bp, Artificial
  Synthetic oligonucleotide
tgtaaggcactcatgcagtgcctaatggatggtgacgttaaaaaattggctgaagtagta

SEQ ID NO: 473523 - DNA, 55 bp, Artificial
  Synthetic oligonucleotide
tgtaaggcactgtgagatatttgacgtgtcccttgtgttgcagttgggccgtgta

SEQ ID NO: 473524 - DNA, 59 bp, Artificial
  Synthetic oligonucleotide
tgtaaggcggggcgggacctcctctaataggtgaggaggcctgtcctgatgcgaatcac

SEQ ID NO: 473525 - DNA, 57 bp, Artificial
  Synthetic oligonucleotide
tgtaaggctaaagttaaagcggacgctgcacggagtgttttccaccgtgagcttgta

SEQ ID NO: 473526 - DNA, 59 bp, Artificial
  Synthetic oligonucleotide
tgtaaggggcaattctcctgtgttcaactacaacaaggccactaagagactcacagttc

SEQ ID NO: 473527 - DNA, 59 bp, Artificial
  Synthetic oligonucleotide
tgtaagtaacgctaggcctttcgcggtctagctgccgtgagcatgcctactaccgccgg

SEQ ID NO: 473528 - DNA, 59 bp, Artificial
  Synthetic oligonucleotide
tgtaagtactacaaccagtggttgggaagacttgcgtagtttgaatatgtcgtgtgtga

SEQ ID NO: 473529 - DNA, 57 bp, Artificial
  Synthetic oligonucleotide
tgtaagtatgtcagcatgccccatctgagggatatacctcagtaggaacaaggtgca

SEQ ID NO: 473530 - DNA, 52 bp, Artificial
  Synthetic oligonucleotide
tgtaagtcttgccgttaccaccgggatcgtaccggagagtctactgtgctct

SEQ ID NO: 473531 - DNA, 60 bp, Artificial
  Synthetic oligonucleotide
tgtaagtgagtccatatctggaatgtcaagaaacacttgtgaattcccaatgctttcctc

SEQ ID NO: 473532 - DNA, 57 bp, Artificial
  Synthetic oligonucleotide
tgtaagtgtcacctcatccaacaatcagctggttatgactattgatcctgcgagtcc

SEQ ID NO: 473533 - DNA, 57 bp, Artificial
  Synthetic oligonucleotide
tgtaagttggatatcgctttggtttgcctttaaccggtcatttgagccaacgcatcg

SEQ ID NO: 473534 - DNA, 55 bp, Artificial
  Synthetic oligonucleotide
tgtaagtttgttggcatgcgcagtagattaatcgatacctcgggagggcgccata

SEQ ID NO: 473535 - DNA, 60 bp, Artificial
  Synthetic oligonucleotide
tgtaataagagcagccacagtccagatctacccttctacgcctcacttgcctcttcttgg

SEQ ID NO: 473536 - DNA, 55 bp, Artificial
  Synthetic oligonucleotide
tgtaataagtttatgggatcaaagtataaaaccatgtgtaaagttaactcctctc

SEQ ID NO: 473537 - DNA, 53 bp, Artificial
  Synthetic oligonucleotide
tgtaataatgaaacgttcaatgggacagggccatgtaacaatgtcagcacagt

SEQ ID NO: 473538 - DNA, 51 bp, Artificial
  Synthetic oligonucleotide
tgtaatacatagtccttaggagctaactccttaattacatcaagagcctgt

SEQ ID NO: 473539 - DNA, 50 bp, Artificial
  Synthetic oligonucleotide
tgtaatacgaacacggtagacgcgtgctcgttagaggactgaaactccca

SEQ ID NO: 473540 - DNA, 57 bp, Artificial
  Synthetic oligonucleotide
tgtaataggatttacacttcccattattcttaaggctttatacatgctttcaacgcg

SEQ ID NO: 473541 - DNA, 60 bp, Artificial
  Synthetic oligonucleotide
tgtaatagtgcccttttagccgataccagcattgcttacattgagcaagggtggtgtccc

SEQ ID NO: 473542 - DNA, 60 bp, Artificial
  Synthetic oligonucleotide
tgtaatcacgaacttggttgcagtctttggcagcttgtatatttggatggaatatggaga

SEQ ID NO: 473543 - DNA, 51 bp, Artificial
  Synthetic oligonucleotide
tgtaatcccctgaacccatttgtcagccacaaggaaatagagtctgtgaac

SEQ ID NO: 473544 - DNA, 57 bp, Artificial
  Synthetic oligonucleotide
tgtaatccgcgggacctacaacaacactactggcagagatgttttggttatatgggg

SEQ ID NO: 473545 - DNA, 57 bp, Artificial
  Synthetic oligonucleotide
tgtaatcctatatgggctgctcctagttttaatgggtttacggattattaccacaca

SEQ ID NO: 473546 - DNA, 53 bp, Artificial
  Synthetic oligonucleotide
tgtaatcgtcatggcgaatttcatgcctgacttctgtaaaatctccgaagatc

SEQ ID NO: 473547 - DNA, 59 bp, Artificial
  Synthetic oligonucleotide
tgtaatcgtcgttgcgacgttgatttgcttacaagcaatcaagctgcctttgggtttta

SEQ ID NO: 473548 - DNA, 59 bp, Artificial
  Synthetic oligonucleotide
tgtaatgaaagataaaccatactacttagtaacatgggcgaactcttcaattgagatgt

SEQ ID NO: 473549 - DNA, 50 bp, Artificial
  Synthetic oligonucleotide
tgtaatgccagcaaattccaccagggagcactgttagtcgctatggtccc

SEQ ID NO: 473550 - DNA, 56 bp, Artificial
  Synthetic oligonucleotide
tgtaatgccgcaatgggggtgggtgtgggtaacttgaccatttacccgcaccagtg

SEQ ID NO: 473551 - DNA, 57 bp, Artificial
  Synthetic oligonucleotide
tgtaatggatggttttttgtagaagcagtagttagtagacgtacgggatccagtgta

SEQ ID NO: 473552 - DNA, 60 bp, Artificial
  Synthetic oligonucleotide
tgtaatgggaatgatcggaatactgcccgatatgaccccaaacactgagatgtcactacg

SEQ ID NO: 473553 - DNA, 55 bp, Artificial
  Synthetic oligonucleotide
tgtaatgggcggaatgccatctgggtgctctggtactagtattttcaattccatg

SEQ ID NO: 473554 - DNA, 60 bp, Artificial
  Synthetic oligonucleotide
tgtaatgtcgaagtgtcgactattcctgaattgggctttacctttgaattgtatgagcgc

SEQ ID NO: 473555 - DNA, 60 bp, Artificial
  Synthetic oligonucleotide
tgtaatgtctgcaaccccagagttccctggggccgaacgcatgacacctgttgccctcca

SEQ ID NO: 473556 - DNA, 60 bp, Artificial
  Synthetic oligonucleotide
tgtaatgttagactatgcattgtttggcaattgtgcgataccaaaggtcacggcagaaga

SEQ ID NO: 473557 - DNA, 51 bp, Artificial
  Synthetic oligonucleotide
tgtaattaaaattcttagagacgtgagaatgcagcaatgcacgtatgtaac

SEQ ID NO: 473558 - DNA, 60 bp, Artificial
  Synthetic oligonucleotide
tgtaattataactataatagctttcttatcattatgtgactaacaatcttgtaactacat

SEQ ID NO: 473559 - DNA, 59 bp, Artificial
  Synthetic oligonucleotide
tgtaattctgcacatgtttgcgagaggggtctccagtacccctttatagaaataagcgc

SEQ ID NO: 473560 - DNA, 59 bp, Artificial
  Synthetic oligonucleotide
tgtaattgagaagagcaattcgtctaatgaaaaagaaccatctaacacatttcagtccg

SEQ ID NO: 473561 - DNA, 60 bp, Artificial
  Synthetic oligonucleotide
tgtaattgtacacggtcagggaatcatctatataatagcacagatggagggttattagta

SEQ ID NO: 473562 - DNA, 55 bp, Artificial
  Synthetic oligonucleotide
tgtaattgtatctaaaggtatagcagtaacggagaaggctaaattgaattcatac

SEQ ID NO: 473563 - DNA, 54 bp, Artificial
  Synthetic oligonucleotide
tgtaatttgactagagtggatactagctcagatgcattttatacagctggttta

SEQ ID NO: 473564 - DNA, 59 bp, Artificial
  Synthetic oligonucleotide
tgtaattttacgtatgattatgagaataacatagtttatttacatgattattcgtatta

SEQ ID NO: 473565 - DNA, 59 bp, Artificial
  Synthetic oligonucleotide
tgtaattttatgttggagcagtagccggatagctctcttctcagagactgagtccatag

SEQ ID NO: 473566 - DNA, 56 bp, Artificial
  Synthetic oligonucleotide
tgtacaaaagtttggagggggacacaccctaacatgatcgaggtcagaaggaacgc

SEQ ID NO: 473567 - DNA, 54 bp, Artificial
  Synthetic oligonucleotide
tgtacaaagctccgcttgacaaggttagcattgaggaaaggcttaactggatca

SEQ ID NO: 473568 - DNA, 53 bp, Artificial
  Synthetic oligonucleotide
tgtacaaggaagctagagctgttaacaagaagtcaaaggtcattagttcactg

SEQ ID NO: 473569 - DNA, 54 bp, Artificial
  Synthetic oligonucleotide
tgtacaagtggttcgggtcgaacaaccgacctaaacactgagtctaaccgatag

SEQ ID NO: 473570 - DNA, 51 bp, Artificial
  Synthetic oligonucleotide
tgtacaagtgtaactacccggcaggacataggcaggtagggacattgcaat

SEQ ID NO: 473571 - DNA, 55 bp, Artificial
  Synthetic oligonucleotide
tgtacaatactattcgtgcatttaccaacacggtacacgtaattcttactcgtcg

SEQ ID NO: 473572 - DNA, 60 bp, Artificial
  Synthetic oligonucleotide
tgtacaataggcgctgtcacatccagtggcggctagtacaagcacttctgtttccccgga

SEQ ID NO: 473573 - DNA, 60 bp, Artificial
  Synthetic oligonucleotide
tgtacaatagtcctagatctgtaagtccctgcacaacatcattgagggtctctccccctt

SEQ ID NO: 473574 - DNA, 60 bp, Artificial
  Synthetic oligonucleotide
tgtacaatatgaccagtaggtgacaattatccagattgtcaaaggtcaagcacttctgtt

SEQ ID NO: 473575 - DNA, 59 bp, Artificial
  Synthetic oligonucleotide
tgtacaatcaagctctgttcgagagcgcgagtggactcacctgggctacaactccttag

SEQ ID NO: 473576 - DNA, 55 bp, Artificial
  Synthetic oligonucleotide
tgtacaatgatagacccaacaaatgggccattacccgaggacaatgagccgagtg

SEQ ID NO: 473577 - DNA, 54 bp, Artificial
  Synthetic oligonucleotide
tgtacaatgggtaaatagttagttgattaatgttaagtagaataagaagatgat

SEQ ID NO: 473578 - DNA, 54 bp, Artificial
  Synthetic oligonucleotide
tgtacaatgtgggaccctttactaaacgagttccctgagtctgtccacggtttc

SEQ ID NO: 473579 - DNA, 60 bp, Artificial
  Synthetic oligonucleotide
tgtacaatttccccaccagagcaggccaatgcggtggcgttctcatgtctactggcaagg

SEQ ID NO: 473580 - DNA, 59 bp, Artificial
  Synthetic oligonucleotide
tgtacacaatccagtgtattattggtcgtaatgagtaattgcgggatgggaccaactac

SEQ ID NO: 473581 - DNA, 60 bp, Artificial
  Synthetic oligonucleotide
tgtacacatccaagcttatgtggaactttacatggccgctggaattgttatgctaaaacg

SEQ ID NO: 473582 - DNA, 55 bp, Artificial
  Synthetic oligonucleotide
tgtacacatggcatcagaccaacaataagtactcagatactattcaatgggacac

SEQ ID NO: 473583 - DNA, 60 bp, Artificial
  Synthetic oligonucleotide
tgtacacatttagaaggcaaaattatcctggtagcagttcatgtagccagtggatatata

SEQ ID NO: 473584 - DNA, 55 bp, Artificial
  Synthetic oligonucleotide
tgtacaccaaacggagcaatcgaagctgttcagttctgggaagagagaggtcacg

SEQ ID NO: 473585 - DNA, 60 bp, Artificial
  Synthetic oligonucleotide
tgtacaccacgacagacagggtaattggggccagaatcttgctatatgctcctaggaagt

SEQ ID NO: 473586 - DNA, 51 bp, Artificial
  Synthetic oligonucleotide
tgtacacccagaacaagtgactcttgtctcacttagaatgggtttgctcgg

SEQ ID NO: 473587 - DNA, 60 bp, Artificial
  Synthetic oligonucleotide
tgtacaccctattgagcgcgcctaatggcacgatacatacggcgactattaaggccgacg

SEQ ID NO: 473588 - DNA, 59 bp, Artificial
  Synthetic oligonucleotide
tgtacaccttagggcttagatctaaatgaccacacaagtaattatgtggtcccaatgac

SEQ ID NO: 473589 - DNA, 52 bp, Artificial
  Synthetic oligonucleotide
tgtacacctttgggctaagttccagaggcccgcataaatcgttatgtgggcc

SEQ ID NO: 473590 - DNA, 58 bp, Artificial
  Synthetic oligonucleotide
tgtacacctttgggcttagatctaaatgcccacataaatagttatgtgggcctaaaga

SEQ ID NO: 473591 - DNA, 57 bp, Artificial
  Synthetic oligonucleotide
tgtacacgcacccacgtcgctataccaccaggcgattaaaggggtccgagtggcgta

SEQ ID NO: 473592 - DNA, 60 bp, Artificial
  Synthetic oligonucleotide
tgtacacgctgccgctactaaatcaggcaacacagtagtgtgcgccgtccaagccagtga

SEQ ID NO: 473593 - DNA, 55 bp, Artificial
  Synthetic oligonucleotide
tgtacactacctcatcgcaatgaaacaggacactggacttgcaagccccgaacaa

SEQ ID NO: 473594 - DNA, 60 bp, Artificial
  Synthetic oligonucleotide
tgtacactctcgggcttagatctaggtggccgcacagataattgtgcggtcccaaagaac

SEQ ID NO: 473595 - DNA, 60 bp, Artificial
  Synthetic oligonucleotide
tgtacactttgggactcagatctagatgtccgcacaaataattgtgtggtcccagtgatc

SEQ ID NO: 473596 - DNA, 56 bp, Artificial
  Synthetic oligonucleotide
tgtacagagggtcctccactcgttgaatcttgaaaaagaggggattcggcacctcc

SEQ ID NO: 473597 - DNA, 54 bp, Artificial
  Synthetic oligonucleotide
tgtacagatacaagtatccggggtctggaagaagcctttatgtgtaggatatga

SEQ ID NO: 473598 - DNA, 59 bp, Artificial
  Synthetic oligonucleotide
tgtacagcatcgtgtgtccctttacaccgctgttacaaattttctgttgtctctgggta

SEQ ID NO: 473599 - DNA, 50 bp, Artificial
  Synthetic oligonucleotide
tgtacagccccctatattgtactcagagaagattccacgttggcacagtt

SEQ ID NO: 473600 - DNA, 51 bp, Artificial
  Synthetic oligonucleotide
tgtacagcctgaggacatgatcgaaacacgctatgttcaaacgtcccagac

SEQ ID NO: 473601 - DNA, 58 bp, Artificial
  Synthetic oligonucleotide
tgtacagcgtagtgcagcccgagtccaagcgtggcacgctggtggtcggagtagcaac

SEQ ID NO: 473602 - DNA, 60 bp, Artificial
  Synthetic oligonucleotide
tgtacagcttcgaagggtgttgactacagctacaataactcttttaccagatgcagaaag

SEQ ID NO: 473603 - DNA, 56 bp, Artificial
  Synthetic oligonucleotide
tgtacaggactgcaattgctcactctatcctggccacgtatcaggtcatcgcatgg

SEQ ID NO: 473604 - DNA, 60 bp, Artificial
  Synthetic oligonucleotide
tgtacaggcggaagttatgactttacactaccagtaggtgcatggccagttatgaatggg

SEQ ID NO: 473605 - DNA, 58 bp, Artificial
  Synthetic oligonucleotide
tgtacaggcgttgtccgtgcttctctcctatgtactccaagggaacacacaggaggac

SEQ ID NO: 473606 - DNA, 60 bp, Artificial
  Synthetic oligonucleotide
tgtacaggggagcctttatgaggctagtctacatggtccagatatgcatgcgcgtattta

SEQ ID NO: 473607 - DNA, 60 bp, Artificial
  Synthetic oligonucleotide
tgtacaggtcgttgcagacacagtcgattactttgttggcggcgatagtactgcgcagaa

SEQ ID NO: 473608 - DNA, 60 bp, Artificial
  Synthetic oligonucleotide
tgtacagtattttgtacattggctggaccaggtgcagattgtgaagcttactctgaaaca

SEQ ID NO: 473609 - DNA, 60 bp, Artificial
  Synthetic oligonucleotide
tgtacatacatcagtcttaggtagaatggtgcagtccgacccacagacatggggttggtg

SEQ ID NO: 473610 - DNA, 58 bp, Artificial
  Synthetic oligonucleotide
tgtacatacccaggtacgctctacaacgcaatttaagggacccgagtcttgcaagata

SEQ ID NO: 473611 - DNA, 60 bp, Artificial
  Synthetic oligonucleotide
tgtacatcgaagtattgcatctaactcaaggaacctgctgggaacaaatgtacaccccag

SEQ ID NO: 473612 - DNA, 55 bp, Artificial
  Synthetic oligonucleotide
tgtacatctggatttacaggatgctgattgttctcgcataacattcttccagaag

SEQ ID NO: 473613 - DNA, 60 bp, Artificial
  Synthetic oligonucleotide
tgtacatgataatccgataatcactgagcaactaattggagatagtccacagccttcggg

SEQ ID NO: 473614 - DNA, 60 bp, Artificial
  Synthetic oligonucleotide
tgtacatgatttgcaacagattttgtataccttcctctagagcgttgaagtcgaacggag

SEQ ID NO: 473615 - DNA, 56 bp, Artificial
  Synthetic oligonucleotide
tgtacatggatgaatagcaccgggttcaccaagacgtgtggggcccccccttgtaa

SEQ ID NO: 473616 - DNA, 56 bp, Artificial
  Synthetic oligonucleotide
tgtacatggatgaatagttccgggtacaccaagacgtgtgggggccccccatgtaa

SEQ ID NO: 473617 - DNA, 58 bp, Artificial
  Synthetic oligonucleotide
tgtacatggttttaggtgtatgctagcaattaagtatttgcaactggtagaaaatacg

SEQ ID NO: 473618 - DNA, 59 bp, Artificial
  Synthetic oligonucleotide
tgtacatgtaatacaggggtgtactattgtgaatcaagaaggaagtactacccagtatc

SEQ ID NO: 473619 - DNA, 60 bp, Artificial
  Synthetic oligonucleotide
tgtacatgtgggcttggtcaatggtctgcaacatactcctatggtggtacccataaaaga

SEQ ID NO: 473620 - DNA, 60 bp, Artificial
  Synthetic oligonucleotide
tgtacattgaggtattgcacttgacccaagggacctgctgggagcagatgtacactccgg

SEQ ID NO: 473621 - DNA, 56 bp, Artificial
  Synthetic oligonucleotide
tgtacattttggcaatgtgagcctacaatttcaaggggataggatcatagtttgga

SEQ ID NO: 473622 - DNA, 57 bp, Artificial
  Synthetic oligonucleotide
tgtaccaaagcagtaagtatatgtcatgacacctttagaaattagtgcaatagtagg

SEQ ID NO: 473623 - DNA, 55 bp, Artificial
  Synthetic oligonucleotide
tgtaccaaatggactcggctttaaagggcggaagacgcgagagtttaggtatata

SEQ ID NO: 473624 - DNA, 59 bp, Artificial
  Synthetic oligonucleotide
tgtaccaacacttgatgattttaggtccatggaggcattttcagggatttttagatcac

SEQ ID NO: 473625 - DNA, 59 bp, Artificial
  Synthetic oligonucleotide
tgtaccaacaggctctcgaggatatcagttgtcatgggctgaacctcgagacagacagc

SEQ ID NO: 473626 - DNA, 56 bp, Artificial
  Synthetic oligonucleotide
tgtaccaactagagcagcattcggcgagctagtatcagaagataagcctgaatcta

SEQ ID NO: 473627 - DNA, 60 bp, Artificial
  Synthetic oligonucleotide
tgtaccaagcgcttgatagatgggatttggattcggcaagaggggatgatgtctcaggca

SEQ ID NO: 473628 - DNA, 53 bp, Artificial
  Synthetic oligonucleotide
tgtaccaagtcgtttaatcgttttattaagcttggagctggaattacccaaac

SEQ ID NO: 473629 - DNA, 59 bp, Artificial
  Synthetic oligonucleotide
tgtaccaagtgaacagccgaacaacacagaatccattgaatactcccccccatcggtga

SEQ ID NO: 473630 - DNA, 55 bp, Artificial
  Synthetic oligonucleotide
tgtaccaattacagccgatagcattaaaagaccgtctcttgtctcaccagagggg

SEQ ID NO: 473631 - DNA, 55 bp, Artificial
  Synthetic oligonucleotide
tgtaccagaacgcttgcatagcgactggggtgagggccaggaagcgaggccacag

SEQ ID NO: 473632 - DNA, 55 bp, Artificial
  Synthetic oligonucleotide
tgtaccagaagatgagagactacgcgtacatggtttgtaagtcaagtgtgcaagc

SEQ ID NO: 473633 - DNA, 55 bp, Artificial
  Synthetic oligonucleotide
tgtaccagagaggaacgcatccattttccagaatccgagatggtctgcagtatgg

SEQ ID NO: 473634 - DNA, 59 bp, Artificial
  Synthetic oligonucleotide
tgtaccagcacacccacgcaagtcgcagaaaaccggagtcattgcacccccaattcgtg

SEQ ID NO: 473635 - DNA, 53 bp, Artificial
  Synthetic oligonucleotide
tgtaccagtaagattaaaaccaggaatggatggccctagagtaaagcaatggc

SEQ ID NO: 473636 - DNA, 54 bp, Artificial
  Synthetic oligonucleotide
tgtaccagttaaacaaggggacagaagcgaccttaaatctgtcgtttcaaccat

SEQ ID NO: 473637 - DNA, 55 bp, Artificial
  Synthetic oligonucleotide
tgtacccaacacaacgacattgaagatgttcccatgtggaaagagggacgtgcta

SEQ ID NO: 473638 - DNA, 57 bp, Artificial
  Synthetic oligonucleotide
tgtacccatctcgacgctattgcctcgggtaaacgacgactcttcgctcaagagaca

SEQ ID NO: 473639 - DNA, 48 bp, Artificial
  Synthetic oligonucleotide
tgtacccctgggagggtaggtaccaaagtgggccaaaaaggttttccc

SEQ ID NO: 473640 - DNA, 55 bp, Artificial
  Synthetic oligonucleotide
tgtacccctgggagggtaggtcccggaccactacgctacgcagcagccttagcta

SEQ ID NO: 473641 - DNA, 53 bp, Artificial
  Synthetic oligonucleotide
tgtacccgacccaaccaaaccctggcttatacaccccctgattgaccctgtag

SEQ ID NO: 473642 - DNA, 55 bp, Artificial
  Synthetic oligonucleotide
tgtacccgcccgcagggcccactgggcgctagtactctggtacgctagtacacta

SEQ ID NO: 473643 - DNA, 59 bp, Artificial
  Synthetic oligonucleotide
tgtacccgctgactacaagtgtgcgcaaaggttgtttgcaaggtctgtactcaattctt

SEQ ID NO: 473644 - DNA, 60 bp, Artificial
  Synthetic oligonucleotide
tgtaccgagttgctgcgccctgactgcagaacatcatgcagcgcaaacctaactgattgt

SEQ ID NO: 473645 - DNA, 55 bp, Artificial
  Synthetic oligonucleotide
tgtaccgatacacaccaagcatcatgtaaacgaatctgtaaggaagtgcttatgt

SEQ ID NO: 473646 - DNA, 60 bp, Artificial
  Synthetic oligonucleotide
tgtaccgcaatggtagtgcggaacctttgacactgccgcgtgcgcgttaccatccgagta

SEQ ID NO: 473647 - DNA, 56 bp, Artificial
  Synthetic oligonucleotide
tgtaccgccgttggctcgactctttttagtgaccctacctcagtcgaattggattg

SEQ ID NO: 473648 - DNA, 55 bp, Artificial
  Synthetic oligonucleotide
tgtaccgcgtaactgttaagcgtggtaataaggcaacatggtactatatggcttt

SEQ ID NO: 473649 - DNA, 56 bp, Artificial
  Synthetic oligonucleotide
tgtaccgctagattactgccctgggtccaccacgtacgtcccaattacggtcacga

SEQ ID NO: 473650 - DNA, 52 bp, Artificial
  Synthetic oligonucleotide
tgtaccgggtgttgtcttcggatatcccggaatccacctatgaagcggcgtc

SEQ ID NO: 473651 - DNA, 51 bp, Artificial
  Synthetic oligonucleotide
tgtaccggtcgcttgttcggacgggtacggtggcttggtgacaacagaccc

SEQ ID NO: 473652 - DNA, 57 bp, Artificial
  Synthetic oligonucleotide
tgtacctaacactgaggtctctcagaactatggaaagaatttccagacacccttttc

SEQ ID NO: 473653 - DNA, 59 bp, Artificial
  Synthetic oligonucleotide
tgtacctacggtggcttcttgtgtctcggaatcgattgagtctaaactcgatcgaatct

SEQ ID NO: 473654 - DNA, 52 bp, Artificial
  Synthetic oligonucleotide
tgtacctaggagacacataagaagagtcccagaaccctgcactcttcctgaa

SEQ ID NO: 473655 - DNA, 59 bp, Artificial
  Synthetic oligonucleotide
tgtacctattgatcagttgacggatatctcctttactcttttcttgatggtcaaactta

SEQ ID NO: 473656 - DNA, 60 bp, Artificial
  Synthetic oligonucleotide
tgtacctcatgaccggcctctcagtacataattcttcagctagtgaggtaaggctatcaa

SEQ ID NO: 473657 - DNA, 60 bp, Artificial
  Synthetic oligonucleotide
tgtacctccgcctcgaaagaagcggacggtggtcctcactgaatcactcatacctactgc

SEQ ID NO: 473658 - DNA, 57 bp, Artificial
  Synthetic oligonucleotide
tgtacctcctaaaagcccagggggaggaggatttggatgtgaatacataagtcttga

SEQ ID NO: 473659 - DNA, 56 bp, Artificial
  Synthetic oligonucleotide
tgtacctgaccgagccagctatagcttggtttgaggctaaccggcctaccctcccc

SEQ ID NO: 473660 - DNA, 56 bp, Artificial
  Synthetic oligonucleotide
tgtacctgaggtcaggtgtgcgaggtatggaaactccttatacttggcggaaggaa

SEQ ID NO: 473661 - DNA, 60 bp, Artificial
  Synthetic oligonucleotide
tgtacctgccatacccaggaaacagcgagattgttggaggtgatataggggtccacatga

SEQ ID NO: 473662 - DNA, 51 bp, Artificial
  Synthetic oligonucleotide
tgtacctgctcttcgtccgactctcctcaccgtcttcccctcaagagcttt

SEQ ID NO: 473663 - DNA, 55 bp, Artificial
  Synthetic oligonucleotide
tgtacctggacccctgcatgggccccgccctttgcaacaggaaagtcgtcgggtc

SEQ ID NO: 473664 - DNA, 54 bp, Artificial
  Synthetic oligonucleotide
tgtacctgggaaccgtgacagctaagagagccaaaatacatccatatgaagcat

SEQ ID NO: 473665 - DNA, 60 bp, Artificial
  Synthetic oligonucleotide
tgtaccttgattgaggcaggcacaagattcaacttaggtcctgtgaccatcacattgtca

SEQ ID NO: 473666 - DNA, 55 bp, Artificial
  Synthetic oligonucleotide
tgtacctttatcggcacccgacacactgtactataaatcgagtacgacgtcgggt

SEQ ID NO: 473667 - DNA, 60 bp, Artificial
  Synthetic oligonucleotide
tgtacgaatacctgatgatggacactactgaaatagtggaattccaggctaggagtacga

SEQ ID NO: 473668 - DNA, 59 bp, Artificial
  Synthetic oligonucleotide
tgtacgacgatttgagttttcacctttcgtcttagaggagtgcactactccatctttca

SEQ ID NO: 473669 - DNA, 60 bp, Artificial
  Synthetic oligonucleotide
tgtacgactgtgatgattatcccttccttgcacgtgacccaagatttaagcatcgggtat

SEQ ID NO: 473670 - DNA, 59 bp, Artificial
  Synthetic oligonucleotide
tgtacgagaaggtcaaatcgcaattgaggaataatgccaaagaaattgggaacggatgc

SEQ ID NO: 473671 - DNA, 60 bp, Artificial
  Synthetic oligonucleotide
tgtacgagttacgctccttcttagcgctctcgggacatgaatggctgggcgagccgatga

SEQ ID NO: 473672 - DNA, 58 bp, Artificial
  Synthetic oligonucleotide
tgtacgatatggtgaacgtggcccaattatattcccgctgtggagttaaactatcgct

SEQ ID NO: 473673 - DNA, 60 bp, Artificial
  Synthetic oligonucleotide
tgtacgatttatccaaacctgatatcttgtttgttgctgccagtggtgatgatagcttaa

SEQ ID NO: 473674 - DNA, 60 bp, Artificial
  Synthetic oligonucleotide
tgtacgatttgttgcaggtatataattttgacattgaaacgtgggatccattggatacac

SEQ ID NO: 473675 - DNA, 56 bp, Artificial
  Synthetic oligonucleotide
tgtacgcaacgctcgtccttccccccgaagccctctacagactaaggtcactctac

SEQ ID NO: 473676 - DNA, 60 bp, Artificial
  Synthetic oligonucleotide
tgtacgcatgcctctaatcctgtgtatgctacccttaagattaggatttacttctacgat

SEQ ID NO: 473677 - DNA, 60 bp, Artificial
  Synthetic oligonucleotide
tgtacgcatggtgtagtggactagcggttagaggagacccctcccttatggatcgcagca

SEQ ID NO: 473678 - DNA, 52 bp, Artificial
  Synthetic oligonucleotide
tgtacgcctgttttatactccctaccccgtaacttagaagcaataacttaag

SEQ ID NO: 473679 - DNA, 55 bp, Artificial
  Synthetic oligonucleotide
tgtacgcggagacagcgagtctgcaacacgcggtccgtcgcatcttacgacacgg

SEQ ID NO: 473680 - DNA, 55 bp, Artificial
  Synthetic oligonucleotide
tgtacgctttctgcgaaagcacaggggtcccgtacaagagtttcaacagggtggc

SEQ ID NO: 473681 - DNA, 57 bp, Artificial
  Synthetic oligonucleotide
tgtacggaaaagctgtgagcgtctctacgaagggagaatgggcgtctggaacggttc

SEQ ID NO: 473682 - DNA, 56 bp, Artificial
  Synthetic oligonucleotide
tgtacggaaccggttcaataaggagaccaacatggatacttcaccaggtacagacc

SEQ ID NO: 473683 - DNA, 55 bp, Artificial
  Synthetic oligonucleotide
tgtacggatccgggacatccgaacacacgaccgtgttcggaaccccatccgaaca

SEQ ID NO: 473684 - DNA, 54 bp, Artificial
  Synthetic oligonucleotide
tgtacggctttgaaccaggtgagttttcttatatacgatttgttgaccctttaa

SEQ ID NO: 473685 - DNA, 60 bp, Artificial
  Synthetic oligonucleotide
tgtacgggaatccatggttgtggcctttgatggagagattataagaacacccgcaatcaa

SEQ ID NO: 473686 - DNA, 58 bp, Artificial
  Synthetic oligonucleotide
tgtacgtaaattgaacagccacagtccaggtctaaccttctccgtctaatgacagatt

SEQ ID NO: 473687 - DNA, 60 bp, Artificial
  Synthetic oligonucleotide
tgtacgtacattataggcaatggggcagtagttgaggtggacactagtgatagagttgct

SEQ ID NO: 473688 - DNA, 56 bp, Artificial
  Synthetic oligonucleotide
tgtacgtcgtggcaatttgatccgttgccccgagggtgtgttcgtcaatcaacccc

SEQ ID NO: 473689 - DNA, 55 bp, Artificial
  Synthetic oligonucleotide
tgtacgtgagtcaccctcaaccactatactaataggtctgaaaggccgcgcagcg

SEQ ID NO: 473690 - DNA, 58 bp, Artificial
  Synthetic oligonucleotide
tgtacgtggctccagtaatccctaagatggttgattctttccagaccagagtagttta

SEQ ID NO: 473691 - DNA, 57 bp, Artificial
  Synthetic oligonucleotide
tgtacgttcgcagggttctgacggtaatgggaaagccactcatttatacgttgatgg

SEQ ID NO: 473692 - DNA, 59 bp, Artificial
  Synthetic oligonucleotide
tgtacgttgagccgtgtttacaaacggattagctcgcatcgtggcatttaatggattcg

SEQ ID NO: 473693 - DNA, 60 bp, Artificial
  Synthetic oligonucleotide
tgtacgttgtgtttgcggcttctggcgagattagaatttcgggcgaggcatatgttctcg

SEQ ID NO: 473694 - DNA, 56 bp, Artificial
  Synthetic oligonucleotide
tgtacgtttgatgaagacggcgttatgccgggctccgtggacgaatcgttacctaa

SEQ ID NO: 473695 - DNA, 57 bp, Artificial
  Synthetic oligonucleotide
tgtacgtttgatgaagacggcgttgcgccgaactccgtggacgaatcgttaccaatg

SEQ ID NO: 473696 - DNA, 56 bp, Artificial
  Synthetic oligonucleotide
tgtactaaacatgcttggggaaaccttaatggtctctaacatgttccctccgtcaa

SEQ ID NO: 473697 - DNA, 57 bp, Artificial
  Synthetic oligonucleotide
tgtactaaagacacaaaccgccttatgtacctgccacaccagcagtccgttgttaag

SEQ ID NO: 473698 - DNA, 60 bp, Artificial
  Synthetic oligonucleotide
tgtactaagagtgttatggaacacgagcaatccatatatgacgctcttaaggactgtggc

SEQ ID NO: 473699 - DNA, 53 bp, Artificial
  Synthetic oligonucleotide
tgtactaatcgggtcaaggaactctcactgatcaagtctaaatccaggataga

SEQ ID NO: 473700 - DNA, 58 bp, Artificial
  Synthetic oligonucleotide
tgtactaccaacccgaacagatccttcatctgtttcaccaagttccgcagttgaccaa

SEQ ID NO: 473701 - DNA, 60 bp, Artificial
  Synthetic oligonucleotide
tgtactacgattatcatccgcttgagagtgaggcgactaagtgtaatcatgcgaacatag

SEQ ID NO: 473702 - DNA, 55 bp, Artificial
  Synthetic oligonucleotide
tgtactactgggaggtgctgcaggacatctcgcggcgcgtgctcgcggggagcca

SEQ ID NO: 473703 - DNA, 55 bp, Artificial
  Synthetic oligonucleotide
tgtactactgtgagtctagaggaaaacactaccccatcacggttacccaacccac

SEQ ID NO: 473704 - DNA, 60 bp, Artificial
  Synthetic oligonucleotide
tgtactagcgacgccagagataccctttacaacggaggcggcgaatgagattgctcgcgt

SEQ ID NO: 473705 - DNA, 60 bp, Artificial
  Synthetic oligonucleotide
tgtactaggcgtaggagatgagatcccggacccgctcagtcctggagagcgtggcatcca

SEQ ID NO: 473706 - DNA, 60 bp, Artificial
  Synthetic oligonucleotide
tgtactaggggtgtggctaaatcactggactttgttccagtggagagcatgcagactacc

SEQ ID NO: 473707 - DNA, 50 bp, Artificial
  Synthetic oligonucleotide
tgtactagttgcttcctagccttctttagcccggcctcggatagtccagt

SEQ ID NO: 473708 - DNA, 60 bp, Artificial
  Synthetic oligonucleotide
tgtactagtttaattagtcactgttccattattatcaccagcattaatttgatagattta

SEQ ID NO: 473709 - DNA, 60 bp, Artificial
  Synthetic oligonucleotide
tgtactatggacttcaaatagcattgtagctctatgtggatccaaagagcgattgggatc

SEQ ID NO: 473710 - DNA, 55 bp, Artificial
  Synthetic oligonucleotide
tgtactattgaaccagtgctactactttgctaaagcaagacttaatccattcgct

SEQ ID NO: 473711 - DNA, 56 bp, Artificial
  Synthetic oligonucleotide
tgtactattgatgtatactagtgtggcttgttggttcgttaagaccaaagtgtcct

SEQ ID NO: 473712 - DNA, 60 bp, Artificial
  Synthetic oligonucleotide
tgtactcaagatgtagctagtctaggcaactagttacattggatgaggtcccgattgata

SEQ ID NO: 473713 - DNA, 59 bp, Artificial
  Synthetic oligonucleotide
tgtactcagagtttaactgcacgatacgtgccgcaaccgtttttggaacaatgcctcaa

SEQ ID NO: 473714 - DNA, 60 bp, Artificial
  Synthetic oligonucleotide
tgtactcatgagaccagtggctaaaaaagacttcattagatcgattcatataatcaccta

SEQ ID NO: 473715 - DNA, 60 bp, Artificial
  Synthetic oligonucleotide
tgtactcatgcatctaaccctgtatacgcgacattgaaaatccgtatttacttctacgac

SEQ ID NO: 473716 - DNA, 59 bp, Artificial
  Synthetic oligonucleotide
tgtactcatgcatctaaccctgtgtatgcaacgcttaagattcgaatctatttctacga

SEQ ID NO: 473717 - DNA, 59 bp, Artificial
  Synthetic oligonucleotide
tgtactcatgcatctaatcccgtgtatgcaacactcaaaattcgggtctatttttatga

SEQ ID NO: 473718 - DNA, 60 bp, Artificial
  Synthetic oligonucleotide
tgtactcatgcctctaatcctgtgtatgctactttgaaagtcaggagttatttctatgac

SEQ ID NO: 473719 - DNA, 60 bp, Artificial
  Synthetic oligonucleotide
tgtactctatgacacagtggtcgattttcatgcagctacggctgagcctagcggttaact

SEQ ID NO: 473720 - DNA, 56 bp, Artificial
  Synthetic oligonucleotide
tgtactctattttatttcagggtttattaaaatcaattcttctgtagcactaccga

SEQ ID NO: 473721 - DNA, 54 bp, Artificial
  Synthetic oligonucleotide
tgtactgactcaacaggccagggacccaacgtggtaatacagtacatgtacatc

SEQ ID NO: 473722 - DNA, 57 bp, Artificial
  Synthetic oligonucleotide
tgtactgagtataattctaacaactggtcttgcttatgataagatttgcatcggcta

SEQ ID NO: 473723 - DNA, 55 bp, Artificial
  Synthetic oligonucleotide
tgtactgagtgagagctccatgactcgtagctcttccctgcgaattccgaccctc

SEQ ID NO: 473724 - DNA, 59 bp, Artificial
  Synthetic oligonucleotide
tgtactgatagtttggacacgttaaatgatttggaggaactctttgataatagtgatgg

SEQ ID NO: 473725 - DNA, 55 bp, Artificial
  Synthetic oligonucleotide
tgtactgcctttcagatccttcgtcaaagaagcttccaatgatcgatacaacctg

SEQ ID NO: 473726 - DNA, 60 bp, Artificial
  Synthetic oligonucleotide
tgtactgcgtgtgtagggacaattggaaaggttccaacaggccttggatgaggatcaaca

SEQ ID NO: 473727 - DNA, 50 bp, Artificial
  Synthetic oligonucleotide
tgtactggccttgtgcatgtgctgtttgtatggtgcctggtttgtatgac

SEQ ID NO: 473728 - DNA, 57 bp, Artificial
  Synthetic oligonucleotide
tgtactgggtctcttcgctagaccagataagagcccgggagctctctggctagtgta

SEQ ID NO: 473729 - DNA, 60 bp, Artificial
  Synthetic oligonucleotide
tgtactggtgatcaatagtaatgggaatctaatcgctcctagaggttatttcaaaatgcg

SEQ ID NO: 473730 - DNA, 50 bp, Artificial
  Synthetic oligonucleotide
tgtactgtggaacgacaatctgccgtccgtcaatactcaacactgcaccc

SEQ ID NO: 473731 - DNA, 58 bp, Artificial
  Synthetic oligonucleotide
tgtactgtgtaagtgtgtccactgaatacacaaacgttaggaataggttgtcaaacaa

SEQ ID NO: 473732 - DNA, 55 bp, Artificial
  Synthetic oligonucleotide
tgtactgttagagacctggtgaagctaaataaagtagacgtgttaaggcccattt

SEQ ID NO: 473733 - DNA, 53 bp, Artificial
  Synthetic oligonucleotide
tgtacttacacaagtaactggtcaacatgaatgctcttggtgctcaaagacat

SEQ ID NO: 473734 - DNA, 60 bp, Artificial
  Synthetic oligonucleotide
tgtacttcagttcaagttgcatgacactcctaccaccactgttccggccctggccgcctc

SEQ ID NO: 473735 - DNA, 50 bp, Artificial
  Synthetic oligonucleotide
tgtacttcgtagaaacactggcgaggagcatctgtgagaaacttgagcag

SEQ ID NO: 473736 - DNA, 60 bp, Artificial
  Synthetic oligonucleotide
tgtacttcttactatgcatttaagcaaattgtaatcaatgtcagcaaataaactggaaaa

SEQ ID NO: 473737 - DNA, 55 bp, Artificial
  Synthetic oligonucleotide
tgtacttgaagctgcatcagaggaggtaccgttggtaggctccggaatggcgaca

SEQ ID NO: 473738 - DNA, 60 bp, Artificial
  Synthetic oligonucleotide
tgtacttggacgcacggtccatgagcatgccgcatgttgttatcatgacatagtgataaa

SEQ ID NO: 473739 - DNA, 60 bp, Artificial
  Synthetic oligonucleotide
tgtacttgtggagagaaattgctcctgctgtacctgggttgctttctccaagcagcttta

SEQ ID NO: 473740 - DNA, 60 bp, Artificial
  Synthetic oligonucleotide
tgtactttaaataccgacacagcagtactgaaatgtcagaaacgaagctacgtcactcag

SEQ ID NO: 473741 - DNA, 53 bp, Artificial
  Synthetic oligonucleotide
tgtactttaagagtgtcggcaaccagtaatgaataaaaacttccgttttatta

SEQ ID NO: 473742 - DNA, 60 bp, Artificial
  Synthetic oligonucleotide
tgtactttcatctgcattccaccccattgtgtttagctaatcgtttcgtcatcaaagtat

SEQ ID NO: 473743 - DNA, 50 bp, Artificial
  Synthetic oligonucleotide
tgtactttctaaaagagactgtaaccctagcaaaaaggcaagaccagtaa

SEQ ID NO: 473744 - DNA, 59 bp, Artificial
  Synthetic oligonucleotide
tgtactttgggtcgacgcgactggtgaaatctacgaactgttggaatttgacatacatg

SEQ ID NO: 473745 - DNA, 60 bp, Artificial
  Synthetic oligonucleotide
tgtactttgtcgaaacattagcaagaagcatctgtgagaaacttgaacaatctggacttc

SEQ ID NO: 473746 - DNA, 60 bp, Artificial
  Synthetic oligonucleotide
tgtactttgttccaagcaaatataatcctgctgacggcccatccaggcacaaaccgcctg

SEQ ID NO: 473747 - DNA, 58 bp, Artificial
  Synthetic oligonucleotide
tgtacttttctagtgttgaggaccaaattgtggagattcacaggaggaccctactaga

SEQ ID NO: 473748 - DNA, 55 bp, Artificial
  Synthetic oligonucleotide
tgtacttttgctattgaggatgttgaagacgttatcagtagtgaagttgtcgaag

SEQ ID NO: 473749 - DNA, 55 bp, Artificial
  Synthetic oligonucleotide
tgtacttttggggatcctggtgatatcatgtctactacatcagggatgaggtgcc

SEQ ID NO: 473750 - DNA, 59 bp, Artificial
  Synthetic oligonucleotide
tgtagaaaatacgtattctcccgatacgttgggatacgatctaatacgcgatctcatac

SEQ ID NO: 473751 - DNA, 50 bp, Artificial
  Synthetic oligonucleotide
tgtagaacaacagtcaaagtgcaactacaggcttgaccaagtaaaactcc

SEQ ID NO: 473752 - DNA, 55 bp, Artificial
  Synthetic oligonucleotide
tgtagaactaaagagggaagacgaaagaccaatttgtacggattcatcataaaag

SEQ ID NO: 473753 - DNA, 60 bp, Artificial
  Synthetic oligonucleotide
tgtagaaggcgtggaagaggagaccaaggaatctataaatacacagcagatcagatgcta

SEQ ID NO: 473754 - DNA, 60 bp, Artificial
  Synthetic oligonucleotide
tgtagaaggtggaagatattatgaacatgcaccaatcgaattaatatatgcatgccgatc

SEQ ID NO: 473755 - DNA, 60 bp, Artificial
  Synthetic oligonucleotide
tgtagaatctagatcactaatattaggaccattactgacttcatccgttaggtcaatcaa

SEQ ID NO: 473756 - DNA, 55 bp, Artificial
  Synthetic oligonucleotide
tgtagacagcgggctggagtcatcgggtcaaaatgaaactagccattctactccg

SEQ ID NO: 473757 - DNA, 60 bp, Artificial
  Synthetic oligonucleotide
tgtagacatctttgagcgcattgaattttgccaaacccaacctgtgttcgatggctccca

SEQ ID NO: 473758 - DNA, 55 bp, Artificial
  Synthetic oligonucleotide
tgtagaccacagttgaaagatgacgctcatctagaaggattcatttgtaggaagc

SEQ ID NO: 473759 - DNA, 60 bp, Artificial
  Synthetic oligonucleotide
tgtagaccgggtctgtgaccacttgctttccgatgataacaggcctcttgatcctgttag

SEQ ID NO: 473760 - DNA, 50 bp, Artificial
  Synthetic oligonucleotide
tgtagacctaaattacagcctagtgtgcggtttaatacctatttacgcac

SEQ ID NO: 473761 - DNA, 59 bp, Artificial
  Synthetic oligonucleotide
tgtagacctttggactaaggtctaaatgaccacacagataattgtgtggacccagtgac

SEQ ID NO: 473762 - DNA, 60 bp, Artificial
  Synthetic oligonucleotide
tgtagacctttgggctaaggtctagatgaccacacaaatagttatgtggtcccaatgatc

SEQ ID NO: 473763 - DNA, 50 bp, Artificial
  Synthetic oligonucleotide
tgtagacgaatacatgacggaggctgtggatcattatgcggggcaactgg

SEQ ID NO: 473764 - DNA, 51 bp, Artificial
  Synthetic oligonucleotide
tgtagacgtcgacactagatagacagtcgcccactagagttaccgtctccg

SEQ ID NO: 473765 - DNA, 60 bp, Artificial
  Synthetic oligonucleotide
tgtagactgaaaggaatggccccactacaattggggaagtgcagcatcgctggatggatc

SEQ ID NO: 473766 - DNA, 60 bp, Artificial
  Synthetic oligonucleotide
tgtagactttgtaccagttgagtccctcgaaacaaccatgagatctcccgtattctcaga

SEQ ID NO: 473767 - DNA, 60 bp, Artificial
  Synthetic oligonucleotide
tgtagagactcattgtccgtcattctcttgtcgtggatctccactatcaccgaccccgtc

SEQ ID NO: 473768 - DNA, 60 bp, Artificial
  Synthetic oligonucleotide
tgtagaggaccttctgatattgtggggaatccatcaccctaatgatgcagcggaacaaac

SEQ ID NO: 473769 - DNA, 60 bp, Artificial
  Synthetic oligonucleotide
tgtagaggcttacagtctgcctagaatcattgcagtgcggaatcatgagattatggttgg

SEQ ID NO: 473770 - DNA, 53 bp, Artificial
  Synthetic oligonucleotide
tgtagagggtgtggaacgttacaggattccactgaatgtgcaggacgcaatgg

SEQ ID NO: 473771 - DNA, 54 bp, Artificial
  Synthetic oligonucleotide
tgtagagtcattattgggcccaataatgtgaaactgagctatcatctctgtctc

SEQ ID NO: 473772 - DNA, 55 bp, Artificial
  Synthetic oligonucleotide
tgtagagtgcgcgtactataagggctccccgtttagcgaaggtattccccaatgg

SEQ ID NO: 473773 - DNA, 56 bp, Artificial
  Synthetic oligonucleotide
tgtagataacgttaaagacttagccaagactaacgaaggggtctcagtaattctga

SEQ ID NO: 473774 - DNA, 55 bp, Artificial
  Synthetic oligonucleotide
tgtagatacaactaacacaaccagttcaatagcgacacaaaccgccacaattagt

SEQ ID NO: 473775 - DNA, 58 bp, Artificial
  Synthetic oligonucleotide
tgtagataggttctttaaatgtctcagagcagaacaagctacccaggaggtgaaaaat

SEQ ID NO: 473776 - DNA, 59 bp, Artificial
  Synthetic oligonucleotide
tgtagatccaaatgagaccctcggagctacaggggggcatcctaccacttctggtacac

SEQ ID NO: 473777 - DNA, 60 bp, Artificial
  Synthetic oligonucleotide
tgtagatgaaccagatgagcttacagtacatgtgaagagtgaagacccagacatagttgc

SEQ ID NO: 473778 - DNA, 55 bp, Artificial
  Synthetic oligonucleotide
tgtagatgaggttccccattttcgtgcaattcccgtgaaacccttatgaatttct

SEQ ID NO: 473779 - DNA, 60 bp, Artificial
  Synthetic oligonucleotide
tgtagatggtgtcaaccataaattaaacgtcacaacaacaacatgcactatacgcaactg

SEQ ID NO: 473780 - DNA, 55 bp, Artificial
  Synthetic oligonucleotide
tgtagattctcacgttggaactcccacagttgacgcggaggataagcatattgca

SEQ ID NO: 473781 - DNA, 60 bp, Artificial
  Synthetic oligonucleotide
tgtagcaagagccaagatcttctcaaagttcgatctgaagagtggctttcatcaagttgc

SEQ ID NO: 473782 - DNA, 52 bp, Artificial
  Synthetic oligonucleotide
tgtagcaatatatcagcagtgcagtgtactcagcacttagtagccacagtaa

SEQ ID NO: 473783 - DNA, 55 bp, Artificial
  Synthetic oligonucleotide
tgtagcaccacgcgattacgctgtctttgttgaagccatagtagctggtatgtac

SEQ ID NO: 473784 - DNA, 60 bp, Artificial
  Synthetic oligonucleotide
tgtagcagtttctttgagaacaccgtttgagatattgaatgagagagagtatctttttga

SEQ ID NO: 473785 - DNA, 55 bp, Artificial
  Synthetic oligonucleotide
tgtagcatacttgtgcaagaaacttggtatggttactcctcaagtaaccacagcg

SEQ ID NO: 473786 - DNA, 57 bp, Artificial
  Synthetic oligonucleotide
tgtagcatgacaaaaatcttggctccctttagagcaaaaaatccagacctagttatt

SEQ ID NO: 473787 - DNA, 60 bp, Artificial
  Synthetic oligonucleotide
tgtagcatgactgatcatatgagagttgctgtatcacattattcagctcaactaatgacc

SEQ ID NO: 473788 - DNA, 60 bp, Artificial
  Synthetic oligonucleotide
tgtagccacacgagatgtcgacgtattcataggcgcttgttctgaaccgatctatcgcat

SEQ ID NO: 473789 - DNA, 60 bp, Artificial
  Synthetic oligonucleotide
tgtagccatgcagcatggaattgtatctgaggactttgagaggcagttagcatattatgc

SEQ ID NO: 473790 - DNA, 60 bp, Artificial
  Synthetic oligonucleotide
tgtagccccgatgtatgctgagtacaacggacttagaatggcggcatcgcaaggactgcc

SEQ ID NO: 473791 - DNA, 60 bp, Artificial
  Synthetic oligonucleotide
tgtagcccttagatacctgattgtccgacgcttgtatgccggtgtcggccaatagcttcc

SEQ ID NO: 473792 - DNA, 54 bp, Artificial
  Synthetic oligonucleotide
tgtagccgccctggtatacagcatggaggctagcacgccgaacgaccttgcggg

SEQ ID NO: 473793 - DNA, 58 bp, Artificial
  Synthetic oligonucleotide
tgtagcctgaatggaaaggcccccttacaactggggaactgcaacgtagcaggatgga

SEQ ID NO: 473794 - DNA, 57 bp, Artificial
  Synthetic oligonucleotide
tgtagcgaccatttccgtatgccgattccctaggaaattggtttcctcgtgatacga

SEQ ID NO: 473795 - DNA, 58 bp, Artificial
  Synthetic oligonucleotide
tgtagcgaggacagtggaacttctaggacgcaggaggtaggaagcccttaagtatcta

SEQ ID NO: 473796 - DNA, 60 bp, Artificial
  Synthetic oligonucleotide
tgtagcgtatcctttatgataaattggaagctctttctcgcagcgggtttacttctcaca

SEQ ID NO: 473797 - DNA, 58 bp, Artificial
  Synthetic oligonucleotide
tgtagcgtgccaaacgcttattcctagaactttcagaacgtagcacgagaacaacctg

SEQ ID NO: 473798 - DNA, 60 bp, Artificial
  Synthetic oligonucleotide
tgtagctaaactgaaagatgattcgatattatatgtagacatacgaacagatagaggaaa

SEQ ID NO: 473799 - DNA, 55 bp, Artificial
  Synthetic oligonucleotide
tgtagctaacaacaatcttacttacagtaaaattccaagaccgatttcggtcctg

SEQ ID NO: 473800 - DNA, 56 bp, Artificial
  Synthetic oligonucleotide
tgtagctacccggctgcaaactgtcgccccaatgaccccggtgggcgttgggataa

SEQ ID NO: 473801 - DNA, 59 bp, Artificial
  Synthetic oligonucleotide
tgtagctagttatgttctagatatgctcgaaatgaagactgacctcctactacagatta

SEQ ID NO: 473802 - DNA, 60 bp, Artificial
  Synthetic oligonucleotide
tgtagctatgctatgtggacaaacggagacgaaccttatcccctcccaccactatggcaa

SEQ ID NO: 473803 - DNA, 47 bp, Artificial
  Synthetic oligonucleotide
tgtagctccatcgtggggattgtagctccatcgtggggatgtagctc

SEQ ID NO: 473804 - DNA, 55 bp, Artificial
  Synthetic oligonucleotide
tgtagctggaggccgtgacgccattttagaggtggtagatactaatcctccaaca

SEQ ID NO: 473805 - DNA, 56 bp, Artificial
  Synthetic oligonucleotide
tgtagcttttgggcttactaattaattgggccttgatccgattaatttgcagttgg

SEQ ID NO: 473806 - DNA, 57 bp, Artificial
  Synthetic oligonucleotide
tgtaggaaccctcttagccgccgccatctagccacccgacgagggtcagacccacac

SEQ ID NO: 473807 - DNA, 51 bp, Artificial
  Synthetic oligonucleotide
tgtaggaagagttcggcggtattacgcatggcgctatccatagttataaac

SEQ ID NO: 473808 - DNA, 60 bp, Artificial
  Synthetic oligonucleotide
tgtaggaaggtcacagattatgacatcactatttgcccattgccaaatgatgttcaacca

SEQ ID NO: 473809 - DNA, 55 bp, Artificial
  Synthetic oligonucleotide
tgtaggaatgctaaaatacggtggaagagtatggacgtttcatggtgaaacacca

SEQ ID NO: 473810 - DNA, 56 bp, Artificial
  Synthetic oligonucleotide
tgtaggaattaagtgtataagaccctacaacaagagaagagaaaggatacgtatag

SEQ ID NO: 473811 - DNA, 60 bp, Artificial
  Synthetic oligonucleotide
tgtaggacaactgccctttccaaaatcaagaatgactggctatcaaaggctagaagatgt

SEQ ID NO: 473812 - DNA, 60 bp, Artificial
  Synthetic oligonucleotide
tgtaggagacacgattgaagttatcgatgagcgattagggatcaacgttattactcacgt

SEQ ID NO: 473813 - DNA, 59 bp, Artificial
  Synthetic oligonucleotide
tgtaggagataatacaagagggggaaacatcactgttacagtccccgtagatgataagc

SEQ ID NO: 473814 - DNA, 59 bp, Artificial
  Synthetic oligonucleotide
tgtaggagcgttagggtcaatacctcccatgaggtccttcaacaacattgtttggctga

SEQ ID NO: 473815 - DNA, 60 bp, Artificial
  Synthetic oligonucleotide
tgtaggatcactcatgcgcaaatttcctagtgcgaaagtattgcttagtagtttattcgt

SEQ ID NO: 473816 - DNA, 60 bp, Artificial
  Synthetic oligonucleotide
tgtaggcctagattacactctgttgtatgacactctgcccgagactgtgagcgataatat

SEQ ID NO: 473817 - DNA, 60 bp, Artificial
  Synthetic oligonucleotide
tgtaggctgcattccttgtgatggggaacactgggatgttgctcagccctgcaaaaagca

SEQ ID NO: 473818 - DNA, 57 bp, Artificial
  Synthetic oligonucleotide
tgtaggcttcgtagacagcatcaaacaacaggtaaactttatcaaccccactagtaa

SEQ ID NO: 473819 - DNA, 55 bp, Artificial
  Synthetic oligonucleotide
tgtagggacccaacaggttatacgcttccttggtctatacaggaatgctgggaaa

SEQ ID NO: 473820 - DNA, 60 bp, Artificial
  Synthetic oligonucleotide
tgtagggagaggctcgttcgacactgagattaaatatgtgagaggaagcggtgcggttcc

SEQ ID NO: 473821 - DNA, 59 bp, Artificial
  Synthetic oligonucleotide
tgtagggattccatctcaccgacacattgtgggtcaaggctgtccaaaaccccatagaa

SEQ ID NO: 473822 - DNA, 60 bp, Artificial
  Synthetic oligonucleotide
tgtagggcctgctaatgcaaaagtaccccatagtgccagtgcagatacactgagtttagt

SEQ ID NO: 473823 - DNA, 60 bp, Artificial
  Synthetic oligonucleotide
tgtagggctctgctatctcagggaacagcttattagctgagtactcgaagtactgcagct

SEQ ID NO: 473824 - DNA, 54 bp, Artificial
  Synthetic oligonucleotide
tgtagggcttatctgacttctagggccgcacagcaagttaatatcgaagtgctt

SEQ ID NO: 473825 - DNA, 57 bp, Artificial
  Synthetic oligonucleotide
tgtaggggtcttgactataatactaactgcttaggatttgatcacatgcttagaccg

SEQ ID NO: 473826 - DNA, 55 bp, Artificial
  Synthetic oligonucleotide
tgtaggtaaagctcttgttatcccatcatactcagttctcagacgtaggtggctg

SEQ ID NO: 473827 - DNA, 55 bp, Artificial
  Synthetic oligonucleotide
tgtaggtaacttcttcggtggaattggttcatgggctaagaacactatggatggt

SEQ ID NO: 473828 - DNA, 55 bp, Artificial
  Synthetic oligonucleotide
tgtaggtacatgtgtcgtgtgcaattcgcaaacatctttaaggtgtggcggttgc

SEQ ID NO: 473829 - DNA, 51 bp, Artificial
  Synthetic oligonucleotide
tgtaggtagtggcttgacatactgtataagtggtgacaatatagcatggcc

SEQ ID NO: 473830 - DNA, 56 bp, Artificial
  Synthetic oligonucleotide
tgtaggtattagttaagtattcttccacccagtacgaaacatcaggtacgccatag

SEQ ID NO: 473831 - DNA, 56 bp, Artificial
  Synthetic oligonucleotide
tgtaggtccgtggaatacggaaaatataacaccatgcttgtggatgaggtcactcg

SEQ ID NO: 473832 - DNA, 54 bp, Artificial
  Synthetic oligonucleotide
tgtaggttgagcttccattacagtacaactggacattacatctatatatcccat

SEQ ID NO: 473833 - DNA, 60 bp, Artificial
  Synthetic oligonucleotide
tgtaggttttacactgacatgttctgtgggcttaactgaatgtccaagctttatgacatc

SEQ ID NO: 473834 - DNA, 56 bp, Artificial
  Synthetic oligonucleotide
tgtagtaaatgattgggcgagtcaggttcaaaaacgtgacgaggaggttgaacggc

SEQ ID NO: 473835 - DNA, 58 bp, Artificial
  Synthetic oligonucleotide
tgtagtacggtctgttttccagggatctgggctagtagtagtgtcctccgacacagtc

SEQ ID NO: 473836 - DNA, 60 bp, Artificial
  Synthetic oligonucleotide
tgtagtattaataatcaggcaactatatcacaatgggagctcaagtctcatcgcaaaaag

SEQ ID NO: 473837 - DNA, 60 bp, Artificial
  Synthetic oligonucleotide
tgtagtcatatgcaatactcttgtgtaacgataaaacagcaatatgccttataaggagtg

SEQ ID NO: 473838 - DNA, 58 bp, Artificial
  Synthetic oligonucleotide
tgtagtccagggatatggcaattagattgtacacatttagaaggaaaagttatcctgg

SEQ ID NO: 473839 - DNA, 58 bp, Artificial
  Synthetic oligonucleotide
tgtagtccattgaacggtaggcttccaattaatcactggagcggtaaactcattcgac

SEQ ID NO: 473840 - DNA, 53 bp, Artificial
  Synthetic oligonucleotide
tgtagtccttacaagctcgttcaactggcccattgacattgttatgttcgata

SEQ ID NO: 473841 - DNA, 60 bp, Artificial
  Synthetic oligonucleotide
tgtagtctcagggcaaaacatgtctgcgatggccggtggaagattgccgtcattaatacg

SEQ ID NO: 473842 - DNA, 55 bp, Artificial
  Synthetic oligonucleotide
tgtagtctttaacgagagatggatgattcatggaggtatgccatcaggatccccg

SEQ ID NO: 473843 - DNA, 60 bp, Artificial
  Synthetic oligonucleotide
tgtagtgagattgttcgcactacaggcataattatactgattgtgtcttcgttgatagag

SEQ ID NO: 473844 - DNA, 60 bp, Artificial
  Synthetic oligonucleotide
tgtagtgcacgaggtctcctacatggatacctttctcgcactccacgcacttgcccccgt

SEQ ID NO: 473845 - DNA, 52 bp, Artificial
  Synthetic oligonucleotide
tgtagtgccaaacgatatgtttataagagagtcattagttgcatgccaacta

SEQ ID NO: 473846 - DNA, 60 bp, Artificial
  Synthetic oligonucleotide
tgtagtgctggtctagatgtgatgttattcatcattagaatccatctgtgcacttcatcc

SEQ ID NO: 473847 - DNA, 59 bp, Artificial
  Synthetic oligonucleotide
tgtagtggcagtaaccgattggtcagggtacagcggaagtttcgttcaacatcctgagc

SEQ ID NO: 473848 - DNA, 58 bp, Artificial
  Synthetic oligonucleotide
tgtagtgggatccagccggttctggcactgtttagccacaatgccgcagactggttcg

SEQ ID NO: 473849 - DNA, 60 bp, Artificial
  Synthetic oligonucleotide
tgtagtgtaactgccactataacaatgaaggcaggagtaatcgggggggaatcatgcttc

SEQ ID NO: 473850 - DNA, 60 bp, Artificial
  Synthetic oligonucleotide
tgtagtgtataatcatcaagaacaggccaagtatgagaatcatactgagaatgcgttgtt

SEQ ID NO: 473851 - DNA, 60 bp, Artificial
  Synthetic oligonucleotide
tgtagtgtcgagctgctacgtggagaccggcagaacaagttgcgtcggagctgtcacact

SEQ ID NO: 473852 - DNA, 57 bp, Artificial
  Synthetic oligonucleotide
tgtagtgtcgaggaaagttagcaatattaacgttccggaagagcgcgacatacttaa

SEQ ID NO: 473853 - DNA, 60 bp, Artificial
  Synthetic oligonucleotide
tgtagtgtcgtaggacatataagcccagctatacaatccgctttggcgaaacgctacact

SEQ ID NO: 473854 - DNA, 55 bp, Artificial
  Synthetic oligonucleotide
tgtagtgtgcctatgtggtgcagagtatcagctaacatcttcttgtgttgatgcc

SEQ ID NO: 473855 - DNA, 60 bp, Artificial
  Synthetic oligonucleotide
tgtagtgtgggggatcataagacctcttttgcctggacaagcctcagtggctatgcttca

SEQ ID NO: 473856 - DNA, 57 bp, Artificial
  Synthetic oligonucleotide
tgtagtgtgttttccttctattgtggaaataaccgcaatgatgcggacgttgttggt

SEQ ID NO: 473857 - DNA, 50 bp, Artificial
  Synthetic oligonucleotide
tgtagtgtttgtcacgtggtgtcatggcctagaactaactactttgcgct

SEQ ID NO: 473858 - DNA, 52 bp, Artificial
  Synthetic oligonucleotide
tgtagttaagcccacagaatcctctatcgtgcccctaaatgaaagtgggatt

SEQ ID NO: 473859 - DNA, 60 bp, Artificial
  Synthetic oligonucleotide
tgtagttacatatggggcacggactatagctatagggttgtcgtcaggtggtacgcctca

SEQ ID NO: 473860 - DNA, 55 bp, Artificial
  Synthetic oligonucleotide
tgtagttagcttgtcattaaatggcggcaatatcagtgtgactctaggtgttcca

SEQ ID NO: 473861 - DNA, 53 bp, Artificial
  Synthetic oligonucleotide
tgtagttatgtgttcgattcccggtcgaaaattccgatttgttgttacggtta

SEQ ID NO: 473862 - DNA, 60 bp, Artificial
  Synthetic oligonucleotide
tgtagttcattgagtaaccatttcaatgtatgtcctgcttcccttgtcctgtcacaattg

SEQ ID NO: 473863 - DNA, 53 bp, Artificial
  Synthetic oligonucleotide
tgtagttcgcggggtccttgatccagacggcgtagctgcccacgcagcacacg

SEQ ID NO: 473864 - DNA, 55 bp, Artificial
  Synthetic oligonucleotide
tgtagttcgcgtgctacgtgcacagcgaaatgtgaaccaccgaaagaccacgttg

SEQ ID NO: 473865 - DNA, 55 bp, Artificial
  Synthetic oligonucleotide
tgtagttgatataggtcctgtgtcccgtcctcctgtagttattgacccggtgggg

SEQ ID NO: 473866 - DNA, 50 bp, Artificial
  Synthetic oligonucleotide
tgtagttgtggagctaaggcttgcgatgatgaatcactgttggatcagtt

SEQ ID NO: 473867 - DNA, 53 bp, Artificial
  Synthetic oligonucleotide
tgtagttgtgtggttagaactctcaaggctaagaattctccaacatcacccta

SEQ ID NO: 473868 - DNA, 60 bp, Artificial
  Synthetic oligonucleotide
tgtagtttccacaccaccaccctcggcaatttcagatctactcaaatcagtggacaacca

SEQ ID NO: 473869 - DNA, 60 bp, Artificial
  Synthetic oligonucleotide
tgtataaaatagttaaagcgccaagcatatcttttaggcatattgttatgcaatcaaggg

SEQ ID NO: 473870 - DNA, 55 bp, Artificial
  Synthetic oligonucleotide
tgtataaacggttcatgctttactgtaatgactgatggcccaagcaatgagcaag

SEQ ID NO: 473871 - DNA, 55 bp, Artificial
  Synthetic oligonucleotide
tgtataaagcccataatgtcgtcagtagtgtactctgtaagctcattctcgttac

SEQ ID NO: 473872 - DNA, 60 bp, Artificial
  Synthetic oligonucleotide
tgtataaattcatgctgaatgaactatcagacagagagatctcatctttgatctttactg

SEQ ID NO: 473873 - DNA, 54 bp, Artificial
  Synthetic oligonucleotide
tgtataaattccaaaggttggatgttcataagggttaaggtcgatggggaagac

SEQ ID NO: 473874 - DNA, 60 bp, Artificial
  Synthetic oligonucleotide
tgtataacagcatcacagcacctgtctgggctggatttgatggagctactgttcagctgc

SEQ ID NO: 473875 - DNA, 55 bp, Artificial
  Synthetic oligonucleotide
tgtataacagccttggcctctatttgtcagatgttctgcttttggaggggagatc

SEQ ID NO: 473876 - DNA, 60 bp, Artificial
  Synthetic oligonucleotide
tgtataacatatttcgatctgattacaaacctgatgttcgtgcaaatctgtacttccaac

SEQ ID NO: 473877 - DNA, 59 bp, Artificial
  Synthetic oligonucleotide
tgtataagagtgtaagcttcgacgcttaccaggtacaggtctctgtttagccagtcttg

SEQ ID NO: 473878 - DNA, 54 bp, Artificial
  Synthetic oligonucleotide
tgtataagcggcgtaagcagacctacaaggtagtacctgttaggccccccgcct

SEQ ID NO: 473879 - DNA, 55 bp, Artificial
  Synthetic oligonucleotide
tgtataagtacaatgtactcgggaaattaaacccttgtgccgtgcctccaacaca

SEQ ID NO: 473880 - DNA, 58 bp, Artificial
  Synthetic oligonucleotide
tgtataagtggtgataatatagcatggccccttaaggtcaatttgactaggaatgcgc

SEQ ID NO: 473881 - DNA, 60 bp, Artificial
  Synthetic oligonucleotide
tgtataatagtaggtataatttgaggtactagaacaatggatcctcatggaaatccgatc

SEQ ID NO: 473882 - DNA, 60 bp, Artificial
  Synthetic oligonucleotide
tgtataattcgtatgctatattcaacagtgttccaattgttgaagtactcagcccagcac

SEQ ID NO: 473883 - DNA, 60 bp, Artificial
  Synthetic oligonucleotide
tgtatacaatgaatttgagaggaagatacgtagcgtgagcgctggacgcgcgctatatat

SEQ ID NO: 473884 - DNA, 60 bp, Artificial
  Synthetic oligonucleotide
tgtatacatcgaagtattgcatttgactcaagggacctgctgggaacaaatgtacactcc

SEQ ID NO: 473885 - DNA, 59 bp, Artificial
  Synthetic oligonucleotide
tgtatacattgatccgtgtataggaccggcaacagccaaccgtaaggtcgtgcgaacca

SEQ ID NO: 473886 - DNA, 57 bp, Artificial
  Synthetic oligonucleotide
tgtataccatggcacatagtagggcccgacgacgcaagcgtgcgtcagctacacagc

SEQ ID NO: 473887 - DNA, 60 bp, Artificial
  Synthetic oligonucleotide
tgtatacgccagcactttcaatagaggccgtctacggatgggcttctttccaaatgctac

SEQ ID NO: 473888 - DNA, 55 bp, Artificial
  Synthetic oligonucleotide
tgtatacggctgctacaggcattggggacatccttatatagattacaggaaaggt

SEQ ID NO: 473889 - DNA, 60 bp, Artificial
  Synthetic oligonucleotide
tgtatactacagggtccatacagtgagagctataagctacagctaatctacagagtccta

SEQ ID NO: 473890 - DNA, 54 bp, Artificial
  Synthetic oligonucleotide
tgtatactaggtatccgtcacgaagtcgaatcgttaaccctagaagaaggggaa

SEQ ID NO: 473891 - DNA, 59 bp, Artificial
  Synthetic oligonucleotide
tgtatactcaatagtcaaggttttataccgcctcaggactgggatgttcttactgatac

SEQ ID NO: 473892 - DNA, 59 bp, Artificial
  Synthetic oligonucleotide
tgtatactgatgattcgaatacgataataccatacagttatgctaaaccaccaaattat

SEQ ID NO: 473893 - DNA, 55 bp, Artificial
  Synthetic oligonucleotide
tgtatacttagttgataagtgcatgtcttgcaatgttccagcgagcgtgatgaat

SEQ ID NO: 473894 - DNA, 53 bp, Artificial
  Synthetic oligonucleotide
tgtatactttagtggagaagtcgagatgaccggttatgtagttatgagatcca

SEQ ID NO: 473895 - DNA, 60 bp, Artificial
  Synthetic oligonucleotide
tgtatagactgtttgagattggcgcttggccgactcattgtcttaccataggggaacgga

SEQ ID NO: 473896 - DNA, 60 bp, Artificial
  Synthetic oligonucleotide
tgtatagagtcgagttgagcgacacggctcactctgacacgccgatcttgtgtctctcgt

SEQ ID NO: 473897 - DNA, 57 bp, Artificial
  Synthetic oligonucleotide
tgtatagcttcgtcaccgactttgatgtcgttagttatacctcaacgtccgggacca

SEQ ID NO: 473898 - DNA, 55 bp, Artificial
  Synthetic oligonucleotide
tgtataggaagcccaggatctatcggacctataggtcccctgacgttcctaaagg

SEQ ID NO: 473899 - DNA, 60 bp, Artificial
  Synthetic oligonucleotide
tgtataggatcaaggacgtatcagatagaagatagtgggtcgaaatcatcgatttcgaag

SEQ ID NO: 473900 - DNA, 60 bp, Artificial
  Synthetic oligonucleotide
tgtataggctaccatgccaacaactcaaccgacactgttgacacagtacttgagaagaat

SEQ ID NO: 473901 - DNA, 60 bp, Artificial
  Synthetic oligonucleotide
tgtataggtacgtgtcgcagggagagcgcccatcagggacgttcgacaccgtcattctct

SEQ ID NO: 473902 - DNA, 60 bp, Artificial
  Synthetic oligonucleotide
tgtatagtagaaaaacgtttgagggattaatagatagacatgatatctctgcattagagt

SEQ ID NO: 473903 - DNA, 60 bp, Artificial
  Synthetic oligonucleotide
tgtatatcagatccttgctatttatagtacggtatcgagcagtctagttttggtgggact

SEQ ID NO: 473904 - DNA, 55 bp, Artificial
  Synthetic oligonucleotide
tgtatatccaatcagcgaagatacttacagatcaacactactactgcctcctcgt

SEQ ID NO: 473905 - DNA, 55 bp, Artificial
  Synthetic oligonucleotide
tgtatatccagatcccagcacaacattatcccaatcactcagtgtcgctcaggtt

SEQ ID NO: 473906 - DNA, 55 bp, Artificial
  Synthetic oligonucleotide
tgtatatcccagtaggacaggtcacagattacggcttcctgaacctgggtggaac

SEQ ID NO: 473907 - DNA, 60 bp, Artificial
  Synthetic oligonucleotide
tgtatatccgacagagtcaatgacctcggacgattttctgaggatcttgggattcaaggc

SEQ ID NO: 473908 - DNA, 60 bp, Artificial
  Synthetic oligonucleotide
tgtatatctcccagtacaggctgcgattcatcgagcgggtgaaggacgattcaagatcta

SEQ ID NO: 473909 - DNA, 59 bp, Artificial
  Synthetic oligonucleotide
tgtatatctggtgttccaggaagaggtttctccatctactactcggaaacatattcagg

SEQ ID NO: 473910 - DNA, 60 bp, Artificial
  Synthetic oligonucleotide
tgtatatggcatgtactcatgcatctaatcctgtgtacgctacattgaaaattcgtatat

SEQ ID NO: 473911 - DNA, 60 bp, Artificial
  Synthetic oligonucleotide
tgtatatggcatgtactcatgcctcaaaccctgtgtatgctactctgaaaatacggatct

SEQ ID NO: 473912 - DNA, 60 bp, Artificial
  Synthetic oligonucleotide
tgtatatggcgtgtacccacgcctctaaccctgtgtatgcgacattgaagatacggatat

SEQ ID NO: 473913 - DNA, 60 bp, Artificial
  Synthetic oligonucleotide
tgtatatgggtcgacctattgttaatgatgatgaacgtgttttgataggtcatattacta

SEQ ID NO: 473914 - DNA, 60 bp, Artificial
  Synthetic oligonucleotide
tgtatatgtatgcgcaagatcctgaaagaaatattgcgttcgatgtacccaggtgttctt

SEQ ID NO: 473915 - DNA, 60 bp, Artificial
  Synthetic oligonucleotide
tgtatatgttgatggacgtgcttacaagccaattagagttatggctgaatatgctatctt

SEQ ID NO: 473916 - DNA, 55 bp, Artificial
  Synthetic oligonucleotide
tgtatattaagtccgttcttcggtctattgatatattggaggaggaggcggtccc

SEQ ID NO: 473917 - DNA, 55 bp, Artificial
  Synthetic oligonucleotide
tgtatcaaatgatgtaagagaaacttatgcacgtatgaatgctaaagttaaagct

SEQ ID NO: 473918 - DNA, 60 bp, Artificial
  Synthetic oligonucleotide
tgtatcaacttcagagccttttttgacatcgacgctgtgtctatattatccagcagaagc

SEQ ID NO: 473919 - DNA, 60 bp, Artificial
  Synthetic oligonucleotide
tgtatcaagacatcggtcgttgtatgaagcttggagacattgatcaagtgcggaatgata

SEQ ID NO: 473920 - DNA, 50 bp, Artificial
  Synthetic oligonucleotide
tgtatcaatacactgtcagcgcttatgttggactccacggctccgaattt

SEQ ID NO: 473921 - DNA, 57 bp, Artificial
  Synthetic oligonucleotide
tgtatcacctggccaaaaggagaggggtgacgagaccctctcaagtgaccgaattgg

SEQ ID NO: 473922 - DNA, 60 bp, Artificial
  Synthetic oligonucleotide
tgtatcactgaactcattgcgatttagatttagactctctgtagaagaaccatcgttttc

SEQ ID NO: 473923 - DNA, 55 bp, Artificial
  Synthetic oligonucleotide
tgtatcagcccaagggatagcagacttggctctctctatggttagatggataccc

SEQ ID NO: 473924 - DNA, 56 bp, Artificial
  Synthetic oligonucleotide
tgtatcagctgacggaccttgcactgtctgcaaaagagttcggtatgtctcgcgtg

SEQ ID NO: 473925 - DNA, 52 bp, Artificial
  Synthetic oligonucleotide
tgtatcaggatgacccttacgctatggaagcacttcgagtcaagactggtcg

SEQ ID NO: 473926 - DNA, 58 bp, Artificial
  Synthetic oligonucleotide
tgtatcatcaacgaagaagttaagctttgttctgcgttttaatggcggactggtttca

SEQ ID NO: 473927 - DNA, 60 bp, Artificial
  Synthetic oligonucleotide
tgtatcatgagaaactgattaattcgttgtttggcccgatattcaaagagatcaatgaga

SEQ ID NO: 473928 - DNA, 55 bp, Artificial
  Synthetic oligonucleotide
tgtatccaacgatttattggacatttgaacttcattttacctttcacaaaaggaa

SEQ ID NO: 473929 - DNA, 57 bp, Artificial
  Synthetic oligonucleotide
tgtatccatggctcccctgtaaattcatataccaacaccccttacacaggtgctttg

SEQ ID NO: 473930 - DNA, 54 bp, Artificial
  Synthetic oligonucleotide
tgtatccctttttgagaggttccagcgttgtttacgcggtcgtgtaatagttcc

SEQ ID NO: 473931 - DNA, 55 bp, Artificial
  Synthetic oligonucleotide
tgtatccgccacaagcattggtcaatctttgagactgcgttcatgactcttgaac

SEQ ID NO: 473932 - DNA, 60 bp, Artificial
  Synthetic oligonucleotide
tgtatccgcgtcatctgtcgctggacttcctgtgtccggtccttcgcttagaattaaata

SEQ ID NO: 473933 - DNA, 54 bp, Artificial
  Synthetic oligonucleotide
tgtatccgtatgtaaaccctttaccgcacttgggctcgaccttattacaggtag

SEQ ID NO: 473934 - DNA, 57 bp, Artificial
  Synthetic oligonucleotide
tgtatccttttaggagtaaacgtggtcattatttcactccacgacgatattacacac

SEQ ID NO: 473935 - DNA, 59 bp, Artificial
  Synthetic oligonucleotide
tgtatcgcaccgccttacccacaagacgggctgcctaaacgtgcacttgaggccttggc

SEQ ID NO: 473936 - DNA, 60 bp, Artificial
  Synthetic oligonucleotide
tgtatcgcagttggcatggtcacactgtacctaggagtcatggttcaggcggactcggga

SEQ ID NO: 473937 - DNA, 55 bp, Artificial
  Synthetic oligonucleotide
tgtatcgcgagtacacgatgttaataagagatgaagttgttaagatgctcgaaga

SEQ ID NO: 473938 - DNA, 58 bp, Artificial
  Synthetic oligonucleotide
tgtatcggaaaccaagactatatagaatgtataggagccctgatgttcctaggggttg

SEQ ID NO: 473939 - DNA, 50 bp, Artificial
  Synthetic oligonucleotide
tgtatcggaacaagacatactgcgttcttggtgggatgccctcaggttgc

SEQ ID NO: 473940 - DNA, 60 bp, Artificial
  Synthetic oligonucleotide
tgtatcgggaagcattagagtctccagaacattgttccccacaccatacagcactcaggc

SEQ ID NO: 473941 - DNA, 55 bp, Artificial
  Synthetic oligonucleotide
tgtatcgtaataagacctattgcgtgcttggtgggatgccctcaggttgctcggg

SEQ ID NO: 473942 - DNA, 50 bp, Artificial
  Synthetic oligonucleotide
tgtatcgtacatggtacacagaggtctacctgttgcggactaagcattat

SEQ ID NO: 473943 - DNA, 57 bp, Artificial
  Synthetic oligonucleotide
tgtatcgtgactatatgagcgatccaaactcaccaatgttgaacgggaagagttctc

SEQ ID NO: 473944 - DNA, 60 bp, Artificial
  Synthetic oligonucleotide
tgtatcgttagcagactgctgacctcctctagcagatctgccgtcgatttgaaacactcc

SEQ ID NO: 473945 - DNA, 60 bp, Artificial
  Synthetic oligonucleotide
tgtatctaaaactacacagaacggaaattattcacagcatggtccattgttgtctactcc

SEQ ID NO: 473946 - DNA, 56 bp, Artificial
  Synthetic oligonucleotide
tgtatctaccccaccactggtcaggttaacatttaacctagtaggagatcctatac

SEQ ID NO: 473947 - DNA, 55 bp, Artificial
  Synthetic oligonucleotide
tgtatctactaagactagtcagacaagtgtggtccctaacatcggtagcaggccc

SEQ ID NO: 473948 - DNA, 60 bp, Artificial
  Synthetic oligonucleotide
tgtatctattacaacacacaacactacatccacatctatatttagaaatcctgcatttgc

SEQ ID NO: 473949 - DNA, 60 bp, Artificial
  Synthetic oligonucleotide
tgtatctcactgggccggtgggttgtgggcatccataggatctgggttgatgatcttggt

SEQ ID NO: 473950 - DNA, 55 bp, Artificial
  Synthetic oligonucleotide
tgtatctctgagtcgtcctctgattgacccattcctattgtgctcctggaagccc

SEQ ID NO: 473951 - DNA, 60 bp, Artificial
  Synthetic oligonucleotide
tgtatctgagacgcgagtaagcccttgagtcaaagacgtagtcgttgcaagtccgcacga

SEQ ID NO: 473952 - DNA, 57 bp, Artificial
  Synthetic oligonucleotide
tgtatgaaaacattaagatgtctgcccactccaccgtaggtttccgtaaaaatgctg

SEQ ID NO: 473953 - DNA, 55 bp, Artificial
  Synthetic oligonucleotide
tgtatgaagcttggagacattgatcaagtgcggaatgatatgaatcagacgacgg

SEQ ID NO: 473954 - DNA, 60 bp, Artificial
  Synthetic oligonucleotide
tgtatgaatggcctgaaacatagtatccccgggcatcttgctcatcagtcttgatgtagt

SEQ ID NO: 473955 - DNA, 60 bp, Artificial
  Synthetic oligonucleotide
tgtatgaatggggtgctatgggagcccttatatacctccaggggccatccgcaataatat

SEQ ID NO: 473956 - DNA, 60 bp, Artificial
  Synthetic oligonucleotide
tgtatgacaaagaagagatcaggaggatttggcgtcaagcgaacaatggagaagacgcaa

SEQ ID NO: 473957 - DNA, 60 bp, Artificial
  Synthetic oligonucleotide
tgtatgacaacgagccaagcacagcgactgtcaagaacgatcttagggatcggtatcagg

SEQ ID NO: 473958 - DNA, 60 bp, Artificial
  Synthetic oligonucleotide
tgtatgacacctctgtgcgatcagtctataccgtacagggcctcgagtacttggctgtca

SEQ ID NO: 473959 - DNA, 60 bp, Artificial
  Synthetic oligonucleotide
tgtatgacaggaaacgataatgatgcaagtgcccaggtaatatatgcagggagaatgaca

SEQ ID NO: 473960 - DNA, 60 bp, Artificial
  Synthetic oligonucleotide
tgtatgacgcatcagatttcagggtggtgaatcaagcattcacattgactaacagagtgt

SEQ ID NO: 473961 - DNA, 60 bp, Artificial
  Synthetic oligonucleotide
tgtatgacgtcgccatttctgatatggatcaaagcataggatctagtgttgcaaatatta

SEQ ID NO: 473962 - DNA, 59 bp, Artificial
  Synthetic oligonucleotide
tgtatgacgtcttcgtcgagtatttcttctgctattgaaccccagtaatgaaacttgaa

SEQ ID NO: 473963 - DNA, 56 bp, Artificial
  Synthetic oligonucleotide
tgtatgactataatttttctatctttcctcccaacaaaagaggaatttctcaccca

SEQ ID NO: 473964 - DNA, 60 bp, Artificial
  Synthetic oligonucleotide
tgtatgagaacatggatatgaggcaccccatcctgatgtagttctctgcaaaccctaatg

SEQ ID NO: 473965 - DNA, 59 bp, Artificial
  Synthetic oligonucleotide
tgtatgaggaaatatacaagaaatacgtacacaatgtcgcagaaaaggaaggtgaatct

SEQ ID NO: 473966 - DNA, 60 bp, Artificial
  Synthetic oligonucleotide
tgtatgagggcacattggattataccaacgcaagtggtaggagacatctgaggtatgacc

SEQ ID NO: 473967 - DNA, 55 bp, Artificial
  Synthetic oligonucleotide
tgtatgagttggaaaagctggagttctgtaatctacatccactgtatgatggctc

SEQ ID NO: 473968 - DNA, 60 bp, Artificial
  Synthetic oligonucleotide
tgtatgagtttcaatatcaatataccattgatgcttcaattatgggtaaggaaaaacgcc

SEQ ID NO: 473969 - DNA, 58 bp, Artificial
  Synthetic oligonucleotide
tgtatgataaaggcagttaggggtgatctgaatttcgtcaacagggcgaaccaacgat

SEQ ID NO: 473970 - DNA, 60 bp, Artificial
  Synthetic oligonucleotide
tgtatgattataaggagaaccgattcattgaaattggagtgacaaggagggaagtacaca

SEQ ID NO: 473971 - DNA, 53 bp, Artificial
  Synthetic oligonucleotide
tgtatgcactatctatcactgacactctttctgagtcatttccccataatatg

SEQ ID NO: 473972 - DNA, 60 bp, Artificial
  Synthetic oligonucleotide
tgtatgcacttttttatagacttgatgtagtaccacttaatggggaggagagcaactcta

SEQ ID NO: 473973 - DNA, 60 bp, Artificial
  Synthetic oligonucleotide
tgtatgcagttagacatgacattgtagatcagatgattaagcatgactggtctgataaca

SEQ ID NO: 473974 - DNA, 56 bp, Artificial
  Synthetic oligonucleotide
tgtatgcatgactaattgggcatccctcggagatgaaggccgtggtctagaagtac

SEQ ID NO: 473975 - DNA, 60 bp, Artificial
  Synthetic oligonucleotide
tgtatgccaatcccatcagtggactaattaactgtacatcaaagattacagggctgctat

SEQ ID NO: 473976 - DNA, 60 bp, Artificial
  Synthetic oligonucleotide
tgtatgcccctcccatcgaaggatggatcaattgtgcatcaaatattacagggctcttac

SEQ ID NO: 473977 - DNA, 60 bp, Artificial
  Synthetic oligonucleotide
tgtatgcccctcccattgcaggacaaatcagatgctcgtcaaatattacaggattattgt

SEQ ID NO: 473978 - DNA, 60 bp, Artificial
  Synthetic oligonucleotide
tgtatgccggactccagtgactaatgagctgccatagtatcagacccactgcctctgggt

SEQ ID NO: 473979 - DNA, 59 bp, Artificial
  Synthetic oligonucleotide
tgtatgcctaaaggttctttcaagtcaactatgattaaacttctcactggattggagat

SEQ ID NO: 473980 - DNA, 55 bp, Artificial
  Synthetic oligonucleotide
tgtatgcgcgcgggaaccgctggactttcgttcacccacctacagctggactcac

SEQ ID NO: 473981 - DNA, 51 bp, Artificial
  Synthetic oligonucleotide
tgtatgcggacttggatactgaagaatccaaaggtccaactgtagactggt

SEQ ID NO: 473982 - DNA, 55 bp, Artificial
  Synthetic oligonucleotide
tgtatgctgcatcacagaatggtccaatactcaaggtaaatgcatctgcccaagg

SEQ ID NO: 473983 - DNA, 60 bp, Artificial
  Synthetic oligonucleotide
tgtatgctgctattactaacaaagttaactttagcttctcttctgcatataggactttat

SEQ ID NO: 473984 - DNA, 60 bp, Artificial
  Synthetic oligonucleotide
tgtatgctgctgagctcggactacggaccttggaacaacttcttgtagaaggaaagctga

SEQ ID NO: 473985 - DNA, 60 bp, Artificial
  Synthetic oligonucleotide
tgtatgcttattggaaatgcaactgtcataccaagtccacaaacgctgttccattattat

SEQ ID NO: 473986 - DNA, 60 bp, Artificial
  Synthetic oligonucleotide
tgtatgcttattggaaatgcaactgttatacccagtccgcagacgttattccattattat

SEQ ID NO: 473987 - DNA, 58 bp, Artificial
  Synthetic oligonucleotide
tgtatggaattatatgcaagcttacagcgcaaactcgaacccgatttcacatgggatg

SEQ ID NO: 473988 - DNA, 59 bp, Artificial
  Synthetic oligonucleotide
tgtatggacatataacgctgagttactcattttgctcgagaacgaaagaaccctagatt

SEQ ID NO: 473989 - DNA, 60 bp, Artificial
  Synthetic oligonucleotide
tgtatggacatataatgctgagttgctcattctactcgagaacgaaaggactctagattt

SEQ ID NO: 473990 - DNA, 56 bp, Artificial
  Synthetic oligonucleotide
tgtatggacctgccgtagccagtgggtacgacttcgaaaaagagggatactctttg

SEQ ID NO: 473991 - DNA, 60 bp, Artificial
  Synthetic oligonucleotide
tgtatggagagcgtcttctacatcgtagactatgcgggtcaatagtctacgatcgcagcg

SEQ ID NO: 473992 - DNA, 59 bp, Artificial
  Synthetic oligonucleotide
tgtatggatggggcggacaattagtcgaacctccaggtcaggatttgagatactaagag

SEQ ID NO: 473993 - DNA, 60 bp, Artificial
  Synthetic oligonucleotide
tgtatggattagagactattcgtggtggaatgaacgaacttgaacgcatttctaatgcct

SEQ ID NO: 473994 - DNA, 60 bp, Artificial
  Synthetic oligonucleotide
tgtatggcactagtggctacagccctgctacacctgtggtgcgcttgcgctgtagttact

SEQ ID NO: 473995 - DNA, 55 bp, Artificial
  Synthetic oligonucleotide
tgtatggccaaagagtgccacacacaagaatgcgtgtcaacccacatggtgttgg

SEQ ID NO: 473996 - DNA, 57 bp, Artificial
  Synthetic oligonucleotide
tgtatgggtatttcgcccacgtgggtggtccctctaagacgtgcgcattctggaaac

SEQ ID NO: 473997 - DNA, 60 bp, Artificial
  Synthetic oligonucleotide
tgtatgggtctgttgtcacaaacgatatgggcacattgtgtgttcgtattgtgactgagc

SEQ ID NO: 473998 - DNA, 55 bp, Artificial
  Synthetic oligonucleotide
tgtatggtacagatggtcttgaagccttagatttaacaactagtgctggataccc

SEQ ID NO: 473999 - DNA, 55 bp, Artificial
  Synthetic oligonucleotide
tgtatggtagggtggggaaggtagccaattcctgcctattgggccgaccgtatca

SEQ ID NO: 474000 - DNA, 60 bp, Artificial
  Synthetic oligonucleotide
tgtatggtaggttccaacttccaaactaagagcattacgagtgtggtctctgagactagc

SEQ ID NO: 474001 - DNA, 59 bp, Artificial
  Synthetic oligonucleotide
tgtatggttgggaaggactgtatcaactagtggaagatcgggctttgaaatcatcaaag

SEQ ID NO: 474002 - DNA, 55 bp, Artificial
  Synthetic oligonucleotide
tgtatgtatgctgtagaaagaatagccaaagagcgctgcaaactaaacccagatg

SEQ ID NO: 474003 - DNA, 60 bp, Artificial
  Synthetic oligonucleotide
tgtatgtcaatggcttgcgaaatgagctggactatggttccgacaacctaccactaggca

SEQ ID NO: 474004 - DNA, 57 bp, Artificial
  Synthetic oligonucleotide
tgtatgtctggggagttcaccacccgagcacaaaccaagagcaaaccgacctatacg

SEQ ID NO: 474005 - DNA, 59 bp, Artificial
  Synthetic oligonucleotide
tgtatgtggctaaccttggtgttagtagctttcttctggagtgagggcttgaacattct

SEQ ID NO: 474006 - DNA, 60 bp, Artificial
  Synthetic oligonucleotide
tgtatgtggggggggttgagcacaggctcacggccgcgtgcaatttcactcgtggggatc

SEQ ID NO: 474007 - DNA, 60 bp, Artificial
  Synthetic oligonucleotide
tgtatgtggttgtgattattgatcgtgtcaaatttatgttctttcattaattagtgtatg

SEQ ID NO: 474008 - DNA, 55 bp, Artificial
  Synthetic oligonucleotide
tgtatgtgtcaatgcctaatgcccaatctagcatgaaggctgaagagatcacacc

SEQ ID NO: 474009 - DNA, 54 bp, Artificial
  Synthetic oligonucleotide
tgtatgtgttgagattaggtgattcggcttacataccaacgtgtattgctatca

SEQ ID NO: 474010 - DNA, 60 bp, Artificial
  Synthetic oligonucleotide
tgtatgttgcccaacatattatgttagatgcggcgacggggttaacgccatcacgatatg

SEQ ID NO: 474011 - DNA, 60 bp, Artificial
  Synthetic oligonucleotide
tgtatgttggtaattacagggtggtgaatcgacatctagccacacacagtgattggcaga

SEQ ID NO: 474012 - DNA, 54 bp, Artificial
  Synthetic oligonucleotide
tgtatgtttcaaggaaagctcaaggatggttgtatagacatcactatgactgcc

SEQ ID NO: 474013 - DNA, 55 bp, Artificial
  Synthetic oligonucleotide
tgtattaaaaacgaaaatagatagatcaactcaaataagtcccaatactttacca

SEQ ID NO: 474014 - DNA, 55 bp, Artificial
  Synthetic oligonucleotide
tgtattaatggtatggggagtacaccaccccgcaactctaaaggaacaccaagac

SEQ ID NO: 474015 - DNA, 52 bp, Artificial
  Synthetic oligonucleotide
tgtattaccactacctcggacgctctgggtacaccatacacgtacagtgcaa

SEQ ID NO: 474016 - DNA, 55 bp, Artificial
  Synthetic oligonucleotide
tgtattaccgctaagcaggcttttgttttctcgccaacttacaaggcctttctac

SEQ ID NO: 474017 - DNA, 55 bp, Artificial
  Synthetic oligonucleotide
tgtattactagcacggattgatactctctatcgtttaaagatcaaacaacccagc

SEQ ID NO: 474018 - DNA, 60 bp, Artificial
  Synthetic oligonucleotide
tgtattactagctaacatgatcgcaggcgcacaagaaaggatggaccctgtggtgttaga

SEQ ID NO: 474019 - DNA, 56 bp, Artificial
  Synthetic oligonucleotide
tgtattagctttgccgagggtttaccctaaggtaaatttagacaactatgtcatgc

SEQ ID NO: 474020 - DNA, 57 bp, Artificial
  Synthetic oligonucleotide
tgtattaggaggagtaatagattcaggttatagaggagatatctcagtcattatgat

SEQ ID NO: 474021 - DNA, 54 bp, Artificial
  Synthetic oligonucleotide
tgtattaggcgtaactgacatgtggacgcatatgatgggaaccgtaaaggttct

SEQ ID NO: 474022 - DNA, 58 bp, Artificial
  Synthetic oligonucleotide
tgtattattggactacgaagtaaactgggaagtaagaggactagtcatgcaaaatatg

SEQ ID NO: 474023 - DNA, 60 bp, Artificial
  Synthetic oligonucleotide
tgtattcaacagtctatatgcatctccgcaactcgaggggttttcagctgaatccagaaa

SEQ ID NO: 474024 - DNA, 52 bp, Artificial
  Synthetic oligonucleotide
tgtattcaactgggctggacatgtgaagacattcaaagcaggttggtgtttt

SEQ ID NO: 474025 - DNA, 60 bp, Artificial
  Synthetic oligonucleotide
tgtattcatcaagcaatagacgtggtcgtagctctacacaacgacggatttattcacggc

SEQ ID NO: 474026 - DNA, 60 bp, Artificial
  Synthetic oligonucleotide
tgtattcccatgtctcggcgcgtgcctactatcgaaaaacacagaacgcatgcgccaaga

SEQ ID NO: 474027 - DNA, 52 bp, Artificial
  Synthetic oligonucleotide
tgtattccggtaaggtttacggtctcttttataaaggtatcagcgttggtag

SEQ ID NO: 474028 - DNA, 60 bp, Artificial
  Synthetic oligonucleotide
tgtattcgatactcttactctagccgatgaccgcttaaaggatttctatgataatcccaa

SEQ ID NO: 474029 - DNA, 56 bp, Artificial
  Synthetic oligonucleotide
tgtattcgtgtcagtaaaatactgcctcttgtggtcattcaatgaataacagctta

SEQ ID NO: 474030 - DNA, 53 bp, Artificial
  Synthetic oligonucleotide
tgtattcgttacgtaggtaaggtcgttcactcctatgataaggccccgaccct

SEQ ID NO: 474031 - DNA, 55 bp, Artificial
  Synthetic oligonucleotide
tgtattctgtatacagacgttggtataagacgccgtataggagtccgtatggctc

SEQ ID NO: 474032 - DNA, 60 bp, Artificial
  Synthetic oligonucleotide
tgtattctgtcgtgtgtgatttcaaggatcagttactgcatgatgggaggtgcgagtttc

SEQ ID NO: 474033 - DNA, 60 bp, Artificial
  Synthetic oligonucleotide
tgtattgaacattatgcgtcaagcttacatcctccacatggtggagtttttcatacagaa

SEQ ID NO: 474034 - DNA, 60 bp, Artificial
  Synthetic oligonucleotide
tgtattgaatggttctcgcgtacacgtcttacatacggtctgtccgttgcgaaggtgaca

SEQ ID NO: 474035 - DNA, 56 bp, Artificial
  Synthetic oligonucleotide
tgtattgataaggaacttttacgtgtcgcacgggtatcctaaccctacaatgggca

SEQ ID NO: 474036 - DNA, 60 bp, Artificial
  Synthetic oligonucleotide
tgtattgccaaacaaagtgcgacggatcgtatccagtatttccgcattatataattgatg

SEQ ID NO: 474037 - DNA, 60 bp, Artificial
  Synthetic oligonucleotide
tgtattgccatgggtgatgactctgtcgaaggttacgttaccaacgccagagagaagtat

SEQ ID NO: 474038 - DNA, 60 bp, Artificial
  Synthetic oligonucleotide
tgtattgcctatcctaatcaacatttttgcagatgcgtgaaaaatggcgaaaagtgtagt

SEQ ID NO: 474039 - DNA, 60 bp, Artificial
  Synthetic oligonucleotide
tgtattgcctcaatcattgtggttatatcagcagttcacctgtatatacggatatgttat

SEQ ID NO: 474040 - DNA, 60 bp, Artificial
  Synthetic oligonucleotide
tgtattggacgcaaatgctaaaacattatgcggagcgatcgcaaagttgagttcgcaacc

SEQ ID NO: 474041 - DNA, 57 bp, Artificial
  Synthetic oligonucleotide
tgtattggaggtatacatattggttttgaacgtatcactgttcgtgaaagagcactc

SEQ ID NO: 474042 - DNA, 58 bp, Artificial
  Synthetic oligonucleotide
tgtattggagtcccatatatagagtcccctataaccctgacacgggtcctcagtataa

SEQ ID NO: 474043 - DNA, 60 bp, Artificial
  Synthetic oligonucleotide
tgtattggcccataactcagctatctccacatttattccagttatccatcttgggcaagt

SEQ ID NO: 474044 - DNA, 60 bp, Artificial
  Synthetic oligonucleotide
tgtattgggcgacttttatgggtggctaccttattgcgagatgctccggctctgcgaccg

SEQ ID NO: 474045 - DNA, 60 bp, Artificial
  Synthetic oligonucleotide
tgtattggggtcaggaactgaaacttagtgctattaatttgcttgatactacagcaatag

SEQ ID NO: 474046 - DNA, 55 bp, Artificial
  Synthetic oligonucleotide
tgtattggttcgcacccgtgggtgtagtatctagtatgtttatgcaatggcgtgg

SEQ ID NO: 474047 - DNA, 55 bp, Artificial
  Synthetic oligonucleotide
tgtattgtatcagaacggagtgatcaacggacctgcgtctacatacttgcgcgaa

SEQ ID NO: 474048 - DNA, 60 bp, Artificial
  Synthetic oligonucleotide
tgtattgtgattataacgtagtactaatgaaatatgacgcgacgttgcaattggatatgt

SEQ ID NO: 474049 - DNA, 59 bp, Artificial
  Synthetic oligonucleotide
tgtattgttagagcagctaaccaagaaagttgcagtttgcgaagttctacaagaccaac

SEQ ID NO: 474050 - DNA, 60 bp, Artificial
  Synthetic oligonucleotide
tgtattgttctggatgtggaagacatccactctaggtcagacagtgcatcttctaggctc

SEQ ID NO: 474051 - DNA, 60 bp, Artificial
  Synthetic oligonucleotide
tgtatttagcagtgacgaaatatcctttgctgggattgttacaaagctaccaacagccaa

SEQ ID NO: 474052 - DNA, 53 bp, Artificial
  Synthetic oligonucleotide
tgtatttagggcaagtaattgggaaagtgcttcttctttagagagagaacaat

SEQ ID NO: 474053 - DNA, 55 bp, Artificial
  Synthetic oligonucleotide
tgtatttcaatgagagataaggactcgccgttagcgtgtgaaacgaacgtcacgc

SEQ ID NO: 474054 - DNA, 57 bp, Artificial
  Synthetic oligonucleotide
tgtatttgaacccctagctaagttggtaactgtagaaccataacacattgccatgtc

SEQ ID NO: 474055 - DNA, 59 bp, Artificial
  Synthetic oligonucleotide
tgtatttgatcgtcatccttgtaattgtgaagtatacttgagtttagtcgtcttaaata

SEQ ID NO: 474056 - DNA, 60 bp, Artificial
  Synthetic oligonucleotide
tgtatttgccctcgaactggatgagcacgtgcagatgaggttccccattctcgtgaagct

SEQ ID NO: 474057 - DNA, 57 bp, Artificial
  Synthetic oligonucleotide
tgtatttggggggcttgggcattggtacaggaacccaaagcatatcaggacgcccca

SEQ ID NO: 474058 - DNA, 59 bp, Artificial
  Synthetic oligonucleotide
tgtatttgtcggaacattcctcggtccagattgagattggtcctagccatccaaatacc

SEQ ID NO: 474059 - DNA, 55 bp, Artificial
  Synthetic oligonucleotide
tgtattttcaagaagtaacacacggtgggacacgtctgcataaaggtcccaaaac

SEQ ID NO: 474060 - DNA, 53 bp, Artificial
  Synthetic oligonucleotide
tgtattttccaaattggctaaagagttagtgattggttccggtaccctaggtg

SEQ ID NO: 474061 - DNA, 60 bp, Artificial
  Synthetic oligonucleotide
tgtattttgcaagaatagagcatctttactctgctataagggttggaactgtagtgactg

SEQ ID NO: 474062 - DNA, 58 bp, Artificial
  Synthetic oligonucleotide
tgtattttggaggacctagtggatctttagtgtccagtgaccagcaaatctttaatag

SEQ ID NO: 474063 - DNA, 53 bp, Artificial
  Synthetic oligonucleotide
tgtcaaaaaagacctgatctcatatggaggaggttggaggcttcaaggatcct

SEQ ID NO: 474064 - DNA, 55 bp, Artificial
  Synthetic oligonucleotide
tgtcaaaagctggagaaacaatatattgaggacacaggaatctgagtgtgtctgc

SEQ ID NO: 474065 - DNA, 57 bp, Artificial
  Synthetic oligonucleotide
tgtcaaaataccaacacacaggcacataaaaggtggctcatgtccaaagccacaccg

SEQ ID NO: 474066 - DNA, 59 bp, Artificial
  Synthetic oligonucleotide
tgtcaaacaatacccagcgaaagatgccgtaactgaagtttgtctaaaagatgacgtca

SEQ ID NO: 474067 - DNA, 60 bp, Artificial
  Synthetic oligonucleotide
tgtcaaacagaatgagtgttccgttgcacatgtgagagaggtgcaatatgttgaccatga

SEQ ID NO: 474068 - DNA, 60 bp, Artificial
  Synthetic oligonucleotide
tgtcaaacattgtccctagacggattggactttagcattgtctctctaagcaacatcact

SEQ ID NO: 474069 - DNA, 60 bp, Artificial
  Synthetic oligonucleotide
tgtcaaacgacgattgggtcatgcgaataagcccaatgacgatcccaatatggtagccca

SEQ ID NO: 474070 - DNA, 60 bp, Artificial
  Synthetic oligonucleotide
tgtcaaacggttggggacatgacatggaggcatttgtcagaaatgctatttgcctcctgg

SEQ ID NO: 474071 - DNA, 59 bp, Artificial
  Synthetic oligonucleotide
tgtcaaagaattgtgggtctgttgggctttgcagctccctttacacaatgtggataccc

SEQ ID NO: 474072 - DNA, 60 bp, Artificial
  Synthetic oligonucleotide
tgtcaaagagggaatttcctgccttcattggatatgattcaataacaggtcaaagaacta

SEQ ID NO: 474073 - DNA, 60 bp, Artificial
  Synthetic oligonucleotide
tgtcaaaggtcaagcacttctgtttccccggtcaaagctgatatgctccaacagggcaaa

SEQ ID NO: 474074 - DNA, 54 bp, Artificial
  Synthetic oligonucleotide
tgtcaaagtctccctctttgtctctcccattgactcagctttctatggcctcag

SEQ ID NO: 474075 - DNA, 55 bp, Artificial
  Synthetic oligonucleotide
tgtcaaagttgtcggaccaagtctcgcagatacagaagttggtgagtacccttcc

SEQ ID NO: 474076 - DNA, 57 bp, Artificial
  Synthetic oligonucleotide
tgtcaacagtttaacacgtggtgagagaggacccactaaaccatgggttggttcatc

SEQ ID NO: 474077 - DNA, 60 bp, Artificial
  Synthetic oligonucleotide
tgtcaaccattgtatttggctcattcacttgccacctcgatgcagctatccaccaggata

SEQ ID NO: 474078 - DNA, 52 bp, Artificial
  Synthetic oligonucleotide
tgtcaacgaattggggggcttttgggttttgctgccccttttacacaatggg

SEQ ID NO: 474079 - DNA, 56 bp, Artificial
  Synthetic oligonucleotide
tgtcaacgacatacaaaagttagtgggaaaactaaattgggcaagccagatttatc

SEQ ID NO: 474080 - DNA, 58 bp, Artificial
  Synthetic oligonucleotide
tgtcaacggggttataaggggacatggaagggcgatggtgtctgccatactacgtgcc

SEQ ID NO: 474081 - DNA, 55 bp, Artificial
  Synthetic oligonucleotide
tgtcaacgtgggtacaggggagtctggcggggagacggcatgatgcacaccacct

SEQ ID NO: 474082 - DNA, 60 bp, Artificial
  Synthetic oligonucleotide
tgtcaacgttgtcgcacagatatgcttcatgaatgcctttataggcgaagactttttgtt

SEQ ID NO: 474083 - DNA, 60 bp, Artificial
  Synthetic oligonucleotide
tgtcaactccaaaccaaacactgtatgcaagacataatccaattccttctagcaggttag

SEQ ID NO: 474084 - DNA, 60 bp, Artificial
  Synthetic oligonucleotide
tgtcaactgctgatgtgatatatggaggagcacagtatctgaccaatcaggtgggagaca

SEQ ID NO: 474085 - DNA, 57 bp, Artificial
  Synthetic oligonucleotide
tgtcaacttacaaagggaaaagagactacttaagtgatctaggtctagtcggcaaca

SEQ ID NO: 474086 - DNA, 60 bp, Artificial
  Synthetic oligonucleotide
tgtcaagaacctgtatgataaagtcagaatgcagctgagagacaacgtcaaagaactagg

SEQ ID NO: 474087 - DNA, 53 bp, Artificial
  Synthetic oligonucleotide
tgtcaagaagtccaagaacagtactctggacctctccctgcacctagaggcta

SEQ ID NO: 474088 - DNA, 55 bp, Artificial
  Synthetic oligonucleotide
tgtcaagacaatgcagtcaagcaattgaagcaactggctcaacaagtcaaatcat

SEQ ID NO: 474089 - DNA, 60 bp, Artificial
  Synthetic oligonucleotide
tgtcaagacatacacgctcactggtgtatgccgctctgagctcaaagttggacgataagg

SEQ ID NO: 474090 - DNA, 59 bp, Artificial
  Synthetic oligonucleotide
tgtcaagacctccttccaaccggttcccatacactactgtgctccacccggctatgcta

SEQ ID NO: 474091 - DNA, 60 bp, Artificial
  Synthetic oligonucleotide
tgtcaagaggaagtcacatacttgggattcaagatccataagggatcacggaccctatca

SEQ ID NO: 474092 - DNA, 53 bp, Artificial
  Synthetic oligonucleotide
tgtcaagcacaagataatcatttgcttggcgtcttccatccaattgtcacccc

SEQ ID NO: 474093 - DNA, 58 bp, Artificial
  Synthetic oligonucleotide
tgtcaagcaggccccgaccggtcgttgtaatgatttcagggagaccaggcatagggaa

SEQ ID NO: 474094 - DNA, 54 bp, Artificial
  Synthetic oligonucleotide
tgtcaagctaaaacgactccgttttaagggtactgtgaagattgaacgtgttta

SEQ ID NO: 474095 - DNA, 60 bp, Artificial
  Synthetic oligonucleotide
tgtcaaggacttactgctccaagagttcaaattttgcttgacaaccacacacagcattgc

SEQ ID NO: 474096 - DNA, 58 bp, Artificial
  Synthetic oligonucleotide
tgtcaagggacactgcagaaatggaccgtgcggcagttaaggggattaggcttcattt

SEQ ID NO: 474097 - DNA, 57 bp, Artificial
  Synthetic oligonucleotide
tgtcaaggttaacaattatgttgtttacaatcaacaggaagcaggaaaatacgagaa

SEQ ID NO: 474098 - DNA, 53 bp, Artificial
  Synthetic oligonucleotide
tgtcaagtaatgacatgaccggtaggggttatattaagggaccgctttggggg

SEQ ID NO: 474099 - DNA, 59 bp, Artificial
  Synthetic oligonucleotide
tgtcaagtagtctgtgctctttcggacctccctagggcggtcatgttagtgccggatta

SEQ ID NO: 474100 - DNA, 60 bp, Artificial
  Synthetic oligonucleotide
tgtcaagtatgacacgcttctgtgtcgcaagaatggacacttgtccgcaaaaagatttta

SEQ ID NO: 474101 - DNA, 55 bp, Artificial
  Synthetic oligonucleotide
tgtcaagtatttgtgagtacgattgtgctctactattctccccacacgctatcgt

SEQ ID NO: 474102 - DNA, 56 bp, Artificial
  Synthetic oligonucleotide
tgtcaagtgcatggtaacgctcatgtggctagctgtgatgctatcatgactagatg

SEQ ID NO: 474103 - DNA, 60 bp, Artificial
  Synthetic oligonucleotide
tgtcaagttgtattggattaacaccccagcaccttcaactgtcttacatctggcacctat

SEQ ID NO: 474104 - DNA, 60 bp, Artificial
  Synthetic oligonucleotide
tgtcaatatgctaaaacgcggaatgccccgcggattgtccttgattggactgaagagggc

SEQ ID NO: 474105 - DNA, 60 bp, Artificial
  Synthetic oligonucleotide
tgtcaatattgagccactctccctccagagtatatggggggctgtcctagattacagata

SEQ ID NO: 474106 - DNA, 60 bp, Artificial
  Synthetic oligonucleotide
tgtcaatcgcacagccttgaactgcaatgcgagcctcgacaccggctggctagtggggct

SEQ ID NO: 474107 - DNA, 55 bp, Artificial
  Synthetic oligonucleotide
tgtcaatcggtatttacaccatattgccatcaatggaggtgcgataaacaccgac

SEQ ID NO: 474108 - DNA, 55 bp, Artificial
  Synthetic oligonucleotide
tgtcaatcgttctaccgaacggtcagacgttcagtgttaacaatctacgtgagtg

SEQ ID NO: 474109 - DNA, 60 bp, Artificial
  Synthetic oligonucleotide
tgtcaatgaacgaggatgggcccttcatcttcgcgaggcacgccaattttaggtaccaca

SEQ ID NO: 474110 - DNA, 60 bp, Artificial
  Synthetic oligonucleotide
tgtcaatgcagtgagggatactcagccgatgcgagacggagctctgcacttcaggtacga

SEQ ID NO: 474111 - DNA, 60 bp, Artificial
  Synthetic oligonucleotide
tgtcaatggaattcctgataagacatttgagatgctatgggatgcggtttgtaaatataa

SEQ ID NO: 474112 - DNA, 55 bp, Artificial
  Synthetic oligonucleotide
tgtcaatgtgttagaaggatttgacgcaatgctaagtggtgatgtgggcgcagca

SEQ ID NO: 474113 - DNA, 55 bp, Artificial
  Synthetic oligonucleotide
tgtcaatgttagtgaagtcaaatgatgtggtttaggttcgagtaatgataagccc

SEQ ID NO: 474114 - DNA, 60 bp, Artificial
  Synthetic oligonucleotide
tgtcaatgttgcgtccgctccagtatgccaagcgtgagcggttgttaggccagcgcaatt

SEQ ID NO: 474115 - DNA, 60 bp, Artificial
  Synthetic oligonucleotide
tgtcaattagcttgtagccatcaggtatgataagtggtagtcctggacacacaactccgg

SEQ ID NO: 474116 - DNA, 57 bp, Artificial
  Synthetic oligonucleotide
tgtcaattattcccctcgtggaggaagtgggccaagaaccaccaaggcctctgaatg

SEQ ID NO: 474117 - DNA, 60 bp, Artificial
  Synthetic oligonucleotide
tgtcaattcggtgatccaggggatataatgagcactccggtagggatgaagtgccctgaa

SEQ ID NO: 474118 - DNA, 55 bp, Artificial
  Synthetic oligonucleotide
tgtcacaaacccacaaatttcaagaaatgctgtccactaatttgtggaaaagccc

SEQ ID NO: 474119 - DNA, 60 bp, Artificial
  Synthetic oligonucleotide
tgtcacaacatccatcaacgacggaaccggtcgagttaccgctgcgacttattgtctaca

SEQ ID NO: 474120 - DNA, 54 bp, Artificial
  Synthetic oligonucleotide
tgtcacaacatgtttattacacgtgatgaggcaatccgtaacgtaagaggctgg

SEQ ID NO: 474121 - DNA, 54 bp, Artificial
  Synthetic oligonucleotide
tgtcacaagtaggccaaacctcacccaccccccccgattacccacttctgtggc

SEQ ID NO: 474122 - DNA, 55 bp, Artificial
  Synthetic oligonucleotide
tgtcacaatggagtgctctccaagaacgggcctcgacttcaatgagatggtgttg

SEQ ID NO: 474123 - DNA, 53 bp, Artificial
  Synthetic oligonucleotide
tgtcacaccagggtgccatggaataactcttgggctaatcatacccagccaga

SEQ ID NO: 474124 - DNA, 60 bp, Artificial
  Synthetic oligonucleotide
tgtcacacgaggaaccggactcacacatcgcgtcggaaagcgattttgtgtgaaatctgt

SEQ ID NO: 474125 - DNA, 59 bp, Artificial
  Synthetic oligonucleotide
tgtcacacggggagcagccattcgaatcggtgatggagtgtgtggacctcattgggcag

SEQ ID NO: 474126 - DNA, 60 bp, Artificial
  Synthetic oligonucleotide
tgtcacacgtgtgtatcacaaagctaaacacgtcaaagcctggtgccctagagctcctag

SEQ ID NO: 474127 - DNA, 60 bp, Artificial
  Synthetic oligonucleotide
tgtcacacttgtggagcaagattaagagtttgtgtagtagcttcatacactgcaattaga

SEQ ID NO: 474128 - DNA, 50 bp, Artificial
  Synthetic oligonucleotide
tgtcacagaccctacgcgtcctcagtaccacgggcacattcccctggggt

SEQ ID NO: 474129 - DNA, 60 bp, Artificial
  Synthetic oligonucleotide
tgtcacagcccaattgccatagaagcagtgcggagtgatgggcacgacggctacattagg

SEQ ID NO: 474130 - DNA, 60 bp, Artificial
  Synthetic oligonucleotide
tgtcacagcgaagtaatacggctggcgtgattcaatccgccacaagcggattttccaata

SEQ ID NO: 474131 - DNA, 57 bp, Artificial
  Synthetic oligonucleotide
tgtcacagggaaattaaaaaagggtcttaaagtgacactagcgaaggcgcatcatgg

SEQ ID NO: 474132 - DNA, 55 bp, Artificial
  Synthetic oligonucleotide
tgtcacagggccacctcaatgtgatcagtttctcgagttcacagccgatttgata

SEQ ID NO: 474133 - DNA, 56 bp, Artificial
  Synthetic oligonucleotide
tgtcacagtcagcttacatttggattccacgctctcaaagggataatctaacccct

SEQ ID NO: 474134 - DNA, 60 bp, Artificial
  Synthetic oligonucleotide
tgtcacagtcatggcttatgtgaatgaagatcttgttgtttcaactgcagctgctatggt

SEQ ID NO: 474135 - DNA, 60 bp, Artificial
  Synthetic oligonucleotide
tgtcacagtctcgcactcgcgagatactcacaaggaccactgtggatcatatggccataa

SEQ ID NO: 474136 - DNA, 51 bp, Artificial
  Synthetic oligonucleotide
tgtcacatacaacccaaactgtgacagagccataggcaaccgtgtatggtt

SEQ ID NO: 474137 - DNA, 52 bp, Artificial
  Synthetic oligonucleotide
tgtcacatctaggagtgtatctcaaagaaacgcttgtgcacgtggtcaaacg

SEQ ID NO: 474138 - DNA, 55 bp, Artificial
  Synthetic oligonucleotide
tgtcacattcctgtttgttcaagccagacactgggtcctgagctggataacattc

SEQ ID NO: 474139 - DNA, 60 bp, Artificial
  Synthetic oligonucleotide
tgtcacattgcggcatcaagaaagacggaatcttcatcccaaaactcgagccagagcgca

SEQ ID NO: 474140 - DNA, 52 bp, Artificial
  Synthetic oligonucleotide
tgtcaccaagcggctccctgtcaagtgttaagatcacacgcccaaaatactc

SEQ ID NO: 474141 - DNA, 60 bp, Artificial
  Synthetic oligonucleotide
tgtcaccaatccgagctctctcaaactctcgctatgttttggtgactggtgtacaatata

SEQ ID NO: 474142 - DNA, 55 bp, Artificial
  Synthetic oligonucleotide
tgtcaccacacgcataggaaataagatgcagaaagaatatgcacttttttataag

SEQ ID NO: 474143 - DNA, 60 bp, Artificial
  Synthetic oligonucleotide
tgtcaccagcaggagtcacgttgtcaacgcaatttactgattatgtatcacttaattcac

SEQ ID NO: 474144 - DNA, 60 bp, Artificial
  Synthetic oligonucleotide
tgtcacccacttcccggtcgaagagtgcaccacggcgcttgacgacttcagagaggagct

SEQ ID NO: 474145 - DNA, 60 bp, Artificial
  Synthetic oligonucleotide
tgtcacccgaagatcagaatgcgttgagaagagattttcctgggagagaactccagttca

SEQ ID NO: 474146 - DNA, 60 bp, Artificial
  Synthetic oligonucleotide
tgtcacccgtgcttagaaacgaccattcttgggtttgcagcgagatgccacgtgccagag

SEQ ID NO: 474147 - DNA, 58 bp, Artificial
  Synthetic oligonucleotide
tgtcacctaggactttgaatgcatgggtgaaagtaatagaagaaagggctttcagccc

SEQ ID NO: 474148 - DNA, 59 bp, Artificial
  Synthetic oligonucleotide
tgtcacctagtggtagatcgggctttgaagtcatcaaagttacagaggggtggatcaac

SEQ ID NO: 474149 - DNA, 60 bp, Artificial
  Synthetic oligonucleotide
tgtcacgaacgactgctccaactcaagcatagtatatgaagtggcggacatgatcatgca

SEQ ID NO: 474150 - DNA, 55 bp, Artificial
  Synthetic oligonucleotide
tgtcacgcaaggcaggatgttcagagtgggtctgctccgctcagcaagttgccgt

SEQ ID NO: 474151 - DNA, 52 bp, Artificial
  Synthetic oligonucleotide
tgtcacgccactttcactatgcgcctcctgtctcccgtaagagttcccaatt

SEQ ID NO: 474152 - DNA, 60 bp, Artificial
  Synthetic oligonucleotide
tgtcacgccgcctggttagcggatggtatcatcgatgctaacgcgcaggctgcttatgat

SEQ ID NO: 474153 - DNA, 60 bp, Artificial
  Synthetic oligonucleotide
tgtcacggggacgattctatcacaattccctatcagggatcagggaaaggtgtcagcttc

SEQ ID NO: 474154 - DNA, 57 bp, Artificial
  Synthetic oligonucleotide
tgtcacgtagagactaaccatggtacccaatttcactgatactcgatctgggaccac

SEQ ID NO: 474155 - DNA, 51 bp, Artificial
  Synthetic oligonucleotide
tgtcacgtattgcacacaacaacacataggttctactatgtaccccctggt

SEQ ID NO: 474156 - DNA, 54 bp, Artificial
  Synthetic oligonucleotide
tgtcactaccatggaactacatggtttagggacttttattagtcccttggttac

SEQ ID NO: 474157 - DNA, 60 bp, Artificial
  Synthetic oligonucleotide
tgtcactagctcctcaaggagtgcgtttgggcctgctgacgaacagcccgggccttccac

SEQ ID NO: 474158 - DNA, 57 bp, Artificial
  Synthetic oligonucleotide
tgtcactaggaatgtagcctccaaatttttgaatggctaccagcaccgaccttgttt

SEQ ID NO: 474159 - DNA, 55 bp, Artificial
  Synthetic oligonucleotide
tgtcactcacatttcgagtgctcgcgggatctcaaagctctatactcgctgtgca

SEQ ID NO: 474160 - DNA, 60 bp, Artificial
  Synthetic oligonucleotide
tgtcactcgggtactttgctagcgctcattgcgctggtgagaccgtcaggtaaggtagta

SEQ ID NO: 474161 - DNA, 60 bp, Artificial
  Synthetic oligonucleotide
tgtcactctacaaacaaatcctgcgaacatacaagcgagcatcacacatttaacgcacat

SEQ ID NO: 474162 - DNA, 60 bp, Artificial
  Synthetic oligonucleotide
tgtcactctgtggtaccagacaaattttgtggttccgtctggagcacctacatcagctag

SEQ ID NO: 474163 - DNA, 60 bp, Artificial
  Synthetic oligonucleotide
tgtcactgatttccttttactagatcaaagaattatatggcagaattggtatgcattcac

SEQ ID NO: 474164 - DNA, 50 bp, Artificial
  Synthetic oligonucleotide
tgtcactgcacttgatggtgacggcataaatcctgatattgtaccggttg

SEQ ID NO: 474165 - DNA, 55 bp, Artificial
  Synthetic oligonucleotide
tgtcactgctctaaagaccatgtctctgggcaacacagccctgatggaacccggg

SEQ ID NO: 474166 - DNA, 56 bp, Artificial
  Synthetic oligonucleotide
tgtcactggcctaataaggatacgttagccttgaccgttgttcgaacatacacgag

SEQ ID NO: 474167 - DNA, 60 bp, Artificial
  Synthetic oligonucleotide
tgtcactgggggtggtttgaaggatgttatcgaaactctctcgtccaccatccacagaga

SEQ ID NO: 474168 - DNA, 60 bp, Artificial
  Synthetic oligonucleotide
tgtcactgtaatagtccatagcaatgcttcccttagcattgggattgcaagaactaagta

SEQ ID NO: 474169 - DNA, 60 bp, Artificial
  Synthetic oligonucleotide
tgtcacttatatctggcatgtggctattgactgttataccaaatgacatgtttcttcgcg

SEQ ID NO: 474170 - DNA, 55 bp, Artificial
  Synthetic oligonucleotide
tgtcacttcatggaaaggacagtagaaaaggaaggtggctcctacaaagtccatc

SEQ ID NO: 474171 - DNA, 59 bp, Artificial
  Synthetic oligonucleotide
tgtcacttgggcactttcagtaggaattttcggacgatccatggatcgttggatttctc

SEQ ID NO: 474172 - DNA, 57 bp, Artificial
  Synthetic oligonucleotide
tgtcactttcagactactttagcgcagttagcgtaacttacggagatgaagcccgtt

SEQ ID NO: 474173 - DNA, 60 bp, Artificial
  Synthetic oligonucleotide
tgtcactttccatgataggttagtttctgagtacaaaatgtcagtggacatgccggtgct

SEQ ID NO: 474174 - DNA, 51 bp, Artificial
  Synthetic oligonucleotide
tgtcactttctatcgatttgtacaattcagtgtaacattcccccgtttcag

SEQ ID NO: 474175 - DNA, 55 bp, Artificial
  Synthetic oligonucleotide
tgtcacttttataccacctatggctgatttaccagataagggaaaaccttttgat

SEQ ID NO: 474176 - DNA, 60 bp, Artificial
  Synthetic oligonucleotide
tgtcagaaatacagaaggcctgcaggacttgtatgattacggtaattaccgatatcaagt

SEQ ID NO: 474177 - DNA, 59 bp, Artificial
  Synthetic oligonucleotide
tgtcagaaatgctatttgcctcctggaactccgtgaaagaagtatccctcaaagcggcc

SEQ ID NO: 474178 - DNA, 59 bp, Artificial
  Synthetic oligonucleotide
tgtcagacagaaaaaggtggcttaaatactacattgccattccacaatgtaagtaagta

SEQ ID NO: 474179 - DNA, 58 bp, Artificial
  Synthetic oligonucleotide
tgtcagaccacaccttggtgtgccactctgcggagagtgcagtctgcgacagtgcccc

SEQ ID NO: 474180 - DNA, 60 bp, Artificial
  Synthetic oligonucleotide
tgtcagacgatgacaggttttgacgtggagtatcaactgccggatgggacgaccaagaaa

SEQ ID NO: 474181 - DNA, 59 bp, Artificial
  Synthetic oligonucleotide
tgtcagagaattgtgggtctattaggctttgctgctccttttacgcaatgtggttaccc

SEQ ID NO: 474182 - DNA, 58 bp, Artificial
  Synthetic oligonucleotide
tgtcagagaattgtgggtcttttgggattcgctgctccctttacacagtgtgggtacc

SEQ ID NO: 474183 - DNA, 60 bp, Artificial
  Synthetic oligonucleotide
tgtcagaggtgatggattttgtctgtatcactccatactatatagtttgggcttgagcaa

SEQ ID NO: 474184 - DNA, 60 bp, Artificial
  Synthetic oligonucleotide
tgtcagagtgtacatgcgcctgaaacacgtgcgcgcatgggtaccgagacctatccgatc

SEQ ID NO: 474185 - DNA, 60 bp, Artificial
  Synthetic oligonucleotide
tgtcagatacaagaattatgcttcagccattgatataaatgctgaaggggtttgtgcagg

SEQ ID NO: 474186 - DNA, 60 bp, Artificial
  Synthetic oligonucleotide
tgtcagatctacggggccacttactccattgaaccacttgacctacctcaaatcattcaa

SEQ ID NO: 474187 - DNA, 60 bp, Artificial
  Synthetic oligonucleotide
tgtcagattcagggaggataagttacactgtggagtttagtttgcctacgcatcataccg

SEQ ID NO: 474188 - DNA, 55 bp, Artificial
  Synthetic oligonucleotide
tgtcagattccaatggtaatatgtttgatgcgtcccgtcagttggttgtaatggc

SEQ ID NO: 474189 - DNA, 60 bp, Artificial
  Synthetic oligonucleotide
tgtcagcaaataatgggaaagttgcaaccagctctccagacaggaacagaggagattaaa

SEQ ID NO: 474190 - DNA, 59 bp, Artificial
  Synthetic oligonucleotide
tgtcagcaaatatgcatttgggaactgccccaaatacgttggagttaagagtctcaaac

SEQ ID NO: 474191 - DNA, 60 bp, Artificial
  Synthetic oligonucleotide
tgtcagcaacaggcaaaagcggccgagggaaaggtcagtcaaaattatcctatagtgcaa

SEQ ID NO: 474192 - DNA, 51 bp, Artificial
  Synthetic oligonucleotide
tgtcagcaatcccctgggattcttccccgagcaccagttggacccgttgtt

SEQ ID NO: 474193 - DNA, 60 bp, Artificial
  Synthetic oligonucleotide
tgtcagcactagttatagtagtgaggaatcaccaggacttggtcacagtcggagcaactt

SEQ ID NO: 474194 - DNA, 60 bp, Artificial
  Synthetic oligonucleotide
tgtcagcactggaggataaactcgcagatttcaaacgaagaatggcagatgctgtgtccc

SEQ ID NO: 474195 - DNA, 60 bp, Artificial
  Synthetic oligonucleotide
tgtcagcagacccactagcatctctgttggagatgtgccacagcacacagataggcggga

SEQ ID NO: 474196 - DNA, 59 bp, Artificial
  Synthetic oligonucleotide
tgtcagcagatccattggcttcgctcctggagatgtgccacagcacacaaattggcggg

SEQ ID NO: 474197 - DNA, 60 bp, Artificial
  Synthetic oligonucleotide
tgtcagcagccataaaagacaacagagccgtccacgccgatatgggttattggatagaaa

SEQ ID NO: 474198 - DNA, 60 bp, Artificial
  Synthetic oligonucleotide
tgtcagccgctggatatgttgaacaatctgagtataggaatatgtcacggcgacataagg

SEQ ID NO: 474199 - DNA, 55 bp, Artificial
  Synthetic oligonucleotide
tgtcagcgaggttgttgatggttcggtaagtcgttgtcgtttgagaggacgctcc

SEQ ID NO: 474200 - DNA, 59 bp, Artificial
  Synthetic oligonucleotide
tgtcagcggcgaaggggcaaacattaacacaagaggctaatgacttttcggccctcatc

SEQ ID NO: 474201 - DNA, 55 bp, Artificial
  Synthetic oligonucleotide
tgtcagctcaattcggagctttatgacatgtcgggttcgagagcggagtaccttc

SEQ ID NO: 474202 - DNA, 60 bp, Artificial
  Synthetic oligonucleotide
tgtcagctgctttagttccttcgcttggttctaaatatttgagagttattgattcgaata

SEQ ID NO: 474203 - DNA, 60 bp, Artificial
  Synthetic oligonucleotide
tgtcagcttccagctcgtcaagctgggtgtctggaaatccccaaccgacatgcaatcctg

SEQ ID NO: 474204 - DNA, 60 bp, Artificial
  Synthetic oligonucleotide
tgtcagcttgcaatgatttcagtgtacgcttgttgcgagacacaacacacattagccaaa

SEQ ID NO: 474205 - DNA, 55 bp, Artificial
  Synthetic oligonucleotide
tgtcaggcactctggaaaccgtatagtcaccgttgaagaagaaacagcatgcctc

SEQ ID NO: 474206 - DNA, 60 bp, Artificial
  Synthetic oligonucleotide
tgtcaggccaggaggagagaattggatttgggagaaccaactagaagtgagagaggaatg

SEQ ID NO: 474207 - DNA, 60 bp, Artificial
  Synthetic oligonucleotide
tgtcaggcgcattacaagaagatggtcatttatcagctagtgttacattaattgaagcaa

SEQ ID NO: 474208 - DNA, 60 bp, Artificial
  Synthetic oligonucleotide
tgtcagggcaggtactatgggagacgctattccagatcctttcaacaataccagtgacta

SEQ ID NO: 474209 - DNA, 60 bp, Artificial
  Synthetic oligonucleotide
tgtcagggcttagagcctgaagccaagtgagctatggccaaggagatcccaaccccttat

SEQ ID NO: 474210 - DNA, 60 bp, Artificial
  Synthetic oligonucleotide
tgtcagggtatacagagctgccaccactacccttacaagaggctgaacagttagtccctg

SEQ ID NO: 474211 - DNA, 60 bp, Artificial
  Synthetic oligonucleotide
tgtcaggtcaaattcaacaattgctagaggtggcaacagcaatacaggcttccttgacac

SEQ ID NO: 474212 - DNA, 55 bp, Artificial
  Synthetic oligonucleotide
tgtcaggtgaaggacgtggctaaattttgaccatgctgctgggtctatttgcgtc

SEQ ID NO: 474213 - DNA, 55 bp, Artificial
  Synthetic oligonucleotide
tgtcaggtgaatgtgctatgtcagctcctcataatcagggttcatctaatgctaa

SEQ ID NO: 474214 - DNA, 60 bp, Artificial
  Synthetic oligonucleotide
tgtcaggttcttaagaggttcactgctagtttgagtggtggtcaatatgcgtccaaagag

SEQ ID NO: 474215 - DNA, 60 bp, Artificial
  Synthetic oligonucleotide
tgtcagtccatgacgtgcacgacatgctcgcaggtcatcccgtggtgtcaatcaccggca

SEQ ID NO: 474216 - DNA, 60 bp, Artificial
  Synthetic oligonucleotide
tgtcagtgaattaaatacaattctgagattatatgaggtcggtaaatcgacacctgaaaa

SEQ ID NO: 474217 - DNA, 58 bp, Artificial
  Synthetic oligonucleotide
tgtcagtgatgacgtcagacttaacagggttggtccaattggaaagacctctccttaa

SEQ ID NO: 474218 - DNA, 57 bp, Artificial
  Synthetic oligonucleotide
tgtcagtgcaccaattctgaatgcatgtacactatggtaaaaaccctgtgtggtctc

SEQ ID NO: 474219 - DNA, 55 bp, Artificial
  Synthetic oligonucleotide
tgtcagtgcggccctgtttcgttgggtcatggactacatagccaactgcaatatg

SEQ ID NO: 474220 - DNA, 60 bp, Artificial
  Synthetic oligonucleotide
tgtcagtgctcttggcgctctgtatgttcggatggtaccgatctatgtcaaagtacctct

SEQ ID NO: 474221 - DNA, 52 bp, Artificial
  Synthetic oligonucleotide
tgtcagtgtctccgtatacagatttaaggggtctatccttcagtggtattcc

SEQ ID NO: 474222 - DNA, 56 bp, Artificial
  Synthetic oligonucleotide
tgtcagttctaaacacacaaaattgaaacttcactctataatagtaaagccgttaa

SEQ ID NO: 474223 - DNA, 60 bp, Artificial
  Synthetic oligonucleotide
tgtcagttggatcaacaacattagctggaattataaatctaagtagcacacccactgcac

SEQ ID NO: 474224 - DNA, 50 bp, Artificial
  Synthetic oligonucleotide
tgtcagttgtagtgcaagaagatcccaaatactacaaaagggctccccga

SEQ ID NO: 474225 - DNA, 55 bp, Artificial
  Synthetic oligonucleotide
tgtcataaaccaacaaattttaagagatgctgccctctaatttgtggcaaagcct

SEQ ID NO: 474226 - DNA, 59 bp, Artificial
  Synthetic oligonucleotide
tgtcataacagacggcacttgactaaagtcggaaggcttgtaatatgacgtgtaaactg

SEQ ID NO: 474227 - DNA, 60 bp, Artificial
  Synthetic oligonucleotide
tgtcataagagagccattcatctcatgctcccacttggaatgcagaactttcttcttgac

SEQ ID NO: 474228 - DNA, 55 bp, Artificial
  Synthetic oligonucleotide
tgtcataagcccacgcctcatatttagtcaggtcgatgaaacccattcgtcgacc

SEQ ID NO: 474229 - DNA, 60 bp, Artificial
  Synthetic oligonucleotide
tgtcataagggaaccattcatatcatgctcccccttggaatgcagaaccttcttcttaac

SEQ ID NO: 474230 - DNA, 60 bp, Artificial
  Synthetic oligonucleotide
tgtcatacacattatggtcattcatttattatcaaagagtagatgatacttggaacaaag

SEQ ID NO: 474231 - DNA, 55 bp, Artificial
  Synthetic oligonucleotide
tgtcatacgattaccagctggcaaacatgataaacttacttatagtgaggtgaga

SEQ ID NO: 474232 - DNA, 60 bp, Artificial
  Synthetic oligonucleotide
tgtcatagactattacgtggtcatcattcgtccattagatcttattaatacgagcaacgc

SEQ ID NO: 474233 - DNA, 58 bp, Artificial
  Synthetic oligonucleotide
tgtcatagcgtcgtcatttgaattaaacgcacgtgtgttacgtttttcattcacgtaa

SEQ ID NO: 474234 - DNA, 60 bp, Artificial
  Synthetic oligonucleotide
tgtcatagtcacaagggagccctatgttagctgcgataatgacaattgctggtcctttgc

SEQ ID NO: 474235 - DNA, 52 bp, Artificial
  Synthetic oligonucleotide
tgtcatatcagcttgcatccgttggctccacaccccgacggaggatgattgc

SEQ ID NO: 474236 - DNA, 55 bp, Artificial
  Synthetic oligonucleotide
tgtcatattaggtgatgaccaactttagttttgcacgtggcgcgttttacaatgt

SEQ ID NO: 474237 - DNA, 59 bp, Artificial
  Synthetic oligonucleotide
tgtcatattattgcaaactcttgggttgagaatggttacaattactattaacacattct

SEQ ID NO: 474238 - DNA, 60 bp, Artificial
  Synthetic oligonucleotide
tgtcatcactgcaatgactacatttgggactggactttgcaagtttcaaagttcttcgat

SEQ ID NO: 474239 - DNA, 59 bp, Artificial
  Synthetic oligonucleotide
tgtcatccacatctccgggtttgctggctgcggcaaaacccacccaatccaacacctac

SEQ ID NO: 474240 - DNA, 59 bp, Artificial
  Synthetic oligonucleotide
tgtcatccaccaccgctcagggttgtgacacaattgcccgctgcgattgtcaaacaggg

SEQ ID NO: 474241 - DNA, 60 bp, Artificial
  Synthetic oligonucleotide
tgtcatccactaccgcccagggttgtgacacaattgcccgctgtaattgccagacagggg

SEQ ID NO: 474242 - DNA, 60 bp, Artificial
  Synthetic oligonucleotide
tgtcatcctggcattttataatagtggctctctagagtacttgatgaaccattacatcag

SEQ ID NO: 474243 - DNA, 60 bp, Artificial
  Synthetic oligonucleotide
tgtcatctaaaggaattgatcagaaaatgagagtacttaatgcatgtttcagtgttaaaa

SEQ ID NO: 474244 - DNA, 55 bp, Artificial
  Synthetic oligonucleotide
tgtcatctctccctggatttccgctcttcagaccgtaggtcgagatcagacggtt

SEQ ID NO: 474245 - DNA, 59 bp, Artificial
  Synthetic oligonucleotide
tgtcatcttctacacttttgggtcatatgcgtgctttgtgtcccccgcccgcgtgccct

SEQ ID NO: 474246 - DNA, 59 bp, Artificial
  Synthetic oligonucleotide
tgtcatgaatctccactattaccgtcccagttgcgttaactggaacctgttgcctatat

SEQ ID NO: 474247 - DNA, 55 bp, Artificial
  Synthetic oligonucleotide
tgtcatgatggcatcagttggttgacaattggaatttctggtcccgacaatgggg

SEQ ID NO: 474248 - DNA, 60 bp, Artificial
  Synthetic oligonucleotide
tgtcatgcacatgactacttaaaggttgtcggtcagtgcctgcgtgcatctcaagcaacc

SEQ ID NO: 474249 - DNA, 60 bp, Artificial
  Synthetic oligonucleotide
tgtcatgccacattcactatgaggctgctatcgccagttagagtaccaaattacaacctg

SEQ ID NO: 474250 - DNA, 55 bp, Artificial
  Synthetic oligonucleotide
tgtcatgcgattccccaagtaatgtcaatggaggacccggagtcaaagggttcgg

SEQ ID NO: 474251 - DNA, 53 bp, Artificial
  Synthetic oligonucleotide
tgtcatggcagcgttcactggaaatacggagggaagaacctcagacatgaggg

SEQ ID NO: 474252 - DNA, 60 bp, Artificial
  Synthetic oligonucleotide
tgtcatgggcacttaagtgggagtacgtagtacttgccttcctgctactcgcagacgctc

SEQ ID NO: 474253 - DNA, 60 bp, Artificial
  Synthetic oligonucleotide
tgtcatgtgtcagatttttacatagaactattctgccaggttctattgcaaactcaatat

SEQ ID NO: 474254 - DNA, 51 bp, Artificial
  Synthetic oligonucleotide
tgtcatgtgttgatcttgttatggacaatcacaatgtttcattgtctgaat

SEQ ID NO: 474255 - DNA, 52 bp, Artificial
  Synthetic oligonucleotide
tgtcatgttacgtagtgtacggtaaccaacataatcgccagtaccttcccac

SEQ ID NO: 474256 - DNA, 57 bp, Artificial
  Synthetic oligonucleotide
tgtcatgttgcaattgactttaacatcactacttgtgtgggtgtagactgatatatg

SEQ ID NO: 474257 - DNA, 60 bp, Artificial
  Synthetic oligonucleotide
tgtcatgttttacttcatagtaagaacttacaacaagcaactggtaaatggctacgcaga

SEQ ID NO: 474258 - DNA, 59 bp, Artificial
  Synthetic oligonucleotide
tgtcatgtttttaactgattacttggccgagcgacgcggggagcattggaacgtaagca

SEQ ID NO: 474259 - DNA, 52 bp, Artificial
  Synthetic oligonucleotide
tgtcattacggtgtactttccaattttccggacccccttggtcgtggaccaa

SEQ ID NO: 474260 - DNA, 60 bp, Artificial
  Synthetic oligonucleotide
tgtcattcgcaaatccactatggcaaccttcgctactgtcaattatgcaacaattgtaca

SEQ ID NO: 474261 - DNA, 57 bp, Artificial
  Synthetic oligonucleotide
tgtcattctgagcaagacaatggttggaaatactgtgctcagggaggatttgctcgc

SEQ ID NO: 474262 - DNA, 60 bp, Artificial
  Synthetic oligonucleotide
tgtcattgcattcagcaggtgtaactttatcaacgcagttcacagatttcgtatcattaa

SEQ ID NO: 474263 - DNA, 53 bp, Artificial
  Synthetic oligonucleotide
tgtcattggatgtaagcaaggtgccattgttggcacgctttacccaatgtggg

SEQ ID NO: 474264 - DNA, 50 bp, Artificial
  Synthetic oligonucleotide
tgtcattgttgcccactctgacctacttttgacttcaacctctagtttgg

SEQ ID NO: 474265 - DNA, 60 bp, Artificial
  Synthetic oligonucleotide
tgtcattgttgttccgattcctggggattcctcaatcaccacaagatcccgcctcctaga

SEQ ID NO: 474266 - DNA, 60 bp, Artificial
  Synthetic oligonucleotide
tgtccaaaagatcgcgatcgttaaattctgctgcattctattatagagtttaggtatagc

SEQ ID NO: 474267 - DNA, 60 bp, Artificial
  Synthetic oligonucleotide
tgtccaaaaggtcaagatcactagattcagcgtcattttattacagagtttagatatcaa

SEQ ID NO: 474268 - DNA, 59 bp, Artificial
  Synthetic oligonucleotide
tgtccaaacgctcaagatcactagattcggctgctttctactatagaatttagatatag

SEQ ID NO: 474269 - DNA, 58 bp, Artificial
  Synthetic oligonucleotide
tgtccaaagcccacgggatcaaccctaacatcagaaccggagtgcggactgtgaccac

SEQ ID NO: 474270 - DNA, 59 bp, Artificial
  Synthetic oligonucleotide
tgtccaaaggtcacttttgacccaattcctatacattattgtgctccagcgggttatgc

SEQ ID NO: 474271 - DNA, 58 bp, Artificial
  Synthetic oligonucleotide
tgtccaaattacccagaggcatttcgcttacgtgtgtgcacggtcccctgattggaac

SEQ ID NO: 474272 - DNA, 59 bp, Artificial
  Synthetic oligonucleotide
tgtccaacaaacaagagtggacaaactgactcaaggtcgccagacctacgactggacat

SEQ ID NO: 474273 - DNA, 51 bp, Artificial
  Synthetic oligonucleotide
tgtccaacaacggtaattcttggtaccgattgaaacaatctgatgggaaat

SEQ ID NO: 474274 - DNA, 58 bp, Artificial
  Synthetic oligonucleotide
tgtccaacacaaccttaaattccgttgcgagcttgactcagaggctcaaacaggtaac

SEQ ID NO: 474275 - DNA, 60 bp, Artificial
  Synthetic oligonucleotide
tgtccaactctgaatcagtatctgtgtgggctagcccaattgtactctttgaagcccacg

SEQ ID NO: 474276 - DNA, 60 bp, Artificial
  Synthetic oligonucleotide
tgtccaagagatcacggtcattgaattcagcggctttttactatagagtctgatatatct

SEQ ID NO: 474277 - DNA, 55 bp, Artificial
  Synthetic oligonucleotide
tgtccaagcgtccagcagatatgatcatttccgggcccgtctcgaagtatcgccg

SEQ ID NO: 474278 - DNA, 60 bp, Artificial
  Synthetic oligonucleotide
tgtccaaggaccagattaaaatgctcctggatcagattatcaagatggctaaggctgaga

SEQ ID NO: 474279 - DNA, 60 bp, Artificial
  Synthetic oligonucleotide
tgtccaatacatgataaactgctcttattacattataaattccaactacacccagcatat

SEQ ID NO: 474280 - DNA, 57 bp, Artificial
  Synthetic oligonucleotide
tgtccaatagcactcaagagtttatttggtctcatcgcacaacatgcatggaaaggc

SEQ ID NO: 474281 - DNA, 55 bp, Artificial
  Synthetic oligonucleotide
tgtccaatcagttccctctccttgaccagcctttctcattggccgcccaaccttc

SEQ ID NO: 474282 - DNA, 58 bp, Artificial
  Synthetic oligonucleotide
tgtccaatcattaggaccaacattatccccagatgcaactatctttttcccacaaaac

SEQ ID NO: 474283 - DNA, 53 bp, Artificial
  Synthetic oligonucleotide
tgtccaatggcaatgcaggcatgttcatggctcgccaatatatgggataaggt

SEQ ID NO: 474284 - DNA, 60 bp, Artificial
  Synthetic oligonucleotide
tgtccaatttctgagaggagtgtctttgtacataagattaatatgctccttgcgggttac

SEQ ID NO: 474285 - DNA, 54 bp, Artificial
  Synthetic oligonucleotide
tgtccacaaaaccatcgaaaccttccttctcttcaaccactggagccacctcgc

SEQ ID NO: 474286 - DNA, 57 bp, Artificial
  Synthetic oligonucleotide
tgtccaccaaccgtcgtaatttcgtgcgatattctacgtttaaaagatcacattctg

SEQ ID NO: 474287 - DNA, 58 bp, Artificial
  Synthetic oligonucleotide
tgtccaccaatcttggtggacctgttgttggaggtgtaagtgccagggtctctgacgg

SEQ ID NO: 474288 - DNA, 60 bp, Artificial
  Synthetic oligonucleotide
tgtccaccctatctacctaggttcgatgcactatgatatcacttacgagacgttaaagtc

SEQ ID NO: 474289 - DNA, 57 bp, Artificial
  Synthetic oligonucleotide
tgtccaccgctagtaccaatcccttcgtctaacatgaacgccgaccgcaccttatcc

SEQ ID NO: 474290 - DNA, 60 bp, Artificial
  Synthetic oligonucleotide
tgtccacgcttggctagttagagagggacgcgaacgcctctcaagaatggcaatcagtgg

SEQ ID NO: 474291 - DNA, 55 bp, Artificial
  Synthetic oligonucleotide
tgtccactataaccgtgtacaagtatggtgaggagtacatcagggtggtgtctat

SEQ ID NO: 474292 - DNA, 58 bp, Artificial
  Synthetic oligonucleotide
tgtccactcaaacaactacaccaatacaatacttgaagttggcccagtaacaatggcg

SEQ ID NO: 474293 - DNA, 56 bp, Artificial
  Synthetic oligonucleotide
tgtccactggtggtagtgggcttgttggcttcgcagacgttagggacctcttttgg

SEQ ID NO: 474294 - DNA, 55 bp, Artificial
  Synthetic oligonucleotide
tgtccacttaatacacaaactctaggaattggttgcttgactactaatgtcgcaa

SEQ ID NO: 474295 - DNA, 59 bp, Artificial
  Synthetic oligonucleotide
tgtccacttggtgacgattttatactggataatagtgtgacaaagattggattggattt

SEQ ID NO: 474296 - DNA, 60 bp, Artificial
  Synthetic oligonucleotide
tgtccagaaagtgcaggccatatttgatgggcatccatctgatgtgactgctgtccagtt

SEQ ID NO: 474297 - DNA, 55 bp, Artificial
  Synthetic oligonucleotide
tgtccagaatgcccttaatgggaatggagatccaaacaacatggacagggcagtc

SEQ ID NO: 474298 - DNA, 59 bp, Artificial
  Synthetic oligonucleotide
tgtccagaatgtcactctgtcttccagacggctggtgaaagaaagatgtgcacgactct

SEQ ID NO: 474299 - DNA, 60 bp, Artificial
  Synthetic oligonucleotide
tgtccagcaatctgatttttgtacaatacaaaatgacgaatgcaattgggccattgatat

SEQ ID NO: 474300 - DNA, 60 bp, Artificial
  Synthetic oligonucleotide
tgtccagcagtacaaatggaagccgcggtgtttacactccgcgcagaatcggctagctta

SEQ ID NO: 474301 - DNA, 57 bp, Artificial
  Synthetic oligonucleotide
tgtccagcccctccccgtgtctgtggaagggggactccgggacgccttgcatgctgg

SEQ ID NO: 474302 - DNA, 60 bp, Artificial
  Synthetic oligonucleotide
tgtccagctccggtaaccaagtggtggtgcgatttccaccgattctcttacatcagagac

SEQ ID NO: 474303 - DNA, 50 bp, Artificial
  Synthetic oligonucleotide
tgtccagctcttactctacagaggtttaagtctctttgagatgcagtcct

SEQ ID NO: 474304 - DNA, 50 bp, Artificial
  Synthetic oligonucleotide
tgtccaggcgcagttcgtcacttttgatgcgcccaacctccactcagcct

SEQ ID NO: 474305 - DNA, 56 bp, Artificial
  Synthetic oligonucleotide
tgtccaggtacttaaggacctgggttttgaagactctcaagaaaatcccaatctga

SEQ ID NO: 474306 - DNA, 55 bp, Artificial
  Synthetic oligonucleotide
tgtccaggtttagtccctcacattatttatatatacgtggaccagtcataaccca

SEQ ID NO: 474307 - DNA, 60 bp, Artificial
  Synthetic oligonucleotide
tgtccagtcagtatcctagatattaagcagggacctaaggaaccattccgagactatgta

SEQ ID NO: 474308 - DNA, 56 bp, Artificial
  Synthetic oligonucleotide
tgtccagtcgttagacttgcatttgttgcagcgaatctcataattaccaagtcgtg

SEQ ID NO: 474309 - DNA, 55 bp, Artificial
  Synthetic oligonucleotide
tgtccatactaaggatgcaatttatacctgtgcccacctaacacaacccagtgac

SEQ ID NO: 474310 - DNA, 60 bp, Artificial
  Synthetic oligonucleotide
tgtccatactgcttcactcattgtgaacctacagaagcagcatttcaggcccattataga

SEQ ID NO: 474311 - DNA, 58 bp, Artificial
  Synthetic oligonucleotide
tgtccatatttacaccgggagtgtgtccgtaccccaggtttccactgatacagctgtc

SEQ ID NO: 474312 - DNA, 57 bp, Artificial
  Synthetic oligonucleotide
tgtccatcaacagggacgcctcacctacaggggtatgttaacctcattaaacccaca

SEQ ID NO: 474313 - DNA, 60 bp, Artificial
  Synthetic oligonucleotide
tgtccatcagataaattgccctttgagcttggatgtgccatagataagttccttgttgtt

SEQ ID NO: 474314 - DNA, 57 bp, Artificial
  Synthetic oligonucleotide
tgtccatccagcaagtcacgaccccagccccagtggaagaagtcaattacgcactaa

SEQ ID NO: 474315 - DNA, 57 bp, Artificial
  Synthetic oligonucleotide
tgtccatcctgaccgtagctggagtgtccaactacgagtcgtacccaaacccagaac

SEQ ID NO: 474316 - DNA, 60 bp, Artificial
  Synthetic oligonucleotide
tgtccatgacgcctgtaatgactcgttatccgtcattctttggtcatgaatctctacaat

SEQ ID NO: 474317 - DNA, 58 bp, Artificial
  Synthetic oligonucleotide
tgtccatgtcccgagttagtgcgccacgtaagcgctggggcttattattacccccagc

SEQ ID NO: 474318 - DNA, 57 bp, Artificial
  Synthetic oligonucleotide
tgtccatgttaatcttaagcttcgtaacgcctatagaggggactataactagctacc

SEQ ID NO: 474319 - DNA, 59 bp, Artificial
  Synthetic oligonucleotide
tgtccattatcgagtcaccgaaagcctcgaatatggtttccactcgagccgactcgttg

SEQ ID NO: 474320 - DNA, 59 bp, Artificial
  Synthetic oligonucleotide
tgtccattcatatgtggtaaagctgtcatttttagggatcgtaatacatgccaaacata

SEQ ID NO: 474321 - DNA, 60 bp, Artificial
  Synthetic oligonucleotide
tgtccattgtcccgtgtctttgattgattttatgcgcctgcgtttgtactagttggccga

SEQ ID NO: 474322 - DNA, 55 bp, Artificial
  Synthetic oligonucleotide
tgtccatttgattgtgataacgtaattgtggtgtgtgtcttgctgtcctaaacat

SEQ ID NO: 474323 - DNA, 54 bp, Artificial
  Synthetic oligonucleotide
tgtccattttcttcgagttgaaatacaggaagtccggaaacgaagccgcccaag

SEQ ID NO: 474324 - DNA, 57 bp, Artificial
  Synthetic oligonucleotide
tgtcccaaatatgttaaaagtaagagcctaaaactagcaactggtctgaggaatgtc

SEQ ID NO: 474325 - DNA, 52 bp, Artificial
  Synthetic oligonucleotide
tgtcccaaggatgaaagaagagctctagacaagatatatgacaagccaaaaa

SEQ ID NO: 474326 - DNA, 51 bp, Artificial
  Synthetic oligonucleotide
tgtcccaatactactgaaggccttatatatgttgacaacacgggggcgaca

SEQ ID NO: 474327 - DNA, 57 bp, Artificial
  Synthetic oligonucleotide
tgtcccacagactgcttccggaagcaccccgaggccacttacaccaagtgtggttcg

SEQ ID NO: 474328 - DNA, 58 bp, Artificial
  Synthetic oligonucleotide
tgtcccacaggcagagacaaggggattgttcggggccatagctggttttatagaagga

SEQ ID NO: 474329 - DNA, 58 bp, Artificial
  Synthetic oligonucleotide
tgtcccacgctcgctcctaacgtatcagtggagcgagcgcgatccgaaaccgaaagtg

SEQ ID NO: 474330 - DNA, 60 bp, Artificial
  Synthetic oligonucleotide
tgtcccactccgtgtcgccacctccactggtttggaactccctactgctcatctcgccca

SEQ ID NO: 474331 - DNA, 54 bp, Artificial
  Synthetic oligonucleotide
tgtcccactctcctctgtttcgacgacgggaaaccgtatgttgtcacgcggaca

SEQ ID NO: 474332 - DNA, 60 bp, Artificial
  Synthetic oligonucleotide
tgtcccagagaatcccaagaccaggggcctctttggagcaattgctggattcatagagaa

SEQ ID NO: 474333 - DNA, 60 bp, Artificial
  Synthetic oligonucleotide
tgtcccagagcagcttgtctacgtgatacacgctgctttgagttaggcagaagctgacac

SEQ ID NO: 474334 - DNA, 60 bp, Artificial
  Synthetic oligonucleotide
tgtcccagctgtagaagctctctatcggaggattacttccttggtattttggaagaatgc

SEQ ID NO: 474335 - DNA, 56 bp, Artificial
  Synthetic oligonucleotide
tgtcccagttaaatgcaggcagggttattgcctaaaaatcactcaggaaggaaggg

SEQ ID NO: 474336 - DNA, 51 bp, Artificial
  Synthetic oligonucleotide
tgtcccagtttaacttctcacgcccggctcgcattccattctgcgccccgc

SEQ ID NO: 474337 - DNA, 55 bp, Artificial
  Synthetic oligonucleotide
tgtcccagtttccagggtttatttccgaaggagaattagcatacttcgaggatta

SEQ ID NO: 474338 - DNA, 60 bp, Artificial
  Synthetic oligonucleotide
tgtcccattgcagggccactgaatacataatgaagggagtctacataaatacagccctgc

SEQ ID NO: 474339 - DNA, 55 bp, Artificial
  Synthetic oligonucleotide
tgtcccattgtgcatgcgggaactgatgaggattcttctaaacaggggattgtct

SEQ ID NO: 474340 - DNA, 59 bp, Artificial
  Synthetic oligonucleotide
tgtccccaacgcatggccgcctgtcgcaccatcgaggcctttcggataggatggggcac

SEQ ID NO: 474341 - DNA, 60 bp, Artificial
  Synthetic oligonucleotide
tgtccccacaccaatatagagtgttcaggttgttactgcctgatccaaatcaatttgcat

SEQ ID NO: 474342 - DNA, 55 bp, Artificial
  Synthetic oligonucleotide
tgtccccacccacagggcccaccgggcgctagcacactggtatcacggtaccttt

SEQ ID NO: 474343 - DNA, 60 bp, Artificial
  Synthetic oligonucleotide
tgtcccccggaacagaccaagaggccatctcttggatacactctcagtctgagattgaat

SEQ ID NO: 474344 - DNA, 60 bp, Artificial
  Synthetic oligonucleotide
tgtccccctccgtcaatctcatgtcgtgtatctctaccacgacatgaccaactgcattaa

SEQ ID NO: 474345 - DNA, 50 bp, Artificial
  Synthetic oligonucleotide
tgtccccggtgcgtgaatccatgatttgcgcagttgatgtggaggaatat

SEQ ID NO: 474346 - DNA, 60 bp, Artificial
  Synthetic oligonucleotide
tgtccccggtgtcctgagacccatcacactggtggcctatgagaaaatgacaccccagtc

SEQ ID NO: 474347 - DNA, 60 bp, Artificial
  Synthetic oligonucleotide
tgtcccgaaacataatatcctctgacatcttgctcatctgtctttatataatggacttca

SEQ ID NO: 474348 - DNA, 53 bp, Artificial
  Synthetic oligonucleotide
tgtcccgaccaataacgcccttgagtgggccaatttttgtgtctgtaccgcga

SEQ ID NO: 474349 - DNA, 57 bp, Artificial
  Synthetic oligonucleotide
tgtcccgatgttacgtctggctacggtgagtcgtgggttcaagagtattaccgtctg

SEQ ID NO: 474350 - DNA, 55 bp, Artificial
  Synthetic oligonucleotide
tgtcccgcaacatttattgaccagtacgaatataacggattaccatcaggccaat

SEQ ID NO: 474351 - DNA, 59 bp, Artificial
  Synthetic oligonucleotide
tgtcccgcacagtggtacctttgtctgtgtgtctgatttcactaggggaactgggctta

SEQ ID NO: 474352 - DNA, 60 bp, Artificial
  Synthetic oligonucleotide
tgtcccggaaaaagatggatactaagcctgctgacccgactgggattgagcctgatgacc

SEQ ID NO: 474353 - DNA, 55 bp, Artificial
  Synthetic oligonucleotide
tgtcccggatcctatatatattacgggtgcgtcaacgccagatcaaatagcagct

SEQ ID NO: 474354 - DNA, 60 bp, Artificial
  Synthetic oligonucleotide
tgtccctaaagcagccagaagtcaatacagcggattcgtgaggacactgttccaacagat

SEQ ID NO: 474355 - DNA, 55 bp, Artificial
  Synthetic oligonucleotide
tgtccctaaagcggccaggagtcaatacagtggattcgtgagaacattgttccaa

SEQ ID NO: 474356 - DNA, 55 bp, Artificial
  Synthetic oligonucleotide
tgtccctaaggcggccagaagccaatacagcggattcgtaagaacactgttccaa

SEQ ID NO: 474357 - DNA, 60 bp, Artificial
  Synthetic oligonucleotide
tgtccctaagggatgtgaaggcccatgtaaggtgcagtcttttgatgcgaagaatgatat

SEQ ID NO: 474358 - DNA, 60 bp, Artificial
  Synthetic oligonucleotide
tgtccctagaggatgtgaaggcccatgtaaggtccaatcttttgatgctaagaacgatat

SEQ ID NO: 474359 - DNA, 55 bp, Artificial
  Synthetic oligonucleotide
tgtccctatgacagaaaatgaggtgataaaacaggcatggggtgcgctgtcatcc

SEQ ID NO: 474360 - DNA, 56 bp, Artificial
  Synthetic oligonucleotide
tgtccctcggggcacattgtgggcgtcttccgggctgctgtatgcacccggggggt

SEQ ID NO: 474361 - DNA, 60 bp, Artificial
  Synthetic oligonucleotide
tgtccctctgtgtgctggtatatctccgtcgaatagcgagccgttcttaaaattgtactc

SEQ ID NO: 474362 - DNA, 55 bp, Artificial
  Synthetic oligonucleotide
tgtccctgagtccgacgcggcagctcgtgtgacccagatactatcgtccctcact

SEQ ID NO: 474363 - DNA, 60 bp, Artificial
  Synthetic oligonucleotide
tgtccctggatcacaggatctaacatctttccttcgtcagattgtcagaaggagtatcac

SEQ ID NO: 474364 - DNA, 58 bp, Artificial
  Synthetic oligonucleotide
tgtccctgggctgtcgcgggcgtgcggtccaggatagttttgtcagcccctacttcac

SEQ ID NO: 474365 - DNA, 52 bp, Artificial
  Synthetic oligonucleotide
tgtccctgtacgatcttgttgtgaattgtaatcacggagaactttcttcatc

SEQ ID NO: 474366 - DNA, 55 bp, Artificial
  Synthetic oligonucleotide
tgtccctgtagtaatagggagtaaaaaggctggtcttttgcagacgatcttgggg

SEQ ID NO: 474367 - DNA, 55 bp, Artificial
  Synthetic oligonucleotide
tgtcccttaaatacacaagaaaagtatgcatccaattaggtagtgagcaagcctg

SEQ ID NO: 474368 - DNA, 55 bp, Artificial
  Synthetic oligonucleotide
tgtcccttaggaaactttcgcccggctactctctcacttcagaaagcgtgtttaa

SEQ ID NO: 474369 - DNA, 55 bp, Artificial
  Synthetic oligonucleotide
tgtcccttgacgcgtatggcgcggagtaggtttgaggagggtcagggaacagggc

SEQ ID NO: 474370 - DNA, 55 bp, Artificial
  Synthetic oligonucleotide
tgtcccttgttctaggctttctgctaggtatgaggctgaacgcttttaccgctgc

SEQ ID NO: 474371 - DNA, 54 bp, Artificial
  Synthetic oligonucleotide
tgtccctttcgattagttggcacacgtctttatctagcctcatcctgttagagt

SEQ ID NO: 474372 - DNA, 60 bp, Artificial
  Synthetic oligonucleotide
tgtccgaataatttggttatggaggatgaaggatgtaccaatctgtcagggttctcatac

SEQ ID NO: 474373 - DNA, 60 bp, Artificial
  Synthetic oligonucleotide
tgtccgaatcgtatgtaataggtaatggttgcttctactgtcagaggcgatgcggtgtcc

SEQ ID NO: 474374 - DNA, 60 bp, Artificial
  Synthetic oligonucleotide
tgtccgacaaccatgaggcaccatgtgcagtttgtcgtaaatctacaccgctcacagcgc

SEQ ID NO: 474375 - DNA, 55 bp, Artificial
  Synthetic oligonucleotide
tgtccgacgttacccgtggtattgggcttacccatcgagttggcaagcgtttctg

SEQ ID NO: 474376 - DNA, 60 bp, Artificial
  Synthetic oligonucleotide
tgtccgatctccgatctgcttgcccatgattcgttcggacctattgccaaatatggaacc

SEQ ID NO: 474377 - DNA, 57 bp, Artificial
  Synthetic oligonucleotide
tgtccgatgatgagtcctgattccttcaagaaacacaactcagtaggattattttcg

SEQ ID NO: 474378 - DNA, 54 bp, Artificial
  Synthetic oligonucleotide
tgtccgatgctattacgaaggcatccacatttgtatcgtttgatttggattatt

SEQ ID NO: 474379 - DNA, 58 bp, Artificial
  Synthetic oligonucleotide
tgtccgattcaacattagttcaaccgacattagacggaccatatcaaccaaccacatt

SEQ ID NO: 474380 - DNA, 60 bp, Artificial
  Synthetic oligonucleotide
tgtccgcaatctcttccctcgtaatactccccgcctgtgatgccgatggacctggatcga

SEQ ID NO: 474381 - DNA, 55 bp, Artificial
  Synthetic oligonucleotide
tgtccgcatagataattgtgttggcccagagatctagcccacatcgtctttcctg

SEQ ID NO: 474382 - DNA, 60 bp, Artificial
  Synthetic oligonucleotide
tgtccgcccgtcaagctgcttcgaactttcagcgacacgtccctgtcatcactaagtcgg

SEQ ID NO: 474383 - DNA, 59 bp, Artificial
  Synthetic oligonucleotide
tgtccgcctcagcggcccctccggtaatctcctcgcttaggcgagccacttcaggtgaa

SEQ ID NO: 474384 - DNA, 60 bp, Artificial
  Synthetic oligonucleotide
tgtccgcgatccaacacattcatagccacgatattagacgacgtgaataatgaacgtgat

SEQ ID NO: 474385 - DNA, 60 bp, Artificial
  Synthetic oligonucleotide
tgtccgctccatctcttaaggcaacttgcaccgccaatcatgactcccctgatgccgagc

SEQ ID NO: 474386 - DNA, 55 bp, Artificial
  Synthetic oligonucleotide
tgtccgctccgtctctcaaggcaacttgcactgccaaccacgactcccctgacgc

SEQ ID NO: 474387 - DNA, 54 bp, Artificial
  Synthetic oligonucleotide
tgtccggaataccgagcatggtggggatcctctcgtagatggctgtcctaccca

SEQ ID NO: 474388 - DNA, 60 bp, Artificial
  Synthetic oligonucleotide
tgtccggatacatagcaggcagcacatcagggaggttccaaacagtccctatgttgagcg

SEQ ID NO: 474389 - DNA, 55 bp, Artificial
  Synthetic oligonucleotide
tgtccggctacgcgcatacctcaacacgcctgggctccctgtatgtcaggaccac

SEQ ID NO: 474390 - DNA, 60 bp, Artificial
  Synthetic oligonucleotide
tgtccggctggttcgttgctggctacagcgggggagacatatatcacagcctgtctcgtg

SEQ ID NO: 474391 - DNA, 53 bp, Artificial
  Synthetic oligonucleotide
tgtccgggagtgaaccccgttctgactaggggtttcagccttaaccaccctca

SEQ ID NO: 474392 - DNA, 50 bp, Artificial
  Synthetic oligonucleotide
tgtccggggtataagaatctcagagcagccagagttatgtgcaaatcaaa

SEQ ID NO: 474393 - DNA, 51 bp, Artificial
  Synthetic oligonucleotide
tgtccggggtatcaaggtcctctgaacaccgagcgagatctgcttcggctt

SEQ ID NO: 474394 - DNA, 60 bp, Artificial
  Synthetic oligonucleotide
tgtccggttggttcacggctgggtacagcgggggagacatttatcacagcgtgtctcatg

SEQ ID NO: 474395 - DNA, 55 bp, Artificial
  Synthetic oligonucleotide
tgtccgtagttatgttggcactgaattgcgtgtatgtcttggtgcaggatctaca

SEQ ID NO: 474396 - DNA, 58 bp, Artificial
  Synthetic oligonucleotide
tgtccgtatgccgcaatattgagaccttccggataggatggggcaccctgcagtacga

SEQ ID NO: 474397 - DNA, 59 bp, Artificial
  Synthetic oligonucleotide
tgtccgtatggaatggagaatttgttcttgactagtgctggtgactttgttgaaaacac

SEQ ID NO: 474398 - DNA, 54 bp, Artificial
  Synthetic oligonucleotide
tgtcctaaaagacttagaatttctgttgttgcaactagggaagccattcgagat

SEQ ID NO: 474399 - DNA, 60 bp, Artificial
  Synthetic oligonucleotide
tgtcctaaatgtcatacaaaaggggaagcaactcatggtcaggtagactacagtccagaa

SEQ ID NO: 474400 - DNA, 60 bp, Artificial
  Synthetic oligonucleotide
tgtcctacctgatgctcctgcagtggtgactccagaggctgtacctgtggatcagggcct

SEQ ID NO: 474401 - DNA, 60 bp, Artificial
  Synthetic oligonucleotide
tgtcctactcattcacaggacttcatacttcacgaaaacggatactgcactgattgtggt

SEQ ID NO: 474402 - DNA, 58 bp, Artificial
  Synthetic oligonucleotide
tgtcctagcaaaaagaccgcgcccggtcctggcaaacaaacagcacttggccacttgc

SEQ ID NO: 474403 - DNA, 54 bp, Artificial
  Synthetic oligonucleotide
tgtcctagggtcatacaaccacgtcaccccagatacaatgtcgagttgggtaag

SEQ ID NO: 474404 - DNA, 60 bp, Artificial
  Synthetic oligonucleotide
tgtcctataaagctgagctctgtacaattcccggttgccacagagccagccacctcttca

SEQ ID NO: 474405 - DNA, 59 bp, Artificial
  Synthetic oligonucleotide
tgtcctatccgtgggtgggctatatacagcaaagataacggcataagaattggttccaa

SEQ ID NO: 474406 - DNA, 60 bp, Artificial
  Synthetic oligonucleotide
tgtcctatgagcggcactatatgttttcccttcgggtagataggcgcacgctaggagcgc

SEQ ID NO: 474407 - DNA, 60 bp, Artificial
  Synthetic oligonucleotide
tgtcctatggagacagttgggaatcgtaagcggtgttttgctgtcgtcattgagagacat

SEQ ID NO: 474408 - DNA, 54 bp, Artificial
  Synthetic oligonucleotide
tgtcctccaatttgtcctggttatcgctggatgtgtctgcggcgttttatcata

SEQ ID NO: 474409 - DNA, 57 bp, Artificial
  Synthetic oligonucleotide
tgtcctccactaatagtgacctccaacataaatgctagtacagacgacagatggcgc

SEQ ID NO: 474410 - DNA, 60 bp, Artificial
  Synthetic oligonucleotide
tgtcctcccttacagcttattagttctgtaatacaagatggggatatgtgtgacattggc

SEQ ID NO: 474411 - DNA, 55 bp, Artificial
  Synthetic oligonucleotide
tgtcctccgccctttgtaagagaaaaaaatgttggctctcctccctttgtgttga

SEQ ID NO: 474412 - DNA, 58 bp, Artificial
  Synthetic oligonucleotide
tgtcctcctacggatgcccaggtcggaccgcggggaggtggagatgccatgccgaccc

SEQ ID NO: 474413 - DNA, 55 bp, Artificial
  Synthetic oligonucleotide
tgtcctcgccgggcttattcccaaaaactacccgggcagagttcatgaaattgta

SEQ ID NO: 474414 - DNA, 60 bp, Artificial
  Synthetic oligonucleotide
tgtcctcgtcacaagcaagcgtcgacaatgggccaacaggcccatgtatcgaaagcccag

SEQ ID NO: 474415 - DNA, 60 bp, Artificial
  Synthetic oligonucleotide
tgtcctctctaggaagtacacctccttcccatggctgctcggttgtgctgccaactggat

SEQ ID NO: 474416 - DNA, 53 bp, Artificial
  Synthetic oligonucleotide
tgtcctgcaggctattatcttatagtcgaaaaagttagcggggtccgacggcg

SEQ ID NO: 474417 - DNA, 58 bp, Artificial
  Synthetic oligonucleotide
tgtcctgcctcaacatccgccaacaacctcagacaagaggaggagtgcttggcagact

SEQ ID NO: 474418 - DNA, 55 bp, Artificial
  Synthetic oligonucleotide
tgtcctggagttaaagcctcaagtggaacccgacctgttttgcgacgaggagtta

SEQ ID NO: 474419 - DNA, 60 bp, Artificial
  Synthetic oligonucleotide
tgtcctgggatggttgtgacctagactactactgcaacatgggagattggccttcttgca

SEQ ID NO: 474420 - DNA, 55 bp, Artificial
  Synthetic oligonucleotide
tgtccttaacaagggaaagtttttctagatggctctctaaacaagagacgtctac

SEQ ID NO: 474421 - DNA, 60 bp, Artificial
  Synthetic oligonucleotide
tgtccttaagatacacaaggaaagtatgcattcagttgggcacagaacaaacatgtaaga

SEQ ID NO: 474422 - DNA, 55 bp, Artificial
  Synthetic oligonucleotide
tgtccttcacccccatggggccccagccgctcatcgcccttggcagatgaaagat

SEQ ID NO: 474423 - DNA, 55 bp, Artificial
  Synthetic oligonucleotide
tgtccttgacacaggtaagactggggaccctttgtaggccaaaggagagtgaagg

SEQ ID NO: 474424 - DNA, 55 bp, Artificial
  Synthetic oligonucleotide
tgtccttgcgactcattgaattggactgggtctgagagatcgagtcaccggggtc

SEQ ID NO: 474425 - DNA, 55 bp, Artificial
  Synthetic oligonucleotide
tgtcctttagagttgctcatcaagaatctgacattgaaggcatataaagaagagg

SEQ ID NO: 474426 - DNA, 60 bp, Artificial
  Synthetic oligonucleotide
tgtcctttcaagatttgagtgataacccatgtaaagttgatctacacacccagtccattg

SEQ ID NO: 474427 - DNA, 57 bp, Artificial
  Synthetic oligonucleotide
tgtcctttcagggaggtcacattgaagagtgctcttgctaccccaacttgggtaaag

SEQ ID NO: 474428 - DNA, 59 bp, Artificial
  Synthetic oligonucleotide
tgtcctttgaatcaggtttcgacacctcggcatgtgcttaactctatactaaaacgcaa

SEQ ID NO: 474429 - DNA, 55 bp, Artificial
  Synthetic oligonucleotide
tgtcgaaaaagttcacggtagttaaattctctggagtatcgacgtatgggaggaa

SEQ ID NO: 474430 - DNA, 55 bp, Artificial
  Synthetic oligonucleotide
tgtcgaaaaatacgggagctaagattattccttactctcaaaagttcaccttcga

SEQ ID NO: 474431 - DNA, 60 bp, Artificial
  Synthetic oligonucleotide
tgtcgaaaaatctagcatccttgatgttcgactttcctgatagttggatgagacagtgta

SEQ ID NO: 474432 - DNA, 59 bp, Artificial
  Synthetic oligonucleotide
tgtcgaaaacctctaacaccataaagtctcactcatccaggtcagaaccagactggaaa

SEQ ID NO: 474433 - DNA, 53 bp, Artificial
  Synthetic oligonucleotide
tgtcgaaacatctaacgattgtagattattaagattattgatggccaatacat

SEQ ID NO: 474434 - DNA, 60 bp, Artificial
  Synthetic oligonucleotide
tgtcgaaactcccccacatgacaatccctatacatgaccttcaatatattatgtatccct

SEQ ID NO: 474435 - DNA, 59 bp, Artificial
  Synthetic oligonucleotide
tgtcgaaagagaccgcgaagaagacgcgtcaatctagggtccgaatgccaaatggactc

SEQ ID NO: 474436 - DNA, 59 bp, Artificial
  Synthetic oligonucleotide
tgtcgaaagaggccgcaaagaagacgcgtcaatccagggttcaaatgccaagtggactc

SEQ ID NO: 474437 - DNA, 60 bp, Artificial
  Synthetic oligonucleotide
tgtcgaaagatcatcagctgttaatggaatgtgctaccctggaagggtagagaatcttga

SEQ ID NO: 474438 - DNA, 60 bp, Artificial
  Synthetic oligonucleotide
tgtcgaaatggttccagtaccttaagataggattctttgccatagcagctatagtgatat

SEQ ID NO: 474439 - DNA, 55 bp, Artificial
  Synthetic oligonucleotide
tgtcgaacacaggcccttgtatctgatgaagcgagtgttcactccattcgggtta

SEQ ID NO: 474440 - DNA, 58 bp, Artificial
  Synthetic oligonucleotide
tgtcgaaccgaatggattgaagacgatttcaactgcgaaagatgttaagaagttgtac

SEQ ID NO: 474441 - DNA, 60 bp, Artificial
  Synthetic oligonucleotide
tgtcgaagaagcgctttggttgcgtgagtgtcaagcgactactggcttcgatgtacagta

SEQ ID NO: 474442 - DNA, 59 bp, Artificial
  Synthetic oligonucleotide
tgtcgaagcgtccagcagatatagggattttcactcccgtctccaaggtacggcgccgc

SEQ ID NO: 474443 - DNA, 60 bp, Artificial
  Synthetic oligonucleotide
tgtcgaagggacacaaacagcagtctgacggaggggcgagcctagcccctgtgaagtcta

SEQ ID NO: 474444 - DNA, 60 bp, Artificial
  Synthetic oligonucleotide
tgtcgaagtttgttgccgctgatgaatatattgtcccatcgttccaatggttgctcggac

SEQ ID NO: 474445 - DNA, 58 bp, Artificial
  Synthetic oligonucleotide
tgtcgaatcaagctaaaggagttggttttgagggtggtggtgtggtagctaagattga

SEQ ID NO: 474446 - DNA, 60 bp, Artificial
  Synthetic oligonucleotide
tgtcgaatgcgtacttcatcagacacgctccccggtgcttggcatgtagatcggtccagg

SEQ ID NO: 474447 - DNA, 58 bp, Artificial
  Synthetic oligonucleotide
tgtcgacccttttttcagaagagtctcgagatcaattcgctaaggagtgcaaacttgg

SEQ ID NO: 474448 - DNA, 51 bp, Artificial
  Synthetic oligonucleotide
tgtcgaccgttcggttgacgcgaagttcagcactgaccagatcgtttaccg

SEQ ID NO: 474449 - DNA, 60 bp, Artificial
  Synthetic oligonucleotide
tgtcgacggtggctacgcatgcggttcggtcaatggctacgtattcaacgccatccagca

SEQ ID NO: 474450 - DNA, 60 bp, Artificial
  Synthetic oligonucleotide
tgtcgagataaatacaagtggcacagcagagaaaccacacttcatcgttgcaacaaacat

SEQ ID NO: 474451 - DNA, 55 bp, Artificial
  Synthetic oligonucleotide
tgtcgagcagcctccatgaaccctgcctcccgggagaccatagtggtctgcggaa

SEQ ID NO: 474452 - DNA, 55 bp, Artificial
  Synthetic oligonucleotide
tgtcgagcccgtgacattaaacgtggaacgattccgaaaggataggcaacgagtg

SEQ ID NO: 474453 - DNA, 60 bp, Artificial
  Synthetic oligonucleotide
tgtcgagccgctaggctccgggactgcaccatgctcgtgtgtggcgacgacttagtcgtt

SEQ ID NO: 474454 - DNA, 56 bp, Artificial
  Synthetic oligonucleotide
tgtcgagcggccaatttgttaaacatgagcgcgtttagtctatcctcggttaaggg

SEQ ID NO: 474455 - DNA, 60 bp, Artificial
  Synthetic oligonucleotide
tgtcgaggaaacatttataactggctccttcacctggattgcaaagcacgattgatggga

SEQ ID NO: 474456 - DNA, 60 bp, Artificial
  Synthetic oligonucleotide
tgtcgagtccatccgatcgagggtggtagctaacggtgctaacgtgcggtcagagtggga

SEQ ID NO: 474457 - DNA, 50 bp, Artificial
  Synthetic oligonucleotide
tgtcgagtgcgtttagcctcagtagagcgacgcacgctaagcacgtgcca

SEQ ID NO: 474458 - DNA, 57 bp, Artificial
  Synthetic oligonucleotide
tgtcgagttagatctcccgatagaggtgtcaaaccgacttagatgtaatagtctaag

SEQ ID NO: 474459 - DNA, 57 bp, Artificial
  Synthetic oligonucleotide
tgtcgataagaaagtgcttaccagagttactgaagttgcctttaggcagttcagacc

SEQ ID NO: 474460 - DNA, 51 bp, Artificial
  Synthetic oligonucleotide
tgtcgatacggtgttttgcaaattccaacgtgttgacacatacaggttgaa

SEQ ID NO: 474461 - DNA, 60 bp, Artificial
  Synthetic oligonucleotide
tgtcgatactaaatgctcctgaacaaagatccgagagactatcgacatcgagagaaatta

SEQ ID NO: 474462 - DNA, 60 bp, Artificial
  Synthetic oligonucleotide
tgtcgatataggacttgacgtcggagctggatttagctctctgaatgttcggatggaaat

SEQ ID NO: 474463 - DNA, 60 bp, Artificial
  Synthetic oligonucleotide
tgtcgatcctccgcgctcgcaacagcgtgactaagttgaggcagggattcttctccaaga

SEQ ID NO: 474464 - DNA, 56 bp, Artificial
  Synthetic oligonucleotide
tgtcgatcgatggagtaaacgtcttgactaacgtagattacggtacggttaatcat

SEQ ID NO: 474465 - DNA, 57 bp, Artificial
  Synthetic oligonucleotide
tgtcgatgacgattagggggcgcgggggataaccgctctcgcggtcctgtaggacta

SEQ ID NO: 474466 - DNA, 55 bp, Artificial
  Synthetic oligonucleotide
tgtcgatggtcatgacaaatccacatccactctcggtgctcatgcctgaaacctc

SEQ ID NO: 474467 - DNA, 59 bp, Artificial
  Synthetic oligonucleotide
tgtcgatgtaagatttgacgtcggagcttgatttagctccctgaaggtttggatggaaa

SEQ ID NO: 474468 - DNA, 60 bp, Artificial
  Synthetic oligonucleotide
tgtcgatgtatatttaggcgcttgttcagagtccgtatatcgcatatacaatcggcttca

SEQ ID NO: 474469 - DNA, 50 bp, Artificial
  Synthetic oligonucleotide
tgtcgattccaaatcccataagttactccgaataagtccaagcattacgg

SEQ ID NO: 474470 - DNA, 55 bp, Artificial
  Synthetic oligonucleotide
tgtcgatttaaatataagaaagttaatggtacggcacctttgggtcatcacttcc

SEQ ID NO: 474471 - DNA, 60 bp, Artificial
  Synthetic oligonucleotide
tgtcgcaatctggcactcgcgagatactgtcaaaaaccactgtggatcatatggccataa

SEQ ID NO: 474472 - DNA, 60 bp, Artificial
  Synthetic oligonucleotide
tgtcgcacagaggagcaacgcctcctgactagcgcactgaaaatcagcgacggtgaaaac

SEQ ID NO: 474473 - DNA, 60 bp, Artificial
  Synthetic oligonucleotide
tgtcgcacagagttcccactcagcgcgaagcattactcgcgataaagaagaggaacatga

SEQ ID NO: 474474 - DNA, 60 bp, Artificial
  Synthetic oligonucleotide
tgtcgcacgcaatgaaatgtacaaggatgcgatcgaacgatacgtcacgaagaagagaga

SEQ ID NO: 474475 - DNA, 60 bp, Artificial
  Synthetic oligonucleotide
tgtcgcagcaactttcgcgactcaataagacgttagcagctggtcgtcctactattaacc

SEQ ID NO: 474476 - DNA, 59 bp, Artificial
  Synthetic oligonucleotide
tgtcgcaggttggagacgttataacggaagatgagccagaaaaattctattcaaccata

SEQ ID NO: 474477 - DNA, 60 bp, Artificial
  Synthetic oligonucleotide
tgtcgcagtcgtagggatccggtgcgagtccgtgatagccgctcggacatattttgcgcg

SEQ ID NO: 474478 - DNA, 60 bp, Artificial
  Synthetic oligonucleotide
tgtcgcatatatacttgtgacaccgatctacgtggcagctgatgtcattcccccgacacg

SEQ ID NO: 474479 - DNA, 60 bp, Artificial
  Synthetic oligonucleotide
tgtcgccagagcctgtacgagcgatcatggatctagcgcactcgcatagctttatcaata

SEQ ID NO: 474480 - DNA, 60 bp, Artificial
  Synthetic oligonucleotide
tgtcgccagctcattagtactgttagtctccctgggggcaatcagtttctggatgtgctc

SEQ ID NO: 474481 - DNA, 51 bp, Artificial
  Synthetic oligonucleotide
tgtcgccaggtgtttaggggcgaaaacgtcatgtttccccgggaagacggt

SEQ ID NO: 474482 - DNA, 60 bp, Artificial
  Synthetic oligonucleotide
tgtcgccccaattgagcatattgcgagtatgagaaggaattatttcacagcggaagtgtc

SEQ ID NO: 474483 - DNA, 59 bp, Artificial
  Synthetic oligonucleotide
tgtcgccgagatggtcgaagtccatgaggaacggggcgtacttctttccacagtccaga

SEQ ID NO: 474484 - DNA, 54 bp, Artificial
  Synthetic oligonucleotide
tgtcgccgtgctcccctctcgcaaacacaatttttatgtccgccccgctcacat

SEQ ID NO: 474485 - DNA, 53 bp, Artificial
  Synthetic oligonucleotide
tgtcgcctcaggtttgtggccgagggacctccgacccgtggtgttctaaccct

SEQ ID NO: 474486 - DNA, 58 bp, Artificial
  Synthetic oligonucleotide
tgtcgcgacagatcgttgcactggtcaaggggtactgtggaccgttcgagtcgaaaaa

SEQ ID NO: 474487 - DNA, 57 bp, Artificial
  Synthetic oligonucleotide
tgtcgcgagggagactatttcccttgccataagggccgctggttttcgtcattacga

SEQ ID NO: 474488 - DNA, 58 bp, Artificial
  Synthetic oligonucleotide
tgtcgcgcggcgtgtatgggttgagaagtgtaaccataacccaattgaggacctggtg

SEQ ID NO: 474489 - DNA, 55 bp, Artificial
  Synthetic oligonucleotide
tgtcgcgcgttggattttatttggatggactacgctgaataggtgttgcgattta

SEQ ID NO: 474490 - DNA, 58 bp, Artificial
  Synthetic oligonucleotide
tgtcgcggctgaaattatcccaggcggtgaagtgtacctgcacccgactcttaacacg

SEQ ID NO: 474491 - DNA, 55 bp, Artificial
  Synthetic oligonucleotide
tgtcgcgggaactgcaaacatggcggatcctaaaggtagtacatctaaagaaggg

SEQ ID NO: 474492 - DNA, 54 bp, Artificial
  Synthetic oligonucleotide
tgtcgcggtgcgctgacaaggtgagcccgtaccggaggaatgcgcaatgaccat

SEQ ID NO: 474493 - DNA, 55 bp, Artificial
  Synthetic oligonucleotide
tgtcgctatgtcaggtcgtgtggtcaaagctccttctcgtcgcctctccagcatg

SEQ ID NO: 474494 - DNA, 60 bp, Artificial
  Synthetic oligonucleotide
tgtcgctattaccagggcaagacatgctatctttgtgtatgacccacataggcaattgca

SEQ ID NO: 474495 - DNA, 60 bp, Artificial
  Synthetic oligonucleotide
tgtcgctccattgataagtttgatcaggggtggggtcccatcacttatgccgagcctagc

SEQ ID NO: 474496 - DNA, 59 bp, Artificial
  Synthetic oligonucleotide
tgtcgctcctcagctcgcgctcaacaccaagtcctccactctccccctcgaacccggcg

SEQ ID NO: 474497 - DNA, 60 bp, Artificial
  Synthetic oligonucleotide
tgtcgctctctggcagcaacacttagacaccgccatgaccatgctgacacctgacatttc

SEQ ID NO: 474498 - DNA, 60 bp, Artificial
  Synthetic oligonucleotide
tgtcgctgaggggaataagagtcagcagaatgggagtagatgaatactccagcacagaga

SEQ ID NO: 474499 - DNA, 56 bp, Artificial
  Synthetic oligonucleotide
tgtcgcttcctacgtccagaagttcgcgagtctgttcgcgggaccggctctctccc

SEQ ID NO: 474500 - DNA, 58 bp, Artificial
  Synthetic oligonucleotide
tgtcggaacatttttgtcgggtctcttcagtgagtggaatagatttggagctaggttc

SEQ ID NO: 474501 - DNA, 60 bp, Artificial
  Synthetic oligonucleotide
tgtcggaagctttagtgtgagcctctcacgaacaagctcgagattagactccgtttgcaa

SEQ ID NO: 474502 - DNA, 55 bp, Artificial
  Synthetic oligonucleotide
tgtcggaagttgaccaaatagaggcgcttagggagttctatgtacggttgcggcc

SEQ ID NO: 474503 - DNA, 55 bp, Artificial
  Synthetic oligonucleotide
tgtcggaattggcagatttgatacttaatgagtggctttgtaatccaatggacat

SEQ ID NO: 474504 - DNA, 60 bp, Artificial
  Synthetic oligonucleotide
tgtcggacagcaagaatcaatgtttctatcgcatctggactacaccgtttgctgaagcgg

SEQ ID NO: 474505 - DNA, 50 bp, Artificial
  Synthetic oligonucleotide
tgtcggacgcgttaagcaggcgttcgattcggtactcacaccttcactgt

SEQ ID NO: 474506 - DNA, 52 bp, Artificial
  Synthetic oligonucleotide
tgtcggacggcgccaatacagcgcgtctcgacgttgtcgctcctgcgtatta

SEQ ID NO: 474507 - DNA, 54 bp, Artificial
  Synthetic oligonucleotide
tgtcggactcctctccattcactttagaggcctgcaggacgcaactttgcgcac

SEQ ID NO: 474508 - DNA, 60 bp, Artificial
  Synthetic oligonucleotide
tgtcggataatatgtccaaggcatcgacatttgtatcgtttgacctcgattatgttgggt

SEQ ID NO: 474509 - DNA, 55 bp, Artificial
  Synthetic oligonucleotide
tgtcggattgcaaataagagtgagtgcaagacaatgtcatatccagggcagggtc

SEQ ID NO: 474510 - DNA, 59 bp, Artificial
  Synthetic oligonucleotide
tgtcggcaaaccatacagctgtccacaaaaaggaaaggctgtaatagcaagcggaccca

SEQ ID NO: 474511 - DNA, 60 bp, Artificial
  Synthetic oligonucleotide
tgtcggctttgcactccgcttttgacagcattcattccgattcaatgtctaacgatatgc

SEQ ID NO: 474512 - DNA, 60 bp, Artificial
  Synthetic oligonucleotide
tgtcgggacgcctactaatagacatggtgtgaagatcctattgcgcttagttgtgagtcc

SEQ ID NO: 474513 - DNA, 53 bp, Artificial
  Synthetic oligonucleotide
tgtcgggactttccaggggaggcgtgttttgggtggagttggggagtggctaa

SEQ ID NO: 474514 - DNA, 58 bp, Artificial
  Synthetic oligonucleotide
tgtcgggagctcgtgtctgtggcgcaggacgccaaatcaggcccccactcggcgttcc

SEQ ID NO: 474515 - DNA, 60 bp, Artificial
  Synthetic oligonucleotide
tgtcgggatgtgcactgaatctgactatgaagcttttgattcctcccaggacgccaatat

SEQ ID NO: 474516 - DNA, 54 bp, Artificial
  Synthetic oligonucleotide
tgtcgggcctcggtctcaacgccgtagcgtattaccggggtctagacgtatccg

SEQ ID NO: 474517 - DNA, 60 bp, Artificial
  Synthetic oligonucleotide
tgtcgggcgagggggatggagtgagcggtttcagcccaatcatgtcgccggctcactacc

SEQ ID NO: 474518 - DNA, 59 bp, Artificial
  Synthetic oligonucleotide
tgtcgggtccaagcctcacctgtggatggacccacgctatttacggatgcgtcctcctc

SEQ ID NO: 474519 - DNA, 54 bp, Artificial
  Synthetic oligonucleotide
tgtcgggtccacccattggggagctgacctcgcagttaccccttacgattacgg

SEQ ID NO: 474520 - DNA, 55 bp, Artificial
  Synthetic oligonucleotide
tgtcgggtggcttctgatgcccagttacaaagagctggatggttggtgcagttcg

SEQ ID NO: 474521 - DNA, 60 bp, Artificial
  Synthetic oligonucleotide
tgtcgggtttacactcacatgtcaggtgtctctcacagaatgcccaacatttctcacatc

SEQ ID NO: 474522 - DNA, 55 bp, Artificial
  Synthetic oligonucleotide
tgtcggtaagcgtttctgtgttaagtccgtgtatattctcggtaagatctggatg

SEQ ID NO: 474523 - DNA, 59 bp, Artificial
  Synthetic oligonucleotide
tgtcggtctgttaggctttgccgccccttttacacaatgtggctatcctgccttaatgc

SEQ ID NO: 474524 - DNA, 60 bp, Artificial
  Synthetic oligonucleotide
tgtcggtgtctagcaacagctcgagttcgggtgcagtaagacgcggtatttcaactataa

SEQ ID NO: 474525 - DNA, 60 bp, Artificial
  Synthetic oligonucleotide
tgtcggtgtgagacgatagtaagctgcgacgggtacgtcgttaagagaattgctatcagt

SEQ ID NO: 474526 - DNA, 57 bp, Artificial
  Synthetic oligonucleotide
tgtcgtactcttgatcgataggtaaggacccacgagctgttcggtcaactggtatcc

SEQ ID NO: 474527 - DNA, 60 bp, Artificial
  Synthetic oligonucleotide
tgtcgtagcccttgggtcacaggagggaggcctccatcaagcgttagcaggagccatcgt

SEQ ID NO: 474528 - DNA, 57 bp, Artificial
  Synthetic oligonucleotide
tgtcgtatagcgttacgctttacttcccacaacccacgaataccctactcagcacac

SEQ ID NO: 474529 - DNA, 55 bp, Artificial
  Synthetic oligonucleotide
tgtcgtatcgcaggttaacaaacgtttagtcgcgtacaaaggtaagatgcgttta

SEQ ID NO: 474530 - DNA, 56 bp, Artificial
  Synthetic oligonucleotide
tgtcgtcaaagaaagtaaagcaacggagcggtgggctgcaaccacccccgatgaaa

SEQ ID NO: 474531 - DNA, 55 bp, Artificial
  Synthetic oligonucleotide
tgtcgtccacgggaaatctcacggtcactagtaacgtcgtgttattaaccttcga

SEQ ID NO: 474532 - DNA, 59 bp, Artificial
  Synthetic oligonucleotide
tgtcgtccacttcctgggacgagtctacgtcctgatataagtaagtgcacttccgaatg

SEQ ID NO: 474533 - DNA, 55 bp, Artificial
  Synthetic oligonucleotide
tgtcgtcccacgtattgccgatgtgcccaagtatgtcggtatcgccccgccttcg

SEQ ID NO: 474534 - DNA, 60 bp, Artificial
  Synthetic oligonucleotide
tgtcgtcccagaagctgtcatcgaagtcgtccagatttggaaatgaaggtatgccttgtg

SEQ ID NO: 474535 - DNA, 56 bp, Artificial
  Synthetic oligonucleotide
tgtcgtcctgggtacacgtacacttcgttggatgttaagccggctaaaactgagaa

SEQ ID NO: 474536 - DNA, 57 bp, Artificial
  Synthetic oligonucleotide
tgtcgtcgggaatattcgggaatgggcggagctagctccgccaataaactgtttgcg

SEQ ID NO: 474537 - DNA, 54 bp, Artificial
  Synthetic oligonucleotide
tgtcgtcgtatacaggtcctcagtatccttgtatatcccaagcttttgctgagg

SEQ ID NO: 474538 - DNA, 60 bp, Artificial
  Synthetic oligonucleotide
tgtcgtcgtattggacgacttctatgggtggctaccctattgcgagatgctccgcctctg

SEQ ID NO: 474539 - DNA, 55 bp, Artificial
  Synthetic oligonucleotide
tgtcgtgaatctccacaatcacagttcctgttgcgttgataggaacttgttgcct

SEQ ID NO: 474540 - DNA, 54 bp, Artificial
  Synthetic oligonucleotide
tgtcgtgacacgcctcgaccagaaaaggctgcggttttcgtacacgcgaccgtt

SEQ ID NO: 474541 - DNA, 57 bp, Artificial
  Synthetic oligonucleotide
tgtcgtgacagacgaccatttggtacacccatggattttggtcaagtttttaacatg

SEQ ID NO: 474542 - DNA, 60 bp, Artificial
  Synthetic oligonucleotide
tgtcgtgcacttcctgggccgggtctacgtcctgatataactagctgcacttccgaatgg

SEQ ID NO: 474543 - DNA, 59 bp, Artificial
  Synthetic oligonucleotide
tgtcgtgcttcatatctaaagtatttctaaggctagtaattcctcttaggacttctgcc

SEQ ID NO: 474544 - DNA, 54 bp, Artificial
  Synthetic oligonucleotide
tgtcgtggttggtgatttcgaaatagaggggatttgttatgtcccaggtaaaaa

SEQ ID NO: 474545 - DNA, 54 bp, Artificial
  Synthetic oligonucleotide
tgtcgtgtaaaactacggtgttaacgggtgtcacaggcttggacgaaagagttc

SEQ ID NO: 474546 - DNA, 60 bp, Artificial
  Synthetic oligonucleotide
tgtcgtgtgacgctgaattctatttgataccaagatcacaaaccgatttatgtgcgcagt

SEQ ID NO: 474547 - DNA, 60 bp, Artificial
  Synthetic oligonucleotide
tgtcgtgtgctgctcaatgtcttactcctggacaggcgcacttatcaccccgtgcgccgc

SEQ ID NO: 474548 - DNA, 53 bp, Artificial
  Synthetic oligonucleotide
tgtcgtgtgttgttccatgtcatacaattggacaggggcgctaatcacacctt

SEQ ID NO: 474549 - DNA, 60 bp, Artificial
  Synthetic oligonucleotide
tgtcgttcaaaatgacgaaacctggatgtctcttgaccttcctatgatcaagtctgacgg

SEQ ID NO: 474550 - DNA, 60 bp, Artificial
  Synthetic oligonucleotide
tgtcgttcggagacgctatttcgtgaataagtgtacagactattcccacctcgaatgcaa

SEQ ID NO: 474551 - DNA, 55 bp, Artificial
  Synthetic oligonucleotide
tgtcgttgatggcgtgaaccataaacttgatgtaactacaaatacttgtacaatc

SEQ ID NO: 474552 - DNA, 60 bp, Artificial
  Synthetic oligonucleotide
tgtcgttgcaaagggcggacgtggctcaggtaagtcatcagatatatcaatcattattac

SEQ ID NO: 474553 - DNA, 60 bp, Artificial
  Synthetic oligonucleotide
tgtcgttgctatgttgtgtgcgccaaactgaagcgactctcggtccgtcttatcactacg

SEQ ID NO: 474554 - DNA, 55 bp, Artificial
  Synthetic oligonucleotide
tgtcgttgctcaactgcttgtatgtgcatgttacccattcgcctcgttgcgcttg

SEQ ID NO: 474555 - DNA, 59 bp, Artificial
  Synthetic oligonucleotide
tgtcgttggagagagacgtattttcgatgtgcaagaggttgtacatttcgaacaagaaa

SEQ ID NO: 474556 - DNA, 59 bp, Artificial
  Synthetic oligonucleotide
tgtcgtttaaaatgatattgcggaatccatttgtagtaactgatagctccataattttc

SEQ ID NO: 474557 - DNA, 57 bp, Artificial
  Synthetic oligonucleotide
tgtcgtttaatcatcgacgatcttactcatctaatcccgtatttaagcgtttacacg

SEQ ID NO: 474558 - DNA, 56 bp, Artificial
  Synthetic oligonucleotide
tgtcgtttggacacaaggtaagatacgtgacagtgaaacggataagttattgggac

SEQ ID NO: 474559 - DNA, 59 bp, Artificial
  Synthetic oligonucleotide
tgtcgtttgtagattgtttacctcctctggcagatctaccgtcgatctggaattgtccc

SEQ ID NO: 474560 - DNA, 58 bp, Artificial
  Synthetic oligonucleotide
tgtctaaactagtcaacaaaagtcagaacataccgactagagttggcagggtcttaga

SEQ ID NO: 474561 - DNA, 58 bp, Artificial
  Synthetic oligonucleotide
tgtctaaagcactatcacatggcataccgatgggaacccgcaacgtgcctgcgcgtca

SEQ ID NO: 474562 - DNA, 58 bp, Artificial
  Synthetic oligonucleotide
tgtctaaatatcacctagacgaaccccaccttcccatgactcaggccctttctcgagc

SEQ ID NO: 474563 - DNA, 56 bp, Artificial
  Synthetic oligonucleotide
tgtctaaatcagacgaaattacgttgactaggttatttacctcacagcagcatcgt

SEQ ID NO: 474564 - DNA, 55 bp, Artificial
  Synthetic oligonucleotide
tgtctaaatctatttaaatatgtcgtcccagaagcttgaatcgatgtcgtccaga

SEQ ID NO: 474565 - DNA, 60 bp, Artificial
  Synthetic oligonucleotide
tgtctaaattgcaggaattggcttcatccggagaagcatatgtcgtatctgatctcgcta

SEQ ID NO: 474566 - DNA, 52 bp, Artificial
  Synthetic oligonucleotide
tgtctaacattagttctctaaacccgttttcaggttcttcccgaacattagt

SEQ ID NO: 474567 - DNA, 59 bp, Artificial
  Synthetic oligonucleotide
tgtctaacgatgtgagagaaacttacgcacggatgaacgccaaggttaaagctctggta

SEQ ID NO: 474568 - DNA, 60 bp, Artificial
  Synthetic oligonucleotide
tgtctaacgccagaccgcctactgcacatacgcattccattaccgatgtcacggacttgc

SEQ ID NO: 474569 - DNA, 59 bp, Artificial
  Synthetic oligonucleotide
tgtctaactccgtaactctgactgtccctctgagtgcgcgcattttggtttcagtttgt

SEQ ID NO: 474570 - DNA, 60 bp, Artificial
  Synthetic oligonucleotide
tgtctaagggacgcgcaaacttatcggtattattagacgatgagatcacacctatcgcat

SEQ ID NO: 474571 - DNA, 57 bp, Artificial
  Synthetic oligonucleotide
tgtctaagtcacaaaatggcgggcgcggctgggacacaaaatggcggcgtagtgggg

SEQ ID NO: 474572 - DNA, 60 bp, Artificial
  Synthetic oligonucleotide
tgtctaagtcaggaaagataggacacatactaaccccagaattggttctgatgtattgtg

SEQ ID NO: 474573 - DNA, 60 bp, Artificial
  Synthetic oligonucleotide
tgtctaatagattaggacaattggttgacctaactagattgctagcatacaattacgaaa

SEQ ID NO: 474574 - DNA, 60 bp, Artificial
  Synthetic oligonucleotide
tgtctaatttatgttctttcattaattagtgtatgtgtgactggattgatgtggatgttt

SEQ ID NO: 474575 - DNA, 60 bp, Artificial
  Synthetic oligonucleotide
tgtctacaaaataccaactgcagcactaaaggtctccggctcgagtctgtacaatcttgc

SEQ ID NO: 474576 - DNA, 56 bp, Artificial
  Synthetic oligonucleotide
tgtctacaaacgggggtggagacgcaggaggtacataagacgtgggcgacgcaaaa

SEQ ID NO: 474577 - DNA, 60 bp, Artificial
  Synthetic oligonucleotide
tgtctacaaatgtgactgacttaacgaacacatcctctgcgcacgcggcgacactatctt

SEQ ID NO: 474578 - DNA, 55 bp, Artificial
  Synthetic oligonucleotide
tgtctacactcctgcgtttgtcccagcaggtcgtgcactcgcacgtgaacatggg

SEQ ID NO: 474579 - DNA, 57 bp, Artificial
  Synthetic oligonucleotide
tgtctacagtcggaacagggaagttaactcgtgcacaacgaagggctgcggcccgta

SEQ ID NO: 474580 - DNA, 60 bp, Artificial
  Synthetic oligonucleotide
tgtctacatcgttcgtgcagatagacccacctatgtgcactgggcgctccgaaaggtcgc

SEQ ID NO: 474581 - DNA, 56 bp, Artificial
  Synthetic oligonucleotide
tgtctacccaagtgtgtccctaatacaaagggtgttcaacgtgtttgatagatggt

SEQ ID NO: 474582 - DNA, 55 bp, Artificial
  Synthetic oligonucleotide
tgtctacgagggctcagatttgtttgtactcaacaacgactggctcatgagtgcg

SEQ ID NO: 474583 - DNA, 60 bp, Artificial
  Synthetic oligonucleotide
tgtctacggattcattatacagtagggcgactgcaaatcaacagataagttagtcgccca

SEQ ID NO: 474584 - DNA, 57 bp, Artificial
  Synthetic oligonucleotide
tgtctactaaagattgataatatcatcccagaagtcgccgtcaaataatggtagagc

SEQ ID NO: 474585 - DNA, 59 bp, Artificial
  Synthetic oligonucleotide
tgtctactagctctcgactttagggaggatatcatccaacccttgttagttctagtgga

SEQ ID NO: 474586 - DNA, 55 bp, Artificial
  Synthetic oligonucleotide
tgtctactccttttagcacttgggcctcctcatcctccgtcatgttctcagtcaa

SEQ ID NO: 474587 - DNA, 55 bp, Artificial
  Synthetic oligonucleotide
tgtctactgacaggagtggtagctccaaagaagcagcatcgatgatcaagttaac

SEQ ID NO: 474588 - DNA, 60 bp, Artificial
  Synthetic oligonucleotide
tgtctactgctgtgagtaccttgttggagagcggtagtctggtgaccgttgcagagcagc

SEQ ID NO: 474589 - DNA, 59 bp, Artificial
  Synthetic oligonucleotide
tgtctactgttataagaatggtctagtcgaaggtgctaaactttatagtgagttggcac

SEQ ID NO: 474590 - DNA, 54 bp, Artificial
  Synthetic oligonucleotide
tgtctacttgtggtaacaggtaaccggctaagtgaccggttggaaagcgtgcct

SEQ ID NO: 474591 - DNA, 54 bp, Artificial
  Synthetic oligonucleotide
tgtctagaccccccgtaaaccccagggagttcctgagatccatagatattgggg

SEQ ID NO: 474592 - DNA, 59 bp, Artificial
  Synthetic oligonucleotide
tgtctagcaatccttacggctattcgattatgtgtgcagtgtgtttctggttgtcatac

SEQ ID NO: 474593 - DNA, 59 bp, Artificial
  Synthetic oligonucleotide
tgtctagggcccgaattgatgcacgaattatcttcgagtctggaaggattaagaaagaa

SEQ ID NO: 474594 - DNA, 50 bp, Artificial
  Synthetic oligonucleotide
tgtctagtatttggcgtcagtgtgtagcagcatgcctagcgttcgagcct

SEQ ID NO: 474595 - DNA, 58 bp, Artificial
  Synthetic oligonucleotide
tgtctagtgcttgtgtcaaccctgttttgccggcctgaaggtaggtgtctgtgacatc

SEQ ID NO: 474596 - DNA, 60 bp, Artificial
  Synthetic oligonucleotide
tgtctagtggggtattaagaaactcatcaccagaggcacttgtcactgcggtggctggag

SEQ ID NO: 474597 - DNA, 60 bp, Artificial
  Synthetic oligonucleotide
tgtctagtgtcaagtcgtgggttcatgagtcgatgctggggttcacgaacttgcacgaga

SEQ ID NO: 474598 - DNA, 60 bp, Artificial
  Synthetic oligonucleotide
tgtctatacaggagccatataaggatcgttttgctgtacttcgccaagtgtcctatccag

SEQ ID NO: 474599 - DNA, 60 bp, Artificial
  Synthetic oligonucleotide
tgtctatcaccgttgagccttgagtcttgctcttctggtaaatgttgtacgccggtctga

SEQ ID NO: 474600 - DNA, 51 bp, Artificial
  Synthetic oligonucleotide
tgtctatcacgtggacagtctacaagaacgtggacaagcccaagggaaagc

SEQ ID NO: 474601 - DNA, 55 bp, Artificial
  Synthetic oligonucleotide
tgtctattgcagcggctaagagctcattgttccagcgtgaatcaaagtatgacgc

SEQ ID NO: 474602 - DNA, 60 bp, Artificial
  Synthetic oligonucleotide
tgtctattttcgaagtcttctggctgtgtgacggcggtgtagcgagtgtgagaaatgggg

SEQ ID NO: 474603 - DNA, 57 bp, Artificial
  Synthetic oligonucleotide
tgtctcaaaactacagcctggtgacacactactgtttttaggtccacttgaacaagg

SEQ ID NO: 474604 - DNA, 55 bp, Artificial
  Synthetic oligonucleotide
tgtctcaacacaatggcctagtaggaggaatgagggtgtggtacaggcaatgagg

SEQ ID NO: 474605 - DNA, 60 bp, Artificial
  Synthetic oligonucleotide
tgtctcaacttggtgctattaatgtggtttgcaaagcaggcggtaagactgtcacctttg

SEQ ID NO: 474606 - DNA, 60 bp, Artificial
  Synthetic oligonucleotide
tgtctcaagctctaatcttccctcatcagtggatcaacttgcgcactaacaactgtgcta

SEQ ID NO: 474607 - DNA, 60 bp, Artificial
  Synthetic oligonucleotide
tgtctcaatgggactcatctcagcataatacacaaccattcaggaaagggataataatgg

SEQ ID NO: 474608 - DNA, 51 bp, Artificial
  Synthetic oligonucleotide
tgtctcacatatctgttagtacagataccatgtcggatttgactcaggatg

SEQ ID NO: 474609 - DNA, 58 bp, Artificial
  Synthetic oligonucleotide
tgtctcacccttcaagatcccccaatccatccccgcctttgcccaccttgtccagcga

SEQ ID NO: 474610 - DNA, 59 bp, Artificial
  Synthetic oligonucleotide
tgtctcacggtggcggcgttgctaaggcaattgcggacttttgtggacctgattttgtg

SEQ ID NO: 474611 - DNA, 55 bp, Artificial
  Synthetic oligonucleotide
tgtctcagtctctgcttacatctctttccgcgacttcgaagcctacgtccctcgg

SEQ ID NO: 474612 - DNA, 60 bp, Artificial
  Synthetic oligonucleotide
tgtctcatacggctaaagcccacactgcatgggccaacgcccctgctgtacaggctagga

SEQ ID NO: 474613 - DNA, 60 bp, Artificial
  Synthetic oligonucleotide
tgtctcatacggctaaagcctacgctgcatgggcctacgcccctgctatataggctggga

SEQ ID NO: 474614 - DNA, 60 bp, Artificial
  Synthetic oligonucleotide
tgtctcatacggctaaagcctacgttgcacgggtcaacacccttgctgtataggctagga

SEQ ID NO: 474615 - DNA, 58 bp, Artificial
  Synthetic oligonucleotide
tgtctcatcagactcaaacccacccttaccggccccactccactcttgtatcggctgg

SEQ ID NO: 474616 - DNA, 55 bp, Artificial
  Synthetic oligonucleotide
tgtctcatgcaggtctatgtattctgatagcagctgtgacgaatccgtcctcgct

SEQ ID NO: 474617 - DNA, 50 bp, Artificial
  Synthetic oligonucleotide
tgtctcattataaacatgaagaatctattataaaactggccgcgcagcgg

SEQ ID NO: 474618 - DNA, 55 bp, Artificial
  Synthetic oligonucleotide
tgtctccagttaggccctctatggtaaggcaggttgcccaaagggagggaaccta

SEQ ID NO: 474619 - DNA, 54 bp, Artificial
  Synthetic oligonucleotide
tgtctccggtaatcttgagttcggtgggcttcctgattgggaccccgggtacaa

SEQ ID NO: 474620 - DNA, 55 bp, Artificial
  Synthetic oligonucleotide
tgtctcctcagcatcattccaggcacagaacgccagaaaatggaatggtgctaag

SEQ ID NO: 474621 - DNA, 60 bp, Artificial
  Synthetic oligonucleotide
tgtctcctctttactccgtctggctcaacagctagtccatgcgcatgtcaacatgggtct

SEQ ID NO: 474622 - DNA, 60 bp, Artificial
  Synthetic oligonucleotide
tgtctcgaaaattactgggtttcttcacctgggacatttcagactcaacaggcaatcatg

SEQ ID NO: 474623 - DNA, 60 bp, Artificial
  Synthetic oligonucleotide
tgtctcgaataacattctttcagaaggactgcaataagtttactacaggtgagacgatag

SEQ ID NO: 474624 - DNA, 60 bp, Artificial
  Synthetic oligonucleotide
tgtctcgaggtcctttctggatactgagtcggattgggcctgtgataccgagtctcctgg

SEQ ID NO: 474625 - DNA, 56 bp, Artificial
  Synthetic oligonucleotide
tgtctcgcaggggacgccctttggggggggggacgtgagctctcaccatgttacta

SEQ ID NO: 474626 - DNA, 53 bp, Artificial
  Synthetic oligonucleotide
tgtctcgcagttcaataagaatgggtcaatggggtatcttgcatactgcaaaa

SEQ ID NO: 474627 - DNA, 55 bp, Artificial
  Synthetic oligonucleotide
tgtctcgggaaatactgtttggcaagcgttagatgaatcgcaagtcggttggcat

SEQ ID NO: 474628 - DNA, 55 bp, Artificial
  Synthetic oligonucleotide
tgtctcgtccaatatactgtcccgttcgacagtcaagcaagcacgagtagctctc

SEQ ID NO: 474629 - DNA, 59 bp, Artificial
  Synthetic oligonucleotide
tgtctcgtgcccgaccccgctggttcatgctatgcctactcctactttctgtaggggta

SEQ ID NO: 474630 - DNA, 60 bp, Artificial
  Synthetic oligonucleotide
tgtctcgttggcatatcgcggtcgcgtgcgcacagggtctaagccaatcactgttatgac

SEQ ID NO: 474631 - DNA, 56 bp, Artificial
  Synthetic oligonucleotide
tgtctcgtttttactagtcgtgaacgtgttgagaaaaagacagcttaggagaacaa

SEQ ID NO: 474632 - DNA, 60 bp, Artificial
  Synthetic oligonucleotide
tgtctctaacccccaccgtggctgcgccatacctgaatgctccgcttgagtccttgagac

SEQ ID NO: 474633 - DNA, 54 bp, Artificial
  Synthetic oligonucleotide
tgtctctactgtgggcggcgttccgtatacgctgcccgttaaatcggtagagag

SEQ ID NO: 474634 - DNA, 60 bp, Artificial
  Synthetic oligonucleotide
tgtctctaggagcgagttcacagagggtggcatacgccaacttgtacgcaaatataggat

SEQ ID NO: 474635 - DNA, 58 bp, Artificial
  Synthetic oligonucleotide
tgtctctctttgattgcttaaatgaaacatccaaggaccacaactgcaataaagcagt

SEQ ID NO: 474636 - DNA, 50 bp, Artificial
  Synthetic oligonucleotide
tgtctctgataactggactgcctttttaggcttttcagaacgatccgact

SEQ ID NO: 474637 - DNA, 55 bp, Artificial
  Synthetic oligonucleotide
tgtctctgccataagtgagactaggacgtgaaccgaatttcaccaaccctcatgg

SEQ ID NO: 474638 - DNA, 60 bp, Artificial
  Synthetic oligonucleotide
tgtctctgtccacatgcgcagtaatcctctagcttccattataggagcttgtgggttctt

SEQ ID NO: 474639 - DNA, 59 bp, Artificial
  Synthetic oligonucleotide
tgtctcttcgcaagtgttgctgaaataatccacaaaaaacctgaggaggttatgatgtt

SEQ ID NO: 474640 - DNA, 56 bp, Artificial
  Synthetic oligonucleotide
tgtctcttgctattgatgcatacccattgtctaagcatcccaatcgtgaatatagg

SEQ ID NO: 474641 - DNA, 52 bp, Artificial
  Synthetic oligonucleotide
tgtctcttggcgtatctgtgttgagccttgatcgacagtggtgaaggacggt

SEQ ID NO: 474642 - DNA, 58 bp, Artificial
  Synthetic oligonucleotide
tgtctctttggtcatcgtaccgctaccaacccacaaatgagcgtcctacgcctcaaaa

SEQ ID NO: 474643 - DNA, 59 bp, Artificial
  Synthetic oligonucleotide
tgtctcttttggggtgtggtcgcgaacccagacgggaatgcgagccaagctttactgca

SEQ ID NO: 474644 - DNA, 55 bp, Artificial
  Synthetic oligonucleotide
tgtctgaactctccacgacaccggcccttcgtcctctgcttcctaccgacggcga

SEQ ID NO: 474645 - DNA, 55 bp, Artificial
  Synthetic oligonucleotide
tgtctgaatgcgtctctttactgcatatgtgttccccatatgtctctatcgtact

SEQ ID NO: 474646 - DNA, 51 bp, Artificial
  Synthetic oligonucleotide
tgtctgacctaattgataatgctgaatacgagcaagggaattctgcagaat

SEQ ID NO: 474647 - DNA, 59 bp, Artificial
  Synthetic oligonucleotide
tgtctgacggtaggcagtactcctattggctggccaaggactcgggtagcttccgtggc

SEQ ID NO: 474648 - DNA, 55 bp, Artificial
  Synthetic oligonucleotide
tgtctgactcccagaattggctattcaaaactgtcactccacctacaggacatga

SEQ ID NO: 474649 - DNA, 59 bp, Artificial
  Synthetic oligonucleotide
tgtctgataggcgcgtgatagtggactgaaaaagtagagtttctctctcctaaaactcc

SEQ ID NO: 474650 - DNA, 55 bp, Artificial
  Synthetic oligonucleotide
tgtctgatatgaatgaggcagcacacctcagcccttggctacataagaaacatcc

SEQ ID NO: 474651 - DNA, 53 bp, Artificial
  Synthetic oligonucleotide
tgtctgatcaaggcgttgtcacagaggtgacccctatacaacccatgtacatc

SEQ ID NO: 474652 - DNA, 55 bp, Artificial
  Synthetic oligonucleotide
tgtctgatcaggttgctcaactaacagagcaacttggaaagcaacctcagcaggg

SEQ ID NO: 474653 - DNA, 60 bp, Artificial
  Synthetic oligonucleotide
tgtctgattttgctgagcatcatgaacttaatcaattgcaagcgttcacagccgttcagt

SEQ ID NO: 474654 - DNA, 60 bp, Artificial
  Synthetic oligonucleotide
tgtctgcaagcacggtttgtaagctgcaaagctgtactcacggtgtgcctggagacttac

SEQ ID NO: 474655 - DNA, 60 bp, Artificial
  Synthetic oligonucleotide
tgtctgcagatgaggaatatctctcaggcataatatctgaggagatcactgcgtgtcagg

SEQ ID NO: 474656 - DNA, 55 bp, Artificial
  Synthetic oligonucleotide
tgtctgcatatgccaatcaccctcaattacaatacttatgggtctccatggccgc

SEQ ID NO: 474657 - DNA, 57 bp, Artificial
  Synthetic oligonucleotide
tgtctgcgccgctccgtgcgactgctgctgatgggatcaggatccacagtctctcga

SEQ ID NO: 474658 - DNA, 60 bp, Artificial
  Synthetic oligonucleotide
tgtctgctattcgcagtgaattgatgtccttacgttcaacagtcggtgatctgtcttccc

SEQ ID NO: 474659 - DNA, 60 bp, Artificial
  Synthetic oligonucleotide
tgtctggaagatgccatgtatggtacagatggtcttgaagccttagatttaacaactagt

SEQ ID NO: 474660 - DNA, 60 bp, Artificial
  Synthetic oligonucleotide
tgtctggacaagccattccccgaacaatctcagacagtctacagattaacataaattata

SEQ ID NO: 474661 - DNA, 55 bp, Artificial
  Synthetic oligonucleotide
tgtctggagagacctttctatccaatgtgggacgagagtcaccccgacccttccc

SEQ ID NO: 474662 - DNA, 50 bp, Artificial
  Synthetic oligonucleotide
tgtctggagaggggtcatggacgggaagcaagttcagattgaattggaca

SEQ ID NO: 474663 - DNA, 60 bp, Artificial
  Synthetic oligonucleotide
tgtctgggattaatgaatctgccgacatgagcattggagtaactgtgataaagaacaaca

SEQ ID NO: 474664 - DNA, 60 bp, Artificial
  Synthetic oligonucleotide
tgtctggtacgacatctacttttgaagagttgcgtgacttgtgtcataatgcgagttatg

SEQ ID NO: 474665 - DNA, 55 bp, Artificial
  Synthetic oligonucleotide
tgtctggtcacaaatgcagctactctagctgcgcctccgatattgaggcctgaac

SEQ ID NO: 474666 - DNA, 57 bp, Artificial
  Synthetic oligonucleotide
tgtctggtgcttacgatgttgttaagatgcaaccgcccggtaccttcgactccccta

SEQ ID NO: 474667 - DNA, 59 bp, Artificial
  Synthetic oligonucleotide
tgtctggtggaccacctgttcttcattgaataggccacttggtgtacgtcagacttaaa

SEQ ID NO: 474668 - DNA, 52 bp, Artificial
  Synthetic oligonucleotide
tgtctggtttcgtgccaatgcgaggtaatgattttgggttggagggtcaaat

SEQ ID NO: 474669 - DNA, 50 bp, Artificial
  Synthetic oligonucleotide
tgtctggttttgttctaaaaagtgctttcttgttgtgggcagctctcttg

SEQ ID NO: 474670 - DNA, 55 bp, Artificial
  Synthetic oligonucleotide
tgtctgtattctataacgcaatgatcgattttcatacagctacgactgagtcttg

SEQ ID NO: 474671 - DNA, 60 bp, Artificial
  Synthetic oligonucleotide
tgtctgtcgattctgtatctgaggagtcacaaggtaatgtggttacttctgttatggaat

SEQ ID NO: 474672 - DNA, 60 bp, Artificial
  Synthetic oligonucleotide
tgtctgtgcctcgtattcttacgctttcaggtcagaagggttctatttctgttggccaga

SEQ ID NO: 474673 - DNA, 55 bp, Artificial
  Synthetic oligonucleotide
tgtctgtgctgcttaaccgtctctatgctggtgcggatgcttctacctccgcgat

SEQ ID NO: 474674 - DNA, 55 bp, Artificial
  Synthetic oligonucleotide
tgtctgtggcgtactgcctcctggagttaatcccactcttgtcaacgatccgggg

SEQ ID NO: 474675 - DNA, 56 bp, Artificial
  Synthetic oligonucleotide
tgtctgttcgagagggtgcctgggtcactaaaacgtgtgccgtctgtgacaaggag

SEQ ID NO: 474676 - DNA, 60 bp, Artificial
  Synthetic oligonucleotide
tgtctgttgggtgggatcttctaggctggatagttatttcagtgcttgtattcggcctga

SEQ ID NO: 474677 - DNA, 54 bp, Artificial
  Synthetic oligonucleotide
tgtctgtttgagcaatgaatcgccactagaagggttagttcattactgggaaag

SEQ ID NO: 474678 - DNA, 59 bp, Artificial
  Synthetic oligonucleotide
tgtcttaagcgtaccacttcgatcaaacgagatgatgggaaacgtcgtcatttctactc

SEQ ID NO: 474679 - DNA, 60 bp, Artificial
  Synthetic oligonucleotide
tgtcttagatctgtatttggcattagttcggaggaactcaagcgaatggtgaggaaattg

SEQ ID NO: 474680 - DNA, 55 bp, Artificial
  Synthetic oligonucleotide
tgtcttagatgcctgcgactcaagctgtgaaataatgataccgaagggcacagga

SEQ ID NO: 474681 - DNA, 56 bp, Artificial
  Synthetic oligonucleotide
tgtcttaggcccagtcacaaactggtacaactcagggatatcgcccagagatctaa

SEQ ID NO: 474682 - DNA, 55 bp, Artificial
  Synthetic oligonucleotide
tgtcttatagggagtagctcagagccactgtatgtcccaacattggatgactatc

SEQ ID NO: 474683 - DNA, 53 bp, Artificial
  Synthetic oligonucleotide
tgtcttatcaaatgcagggttgtatgcttgttcttacagtgaccctgcaaaat

SEQ ID NO: 474684 - DNA, 60 bp, Artificial
  Synthetic oligonucleotide
tgtcttatgtcttataagacgtgccagtgtcttacaacgtataagacgtatccgtgtcta

SEQ ID NO: 474685 - DNA, 60 bp, Artificial
  Synthetic oligonucleotide
tgtcttcaaaaggtgtatggagcgccatctgtggaagaattgtgtgcaaatcacaaggag

SEQ ID NO: 474686 - DNA, 56 bp, Artificial
  Synthetic oligonucleotide
tgtcttcaaggtgttggccccgtacagaccagaagtgctagaggccctacaccgtt

SEQ ID NO: 474687 - DNA, 60 bp, Artificial
  Synthetic oligonucleotide
tgtcttcacctaccacacatggatggagttaagaaggctagggaagtgagattacacgac

SEQ ID NO: 474688 - DNA, 60 bp, Artificial
  Synthetic oligonucleotide
tgtcttcacttggtttgagctcactatccccgaagagaattacaccttgtcgtctctgat

SEQ ID NO: 474689 - DNA, 52 bp, Artificial
  Synthetic oligonucleotide
tgtcttcatgtcgctctctgacggagcagatatacagtggtttatacttctg

SEQ ID NO: 474690 - DNA, 55 bp, Artificial
  Synthetic oligonucleotide
tgtcttcccagtacgactgtcaccctcaatcactatactttgaggtctcaagggc

SEQ ID NO: 474691 - DNA, 60 bp, Artificial
  Synthetic oligonucleotide
tgtcttccgaatgggtttgcgagtgtctccaattgaggctcctcaaactctcgcattcaa

SEQ ID NO: 474692 - DNA, 60 bp, Artificial
  Synthetic oligonucleotide
tgtcttcgatgttgaactatacttacgatcttcctcatatcactcgttgtgccaccaaca

SEQ ID NO: 474693 - DNA, 55 bp, Artificial
  Synthetic oligonucleotide
tgtcttctaccttcgggggaatactagctggcctaatcggattactggtaggatt

SEQ ID NO: 474694 - DNA, 55 bp, Artificial
  Synthetic oligonucleotide
tgtcttctacgtgagagagattgctatcagcgatcaacttccacagacgagagtc

SEQ ID NO: 474695 - DNA, 59 bp, Artificial
  Synthetic oligonucleotide
tgtcttctccagtcacaactgacaatacctccacaccacctttcacaacaagttttgga

SEQ ID NO: 474696 - DNA, 54 bp, Artificial
  Synthetic oligonucleotide
tgtcttctgcccacggattactcactggagacgttattactctagatgcccttc

SEQ ID NO: 474697 - DNA, 59 bp, Artificial
  Synthetic oligonucleotide
tgtcttctgtagcaggcgttggaggtgttatatacagcaactataaccctggggaactg

SEQ ID NO: 474698 - DNA, 55 bp, Artificial
  Synthetic oligonucleotide
tgtcttcttcaatcccttcaacagattgagagcatgatcgaggccgagtcctccg

SEQ ID NO: 474699 - DNA, 56 bp, Artificial
  Synthetic oligonucleotide
tgtcttgaacacaggtaacatagtaggtatacatgtggggggtaatggtagggtag

SEQ ID NO: 474700 - DNA, 60 bp, Artificial
  Synthetic oligonucleotide
tgtcttgagaccacgtctgctaaccatgcaaagcaacatttcagccttatccgccgctac

SEQ ID NO: 474701 - DNA, 60 bp, Artificial
  Synthetic oligonucleotide
tgtcttgatctgttgttttactacgttgtattacactcatcgagatggcacctaaggcac

SEQ ID NO: 474702 - DNA, 55 bp, Artificial
  Synthetic oligonucleotide
tgtcttgccttctggcaagagagcttgggttcccgtgagggcgcccatcgcagct

SEQ ID NO: 474703 - DNA, 59 bp, Artificial
  Synthetic oligonucleotide
tgtcttggacactgagggggtgtacagcaacgaaagtgagtggggccagacttcgccat

SEQ ID NO: 474704 - DNA, 58 bp, Artificial
  Synthetic oligonucleotide
tgtcttggcccaacttgaggtttctttgttagatcaacacttgtgttgtcccaagatc

SEQ ID NO: 474705 - DNA, 57 bp, Artificial
  Synthetic oligonucleotide
tgtcttgtcactacttctctgaaagtgtgtttaattgggactatttctaaatttcaa

SEQ ID NO: 474706 - DNA, 55 bp, Artificial
  Synthetic oligonucleotide
tgtcttgtccctaaggctacgtattgcctccccgtttaaatcgtcaagctataaa

SEQ ID NO: 474707 - DNA, 56 bp, Artificial
  Synthetic oligonucleotide
tgtcttgtcgctttaaccaggcataaggtcaccttccgctacgagtattgtggtac

SEQ ID NO: 474708 - DNA, 59 bp, Artificial
  Synthetic oligonucleotide
tgtcttgtgcaagggtacgaccgaatcgtaatggagaggcagtgtagtactaaaagtca

SEQ ID NO: 474709 - DNA, 57 bp, Artificial
  Synthetic oligonucleotide
tgtctttacgcgtggcaagatttaattggatgaagagttaagtggttactttattca

SEQ ID NO: 474710 - DNA, 55 bp, Artificial
  Synthetic oligonucleotide
tgtctttatatacttggtccccaagttttatttcctgcaatatgtgggacccact

SEQ ID NO: 474711 - DNA, 54 bp, Artificial
  Synthetic oligonucleotide
tgtctttcccgtgttagatcaggtgttcggactcaaaaaagtcttctcaaggac

SEQ ID NO: 474712 - DNA, 57 bp, Artificial
  Synthetic oligonucleotide
tgtctttcgattacaactctggtcctattgaggtgtttatcgtgtcgaacgacgaaa

SEQ ID NO: 474713 - DNA, 60 bp, Artificial
  Synthetic oligonucleotide
tgtctttctctccgactgcattcttcacagaggcatcagtgcgcacaaaaagatgggctt

SEQ ID NO: 474714 - DNA, 60 bp, Artificial
  Synthetic oligonucleotide
tgtctttctttgaatccaccataatattatggactataacgtttggatctggacactcag

SEQ ID NO: 474715 - DNA, 60 bp, Artificial
  Synthetic oligonucleotide
tgtctttgaggtacacaaggaaagcatgtatccaacttggcactgaacaaacttgcaaaa

SEQ ID NO: 474716 - DNA, 58 bp, Artificial
  Synthetic oligonucleotide
tgtctttgcaacaatgccccagcgtctttaacgaaagcagacagtgcggttggacggg

SEQ ID NO: 474717 - DNA, 55 bp, Artificial
  Synthetic oligonucleotide
tgtctttgcgtatggtgacgtgatgacgcgcgctacgcgcgctgccttcggcagt

SEQ ID NO: 474718 - DNA, 56 bp, Artificial
  Synthetic oligonucleotide
tgtctttggctgggaatatcaacttgacacgaacgtcattagagtacccaaccagt

SEQ ID NO: 474719 - DNA, 55 bp, Artificial
  Synthetic oligonucleotide
tgtctttgtgacatatgtttcagatggagaggctgtgtttactgtcccagctcgt

SEQ ID NO: 474720 - DNA, 60 bp, Artificial
  Synthetic oligonucleotide
tgtcttttagtccttgagtcaatcctatgggctgcaagtgcatcagaaacacccttaagc

SEQ ID NO: 474721 - DNA, 58 bp, Artificial
  Synthetic oligonucleotide
tgtcttttcagacccttatcccaagcgcaggggatcccgacaggcccagaggaatcga

SEQ ID NO: 474722 - DNA, 60 bp, Artificial
  Synthetic oligonucleotide
tgtgaaaattcaatggtcacaggatcccacaatgctgtacaataagatggaattcgagcc

SEQ ID NO: 474723 - DNA, 60 bp, Artificial
  Synthetic oligonucleotide
tgtgaaacactcgagggttcagaacgtctggtgcacaacaatcgttacgtgacgtcatat

SEQ ID NO: 474724 - DNA, 53 bp, Artificial
  Synthetic oligonucleotide
tgtgaaacccagtgtgcccggactcaaaaagatcacccttaagggggaccttc

SEQ ID NO: 474725 - DNA, 55 bp, Artificial
  Synthetic oligonucleotide
tgtgaaacctggagatgtcctaatgataaacagtaatggcaacttaattgcaccg

SEQ ID NO: 474726 - DNA, 51 bp, Artificial
  Synthetic oligonucleotide
tgtgaaacgaatgagaggtctagatgtgatagcacgcactgtggactctgt

SEQ ID NO: 474727 - DNA, 56 bp, Artificial
  Synthetic oligonucleotide
tgtgaaacggatcttgacgttgaagagtgtggtgaggttgctgctttattgtgtct

SEQ ID NO: 474728 - DNA, 59 bp, Artificial
  Synthetic oligonucleotide
tgtgaaactaaccccactctgtgtcactttaaattgcactgatgttaatactaatacca

SEQ ID NO: 474729 - DNA, 55 bp, Artificial
  Synthetic oligonucleotide
tgtgaaactagtgaggccatactggcagtaaacaccacgcggttcccaaacatgt

SEQ ID NO: 474730 - DNA, 53 bp, Artificial
  Synthetic oligonucleotide
tgtgaaactggaccctaacgaacccatagacgcggggtccgcgggtctcaagt

SEQ ID NO: 474731 - DNA, 55 bp, Artificial
  Synthetic oligonucleotide
tgtgaaagtggaacgggttcatgcagggatgaacattgactgttcagtgccgaag

SEQ ID NO: 474732 - DNA, 53 bp, Artificial
  Synthetic oligonucleotide
tgtgaaatatccgaagggagttgaaactgcatatggcaacttagacagcctat

SEQ ID NO: 474733 - DNA, 55 bp, Artificial
  Synthetic oligonucleotide
tgtgaacaagggtggtcagaggaggacattcaggaaagattagcgttcttcgcca

SEQ ID NO: 474734 - DNA, 60 bp, Artificial
  Synthetic oligonucleotide
tgtgaacacgaattctcgcgcggtggagaccgttatgctgtggctctccactctatttac

SEQ ID NO: 474735 - DNA, 55 bp, Artificial
  Synthetic oligonucleotide
tgtgaacactgtttccgactttgacccttattctaacgatgtggttaggaaggag

SEQ ID NO: 474736 - DNA, 60 bp, Artificial
  Synthetic oligonucleotide
tgtgaacagagctgtatggactattataagtgattctagatgttgtttggaaactgtctc

SEQ ID NO: 474737 - DNA, 60 bp, Artificial
  Synthetic oligonucleotide
tgtgaacatcttaggaaactgggttaagcctcaatgcattggttatgagactgttctagt

SEQ ID NO: 474738 - DNA, 60 bp, Artificial
  Synthetic oligonucleotide
tgtgaacatgggcatgtggttagtggaaactacaccgaatgcactggagcttccgaggaa

SEQ ID NO: 474739 - DNA, 55 bp, Artificial
  Synthetic oligonucleotide
tgtgaaccagatagcaccactagcactcgcaacaatagctcctcaggccagcaca

SEQ ID NO: 474740 - DNA, 60 bp, Artificial
  Synthetic oligonucleotide
tgtgaaccctccttcaactaataaatgactaatgcttgaccagccagtctcgcctacttc

SEQ ID NO: 474741 - DNA, 54 bp, Artificial
  Synthetic oligonucleotide
tgtgaacgcgtcgcttttgtttcgaaaggcacgaacctaatcattttaccggta

SEQ ID NO: 474742 - DNA, 60 bp, Artificial
  Synthetic oligonucleotide
tgtgaacgctctataaataacagggtccaatatcctactgatgcttgacaaaatatgcta

SEQ ID NO: 474743 - DNA, 57 bp, Artificial
  Synthetic oligonucleotide
tgtgaacgtcagagccctggtgaagagaattctgaaatcagcttcagagaggagtgc

SEQ ID NO: 474744 - DNA, 60 bp, Artificial
  Synthetic oligonucleotide
tgtgaactctgcttgtttcgtgtctccctccgtcaatcgcatgtcgtgaatctcaattac

SEQ ID NO: 474745 - DNA, 60 bp, Artificial
  Synthetic oligonucleotide
tgtgaactgatgatacccaaaggcactggggatatattggtggactgctcaggagggcag

SEQ ID NO: 474746 - DNA, 57 bp, Artificial
  Synthetic oligonucleotide
tgtgaagaagggacttgaatggttcgaaaaaaatgcaggcaccattaagtcctggga

SEQ ID NO: 474747 - DNA, 60 bp, Artificial
  Synthetic oligonucleotide
tgtgaagacatcgtccattgaccatacaatggatccaagtgataagctcagtggtttatt

SEQ ID NO: 474748 - DNA, 59 bp, Artificial
  Synthetic oligonucleotide
tgtgaagagtcccgtgtgctcgtcttgagtcctccggcccctgaatgtggctaacctta

SEQ ID NO: 474749 - DNA, 60 bp, Artificial
  Synthetic oligonucleotide
tgtgaagagtttctgggacaaggtggtttgtgcaacggaccgctgctttgacttgctcaa

SEQ ID NO: 474750 - DNA, 60 bp, Artificial
  Synthetic oligonucleotide
tgtgaagattcaatggtctcaagaccccacgatgctgtacaataagatggagtttgaacc

SEQ ID NO: 474751 - DNA, 58 bp, Artificial
  Synthetic oligonucleotide
tgtgaagcagaaagaaccttagccaccttacaaacttgctcataggtggagaagttct

SEQ ID NO: 474752 - DNA, 60 bp, Artificial
  Synthetic oligonucleotide
tgtgaagccaaaaattggacagggtgcgaagagtcgagtgtgctcatcttgagtcctccg

SEQ ID NO: 474753 - DNA, 60 bp, Artificial
  Synthetic oligonucleotide
tgtgaagccaagtaatggacagggtgtgaagagccgagtgtgctcactttgagtcctccg

SEQ ID NO: 474754 - DNA, 59 bp, Artificial
  Synthetic oligonucleotide
tgtgaagccttttcagaaggaggtattttcaatattacttctccaatgtgtctggtgtc

SEQ ID NO: 474755 - DNA, 55 bp, Artificial
  Synthetic oligonucleotide
tgtgaaggaagctatagatcgccgccttcattataagattgaagtcaaaccagca

SEQ ID NO: 474756 - DNA, 55 bp, Artificial
  Synthetic oligonucleotide
tgtgaaggatgtgaatgcaacagggtttcattttgaagaatgttcctgttacccg

SEQ ID NO: 474757 - DNA, 50 bp, Artificial
  Synthetic oligonucleotide
tgtgaaggcccatgtaaggtccaatcattcgagcagaggcatgacatagc

SEQ ID NO: 474758 - DNA, 60 bp, Artificial
  Synthetic oligonucleotide
tgtgaaggcccatgtaaggtccaatcgtatgaacagaggcacgacatatcccatgtaggc

SEQ ID NO: 474759 - DNA, 60 bp, Artificial
  Synthetic oligonucleotide
tgtgaaggcccttgtaaagtccagtcctacgaacagcgtcatgacatctcacacgtgggc

SEQ ID NO: 474760 - DNA, 60 bp, Artificial
  Synthetic oligonucleotide
tgtgaaggcccttgtaaggtgcagtcctttgaatctaggcacgatgtctctcatattggc

SEQ ID NO: 474761 - DNA, 60 bp, Artificial
  Synthetic oligonucleotide
tgtgaagggccatgcaagattcagtcgtttgaacagcgtcatgatatctctcatactggg

SEQ ID NO: 474762 - DNA, 51 bp, Artificial
  Synthetic oligonucleotide
tgtgaagtaatcagaatcttttggagcataatgagaagtatataaagcgat

SEQ ID NO: 474763 - DNA, 60 bp, Artificial
  Synthetic oligonucleotide
tgtgaagtaatgatacctaagggcacaggtgacatcctagtagactgttcaggtgggcag

SEQ ID NO: 474764 - DNA, 51 bp, Artificial
  Synthetic oligonucleotide
tgtgaagtcgctacagtaagtggatgggctgatgcttattttcgtctatgt

SEQ ID NO: 474765 - DNA, 60 bp, Artificial
  Synthetic oligonucleotide
tgtgaagtctgggctacccgcctccaagcaatgttactgcagtactatgcagagattttc

SEQ ID NO: 474766 - DNA, 55 bp, Artificial
  Synthetic oligonucleotide
tgtgaagtgcccaagattgagcaaacagcttgaaagtaacacctgggcctggaaa

SEQ ID NO: 474767 - DNA, 57 bp, Artificial
  Synthetic oligonucleotide
tgtgaagttgagtaccacgggcttcgccaaaactcaatgtaccagggtcccatacca

SEQ ID NO: 474768 - DNA, 60 bp, Artificial
  Synthetic oligonucleotide
tgtgaatacaccgtggagatggcaagcccacggcgggtaccgttcatgctccactggaac

SEQ ID NO: 474769 - DNA, 54 bp, Artificial
  Synthetic oligonucleotide
tgtgaatatccagcagggcacaaacaggtaggcaccctacaatatctagcacta

SEQ ID NO: 474770 - DNA, 50 bp, Artificial
  Synthetic oligonucleotide
tgtgaatcacgtcgcgatacgcaatctccgaacgtgacacaccgtaacgt

SEQ ID NO: 474771 - DNA, 60 bp, Artificial
  Synthetic oligonucleotide
tgtgaatcatggagtaacgcaccatgagtcccccgataattcggtcccaagagactacac

SEQ ID NO: 474772 - DNA, 51 bp, Artificial
  Synthetic oligonucleotide
tgtgaatccgtctgggcccaagggacagggggacaagaggaccagacagcg

SEQ ID NO: 474773 - DNA, 60 bp, Artificial
  Synthetic oligonucleotide
tgtgaatgcaactgcgcttaaacttgtagaagcaacgccacagatgaagtggtcatacct

SEQ ID NO: 474774 - DNA, 60 bp, Artificial
  Synthetic oligonucleotide
tgtgaatggtttgtatgagattaatatgtacgtgtgaggcctgggactgctaaccccatg

SEQ ID NO: 474775 - DNA, 60 bp, Artificial
  Synthetic oligonucleotide
tgtgaatgtaagaggatcaggaatgaggatactggtaagaggcaactccccagtattcaa

SEQ ID NO: 474776 - DNA, 56 bp, Artificial
  Synthetic oligonucleotide
tgtgaatgttgatgtgaatgtggataaccatcagcccaaggccaatatggttttct

SEQ ID NO: 474777 - DNA, 55 bp, Artificial
  Synthetic oligonucleotide
tgtgaattacgagacgtctgatggtgacgatacggatagcgattggggtctggaa

SEQ ID NO: 474778 - DNA, 60 bp, Artificial
  Synthetic oligonucleotide
tgtgaattgaccgattcaagctggatagaacttgatgaaataggagaagatgttgctcca

SEQ ID NO: 474779 - DNA, 58 bp, Artificial
  Synthetic oligonucleotide
tgtgaattgcttcgacaaaatattaactgttggtgcccggaaggggatgtctactgag

SEQ ID NO: 474780 - DNA, 60 bp, Artificial
  Synthetic oligonucleotide
tgtgaatttactatacatactacagttgaggcaagttgtcctataacaacagagtgtgtc

SEQ ID NO: 474781 - DNA, 60 bp, Artificial
  Synthetic oligonucleotide
tgtgacaaaatgtgggcatgaagcggcgcctagtaaaacaatgataacaccttattctgt

SEQ ID NO: 474782 - DNA, 60 bp, Artificial
  Synthetic oligonucleotide
tgtgacaaagaactacattaattcaagtgatatttggaagggttcagccttatggaatgc

SEQ ID NO: 474783 - DNA, 60 bp, Artificial
  Synthetic oligonucleotide
tgtgacaaagaatgcaagtgtctttgatggattttcaattgagtcagactacacggcctt

SEQ ID NO: 474784 - DNA, 60 bp, Artificial
  Synthetic oligonucleotide
tgtgacaacaattgcattgaaagcataaggaacggaacatatgaccatgatatttacaga

SEQ ID NO: 474785 - DNA, 59 bp, Artificial
  Synthetic oligonucleotide
tgtgacaccgaagggagacctttgcgaatcagaacacgaagaggcattcagcctagccg

SEQ ID NO: 474786 - DNA, 53 bp, Artificial
  Synthetic oligonucleotide
tgtgacagaaacaggtttcctgtagctattgggcttactaattaattgggcct

SEQ ID NO: 474787 - DNA, 55 bp, Artificial
  Synthetic oligonucleotide
tgtgacagctaaactcctgcatccagcttgcaaccatggttctgaagatccacac

SEQ ID NO: 474788 - DNA, 60 bp, Artificial
  Synthetic oligonucleotide
tgtgacataccccatcagtttaaagatgtgtctaaattgattgccacagaggactaccgt

SEQ ID NO: 474789 - DNA, 52 bp, Artificial
  Synthetic oligonucleotide
tgtgacatcgttcgaccgttcgatggcaaccaagtacgtgcggacctacgga

SEQ ID NO: 474790 - DNA, 55 bp, Artificial
  Synthetic oligonucleotide
tgtgacatgctgcgactaattgattacaacaaggctgcactaacaaaattcaagc

SEQ ID NO: 474791 - DNA, 60 bp, Artificial
  Synthetic oligonucleotide
tgtgacattgtcaatggtgccttggggagtcctggttgtgatcacttgaatggtgcagaa

SEQ ID NO: 474792 - DNA, 60 bp, Artificial
  Synthetic oligonucleotide
tgtgacatttgaatttgccttcgaactgtataagcacgtggagatgaggttccccatctt

SEQ ID NO: 474793 - DNA, 60 bp, Artificial
  Synthetic oligonucleotide
tgtgaccatagaggcccatctttgaggaccaccactgcatctggaaaactagtcacgcaa

SEQ ID NO: 474794 - DNA, 59 bp, Artificial
  Synthetic oligonucleotide
tgtgaccatcacactgtcagaaccaagaaacatccaacaaaaactccctcctgaaataa

SEQ ID NO: 474795 - DNA, 55 bp, Artificial
  Synthetic oligonucleotide
tgtgacccaatagtcttgaaccatctacagggcgtcttgtttgtggttgggagcc

SEQ ID NO: 474796 - DNA, 60 bp, Artificial
  Synthetic oligonucleotide
tgtgacccatccgttactcgccaggcatatgctgacgtgactttttcgttcacgcagtat

SEQ ID NO: 474797 - DNA, 53 bp, Artificial
  Synthetic oligonucleotide
tgtgacccgatcagattattcgtgaaaggggagccgcacaaacaagctaagct

SEQ ID NO: 474798 - DNA, 57 bp, Artificial
  Synthetic oligonucleotide
tgtgaccgatgaacgttcgagtgtgcacgtttctagaccacggagtgacggtagggt

SEQ ID NO: 474799 - DNA, 60 bp, Artificial
  Synthetic oligonucleotide
tgtgaccgccttcgttaccttaaatgatctacatacaatatgagagctcttacttaagag

SEQ ID NO: 474800 - DNA, 60 bp, Artificial
  Synthetic oligonucleotide
tgtgacctctgagtcacctattcaattagggcgatcacatgggggtcatacttaatcagg

SEQ ID NO: 474801 - DNA, 51 bp, Artificial
  Synthetic oligonucleotide
tgtgaccttccgagagtgtccactctcccctcattagaccaggaagacgcg

SEQ ID NO: 474802 - DNA, 56 bp, Artificial
  Synthetic oligonucleotide
tgtgaccttgagccggaggctaggaaagtgatttcctccctcacggaacggcttta

SEQ ID NO: 474803 - DNA, 60 bp, Artificial
  Synthetic oligonucleotide
tgtgacgagctcgctgcaaaactgtcgggcctcggaatcaatgctgtagcgtattaccgg

SEQ ID NO: 474804 - DNA, 60 bp, Artificial
  Synthetic oligonucleotide
tgtgacgccagattatgcaaaatctggatgcaaggtggacatgcagccgttccactcata

SEQ ID NO: 474805 - DNA, 59 bp, Artificial
  Synthetic oligonucleotide
tgtgacgcgaagtgtcaaacaccccagggagcgatgaacagtagccttcctttccagaa

SEQ ID NO: 474806 - DNA, 55 bp, Artificial
  Synthetic oligonucleotide
tgtgacggggggggtgaatgcccgtactacccacagcctcacgtccttcttttca

SEQ ID NO: 474807 - DNA, 60 bp, Artificial
  Synthetic oligonucleotide
tgtgacgttggagttgccactgtctgcgcagctgccttcaaaggcgttagcgacgcaatc

SEQ ID NO: 474808 - DNA, 52 bp, Artificial
  Synthetic oligonucleotide
tgtgactactaagggttttattataagggtggtagattaggggtgtttacta

SEQ ID NO: 474809 - DNA, 50 bp, Artificial
  Synthetic oligonucleotide
tgtgactactgttttgctagatgaaaatggtgtgggtcccctgtgtaaag

SEQ ID NO: 474810 - DNA, 60 bp, Artificial
  Synthetic oligonucleotide
tgtgactatgctagttttgatggtctgataactaagcaagtcatgagcaagatggcagaa

SEQ ID NO: 474811 - DNA, 52 bp, Artificial
  Synthetic oligonucleotide
tgtgactcattctctacaggaaaattcctgctagcatacacccctcccgggg

SEQ ID NO: 474812 - DNA, 60 bp, Artificial
  Synthetic oligonucleotide
tgtgactccattctttacgttggagtcttcaaccttatacagcagctgccatggtacgtt

SEQ ID NO: 474813 - DNA, 51 bp, Artificial
  Synthetic oligonucleotide
tgtgactgagacgagtgatgttacaactgaagtcgctgcatcgagtagtga

SEQ ID NO: 474814 - DNA, 60 bp, Artificial
  Synthetic oligonucleotide
tgtgactgcggacagcgctcgcgagctcgtggctaacgcggccgtgctgtcggaggctta

SEQ ID NO: 474815 - DNA, 60 bp, Artificial
  Synthetic oligonucleotide
tgtgacttacgagggcgatactagtgcgggctacaatcatgatgtctccatacttcgtgc

SEQ ID NO: 474816 - DNA, 60 bp, Artificial
  Synthetic oligonucleotide
tgtgacttgcaatatccgttcggctcaccactaactgacaacccttgcgtcaacttccag

SEQ ID NO: 474817 - DNA, 60 bp, Artificial
  Synthetic oligonucleotide
tgtgagaaaaatgatgactaattcacaagacacagagctctctttcacaatcactggaga

SEQ ID NO: 474818 - DNA, 57 bp, Artificial
  Synthetic oligonucleotide
tgtgagaacactatcccaacagatgcgtgatgtactgggtacattggatactgtcca

SEQ ID NO: 474819 - DNA, 60 bp, Artificial
  Synthetic oligonucleotide
tgtgagaaccctattccaacaaatgagggatgtgcttggaacatttgatactgttcagat

SEQ ID NO: 474820 - DNA, 55 bp, Artificial
  Synthetic oligonucleotide
tgtgagaagtttagacagaagcacgaccatgctacagcgcgttgtgagccagtcg

SEQ ID NO: 474821 - DNA, 60 bp, Artificial
  Synthetic oligonucleotide
tgtgagaatcgatggccagtggcagatcgcaaatcctgataagtttcaattcttctcatc

SEQ ID NO: 474822 - DNA, 60 bp, Artificial
  Synthetic oligonucleotide
tgtgagacagagcccagacttcgatgaaaacaagattatggtattcctcaagtcgcagtg

SEQ ID NO: 474823 - DNA, 60 bp, Artificial
  Synthetic oligonucleotide
tgtgagagcgcgggaacccaagaggatgcggcgagcctacgagtcttcacggaggctatg

SEQ ID NO: 474824 - DNA, 55 bp, Artificial
  Synthetic oligonucleotide
tgtgagaggaatttataacgatgttgttgaatgtatcgacccaagtcaacagttc

SEQ ID NO: 474825 - DNA, 58 bp, Artificial
  Synthetic oligonucleotide
tgtgagaggtaactcccctgtgttcaactataacaaggcaaccaagaggcttacagtc

SEQ ID NO: 474826 - DNA, 56 bp, Artificial
  Synthetic oligonucleotide
tgtgagaggtaattcccctgtgtttaactacaacaaagcaaccaagaggcttacaa

SEQ ID NO: 474827 - DNA, 50 bp, Artificial
  Synthetic oligonucleotide
tgtgagagtctggacaagaacaccagcagcgggtatccctaccataagca

SEQ ID NO: 474828 - DNA, 55 bp, Artificial
  Synthetic oligonucleotide
tgtgagagtggaagagctgccaacccggccgctactggctgagccgctgcaaacc

SEQ ID NO: 474829 - DNA, 56 bp, Artificial
  Synthetic oligonucleotide
tgtgagatccgtgcactacgggtcttaggcgacgacagcgctttccgttcttgcga

SEQ ID NO: 474830 - DNA, 50 bp, Artificial
  Synthetic oligonucleotide
tgtgagatgggtgacggaaaatcaactaaatgtttagagcctagaaagtt

SEQ ID NO: 474831 - DNA, 60 bp, Artificial
  Synthetic oligonucleotide
tgtgagattcgggcgatttttgctgactcgaagattctgctcgagcatgcgaatttcgct

SEQ ID NO: 474832 - DNA, 60 bp, Artificial
  Synthetic oligonucleotide
tgtgagattgacctatcgatcgcctattgatgttgcacactatctcacgaagaagtctta

SEQ ID NO: 474833 - DNA, 60 bp, Artificial
  Synthetic oligonucleotide
tgtgagcaaattgctgactcacagcatcggtcccatcgacagatggtaaccaccactaat

SEQ ID NO: 474834 - DNA, 57 bp, Artificial
  Synthetic oligonucleotide
tgtgagcacagtcggtgaatcgcaagggttaagcgcaaaccgagtcaacattctctt

SEQ ID NO: 474835 - DNA, 60 bp, Artificial
  Synthetic oligonucleotide
tgtgagcagatggatagagagacttttaggtcagaacatcctaattttttccttaatcag

SEQ ID NO: 474836 - DNA, 60 bp, Artificial
  Synthetic oligonucleotide
tgtgagcagattgcagattcacagcatcggtctcacagacaaatggtgactaccaccaac

SEQ ID NO: 474837 - DNA, 60 bp, Artificial
  Synthetic oligonucleotide
tgtgagcagattgccgactcccagcatcggtcccacagacagatggtgacgacaaccaac

SEQ ID NO: 474838 - DNA, 52 bp, Artificial
  Synthetic oligonucleotide
tgtgagcagtccaaggcgtgtaaacaagccggcgcgctccctacatgacgtt

SEQ ID NO: 474839 - DNA, 60 bp, Artificial
  Synthetic oligonucleotide
tgtgagccctctgtggataggagaatgcccaaaatatgtaaaaagtgagagtctaaggct

SEQ ID NO: 474840 - DNA, 51 bp, Artificial
  Synthetic oligonucleotide
tgtgagccctggtggtgccattgtactaagttcagctttaagatggggttc

SEQ ID NO: 474841 - DNA, 51 bp, Artificial
  Synthetic oligonucleotide
tgtgagccggacggtaatctccaagtggcaccggtcggttgtgggtatccg

SEQ ID NO: 474842 - DNA, 60 bp, Artificial
  Synthetic oligonucleotide
tgtgagcctggtgattgtggtggaaaattattgtgcaagcatggtgtaataggtataatt

SEQ ID NO: 474843 - DNA, 60 bp, Artificial
  Synthetic oligonucleotide
tgtgagcgcctgaaagtctcttgcggacctaaatctattcaattccatgcatgctttaat

SEQ ID NO: 474844 - DNA, 58 bp, Artificial
  Synthetic oligonucleotide
tgtgagcgcctgctcgagctacggtattcgcctaggttcgacgggtggtgcggttttg

SEQ ID NO: 474845 - DNA, 60 bp, Artificial
  Synthetic oligonucleotide
tgtgagcgtgtgagtggggagaattcttttcgattccagatcaacataagtgaaccagag

SEQ ID NO: 474846 - DNA, 52 bp, Artificial
  Synthetic oligonucleotide
tgtgagctcctatcggatactttgaagttccggggctttccaaggtacctct

SEQ ID NO: 474847 - DNA, 60 bp, Artificial
  Synthetic oligonucleotide
tgtgagctccttgcgacctacgcaagaggatccgatgagggtaacaggcacaccaacgag

SEQ ID NO: 474848 - DNA, 60 bp, Artificial
  Synthetic oligonucleotide
tgtgagctcgattgtgtccttattcgcgtgactcctttaacaaatcacaatagatctcat

SEQ ID NO: 474849 - DNA, 59 bp, Artificial
  Synthetic oligonucleotide
tgtgagctgaatggcacagactggctggacaaacattttagttgggcagtggagacttt

SEQ ID NO: 474850 - DNA, 60 bp, Artificial
  Synthetic oligonucleotide
tgtgagctgaccgattcaagttggatagagcttgatgaaataggggaagatgtcgcccca

SEQ ID NO: 474851 - DNA, 60 bp, Artificial
  Synthetic oligonucleotide
tgtgagctttgacctgtgattcggcttctctctgattccatgtgctcacggcggactcgg

SEQ ID NO: 474852 - DNA, 58 bp, Artificial
  Synthetic oligonucleotide
tgtgaggaacacgggcatccatgggctacctggggatttcttgtcgaattaccctaga

SEQ ID NO: 474853 - DNA, 60 bp, Artificial
  Synthetic oligonucleotide
tgtgaggagcttgattcaccagttgcatctatcaagtgttacagtgccgtcgctcatgaa

SEQ ID NO: 474854 - DNA, 55 bp, Artificial
  Synthetic oligonucleotide
tgtgaggcctctggtgagatgggtttcgtcttgctgtagtctgccagaagtggag

SEQ ID NO: 474855 - DNA, 60 bp, Artificial
  Synthetic oligonucleotide
tgtgagggcccatgtaaggttcagtcatttgaacagcgtcacgacatatcacatgttggt

SEQ ID NO: 474856 - DNA, 60 bp, Artificial
  Synthetic oligonucleotide
tgtgagggtcagtggcttgctaaatgtgaaccagaccacttgcctaaagacatatttgta

SEQ ID NO: 474857 - DNA, 58 bp, Artificial
  Synthetic oligonucleotide
tgtgaggtaatcgcatgaaattcaaccgtaaaggggtcctctcgctggtgggagccgc

SEQ ID NO: 474858 - DNA, 60 bp, Artificial
  Synthetic oligonucleotide
tgtgaggtcatcgactcggactctaagtcgtggtctacagtctccgatcaagaggattct

SEQ ID NO: 474859 - DNA, 60 bp, Artificial
  Synthetic oligonucleotide
tgtgagtaagcaaacgcaggatggtaactattcacagcatgggccgttactgtcaactcc

SEQ ID NO: 474860 - DNA, 56 bp, Artificial
  Synthetic oligonucleotide
tgtgagtaagcttggcaagaagtggtacccgtataagaccagcgcagattacgcga

SEQ ID NO: 474861 - DNA, 58 bp, Artificial
  Synthetic oligonucleotide
tgtgagtcggagagtgtaaaccctattggttgagaaacggcgtctgcggaagtgtcta

SEQ ID NO: 474862 - DNA, 55 bp, Artificial
  Synthetic oligonucleotide
tgtgagtctagagtcccgtgtgagttgtaacggtagacatctgtgacgcgaagtc

SEQ ID NO: 474863 - DNA, 54 bp, Artificial
  Synthetic oligonucleotide
tgtgagtggaagtctttctttattggggggtacactcgaggagtggaaggcggg

SEQ ID NO: 474864 - DNA, 53 bp, Artificial
  Synthetic oligonucleotide
tgtgagtgttaaggtaccgtacttttatccacgtgtggacataagtgcgcgtg

SEQ ID NO: 474865 - DNA, 55 bp, Artificial
  Synthetic oligonucleotide
tgtgagtttcctcactaggatggcaactaggcggaacgagtgggactcagccctg

SEQ ID NO: 474866 - DNA, 55 bp, Artificial
  Synthetic oligonucleotide
tgtgataaaaactcctccactcaagaagaaaatgtctggtaccttcgggggaata

SEQ ID NO: 474867 - DNA, 55 bp, Artificial
  Synthetic oligonucleotide
tgtgataaaacatgtcccagtggaaggtggcttgtacgtaaagacctatgccccg

SEQ ID NO: 474868 - DNA, 60 bp, Artificial
  Synthetic oligonucleotide
tgtgataagactgccatcccacttacgtggacagggatgattgacttgccaggatactat

SEQ ID NO: 474869 - DNA, 56 bp, Artificial
  Synthetic oligonucleotide
tgtgataatgcactgttaaccccaatttcatccccaatggttaacttaactcaagt

SEQ ID NO: 474870 - DNA, 60 bp, Artificial
  Synthetic oligonucleotide
tgtgataattatgtagacagagttattaaaatgtatgctgatgtctttgggatgtgggtc

SEQ ID NO: 474871 - DNA, 59 bp, Artificial
  Synthetic oligonucleotide
tgtgataccaaatgtcaaaccccagtgggtgctataaattcaagtatgcctttccacaa

SEQ ID NO: 474872 - DNA, 60 bp, Artificial
  Synthetic oligonucleotide
tgtgatactaagtgtcaaactccagtgggtgagataaactccagtatgcccttccacaat

SEQ ID NO: 474873 - DNA, 60 bp, Artificial
  Synthetic oligonucleotide
tgtgatactagctgtgaactgatgatacccaaaggcactggggatatattggtggactgc

SEQ ID NO: 474874 - DNA, 60 bp, Artificial
  Synthetic oligonucleotide
tgtgatagccacagctaatgccaccactactcaaacaatacctgaccccaccgaagggtc

SEQ ID NO: 474875 - DNA, 60 bp, Artificial
  Synthetic oligonucleotide
tgtgataggctatgtggaactcccccctatgccattggctgatacatcacaaatggtgcc

SEQ ID NO: 474876 - DNA, 60 bp, Artificial
  Synthetic oligonucleotide
tgtgataggctttacacttcccatcatccttaaagctctatatatgttgtcaacacgtgg

SEQ ID NO: 474877 - DNA, 60 bp, Artificial
  Synthetic oligonucleotide
tgtgataggtagtgccctgcacggggacacaccctgaggatgacccatagatgtactttc

SEQ ID NO: 474878 - DNA, 60 bp, Artificial
  Synthetic oligonucleotide
tgtgataggttaagacgtgatggcgtcatgactccagctcaacagaatcaagtcgaggca

SEQ ID NO: 474879 - DNA, 60 bp, Artificial
  Synthetic oligonucleotide
tgtgatcatggaagttgtcttcccaaatgaagtaggagctaggatactaacgtcggagtc

SEQ ID NO: 474880 - DNA, 60 bp, Artificial
  Synthetic oligonucleotide
tgtgatcatgtttactgactcatgggggcataatcttaacacaccttcttaaataccgtc

SEQ ID NO: 474881 - DNA, 60 bp, Artificial
  Synthetic oligonucleotide
tgtgatccagatactttctggtctgttataccatgtctgctagatggggagttaattgcc

SEQ ID NO: 474882 - DNA, 57 bp, Artificial
  Synthetic oligonucleotide
tgtgatccatgggtgtggaggttccggcaaaagtcacgccattcaacagttcatccg

SEQ ID NO: 474883 - DNA, 55 bp, Artificial
  Synthetic oligonucleotide
tgtgatcgtgccaaaacttggaacatggccgagtatgatggatgttgctacggca

SEQ ID NO: 474884 - DNA, 60 bp, Artificial
  Synthetic oligonucleotide
tgtgatctcacatttaacgaaaagtttatgtgatcatggatcccttgttctcagttttcc

SEQ ID NO: 474885 - DNA, 60 bp, Artificial
  Synthetic oligonucleotide
tgtgatctgctgttaggaggaggaaaatggtcctacatcgtcgaaagaccatcggctgtt

SEQ ID NO: 474886 - DNA, 59 bp, Artificial
  Synthetic oligonucleotide
tgtgatctgtttaaatctgaagagtactgtttagtagccttgacacgtcacaaaaggac

SEQ ID NO: 474887 - DNA, 60 bp, Artificial
  Synthetic oligonucleotide
tgtgatgaaacatagaatgataaagagagagcaccgaaacgacatcatgagtacgctttt

SEQ ID NO: 474888 - DNA, 55 bp, Artificial
  Synthetic oligonucleotide
tgtgatgaaccggagcccagatcactagcaagctggatacaaagtgaattcaaca

SEQ ID NO: 474889 - DNA, 59 bp, Artificial
  Synthetic oligonucleotide
tgtgatgaacttttgagagtttttgatcgatatccgtgtaaagtacctgtgaaaggagc

SEQ ID NO: 474890 - DNA, 60 bp, Artificial
  Synthetic oligonucleotide
tgtgatgaaggacaagccatattacttagtaacatgggcaaactctgcaattgagatgtt

SEQ ID NO: 474891 - DNA, 60 bp, Artificial
  Synthetic oligonucleotide
tgtgatgaaggatggacgctctctcatagtgccatgcagagaccaagatgagctggttgg

SEQ ID NO: 474892 - DNA, 58 bp, Artificial
  Synthetic oligonucleotide
tgtgatgaatgtttacacttactggacgcaacgtcaaggttacctttcactgtattcg

SEQ ID NO: 474893 - DNA, 60 bp, Artificial
  Synthetic oligonucleotide
tgtgatgacctaattggtaagacttcatggtcctatattgtggagaagcctaacccaaca

SEQ ID NO: 474894 - DNA, 60 bp, Artificial
  Synthetic oligonucleotide
tgtgatgatcagtgtatggagagcataaggaacaacacttatgaccatacccaatacagg

SEQ ID NO: 474895 - DNA, 60 bp, Artificial
  Synthetic oligonucleotide
tgtgatgatgactgtatggccagtataaggaataatacctacgatcatagcacatacaga

SEQ ID NO: 474896 - DNA, 59 bp, Artificial
  Synthetic oligonucleotide
tgtgatgattaccacggctggccaaggcttgaggaaagatgggaatacgttgaacgtaa

SEQ ID NO: 474897 - DNA, 60 bp, Artificial
  Synthetic oligonucleotide
tgtgatgccacgtatgcgttattagtacttcgtctcgaagttatgagtgagggccctata

SEQ ID NO: 474898 - DNA, 56 bp, Artificial
  Synthetic oligonucleotide
tgtgatgctactttttgccggcgttgacggggatacctatgtgtcgggggggaaga

SEQ ID NO: 474899 - DNA, 60 bp, Artificial
  Synthetic oligonucleotide
tgtgatggaaatactgggcattgcaattaacaggtataatggattaacattgcgtggagt

SEQ ID NO: 474900 - DNA, 59 bp, Artificial
  Synthetic oligonucleotide
tgtgatggaaatactggggatagcaatcaacaggtacaatggactaactctacgtgggg

SEQ ID NO: 474901 - DNA, 59 bp, Artificial
  Synthetic oligonucleotide
tgtgatggaaattctagggatagctatcaacaggtacaatggactaactttgcgaggag

SEQ ID NO: 474902 - DNA, 58 bp, Artificial
  Synthetic oligonucleotide
tgtgatggaagtccctgaggtaatccctaggtgctaattctttaaggatcgtaagagc

SEQ ID NO: 474903 - DNA, 60 bp, Artificial
  Synthetic oligonucleotide
tgtgatggagatattggggatagcgatcaatagatataatgggttaaccttacgaggagt

SEQ ID NO: 474904 - DNA, 60 bp, Artificial
  Synthetic oligonucleotide
tgtgatggaggaagttcataaaatgattcgtgcagatcagcattgggagacacctgcgtt

SEQ ID NO: 474905 - DNA, 60 bp, Artificial
  Synthetic oligonucleotide
tgtgatggttcagtgggcctacgaccacgatatcacagaggagagcattttggcctatga

SEQ ID NO: 474906 - DNA, 60 bp, Artificial
  Synthetic oligonucleotide
tgtgatggttgacgctgaaattaagtactgtaaggggatgggaattgtgcaaccatatat

SEQ ID NO: 474907 - DNA, 55 bp, Artificial
  Synthetic oligonucleotide
tgtgatgtcgttattggcatcattaacaacacagtttatgatcctctgcaacctg

SEQ ID NO: 474908 - DNA, 55 bp, Artificial
  Synthetic oligonucleotide
tgtgatgtctccttactatgcactcaatcctaagaaatccgatccttcaacgcta

SEQ ID NO: 474909 - DNA, 59 bp, Artificial
  Synthetic oligonucleotide
tgtgatgtgggatccactagtaaacgaattcccagatacggtgcacggatttcgttgta

SEQ ID NO: 474910 - DNA, 55 bp, Artificial
  Synthetic oligonucleotide
tgtgattaccaacggccatggggtttgtatatacttcctacccctcgagcaccca

SEQ ID NO: 474911 - DNA, 54 bp, Artificial
  Synthetic oligonucleotide
tgtgattaccgagaagttactggccaatcacatcatccctcttttcgatgcact

SEQ ID NO: 474912 - DNA, 60 bp, Artificial
  Synthetic oligonucleotide
tgtgattacgcgccatttcgatcaccgatatcatccgcaggctatggccctcaatgtgtc

SEQ ID NO: 474913 - DNA, 58 bp, Artificial
  Synthetic oligonucleotide
tgtgattatgggcaccaacgtacgctggcaggttgacaatcctggtaagaaacgggac

SEQ ID NO: 474914 - DNA, 60 bp, Artificial
  Synthetic oligonucleotide
tgtgattcaagctgtgaagtgatgatacctaagggcactggtgacattctagtagattgt

SEQ ID NO: 474915 - DNA, 59 bp, Artificial
  Synthetic oligonucleotide
tgtgattccattctgtcattgtgaatgttatgacaatgcttgcaacaccttgtggtgtc

SEQ ID NO: 474916 - DNA, 52 bp, Artificial
  Synthetic oligonucleotide
tgtgattccccaagtaatgtaaatggaggacccggagttaaggggtttggct

SEQ ID NO: 474917 - DNA, 55 bp, Artificial
  Synthetic oligonucleotide
tgtgattccccaagtaatgtcaatgggggacccggagtcaaagggtttggcttca

SEQ ID NO: 474918 - DNA, 55 bp, Artificial
  Synthetic oligonucleotide
tgtgattctggtccgtttgcaacggacacccaacgaaatatatccgggtggactt

SEQ ID NO: 474919 - DNA, 60 bp, Artificial
  Synthetic oligonucleotide
tgtgattgtagttgagctcagtaattaagtgctgaaggaagtaagatctaggtaggacaa

SEQ ID NO: 474920 - DNA, 60 bp, Artificial
  Synthetic oligonucleotide
tgtgatttccatcggggcactagtggcaatcctgaagctatgtgtgctttgtgttatatg

SEQ ID NO: 474921 - DNA, 60 bp, Artificial
  Synthetic oligonucleotide
tgtgatttccgaaatcactcatcggagaagaatggagttctgggaatcgtctgccatccc

SEQ ID NO: 474922 - DNA, 60 bp, Artificial
  Synthetic oligonucleotide
tgtgattttgagcttgagatgctgcagtttcaaggagccggatcttcaagaatggaaaat

SEQ ID NO: 474923 - DNA, 60 bp, Artificial
  Synthetic oligonucleotide
tgtgcaaaacagcactttgaggaagtgatgaatcgcataactgagagaaatgatctacat

SEQ ID NO: 474924 - DNA, 60 bp, Artificial
  Synthetic oligonucleotide
tgtgcaaactcgcacctatcgggaatgtgctttctaataagccctttcaattcttggaca

SEQ ID NO: 474925 - DNA, 53 bp, Artificial
  Synthetic oligonucleotide
tgtgcaaattactttggaggtagtaaaaccaaaaaggtaaatgcgcaaggtaa

SEQ ID NO: 474926 - DNA, 56 bp, Artificial
  Synthetic oligonucleotide
tgtgcaaattgattaggggaaccaaatcactgacagaagtggtacctttaagtaaa

SEQ ID NO: 474927 - DNA, 60 bp, Artificial
  Synthetic oligonucleotide
tgtgcaacagctttttggaagggttccaacgggtgaatttccattacatcagatgatgct

SEQ ID NO: 474928 - DNA, 53 bp, Artificial
  Synthetic oligonucleotide
tgtgcaacattctcaaagggaaatttcagacagcagcgcaacgagcaatgatg

SEQ ID NO: 474929 - DNA, 59 bp, Artificial
  Synthetic oligonucleotide
tgtgcaaccaagcgtcatgggaacccttcggaggaagacagttgccatcttatgggcgg

SEQ ID NO: 474930 - DNA, 60 bp, Artificial
  Synthetic oligonucleotide
tgtgcaacctcacttctgttcacaccatccgagagaccggacctcgacaattcgcccaga

SEQ ID NO: 474931 - DNA, 60 bp, Artificial
  Synthetic oligonucleotide
tgtgcaacggaccgctgctttgacttgctcaagaggctgtttgacacgtttgaggactcc

SEQ ID NO: 474932 - DNA, 58 bp, Artificial
  Synthetic oligonucleotide
tgtgcaacgtggaaaaacaacggcacgtagataacggcaggcgattccactgtgttgg

SEQ ID NO: 474933 - DNA, 60 bp, Artificial
  Synthetic oligonucleotide
tgtgcaactcctgcaatgtgttcttcgtggcgtcagcttgaaatgtctgtagtctagtaa

SEQ ID NO: 474934 - DNA, 60 bp, Artificial
  Synthetic oligonucleotide
tgtgcaacttgccttaaataacactcatgttgtcagtaccaagtatactcctcatcaact

SEQ ID NO: 474935 - DNA, 60 bp, Artificial
  Synthetic oligonucleotide
tgtgcaactttggtgctcccatacgtaaactctctctctattgacagtatggtgaaacac

SEQ ID NO: 474936 - DNA, 60 bp, Artificial
  Synthetic oligonucleotide
tgtgcaagacgtaatgtcaattcaaccaaagaagggtgatgtcattattgcgtcatactc

SEQ ID NO: 474937 - DNA, 60 bp, Artificial
  Synthetic oligonucleotide
tgtgcaagcgatgtccaaaaggtctaggtcactaaattcagcagcattttactacagggt

SEQ ID NO: 474938 - DNA, 60 bp, Artificial
  Synthetic oligonucleotide
tgtgcaagctcagggtacaggatcaaatgctgatatgatccaacatgggaacaatttact

SEQ ID NO: 474939 - DNA, 60 bp, Artificial
  Synthetic oligonucleotide
tgtgcaagtgctgctctctaactgagtgctcactaagtttttggacagaggcttatcatg

SEQ ID NO: 474940 - DNA, 52 bp, Artificial
  Synthetic oligonucleotide
tgtgcaagttgttgtccactctaacagacgcgaaaggtcaactcatctaccc

SEQ ID NO: 474941 - DNA, 55 bp, Artificial
  Synthetic oligonucleotide
tgtgcaagtttaaggaggtgtatggcgtgagctttgctgaactagtgcggtgctt

SEQ ID NO: 474942 - DNA, 52 bp, Artificial
  Synthetic oligonucleotide
tgtgcaatatcacggacttcgtcagaattcaatgtatgagggtcctatacca

SEQ ID NO: 474943 - DNA, 60 bp, Artificial
  Synthetic oligonucleotide
tgtgcaatctttgataacctgaggtatctgatacctgctgtaacatcgacatactcaggt

SEQ ID NO: 474944 - DNA, 55 bp, Artificial
  Synthetic oligonucleotide
tgtgcaatgtcggatccagtctatcgagtacataataggttacagggatatatag

SEQ ID NO: 474945 - DNA, 60 bp, Artificial
  Synthetic oligonucleotide
tgtgcacaaagttacattcgtgtaattttcgtttctctccctccaatgcgcatgtgttca

SEQ ID NO: 474946 - DNA, 60 bp, Artificial
  Synthetic oligonucleotide
tgtgcacccatatatgaatgtgcctgggtcagctctaccggcattgtgaagaaggggctt

SEQ ID NO: 474947 - DNA, 57 bp, Artificial
  Synthetic oligonucleotide
tgtgcaccctttgggtgacaccttacgacgcttcgggctactttgatgattccttgt

SEQ ID NO: 474948 - DNA, 56 bp, Artificial
  Synthetic oligonucleotide
tgtgcaccgttctacccgctgttcgactcttaagtaatagaccgaagaacgttcta

SEQ ID NO: 474949 - DNA, 58 bp, Artificial
  Synthetic oligonucleotide
tgtgcacgagaaagtgtatgatggcccggcgtgggttggtgttcaaacccgcgttaga

SEQ ID NO: 474950 - DNA, 60 bp, Artificial
  Synthetic oligonucleotide
tgtgcacgcgtgtgcgagcgcgatcctggatttctatctaacgacaactatttcaaatgg

SEQ ID NO: 474951 - DNA, 60 bp, Artificial
  Synthetic oligonucleotide
tgtgcacgttgctaccgtacaacccatgtgagcttagagcaaaggtgctcgccgatagtt

SEQ ID NO: 474952 - DNA, 59 bp, Artificial
  Synthetic oligonucleotide
tgtgcactataagttgacggttatgtttttaatcgcgttttctgtgctagttgcttcaa

SEQ ID NO: 474953 - DNA, 58 bp, Artificial
  Synthetic oligonucleotide
tgtgcactccaagggccttatactcaggagaggaaggaggacttagtcacaaaaatat

SEQ ID NO: 474954 - DNA, 60 bp, Artificial
  Synthetic oligonucleotide
tgtgcactctgtcaagttaacacttgcacggaggcgcgatcttcagtatatttataacaa

SEQ ID NO: 474955 - DNA, 60 bp, Artificial
  Synthetic oligonucleotide
tgtgcactggcaattctttgagtgcacgttttatgtgcttaaagaccgccaatagagtgg

SEQ ID NO: 474956 - DNA, 60 bp, Artificial
  Synthetic oligonucleotide
tgtgcacttcgcttcacctctgcacgttgcatggagaccaccgtgaacgccccccggaac

SEQ ID NO: 474957 - DNA, 51 bp, Artificial
  Synthetic oligonucleotide
tgtgcagactgttcctcaacaccttcagacagctggtggatttctgaggat

SEQ ID NO: 474958 - DNA, 54 bp, Artificial
  Synthetic oligonucleotide
tgtgcagagatccaaggtagtgtgcgcaactgtgttggaggcgccattagaaat

SEQ ID NO: 474959 - DNA, 60 bp, Artificial
  Synthetic oligonucleotide
tgtgcagagggtagccatcaattggttgcaggaggaacaactgggcacaaatgagatata

SEQ ID NO: 474960 - DNA, 60 bp, Artificial
  Synthetic oligonucleotide
tgtgcagattgctggacacttatagtaataagaaatacgccaccgcttaccttacaaaga

SEQ ID NO: 474961 - DNA, 60 bp, Artificial
  Synthetic oligonucleotide
tgtgcagattgggttgtatgtgccttcggtgtgtattatgcagtggcagagggtataaaa

SEQ ID NO: 474962 - DNA, 58 bp, Artificial
  Synthetic oligonucleotide
tgtgcagatttgcggcgtgtgatcttcgaagggtccacccggatcccgtccagttcct

SEQ ID NO: 474963 - DNA, 60 bp, Artificial
  Synthetic oligonucleotide
tgtgcagcagatctttcaaggtcgtaatgatcctatgatgatttacctagtttggaggcg

SEQ ID NO: 474964 - DNA, 59 bp, Artificial
  Synthetic oligonucleotide
tgtgcagccatggttgaagcatggggataccccgatttagttcatgaaattcgaaagtt

SEQ ID NO: 474965 - DNA, 51 bp, Artificial
  Synthetic oligonucleotide
tgtgcagctctgtcaacatttgctcatgtcgcatcattcactggattaacc

SEQ ID NO: 474966 - DNA, 59 bp, Artificial
  Synthetic oligonucleotide
tgtgcaggtctaggagggttcagacacaatttgtataatgctgtgacaaaaacaaacct

SEQ ID NO: 474967 - DNA, 60 bp, Artificial
  Synthetic oligonucleotide
tgtgcaggtttcatgtccttgatccagtcttcgtcgtcattggttagaatgatggacggg

SEQ ID NO: 474968 - DNA, 59 bp, Artificial
  Synthetic oligonucleotide
tgtgcagtactttgcctgcagcagtatggtctgggggagactcatagaccaaacaacgg

SEQ ID NO: 474969 - DNA, 55 bp, Artificial
  Synthetic oligonucleotide
tgtgcagttcgcggatcgtgtcacagctcactggaaacgaggtatgctgtcattc

SEQ ID NO: 474970 - DNA, 57 bp, Artificial
  Synthetic oligonucleotide
tgtgcatatctgacgttactcgcggtaacggtattactcaccgtgtcgggaagcggt

SEQ ID NO: 474971 - DNA, 60 bp, Artificial
  Synthetic oligonucleotide
tgtgcatatttgggacaggcttatgctttttggtgcgacccttgatgaccaggccttttg

SEQ ID NO: 474972 - DNA, 60 bp, Artificial
  Synthetic oligonucleotide
tgtgcatgctctaacttgagggacattgcagaagctagcgccaaagtttctgtccctaca

SEQ ID NO: 474973 - DNA, 60 bp, Artificial
  Synthetic oligonucleotide
tgtgcatgtcccaatgcttccctcgcctgttcgattcactgcccaagatctatgagccca

SEQ ID NO: 474974 - DNA, 55 bp, Artificial
  Synthetic oligonucleotide
tgtgcatgtgctgcaatctaccggataccatgtgtatgtcaacggtgcagaatga

SEQ ID NO: 474975 - DNA, 53 bp, Artificial
  Synthetic oligonucleotide
tgtgcattacgggtttagttgatgtaatggattctgcgttggtgcgtttggca

SEQ ID NO: 474976 - DNA, 50 bp, Artificial
  Synthetic oligonucleotide
tgtgcattccgggagggttggaccaaccaacttatgatctttgagtatca

SEQ ID NO: 474977 - DNA, 60 bp, Artificial
  Synthetic oligonucleotide
tgtgccaaacactcaagactcgtcccacagctttggtcgagggcgttgcagtacccacaa

SEQ ID NO: 474978 - DNA, 54 bp, Artificial
  Synthetic oligonucleotide
tgtgccaaagacttttttactccaactaactttaactgtgatactaaaaatcaa

SEQ ID NO: 474979 - DNA, 52 bp, Artificial
  Synthetic oligonucleotide
tgtgccaactccagaacgcctaatatacacgtcaaaatcgagatacttacgc

SEQ ID NO: 474980 - DNA, 60 bp, Artificial
  Synthetic oligonucleotide
tgtgccaagagctaaggagcgagtggaggttgagagcaagtctgtgtacaagggactcag

SEQ ID NO: 474981 - DNA, 54 bp, Artificial
  Synthetic oligonucleotide
tgtgccaaggcctcattttaggccaattggggcgtttgcaccaacccggtccgg

SEQ ID NO: 474982 - DNA, 60 bp, Artificial
  Synthetic oligonucleotide
tgtgccaatcggaagagcattattgctccctgagtactctacattgtaccgccgttggct

SEQ ID NO: 474983 - DNA, 60 bp, Artificial
  Synthetic oligonucleotide
tgtgccaattggaagagcattactgctcccagagtactcaacactgtaccgccgttggct

SEQ ID NO: 474984 - DNA, 60 bp, Artificial
  Synthetic oligonucleotide
tgtgccacagacgcattgtcaactggctataccgggggtttttctacagtgactgactgt

SEQ ID NO: 474985 - DNA, 60 bp, Artificial
  Synthetic oligonucleotide
tgtgccacagcaggttaccttagagcagaggaaaagagggtgccagtggtgcaacaatcc

SEQ ID NO: 474986 - DNA, 60 bp, Artificial
  Synthetic oligonucleotide
tgtgccacatgtgaacagattgctgattctcagcaccggtctcacagacagatggtgaca

SEQ ID NO: 474987 - DNA, 57 bp, Artificial
  Synthetic oligonucleotide
tgtgccacccaaacgacaagccaatggtacctgcgaaccaaatcctcggctgaactt

SEQ ID NO: 474988 - DNA, 60 bp, Artificial
  Synthetic oligonucleotide
tgtgccacctggagcccctaagccagattccagggaatctctcgcgtggcaaactgccac

SEQ ID NO: 474989 - DNA, 60 bp, Artificial
  Synthetic oligonucleotide
tgtgccacctgtgaacagattgctgattcacagcatcggtctcacagacagatggctact

SEQ ID NO: 474990 - DNA, 59 bp, Artificial
  Synthetic oligonucleotide
tgtgccactctcaggttgttcgatcgagttgttaccaatgaagttccaaccgatctact

SEQ ID NO: 474991 - DNA, 53 bp, Artificial
  Synthetic oligonucleotide
tgtgccagaacccagatggcaaggacgtgtccttattttgtcagatggtctcg

SEQ ID NO: 474992 - DNA, 55 bp, Artificial
  Synthetic oligonucleotide
tgtgccagtgaggacacctggtataaggtacctggacagattagcaacagagggc

SEQ ID NO: 474993 - DNA, 54 bp, Artificial
  Synthetic oligonucleotide
tgtgccatccacgatcaattctacgccctctgttaccccatcaatccattcgtt

SEQ ID NO: 474994 - DNA, 60 bp, Artificial
  Synthetic oligonucleotide
tgtgccatttcaactactacagatgacaaaaggctctgataatcataatgtgtgataacc

SEQ ID NO: 474995 - DNA, 55 bp, Artificial
  Synthetic oligonucleotide
tgtgcccaagccccttgaagcttgtcgacgggcaagactgccacctcatcaatgg

SEQ ID NO: 474996 - DNA, 60 bp, Artificial
  Synthetic oligonucleotide
tgtgccccctaggtcatgctgtcggcattttccgagcggcagtgtgcacccggggtgtgg

SEQ ID NO: 474997 - DNA, 60 bp, Artificial
  Synthetic oligonucleotide
tgtgcccctgtggggctagcacggggtcgttcattcgtctctactgttcagacgagcatc

SEQ ID NO: 474998 - DNA, 56 bp, Artificial
  Synthetic oligonucleotide
tgtgccccttaagcgtgggttactggttagggttgtgggcgagtgctacggcgaga

SEQ ID NO: 474999 - DNA, 55 bp, Artificial
  Synthetic oligonucleotide
tgtgcccggtggggttgcgagacaacaggcgatgcctactggaggccttctcagt

SEQ ID NO: 475000 - DNA, 59 bp, Artificial
  Synthetic oligonucleotide
tgtgcccgtggggagggcattgacactacctgcatattctagtcttagacggaaatggt

SEQ ID NO: 475001 - DNA, 55 bp, Artificial
  Synthetic oligonucleotide
tgtgccgaatacacgtcgcctgcattggaatgacgacgttgtggcgtggaaggca

SEQ ID NO: 475002 - DNA, 60 bp, Artificial
  Synthetic oligonucleotide
tgtgccgagataattggcatggctcaaatcggccgtgggtgtctttcaatcaaaatctgg

SEQ ID NO: 475003 - DNA, 52 bp, Artificial
  Synthetic oligonucleotide
tgtgccgattgtgttaaccagttcagcactgcagctaacctgaccgtgtgcc

SEQ ID NO: 475004 - DNA, 55 bp, Artificial
  Synthetic oligonucleotide
tgtgccgcgtcattggttccgtgaccgaaacacccttgttgaggtccgccatgac

SEQ ID NO: 475005 - DNA, 55 bp, Artificial
  Synthetic oligonucleotide
tgtgccgcgtctttcaaagatcacaaagaaaatgtcgttgccacgcgtgaaagga

SEQ ID NO: 475006 - DNA, 53 bp, Artificial
  Synthetic oligonucleotide
tgtgccgggcgcacaagagttgctgatctcgtacagaaccgacgtgggcactg

SEQ ID NO: 475007 - DNA, 53 bp, Artificial
  Synthetic oligonucleotide
tgtgccgtccacttgggccctaggcgaggcgtgtttgtgccttaccagtgtaa

SEQ ID NO: 475008 - DNA, 60 bp, Artificial
  Synthetic oligonucleotide
tgtgccgtcgtcagcgaggtcgtacataaacctggcgatcttgctcgtcattaccaagca

SEQ ID NO: 475009 - DNA, 51 bp, Artificial
  Synthetic oligonucleotide
tgtgccgttatgtcaaaactggaggccgtgagagccatatgtttcggggat

SEQ ID NO: 475010 - DNA, 57 bp, Artificial
  Synthetic oligonucleotide
tgtgcctaacctggggcagatttatgacgtaaattctgttgctaattccgtggttaa

SEQ ID NO: 475011 - DNA, 60 bp, Artificial
  Synthetic oligonucleotide
tgtgcctaggctcaaaagcctagcaagtaaaatgcgagtgccaaaatacgagaagaggct

SEQ ID NO: 475012 - DNA, 59 bp, Artificial
  Synthetic oligonucleotide
tgtgcctattagcccactagactacgaccaaggagcgacaccagtaatccctataacta

SEQ ID NO: 475013 - DNA, 60 bp, Artificial
  Synthetic oligonucleotide
tgtgcctcaaagatgacgtaagcatgataaaaactgaggccagatataccaagaatagta

SEQ ID NO: 475014 - DNA, 60 bp, Artificial
  Synthetic oligonucleotide
tgtgcctcacccatctgaaatgttgaacctagtacctaagtcatcagtctcttgtaattg

SEQ ID NO: 475015 - DNA, 55 bp, Artificial
  Synthetic oligonucleotide
tgtgcctctcgggcacataggatgtacagaggattccaatgagcgacgagatccc

SEQ ID NO: 475016 - DNA, 60 bp, Artificial
  Synthetic oligonucleotide
tgtgcctgacatgaccttagtcctcaagaccaatcttaagtcaccatgagctcttaagtt

SEQ ID NO: 475017 - DNA, 59 bp, Artificial
  Synthetic oligonucleotide
tgtgcctgacggcacaataacttaccgtaaggagggttgccgcatgagtggggatataa

SEQ ID NO: 475018 - DNA, 59 bp, Artificial
  Synthetic oligonucleotide
tgtgcctggagtacctgtggttataaccagcaatggtgacattacttttgttgtaagcg

SEQ ID NO: 475019 - DNA, 56 bp, Artificial
  Synthetic oligonucleotide
tgtgccttgtcgtaagtgtgttggttgtcgtttggataattctgctgagtgaggtg

SEQ ID NO: 475020 - DNA, 53 bp, Artificial
  Synthetic oligonucleotide
tgtgcgaccagatgacaggtatcctagcgactgacgttagcgcagatgacgct

SEQ ID NO: 475021 - DNA, 60 bp, Artificial
  Synthetic oligonucleotide
tgtgcgagaaggaagcacgggaggtgtctgtagagtatcgcgatcgtcgtcggaaagttg

SEQ ID NO: 475022 - DNA, 60 bp, Artificial
  Synthetic oligonucleotide
tgtgcgagaatccatgtgatgcgcagttaattccaagataatacgagcacccacaaggaa

SEQ ID NO: 475023 - DNA, 60 bp, Artificial
  Synthetic oligonucleotide
tgtgcgagctcatacgtggagcctaccctaaaatccagaccacgagccgtgtgctacggt

SEQ ID NO: 475024 - DNA, 58 bp, Artificial
  Synthetic oligonucleotide
tgtgcgagttcacccttcctaaatggtggccaatcatcattaggggatgctcgatgtt

SEQ ID NO: 475025 - DNA, 60 bp, Artificial
  Synthetic oligonucleotide
tgtgcgagttcactttgtgcgagtagagcgcaagatcctagttccgcgagcgtagacccg

SEQ ID NO: 475026 - DNA, 60 bp, Artificial
  Synthetic oligonucleotide
tgtgcgataacagttgagagagagatatctactactagtgatctactggttgtacctgac

SEQ ID NO: 475027 - DNA, 55 bp, Artificial
  Synthetic oligonucleotide
tgtgcgcaaaagcggcgagtacgttgaacagattgacagttattatacacaggga

SEQ ID NO: 475028 - DNA, 60 bp, Artificial
  Synthetic oligonucleotide
tgtgcgcaagccacactggcggaatataacagaactgtgacaaatatcctagggcctcta

SEQ ID NO: 475029 - DNA, 53 bp, Artificial
  Synthetic oligonucleotide
tgtgcgcaagcgcgggggctccaggcctttgtccgtgtcgtgccgccacccga

SEQ ID NO: 475030 - DNA, 54 bp, Artificial
  Synthetic oligonucleotide
tgtgcgcacactgttggggcagtctgtgaatcgtgatttttatgcgtatcctca

SEQ ID NO: 475031 - DNA, 55 bp, Artificial
  Synthetic oligonucleotide
tgtgcgcactcctggtgttgtgactactgaacactcgattgaggtatatgacgct

SEQ ID NO: 475032 - DNA, 60 bp, Artificial
  Synthetic oligonucleotide
tgtgcgcagcgatactgcgccgcaacgttggtcccactgagggggctacccagtggatga

SEQ ID NO: 475033 - DNA, 60 bp, Artificial
  Synthetic oligonucleotide
tgtgcgccccaaacaatgaatgaatctcgccctgcatcagatttcagagaacacacaata

SEQ ID NO: 475034 - DNA, 59 bp, Artificial
  Synthetic oligonucleotide
tgtgcgccgccggttatcggtgcacagtgttgtctcccgcacgggggtcaataatgttg

SEQ ID NO: 475035 - DNA, 59 bp, Artificial
  Synthetic oligonucleotide
tgtgcgcggaatgaacatggcggcgctaaccagattaagtcaacctggtttggcgtttc

SEQ ID NO: 475036 - DNA, 58 bp, Artificial
  Synthetic oligonucleotide
tgtgcgcgtatgcgagaagatggccctgtacgacgtggttaccaaactccccctggcc

SEQ ID NO: 475037 - DNA, 60 bp, Artificial
  Synthetic oligonucleotide
tgtgcgctccgtcaagttaacgcttgcacggaggcgcgaccttcagtatttctacaacaa

SEQ ID NO: 475038 - DNA, 60 bp, Artificial
  Synthetic oligonucleotide
tgtgcgctgtgttcagagccgatccgggaagggacggcccgtggcagtcaaccatgctgg

SEQ ID NO: 475039 - DNA, 55 bp, Artificial
  Synthetic oligonucleotide
tgtgcgctgttcggccggcggttgagttttgcgagtgggccgctcccctcgtatt

SEQ ID NO: 475040 - DNA, 60 bp, Artificial
  Synthetic oligonucleotide
tgtgcggataatatcctagctagaatgcataagctacgtgaagtacttacaatggttgtg

SEQ ID NO: 475041 - DNA, 59 bp, Artificial
  Synthetic oligonucleotide
tgtgcggtttagtagaataggacaacgagggtctatgtacacacgtagtggcaaacata

SEQ ID NO: 475042 - DNA, 60 bp, Artificial
  Synthetic oligonucleotide
tgtgcgtagtcaggaccgccacaccaagcagatagtatctgctcgcttgggcgacttcct

SEQ ID NO: 475043 - DNA, 55 bp, Artificial
  Synthetic oligonucleotide
tgtgcgtagtcgtaatgagtaattgtgggacggaaccgactactttgggtgtccg

SEQ ID NO: 475044 - DNA, 53 bp, Artificial
  Synthetic oligonucleotide
tgtgcgtcttgttgtacacgctattctccaatttaatgatcaacgactcggcc

SEQ ID NO: 475045 - DNA, 60 bp, Artificial
  Synthetic oligonucleotide
tgtgcgtgaatccatgatttgcgcaactaatatgaatgtatattgaacagccacactcta

SEQ ID NO: 475046 - DNA, 60 bp, Artificial
  Synthetic oligonucleotide
tgtgcgtgaatccatggtgttcgcagtccactgatttgtatatggaacacccgcaagcta

SEQ ID NO: 475047 - DNA, 60 bp, Artificial
  Synthetic oligonucleotide
tgtgcgtgaatccatggtttgcacaatccagagcgacgtaaatagaacaaccgcagttta

SEQ ID NO: 475048 - DNA, 58 bp, Artificial
  Synthetic oligonucleotide
tgtgcgttcccttaatctaagtgaggcttccttcgtgataagtaatttgcttccagga

SEQ ID NO: 475049 - DNA, 60 bp, Artificial
  Synthetic oligonucleotide
tgtgcgttggtctcgatggacaagtatcgacatatgattaagacacaacttaaacctgtc

SEQ ID NO: 475050 - DNA, 60 bp, Artificial
  Synthetic oligonucleotide
tgtgctaagatcaaaaacattagtgcagtgaccacagattgcaccttcatttatagcaag

SEQ ID NO: 475051 - DNA, 54 bp, Artificial
  Synthetic oligonucleotide
tgtgctacctcaagattgggatgtgttaacagataccataagttggtccccatc

SEQ ID NO: 475052 - DNA, 60 bp, Artificial
  Synthetic oligonucleotide
tgtgctacctgtgttaacggccgaacatagagcgatgatacagaatgctttggacgggtc

SEQ ID NO: 475053 - DNA, 57 bp, Artificial
  Synthetic oligonucleotide
tgtgctactgtgtgccggtcgacgaccgaagcggtatacgttaccgcgacgtttatc

SEQ ID NO: 475054 - DNA, 58 bp, Artificial
  Synthetic oligonucleotide
tgtgctagacgccaaggagttagtggacaaggacggtacaaacttggaactgacacta

SEQ ID NO: 475055 - DNA, 60 bp, Artificial
  Synthetic oligonucleotide
tgtgctagacgtcagcaatttcatagagtcagaggtggttggaagggtaattgtaggcac

SEQ ID NO: 475056 - DNA, 60 bp, Artificial
  Synthetic oligonucleotide
tgtgctagcggagtttgcgtcacaggatcgcagaatccttccaccgagatcacactcaag

SEQ ID NO: 475057 - DNA, 56 bp, Artificial
  Synthetic oligonucleotide
tgtgctagtaacttacgcgcacttaacggctgggaaggtcccgcaccggagccttc

SEQ ID NO: 475058 - DNA, 60 bp, Artificial
  Synthetic oligonucleotide
tgtgctagttatgacatttgccctaactgcacatctggtgacatccctgatgatggttcg

SEQ ID NO: 475059 - DNA, 55 bp, Artificial
  Synthetic oligonucleotide
tgtgctatgttttatactgcacgagaaagaaacatgcaaacccttaaccatcaag

SEQ ID NO: 475060 - DNA, 60 bp, Artificial
  Synthetic oligonucleotide
tgtgctcaaaaggatatatgagcgtccctcaagtattatgtgctgttactcggacagtct

SEQ ID NO: 475061 - DNA, 60 bp, Artificial
  Synthetic oligonucleotide
tgtgctcaccttgagtcctccggcccctgaatgtggctaaccttaaccctgcagctagtg

SEQ ID NO: 475062 - DNA, 58 bp, Artificial
  Synthetic oligonucleotide
tgtgctcactttgagtcctccggcccctgaatgtggctaatcctaaccccgtagctgt

SEQ ID NO: 475063 - DNA, 60 bp, Artificial
  Synthetic oligonucleotide
tgtgctcaggccaggaaatacaagctgcgttctactcatcactggggaatcagtccggct

SEQ ID NO: 475064 - DNA, 58 bp, Artificial
  Synthetic oligonucleotide
tgtgctcaggggtaatgaggttactgccgttgctgattggtcgatatatgtttccttc

SEQ ID NO: 475065 - DNA, 56 bp, Artificial
  Synthetic oligonucleotide
tgtgctcccttgtgtgcgtactcgttggaaggggttaaatgccggacggagttcga

SEQ ID NO: 475066 - DNA, 60 bp, Artificial
  Synthetic oligonucleotide
tgtgctctacacagccctatttagacccagcccgagtgcgacgcccgaagttctaggagc

SEQ ID NO: 475067 - DNA, 59 bp, Artificial
  Synthetic oligonucleotide
tgtgctctcctccgcgtgaaactgtagttggaattcctgtaacccgtgctgttgataac

SEQ ID NO: 475068 - DNA, 55 bp, Artificial
  Synthetic oligonucleotide
tgtgctctgatagttctggtgtccacacaggccaagtgttcactgtgctcaaccg

SEQ ID NO: 475069 - DNA, 55 bp, Artificial
  Synthetic oligonucleotide
tgtgctgacagaggttcctgaagcaattgacctgtattgcgatgagcacatgcca

SEQ ID NO: 475070 - DNA, 53 bp, Artificial
  Synthetic oligonucleotide
tgtgctgactggatcggctgtaggatgcgatcctgatgtcttttggtcacaga

SEQ ID NO: 475071 - DNA, 59 bp, Artificial
  Synthetic oligonucleotide
tgtgctgaggagtgttattttcacaaggggcgtgatgcttattttttcactaagcgtaa

SEQ ID NO: 475072 - DNA, 60 bp, Artificial
  Synthetic oligonucleotide
tgtgctgattatgcaaccgcacaacccgcaaacactggcaaggtggcaatgtctcaccat

SEQ ID NO: 475073 - DNA, 60 bp, Artificial
  Synthetic oligonucleotide
tgtgctgctcaatgtcatactcttggacgggggcacttgtaacaccatgtgcggctgagg

SEQ ID NO: 475074 - DNA, 57 bp, Artificial
  Synthetic oligonucleotide
tgtgctgctcgatgtcctatacctggacaggcgcacttgtcaccccgtgcgcagcgg

SEQ ID NO: 475075 - DNA, 59 bp, Artificial
  Synthetic oligonucleotide
tgtgctggaggtagacgaccccgatgtagaattgtgggagtccagtctaccttccgatc

SEQ ID NO: 475076 - DNA, 60 bp, Artificial
  Synthetic oligonucleotide
tgtgctggtggtaacaggttcacaaggctggtcaagggctgcctgatatacatggacctg

SEQ ID NO: 475077 - DNA, 60 bp, Artificial
  Synthetic oligonucleotide
tgtgctggttcattacgaacggtctgttgtcgtgctgaatgatcttgaaatagaggggat

SEQ ID NO: 475078 - DNA, 57 bp, Artificial
  Synthetic oligonucleotide
tgtgctgtggaaagtggacgatgcggtagttgactctataaaacttccacctaacgt

SEQ ID NO: 475079 - DNA, 57 bp, Artificial
  Synthetic oligonucleotide
tgtgctgttacgcgggataagcccgtaggccattcgcgggtcaggtacgttactgta

SEQ ID NO: 475080 - DNA, 60 bp, Artificial
  Synthetic oligonucleotide
tgtgctgttagacggtcgtaagacgcgcttgcaacatgggcctatgaccggataagtcat

SEQ ID NO: 475081 - DNA, 50 bp, Artificial
  Synthetic oligonucleotide
tgtgctgttaggtttcccatgtagactccggaggattgaggtctttcaga

SEQ ID NO: 475082 - DNA, 58 bp, Artificial
  Synthetic oligonucleotide
tgtgctgttatcctgaattgctccctgaattcggaaccgtatgggattgcgaccagtc

SEQ ID NO: 475083 - DNA, 60 bp, Artificial
  Synthetic oligonucleotide
tgtgctgttgtgacctcaccgtatcaaaccattcggttctctgtcaagtcctgcgatccg

SEQ ID NO: 475084 - DNA, 55 bp, Artificial
  Synthetic oligonucleotide
tgtgcttaggatggtggcttgcacttgccggatcacggtctccgtgcagcgcacg

SEQ ID NO: 475085 - DNA, 55 bp, Artificial
  Synthetic oligonucleotide
tgtgcttcagctttcaacctttgaatggcttgtttgttgaagtcaaacagcctca

SEQ ID NO: 475086 - DNA, 55 bp, Artificial
  Synthetic oligonucleotide
tgtgcttccgtgctcgctttaatttttcccttagaccacgcaaccgcaaccacgt

SEQ ID NO: 475087 - DNA, 55 bp, Artificial
  Synthetic oligonucleotide
tgtgctttctatactacatagagttaggcaggggtactcacctttgtcgtttcag

SEQ ID NO: 475088 - DNA, 60 bp, Artificial
  Synthetic oligonucleotide
tgtgctttgagtataacaagcgtgcaataggtagtttgagggtgaatagcctgtacgccc

SEQ ID NO: 475089 - DNA, 55 bp, Artificial
  Synthetic oligonucleotide
tgtggaaagcgggatagcctatcactccaaaacgatgcatcggaaggatagaccc

SEQ ID NO: 475090 - DNA, 57 bp, Artificial
  Synthetic oligonucleotide
tgtggaaaggggaaggagcagtcatcgtaaaggtagggacagagatcaaggtagtac

SEQ ID NO: 475091 - DNA, 60 bp, Artificial
  Synthetic oligonucleotide
tgtggaacaacgagctgctattgcttttcaacgaacgcatgtccaacacaagaaattggt

SEQ ID NO: 475092 - DNA, 53 bp, Artificial
  Synthetic oligonucleotide
tgtggaaccgcccggtacgcaagtactactcagacaccccctactacccctgg

SEQ ID NO: 475093 - DNA, 60 bp, Artificial
  Synthetic oligonucleotide
tgtggaacgataacacagatgttagcacctatgtttaaaataacgtgctcgcagtgtgca

SEQ ID NO: 475094 - DNA, 55 bp, Artificial
  Synthetic oligonucleotide
tgtggaactttgtcagtggtatccaatacctggcggggttatctaccctgccaag

SEQ ID NO: 475095 - DNA, 56 bp, Artificial
  Synthetic oligonucleotide
tgtggaagaaccagaggattacaaagaagcttcagttttttatcaaaacaagatag

SEQ ID NO: 475096 - DNA, 59 bp, Artificial
  Synthetic oligonucleotide
tgtggaagactgctccggtggaccttggctgtacttacacgatacagggaactgtacca

SEQ ID NO: 475097 - DNA, 60 bp, Artificial
  Synthetic oligonucleotide
tgtggaagcgttgaaccaggaattagctaaagctcgcgtcgaacagcaggatatgatgac

SEQ ID NO: 475098 - DNA, 57 bp, Artificial
  Synthetic oligonucleotide
tgtggaagctacttcagatgatatcctgtctagacttgttgttgaacaaagcaccca

SEQ ID NO: 475099 - DNA, 58 bp, Artificial
  Synthetic oligonucleotide
tgtggaagggagggacatcaaatgaaagactgcacagaggggagacaggctaattttt

SEQ ID NO: 475100 - DNA, 57 bp, Artificial
  Synthetic oligonucleotide
tgtggaagtcattgtaatggctaacttccttccgaaggaaggaatcttttctgagga

SEQ ID NO: 475101 - DNA, 60 bp, Artificial
  Synthetic oligonucleotide
tgtggaagtttgacagccgcctagcatttcatcacatggcccgagagctgcatccggagt

SEQ ID NO: 475102 - DNA, 60 bp, Artificial
  Synthetic oligonucleotide
tgtggaagtttgacagttccctagcacggagacatctggcccgagagatgcatccggagt

SEQ ID NO: 475103 - DNA, 51 bp, Artificial
  Synthetic oligonucleotide
tgtggaagtttgatcggtgagcgggatagggcagcgtggtcaaagaatatc

SEQ ID NO: 475104 - DNA, 55 bp, Artificial
  Synthetic oligonucleotide
tgtggaatccaatgggaatctaattgccccttggtatgcgttcagatttgtcagc

SEQ ID NO: 475105 - DNA, 60 bp, Artificial
  Synthetic oligonucleotide
tgtggaatggaatgaacacctacaaacagcagtggaccactacgcagcccagctctatgt

SEQ ID NO: 475106 - DNA, 60 bp, Artificial
  Synthetic oligonucleotide
tgtggaatgtatggcgtcagtgggcccgacatttacaaggggatttatcagttcaagtca

SEQ ID NO: 475107 - DNA, 55 bp, Artificial
  Synthetic oligonucleotide
tgtggaatttaacagaccaagtacagttgacagagttccccatagagcacacgaa

SEQ ID NO: 475108 - DNA, 55 bp, Artificial
  Synthetic oligonucleotide
tgtggacaatacactcgcactcatgaccgcttttctctacgcatatgcccggctc

SEQ ID NO: 475109 - DNA, 55 bp, Artificial
  Synthetic oligonucleotide
tgtggacagtggactaggaaatgaagctgaagattctaatgagtcgacacaggta

SEQ ID NO: 475110 - DNA, 60 bp, Artificial
  Synthetic oligonucleotide
tgtggacatccaatagtatagtagcactctgtggatccaaggagcgattgggatcttggt

SEQ ID NO: 475111 - DNA, 59 bp, Artificial
  Synthetic oligonucleotide
tgtggacatgcgatgtggtttggagccacaacttttgaaagtcccaaacttcatttcac

SEQ ID NO: 475112 - DNA, 60 bp, Artificial
  Synthetic oligonucleotide
tgtggacatggggcaccatgatccttgggatattaatgatctgtagtgctgcaaacaatt

SEQ ID NO: 475113 - DNA, 60 bp, Artificial
  Synthetic oligonucleotide
tgtggacatttaacaatctgacacgtgggtggatcggaccattctcctcctgaacacagg

SEQ ID NO: 475114 - DNA, 60 bp, Artificial
  Synthetic oligonucleotide
tgtggaccaagcatgtgcgtccgacgctgggtgacttcacgggctggtcgcttcacacgt

SEQ ID NO: 475115 - DNA, 60 bp, Artificial
  Synthetic oligonucleotide
tgtggaccagatatggttcaggtttcattgaacgcaggtgcgagaggtgatgtgcagcag

SEQ ID NO: 475116 - DNA, 56 bp, Artificial
  Synthetic oligonucleotide
tgtggacccaaagacctagcccacacagtcttccccgtcctactatcaccctctaa

SEQ ID NO: 475117 - DNA, 57 bp, Artificial
  Synthetic oligonucleotide
tgtggacccactcacaggagcgacattagatgaaagtcctttcacagatatcactct

SEQ ID NO: 475118 - DNA, 53 bp, Artificial
  Synthetic oligonucleotide
tgtggaccggtcccaattaaagatttcgggggcaactggtttttacattggca

SEQ ID NO: 475119 - DNA, 60 bp, Artificial
  Synthetic oligonucleotide
tgtggactacacaccatgtagcatgattcacgaatgggtttagtccacgcttgcgtaggg

SEQ ID NO: 475120 - DNA, 57 bp, Artificial
  Synthetic oligonucleotide
tgtggactactatatcacagaaccagacgtcctattagaacatatgagacctcttgt

SEQ ID NO: 475121 - DNA, 58 bp, Artificial
  Synthetic oligonucleotide
tgtggactagggacaacgaggtcgtcgtactaacagcgtcacacgtggttggtcgcgc

SEQ ID NO: 475122 - DNA, 60 bp, Artificial
  Synthetic oligonucleotide
tgtggactcagtctctgagaagagaactgtctggctattgctccaacataaagttgcagg

SEQ ID NO: 475123 - DNA, 55 bp, Artificial
  Synthetic oligonucleotide
tgtggagaaggttaagctaaacgttccgcgcagaatcaaaatctctgcacacgca

SEQ ID NO: 475124 - DNA, 55 bp, Artificial
  Synthetic oligonucleotide
tgtggagacgaagattcgtcgtggaggccacccatcagtgattgaggtagacggg

SEQ ID NO: 475125 - DNA, 54 bp, Artificial
  Synthetic oligonucleotide
tgtggagatgatacggtcatccagatctcatactattgtggcactctcacgtca

SEQ ID NO: 475126 - DNA, 55 bp, Artificial
  Synthetic oligonucleotide
tgtggagattcctcaaggcacgatcttgctgcgactcagccaaatttcatgccca

SEQ ID NO: 475127 - DNA, 55 bp, Artificial
  Synthetic oligonucleotide
tgtggagatttgacagccgactagcatttaaacacagagcccgagagctgcatcc

SEQ ID NO: 475128 - DNA, 55 bp, Artificial
  Synthetic oligonucleotide
tgtggagcaaaacaaacgatgcagggtccgacagagtaatggtgtcgcctcttgc

SEQ ID NO: 475129 - DNA, 50 bp, Artificial
  Synthetic oligonucleotide
tgtggagcacattgagggttgtagaaacgcagcccttagaatcagacctt

SEQ ID NO: 475130 - DNA, 59 bp, Artificial
  Synthetic oligonucleotide
tgtggagcatagtctatatagaatataggaaactgttaagacaaaaacaaatagacagg

SEQ ID NO: 475131 - DNA, 60 bp, Artificial
  Synthetic oligonucleotide
tgtggagcatgttttatggctatgtagattttatagagtcagaactaggcatctcagcag

SEQ ID NO: 475132 - DNA, 60 bp, Artificial
  Synthetic oligonucleotide
tgtggaggaagccatgaatctgctcaaggattatgaggtggccccatgtcaagtggtcta

SEQ ID NO: 475133 - DNA, 59 bp, Artificial
  Synthetic oligonucleotide
tgtggaggaatgctcctgttacccccggtatccagaagttaggtgtgtttgcagagaca

SEQ ID NO: 475134 - DNA, 60 bp, Artificial
  Synthetic oligonucleotide
tgtggaggactctgcctttagggcagaggttaaatctgatgtggttgctaaccgtgacca

SEQ ID NO: 475135 - DNA, 60 bp, Artificial
  Synthetic oligonucleotide
tgtggaggccggggccattctggccccggccacgcacgcttgcggagcaaatgggcaata

SEQ ID NO: 475136 - DNA, 60 bp, Artificial
  Synthetic oligonucleotide
tgtggaggctgaagtcaagtcccgtactgactctgaccgctacatcgtcctcaagaacaa

SEQ ID NO: 475137 - DNA, 55 bp, Artificial
  Synthetic oligonucleotide
tgtggaggctgtgagacacagttaaagctttacgtgctagccacagattttggaa

SEQ ID NO: 475138 - DNA, 60 bp, Artificial
  Synthetic oligonucleotide
tgtggaggggtggattgagggagcccaatccaagtacgccgcgctaggtcacacctgcaa

SEQ ID NO: 475139 - DNA, 54 bp, Artificial
  Synthetic oligonucleotide
tgtggagtatccttactgggtgaaataaatgttcccgaatttttgcgttacgcg

SEQ ID NO: 475140 - DNA, 55 bp, Artificial
  Synthetic oligonucleotide
tgtggagttgataaggggaagaccacaggaaactagagtatggtggacatcaaac

SEQ ID NO: 475141 - DNA, 54 bp, Artificial
  Synthetic oligonucleotide
tgtggagttgataaggggaaggaaaccggaaactgaagtctggtggacctcaaa

SEQ ID NO: 475142 - DNA, 57 bp, Artificial
  Synthetic oligonucleotide
tgtggagtttggtgcctactggctcagctagttgcaccatagccgcactcgggtctt

SEQ ID NO: 475143 - DNA, 53 bp, Artificial
  Synthetic oligonucleotide
tgtggatacaaagatccggagggggtcccaccctttaatggttgagctggaaa

SEQ ID NO: 475144 - DNA, 58 bp, Artificial
  Synthetic oligonucleotide
tgtggatattataacatcccaatgaaaccagtgagatgggttaggaaaggcaaataaa

SEQ ID NO: 475145 - DNA, 60 bp, Artificial
  Synthetic oligonucleotide
tgtggatcagcgaaaaggaaggatcaggcgcgagcgtgtccaccatagagcagacttcat

SEQ ID NO: 475146 - DNA, 50 bp, Artificial
  Synthetic oligonucleotide
tgtggatccactcactggtgcaactttggacgaaggtacaagagtggata

SEQ ID NO: 475147 - DNA, 55 bp, Artificial
  Synthetic oligonucleotide
tgtggatccactgcttcgtccgcatgccccgggttcagctcgcgttccggttcat

SEQ ID NO: 475148 - DNA, 55 bp, Artificial
  Synthetic oligonucleotide
tgtggatgctggcgtgacactgcagaaagacgccccgatcgccacaccgctgaca

SEQ ID NO: 475149 - DNA, 60 bp, Artificial
  Synthetic oligonucleotide
tgtggatgggaagaacaatcagcaaagattcacgttcaggttatgagaccttcaaggtca

SEQ ID NO: 475150 - DNA, 56 bp, Artificial
  Synthetic oligonucleotide
tgtggatgtggtacctgtgtccgggaccgagcatgctaatacattacctcctaata

SEQ ID NO: 475151 - DNA, 58 bp, Artificial
  Synthetic oligonucleotide
tgtggatgttagctgaatgtaaaccttaatagattcatcacctctcaatgcgacattg

SEQ ID NO: 475152 - DNA, 55 bp, Artificial
  Synthetic oligonucleotide
tgtggattacaacagttctggtacagccgttgggaagaaacagtctccggggtcg

SEQ ID NO: 475153 - DNA, 60 bp, Artificial
  Synthetic oligonucleotide
tgtggattatgggaagaagtggcatccgctactagtatcgtcagagaaggggcttagagt

SEQ ID NO: 475154 - DNA, 60 bp, Artificial
  Synthetic oligonucleotide
tgtggattcgcactcctcccgcttacagaccaccaaatgcccctatcttatcaacacttc

SEQ ID NO: 475155 - DNA, 52 bp, Artificial
  Synthetic oligonucleotide
tgtggattggcttaaatccttgtttaagaaagaaaatccggcacgtgttaag

SEQ ID NO: 475156 - DNA, 57 bp, Artificial
  Synthetic oligonucleotide
tgtggatttccagttttaatgatagccatgatgctttttgtggatgcaccaaaccag

SEQ ID NO: 475157 - DNA, 60 bp, Artificial
  Synthetic oligonucleotide
tgtggatttgtgtgtcgttctagagtcagaccagtatttagtggctggggattactccaa

SEQ ID NO: 475158 - DNA, 57 bp, Artificial
  Synthetic oligonucleotide
tgtggcaagaagttcgcggacttacacctgctttacgaactgctatgcccgaaaaaa

SEQ ID NO: 475159 - DNA, 60 bp, Artificial
  Synthetic oligonucleotide
tgtggcaagggacctgtacctgggagcatgtcgaggagatgtaagagtgacaccaacctt

SEQ ID NO: 475160 - DNA, 60 bp, Artificial
  Synthetic oligonucleotide
tgtggcaatcctctaaagattacagaatcaccctccataaccagagccctgattgtgggg

SEQ ID NO: 475161 - DNA, 60 bp, Artificial
  Synthetic oligonucleotide
tgtggcaatgcgtactggtagggagatctcactaccttacccggtcagctgtggcctgac

SEQ ID NO: 475162 - DNA, 60 bp, Artificial
  Synthetic oligonucleotide
tgtggcaatggtataagtttgaagggttcgaccctgctgccgtcatgagacgggtgaatg

SEQ ID NO: 475163 - DNA, 55 bp, Artificial
  Synthetic oligonucleotide
tgtggcacgacttttggatactataggtaagataatgtctgatgagaaagccgga

SEQ ID NO: 475164 - DNA, 60 bp, Artificial
  Synthetic oligonucleotide
tgtggcacgttgctactgttaccaagtgttcagaataagcaacctgtgatcgttggcatc

SEQ ID NO: 475165 - DNA, 60 bp, Artificial
  Synthetic oligonucleotide
tgtggcagacattgacaagttaattgactatgcagcctctggagaccctacatcacctga

SEQ ID NO: 475166 - DNA, 60 bp, Artificial
  Synthetic oligonucleotide
tgtggcagcccccagtgcataatgtacccggcatcgagagaaactggtacgagagttgct

SEQ ID NO: 475167 - DNA, 50 bp, Artificial
  Synthetic oligonucleotide
tgtggcagctgatgtactttcacaggagagacctgagactagcggctaat

SEQ ID NO: 475168 - DNA, 60 bp, Artificial
  Synthetic oligonucleotide
tgtggcaggaagtaggacgagccatgtatgccgcccccgttgcaggaagcattacctgta

SEQ ID NO: 475169 - DNA, 60 bp, Artificial
  Synthetic oligonucleotide
tgtggcaggaggatgcataggcttcaccccatacggcagtccggctggtgtttacgggtg

SEQ ID NO: 475170 - DNA, 60 bp, Artificial
  Synthetic oligonucleotide
tgtggcatagcagtcaatgatgaggcggttgcgaaaggaattgcccatagaagcaaagcg

SEQ ID NO: 475171 - DNA, 55 bp, Artificial
  Synthetic oligonucleotide
tgtggcatatggggatgatgttgtggcatcttatccctatgagctagatcctagt

SEQ ID NO: 475172 - DNA, 54 bp, Artificial
  Synthetic oligonucleotide
tgtggcatccaggcctacggctccccccccccgagattgctggtatcccggggg

SEQ ID NO: 475173 - DNA, 60 bp, Artificial
  Synthetic oligonucleotide
tgtggcatgccgcagtggcttgtccggctatatcacctagtccggtcggcctggacccta

SEQ ID NO: 475174 - DNA, 60 bp, Artificial
  Synthetic oligonucleotide
tgtggcatgctacaacagctggtacattggtggcaccacaccagaaatgcccactaccaa

SEQ ID NO: 475175 - DNA, 59 bp, Artificial
  Synthetic oligonucleotide
tgtggcatgtataggcgctgggcgaggtttcggttgtacgcggataggaatcccctcag

SEQ ID NO: 475176 - DNA, 54 bp, Artificial
  Synthetic oligonucleotide
tgtggcattgcgagtcccaaaacgggcgtgtctaactacggtcgccctggggtt

SEQ ID NO: 475177 - DNA, 56 bp, Artificial
  Synthetic oligonucleotide
tgtggccataaaaccctcaatatacatgcatgctttcgtcaacacaaagcatgtat

SEQ ID NO: 475178 - DNA, 60 bp, Artificial
  Synthetic oligonucleotide
tgtggccatggtattttcacaagaggattgcatgataaaggcagtccggggcgatctgaa

SEQ ID NO: 475179 - DNA, 60 bp, Artificial
  Synthetic oligonucleotide
tgtggcccaatcaaaggggaatgctttctgaatcatagagaggtactcttgcttggaagt

SEQ ID NO: 475180 - DNA, 59 bp, Artificial
  Synthetic oligonucleotide
tgtggcccagtcataggggaactctttacgaatcatagagaggtactcttgctttgaag

SEQ ID NO: 475181 - DNA, 53 bp, Artificial
  Synthetic oligonucleotide
tgtggccccgggccttggtaccctccccgatgtcgttaggtttgctgggcgac

SEQ ID NO: 475182 - DNA, 53 bp, Artificial
  Synthetic oligonucleotide
tgtggcccggtatattgctttacccccagccccgtggtagtgggtacgaccga

SEQ ID NO: 475183 - DNA, 60 bp, Artificial
  Synthetic oligonucleotide
tgtggcctacaggcatatactcacactggccacaaacactacaatggtgctatgcatcag

SEQ ID NO: 475184 - DNA, 60 bp, Artificial
  Synthetic oligonucleotide
tgtggcgaagaacgtcacttcgcacgggaatgtccaaatgaccggcgaaatgtgaagcga

SEQ ID NO: 475185 - DNA, 55 bp, Artificial
  Synthetic oligonucleotide
tgtggcgacattagaaaacgtgacgcgtcgcatatcgcggcacaatctggcagcg

SEQ ID NO: 475186 - DNA, 60 bp, Artificial
  Synthetic oligonucleotide
tgtggcgagcaatcattgcgacgttgaacatgtgttcagctatgctttgggttcgggttg

SEQ ID NO: 475187 - DNA, 60 bp, Artificial
  Synthetic oligonucleotide
tgtggcgcaacctgtgcagaaagtgactcgactgagtgctccggtggctctcgcctaccg

SEQ ID NO: 475188 - DNA, 60 bp, Artificial
  Synthetic oligonucleotide
tgtggcgcacattgatggaaccaagtaccacctgaaaagtggccacgtgacatgcgaggt

SEQ ID NO: 475189 - DNA, 60 bp, Artificial
  Synthetic oligonucleotide
tgtggcgcccataatgaggtgtccaactgggactgtattcgtattgagaggatatacgta

SEQ ID NO: 475190 - DNA, 59 bp, Artificial
  Synthetic oligonucleotide
tgtggcgccctttacaggaagtggcctggagcttttgataagcagccggtagcaactgg

SEQ ID NO: 475191 - DNA, 54 bp, Artificial
  Synthetic oligonucleotide
tgtggcgcctaatcccctacaacgtaggaagttcacagcgaaacaagccagtgg

SEQ ID NO: 475192 - DNA, 60 bp, Artificial
  Synthetic oligonucleotide
tgtggcgcgagcaacggcatatttcacagcgccaactggggatccgcattggaaagaagt

SEQ ID NO: 475193 - DNA, 55 bp, Artificial
  Synthetic oligonucleotide
tgtggcggcatcttgagatgtgttcatggacccataggcctcctcaccgcagggg

SEQ ID NO: 475194 - DNA, 55 bp, Artificial
  Synthetic oligonucleotide
tgtggcggttcaagcctatgtaagcacaatgaatgggtaattcgcaagatcaagc

SEQ ID NO: 475195 - DNA, 60 bp, Artificial
  Synthetic oligonucleotide
tgtggcgttaatcggtacctgttgtcggtactctatgacgcagtggtcgatcttcatgca

SEQ ID NO: 475196 - DNA, 60 bp, Artificial
  Synthetic oligonucleotide
tgtggctagaaggaatggtggcatacgttggaagcaaacagatagcgatgaggctccttc

SEQ ID NO: 475197 - DNA, 60 bp, Artificial
  Synthetic oligonucleotide
tgtggctagattgggcaggcctacttattctgaaactcctcaaggatatgttagagtaag

SEQ ID NO: 475198 - DNA, 51 bp, Artificial
  Synthetic oligonucleotide
tgtggctcgcgagcgtggcagttgtcatagcttgtgcaggagcaatgaagt

SEQ ID NO: 475199 - DNA, 55 bp, Artificial
  Synthetic oligonucleotide
tgtggctctattgagatttgtgaatccagacacgggtagggtcctgtttgagtgc

SEQ ID NO: 475200 - DNA, 55 bp, Artificial
  Synthetic oligonucleotide
tgtggctgacatcgataagttgattgactatgctgcctctggtgaccctacatcg

SEQ ID NO: 475201 - DNA, 60 bp, Artificial
  Synthetic oligonucleotide
tgtggctgacattgataaattgattgattatgctgcctcaggagacccaacatcacctga

SEQ ID NO: 475202 - DNA, 55 bp, Artificial
  Synthetic oligonucleotide
tgtggctggagagttagctgaatatatgacttcagaggagatacgattcgatgcg

SEQ ID NO: 475203 - DNA, 60 bp, Artificial
  Synthetic oligonucleotide
tgtggcttcccggctacccatgctacacaatctgcgtatgacagggtcaaatgtaaccat

SEQ ID NO: 475204 - DNA, 60 bp, Artificial
  Synthetic oligonucleotide
tgtggcttgtagaaagataatcagaagatcaatagtcgcatcgaacccattggagctagc

SEQ ID NO: 475205 - DNA, 51 bp, Artificial
  Synthetic oligonucleotide
tgtggctttactgttcaagagtcaaatggcctttttgtccccataccaact

SEQ ID NO: 475206 - DNA, 56 bp, Artificial
  Synthetic oligonucleotide
tgtgggaaatgattcggtttttaagacaaaattggttcgcgatgaacaaattggca

SEQ ID NO: 475207 - DNA, 60 bp, Artificial
  Synthetic oligonucleotide
tgtgggaattttgtgttctagcatgcaagttaataggcatcgtctagcatgtgctgtggg

SEQ ID NO: 475208 - DNA, 60 bp, Artificial
  Synthetic oligonucleotide
tgtgggacaagaggcccatcattgagaacgacaacagtgtcaggaaagttgatacacgaa

SEQ ID NO: 475209 - DNA, 56 bp, Artificial
  Synthetic oligonucleotide
tgtgggacagagacgaactataaccacacggtctggaacccaaatagggagtcagg

SEQ ID NO: 475210 - DNA, 58 bp, Artificial
  Synthetic oligonucleotide
tgtgggacccacttatgaatgaagttcgagggtgatttcaagtatatggaggaaattg

SEQ ID NO: 475211 - DNA, 60 bp, Artificial
  Synthetic oligonucleotide
tgtgggacccattggtcaatgattttcctgacacactgcatggattgcggtgtatgttag

SEQ ID NO: 475212 - DNA, 54 bp, Artificial
  Synthetic oligonucleotide
tgtgggaccgcggccccactctatttaaggatacaaaaatgtctaacgttcaaa

SEQ ID NO: 475213 - DNA, 51 bp, Artificial
  Synthetic oligonucleotide
tgtgggactcgttgcctggttggagtgaggtggaggcgtacttcaaagctt

SEQ ID NO: 475214 - DNA, 51 bp, Artificial
  Synthetic oligonucleotide
tgtgggagatcaacggcccggaatcggtactagtcaacacataccaatgga

SEQ ID NO: 475215 - DNA, 60 bp, Artificial
  Synthetic oligonucleotide
tgtgggagcgttggggtcaatgcctcccataaggtctttcagcaacattgtttggctgta

SEQ ID NO: 475216 - DNA, 58 bp, Artificial
  Synthetic oligonucleotide
tgtgggaggctgtaactgtacaaacagaggttattggaataactagcatgcttaacct

SEQ ID NO: 475217 - DNA, 59 bp, Artificial
  Synthetic oligonucleotide
tgtgggatacgataacaacttcaaactacattctggcaagatcggtagtaccagattta

SEQ ID NO: 475218 - DNA, 60 bp, Artificial
  Synthetic oligonucleotide
tgtgggatatggagcagcattgctgcgtaaatatttcgcacagtctcaaggtgagatcac

SEQ ID NO: 475219 - DNA, 60 bp, Artificial
  Synthetic oligonucleotide
tgtgggatccacttatgcacgaattccctgaaagcgttcatggtctaaggtgcatgctag

SEQ ID NO: 475220 - DNA, 60 bp, Artificial
  Synthetic oligonucleotide
tgtgggatccattattgcacgaatttccagaaagcgttcatggtgtcaggtgcatgctag

SEQ ID NO: 475221 - DNA, 55 bp, Artificial
  Synthetic oligonucleotide
tgtgggatgaaagcctaaagccatgtgtgaaactaaccccactctgtgttacctt

SEQ ID NO: 475222 - DNA, 56 bp, Artificial
  Synthetic oligonucleotide
tgtgggatgtgagaagaggacgttggttactaaaacctaacgcgaaatgtcacgct

SEQ ID NO: 475223 - DNA, 51 bp, Artificial
  Synthetic oligonucleotide
tgtgggcaactgtctatacaagtcgtctaaacgttgtttacccatatagta

SEQ ID NO: 475224 - DNA, 60 bp, Artificial
  Synthetic oligonucleotide
tgtgggcaatttaatgattgggcttctgcagccaaaaagatggctaaaggagtaggatcc

SEQ ID NO: 475225 - DNA, 55 bp, Artificial
  Synthetic oligonucleotide
tgtgggccactggtatttgaggcgtcaactgacgtgaacatatcagggcatctac

SEQ ID NO: 475226 - DNA, 60 bp, Artificial
  Synthetic oligonucleotide
tgtgggccagaagctggtattcacccaagcggccaaggctgctaaccctggcgcgattac

SEQ ID NO: 475227 - DNA, 60 bp, Artificial
  Synthetic oligonucleotide
tgtgggccagtgtttaccaaatagacaactaatttccttgtaatcagcatgttcagagac

SEQ ID NO: 475228 - DNA, 59 bp, Artificial
  Synthetic oligonucleotide
tgtgggccatactaagtgcgctagatgagagagaaagtgcaattgggcactgttcatac

SEQ ID NO: 475229 - DNA, 60 bp, Artificial
  Synthetic oligonucleotide
tgtgggccgcatttctttacgtcaattattacatattgagattcgaatttgcatatatcg

SEQ ID NO: 475230 - DNA, 56 bp, Artificial
  Synthetic oligonucleotide
tgtgggccgggtggggcggtagttttgaggtccggctatcgatctctggttctggc

SEQ ID NO: 475231 - DNA, 60 bp, Artificial
  Synthetic oligonucleotide
tgtgggcctaatgatcttgcccacatcgtctttcctgttctactatcaccttcaattact

SEQ ID NO: 475232 - DNA, 53 bp, Artificial
  Synthetic oligonucleotide
tgtgggcctgcaggggtatagaaattggcagagggcagcccctaggggtcggc

SEQ ID NO: 475233 - DNA, 60 bp, Artificial
  Synthetic oligonucleotide
tgtgggcgaaggcctgcagctggtgattagttccactagacgggcaccacggatcctacc

SEQ ID NO: 475234 - DNA, 58 bp, Artificial
  Synthetic oligonucleotide
tgtgggcgatgggtctttgactatgggctgttggagtcggatttagtaatctccgtct

SEQ ID NO: 475235 - DNA, 58 bp, Artificial
  Synthetic oligonucleotide
tgtgggcgtcacatacgggtactccaccgcagaggaccacgttgccgggcccaacaca

SEQ ID NO: 475236 - DNA, 55 bp, Artificial
  Synthetic oligonucleotide
tgtgggcgtttccgcacggcaagcttcgcgtaattactgtgacgacgtccctgtt

SEQ ID NO: 475237 - DNA, 56 bp, Artificial
  Synthetic oligonucleotide
tgtgggctaaacaatgaacctggatcgggtaattggccggatggttccaacattgg

SEQ ID NO: 475238 - DNA, 60 bp, Artificial
  Synthetic oligonucleotide
tgtgggctaattcgtcgctcattcataacattggactggtcacgtttcgataaacgagcg

SEQ ID NO: 475239 - DNA, 52 bp, Artificial
  Synthetic oligonucleotide
tgtgggcttcgtgtgtcgatcttggcaacgatccgttagcgtctacgcatcc

SEQ ID NO: 475240 - DNA, 58 bp, Artificial
  Synthetic oligonucleotide
tgtgggcttttcttttccatgggttgctctgaatgaaccgctttttggctgcgttaca

SEQ ID NO: 475241 - DNA, 56 bp, Artificial
  Synthetic oligonucleotide
tgtggggagctacagggtggtgaataggcacttggcaacgcacaatgactggcaga

SEQ ID NO: 475242 - DNA, 58 bp, Artificial
  Synthetic oligonucleotide
tgtggggagtaacatctacgtctgtggacgttgtgaaaactgtattccaagttcagtg

SEQ ID NO: 475243 - DNA, 50 bp, Artificial
  Synthetic oligonucleotide
tgtggggatccaccacagctattaaggggtatacggttgagaaggtcggc

SEQ ID NO: 475244 - DNA, 60 bp, Artificial
  Synthetic oligonucleotide
tgtgggggacgcacacaaccttatataagagcatcggtgctaggcttgggaacgagactg

SEQ ID NO: 475245 - DNA, 58 bp, Artificial
  Synthetic oligonucleotide
tgtggggtgcttggcgtatgtgatggctacggttgtgcgtgcacctatcacgcacaac

SEQ ID NO: 475246 - DNA, 57 bp, Artificial
  Synthetic oligonucleotide
tgtgggtagcggacagggaattagagggtgtttggatacttggtggagtgactccta

SEQ ID NO: 475247 - DNA, 57 bp, Artificial
  Synthetic oligonucleotide
tgtgggtagtgaacgctgtagacctgggtacacgttcacatctataacccttaagcc

SEQ ID NO: 475248 - DNA, 55 bp, Artificial
  Synthetic oligonucleotide
tgtgggtagttgtagttcaattgaaagtgcttatccgttggtaaaagatatgctc

SEQ ID NO: 475249 - DNA, 56 bp, Artificial
  Synthetic oligonucleotide
tgtgggtatagtgatagagtgctgcaactcactttaggcaattccactattactac

SEQ ID NO: 475250 - DNA, 56 bp, Artificial
  Synthetic oligonucleotide
tgtgggtcacctgggcaaataagacgggccgaacagatttttgccttagtctacag

SEQ ID NO: 475251 - DNA, 56 bp, Artificial
  Synthetic oligonucleotide
tgtgggtcataatgtcttttattgctgttttcggtaggtattacacagtaaactaa

SEQ ID NO: 475252 - DNA, 59 bp, Artificial
  Synthetic oligonucleotide
tgtgggtcccccctctcaacgttcgggggggtcgcgatgccatcatcctcctcgcatgc

SEQ ID NO: 475253 - DNA, 55 bp, Artificial
  Synthetic oligonucleotide
tgtgggtggaagtggcattggaagcaatgcaggagaggacattgaactgacactg

SEQ ID NO: 475254 - DNA, 60 bp, Artificial
  Synthetic oligonucleotide
tgtgggttgaagtgcgaaagtgtgttagatttaggcacacatcctggtgctgcgatggcg

SEQ ID NO: 475255 - DNA, 55 bp, Artificial
  Synthetic oligonucleotide
tgtgggttgtacccacccacactgtctacggacgtagtacacttgtatctcggta

SEQ ID NO: 475256 - DNA, 60 bp, Artificial
  Synthetic oligonucleotide
tgtgggtttggcgctgttgctaggaagtctgacaatgcaaaggttatgtagtcagaattc

SEQ ID NO: 475257 - DNA, 60 bp, Artificial
  Synthetic oligonucleotide
tgtggtaaattttgtgagtatggagttctccctcactgatccgaggcttgagccgcacaa

SEQ ID NO: 475258 - DNA, 53 bp, Artificial
  Synthetic oligonucleotide
tgtggtaacgggtaaccggataagtgacctgttggaaagcgtgcctttcccac

SEQ ID NO: 475259 - DNA, 51 bp, Artificial
  Synthetic oligonucleotide
tgtggtaatctttgcccccaacttaagcgttgggaggttttaagtaattct

SEQ ID NO: 475260 - DNA, 60 bp, Artificial
  Synthetic oligonucleotide
tgtggtaccgacgtggaggataccaggcaggctagagaaatggcacagtctggtcaagta

SEQ ID NO: 475261 - DNA, 50 bp, Artificial
  Synthetic oligonucleotide
tgtggtactggaactgcagtacacaggcacggatggaccctgcaagatac

SEQ ID NO: 475262 - DNA, 53 bp, Artificial
  Synthetic oligonucleotide
tgtggtatcagtcggtcgaaagacgcgcttccaacatgggcctatggtcggat

SEQ ID NO: 475263 - DNA, 55 bp, Artificial
  Synthetic oligonucleotide
tgtggtatctcgctttgctaacgcaaaccttcagatgaataacaatcggtaccac

SEQ ID NO: 475264 - DNA, 55 bp, Artificial
  Synthetic oligonucleotide
tgtggtcaaaatgccaggttacttctcaacgagcatcggaatgttatccgacctg

SEQ ID NO: 475265 - DNA, 50 bp, Artificial
  Synthetic oligonucleotide
tgtggtcaggaaggacatcagatgaaagactgcacaggaagacccaacaa

SEQ ID NO: 475266 - DNA, 60 bp, Artificial
  Synthetic oligonucleotide
tgtggtcatccagtctttccatgggtatcagacagaggatcgaattgctactcagcgcaa

SEQ ID NO: 475267 - DNA, 59 bp, Artificial
  Synthetic oligonucleotide
tgtggtcccaaagacctggcccacattgtcttgcccgtacgactatcaccctcaatgac

SEQ ID NO: 475268 - DNA, 59 bp, Artificial
  Synthetic oligonucleotide
tgtggtcgacttgtacaaacacgatctacgcaggtccctcaactggtacaaaccgtgca

SEQ ID NO: 475269 - DNA, 60 bp, Artificial
  Synthetic oligonucleotide
tgtggtcgcctctggctcctccacctgacttggtgtttgatcgtgatactcctggcgttc

SEQ ID NO: 475270 - DNA, 53 bp, Artificial
  Synthetic oligonucleotide
tgtggtctacaactttctccgcaaccccttccaaaaactcaaaatttatctaa

SEQ ID NO: 475271 - DNA, 60 bp, Artificial
  Synthetic oligonucleotide
tgtggtctattcaacgactcttgatgtgattggagccccaatagtaatgatgtttcctca

SEQ ID NO: 475272 - DNA, 55 bp, Artificial
  Synthetic oligonucleotide
tgtggtctatttcccactcagatccaagttcgtaatatcgtcagtcctgttatgg

SEQ ID NO: 475273 - DNA, 51 bp, Artificial
  Synthetic oligonucleotide
tgtggtcttggatggatggtagaataacaggattagtgttatatttagtcc

SEQ ID NO: 475274 - DNA, 60 bp, Artificial
  Synthetic oligonucleotide
tgtggtgaagaaactgcgtacacttgtgaatcaaaatcctgatgatcgagtggatatatg

SEQ ID NO: 475275 - DNA, 55 bp, Artificial
  Synthetic oligonucleotide
tgtggtgaaggatggagtgttccataccatgtggcatgtgacccgtggagctttt

SEQ ID NO: 475276 - DNA, 55 bp, Artificial
  Synthetic oligonucleotide
tgtggtgaggaaccacgatgacctaatcacgatgacagccacactggcccttatt

SEQ ID NO: 475277 - DNA, 60 bp, Artificial
  Synthetic oligonucleotide
tgtggtgaggctttctttgacaacatgattgggcaaataatgagatcccatttaagcggg

SEQ ID NO: 475278 - DNA, 60 bp, Artificial
  Synthetic oligonucleotide
tgtggtgagtacgcgaatcgcgtgttcactgtgcttgggaaggacaacggtctgctaacc

SEQ ID NO: 475279 - DNA, 51 bp, Artificial
  Synthetic oligonucleotide
tgtggtgatgaatggattcatggtctggtgtattgataatgggtcgtcccc

SEQ ID NO: 475280 - DNA, 60 bp, Artificial
  Synthetic oligonucleotide
tgtggtgcaacagggagcacctgtgttatctgcggtgccagaggaatgggaagtaacggc

SEQ ID NO: 475281 - DNA, 60 bp, Artificial
  Synthetic oligonucleotide
tgtggtgcatgagatggtaaacaggacaaagactggagtcggccagattggcgaggttag

SEQ ID NO: 475282 - DNA, 60 bp, Artificial
  Synthetic oligonucleotide
tgtggtgccgagaaaggatgtctacaggatcccaactgcagtattgaaagtgtctggctc

SEQ ID NO: 475283 - DNA, 60 bp, Artificial
  Synthetic oligonucleotide
tgtggtggaatgggaataccagacaaggatggcatggtgtggatagtagaaccaccaata

SEQ ID NO: 475284 - DNA, 54 bp, Artificial
  Synthetic oligonucleotide
tgtggtggacaccacacggagtaccaatgtctctctgtgtgcagctgaggtgtc

SEQ ID NO: 475285 - DNA, 55 bp, Artificial
  Synthetic oligonucleotide
tgtggtggcccgtgccagttctgattatatgagttaccgcagaacttcccaatta

SEQ ID NO: 475286 - DNA, 55 bp, Artificial
  Synthetic oligonucleotide
tgtggtgggaacgaccgacaggcagggcgcgcctacctacaactggggtgaaaat

SEQ ID NO: 475287 - DNA, 56 bp, Artificial
  Synthetic oligonucleotide
tgtggtggggacgaccgatcgtctcggcgtccctacgtacagctggggggccaatg

SEQ ID NO: 475288 - DNA, 56 bp, Artificial
  Synthetic oligonucleotide
tgtggtgggtgttatggggagcccctgctcaacggggcttcacctaccacaaatag

SEQ ID NO: 475289 - DNA, 52 bp, Artificial
  Synthetic oligonucleotide
tgtggtggtcgggacaaccgaccgccttggggttccaacatacacgtggggc

SEQ ID NO: 475290 - DNA, 60 bp, Artificial
  Synthetic oligonucleotide
tgtggtgtacaaccaccaagaggctggcaagtacgagaatcacacggagaacgctctgtt

SEQ ID NO: 475291 - DNA, 56 bp, Artificial
  Synthetic oligonucleotide
tgtggtgtcatggtaaaggcagataatggggccattagataccgagggctccccag

SEQ ID NO: 475292 - DNA, 51 bp, Artificial
  Synthetic oligonucleotide
tgtggttaaacgccggatctgaattacaagtagctggttttgactattcat

SEQ ID NO: 475293 - DNA, 54 bp, Artificial
  Synthetic oligonucleotide
tgtggttacgcaatatcttaattcagagtgtttgtattatttcaaatcgtttac

SEQ ID NO: 475294 - DNA, 60 bp, Artificial
  Synthetic oligonucleotide
tgtggttatgcgagctgcatattattagctgatggaacagtggggttgttgacttcatat

SEQ ID NO: 475295 - DNA, 60 bp, Artificial
  Synthetic oligonucleotide
tgtggttatgttgcagcacttgtgtgccaagcgataatcccttgtggaaaaatcacatgt

SEQ ID NO: 475296 - DNA, 55 bp, Artificial
  Synthetic oligonucleotide
tgtggttcacttaaatcgaaccattggagcaatccaacgttaatactacgttaag

SEQ ID NO: 475297 - DNA, 58 bp, Artificial
  Synthetic oligonucleotide
tgtggttccgtcgattacgttagaatcttcaaccttgtatactagctcccatggtgtc

SEQ ID NO: 475298 - DNA, 58 bp, Artificial
  Synthetic oligonucleotide
tgtggttcggttccacacaggatggggcgagtcacccttcgacatgcctcgtaagagg

SEQ ID NO: 475299 - DNA, 55 bp, Artificial
  Synthetic oligonucleotide
tgtggttctgataaccatcagtgccgtggtgtatctttctgtctgttaaccgggg

SEQ ID NO: 475300 - DNA, 58 bp, Artificial
  Synthetic oligonucleotide
tgtggttgaaacgtatctgtagatggtatatccgtgtcgttgtgtagagggggtcctc

SEQ ID NO: 475301 - DNA, 60 bp, Artificial
  Synthetic oligonucleotide
tgtggttgaaccggatttgaatgtggtatatccttgtgtgcgtgtagagtggatcctcca

SEQ ID NO: 475302 - DNA, 58 bp, Artificial
  Synthetic oligonucleotide
tgtggttgaacctgatttgtaagtggtatatcctggtgttggtgtagaggggatcctc

SEQ ID NO: 475303 - DNA, 60 bp, Artificial
  Synthetic oligonucleotide
tgtggttgaattggatctgtgctgttattatgtcctgatccatgttgaacggtcgttgtg

SEQ ID NO: 475304 - DNA, 55 bp, Artificial
  Synthetic oligonucleotide
tgtggttgccttggtcaacagggagcctaaggtggacgaggttcaggtggggtac

SEQ ID NO: 475305 - DNA, 55 bp, Artificial
  Synthetic oligonucleotide
tgtggttgctagcgcgacgaccgttggagagcgcactgtgaatacccgcaacccc

SEQ ID NO: 475306 - DNA, 55 bp, Artificial
  Synthetic oligonucleotide
tgtggttgggcaatccacgtccaggcaaacgctactaggtttcatcaggggtgtt

SEQ ID NO: 475307 - DNA, 60 bp, Artificial
  Synthetic oligonucleotide
tgtggttggtcgctccactgtgaacccgacagtagacctggcagatgaggctagaaattc

SEQ ID NO: 475308 - DNA, 60 bp, Artificial
  Synthetic oligonucleotide
tgtggtttcaggggcatggcgtagtgctcaacttcgaaccttaaatgctgagttggataa

SEQ ID NO: 475309 - DNA, 55 bp, Artificial
  Synthetic oligonucleotide
tgtggtttcctgtgtgcttggcgcctccgaccccacacccgagtcgcttggcata

SEQ ID NO: 475310 - DNA, 60 bp, Artificial
  Synthetic oligonucleotide
tgtggtttgccactggtggacatcaagactaggagcatagtcggagtgcacagccttgca

SEQ ID NO: 475311 - DNA, 52 bp, Artificial
  Synthetic oligonucleotide
tgtggttttagtagattagacggttccggtaacaagtgtaaagtagtattag

SEQ ID NO: 475312 - DNA, 53 bp, Artificial
  Synthetic oligonucleotide
tgtgtaaacaatacctgaacctttaccccgttgccaggcaacggcccggtctg

SEQ ID NO: 475313 - DNA, 55 bp, Artificial
  Synthetic oligonucleotide
tgtgtaaatggttcatgttttactataatgaccgatggcccaagtgatgggccgg

SEQ ID NO: 475314 - DNA, 54 bp, Artificial
  Synthetic oligonucleotide
tgtgtaacgatccggtttcggacttctgtacggtcgaggctaacggcgttgcat

SEQ ID NO: 475315 - DNA, 55 bp, Artificial
  Synthetic oligonucleotide
tgtgtacaatgcatgtcttgcaaggtttaaggaagcatttggggttggtttcaca

SEQ ID NO: 475316 - DNA, 60 bp, Artificial
  Synthetic oligonucleotide
tgtgtacacattacagagctcagacgacttcgttacaggtagctgtggaagagacgtgca

SEQ ID NO: 475317 - DNA, 60 bp, Artificial
  Synthetic oligonucleotide
tgtgtacatagcctggggattgacgactaggacttatgcaagaaactacgtatatgggca

SEQ ID NO: 475318 - DNA, 54 bp, Artificial
  Synthetic oligonucleotide
tgtgtacatagttataatagtgttgtagctgctatactacttgtactctactgc

SEQ ID NO: 475319 - DNA, 60 bp, Artificial
  Synthetic oligonucleotide
tgtgtacatcgaagtattgcatctaacccaaggaacctgctgggaacagatgtatactcc

SEQ ID NO: 475320 - DNA, 60 bp, Artificial
  Synthetic oligonucleotide
tgtgtaccaaagtccaataccaaaggctgacatagatgctagcagagcgctattttcaac

SEQ ID NO: 475321 - DNA, 60 bp, Artificial
  Synthetic oligonucleotide
tgtgtaccaggcaaggtttgaggcagtagcatggtcagctactgcatgtcacgatgggaa

SEQ ID NO: 475322 - DNA, 52 bp, Artificial
  Synthetic oligonucleotide
tgtgtacccacagaccccgacccacaagaaatggttttgggaaatgtaacgg

SEQ ID NO: 475323 - DNA, 53 bp, Artificial
  Synthetic oligonucleotide
tgtgtacccccaatgctagagtgttttgggagcgtgggcaagtatactgcaca

SEQ ID NO: 475324 - DNA, 60 bp, Artificial
  Synthetic oligonucleotide
tgtgtacctactggaatggtgataagaccggagaagtgcgagaaaactgaagacccagca

SEQ ID NO: 475325 - DNA, 52 bp, Artificial
  Synthetic oligonucleotide
tgtgtacctggatttcatggctgggcaactgcagcactattgattacctttt

SEQ ID NO: 475326 - DNA, 60 bp, Artificial
  Synthetic oligonucleotide
tgtgtacgagacggccgatgctatcctacactctccggggtgcgtcccttgcgttcgcga

SEQ ID NO: 475327 - DNA, 60 bp, Artificial
  Synthetic oligonucleotide
tgtgtacgagatattgcaatctatccccattgcacattgaatacaaccagaacatgaaat

SEQ ID NO: 475328 - DNA, 57 bp, Artificial
  Synthetic oligonucleotide
tgtgtacgggaggtagttataacttcgcattaccagttggacagtggcccgtaatga

SEQ ID NO: 475329 - DNA, 55 bp, Artificial
  Synthetic oligonucleotide
tgtgtacgtgatgggtccaggaatgcaacaaactcacaagcacagagttacctct

SEQ ID NO: 475330 - DNA, 60 bp, Artificial
  Synthetic oligonucleotide
tgtgtactctcaaactcaacaactgtgttgtcccatgctctacccttgatctgtgagcgt

SEQ ID NO: 475331 - DNA, 60 bp, Artificial
  Synthetic oligonucleotide
tgtgtacttcggatactgcaccatgaacaacaccggtgccacgttttccactctcggtgc

SEQ ID NO: 475332 - DNA, 60 bp, Artificial
  Synthetic oligonucleotide
tgtgtagagtgtcaccaaggccgtcgtttgatcgataggtggagagagagtgaagcgagg

SEQ ID NO: 475333 - DNA, 55 bp, Artificial
  Synthetic oligonucleotide
tgtgtagatagtaggagcagccacagcctaggtctatgcgcttacgtcgaatggg

SEQ ID NO: 475334 - DNA, 55 bp, Artificial
  Synthetic oligonucleotide
tgtgtagatagtatgagcagccacagtctaggtctacacgcttacgcctgattgg

SEQ ID NO: 475335 - DNA, 59 bp, Artificial
  Synthetic oligonucleotide
tgtgtagccacagtgcgggtgagtagtggtttttccccttgtcttcgcttggcgagtga

SEQ ID NO: 475336 - DNA, 60 bp, Artificial
  Synthetic oligonucleotide
tgtgtagctactcagttctcttctcagagattgagtccagcgaaagctgggaacctcttt

SEQ ID NO: 475337 - DNA, 56 bp, Artificial
  Synthetic oligonucleotide
tgtgtagctgtctaaatacggggattcccttcgttttcacaagtgtccatcgttat

SEQ ID NO: 475338 - DNA, 56 bp, Artificial
  Synthetic oligonucleotide
tgtgtagttacgactttctcatctatgggaagacccccttgtttaggggcaatatc

SEQ ID NO: 475339 - DNA, 55 bp, Artificial
  Synthetic oligonucleotide
tgtgtagttcatttcactggtcgcagtgtaactatatcaggttgtgagttcactc

SEQ ID NO: 475340 - DNA, 60 bp, Artificial
  Synthetic oligonucleotide
tgtgtataaagtactgtcgatttatagctgcattgcaagcagtattgtgctggtaggtct

SEQ ID NO: 475341 - DNA, 60 bp, Artificial
  Synthetic oligonucleotide
tgtgtatatagactactgggatgattcgcaagcgtttagaaatatggtatatgtaagatc

SEQ ID NO: 475342 - DNA, 50 bp, Artificial
  Synthetic oligonucleotide
tgtgtatcgacgttgatgtcaatcgatttggattcacatggtacgggtac

SEQ ID NO: 475343 - DNA, 60 bp, Artificial
  Synthetic oligonucleotide
tgtgtatgaagttaaaggacgaaagtatccatatccatatactgaaattgcaccgcatac

SEQ ID NO: 475344 - DNA, 58 bp, Artificial
  Synthetic oligonucleotide
tgtgtatgaatcgcggtacataattgcgcggattagggaaatgcgaggtaaagaaaaa

SEQ ID NO: 475345 - DNA, 55 bp, Artificial
  Synthetic oligonucleotide
tgtgtatgagaagattatggagagcatcacagtagggtgcacagcaaagtgcgcg

SEQ ID NO: 475346 - DNA, 55 bp, Artificial
  Synthetic oligonucleotide
tgtgtatgcacttttttataaatctgatatagtaccacttaatggggataaccat

SEQ ID NO: 475347 - DNA, 55 bp, Artificial
  Synthetic oligonucleotide
tgtgtattaaatcagttattgttgggtgggcacacgggttaagttgcactacggg

SEQ ID NO: 475348 - DNA, 57 bp, Artificial
  Synthetic oligonucleotide
tgtgtattatgacgaaacaccaatccctgcacatatgtcaggagctcttggtatcat

SEQ ID NO: 475349 - DNA, 60 bp, Artificial
  Synthetic oligonucleotide
tgtgtattcaattcccagaactctcataacgatcgataaactgattgagagtgaaaatat

SEQ ID NO: 475350 - DNA, 52 bp, Artificial
  Synthetic oligonucleotide
tgtgtattctaacgcatgtaataaagcacgtagtagtgtatcttggactagt

SEQ ID NO: 475351 - DNA, 58 bp, Artificial
  Synthetic oligonucleotide
tgtgtcaaatgtacaccaatgtagacaaggacctagtaggatggccatctcccccggg

SEQ ID NO: 475352 - DNA, 59 bp, Artificial
  Synthetic oligonucleotide
tgtgtcaacaacgaggcgttaatgtgtttaaataatgcgcaggagtgtatagattgtgc

SEQ ID NO: 475353 - DNA, 59 bp, Artificial
  Synthetic oligonucleotide
tgtgtcaacagaggcttacctcgtttttactggtcttagagcagggagactagtcaatc

SEQ ID NO: 475354 - DNA, 60 bp, Artificial
  Synthetic oligonucleotide
tgtgtcaacattggagacaaaactcggggaacttaagagacagctggcagatttggttgc

SEQ ID NO: 475355 - DNA, 55 bp, Artificial
  Synthetic oligonucleotide
tgtgtcaaccgcttatgcgaccatctttctcaatctgggtccgctcttgatgcgg

SEQ ID NO: 475356 - DNA, 60 bp, Artificial
  Synthetic oligonucleotide
tgtgtcaacggcgcgtgttggactgtctatcatggcgccggctcaaagaccctagccggc

SEQ ID NO: 475357 - DNA, 60 bp, Artificial
  Synthetic oligonucleotide
tgtgtcaactgcaaacatagcactcagttggagctctgtggaacacagaggcaataagat

SEQ ID NO: 475358 - DNA, 60 bp, Artificial
  Synthetic oligonucleotide
tgtgtcaagcctcggctaataggccttgggaatatgacggtacatatgctaggatgactc

SEQ ID NO: 475359 - DNA, 60 bp, Artificial
  Synthetic oligonucleotide
tgtgtcaattattctatgcatcattatgtaaaaccgctggtttttgaaaggatgcggaag

SEQ ID NO: 475360 - DNA, 55 bp, Artificial
  Synthetic oligonucleotide
tgtgtcaattgaactatgtggacgaatgcttcttaacaacggacttattgacgaa

SEQ ID NO: 475361 - DNA, 60 bp, Artificial
  Synthetic oligonucleotide
tgtgtcaattgtctctgccagctggtggggttctttacactttatgttgtgtagggccgc

SEQ ID NO: 475362 - DNA, 60 bp, Artificial
  Synthetic oligonucleotide
tgtgtcacagactaatggtgtgttcctactaatgcgagtgtatgttcgtgagttagacaa

SEQ ID NO: 475363 - DNA, 60 bp, Artificial
  Synthetic oligonucleotide
tgtgtcacagcacacaaattggtggggtaaggatggtggacatccttaggcaaaatccaa

SEQ ID NO: 475364 - DNA, 52 bp, Artificial
  Synthetic oligonucleotide
tgtgtcactttggtacagagtacccaaacagtgcaaggacctcacagtgccg

SEQ ID NO: 475365 - DNA, 60 bp, Artificial
  Synthetic oligonucleotide
tgtgtcagcagagcgcttctacactttaccatctgttcagtggactactaccttcaaggg

SEQ ID NO: 475366 - DNA, 54 bp, Artificial
  Synthetic oligonucleotide
tgtgtcagtcgcccatgacggtgctggaaagagggtctactaccttacccgtga

SEQ ID NO: 475367 - DNA, 60 bp, Artificial
  Synthetic oligonucleotide
tgtgtcagtctagatgctgtggccacaaatctactatcacttcctgctgatgtctgcaga

SEQ ID NO: 475368 - DNA, 54 bp, Artificial
  Synthetic oligonucleotide
tgtgtcagttgcaagaaatgtatcttgtttaaacgtctcttagattacacttac

SEQ ID NO: 475369 - DNA, 57 bp, Artificial
  Synthetic oligonucleotide
tgtgtcagtttttctctagtgctgttcgtgcgctgttcccgactttgagaccccgtg

SEQ ID NO: 475370 - DNA, 60 bp, Artificial
  Synthetic oligonucleotide
tgtgtcatacctagcccacttctgtcgcaagttccaaccactatacgccacggaagctaa

SEQ ID NO: 475371 - DNA, 60 bp, Artificial
  Synthetic oligonucleotide
tgtgtcattaaaggagaatctttcagtgattcttgaacgatttcaggcataaacatccaa

SEQ ID NO: 475372 - DNA, 59 bp, Artificial
  Synthetic oligonucleotide
tgtgtccagaggtttgctggatcatctctttactttttcgtctgataatactgagcgag

SEQ ID NO: 475373 - DNA, 59 bp, Artificial
  Synthetic oligonucleotide
tgtgtccccaatagtggcaccgatatatcggtgtacaattggtgtcacaaaacgacaaa

SEQ ID NO: 475374 - DNA, 60 bp, Artificial
  Synthetic oligonucleotide
tgtgtccccatctttgtcgatataggacttgacgtcggagctggatttagctccctgaat

SEQ ID NO: 475375 - DNA, 54 bp, Artificial
  Synthetic oligonucleotide
tgtgtcccccaatacatttgggggacattgggggctcggaaagagaaataaatc

SEQ ID NO: 475376 - DNA, 60 bp, Artificial
  Synthetic oligonucleotide
tgtgtccctattgtagagcacatatagcacacccagtaggtgcaggaaatttagatggac

SEQ ID NO: 475377 - DNA, 53 bp, Artificial
  Synthetic oligonucleotide
tgtgtcctcacgtttatcagcgccgttgcagccaatgagatgggctggttgga

SEQ ID NO: 475378 - DNA, 60 bp, Artificial
  Synthetic oligonucleotide
tgtgtcctggaggctatggccttccttgaagaatcccacccagggatctttgagaactca

SEQ ID NO: 475379 - DNA, 59 bp, Artificial
  Synthetic oligonucleotide
tgtgtccttgcttctcgccttgctacaaatccttccgtgatccctgccctaccggcacc

SEQ ID NO: 475380 - DNA, 55 bp, Artificial
  Synthetic oligonucleotide
tgtgtcgaagccccatatcaatcccttatgccggaacgcattcaaggggaagcca

SEQ ID NO: 475381 - DNA, 55 bp, Artificial
  Synthetic oligonucleotide
tgtgtcgcctgcacgtccacctgtggttattgaacctgtgggtcctacggaaccc

SEQ ID NO: 475382 - DNA, 60 bp, Artificial
  Synthetic oligonucleotide
tgtgtcgctcagtgcagctgaattgcatggcacttatgtggctagtttgtcatccttttt

SEQ ID NO: 475383 - DNA, 54 bp, Artificial
  Synthetic oligonucleotide
tgtgtcgtctatacgacatacctcagacttttccgacgttgttgtgcacgacgt

SEQ ID NO: 475384 - DNA, 59 bp, Artificial
  Synthetic oligonucleotide
tgtgtcgttcagagtgggactacacgactacccggtggggtcgcaattgccttgcgagc

SEQ ID NO: 475385 - DNA, 50 bp, Artificial
  Synthetic oligonucleotide
tgtgtctacaggtacctacttgggaacaaaggagctcatccactggttac

SEQ ID NO: 475386 - DNA, 58 bp, Artificial
  Synthetic oligonucleotide
tgtgtctatattatccagcagaagctgagacagagattgcagatagttcgtggaaaga

SEQ ID NO: 475387 - DNA, 60 bp, Artificial
  Synthetic oligonucleotide
tgtgtctcagcaatgaatctcctcttgaaggactagtgcactactgggagcaggcaatta

SEQ ID NO: 475388 - DNA, 56 bp, Artificial
  Synthetic oligonucleotide
tgtgtctccgatgttacccgtggtaatgggttgactcatcgtgtgggtaagaggtt

SEQ ID NO: 475389 - DNA, 60 bp, Artificial
  Synthetic oligonucleotide
tgtgtctccgtccttatcgacgtaggacttgacgtcggagctggatttagctctctggat

SEQ ID NO: 475390 - DNA, 55 bp, Artificial
  Synthetic oligonucleotide
tgtgtctctcgttgtctcctgcttcagatcccagattgtcacacactatgttggg

SEQ ID NO: 475391 - DNA, 57 bp, Artificial
  Synthetic oligonucleotide
tgtgtctgaataaataactctattcatccgagattcgggtaagtagggttaatcgaa

SEQ ID NO: 475392 - DNA, 55 bp, Artificial
  Synthetic oligonucleotide
tgtgtctgagcggtatgcggaaccattgcccaccatagtcaaccaaggcttgtgt

SEQ ID NO: 475393 - DNA, 60 bp, Artificial
  Synthetic oligonucleotide
tgtgtctttaagcctgaaggaagggcttatgcgatggctattcatagtatctatgatata

SEQ ID NO: 475394 - DNA, 60 bp, Artificial
  Synthetic oligonucleotide
tgtgtgaaacctgtcaaaggctcaacccaactggaggcggaaagatgcgaactattcaga

SEQ ID NO: 475395 - DNA, 55 bp, Artificial
  Synthetic oligonucleotide
tgtgtgaacgggtcatgtttcaccataatgaccgatggcccgagtaatgaggccg

SEQ ID NO: 475396 - DNA, 57 bp, Artificial
  Synthetic oligonucleotide
tgtgtgacaggacagctagtggaaggggtttgttttatccctatgaatggagtaggt

SEQ ID NO: 475397 - DNA, 60 bp, Artificial
  Synthetic oligonucleotide
tgtgtgactccattaaggaggagctccggcccctaatccaacagacctcatttgtgaagc

SEQ ID NO: 475398 - DNA, 60 bp, Artificial
  Synthetic oligonucleotide
tgtgtgagatcatccgccgtactctggtgtgcaagtccattaggtgtcctggagggatca

SEQ ID NO: 475399 - DNA, 55 bp, Artificial
  Synthetic oligonucleotide
tgtgtgagctcatattatggggttacgaacaatatactgcacaactactagatgg

SEQ ID NO: 475400 - DNA, 60 bp, Artificial
  Synthetic oligonucleotide
tgtgtgagtaactcccctgtgcgagaatccatggtctgtgcagtcgaggtgaacgtatat

SEQ ID NO: 475401 - DNA, 55 bp, Artificial
  Synthetic oligonucleotide
tgtgtgatctttcctgttacttgtctagatggtgttagatgttagagtctgtggt

SEQ ID NO: 475402 - DNA, 60 bp, Artificial
  Synthetic oligonucleotide
tgtgtgatgtctattctaagagtaatcttaagattcagaacgttactgttcctagtgcaa

SEQ ID NO: 475403 - DNA, 57 bp, Artificial
  Synthetic oligonucleotide
tgtgtgatttacgccggtatcatgacctataaaattataggcgtcccgggagtttgc

SEQ ID NO: 475404 - DNA, 60 bp, Artificial
  Synthetic oligonucleotide
tgtgtgcaacaatttgtatgtcaagaagcttcagcgttctatctatgacaattgttatag

SEQ ID NO: 475405 - DNA, 56 bp, Artificial
  Synthetic oligonucleotide
tgtgtgcaaccgctcaccccgccacgggggtgcaccctaacagggatgaaaagtac

SEQ ID NO: 475406 - DNA, 55 bp, Artificial
  Synthetic oligonucleotide
tgtgtgcacctgttggtatgtgtactcgaggatgtaggtgttccaccatccaggt

SEQ ID NO: 475407 - DNA, 55 bp, Artificial
  Synthetic oligonucleotide
tgtgtgcagcgaaccgcgttggtaaatcttacagcgaggcatacgagtttgcttg

SEQ ID NO: 475408 - DNA, 59 bp, Artificial
  Synthetic oligonucleotide
tgtgtgcaggtctccccagcgacactccaagaggagaggacagtcagttcacggggtca

SEQ ID NO: 475409 - DNA, 60 bp, Artificial
  Synthetic oligonucleotide
tgtgtgcagtactgcggtaagctgcaatggccgaccctgaaggtacagatggggatggga

SEQ ID NO: 475410 - DNA, 53 bp, Artificial
  Synthetic oligonucleotide
tgtgtgcatatagctcgggtaccccctcttcggagggttccataaggagacca

SEQ ID NO: 475411 - DNA, 52 bp, Artificial
  Synthetic oligonucleotide
tgtgtgcatggcgttagtgttaatgtcaaagtcacccaaattaagggcactg

SEQ ID NO: 475412 - DNA, 60 bp, Artificial
  Synthetic oligonucleotide
tgtgtgccacaatggcacatgtgcagttgtaatgaccgacggatcggctagtagtcaagc

SEQ ID NO: 475413 - DNA, 52 bp, Artificial
  Synthetic oligonucleotide
tgtgtgccgctcaccgacgcactcaggcgatgctcgtagatcttgatcgaga

SEQ ID NO: 475414 - DNA, 60 bp, Artificial
  Synthetic oligonucleotide
tgtgtgcgagcttatacgtggtgcctatcccaagatccagaccactagccgtgtgctacg

SEQ ID NO: 475415 - DNA, 60 bp, Artificial
  Synthetic oligonucleotide
tgtgtgcgatggtatatggatacatgcgtcatctggggataaatgagtttagtctggcga

SEQ ID NO: 475416 - DNA, 55 bp, Artificial
  Synthetic oligonucleotide
tgtgtgcgccaagaatgtgcagtattgtataaggcacgggaagtagggtttaccc

SEQ ID NO: 475417 - DNA, 60 bp, Artificial
  Synthetic oligonucleotide
tgtgtgcggactgatgcggatttcccatgcataagatacagaccccgtgtgcgacgacca

SEQ ID NO: 475418 - DNA, 60 bp, Artificial
  Synthetic oligonucleotide
tgtgtgctacggacatgcaccgcgtgcggatgggacgataccggattggaataaccttgg

SEQ ID NO: 475419 - DNA, 60 bp, Artificial
  Synthetic oligonucleotide
tgtgtgctcaggacttgttggggatacaccaaggaatgaggatggttccagtagcagcaa

SEQ ID NO: 475420 - DNA, 60 bp, Artificial
  Synthetic oligonucleotide
tgtgtgctcctactaaagtctatatgtctggttctctgcgttcgtggattcattatattg

SEQ ID NO: 475421 - DNA, 55 bp, Artificial
  Synthetic oligonucleotide
tgtgtgctgtgttcaagaatctgcaaatcgaaataaactttacaaagaggtctgg

SEQ ID NO: 475422 - DNA, 60 bp, Artificial
  Synthetic oligonucleotide
tgtgtgcttgcgcttaaatctattaagcgttttgccactaaaatgacaatgctcagttcc

SEQ ID NO: 475423 - DNA, 54 bp, Artificial
  Synthetic oligonucleotide
tgtgtggaaaccacgtgaaggaccccaacgttcttgtagtcgcaacaaacggcc

SEQ ID NO: 475424 - DNA, 50 bp, Artificial
  Synthetic oligonucleotide
tgtgtggaatcctgcttgcgagaaagctgttgagttgacattcaacccca

SEQ ID NO: 475425 - DNA, 56 bp, Artificial
  Synthetic oligonucleotide
tgtgtggacataaggccgactgcgcaacctaatggttgctggaatgtgcgcacgac

SEQ ID NO: 475426 - DNA, 60 bp, Artificial
  Synthetic oligonucleotide
tgtgtggacgagtacattgtcacaactattcttgacgaaggggtggccaactggatctgt

SEQ ID NO: 475427 - DNA, 57 bp, Artificial
  Synthetic oligonucleotide
tgtgtggacgtatgggggcagaccggcccttggtctacccccatcgagttcgagctc

SEQ ID NO: 475428 - DNA, 55 bp, Artificial
  Synthetic oligonucleotide
tgtgtggagcaaccgtactaaatgggactccgaaatcgctgaggctactatcgca

SEQ ID NO: 475429 - DNA, 60 bp, Artificial
  Synthetic oligonucleotide
tgtgtggataaatataaatgggattatgactttatatttactgtgttttaatcatgcaaa

SEQ ID NO: 475430 - DNA, 58 bp, Artificial
  Synthetic oligonucleotide
tgtgtggatgatgtaaatgggaagacggatgtgtcgaagttggaggaaactcggggaa

SEQ ID NO: 475431 - DNA, 60 bp, Artificial
  Synthetic oligonucleotide
tgtgtgggatttggggctccagtcttcagttacattcacagtcccctacatctcccaatc

SEQ ID NO: 475432 - DNA, 55 bp, Artificial
  Synthetic oligonucleotide
tgtgtgggcagcgaatgaattggataaattcggattggcagagagcctgttggag

SEQ ID NO: 475433 - DNA, 60 bp, Artificial
  Synthetic oligonucleotide
tgtgtggggaaattctttacactaaacacactgattacaaatatgctgctgagataggaa

SEQ ID NO: 475434 - DNA, 60 bp, Artificial
  Synthetic oligonucleotide
tgtgtgggttgatacagtagacaactgtgacgcgatgtcgtgttgagaagggaacacatc

SEQ ID NO: 475435 - DNA, 55 bp, Artificial
  Synthetic oligonucleotide
tgtgtggtcagtaatagcgaatctttgtctgctgtcacacgttcgttacaggctc

SEQ ID NO: 475436 - DNA, 60 bp, Artificial
  Synthetic oligonucleotide
tgtgtggtggtgccttggtttcatcaaatcagtctatacagaatgcaatcttgggcatac

SEQ ID NO: 475437 - DNA, 59 bp, Artificial
  Synthetic oligonucleotide
tgtgtggttgaaaggttcccctggtactgaccagccatgccggtggctctttctgctct

SEQ ID NO: 475438 - DNA, 60 bp, Artificial
  Synthetic oligonucleotide
tgtgtgtaagccacgaaactgacgtggtatatcagctaatgaaagagatgcggtttggtc

SEQ ID NO: 475439 - DNA, 58 bp, Artificial
  Synthetic oligonucleotide
tgtgtgtacaagactcggcaataatacgagaaaaagtataaggataggaccaggacaa

SEQ ID NO: 475440 - DNA, 55 bp, Artificial
  Synthetic oligonucleotide
tgtgtgtagaacttaccagtcaggaaaggcagtgtagcttaattgaggcgggtac

SEQ ID NO: 475441 - DNA, 55 bp, Artificial
  Synthetic oligonucleotide
tgtgtgtcagtgatgtaaccaggggaggtggtataacgcatagggtaggtaaacg

SEQ ID NO: 475442 - DNA, 60 bp, Artificial
  Synthetic oligonucleotide
tgtgtgtgagctcatacgcggggcttaccctaaaattcaaaccactagccgtgtgctgcg

SEQ ID NO: 475443 - DNA, 60 bp, Artificial
  Synthetic oligonucleotide
tgtgtgtgataattctctgagcagaggtcagacaagatatggggttaaacatggcatcat

SEQ ID NO: 475444 - DNA, 60 bp, Artificial
  Synthetic oligonucleotide
tgtgtgtgatctaatcaaaggcatttacccttactatgagccggccccacacaccaccaa

SEQ ID NO: 475445 - DNA, 60 bp, Artificial
  Synthetic oligonucleotide
tgtgtgtgcagtggcctcacaaggagacaataatggacatgtggtgcttcaatttatgtt

SEQ ID NO: 475446 - DNA, 60 bp, Artificial
  Synthetic oligonucleotide
tgtgtgtgccataaaggggtctgtccggtagtcatgacagatggtccagcaaacaatagg

SEQ ID NO: 475447 - DNA, 60 bp, Artificial
  Synthetic oligonucleotide
tgtgtgtgctgaagcacaatcgctttgtttgactatgtaaacactgttatctctggtctt

SEQ ID NO: 475448 - DNA, 55 bp, Artificial
  Synthetic oligonucleotide
tgtgtgtggggaccgctggactaccgtccacccacctacggttggactcatggca

SEQ ID NO: 475449 - DNA, 59 bp, Artificial
  Synthetic oligonucleotide
tgtgtgtgtcgatggttgtatactgctgaaattagccaaaaggggcacgcccagaaccc

SEQ ID NO: 475450 - DNA, 55 bp, Artificial
  Synthetic oligonucleotide
tgtgtgttactctaccaagcaatacccaaagttgttgagctgtcctccaaggatc

SEQ ID NO: 475451 - DNA, 54 bp, Artificial
  Synthetic oligonucleotide
tgtgtgttactgtcccgcttgttatatacaccactacattgtgaacacacagca

SEQ ID NO: 475452 - DNA, 60 bp, Artificial
  Synthetic oligonucleotide
tgtgtgttagttggtcaccacaatgtatttttaagtactgtgtatatcccagtgtgctat

SEQ ID NO: 475453 - DNA, 60 bp, Artificial
  Synthetic oligonucleotide
tgtgtgttggtgctttcagtgatgattggcacctttatggcagactctgaatatgctatg

SEQ ID NO: 475454 - DNA, 58 bp, Artificial
  Synthetic oligonucleotide
tgtgttaacctaatcacttttgaagatggtctgagggagctctcgataatacagagtc

SEQ ID NO: 475455 - DNA, 60 bp, Artificial
  Synthetic oligonucleotide
tgtgttaagaccagagtttgcgattcacggcgtaaatccgatgccagggccgctcacacg

SEQ ID NO: 475456 - DNA, 60 bp, Artificial
  Synthetic oligonucleotide
tgtgttaagggctcagacaggaattcagccggtcttggttctcttttcacacaagctgta

SEQ ID NO: 475457 - DNA, 56 bp, Artificial
  Synthetic oligonucleotide
tgtgttaccttatggaatgatggttggggtgttggtattcctgcctgaaacggcgg

SEQ ID NO: 475458 - DNA, 58 bp, Artificial
  Synthetic oligonucleotide
tgtgttacgcactagagttattcgcacgcccgaaggtcgtgtgttcttggttaatcag

SEQ ID NO: 475459 - DNA, 60 bp, Artificial
  Synthetic oligonucleotide
tgtgttagatcagttacagtatatgttagacggatacgaggctggcgacgttattgatgc

SEQ ID NO: 475460 - DNA, 59 bp, Artificial
  Synthetic oligonucleotide
tgtgttagcgatttcatcacgggcttcttgtgatttcttaccagaggccaacttgaagt

SEQ ID NO: 475461 - DNA, 53 bp, Artificial
  Synthetic oligonucleotide
tgtgttaggggcgggagatgaaatcccagacccattaagccccggggaacaag

SEQ ID NO: 475462 - DNA, 59 bp, Artificial
  Synthetic oligonucleotide
tgtgttatcgaactcatacctttagatggctgcccactcatttggacttccacaaaacc

SEQ ID NO: 475463 - DNA, 54 bp, Artificial
  Synthetic oligonucleotide
tgtgttatggaaccttgcaacattcctaactacggtgttggaataacgttgccg

SEQ ID NO: 475464 - DNA, 60 bp, Artificial
  Synthetic oligonucleotide
tgtgttatggtgcaagctcacagacccttcagcgtggtgataatacagtaacaatccaag

SEQ ID NO: 475465 - DNA, 60 bp, Artificial
  Synthetic oligonucleotide
tgtgttatgtaatggaatgtgcaatctcgcaaccaaccgtcattggttgatggtgcggct

SEQ ID NO: 475466 - DNA, 55 bp, Artificial
  Synthetic oligonucleotide
tgtgttattgtgtggaaacatcatataagccattacaatgccaggttagagatcc

SEQ ID NO: 475467 - DNA, 58 bp, Artificial
  Synthetic oligonucleotide
tgtgttcaactataacaaggcaaccaagaggcttacagttctcgggaaggatgcaggt

SEQ ID NO: 475468 - DNA, 55 bp, Artificial
  Synthetic oligonucleotide
tgtgttcaataccgtacaggcgtatggtaggcgtcgaatcccttactacacaggg

SEQ ID NO: 475469 - DNA, 53 bp, Artificial
  Synthetic oligonucleotide
tgtgttcagagaacttatgttgcctgccatatacgacaagtagtaaatgattg

SEQ ID NO: 475470 - DNA, 56 bp, Artificial
  Synthetic oligonucleotide
tgtgttcatgtggcttttataagatacccccgaagccatttatatgggtggggaaa

SEQ ID NO: 475471 - DNA, 60 bp, Artificial
  Synthetic oligonucleotide
tgtgttcccatctctcctagccgccgcctggtcatctcggtactcgacacataaagaaga

SEQ ID NO: 475472 - DNA, 52 bp, Artificial
  Synthetic oligonucleotide
tgtgttcgggaccgttaccgtgaagagcccgaacgtggtatggtacggggac

SEQ ID NO: 475473 - DNA, 56 bp, Artificial
  Synthetic oligonucleotide
tgtgttcgtaccactgctcttttaaacggaattttcggctgccaaatcaagtctcg

SEQ ID NO: 475474 - DNA, 55 bp, Artificial
  Synthetic oligonucleotide
tgtgttctctgcgcgctgcaatgtgcagcgatacttgagacacatatcgatgttg

SEQ ID NO: 475475 - DNA, 60 bp, Artificial
  Synthetic oligonucleotide
tgtgttgacaggttcagctgtcgggtgtgatcccgatactttctggtcagtgattccttg

SEQ ID NO: 475476 - DNA, 55 bp, Artificial
  Synthetic oligonucleotide
tgtgttgagattagcgagtaaggagcagaagggcttcttatcgcgacaggccgac

SEQ ID NO: 475477 - DNA, 50 bp, Artificial
  Synthetic oligonucleotide
tgtgttgatgagaccatagctatgacattacgtcagagtggatttgtctt

SEQ ID NO: 475478 - DNA, 60 bp, Artificial
  Synthetic oligonucleotide
tgtgttgccgtcatgcgctcccagtgccccacacacaattgtaacataaaagccccgtcc

SEQ ID NO: 475479 - DNA, 60 bp, Artificial
  Synthetic oligonucleotide
tgtgttgctcaatgtcttattcctggacaggcgcgcttatcaccccgtgtgccgcggaag

SEQ ID NO: 475480 - DNA, 57 bp, Artificial
  Synthetic oligonucleotide
tgtgttggactgtctaccatggtgccggctcgaagaccctagccggcccaaagggcc

SEQ ID NO: 475481 - DNA, 60 bp, Artificial
  Synthetic oligonucleotide
tgtgttggagacctcaacgaacgcagacccaggtataatatttgaagccatgcgtggaga

SEQ ID NO: 475482 - DNA, 56 bp, Artificial
  Synthetic oligonucleotide
tgtgttggctgattatctcaccagagaataccagcaaaaacgtcagcaatgacgac

SEQ ID NO: 475483 - DNA, 60 bp, Artificial
  Synthetic oligonucleotide
tgtgttggttgtttggggaattcaccaccctgctacactgaaagagcatcaagacctata

SEQ ID NO: 475484 - DNA, 51 bp, Artificial
  Synthetic oligonucleotide
tgtgttgtatgtgtatccatctcatacaactctccacgaggcacatcgact

SEQ ID NO: 475485 - DNA, 59 bp, Artificial
  Synthetic oligonucleotide
tgtgttgtcaagttccccatatagactccagaagtttgaggtctttcagacctcataat

SEQ ID NO: 475486 - DNA, 60 bp, Artificial
  Synthetic oligonucleotide
tgtgttgtcaggctagccattgacatcttagcagattgctgcgagcaaacggaactcacc

SEQ ID NO: 475487 - DNA, 60 bp, Artificial
  Synthetic oligonucleotide
tgtgttgtctgtggagaaggatacattaatggttgatcttgaagggacgacgtcgctctc

SEQ ID NO: 475488 - DNA, 53 bp, Artificial
  Synthetic oligonucleotide
tgtgtttaaagggcgtcacctaggaaagtacagttcgagtccagggaattact

SEQ ID NO: 475489 - DNA, 56 bp, Artificial
  Synthetic oligonucleotide
tgtgtttaactacaacaaggcaaccaagaggcttacggtcctcggaaaggatgcag

SEQ ID NO: 475490 - DNA, 60 bp, Artificial
  Synthetic oligonucleotide
tgtgtttaaggcctgtgcgtaagcgtcattagctgtctgctggcctcctctagcagatct

SEQ ID NO: 475491 - DNA, 54 bp, Artificial
  Synthetic oligonucleotide
tgtgtttactattaactaaaccaaccacacttatatgaccttatgtctttaggg

SEQ ID NO: 475492 - DNA, 56 bp, Artificial
  Synthetic oligonucleotide
tgtgtttctgatgtgacacgtggtaatggcattacccaccgtgtggggaaacgttt

SEQ ID NO: 475493 - DNA, 54 bp, Artificial
  Synthetic oligonucleotide
tgtgtttgagactaattttaaagcaagaaagactgtactctgttatgacctttc

SEQ ID NO: 475494 - DNA, 52 bp, Artificial
  Synthetic oligonucleotide
tgtgtttgcagggacaattggaacggaatgaatagaccaattctgatattcg

SEQ ID NO: 475495 - DNA, 58 bp, Artificial
  Synthetic oligonucleotide
tgtgtttgttaggaagtctgacaatgtgaaggtaacgtagtcagagttccatattacg

SEQ ID NO: 475496 - DNA, 60 bp, Artificial
  Synthetic oligonucleotide
tgtgttttacctctgatggtgtaagcatgaaagtactagctttaagacacagtgtggctc

SEQ ID NO: 475497 - DNA, 55 bp, Artificial
  Synthetic oligonucleotide
tgtgttttgtacacctcctgtgtcttcttgggtcaatgacgggtgctctagtctg

SEQ ID NO: 475498 - DNA, 50 bp, Artificial
  Synthetic oligonucleotide
tgtgttttgtcgttctcggggggaagtttgtcatgtgagagcgcctttta

SEQ ID NO: 475499 - DNA, 57 bp, Artificial
  Synthetic oligonucleotide
tgttaaaaataatctaatgggtaaagcaactactattgatcaagctctaaatggaaa

SEQ ID NO: 475500 - DNA, 60 bp, Artificial
  Synthetic oligonucleotide
tgttaaaacttggccggtcatggatcacagaacattcatgcaggagcaagggcggggcac

SEQ ID NO: 475501 - DNA, 60 bp, Artificial
  Synthetic oligonucleotide
tgttaaaatctccctttgcatctgaacggtggacattgacagatgttagtgcagaactga

SEQ ID NO: 475502 - DNA, 53 bp, Artificial
  Synthetic oligonucleotide
tgttaaacaagctgaagggaattttatcaaccacatctcaggatgcatacaga

SEQ ID NO: 475503 - DNA, 58 bp, Artificial
  Synthetic oligonucleotide
tgttaaaccaagcgctgatgtaactttctatgcaacgctaacgcaaggagactttaaa

SEQ ID NO: 475504 - DNA, 52 bp, Artificial
  Synthetic oligonucleotide
tgttaaacctagcgttgacgtaactttctatgcaacgctagcacgaggtgac

SEQ ID NO: 475505 - DNA, 54 bp, Artificial
  Synthetic oligonucleotide
tgttaaactacccgaaattttctacccagccgaagcgaacgtgcagaaggccta

SEQ ID NO: 475506 - DNA, 53 bp, Artificial
  Synthetic oligonucleotide
tgttaaagtaagcccacctacaccgtatcgtttaactgacttttctaacttca

SEQ ID NO: 475507 - DNA, 58 bp, Artificial
  Synthetic oligonucleotide
tgttaaagtatgtataattggtacagtctcaaaattctcccaaggtgatacactatta

SEQ ID NO: 475508 - DNA, 56 bp, Artificial
  Synthetic oligonucleotide
tgttaaagtggccactaagtatgttaagaaggttactggcaaactagcagtgcgct

SEQ ID NO: 475509 - DNA, 55 bp, Artificial
  Synthetic oligonucleotide
tgttaaatccctaaagcttgctaccgggctcagaaatgtccctgcgattgccgca

SEQ ID NO: 475510 - DNA, 56 bp, Artificial
  Synthetic oligonucleotide
tgttaaatccgtttatgtcttgggtaagatatggatggacgaaaatattaagacca

SEQ ID NO: 475511 - DNA, 54 bp, Artificial
  Synthetic oligonucleotide
tgttaaatcttggcggtaggcccacaaacaggaccctaatgtataattttccaa

SEQ ID NO: 475512 - DNA, 60 bp, Artificial
  Synthetic oligonucleotide
tgttaaattggcgggatgggcagctgataaccgatggtgaatatcgtgaaatgaatcagc

SEQ ID NO: 475513 - DNA, 60 bp, Artificial
  Synthetic oligonucleotide
tgttaacaaaagcacattacagagcagacgggcagctgtgtctgcattggagaccaaact

SEQ ID NO: 475514 - DNA, 59 bp, Artificial
  Synthetic oligonucleotide
tgttaacaacagctatatgggatgtcccagtgggtccttagtttctacggatggccagc

SEQ ID NO: 475515 - DNA, 54 bp, Artificial
  Synthetic oligonucleotide
tgttaacaacggagattgtatatcaagttcacattgtgcgcttgggaatgttgt

SEQ ID NO: 475516 - DNA, 56 bp, Artificial
  Synthetic oligonucleotide
tgttaacaagggatggtgggattaataccagtacaagtgaaaccttcagacctgga

SEQ ID NO: 475517 - DNA, 56 bp, Artificial
  Synthetic oligonucleotide
tgttaacagacctattgattggaaggtatgtcaaagaattgtgggtcttttaggat

SEQ ID NO: 475518 - DNA, 59 bp, Artificial
  Synthetic oligonucleotide
tgttaacaggaataacttctccgacctgttctgcaattgactatgagttaaggtgcgac

SEQ ID NO: 475519 - DNA, 60 bp, Artificial
  Synthetic oligonucleotide
tgttaacatcaaaccttactttcactgtttactcagatctgcttgcattcgtatcggctg

SEQ ID NO: 475520 - DNA, 55 bp, Artificial
  Synthetic oligonucleotide
tgttaacatctgtaggcgactgtgcatatataggtccatatgaagaccttgcaag

SEQ ID NO: 475521 - DNA, 59 bp, Artificial
  Synthetic oligonucleotide
tgttaacctagccggccagataactgttgtcaagtgtgatacaaaccatgttttgtcta

SEQ ID NO: 475522 - DNA, 60 bp, Artificial
  Synthetic oligonucleotide
tgttaacctgtaaattagatgatggtgatacatggatggcattatggatgttacttacat

SEQ ID NO: 475523 - DNA, 57 bp, Artificial
  Synthetic oligonucleotide
tgttaacgcactcaatcacgaaggaatccaagcgggagttgacaggttttatcgaac

SEQ ID NO: 475524 - DNA, 60 bp, Artificial
  Synthetic oligonucleotide
tgttaacgctgaacgccatctgacaaccgatgcatctgctagccgccatacttatggtgg

SEQ ID NO: 475525 - DNA, 50 bp, Artificial
  Synthetic oligonucleotide
tgttaacggctgttccttcgaaatttagtgtgatgttggtggatgagtac

SEQ ID NO: 475526 - DNA, 58 bp, Artificial
  Synthetic oligonucleotide
tgttaactagggtaatcgaggcagcctttcggaatttcaagcctgatacccccatgca

SEQ ID NO: 475527 - DNA, 55 bp, Artificial
  Synthetic oligonucleotide
tgttaacttggctttcatgaacctctttgatcttccacaaggggtaggctacggg

SEQ ID NO: 475528 - DNA, 60 bp, Artificial
  Synthetic oligonucleotide
tgttaagaatgattacgatgtgagcgatcaggacatggaagttctattgagtggtttaat

SEQ ID NO: 475529 - DNA, 56 bp, Artificial
  Synthetic oligonucleotide
tgttaagacaatctactagccctatgaatactccagtttacccagttcctaaacca

SEQ ID NO: 475530 - DNA, 58 bp, Artificial
  Synthetic oligonucleotide
tgttaagacgcttagcggcataccgaatttgggtgataagtccgaagctgaactactg

SEQ ID NO: 475531 - DNA, 60 bp, Artificial
  Synthetic oligonucleotide
tgttaagatgctgtcagcatttggagataaatcagcgtacgcgctatgtacattcgcata

SEQ ID NO: 475532 - DNA, 58 bp, Artificial
  Synthetic oligonucleotide
tgttaagtaagcaatggataacagtcttttatggaataccagtatggaaaaacagctc

SEQ ID NO: 475533 - DNA, 60 bp, Artificial
  Synthetic oligonucleotide
tgttaagtgatggttctgatccagacatgcatatgacgaggaagtttaagtttgtcttaa

SEQ ID NO: 475534 - DNA, 55 bp, Artificial
  Synthetic oligonucleotide
tgttaatacattcctgaaccgtcgtcctaactagctcgcttaattgggccactga

SEQ ID NO: 475535 - DNA, 50 bp, Artificial
  Synthetic oligonucleotide
tgttaatactaaacatgggttaaagatcaggcaactattgtgggttcata

SEQ ID NO: 475536 - DNA, 60 bp, Artificial
  Synthetic oligonucleotide
tgttaatattggcagtggcatatttgtaataatagctgggcaccgattggggactctcta

SEQ ID NO: 475537 - DNA, 60 bp, Artificial
  Synthetic oligonucleotide
tgttaatcaaacaattataactcatcatgaaagtactactgtgcaatttgaattgtctcc

SEQ ID NO: 475538 - DNA, 60 bp, Artificial
  Synthetic oligonucleotide
tgttaatgaacttggcagagacaacacaagctgacttatgtattccctatgtatctgaca

SEQ ID NO: 475539 - DNA, 60 bp, Artificial
  Synthetic oligonucleotide
tgttaatgagtgattgctataaatttggtcacatgtctttatacccgaaaggtatcacac

SEQ ID NO: 475540 - DNA, 59 bp, Artificial
  Synthetic oligonucleotide
tgttaatggagtgttcgtgtttagcttaatcatggacacaaagccttatttacctgctg

SEQ ID NO: 475541 - DNA, 60 bp, Artificial
  Synthetic oligonucleotide
tgttaatggtactctcaagcagtgtctcgagatcctttctggatacggagtcggattggg

SEQ ID NO: 475542 - DNA, 60 bp, Artificial
  Synthetic oligonucleotide
tgttaattacattctcaatatggatagaaatctaccatcaactgccagatatataagacc

SEQ ID NO: 475543 - DNA, 57 bp, Artificial
  Synthetic oligonucleotide
tgttaattctacggtgtatttggacccctgcatgggccctgccctttgcaacagaag

SEQ ID NO: 475544 - DNA, 57 bp, Artificial
  Synthetic oligonucleotide
tgttaattggaaataccacagtaattccaagtccgcaaacactgtttcactattata

SEQ ID NO: 475545 - DNA, 55 bp, Artificial
  Synthetic oligonucleotide
tgttaattggaaatactacggtaattccaagcccgcaaacactatttcactacta

SEQ ID NO: 475546 - DNA, 57 bp, Artificial
  Synthetic oligonucleotide
tgttaattgggccatcgtgcctaccaatgggattgggatttaataatcgtctaatgg

SEQ ID NO: 475547 - DNA, 59 bp, Artificial
  Synthetic oligonucleotide
tgttacaaagttatcatctagaataacagcactggagcccactcccctatcaccctggg

SEQ ID NO: 475548 - DNA, 56 bp, Artificial
  Synthetic oligonucleotide
tgttacaacatgtagccacagaaagtattgttagaattggaacatgtccaaaattt

SEQ ID NO: 475549 - DNA, 60 bp, Artificial
  Synthetic oligonucleotide
tgttacaacgtgttgcctgttaatcctatatattttgtgccaggtacacattgccctgcc

SEQ ID NO: 475550 - DNA, 56 bp, Artificial
  Synthetic oligonucleotide
tgttacaattggagaggaccagataaatctttcccttagcacgtttaaattgtgag

SEQ ID NO: 475551 - DNA, 60 bp, Artificial
  Synthetic oligonucleotide
tgttacacaggcgctgaagcattggtcacgactgctattcacatgcatcgatggataaga

SEQ ID NO: 475552 - DNA, 60 bp, Artificial
  Synthetic oligonucleotide
tgttacacatgcccaagacatactggaaaagacacacaacgggaagctctgcgatctaga

SEQ ID NO: 475553 - DNA, 55 bp, Artificial
  Synthetic oligonucleotide
tgttacagccagtgtgcccgtggccggcgctaccaccactcacagcagagtgtga

SEQ ID NO: 475554 - DNA, 60 bp, Artificial
  Synthetic oligonucleotide
tgttacaggccctgacagtataacaacaattgaactctatcttaacaccaggatgggaca

SEQ ID NO: 475555 - DNA, 53 bp, Artificial
  Synthetic oligonucleotide
tgttacaggctttgttttaagggttggtcgtggcacagctgttaatcgtactg

SEQ ID NO: 475556 - DNA, 53 bp, Artificial
  Synthetic oligonucleotide
tgttacagttgtagacaccactcgtagcactaatttaaccttatgtgctgcca

SEQ ID NO: 475557 - DNA, 52 bp, Artificial
  Synthetic oligonucleotide
tgttacatcaggcataccaggggatataagacaagcacattgtaaccttagt

SEQ ID NO: 475558 - DNA, 55 bp, Artificial
  Synthetic oligonucleotide
tgttaccaaagatttgctggaccatctagatgttggagggctgttgagggctgcc

SEQ ID NO: 475559 - DNA, 60 bp, Artificial
  Synthetic oligonucleotide
tgttaccagacatgactccaagcacagagatgtcaatgagaggaataagagtcagcaaaa

SEQ ID NO: 475560 - DNA, 60 bp, Artificial
  Synthetic oligonucleotide
tgttaccatatagctattggattggccatccggtgactagcagagcactgatatacctat

SEQ ID NO: 475561 - DNA, 52 bp, Artificial
  Synthetic oligonucleotide
tgttaccatttctctggaggatcagaacacgaacctagcctcagattacgca

SEQ ID NO: 475562 - DNA, 53 bp, Artificial
  Synthetic oligonucleotide
tgttacccagggaaattcactaatgaggaagcactgagacaaataatcagaga

SEQ ID NO: 475563 - DNA, 59 bp, Artificial
  Synthetic oligonucleotide
tgttacccattcagttaatttactagaaaacagccacaatggaaaactctgcagcctga

SEQ ID NO: 475564 - DNA, 57 bp, Artificial
  Synthetic oligonucleotide
tgttaccccggtcaaaattgatatgctccaccagggcaaaaacaattgcgatcgtta

SEQ ID NO: 475565 - DNA, 60 bp, Artificial
  Synthetic oligonucleotide
tgttaccgcagtacgtcaagagtatgctataccagttggaccagtatttccaccaggcat

SEQ ID NO: 475566 - DNA, 59 bp, Artificial
  Synthetic oligonucleotide
tgttaccgtaaagttcgaagataactacgtactgcaactcatgtgcgcgtcttacgaca

SEQ ID NO: 475567 - DNA, 55 bp, Artificial
  Synthetic oligonucleotide
tgttaccgtgttgcgtacattgctcgtaaaagactttcgttaatttgtctccttc

SEQ ID NO: 475568 - DNA, 60 bp, Artificial
  Synthetic oligonucleotide
tgttacctcccaggtaaagacgccactcgctagctgagccgcagtgatggactcccctgt

SEQ ID NO: 475569 - DNA, 53 bp, Artificial
  Synthetic oligonucleotide
tgttacctctgaactaataaagtgcaattcaaaactccaacaacgctgggatt

SEQ ID NO: 475570 - DNA, 57 bp, Artificial
  Synthetic oligonucleotide
tgttacctgcaacatgcgtgccgaatattccgtcatgcaggacgtgtatatcaacgc

SEQ ID NO: 475571 - DNA, 54 bp, Artificial
  Synthetic oligonucleotide
tgttacctggggttaagaattccgttgcgagtttgcctggtgtttcacgtgtaa

SEQ ID NO: 475572 - DNA, 56 bp, Artificial
  Synthetic oligonucleotide
tgttacgacgttagtaaaacggaatactttgttgtgatcacattcctgctggaatt

SEQ ID NO: 475573 - DNA, 55 bp, Artificial
  Synthetic oligonucleotide
tgttacgcgtggagttggtttgacccatcgagtagggaaacgtttctgcgtcaag

SEQ ID NO: 475574 - DNA, 60 bp, Artificial
  Synthetic oligonucleotide
tgttacgggaaacgcgtgagtcagcgatgtggcgagcgtgacagccatattctatcctag

SEQ ID NO: 475575 - DNA, 60 bp, Artificial
  Synthetic oligonucleotide
tgttacgtaggctgcaacgaaacataaactcactaacgtacaaaagctgatatctcgcat

SEQ ID NO: 475576 - DNA, 58 bp, Artificial
  Synthetic oligonucleotide
tgttactagaggtagtgggattacccatagagtagggaagcggttctgtatcaagtca

SEQ ID NO: 475577 - DNA, 53 bp, Artificial
  Synthetic oligonucleotide
tgttactaggggagtgggtttgacccatcgtgttggtaaacgtttctgtgtta

SEQ ID NO: 475578 - DNA, 60 bp, Artificial
  Synthetic oligonucleotide
tgttactcacagtctcattgtcaccggttcaatcagcacctgttggtcatggtaagacaa

SEQ ID NO: 475579 - DNA, 60 bp, Artificial
  Synthetic oligonucleotide
tgttactccactttgggcagttgtgtgctgtgatgtctaagctaaaagctgttcgtgcta

SEQ ID NO: 475580 - DNA, 59 bp, Artificial
  Synthetic oligonucleotide
tgttactcgacaatagagtctgtgtcgaaagttgtggaaatggcggggtatagatatat

SEQ ID NO: 475581 - DNA, 50 bp, Artificial
  Synthetic oligonucleotide
tgttactcgggcgggtgaattaggcttacgctacgccgaaggttttgacg

SEQ ID NO: 475582 - DNA, 55 bp, Artificial
  Synthetic oligonucleotide
tgttactcttgcaattatgggtctcgagtttgtgtgcgcattaaggtggatggga

SEQ ID NO: 475583 - DNA, 55 bp, Artificial
  Synthetic oligonucleotide
tgttactgacagaggaagacaaaaggttgtccccctagtagacacaacaaatcag

SEQ ID NO: 475584 - DNA, 60 bp, Artificial
  Synthetic oligonucleotide
tgttactgatcagttaataggttacacacccagccttggcgagacgcgcaacccgcatat

SEQ ID NO: 475585 - DNA, 50 bp, Artificial
  Synthetic oligonucleotide
tgttactgctgctggggcaacagagggctttgggtaaacagttttctcct

SEQ ID NO: 475586 - DNA, 60 bp, Artificial
  Synthetic oligonucleotide
tgttactggcattgctagctttaaggatgggactcagcatacgattgttgatgagatact

SEQ ID NO: 475587 - DNA, 60 bp, Artificial
  Synthetic oligonucleotide
tgttactgtatatggcatgtactcatgcctctaaccctgtgtatgcaacgcttaagattc

SEQ ID NO: 475588 - DNA, 55 bp, Artificial
  Synthetic oligonucleotide
tgttactgtctacgacagagtggcaggtactaccctgttcctttaccaccctacc

SEQ ID NO: 475589 - DNA, 55 bp, Artificial
  Synthetic oligonucleotide
tgttagaaacccctgcaaagacacccaaggttccacaggccctagaaagcctcgc

SEQ ID NO: 475590 - DNA, 60 bp, Artificial
  Synthetic oligonucleotide
tgttagaaggaagataagaactaagtatcttatgaacaatgagtagctgatttctgatta

SEQ ID NO: 475591 - DNA, 59 bp, Artificial
  Synthetic oligonucleotide
tgttagacaagaatatgctataccggttggaccagtgtttccaccaggaatgaattgga

SEQ ID NO: 475592 - DNA, 52 bp, Artificial
  Synthetic oligonucleotide
tgttagacacacacggcgggacgtgttgctggagctgccactccgcccaaga

SEQ ID NO: 475593 - DNA, 59 bp, Artificial
  Synthetic oligonucleotide
tgttagacacgccttattttctagaaactctgtccatgtatgcggcccgctaaatatag

SEQ ID NO: 475594 - DNA, 60 bp, Artificial
  Synthetic oligonucleotide
tgttagacactttcctagagtatggctccatagcttagggcaacatatctataacacata

SEQ ID NO: 475595 - DNA, 60 bp, Artificial
  Synthetic oligonucleotide
tgttagacatttccctaggcactggctacatggcctaggacaatacatctataataccta

SEQ ID NO: 475596 - DNA, 60 bp, Artificial
  Synthetic oligonucleotide
tgttagacctgtgctcaaggaatccctaatcaactgtccttatgcgctcaatgattatga

SEQ ID NO: 475597 - DNA, 55 bp, Artificial
  Synthetic oligonucleotide
tgttagaccttatacttctactgtgtgtcgcgatttctgcgtaactcgtggatgt

SEQ ID NO: 475598 - DNA, 52 bp, Artificial
  Synthetic oligonucleotide
tgttagacgatacagtgaggtgggacggtaccttaaaaaaagcctacgtcgg

SEQ ID NO: 475599 - DNA, 55 bp, Artificial
  Synthetic oligonucleotide
tgttagactcggttattcctagacgtgactggggagatattcgttatccggaccc

SEQ ID NO: 475600 - DNA, 55 bp, Artificial
  Synthetic oligonucleotide
tgttagagacccctgcactcagcccaccttcgaactgcccggagccagtacgcag

SEQ ID NO: 475601 - DNA, 56 bp, Artificial
  Synthetic oligonucleotide
tgttagagggtttgctgttgctttctgtattagttggtgacgaggactagtttagg

SEQ ID NO: 475602 - DNA, 52 bp, Artificial
  Synthetic oligonucleotide
tgttagagtatggtgtcctagaccgcctagagtagtcccatactatggaccc

SEQ ID NO: 475603 - DNA, 54 bp, Artificial
  Synthetic oligonucleotide
tgttagagtcctggaaagacccggactacgtccctccggtggtacatgggtgcc

SEQ ID NO: 475604 - DNA, 58 bp, Artificial
  Synthetic oligonucleotide
tgttagatacttccgaggaattaaagaattacaacgagtggttcatccagtggcagaa

SEQ ID NO: 475605 - DNA, 55 bp, Artificial
  Synthetic oligonucleotide
tgttagatggcactcaaaacggacagagtcaatacaagctgggagtgtcacgagc

SEQ ID NO: 475606 - DNA, 55 bp, Artificial
  Synthetic oligonucleotide
tgttagattgtacgggagctcctcactgctcgctgcgtcgagagtgatcgagact

SEQ ID NO: 475607 - DNA, 55 bp, Artificial
  Synthetic oligonucleotide
tgttagcactgtgtagacaacatcataatgaacagcacgcaattggcgttaagtc

SEQ ID NO: 475608 - DNA, 60 bp, Artificial
  Synthetic oligonucleotide
tgttagccacatatgggttcgatcagtcagctccagaggtgatcggagaaatacacttcg

SEQ ID NO: 475609 - DNA, 55 bp, Artificial
  Synthetic oligonucleotide
tgttagccaggctatgtccacgatggccacaggtgagtgttgggaagtgtcaaaa

SEQ ID NO: 475610 - DNA, 53 bp, Artificial
  Synthetic oligonucleotide
tgttagcctcatgtttgcggcagtccaacagatcgcatctaagggcaagttgt

SEQ ID NO: 475611 - DNA, 60 bp, Artificial
  Synthetic oligonucleotide
tgttagcgagatcaggtgacgatccaagcccaaagaggctggtggtgtattcttcactaa

SEQ ID NO: 475612 - DNA, 60 bp, Artificial
  Synthetic oligonucleotide
tgttagcgatctaagacagtataacagtgatgaaccagagtctagatcgctagcaagctg

SEQ ID NO: 475613 - DNA, 60 bp, Artificial
  Synthetic oligonucleotide
tgttagcgatctaattcaacaatttaatcaaatgatagtaaccatgaatggaaatgactt

SEQ ID NO: 475614 - DNA, 60 bp, Artificial
  Synthetic oligonucleotide
tgttagcgctggacgcgcactgtacatccctccctacgaagtgctcctgcatgagtggta

SEQ ID NO: 475615 - DNA, 54 bp, Artificial
  Synthetic oligonucleotide
tgttagctgtgttcaaaccttgacgttgaatgtgacgtgcaatgattccagata

SEQ ID NO: 475616 - DNA, 60 bp, Artificial
  Synthetic oligonucleotide
tgttaggaacacatgttgtctgggatgttggattacagtccactatgtcaatggtagtcc

SEQ ID NO: 475617 - DNA, 57 bp, Artificial
  Synthetic oligonucleotide
tgttaggacctaaaaatgtgcctaattgatcggatttaaaggaacaagtatccatca

SEQ ID NO: 475618 - DNA, 59 bp, Artificial
  Synthetic oligonucleotide
tgttaggactgacagttgatcattctacggtcggagcaagcggtgtttatccctcttta

SEQ ID NO: 475619 - DNA, 60 bp, Artificial
  Synthetic oligonucleotide
tgttaggagagcaatagtatccgcagatccactggcatcactactggagatgtgtcacag

SEQ ID NO: 475620 - DNA, 60 bp, Artificial
  Synthetic oligonucleotide
tgttaggccaaccataagatgggtggcagcatgttgcaacttgcccgaagtagagacatt

SEQ ID NO: 475621 - DNA, 60 bp, Artificial
  Synthetic oligonucleotide
tgttaggggcaaactgacggaattgaacatatatagtgagcttggttacataagtgatcg

SEQ ID NO: 475622 - DNA, 60 bp, Artificial
  Synthetic oligonucleotide
tgttaggggccatactgagtacaaagctgtgtcatgcgacttcaacaacgggatcaccat

SEQ ID NO: 475623 - DNA, 56 bp, Artificial
  Synthetic oligonucleotide
tgttagggttctcaaagatgtgtacgttggttgacctcaccatcacaaagggagtt

SEQ ID NO: 475624 - DNA, 53 bp, Artificial
  Synthetic oligonucleotide
tgttaggtactccctagactttgtcttaaagggaaccgtgtgactcggttctc

SEQ ID NO: 475625 - DNA, 59 bp, Artificial
  Synthetic oligonucleotide
tgttaggtttgattcagaaattactctagtcccttgtatagctggtaagggagctgata

SEQ ID NO: 475626 - DNA, 54 bp, Artificial
  Synthetic oligonucleotide
tgttagtattccctggactcacaaggtgggcaattttacggggctttactcttc

SEQ ID NO: 475627 - DNA, 53 bp, Artificial
  Synthetic oligonucleotide
tgttagtcacgccgattacagagatcattcgaaacggttagagtcgctagcga

SEQ ID NO: 475628 - DNA, 56 bp, Artificial
  Synthetic oligonucleotide
tgttagtcgtgtggcaggcccacgtttatatagtagggcctatcatcaggttcgtg

SEQ ID NO: 475629 - DNA, 59 bp, Artificial
  Synthetic oligonucleotide
tgttagtgagccctcagggtacgctactgttgtggaggcttacaccaaccgtatggtca

SEQ ID NO: 475630 - DNA, 60 bp, Artificial
  Synthetic oligonucleotide
tgttagtgatgttacccgaggaaccggactcacacatcgcgtaggcaagcgattctgtgt

SEQ ID NO: 475631 - DNA, 52 bp, Artificial
  Synthetic oligonucleotide
tgttagtgtgtggtttacacttctacgtctaaaggtgacacctaaccttact

SEQ ID NO: 475632 - DNA, 53 bp, Artificial
  Synthetic oligonucleotide
tgttagttagtaatccgacccacgttttgcgttgagtgggatcccaacggtag

SEQ ID NO: 475633 - DNA, 56 bp, Artificial
  Synthetic oligonucleotide
tgttagttccttggctcaagtagggtataggttctttagtgattgggatcacaaag

SEQ ID NO: 475634 - DNA, 55 bp, Artificial
  Synthetic oligonucleotide
tgttagtttgacatcgactgatatgttacagggagtctgtggcgttttagtgggg

SEQ ID NO: 475635 - DNA, 56 bp, Artificial
  Synthetic oligonucleotide
tgttataaaagtaatgttaatgtgggtagttgtagttcaattgaaagtgcttatcc

SEQ ID NO: 475636 - DNA, 55 bp, Artificial
  Synthetic oligonucleotide
tgttataaccacacaaccagccaacgactgctgctacatatccctgtacagtccc

SEQ ID NO: 475637 - DNA, 55 bp, Artificial
  Synthetic oligonucleotide
tgttataacctggagtctggtcgtattttaggagctgaaacggtgggtgaaccac

SEQ ID NO: 475638 - DNA, 60 bp, Artificial
  Synthetic oligonucleotide
tgttataacgagatgttacgcatgctggtcgccgcaggtaaggactcggaggcagcgtat

SEQ ID NO: 475639 - DNA, 55 bp, Artificial
  Synthetic oligonucleotide
tgttataacgatttatcggtgtacgactaagcctgttagaaacacctctccttac

SEQ ID NO: 475640 - DNA, 59 bp, Artificial
  Synthetic oligonucleotide
tgttataagatgggtggcaagtggtcaaaaagtagtatctttggatggcctgctgtaag

SEQ ID NO: 475641 - DNA, 56 bp, Artificial
  Synthetic oligonucleotide
tgttataagcgtaacagcaactcccactggttcagtggccggaaaggaaggttgaa

SEQ ID NO: 475642 - DNA, 60 bp, Artificial
  Synthetic oligonucleotide
tgttataatacgtgcaatattggaccgtgcgattgataccgtcactgccatggactacaa

SEQ ID NO: 475643 - DNA, 54 bp, Artificial
  Synthetic oligonucleotide
tgttataatggatgacatcatgcaaaatccagatggggaggatatgtccttgtt

SEQ ID NO: 475644 - DNA, 54 bp, Artificial
  Synthetic oligonucleotide
tgttatacattcgatgtatattccagtgattttgaataccaccgatgctatagc

SEQ ID NO: 475645 - DNA, 58 bp, Artificial
  Synthetic oligonucleotide
tgttataccatgacaagggaaacaagcaacatttatcttgacaactactaactacatt

SEQ ID NO: 475646 - DNA, 60 bp, Artificial
  Synthetic oligonucleotide
tgttatactatcaatagagtgaagtcattcaagctatgcgaaaatagtggcacgggaaaa

SEQ ID NO: 475647 - DNA, 60 bp, Artificial
  Synthetic oligonucleotide
tgttatagacagtccagctggacaagcaaaaccggacacatccaattacaatatcgttac

SEQ ID NO: 475648 - DNA, 55 bp, Artificial
  Synthetic oligonucleotide
tgttatagccttcgtgactttggtaacgactttgtaccgtccctgtacagacagg

SEQ ID NO: 475649 - DNA, 57 bp, Artificial
  Synthetic oligonucleotide
tgttatataagtgtcgtggtgtcgagactagttctccactactcaactcccacttat

SEQ ID NO: 475650 - DNA, 60 bp, Artificial
  Synthetic oligonucleotide
tgttatatattatcgtcatctctccttggtggatctatgttcctctatctatgtcctttt

SEQ ID NO: 475651 - DNA, 60 bp, Artificial
  Synthetic oligonucleotide
tgttatatcatgtgcatggtgtccgcatgtaacgatttctcggtgcgcatgttacgcgat

SEQ ID NO: 475652 - DNA, 60 bp, Artificial
  Synthetic oligonucleotide
tgttatatgggtcagataagatcacttaatgcgaccgtaattcagacttgtgcacctcat

SEQ ID NO: 475653 - DNA, 60 bp, Artificial
  Synthetic oligonucleotide
tgttatattctgacaatgtggactcttcttctcattattgaatccattctctgggcagca

SEQ ID NO: 475654 - DNA, 60 bp, Artificial
  Synthetic oligonucleotide
tgttatattggattctgctctctgggctcctactattgaagcagactctcccggatccaa

SEQ ID NO: 475655 - DNA, 60 bp, Artificial
  Synthetic oligonucleotide
tgttatcacaacctcaagatgcggtttccagttgcagtctcttcacgggagaacagcaag

SEQ ID NO: 475656 - DNA, 55 bp, Artificial
  Synthetic oligonucleotide
tgttatccgcctttcacaaactcaaccatgacacgtcctgtggaccttatctggg

SEQ ID NO: 475657 - DNA, 55 bp, Artificial
  Synthetic oligonucleotide
tgttatccgctttagctttaatcatctcgcagtgtcgatgccttgtcatctctac

SEQ ID NO: 475658 - DNA, 56 bp, Artificial
  Synthetic oligonucleotide
tgttatccgggccactattcgctatcgcccgctggtcccaaacgctgtcggcgggt

SEQ ID NO: 475659 - DNA, 60 bp, Artificial
  Synthetic oligonucleotide
tgttatcctgatgctagcgaggtaatgtgtgtatgcagagacaactggcatggttcgaat

SEQ ID NO: 475660 - DNA, 57 bp, Artificial
  Synthetic oligonucleotide
tgttatcggatggatgctcgggagcaacacaatgcaacgcgtcgtgttcgctatcct

SEQ ID NO: 475661 - DNA, 57 bp, Artificial
  Synthetic oligonucleotide
tgttatctatcctgttggacaagaaaccgtatttaccagatggtgtgaatacgatac

SEQ ID NO: 475662 - DNA, 57 bp, Artificial
  Synthetic oligonucleotide
tgttatctcgggtttggttgtgctcactcatgtcgaaaacattcacgacggaccctt

SEQ ID NO: 475663 - DNA, 56 bp, Artificial
  Synthetic oligonucleotide
tgttatgaaccggttttacaaggtttcatacatcgaaaatagcactacctggggca

SEQ ID NO: 475664 - DNA, 60 bp, Artificial
  Synthetic oligonucleotide
tgttatgagtcagagcttaagtgacagggttgaccgtatgtaccatgagctaattcatac

SEQ ID NO: 475665 - DNA, 60 bp, Artificial
  Synthetic oligonucleotide
tgttatgatgatgatggtatcttgacaatcaatgtcattggtgatgcaaaatttcacaca

SEQ ID NO: 475666 - DNA, 60 bp, Artificial
  Synthetic oligonucleotide
tgttatgcccccagactatgatcctaaggtgttctcaaggtgggagagcatcactctcaa

SEQ ID NO: 475667 - DNA, 60 bp, Artificial
  Synthetic oligonucleotide
tgttatgctggctgtttgcaaacgcatgtgtttcagggcaactatggaagtaagcaacaa

SEQ ID NO: 475668 - DNA, 60 bp, Artificial
  Synthetic oligonucleotide
tgttatgcttgattgggctctctgagctccaacaattgacgctgaatctcccgggtccaa

SEQ ID NO: 475669 - DNA, 59 bp, Artificial
  Synthetic oligonucleotide
tgttatgcttgttgtactccctgtttacggttatctgctaagtatgaactagaaagata

SEQ ID NO: 475670 - DNA, 57 bp, Artificial
  Synthetic oligonucleotide
tgttatggggcaactgtgacaaacttattgaggggttctaacacagtcaaagttgtg

SEQ ID NO: 475671 - DNA, 60 bp, Artificial
  Synthetic oligonucleotide
tgttatggtgaagactctcccagcgctgaattcaccgagtgcggaggagtgcggatatag

SEQ ID NO: 475672 - DNA, 58 bp, Artificial
  Synthetic oligonucleotide
tgttatggtgcacaaagtgttacactcatcagaggccaaaatacagtaaaggtttccg

SEQ ID NO: 475673 - DNA, 55 bp, Artificial
  Synthetic oligonucleotide
tgttatggtttaaggagtgaccctttaggtcgttcaagctattcaatagtggcga

SEQ ID NO: 475674 - DNA, 57 bp, Artificial
  Synthetic oligonucleotide
tgttatgtgggtttagtatggggtattcttctaacatttgaaattgttgtctgggca

SEQ ID NO: 475675 - DNA, 60 bp, Artificial
  Synthetic oligonucleotide
tgttatgttattaaactcgcatttacctaatgcgagtcttgcatcggtcgtctgagactt

SEQ ID NO: 475676 - DNA, 51 bp, Artificial
  Synthetic oligonucleotide
tgttatgtttgacacgtgcgtaatggtcggtctattctcaggtgttcgtaa

SEQ ID NO: 475677 - DNA, 57 bp, Artificial
  Synthetic oligonucleotide
tgttattaaaacaccgatttgaaataattgaaggaagagaccggacaatggcatgga

SEQ ID NO: 475678 - DNA, 60 bp, Artificial
  Synthetic oligonucleotide
tgttattatggcatcgacagatgagcatgtatctataaacaaatgtattcagatagtaat

SEQ ID NO: 475679 - DNA, 54 bp, Artificial
  Synthetic oligonucleotide
tgttattcctggggatattaataatatgtaatgctgaagacttgtgggtcacaa

SEQ ID NO: 475680 - DNA, 58 bp, Artificial
  Synthetic oligonucleotide
tgttattcgatcacgtttcctcacgcatgaagttttcgacttaacgtccgatttgcca

SEQ ID NO: 475681 - DNA, 55 bp, Artificial
  Synthetic oligonucleotide
tgttattcgtgcactggtattttccttcgaactgtatgagcacatggagatgagg

SEQ ID NO: 475682 - DNA, 58 bp, Artificial
  Synthetic oligonucleotide
tgttattctggttagttagagatagaagacctggttcaacgccatatggttttcagga

SEQ ID NO: 475683 - DNA, 60 bp, Artificial
  Synthetic oligonucleotide
tgttattgaaagtgtacaaaggaattgatttagaccaatttagaatgatagcatatggag

SEQ ID NO: 475684 - DNA, 60 bp, Artificial
  Synthetic oligonucleotide
tgttattgatgcaacagccccatctgttgtaccccttacagaaggtgttccagagacaac

SEQ ID NO: 475685 - DNA, 60 bp, Artificial
  Synthetic oligonucleotide
tgttattgtacatggcatgtactcatgcctctaatcctgtgtatgctacattgaagatac

SEQ ID NO: 475686 - DNA, 55 bp, Artificial
  Synthetic oligonucleotide
tgttatttacccgaaatcacatttccgaccgagatggtaatctcaaacaacgacc

SEQ ID NO: 475687 - DNA, 56 bp, Artificial
  Synthetic oligonucleotide
tgttatttacctaacatcctttgttgtcccaatactactgaaggccttgtatatgt

SEQ ID NO: 475688 - DNA, 59 bp, Artificial
  Synthetic oligonucleotide
tgttcaaaacagaggacggtgttaacatgtgtaccctcatggccatagaccttggtgaa

SEQ ID NO: 475689 - DNA, 60 bp, Artificial
  Synthetic oligonucleotide
tgttcaaacgttgcgtgatgccaccacatcttcatggattattgattttcataagatgtg

SEQ ID NO: 475690 - DNA, 53 bp, Artificial
  Synthetic oligonucleotide
tgttcaaactgaaacccctcgaagaagtttcgggggatacaatttgagaccca

SEQ ID NO: 475691 - DNA, 55 bp, Artificial
  Synthetic oligonucleotide
tgttcaaagtcaggaaatattacaagccgtctttaaccgtgagaaaaagcgtaga

SEQ ID NO: 475692 - DNA, 60 bp, Artificial
  Synthetic oligonucleotide
tgttcaaagttgccgtcccacgcgactataaattgtctcacaagtgcgattcatctatgg

SEQ ID NO: 475693 - DNA, 55 bp, Artificial
  Synthetic oligonucleotide
tgttcaacaccaatggcttttggggctctttaactgtggaaaacacccactctcc

SEQ ID NO: 475694 - DNA, 60 bp, Artificial
  Synthetic oligonucleotide
tgttcaacaccgatcctcgtatatattttccgaatactggtatgaccactgtcttcactg

SEQ ID NO: 475695 - DNA, 50 bp, Artificial
  Synthetic oligonucleotide
tgttcaacctcagcaggatagttcctcggcagtccggtctgtcggattag

SEQ ID NO: 475696 - DNA, 60 bp, Artificial
  Synthetic oligonucleotide
tgttcaagggactaatgaggcaatgcaactacgaatacacgtatgaatagttacgtaata

SEQ ID NO: 475697 - DNA, 60 bp, Artificial
  Synthetic oligonucleotide
tgttcaatagcacttggtacaaaaatggcactaacacaactagcacacagaccagtgaaa

SEQ ID NO: 475698 - DNA, 59 bp, Artificial
  Synthetic oligonucleotide
tgttcaatgaccttagaaatacaacacttcattgcaaactagaaggtaagcaaaatatc

SEQ ID NO: 475699 - DNA, 60 bp, Artificial
  Synthetic oligonucleotide
tgttcaatgtcgagaaggacattgttgacaatctgataacgatggacatatcatgtggcg

SEQ ID NO: 475700 - DNA, 60 bp, Artificial
  Synthetic oligonucleotide
tgttcaatgtggagtgcttcaagcgctatgcctgctccggagaatattgggaagaatacg

SEQ ID NO: 475701 - DNA, 60 bp, Artificial
  Synthetic oligonucleotide
tgttcacaagccagcagccgctatttgcctagcgaccattgagttgaccccgatttccct

SEQ ID NO: 475702 - DNA, 60 bp, Artificial
  Synthetic oligonucleotide
tgttcacactagacgtggcgtttacccgtctgattggcctgtggctcggtggagcaatgt

SEQ ID NO: 475703 - DNA, 53 bp, Artificial
  Synthetic oligonucleotide
tgttcacagatattgctactccacactcagtgtgggtatttgcatgtgcacca

SEQ ID NO: 475704 - DNA, 60 bp, Artificial
  Synthetic oligonucleotide
tgttcacagccgtgcgggtggagctaatcaaaacgcagtttattcagtaatgctgaattc

SEQ ID NO: 475705 - DNA, 60 bp, Artificial
  Synthetic oligonucleotide
tgttcaccaataagtatatgatgatgaatttgaggtacattgacatattgaacagacatc

SEQ ID NO: 475706 - DNA, 55 bp, Artificial
  Synthetic oligonucleotide
tgttcaccgacaattccacccctcctgcggtgccccagacctatcaggtcgccca

SEQ ID NO: 475707 - DNA, 55 bp, Artificial
  Synthetic oligonucleotide
tgttcaccgtctaccctaagtataccacttcaatcttagatcaaaggttagacag

SEQ ID NO: 475708 - DNA, 52 bp, Artificial
  Synthetic oligonucleotide
tgttcacctaaccctcggtttcgcagggtccgggaagagtttctacccacag

SEQ ID NO: 475709 - DNA, 54 bp, Artificial
  Synthetic oligonucleotide
tgttcacgctaacatactaaatgacatatctcctcagatcgtctctgacatgat

SEQ ID NO: 475710 - DNA, 60 bp, Artificial
  Synthetic oligonucleotide
tgttcacgtctcggtagcgaaggatacttactctatcaatccttggaacaatgtggctga

SEQ ID NO: 475711 - DNA, 55 bp, Artificial
  Synthetic oligonucleotide
tgttcacgttcagacccaggatgtacgagattgcccaggactgcaactgttccat

SEQ ID NO: 475712 - DNA, 60 bp, Artificial
  Synthetic oligonucleotide
tgttcactaataacgagagatgggagattcgtaaccgtggcagatactgaaggagactcg

SEQ ID NO: 475713 - DNA, 57 bp, Artificial
  Synthetic oligonucleotide
tgttcagacagaatgagacggtagacttaaggtttatcgaaccgaaggtgcgttatg

SEQ ID NO: 475714 - DNA, 60 bp, Artificial
  Synthetic oligonucleotide
tgttcagagaatacaaccacagacatagtgtgggggcgacacttgaggcactcttccaag

SEQ ID NO: 475715 - DNA, 60 bp, Artificial
  Synthetic oligonucleotide
tgttcagatcaaatggcctcatggcaaatgaatctggaaggctaatagactttcttaagg

SEQ ID NO: 475716 - DNA, 60 bp, Artificial
  Synthetic oligonucleotide
tgttcagcctcattaggcctaatgagaacccagcacataaaagccaactagtatggatgg

SEQ ID NO: 475717 - DNA, 60 bp, Artificial
  Synthetic oligonucleotide
tgttcaggaattgctgatgacatgcttagctaagataatgattaagcctcgctgtttgtt

SEQ ID NO: 475718 - DNA, 55 bp, Artificial
  Synthetic oligonucleotide
tgttcaggagttggaccataaaagattggaaattgtgcaaccctatcccaacagc

SEQ ID NO: 475719 - DNA, 59 bp, Artificial
  Synthetic oligonucleotide
tgttcaggttcacaattaccgcttattgataacaattcggtacccgcagcatcgcgtaa

SEQ ID NO: 475720 - DNA, 59 bp, Artificial
  Synthetic oligonucleotide
tgttcagtcttgttacaaaaaattcaaactgttgatgaggctgatctaaagggcacaat

SEQ ID NO: 475721 - DNA, 58 bp, Artificial
  Synthetic oligonucleotide
tgttcagtgtaacgcaactaaattccatagtggttgcctactagtagtagccatcccg

SEQ ID NO: 475722 - DNA, 57 bp, Artificial
  Synthetic oligonucleotide
tgttcagttacgagatccaaatgataacttatccggcaagatgtaccgtaaaaacga

SEQ ID NO: 475723 - DNA, 59 bp, Artificial
  Synthetic oligonucleotide
tgttcagttgttcccttttgatacttatgaggaactagttacaattgtcttcaatgata

SEQ ID NO: 475724 - DNA, 53 bp, Artificial
  Synthetic oligonucleotide
tgttcataagtcgggaaaagtaagacatttcgacgacgtaggatcgtctacag

SEQ ID NO: 475725 - DNA, 58 bp, Artificial
  Synthetic oligonucleotide
tgttcatatactactacgcccgagtgaatgttccgataaaggatttagttcaatctaa

SEQ ID NO: 475726 - DNA, 60 bp, Artificial
  Synthetic oligonucleotide
tgttcatatgcatataacatgggaagtgcagtttcaagacatatggaccagcttagcctt

SEQ ID NO: 475727 - DNA, 60 bp, Artificial
  Synthetic oligonucleotide
tgttcatatgcctacaagtggacatatttatgtacgatagtgacataaaacatcatcact

SEQ ID NO: 475728 - DNA, 60 bp, Artificial
  Synthetic oligonucleotide
tgttcatatgtgcctcagctttgatcctctacaccgttaaatagataagaagttgtgttt

SEQ ID NO: 475729 - DNA, 60 bp, Artificial
  Synthetic oligonucleotide
tgttcatctatgctctgcagacctatccagcttcgccgtttggtcatcatgatgtgctct

SEQ ID NO: 475730 - DNA, 60 bp, Artificial
  Synthetic oligonucleotide
tgttcatgctctgcttgaaactcacacatcttttgcacaagttctttgcaacaacttaca

SEQ ID NO: 475731 - DNA, 60 bp, Artificial
  Synthetic oligonucleotide
tgttcattgtctcgccacagcgccactggtttgtgcaagaatgcaattgctccatctacc

SEQ ID NO: 475732 - DNA, 55 bp, Artificial
  Synthetic oligonucleotide
tgttcatttctagttacttcgcggggcctgggtacttctaagatccctgtccgta

SEQ ID NO: 475733 - DNA, 51 bp, Artificial
  Synthetic oligonucleotide
tgttccaaagaaaccctaatcctcgaattagggtttcctgttgttaatggt

SEQ ID NO: 475734 - DNA, 60 bp, Artificial
  Synthetic oligonucleotide
tgttccaagaggatgtgaaggcccatgtaaggtccagtcatttgagtccagacatgatat

SEQ ID NO: 475735 - DNA, 59 bp, Artificial
  Synthetic oligonucleotide
tgttccaatcgttgattgacgatgagttatgggttcccctgtgcgtaaatccctcacca

SEQ ID NO: 475736 - DNA, 54 bp, Artificial
  Synthetic oligonucleotide
tgttccacaaccaaagacacttgaaggagatggctggttgtcaaaagggaaaat

SEQ ID NO: 475737 - DNA, 56 bp, Artificial
  Synthetic oligonucleotide
tgttccaccattgaagagctcagacggcataaataatgaatttagcttgcccttca

SEQ ID NO: 475738 - DNA, 56 bp, Artificial
  Synthetic oligonucleotide
tgttccacgcagcaagctatggtaaagcattgttatcagagttcctcaagcgtgtg

SEQ ID NO: 475739 - DNA, 59 bp, Artificial
  Synthetic oligonucleotide
tgttccagaaggtcaccatgccggaagttacgaccaacccctcgatgcaatcagttggc

SEQ ID NO: 475740 - DNA, 60 bp, Artificial
  Synthetic oligonucleotide
tgttccatcactcgttatctaatgaaggggattaagagcagactgatcaataatggagac

SEQ ID NO: 475741 - DNA, 54 bp, Artificial
  Synthetic oligonucleotide
tgttcccaaagatgcccggcctcccctttatctcttgccaaaagggatataagg

SEQ ID NO: 475742 - DNA, 57 bp, Artificial
  Synthetic oligonucleotide
tgttcccaaccactatagggggtgagttaacacaactcccatccatttctgaaatca

SEQ ID NO: 475743 - DNA, 57 bp, Artificial
  Synthetic oligonucleotide
tgttcccacggtccaggtctcgcctgaggagctcaaagaggctccggaacggttcga

SEQ ID NO: 475744 - DNA, 54 bp, Artificial
  Synthetic oligonucleotide
tgttcccacggttgaaaacaacttatccgttatccgctatagtacttcgagaaa

SEQ ID NO: 475745 - DNA, 60 bp, Artificial
  Synthetic oligonucleotide
tgttcccagtggtgcagtggacgctataccgttcaccggttagctcgccgtcagcatgcc

SEQ ID NO: 475746 - DNA, 55 bp, Artificial
  Synthetic oligonucleotide
tgttcccataagaacgcaccaataacgataatgtcgcctatgagcattatcgggt

SEQ ID NO: 475747 - DNA, 59 bp, Artificial
  Synthetic oligonucleotide
tgttcccatctctcctagtcgccgcctggtcattcggtgttctcctgagtaacaagacc

SEQ ID NO: 475748 - DNA, 52 bp, Artificial
  Synthetic oligonucleotide
tgttcccatgtgtgccaccactgaaacaggcagagtagcaatctacttcgat

SEQ ID NO: 475749 - DNA, 60 bp, Artificial
  Synthetic oligonucleotide
tgttcccccagtacttcatgtaaccaacacagctaccacagtgttgctggatgaacaggg

SEQ ID NO: 475750 - DNA, 60 bp, Artificial
  Synthetic oligonucleotide
tgttcccctatggctagcattaaatggctaccctaactatgtaatgcaaaagtctggtga

SEQ ID NO: 475751 - DNA, 53 bp, Artificial
  Synthetic oligonucleotide
tgttccgacatttataatgcaacccggtgcgaaggtaattgatctaattgcta

SEQ ID NO: 475752 - DNA, 60 bp, Artificial
  Synthetic oligonucleotide
tgttccgattaatcggtccaaagtgcggtgatgatggtctgtcgcgggccatcatatgga

SEQ ID NO: 475753 - DNA, 56 bp, Artificial
  Synthetic oligonucleotide
tgttccgcctttccgtaagtgtctgatttcacgataaaaaagccgattccatttga

SEQ ID NO: 475754 - DNA, 58 bp, Artificial
  Synthetic oligonucleotide
tgttccgctgtggaaaggcagggcattggagccgagactgcaccctcccacgcccccc

SEQ ID NO: 475755 - DNA, 55 bp, Artificial
  Synthetic oligonucleotide
tgttccggtcacgatgataatacgttaagggagttgcaagaccaattaacgatga

SEQ ID NO: 475756 - DNA, 54 bp, Artificial
  Synthetic oligonucleotide
tgttccggtgatcatagaccatacaagggaccgagaacgcactgagtcaggatc

SEQ ID NO: 475757 - DNA, 55 bp, Artificial
  Synthetic oligonucleotide
tgttccgtggtgctcagttgcggtttgagccacgcgacaactgggcgcaccctgt

SEQ ID NO: 475758 - DNA, 57 bp, Artificial
  Synthetic oligonucleotide
tgttccgttcatacggagccttctgatgccaacgaccggaccggcgtccattccgga

SEQ ID NO: 475759 - DNA, 55 bp, Artificial
  Synthetic oligonucleotide
tgttcctagaattgatatagcgttaaatgattcatggtatttcgagcgccgccct

SEQ ID NO: 475760 - DNA, 60 bp, Artificial
  Synthetic oligonucleotide
tgttcctagcgcttgcaggaagatcctgcacagaagaagctttcaaaatcggactgcaca

SEQ ID NO: 475761 - DNA, 58 bp, Artificial
  Synthetic oligonucleotide
tgttcctagctgaaaagggattccttagagtagcacatacttatgacacatcagcaga

SEQ ID NO: 475762 - DNA, 54 bp, Artificial
  Synthetic oligonucleotide
tgttcctcgtagcctaattgtttcgtggtcccccctataaacttagtgcgcaag

SEQ ID NO: 475763 - DNA, 60 bp, Artificial
  Synthetic oligonucleotide
tgttcctctaaaatcaccatcagcagaagcctgtgggtatagtgatagagttttacagtt

SEQ ID NO: 475764 - DNA, 60 bp, Artificial
  Synthetic oligonucleotide
tgttcctctgtcaagtggtatgatggtataattgagaagattcaggacaccatgtacaca

SEQ ID NO: 475765 - DNA, 54 bp, Artificial
  Synthetic oligonucleotide
tgttcctgaagagaggagagataaggcaatcttctgccctcctggtttgttgca

SEQ ID NO: 475766 - DNA, 60 bp, Artificial
  Synthetic oligonucleotide
tgttcctgaccagagtgtagttagtatcattaaacatgggatcttcgatattgcaagtgt

SEQ ID NO: 475767 - DNA, 57 bp, Artificial
  Synthetic oligonucleotide
tgttcctgtcaactctacggtgtacttggacccctgcatgggccccgccctttgcaa

SEQ ID NO: 475768 - DNA, 60 bp, Artificial
  Synthetic oligonucleotide
tgttcctgtgacatccgtagagttcgatgacacaataaatatgattgccgaagtacaccc

SEQ ID NO: 475769 - DNA, 60 bp, Artificial
  Synthetic oligonucleotide
tgttcctgttatccgagcgggacagatattgagtgtgtatgtcgggacaattggcgggga

SEQ ID NO: 475770 - DNA, 60 bp, Artificial
  Synthetic oligonucleotide
tgttccttctcgaggcattatgaagttttggctaggcttcttgctaagcagatttaacga

SEQ ID NO: 475771 - DNA, 59 bp, Artificial
  Synthetic oligonucleotide
tgttccttgtatgataaggagaactttaatcgccctgtatcaggccccactgaattgta

SEQ ID NO: 475772 - DNA, 60 bp, Artificial
  Synthetic oligonucleotide
tgttcgaaatgtggtttatgattcttacgctcacttgtgacaagatccttgatggacggg

SEQ ID NO: 475773 - DNA, 60 bp, Artificial
  Synthetic oligonucleotide
tgttcgacaacgagcccagtactgctactgtcaagaacgatattcgcgatcgttttcaag

SEQ ID NO: 475774 - DNA, 60 bp, Artificial
  Synthetic oligonucleotide
tgttcgacaacgagcctagcactgctactgttaagaatatgcacagagatcgttatcagg

SEQ ID NO: 475775 - DNA, 56 bp, Artificial
  Synthetic oligonucleotide
tgttcgacaatgagcccagtaccgcaaccgtgaagaatgattacagggataggttt

SEQ ID NO: 475776 - DNA, 50 bp, Artificial
  Synthetic oligonucleotide
tgttcgacgcatcggcggtacccgagatgggaacttccctaacaaacttg

SEQ ID NO: 475777 - DNA, 60 bp, Artificial
  Synthetic oligonucleotide
tgttcgactcgtccgtcctctgtgagtgctatgacgcgggctgcgcttggtatgagctca

SEQ ID NO: 475778 - DNA, 60 bp, Artificial
  Synthetic oligonucleotide
tgttcgactcttctgtcctctgtgagtgctatgacgcaggttgtgcttggtacgagctca

SEQ ID NO: 475779 - DNA, 60 bp, Artificial
  Synthetic oligonucleotide
tgttcgagccactccccgcaaggctcaataaataagcagggagctccagcagttggaaga

SEQ ID NO: 475780 - DNA, 55 bp, Artificial
  Synthetic oligonucleotide
tgttcgatcgtcaattgggcgtacccgtggacgtgtctcgtaacacatttcggag

SEQ ID NO: 475781 - DNA, 60 bp, Artificial
  Synthetic oligonucleotide
tgttcgatttaacgcaatgatactttgaattaccgctaatggaattgcatttagagattg

SEQ ID NO: 475782 - DNA, 58 bp, Artificial
  Synthetic oligonucleotide
tgttcgatttacaaacacaggtacagtactgacaaacccatacacctcctctgaaata

SEQ ID NO: 475783 - DNA, 54 bp, Artificial
  Synthetic oligonucleotide
tgttcgcaaaggttcacccttaagaacatagtggatacagttaggcagcggtac

SEQ ID NO: 475784 - DNA, 60 bp, Artificial
  Synthetic oligonucleotide
tgttcgccctcgctagctacgtccagcaccctcacaagaccgtcagggtcaagttccaca

SEQ ID NO: 475785 - DNA, 55 bp, Artificial
  Synthetic oligonucleotide
tgttcgccgtggggcctgccttcggtgctgcgttctggcatttcacatcgcctga

SEQ ID NO: 475786 - DNA, 60 bp, Artificial
  Synthetic oligonucleotide
tgttcgcgcgatggtgatcttatttggtgatcgcgctcaaggtagcagtgcatacttagg

SEQ ID NO: 475787 - DNA, 60 bp, Artificial
  Synthetic oligonucleotide
tgttcgcggttattacgtctctcgtaatgcttttcactgcgattacgactcagcgtatgt

SEQ ID NO: 475788 - DNA, 60 bp, Artificial
  Synthetic oligonucleotide
tgttcgcgtgcctagaccttctgtgcctaagaaaggcctactcctcagactggcggcagg

SEQ ID NO: 475789 - DNA, 53 bp, Artificial
  Synthetic oligonucleotide
tgttcgctgacgaactgtggcgcacgccacaagtccggcgtgattattgagtt

SEQ ID NO: 475790 - DNA, 59 bp, Artificial
  Synthetic oligonucleotide
tgttcggactactctgtttaatagaaattccgacagagtccccatgaagattcagacga

SEQ ID NO: 475791 - DNA, 59 bp, Artificial
  Synthetic oligonucleotide
tgttcggaggggacttgttgagcggctattcatggtggaaaccaaggatggcttagctc

SEQ ID NO: 475792 - DNA, 57 bp, Artificial
  Synthetic oligonucleotide
tgttcggatggaaatgtgctgacctagttggggataccaggtcgaacagtcggttat

SEQ ID NO: 475793 - DNA, 59 bp, Artificial
  Synthetic oligonucleotide
tgttcggatggaaatgtgctgacctggttggggataccaggtcgaagaatcgttgattg

SEQ ID NO: 475794 - DNA, 59 bp, Artificial
  Synthetic oligonucleotide
tgttcggatggaaatgtgctgacctggttggggatgtgaggtcgaagaatctgttgttt

SEQ ID NO: 475795 - DNA, 58 bp, Artificial
  Synthetic oligonucleotide
tgttcggatggaaatgtgtggattgtgttggggataccaggtcgaagaatcgcttatt

SEQ ID NO: 475796 - DNA, 60 bp, Artificial
  Synthetic oligonucleotide
tgttcggtgcaattcccgttaagtcatgccctgttatcatatccattgacgacggaccac

SEQ ID NO: 475797 - DNA, 53 bp, Artificial
  Synthetic oligonucleotide
tgttcgtagtccgtatgccattaccggcacattgtatacgtcaacaatacgac

SEQ ID NO: 475798 - DNA, 55 bp, Artificial
  Synthetic oligonucleotide
tgttcgtctttactcctggtgttgcgaagttggcaggtgctggactggctagaac

SEQ ID NO: 475799 - DNA, 58 bp, Artificial
  Synthetic oligonucleotide
tgttcgtgacggtatacgctccctccattccgttgtccacaggacctctcgacgatgt

SEQ ID NO: 475800 - DNA, 60 bp, Artificial
  Synthetic oligonucleotide
tgttcgtgccaagaactatgtcgaagcgtcctgcagatataggaattttcacacccgtct

SEQ ID NO: 475801 - DNA, 60 bp, Artificial
  Synthetic oligonucleotide
tgttcgtgcctcgcctcaagcgaagcgcgtcaggacacctactccctaccccagccatct

SEQ ID NO: 475802 - DNA, 53 bp, Artificial
  Synthetic oligonucleotide
tgttcgtgcgctgaacacgccaatgagtgaaggctatgatgatcccgcagtct

SEQ ID NO: 475803 - DNA, 60 bp, Artificial
  Synthetic oligonucleotide
tgttcgtggcgaataccgaggttatcccgcaaacgcagctatggtctggtgcgagtgcgt

SEQ ID NO: 475804 - DNA, 55 bp, Artificial
  Synthetic oligonucleotide
tgttcgtggtagattatatgggaaggtagaagatgctagaacaaaactcccattc

SEQ ID NO: 475805 - DNA, 56 bp, Artificial
  Synthetic oligonucleotide
tgttcgtggtatgagctgacaccttcagaaaccaccgtccggttacgggcatacct

SEQ ID NO: 475806 - DNA, 60 bp, Artificial
  Synthetic oligonucleotide
tgttcgttccgatgcgagatggggtggcacccgagatagtcgactcactggcgatcgggc

SEQ ID NO: 475807 - DNA, 57 bp, Artificial
  Synthetic oligonucleotide
tgttcgttgtatgaggaaatatacaagaaatacgtatacaatgtcccagaaaagaaa

SEQ ID NO: 475808 - DNA, 57 bp, Artificial
  Synthetic oligonucleotide
tgttcgttgtgttagtgatgttacgcgtggtccgggaattactcatagggttggcaa

SEQ ID NO: 475809 - DNA, 55 bp, Artificial
  Synthetic oligonucleotide
tgttctaagcattgcagaagtactatgttcgtgcaacagtgctccactcgtcgcc

SEQ ID NO: 475810 - DNA, 60 bp, Artificial
  Synthetic oligonucleotide
tgttctacaaacccactgagcaggtggacaccctgctctgtgacattggggagtcatcct

SEQ ID NO: 475811 - DNA, 53 bp, Artificial
  Synthetic oligonucleotide
tgttctacacactgctgttcaaagtggtcttatttgaaaaacacttgggcatt

SEQ ID NO: 475812 - DNA, 59 bp, Artificial
  Synthetic oligonucleotide
tgttctacgcaaacagcttcaatgcgtccggatgtccggagcgcatggctagctgccgc

SEQ ID NO: 475813 - DNA, 55 bp, Artificial
  Synthetic oligonucleotide
tgttctacgcacacaagttcaactcgtccggatgcccagaacgtatggccagctg

SEQ ID NO: 475814 - DNA, 60 bp, Artificial
  Synthetic oligonucleotide
tgttctactgcatgtcgtgagcatcatagtaacagtattagtccttgggagaggtggaaa

SEQ ID NO: 475815 - DNA, 55 bp, Artificial
  Synthetic oligonucleotide
tgttctagcagcaaagaaaccatacatcagagagaaaactgaaacactcaacgtc

SEQ ID NO: 475816 - DNA, 58 bp, Artificial
  Synthetic oligonucleotide
tgttctataatcatcaagcatgtaatctacccttgtacgatggaatcactaattccgc

SEQ ID NO: 475817 - DNA, 60 bp, Artificial
  Synthetic oligonucleotide
tgttctatcgactgatgattatattgtaccgacgaatctttattttcatgccaattcgga

SEQ ID NO: 475818 - DNA, 58 bp, Artificial
  Synthetic oligonucleotide
tgttctcaaacaaaatggcaagactaggaaaaggatacatgttcgagagtaagagaat

SEQ ID NO: 475819 - DNA, 60 bp, Artificial
  Synthetic oligonucleotide
tgttctcaaacaagatggcgagattagggaaaggatacatgttcgaaagcaagagcatga

SEQ ID NO: 475820 - DNA, 60 bp, Artificial
  Synthetic oligonucleotide
tgttctcaccgggttgtcgctatgatatgatcttgtccataagcgataaaggacaccgta

SEQ ID NO: 475821 - DNA, 51 bp, Artificial
  Synthetic oligonucleotide
tgttctcactgttacctggggtagcacattctattgctgttgagttatgcg

SEQ ID NO: 475822 - DNA, 55 bp, Artificial
  Synthetic oligonucleotide
tgttctcagcattcgtacctcccgttttggctacacgtgatgcctggagggacgc

SEQ ID NO: 475823 - DNA, 55 bp, Artificial
  Synthetic oligonucleotide
tgttctccatgccctggactagtgtgccctcaagttggcgtatatctcgctcttc

SEQ ID NO: 475824 - DNA, 60 bp, Artificial
  Synthetic oligonucleotide
tgttctcccctgtgcgtgaatccatgatctgcgcacttgatatggtaaaatatggaacag

SEQ ID NO: 475825 - DNA, 60 bp, Artificial
  Synthetic oligonucleotide
tgttctccggcaggacaccaagccatgccgtggtctctgccgagacataatatcagaacg

SEQ ID NO: 475826 - DNA, 60 bp, Artificial
  Synthetic oligonucleotide
tgttctccttcacatgtctgacaaggtttttgatgatccacaagacaagttaacttatgt

SEQ ID NO: 475827 - DNA, 56 bp, Artificial
  Synthetic oligonucleotide
tgttctcgatttgcttctagatcttggagtcactaatcttgttcgaagagagaaac

SEQ ID NO: 475828 - DNA, 59 bp, Artificial
  Synthetic oligonucleotide
tgttctcgggccccgattagctcctcggtctggtcacgtacagttgaaccgagatcata

SEQ ID NO: 475829 - DNA, 60 bp, Artificial
  Synthetic oligonucleotide
tgttctgagagattggccagctgccgacccctcaccgattatgcccagggctggggccct

SEQ ID NO: 475830 - DNA, 52 bp, Artificial
  Synthetic oligonucleotide
tgttctgcggtagtatgatggctactggtaagctgctacttagctacagtcc

SEQ ID NO: 475831 - DNA, 60 bp, Artificial
  Synthetic oligonucleotide
tgttctgctttgtgtgctacggatatgcgccgcgcgcggatgggacaataccggattgga

SEQ ID NO: 475832 - DNA, 53 bp, Artificial
  Synthetic oligonucleotide
tgttctggagttatcaagaggaagcgctttaaaggttgagctaattggaacgc

SEQ ID NO: 475833 - DNA, 50 bp, Artificial
  Synthetic oligonucleotide
tgttctggatgagcgtcgggacggcagtgagacctacacgctgcatgggg

SEQ ID NO: 475834 - DNA, 59 bp, Artificial
  Synthetic oligonucleotide
tgttctggtgtcctacaggcgttcatgtcgtgtgtagtgcggtctggctaaccgtaacg

SEQ ID NO: 475835 - DNA, 54 bp, Artificial
  Synthetic oligonucleotide
tgttctggttggttagagatcggagaccttattcgacacctatggattttggcc

SEQ ID NO: 475836 - DNA, 55 bp, Artificial
  Synthetic oligonucleotide
tgttctgtaaatggaatgaatgacttcaactttaacggaggatcactaccgacgg

SEQ ID NO: 475837 - DNA, 60 bp, Artificial
  Synthetic oligonucleotide
tgttctgtccgtggagaaggatacgatgatggttgaccttgaaggaacgacatccctatc

SEQ ID NO: 475838 - DNA, 57 bp, Artificial
  Synthetic oligonucleotide
tgttcttaaaggacaaggcaatcgcacatcctagtgataactggctcgcctcattta

SEQ ID NO: 475839 - DNA, 60 bp, Artificial
  Synthetic oligonucleotide
tgttcttaccaactctactatctgagagtgagaggtctcaacaacatcgtcttatacatg

SEQ ID NO: 475840 - DNA, 60 bp, Artificial
  Synthetic oligonucleotide
tgttcttaggtccattagaacaaggaggaatcatccttaaacaatggtgcacaacatcat

SEQ ID NO: 475841 - DNA, 58 bp, Artificial
  Synthetic oligonucleotide
tgttcttattgtaggtggaatctcagacatgtgtcaaggtccaaatgcagctgatgtc

SEQ ID NO: 475842 - DNA, 55 bp, Artificial
  Synthetic oligonucleotide
tgttcttccgcttcaaaagggacgagaacatctactatacaccaatgtctcaact

SEQ ID NO: 475843 - DNA, 51 bp, Artificial
  Synthetic oligonucleotide
tgttcttctcgaggatagaacacttgtactcagctatcagagtagggactg

SEQ ID NO: 475844 - DNA, 60 bp, Artificial
  Synthetic oligonucleotide
tgttcttgagaaagctagggtgccctgactggataatggagttgttcaatataccattta

SEQ ID NO: 475845 - DNA, 57 bp, Artificial
  Synthetic oligonucleotide
tgttctttaaaagtgatcttctgctccctcttcgcactttacggcttcggtagactg

SEQ ID NO: 475846 - DNA, 59 bp, Artificial
  Synthetic oligonucleotide
tgttctttgccaacggggatgacctgctaattgccattaaaccagagtgtgaatcgtac

SEQ ID NO: 475847 - DNA, 60 bp, Artificial
  Synthetic oligonucleotide
tgttgaaacactagcaaggagcatttgtgagaagctcgagcaatctggactcccagttgg

SEQ ID NO: 475848 - DNA, 59 bp, Artificial
  Synthetic oligonucleotide
tgttgaaacatcgatttgaaataattgaaggaagagaccgaacaatggcttggactgtg

SEQ ID NO: 475849 - DNA, 58 bp, Artificial
  Synthetic oligonucleotide
tgttgaaagtaaggtcgagttgccagacttctcaggcaccggtgtgaaacgttcctca

SEQ ID NO: 475850 - DNA, 59 bp, Artificial
  Synthetic oligonucleotide
tgttgaaatatacaagactgtattgaatcttgctagctcatttggtgaatcaattcaac

SEQ ID NO: 475851 - DNA, 58 bp, Artificial
  Synthetic oligonucleotide
tgttgaacgcatcagggatgttgggggaccaccagtctctggatggggttcctctggt

SEQ ID NO: 475852 - DNA, 56 bp, Artificial
  Synthetic oligonucleotide
tgttgaactgatccgcatacggaccgggatcctttgttgttgcatgagcccggcaa

SEQ ID NO: 475853 - DNA, 56 bp, Artificial
  Synthetic oligonucleotide
tgttgaactgatctgcatatggactgatatcctttgttgttgcatgagccttacat

SEQ ID NO: 475854 - DNA, 55 bp, Artificial
  Synthetic oligonucleotide
tgttgaagagttccatctccataaaataagacttccattatttaaacccgcggga

SEQ ID NO: 475855 - DNA, 60 bp, Artificial
  Synthetic oligonucleotide
tgttgaagatacctaatgctgagacagatccgagttctagaatcactgagaggcaagaaa

SEQ ID NO: 475856 - DNA, 50 bp, Artificial
  Synthetic oligonucleotide
tgttgaaggctgtaaaacactgagtaactcacagcaacgaaacccgcaga

SEQ ID NO: 475857 - DNA, 53 bp, Artificial
  Synthetic oligonucleotide
tgttgaaggtacctaatgctggaacagatccaaattctagaatcactgaaagg

SEQ ID NO: 475858 - DNA, 56 bp, Artificial
  Synthetic oligonucleotide
tgttgaatctggcccctatgtgcctagactagaaaaccaaaagtctggtacttggg

SEQ ID NO: 475859 - DNA, 60 bp, Artificial
  Synthetic oligonucleotide
tgttgaattacaacggcataataacagacactatcaagagttggagaaccattatattga

SEQ ID NO: 475860 - DNA, 54 bp, Artificial
  Synthetic oligonucleotide
tgttgaattctcgaatacgccggattctttagttcttattaacccgacgtatac

SEQ ID NO: 475861 - DNA, 60 bp, Artificial
  Synthetic oligonucleotide
tgttgaatttgtatgcatgtattgtgatttgactgttctgtgtgcaagtgagatttgtta

SEQ ID NO: 475862 - DNA, 55 bp, Artificial
  Synthetic oligonucleotide
tgttgacaaaactcagcaagcactagcttcgatcaagagtggttccaaacatacc

SEQ ID NO: 475863 - DNA, 55 bp, Artificial
  Synthetic oligonucleotide
tgttgacaagatcttgtggggaaagctatcttatgcatgtgatgaaacagacgca

SEQ ID NO: 475864 - DNA, 60 bp, Artificial
  Synthetic oligonucleotide
tgttgacaatatgtcaacggaagcgctcatacaaaagctgtcaactttgtgactagcttt

SEQ ID NO: 475865 - DNA, 60 bp, Artificial
  Synthetic oligonucleotide
tgttgacacaatattcgagaagaatgtggcagtgacacattctgttaacctgcttgagga

SEQ ID NO: 475866 - DNA, 52 bp, Artificial
  Synthetic oligonucleotide
tgttgacagccggcagaatcagtgagatgggggtctgcttcggaaccatccc

SEQ ID NO: 475867 - DNA, 60 bp, Artificial
  Synthetic oligonucleotide
tgttgacatattggtcgcgcagcgcaaagcctacagaaacacagaaggacggactacgac

SEQ ID NO: 475868 - DNA, 60 bp, Artificial
  Synthetic oligonucleotide
tgttgacatgccaggtggttattgtctagaaaagtggatgttgattgcttctgaattgaa

SEQ ID NO: 475869 - DNA, 60 bp, Artificial
  Synthetic oligonucleotide
tgttgacattccctgagcccttatgagactcttgcttcaacgaaatgaagtaggagtctt

SEQ ID NO: 475870 - DNA, 60 bp, Artificial
  Synthetic oligonucleotide
tgttgaccaaagcttaattattgctgccaggaacatagtaaggagagcaacggtgtcagc

SEQ ID NO: 475871 - DNA, 60 bp, Artificial
  Synthetic oligonucleotide
tgttgaccaaagcttgattatcgctgccagaaacatagtaagaagagcaacagtatcagc

SEQ ID NO: 475872 - DNA, 60 bp, Artificial
  Synthetic oligonucleotide
tgttgaccagagtttgatcattgctgccagaaacattgttagaagagcaacggtatcagc

SEQ ID NO: 475873 - DNA, 58 bp, Artificial
  Synthetic oligonucleotide
tgttgaccatcgtggggctgttgttattacacccaccaagacgttggcacgtgagtgg

SEQ ID NO: 475874 - DNA, 58 bp, Artificial
  Synthetic oligonucleotide
tgttgacgagctggatgccttcccagagggctgattattcgttacgggtaaaagtgta

SEQ ID NO: 475875 - DNA, 59 bp, Artificial
  Synthetic oligonucleotide
tgttgactaactcgcctctacctcaacaggcgtgtcggcaaccgttctgtccatttgag

SEQ ID NO: 475876 - DNA, 60 bp, Artificial
  Synthetic oligonucleotide
tgttgactaccgctacaataactcttttgccagatgcagaaagattcagctttcctagag

SEQ ID NO: 475877 - DNA, 60 bp, Artificial
  Synthetic oligonucleotide
tgttgacttggtcaatcggtgtctctcaatctttgctatgcaatcggtgtatggtgtctt

SEQ ID NO: 475878 - DNA, 56 bp, Artificial
  Synthetic oligonucleotide
tgttgagactaaaggtggaactgtaccttttttggcccgcagtattctgattacca

SEQ ID NO: 475879 - DNA, 57 bp, Artificial
  Synthetic oligonucleotide
tgttgagccaaatatcgaggtattcgcgcccccacgcaccgttgtcgaaccctgacc

SEQ ID NO: 475880 - DNA, 60 bp, Artificial
  Synthetic oligonucleotide
tgttgaggagctgcgactggcgcatactccgtttatgcgggctgggaagcgtgcgcgggc

SEQ ID NO: 475881 - DNA, 60 bp, Artificial
  Synthetic oligonucleotide
tgttgaggagcttccattgggagagttttcacctggacggatttcgagaaccatgatgca

SEQ ID NO: 475882 - DNA, 55 bp, Artificial
  Synthetic oligonucleotide
tgttgaggagtactagctcgaaagaaacttcgaaaatcgccgaagtttattatca

SEQ ID NO: 475883 - DNA, 58 bp, Artificial
  Synthetic oligonucleotide
tgttgaggagtcaatttaccaatgttgtgacttggcccccgaagccaaattggccata

SEQ ID NO: 475884 - DNA, 60 bp, Artificial
  Synthetic oligonucleotide
tgttgaggagtcgatttaccaatgttgtgacttagcccctgaagccagacaggctataag

SEQ ID NO: 475885 - DNA, 57 bp, Artificial
  Synthetic oligonucleotide
tgttgagggaaaagttttaatgtctgtaaagatagttgatttactatcaagtgcgaa

SEQ ID NO: 475886 - DNA, 55 bp, Artificial
  Synthetic oligonucleotide
tgttgagggatgggttaatgatgcccctaggaaatattcagcgctaggccatctc

SEQ ID NO: 475887 - DNA, 59 bp, Artificial
  Synthetic oligonucleotide
tgttgaggtgcgtcgggtgggggatttccattacatcacgggggccacagaagatgagc

SEQ ID NO: 475888 - DNA, 60 bp, Artificial
  Synthetic oligonucleotide
tgttgagtatacctggacttgcactctgatgaactgttggagccttacgtctattatgaa

SEQ ID NO: 475889 - DNA, 52 bp, Artificial
  Synthetic oligonucleotide
tgttgagtcggaactgctcttaccgacacttaaacttaactttctgctgtgg

SEQ ID NO: 475890 - DNA, 57 bp, Artificial
  Synthetic oligonucleotide
tgttgagtctatggaaaccactatgcggtctccggtcttcacggacaactcgtcccc

SEQ ID NO: 475891 - DNA, 58 bp, Artificial
  Synthetic oligonucleotide
tgttgagtgccaccgactcaatgtcgggatataaagagggtcttctactaggtagacc

SEQ ID NO: 475892 - DNA, 60 bp, Artificial
  Synthetic oligonucleotide
tgttgagttatgccacgaaggtacgtgcagtctcagtcaaagcgttcggtaatgagctgt

SEQ ID NO: 475893 - DNA, 60 bp, Artificial
  Synthetic oligonucleotide
tgttgagttgacctacacctgtggcaccacagcgatcaatgaaaaggtcaccacgttcat

SEQ ID NO: 475894 - DNA, 60 bp, Artificial
  Synthetic oligonucleotide
tgttgataaaacatgtgcatgctctaacttgagggacattgcagaagctagcgccaaagt

SEQ ID NO: 475895 - DNA, 60 bp, Artificial
  Synthetic oligonucleotide
tgttgataagattagtgagccgataatcccctgtttctatgaagccagatggtgagacat

SEQ ID NO: 475896 - DNA, 57 bp, Artificial
  Synthetic oligonucleotide
tgttgatactaagggtcagactaattttaaagtcgggtatgacactagcgaccgcga

SEQ ID NO: 475897 - DNA, 60 bp, Artificial
  Synthetic oligonucleotide
tgttgatagattctatcattgtcttagagcagaacaagcggacccggctgtaaaaaattg

SEQ ID NO: 475898 - DNA, 60 bp, Artificial
  Synthetic oligonucleotide
tgttgatagcaaggagatcgtgtggtatgatttgtcgttgaccaatttcggcctggtgcg

SEQ ID NO: 475899 - DNA, 52 bp, Artificial
  Synthetic oligonucleotide
tgttgataggcataataatttcgaaacgcatgaaacggacgtaaattagtag

SEQ ID NO: 475900 - DNA, 59 bp, Artificial
  Synthetic oligonucleotide
tgttgatagggcaaggagacgtagtgttggtgatgaaacggaaacgggactctagcata

SEQ ID NO: 475901 - DNA, 58 bp, Artificial
  Synthetic oligonucleotide
tgttgatatattcggatccgtaaacgcttgcaggggaacattgaaggtggcggaacgc

SEQ ID NO: 475902 - DNA, 60 bp, Artificial
  Synthetic oligonucleotide
tgttgatcaaaggacacctttttgtagtcaatagacatgtggctgaaacagactggtgcg

SEQ ID NO: 475903 - DNA, 55 bp, Artificial
  Synthetic oligonucleotide
tgttgatcgagggttgaaggaaacagcagggtaacgtcggtgaggtcgttggata

SEQ ID NO: 475904 - DNA, 55 bp, Artificial
  Synthetic oligonucleotide
tgttgatgacgtgacaccggtcaccagtcagcctaaagtttccgaagaattttta

SEQ ID NO: 475905 - DNA, 57 bp, Artificial
  Synthetic oligonucleotide
tgttgatggagcagacggaataaaggggttttcatacaagtatggtaatggtgtttg

SEQ ID NO: 475906 - DNA, 60 bp, Artificial
  Synthetic oligonucleotide
tgttgatgggttaggtgatttgacacagatagtaactgagtgcttgtgggttgcttctat

SEQ ID NO: 475907 - DNA, 60 bp, Artificial
  Synthetic oligonucleotide
tgttgatggttcaaagacaagcggtatccatggcatattcagcacagtggtcgtccggga

SEQ ID NO: 475908 - DNA, 60 bp, Artificial
  Synthetic oligonucleotide
tgttgattagagatgaaatagtcaaaatgttagaagtgccagttaaacatgatgaccatt

SEQ ID NO: 475909 - DNA, 58 bp, Artificial
  Synthetic oligonucleotide
tgttgattagtgttaaaattgatagcgaaaagcagtatgattctagtgacttcacgca

SEQ ID NO: 475910 - DNA, 60 bp, Artificial
  Synthetic oligonucleotide
tgttgattatctacctgctgaagttcacgattggcttgagtatgctcaccggcccggctg

SEQ ID NO: 475911 - DNA, 58 bp, Artificial
  Synthetic oligonucleotide
tgttgattttaccgtcaagcaaattaaaccagcaaaggctgattcccttcagattgag

SEQ ID NO: 475912 - DNA, 58 bp, Artificial
  Synthetic oligonucleotide
tgttgcaacatgtggcaacagaaagtattactagagtaggaaaatgtccaacgtttaa

SEQ ID NO: 475913 - DNA, 60 bp, Artificial
  Synthetic oligonucleotide
tgttgcaaccggcgctcgaagttatctctctccgctatcacggcttctcgtttcgcttga

SEQ ID NO: 475914 - DNA, 60 bp, Artificial
  Synthetic oligonucleotide
tgttgcaactcacagtctggggcattaagcagctccaggcaagagtcctggccatagaaa

SEQ ID NO: 475915 - DNA, 56 bp, Artificial
  Synthetic oligonucleotide
tgttgcacacaccacctctaggccctatgtgggtatagttccgttagtagaccggg

SEQ ID NO: 475916 - DNA, 60 bp, Artificial
  Synthetic oligonucleotide
tgttgcacactactcagctcaattaatgacactagaaattgattcaagaaacatgagctt

SEQ ID NO: 475917 - DNA, 60 bp, Artificial
  Synthetic oligonucleotide
tgttgcaccacatcatgcgaatgaatcgttctttatgggatttgatctggagttggagta

SEQ ID NO: 475918 - DNA, 57 bp, Artificial
  Synthetic oligonucleotide
tgttgcaccgtataccagtgatggaaagattactgttaaactagtcgccggtcagaa

SEQ ID NO: 475919 - DNA, 50 bp, Artificial
  Synthetic oligonucleotide
tgttgcacttgctagacagagtagattatagaatagcagtaggagcactg

SEQ ID NO: 475920 - DNA, 56 bp, Artificial
  Synthetic oligonucleotide
tgttgcactttgataggaacctgagtagagtgagccttcgagggtgatgaatctcg

SEQ ID NO: 475921 - DNA, 59 bp, Artificial
  Synthetic oligonucleotide
tgttgcagagtactcttcccgatgttgaaaagttggtatggttgtgtgctatgtcatat

SEQ ID NO: 475922 - DNA, 55 bp, Artificial
  Synthetic oligonucleotide
tgttgcagctggtgctgtacaaaaatttacagaggtgtcatgggcgaagaaaagt

SEQ ID NO: 475923 - DNA, 60 bp, Artificial
  Synthetic oligonucleotide
tgttgcaggcagcaacagctggaagttggacaaatcataccagaagacttcgtttgtttt

SEQ ID NO: 475924 - DNA, 51 bp, Artificial
  Synthetic oligonucleotide
tgttgcatatggtctgagcataatagatcttttccaaaagtcctcaactgt

SEQ ID NO: 475925 - DNA, 60 bp, Artificial
  Synthetic oligonucleotide
tgttgcatctgatcggaaaagtccacgacgcctgcagagattcgttgtccgtcatcctct

SEQ ID NO: 475926 - DNA, 55 bp, Artificial
  Synthetic oligonucleotide
tgttgccacaaactacacaaagaagcgcaacgagttccagcccttcactcaggag

SEQ ID NO: 475927 - DNA, 55 bp, Artificial
  Synthetic oligonucleotide
tgttgccacatgtagattttacactctagattccatacaatggcagaaggagtcc

SEQ ID NO: 475928 - DNA, 54 bp, Artificial
  Synthetic oligonucleotide
tgttgccatagctgaggcccctaaacctcatagcaatgtcgtggaagtgactga

SEQ ID NO: 475929 - DNA, 52 bp, Artificial
  Synthetic oligonucleotide
tgttgccatttctacgagagacgtagtttccgttaagggaacaacggatcta

SEQ ID NO: 475930 - DNA, 60 bp, Artificial
  Synthetic oligonucleotide
tgttgccccaattgaacacattgcaagcatgagaaggaactatttcacagcggaggtgtc

SEQ ID NO: 475931 - DNA, 57 bp, Artificial
  Synthetic oligonucleotide
tgttgcccctggtactactgtacttcgtcgttggttacctgacgatgcagtaattgt

SEQ ID NO: 475932 - DNA, 58 bp, Artificial
  Synthetic oligonucleotide
tgttgcccctttatatgtggaaaagcagtcgtgttcaaggatcggaacacgtgtcaaa

SEQ ID NO: 475933 - DNA, 58 bp, Artificial
  Synthetic oligonucleotide
tgttgccgtatacgcgccgtatacctccccgaacaacaccacatcgccgcaactacaa

SEQ ID NO: 475934 - DNA, 60 bp, Artificial
  Synthetic oligonucleotide
tgttgcctgatcagacgacccagaagcatttttggttgcaaaaagggcctacagttatca

SEQ ID NO: 475935 - DNA, 60 bp, Artificial
  Synthetic oligonucleotide
tgttgcctttgacaatatgcgcatcatgaacgaattgtaagcgccaaccccactgtggag

SEQ ID NO: 475936 - DNA, 60 bp, Artificial
  Synthetic oligonucleotide
tgttgcgactattttagatgaagtgaagcaatggagagatggcataacgtaccactcaag

SEQ ID NO: 475937 - DNA, 54 bp, Artificial
  Synthetic oligonucleotide
tgttgcggaagtggaggtaccggggtcaaaagatgacgtcccagaaactgtttc

SEQ ID NO: 475938 - DNA, 60 bp, Artificial
  Synthetic oligonucleotide
tgttgcgggtcctcgcctaggcctttacagccgtgccacatctcaggttaaggtgcctga

SEQ ID NO: 475939 - DNA, 59 bp, Artificial
  Synthetic oligonucleotide
tgttgcgggtcttatccctaggcgctacagatgtaattaacgaaagatctgtaattgtc

SEQ ID NO: 475940 - DNA, 58 bp, Artificial
  Synthetic oligonucleotide
tgttgcgttgtaaacgttatgccaaagcgcaatttcgatatggcgttttctactccaa

SEQ ID NO: 475941 - DNA, 60 bp, Artificial
  Synthetic oligonucleotide
tgttgctagttggtgtggtgatagtgctttcatgttgcagtccgatagtgtgtcttgggt

SEQ ID NO: 475942 - DNA, 57 bp, Artificial
  Synthetic oligonucleotide
tgttgctatgaaagaggttgccactgggagaaacccaaacaaagatcctctaaagct

SEQ ID NO: 475943 - DNA, 57 bp, Artificial
  Synthetic oligonucleotide
tgttgctccactcctacccgtacgtcaaaccatcggccgagcaagtgaaaagggcga

SEQ ID NO: 475944 - DNA, 59 bp, Artificial
  Synthetic oligonucleotide
tgttgctccggtcataatcatcgctggaccccccaacgcgcttaagtgccaaaggtaca

SEQ ID NO: 475945 - DNA, 60 bp, Artificial
  Synthetic oligonucleotide
tgttgctcgagcctacaagaccattggctgaaaatgtgagcaaacaactgagtagtgacc

SEQ ID NO: 475946 - DNA, 55 bp, Artificial
  Synthetic oligonucleotide
tgttgctcgtgccagttctgattacatgagttacagaagaacgtctcagttgacg

SEQ ID NO: 475947 - DNA, 60 bp, Artificial
  Synthetic oligonucleotide
tgttgctgaccaggcagtagtttcagtgaaattagcgggcaattcctctctctgccctgt

SEQ ID NO: 475948 - DNA, 53 bp, Artificial
  Synthetic oligonucleotide
tgttgctgcggccttacacaatataaaggctaaagcacctaaccagcaagcag

SEQ ID NO: 475949 - DNA, 54 bp, Artificial
  Synthetic oligonucleotide
tgttgctggcattgtcaaagttgctttctacacaaaggcttaggcatctcctat

SEQ ID NO: 475950 - DNA, 59 bp, Artificial
  Synthetic oligonucleotide
tgttgctttgccagtccctctgggcccccatgaattccttgaagtgctttaaataatgc

SEQ ID NO: 475951 - DNA, 60 bp, Artificial
  Synthetic oligonucleotide
tgttgcttttgtctctaaggacatgagcttaatcatattgccggtcggtgtttaggcgct

SEQ ID NO: 475952 - DNA, 59 bp, Artificial
  Synthetic oligonucleotide
tgttggaaatagtggggactccaaatacgttgacatgccgccacaagaaggccaatcca

SEQ ID NO: 475953 - DNA, 57 bp, Artificial
  Synthetic oligonucleotide
tgttggaacgtgttacgggcggatgttagcggagcggatagtacatgcggttacgaa

SEQ ID NO: 475954 - DNA, 53 bp, Artificial
  Synthetic oligonucleotide
tgttggaataggggggagtagcagtgattacgttgtcccggggacccacgagt

SEQ ID NO: 475955 - DNA, 58 bp, Artificial
  Synthetic oligonucleotide
tgttggaatggtacaaccatctactacttccgcttaccttacaggcattagctataaa

SEQ ID NO: 475956 - DNA, 60 bp, Artificial
  Synthetic oligonucleotide
tgttggaattctcgcggaaaatcccagagcagcatgtgtggcgggtatggcagtcaattc

SEQ ID NO: 475957 - DNA, 53 bp, Artificial
  Synthetic oligonucleotide
tgttggaccgtctaccacggtgccggctcaaagaccctggccggcccaaaagg

SEQ ID NO: 475958 - DNA, 55 bp, Artificial
  Synthetic oligonucleotide
tgttggaccgtctaccatggcgccggttcaaagacccttgccggcgcaaagggcc

SEQ ID NO: 475959 - DNA, 54 bp, Artificial
  Synthetic oligonucleotide
tgttggaccttgattggaacctgagtagagtgggccttcgagggagatgaaggt

SEQ ID NO: 475960 - DNA, 58 bp, Artificial
  Synthetic oligonucleotide
tgttggactgtctatcatggcgccggctcaaagaccctggccggcccaaagggaccaa

SEQ ID NO: 475961 - DNA, 56 bp, Artificial
  Synthetic oligonucleotide
tgttggagctatacattagggttaaagtcgtgctgggcgccccaaaaccgttagca

SEQ ID NO: 475962 - DNA, 57 bp, Artificial
  Synthetic oligonucleotide
tgttggagggaacggttcacacgggttcgcagcggccctaaagcgctcatacttcac

SEQ ID NO: 475963 - DNA, 60 bp, Artificial
  Synthetic oligonucleotide
tgttggatcgaccgatttctcactcatccacagctgcaaacacccaggtgagtcaacact

SEQ ID NO: 475964 - DNA, 60 bp, Artificial
  Synthetic oligonucleotide
tgttggatctgcaatgttgaaggtcactatgcaaacaagtgtcctaacaaacaaaaatac

SEQ ID NO: 475965 - DNA, 55 bp, Artificial
  Synthetic oligonucleotide
tgttggatgtctgactctccgtctaaggcatcgacatttgtatcatatgatctgg

SEQ ID NO: 475966 - DNA, 55 bp, Artificial
  Synthetic oligonucleotide
tgttggattcggaacgcgcagctgcaaccagtgatgccgagtcacctgggtccag

SEQ ID NO: 475967 - DNA, 52 bp, Artificial
  Synthetic oligonucleotide
tgttggattctgtgacaacccccttatgtgttgttatcccgagttgcttccc

SEQ ID NO: 475968 - DNA, 55 bp, Artificial
  Synthetic oligonucleotide
tgttggcaatgcacgtaagtctatagctatctatgaatcccatggagcacgtgtg

SEQ ID NO: 475969 - DNA, 60 bp, Artificial
  Synthetic oligonucleotide
tgttggcatatggtcaatcgccatttaattccgagtccgagtgtatttcactcagcccga

SEQ ID NO: 475970 - DNA, 58 bp, Artificial
  Synthetic oligonucleotide
tgttggcattggataaatgggcaagtttgtggagttggtttgacatatcacaatggct

SEQ ID NO: 475971 - DNA, 57 bp, Artificial
  Synthetic oligonucleotide
tgttggccaacaacgtgaaacacggtgacactccctatcctgaccttaccggtctca

SEQ ID NO: 475972 - DNA, 58 bp, Artificial
  Synthetic oligonucleotide
tgttggcgtccaattctcccgtgatttagtcgtatcatctaagttggtagttatatta

SEQ ID NO: 475973 - DNA, 59 bp, Artificial
  Synthetic oligonucleotide
tgttggcgtgctgaatcgaaccacttcggacgctcgccacacgatgtacacagattgga

SEQ ID NO: 475974 - DNA, 55 bp, Artificial
  Synthetic oligonucleotide
tgttggcgtggacgccgttgctgcgctcttggggtagacgcgtctctcaggctac

SEQ ID NO: 475975 - DNA, 60 bp, Artificial
  Synthetic oligonucleotide
tgttggcgtggtctggttggtctatgatgcgcagccgaccggcaatgccccgcaagtgaa

SEQ ID NO: 475976 - DNA, 54 bp, Artificial
  Synthetic oligonucleotide
tgttggcgttacgtacgggtattccacaggggaagaccacgttgcagggcctaa

SEQ ID NO: 475977 - DNA, 60 bp, Artificial
  Synthetic oligonucleotide
tgttgggaaggttatgtgtgtatctgatgtgacgagaggtaatggtattacccatcgtgt

SEQ ID NO: 475978 - DNA, 60 bp, Artificial
  Synthetic oligonucleotide
tgttgggactatgtaagtcaaagagtacctgacgaaagactacaacgatggctagctatg

SEQ ID NO: 475979 - DNA, 50 bp, Artificial
  Synthetic oligonucleotide
tgttgggccaaccaactgtttgtaactgtggtagacaccacacgaagtac

SEQ ID NO: 475980 - DNA, 60 bp, Artificial
  Synthetic oligonucleotide
tgttgggccgacgatgtagaggctgcgttttcttgttcctggagcattctggttgtttca

SEQ ID NO: 475981 - DNA, 60 bp, Artificial
  Synthetic oligonucleotide
tgttgggcggaattatgcggcatctagcagactcgtctgtaagcttacttcgtggcgttt

SEQ ID NO: 475982 - DNA, 55 bp, Artificial
  Synthetic oligonucleotide
tgttgggctggggaaggtcctcgtggacattcttgcagggtatggtgcgggcgtg

SEQ ID NO: 475983 - DNA, 60 bp, Artificial
  Synthetic oligonucleotide
tgttgggggcaaactgacggaattgaacatacagagtgagctcgcatacataagtgattt

SEQ ID NO: 475984 - DNA, 55 bp, Artificial
  Synthetic oligonucleotide
tgttgggggccctcttaccaattcaaggggggagaactgcggctaccgcaggtgc

SEQ ID NO: 475985 - DNA, 59 bp, Artificial
  Synthetic oligonucleotide
tgttggggtgacgggtggtccaagcacgaacattgctcacatcccgaccgtagtagcga

SEQ ID NO: 475986 - DNA, 54 bp, Artificial
  Synthetic oligonucleotide
tgttggggtttgtagggcttgtatttgggaaagtgcctcctctttgcttaggga

SEQ ID NO: 475987 - DNA, 60 bp, Artificial
  Synthetic oligonucleotide
tgttgggtaagatttggatggatgagaatatcaagacgaagaatcacacaaatactgtga

SEQ ID NO: 475988 - DNA, 60 bp, Artificial
  Synthetic oligonucleotide
tgttgggttataggtgtatccccattgagatcgggagtgaatcattgccctatctgacag

SEQ ID NO: 475989 - DNA, 56 bp, Artificial
  Synthetic oligonucleotide
tgttggtaccatactttgtcgtggtccgtgatcttgaaactcaggggatttgttac

SEQ ID NO: 475990 - DNA, 55 bp, Artificial
  Synthetic oligonucleotide
tgttggtatcccgcctttaatttgaactggcttcccgtactttgtgttggattgc

SEQ ID NO: 475991 - DNA, 60 bp, Artificial
  Synthetic oligonucleotide
tgttggtccacatttaaggacctggatccttcatcatgtaacggcgtctatgacaatata

SEQ ID NO: 475992 - DNA, 60 bp, Artificial
  Synthetic oligonucleotide
tgttggtcctattgtaggcctagattacactctgttgtatgacactctgcccgagactgt

SEQ ID NO: 475993 - DNA, 57 bp, Artificial
  Synthetic oligonucleotide
tgttggtctaaagattcccgcgtcgcaggacttagtcgaatggaaaacagtgcgtat

SEQ ID NO: 475994 - DNA, 60 bp, Artificial
  Synthetic oligonucleotide
tgttggtctacgtttaaggatctggatcatgattcatgtaacggtgtttatgacaacatt

SEQ ID NO: 475995 - DNA, 60 bp, Artificial
  Synthetic oligonucleotide
tgttggtgacacaccaagaaatgatgatagctccagtagtagcaactgcagggatcccaa

SEQ ID NO: 475996 - DNA, 60 bp, Artificial
  Synthetic oligonucleotide
tgttggtgatgatacgttattttatgctaaattacataccacagatacgaaagtatttga

SEQ ID NO: 475997 - DNA, 58 bp, Artificial
  Synthetic oligonucleotide
tgttggtggctgacaccacgaaagtgtatgtcactaacccggacaatgttgggaggag

SEQ ID NO: 475998 - DNA, 60 bp, Artificial
  Synthetic oligonucleotide
tgttggtggtgggactgtccccgctgcccaggatcctgactgcttcagctctgctggaga

SEQ ID NO: 475999 - DNA, 60 bp, Artificial
  Synthetic oligonucleotide
tgttggtgtacctgagtgcagctgacttttgatacgtctacgagtcaagtacccccgctg

SEQ ID NO: 476000 - DNA, 60 bp, Artificial
  Synthetic oligonucleotide
tgttggtgtggaagtttgacagccgcctagcctttcatcatatggcccgagagctgcacc

SEQ ID NO: 476001 - DNA, 60 bp, Artificial
  Synthetic oligonucleotide
tgttggtgtttccaattcgcgtgtaatgggtgagtgagctgatgtggtcgccgaggcatg

SEQ ID NO: 476002 - DNA, 56 bp, Artificial
  Synthetic oligonucleotide
tgttggttagttgcccagctcgagctaagcgttttggtttccaatatgaaccggga

SEQ ID NO: 476003 - DNA, 60 bp, Artificial
  Synthetic oligonucleotide
tgttgtaacttacgatgacgaacccagctctcatatttccctagctcgcaggatccgacg

SEQ ID NO: 476004 - DNA, 57 bp, Artificial
  Synthetic oligonucleotide
tgttgtaaggcgcatcgagtcccttaacttggtctatgctatagttggggacgaggt

SEQ ID NO: 476005 - DNA, 55 bp, Artificial
  Synthetic oligonucleotide
tgttgtacaaagcaagggaatgtggattaacacacattggccaccaggtggtgcc

SEQ ID NO: 476006 - DNA, 57 bp, Artificial
  Synthetic oligonucleotide
tgttgtacatggcgtgtactcatgcctctaatcctgtatacgctacgttgaagatta

SEQ ID NO: 476007 - DNA, 52 bp, Artificial
  Synthetic oligonucleotide
tgttgtacgcctttgacagtatttcaatcttgggggacttgaatgttatttc

SEQ ID NO: 476008 - DNA, 57 bp, Artificial
  Synthetic oligonucleotide
tgttgtattagtgcgcatgccaaaggactttccaccgtttaagagcaacgcttcttt

SEQ ID NO: 476009 - DNA, 55 bp, Artificial
  Synthetic oligonucleotide
tgttgtattctcccatgctctcccaacaactgatgttctgcaggctatgtaaggc

SEQ ID NO: 476010 - DNA, 51 bp, Artificial
  Synthetic oligonucleotide
tgttgtcacagcccagaaccagtacacctgagattccaataaaacgtgcaa

SEQ ID NO: 476011 - DNA, 56 bp, Artificial
  Synthetic oligonucleotide
tgttgtcaccgtcgtctccagcctacccctacacgagatcgtggaaaaacaccgcc

SEQ ID NO: 476012 - DNA, 55 bp, Artificial
  Synthetic oligonucleotide
tgttgtcagctagcacagtgtgtaagttgcagagttgcacacacggtgtgccagg

SEQ ID NO: 476013 - DNA, 60 bp, Artificial
  Synthetic oligonucleotide
tgttgtcatttacagtctatacgcctcgcatggagtcacaatccttagggatggatactt

SEQ ID NO: 476014 - DNA, 55 bp, Artificial
  Synthetic oligonucleotide
tgttgtcatttagaaaccaacctggcaatcccagtggtaatctgacatttggtgg

SEQ ID NO: 476015 - DNA, 57 bp, Artificial
  Synthetic oligonucleotide
tgttgtccacaattgtagaggttgactcatgtcaaaagaactcatgcattcataata

SEQ ID NO: 476016 - DNA, 56 bp, Artificial
  Synthetic oligonucleotide
tgttgtcccaggctcttccttttatttgtgaacgagaagctatgtaaggccatcct

SEQ ID NO: 476017 - DNA, 55 bp, Artificial
  Synthetic oligonucleotide
tgttgtcccgtcggcatatcttactgtagcttcccagcgtattccgaaatatcct

SEQ ID NO: 476018 - DNA, 59 bp, Artificial
  Synthetic oligonucleotide
tgttgtccgcccgaacacatatccaaattgacgtgcatttcgataaaagcgtataactc

SEQ ID NO: 476019 - DNA, 59 bp, Artificial
  Synthetic oligonucleotide
tgttgtccggaactttggccactggatgaggttgtggtaccatactctgtcgtggtcca

SEQ ID NO: 476020 - DNA, 60 bp, Artificial
  Synthetic oligonucleotide
tgttgtcgatagtgtgaatcataaactagatgtaacttcaacaacatgtacaatacgaaa

SEQ ID NO: 476021 - DNA, 53 bp, Artificial
  Synthetic oligonucleotide
tgttgtcggtgttgttaggtcaggtgggtctgtgtctactaatattgacgtac

SEQ ID NO: 476022 - DNA, 50 bp, Artificial
  Synthetic oligonucleotide
tgttgtctacaatggtccttatgcaggtatctatgatcattggggaacag

SEQ ID NO: 476023 - DNA, 60 bp, Artificial
  Synthetic oligonucleotide
tgttgtctagaatattgggcctgtcgttacttgtgtatcgcatggaactgctccgtccaa

SEQ ID NO: 476024 - DNA, 60 bp, Artificial
  Synthetic oligonucleotide
tgttgtctgacatgattagaagaaggaacttgatcctcaacagaggtggcgatgagaacc

SEQ ID NO: 476025 - DNA, 51 bp, Artificial
  Synthetic oligonucleotide
tgttgtgaggattgggtggcggcactatatggtattagtggacctttatat

SEQ ID NO: 476026 - DNA, 60 bp, Artificial
  Synthetic oligonucleotide
tgttgtgagtaaagacactgtagcccagccatgcagcccagggacacataactccacagc

SEQ ID NO: 476027 - DNA, 60 bp, Artificial
  Synthetic oligonucleotide
tgttgtgatgaaaacatcagtatccctacaggatgccttttgccagaataactctgaaag

SEQ ID NO: 476028 - DNA, 60 bp, Artificial
  Synthetic oligonucleotide
tgttgtgattactggtgggcttgaggatggaacatatggctcattcgcgtttgatggcag

SEQ ID NO: 476029 - DNA, 50 bp, Artificial
  Synthetic oligonucleotide
tgttgtgattggtggagcatgcattacctaggtagtgctaagtatgcacc

SEQ ID NO: 476030 - DNA, 53 bp, Artificial
  Synthetic oligonucleotide
tgttgtgcccgaattttgatcgttcgctattcatttccagcgtcgctatggct

SEQ ID NO: 476031 - DNA, 60 bp, Artificial
  Synthetic oligonucleotide
tgttgtgccctacatcaactgcacacccatggacagcatgttgcgacacaacaatgtgtc

SEQ ID NO: 476032 - DNA, 60 bp, Artificial
  Synthetic oligonucleotide
tgttgtgcggatgggcgcactaccggtgggcaaacaattgctcaagaggctgatcctttg

SEQ ID NO: 476033 - DNA, 60 bp, Artificial
  Synthetic oligonucleotide
tgttgtgcgtgtcactgttttgtgttgttgcgtgcgtgtgttgcacatgtgttaattaaa

SEQ ID NO: 476034 - DNA, 60 bp, Artificial
  Synthetic oligonucleotide
tgttgtggacggttttcaggtcagggagccttgccttagaggcgctctcaaaaatgatgc

SEQ ID NO: 476035 - DNA, 60 bp, Artificial
  Synthetic oligonucleotide
tgttgtggcacgagccagctctgattacatgagttacagaaggacttctcaattgacagt

SEQ ID NO: 476036 - DNA, 60 bp, Artificial
  Synthetic oligonucleotide
tgttgtgggcttgcttatcacccattcacaaattgtggctcatattgtgtctgcggttct

SEQ ID NO: 476037 - DNA, 55 bp, Artificial
  Synthetic oligonucleotide
tgttgtgggtaatacaccccgggtcgatctgattacctgttttgctcagggtaag

SEQ ID NO: 476038 - DNA, 60 bp, Artificial
  Synthetic oligonucleotide
tgttgtgggtttaactgaatgtccaagctttatcacttccattaaagcatgtgaccttgc

SEQ ID NO: 476039 - DNA, 57 bp, Artificial
  Synthetic oligonucleotide
tgttgtggtaacaaacacaactaccctgatgagctaaaccccttctctgataatggg

SEQ ID NO: 476040 - DNA, 59 bp, Artificial
  Synthetic oligonucleotide
tgttgtggttctataccacgactctgtcaggctaggcctaggaactagggtgcgtactc

SEQ ID NO: 476041 - DNA, 53 bp, Artificial
  Synthetic oligonucleotide
tgttgtggttggttagggaccggagaccgtacgggacgcctatggattttgga

SEQ ID NO: 476042 - DNA, 58 bp, Artificial
  Synthetic oligonucleotide
tgttgtgtaactacagaatttggtcaaccggtttattcagagatcattccaccaacta

SEQ ID NO: 476043 - DNA, 56 bp, Artificial
  Synthetic oligonucleotide
tgttgtgtctaagagtaaagagttacttgatgtgtctctggattctttaggtgcag

SEQ ID NO: 476044 - DNA, 53 bp, Artificial
  Synthetic oligonucleotide
tgttgtgtgagtggtttttaatagccactgtgtctccattttgttcattcgcc

SEQ ID NO: 476045 - DNA, 60 bp, Artificial
  Synthetic oligonucleotide
tgttgtgtgcattttgatactagcagtctgtgttgttagcacttcagcagtagagatgga

SEQ ID NO: 476046 - DNA, 60 bp, Artificial
  Synthetic oligonucleotide
tgttgtgtgggcagcgaacgaattggacagatttggattagcagaaagcctgttggaggc

SEQ ID NO: 476047 - DNA, 55 bp, Artificial
  Synthetic oligonucleotide
tgttgtgtgtctagaaccaacatacccgttactggacctctttcggacaacccac

SEQ ID NO: 476048 - DNA, 60 bp, Artificial
  Synthetic oligonucleotide
tgttgttataattgtgaagcaaatgtaagaatcactttgtatgctgttgcatttggacta

SEQ ID NO: 476049 - DNA, 60 bp, Artificial
  Synthetic oligonucleotide
tgttgttccatgtcttacagctggacaggagcccttgtcacaccatgcgcagccgaagag

SEQ ID NO: 476050 - DNA, 60 bp, Artificial
  Synthetic oligonucleotide
tgttgttccccgtcggccttcacacatcgctgatgacgaaacttacaacagatcccgtgc

SEQ ID NO: 476051 - DNA, 60 bp, Artificial
  Synthetic oligonucleotide
tgttgttccgtcgatcacgttggagtcctcgactctgtagactatctcccatggtgtgtc

SEQ ID NO: 476052 - DNA, 55 bp, Artificial
  Synthetic oligonucleotide
tgttgttcgtgcattggtatttggcttcgaactgtaaaagcacatggagatgagg

SEQ ID NO: 476053 - DNA, 54 bp, Artificial
  Synthetic oligonucleotide
tgttgttcttctttaaacagtggtatgacttctacaagaacgaatacgtttcgg

SEQ ID NO: 476054 - DNA, 60 bp, Artificial
  Synthetic oligonucleotide
tgttgttcttgctgcatgattgaggcagattgtcaaacattcgtgtgagattgaattcaa

SEQ ID NO: 476055 - DNA, 60 bp, Artificial
  Synthetic oligonucleotide
tgttgttgcacaactgatgacgtggggacagctattctgtcagatttcaagatgcctaca

SEQ ID NO: 476056 - DNA, 60 bp, Artificial
  Synthetic oligonucleotide
tgttgttggtaatgttgattgcgatgtctttgagaacgcaattgacaatgtggagaaaat

SEQ ID NO: 476057 - DNA, 55 bp, Artificial
  Synthetic oligonucleotide
tgttgttggtgattcaactttcttccttggaatgggatccgtcgccatcgcgtgg

SEQ ID NO: 476058 - DNA, 60 bp, Artificial
  Synthetic oligonucleotide
tgttgtttacaatcaacaggaagcaggaaaatacgagaatcataccgagaatgcgttgat

SEQ ID NO: 476059 - DNA, 52 bp, Artificial
  Synthetic oligonucleotide
tgttgtttagatgctatacttgatggtatataagagataaggattgatgcca

SEQ ID NO: 476060 - DNA, 56 bp, Artificial
  Synthetic oligonucleotide
tgttgtttctcttgtagcgccaacattgtgtccacaacaaactttttctaggtttg

SEQ ID NO: 476061 - DNA, 54 bp, Artificial
  Synthetic oligonucleotide
tgtttaaatttcagtggggcggacacgggacagaacaattcaaaaccagcgtcg

SEQ ID NO: 476062 - DNA, 56 bp, Artificial
  Synthetic oligonucleotide
tgtttaacggaagcttaagcttcagcggaaataataggaatgttcgtggatttctc

SEQ ID NO: 476063 - DNA, 57 bp, Artificial
  Synthetic oligonucleotide
tgtttaagatggctccttttattcttgtggcgtggtttttgcatataccagtctttc

SEQ ID NO: 476064 - DNA, 60 bp, Artificial
  Synthetic oligonucleotide
tgtttaagtggtacatgttcagagataggaaatatgcaaaggtgcatggaacatactact

SEQ ID NO: 476065 - DNA, 59 bp, Artificial
  Synthetic oligonucleotide
tgtttaataaagtggccgatacagaaaatcccaccacttatcctgctgcagaaacagac

SEQ ID NO: 476066 - DNA, 59 bp, Artificial
  Synthetic oligonucleotide
tgtttaatagtacttggaatgatactacaggaaggttaaataccactgaagacatcaca

SEQ ID NO: 476067 - DNA, 54 bp, Artificial
  Synthetic oligonucleotide
tgtttaatgaatttctaacattttatgaatcgatcgagagacgaaatgtccccc

SEQ ID NO: 476068 - DNA, 50 bp, Artificial
  Synthetic oligonucleotide
tgtttaatgacacattaaaccacaccatcgaccaaaatatcacactccca

SEQ ID NO: 476069 - DNA, 53 bp, Artificial
  Synthetic oligonucleotide
tgtttacaaacatttttcccgtaaagaggaagagccaattcctactgaaggag

SEQ ID NO: 476070 - DNA, 60 bp, Artificial
  Synthetic oligonucleotide
tgtttacaactgtagacagcactaacctccacacgcatattgtggacatgtctatgactt

SEQ ID NO: 476071 - DNA, 60 bp, Artificial
  Synthetic oligonucleotide
tgtttacatacgagaggtcaattatgtaatcatctgacgaggatggatctgttacatgcg

SEQ ID NO: 476072 - DNA, 57 bp, Artificial
  Synthetic oligonucleotide
tgtttaccagtgtgcaatgaggtccaaccacactattaagggttcattccttaatgg

SEQ ID NO: 476073 - DNA, 52 bp, Artificial
  Synthetic oligonucleotide
tgtttacctgatagtactgtccctaccaacaggctcctatctacatcaactg

SEQ ID NO: 476074 - DNA, 60 bp, Artificial
  Synthetic oligonucleotide
tgtttacgaggcgcgctaattgcggcggagtgcaaattgggcgatgtatatcatacctta

SEQ ID NO: 476075 - DNA, 53 bp, Artificial
  Synthetic oligonucleotide
tgtttacgtcccgtcagcgctgaatcccgcggacgacccctcccggggccgct

SEQ ID NO: 476076 - DNA, 53 bp, Artificial
  Synthetic oligonucleotide
tgtttacgtcccgtcggcgctgaaccctgccgacgacccgtctcggggtcgct

SEQ ID NO: 476077 - DNA, 53 bp, Artificial
  Synthetic oligonucleotide
tgtttacgtcccttcggagctgaatcccgcggacgacccttctcggggccgat

SEQ ID NO: 476078 - DNA, 60 bp, Artificial
  Synthetic oligonucleotide
tgtttactaacagctctgggacacaacagtggagaggccttgcaagatattttaagattc

SEQ ID NO: 476079 - DNA, 54 bp, Artificial
  Synthetic oligonucleotide
tgtttactggagcagatggttggtaacagcttgtaatgtacagctaacaccagc

SEQ ID NO: 476080 - DNA, 53 bp, Artificial
  Synthetic oligonucleotide
tgtttagaagattgtgattttctcaaaagaggtttcaaaaaccgagggttgta

SEQ ID NO: 476081 - DNA, 53 bp, Artificial
  Synthetic oligonucleotide
tgtttagacaatggcttggtatgagtaataaagttgtggacgaatcggtagta

SEQ ID NO: 476082 - DNA, 60 bp, Artificial
  Synthetic oligonucleotide
tgtttagatacgcgtctatgctatcattaccgcgatgctcattatgtggtaaaaagtttc

SEQ ID NO: 476083 - DNA, 57 bp, Artificial
  Synthetic oligonucleotide
tgtttagccctgggttgttcccaaagcttaaccatacaaactgtgataagagtgcca

SEQ ID NO: 476084 - DNA, 60 bp, Artificial
  Synthetic oligonucleotide
tgtttagcctttgctgacttgataagtgataacatgagcactgtttacagtaataagctc

SEQ ID NO: 476085 - DNA, 55 bp, Artificial
  Synthetic oligonucleotide
tgtttagggttagtacattttgcgcatgcattcgaatgtggttcgagtgtgccgc

SEQ ID NO: 476086 - DNA, 60 bp, Artificial
  Synthetic oligonucleotide
tgtttagttcgcacatctgtgatggaatgcagtcaaaatcgaaatcttactataatggca

SEQ ID NO: 476087 - DNA, 54 bp, Artificial
  Synthetic oligonucleotide
tgtttataagcacgaaaagaaagatcaggctgaaggattgcacgatttcgcccg

SEQ ID NO: 476088 - DNA, 55 bp, Artificial
  Synthetic oligonucleotide
tgtttataataggatgtacaccatgtgtaggggaatactgggatacagcccctgt

SEQ ID NO: 476089 - DNA, 58 bp, Artificial
  Synthetic oligonucleotide
tgtttatactccgcccttcgcggatatcaggaccccagggcacacctcctcctccaga

SEQ ID NO: 476090 - DNA, 60 bp, Artificial
  Synthetic oligonucleotide
tgtttatattatcctactgaagcttcaactcaaattggggatacagaatggaaagataca

SEQ ID NO: 476091 - DNA, 55 bp, Artificial
  Synthetic oligonucleotide
tgtttatcaatctgaggccgcagccactgatcgtggttgcatagcctaccatgtg

SEQ ID NO: 476092 - DNA, 52 bp, Artificial
  Synthetic oligonucleotide
tgtttatcaccgaaatcaggagtatcatttgattcagtgattgcttgtggcg

SEQ ID NO: 476093 - DNA, 60 bp, Artificial
  Synthetic oligonucleotide
tgtttatcgagactattggatctctctcggtccgcttcactgttagtgataagattaagg

SEQ ID NO: 476094 - DNA, 60 bp, Artificial
  Synthetic oligonucleotide
tgtttatctcctctagctgctcattgcgctgataggaccctacgtcgtgacaacgtaaag

SEQ ID NO: 476095 - DNA, 55 bp, Artificial
  Synthetic oligonucleotide
tgtttatgataacgagccgtctaccgctactgttaagaacgatcagcgcgatcgt

SEQ ID NO: 476096 - DNA, 58 bp, Artificial
  Synthetic oligonucleotide
tgtttatggattacgtggcgtttgttgaggggtatgacagcttatccctctcaaattg

SEQ ID NO: 476097 - DNA, 53 bp, Artificial
  Synthetic oligonucleotide
tgtttattcgacggtactaggcttcgtccctttgatgacgttaaatgaaagcg

SEQ ID NO: 476098 - DNA, 52 bp, Artificial
  Synthetic oligonucleotide
tgtttattcgcttcccccagacccctcccactttgacgggtataaacaacag

SEQ ID NO: 476099 - DNA, 57 bp, Artificial
  Synthetic oligonucleotide
tgtttcaaagccgactcaagttattaccgtcaaagtatctgaggaactttggcgcga

SEQ ID NO: 476100 - DNA, 60 bp, Artificial
  Synthetic oligonucleotide
tgtttcaatagtggcattcgaggaaaagcttctgcagacatctatgccacgtgttcacaa

SEQ ID NO: 476101 - DNA, 60 bp, Artificial
  Synthetic oligonucleotide
tgtttcacttatggtttgccagttatgactaacggtgtgtcaacgagcctactagcgatg

SEQ ID NO: 476102 - DNA, 55 bp, Artificial
  Synthetic oligonucleotide
tgtttcagacaccgaagctacaaacagtgatcaagaaacaatatacatgataggt

SEQ ID NO: 476103 - DNA, 55 bp, Artificial
  Synthetic oligonucleotide
tgtttcagataatgcgggtcaacatcatctatgacgttataccatgcgtcattac

SEQ ID NO: 476104 - DNA, 60 bp, Artificial
  Synthetic oligonucleotide
tgtttcagccgggaagatggtttatgagacctgcacaagcggttacgcctgtcatatgcg

SEQ ID NO: 476105 - DNA, 55 bp, Artificial
  Synthetic oligonucleotide
tgtttcagggatggcggtgcgcggttaacgcgatgcgggcgctgtggtgcgttct

SEQ ID NO: 476106 - DNA, 55 bp, Artificial
  Synthetic oligonucleotide
tgtttcagggcagggcgtatggtgggagcatatggtgcggggtcaacctctggca

SEQ ID NO: 476107 - DNA, 55 bp, Artificial
  Synthetic oligonucleotide
tgtttcaggtatgggcaactcagcatccctaaataagtccagaatgtttatcccc

SEQ ID NO: 476108 - DNA, 60 bp, Artificial
  Synthetic oligonucleotide
tgtttcaggttccctgaagagtagatcaatgggaagcatcctcttaggtttctcattgga

SEQ ID NO: 476109 - DNA, 60 bp, Artificial
  Synthetic oligonucleotide
tgtttcagttggatcatccaaatactaccaaaggttcacaccagaaatagcagccagacc

SEQ ID NO: 476110 - DNA, 60 bp, Artificial
  Synthetic oligonucleotide
tgtttcattcccacacacacaattgcattgacacaaccaggacatacatacgatacaatg

SEQ ID NO: 476111 - DNA, 58 bp, Artificial
  Synthetic oligonucleotide
tgtttccaactctctgacgaatctgtttaccttccaagggccaagtgatgactcctgg

SEQ ID NO: 476112 - DNA, 60 bp, Artificial
  Synthetic oligonucleotide
tgtttccaaggataatgggatcagaataggttcaagagggcacatatttgttataagaga

SEQ ID NO: 476113 - DNA, 59 bp, Artificial
  Synthetic oligonucleotide
tgtttccagcgatccaagttcttgttgatggatgctctgaaattgagtattgaagaccc

SEQ ID NO: 476114 - DNA, 58 bp, Artificial
  Synthetic oligonucleotide
tgtttccaggaccattaccggacagacgtccgaagccaatgccagttcggcatttgaa

SEQ ID NO: 476115 - DNA, 57 bp, Artificial
  Synthetic oligonucleotide
tgtttcccaacgtatccacgaagatcaatttggaccggagtttgtgatcccacataa

SEQ ID NO: 476116 - DNA, 55 bp, Artificial
  Synthetic oligonucleotide
tgtttcccatgcaattcaccaactcagcctatcgccagatggagcccatgttcgc

SEQ ID NO: 476117 - DNA, 60 bp, Artificial
  Synthetic oligonucleotide
tgtttcccccatcaaccagacatgcaccggctttcactgcagcagcaagactcagattgt

SEQ ID NO: 476118 - DNA, 56 bp, Artificial
  Synthetic oligonucleotide
tgtttccccggagcggagtatagatggccaccgctgtcaaaagctcttaaccgtta

SEQ ID NO: 476119 - DNA, 55 bp, Artificial
  Synthetic oligonucleotide
tgtttccctggctccttgtaatgtcgaataccacgggcttcgtcagagctctgtg

SEQ ID NO: 476120 - DNA, 55 bp, Artificial
  Synthetic oligonucleotide
tgtttccgaagatttagcaacaggaaaagcccaggcaggtggaagaccttatttg

SEQ ID NO: 476121 - DNA, 56 bp, Artificial
  Synthetic oligonucleotide
tgtttccgaagccaaaatttaaaggaaatgaggtggtgctcaattacacaggatcg

SEQ ID NO: 476122 - DNA, 55 bp, Artificial
  Synthetic oligonucleotide
tgtttccgcactggggcaaaccacaggtgaaccgtgccacgggcctggttaccga

SEQ ID NO: 476123 - DNA, 58 bp, Artificial
  Synthetic oligonucleotide
tgtttcgaaacatcaactcagctttcgcggtgctcaagtccacgaaaccaattcggaa

SEQ ID NO: 476124 - DNA, 52 bp, Artificial
  Synthetic oligonucleotide
tgtttcgagatattccacaagtgtgataacaattgcattgagagcatccgga

SEQ ID NO: 476125 - DNA, 58 bp, Artificial
  Synthetic oligonucleotide
tgtttcgctcagcacaaccccagtgtagatcaggtcgatgagtcaccgcattccccac

SEQ ID NO: 476126 - DNA, 59 bp, Artificial
  Synthetic oligonucleotide
tgtttctagcaatgataacatacataacaaggaatcaacctgagtggtttaggaatgtt

SEQ ID NO: 476127 - DNA, 51 bp, Artificial
  Synthetic oligonucleotide
tgtttctatattcaaccgtaaggaagatattggacagcaaaaggatctagc

SEQ ID NO: 476128 - DNA, 53 bp, Artificial
  Synthetic oligonucleotide
tgtttctcctttttccacggaccagaagtctatgcaatcctttgtgtagccct

SEQ ID NO: 476129 - DNA, 57 bp, Artificial
  Synthetic oligonucleotide
tgtttctggtttaaacaagataaatcttaggtccatgaccgatgtggtagactccat

SEQ ID NO: 476130 - DNA, 60 bp, Artificial
  Synthetic oligonucleotide
tgtttcttacattgcctacaataaatttcacacccacgatgtctcaacttatgagcactg

SEQ ID NO: 476131 - DNA, 60 bp, Artificial
  Synthetic oligonucleotide
tgtttctttgcaggttgatataatgcaagctctactgggtcaagttggaggtcctcgatg

SEQ ID NO: 476132 - DNA, 60 bp, Artificial
  Synthetic oligonucleotide
tgtttgaaaggacacatgaattctttgagtcgagtctcatctactacaacgggaggccag

SEQ ID NO: 476133 - DNA, 52 bp, Artificial
  Synthetic oligonucleotide
tgtttgaaatgccgcctactgagcgaagaatcgttcatcgaattacagaaaa

SEQ ID NO: 476134 - DNA, 53 bp, Artificial
  Synthetic oligonucleotide
tgtttgaaccccagggtcctaaacccatacaggggtacaacgattggctagag

SEQ ID NO: 476135 - DNA, 59 bp, Artificial
  Synthetic oligonucleotide
tgtttgacatcaagagacgccagcctactcgactccatagcttcggacaacaccatacg

SEQ ID NO: 476136 - DNA, 58 bp, Artificial
  Synthetic oligonucleotide
tgtttgacgtccgatggaatggttttgggatgttctataaagagtgggcttctgcaaa

SEQ ID NO: 476137 - DNA, 60 bp, Artificial
  Synthetic oligonucleotide
tgtttgactcggtcgtcctctgtgagtgctatgacgcgggctgctcatggtacgatctgc

SEQ ID NO: 476138 - DNA, 54 bp, Artificial
  Synthetic oligonucleotide
tgtttgagaagtacgtgaacagagtgttgtctcgcaccaggaaggctgagttcg

SEQ ID NO: 476139 - DNA, 55 bp, Artificial
  Synthetic oligonucleotide
tgtttgataaatgctcatattgccggttcgggttggctgtacccaactgagcagg

SEQ ID NO: 476140 - DNA, 57 bp, Artificial
  Synthetic oligonucleotide
tgtttgataatgagcctagcactgctactattaagaacgatttacgagatcgtttcc

SEQ ID NO: 476141 - DNA, 55 bp, Artificial
  Synthetic oligonucleotide
tgtttgatgcactatgtatttggaaatgcccaattagagggattcagtgcagagt

SEQ ID NO: 476142 - DNA, 60 bp, Artificial
  Synthetic oligonucleotide
tgtttgatggagcaggttggctgatggtcagggaccctttggtgagcatgagcaaggatt

SEQ ID NO: 476143 - DNA, 58 bp, Artificial
  Synthetic oligonucleotide
tgtttgatggatggacttaagtcaggtagggttacattcattccaactctgggaaatc

SEQ ID NO: 476144 - DNA, 60 bp, Artificial
  Synthetic oligonucleotide
tgtttgatgtgaattataggaaatcggataattgccagaggctaagctctcagtgataaa

SEQ ID NO: 476145 - DNA, 60 bp, Artificial
  Synthetic oligonucleotide
tgtttgcagagacaattggaagggctctaataggcccgttatagatataaatatggcaga

SEQ ID NO: 476146 - DNA, 60 bp, Artificial
  Synthetic oligonucleotide
tgtttgcagatgatgacttttctggcaacagactatacatgcacccggcagttctaactc

SEQ ID NO: 476147 - DNA, 55 bp, Artificial
  Synthetic oligonucleotide
tgtttgcagtatttggactaataccaatgtatcaattgagtactgaggcagttcc

SEQ ID NO: 476148 - DNA, 57 bp, Artificial
  Synthetic oligonucleotide
tgtttgccctttgttgattgcgggccaataactgatgtgactgtccactgcccttgg

SEQ ID NO: 476149 - DNA, 60 bp, Artificial
  Synthetic oligonucleotide
tgtttgccgaaaagccacgcgagaaactctcacgccgttgcctggaggatgttcacagtg

SEQ ID NO: 476150 - DNA, 60 bp, Artificial
  Synthetic oligonucleotide
tgtttgcgtggtgcgctaattgctgctgagtgtgagctcggcgatgtgtacttcacattg

SEQ ID NO: 476151 - DNA, 60 bp, Artificial
  Synthetic oligonucleotide
tgtttgctacaccctgtgtgccagcatggaatggaagatgaccacagagaagtattaatg

SEQ ID NO: 476152 - DNA, 52 bp, Artificial
  Synthetic oligonucleotide
tgtttgctacagtgtgcttatgcaggcatggatagtaacatgcaagtgtatg

SEQ ID NO: 476153 - DNA, 54 bp, Artificial
  Synthetic oligonucleotide
tgtttgctaggcatttttggaacagagctggaacaatgggtgacactattccac

SEQ ID NO: 476154 - DNA, 59 bp, Artificial
  Synthetic oligonucleotide
tgtttgctcctgttactagctccacgccgccagaatccccaggacgagaaagagcttcc

SEQ ID NO: 476155 - DNA, 59 bp, Artificial
  Synthetic oligonucleotide
tgtttgctgacctcccctagcagatctaccgtcgacctggaattctccccattcaatgg

SEQ ID NO: 476156 - DNA, 55 bp, Artificial
  Synthetic oligonucleotide
tgtttggaacagtgggcaattgtctgggcaggaatcaaatgttttgataactctg

SEQ ID NO: 476157 - DNA, 54 bp, Artificial
  Synthetic oligonucleotide
tgtttggaaccggaggttactgaggataccaaataccgggtatcccttgatgaa

SEQ ID NO: 476158 - DNA, 51 bp, Artificial
  Synthetic oligonucleotide
tgtttggaatgaattgtttatggttagaggacctccagaagccaaatcgac

SEQ ID NO: 476159 - DNA, 52 bp, Artificial
  Synthetic oligonucleotide
tgtttggatagggaggacaaagagcttggaatccagaagcggttttgagatg

SEQ ID NO: 476160 - DNA, 50 bp, Artificial
  Synthetic oligonucleotide
tgtttggatgatctcccagatcatgataataattgtggatgatcgtttgt

SEQ ID NO: 476161 - DNA, 60 bp, Artificial
  Synthetic oligonucleotide
tgtttggattacctagaattgtagctagtgaaattctgcaaaaatgcacaatatgtagaa

SEQ ID NO: 476162 - DNA, 59 bp, Artificial
  Synthetic oligonucleotide
tgtttggcgatccaatcgccaaacaatatacgcgtaaggaaatctgtgaaacacaggag

SEQ ID NO: 476163 - DNA, 58 bp, Artificial
  Synthetic oligonucleotide
tgtttgggagtcggctaatccattctgtggcgagagcacactttacacccggacttgg

SEQ ID NO: 476164 - DNA, 55 bp, Artificial
  Synthetic oligonucleotide
tgtttgggtcttgtcaagatgtaattagaccagaaacaaaagtttacaggaaagc

SEQ ID NO: 476165 - DNA, 55 bp, Artificial
  Synthetic oligonucleotide
tgtttggtccagctcaggtttgggggtgaagtacctggagtgataggtaaagggc

SEQ ID NO: 476166 - DNA, 60 bp, Artificial
  Synthetic oligonucleotide
tgtttggtctctgcaagagattcttggtcgagttctatcgtgccagactctgcttgcaca

SEQ ID NO: 476167 - DNA, 55 bp, Artificial
  Synthetic oligonucleotide
tgtttggtgccatagctggattcatagaaggaggttggcctggactagtcgcagg

SEQ ID NO: 476168 - DNA, 51 bp, Artificial
  Synthetic oligonucleotide
tgtttggtgtgagccgggtcagtcttgtacagggggtcccaatggcggaga

SEQ ID NO: 476169 - DNA, 57 bp, Artificial
  Synthetic oligonucleotide
tgtttgtacactcttactcgttcaactctacctcacgtaggcgataatatacatagt

SEQ ID NO: 476170 - DNA, 57 bp, Artificial
  Synthetic oligonucleotide
tgtttgtagggacaactggactggaaccaacagaccagtattggtgatttctccgga

SEQ ID NO: 476171 - DNA, 57 bp, Artificial
  Synthetic oligonucleotide
tgtttgtagtgtgatttcatcacggttaatagccgaggtacggtaatgtttgttgtc

SEQ ID NO: 476172 - DNA, 60 bp, Artificial
  Synthetic oligonucleotide
tgtttgtatcactggggatgataaaaatgcaactgctagcttcatttatgacgggaggct

SEQ ID NO: 476173 - DNA, 50 bp, Artificial
  Synthetic oligonucleotide
tgtttgtcttaaacatcacattcatgaaattaaatgtgatgagtatttgg

SEQ ID NO: 476174 - DNA, 59 bp, Artificial
  Synthetic oligonucleotide
tgtttgtgagctcatacgcggggcctacccaaagattcagacgaccagccgtgtgttac

SEQ ID NO: 476175 - DNA, 53 bp, Artificial
  Synthetic oligonucleotide
tgtttgtgcatatgaaaggcaggtgctgtaagcccaagacacatcccgcatat

SEQ ID NO: 476176 - DNA, 60 bp, Artificial
  Synthetic oligonucleotide
tgtttgtgctgccagagaatacatgtggtacaccaaatctatccattagtccttgtctac

SEQ ID NO: 476177 - DNA, 60 bp, Artificial
  Synthetic oligonucleotide
tgtttgtggcgagcacaagggctattgtgttcacatgggacacggcgtgtatgcgtcagt

SEQ ID NO: 476178 - DNA, 59 bp, Artificial
  Synthetic oligonucleotide
tgtttgtgtatgagctaggtattggttaattccatgcttaagtggttctaccataggaa

SEQ ID NO: 476179 - DNA, 60 bp, Artificial
  Synthetic oligonucleotide
tgtttgttgaagtcaaacagcctcagcatgtcacaaaattcctcatcatgcttctcatta

SEQ ID NO: 476180 - DNA, 60 bp, Artificial
  Synthetic oligonucleotide
tgtttgttggattcactccattgaacacattcactcccagtatcatttcaatagtaatca

SEQ ID NO: 476181 - DNA, 59 bp, Artificial
  Synthetic oligonucleotide
tgttttaatagctattggtcaatcaaaagaaattgaaaccactgccactgctgaaggag

SEQ ID NO: 476182 - DNA, 55 bp, Artificial
  Synthetic oligonucleotide
tgttttaatccagtacatactatggcattatctcaacccagccatacatatgata

SEQ ID NO: 476183 - DNA, 54 bp, Artificial
  Synthetic oligonucleotide
tgttttacaagggactttccactggggactttccagggaggcgtgacatgggcg

SEQ ID NO: 476184 - DNA, 53 bp, Artificial
  Synthetic oligonucleotide
tgttttacacaaagctacatactacagatattaaggttttcgataaggtggcg

SEQ ID NO: 476185 - DNA, 58 bp, Artificial
  Synthetic oligonucleotide
tgttttacaccaacagggatagggaagtatgttccacttgatgagggtactggtgcca

SEQ ID NO: 476186 - DNA, 58 bp, Artificial
  Synthetic oligonucleotide
tgttttacacctatggggcgcccccagcaagaatatcagtgccctacgtgggaatagc

SEQ ID NO: 476187 - DNA, 58 bp, Artificial
  Synthetic oligonucleotide
tgttttacacggtagtggattacgtcaatcaaataattcagacaatgtccaaaagatc

SEQ ID NO: 476188 - DNA, 56 bp, Artificial
  Synthetic oligonucleotide
tgttttaccagttctactatccccctctatgactatgcttatgggcctaaaaggcc

SEQ ID NO: 476189 - DNA, 50 bp, Artificial
  Synthetic oligonucleotide
tgttttacgaaccatgtgtggtgatggcaaacgacgtagtgacagcgcac

SEQ ID NO: 476190 - DNA, 59 bp, Artificial
  Synthetic oligonucleotide
tgttttagaaagtgcccctcctccaggacgttcaagcaacgtgagtgagcgcagccagg

SEQ ID NO: 476191 - DNA, 60 bp, Artificial
  Synthetic oligonucleotide
tgttttagaggcgatgcgaatgattgaccatggtgtacgtgatttttcacccttgacaga

SEQ ID NO: 476192 - DNA, 56 bp, Artificial
  Synthetic oligonucleotide
tgttttataccgtagtagattacataaatcaaatagttcaagtaatgtccaaacga

SEQ ID NO: 476193 - DNA, 55 bp, Artificial
  Synthetic oligonucleotide
tgttttatgaaccatgtgtgataatggcaaacgatgtggtgactgcacacctgat

SEQ ID NO: 476194 - DNA, 60 bp, Artificial
  Synthetic oligonucleotide
tgttttatgcaggtttgccccttacatgagatacatagagtcaaaggtgatagagtcact

SEQ ID NO: 476195 - DNA, 60 bp, Artificial
  Synthetic oligonucleotide
tgttttcaacctccgctatctcgccttgggtgaataatggttgtatgagtctattctcgc

SEQ ID NO: 476196 - DNA, 60 bp, Artificial
  Synthetic oligonucleotide
tgttttcacatgaggattatttaatagcaaaagagttaataatcttatcatactcaaata

SEQ ID NO: 476197 - DNA, 59 bp, Artificial
  Synthetic oligonucleotide
tgttttcagatggagggccaaacctatacaatatccggaatcttcacattccagaggtc

SEQ ID NO: 476198 - DNA, 60 bp, Artificial
  Synthetic oligonucleotide
tgttttcagggcagattttgcgacaggaacaggatataatggatgggctacaatagatgt

SEQ ID NO: 476199 - DNA, 55 bp, Artificial
  Synthetic oligonucleotide
tgttttcctcagaccctacagaatgcgggtcagatggagaggagcttgagttcag

SEQ ID NO: 476200 - DNA, 60 bp, Artificial
  Synthetic oligonucleotide
tgttttcgcgaccggaatagagtggctcttcgagtgtgataaagactgcattcttgattg

SEQ ID NO: 476201 - DNA, 55 bp, Artificial
  Synthetic oligonucleotide
tgttttcgtctctcatgtcgcgagtgggattcgagaccctacaagattgggcctg

SEQ ID NO: 476202 - DNA, 58 bp, Artificial
  Synthetic oligonucleotide
tgttttctactctgtattcaactctccaaggatttttatccttagcggagaagtatga

SEQ ID NO: 476203 - DNA, 55 bp, Artificial
  Synthetic oligonucleotide
tgttttctcgaaagacaatctcgcgggaagttccagtggagcaatcacgttcggg

SEQ ID NO: 476204 - DNA, 60 bp, Artificial
  Synthetic oligonucleotide
tgttttctgaatcctagaatgggagaaaatgatgagcacaaggatggatatggatacagt

SEQ ID NO: 476205 - DNA, 59 bp, Artificial
  Synthetic oligonucleotide
tgttttgaagggcctggaatccagtgggttgaagagaatgagtactacccagcacgcta

SEQ ID NO: 476206 - DNA, 60 bp, Artificial
  Synthetic oligonucleotide
tgttttgacagcacagttatatgttctcctgcatctgtatctagtactgtgcaagaagta

SEQ ID NO: 476207 - DNA, 50 bp, Artificial
  Synthetic oligonucleotide
tgttttgacggttaaacgattagttaaagtaacaagactccttcgcccct

SEQ ID NO: 476208 - DNA, 51 bp, Artificial
  Synthetic oligonucleotide
tgttttgcatcggtgctttctcagaccagttggtagggacgttcagcgctg

SEQ ID NO: 476209 - DNA, 60 bp, Artificial
  Synthetic oligonucleotide
tgttttgcccttagactattcgagttgcctctgtggattagggctggaggcagcacggat

SEQ ID NO: 476210 - DNA, 55 bp, Artificial
  Synthetic oligonucleotide
tgttttgcgggagcatgatggccactggaaagattcttctcagctactccccacc

SEQ ID NO: 476211 - DNA, 60 bp, Artificial
  Synthetic oligonucleotide
tgttttgctagggttcattatgtgggcctgccaaaggggcaacattagatgcaacatctg

SEQ ID NO: 476212 - DNA, 60 bp, Artificial
  Synthetic oligonucleotide
tgttttgctcgcagccggtctggagcgaaacttatcgggactgacaactctgttgtcctc

SEQ ID NO: 476213 - DNA, 52 bp, Artificial
  Synthetic oligonucleotide
tgttttgctgcatacaatgccgcgcttctctatcgattgatcatgccatacg

SEQ ID NO: 476214 - DNA, 52 bp, Artificial
  Synthetic oligonucleotide
tgttttggccaaagacacctctagttccctgccattccggggaaggcggttt

SEQ ID NO: 476215 - DNA, 55 bp, Artificial
  Synthetic oligonucleotide
tgttttggtggcgttgacaaggcacactactcgatgtaaatattacacagttgtg

SEQ ID NO: 476216 - DNA, 53 bp, Artificial
  Synthetic oligonucleotide
tgttttggttggtgcgagaccggagaccctatggtacgcctatggattttggc

SEQ ID NO: 476217 - DNA, 53 bp, Artificial
  Synthetic oligonucleotide
tgttttggttggttagggaccggagaccatatggcacccctatggagtttggc

SEQ ID NO: 476218 - DNA, 58 bp, Artificial
  Synthetic oligonucleotide
tgttttgtcatccgcgctgctaaaaattgcatggcttgccgttatgcccgtacccggt

SEQ ID NO: 476219 - DNA, 54 bp, Artificial
  Synthetic oligonucleotide
tgttttgtgaaccccggggtacacactccgtaaaaggacatcgctccggcagaa

SEQ ID NO: 476220 - DNA, 57 bp, Artificial
  Synthetic oligonucleotide
tgttttgtgaatcactgaacctttttaaccttggcgtacaattacagctgtcacgta

SEQ ID NO: 476221 - DNA, 58 bp, Artificial
  Synthetic oligonucleotide
tgttttgtgactaggcatgccaagatctgtataatcgggactgtgtccaagttttctc

SEQ ID NO: 476222 - DNA, 53 bp, Artificial
  Synthetic oligonucleotide
tgttttgtgggaccgctaacacaaccttaaaggttttgcttgcctatacccca

SEQ ID NO: 476223 - DNA, 59 bp, Artificial
  Synthetic oligonucleotide
tgttttgttcccgataaggctgttgttagtgcattgaaaagggggatgtatgctattgc

SEQ ID NO: 476224 - DNA, 60 bp, Artificial
  Synthetic oligonucleotide
tgttttgtttcagcatgcaaggatttttgcctacgcatggctagagatactgacatgcac

SEQ ID NO: 476225 - DNA, 54 bp, Artificial
  Synthetic oligonucleotide
tgtttttaattggcagatggattcaagaatgatggaattgaggactcagagcat

SEQ ID NO: 476226 - DNA, 56 bp, Artificial
  Synthetic oligonucleotide
tgtttttagcaagaataaaccagctcttgaggcaactacaaaattttatagatctt

SEQ ID NO: 476227 - DNA, 58 bp, Artificial
  Synthetic oligonucleotide
tgtttttcataaattgatgggtaaagtcttctgaaggagtggattatatggttgaatc

SEQ ID NO: 476228 - DNA, 53 bp, Artificial
  Synthetic oligonucleotide
tgtttttcgaaacacatctataaatccaccctgtatgaggtggaagggggcat

SEQ ID NO: 476229 - DNA, 60 bp, Artificial
  Synthetic oligonucleotide
tgtttttggccatgatcacatatataaccagaaatcagcctgaatggttcagaaatattc

SEQ ID NO: 476230 - DNA, 56 bp, Artificial
  Synthetic oligonucleotide
tgtttttgggttgaaatgatcaggggcaaaccagaagagaaaactatctggacttc

SEQ ID NO: 476231 - DNA, 56 bp, Artificial
  Synthetic oligonucleotide
tgttttttagcaacacacaattcacgccatacttatactgtagtcccttttaacga

SEQ ID NO: 476232 - DNA, 55 bp, Artificial
  Synthetic oligonucleotide
ttaaaaaacagtcaaaaccaaaatgcttgatgcacgaacctatatccttacgacc

SEQ ID NO: 476233 - DNA, 50 bp, Artificial
  Synthetic oligonucleotide
ttaaaaacatccttccattgttatggtgcatgtactaaatatgaataccc

SEQ ID NO: 476234 - DNA, 58 bp, Artificial
  Synthetic oligonucleotide
ttaaaaaccacatttaacagcggtgatttgataccgatttatgtggatgaggtcctgc

SEQ ID NO: 476235 - DNA, 56 bp, Artificial
  Synthetic oligonucleotide
ttaaaaataatcttattggtaaagcaattactattgatcaagccttgaataacaaa

SEQ ID NO: 476236 - DNA, 56 bp, Artificial
  Synthetic oligonucleotide
ttaaaaatgtatggagcaattctattgtgagttaccttaacaagaaacagaacaat

SEQ ID NO: 476237 - DNA, 56 bp, Artificial
  Synthetic oligonucleotide
ttaaaaattagtttagaaatgagaccaacagttaaacatgaattattcagctcaaa

SEQ ID NO: 476238 - DNA, 60 bp, Artificial
  Synthetic oligonucleotide
ttaaaacacaaaattatggaatcaatttaccaattactggctctatggacacagcatatg

SEQ ID NO: 476239 - DNA, 56 bp, Artificial
  Synthetic oligonucleotide
ttaaaacagaagcacttaagaagttgttactaagcgtccaaagccatacaggacta

SEQ ID NO: 476240 - DNA, 51 bp, Artificial
  Synthetic oligonucleotide
ttaaaacagccgtgtggttgtacccaccaccggacacactgtgtgttgtgc

SEQ ID NO: 476241 - DNA, 52 bp, Artificial
  Synthetic oligonucleotide
ttaaaacagcctgggggttgtacccacccctgggacccacgcggcgccagta

SEQ ID NO: 476242 - DNA, 47 bp, Artificial
  Synthetic oligonucleotide
ttaaaacagcctgtgggttgtgacccacccacagggcccactgggcg

SEQ ID NO: 476243 - DNA, 57 bp, Artificial
  Synthetic oligonucleotide
ttaaaacagcggacgggtatcccaccatccggctcactgagcgtagtactctggtat

SEQ ID NO: 476244 - DNA, 54 bp, Artificial
  Synthetic oligonucleotide
ttaaaacagcggatgggtaccccaccatccgacccactgggtgtagtactctgg

SEQ ID NO: 476245 - DNA, 55 bp, Artificial
  Synthetic oligonucleotide
ttaaaacagctctggggttgttcccactcaagggcccacgtggcggctagtactc

SEQ ID NO: 476246 - DNA, 60 bp, Artificial
  Synthetic oligonucleotide
ttaaaacagctgtgggttgcacccactcacagggcccactgggcgcaagcactctggtac

SEQ ID NO: 476247 - DNA, 55 bp, Artificial
  Synthetic oligonucleotide
ttaaaacagcttgatatgttggaacgacaaataaccacaatgcatgtgtccaacc

SEQ ID NO: 476248 - DNA, 55 bp, Artificial
  Synthetic oligonucleotide
ttaaaacattcaggcaaggtgcatgctcaggcattctttacacaaaacgggagta

SEQ ID NO: 476249 - DNA, 55 bp, Artificial
  Synthetic oligonucleotide
ttaaaaccaggtcagacattgcgagtgaggtccaatgggaatctaattgccccat

SEQ ID NO: 476250 - DNA, 56 bp, Artificial
  Synthetic oligonucleotide
ttaaaaccgagtctagctctgcttctatgatcaaacctaccaactctgttatcaca

SEQ ID NO: 476251 - DNA, 52 bp, Artificial
  Synthetic oligonucleotide
ttaaaacgaaagtacaaaaaaagttctacggaacctacagttgctgctctta

SEQ ID NO: 476252 - DNA, 56 bp, Artificial
  Synthetic oligonucleotide
ttaaaacgacgtggtggaggcatttggagtgtcgttttgtattggagacaatcact

SEQ ID NO: 476253 - DNA, 60 bp, Artificial
  Synthetic oligonucleotide
ttaaaacgtgatggtcatgggattactgtgttacatgacggtatttattgcttgtgccat

SEQ ID NO: 476254 - DNA, 54 bp, Artificial
  Synthetic oligonucleotide
ttaaaacgttggagtctaccagcccgctaaagcaagttgagttctaacaaagcc

SEQ ID NO: 476255 - DNA, 59 bp, Artificial
  Synthetic oligonucleotide
ttaaaactgaatcatggttgttcccaccatgattacccacgcggtgcagtggtcttgta

SEQ ID NO: 476256 - DNA, 54 bp, Artificial
  Synthetic oligonucleotide
ttaaaactgagtgtgggttgtacccacccacactgtctacggacgtagtacact

SEQ ID NO: 476257 - DNA, 56 bp, Artificial
  Synthetic oligonucleotide
ttaaaactggatcatggttgttcccaccatgattacctacgggtgtagtatacttg

SEQ ID NO: 476258 - DNA, 55 bp, Artificial
  Synthetic oligonucleotide
ttaaaactggatccaggttgttcccacctggatctcctacgggagttgtactctg

SEQ ID NO: 476259 - DNA, 57 bp, Artificial
  Synthetic oligonucleotide
ttaaaactggatctaggttgttcccacctagatcacccatgtggagtagtactctat

SEQ ID NO: 476260 - DNA, 56 bp, Artificial
  Synthetic oligonucleotide
ttaaaactggatctgggttgctcccacccagattacccaagtggtgtagtactctg

SEQ ID NO: 476261 - DNA, 54 bp, Artificial
  Synthetic oligonucleotide
ttaaaactgggagtgggttgttcccacccactccacccatgcggtgttgtactc

SEQ ID NO: 476262 - DNA, 54 bp, Artificial
  Synthetic oligonucleotide
ttaaaactgggtctaggttgttcccacctagacctcctacatggagttgtactc

SEQ ID NO: 476263 - DNA, 54 bp, Artificial
  Synthetic oligonucleotide
ttaaaactgggtgtgggttgttcccactcacaccacccaatgggtgttgtactc

SEQ ID NO: 476264 - DNA, 51 bp, Artificial
  Synthetic oligonucleotide
ttaaaagaaccagaaaaacggtgaggtggaatccaattcctcccccgcaaa

SEQ ID NO: 476265 - DNA, 60 bp, Artificial
  Synthetic oligonucleotide
ttaaaagaacgaggggcgtcgctacagcacacagcaccatttggctgccaaatagcaaca

SEQ ID NO: 476266 - DNA, 60 bp, Artificial
  Synthetic oligonucleotide
ttaaaagagcaagagtctgcaactagtcgcgcagagaaagtagtgtctgatgtgtacgag

SEQ ID NO: 476267 - DNA, 60 bp, Artificial
  Synthetic oligonucleotide
ttaaaagcatgctagtgaagatgagttaatggcaatggtgacgcacacataaaataaaaa

SEQ ID NO: 476268 - DNA, 60 bp, Artificial
  Synthetic oligonucleotide
ttaaaagggagtgctactagtctgcttgataccatagcaatagcagtagctgaaagagca

SEQ ID NO: 476269 - DNA, 55 bp, Artificial
  Synthetic oligonucleotide
ttaaaaggttatttaccatttatgccaggtgccatgtgcattactagaataggac

SEQ ID NO: 476270 - DNA, 56 bp, Artificial
  Synthetic oligonucleotide
ttaaaagttcgtgggaaatcaaccagccgactacatgtctggaagcaccaggttta

SEQ ID NO: 476271 - DNA, 54 bp, Artificial
  Synthetic oligonucleotide
ttaaaatagcctcagggttgttcccaccctgagggcccacgtggcgtagtactc

SEQ ID NO: 476272 - DNA, 60 bp, Artificial
  Synthetic oligonucleotide
ttaaaatcccctcgtctgaagagagggagcgcgtgataaggaaatgctgcgaggcctaca

SEQ ID NO: 476273 - DNA, 56 bp, Artificial
  Synthetic oligonucleotide
ttaaaatctataaccaccctcgactttatattaaccctcaacacagtcaagcatgg

SEQ ID NO: 476274 - DNA, 48 bp, Artificial
  Synthetic oligonucleotide
ttaaaatgaaggtaggtaaaacccgggagtcttaattaattccctttc

SEQ ID NO: 476275 - DNA, 55 bp, Artificial
  Synthetic oligonucleotide
ttaaaatggagtgtccacacacaattggtttgggtcagggcctagttattggatc

SEQ ID NO: 476276 - DNA, 58 bp, Artificial
  Synthetic oligonucleotide
ttaaaatgtccatggacagttggcatgactaagttttatgggggctgggataagctaa

SEQ ID NO: 476277 - DNA, 56 bp, Artificial
  Synthetic oligonucleotide
ttaaaattcatgtttttacatcatggcgtgggttacgcaagcgtatagttcgggat

SEQ ID NO: 476278 - DNA, 60 bp, Artificial
  Synthetic oligonucleotide
ttaaaatttcagactcttatgatctatataataagaatggtgtgaagcttgagataacag

SEQ ID NO: 476279 - DNA, 60 bp, Artificial
  Synthetic oligonucleotide
ttaaacaataaattgagacatctacacagagatagcgctctttacgattatgtatcagtt

SEQ ID NO: 476280 - DNA, 57 bp, Artificial
  Synthetic oligonucleotide
ttaaacactgactggagtggctacagtgggtccttcatggactattgggccgagggg

SEQ ID NO: 476281 - DNA, 60 bp, Artificial
  Synthetic oligonucleotide
ttaaacagatctcaaccaatgcatgataatttaatgggaactatgtggcttaatgctgga

SEQ ID NO: 476282 - DNA, 60 bp, Artificial
  Synthetic oligonucleotide
ttaaacagcaacttgggcagtgactgcggttacaccgccttgcaaatgctattcagtgac

SEQ ID NO: 476283 - DNA, 52 bp, Artificial
  Synthetic oligonucleotide
ttaaacaggacccttatgacaaactaaagttttggcctgtagaccttaagga

SEQ ID NO: 476284 - DNA, 56 bp, Artificial
  Synthetic oligonucleotide
ttaaacaggcaggaaatagaatcggtaaagctagaaaatcttggtgtgtatcaaat

SEQ ID NO: 476285 - DNA, 59 bp, Artificial
  Synthetic oligonucleotide
ttaaacaggtgcaagactctctttggggatctgaatccccatttggagaaacagcgagc

SEQ ID NO: 476286 - DNA, 52 bp, Artificial
  Synthetic oligonucleotide
ttaaacatcgacggcgcttcatcgcgtttcaccattcctaagccgacccaga

SEQ ID NO: 476287 - DNA, 60 bp, Artificial
  Synthetic oligonucleotide
ttaaacatggtccgtgcatcaagacaaaagcgtgcctctgaggatgatttgtataggggg

SEQ ID NO: 476288 - DNA, 55 bp, Artificial
  Synthetic oligonucleotide
ttaaacatgtaccactcttagatgccattcttctacatccggagtaaaagtcccg

SEQ ID NO: 476289 - DNA, 56 bp, Artificial
  Synthetic oligonucleotide
ttaaacattggcctttcaacacctttatggataactttctctacaaatgaagagaa

SEQ ID NO: 476290 - DNA, 57 bp, Artificial
  Synthetic oligonucleotide
ttaaaccaacgagcacctgatacagctaggtgagtacacggtggatgtgcgatcata

SEQ ID NO: 476291 - DNA, 60 bp, Artificial
  Synthetic oligonucleotide
ttaaaccaaggccattggcatctctcttgcgacttgaaccatctgacaccaagacacgca

SEQ ID NO: 476292 - DNA, 60 bp, Artificial
  Synthetic oligonucleotide
ttaaaccaatctccggcagtcagtacctccaggtaactgatgctgagaaacaactggtgc

SEQ ID NO: 476293 - DNA, 57 bp, Artificial
  Synthetic oligonucleotide
ttaaaccaggggacatcctgataatcaacagtaatggaaacctaattgctcctcgag

SEQ ID NO: 476294 - DNA, 57 bp, Artificial
  Synthetic oligonucleotide
ttaaacccaccctccacgggccgacacccctgctatacagactgggtgctgttcaga

SEQ ID NO: 476295 - DNA, 52 bp, Artificial
  Synthetic oligonucleotide
ttaaaccccagacctgacgctctgaaccttcgggtttccccactcgaccaac

SEQ ID NO: 476296 - DNA, 56 bp, Artificial
  Synthetic oligonucleotide
ttaaacccggttaaccatggattagcattggttgtgagagatggagacggctcctt

SEQ ID NO: 476297 - DNA, 54 bp, Artificial
  Synthetic oligonucleotide
ttaaaccctgtgtaaaattaacaccattttgtgtaaccatgaagtgtactgtag

SEQ ID NO: 476298 - DNA, 55 bp, Artificial
  Synthetic oligonucleotide
ttaaaccgtaagtaaattatcaatcttcggacatatgtaagcgtgggacacgtca

SEQ ID NO: 476299 - DNA, 54 bp, Artificial
  Synthetic oligonucleotide
ttaaacctaggtcaaaggaaatacacaaagaccacatactggtgggacggtcta

SEQ ID NO: 476300 - DNA, 57 bp, Artificial
  Synthetic oligonucleotide
ttaaacctagtgccgttattctacatcctagtgcttataattgtccccgcggtcata

SEQ ID NO: 476301 - DNA, 53 bp, Artificial
  Synthetic oligonucleotide
ttaaacctcctatacctcaagttttacgtcattggtttggacgtaaattgcaa

SEQ ID NO: 476302 - DNA, 57 bp, Artificial
  Synthetic oligonucleotide
ttaaacctgacttctcacacataaaactgacattagccccgcaaggaggttttgaca

SEQ ID NO: 476303 - DNA, 55 bp, Artificial
  Synthetic oligonucleotide
ttaaacctggggtcctcaatcctactggcaagctatggcgacccgtcggtacttc

SEQ ID NO: 476304 - DNA, 59 bp, Artificial
  Synthetic oligonucleotide
ttaaacgagtgcggggttctagtgcagctcgactagaaccctgtaatggtactgatcca

SEQ ID NO: 476305 - DNA, 60 bp, Artificial
  Synthetic oligonucleotide
ttaaacgatgctcctggggttctagatgttgcactagtgaatccaataactagggatcga

SEQ ID NO: 476306 - DNA, 55 bp, Artificial
  Synthetic oligonucleotide
ttaaacgctcagattctgcggtctgagtcccttctctgctgggctaaactttagc

SEQ ID NO: 476307 - DNA, 59 bp, Artificial
  Synthetic oligonucleotide
ttaaacgctgcagtcatacgggtacgaccgttcgtgtccattgcatattcccaatggat

SEQ ID NO: 476308 - DNA, 60 bp, Artificial
  Synthetic oligonucleotide
ttaaacggaatggtgtcaaacgtcgagattgtcatgtgttcaaggtgcatgatgagacga

SEQ ID NO: 476309 - DNA, 55 bp, Artificial
  Synthetic oligonucleotide
ttaaacgggatatcatctacgatgttgtagattgcgtcttcgttgtatgaagacc

SEQ ID NO: 476310 - DNA, 51 bp, Artificial
  Synthetic oligonucleotide
ttaaacgtattactgggtacgggttcgcatttatctgcggaagagacggtg

SEQ ID NO: 476311 - DNA, 55 bp, Artificial
  Synthetic oligonucleotide
ttaaacgtgcgacctcgccatattcggcgctataagtaattacgtttgcactgcg

SEQ ID NO: 476312 - DNA, 59 bp, Artificial
  Synthetic oligonucleotide
ttaaacgtgttggatcgctgctcctgagtggaaaaaatcgcgtagaaggctgcgaacta

SEQ ID NO: 476313 - DNA, 53 bp, Artificial
  Synthetic oligonucleotide
ttaaacgtttggttagtgatctgttgatgggagcacagagtcaaattatcgat

SEQ ID NO: 476314 - DNA, 54 bp, Artificial
  Synthetic oligonucleotide
ttaaactaaagaagggaatagaacttgaaatagacgctgtagctaaagatttcg

SEQ ID NO: 476315 - DNA, 52 bp, Artificial
  Synthetic oligonucleotide
ttaaactatcttatcccaggttatgagaccagggattttatattagaggtgc

SEQ ID NO: 476316 - DNA, 60 bp, Artificial
  Synthetic oligonucleotide
ttaaactcaaggagcacgtccctttcgatgacgtgcattgcagttggcctagtaacacta

SEQ ID NO: 476317 - DNA, 60 bp, Artificial
  Synthetic oligonucleotide
ttaaactcgagatggatgacctggcacataacgcagctgagctggacaagatacagatga

SEQ ID NO: 476318 - DNA, 54 bp, Artificial
  Synthetic oligonucleotide
ttaaactgacttccatggtgggcgcctcagctgttaacgggactgtactccgca

SEQ ID NO: 476319 - DNA, 51 bp, Artificial
  Synthetic oligonucleotide
ttaaactgctcctggatcagattatcaagatggctaaggctgagagctcag

SEQ ID NO: 476320 - DNA, 59 bp, Artificial
  Synthetic oligonucleotide
ttaaactggcccatcatcgaagtttatctttaaaacgacagcgcttcgttatatgatgc

SEQ ID NO: 476321 - DNA, 53 bp, Artificial
  Synthetic oligonucleotide
ttaaacttaatcatgcctgctaggttctatcctaaccttactaaatatttgcc

SEQ ID NO: 476322 - DNA, 58 bp, Artificial
  Synthetic oligonucleotide
ttaaacttagcaagtttaaggaatgttcttagcaggacatatgccacatttgggagga

SEQ ID NO: 476323 - DNA, 60 bp, Artificial
  Synthetic oligonucleotide
ttaaagaacttgttgctgaactgaggtggcaatataatagatttgctataataacacatg

SEQ ID NO: 476324 - DNA, 60 bp, Artificial
  Synthetic oligonucleotide
ttaaagaagagggaaatccctatatgtgctggtggttggatgcatgcccctattgaacta

SEQ ID NO: 476325 - DNA, 50 bp, Artificial
  Synthetic oligonucleotide
ttaaagaagctatagcagttgttggtcgtcagccagtatgtgtgcggaga

SEQ ID NO: 476326 - DNA, 60 bp, Artificial
  Synthetic oligonucleotide
ttaaagaatgaatatgtggttgcactatatgcgctgtctaacgacttcaataatagagaa

SEQ ID NO: 476327 - DNA, 51 bp, Artificial
  Synthetic oligonucleotide
ttaaagacgaagtctttgcgacaagggggggcccacgccgaatttaatatt

SEQ ID NO: 476328 - DNA, 58 bp, Artificial
  Synthetic oligonucleotide
ttaaagacgccacggctagtcagaggctcagggcagtgaacgccatcctaaaccacat

SEQ ID NO: 476329 - DNA, 60 bp, Artificial
  Synthetic oligonucleotide
ttaaagactgattttagtggtggccgtatacatcatgaactgtcatattgcgatattcac

SEQ ID NO: 476330 - DNA, 55 bp, Artificial
  Synthetic oligonucleotide
ttaaagagtacaggcagaaaattgatgcactaaaggccgccatcgaaatcgaacg

SEQ ID NO: 476331 - DNA, 58 bp, Artificial
  Synthetic oligonucleotide
ttaaagagttacatataaactaacacagccacggataaatcgtattaagctatgataa

SEQ ID NO: 476332 - DNA, 57 bp, Artificial
  Synthetic oligonucleotide
ttaaagatacgtacgtattaagagtacattcacaacgcgagaatgttgaggagcctt

SEQ ID NO: 476333 - DNA, 56 bp, Artificial
  Synthetic oligonucleotide
ttaaagatctcaggttgtaaaaaagccttcgtctttggtgatgctaagcaaatccc

SEQ ID NO: 476334 - DNA, 58 bp, Artificial
  Synthetic oligonucleotide
ttaaagcacctagcccgagagaaacatccggagttctacaaagactaaagactgctga

SEQ ID NO: 476335 - DNA, 50 bp, Artificial
  Synthetic oligonucleotide
ttaaagcatgtgtgagagcaatagtgtatctaaagttagcaaggtcctcg

SEQ ID NO: 476336 - DNA, 58 bp, Artificial
  Synthetic oligonucleotide
ttaaagccatgtgtacaattaaccccactctgtgtcactttagattgtactaactata

SEQ ID NO: 476337 - DNA, 54 bp, Artificial
  Synthetic oligonucleotide
ttaaagcggagaagattaataccactaagaaacctgacccagctccgcgggtta

SEQ ID NO: 476338 - DNA, 58 bp, Artificial
  Synthetic oligonucleotide
ttaaagctagagctccaccgggtgaacaattcacacacctagtacctttgatgcgtaa

SEQ ID NO: 476339 - DNA, 59 bp, Artificial
  Synthetic oligonucleotide
ttaaaggaaggtggtgaagctcaaatgtcaaatgagaacttgaatgccgactccatgtt

SEQ ID NO: 476340 - DNA, 50 bp, Artificial
  Synthetic oligonucleotide
ttaaaggagtcaactacattgctgatcgtgatgtgataactactgggggt

SEQ ID NO: 476341 - DNA, 55 bp, Artificial
  Synthetic oligonucleotide
ttaaaggatggtaaccacaagctttgtcgcctctcccggcgttacagggatgtaa

SEQ ID NO: 476342 - DNA, 58 bp, Artificial
  Synthetic oligonucleotide
ttaaaggatttttgatgcatttaggtgagaatccaaattcttatgatcgtcaactaac

SEQ ID NO: 476343 - DNA, 60 bp, Artificial
  Synthetic oligonucleotide
ttaaaggcagtctctggcgctttgtccaatcataatgcgcctgacgagtcaatataattt

SEQ ID NO: 476344 - DNA, 54 bp, Artificial
  Synthetic oligonucleotide
ttaaaggcgagaaaaatgaatgaaaatatgcattctcttcagaatgtcatctct

SEQ ID NO: 476345 - DNA, 59 bp, Artificial
  Synthetic oligonucleotide
ttaaaggcgagccagttgtaagcactgaagttattgcggctgagtttggtcgccgtcac

SEQ ID NO: 476346 - DNA, 60 bp, Artificial
  Synthetic oligonucleotide
ttaaagggatcagccagacatattgaggaatgctcctgttacggacacagtcaaaaggtg

SEQ ID NO: 476347 - DNA, 55 bp, Artificial
  Synthetic oligonucleotide
ttaaagggatcgtgaatcaatggtacgatgttactgaattagactacttgcctct

SEQ ID NO: 476348 - DNA, 52 bp, Artificial
  Synthetic oligonucleotide
ttaaaggggaaattcctattttgccctttaatgaacgcgttcagtacgcctg

SEQ ID NO: 476349 - DNA, 59 bp, Artificial
  Synthetic oligonucleotide
ttaaaggggacgatgatgtttgatggggcgatgttatttgacgattcaggcttcatccc

SEQ ID NO: 476350 - DNA, 51 bp, Artificial
  Synthetic oligonucleotide
ttaaaggtagacggagttgctgcctggattcacgcctctcacgtgaaagct

SEQ ID NO: 476351 - DNA, 50 bp, Artificial
  Synthetic oligonucleotide
ttaaaggttacgcatctacacctgctctagacttacagggagaaatggtt

SEQ ID NO: 476352 - DNA, 56 bp, Artificial
  Synthetic oligonucleotide
ttaaagtaacgcaattgtgtaaactccttaggggagccaaagcactaacagacata

SEQ ID NO: 476353 - DNA, 58 bp, Artificial
  Synthetic oligonucleotide
ttaaagtaccacatcttacatttggcgtattaaatatttcagattctatggtgccgga

SEQ ID NO: 476354 - DNA, 60 bp, Artificial
  Synthetic oligonucleotide
ttaaagtaccacatcttacatttggcgtattaaatatttctgaacagatgctgtcagata

SEQ ID NO: 476355 - DNA, 57 bp, Artificial
  Synthetic oligonucleotide
ttaaagtatttgactcggaggacttcattattgagtacggaacaactgatgacgaag

SEQ ID NO: 476356 - DNA, 50 bp, Artificial
  Synthetic oligonucleotide
ttaaagtgagttcccaatgatagtacacaatgcagcagtgaccgttgctt

SEQ ID NO: 476357 - DNA, 55 bp, Artificial
  Synthetic oligonucleotide
ttaaagtgcttctctagagtctcacacacgttaactaattggttgtacatgcctt

SEQ ID NO: 476358 - DNA, 58 bp, Artificial
  Synthetic oligonucleotide
ttaaagtgctttaggtaatgcgggtctacgtcatcaatgacgttataccacgcctcat

SEQ ID NO: 476359 - DNA, 57 bp, Artificial
  Synthetic oligonucleotide
ttaaagtggtcccccccactcagtaatgtccaatcatgaccgcgcctcaaagcttaa

SEQ ID NO: 476360 - DNA, 60 bp, Artificial
  Synthetic oligonucleotide
ttaaagtgtgtgtccatacatcgagaaatgtgtaatgacgtggagcgttctccaccattc

SEQ ID NO: 476361 - DNA, 57 bp, Artificial
  Synthetic oligonucleotide
ttaaagttagagcggccagattcaaagctcatttgcctaaattacgattaattcgta

SEQ ID NO: 476362 - DNA, 56 bp, Artificial
  Synthetic oligonucleotide
ttaaagttgagtaccagaaaacaatgggttcaatggtatgtgatgtgtgtcaccat

SEQ ID NO: 476363 - DNA, 55 bp, Artificial
  Synthetic oligonucleotide
ttaaataagagctttgacactattgattcagacggtgctacgcttgaccttccgg

SEQ ID NO: 476364 - DNA, 59 bp, Artificial
  Synthetic oligonucleotide
ttaaataattgtctacggaagatcgataagatcatcccagaagtcgccgtcaaataatg

SEQ ID NO: 476365 - DNA, 60 bp, Artificial
  Synthetic oligonucleotide
ttaaatacaagtgattcacaactatttaacagaccatattggcttcgcagagctcagggc

SEQ ID NO: 476366 - DNA, 53 bp, Artificial
  Synthetic oligonucleotide
ttaaataccaccaaggggccatccgcattaatattaccggatggcccccaaaa

SEQ ID NO: 476367 - DNA, 56 bp, Artificial
  Synthetic oligonucleotide
ttaaatacccttaagaaacgaccagtcggaggctgtgaggtcatccagagtcggta

SEQ ID NO: 476368 - DNA, 60 bp, Artificial
  Synthetic oligonucleotide
ttaaatacgagctcatacgagcatcttgtgcgaagtaaaggacaccagtattgcgcctct

SEQ ID NO: 476369 - DNA, 58 bp, Artificial
  Synthetic oligonucleotide
ttaaatagccctacgattcattggcattcatgcgttgtttaagttgaatttctttgag

SEQ ID NO: 476370 - DNA, 56 bp, Artificial
  Synthetic oligonucleotide
ttaaatatcaccgaacacgtcagcgaacagtacgttaaaggcatcgtttgtaacta

SEQ ID NO: 476371 - DNA, 55 bp, Artificial
  Synthetic oligonucleotide
ttaaatatctgggaagccttgttcagtattggtgtttggagctaaaaaagagtac

SEQ ID NO: 476372 - DNA, 55 bp, Artificial
  Synthetic oligonucleotide
ttaaatcaagctctataatcctggaaactgcgatttaccatatggtagagcccgg

SEQ ID NO: 476373 - DNA, 60 bp, Artificial
  Synthetic oligonucleotide
ttaaatcagtctctcgttgtcaatgagggtgatctgggagtaacacccagttatactgtg

SEQ ID NO: 476374 - DNA, 59 bp, Artificial
  Synthetic oligonucleotide
ttaaatcgtcccgatttagcaagccatggctctttatccgtctcaagatgtcttggccc

SEQ ID NO: 476375 - DNA, 59 bp, Artificial
  Synthetic oligonucleotide
ttaaatctattggttatcacaaactggcagcaaatagggaaattatcgagtcaagtatg

SEQ ID NO: 476376 - DNA, 60 bp, Artificial
  Synthetic oligonucleotide
ttaaatctcagctatgcacaaagaaggagaagatgttttgcgacgctaaagctggtcaga

SEQ ID NO: 476377 - DNA, 60 bp, Artificial
  Synthetic oligonucleotide
ttaaatgaacatggtattagtatactcccagctaacgcatcacaatatgtcaaaagatca

SEQ ID NO: 476378 - DNA, 60 bp, Artificial
  Synthetic oligonucleotide
ttaaatgcagaaggccaatatatgataatgactgtatcattgaagcatatctcgacaaaa

SEQ ID NO: 476379 - DNA, 55 bp, Artificial
  Synthetic oligonucleotide
ttaaatgctgtcatgggaaagaatgttcatcaactggcctccaagccagtgcacc

SEQ ID NO: 476380 - DNA, 55 bp, Artificial
  Synthetic oligonucleotide
ttaaatggagttcttatggagcgttggattcttggtgagttcacagctcgtgcac

SEQ ID NO: 476381 - DNA, 59 bp, Artificial
  Synthetic oligonucleotide
ttaaatggcagtttgaaactattctcatcatttggcgattattccagtagactagtacg

SEQ ID NO: 476382 - DNA, 55 bp, Artificial
  Synthetic oligonucleotide
ttaaatggcctcacggccaatgaatctgggaggctcatagacttcctcaaggatg

SEQ ID NO: 476383 - DNA, 60 bp, Artificial
  Synthetic oligonucleotide
ttaaatggtaaacgagctagaacagactatacagctgcaggatctagtaccagatctaca

SEQ ID NO: 476384 - DNA, 55 bp, Artificial
  Synthetic oligonucleotide
ttaaatggtagcctagcagaagaggagataataattagatctgaaaatatagaag

SEQ ID NO: 476385 - DNA, 57 bp, Artificial
  Synthetic oligonucleotide
ttaaatggtagcctagcagaaggggatataataattagatctgaaaatttgacagac

SEQ ID NO: 476386 - DNA, 60 bp, Artificial
  Synthetic oligonucleotide
ttaaatggtgtgtacaccaacccaacagctagtgagtttatggatgggtatgataatcag

SEQ ID NO: 476387 - DNA, 60 bp, Artificial
  Synthetic oligonucleotide
ttaaattcaaggagcgcgtccctttcgatgacgtgcattgcagttggcatggttacactg

SEQ ID NO: 476388 - DNA, 56 bp, Artificial
  Synthetic oligonucleotide
ttaaattccgcattgagatcgttaagtttgacgactaacttgtctaactcttcgtg

SEQ ID NO: 476389 - DNA, 54 bp, Artificial
  Synthetic oligonucleotide
ttaaattggtcaggatacagtggttctttcacactaccggtggagttaacaaaa

SEQ ID NO: 476390 - DNA, 55 bp, Artificial
  Synthetic oligonucleotide
ttaaattggtgctatacacaaatggtcggtcttgaattcgacagtttcatgtgtg

SEQ ID NO: 476391 - DNA, 56 bp, Artificial
  Synthetic oligonucleotide
ttaaatttaatagtataccttatgaatacgatgttaaagttccacatttgacacta

SEQ ID NO: 476392 - DNA, 59 bp, Artificial
  Synthetic oligonucleotide
ttaaatttgtaacttaaggcgattcacttggcccgatcatgagataccaatggtgttca

SEQ ID NO: 476393 - DNA, 57 bp, Artificial
  Synthetic oligonucleotide
ttaacaaacgcggtcactatccgcgaacctaacgtagatgtcgagggaacagcacaa

SEQ ID NO: 476394 - DNA, 60 bp, Artificial
  Synthetic oligonucleotide
ttaacaacatcttgcaggacaccaaagatgggatagtctctgttgctttgactcacacct

SEQ ID NO: 476395 - DNA, 57 bp, Artificial
  Synthetic oligonucleotide
ttaacaacatgcaacaagatatgtccactaaacacggacccgacttcaaccgtctgg

SEQ ID NO: 476396 - DNA, 57 bp, Artificial
  Synthetic oligonucleotide
ttaacaaccgaacccttatttacaaaaatgtctcgagaggatccatcagttgcgata

SEQ ID NO: 476397 - DNA, 56 bp, Artificial
  Synthetic oligonucleotide
ttaacaacctcctacagatgatgtacaccaaccgtggcctagggtccgctaaggac

SEQ ID NO: 476398 - DNA, 56 bp, Artificial
  Synthetic oligonucleotide
ttaacaacctctcgaacaaagctctacccgcacgttcctggtacattacaaagcca

SEQ ID NO: 476399 - DNA, 50 bp, Artificial
  Synthetic oligonucleotide
ttaacaacgtggccgtcacccttaaacgagccctcggggcccggtccaaa

SEQ ID NO: 476400 - DNA, 55 bp, Artificial
  Synthetic oligonucleotide
ttaacaactggtcgtacgtttgtagcccatattcatcaggctgggtactgtaatc

SEQ ID NO: 476401 - DNA, 58 bp, Artificial
  Synthetic oligonucleotide
ttaacaagaatgctattcttgttagttatgtatgggtgtcgatgtcacgtagcaagtg

SEQ ID NO: 476402 - DNA, 57 bp, Artificial
  Synthetic oligonucleotide
ttaacaataaggggaaggaagtcctcgtgctatggggcattcaccatccacctacca

SEQ ID NO: 476403 - DNA, 58 bp, Artificial
  Synthetic oligonucleotide
ttaacaatacaatctgaaacgcagtttctagccggtataaattcacaagcagcgaatg

SEQ ID NO: 476404 - DNA, 59 bp, Artificial
  Synthetic oligonucleotide
ttaacaatcttgttgagctgaaatcaactcaacaaaagagtgtgctgagagttgggaca

SEQ ID NO: 476405 - DNA, 57 bp, Artificial
  Synthetic oligonucleotide
ttaacaatgcaggctgaaacggcggaccacacgatcgcactctcagttatacatgga

SEQ ID NO: 476406 - DNA, 57 bp, Artificial
  Synthetic oligonucleotide
ttaacaattttactactgtcgacgctcgcggatgtttgttcggtgttgaggcctgag

SEQ ID NO: 476407 - DNA, 55 bp, Artificial
  Synthetic oligonucleotide
ttaacacaatggtagaaagtagcccatatgtaccaaaatactcacaaactaaaaa

SEQ ID NO: 476408 - DNA, 59 bp, Artificial
  Synthetic oligonucleotide
ttaacacagccaaacatgggttcacaagtgtctacacagcgctccggttctcacgaaaa

SEQ ID NO: 476409 - DNA, 58 bp, Artificial
  Synthetic oligonucleotide
ttaacacagttacgagatgtcatcaagtctagttacccgcgtttcaagcacgcagttc

SEQ ID NO: 476410 - DNA, 59 bp, Artificial
  Synthetic oligonucleotide
ttaacacatgtcactgcagccaaaaccttaacaggcaatactggtcgacttggggtgag

SEQ ID NO: 476411 - DNA, 51 bp, Artificial
  Synthetic oligonucleotide
ttaacaccagtgcagggttcccatacgtaaccatgggtgttaagaaaaggg

SEQ ID NO: 476412 - DNA, 53 bp, Artificial
  Synthetic oligonucleotide
ttaacacccctaccaaaacaaagctccaccccagtgtgttttatgaggtattc

SEQ ID NO: 476413 - DNA, 59 bp, Artificial
  Synthetic oligonucleotide
ttaacacccggccgcacttaagcctagccagtgtatgtgcgcgatggatacccgtgtaa

SEQ ID NO: 476414 - DNA, 50 bp, Artificial
  Synthetic oligonucleotide
ttaacaccttgcttcctggatgggtttatcactgcataattaatacaacg

SEQ ID NO: 476415 - DNA, 52 bp, Artificial
  Synthetic oligonucleotide
ttaacacgatccgctacgaatgagttaacggtgattgaatagtcagccacga

SEQ ID NO: 476416 - DNA, 50 bp, Artificial
  Synthetic oligonucleotide
ttaacacgtcttcacagggaaacgggttgagggaagaatctcatattaga

SEQ ID NO: 476417 - DNA, 60 bp, Artificial
  Synthetic oligonucleotide
ttaacactcgcgtccgttccatctctgaaacagatgtaaagattggtaccttcgctgcta

SEQ ID NO: 476418 - DNA, 60 bp, Artificial
  Synthetic oligonucleotide
ttaacagaagggctaggtgaagatttaatggaagtcattgtcgacaaaactcatcagaca

SEQ ID NO: 476419 - DNA, 55 bp, Artificial
  Synthetic oligonucleotide
ttaacagctttgggttcttgatgtcccaaactttgacaacaccgttttgattggc

SEQ ID NO: 476420 - DNA, 57 bp, Artificial
  Synthetic oligonucleotide
ttaacaggaatgaactgcataaggccttgtttttgggtagagttaatcagaggacaa

SEQ ID NO: 476421 - DNA, 60 bp, Artificial
  Synthetic oligonucleotide
ttaacaggcctatgtataggaagcccagaatctaccgcacgttaaggacgcatgacattc

SEQ ID NO: 476422 - DNA, 53 bp, Artificial
  Synthetic oligonucleotide
ttaacaggctcgttcacaagcctccttttacattaagtttaaaggtttatgtg

SEQ ID NO: 476423 - DNA, 54 bp, Artificial
  Synthetic oligonucleotide
ttaacagggttcctaaggacttacctgctggtgtgtccgtgaggtttccaggcc

SEQ ID NO: 476424 - DNA, 56 bp, Artificial
  Synthetic oligonucleotide
ttaacaggtcctgccaatactttaaaatgctacagaaatcgctttaaaagcaaata

SEQ ID NO: 476425 - DNA, 58 bp, Artificial
  Synthetic oligonucleotide
ttaacagtagatgaaccatctttctcaataatacgaacacgcacagtaaacttgtacg

SEQ ID NO: 476426 - DNA, 60 bp, Artificial
  Synthetic oligonucleotide
ttaacagtgcaatcaaattatccaatgactacgcgcagatattagaccagttcgacctaa

SEQ ID NO: 476427 - DNA, 54 bp, Artificial
  Synthetic oligonucleotide
ttaacagttcatttgcgtacatgtttatccctcctttttttctatcttagctct

SEQ ID NO: 476428 - DNA, 59 bp, Artificial
  Synthetic oligonucleotide
ttaacataatagatataaactgctgtggacgtgcttttggcaaagctcctttagaccaa

SEQ ID NO: 476429 - DNA, 60 bp, Artificial
  Synthetic oligonucleotide
ttaacatagagaggagcctctcatattcagtgctagtctcacttcccctttcgtgcccat

SEQ ID NO: 476430 - DNA, 59 bp, Artificial
  Synthetic oligonucleotide
ttaacatcgcttctttgtatgtacgtgaaaatttcgaaatttgcacagatcaattggac

SEQ ID NO: 476431 - DNA, 60 bp, Artificial
  Synthetic oligonucleotide
ttaacatctgtctgccaggtctgagggcccctctcctggacaagttgtatgatcctctgg

SEQ ID NO: 476432 - DNA, 56 bp, Artificial
  Synthetic oligonucleotide
ttaacatgaccggttctaacgcttccgctgtctatagtgcggcgctttttgaaggg

SEQ ID NO: 476433 - DNA, 60 bp, Artificial
  Synthetic oligonucleotide
ttaacatgcagcctcctacgtcctcgattcttgaggatacttacagatatcttgaatcac

SEQ ID NO: 476434 - DNA, 58 bp, Artificial
  Synthetic oligonucleotide
ttaacattgtcgggaaataaccttgccattcgactgccaggaaacacaggtctgaata

SEQ ID NO: 476435 - DNA, 57 bp, Artificial
  Synthetic oligonucleotide
ttaacatttctgttaaggctgatggtaaggctattgatggggcttataagtataagg

SEQ ID NO: 476436 - DNA, 60 bp, Artificial
  Synthetic oligonucleotide
ttaaccaatacagggtctgcattattgccaactggagaactggtcagataccgcaccaaa

SEQ ID NO: 476437 - DNA, 60 bp, Artificial
  Synthetic oligonucleotide
ttaaccaatcctgctcctcaagagattcctcagccccagtggactcccgaagaagatcag

SEQ ID NO: 476438 - DNA, 52 bp, Artificial
  Synthetic oligonucleotide
ttaaccacaaggttaatttggagaccccaataggtaaatgggacaccaatac

SEQ ID NO: 476439 - DNA, 54 bp, Artificial
  Synthetic oligonucleotide
ttaaccacccaacctttgtgggtagtgaacgctgtagacctgggtacacgttca

SEQ ID NO: 476440 - DNA, 58 bp, Artificial
  Synthetic oligonucleotide
ttaaccacttcatgggcgtcaaaccttacgacatagtgcacttttgtgacactcgctt

SEQ ID NO: 476441 - DNA, 54 bp, Artificial
  Synthetic oligonucleotide
ttaaccagatgcaagaggacatgtcaacaaaacacggacccgactttaaccggt

SEQ ID NO: 476442 - DNA, 60 bp, Artificial
  Synthetic oligonucleotide
ttaaccagctgagaagattccattgaaaattatgggagcgcagcgacaacgacgaggtta

SEQ ID NO: 476443 - DNA, 55 bp, Artificial
  Synthetic oligonucleotide
ttaaccaggatattgcagacttagcccaagcagctccaaatgaggattttagaga

SEQ ID NO: 476444 - DNA, 51 bp, Artificial
  Synthetic oligonucleotide
ttaaccagtactaaccctaaatccaagcatgaaataatcttaccaagtatc

SEQ ID NO: 476445 - DNA, 52 bp, Artificial
  Synthetic oligonucleotide
ttaaccatagagagatagctgatcttaaccagctaacttctcggcttattac

SEQ ID NO: 476446 - DNA, 55 bp, Artificial
  Synthetic oligonucleotide
ttaaccatctgagggccgagagcctcctgaacgcgccatcgagcgcttgcccgga

SEQ ID NO: 476447 - DNA, 51 bp, Artificial
  Synthetic oligonucleotide
ttaacccacagcaaattatcccgattatacgtataagagacggtgccctgc

SEQ ID NO: 476448 - DNA, 58 bp, Artificial
  Synthetic oligonucleotide
ttaacccatgggctattcctcgatacggttcaaccctgactgaggctgcccagttggc

SEQ ID NO: 476449 - DNA, 54 bp, Artificial
  Synthetic oligonucleotide
ttaacccctctctgtgttactttagagtgtcactataatatcactgtcaagaat

SEQ ID NO: 476450 - DNA, 59 bp, Artificial
  Synthetic oligonucleotide
ttaacccgatctggtggtcaacaaacatcattagcaaattctgtagtaggtcaagcaac

SEQ ID NO: 476451 - DNA, 52 bp, Artificial
  Synthetic oligonucleotide
ttaaccctaccgcatgaaccgaacttgacaaaagtgcggtaggggtaaattc

SEQ ID NO: 476452 - DNA, 52 bp, Artificial
  Synthetic oligonucleotide
ttaaccgaatcggctcaacccttatccgcgatctttcgtggaagaaccccct

SEQ ID NO: 476453 - DNA, 55 bp, Artificial
  Synthetic oligonucleotide
ttaaccgcgtgaccgagggcgagcgagaggtgcggtacatgcgcatttcgcgtca

SEQ ID NO: 476454 - DNA, 54 bp, Artificial
  Synthetic oligonucleotide
ttaaccggagtctggttatttacggggtccgagagacggacagcggcctgtata

SEQ ID NO: 476455 - DNA, 59 bp, Artificial
  Synthetic oligonucleotide
ttaaccggcaattcatctctttgtcccatccgtgggtgggctatacacagcaaagacaa

SEQ ID NO: 476456 - DNA, 60 bp, Artificial
  Synthetic oligonucleotide
ttaaccggcatgtagctatatcaagctgcccagactctataagtaaggatgtgcagaggc

SEQ ID NO: 476457 - DNA, 60 bp, Artificial
  Synthetic oligonucleotide
ttaaccggggatcctatgcagagtgcctaccatgaaactaacagggatgcctacatctct

SEQ ID NO: 476458 - DNA, 55 bp, Artificial
  Synthetic oligonucleotide
ttaaccgtcggtgctcggaaaggaatgtcgacggaatgtttcgccgttgacagct

SEQ ID NO: 476459 - DNA, 54 bp, Artificial
  Synthetic oligonucleotide
ttaaccgtgaattcacgtataacggtgaacctgtcagcgactttgttcgtaacg

SEQ ID NO: 476460 - DNA, 60 bp, Artificial
  Synthetic oligonucleotide
ttaaccgtgtgcagagattccgtggtgctgaacagcaaatcaaattcatttgtcagaggg

SEQ ID NO: 476461 - DNA, 54 bp, Artificial
  Synthetic oligonucleotide
ttaacctcgagcaaacgggtagcatgatttttgacgtgaacatagcgggtaaag

SEQ ID NO: 476462 - DNA, 55 bp, Artificial
  Synthetic oligonucleotide
ttaacctctaataccgcaaaaaagatctatagtacaatcggaaaagcggcggagc

SEQ ID NO: 476463 - DNA, 55 bp, Artificial
  Synthetic oligonucleotide
ttaacctctactttattgaaacccgcaccttcatgtataaacaccgtcatgaaac

SEQ ID NO: 476464 - DNA, 56 bp, Artificial
  Synthetic oligonucleotide
ttaacctctttgacttagaaggagagcctgcaacgaaggtatttcactgggagtac

SEQ ID NO: 476465 - DNA, 60 bp, Artificial
  Synthetic oligonucleotide
ttaacctgcgcgcacttatggaggcgaatgttactgccgatgataggatacgagcattac

SEQ ID NO: 476466 - DNA, 59 bp, Artificial
  Synthetic oligonucleotide
ttaacctggcgaataatgctcggatacagagacgtcaagtcaaaactcataatgtatcg

SEQ ID NO: 476467 - DNA, 54 bp, Artificial
  Synthetic oligonucleotide
ttaaccttcatgcagggtcccaaaaagttcatgagaatggtggaggcaaacctg

SEQ ID NO: 476468 - DNA, 55 bp, Artificial
  Synthetic oligonucleotide
ttaaccttgaaggaaggttggtggtatacagctggagggaaagcgacagatatgc

SEQ ID NO: 476469 - DNA, 54 bp, Artificial
  Synthetic oligonucleotide
ttaacgaaccccaatcctcaagagattccccaacctgtattcttggccgaagac

SEQ ID NO: 476470 - DNA, 55 bp, Artificial
  Synthetic oligonucleotide
ttaacgacatatgcaagacgttactcgctttcggcagcgtttggaattgcagcag

SEQ ID NO: 476471 - DNA, 58 bp, Artificial
  Synthetic oligonucleotide
ttaacgacctcactaagttatttggtgagtgatgactattaagattcgaatctgaaag

SEQ ID NO: 476472 - DNA, 55 bp, Artificial
  Synthetic oligonucleotide
ttaacgatctaaaccttgacgccgctatgggcgctttatacacaggaaagaagtc

SEQ ID NO: 476473 - DNA, 60 bp, Artificial
  Synthetic oligonucleotide
ttaacgatgatgcttcggctattgctgtaccgaccgctcgcgtcgaggatatgcttcagg

SEQ ID NO: 476474 - DNA, 60 bp, Artificial
  Synthetic oligonucleotide
ttaacgatgcaccctgtttggggtatgatcataagtattcgacacttatgcaatacttga

SEQ ID NO: 476475 - DNA, 60 bp, Artificial
  Synthetic oligonucleotide
ttaacgcacgtgtcgacaattggtaggttaacgatggtgtaatgctcttgatagatcatc

SEQ ID NO: 476476 - DNA, 55 bp, Artificial
  Synthetic oligonucleotide
ttaacgcactctcgcaagaaatagcgttatcgcaactgatcgatctagcgactct

SEQ ID NO: 476477 - DNA, 60 bp, Artificial
  Synthetic oligonucleotide
ttaacgccatctgcaaatacactctgtgtggggcggcagatggatagtcatgttacgatt

SEQ ID NO: 476478 - DNA, 53 bp, Artificial
  Synthetic oligonucleotide
ttaacgccctacctgaaaatcacgtttaatgaccgactgtaaataaagaacga

SEQ ID NO: 476479 - DNA, 60 bp, Artificial
  Synthetic oligonucleotide
ttaacgccttggcatatgagtcgttagccgattgctggcctcctctagcagacctaccgt

SEQ ID NO: 476480 - DNA, 53 bp, Artificial
  Synthetic oligonucleotide
ttaacgcgccaacagtatcagacagtcgggccctggctaggaggttccacttt

SEQ ID NO: 476481 - DNA, 55 bp, Artificial
  Synthetic oligonucleotide
ttaacgcgcgcttaagaattactaaaggggagatcggaacatcaaaaaaggatga

SEQ ID NO: 476482 - DNA, 57 bp, Artificial
  Synthetic oligonucleotide
ttaacgcgctggacaaaagtgcgtttgacaagtaccgatcccgaggagtgaacgaga

SEQ ID NO: 476483 - DNA, 56 bp, Artificial
  Synthetic oligonucleotide
ttaacggaaccccttttgatccaacagaggatgttccagctcctctaggtacacca

SEQ ID NO: 476484 - DNA, 55 bp, Artificial
  Synthetic oligonucleotide
ttaacggacttggcactctgaatatttgggtgaaacccatttatatcaaagaacc

SEQ ID NO: 476485 - DNA, 55 bp, Artificial
  Synthetic oligonucleotide
ttaacggccaacgtcaatttattagcggcaactctacctcgacgttgttactggc

SEQ ID NO: 476486 - DNA, 60 bp, Artificial
  Synthetic oligonucleotide
ttaacggctactgttgagctcgctgcaggccccgaccgtctggagtgccgcaccgtgctc

SEQ ID NO: 476487 - DNA, 55 bp, Artificial
  Synthetic oligonucleotide
ttaacgggatgcttgagcaggctgcagatttgcaactatgctctcttgttgcctc

SEQ ID NO: 476488 - DNA, 57 bp, Artificial
  Synthetic oligonucleotide
ttaacgggtgaatcgtatggtgaaaccgtaaagagagcagtcctattgaatgtgtta

SEQ ID NO: 476489 - DNA, 55 bp, Artificial
  Synthetic oligonucleotide
ttaacgggttgaggaacttgacaatccccgcagcacagggactcccggttatgaa

SEQ ID NO: 476490 - DNA, 56 bp, Artificial
  Synthetic oligonucleotide
ttaacggtaagcaggtggacgtgtccaacggacaactagtcaccgggcgcgacgca

SEQ ID NO: 476491 - DNA, 53 bp, Artificial
  Synthetic oligonucleotide
ttaacggtcaagcacttctgtttccccggtttaaattgatacgctccaccagg

SEQ ID NO: 476492 - DNA, 53 bp, Artificial
  Synthetic oligonucleotide
ttaacggtgtactaatccagagtagttcagtgcaggggaaacccgggccgtaa

SEQ ID NO: 476493 - DNA, 54 bp, Artificial
  Synthetic oligonucleotide
ttaacggttatcacgattctgtagtgttatctatcacagaaacaagaacggcat

SEQ ID NO: 476494 - DNA, 53 bp, Artificial
  Synthetic oligonucleotide
ttaacgtaacagtcaatcctggtccattcgcccagacagactatgcgccagtt

SEQ ID NO: 476495 - DNA, 53 bp, Artificial
  Synthetic oligonucleotide
ttaacgtacgttacttcatcaaccacagacccctcgaaattaaagtcgaggtc

SEQ ID NO: 476496 - DNA, 50 bp, Artificial
  Synthetic oligonucleotide
ttaacgtccaagtcaaagaagttacaacacaagattcaacgaaaacaatt

SEQ ID NO: 476497 - DNA, 59 bp, Artificial
  Synthetic oligonucleotide
ttaactaaacacgcatctattaaagaatatcgtccttttagggtcatgcgtctgacatc

SEQ ID NO: 476498 - DNA, 56 bp, Artificial
  Synthetic oligonucleotide
ttaactaattgaatgtttagcgattcgtgtaataacatataactccttacggcggc

SEQ ID NO: 476499 - DNA, 53 bp, Artificial
  Synthetic oligonucleotide
ttaactacagtgaaggatcgtcaccgtacgtgcccatcacagtcacaatcgcg

SEQ ID NO: 476500 - DNA, 60 bp, Artificial
  Synthetic oligonucleotide
ttaactacatacgagccaaaaagagggtgctatagggcattatcaatgtttagatacaga

SEQ ID NO: 476501 - DNA, 58 bp, Artificial
  Synthetic oligonucleotide
ttaactactcatgaagcccaagggaaaacaagagaccatgtgatacttgtgcgtttaa

SEQ ID NO: 476502 - DNA, 60 bp, Artificial
  Synthetic oligonucleotide
ttaactagcaatcatgatcctatttgcagcgtgcataagggtgctcatgtcgcatcatcc

SEQ ID NO: 476503 - DNA, 50 bp, Artificial
  Synthetic oligonucleotide
ttaactagcttctacaaatggttagacgctttcaacatgacagtcactta

SEQ ID NO: 476504 - DNA, 59 bp, Artificial
  Synthetic oligonucleotide
ttaactcagggagccctcctcaatgacaagcattcaaatggaacagtaaaagacaggag

SEQ ID NO: 476505 - DNA, 55 bp, Artificial
  Synthetic oligonucleotide
ttaactcagtaaatgagacaattggcaacacagacaatgcatcaggcggcgatat

SEQ ID NO: 476506 - DNA, 60 bp, Artificial
  Synthetic oligonucleotide
ttaactcatcatacgatagttcaagtagcagcctcaagagcaggatataaggacttgttt

SEQ ID NO: 476507 - DNA, 59 bp, Artificial
  Synthetic oligonucleotide
ttaactccagattgggtcattgaggaagagtgcgaactggattatttcagggtgaagta

SEQ ID NO: 476508 - DNA, 59 bp, Artificial
  Synthetic oligonucleotide
ttaactccagctgagaccacggttcgactgcgcgcatacctcaacaccccagggcttcc

SEQ ID NO: 476509 - DNA, 56 bp, Artificial
  Synthetic oligonucleotide
ttaactgctggagaaattgatggttcaaaggttattaagatatcttttctaaccac

SEQ ID NO: 476510 - DNA, 55 bp, Artificial
  Synthetic oligonucleotide
ttaactgctgtcattactgcggcttatcttaccatctgccatcagaggtacctcc

SEQ ID NO: 476511 - DNA, 60 bp, Artificial
  Synthetic oligonucleotide
ttaactgggcagctgctgtttgagtgcaagctctacagcgagggttacatcgccttgtcc

SEQ ID NO: 476512 - DNA, 56 bp, Artificial
  Synthetic oligonucleotide
ttaactggtcaaaacaatgtgatagacccctggattagattaaattttgtacaagc

SEQ ID NO: 476513 - DNA, 55 bp, Artificial
  Synthetic oligonucleotide
ttaactggtgcgattacttcaccagtgtctaaacgcgccagcattgtacgcaatt

SEQ ID NO: 476514 - DNA, 56 bp, Artificial
  Synthetic oligonucleotide
ttaactggtgtcgataagctctgtaattgggaaagtgtctcctctttggttaagga

SEQ ID NO: 476515 - DNA, 59 bp, Artificial
  Synthetic oligonucleotide
ttaactgtcaaaagccactgtgtcctgaagaaaagcaaagacatctggacaaaaagcaa

SEQ ID NO: 476516 - DNA, 56 bp, Artificial
  Synthetic oligonucleotide
ttaactgtctttccgacagcggatttctgcgcaagttgttttcgaacgaagaacag

SEQ ID NO: 476517 - DNA, 58 bp, Artificial
  Synthetic oligonucleotide
ttaactgttggtaatccatattatcctatactggatggggatactgttactgttccta

SEQ ID NO: 476518 - DNA, 60 bp, Artificial
  Synthetic oligonucleotide
ttaacttaagaagtaataactcagcaacaataatagtgccatatgttaatgctgtaccta

SEQ ID NO: 476519 - DNA, 50 bp, Artificial
  Synthetic oligonucleotide
ttaacttacatggtgagtgtggttttcaaacaccatgtgtaaactgcgat

SEQ ID NO: 476520 - DNA, 60 bp, Artificial
  Synthetic oligonucleotide
ttaacttcgctgcctatacaggcatgagacaaggagaaatccttaagttatcagcatccc

SEQ ID NO: 476521 - DNA, 57 bp, Artificial
  Synthetic oligonucleotide
ttaacttcggcattcccccggacatcgccacggcgttggcatggcgtgaaagccgct

SEQ ID NO: 476522 - DNA, 58 bp, Artificial
  Synthetic oligonucleotide
ttaacttgtgacacttgctctcgtgccaatcttaccccaacacttattagggaactga

SEQ ID NO: 476523 - DNA, 60 bp, Artificial
  Synthetic oligonucleotide
ttaacttttgcaatgagaagctcatctgattatagtgatgttgtaggagcatggatagaa

SEQ ID NO: 476524 - DNA, 51 bp, Artificial
  Synthetic oligonucleotide
ttaagaaactatcatgtaagcaatgtcgacagcacattaagcaccttagtt

SEQ ID NO: 476525 - DNA, 59 bp, Artificial
  Synthetic oligonucleotide
ttaagaacaaatattgtctcgagatcgatttgtccaagttcgataaatctcagggtgaa

SEQ ID NO: 476526 - DNA, 52 bp, Artificial
  Synthetic oligonucleotide
ttaagaacaatcgtttaacctttccagaaattgttagtgttcttgagaaagg

SEQ ID NO: 476527 - DNA, 55 bp, Artificial
  Synthetic oligonucleotide
ttaagaacacaagagtcttcatgtgtttgcatcaagggggagtgttactgggtaa

SEQ ID NO: 476528 - DNA, 51 bp, Artificial
  Synthetic oligonucleotide
ttaagaacctgactgctagtggctcaggttgctacagaggcaaggtttgat

SEQ ID NO: 476529 - DNA, 57 bp, Artificial
  Synthetic oligonucleotide
ttaagaacggcgatattaaacagaactacactgccaaacatgttgccaccgattttc

SEQ ID NO: 476530 - DNA, 57 bp, Artificial
  Synthetic oligonucleotide
ttaagaacgtgttaacgttcctgtgtgagaactgacggttggatgaggaggaggcca

SEQ ID NO: 476531 - DNA, 55 bp, Artificial
  Synthetic oligonucleotide
ttaagaagatacaatatggggctgtagcgtcaggagagaagcagacgaaagcagc

SEQ ID NO: 476532 - DNA, 59 bp, Artificial
  Synthetic oligonucleotide
ttaagaagctgtgggatcagacccgttcaaaggcagggctattagtttctgatggaggc

SEQ ID NO: 476533 - DNA, 60 bp, Artificial
  Synthetic oligonucleotide
ttaagaaggagaagcatccacagatcccacattttagagggaaatatggccatgaccaat

SEQ ID NO: 476534 - DNA, 59 bp, Artificial
  Synthetic oligonucleotide
ttaagaaggtacgcgtcaacgttgatatatcacgttgtacgtgatttatatctcgtgag

SEQ ID NO: 476535 - DNA, 60 bp, Artificial
  Synthetic oligonucleotide
ttaagaagtacaaggactgcgatgtgtaccacaccgaagttaagcatgctcccttcataa

SEQ ID NO: 476536 - DNA, 59 bp, Artificial
  Synthetic oligonucleotide
ttaagaatagcattggaaaacagattgagataacttcgagaattaaagcacttgttata

SEQ ID NO: 476537 - DNA, 60 bp, Artificial
  Synthetic oligonucleotide
ttaagaatctgttgagtgtccatactcagtttgctatcaatttatctgaagttattcaaa

SEQ ID NO: 476538 - DNA, 55 bp, Artificial
  Synthetic oligonucleotide
ttaagaatgagcgtgagatggcaccgcgcccacaggttcagagcacggtatcaag

SEQ ID NO: 476539 - DNA, 55 bp, Artificial
  Synthetic oligonucleotide
ttaagaattacacccctctccttcggagctgcctgccaaggtatttttacgtcta

SEQ ID NO: 476540 - DNA, 54 bp, Artificial
  Synthetic oligonucleotide
ttaagaattgtcagtgcaacctttcttttcatcgtggtagaatggctcttcatc

SEQ ID NO: 476541 - DNA, 58 bp, Artificial
  Synthetic oligonucleotide
ttaagaatttgcatgatagtaatttcagtaataaggagagttaggcagggttactcac

SEQ ID NO: 476542 - DNA, 60 bp, Artificial
  Synthetic oligonucleotide
ttaagacactactcaggacggctaatcaatgcttgggtctactgcagggaactagaattg

SEQ ID NO: 476543 - DNA, 60 bp, Artificial
  Synthetic oligonucleotide
ttaagacagaggcctatgagcagaaattaaatatggagtggctcttttcagcatcacatc

SEQ ID NO: 476544 - DNA, 57 bp, Artificial
  Synthetic oligonucleotide
ttaagaccaagaatcataccaacacagtcatgttttttttagttcgtgataggagac

SEQ ID NO: 476545 - DNA, 55 bp, Artificial
  Synthetic oligonucleotide
ttaagacctgtcacgtttacatatttcgaatatattaagggccgaaggcccgtca

SEQ ID NO: 476546 - DNA, 60 bp, Artificial
  Synthetic oligonucleotide
ttaagacgggagaactgcgaatacgtattgagatgggcgcttacccatacatgctgcatt

SEQ ID NO: 476547 - DNA, 51 bp, Artificial
  Synthetic oligonucleotide
ttaagactcctcgatttgctttcgtaacccaacgaaagcatgttgacacag

SEQ ID NO: 476548 - DNA, 55 bp, Artificial
  Synthetic oligonucleotide
ttaagactgacttcttaatgacgcccttaagccgtttccatgacttaggaaggcc

SEQ ID NO: 476549 - DNA, 57 bp, Artificial
  Synthetic oligonucleotide
ttaagacttgggtttgacgaatcctaagcgcttgggttcaaaggagagggcaatgca

SEQ ID NO: 476550 - DNA, 50 bp, Artificial
  Synthetic oligonucleotide
ttaagagacagcctagagggtgggtgctgcctggatacaaatatcttggg

SEQ ID NO: 476551 - DNA, 57 bp, Artificial
  Synthetic oligonucleotide
ttaagagactatatgccttcgtctgttgcgcctgtgttctttgcgcctgtatcagat

SEQ ID NO: 476552 - DNA, 55 bp, Artificial
  Synthetic oligonucleotide
ttaagagaggtgattggtcttcatattgtgaagtctccttgacacagagcaccaa

SEQ ID NO: 476553 - DNA, 60 bp, Artificial
  Synthetic oligonucleotide
ttaagagccagcccggaactgttctcagcagttgctccgattcctgtgactcctgagaac

SEQ ID NO: 476554 - DNA, 55 bp, Artificial
  Synthetic oligonucleotide
ttaagagcgcagcacatgtacgatcggcgttcttgtatcgctgccaggctaagcg

SEQ ID NO: 476555 - DNA, 55 bp, Artificial
  Synthetic oligonucleotide
ttaagagcgttattttgttatcggtataataataatcacacgtaaggtactagaa

SEQ ID NO: 476556 - DNA, 58 bp, Artificial
  Synthetic oligonucleotide
ttaagagctcagggttccgaacatcccagacccttatgatgccatcctttgtggtgtt

SEQ ID NO: 476557 - DNA, 58 bp, Artificial
  Synthetic oligonucleotide
ttaagagtatcaagcttcataagaggaaaaagagtggttccaagagggcagctttcca

SEQ ID NO: 476558 - DNA, 55 bp, Artificial
  Synthetic oligonucleotide
ttaagagtcatcagctgtgaataagtcaaccctgttggaaaccctgcggactgca

SEQ ID NO: 476559 - DNA, 52 bp, Artificial
  Synthetic oligonucleotide
ttaagagtctcaaactggcaatcggtttgaggaacgtgcctgctaggtcaag

SEQ ID NO: 476560 - DNA, 58 bp, Artificial
  Synthetic oligonucleotide
ttaagagtgtcggcaaccagtgatgaataaaaactcccgttttattatatctgatgaa

SEQ ID NO: 476561 - DNA, 52 bp, Artificial
  Synthetic oligonucleotide
ttaagagtgtttgacatctcctcttgactagcgatcaaggtttcttgctcag

SEQ ID NO: 476562 - DNA, 56 bp, Artificial
  Synthetic oligonucleotide
ttaagagttcgggaccaacgagggaacgtactactgtcacctgaagaagtcagcga

SEQ ID NO: 476563 - DNA, 57 bp, Artificial
  Synthetic oligonucleotide
ttaagagttgggtatcaaaaggtcttgctattgacaaagtgtataatcccataggga

SEQ ID NO: 476564 - DNA, 50 bp, Artificial
  Synthetic oligonucleotide
ttaagagttggtttgataccctacttgccaaaattgaccatgccttggcc

SEQ ID NO: 476565 - DNA, 55 bp, Artificial
  Synthetic oligonucleotide
ttaagatcccacgtacgcaacagcctcaaattcatatctatgcggctccatggga

SEQ ID NO: 476566 - DNA, 60 bp, Artificial
  Synthetic oligonucleotide
ttaagatgacagtcgcaccacaatgcatggcggcactagaggtggaatgtgatacaacac

SEQ ID NO: 476567 - DNA, 56 bp, Artificial
  Synthetic oligonucleotide
ttaagatggtagaatatttgttggtcaaagtttctgaaaatcacaagtgttttcga

SEQ ID NO: 476568 - DNA, 50 bp, Artificial
  Synthetic oligonucleotide
ttaagattacgtgctcgcagggtggacaatgtatcattaacgacggattt

SEQ ID NO: 476569 - DNA, 54 bp, Artificial
  Synthetic oligonucleotide
ttaagcaaacagaccgcctggtgtaccgagagcaaattctaccgctgacggtgg

SEQ ID NO: 476570 - DNA, 50 bp, Artificial
  Synthetic oligonucleotide
ttaagcaaagaccctagtgacaaattaagtgttagtaaatcaccgtcagt

SEQ ID NO: 476571 - DNA, 59 bp, Artificial
  Synthetic oligonucleotide
ttaagcaaaggttttattcaatcgatcgttacgtgcatgcgagggtgatccttagaata

SEQ ID NO: 476572 - DNA, 54 bp, Artificial
  Synthetic oligonucleotide
ttaagcaactggggtttgtaagcatgtaagcttgagggcttacctggtaaaggt

SEQ ID NO: 476573 - DNA, 60 bp, Artificial
  Synthetic oligonucleotide
ttaagcaagcggtgctattgaatgtgctcggcgcaggagatgagatcccggacccactta

SEQ ID NO: 476574 - DNA, 57 bp, Artificial
  Synthetic oligonucleotide
ttaagcaatatgcataatgatgctagtgtagttaatgcttataatgtgtacaatcct

SEQ ID NO: 476575 - DNA, 56 bp, Artificial
  Synthetic oligonucleotide
ttaagcacacagaccaataggcggtgaccacccaagtcactaacggtcaagcactt

SEQ ID NO: 476576 - DNA, 57 bp, Artificial
  Synthetic oligonucleotide
ttaagcacagttttgggagtttcaatcctaaatctggggcagaagagatacaccaaa

SEQ ID NO: 476577 - DNA, 55 bp, Artificial
  Synthetic oligonucleotide
ttaagcagatttaaagatacggctggcgtcagttttacagacctgacgcggtcgt

SEQ ID NO: 476578 - DNA, 59 bp, Artificial
  Synthetic oligonucleotide
ttaagcagtgggtatcaacgcagagtacgaaacacaaagctcctcaaggattgttaaca

SEQ ID NO: 476579 - DNA, 55 bp, Artificial
  Synthetic oligonucleotide
ttaagcataactcaacagcaggatacagtgggaggatcttatgactcatggaacg

SEQ ID NO: 476580 - DNA, 60 bp, Artificial
  Synthetic oligonucleotide
ttaagcatcaatgaactgagcaatcttgcaaaaggagagaaggctaatgtgctaattggg

SEQ ID NO: 476581 - DNA, 60 bp, Artificial
  Synthetic oligonucleotide
ttaagcatcgaagacccaagccatgagggggaagggataccgctatatgatgcaatcaaa

SEQ ID NO: 476582 - DNA, 60 bp, Artificial
  Synthetic oligonucleotide
ttaagcatcgaagacccgagtcatgagggggaagggataccactatacgatgcaatcaaa

SEQ ID NO: 476583 - DNA, 59 bp, Artificial
  Synthetic oligonucleotide
ttaagcatcgaagaccctagccacgagggggaggggataccgctctatgacgcaatcaa

SEQ ID NO: 476584 - DNA, 56 bp, Artificial
  Synthetic oligonucleotide
ttaagcattacattggaagcattgctgtcggagtacttggcacggttcttcctttc

SEQ ID NO: 476585 - DNA, 59 bp, Artificial
  Synthetic oligonucleotide
ttaagccaagcttgtgcaaccttcctaaaacactcgagcgtgccagtgtcgggcagcaa

SEQ ID NO: 476586 - DNA, 50 bp, Artificial
  Synthetic oligonucleotide
ttaagccactctggagtggtaatagtgtacaaacggatctgagtacaaag

SEQ ID NO: 476587 - DNA, 58 bp, Artificial
  Synthetic oligonucleotide
ttaagcccagcaactccttcaatttcatcgtagatggacactcgtgtttcttaaggtc

SEQ ID NO: 476588 - DNA, 52 bp, Artificial
  Synthetic oligonucleotide
ttaagcccgctgtactcaaacccctccgggaggggccctttacagtaggcgc

SEQ ID NO: 476589 - DNA, 58 bp, Artificial
  Synthetic oligonucleotide
ttaagccctacgaacaccatctatatagagctctagatgttgtttggaaagggcctac

SEQ ID NO: 476590 - DNA, 53 bp, Artificial
  Synthetic oligonucleotide
ttaagcctggtttacgaatgacgttatgtactaaatctttactcggttcaacg

SEQ ID NO: 476591 - DNA, 56 bp, Artificial
  Synthetic oligonucleotide
ttaagcgacagggcttaaccattgatgcggagcctactgaactttcctaccaggat

SEQ ID NO: 476592 - DNA, 57 bp, Artificial
  Synthetic oligonucleotide
ttaagcgagtcattgagagacaacaccccaattttagtcccgatacagaacggaatc

SEQ ID NO: 476593 - DNA, 57 bp, Artificial
  Synthetic oligonucleotide
ttaagcgcggaagtaattgagactgcgtcggaggaggtaccaatcttcggcgctggg

SEQ ID NO: 476594 - DNA, 60 bp, Artificial
  Synthetic oligonucleotide
ttaagcgcgtcgtttcctacgctggagcgtcatgatgaaaagttgaggccaggacatata

SEQ ID NO: 476595 - DNA, 60 bp, Artificial
  Synthetic oligonucleotide
ttaagcgctttggcgtaagcatcattcgctgattgttgaccgcctctagcagatcgtcca

SEQ ID NO: 476596 - DNA, 60 bp, Artificial
  Synthetic oligonucleotide
ttaagcggaaagtgtctcaatattattgcatacccatggctgagcgccaaaacaatgggt

SEQ ID NO: 476597 - DNA, 51 bp, Artificial
  Synthetic oligonucleotide
ttaagcggcactgtctacaacgatggaaactgagctacccaccggacctag

SEQ ID NO: 476598 - DNA, 57 bp, Artificial
  Synthetic oligonucleotide
ttaagctaaaattcccagacaaattcatgcagttcagttcgcgaaatcaggggttag

SEQ ID NO: 476599 - DNA, 60 bp, Artificial
  Synthetic oligonucleotide
ttaagctagagacaggacccaatgacaagtatggagactacacagcacagtaccaaggaa

SEQ ID NO: 476600 - DNA, 60 bp, Artificial
  Synthetic oligonucleotide
ttaagctagtttcacgatttgcatgtttcacattgacggcgaagtatgaaatgaggcttt

SEQ ID NO: 476601 - DNA, 60 bp, Artificial
  Synthetic oligonucleotide
ttaagcttaagttactgaggttcatgacgttagattcagctatgagtagcgacgacggta

SEQ ID NO: 476602 - DNA, 55 bp, Artificial
  Synthetic oligonucleotide
ttaagcttcagaacccgactgcatgcacgaaggatgcgtgtgacccatctgtgac

SEQ ID NO: 476603 - DNA, 60 bp, Artificial
  Synthetic oligonucleotide
ttaagcttggtccagcaatgcatcatgcttgttttttatctacatacactgatgtgacgc

SEQ ID NO: 476604 - DNA, 52 bp, Artificial
  Synthetic oligonucleotide
ttaaggaagtactaggtggtttgaaggctttaggggttagccataaggttga

SEQ ID NO: 476605 - DNA, 51 bp, Artificial
  Synthetic oligonucleotide
ttaaggaagtcaatggaagaagcattcgaaaaatccatgaacgaagaattt

SEQ ID NO: 476606 - DNA, 56 bp, Artificial
  Synthetic oligonucleotide
ttaaggaccgtttctacatacgccatgttgtgaaacgtgttttgtctgtggagaag

SEQ ID NO: 476607 - DNA, 59 bp, Artificial
  Synthetic oligonucleotide
ttaaggacgcacatggaaaagtagcaacaaacggacaacttgctccaggtgtctatatc

SEQ ID NO: 476608 - DNA, 57 bp, Artificial
  Synthetic oligonucleotide
ttaaggaggacccaagattggtaaaaatggcatcgctaggcgtcccttgggcagtga

SEQ ID NO: 476609 - DNA, 60 bp, Artificial
  Synthetic oligonucleotide
ttaaggatataccttatagatactcagttgggcaacctatgggagccttatcatcatgag

SEQ ID NO: 476610 - DNA, 59 bp, Artificial
  Synthetic oligonucleotide
ttaaggatcgtaagagccgctgatttactgccgctgttaagtgccgcggcgtaagcgtc

SEQ ID NO: 476611 - DNA, 58 bp, Artificial
  Synthetic oligonucleotide
ttaaggatgagcacgaacttttgaagacactcttccaattgtctatttcctcagttcc

SEQ ID NO: 476612 - DNA, 55 bp, Artificial
  Synthetic oligonucleotide
ttaaggatgggactcagcatacgattgttgatgagatactactgcagccggcacg

SEQ ID NO: 476613 - DNA, 60 bp, Artificial
  Synthetic oligonucleotide
ttaaggatgtggcgcgagctacagcatattttacggcgccaaccggagatccgcattgga

SEQ ID NO: 476614 - DNA, 52 bp, Artificial
  Synthetic oligonucleotide
ttaaggattgggtggcaaattacccgggagtgggaggtgggtcgtttattga

SEQ ID NO: 476615 - DNA, 60 bp, Artificial
  Synthetic oligonucleotide
ttaaggcaagctcgatggaagaccgaaaaggtctaggattcttattggctgggctcatga

SEQ ID NO: 476616 - DNA, 60 bp, Artificial
  Synthetic oligonucleotide
ttaaggcatgtctgtcaggcgcaacaaccttggtgtctggcataattgcaactcaaaaac

SEQ ID NO: 476617 - DNA, 55 bp, Artificial
  Synthetic oligonucleotide
ttaaggcgctttgaggctgccgggtaggtgcgctagccctgcccgtagactcttg

SEQ ID NO: 476618 - DNA, 60 bp, Artificial
  Synthetic oligonucleotide
ttaaggctagcagtaactttgatgaaaagtggtatgattactcagtgtgcagcaaagagg

SEQ ID NO: 476619 - DNA, 60 bp, Artificial
  Synthetic oligonucleotide
ttaaggctcactacactgcatatagatacatcaaagaagagctatctgaacaaggatatg

SEQ ID NO: 476620 - DNA, 55 bp, Artificial
  Synthetic oligonucleotide
ttaaggctcggcgaggtagatctacggaggagctgcaattcggggaccttgagcg

SEQ ID NO: 476621 - DNA, 60 bp, Artificial
  Synthetic oligonucleotide
ttaaggctgtgataagcgctctgtctggaattgacttaacccatctgagtgtgcctaagg

SEQ ID NO: 476622 - DNA, 58 bp, Artificial
  Synthetic oligonucleotide
ttaaggcttgcgacgcctccatcacttacaattacttcctctcggttatttgcggagc

SEQ ID NO: 476623 - DNA, 52 bp, Artificial
  Synthetic oligonucleotide
ttaagggaaagtaatcacaaggcttaaagtttattgcggagacccttgcctt

SEQ ID NO: 476624 - DNA, 53 bp, Artificial
  Synthetic oligonucleotide
ttaagggcccgtggtttgaaaatgtcgcgttcccgcctaaattgtttgcttgc

SEQ ID NO: 476625 - DNA, 55 bp, Artificial
  Synthetic oligonucleotide
ttaagggcgcatttcatcaaggaagaatcgcatcgtttcggcaagtgcacagcgc

SEQ ID NO: 476626 - DNA, 60 bp, Artificial
  Synthetic oligonucleotide
ttaagggctacatgcaccacagcacgtgatcaccccgacgctgagctgatagaagctaat

SEQ ID NO: 476627 - DNA, 59 bp, Artificial
  Synthetic oligonucleotide
ttaagggctcctctggtggtccactgttatgcccctcggggcacgctgttggcatcttc

SEQ ID NO: 476628 - DNA, 56 bp, Artificial
  Synthetic oligonucleotide
ttaaggggtggtgtttagaatgttgtcaaatagctgatttaacacattgttatggt

SEQ ID NO: 476629 - DNA, 55 bp, Artificial
  Synthetic oligonucleotide
ttaagggtaaacgtgatggtgatttacgtcggcgcgcacacattagacggagtcg

SEQ ID NO: 476630 - DNA, 55 bp, Artificial
  Synthetic oligonucleotide
ttaagggtagagtacaagggaggtatgacccagttcgttgctaagacacttataa

SEQ ID NO: 476631 - DNA, 57 bp, Artificial
  Synthetic oligonucleotide
ttaagggtagtaatggcagggacccgcccccaagctctgtatatgttgctacaccta

SEQ ID NO: 476632 - DNA, 57 bp, Artificial
  Synthetic oligonucleotide
ttaagggttctcctccttgctcagtcatacaggagattgtcacagctggcactgatc

SEQ ID NO: 476633 - DNA, 52 bp, Artificial
  Synthetic oligonucleotide
ttaaggtaaagcaactttgtaaactccttcggggggccaaagcattaacaga

SEQ ID NO: 476634 - DNA, 57 bp, Artificial
  Synthetic oligonucleotide
ttaaggtaactagttacccaggagaagagactattgggtcgtatgctatcctcactc

SEQ ID NO: 476635 - DNA, 54 bp, Artificial
  Synthetic oligonucleotide
ttaaggtcaaactgggtaaacgtaatgtcaagagatcaaacctgatattgacgg

SEQ ID NO: 476636 - DNA, 54 bp, Artificial
  Synthetic oligonucleotide
ttaaggtcgacaatgtggacggagaagccaagaacactttgaagccactttttt

SEQ ID NO: 476637 - DNA, 50 bp, Artificial
  Synthetic oligonucleotide
ttaaggttacggctgaattggacgttgataatagagcagtaatgtatcgt

SEQ ID NO: 476638 - DNA, 54 bp, Artificial
  Synthetic oligonucleotide
ttaaggttaggcacttggcagggattaaacacttgggcagctcggttaaggtta

SEQ ID NO: 476639 - DNA, 56 bp, Artificial
  Synthetic oligonucleotide
ttaaggttatgtcccacgggtcaactttattcaatcgaggatcaagagtgtcgttc

SEQ ID NO: 476640 - DNA, 60 bp, Artificial
  Synthetic oligonucleotide
ttaaggttcagaatgcaggcgaaacagcatatgaaggtatgtaaactaggtggtgaatgg

SEQ ID NO: 476641 - DNA, 55 bp, Artificial
  Synthetic oligonucleotide
ttaaggttctgagccacatcgtctggtccaaaccctcaggcgtgtggaaccgggc

SEQ ID NO: 476642 - DNA, 55 bp, Artificial
  Synthetic oligonucleotide
ttaagtaacacacccactgcacgaatgattcgctatgagttccctaccaaaacag

SEQ ID NO: 476643 - DNA, 51 bp, Artificial
  Synthetic oligonucleotide
ttaagtacctttctaacgttggccaaagtagtattatggattatcacagct

SEQ ID NO: 476644 - DNA, 53 bp, Artificial
  Synthetic oligonucleotide
ttaagtactttaagaacagaattaacgaatttgaaacggcgtgttgactataa

SEQ ID NO: 476645 - DNA, 58 bp, Artificial
  Synthetic oligonucleotide
ttaagtagataagtgctgttgcttgtagttcaacagaaagctttgagtacgtctttct

SEQ ID NO: 476646 - DNA, 57 bp, Artificial
  Synthetic oligonucleotide
ttaagtaggccttcacgcttggtccaatttcagttcgataatcctgcctttgaggaa

SEQ ID NO: 476647 - DNA, 60 bp, Artificial
  Synthetic oligonucleotide
ttaagtattcaaacaattactggatatggcagagcatgggtgaaaaacgtgagcacagag

SEQ ID NO: 476648 - DNA, 52 bp, Artificial
  Synthetic oligonucleotide
ttaagtcaatggacaaaagcatagacactttgtcggaaataagtggagctgc

SEQ ID NO: 476649 - DNA, 55 bp, Artificial
  Synthetic oligonucleotide
ttaagtcacctaagttgcctatatatactgctgcacaataaagcaaggtatcagc

SEQ ID NO: 476650 - DNA, 60 bp, Artificial
  Synthetic oligonucleotide
ttaagtccaagaatcacacgaacactgtgatattcaagttatgtcgtgacagacgacctt

SEQ ID NO: 476651 - DNA, 57 bp, Artificial
  Synthetic oligonucleotide
ttaagtccaagaatcatactaacacggtcatgttctggttagttagggatcgccgcc

SEQ ID NO: 476652 - DNA, 56 bp, Artificial
  Synthetic oligonucleotide
ttaagtccatcctgagcgaattaatcaagctggctacatcgcaggcattcaagtcc

SEQ ID NO: 476653 - DNA, 59 bp, Artificial
  Synthetic oligonucleotide
ttaagtccgatgatgattaccggatttttcctaatggtgatcttagcaccattagaggc

SEQ ID NO: 476654 - DNA, 55 bp, Artificial
  Synthetic oligonucleotide
ttaagtcctgcaataagttctttaagaggctgggtgtgtcaacggagtggaaaaa

SEQ ID NO: 476655 - DNA, 54 bp, Artificial
  Synthetic oligonucleotide
ttaagtcgagctcactcccccatcatgtacgagcactaggccagattaaagcaa

SEQ ID NO: 476656 - DNA, 55 bp, Artificial
  Synthetic oligonucleotide
ttaagtctaaccttttcaatcagaaatggggtgcaattcactgagcatgataaag

SEQ ID NO: 476657 - DNA, 60 bp, Artificial
  Synthetic oligonucleotide
ttaagtctcacacatcatattgtatatccaatcagcgaagatacttacagatcaacacta

SEQ ID NO: 476658 - DNA, 55 bp, Artificial
  Synthetic oligonucleotide
ttaagtgacgctaataaggctaaagccatggtggtatttggggcacctaatacgc

SEQ ID NO: 476659 - DNA, 53 bp, Artificial
  Synthetic oligonucleotide
ttaagtgagctttgacgctccggagaacgctaactacgcggcgacaatcgtta

SEQ ID NO: 476660 - DNA, 60 bp, Artificial
  Synthetic oligonucleotide
ttaagtgaggagccaagtacatcagggtggagagatccagtaagacagagatttccagca

SEQ ID NO: 476661 - DNA, 55 bp, Artificial
  Synthetic oligonucleotide
ttaagtgctgccgcgtaagcgtcattggctgattgttgtcctccccttgcagatc

SEQ ID NO: 476662 - DNA, 58 bp, Artificial
  Synthetic oligonucleotide
ttaagtgctttaagagacaacctccaagcaatagcattcatgaaaagtcaacttgtta

SEQ ID NO: 476663 - DNA, 59 bp, Artificial
  Synthetic oligonucleotide
ttaagtggaattgatttatctcatctacgtacaccaaagatagaacctacgatggttgc

SEQ ID NO: 476664 - DNA, 57 bp, Artificial
  Synthetic oligonucleotide
ttaagtggtgggtccagaacgcacgacgatgcagactaaaaacttagataacgctcc

SEQ ID NO: 476665 - DNA, 57 bp, Artificial
  Synthetic oligonucleotide
ttaagtgtagcctccacccgagttgcaagaggggaacacgcagtctcgccgaccctg

SEQ ID NO: 476666 - DNA, 55 bp, Artificial
  Synthetic oligonucleotide
ttaagtgtttcaattgtggcaaagaagggcacctagctaaaaattgcagggcccc

SEQ ID NO: 476667 - DNA, 60 bp, Artificial
  Synthetic oligonucleotide
ttaagttaaatatcatctaatgcgcagttcagctatgagtcagtgcggaacacttgctcg

SEQ ID NO: 476668 - DNA, 56 bp, Artificial
  Synthetic oligonucleotide
ttaagttagtataataagcaagtgtacccctttcctttcaatcacaatcagcccag

SEQ ID NO: 476669 - DNA, 55 bp, Artificial
  Synthetic oligonucleotide
ttaagttgaaacgcttgcggtttaagggtactgttaaaattgagcgtgtgtatgc

SEQ ID NO: 476670 - DNA, 55 bp, Artificial
  Synthetic oligonucleotide
ttaagttgaaggtgtatatgcgcgaggttgaagactatgaggctgagttaacgag

SEQ ID NO: 476671 - DNA, 52 bp, Artificial
  Synthetic oligonucleotide
ttaagttggatatagtagaaagattagacgtgtcttctgactggtccgctcg

SEQ ID NO: 476672 - DNA, 56 bp, Artificial
  Synthetic oligonucleotide
ttaagttggtgtgtccagggtgtcgagagaaacttcgccatgtctgacgaaaaagg

SEQ ID NO: 476673 - DNA, 56 bp, Artificial
  Synthetic oligonucleotide
ttaagttgttgggtattggaggtaaaccatgtatcaaggttgctactgtacagtct

SEQ ID NO: 476674 - DNA, 52 bp, Artificial
  Synthetic oligonucleotide
ttaagtttccctacgctggatgaaactgaggatctataagttggggactctt

SEQ ID NO: 476675 - DNA, 58 bp, Artificial
  Synthetic oligonucleotide
ttaagtttgtatgaacaagcaggacagatgcttggaactaaaacaagtaataatgtta

SEQ ID NO: 476676 - DNA, 56 bp, Artificial
  Synthetic oligonucleotide
ttaataaactaaaccacaccgaactcatgagctttgactacacagacccaaccttc

SEQ ID NO: 476677 - DNA, 58 bp, Artificial
  Synthetic oligonucleotide
ttaataaatgcagtgctccgtctacgattgtcaagcatggaagagtgggatgttggac

SEQ ID NO: 476678 - DNA, 58 bp, Artificial
  Synthetic oligonucleotide
ttaataaattaagaaacctaccacaggatagaacatacaatcaagatcctaacaatgc

SEQ ID NO: 476679 - DNA, 55 bp, Artificial
  Synthetic oligonucleotide
ttaataacaacacgtataatccctacgtacatttactcatgttagaaccaaataa

SEQ ID NO: 476680 - DNA, 57 bp, Artificial
  Synthetic oligonucleotide
ttaataacaccagaccaccgctgggcaattggttcggttgtacctggatgaactcaa

SEQ ID NO: 476681 - DNA, 51 bp, Artificial
  Synthetic oligonucleotide
ttaataacgcgagacaattttgttgactacgtgtacaatcattcggatcca

SEQ ID NO: 476682 - DNA, 57 bp, Artificial
  Synthetic oligonucleotide
ttaataacttgggattcagggttatgcacgtcctttgagctcgtcccgattgtccat

SEQ ID NO: 476683 - DNA, 56 bp, Artificial
  Synthetic oligonucleotide
ttaataagtggagttatcgccaactacgtggacatggaatgatattcgtaagtact

SEQ ID NO: 476684 - DNA, 53 bp, Artificial
  Synthetic oligonucleotide
ttaataatactcaattggcaattaagaagtgcttactaacaatttccaaatgc

SEQ ID NO: 476685 - DNA, 55 bp, Artificial
  Synthetic oligonucleotide
ttaataatcaggctattgtatcacaatgggagctcaagtctcatcgcaaaaggtc

SEQ ID NO: 476686 - DNA, 53 bp, Artificial
  Synthetic oligonucleotide
ttaataatgaaggacaaggtctacctgtcgtgggtaccagcacataaggggat

SEQ ID NO: 476687 - DNA, 60 bp, Artificial
  Synthetic oligonucleotide
ttaataatttgtcgcaacaaatagcaatgtcacaattgatagacttagcgctactaccac

SEQ ID NO: 476688 - DNA, 54 bp, Artificial
  Synthetic oligonucleotide
ttaataattttgaagaaccacctgatagggactttttagatgttgctaggttag

SEQ ID NO: 476689 - DNA, 60 bp, Artificial
  Synthetic oligonucleotide
ttaatacactgtatcataatatacgaaatataaatggttaaggatatctagtgtcaaaca

SEQ ID NO: 476690 - DNA, 60 bp, Artificial
  Synthetic oligonucleotide
ttaatacagaggtgactaagcagatgatccaagacgtatcgaacgatgtaagagaaactt

SEQ ID NO: 476691 - DNA, 60 bp, Artificial
  Synthetic oligonucleotide
ttaataccaaaataggcaatgctaagtgctgtccatttatctgtggaaaagctgtagagt

SEQ ID NO: 476692 - DNA, 55 bp, Artificial
  Synthetic oligonucleotide
ttaataccaaaattacagaaacaagggcaaggacaatggacatatcaaatttacc

SEQ ID NO: 476693 - DNA, 60 bp, Artificial
  Synthetic oligonucleotide
ttaataccatgatagtacccaaatctagataccaattgggtactggtgtcacacttgcag

SEQ ID NO: 476694 - DNA, 60 bp, Artificial
  Synthetic oligonucleotide
ttaataccggcgtgagatatccaagtcaaggtggacgtcatgatgtttccaagattcctg

SEQ ID NO: 476695 - DNA, 57 bp, Artificial
  Synthetic oligonucleotide
ttaatactggatccaggttgttcccacctggatctcccaagcggagtggtacactat

SEQ ID NO: 476696 - DNA, 57 bp, Artificial
  Synthetic oligonucleotide
ttaatacttaaataagctaaactcagtttttgccatcacaagaccttctggactaga

SEQ ID NO: 476697 - DNA, 55 bp, Artificial
  Synthetic oligonucleotide
ttaatagacatggtgtgaagatcctattgcgcttagctgtgagtcctccggcccc

SEQ ID NO: 476698 - DNA, 60 bp, Artificial
  Synthetic oligonucleotide
ttaatagacgctgcctacgacgcaagtgggaatggagtcgcacaatcggccttcagaaaa

SEQ ID NO: 476699 - DNA, 52 bp, Artificial
  Synthetic oligonucleotide
ttaatagcaaatcgaaatttatagactccacatctgccgtgaagagggaggt

SEQ ID NO: 476700 - DNA, 57 bp, Artificial
  Synthetic oligonucleotide
ttaataggacaaggagatgtagtgttagtaatgaaacggaaacgggactctagcata

SEQ ID NO: 476701 - DNA, 54 bp, Artificial
  Synthetic oligonucleotide
ttaataggaccactgtcagggttcatacccacaggagtgaccaaaaccctaaaa

SEQ ID NO: 476702 - DNA, 57 bp, Artificial
  Synthetic oligonucleotide
ttaatagtcagttcggtgtatggtcaggtttgaatggtacttgtagtcactaaacta

SEQ ID NO: 476703 - DNA, 57 bp, Artificial
  Synthetic oligonucleotide
ttaatagtgaggtcgcgcgttgggtatttgctctaccccgtgaactggatgaaccta

SEQ ID NO: 476704 - DNA, 60 bp, Artificial
  Synthetic oligonucleotide
ttaatagttcagaagttaaacagttgtgaacattccattatcgaacatgctaacatatta

SEQ ID NO: 476705 - DNA, 58 bp, Artificial
  Synthetic oligonucleotide
ttaatataaacccctcatgtttatttgttcatacaacattaaagagtgccaggaatga

SEQ ID NO: 476706 - DNA, 53 bp, Artificial
  Synthetic oligonucleotide
ttaatataattggtcggcgctcagacttcgtcagaaggatgggctgtagctga

SEQ ID NO: 476707 - DNA, 60 bp, Artificial
  Synthetic oligonucleotide
ttaatatgatcaggcacacactcatcgtggcgccccattgtctccacaatagtttaaatt

SEQ ID NO: 476708 - DNA, 60 bp, Artificial
  Synthetic oligonucleotide
ttaatatggatatagaacgagcagccgcattcgaggtctacccgcctacgtctgatggcc

SEQ ID NO: 476709 - DNA, 57 bp, Artificial
  Synthetic oligonucleotide
ttaatatgtcgtgcgatggcacgaaaaacacacgcaaacaatacaggggggtagtag

SEQ ID NO: 476710 - DNA, 60 bp, Artificial
  Synthetic oligonucleotide
ttaatatgtgagtctctgccgaaacaaatcagagcgaaagcggaaagcagaagcgatgga

SEQ ID NO: 476711 - DNA, 55 bp, Artificial
  Synthetic oligonucleotide
ttaatcaacctgtctgatgtcatctaggaagctcctaatggtcttcaaaatgagt

SEQ ID NO: 476712 - DNA, 55 bp, Artificial
  Synthetic oligonucleotide
ttaatcaagtggggcaaaccatctatctgggtgtcaaacactgacccacgtcacg

SEQ ID NO: 476713 - DNA, 60 bp, Artificial
  Synthetic oligonucleotide
ttaatcacatgggcacactgtgcattagaatagtcactaatcagcaaaatcatgaggttg

SEQ ID NO: 476714 - DNA, 59 bp, Artificial
  Synthetic oligonucleotide
ttaatcagcaacagtctcttgaagtcgaccacattttagaactatcggaacgtccagat

SEQ ID NO: 476715 - DNA, 60 bp, Artificial
  Synthetic oligonucleotide
ttaatcataccatccctgccgcttggtagccgatggtatgcgtgaactgcctcactaact

SEQ ID NO: 476716 - DNA, 60 bp, Artificial
  Synthetic oligonucleotide
ttaatcatcaacatttaccagcccgacgagccgaaccacaacgtcacacaatgttgtgta

SEQ ID NO: 476717 - DNA, 53 bp, Artificial
  Synthetic oligonucleotide
ttaatcattagcacatatacgctcgtcgtaatcacaaggacctatacaagcat

SEQ ID NO: 476718 - DNA, 58 bp, Artificial
  Synthetic oligonucleotide
ttaatccaggaccgttcgcacagactggatacgctccagttaattggggacacggtga

SEQ ID NO: 476719 - DNA, 59 bp, Artificial
  Synthetic oligonucleotide
ttaatccccacagattgctcaggtttcgattggtcggtttcagactggcttctcgaaga

SEQ ID NO: 476720 - DNA, 60 bp, Artificial
  Synthetic oligonucleotide
ttaatccctatgctgatgcaatcaaagaggcgcaggcctattacgaagagcttgaggtcg

SEQ ID NO: 476721 - DNA, 54 bp, Artificial
  Synthetic oligonucleotide
ttaatccgtcaacttcctcgagttacagttgaggtgtgtaaaacaaagaaggta

SEQ ID NO: 476722 - DNA, 50 bp, Artificial
  Synthetic oligonucleotide
ttaatcctgcgtctgcagtattcgatagcacatcccgcagtcgcataacc

SEQ ID NO: 476723 - DNA, 60 bp, Artificial
  Synthetic oligonucleotide
ttaatcctgctagtagcagcaggcttgctatatctgacggacaacatgtctactattttc

SEQ ID NO: 476724 - DNA, 53 bp, Artificial
  Synthetic oligonucleotide
ttaatccttataagaatgcatttgttctgccaatagaaacttaaactgagcca

SEQ ID NO: 476725 - DNA, 58 bp, Artificial
  Synthetic oligonucleotide
ttaatcgcaggttgtgggctcaagttgaaggttgactatcgccctattgggctgtacg

SEQ ID NO: 476726 - DNA, 51 bp, Artificial
  Synthetic oligonucleotide
ttaatcgcgtgtgttgtgcacccgaccttggtattcgacatcaccaagttg

SEQ ID NO: 476727 - DNA, 60 bp, Artificial
  Synthetic oligonucleotide
ttaatcgctacaacattagagtatagagataggccaattccggatgactcactagcagtc

SEQ ID NO: 476728 - DNA, 60 bp, Artificial
  Synthetic oligonucleotide
ttaatcggaatgagagaccgtgatgattggcaattctatccaaatgccaacgttccagct

SEQ ID NO: 476729 - DNA, 56 bp, Artificial
  Synthetic oligonucleotide
ttaatcggtggaggatggttgatttgggagttcatttcaaagaagttgaatgaacc

SEQ ID NO: 476730 - DNA, 58 bp, Artificial
  Synthetic oligonucleotide
ttaatcgtcgtaaacctcgtaatcctcatacgtatttcagtgtccgattaatggcaga

SEQ ID NO: 476731 - DNA, 55 bp, Artificial
  Synthetic oligonucleotide
ttaatctcgtcgaatatttcttggaacaacggccggtgagacgaacgttgaatta

SEQ ID NO: 476732 - DNA, 54 bp, Artificial
  Synthetic oligonucleotide
ttaatctctgaaaaccatcctaacgtagttatgagtagtctaaccccttacgag

SEQ ID NO: 476733 - DNA, 55 bp, Artificial
  Synthetic oligonucleotide
ttaatctggagatagacagagcatctatcgatatgtcagtgttcaacgactggac

SEQ ID NO: 476734 - DNA, 56 bp, Artificial
  Synthetic oligonucleotide
ttaatctggcaaaaaggttcaggttccgagtggattttgactgtccacaatacgaa

SEQ ID NO: 476735 - DNA, 58 bp, Artificial
  Synthetic oligonucleotide
ttaatcttgcttctgttaaggtaaacgtcgttgggtgtactcaaagcttgatgacaca

SEQ ID NO: 476736 - DNA, 58 bp, Artificial
  Synthetic oligonucleotide
ttaatgaaactagataagtgggacagtctgtggagttggtttagcataacaaactggc

SEQ ID NO: 476737 - DNA, 60 bp, Artificial
  Synthetic oligonucleotide
ttaatgaaagccaattgtcctcacactctccttctgcacatgttttgcacaagcacaaca

SEQ ID NO: 476738 - DNA, 60 bp, Artificial
  Synthetic oligonucleotide
ttaatgaaatacgacgctacactgcaactggacatgtccgaactagcagatttgttactt

SEQ ID NO: 476739 - DNA, 60 bp, Artificial
  Synthetic oligonucleotide
ttaatgaaatacgatgcaaatttacaactagatatgtctgaattggccgatttaatatta

SEQ ID NO: 476740 - DNA, 60 bp, Artificial
  Synthetic oligonucleotide
ttaatgaagacccttggggagagagacttatctggacatttgatcccactctggcctatg

SEQ ID NO: 476741 - DNA, 50 bp, Artificial
  Synthetic oligonucleotide
ttaatgaagtcacctgggagaacgcaaccttcttgaagaggggttttcta

SEQ ID NO: 476742 - DNA, 56 bp, Artificial
  Synthetic oligonucleotide
ttaatgaatttcctgaatccgttcacggatttcgttgtatgttagctattaaatat

SEQ ID NO: 476743 - DNA, 60 bp, Artificial
  Synthetic oligonucleotide
ttaatgaccggaacttctggagaggcgagaacggacgaagaacaaggattgcatatgaga

SEQ ID NO: 476744 - DNA, 58 bp, Artificial
  Synthetic oligonucleotide
ttaatgagacaactgagataagtgagaacacttcatgcgtacgcggagacaactgctc

SEQ ID NO: 476745 - DNA, 53 bp, Artificial
  Synthetic oligonucleotide
ttaatgagagcggaagtctgaagaggtgcttcacggtcgagcaagaacacatc

SEQ ID NO: 476746 - DNA, 60 bp, Artificial
  Synthetic oligonucleotide
ttaatgagcagcacaaatcactttgagagagttcagatatttcctagaagctcttggtcc

SEQ ID NO: 476747 - DNA, 60 bp, Artificial
  Synthetic oligonucleotide
ttaatgagcatgataaacacacaacacacgttaagattcgagtttaccacagagcaaaac

SEQ ID NO: 476748 - DNA, 59 bp, Artificial
  Synthetic oligonucleotide
ttaatgagctgtcctattggtgaggctccctctccatacaattcaaggtttgagtcggt

SEQ ID NO: 476749 - DNA, 50 bp, Artificial
  Synthetic oligonucleotide
ttaatgagcttgcggacgggtaaagagacctttaatcaatcggcgctttt

SEQ ID NO: 476750 - DNA, 59 bp, Artificial
  Synthetic oligonucleotide
ttaatgatcgcttggctcgcagggtattaaagtcgcgttgcaaactagtcgtacaagtg

SEQ ID NO: 476751 - DNA, 59 bp, Artificial
  Synthetic oligonucleotide
ttaatgattacgatcgagtgtgtatgagactcgttgacaacacgttcaacgttgaacca

SEQ ID NO: 476752 - DNA, 60 bp, Artificial
  Synthetic oligonucleotide
ttaatgcaaatcagggtaatagtagtgactatagattaataaattgtaatacctcagcca

SEQ ID NO: 476753 - DNA, 60 bp, Artificial
  Synthetic oligonucleotide
ttaatgcaactatcacgacaacagttcccaacaatgcctattgattataagaggtcaatc

SEQ ID NO: 476754 - DNA, 55 bp, Artificial
  Synthetic oligonucleotide
ttaatgcaactgaaacggtggaacgaacaaacgttcccaggatctgctcaaaagg

SEQ ID NO: 476755 - DNA, 60 bp, Artificial
  Synthetic oligonucleotide
ttaatgcaactgtcacgacaacaattcccaacaatgccagttgattataagaggtcgatt

SEQ ID NO: 476756 - DNA, 60 bp, Artificial
  Synthetic oligonucleotide
ttaatgcaaggttcaacacttcccagaaggtctggggccgcaggtgctgcagtgaaagga

SEQ ID NO: 476757 - DNA, 60 bp, Artificial
  Synthetic oligonucleotide
ttaatgcaatcagacgaatcggagaggatgtttggacgcatgctatcaccacagcaggaa

SEQ ID NO: 476758 - DNA, 60 bp, Artificial
  Synthetic oligonucleotide
ttaatgcactcttgcacagtcgatctgactagctcgttcaactgcgacatggacatggtt

SEQ ID NO: 476759 - DNA, 55 bp, Artificial
  Synthetic oligonucleotide
ttaatgccccagcaaacattcagcagtttgaacatgttgtaccactaagacgtgc

SEQ ID NO: 476760 - DNA, 57 bp, Artificial
  Synthetic oligonucleotide
ttaatgcgggcacgttgagcattatcagggatccggctctcgtggccaatgcgtacc

SEQ ID NO: 476761 - DNA, 60 bp, Artificial
  Synthetic oligonucleotide
ttaatgcgtgctagaaagcacagttattcgagcttctccaagttgttagaggcatatctg

SEQ ID NO: 476762 - DNA, 60 bp, Artificial
  Synthetic oligonucleotide
ttaatgctgtcccaatggattcaatgctaaggcacaataattggagtttagtcatcatac

SEQ ID NO: 476763 - DNA, 60 bp, Artificial
  Synthetic oligonucleotide
ttaatgcttcggcacatgcgtcattagcagtgtggcagctgcctctagccgatctggcgt

SEQ ID NO: 476764 - DNA, 60 bp, Artificial
  Synthetic oligonucleotide
ttaatgcttgagcctaccagaccactcacagataacgtacacaagcaactgagaagtgaa

SEQ ID NO: 476765 - DNA, 60 bp, Artificial
  Synthetic oligonucleotide
ttaatggcacctggaatgagactagtactcggaataatgctacagaaaatggaactatca

SEQ ID NO: 476766 - DNA, 50 bp, Artificial
  Synthetic oligonucleotide
ttaatggcagcaaattatccaaatcgtgttagtatgcatgtatttgatac

SEQ ID NO: 476767 - DNA, 55 bp, Artificial
  Synthetic oligonucleotide
ttaatggcggggacctctaaggtttcccgctcagctaattattcacgtggcacgg

SEQ ID NO: 476768 - DNA, 60 bp, Artificial
  Synthetic oligonucleotide
ttaatgggagcattgtaattccaaccgtcatgagatcctcttttaatgagttcagcttca

SEQ ID NO: 476769 - DNA, 57 bp, Artificial
  Synthetic oligonucleotide
ttaatggggtgtggacaatgatggaaggtgaggagcaggtggagtttcccttgaaac

SEQ ID NO: 476770 - DNA, 50 bp, Artificial
  Synthetic oligonucleotide
ttaatggtgacagcattctagatagagatgtacggaatttagtgtttgtt

SEQ ID NO: 476771 - DNA, 59 bp, Artificial
  Synthetic oligonucleotide
ttaatggtgctgtcacagtaccccgaagtatccccatccaaacatacgatatactacta

SEQ ID NO: 476772 - DNA, 60 bp, Artificial
  Synthetic oligonucleotide
ttaatgtcagtagtacctactagtatgttcattagagagtcactcgttgcttgccagctt

SEQ ID NO: 476773 - DNA, 60 bp, Artificial
  Synthetic oligonucleotide
ttaatgtcatgatgacggatgaggcctgtgtcacaaagtggatactgtacctccgttcaa

SEQ ID NO: 476774 - DNA, 52 bp, Artificial
  Synthetic oligonucleotide
ttaatgtcccttgacatacccacagagcagatgtgcttggaagatgccatgt

SEQ ID NO: 476775 - DNA, 56 bp, Artificial
  Synthetic oligonucleotide
ttaatgtctgccctacttcctcctggactcaacatgccaattggactcttgttatt

SEQ ID NO: 476776 - DNA, 52 bp, Artificial
  Synthetic oligonucleotide
ttaatgtgacaagtgattctctgacagaattaatggctgaagggtgtaaata

SEQ ID NO: 476777 - DNA, 55 bp, Artificial
  Synthetic oligonucleotide
ttaatgtgcgacaatcaactcgattcaaatggtaactttgtttggggaaagaggg

SEQ ID NO: 476778 - DNA, 55 bp, Artificial
  Synthetic oligonucleotide
ttaatgtggcaagggttgacaatgtacgtaatggggacaacccattctcgaatta

SEQ ID NO: 476779 - DNA, 55 bp, Artificial
  Synthetic oligonucleotide
ttaatgtggccgtgtctgcccttagccatcagagactcacctccctgatccacgt

SEQ ID NO: 476780 - DNA, 50 bp, Artificial
  Synthetic oligonucleotide
ttaatgtgttagtgtcccgggatcttgtatgtatcattgaccccaccagt

SEQ ID NO: 476781 - DNA, 57 bp, Artificial
  Synthetic oligonucleotide
ttaatgttaggggtgctggtgtcaaaagagcagattgggatggtcaagtctttgttt

SEQ ID NO: 476782 - DNA, 60 bp, Artificial
  Synthetic oligonucleotide
ttaatgttatgagcatgttggacattccaagagtaccaaatgtttcctcacaatcgggaa

SEQ ID NO: 476783 - DNA, 60 bp, Artificial
  Synthetic oligonucleotide
ttaatgttatgttagtcgatgagtatacattaactcaaagtgctgaaatcttgctcttgc

SEQ ID NO: 476784 - DNA, 60 bp, Artificial
  Synthetic oligonucleotide
ttaatgttcgaaatgacatgctactccggtttattcaatggaaatagatttgtcgatgaa

SEQ ID NO: 476785 - DNA, 60 bp, Artificial
  Synthetic oligonucleotide
ttaatgttcgagggggccgcgatgccatcatccttcttacgtgcgcggtccacccagagc

SEQ ID NO: 476786 - DNA, 53 bp, Artificial
  Synthetic oligonucleotide
ttaatgttttgcagatggctggtttgtggctacctcagactggtaaaatatac

SEQ ID NO: 476787 - DNA, 59 bp, Artificial
  Synthetic oligonucleotide
ttaattaaactactgaacgtatagtctcagtgacatgggactcctgaagcttacactta

SEQ ID NO: 476788 - DNA, 57 bp, Artificial
  Synthetic oligonucleotide
ttaattaatgtagacacccgggtagagttagcaagtatgattaacataaaagcatac

SEQ ID NO: 476789 - DNA, 54 bp, Artificial
  Synthetic oligonucleotide
ttaattaggttccccattggaacagctcctgtacttgggaactacgaagaaatg

SEQ ID NO: 476790 - DNA, 57 bp, Artificial
  Synthetic oligonucleotide
ttaattatcctgggatgctatcgacgagtgggaataagacaaaccaagttgagggta

SEQ ID NO: 476791 - DNA, 60 bp, Artificial
  Synthetic oligonucleotide
ttaattatgagtggtggaccactatatacttacaggcgaagttgttgctagtgcgcaatg

SEQ ID NO: 476792 - DNA, 59 bp, Artificial
  Synthetic oligonucleotide
ttaattcaaattccagtggtgtggtgcttgaaggtactaacaatacagatgtatgggta

SEQ ID NO: 476793 - DNA, 55 bp, Artificial
  Synthetic oligonucleotide
ttaattcaacgtttagcccacgatacgggcatcctatccaatttgtgtcccttta

SEQ ID NO: 476794 - DNA, 55 bp, Artificial
  Synthetic oligonucleotide
ttaattcagggtccaccatacctacattttctggtactagtggctttgaagttac

SEQ ID NO: 476795 - DNA, 55 bp, Artificial
  Synthetic oligonucleotide
ttaattcataacgagggggaaattcctaacttcaacgttagatgggagatcgatc

SEQ ID NO: 476796 - DNA, 53 bp, Artificial
  Synthetic oligonucleotide
ttaattccaatgacgggagagaggtcagagtgctcaatgataggaacgcagtt

SEQ ID NO: 476797 - DNA, 60 bp, Artificial
  Synthetic oligonucleotide
ttaattcgattgggccttgtagtccatactttgataatgatgcggatcgtatcaatttcc

SEQ ID NO: 476798 - DNA, 60 bp, Artificial
  Synthetic oligonucleotide
ttaattcgcgagttgttagaattagatagtcgcttctgtgcatacacagctggtgtagag

SEQ ID NO: 476799 - DNA, 56 bp, Artificial
  Synthetic oligonucleotide
ttaattcggtgtttgatttggcctgggctcttcgccgacaccttacgctaactgga

SEQ ID NO: 476800 - DNA, 60 bp, Artificial
  Synthetic oligonucleotide
ttaattgacaaatcccagtacccgctcttcattttcaggccagatctgatctcaaatcgg

SEQ ID NO: 476801 - DNA, 60 bp, Artificial
  Synthetic oligonucleotide
ttaattgagccaactaaagctgtgccatgtgagtttgtgttttacacatggcccctacaa

SEQ ID NO: 476802 - DNA, 57 bp, Artificial
  Synthetic oligonucleotide
ttaattgcacaagacccggcaataatacaaggaaaagtatacatataggaccaggaa

SEQ ID NO: 476803 - DNA, 55 bp, Artificial
  Synthetic oligonucleotide
ttaattgcagcgaggacggtgaacaggggactgaggagagggtgggaagccctca

SEQ ID NO: 476804 - DNA, 60 bp, Artificial
  Synthetic oligonucleotide
ttaattgcatcggaaacgaaactaggtgacgtttattcaatgatgcgctcatggtacgat

SEQ ID NO: 476805 - DNA, 60 bp, Artificial
  Synthetic oligonucleotide
ttaattgctccaaggggacactacagactaaataatcagaagaagagcacaattctgaac

SEQ ID NO: 476806 - DNA, 60 bp, Artificial
  Synthetic oligonucleotide
ttaattggcacttgttgtctgtactcgatgacacaatgatctatcttcatgcaccttctc

SEQ ID NO: 476807 - DNA, 56 bp, Artificial
  Synthetic oligonucleotide
ttaattgtggtatgcctgcagcttttgttctcgaagatgggcatcctaggctaact

SEQ ID NO: 476808 - DNA, 57 bp, Artificial
  Synthetic oligonucleotide
ttaatttagctgtgtaacagcgctatggggtgactaaaaaagactaagaatctctaa

SEQ ID NO: 476809 - DNA, 53 bp, Artificial
  Synthetic oligonucleotide
ttaatttagttgattggacagagggtgagagcggaaaagagggtaaagcggaa

SEQ ID NO: 476810 - DNA, 55 bp, Artificial
  Synthetic oligonucleotide
ttaatttcttgcctggtgcatatgcgcaaatatcaaatgcggctcggcaggcatg

SEQ ID NO: 476811 - DNA, 53 bp, Artificial
  Synthetic oligonucleotide
ttaatttgaacgggtttcccgtatttcgtgttggactgccagtccctctggga

SEQ ID NO: 476812 - DNA, 55 bp, Artificial
  Synthetic oligonucleotide
ttaatttgaatgggcttcccgtacttggtgttgctttgccagtctctttgggccc

SEQ ID NO: 476813 - DNA, 57 bp, Artificial
  Synthetic oligonucleotide
ttaatttgacacctttgaatttaatatatactagtggtacttttgctccttatgatg

SEQ ID NO: 476814 - DNA, 51 bp, Artificial
  Synthetic oligonucleotide
ttaatttggaatccgtttcggataaggttcaacctttcttcgattcggtcc

SEQ ID NO: 476815 - DNA, 59 bp, Artificial
  Synthetic oligonucleotide
ttaatttgtgaagcacttaattcaattaaagttactcaatctgatgttgctaatgttct

SEQ ID NO: 476816 - DNA, 53 bp, Artificial
  Synthetic oligonucleotide
ttaattttaaccggctttccgtacttacagttggattgccagtctctttgggc

SEQ ID NO: 476817 - DNA, 56 bp, Artificial
  Synthetic oligonucleotide
ttacaaaacttcccaagtttgttaggaattctccacaagcctatgattggatcgta

SEQ ID NO: 476818 - DNA, 55 bp, Artificial
  Synthetic oligonucleotide
ttacaaacacgaaacagttgactttattgtaacctataacagaaactatcctatg

SEQ ID NO: 476819 - DNA, 55 bp, Artificial
  Synthetic oligonucleotide
ttacaaacagattagcacgtttgcgggataggcattttgacctactttgtttagg

SEQ ID NO: 476820 - DNA, 58 bp, Artificial
  Synthetic oligonucleotide
ttacaaacctatactgtacaatcttacaaagcatgtcacgtactaaacaatgtcaacg

SEQ ID NO: 476821 - DNA, 50 bp, Artificial
  Synthetic oligonucleotide
ttacaaactgctgtcgccaatgctgacactcctacctataagtctgttaa

SEQ ID NO: 476822 - DNA, 54 bp, Artificial
  Synthetic oligonucleotide
ttacaaagagaaccgtttcattgaaattggagtgaccaggagggaggtccatat

SEQ ID NO: 476823 - DNA, 60 bp, Artificial
  Synthetic oligonucleotide
ttacaaagatgtgtaacaatgtacaatccagtcaacatcttggatgtgaagcaaggtcct

SEQ ID NO: 476824 - DNA, 58 bp, Artificial
  Synthetic oligonucleotide
ttacaaagattctcaacaagcttaagggactagtcgccactgtggaacctacagtcta

SEQ ID NO: 476825 - DNA, 60 bp, Artificial
  Synthetic oligonucleotide
ttacaaagcgctccgtcatattgagtttatctcgaaataatctcgaagcaacaactggtc

SEQ ID NO: 476826 - DNA, 51 bp, Artificial
  Synthetic oligonucleotide
ttacaaagcttcgaagaagctttcacccgagtacatgtaatgtacgactgc

SEQ ID NO: 476827 - DNA, 54 bp, Artificial
  Synthetic oligonucleotide
ttacaaaggtacttattatccgtgtgttatagaagcccaaaggaaacacgcgga

SEQ ID NO: 476828 - DNA, 50 bp, Artificial
  Synthetic oligonucleotide
ttacaaataccaccatacaggatggcgatatggtggaaacaggctatggg

SEQ ID NO: 476829 - DNA, 60 bp, Artificial
  Synthetic oligonucleotide
ttacaacaataccaaccaagaggatcttctaatactgtgggggatccatcatcctaatga

SEQ ID NO: 476830 - DNA, 52 bp, Artificial
  Synthetic oligonucleotide
ttacaacaatactaatcaagaagatcttctaatactgtggggaatccaccac

SEQ ID NO: 476831 - DNA, 60 bp, Artificial
  Synthetic oligonucleotide
ttacaacacaagtagctctaactccagaatccgggttatggccgcttatcattgcggagc

SEQ ID NO: 476832 - DNA, 55 bp, Artificial
  Synthetic oligonucleotide
ttacaacagaacaaagtagaaacagtgatcatggaagaagcctggaatctatcag

SEQ ID NO: 476833 - DNA, 60 bp, Artificial
  Synthetic oligonucleotide
ttacaacagaatgggtactgtcactaccgaagtggcatttggtctagtgtgcgcaacctg

SEQ ID NO: 476834 - DNA, 55 bp, Artificial
  Synthetic oligonucleotide
ttacaacagacgcaggagggaacgcaaggtgtgctggagctgcttaaggcgagca

SEQ ID NO: 476835 - DNA, 55 bp, Artificial
  Synthetic oligonucleotide
ttacaacagactaacttctccctccaatgtggcttctcatgttagagttaatgtt

SEQ ID NO: 476836 - DNA, 60 bp, Artificial
  Synthetic oligonucleotide
ttacaacattcgacacatcggtcatcatagagctaaaacggacaataaaagtttgactgc

SEQ ID NO: 476837 - DNA, 57 bp, Artificial
  Synthetic oligonucleotide
ttacaaccatgacgtctccatacttcgtgcgtggattcgtacgactaaaatagttgg

SEQ ID NO: 476838 - DNA, 52 bp, Artificial
  Synthetic oligonucleotide
ttacaacccacgcgggaagtggtgggacggttactcgggaaatgacgtagtc

SEQ ID NO: 476839 - DNA, 60 bp, Artificial
  Synthetic oligonucleotide
ttacaaccggtggcagaacatggtggcccgttgcactcagccccatcacaagatgtggcc

SEQ ID NO: 476840 - DNA, 57 bp, Artificial
  Synthetic oligonucleotide
ttacaactatgacactacatttcaagcagacggaatgcaccaactcctcggataatc

SEQ ID NO: 476841 - DNA, 50 bp, Artificial
  Synthetic oligonucleotide
ttacaacttgtacgccggtcttgacgtgatttacacggctcgactgaacc

SEQ ID NO: 476842 - DNA, 55 bp, Artificial
  Synthetic oligonucleotide
ttacaagaacaagacatattgtgtcaagggcggcatgccatctggctgctcaggc

SEQ ID NO: 476843 - DNA, 55 bp, Artificial
  Synthetic oligonucleotide
ttacaagaagcttgcccctgcgcctgaacgaaatagatttgggagtactgtctgc

SEQ ID NO: 476844 - DNA, 54 bp, Artificial
  Synthetic oligonucleotide
ttacaagagtagatgcaattctccagccttcattacctggcgaattcagatact

SEQ ID NO: 476845 - DNA, 60 bp, Artificial
  Synthetic oligonucleotide
ttacaagcccagcgtctctacgttcagcagagaatttttgagacaatcgctcgcagaagc

SEQ ID NO: 476846 - DNA, 60 bp, Artificial
  Synthetic oligonucleotide
ttacaagcttaacagtcaaaagaagagcacaattctgaacactgcagttcccataggatc

SEQ ID NO: 476847 - DNA, 58 bp, Artificial
  Synthetic oligonucleotide
ttacaaggcatgcagacatcgtgccagtacgtaggaggggagacacgcggggtgccct

SEQ ID NO: 476848 - DNA, 57 bp, Artificial
  Synthetic oligonucleotide
ttacaaggccggtgtgactccagagaccttcccaactatctcacagttccttttcga

SEQ ID NO: 476849 - DNA, 54 bp, Artificial
  Synthetic oligonucleotide
ttacaaggttacacttatatcttacgacgagaaagggaagcttgtttccgacga

SEQ ID NO: 476850 - DNA, 56 bp, Artificial
  Synthetic oligonucleotide
ttacaaggttgtcgaggtacccttgaaatcatctcctagatttcttcggaagagct

SEQ ID NO: 476851 - DNA, 58 bp, Artificial
  Synthetic oligonucleotide
ttacaagtaaggattagatgctgcaagtgccacaagcctttgtctcccgtggaaaaaa

SEQ ID NO: 476852 - DNA, 55 bp, Artificial
  Synthetic oligonucleotide
ttacaagtgagacgaatggtgactgaattctgtgataggttaagacgtgatggcg

SEQ ID NO: 476853 - DNA, 53 bp, Artificial
  Synthetic oligonucleotide
ttacaagttcgatgtgtttgggtttgtccaatttattagttcaagatatctca

SEQ ID NO: 476854 - DNA, 53 bp, Artificial
  Synthetic oligonucleotide
ttacaagttgttcacgtccaccgtctagcgtgtcctcgttacttgcatagata

SEQ ID NO: 476855 - DNA, 53 bp, Artificial
  Synthetic oligonucleotide
ttacaataacaccaatcaagaagatcttttggtactgtgggggattcaccatc

SEQ ID NO: 476856 - DNA, 58 bp, Artificial
  Synthetic oligonucleotide
ttacaataatgttaatgcatacctaacaagaattactgagtctcacatggctaattta

SEQ ID NO: 476857 - DNA, 52 bp, Artificial
  Synthetic oligonucleotide
ttacaatatcctgtgagagccacatatgccctaaccccaaccaacgctccca

SEQ ID NO: 476858 - DNA, 60 bp, Artificial
  Synthetic oligonucleotide
ttacaatctgcctaagcatggactgggtgactacagtctcttcggtcccagattccgtgt

SEQ ID NO: 476859 - DNA, 60 bp, Artificial
  Synthetic oligonucleotide
ttacaatgacacagtcgcaggtctattaatgtgccaacaatgtgctttgatgtggtctct

SEQ ID NO: 476860 - DNA, 60 bp, Artificial
  Synthetic oligonucleotide
ttacaatgcaagaatagtcataagatgcccatacactgagcccatgttaatagaccactc

SEQ ID NO: 476861 - DNA, 60 bp, Artificial
  Synthetic oligonucleotide
ttacaatgccactgaatatgcgttattcaggacgaaattcagtggatactgctaggcgct

SEQ ID NO: 476862 - DNA, 58 bp, Artificial
  Synthetic oligonucleotide
ttacaattcaactgaatttagaactctttgtggtttaccatagaaatatgggcgatca

SEQ ID NO: 476863 - DNA, 56 bp, Artificial
  Synthetic oligonucleotide
ttacaattggggaaatgtaatatcgccggatggctcttgggaaacccggaatgcga

SEQ ID NO: 476864 - DNA, 55 bp, Artificial
  Synthetic oligonucleotide
ttacaattgtttggttaaatacaaagcaagatggataagggacatactcatcatg

SEQ ID NO: 476865 - DNA, 53 bp, Artificial
  Synthetic oligonucleotide
ttacacaaacattggtatcaaacaatgattggtcaggttactcagggagtttt

SEQ ID NO: 476866 - DNA, 55 bp, Artificial
  Synthetic oligonucleotide
ttacacaaactatagagtaacgtaaatgttactacacggagaggaattacaagta

SEQ ID NO: 476867 - DNA, 54 bp, Artificial
  Synthetic oligonucleotide
ttacacaaagttctataacagatttaagattagataaaaatctgtgcggaattg

SEQ ID NO: 476868 - DNA, 60 bp, Artificial
  Synthetic oligonucleotide
ttacacaacaccgagttcttatcacgttgctaagcctgtgataatgcacagaggacatat

SEQ ID NO: 476869 - DNA, 51 bp, Artificial
  Synthetic oligonucleotide
ttacacaaggaatggccccattcaaggaattggagatgcaaccccacttgg

SEQ ID NO: 476870 - DNA, 57 bp, Artificial
  Synthetic oligonucleotide
ttacacacagcgcaataaagccgttcgacaacaggctaaagcacaactggtagaatt

SEQ ID NO: 476871 - DNA, 50 bp, Artificial
  Synthetic oligonucleotide
ttacacacataaccacgaaccaaaatcggttaaaacaaaaccactttcgt

SEQ ID NO: 476872 - DNA, 58 bp, Artificial
  Synthetic oligonucleotide
ttacacaccagggccagggactagatttccactgacctttggatggtgctttaagcta

SEQ ID NO: 476873 - DNA, 58 bp, Artificial
  Synthetic oligonucleotide
ttacacaccagggccagggatcaaatacccactgacctttgggtggtgcttcaagcta

SEQ ID NO: 476874 - DNA, 59 bp, Artificial
  Synthetic oligonucleotide
ttacacaccagggccagggatcaggtacccactaacatttggatggtgctacaagctag

SEQ ID NO: 476875 - DNA, 58 bp, Artificial
  Synthetic oligonucleotide
ttacacaccagggccagggattagattccctctaacatttggatggtgcttcaagtta

SEQ ID NO: 476876 - DNA, 53 bp, Artificial
  Synthetic oligonucleotide
ttacacaccccaaattcgccggaaaaggaggaatgctcacggaaacagaccgt

SEQ ID NO: 476877 - DNA, 54 bp, Artificial
  Synthetic oligonucleotide
ttacacacccgcttgaaaaagtaagtctaacaaatggccaaagtgcgcgaggtt

SEQ ID NO: 476878 - DNA, 60 bp, Artificial
  Synthetic oligonucleotide
ttacacacgaagagtgtcacattcaagaatacttgtagaaatggagttgtacagaggatt

SEQ ID NO: 476879 - DNA, 56 bp, Artificial
  Synthetic oligonucleotide
ttacacacgtcttcaatcgctttcctgagaatcagatactggtgcgtccgcccgct

SEQ ID NO: 476880 - DNA, 54 bp, Artificial
  Synthetic oligonucleotide
ttacacacgtttagccgcggaaggtcgtggtgtggatactgaccaagtttatgg

SEQ ID NO: 476881 - DNA, 60 bp, Artificial
  Synthetic oligonucleotide
ttacacactagtgcggccacaagatagatgttggataatgtcgtgtactgattctgaata

SEQ ID NO: 476882 - DNA, 60 bp, Artificial
  Synthetic oligonucleotide
ttacacatcactgaatgtgctggctagatttactgatttggagctccatgggctaacacc

SEQ ID NO: 476883 - DNA, 59 bp, Artificial
  Synthetic oligonucleotide
ttacacatcagtaatgctgtctctgacttccccgaatccggaagagcaaggaacttccg

SEQ ID NO: 476884 - DNA, 60 bp, Artificial
  Synthetic oligonucleotide
ttacacatcgctgcccggccgatgtatgcgagctcatacgcggagcctaccctaaaatcc

SEQ ID NO: 476885 - DNA, 54 bp, Artificial
  Synthetic oligonucleotide
ttacacatcgtgtcggtaagcgtttttgtgtaaagtccgtgtacattttaggga

SEQ ID NO: 476886 - DNA, 58 bp, Artificial
  Synthetic oligonucleotide
ttacacattgtgagcctacagaatctgccttccaggcacattataaagtgtgccaggc

SEQ ID NO: 476887 - DNA, 57 bp, Artificial
  Synthetic oligonucleotide
ttacaccaatcgttcaagcaattggccgtagacaaggacgtagctagactgactagc

SEQ ID NO: 476888 - DNA, 57 bp, Artificial
  Synthetic oligonucleotide
ttacaccacgatgtctgattcactatccgtatcggctgtggcattacccatgcaccg

SEQ ID NO: 476889 - DNA, 55 bp, Artificial
  Synthetic oligonucleotide
ttacaccaggtgggactccacccagcagagggccatcttgaagcgcgctggtgac

SEQ ID NO: 476890 - DNA, 56 bp, Artificial
  Synthetic oligonucleotide
ttacacccaggtgcatggtcaactacccctatagactttggcactacccttgtacc

SEQ ID NO: 476891 - DNA, 53 bp, Artificial
  Synthetic oligonucleotide
ttacaccgattggaatgttaaagtcggcttaggcacgtttactggcgctaatc

SEQ ID NO: 476892 - DNA, 58 bp, Artificial
  Synthetic oligonucleotide
ttacaccgcgaccttctttaaaagagaaccgctgcctattcatgtagatacgattcga

SEQ ID NO: 476893 - DNA, 54 bp, Artificial
  Synthetic oligonucleotide
ttacaccgcgactgggtcatggcaggcaggaacaactaacttcacacctagcgt

SEQ ID NO: 476894 - DNA, 54 bp, Artificial
  Synthetic oligonucleotide
ttacaccggtttcagcgccggccgcgatggggacccagattacttatcggggac

SEQ ID NO: 476895 - DNA, 55 bp, Artificial
  Synthetic oligonucleotide
ttacacctgatcgggaaagtccatgacgcctgtaaggattcgttgtcagtcatcc

SEQ ID NO: 476896 - DNA, 60 bp, Artificial
  Synthetic oligonucleotide
ttacacctggaacaaagcttactgtagcttatcttaatgagttatccaagcatagtgctg

SEQ ID NO: 476897 - DNA, 56 bp, Artificial
  Synthetic oligonucleotide
ttacaccttatgagtcatctctcggttaacgttactggaactaaccttgctaggta

SEQ ID NO: 476898 - DNA, 57 bp, Artificial
  Synthetic oligonucleotide
ttacacgaaagtctgctaacgggggtggcgtcgcgcctgacgaagtgggagcaacag

SEQ ID NO: 476899 - DNA, 60 bp, Artificial
  Synthetic oligonucleotide
ttacacgaaattcaacgtgtatgactacgaggcagcttggaagattcttgcagatcggaa

SEQ ID NO: 476900 - DNA, 60 bp, Artificial
  Synthetic oligonucleotide
ttacacgacattccaactagagatcatcgcgggatggaggttgcggaacctgaagtgtta

SEQ ID NO: 476901 - DNA, 60 bp, Artificial
  Synthetic oligonucleotide
ttacacgagaagacatgggacaaatacagacttggttctgacagtgtaatcgatcagtac

SEQ ID NO: 476902 - DNA, 60 bp, Artificial
  Synthetic oligonucleotide
ttacacgatatcaaacctccgcgcgagagcatatgcatcagacgtgaagaacgacaggac

SEQ ID NO: 476903 - DNA, 60 bp, Artificial
  Synthetic oligonucleotide
ttacacgcacctggttgtgtgccctgtgtcctggaagataatgtcagtaggtgctgggtc

SEQ ID NO: 476904 - DNA, 55 bp, Artificial
  Synthetic oligonucleotide
ttacacgccaggccccgactgacaccattccgacggatgacgaacgtccagtccc

SEQ ID NO: 476905 - DNA, 60 bp, Artificial
  Synthetic oligonucleotide
ttacacgccgtttgcgataaagtgggcttatacatcgctctgtcgaggcataccagtgaa

SEQ ID NO: 476906 - DNA, 57 bp, Artificial
  Synthetic oligonucleotide
ttacacgcgagcaccgtagatcgtgcctactttatcccaacgaggggcattaccagt

SEQ ID NO: 476907 - DNA, 60 bp, Artificial
  Synthetic oligonucleotide
ttacacggagcgaaacgaagtgatttcaagcgtcgttcgagtaatcagattaagagcatg

SEQ ID NO: 476908 - DNA, 54 bp, Artificial
  Synthetic oligonucleotide
ttacacggatgattcagtgtcattgatttacactttctttatgctagtctcaac

SEQ ID NO: 476909 - DNA, 60 bp, Artificial
  Synthetic oligonucleotide
ttacacggcacgtctccaagctggtagtgtactcggacatgagtcatgacgatgtggttg

SEQ ID NO: 476910 - DNA, 55 bp, Artificial
  Synthetic oligonucleotide
ttacacgtaagggagtgtatgccgtcaggtataaggtcaacgagaaccccctgta

SEQ ID NO: 476911 - DNA, 53 bp, Artificial
  Synthetic oligonucleotide
ttacacgtggtaatggaattactcatcgtgttggtaaaaggttttgtgttaaa

SEQ ID NO: 476912 - DNA, 56 bp, Artificial
  Synthetic oligonucleotide
ttacacgttttcgatgtggctagagttccagacgaccaaatgtataggttaaggga

SEQ ID NO: 476913 - DNA, 59 bp, Artificial
  Synthetic oligonucleotide
ttacactaattggatgcaatggctcaccatggagatttcttaaagagaaattttgtaaa

SEQ ID NO: 476914 - DNA, 55 bp, Artificial
  Synthetic oligonucleotide
ttacactatatgtaccctccaaaagaaggagaggcacgtttagtgactcgacgca

SEQ ID NO: 476915 - DNA, 60 bp, Artificial
  Synthetic oligonucleotide
ttacactcagcaggggtcactttatctacgcaatttacagactatgtttctctgaattca

SEQ ID NO: 476916 - DNA, 54 bp, Artificial
  Synthetic oligonucleotide
ttacactcagggggagaaacgggacttgagtaaacacttggcggttagagccac

SEQ ID NO: 476917 - DNA, 60 bp, Artificial
  Synthetic oligonucleotide
ttacactcccgattatactgaaggcactctatatgttatcaacacgaggaagacagactg

SEQ ID NO: 476918 - DNA, 53 bp, Artificial
  Synthetic oligonucleotide
ttacactgccacccggttccatataccgaaagacagcactcatgtttatgctg

SEQ ID NO: 476919 - DNA, 57 bp, Artificial
  Synthetic oligonucleotide
ttacactgccgctgaaataacagcgtaaacaaattgttagtagctactccgtgaaaa

SEQ ID NO: 476920 - DNA, 55 bp, Artificial
  Synthetic oligonucleotide
ttacactggagcggaggccttgattacaactgcgattcacattcaccgctggatt

SEQ ID NO: 476921 - DNA, 60 bp, Artificial
  Synthetic oligonucleotide
ttacactggatgatggaacgccaatgtattcggagctcaagagtccgactaagaggcatc

SEQ ID NO: 476922 - DNA, 60 bp, Artificial
  Synthetic oligonucleotide
ttacactggcattggtgagcaggccatcgggtctgatagggaccgggttgtgcgcatcag

SEQ ID NO: 476923 - DNA, 60 bp, Artificial
  Synthetic oligonucleotide
ttacactgggacaagcaaagcatgctcaaactcattctacagaagtatgagatggctgac

SEQ ID NO: 476924 - DNA, 60 bp, Artificial
  Synthetic oligonucleotide
ttacactgggagctgtattcattgggttcttaggaacagctggaagcacaatgggcgcgg

SEQ ID NO: 476925 - DNA, 55 bp, Artificial
  Synthetic oligonucleotide
ttacactgtctacagtgcaacctcaggtagctgcattcattgtcagatgggttcg

SEQ ID NO: 476926 - DNA, 57 bp, Artificial
  Synthetic oligonucleotide
ttacactgttttaaggccagagtttgcgattcacggcgtaaatccgatgccagggcc

SEQ ID NO: 476927 - DNA, 60 bp, Artificial
  Synthetic oligonucleotide
ttacacttacatacagaggagtgtactcagcactagttaaatacgcagctgaagtaggat

SEQ ID NO: 476928 - DNA, 60 bp, Artificial
  Synthetic oligonucleotide
ttacagaacctcatatctctacaagtgcactcgaatggattgatcaagatagttctctta

SEQ ID NO: 476929 - DNA, 57 bp, Artificial
  Synthetic oligonucleotide
ttacagaaccttccctgttggaggttcctcagaatggtgaggtttcagggcacatac

SEQ ID NO: 476930 - DNA, 60 bp, Artificial
  Synthetic oligonucleotide
ttacagaagaacgtctcagttgacggtttcagcccatgagaatagtctcagttcaaatca

SEQ ID NO: 476931 - DNA, 57 bp, Artificial
  Synthetic oligonucleotide
ttacagaagtttctgtaaggtgctagactaaaattgttgggactttgaatctctgaa

SEQ ID NO: 476932 - DNA, 60 bp, Artificial
  Synthetic oligonucleotide
ttacagaatgcactcaataccagaccacaacaagaacagtcatcaaatggtataatgatc

SEQ ID NO: 476933 - DNA, 50 bp, Artificial
  Synthetic oligonucleotide
ttacagacaccaaacagtagactatatagttagctacaacagaacaggcc

SEQ ID NO: 476934 - DNA, 60 bp, Artificial
  Synthetic oligonucleotide
ttacagacactgcaacacacttcacctaatctgcctcattatatccacaaataagctctg

SEQ ID NO: 476935 - DNA, 60 bp, Artificial
  Synthetic oligonucleotide
ttacagacgccctagggccacacggtgccgaggcagtgcccattgatgcgagtgttcgca

SEQ ID NO: 476936 - DNA, 60 bp, Artificial
  Synthetic oligonucleotide
ttacagacgctatcgcagacgccgaaggagaccgacacgaagatggaggcaccggaggtg

SEQ ID NO: 476937 - DNA, 59 bp, Artificial
  Synthetic oligonucleotide
ttacagactcagcttcaacagacgtcccaacaccctacacagaaacaccgacatcggaa

SEQ ID NO: 476938 - DNA, 60 bp, Artificial
  Synthetic oligonucleotide
ttacagactcgtcagtcatatcgttgatagcgaagcttgacgctacagtttttgcccaaa

SEQ ID NO: 476939 - DNA, 60 bp, Artificial
  Synthetic oligonucleotide
ttacagactgagatcccggatcgggcctggaactctggatacgaatggatcacagaatac

SEQ ID NO: 476940 - DNA, 58 bp, Artificial
  Synthetic oligonucleotide
ttacagagaaattactcaagaacctgataaaactgattagtagcttggttataatcac

SEQ ID NO: 476941 - DNA, 60 bp, Artificial
  Synthetic oligonucleotide
ttacagagtcggatacttatgtgcaggtctccccagcgacactccaagaggagaggacag

SEQ ID NO: 476942 - DNA, 60 bp, Artificial
  Synthetic oligonucleotide
ttacagagttgggtacttatgtgcggggctgcccagtgatactccaagaggggaagatgc

SEQ ID NO: 476943 - DNA, 60 bp, Artificial
  Synthetic oligonucleotide
ttacagatctactccaatcagttaggactcccgaggtcatcaagtattgtgaagacaata

SEQ ID NO: 476944 - DNA, 55 bp, Artificial
  Synthetic oligonucleotide
ttacagatggcggtcccttggagctgcacaccttcctcaaacgcggcttcaagag

SEQ ID NO: 476945 - DNA, 59 bp, Artificial
  Synthetic oligonucleotide
ttacagatttcgtatcattaaattcattaagatttagatttagactagctgtcgaagaa

SEQ ID NO: 476946 - DNA, 60 bp, Artificial
  Synthetic oligonucleotide
ttacagcacgcgattggacgcccggtcaatcaggagctgctattgccgcgttacgcggat

SEQ ID NO: 476947 - DNA, 60 bp, Artificial
  Synthetic oligonucleotide
ttacagcagaatatgaatgccgccgtgttctcaaatacagcgagaattgacgatataata

SEQ ID NO: 476948 - DNA, 58 bp, Artificial
  Synthetic oligonucleotide
ttacagcagacctgatgtctgtacttctccagaaaactggtttgttttagctgaaaaa

SEQ ID NO: 476949 - DNA, 55 bp, Artificial
  Synthetic oligonucleotide
ttacagcagatcgtcatgagggacttccagggtcgtatcgtagtagagcgcttgg

SEQ ID NO: 476950 - DNA, 57 bp, Artificial
  Synthetic oligonucleotide
ttacagcccgaactgtggattccgtgttgctaaacggttgtaaatatctggtggaca

SEQ ID NO: 476951 - DNA, 52 bp, Artificial
  Synthetic oligonucleotide
ttacagcgttatggtagacgtcgtctttatttgctttggaacccccggaaac

SEQ ID NO: 476952 - DNA, 56 bp, Artificial
  Synthetic oligonucleotide
ttacagcgtttaacccccttaatctaggctctagcatgtttgaaactagtataaga

SEQ ID NO: 476953 - DNA, 55 bp, Artificial
  Synthetic oligonucleotide
ttacagctcgacagcgacagaagagtattcggagagcagggacctgagctctggg

SEQ ID NO: 476954 - DNA, 60 bp, Artificial
  Synthetic oligonucleotide
ttacagctggttctcgcaatatcctagtgactctaaattctactataaatataacctgtg

SEQ ID NO: 476955 - DNA, 54 bp, Artificial
  Synthetic oligonucleotide
ttacagctgtgatcactgcagcgtacttgactatttgccaccagcgctacttac

SEQ ID NO: 476956 - DNA, 52 bp, Artificial
  Synthetic oligonucleotide
ttacagctttgcattaccagttggtcaatggccagttatgactggaggagca

SEQ ID NO: 476957 - DNA, 55 bp, Artificial
  Synthetic oligonucleotide
ttacaggaaatcgtaccagtaatgctacaagaagtgataccagtaatgttactgg

SEQ ID NO: 476958 - DNA, 52 bp, Artificial
  Synthetic oligonucleotide
ttacaggacgtggtgcaaggggtaccaggcgatacgtcagcgggtggtgcgg

SEQ ID NO: 476959 - DNA, 57 bp, Artificial
  Synthetic oligonucleotide
ttacaggactgctattaacaagagatggtgggaatattaacagtacagaggaaacct

SEQ ID NO: 476960 - DNA, 56 bp, Artificial
  Synthetic oligonucleotide
ttacaggagtgtgggtgctttcgcacctacaaggtccggatttatccgggccattg

SEQ ID NO: 476961 - DNA, 59 bp, Artificial
  Synthetic oligonucleotide
ttacaggcaacattgtaggtctttgaggctgtttctcacttgaagtaacttggtggcgc

SEQ ID NO: 476962 - DNA, 60 bp, Artificial
  Synthetic oligonucleotide
ttacaggcttgggtatatatgataagaccatgattataccaacacatgccgatccaggta

SEQ ID NO: 476963 - DNA, 55 bp, Artificial
  Synthetic oligonucleotide
ttacaggggcaaatggtacaccagcccttaacacctagaactttgaatgcgtggg

SEQ ID NO: 476964 - DNA, 50 bp, Artificial
  Synthetic oligonucleotide
ttacaggtctactcataaaatctctactcacagccatcaacgacatttgc

SEQ ID NO: 476965 - DNA, 53 bp, Artificial
  Synthetic oligonucleotide
ttacaggtgcgggtacatgggtagacggtacagataatcgtactatcttgttc

SEQ ID NO: 476966 - DNA, 53 bp, Artificial
  Synthetic oligonucleotide
ttacaggttaaatctaaggtgttctctcccggtccccacggacacccggatca

SEQ ID NO: 476967 - DNA, 54 bp, Artificial
  Synthetic oligonucleotide
ttacagtaataatgactcttaaaggcaatcgtacgccaaccagttatcttccta

SEQ ID NO: 476968 - DNA, 55 bp, Artificial
  Synthetic oligonucleotide
ttacagtataaacgcaccagctattgtgccacaagtggaaattgatcgtttagct

SEQ ID NO: 476969 - DNA, 59 bp, Artificial
  Synthetic oligonucleotide
ttacagtatttggcactaacagcattaagagcaccaagaaagataaagccacccttgcc

SEQ ID NO: 476970 - DNA, 53 bp, Artificial
  Synthetic oligonucleotide
ttacagtcagcttatgtgccaacctattctgttacttgaccaagctcttgttt

SEQ ID NO: 476971 - DNA, 59 bp, Artificial
  Synthetic oligonucleotide
ttacagtcctcgggaaggatgcaggtgcactcacagaagacccagatgagggaacagcg

SEQ ID NO: 476972 - DNA, 57 bp, Artificial
  Synthetic oligonucleotide
ttacagtcgagttcaccccaggtgagtcttatacctcggccactgggcacgtatcgg

SEQ ID NO: 476973 - DNA, 54 bp, Artificial
  Synthetic oligonucleotide
ttacagtctaagtctagtttagtatggaatgtttcagaagaacctcatcccatg

SEQ ID NO: 476974 - DNA, 60 bp, Artificial
  Synthetic oligonucleotide
ttacagtctccgcggaaggagacgacagttctcgagatgagactgaggattcgtttgata

SEQ ID NO: 476975 - DNA, 51 bp, Artificial
  Synthetic oligonucleotide
ttacagtgacagagtgcaacaaatcaccctcggaaactccaccataactac

SEQ ID NO: 476976 - DNA, 51 bp, Artificial
  Synthetic oligonucleotide
ttacagtggaaatttgacagcagcctagcacgtaggcatgttgcccgagag

SEQ ID NO: 476977 - DNA, 55 bp, Artificial
  Synthetic oligonucleotide
ttacagtggaagtttgacagtctcctagcacatagacacatggcccgcgagctac

SEQ ID NO: 476978 - DNA, 60 bp, Artificial
  Synthetic oligonucleotide
ttacagtggtcgtttgatggcggctgccaatataagtggagttgttacgctgtaccttga

SEQ ID NO: 476979 - DNA, 54 bp, Artificial
  Synthetic oligonucleotide
ttacagtgtacgttcaataagacaaataagtaagcggtttgaatccctcgttgg

SEQ ID NO: 476980 - DNA, 55 bp, Artificial
  Synthetic oligonucleotide
ttacagttaacgccccaagtgagttacttggagaatacaacaacatcagagtaca

SEQ ID NO: 476981 - DNA, 60 bp, Artificial
  Synthetic oligonucleotide
ttacagttaacttcagtcacgtcgttgtgtatgctcattggaaatgcaacagttataccc

SEQ ID NO: 476982 - DNA, 55 bp, Artificial
  Synthetic oligonucleotide
ttacagttaatccaggaccatttgctcagactggatatgcgccagtaagttgggg

SEQ ID NO: 476983 - DNA, 56 bp, Artificial
  Synthetic oligonucleotide
ttacagttacaggcgtgttttaatcaaccctgcaaatcaagaagagaagatccctt

SEQ ID NO: 476984 - DNA, 59 bp, Artificial
  Synthetic oligonucleotide
ttacagttccacaccttccagctcatggttacttcgtcacgaattccgaattctcgaga

SEQ ID NO: 476985 - DNA, 58 bp, Artificial
  Synthetic oligonucleotide
ttacataataacatcgctggattgtagcaattgtacacatgttatcgatcggctaagc

SEQ ID NO: 476986 - DNA, 60 bp, Artificial
  Synthetic oligonucleotide
ttacatacagttcaagagcaaacaccgtattgaaccagtatgcctgttagtgcatggcag

SEQ ID NO: 476987 - DNA, 58 bp, Artificial
  Synthetic oligonucleotide
ttacatacgcaaatgttttgtccttcgtcgaatctattcgatcgagggtaatcataaa

SEQ ID NO: 476988 - DNA, 60 bp, Artificial
  Synthetic oligonucleotide
ttacatactcatcagcgcttgagttcgatttaactgattatcaggatggatgcgaacacg

SEQ ID NO: 476989 - DNA, 60 bp, Artificial
  Synthetic oligonucleotide
ttacatactgattaaaatacgtattcatacattagctattgtccctatatcatattcttc

SEQ ID NO: 476990 - DNA, 60 bp, Artificial
  Synthetic oligonucleotide
ttacatagaagctgtacagctacaagagctcaggaactcagttggatggttagaacgatt

SEQ ID NO: 476991 - DNA, 55 bp, Artificial
  Synthetic oligonucleotide
ttacatagatggtgcctatggaataggtaagagtttaacggcgaagtacctggtc

SEQ ID NO: 476992 - DNA, 57 bp, Artificial
  Synthetic oligonucleotide
ttacataggcctgccttaacatcccgaagaggaacagtacgttttagcagagtaggc

SEQ ID NO: 476993 - DNA, 59 bp, Artificial
  Synthetic oligonucleotide
ttacataggcctgctttaacatctcgcagaggcactattagatttagtaggttaggtag

SEQ ID NO: 476994 - DNA, 60 bp, Artificial
  Synthetic oligonucleotide
ttacatagtcggcagatttgccgacgaaaaacacacacatagtgcagcctcgggctaaag

SEQ ID NO: 476995 - DNA, 55 bp, Artificial
  Synthetic oligonucleotide
ttacatagtttgttagagttgggtacaaaacctactgcccctcatgttcgtaata

SEQ ID NO: 476996 - DNA, 58 bp, Artificial
  Synthetic oligonucleotide
ttacatatcgtatggccgtagtttttgtaccctcattcagactgtatatgttccgttg

SEQ ID NO: 476997 - DNA, 58 bp, Artificial
  Synthetic oligonucleotide
ttacatatgcggtgtgtcggttgtgggaaatatgtgacccatttaaacgtctcttaga

SEQ ID NO: 476998 - DNA, 56 bp, Artificial
  Synthetic oligonucleotide
ttacatcacctgctggtatcaaactaagttagtagcccccccaaatacacctacaa

SEQ ID NO: 476999 - DNA, 60 bp, Artificial
  Synthetic oligonucleotide
ttacatcatcaacatgcttaaatagcttaaacaatacatgctcacacgctttcaatacat

SEQ ID NO: 477000 - DNA, 56 bp, Artificial
  Synthetic oligonucleotide
ttacatcatcgggaacggggccaagatcaagattcgggggaattacacggagtaca

SEQ ID NO: 477001 - DNA, 60 bp, Artificial
  Synthetic oligonucleotide
ttacatccaaagtcccttcaattacatcattcagtacatgcgtgactgttctaattacat

SEQ ID NO: 477002 - DNA, 53 bp, Artificial
  Synthetic oligonucleotide
ttacatccagcctgtagccatggaagtaacgacccagaaggagagactctgat

SEQ ID NO: 477003 - DNA, 55 bp, Artificial
  Synthetic oligonucleotide
ttacatccgtcatgtcgtcaaacgtgtgttgtccgtggagaaggatacgactatg

SEQ ID NO: 477004 - DNA, 58 bp, Artificial
  Synthetic oligonucleotide
ttacatcgacctgcttgtcgggagcgccaccctgtgctcggccctctacgtgggggac

SEQ ID NO: 477005 - DNA, 60 bp, Artificial
  Synthetic oligonucleotide
ttacatcggaatattttatactggcatactatcagttatatgccttctcatcgtcattta

SEQ ID NO: 477006 - DNA, 60 bp, Artificial
  Synthetic oligonucleotide
ttacatcggggggataggcaaagaactcatagtagacgacactagtgatgtcacatcatt

SEQ ID NO: 477007 - DNA, 60 bp, Artificial
  Synthetic oligonucleotide
ttacatctatcgtccccgtaaggacgtcgttcagtacatgagcaacggctctgacgacaa

SEQ ID NO: 477008 - DNA, 60 bp, Artificial
  Synthetic oligonucleotide
ttacatctatgacgaacttgataccctttccgttgttatatgtgatcgtcatctgttgct

SEQ ID NO: 477009 - DNA, 60 bp, Artificial
  Synthetic oligonucleotide
ttacatctgattgatcatatctaggtccaggggtaaacggcagcttgagggcaacttaaa

SEQ ID NO: 477010 - DNA, 55 bp, Artificial
  Synthetic oligonucleotide
ttacatgaagatgctcatcctgtctggtacgtgatcgtatggccaaagacccagt

SEQ ID NO: 477011 - DNA, 52 bp, Artificial
  Synthetic oligonucleotide
ttacatgacgagctgcactactggtgtgagagggacctggttaccttcctgt

SEQ ID NO: 477012 - DNA, 59 bp, Artificial
  Synthetic oligonucleotide
ttacatgatccaagtaaagagaggctcgtgtgggctttagtaggcattcaggtgtcaag

SEQ ID NO: 477013 - DNA, 58 bp, Artificial
  Synthetic oligonucleotide
ttacatgatggtatttattgtctgtgccatcgcgaacattttaccggaagtttcgagt

SEQ ID NO: 477014 - DNA, 57 bp, Artificial
  Synthetic oligonucleotide
ttacatggataacaaccctagatggccgacgcgagacccaggagcccctattactag

SEQ ID NO: 477015 - DNA, 60 bp, Artificial
  Synthetic oligonucleotide
ttacatggatgtgtttcgacccaaagttcccatccatgtggccatgacaggagccctcaa

SEQ ID NO: 477016 - DNA, 55 bp, Artificial
  Synthetic oligonucleotide
ttacatggttccaacaccagcccccctttcatacgttagtaagttcgatgatacg

SEQ ID NO: 477017 - DNA, 50 bp, Artificial
  Synthetic oligonucleotide
ttacatgtctctacactgttggtgcccgaacttccagaaccacgtcacat

SEQ ID NO: 477018 - DNA, 55 bp, Artificial
  Synthetic oligonucleotide
ttacatgtgctggtcgcatgttggtctgtatgggtcagatgcccaaccatgcccc

SEQ ID NO: 477019 - DNA, 59 bp, Artificial
  Synthetic oligonucleotide
ttacatgtgtggtgaagtggagttgaaaccctaatacatgggtgtgtacgtatatatac

SEQ ID NO: 477020 - DNA, 60 bp, Artificial
  Synthetic oligonucleotide
ttacatgttcaagacaccgccttgcgacagagaaaccagtcatgagggacatctttgcgg

SEQ ID NO: 477021 - DNA, 58 bp, Artificial
  Synthetic oligonucleotide
ttacatgttgacaactagagggaggcagactactaaagacaataagggaatgaggatt

SEQ ID NO: 477022 - DNA, 59 bp, Artificial
  Synthetic oligonucleotide
ttacatgttggcgttgttaaatatggcgattctcaattaagccctactgttgagcgttg

SEQ ID NO: 477023 - DNA, 58 bp, Artificial
  Synthetic oligonucleotide
ttacattaaccaaattgtacaagttatgtccaagcggtcaagatcattagacgcagct

SEQ ID NO: 477024 - DNA, 54 bp, Artificial
  Synthetic oligonucleotide
ttacattaacccccgaaattatggcctatttacacaccatgaatagtagtttac

SEQ ID NO: 477025 - DNA, 55 bp, Artificial
  Synthetic oligonucleotide
ttacattaacgtgtattgtaagcctgacagaatgtagtacctttatcacatcaat

SEQ ID NO: 477026 - DNA, 55 bp, Artificial
  Synthetic oligonucleotide
ttacattaagagcctccgacttacttcctgtgttaattgctttggcgtaagcatc

SEQ ID NO: 477027 - DNA, 56 bp, Artificial
  Synthetic oligonucleotide
ttacattatgttgtccacggaggcctagttatgcaaaagaacataaaccttagaca

SEQ ID NO: 477028 - DNA, 56 bp, Artificial
  Synthetic oligonucleotide
ttacattattcagtagcggaaagcattatcttaggtctagcgattgggttgtcagc

SEQ ID NO: 477029 - DNA, 55 bp, Artificial
  Synthetic oligonucleotide
ttacattcaacaggtaaagctagtattgaaggtggtaagtattatgagcatgccc

SEQ ID NO: 477030 - DNA, 58 bp, Artificial
  Synthetic oligonucleotide
ttacattcatattacacttatatgcaaagctagaagttataaactacgctataaaaaa

SEQ ID NO: 477031 - DNA, 57 bp, Artificial
  Synthetic oligonucleotide
ttacattctgtgaaacggtctggctttacatttgtagccacctaggaggtaggactc

SEQ ID NO: 477032 - DNA, 50 bp, Artificial
  Synthetic oligonucleotide
ttacattgagctttcaaccagtggtaatatgcgtagtgacttatctagac

SEQ ID NO: 477033 - DNA, 52 bp, Artificial
  Synthetic oligonucleotide
ttacattgcaggtttaatttcgtgaattaacgtaaagctttttcacccttac

SEQ ID NO: 477034 - DNA, 60 bp, Artificial
  Synthetic oligonucleotide
ttacattgccaagagctagagtttcattgcaagtaggcgatgacttaaggtctatgcagg

SEQ ID NO: 477035 - DNA, 56 bp, Artificial
  Synthetic oligonucleotide
ttacatttactgtttaccatattatatagattgataagtttaggattaagtagccg

SEQ ID NO: 477036 - DNA, 55 bp, Artificial
  Synthetic oligonucleotide
ttacatttgattaaaattccaactcaccgtcacctggttggtaagccgtgcccaa

SEQ ID NO: 477037 - DNA, 51 bp, Artificial
  Synthetic oligonucleotide
ttacatttgtattatagtcccggcaaattctgacatcacggagattgaggt

SEQ ID NO: 477038 - DNA, 60 bp, Artificial
  Synthetic oligonucleotide
ttacattttctcaggagagaactagcagatggggctgcgaggaatttggctgcctggcta

SEQ ID NO: 477039 - DNA, 60 bp, Artificial
  Synthetic oligonucleotide
ttaccaaactccatgttactattcagggcttgctgttggtatcaatccgtacagagattg

SEQ ID NO: 477040 - DNA, 60 bp, Artificial
  Synthetic oligonucleotide
ttaccaaatcgcaatcgcgatgaggaagcattccattccgtgtgtctccctaagatattg

SEQ ID NO: 477041 - DNA, 55 bp, Artificial
  Synthetic oligonucleotide
ttaccaacccgtctcgaacgcgaaacgtagagagtctcgggcggcgcgtgggcta

SEQ ID NO: 477042 - DNA, 55 bp, Artificial
  Synthetic oligonucleotide
ttaccaacctcttctcaccaggcgctcagcagaacgtccagttgatcaacaccaa

SEQ ID NO: 477043 - DNA, 51 bp, Artificial
  Synthetic oligonucleotide
ttaccaacggctcaaatcaaacattcacagtgataaattattacaaggatg

SEQ ID NO: 477044 - DNA, 55 bp, Artificial
  Synthetic oligonucleotide
ttaccaagactagcagacatcgtgaacgttttgtcggtcatcacgttgcttaacg

SEQ ID NO: 477045 - DNA, 52 bp, Artificial
  Synthetic oligonucleotide
ttaccaaggcagactatgcaaccccctgaacccatttgtcagccacaaggaa

SEQ ID NO: 477046 - DNA, 60 bp, Artificial
  Synthetic oligonucleotide
ttaccaagtcggcactcgctcacatgacattaaaggagttgcgttataatgtaccagaag

SEQ ID NO: 477047 - DNA, 58 bp, Artificial
  Synthetic oligonucleotide
ttaccaagtgcgaatacctttctgacattgtctctcacgtgggtactattccactaac

SEQ ID NO: 477048 - DNA, 58 bp, Artificial
  Synthetic oligonucleotide
ttaccaatcaaaaacacgctactcaatcaggtgataatatacataaatttgctaacgg

SEQ ID NO: 477049 - DNA, 59 bp, Artificial
  Synthetic oligonucleotide
ttaccaatctgatgaagggactggctggtcgcaagaaaaagcgaagcttgacagtaccc

SEQ ID NO: 477050 - DNA, 60 bp, Artificial
  Synthetic oligonucleotide
ttaccaatgtcgatgtcaacgtagcaaacggcgccaacgtcgttgctaatattcgagtgc

SEQ ID NO: 477051 - DNA, 55 bp, Artificial
  Synthetic oligonucleotide
ttaccacagggtgtccccaccttccaagttccagggtccgagcagttcgtgacca

SEQ ID NO: 477052 - DNA, 57 bp, Artificial
  Synthetic oligonucleotide
ttaccaccaacgtggggcctttcactggactaggcatttatgacaacattttggtgc

SEQ ID NO: 477053 - DNA, 50 bp, Artificial
  Synthetic oligonucleotide
ttaccaccaattgagagacttcatattggtgatagcgagaaccttggaac

SEQ ID NO: 477054 - DNA, 56 bp, Artificial
  Synthetic oligonucleotide
ttaccaccatactcagttccctcaccataactagtcttcttcggaaactccacgag

SEQ ID NO: 477055 - DNA, 60 bp, Artificial
  Synthetic oligonucleotide
ttaccaccatgattgggcaatgcgcaacccttttggatattgtgctgacagagcagccgg

SEQ ID NO: 477056 - DNA, 60 bp, Artificial
  Synthetic oligonucleotide
ttaccacccgatgggagacgccaacactgcgtcgctggtaattgcagtcatgaccgggct

SEQ ID NO: 477057 - DNA, 52 bp, Artificial
  Synthetic oligonucleotide
ttaccaccttgtccgttccgcttgggtcctccaggccccgaaggagtcctta

SEQ ID NO: 477058 - DNA, 55 bp, Artificial
  Synthetic oligonucleotide
ttaccacgtatataactcgagtcgggtctatagtcgcgcccagtaccacacgggg

SEQ ID NO: 477059 - DNA, 56 bp, Artificial
  Synthetic oligonucleotide
ttaccacgtctggtgatgatgacctcccgcccccccctggtgattccccgtcacgc

SEQ ID NO: 477060 - DNA, 54 bp, Artificial
  Synthetic oligonucleotide
ttaccactaggatatcttgtacgaaaactgatgcgccataaaaacgattacgag

SEQ ID NO: 477061 - DNA, 60 bp, Artificial
  Synthetic oligonucleotide
ttaccactggtgtgagaaaaggttagcaactctggtggcagcaaactgtcaaggagataa

SEQ ID NO: 477062 - DNA, 55 bp, Artificial
  Synthetic oligonucleotide
ttaccagacagcccgaaggtgtcaagggaatgtatagctcactgttaaagttcag

SEQ ID NO: 477063 - DNA, 55 bp, Artificial
  Synthetic oligonucleotide
ttaccagacttctggaggatccgactaccttaaatataagaggaggagcaagtcc

SEQ ID NO: 477064 - DNA, 55 bp, Artificial
  Synthetic oligonucleotide
ttaccagattttggcgatctattcaactgccgccagttcactggtactgttggtc

SEQ ID NO: 477065 - DNA, 59 bp, Artificial
  Synthetic oligonucleotide
ttaccagcaagaggataattatcacgagcaataagccccccgagacctggtgcaaggag

SEQ ID NO: 477066 - DNA, 60 bp, Artificial
  Synthetic oligonucleotide
ttaccagcaatcagaccccgttggaatggtactcctcaactgctgtcccagctgtagaag

SEQ ID NO: 477067 - DNA, 60 bp, Artificial
  Synthetic oligonucleotide
ttaccagcggaacctctcaggacgcaactgtccagtatgctggatacagtactccctggg

SEQ ID NO: 477068 - DNA, 60 bp, Artificial
  Synthetic oligonucleotide
ttaccagctgtaaatccaaataataacgcagaatattatgagatagctggcagattctca

SEQ ID NO: 477069 - DNA, 55 bp, Artificial
  Synthetic oligonucleotide
ttaccaggacgtgcttaaggaggttaaagcagcggcgtcaaaagtgaaggccaac

SEQ ID NO: 477070 - DNA, 51 bp, Artificial
  Synthetic oligonucleotide
ttaccaggtgacagatttaggctataggagttcgttttgtaatggaagtat

SEQ ID NO: 477071 - DNA, 53 bp, Artificial
  Synthetic oligonucleotide
ttaccagtcctcccaattccgaggtatcataatgacttgcccaagagggacgc

SEQ ID NO: 477072 - DNA, 58 bp, Artificial
  Synthetic oligonucleotide
ttaccagtcggtaatcggtccaaggttctctgcgcaattcgctgcgttcagtaccaag

SEQ ID NO: 477073 - DNA, 57 bp, Artificial
  Synthetic oligonucleotide
ttaccagtgtctgactgctctttttatggaccttggattatttctgggacttatccg

SEQ ID NO: 477074 - DNA, 54 bp, Artificial
  Synthetic oligonucleotide
ttaccagttacgcgtggcaaacctccaccaacccaagcgtcttctggaccgaag

SEQ ID NO: 477075 - DNA, 55 bp, Artificial
  Synthetic oligonucleotide
ttaccataattggtaggtgaggtcacgccgtttggtcaagtcacccgagctttcg

SEQ ID NO: 477076 - DNA, 55 bp, Artificial
  Synthetic oligonucleotide
ttaccataggaaacagctgcttaaccgcaaggcttaaccgcaaaccaacttccta

SEQ ID NO: 477077 - DNA, 60 bp, Artificial
  Synthetic oligonucleotide
ttaccatcagaactctgaacctgaagaagaggtgttggacaaatcgaatggtactctcga

SEQ ID NO: 477078 - DNA, 60 bp, Artificial
  Synthetic oligonucleotide
ttaccatcgtgagaaggcaattgtcaagatgtctgaatttgctgcatctgggaagacatt

SEQ ID NO: 477079 - DNA, 55 bp, Artificial
  Synthetic oligonucleotide
ttaccattactctgaagacatgatgcaattctccaaaggtttgatggtggcagac

SEQ ID NO: 477080 - DNA, 53 bp, Artificial
  Synthetic oligonucleotide
ttaccattttttgagttatcagaccctagtgttgaactttcccatggtaattt

SEQ ID NO: 477081 - DNA, 51 bp, Artificial
  Synthetic oligonucleotide
ttacccaaacccacctaggcctagtgtataaagctcctaatgcatccctgc

SEQ ID NO: 477082 - DNA, 50 bp, Artificial
  Synthetic oligonucleotide
ttacccaaacttattcgaaagaccagtggtagcaccaatcgaggttaaaa

SEQ ID NO: 477083 - DNA, 60 bp, Artificial
  Synthetic oligonucleotide
ttacccaacatgggcggttcagacagcgagttggccagaatgttactacatcaatcgtat

SEQ ID NO: 477084 - DNA, 56 bp, Artificial
  Synthetic oligonucleotide
ttacccaactaaatctggttactgtggaggtgtcttatacaaaattgggcaagtgc

SEQ ID NO: 477085 - DNA, 60 bp, Artificial
  Synthetic oligonucleotide
ttacccaatgcccagtcaagcatgaaggcagaagagatcacaccaggtagatacagaaca

SEQ ID NO: 477086 - DNA, 53 bp, Artificial
  Synthetic oligonucleotide
ttacccacaagtttgaagccaagtttttgaacggaagaaccctagagattgaa

SEQ ID NO: 477087 - DNA, 55 bp, Artificial
  Synthetic oligonucleotide
ttacccacagagtgcttcgaagagagacacctaagtgtatccccgtaatcgtcgg

SEQ ID NO: 477088 - DNA, 60 bp, Artificial
  Synthetic oligonucleotide
ttacccaccactgcttggattagttctgcagttaacaatcgctcctcagatatcaacaaa

SEQ ID NO: 477089 - DNA, 56 bp, Artificial
  Synthetic oligonucleotide
ttacccacggaccaacgacaacttacatcgttactcacctcgtcgaactcaccatg

SEQ ID NO: 477090 - DNA, 55 bp, Artificial
  Synthetic oligonucleotide
ttacccagaaagaatgcaaactcacatccttcttgggattggcttcgctgagccc

SEQ ID NO: 477091 - DNA, 54 bp, Artificial
  Synthetic oligonucleotide
ttacccagcttcttactaaatcaatccttctaattatcgctttcgctacagagg

SEQ ID NO: 477092 - DNA, 55 bp, Artificial
  Synthetic oligonucleotide
ttacccaggagaagagactattgggtcgtatgctatcctcactcctcaagcggtc

SEQ ID NO: 477093 - DNA, 60 bp, Artificial
  Synthetic oligonucleotide
ttacccaggagatttcatcaattatgaagagctaagagagcagttgagctcagtgtcatc

SEQ ID NO: 477094 - DNA, 53 bp, Artificial
  Synthetic oligonucleotide
ttacccagttgccaaaggatcatacaacaacacaagtggagaacagatgctta

SEQ ID NO: 477095 - DNA, 54 bp, Artificial
  Synthetic oligonucleotide
ttacccatatgtttcaaacttagggatacattaagacagcatgaggatgcttat

SEQ ID NO: 477096 - DNA, 54 bp, Artificial
  Synthetic oligonucleotide
ttaccccaccccaccggtcagcgatatttgggtgttaccaccgccctcagtaga

SEQ ID NO: 477097 - DNA, 54 bp, Artificial
  Synthetic oligonucleotide
ttacccccacggtggctaccagggacggcaaactccccacaacgcagctccgac

SEQ ID NO: 477098 - DNA, 60 bp, Artificial
  Synthetic oligonucleotide
ttacccccgaatacgacgcatacctagatatggtggacggcgctacttgctgcctagata

SEQ ID NO: 477099 - DNA, 59 bp, Artificial
  Synthetic oligonucleotide
ttacccccgatatgtcggaagcttgggatgagatagtgacctcctgcctccataccgcc

SEQ ID NO: 477100 - DNA, 55 bp, Artificial
  Synthetic oligonucleotide
ttaccccctcattgggacccacgccatgccctccgtgacccagagagaaagtttc

SEQ ID NO: 477101 - DNA, 60 bp, Artificial
  Synthetic oligonucleotide
ttacccccttgcccggagcttgagcagggcctactctacatgccacaagagcttactgtg

SEQ ID NO: 477102 - DNA, 53 bp, Artificial
  Synthetic oligonucleotide
ttaccccggaccgagtatcaataggctgtacccacggctgaaagagaaaacgt

SEQ ID NO: 477103 - DNA, 50 bp, Artificial
  Synthetic oligonucleotide
ttaccccggagctcccgttctccacactccttccccccgcgggaccccca

SEQ ID NO: 477104 - DNA, 57 bp, Artificial
  Synthetic oligonucleotide
ttaccccgtcagggtcctctgtgcaagttagtagcactagttatattaatccattgt

SEQ ID NO: 477105 - DNA, 54 bp, Artificial
  Synthetic oligonucleotide
ttacccctggacgccggacccgtccgatgtcttagtgtttgtcccgtacgatca

SEQ ID NO: 477106 - DNA, 54 bp, Artificial
  Synthetic oligonucleotide
ttacccgacatgatgcaagacccagtaacttttcgcccgtctacgcaagtcagc

SEQ ID NO: 477107 - DNA, 60 bp, Artificial
  Synthetic oligonucleotide
ttacccgaggacaacgagccaagcggatatgcacaaacagattgtgtgttggaagcaatg

SEQ ID NO: 477108 - DNA, 54 bp, Artificial
  Synthetic oligonucleotide
ttacccgaggacaatgagccgagtgcctatgcacaattagattgcgttctggag

SEQ ID NO: 477109 - DNA, 52 bp, Artificial
  Synthetic oligonucleotide
ttacccgagggccccatgctcaacggggaccgaggtggctttgcccgggcct

SEQ ID NO: 477110 - DNA, 60 bp, Artificial
  Synthetic oligonucleotide
ttacccgattgttccacatatattgattggagtgctcgaaattcatttggatttacgatc

SEQ ID NO: 477111 - DNA, 60 bp, Artificial
  Synthetic oligonucleotide
ttacccgcaattgcattatcgtttcgccatcaaagtatggttcgtttcatcaacatctgc

SEQ ID NO: 477112 - DNA, 55 bp, Artificial
  Synthetic oligonucleotide
ttacccgccgtggatgtcggcgcgagtgtcacagaggatgcgcattccctccgaa

SEQ ID NO: 477113 - DNA, 55 bp, Artificial
  Synthetic oligonucleotide
ttacccgcgtttggtaggccatacacaacttttctacgtatacataatgtaagca

SEQ ID NO: 477114 - DNA, 53 bp, Artificial
  Synthetic oligonucleotide
ttacccggcagcctctgcgattcctaccttttccgcgcgcgtacacactacac

SEQ ID NO: 477115 - DNA, 54 bp, Artificial
  Synthetic oligonucleotide
ttacccggcctcccttccatgtgaggactttccaggcggtcttcaaggaaggaa

SEQ ID NO: 477116 - DNA, 55 bp, Artificial
  Synthetic oligonucleotide
ttacccggctacctacttcgaaaagcctagtaccaccaatgattgtctcaagtgt

SEQ ID NO: 477117 - DNA, 54 bp, Artificial
  Synthetic oligonucleotide
ttacccggtaagccaaccgggtgtacacggtcgtcatgctgcggacagggttct

SEQ ID NO: 477118 - DNA, 55 bp, Artificial
  Synthetic oligonucleotide
ttacccgtggacgcctgacccatcggacgtcttggtatttgtcccgtacgatcaa

SEQ ID NO: 477119 - DNA, 56 bp, Artificial
  Synthetic oligonucleotide
ttacccgtggcaacgggctcactcatcgtgttgggaagagattttgtataaagtcc

SEQ ID NO: 477120 - DNA, 59 bp, Artificial
  Synthetic oligonucleotide
ttacccgtgttaatgtcaccgctgctgccttcaccaactacctacagctgttaggtctc

SEQ ID NO: 477121 - DNA, 58 bp, Artificial
  Synthetic oligonucleotide
ttacccgttaccaagtttagtctagtcaggatagtatctagatctgcgttctgcgtgt

SEQ ID NO: 477122 - DNA, 47 bp, Artificial
  Synthetic oligonucleotide
ttaccctaacatggagggggggaggaccccccctagatacccccccc

SEQ ID NO: 477123 - DNA, 60 bp, Artificial
  Synthetic oligonucleotide
ttaccctatagtgcaaaatgcacaagggcaaatgatataccaggcagtatcacctaggac

SEQ ID NO: 477124 - DNA, 60 bp, Artificial
  Synthetic oligonucleotide
ttaccctatagtgcagaatcttcaagggcaaatggtacatcaagccttatcacctaggac

SEQ ID NO: 477125 - DNA, 58 bp, Artificial
  Synthetic oligonucleotide
ttaccctattcaagacgcccaatacacaaataatagaggaaagagcatccttttcatg

SEQ ID NO: 477126 - DNA, 56 bp, Artificial
  Synthetic oligonucleotide
ttaccctcagtcccatatttactttcaagcatttgtatcagtaattcaagctttgc

SEQ ID NO: 477127 - DNA, 60 bp, Artificial
  Synthetic oligonucleotide
ttaccctcatgctgctaacggtgtctggaccgcttaccaacactccatcatcctcatcgc

SEQ ID NO: 477128 - DNA, 58 bp, Artificial
  Synthetic oligonucleotide
ttaccctcgcacgcctatttcgatgatacttggcaccagtattttgtggaaggaagta

SEQ ID NO: 477129 - DNA, 58 bp, Artificial
  Synthetic oligonucleotide
ttaccctggcccctatgtgctctgagtttgccggccttagacaagcagttacgcaagg

SEQ ID NO: 477130 - DNA, 52 bp, Artificial
  Synthetic oligonucleotide
ttaccctgtatttgttcagtaacccaatcgaaatacctcggatttttaatct

SEQ ID NO: 477131 - DNA, 59 bp, Artificial
  Synthetic oligonucleotide
ttacccttgaatttagcgaaatgggttctctgatgaacattcgagtcgctaactctata

SEQ ID NO: 477132 - DNA, 50 bp, Artificial
  Synthetic oligonucleotide
ttaccgaacgacagacacggaggggagggtcgcccgcggaagaggacgaa

SEQ ID NO: 477133 - DNA, 60 bp, Artificial
  Synthetic oligonucleotide
ttaccgaatcgttcctgattcacgtgtagctgcggagcatttgcttgggcatttgcttga

SEQ ID NO: 477134 - DNA, 56 bp, Artificial
  Synthetic oligonucleotide
ttaccgaatggaactcgagagctagcaataggtagactaattatgccaaccaattt

SEQ ID NO: 477135 - DNA, 58 bp, Artificial
  Synthetic oligonucleotide
ttaccgacagtgaagcttgctaagcaggccctgcccctgctaacgaatcctaaaattg

SEQ ID NO: 477136 - DNA, 55 bp, Artificial
  Synthetic oligonucleotide
ttaccgactttgaccagggctggggccctatcagacatgccgacggaagcggtcc

SEQ ID NO: 477137 - DNA, 55 bp, Artificial
  Synthetic oligonucleotide
ttaccgatccctcccacattacagcagagacggctaagcgtaggttggctagggg

SEQ ID NO: 477138 - DNA, 60 bp, Artificial
  Synthetic oligonucleotide
ttaccgcacaaacactacaggtgatgactatatcccaacatgtgattgcacagatgcaac

SEQ ID NO: 477139 - DNA, 58 bp, Artificial
  Synthetic oligonucleotide
ttaccgccagctaacgtcaccgtggctacttcaggccagccttttaaccttgcagctg

SEQ ID NO: 477140 - DNA, 54 bp, Artificial
  Synthetic oligonucleotide
ttaccgccgacgttgcgtcttgggcgattaaccttgtcgtcgccgacgttcgaa

SEQ ID NO: 477141 - DNA, 55 bp, Artificial
  Synthetic oligonucleotide
ttaccgccgagtcaccatcgtcgacgtaacaaaccctcttgttgaatcacacaag

SEQ ID NO: 477142 - DNA, 56 bp, Artificial
  Synthetic oligonucleotide
ttaccgctacgtccacaagaagaagaatcccgctcccgccgacatctcaatgctcg

SEQ ID NO: 477143 - DNA, 60 bp, Artificial
  Synthetic oligonucleotide
ttaccgctcagcgtgaaggtatgatttgaaacaatattcgccagttagcaagtgggatta

SEQ ID NO: 477144 - DNA, 59 bp, Artificial
  Synthetic oligonucleotide
ttaccgctcgttttacacagcttaccaacttgggcgcgagggcaacaactgtgatgaca

SEQ ID NO: 477145 - DNA, 60 bp, Artificial
  Synthetic oligonucleotide
ttaccgctgcggagactggccatacctctcaggttgtacccagcgacaccatgcaaacta

SEQ ID NO: 477146 - DNA, 53 bp, Artificial
  Synthetic oligonucleotide
ttaccggacccagaggaagattacttagtacggtacttattcagaggaatagg

SEQ ID NO: 477147 - DNA, 58 bp, Artificial
  Synthetic oligonucleotide
ttaccggatgtaccgatcacccgatgtgcccaaagggtgcgaaggcccatgcaaggtc

SEQ ID NO: 477148 - DNA, 60 bp, Artificial
  Synthetic oligonucleotide
ttaccggcgctgtttcctttatttgctacggcattgaagatgatggtctcgaatacgtgc

SEQ ID NO: 477149 - DNA, 60 bp, Artificial
  Synthetic oligonucleotide
ttaccggctggtggtaagttccgctccattgcgactacagcgacggctgaggcctctgta

SEQ ID NO: 477150 - DNA, 52 bp, Artificial
  Synthetic oligonucleotide
ttaccgggacccagggccatcctcttctgacgggaacggcggtagcggggaa

SEQ ID NO: 477151 - DNA, 52 bp, Artificial
  Synthetic oligonucleotide
ttaccgggctattaaacgggttgaaccgcttgcaaccgaacgactgcatcaa

SEQ ID NO: 477152 - DNA, 52 bp, Artificial
  Synthetic oligonucleotide
ttaccgggtcctttgcgggggatggcgtttcagggattaaattatccgcggc

SEQ ID NO: 477153 - DNA, 54 bp, Artificial
  Synthetic oligonucleotide
ttaccggtattggtaaggctggagatcagactttaactcttacaccgcgtgggg

SEQ ID NO: 477154 - DNA, 55 bp, Artificial
  Synthetic oligonucleotide
ttaccggtccaaccgcgggtactcgctggatttatcagctcgtggaatctcgcat

SEQ ID NO: 477155 - DNA, 55 bp, Artificial
  Synthetic oligonucleotide
ttaccgtaacacccaatgctccttcgataaccctcaaacttggtgactacggaga

SEQ ID NO: 477156 - DNA, 57 bp, Artificial
  Synthetic oligonucleotide
ttaccgtatatacaacagattacaaggttacatagaagccgtacagctacaagaact

SEQ ID NO: 477157 - DNA, 60 bp, Artificial
  Synthetic oligonucleotide
ttaccgtatgaatatatttccgcgcaacacgctgtggtagaaaaaatgttatcatatgca

SEQ ID NO: 477158 - DNA, 60 bp, Artificial
  Synthetic oligonucleotide
ttaccgtatgagtactttatcgcgcaacacgctgtagtagagaaaatgttatcatatgca

SEQ ID NO: 477159 - DNA, 55 bp, Artificial
  Synthetic oligonucleotide
ttaccgtcctgaatgaacggtgatactaagtcgatgaccttttgggtgacaatac

SEQ ID NO: 477160 - DNA, 51 bp, Artificial
  Synthetic oligonucleotide
ttaccgtcgttcccgacgttaaagggagactaccacaagcttgaaaccgtc

SEQ ID NO: 477161 - DNA, 55 bp, Artificial
  Synthetic oligonucleotide
ttaccgtctcaccatacgctcggctgagggttacctcaaaagcggcaagacgggc

SEQ ID NO: 477162 - DNA, 55 bp, Artificial
  Synthetic oligonucleotide
ttaccgtctgcgctacgtatgacttatgtgtgctggaaacagggcatttgtgtaa

SEQ ID NO: 477163 - DNA, 56 bp, Artificial
  Synthetic oligonucleotide
ttaccgtgaagaagttagtcatctaagcgttgccggagttgtgagtgggggcgggc

SEQ ID NO: 477164 - DNA, 57 bp, Artificial
  Synthetic oligonucleotide
ttaccgtgacatacaactttaacttttagttatggcgtattgtcgctgttgtgatac

SEQ ID NO: 477165 - DNA, 56 bp, Artificial
  Synthetic oligonucleotide
ttaccgtgatgttatttcttcatttggaggtaaaacctcttatgacgctgacaacc

SEQ ID NO: 477166 - DNA, 55 bp, Artificial
  Synthetic oligonucleotide
ttaccgttcgggtacaagttgggcgcaacaagctaaactgaatgcaagtgattca

SEQ ID NO: 477167 - DNA, 55 bp, Artificial
  Synthetic oligonucleotide
ttaccgttggcaatatgtcgtatggtttgagtacgggtattacgccgaagtcgtc

SEQ ID NO: 477168 - DNA, 58 bp, Artificial
  Synthetic oligonucleotide
ttacctactgggataaagagaaacgtatgacactaaaacagatgatacaacaagtcac

SEQ ID NO: 477169 - DNA, 60 bp, Artificial
  Synthetic oligonucleotide
ttacctactgtcatggaagcaagtattgtcagaattgcaggacgttgagaatgaggagaa

SEQ ID NO: 477170 - DNA, 52 bp, Artificial
  Synthetic oligonucleotide
ttacctacttcaggggtgaaatccgttcaactgttcgttcgtgctgaatccg

SEQ ID NO: 477171 - DNA, 60 bp, Artificial
  Synthetic oligonucleotide
ttacctagccagccttcaggaccgtgtcactcggtcactgctgtaccatataggggctaa

SEQ ID NO: 477172 - DNA, 54 bp, Artificial
  Synthetic oligonucleotide
ttacctatacagaaagaaacatgggaagcatggtggatggagtattggcaagct

SEQ ID NO: 477173 - DNA, 60 bp, Artificial
  Synthetic oligonucleotide
ttacctatagcgatatatttctagctctatagctagtcctatatgctatttatacctctt

SEQ ID NO: 477174 - DNA, 59 bp, Artificial
  Synthetic oligonucleotide
ttacctatatcattttaactgtcgtatctcttgtctgtggtatacttagtctagttcta

SEQ ID NO: 477175 - DNA, 60 bp, Artificial
  Synthetic oligonucleotide
ttacctatatgccaatcctcctaaacaaagtgatggcgtaagaagctgccgtatgaaaga

SEQ ID NO: 477176 - DNA, 56 bp, Artificial
  Synthetic oligonucleotide
ttacctatattgttctaactgtcatttctctagttttcggtgcacttagtctgggt

SEQ ID NO: 477177 - DNA, 53 bp, Artificial
  Synthetic oligonucleotide
ttacctatgacgactaaactcccgccgaaaggctttctctcgcgtcttaaacc

SEQ ID NO: 477178 - DNA, 58 bp, Artificial
  Synthetic oligonucleotide
ttacctatggcatcttacagttgtggccactcctgctattgctcctagtgttacctca

SEQ ID NO: 477179 - DNA, 60 bp, Artificial
  Synthetic oligonucleotide
ttacctcatggcacccaagaccatgaagtctgacaagtacaactatgttgtctcgtatgg

SEQ ID NO: 477180 - DNA, 55 bp, Artificial
  Synthetic oligonucleotide
ttacctcgaggatgatgaaatttaggcgcacatgacacacggacggacttaatgg

SEQ ID NO: 477181 - DNA, 57 bp, Artificial
  Synthetic oligonucleotide
ttacctcgggctctagctcatcggcaccccccaatatcatacgcgtgggtataagtt

SEQ ID NO: 477182 - DNA, 52 bp, Artificial
  Synthetic oligonucleotide
ttacctcgtcactcacaaccagggaagaccatctgggttgagcacaagttgg

SEQ ID NO: 477183 - DNA, 55 bp, Artificial
  Synthetic oligonucleotide
ttacctctactgacagcagcagtgtaacaagtagtacacctattccagggtctcg

SEQ ID NO: 477184 - DNA, 57 bp, Artificial
  Synthetic oligonucleotide
ttacctctctgtgtctgcccttcccttgtcgaagccatgggaaagacttttagctcc

SEQ ID NO: 477185 - DNA, 59 bp, Artificial
  Synthetic oligonucleotide
ttacctgccccggatcctgattttttagacattatagctttgcataggcctgcattaac

SEQ ID NO: 477186 - DNA, 60 bp, Artificial
  Synthetic oligonucleotide
ttacctgcgtcaagcctgctctatgatcgtactgaaatcatgctcccgaacatgaacaat

SEQ ID NO: 477187 - DNA, 58 bp, Artificial
  Synthetic oligonucleotide
ttacctgtgtgttgtgtgcaacatattaacaatagtgggggaggcttgggactttgtc

SEQ ID NO: 477188 - DNA, 60 bp, Artificial
  Synthetic oligonucleotide
ttacctgtgttgatactaccagaagtacaaatttaactattagcactgccactgctgcgg

SEQ ID NO: 477189 - DNA, 50 bp, Artificial
  Synthetic oligonucleotide
ttaccttaagctacctatatgaagagtacacttttcataacaatgtatgg

SEQ ID NO: 477190 - DNA, 58 bp, Artificial
  Synthetic oligonucleotide
ttaccttacatgaatggttactgttacttgaaattgattcgacgaacttgtcgattca

SEQ ID NO: 477191 - DNA, 56 bp, Artificial
  Synthetic oligonucleotide
ttaccttacccgtgaccctacaactcccctcgcaagagctgcgtgggaaacagcaa

SEQ ID NO: 477192 - DNA, 60 bp, Artificial
  Synthetic oligonucleotide
ttaccttatatggacgcttatgacgctccactggatgcgcatgtcaacgctgtcgatcat

SEQ ID NO: 477193 - DNA, 60 bp, Artificial
  Synthetic oligonucleotide
ttaccttgcacctgggatgtgtgtaaataggaaagaatgcaggcacaccttgagtgtgag

SEQ ID NO: 477194 - DNA, 60 bp, Artificial
  Synthetic oligonucleotide
ttaccttggcaaattgacgacatgtataattttgcatgatcaatatgtctagacagattt

SEQ ID NO: 477195 - DNA, 55 bp, Artificial
  Synthetic oligonucleotide
ttacctttacgtatctgtgttgacacactcagcggaggtttaaccgaactcgcta

SEQ ID NO: 477196 - DNA, 55 bp, Artificial
  Synthetic oligonucleotide
ttacctttgggtgttgagagaccttatcttagtcctgaaggcaagacgcgggagg

SEQ ID NO: 477197 - DNA, 51 bp, Artificial
  Synthetic oligonucleotide
ttacctttttggaggtctaatgggtttgttaacaataagaagaagcctctt

SEQ ID NO: 477198 - DNA, 59 bp, Artificial
  Synthetic oligonucleotide
ttacgaaaagcggaaactattcacaatactcaagcttgtcgactaatcataaactatgc

SEQ ID NO: 477199 - DNA, 54 bp, Artificial
  Synthetic oligonucleotide
ttacgaaaagggttcgcgatcttgtaggttcaaaacttggagagtggccaacga

SEQ ID NO: 477200 - DNA, 60 bp, Artificial
  Synthetic oligonucleotide
ttacgaaacacacaataccagatccgtctttggtcagtctacagagcaggcaacgtacta

SEQ ID NO: 477201 - DNA, 55 bp, Artificial
  Synthetic oligonucleotide
ttacgaaagaggttgccgctggtaccccattgttggacctgtccctggagtggcc

SEQ ID NO: 477202 - DNA, 58 bp, Artificial
  Synthetic oligonucleotide
ttacgaacaataagtctgctgaggaagccaatcgatagagcagtatattcggtagact

SEQ ID NO: 477203 - DNA, 58 bp, Artificial
  Synthetic oligonucleotide
ttacgaaccccgaagatagaaccgacgatggttgcaaccactttagagcatagattca

SEQ ID NO: 477204 - DNA, 60 bp, Artificial
  Synthetic oligonucleotide
ttacgaacgagataggtgataagtttggacactatctctcagcgtatgctagacttaaat

SEQ ID NO: 477205 - DNA, 60 bp, Artificial
  Synthetic oligonucleotide
ttacgaacgtattctcgtatcattgatgctcgtaagaaagatgactcaagctgccgagga

SEQ ID NO: 477206 - DNA, 60 bp, Artificial
  Synthetic oligonucleotide
ttacgaactagaatatcagaaggctttgaatagttggattgcacaagtttcaatgcgctt

SEQ ID NO: 477207 - DNA, 60 bp, Artificial
  Synthetic oligonucleotide
ttacgaaggaaatattgaaacgatcattaatgcaactgatccattcagtgtagaatcgtt

SEQ ID NO: 477208 - DNA, 54 bp, Artificial
  Synthetic oligonucleotide
ttacgaaggcgaaggggaggacactgaggtgaacctttgctttactgaagaaac

SEQ ID NO: 477209 - DNA, 50 bp, Artificial
  Synthetic oligonucleotide
ttacgaaggcgtgagtggttcgaaaacacgtggatcataaatgacattgg

SEQ ID NO: 477210 - DNA, 58 bp, Artificial
  Synthetic oligonucleotide
ttacgaagtgcgcaacgcgtccggggggtaccatgtcacgaacgactgctccaactca

SEQ ID NO: 477211 - DNA, 58 bp, Artificial
  Synthetic oligonucleotide
ttacgaagtggcgggtaatactagcccgccacttcgttgcctatataatcgcataata

SEQ ID NO: 477212 - DNA, 55 bp, Artificial
  Synthetic oligonucleotide
ttacgaatctatcaggtggaccagagatgcacgcaacacacaagatcatgtgcgt

SEQ ID NO: 477213 - DNA, 55 bp, Artificial
  Synthetic oligonucleotide
ttacgaatctgcaccacatttctgccccagcgattttgcattaccttagccttgc

SEQ ID NO: 477214 - DNA, 60 bp, Artificial
  Synthetic oligonucleotide
ttacgaatggagtaagcagtgtatgagaagcgcacactctagtataggcagtagattacg

SEQ ID NO: 477215 - DNA, 50 bp, Artificial
  Synthetic oligonucleotide
ttacgaatggggtaaacaacgtatgaaaagcgtacactctagtataggca

SEQ ID NO: 477216 - DNA, 55 bp, Artificial
  Synthetic oligonucleotide
ttacgacaattttgtcgttattatgccaagttcgtctggaactggcgccttagcc

SEQ ID NO: 477217 - DNA, 60 bp, Artificial
  Synthetic oligonucleotide
ttacgaccagcttggctcaacaaatagagcggttaacatcggctatgtgttgagaacaac

SEQ ID NO: 477218 - DNA, 58 bp, Artificial
  Synthetic oligonucleotide
ttacgaccgcacgcaagtaaaagtacaaactcgcgaggagaatccacgcaacgcgcgc

SEQ ID NO: 477219 - DNA, 60 bp, Artificial
  Synthetic oligonucleotide
ttacgacctaatcaacactgcggcttgccggctgatctatgacgtactgaatttccctgg

SEQ ID NO: 477220 - DNA, 58 bp, Artificial
  Synthetic oligonucleotide
ttacgacggcgtacagtgagacgccggaggtggaatgtgtctgggtgattgagtctga

SEQ ID NO: 477221 - DNA, 55 bp, Artificial
  Synthetic oligonucleotide
ttacgagacggtttggattgatgaaggacttatggttcatcctgggctcgtgtgg

SEQ ID NO: 477222 - DNA, 59 bp, Artificial
  Synthetic oligonucleotide
ttacgagacttgcgctcccttacaccgcgccgcaccgagtgttggcaacagtgtataac

SEQ ID NO: 477223 - DNA, 56 bp, Artificial
  Synthetic oligonucleotide
ttacgagagaaaacggtgagccaggataagttaccaaatactcgacgcggcaattg

SEQ ID NO: 477224 - DNA, 60 bp, Artificial
  Synthetic oligonucleotide
ttacgagagactcgaaccttgctcagaccttgatccgaaacatagtgtcgttgacaggcc

SEQ ID NO: 477225 - DNA, 60 bp, Artificial
  Synthetic oligonucleotide
ttacgagatattcagctacgtaatcaatgtctggacatcttgcgtgagtacggaagaagt

SEQ ID NO: 477226 - DNA, 60 bp, Artificial
  Synthetic oligonucleotide
ttacgagatccctcaagtagaactctacgtgcagctggtcagaaagttgaatagcactaa

SEQ ID NO: 477227 - DNA, 57 bp, Artificial
  Synthetic oligonucleotide
ttacgagcagtctgtcatgtggaccagagggggagatttccaagacgtggtaacctc

SEQ ID NO: 477228 - DNA, 60 bp, Artificial
  Synthetic oligonucleotide
ttacgagcatgcagtctcgcgtgttgtgtttctcgccgatcaactctggacgaatggaaa

SEQ ID NO: 477229 - DNA, 54 bp, Artificial
  Synthetic oligonucleotide
ttacgagcgcccaagttgctggattgcggtcgcagaattctgacgcgtgctgct

SEQ ID NO: 477230 - DNA, 55 bp, Artificial
  Synthetic oligonucleotide
ttacgaggctcggttacgtaagtagagataaaagcgagagctatttcaagggttg

SEQ ID NO: 477231 - DNA, 60 bp, Artificial
  Synthetic oligonucleotide
ttacgagggagacaccagtgcgggctataaccatgacgtgtccatacttcgtgcatggat

SEQ ID NO: 477232 - DNA, 50 bp, Artificial
  Synthetic oligonucleotide
ttacgagtaaacgctaaagctaactgtccttttccaaatcccgtcgtcag

SEQ ID NO: 477233 - DNA, 60 bp, Artificial
  Synthetic oligonucleotide
ttacgagtcaagttgtcagtgtcagccacgagagtccttgaccgccatagcgagcgccac

SEQ ID NO: 477234 - DNA, 60 bp, Artificial
  Synthetic oligonucleotide
ttacgatataggatacatacccgctagtgcttatgttatctttacactcatacacagttc

SEQ ID NO: 477235 - DNA, 60 bp, Artificial
  Synthetic oligonucleotide
ttacgatatgtatcatgaaaaaccaatcgtatacatgataggatcagcgccctcgtattg

SEQ ID NO: 477236 - DNA, 55 bp, Artificial
  Synthetic oligonucleotide
ttacgatcgtcccatttgtttgctaacataggcataacgtctggggtttgtaaat

SEQ ID NO: 477237 - DNA, 60 bp, Artificial
  Synthetic oligonucleotide
ttacgatctgggcaaacatgtggaaactgctgcacagacagctaaagatctagtgatacc

SEQ ID NO: 477238 - DNA, 57 bp, Artificial
  Synthetic oligonucleotide
ttacgatgatgtacgacggccaagacctcacggactattttttagtccaagaggtca

SEQ ID NO: 477239 - DNA, 60 bp, Artificial
  Synthetic oligonucleotide
ttacgatgcgcttggagacatccaggtagttttgattgggcttgatcaacagattaagaa

SEQ ID NO: 477240 - DNA, 59 bp, Artificial
  Synthetic oligonucleotide
ttacgatgtaatcgcgttgaatcactatgtaataataaatgccaaaggccgtagcaccg

SEQ ID NO: 477241 - DNA, 50 bp, Artificial
  Synthetic oligonucleotide
ttacgatgtcgtggttcctcaggaatggcctctcgtggtgctgggttatc

SEQ ID NO: 477242 - DNA, 56 bp, Artificial
  Synthetic oligonucleotide
ttacgatgtttcattggcgtatagggggagagtacgaactggtactcaacctatta

SEQ ID NO: 477243 - DNA, 52 bp, Artificial
  Synthetic oligonucleotide
ttacgattaaaatcctactcggaagccctaggactaatgagtcgtttcctcc

SEQ ID NO: 477244 - DNA, 60 bp, Artificial
  Synthetic oligonucleotide
ttacgattggataacttctcaattatcagataacttgtttgccggacatctgagcaatct

SEQ ID NO: 477245 - DNA, 53 bp, Artificial
  Synthetic oligonucleotide
ttacgcaagtgaatgccgaaacaagaagcaatacactgacagagttaacatca

SEQ ID NO: 477246 - DNA, 59 bp, Artificial
  Synthetic oligonucleotide
ttacgcacatcggccgcggtcgagagaaggacggactgtcgctatccggcgactaagga

SEQ ID NO: 477247 - DNA, 59 bp, Artificial
  Synthetic oligonucleotide
ttacgcacctggggtacacaatcgaatacgcttagtgagagggacgcgaattggatata

SEQ ID NO: 477248 - DNA, 59 bp, Artificial
  Synthetic oligonucleotide
ttacgcatgcagatcggcgagggaattcgcaaagttgcaagacgatttaacggtactaa

SEQ ID NO: 477249 - DNA, 51 bp, Artificial
  Synthetic oligonucleotide
ttacgcattgatggcaagctttttcgtggagtacttgatacgggggctgat

SEQ ID NO: 477250 - DNA, 60 bp, Artificial
  Synthetic oligonucleotide
ttacgccaacgaatgtcctaatcgacaaagctcagagaaggctcacatccttcaacaagc

SEQ ID NO: 477251 - DNA, 60 bp, Artificial
  Synthetic oligonucleotide
ttacgccacaagtttgcactagaatgttacttgttatcacacgtattgcctcgagcgagg

SEQ ID NO: 477252 - DNA, 55 bp, Artificial
  Synthetic oligonucleotide
ttacgccatagaaataagttttgcctacgtgaaaggagaaatggccgtctgccac

SEQ ID NO: 477253 - DNA, 57 bp, Artificial
  Synthetic oligonucleotide
ttacgccatagtaattttggttatagatggcattctatgaccccgtcaagaggacgt

SEQ ID NO: 477254 - DNA, 60 bp, Artificial
  Synthetic oligonucleotide
ttacgccatatatgcctcttcattttgtcgatactttctattgcaagttaccgctcgtca

SEQ ID NO: 477255 - DNA, 57 bp, Artificial
  Synthetic oligonucleotide
ttacgccggttgccagggtctcactgcccctaaaatccaaattctgatagacaacca

SEQ ID NO: 477256 - DNA, 56 bp, Artificial
  Synthetic oligonucleotide
ttacgcgacccaaccggcagcacttccattatgacgcccgcccattgtggtaaacc

SEQ ID NO: 477257 - DNA, 55 bp, Artificial
  Synthetic oligonucleotide
ttacgcgcacgttggattggagttagcgggtacagacgcggaacgtgcagcaggt

SEQ ID NO: 477258 - DNA, 55 bp, Artificial
  Synthetic oligonucleotide
ttacgcgcgatgctattcagatgttgagatatctttatgccaacttaagggaagg

SEQ ID NO: 477259 - DNA, 57 bp, Artificial
  Synthetic oligonucleotide
ttacgcgcttatgaaggcacagcctatccctaaggtacgcttaaccgccgaacgtga

SEQ ID NO: 477260 - DNA, 60 bp, Artificial
  Synthetic oligonucleotide
ttacgcggactccccgtctgtgccttcacatctgccggaccgtgtgcacttcgcttcacc

SEQ ID NO: 477261 - DNA, 50 bp, Artificial
  Synthetic oligonucleotide
ttacgcgtcctcctcatagccagggacggagcaatgtatgtgcatcacat

SEQ ID NO: 477262 - DNA, 58 bp, Artificial
  Synthetic oligonucleotide
ttacgctaccattttggtacatcgttaacaaggtttaattgctgtactggatgcattg

SEQ ID NO: 477263 - DNA, 59 bp, Artificial
  Synthetic oligonucleotide
ttacgctaggcaaatacccatacctgccatcctccttgatcagctttaccgttttgcca

SEQ ID NO: 477264 - DNA, 55 bp, Artificial
  Synthetic oligonucleotide
ttacgctcctgatgagcaattctcagatctgactatcttctccacacgtcttacg

SEQ ID NO: 477265 - DNA, 57 bp, Artificial
  Synthetic oligonucleotide
ttacgctgccttccaccgggctctgcaggatcccaaagtcaagggtctgtattttcc

SEQ ID NO: 477266 - DNA, 53 bp, Artificial
  Synthetic oligonucleotide
ttacgctgggactttccactggggcgttccagtaggtggggtctgggcgggac

SEQ ID NO: 477267 - DNA, 59 bp, Artificial
  Synthetic oligonucleotide
ttacgctgggtatctctccacccatcaactggatggtgtttatcccgataactgggcgc

SEQ ID NO: 477268 - DNA, 55 bp, Artificial
  Synthetic oligonucleotide
ttacgcttcggctgaccgtttcctccccgggcccaacacgagcgggcttgagtca

SEQ ID NO: 477269 - DNA, 60 bp, Artificial
  Synthetic oligonucleotide
ttacgcttgcgttgtacccagagtctagcgtgttaacgctagacgtgtcattcactcgcc

SEQ ID NO: 477270 - DNA, 57 bp, Artificial
  Synthetic oligonucleotide
ttacgctttacacactagtattgattacatacggactaggggggaatctctacagcc

SEQ ID NO: 477271 - DNA, 59 bp, Artificial
  Synthetic oligonucleotide
ttacggaaataatgcttgaaacattaaatgatgactatattaaacacttcacaccagga

SEQ ID NO: 477272 - DNA, 53 bp, Artificial
  Synthetic oligonucleotide
ttacggaacggtgcaattgccgtacgacaaaatcaaacagtatgctctcgagc

SEQ ID NO: 477273 - DNA, 60 bp, Artificial
  Synthetic oligonucleotide
ttacggaagatcgataagatcatcccagaagtcgccgtcaaatagtggtagagcttcaat

SEQ ID NO: 477274 - DNA, 59 bp, Artificial
  Synthetic oligonucleotide
ttacggaatacccatggctgagcgccagaacagtggatggcttaagaagtttaccgaga

SEQ ID NO: 477275 - DNA, 55 bp, Artificial
  Synthetic oligonucleotide
ttacggaatgtcgttaaactctaggctttccggatggcttctaattatccgaggc

SEQ ID NO: 477276 - DNA, 60 bp, Artificial
  Synthetic oligonucleotide
ttacggacaccctgttgtgtggttctaccacgagtcaggagctgcgagtattgtagcaag

SEQ ID NO: 477277 - DNA, 60 bp, Artificial
  Synthetic oligonucleotide
ttacggaggtagatctgatgaattggtctcttctgtgggccgagccgaaaaggatcctga

SEQ ID NO: 477278 - DNA, 56 bp, Artificial
  Synthetic oligonucleotide
ttacggaggttttggtcagtacgatctgtcaccgaaaggaacctgattagccattc

SEQ ID NO: 477279 - DNA, 55 bp, Artificial
  Synthetic oligonucleotide
ttacggagtgtacttatgcctccgatttcggtggtatagccaccgttgcctacaa

SEQ ID NO: 477280 - DNA, 56 bp, Artificial
  Synthetic oligonucleotide
ttacggagttttagggcccatttgtccttacgtatgtgcagcgattacttgtatcg

SEQ ID NO: 477281 - DNA, 54 bp, Artificial
  Synthetic oligonucleotide
ttacggatactaaaacgcgttatttcaactcagtgagtgggaagttgattttag

SEQ ID NO: 477282 - DNA, 58 bp, Artificial
  Synthetic oligonucleotide
ttacggattcagaaatgagcaagctgtatgagcgtgtcagaaaacaattgagggagaa

SEQ ID NO: 477283 - DNA, 50 bp, Artificial
  Synthetic oligonucleotide
ttacggatttctgccaccatcatgatgtcaacccgagcctaattggaacc

SEQ ID NO: 477284 - DNA, 60 bp, Artificial
  Synthetic oligonucleotide
ttacggcacactgggaatggattgtgaaccacagtcaggacttgattttggacaattgta

SEQ ID NO: 477285 - DNA, 55 bp, Artificial
  Synthetic oligonucleotide
ttacggcgacgttatgtcggcagtcggtcggctttggattcccgaatttcagtac

SEQ ID NO: 477286 - DNA, 58 bp, Artificial
  Synthetic oligonucleotide
ttacggcgtacgctcagcagacgaggggcctcctggggtgcataattaccagtttgac

SEQ ID NO: 477287 - DNA, 60 bp, Artificial
  Synthetic oligonucleotide
ttacggctgacagtatgaagtggagggcgcttgcgtatatagttgcggtgtttgacgcct

SEQ ID NO: 477288 - DNA, 52 bp, Artificial
  Synthetic oligonucleotide
ttacgggaaggttcccattttcagaggagtaatcagaggccttgagacaaaa

SEQ ID NO: 477289 - DNA, 55 bp, Artificial
  Synthetic oligonucleotide
ttacgggaaggtttttgcttatctatatcaggctgcaccacgagactacgattgt

SEQ ID NO: 477290 - DNA, 55 bp, Artificial
  Synthetic oligonucleotide
ttacgggagtagattatgaccggggattccatgtgtggatagaatgcgtgacttc

SEQ ID NO: 477291 - DNA, 55 bp, Artificial
  Synthetic oligonucleotide
ttacgggcgacaatacaccaacgtcctccgagcctgccccctctgtccgcccctc

SEQ ID NO: 477292 - DNA, 50 bp, Artificial
  Synthetic oligonucleotide
ttacggggagtaacaatgagacctacctcgcaggcccaaagaaatgacat

SEQ ID NO: 477293 - DNA, 54 bp, Artificial
  Synthetic oligonucleotide
ttacggggctttactcttctaccatacctgtcttcaatcccaactggaaaactc

SEQ ID NO: 477294 - DNA, 56 bp, Artificial
  Synthetic oligonucleotide
ttacggggggaaagctagtaacgaccagcggccgtattgctggcactatgccccac

SEQ ID NO: 477295 - DNA, 55 bp, Artificial
  Synthetic oligonucleotide
ttacgggtgtcggggaccgttagcgtcacgcaaattggaggagacgatcctatgg

SEQ ID NO: 477296 - DNA, 60 bp, Artificial
  Synthetic oligonucleotide
ttacggtagcaccccgctgtggatagccagcaagacactactagagcatgctagtgcaac

SEQ ID NO: 477297 - DNA, 51 bp, Artificial
  Synthetic oligonucleotide
ttacggtgtaattccgtgagggtggcgtaaaccaaattacgcaatgttttg

SEQ ID NO: 477298 - DNA, 47 bp, Artificial
  Synthetic oligonucleotide
ttacggtgttactgtttaccgttccgttttatattaaccccgttccg

SEQ ID NO: 477299 - DNA, 58 bp, Artificial
  Synthetic oligonucleotide
ttacggttacgacctggctggcctatacattcgtgaatgaagacatagggaccataaa

SEQ ID NO: 477300 - DNA, 52 bp, Artificial
  Synthetic oligonucleotide
ttacgtaatatgcgacatgacggtgaggttttaatggctgctgagttgtttg

SEQ ID NO: 477301 - DNA, 60 bp, Artificial
  Synthetic oligonucleotide
ttacgtaatctttcgcgagatcagtgcgattcagagaatattggatgcagttctagcgcc

SEQ ID NO: 477302 - DNA, 55 bp, Artificial
  Synthetic oligonucleotide
ttacgtaatgagttaaataggcgggcagttgtccgctaaacgtgtcggtggtcaa

SEQ ID NO: 477303 - DNA, 50 bp, Artificial
  Synthetic oligonucleotide
ttacgtaccaccgatggatcactattcttccgcgctatgcctcagaatgg

SEQ ID NO: 477304 - DNA, 59 bp, Artificial
  Synthetic oligonucleotide
ttacgtatccgtcgatataactcacctgtcctgcctggttagtcttattgaatatgacg

SEQ ID NO: 477305 - DNA, 56 bp, Artificial
  Synthetic oligonucleotide
ttacgtattcacaagaagtcctgactgactttaggagacaggacacgatttgggtt

SEQ ID NO: 477306 - DNA, 50 bp, Artificial
  Synthetic oligonucleotide
ttacgtcacctcctagcattaccccaccccttttagccatttactccacg

SEQ ID NO: 477307 - DNA, 54 bp, Artificial
  Synthetic oligonucleotide
ttacgtcatgactggtttgaatgaaggtgctttgggctttggaggttctagacc

SEQ ID NO: 477308 - DNA, 56 bp, Artificial
  Synthetic oligonucleotide
ttacgtcattgtctactagtggttattctactaagcttgtttctgaacccatcccc

SEQ ID NO: 477309 - DNA, 60 bp, Artificial
  Synthetic oligonucleotide
ttacgtccgctgattatgagctcttgcatagactttttgttatgtggttgaagggcgatg

SEQ ID NO: 477310 - DNA, 50 bp, Artificial
  Synthetic oligonucleotide
ttacgtctacagaggagacgtgtagacaatacgtcttacactgactctct

SEQ ID NO: 477311 - DNA, 55 bp, Artificial
  Synthetic oligonucleotide
ttacgtgatcgagtacgttgactccacgtccgagactggcgttatggttcccgcc

SEQ ID NO: 477312 - DNA, 51 bp, Artificial
  Synthetic oligonucleotide
ttacgtgatggcccgtacgcgtaagcggagcgcgcccctagacctgaactt

SEQ ID NO: 477313 - DNA, 60 bp, Artificial
  Synthetic oligonucleotide
ttacgtgcccagacaagagccaatgttcagatggatgagattctcagatctgagcacgtg

SEQ ID NO: 477314 - DNA, 60 bp, Artificial
  Synthetic oligonucleotide
ttacgtggttgtgaggggtgcaatcagacatctgtcagggagcaggacagttacacttac

SEQ ID NO: 477315 - DNA, 59 bp, Artificial
  Synthetic oligonucleotide
ttacgtgttggtggtctccctgttcacaccatacataatccaccaacttcagaccaaga

SEQ ID NO: 477316 - DNA, 58 bp, Artificial
  Synthetic oligonucleotide
ttacgttcaaggaattggtgatagtcagagagccaacaatataaccgttactaagcat

SEQ ID NO: 477317 - DNA, 52 bp, Artificial
  Synthetic oligonucleotide
ttacgttccgcctcagggtggcgcggctaagacggctaccgctacggtcacc

SEQ ID NO: 477318 - DNA, 59 bp, Artificial
  Synthetic oligonucleotide
ttacgttctatgtgtaaattgtctattaaacagtttaagtaatactcatcatctatata

SEQ ID NO: 477319 - DNA, 59 bp, Artificial
  Synthetic oligonucleotide
ttacgttgaactcacaaggggagtgccaaacaaaaatgagaatgtctcttggaccagca

SEQ ID NO: 477320 - DNA, 60 bp, Artificial
  Synthetic oligonucleotide
ttacgttgacactggcgcactatctcaaagcgagttacgcgagacattacgcagacgtgg

SEQ ID NO: 477321 - DNA, 53 bp, Artificial
  Synthetic oligonucleotide
ttacgttgactcaaaggattacgacaacggggccgttcgctattctgaccggg

SEQ ID NO: 477322 - DNA, 58 bp, Artificial
  Synthetic oligonucleotide
ttacgttgcgagcaccacccctggtttctctggttcgcccatcttattgcgtaatgcc

SEQ ID NO: 477323 - DNA, 58 bp, Artificial
  Synthetic oligonucleotide
ttacgttggtggtgtgtcagccaaagatatggccatgaacaacgccaatccagacaat

SEQ ID NO: 477324 - DNA, 60 bp, Artificial
  Synthetic oligonucleotide
ttacgtttcagtctgcagggtatcctttatatcattcaggttacagatctcattaatttc

SEQ ID NO: 477325 - DNA, 55 bp, Artificial
  Synthetic oligonucleotide
ttacgtttcttaccaacagatcggcctgctctgatgatacaacagccattgctgg

SEQ ID NO: 477326 - DNA, 53 bp, Artificial
  Synthetic oligonucleotide
ttacgttttgagtccggacttacagtgtgggttcactctggtttgtatacagg

SEQ ID NO: 477327 - DNA, 60 bp, Artificial
  Synthetic oligonucleotide
ttactaaattggttacacagcaaattgaatcaacagctagtcaaatgaatctacatgaag

SEQ ID NO: 477328 - DNA, 53 bp, Artificial
  Synthetic oligonucleotide
ttactaacctggctagagggtctaatacagttaaggttgttggaaaaggtgga

SEQ ID NO: 477329 - DNA, 54 bp, Artificial
  Synthetic oligonucleotide
ttactaactgatgcggggggggtgcttgaaatggaagggatggtaccgagtggt

SEQ ID NO: 477330 - DNA, 60 bp, Artificial
  Synthetic oligonucleotide
ttactaagatggtcagagatgtcattataccaatgcttggaacttggcccacaatgcagg

SEQ ID NO: 477331 - DNA, 51 bp, Artificial
  Synthetic oligonucleotide
ttactaaggagtacgtaaaaggtcggaagaacgtttattcacacccggcga

SEQ ID NO: 477332 - DNA, 60 bp, Artificial
  Synthetic oligonucleotide
ttactaatcactgacccatcgcacctgagaggcttgaagaaacctggcaacttagagcat

SEQ ID NO: 477333 - DNA, 57 bp, Artificial
  Synthetic oligonucleotide
ttactacaaggactgctgacactgagctttctacaagggactttccgctggggactt

SEQ ID NO: 477334 - DNA, 54 bp, Artificial
  Synthetic oligonucleotide
ttactacaagttcaacaacgaggaaaaagtggagttttggactgatactactgt

SEQ ID NO: 477335 - DNA, 50 bp, Artificial
  Synthetic oligonucleotide
ttactacagcaggtttgttgtatgcttatgcagtaggatcctctgccgac

SEQ ID NO: 477336 - DNA, 57 bp, Artificial
  Synthetic oligonucleotide
ttactacatgcaacccaactggggaaccgcaacaggaaactacactttccacacatc

SEQ ID NO: 477337 - DNA, 59 bp, Artificial
  Synthetic oligonucleotide
ttactacgccgtattgcttcggcgagttgttcaatatgtatgataatgaacccagtaca

SEQ ID NO: 477338 - DNA, 59 bp, Artificial
  Synthetic oligonucleotide
ttactactgggctgtcctcaaacctggacaaactgtcaagatacagaccaatgggaatc

SEQ ID NO: 477339 - DNA, 52 bp, Artificial
  Synthetic oligonucleotide
ttactactggggtttgagtttggaaggaggtcgttcatgtgcatggttctct

SEQ ID NO: 477340 - DNA, 60 bp, Artificial
  Synthetic oligonucleotide
ttactactggtagagatccaataaatggtccatgccatggattagttgccttgtcgagac

SEQ ID NO: 477341 - DNA, 55 bp, Artificial
  Synthetic oligonucleotide
ttactactggtggattggctactatgccacttagagaatggacttttgatctgcc

SEQ ID NO: 477342 - DNA, 60 bp, Artificial
  Synthetic oligonucleotide
ttactacttttacttgcagccagtattgtgctgtacctactaagtccacagctgggcgca

SEQ ID NO: 477343 - DNA, 57 bp, Artificial
  Synthetic oligonucleotide
ttactagaggcaacggtattactcatagaataggtaaaagattttgcgtcaaatctg

SEQ ID NO: 477344 - DNA, 60 bp, Artificial
  Synthetic oligonucleotide
ttactagatggacacgtgatggtgtacaagacgctgctattctgatggacgacaagctcc

SEQ ID NO: 477345 - DNA, 60 bp, Artificial
  Synthetic oligonucleotide
ttactagatttgctagaaggcaaggccctgaatattaactgtccatcagataaactgccc

SEQ ID NO: 477346 - DNA, 60 bp, Artificial
  Synthetic oligonucleotide
ttactagctctattatataccgggtggagtgaataacatgttcttttgctctgtgcatgg

SEQ ID NO: 477347 - DNA, 56 bp, Artificial
  Synthetic oligonucleotide
ttactaggatgacgttcgttggtaacctatacgattctaggttcttggccgatata

SEQ ID NO: 477348 - DNA, 60 bp, Artificial
  Synthetic oligonucleotide
ttactagggacgctctaccacagcgcatatctgaagcttggaacaccgtcatcataaggc

SEQ ID NO: 477349 - DNA, 54 bp, Artificial
  Synthetic oligonucleotide
ttactagggcaagtaggttatgtggcgcgctctactttcgacgctgcctatgtt

SEQ ID NO: 477350 - DNA, 56 bp, Artificial
  Synthetic oligonucleotide
ttactataaaccttagtcctttagtacgtgggtatttctatatcttgcggagcata

SEQ ID NO: 477351 - DNA, 60 bp, Artificial
  Synthetic oligonucleotide
ttactatacccagtgtaaataatgagacaccaggagttagatatcagtataatgtgttac

SEQ ID NO: 477352 - DNA, 56 bp, Artificial
  Synthetic oligonucleotide
ttactatagacccgggcctaatggtacggtgtctgttctaatgtcggacggcgcca

SEQ ID NO: 477353 - DNA, 52 bp, Artificial
  Synthetic oligonucleotide
ttactatatacacttcaatgatgatgcccttagatatgggacttctggacaa

SEQ ID NO: 477354 - DNA, 53 bp, Artificial
  Synthetic oligonucleotide
ttactatcagaccatcaagatctcaagtgggctagattccctaagagtgacgg

SEQ ID NO: 477355 - DNA, 60 bp, Artificial
  Synthetic oligonucleotide
ttactatgcaaaccatgtcaaaatgtttcaagcattgtcgccacagtggacgtgctcgca

SEQ ID NO: 477356 - DNA, 60 bp, Artificial
  Synthetic oligonucleotide
ttactatgcctacgctgcgccaattccctgccagtcgatcccgctgcgattgtcgttgct

SEQ ID NO: 477357 - DNA, 51 bp, Artificial
  Synthetic oligonucleotide
ttactatgtggtccccacgagggttctacagacgtcactgtcaaccaatca

SEQ ID NO: 477358 - DNA, 54 bp, Artificial
  Synthetic oligonucleotide
ttactatgttgcaaagaatggtaaaactgagaggatcaaccattcaagagtcgt

SEQ ID NO: 477359 - DNA, 60 bp, Artificial
  Synthetic oligonucleotide
ttactattccagtatgcatcttacacaaccagccatatttgtcccacactttgtcttcat

SEQ ID NO: 477360 - DNA, 53 bp, Artificial
  Synthetic oligonucleotide
ttactattcccggttcagattgggcttataccctctctttaaccgatgtggtt

SEQ ID NO: 477361 - DNA, 59 bp, Artificial
  Synthetic oligonucleotide
ttactcaaaccgagaaaattggtgatgtgtataggactacgatcctatatacagggata

SEQ ID NO: 477362 - DNA, 60 bp, Artificial
  Synthetic oligonucleotide
ttactcaaacctctcagtgaggggttgatagtctttgagaattggatcatgaacaagcag

SEQ ID NO: 477363 - DNA, 60 bp, Artificial
  Synthetic oligonucleotide
ttactcaaatcgccatccgtgcatatcgttacagcggtcaactgcctcaagaaggtgcat

SEQ ID NO: 477364 - DNA, 58 bp, Artificial
  Synthetic oligonucleotide
ttactcaacctgatcttactaatattctttcgagagtagtttctgttagacatttaga

SEQ ID NO: 477365 - DNA, 60 bp, Artificial
  Synthetic oligonucleotide
ttactcaacgccacatccatagcagtagctgagggaacagataggattatagaagcatta

SEQ ID NO: 477366 - DNA, 51 bp, Artificial
  Synthetic oligonucleotide
ttactcaacgtcccaccttcgcccgaatgcactttgaaaccgaagtccttc

SEQ ID NO: 477367 - DNA, 53 bp, Artificial
  Synthetic oligonucleotide
ttactcaactgacacagtagatccatttccgtacactccgttatatccacgtc

SEQ ID NO: 477368 - DNA, 60 bp, Artificial
  Synthetic oligonucleotide
ttactcacacgtagatcgtcacatgcatccagatgcctccgtaatgaaggttgtttcgcg

SEQ ID NO: 477369 - DNA, 60 bp, Artificial
  Synthetic oligonucleotide
ttactcacagctctacagagcgcaggttacacgaatgttgtcgcaagagaacggagattt

SEQ ID NO: 477370 - DNA, 60 bp, Artificial
  Synthetic oligonucleotide
ttactcagacaattagaaccagctctcaaaacagggtcagaaggactgcgctctctattt

SEQ ID NO: 477371 - DNA, 57 bp, Artificial
  Synthetic oligonucleotide
ttactcagcggagagattgataggtagagttttctccacccttcatggtagttttgg

SEQ ID NO: 477372 - DNA, 60 bp, Artificial
  Synthetic oligonucleotide
ttactcagctgtcaatggtgatgcccacaacttcataaaagatgtgcaatgcatagatcc

SEQ ID NO: 477373 - DNA, 60 bp, Artificial
  Synthetic oligonucleotide
ttactcatagatgcccggcggatgtctgtgagctaatccgcggtgcatacccgaagatcc

SEQ ID NO: 477374 - DNA, 52 bp, Artificial
  Synthetic oligonucleotide
ttactcatcgtgtcggcaaacgtttttgcatcaagtctgtttacattacagg

SEQ ID NO: 477375 - DNA, 60 bp, Artificial
  Synthetic oligonucleotide
ttactcatgtaattatggagcaagagtgtgtattaaaatcaaaagtgatggtaatgcaaa

SEQ ID NO: 477376 - DNA, 51 bp, Artificial
  Synthetic oligonucleotide
ttactcattacggtggttacgaccaattttctcgtcaaatgttcgaacgtt

SEQ ID NO: 477377 - DNA, 60 bp, Artificial
  Synthetic oligonucleotide
ttactcattgtgaacccacagaagcagcattccaagctcattacaaggtatgccaagtta

SEQ ID NO: 477378 - DNA, 58 bp, Artificial
  Synthetic oligonucleotide
ttactcattttactacttggacatccattccaaccttggctgctcagtttccatttaa

SEQ ID NO: 477379 - DNA, 60 bp, Artificial
  Synthetic oligonucleotide
ttactcctcatctattctgtttaatttcattacgtcgacatgtatcttcgctgtagagca

SEQ ID NO: 477380 - DNA, 55 bp, Artificial
  Synthetic oligonucleotide
ttactcctcgaggggctaggatagagttaattaataaagccaatgcgaacctccc

SEQ ID NO: 477381 - DNA, 55 bp, Artificial
  Synthetic oligonucleotide
ttactcgaagcccaaatttcgagcacaatcatcagatattaaccacagtccagga

SEQ ID NO: 477382 - DNA, 60 bp, Artificial
  Synthetic oligonucleotide
ttactcgagttcagaaacttaaacgctgatcactcattcactactaagtctgacgggatc

SEQ ID NO: 477383 - DNA, 55 bp, Artificial
  Synthetic oligonucleotide
ttactcgatctccactgactcattgtcctcaaacaactttcgacacctgattccc

SEQ ID NO: 477384 - DNA, 59 bp, Artificial
  Synthetic oligonucleotide
ttactcgcgtgccctgtggcgcgtgacctccgacagttatgtcgaggtgcgtagggtgg

SEQ ID NO: 477385 - DNA, 60 bp, Artificial
  Synthetic oligonucleotide
ttactcgctctgagtaagagtagagacaagcgaacgagatgacgagatgccggttaacgc

SEQ ID NO: 477386 - DNA, 60 bp, Artificial
  Synthetic oligonucleotide
ttactcggaacgataaggactatatcacgaggccagtctcttataagccacattgtacga

SEQ ID NO: 477387 - DNA, 52 bp, Artificial
  Synthetic oligonucleotide
ttactcgggtgtcctaacggtgggagtcgcgttgacgcgtcgggtctacccg

SEQ ID NO: 477388 - DNA, 60 bp, Artificial
  Synthetic oligonucleotide
ttactcgtatccgtcgtctagcagagctgcgttcaattatgtcgttcgaatatcgacgtt

SEQ ID NO: 477389 - DNA, 55 bp, Artificial
  Synthetic oligonucleotide
ttactcgtcagagaagagtaagggatggatccggtagatcctaacctagagccct

SEQ ID NO: 477390 - DNA, 53 bp, Artificial
  Synthetic oligonucleotide
ttactcgtggttccggtattacccacagagtgggtaagaggttctgcgttaag

SEQ ID NO: 477391 - DNA, 54 bp, Artificial
  Synthetic oligonucleotide
ttactctaaaacgacgtggcgaagccataaaacttgtcgttttgattcggcgtc

SEQ ID NO: 477392 - DNA, 60 bp, Artificial
  Synthetic oligonucleotide
ttactctaagaatcctgtatggtgagtacaagaggtttatgaactactggacagcatcta

SEQ ID NO: 477393 - DNA, 51 bp, Artificial
  Synthetic oligonucleotide
ttactctaggtcactggaaagatgtgagaacaagggctcacaatctgtccg

SEQ ID NO: 477394 - DNA, 60 bp, Artificial
  Synthetic oligonucleotide
ttactctcggctgcgggcactgcaatggggggcgctgcgacagcgctaacactccagtct

SEQ ID NO: 477395 - DNA, 56 bp, Artificial
  Synthetic oligonucleotide
ttactctctgacgagttcggtaacaccttttccgttccagatccattgcgcgaggt

SEQ ID NO: 477396 - DNA, 54 bp, Artificial
  Synthetic oligonucleotide
ttactctcttgcctgactgcgcctgcgacagcctaccaggtacgcaactccacg

SEQ ID NO: 477397 - DNA, 53 bp, Artificial
  Synthetic oligonucleotide
ttactcttctgggaacaaggaggtctatgcaaggctatcagggaacaatgttg

SEQ ID NO: 477398 - DNA, 60 bp, Artificial
  Synthetic oligonucleotide
ttactcttgacactgagatgtcagttgataacaacatgggagaaacaagtgatatgcgaa

SEQ ID NO: 477399 - DNA, 60 bp, Artificial
  Synthetic oligonucleotide
ttactctttggtgtgcccctcctggagcagtataatgttctacatactgaccagacctag

SEQ ID NO: 477400 - DNA, 55 bp, Artificial
  Synthetic oligonucleotide
ttactgaacgcagttcttgatgttaggagcttcttcatggaagactggtgggtcg

SEQ ID NO: 477401 - DNA, 60 bp, Artificial
  Synthetic oligonucleotide
ttactgaagcaccgattcgaaataattgaaggaagagacagaacaatggcctggacagtg

SEQ ID NO: 477402 - DNA, 53 bp, Artificial
  Synthetic oligonucleotide
ttactgacaaagggagacaaaaggttgtctccatagatgacacaacaaatcag

SEQ ID NO: 477403 - DNA, 58 bp, Artificial
  Synthetic oligonucleotide
ttactgacaagcagctcgcactaccagggtttaggtctttcaacaggtcaagggacaa

SEQ ID NO: 477404 - DNA, 55 bp, Artificial
  Synthetic oligonucleotide
ttactgacaattgagcttgttatttgggcagcaagtgcagatacaccgctccttg

SEQ ID NO: 477405 - DNA, 60 bp, Artificial
  Synthetic oligonucleotide
ttactgacagccagacagcgaccaaaagaattcgaatggccatcaattagtgtcgaatag

SEQ ID NO: 477406 - DNA, 55 bp, Artificial
  Synthetic oligonucleotide
ttactgaccagcacacacatcatgtgaaagtgacaaccagagtgtaccacaaagc

SEQ ID NO: 477407 - DNA, 60 bp, Artificial
  Synthetic oligonucleotide
ttactgaccctgtggcgttgatcggaacttgttgtctgtattctatgacgcaatggtcta

SEQ ID NO: 477408 - DNA, 55 bp, Artificial
  Synthetic oligonucleotide
ttactgacgcctttttccaaatccccctccccaagcagttccagccatacttcgc

SEQ ID NO: 477409 - DNA, 55 bp, Artificial
  Synthetic oligonucleotide
ttactgacggcaccatcttcatgtgtaacaccattgaccctgggactggagacga

SEQ ID NO: 477410 - DNA, 52 bp, Artificial
  Synthetic oligonucleotide
ttactgacgttgtcgatggcgtgaatcataaacttgatgttacaactgctac

SEQ ID NO: 477411 - DNA, 58 bp, Artificial
  Synthetic oligonucleotide
ttactgagcttcgaaagttctgtctatcatcccaaagcggttactgtcgagtttgaag

SEQ ID NO: 477412 - DNA, 60 bp, Artificial
  Synthetic oligonucleotide
ttactgaggctggtatcggcagaaacagcctcattaacgatttggctcagagacgtgtgt

SEQ ID NO: 477413 - DNA, 60 bp, Artificial
  Synthetic oligonucleotide
ttactgagtgcagggaccctgattgccttgatgttgataattttcctaatgatatgtcgt

SEQ ID NO: 477414 - DNA, 55 bp, Artificial
  Synthetic oligonucleotide
ttactgatgattataggttcattaattccttggccaccagatgtcctgaccagaa

SEQ ID NO: 477415 - DNA, 60 bp, Artificial
  Synthetic oligonucleotide
ttactgattgatacatgatgcaatccaatagagcacagtgaggttcactggaactcaatt

SEQ ID NO: 477416 - DNA, 55 bp, Artificial
  Synthetic oligonucleotide
ttactgcagaccggccgatagccagtgcttaaataaatggccctctgcagtgggc

SEQ ID NO: 477417 - DNA, 60 bp, Artificial
  Synthetic oligonucleotide
ttactgcagcaccaaatgaggaatttgctgatgttatcaagttaggccgtgccagattta

SEQ ID NO: 477418 - DNA, 55 bp, Artificial
  Synthetic oligonucleotide
ttactgcccatgagaacagcctgagttccaatgaattcttttcaggcatgctgac

SEQ ID NO: 477419 - DNA, 60 bp, Artificial
  Synthetic oligonucleotide
ttactgcccctgacaaggttcctgctatgctgaggcactggatggatgatacctcctttt

SEQ ID NO: 477420 - DNA, 55 bp, Artificial
  Synthetic oligonucleotide
ttactgcccgtatgcctttagtctagctacggctaaatagaacctagcagaggct

SEQ ID NO: 477421 - DNA, 60 bp, Artificial
  Synthetic oligonucleotide
ttactgcgatgcagatggatcacaatttgatagttcactatcgccataccttatcaacgc

SEQ ID NO: 477422 - DNA, 60 bp, Artificial
  Synthetic oligonucleotide
ttactgctaagtgtacacccagagtatgagtatatccttgacactatggcagacaacttt

SEQ ID NO: 477423 - DNA, 60 bp, Artificial
  Synthetic oligonucleotide
ttactgctcgtggaggctctggtgctgctttacgggatgtacttaagaatgctaatattg

SEQ ID NO: 477424 - DNA, 53 bp, Artificial
  Synthetic oligonucleotide
ttactggaaacaatgctttgccgtaaggctttcattagccagcggaccaccac

SEQ ID NO: 477425 - DNA, 54 bp, Artificial
  Synthetic oligonucleotide
ttactggaagattggaactttgggttaaccttgccaccgtccactagcttggag

SEQ ID NO: 477426 - DNA, 55 bp, Artificial
  Synthetic oligonucleotide
ttactggaccatgcagtgcctacttttaggcagattatgacgcacttcagtgacg

SEQ ID NO: 477427 - DNA, 53 bp, Artificial
  Synthetic oligonucleotide
ttactggagtatgtggactacaagggcactttcctcacaagagaggccctgga

SEQ ID NO: 477428 - DNA, 53 bp, Artificial
  Synthetic oligonucleotide
ttactggatcctggagtacctctggaaagtgcctttcgacttttggcggggag

SEQ ID NO: 477429 - DNA, 58 bp, Artificial
  Synthetic oligonucleotide
ttactggcaggtggaggtacaacgtttgctgacgaaaaatatattatagagggatcga

SEQ ID NO: 477430 - DNA, 54 bp, Artificial
  Synthetic oligonucleotide
ttactgggatacgtcgacatgaagtacttaaccaggcgtttccgagattcttcg

SEQ ID NO: 477431 - DNA, 55 bp, Artificial
  Synthetic oligonucleotide
ttactgggatgattcacaggcttttaggaacatggtatacgtcagatcgctagct

SEQ ID NO: 477432 - DNA, 60 bp, Artificial
  Synthetic oligonucleotide
ttactgggcgggacaggggagtggttttgcccgctgagctgcatataagcagctgctttg

SEQ ID NO: 477433 - DNA, 60 bp, Artificial
  Synthetic oligonucleotide
ttactggggttgtatatatagtgtggattgtagaaggcctcttgctcacatttgggccat

SEQ ID NO: 477434 - DNA, 55 bp, Artificial
  Synthetic oligonucleotide
ttactgggtggctacctctaataatctgtggatctggaaacacccagtttaactt

SEQ ID NO: 477435 - DNA, 55 bp, Artificial
  Synthetic oligonucleotide
ttactgggttttaatgcatccaggggaatcaataacctttgaaagcaatggaggg

SEQ ID NO: 477436 - DNA, 59 bp, Artificial
  Synthetic oligonucleotide
ttactggtaaagggttttactctcagtctgtttcgcaggtgagctacttgccatgtcta

SEQ ID NO: 477437 - DNA, 60 bp, Artificial
  Synthetic oligonucleotide
ttactggtgagggcggcaaggttcatgttgagaaggatgccgtctatgtccgcactctgg

SEQ ID NO: 477438 - DNA, 57 bp, Artificial
  Synthetic oligonucleotide
ttactggtggacaatatgcagctagggaacaggcgttggttaagaagtttgtcaggg

SEQ ID NO: 477439 - DNA, 55 bp, Artificial
  Synthetic oligonucleotide
ttactggtggacaatgtgcgagtacggaacaggcgttggttaagaaatttgttag

SEQ ID NO: 477440 - DNA, 60 bp, Artificial
  Synthetic oligonucleotide
ttactggtggtcagtatgcatgcaaggagcaggctctcgtgaagcgtttttttagagtta

SEQ ID NO: 477441 - DNA, 57 bp, Artificial
  Synthetic oligonucleotide
ttactggttattctttttctcttgcgggtatagctgatggattcaggaagaggtact

SEQ ID NO: 477442 - DNA, 60 bp, Artificial
  Synthetic oligonucleotide
ttactgtaaggctgcatgtaagaaattccaggaacataagaggtgggtgtattcacaatc

SEQ ID NO: 477443 - DNA, 60 bp, Artificial
  Synthetic oligonucleotide
ttactgtcacacacgcccaagacatacttgaaaagacacacaacgggaagctctgcagcc

SEQ ID NO: 477444 - DNA, 60 bp, Artificial
  Synthetic oligonucleotide
ttactgtccccactgtgcgcgccactcgaaagcagcagtggtcgaaccgtcccatgtacc

SEQ ID NO: 477445 - DNA, 59 bp, Artificial
  Synthetic oligonucleotide
ttactgtgaaacatccagtgagagtcagatttctcgtcgttgcttccgttgcctcagtt

SEQ ID NO: 477446 - DNA, 60 bp, Artificial
  Synthetic oligonucleotide
ttactgtggttcaccatgaaccctacttaatgacaaagttcgatgcatatgagtaccagt

SEQ ID NO: 477447 - DNA, 59 bp, Artificial
  Synthetic oligonucleotide
ttactgttaagatccaagtggccgcaaagataattgtgaggacctaacgcacgtgccca

SEQ ID NO: 477448 - DNA, 55 bp, Artificial
  Synthetic oligonucleotide
ttactgttaatccagggccattcgcacaaacgggatatgcgcctgttaattgggg

SEQ ID NO: 477449 - DNA, 54 bp, Artificial
  Synthetic oligonucleotide
ttactgtttcccattggatggagtgggtcgcacagatacttacaaaggcgtcgt

SEQ ID NO: 477450 - DNA, 54 bp, Artificial
  Synthetic oligonucleotide
ttacttaacaaacccaaacccagattaggaatgaccataacgaccagttcattc

SEQ ID NO: 477451 - DNA, 57 bp, Artificial
  Synthetic oligonucleotide
ttacttaatgacaaacattctaacggcacagtgaaggaccgaagtccatataggact

SEQ ID NO: 477452 - DNA, 53 bp, Artificial
  Synthetic oligonucleotide
ttacttaatggtccggttagcctttaagctaccgagagtgacagattagatac

SEQ ID NO: 477453 - DNA, 60 bp, Artificial
  Synthetic oligonucleotide
ttacttacgttatgaaccgtttgcctgatatggtaatcatggcagtcaaccgcgctatca

SEQ ID NO: 477454 - DNA, 59 bp, Artificial
  Synthetic oligonucleotide
ttacttagatgaagcttcatttccatcgcaacgcggtaacgtgctagatgttaatactt

SEQ ID NO: 477455 - DNA, 59 bp, Artificial
  Synthetic oligonucleotide
ttacttagcagtcccgagtcctcgcagaccagaccagatgtggacctcagtccccggct

SEQ ID NO: 477456 - DNA, 60 bp, Artificial
  Synthetic oligonucleotide
ttacttatatgaccacattactaatcgcattaaacattatcgcgttcataacatgtgtga

SEQ ID NO: 477457 - DNA, 60 bp, Artificial
  Synthetic oligonucleotide
ttacttatcaacacgttcagaccggtgttcagccccgcaataagatgtatatgacctgcc

SEQ ID NO: 477458 - DNA, 53 bp, Artificial
  Synthetic oligonucleotide
ttacttatggacccctacagggaggttgtaagcaatctgtttttagtggtaag

SEQ ID NO: 477459 - DNA, 58 bp, Artificial
  Synthetic oligonucleotide
ttacttatggagcatgtcccaaatatgtcaaacagagcaccctaaagttggcaaccgg

SEQ ID NO: 477460 - DNA, 58 bp, Artificial
  Synthetic oligonucleotide
ttacttatgggtcttccattaactcggccggaaccactaaggcatgcatgagaaatgg

SEQ ID NO: 477461 - DNA, 59 bp, Artificial
  Synthetic oligonucleotide
ttacttattcctaccacaaccatggttgtgttgaaatgcctgaggctgctaacttactc

SEQ ID NO: 477462 - DNA, 60 bp, Artificial
  Synthetic oligonucleotide
ttacttcacagcagaggtgtcccattgcagagccactgaatacataatgaagggggtata

SEQ ID NO: 477463 - DNA, 55 bp, Artificial
  Synthetic oligonucleotide
ttacttcaggtattgcgatgttagacaagcttcgtcgtgaggcttgccttcaggg

SEQ ID NO: 477464 - DNA, 57 bp, Artificial
  Synthetic oligonucleotide
ttacttcatacttatcctgatgggtcaaaagtgtacgctggctcccttttcgagtcc

SEQ ID NO: 477465 - DNA, 55 bp, Artificial
  Synthetic oligonucleotide
ttacttccaccggcgcgacttgcggacgcttggacttgccatctgttcggcggtg

SEQ ID NO: 477466 - DNA, 56 bp, Artificial
  Synthetic oligonucleotide
ttacttcctaaaagtattaggcgatgacgttattttcggaatcctcaagcacatac

SEQ ID NO: 477467 - DNA, 51 bp, Artificial
  Synthetic oligonucleotide
ttacttctactttcacgggttctatccgtgaaaagggtacgtgttgcccct

SEQ ID NO: 477468 - DNA, 58 bp, Artificial
  Synthetic oligonucleotide
ttacttctctatccccctatcggtgtatcggtgtcttatatatactagagctactaaa

SEQ ID NO: 477469 - DNA, 51 bp, Artificial
  Synthetic oligonucleotide
ttacttctggggcaagctgcagggggcagctgatctactcctggcctcgag

SEQ ID NO: 477470 - DNA, 60 bp, Artificial
  Synthetic oligonucleotide
ttacttcttgccattgcaatgggccttgtcttcatatgtgtgaagtatggaaacatgcgg

SEQ ID NO: 477471 - DNA, 55 bp, Artificial
  Synthetic oligonucleotide
ttacttgagcttagataaaacaatgactcaatacccatccttacaggcacaaatc

SEQ ID NO: 477472 - DNA, 57 bp, Artificial
  Synthetic oligonucleotide
ttacttgagtcgtgcgtttctttgtattttgcgtcttagtgtacctatggacaaatc

SEQ ID NO: 477473 - DNA, 60 bp, Artificial
  Synthetic oligonucleotide
ttacttgcaccagtgattacatgtatgagtatacgaaattgcatggtaagcatcctcgag

SEQ ID NO: 477474 - DNA, 55 bp, Artificial
  Synthetic oligonucleotide
ttacttgctgtgaggattgtggacaggggactgaagagagggtgggaagtcctca

SEQ ID NO: 477475 - DNA, 57 bp, Artificial
  Synthetic oligonucleotide
ttacttggaacccacaatacggtcggcagtaccctcggcgattcagaacacgctcca

SEQ ID NO: 477476 - DNA, 53 bp, Artificial
  Synthetic oligonucleotide
ttacttggattggcatcactcgaagatctattcaggtttaacagaacaacagg

SEQ ID NO: 477477 - DNA, 60 bp, Artificial
  Synthetic oligonucleotide
ttacttggtggcaaggtctgtgtcgatgatttcaacaaccaattctactcgcaccattta

SEQ ID NO: 477478 - DNA, 60 bp, Artificial
  Synthetic oligonucleotide
ttacttgtgctggatattacaacatgtgagatcttatcagccaacaccaaggcattgttt

SEQ ID NO: 477479 - DNA, 57 bp, Artificial
  Synthetic oligonucleotide
ttactttatatgcctcaggagttgactacgtcggacagtgtgcttatattcgagctt

SEQ ID NO: 477480 - DNA, 58 bp, Artificial
  Synthetic oligonucleotide
ttactttccacacctatgaccctgtacgtaggtgtggccactttcagctcaaatcagg

SEQ ID NO: 477481 - DNA, 58 bp, Artificial
  Synthetic oligonucleotide
ttactttcccaaacaccattgtgcagattgaaccagatatgaactcaaggtttcaact

SEQ ID NO: 477482 - DNA, 55 bp, Artificial
  Synthetic oligonucleotide
ttactttccccgcccagtgtatacaaggtcctccagtgttaagcgtcctgcccta

SEQ ID NO: 477483 - DNA, 55 bp, Artificial
  Synthetic oligonucleotide
ttactttccgttggtttatttgggtgacgaattcattatatgtatgttgacgcgg

SEQ ID NO: 477484 - DNA, 54 bp, Artificial
  Synthetic oligonucleotide
ttactttcgcctcgcaggtaaataattgagtccccaataggtaaatgaggcccc

SEQ ID NO: 477485 - DNA, 56 bp, Artificial
  Synthetic oligonucleotide
ttactttctccgtgtggtttgataggaagaactttctcactaactctggtcgtgtg

SEQ ID NO: 477486 - DNA, 51 bp, Artificial
  Synthetic oligonucleotide
ttactttcttagaccatccatcaataaagcaattctcgaatggaccatatc

SEQ ID NO: 477487 - DNA, 59 bp, Artificial
  Synthetic oligonucleotide
ttacttttaatgaagagtgctcattcgatggtggagaagaatgggacgtgatatcatcc

SEQ ID NO: 477488 - DNA, 60 bp, Artificial
  Synthetic oligonucleotide
ttacttttcagtacttccctgagtaggctagtgatcaagctccgtgacagtacgagtcta

SEQ ID NO: 477489 - DNA, 58 bp, Artificial
  Synthetic oligonucleotide
ttacttttgggacgcagcagtgcgtctttaaaaggaatacttattcatcctggtgtga

SEQ ID NO: 477490 - DNA, 55 bp, Artificial
  Synthetic oligonucleotide
ttagaaaacatttataaactccgatagtgctcaattcatattatttttgggaaat

SEQ ID NO: 477491 - DNA, 60 bp, Artificial
  Synthetic oligonucleotide
ttagaaacgggacttatgatcatgatagatacagagatgaggcactgaacaaccggttcc

SEQ ID NO: 477492 - DNA, 52 bp, Artificial
  Synthetic oligonucleotide
ttagaaactgactttgacacggcacttttctcaaagtacaaaggtaaccctg

SEQ ID NO: 477493 - DNA, 59 bp, Artificial
  Synthetic oligonucleotide
ttagaaactggctgggcgtacacacatcaaggtggcattagttcagtggaccatgtcac

SEQ ID NO: 477494 - DNA, 54 bp, Artificial
  Synthetic oligonucleotide
ttagaaaggagagcggagccgcgtatgagctttaagttcgaagggttaaccact

SEQ ID NO: 477495 - DNA, 60 bp, Artificial
  Synthetic oligonucleotide
ttagaaagtcggatttggcaaaaagtgttaatagcttgactgacgccataactgatgcag

SEQ ID NO: 477496 - DNA, 58 bp, Artificial
  Synthetic oligonucleotide
ttagaaattgggaaactgtgaaaatccaatggtctcaggaccctacaatgctatacaa

SEQ ID NO: 477497 - DNA, 60 bp, Artificial
  Synthetic oligonucleotide
ttagaacacttagcttcagaatatttgatatgaaggtgagggaagatatgagcactagag

SEQ ID NO: 477498 - DNA, 55 bp, Artificial
  Synthetic oligonucleotide
ttagaaccaactggtgtcttaatatataaaacatacgggacccatattgcgacac

SEQ ID NO: 477499 - DNA, 60 bp, Artificial
  Synthetic oligonucleotide
ttagaacccaagagtcagagtgtgtgtgccataaaggaatttgcccagtagtcatgacag

SEQ ID NO: 477500 - DNA, 50 bp, Artificial
  Synthetic oligonucleotide
ttagaacgcgccttggaaggctagttatttgtggtccccctatatcaact

SEQ ID NO: 477501 - DNA, 56 bp, Artificial
  Synthetic oligonucleotide
ttagaacgcgggggagcagtagggtccgtgggatgctcctcccgattccgtccatc

SEQ ID NO: 477502 - DNA, 60 bp, Artificial
  Synthetic oligonucleotide
ttagaacggtgctccttcgtgagcttaagcgctcaggtgactcgtatatacttgagttcc

SEQ ID NO: 477503 - DNA, 50 bp, Artificial
  Synthetic oligonucleotide
ttagaacgttgactaattagacatttgctaatagtcgtctctataatgtc

SEQ ID NO: 477504 - DNA, 57 bp, Artificial
  Synthetic oligonucleotide
ttagaactatgtagattactttcgagtataggtagaaagatggtaaatatggaggaa

SEQ ID NO: 477505 - DNA, 54 bp, Artificial
  Synthetic oligonucleotide
ttagaactgccggtaggagtcacggagagtacatatcttgtggagatgggaaag

SEQ ID NO: 477506 - DNA, 60 bp, Artificial
  Synthetic oligonucleotide
ttagaagacttgctgatgggcacgctagacattgtgtgccccaagtgtgccgggaggttg

SEQ ID NO: 477507 - DNA, 60 bp, Artificial
  Synthetic oligonucleotide
ttagaagcaacctatgccatggtacagcatgtggctaaaggcgtgcggatcttggaagcc

SEQ ID NO: 477508 - DNA, 60 bp, Artificial
  Synthetic oligonucleotide
ttagaagcgacctatgccatggtgcagcatgtagctaagggagtacggatcttggaagct

SEQ ID NO: 477509 - DNA, 60 bp, Artificial
  Synthetic oligonucleotide
ttagaagcggcctatgccatggtacagcatgtagccaaaggagtaagaatcctggaggca

SEQ ID NO: 477510 - DNA, 54 bp, Artificial
  Synthetic oligonucleotide
ttagaagcgtcccagtcggacgttgcttaaccctccctgcgttttcaaccctgc

SEQ ID NO: 477511 - DNA, 60 bp, Artificial
  Synthetic oligonucleotide
ttagaagcgttgacgattcaatcagagacgcagtttctgacgggcataaattcccaagcg

SEQ ID NO: 477512 - DNA, 60 bp, Artificial
  Synthetic oligonucleotide
ttagaaggaaaaattatcctggtagcagtgcatgtggccagtggatatatagaagcagaa

SEQ ID NO: 477513 - DNA, 55 bp, Artificial
  Synthetic oligonucleotide
ttagaaggacgctggcggcctaaagtagtaggaggtataggagggggaatctcag

SEQ ID NO: 477514 - DNA, 55 bp, Artificial
  Synthetic oligonucleotide
ttagaagggaattggaagaatttagcacctgcagagcaatcctatcaagtcggca

SEQ ID NO: 477515 - DNA, 58 bp, Artificial
  Synthetic oligonucleotide
ttagaaggtatagtaggtggatttgctttttcgagttcaagagaagcagccgcacaac

SEQ ID NO: 477516 - DNA, 60 bp, Artificial
  Synthetic oligonucleotide
ttagaagtaagcaagtgtgtgttcccatctctcctagtcgccgcctggtcatctcggtac

SEQ ID NO: 477517 - DNA, 60 bp, Artificial
  Synthetic oligonucleotide
ttagaagttcataaattgctagataagtgttgtcgtgaagttcctgctcaaatgggaata

SEQ ID NO: 477518 - DNA, 55 bp, Artificial
  Synthetic oligonucleotide
ttagaataccaccccccactctatttgcagacaggtggtacttccagaaagactt

SEQ ID NO: 477519 - DNA, 56 bp, Artificial
  Synthetic oligonucleotide
ttagaatcatcagaaggctgtagacaaatactagaacagctacaaccagcccttaa

SEQ ID NO: 477520 - DNA, 60 bp, Artificial
  Synthetic oligonucleotide
ttagaatctccagtaactaccatagtgggatatcatccagcagctagagaccgtcaattc

SEQ ID NO: 477521 - DNA, 53 bp, Artificial
  Synthetic oligonucleotide
ttagaatgcccgtatccgaacatgcagattatttcgctcgatgcgcttacaac

SEQ ID NO: 477522 - DNA, 58 bp, Artificial
  Synthetic oligonucleotide
ttagaatgcgtccccacggaagaggcaaacgtaacgatgcaactcatgggagcgtcgg

SEQ ID NO: 477523 - DNA, 54 bp, Artificial
  Synthetic oligonucleotide
ttagaattacaggtaaccggataggtgaccgttcgtacatggacaaattggtct

SEQ ID NO: 477524 - DNA, 56 bp, Artificial
  Synthetic oligonucleotide
ttagaattgttagaggagcttaaaaatgaagctgttagacattttcctagaccctg

SEQ ID NO: 477525 - DNA, 55 bp, Artificial
  Synthetic oligonucleotide
ttagacaacacaggagaaggaaccttaggaggtgtagctaataagaactgtagct

SEQ ID NO: 477526 - DNA, 56 bp, Artificial
  Synthetic oligonucleotide
ttagacaattggtttgcaccggtagtctaagaagcgctatgtatcacgtggttggt

SEQ ID NO: 477527 - DNA, 60 bp, Artificial
  Synthetic oligonucleotide
ttagacactttcctagaccatggctccataacttaggacaatatatctatgaaacttatg

SEQ ID NO: 477528 - DNA, 50 bp, Artificial
  Synthetic oligonucleotide
ttagacaggaacatccgcgcgttggcttgtagcccgatcatgtcggggga

SEQ ID NO: 477529 - DNA, 57 bp, Artificial
  Synthetic oligonucleotide
ttagacaggcctatgaggctgtatcctggggacaaccccttctacccgtggctacca

SEQ ID NO: 477530 - DNA, 55 bp, Artificial
  Synthetic oligonucleotide
ttagacaggcctatgaggctgtatcctggggacccccccttctacccttggctac

SEQ ID NO: 477531 - DNA, 57 bp, Artificial
  Synthetic oligonucleotide
ttagacaggggcttttataaacactacggtattattgtaggagatagtgtgtatcaa

SEQ ID NO: 477532 - DNA, 55 bp, Artificial
  Synthetic oligonucleotide
ttagacatcttggaaaggcaaattgcaacaatgcatgtttctaacccaacacagg

SEQ ID NO: 477533 - DNA, 57 bp, Artificial
  Synthetic oligonucleotide
ttagacatgaccactgacctgtgcatcggggagcgtagtgaccatctggtctgcccc

SEQ ID NO: 477534 - DNA, 59 bp, Artificial
  Synthetic oligonucleotide
ttagacatgggtgcttgcccccaacttgcacaattaggaatagtattatgtacgagtaa

SEQ ID NO: 477535 - DNA, 55 bp, Artificial
  Synthetic oligonucleotide
ttagacattatagagtctggagccaagggtagcaacgaattattactcagcacgt

SEQ ID NO: 477536 - DNA, 60 bp, Artificial
  Synthetic oligonucleotide
ttagacatttccattgtgctgaagaacagggcataactgattacatccatatgctcggtg

SEQ ID NO: 477537 - DNA, 60 bp, Artificial
  Synthetic oligonucleotide
ttagacattttcctagtgtatggctccatgggttgggacaacttatctatgaaacatatg

SEQ ID NO: 477538 - DNA, 54 bp, Artificial
  Synthetic oligonucleotide
ttagaccaatgggcacaattgtggaactggttggacataacacaatggttgtgg

SEQ ID NO: 477539 - DNA, 50 bp, Artificial
  Synthetic oligonucleotide
ttagaccatactatagagctcaatggggtcaattgaatgctagaacacct

SEQ ID NO: 477540 - DNA, 60 bp, Artificial
  Synthetic oligonucleotide
ttagacccttgtttaagctgacaacattgataatggacttttgactcaagtcatagtcaa

SEQ ID NO: 477541 - DNA, 55 bp, Artificial
  Synthetic oligonucleotide
ttagacctcagtatgttaccgagcttagaggtaacgatgtgtacataacaggtgt

SEQ ID NO: 477542 - DNA, 55 bp, Artificial
  Synthetic oligonucleotide
ttagacctcccactgtgtcagaaccccaagcccttaagcgtagattttttgtgga

SEQ ID NO: 477543 - DNA, 59 bp, Artificial
  Synthetic oligonucleotide
ttagacgctgaccacacagcgactaacatggggccactcaccggttctaccaagtacca

SEQ ID NO: 477544 - DNA, 53 bp, Artificial
  Synthetic oligonucleotide
ttagacggtgaagtttgcaatgtcgtttctcatggtcgcatgtggacacttac

SEQ ID NO: 477545 - DNA, 54 bp, Artificial
  Synthetic oligonucleotide
ttagacgtcagttcaccaagtatgttgccgctagtttcaccaagcgctcacttt

SEQ ID NO: 477546 - DNA, 57 bp, Artificial
  Synthetic oligonucleotide
ttagacgtctgctggctggtactccccgtacaccccacgcggatcctcagactcccc

SEQ ID NO: 477547 - DNA, 51 bp, Artificial
  Synthetic oligonucleotide
ttagacgttataccacagtccaataggacgtggccaatccaggccatgacg

SEQ ID NO: 477548 - DNA, 55 bp, Artificial
  Synthetic oligonucleotide
ttagacgtttccagagtaaacaccatgtctaacgtcaggcaacttaccgaaaaga

SEQ ID NO: 477549 - DNA, 56 bp, Artificial
  Synthetic oligonucleotide
ttagactataaaccggatgccaacccaactgggcaattaggccacaataagcccga

SEQ ID NO: 477550 - DNA, 59 bp, Artificial
  Synthetic oligonucleotide
ttagactcctattttgttgttaagagacatactatgtctaattatcaacatgaggagac

SEQ ID NO: 477551 - DNA, 59 bp, Artificial
  Synthetic oligonucleotide
ttagactggatgattctctttccgcaatgccttacatctatgtgccaatcaaagagggt

SEQ ID NO: 477552 - DNA, 57 bp, Artificial
  Synthetic oligonucleotide
ttagagaaaccgcatgcctagggaaagcctacgcccaaatgtggactctcatgtatt

SEQ ID NO: 477553 - DNA, 59 bp, Artificial
  Synthetic oligonucleotide
ttagagaaaggaatccccactttacaatctccaacagttgaggcatgtggttattcaga

SEQ ID NO: 477554 - DNA, 60 bp, Artificial
  Synthetic oligonucleotide
ttagagaaccatgtcgatgcgtattggttagccgtggagagatctgtgagtgtgagttgg

SEQ ID NO: 477555 - DNA, 60 bp, Artificial
  Synthetic oligonucleotide
ttagagaacctactgaccttaagcaattcaaacaggatgctaagtactcacatgggatag

SEQ ID NO: 477556 - DNA, 60 bp, Artificial
  Synthetic oligonucleotide
ttagagaaggtatgctatgttccccatcataaggtggggtgggcatggtggacttgcagc

SEQ ID NO: 477557 - DNA, 60 bp, Artificial
  Synthetic oligonucleotide
ttagagaatcacaaagaaacggaattgcgccgcaatcagactcgctaagaaagttgtcag

SEQ ID NO: 477558 - DNA, 55 bp, Artificial
  Synthetic oligonucleotide
ttagagacgttttttcttggaattggctccgaattaataacactacgtcagtata

SEQ ID NO: 477559 - DNA, 55 bp, Artificial
  Synthetic oligonucleotide
ttagagactctgatgattggctcacaaagtactcatactatcctgaagaccctgt

SEQ ID NO: 477560 - DNA, 51 bp, Artificial
  Synthetic oligonucleotide
ttagagagggggtgatttaattggaactagtaacatacagaaacaagcttg

SEQ ID NO: 477561 - DNA, 60 bp, Artificial
  Synthetic oligonucleotide
ttagagagtgctgctactgcacttggaattttctgtgaaacaacattgttgtccatgggg

SEQ ID NO: 477562 - DNA, 59 bp, Artificial
  Synthetic oligonucleotide
ttagagagtgtgattttgctttctttgcaacatagatttagttttacgtctgctttgtg

SEQ ID NO: 477563 - DNA, 57 bp, Artificial
  Synthetic oligonucleotide
ttagagatacccggttttttaaattggatgccacccatttcagtacatgatgtctta

SEQ ID NO: 477564 - DNA, 58 bp, Artificial
  Synthetic oligonucleotide
ttagagatagacacctctttgttgagcgacgataaagttaagaacgtgtcgctaccta

SEQ ID NO: 477565 - DNA, 58 bp, Artificial
  Synthetic oligonucleotide
ttagagatcaaactctctacagaggaaaccaaacaacctacaacttatgctcagatgt

SEQ ID NO: 477566 - DNA, 60 bp, Artificial
  Synthetic oligonucleotide
ttagagatcaccgtcgtgtcgtcgcaggttttaccatctactaatcaagagtatatcacc

SEQ ID NO: 477567 - DNA, 55 bp, Artificial
  Synthetic oligonucleotide
ttagagatcactatagtcaccaacaatgcaggcttaatgcagattatgtatgtgc

SEQ ID NO: 477568 - DNA, 60 bp, Artificial
  Synthetic oligonucleotide
ttagagatcctgccacacattcgaagtacatttagggctctaacaattcatagagtgacg

SEQ ID NO: 477569 - DNA, 59 bp, Artificial
  Synthetic oligonucleotide
ttagagatctcaaacacatgggggttcgtattgatgcacctgaagacacccgtgttcct

SEQ ID NO: 477570 - DNA, 59 bp, Artificial
  Synthetic oligonucleotide
ttagagattggtctgttcttcctgagactgataagttaatgatgatatcgcagtataaa

SEQ ID NO: 477571 - DNA, 54 bp, Artificial
  Synthetic oligonucleotide
ttagagcaagctgggttcacaggataatgaatcgagaatatcgtgaggtgcgtt

SEQ ID NO: 477572 - DNA, 52 bp, Artificial
  Synthetic oligonucleotide
ttagagcaggaaggataacagcctgggatggtcaagcagcacttaacgttca

SEQ ID NO: 477573 - DNA, 50 bp, Artificial
  Synthetic oligonucleotide
ttagagcatctgtgtccaactgatgatgtctatctaggatcaggtgatcc

SEQ ID NO: 477574 - DNA, 60 bp, Artificial
  Synthetic oligonucleotide
ttagagcccagatcagattacaaattcatgtacatgggagttgtgcccttgtccactaag

SEQ ID NO: 477575 - DNA, 60 bp, Artificial
  Synthetic oligonucleotide
ttagagctgggatcaaagatgaggacttcattatatgtaggggcccatactatgtcgagc

SEQ ID NO: 477576 - DNA, 51 bp, Artificial
  Synthetic oligonucleotide
ttagaggagttacaccagtccctaattattcggttacaaaaactaaaaaca

SEQ ID NO: 477577 - DNA, 60 bp, Artificial
  Synthetic oligonucleotide
ttagaggatacatataggttccttaccaacaaggctattgcctgtcagcgcgatgcgccc

SEQ ID NO: 477578 - DNA, 51 bp, Artificial
  Synthetic oligonucleotide
ttagaggatataattaactcatcatccttattcttaaataccatctccttt

SEQ ID NO: 477579 - DNA, 55 bp, Artificial
  Synthetic oligonucleotide
ttagaggctacttagagactacttagggactacttagagactacttagggactac

SEQ ID NO: 477580 - DNA, 55 bp, Artificial
  Synthetic oligonucleotide
ttagagggaagcttgctgaccaatctggcgtatttagcatccaaacggggatggg

SEQ ID NO: 477581 - DNA, 50 bp, Artificial
  Synthetic oligonucleotide
ttagagggcattggagagctccttgcagacgctgtttaaatagagaactg

SEQ ID NO: 477582 - DNA, 60 bp, Artificial
  Synthetic oligonucleotide
ttagagggcctgccgtttgtaagaaggtcaccgaacatgagaaatgcaccacatccatga

SEQ ID NO: 477583 - DNA, 60 bp, Artificial
  Synthetic oligonucleotide
ttagaggggaagtaactactttggatgcagcattggcacttgcactttatgctcttaact

SEQ ID NO: 477584 - DNA, 57 bp, Artificial
  Synthetic oligonucleotide
ttagagggtaggagttatattcgaggtcactgtccaattggaataacaggagtccac

SEQ ID NO: 477585 - DNA, 60 bp, Artificial
  Synthetic oligonucleotide
ttagaggtctctgtttgccagtataatatgtgcgagtacccacaaacgatttgtcatcct

SEQ ID NO: 477586 - DNA, 55 bp, Artificial
  Synthetic oligonucleotide
ttagagtacaaaccggatcaaattcacttaagcaatgctcgagctcttaactcac

SEQ ID NO: 477587 - DNA, 55 bp, Artificial
  Synthetic oligonucleotide
ttagagtaggccccgagcagtggctgtttcccgagaggaagccaaagccaccgcc

SEQ ID NO: 477588 - DNA, 51 bp, Artificial
  Synthetic oligonucleotide
ttagagtctcctttcaactaaaagccccccaataaaatttcaaggccgtgg

SEQ ID NO: 477589 - DNA, 55 bp, Artificial
  Synthetic oligonucleotide
ttagagtcttatgcgacgatcacaccgatgagttggcctctgcttccagtgtccc

SEQ ID NO: 477590 - DNA, 60 bp, Artificial
  Synthetic oligonucleotide
ttagagtgtgtacaagagcaacttctacatctgtatgaaaaagacagtgcagagctaaga

SEQ ID NO: 477591 - DNA, 59 bp, Artificial
  Synthetic oligonucleotide
ttagagtgttgacataaataggtcattgtttgcttaagaccgttatcctgaggaagctc

SEQ ID NO: 477592 - DNA, 59 bp, Artificial
  Synthetic oligonucleotide
ttagagtttgaagattggtctatagatccaaaaaattatgtaatgaagtttagatgtga

SEQ ID NO: 477593 - DNA, 60 bp, Artificial
  Synthetic oligonucleotide
ttagataaacttaaggtcatagcatatggtgatgacctgattgtttcctatccctttgaa

SEQ ID NO: 477594 - DNA, 55 bp, Artificial
  Synthetic oligonucleotide
ttagataagaatttgaagaaacaagggtttgcaggaccaaaacctagatttgctg

SEQ ID NO: 477595 - DNA, 52 bp, Artificial
  Synthetic oligonucleotide
ttagataagctccgtcgtgaggcttgtcttcagggcaacagaaccgagagga

SEQ ID NO: 477596 - DNA, 50 bp, Artificial
  Synthetic oligonucleotide
ttagataagtcgaatggtgtaataacgcttagcagggtgctgcacgctga

SEQ ID NO: 477597 - DNA, 55 bp, Artificial
  Synthetic oligonucleotide
ttagataccttggaggctagagaagagtctcttcgagctcagattaaagctctca

SEQ ID NO: 477598 - DNA, 53 bp, Artificial
  Synthetic oligonucleotide
ttagatactgcacaaatagtgagtcgtataggcatgaacgcaggaaaggcgtt

SEQ ID NO: 477599 - DNA, 55 bp, Artificial
  Synthetic oligonucleotide
ttagatagagttcccgcactgcaagaggtggatgacattggtggtcaatggtcgt

SEQ ID NO: 477600 - DNA, 59 bp, Artificial
  Synthetic oligonucleotide
ttagatagttgttttgaccaggaccacagctgtcagttgggaccacacgtgctttggga

SEQ ID NO: 477601 - DNA, 58 bp, Artificial
  Synthetic oligonucleotide
ttagatataagcctgtagactttggcttatccagtacacctcgtacatcagaacacta

SEQ ID NO: 477602 - DNA, 59 bp, Artificial
  Synthetic oligonucleotide
ttagatatagcttataagtatctaagccttacaaaggatgagttgattaactattacag

SEQ ID NO: 477603 - DNA, 60 bp, Artificial
  Synthetic oligonucleotide
ttagatatatatactctagaatgaatgcgaaagtaaaagctttcgtgtctacggtcggca

SEQ ID NO: 477604 - DNA, 60 bp, Artificial
  Synthetic oligonucleotide
ttagatatgacccattggatataagccaacactttggtagtgatgttctcccgctactag

SEQ ID NO: 477605 - DNA, 60 bp, Artificial
  Synthetic oligonucleotide
ttagatattggagatgcatatttcactataccattagatccaaagtttagacagtataca

SEQ ID NO: 477606 - DNA, 58 bp, Artificial
  Synthetic oligonucleotide
ttagatcaagatggccacatagatagttgtgacgacccaaacttctggcccataatgt

SEQ ID NO: 477607 - DNA, 60 bp, Artificial
  Synthetic oligonucleotide
ttagatcaccacatggagaagaccatgacctagctggggaagagattgcttcttactcta

SEQ ID NO: 477608 - DNA, 60 bp, Artificial
  Synthetic oligonucleotide
ttagatcagttgaagactgaatacactgaagacgttgacgatgagatgtatagagaatat

SEQ ID NO: 477609 - DNA, 60 bp, Artificial
  Synthetic oligonucleotide
ttagatcccactaatacactgtggcttgacatcgaaggacccccaacagatcctgtggaa

SEQ ID NO: 477610 - DNA, 58 bp, Artificial
  Synthetic oligonucleotide
ttagatccgtctggcgtggaagttttgacagcgaacctgtgtcctaacgcggatgcgg

SEQ ID NO: 477611 - DNA, 50 bp, Artificial
  Synthetic oligonucleotide
ttagatcgtcaaatatgactgcgtagaatgggaagtttacgccttgtcct

SEQ ID NO: 477612 - DNA, 60 bp, Artificial
  Synthetic oligonucleotide
ttagatctacttattacaaaccacagaggtccacatgcacgaaattgctggtcggttaca

SEQ ID NO: 477613 - DNA, 60 bp, Artificial
  Synthetic oligonucleotide
ttagatctagcaacttctcagacaatgctaaagtcataatagtacagctgagtgagacta

SEQ ID NO: 477614 - DNA, 60 bp, Artificial
  Synthetic oligonucleotide
ttagatctctattgccttctgggaatgaacagatctggggcagatgcgcactggtagata

SEQ ID NO: 477615 - DNA, 55 bp, Artificial
  Synthetic oligonucleotide
ttagatctgcttggaatacaggataatctccacgaagttcaagagagattgttcc

SEQ ID NO: 477616 - DNA, 55 bp, Artificial
  Synthetic oligonucleotide
ttagatgaagcccgtgaagattgtgaaggttgtgaaaactgtagtgagcatcctg

SEQ ID NO: 477617 - DNA, 50 bp, Artificial
  Synthetic oligonucleotide
ttagatgacacagagccagggaaaaacatagtggattgtgaaaaattcca

SEQ ID NO: 477618 - DNA, 60 bp, Artificial
  Synthetic oligonucleotide
ttagatgatatatggttggtcgctccgccatttcccatggtagacctggcagatgaggct

SEQ ID NO: 477619 - DNA, 53 bp, Artificial
  Synthetic oligonucleotide
ttagatgcaatttcacatatgattatgttgacgacattgtttaccttcatgac

SEQ ID NO: 477620 - DNA, 60 bp, Artificial
  Synthetic oligonucleotide
ttagatgccactgtgatgcagtcagacgaattcgttctgtctggccgttatccagtgcgc

SEQ ID NO: 477621 - DNA, 60 bp, Artificial
  Synthetic oligonucleotide
ttagatgtagtatctgtgaagactcgctgtcagatgacctctctattaaacggagacaat

SEQ ID NO: 477622 - DNA, 60 bp, Artificial
  Synthetic oligonucleotide
ttagatgtgagtgactcgagtactggagttggagctgttatgaatcactttagcctggct

SEQ ID NO: 477623 - DNA, 55 bp, Artificial
  Synthetic oligonucleotide
ttagattaggagtagaacctatttatgagatcccttgtacaagagaagcatggga

SEQ ID NO: 477624 - DNA, 57 bp, Artificial
  Synthetic oligonucleotide
ttagattatcttgaccaccccgaattattcagcaaccatgactacgtaattaacttc

SEQ ID NO: 477625 - DNA, 53 bp, Artificial
  Synthetic oligonucleotide
ttagattcatggaaatcgctgctagagcctccgcgggagcgaaggtgtgtacc

SEQ ID NO: 477626 - DNA, 60 bp, Artificial
  Synthetic oligonucleotide
ttagattgaccgtcagcacgacagaagtttggctgtgagtatgttcgtcagaccggccgt

SEQ ID NO: 477627 - DNA, 60 bp, Artificial
  Synthetic oligonucleotide
ttagattggcaatgacaagaggaaactcgactagaccaatgattacattggacatttctg

SEQ ID NO: 477628 - DNA, 60 bp, Artificial
  Synthetic oligonucleotide
ttagattgggcaagtgacccttattctgctaatctgccctgtgtccagagcataacccga

SEQ ID NO: 477629 - DNA, 53 bp, Artificial
  Synthetic oligonucleotide
ttagattgggtggtgtgtgtgttcggggtgtattgcacggtggcagagggtat

SEQ ID NO: 477630 - DNA, 55 bp, Artificial
  Synthetic oligonucleotide
ttagattgtatctttaggggtgagtgtttccatcttgtgagaaacacttggaggg

SEQ ID NO: 477631 - DNA, 60 bp, Artificial
  Synthetic oligonucleotide
ttagattgtctatattagcaacgcaatctgctgtttgccttatgcgcgttttgttgcaag

SEQ ID NO: 477632 - DNA, 58 bp, Artificial
  Synthetic oligonucleotide
ttagatttggatatttatgctgagaaatgtcctagcccgacgccccccaatagtccga

SEQ ID NO: 477633 - DNA, 58 bp, Artificial
  Synthetic oligonucleotide
ttagcaaaagcaggggtataatctgtaaaaatggagaaaatagtgcttcttcttgcaa

SEQ ID NO: 477634 - DNA, 51 bp, Artificial
  Synthetic oligonucleotide
ttagcaaaggactggagtgatcgtatcgaacaatggttaattgaaccttgc

SEQ ID NO: 477635 - DNA, 52 bp, Artificial
  Synthetic oligonucleotide
ttagcaaccacaacaggtcggtgaggtcccatccggtgacaacctcaacgat

SEQ ID NO: 477636 - DNA, 55 bp, Artificial
  Synthetic oligonucleotide
ttagcaacccgctatacaaacgggataaagagacctaccacgaatacacaacgcg

SEQ ID NO: 477637 - DNA, 60 bp, Artificial
  Synthetic oligonucleotide
ttagcaagaacgccttgttagtatattattgttggatgtcggatgttatgtctaaggcat

SEQ ID NO: 477638 - DNA, 53 bp, Artificial
  Synthetic oligonucleotide
ttagcaaggatgttaaccagtgattctgatatatattccttgccaccagcccc

SEQ ID NO: 477639 - DNA, 51 bp, Artificial
  Synthetic oligonucleotide
ttagcaatccgcccaataggggtccaggatgcttggcttagcacgttcgtt

SEQ ID NO: 477640 - DNA, 56 bp, Artificial
  Synthetic oligonucleotide
ttagcacaggtagcggcgatcagagagaaaaaccgagtgacggagatttttcgttc

SEQ ID NO: 477641 - DNA, 60 bp, Artificial
  Synthetic oligonucleotide
ttagcaccgattatgcctcagcatcgctgcttgctcttaggcgcgagatgattcttagga

SEQ ID NO: 477642 - DNA, 59 bp, Artificial
  Synthetic oligonucleotide
ttagcacggaggagactgaatctaagaaaatgagaggtatagtaaagatacttgagccg

SEQ ID NO: 477643 - DNA, 60 bp, Artificial
  Synthetic oligonucleotide
ttagcacggtatgcttttgatttctatgaaatgacttcacgcacaccagctagagctaag

SEQ ID NO: 477644 - DNA, 60 bp, Artificial
  Synthetic oligonucleotide
ttagcacgtttgaatcagccgatgccagcggcccgctttacttacaagcttcgaccactg

SEQ ID NO: 477645 - DNA, 52 bp, Artificial
  Synthetic oligonucleotide
ttagcactaatggatttgctaatgttcagcacatcagcttacttgattagca

SEQ ID NO: 477646 - DNA, 60 bp, Artificial
  Synthetic oligonucleotide
ttagcactactgtccctctgcgcactgaaccatgttacggcatgacagtgactcctccag

SEQ ID NO: 477647 - DNA, 60 bp, Artificial
  Synthetic oligonucleotide
ttagcactgaaagtagtaagcgatgtcagatcccagggagagaatcccacctggaaacag

SEQ ID NO: 477648 - DNA, 60 bp, Artificial
  Synthetic oligonucleotide
ttagcagaaaaaacgagattctctactgcgtctcgacaaaggaattatcagtggacattc

SEQ ID NO: 477649 - DNA, 58 bp, Artificial
  Synthetic oligonucleotide
ttagcagaacaagaagttcacttaatgccaggagaagttagaataatacccacaggag

SEQ ID NO: 477650 - DNA, 60 bp, Artificial
  Synthetic oligonucleotide
ttagcagacccctcactaaatgtcacaggacacatggaaaactttatgcgcttacacgta

SEQ ID NO: 477651 - DNA, 59 bp, Artificial
  Synthetic oligonucleotide
ttagcagactggccactgtccaacggtcctcgtcgttggtcacatactcgaacaattcc

SEQ ID NO: 477652 - DNA, 55 bp, Artificial
  Synthetic oligonucleotide
ttagcagagtgggccagcgggccagcatgcacacacgaagcggtgcacgtatagg

SEQ ID NO: 477653 - DNA, 55 bp, Artificial
  Synthetic oligonucleotide
ttagcagatcaagtggtagtggaaacaggtagcggagggcaaattattggtgggg

SEQ ID NO: 477654 - DNA, 55 bp, Artificial
  Synthetic oligonucleotide
ttagcagccgagagcactttctgctcgggtccaccctgctgcaccatgtggccgt

SEQ ID NO: 477655 - DNA, 54 bp, Artificial
  Synthetic oligonucleotide
ttagcagctggtcgtccaactattaaccacccaacctttgtagggagtgaacgt

SEQ ID NO: 477656 - DNA, 58 bp, Artificial
  Synthetic oligonucleotide
ttagcagcttaccaaacttcggtccttaacatagagcgaaacactatgttattgactg

SEQ ID NO: 477657 - DNA, 54 bp, Artificial
  Synthetic oligonucleotide
ttagcagggtacttccctaataaaaccataagcttccaaccatcctcaggaggg

SEQ ID NO: 477658 - DNA, 54 bp, Artificial
  Synthetic oligonucleotide
ttagcagtcgaaataactggtagaattttcgggcctggctgcgaagaagctctt

SEQ ID NO: 477659 - DNA, 55 bp, Artificial
  Synthetic oligonucleotide
ttagcagtggagttgaataccgcgtgcataaccactcgtttcaaaacctaaggcg

SEQ ID NO: 477660 - DNA, 57 bp, Artificial
  Synthetic oligonucleotide
ttagcagttagtctgaagttaaaggaagtaatgttacaacaatctcagataaatagt

SEQ ID NO: 477661 - DNA, 55 bp, Artificial
  Synthetic oligonucleotide
ttagcatcagaatgtgccaatgcagccgcatggttaaatcacaacaatcaggcta

SEQ ID NO: 477662 - DNA, 55 bp, Artificial
  Synthetic oligonucleotide
ttagcatggaactgcccagctttggagtgtctgggattaacgaatccgctgacat

SEQ ID NO: 477663 - DNA, 57 bp, Artificial
  Synthetic oligonucleotide
ttagcattatatgttcctataggctggaatgggtacggtgcgcatccggcagctctc

SEQ ID NO: 477664 - DNA, 60 bp, Artificial
  Synthetic oligonucleotide
ttagcattgcttaacgtagtagataacgtaaaacatcgtattcaaatgaatacagctagc

SEQ ID NO: 477665 - DNA, 56 bp, Artificial
  Synthetic oligonucleotide
ttagcattggacagttggcaaaatctgtggagttggtttagcataacaaagtggct

SEQ ID NO: 477666 - DNA, 51 bp, Artificial
  Synthetic oligonucleotide
ttagcattggcacatggggtgaatccttgaactttatccctaatatgaggc

SEQ ID NO: 477667 - DNA, 60 bp, Artificial
  Synthetic oligonucleotide
ttagccaaaattaccctatagtgcaaaatgcacaagggcaaatgatacatcagaacttgt

SEQ ID NO: 477668 - DNA, 60 bp, Artificial
  Synthetic oligonucleotide
ttagccataggagacctacagggactagtactgagacagctcatgaatcaggagatgaca

SEQ ID NO: 477669 - DNA, 57 bp, Artificial
  Synthetic oligonucleotide
ttagccatcttagggcccctctacatactccagacctcgctcctacgcgtcccttac

SEQ ID NO: 477670 - DNA, 59 bp, Artificial
  Synthetic oligonucleotide
ttagcccactttcaggaagtgctcaacatgtagaggaatgttcctgttatccccaacac

SEQ ID NO: 477671 - DNA, 59 bp, Artificial
  Synthetic oligonucleotide
ttagcccagaagtgatacccatgttcgtagcattatcagaaggggccaccccacaagat

SEQ ID NO: 477672 - DNA, 55 bp, Artificial
  Synthetic oligonucleotide
ttagcccgttccgttattgagtaccaatccgttattgagtaccgatatatcggta

SEQ ID NO: 477673 - DNA, 55 bp, Artificial
  Synthetic oligonucleotide
ttagccctagacgaccgaacccttcctgacaaaatagcgtcttacctcagtgagt

SEQ ID NO: 477674 - DNA, 58 bp, Artificial
  Synthetic oligonucleotide
ttagccctgccccgtatcctcacagcgtcccctgacccgtatcattcgcttatcgccg

SEQ ID NO: 477675 - DNA, 57 bp, Artificial
  Synthetic oligonucleotide
ttagccctgcctggtttgaagcactcaagatggtgttagagaagattggattcgggg

SEQ ID NO: 477676 - DNA, 50 bp, Artificial
  Synthetic oligonucleotide
ttagccgatcacatgaaatgggatttatttgtcggtatgacaattcgctt

SEQ ID NO: 477677 - DNA, 54 bp, Artificial
  Synthetic oligonucleotide
ttagccgcacgttggccgttatcccattgcttaacaatccgggccgggtgcttt

SEQ ID NO: 477678 - DNA, 54 bp, Artificial
  Synthetic oligonucleotide
ttagccgccatgactttccaagtctcctcaccttccgtccccacggcttctgaa

SEQ ID NO: 477679 - DNA, 60 bp, Artificial
  Synthetic oligonucleotide
ttagccggaatgggattggctaatttcaattacgatgatacgctatctgaaatgtatgca

SEQ ID NO: 477680 - DNA, 59 bp, Artificial
  Synthetic oligonucleotide
ttagccgtgggtctccagctggcatgtctgttcagcccaaaaactggctacctggaccc

SEQ ID NO: 477681 - DNA, 55 bp, Artificial
  Synthetic oligonucleotide
ttagccgtgtcacagcttactgaggttttctcaaggaaggggaaacacctcctaa

SEQ ID NO: 477682 - DNA, 60 bp, Artificial
  Synthetic oligonucleotide
ttagccgtgttcagatgccagatgactttgtctcctagaaaatggctgttagtcagaata

SEQ ID NO: 477683 - DNA, 52 bp, Artificial
  Synthetic oligonucleotide
ttagccgttatataaagtttaacctatgtttaaccgtcttgctttaattcga

SEQ ID NO: 477684 - DNA, 60 bp, Artificial
  Synthetic oligonucleotide
ttagcctaagtacagaaattcagatgactgatttctggacatttaatcctgatttagtgg

SEQ ID NO: 477685 - DNA, 60 bp, Artificial
  Synthetic oligonucleotide
ttagcctatgaccatcaatatcgtgtcaccgctcgctatctttcggatccgctcgtctca

SEQ ID NO: 477686 - DNA, 58 bp, Artificial
  Synthetic oligonucleotide
ttagccttgccaaggttgaattggcaccactttctttgttctggagacctgtgtacgc

SEQ ID NO: 477687 - DNA, 60 bp, Artificial
  Synthetic oligonucleotide
ttagcgacaactctagctagagcttgtaaatttacatctcattgaaaacccctcacacaa

SEQ ID NO: 477688 - DNA, 55 bp, Artificial
  Synthetic oligonucleotide
ttagcgacctccggtcgcccaggtaggtaccgaacgatgagagaggtacctagac

SEQ ID NO: 477689 - DNA, 53 bp, Artificial
  Synthetic oligonucleotide
ttagcgagcgtcaaataaccgcatttagagacagctcacaagatagcgctaac

SEQ ID NO: 477690 - DNA, 60 bp, Artificial
  Synthetic oligonucleotide
ttagcgatacctagcaggtcagccaaatccttttgcatcttgacgccataggctgacatt

SEQ ID NO: 477691 - DNA, 60 bp, Artificial
  Synthetic oligonucleotide
ttagcgatcctaagggcgtcattgaattcgacggaggggccatcactcgtgatgccgcac

SEQ ID NO: 477692 - DNA, 60 bp, Artificial
  Synthetic oligonucleotide
ttagcgatctaatcggagttgttcgccgtaccaactatgtcgaagcgaccagcagatatc

SEQ ID NO: 477693 - DNA, 59 bp, Artificial
  Synthetic oligonucleotide
ttagcgatgccgccgtcaatgttgtcagacgtcaggtcgatttgaccccggcgaagccc

SEQ ID NO: 477694 - DNA, 60 bp, Artificial
  Synthetic oligonucleotide
ttagcgattacattacaagcggttaaagcgatcaaagataagactggtgcgacgacacta

SEQ ID NO: 477695 - DNA, 59 bp, Artificial
  Synthetic oligonucleotide
ttagcgctggttaacaaagttacaatgccatcgttccgcttcccattagagctagactc

SEQ ID NO: 477696 - DNA, 54 bp, Artificial
  Synthetic oligonucleotide
ttagcggaccttatattgaatgaatggctgtgcaatccgatggatataacgttg

SEQ ID NO: 477697 - DNA, 60 bp, Artificial
  Synthetic oligonucleotide
ttagcggcaaagaggtaatgaggatcacacttgcaaagatagctaaagctatgggaatat

SEQ ID NO: 477698 - DNA, 54 bp, Artificial
  Synthetic oligonucleotide
ttagcggcaacactttccggttctgacccaatgcaggctatcggctcccgtgta

SEQ ID NO: 477699 - DNA, 54 bp, Artificial
  Synthetic oligonucleotide
ttagcggggacactcccgcagatttctggaaacggcgtcccctatcaattgtac

SEQ ID NO: 477700 - DNA, 53 bp, Artificial
  Synthetic oligonucleotide
ttagcggtacccctccctcgggcgggatctgagttggcggtaatctacaaacc

SEQ ID NO: 477701 - DNA, 60 bp, Artificial
  Synthetic oligonucleotide
ttagcggttatactacttgtactctactgctacgcatcacttgttacaaatcgcaatact

SEQ ID NO: 477702 - DNA, 60 bp, Artificial
  Synthetic oligonucleotide
ttagcggttcaatctacggtggagtcccctcaaacaagatcactgctatcgctggtgagt

SEQ ID NO: 477703 - DNA, 52 bp, Artificial
  Synthetic oligonucleotide
ttagcgtaatgaatgatctatatgctacacttcgagataattctggtggtaa

SEQ ID NO: 477704 - DNA, 51 bp, Artificial
  Synthetic oligonucleotide
ttagcgtaatgtcgcctgcctatggtccgtgcgtagtgccgccacgcgact

SEQ ID NO: 477705 - DNA, 60 bp, Artificial
  Synthetic oligonucleotide
ttagcgtacgtggtaccagcaccgccagattatgacatgttcgttaaaggtgtggcagca

SEQ ID NO: 477706 - DNA, 60 bp, Artificial
  Synthetic oligonucleotide
ttagcgtcatatctcgacagtttctttttcgggatagcgagcctgcatcattgctttgta

SEQ ID NO: 477707 - DNA, 55 bp, Artificial
  Synthetic oligonucleotide
ttagcgtgaaaaggataccagggaaatcatcatcagtcattaaatgcactaggct

SEQ ID NO: 477708 - DNA, 60 bp, Artificial
  Synthetic oligonucleotide
ttagcgtgaacaacgtggtggcttttcagtgcgaattaatgaacgactcgattgtgtaca

SEQ ID NO: 477709 - DNA, 60 bp, Artificial
  Synthetic oligonucleotide
ttagctaacatgaccaatgatgctaaagtaatacagacgttacacttatataagcaaacg

SEQ ID NO: 477710 - DNA, 54 bp, Artificial
  Synthetic oligonucleotide
ttagctaacttaatacggtagtcttcgaaattcagtgcgtgtgggtttgggacg

SEQ ID NO: 477711 - DNA, 52 bp, Artificial
  Synthetic oligonucleotide
ttagctaacttaattcggtagtcttcgaaattaagtgttggtgggttcggtg

SEQ ID NO: 477712 - DNA, 60 bp, Artificial
  Synthetic oligonucleotide
ttagctaatcagtattcgatcataaagtcgagtgattacgtttcacagatgagatggctg

SEQ ID NO: 477713 - DNA, 60 bp, Artificial
  Synthetic oligonucleotide
ttagctaccttgctgccagtcataactggcccctcgcaccgggtaatgtgcgtctgggaa

SEQ ID NO: 477714 - DNA, 60 bp, Artificial
  Synthetic oligonucleotide
ttagctacgctaatgtgagcgggagctcggaagataagccctactgctggcactacccgc

SEQ ID NO: 477715 - DNA, 59 bp, Artificial
  Synthetic oligonucleotide
ttagctacggtctatctctttggcgtcttcagttatcaaacaactcggttgtgctggct

SEQ ID NO: 477716 - DNA, 60 bp, Artificial
  Synthetic oligonucleotide
ttagctagcctgctatcgatgcagagttcaatatctgcattacaagcagctacaccacaa

SEQ ID NO: 477717 - DNA, 60 bp, Artificial
  Synthetic oligonucleotide
ttagctcaacacgctcaccctcgctacgatgaccacagacacgctaaagcttgcacagga

SEQ ID NO: 477718 - DNA, 60 bp, Artificial
  Synthetic oligonucleotide
ttagctcagttagttgctcttttgatggcgaaatgcgtatacctgacgtgcctttgaaga

SEQ ID NO: 477719 - DNA, 55 bp, Artificial
  Synthetic oligonucleotide
ttagctccctggaaatttggatggaattgggaggagctggtggggtgttgaaggt

SEQ ID NO: 477720 - DNA, 60 bp, Artificial
  Synthetic oligonucleotide
ttagctcgatcaattgtcaaatatgtattaaacgtagcagatgcgggtcccccacgatgc

SEQ ID NO: 477721 - DNA, 60 bp, Artificial
  Synthetic oligonucleotide
ttagctgatggcctatcgcctagggcagctagggcgcaagccctggggctctaggacggc

SEQ ID NO: 477722 - DNA, 60 bp, Artificial
  Synthetic oligonucleotide
ttagctgatttgggtgataacgaacttgctccgattgacaatcagattgccactctacat

SEQ ID NO: 477723 - DNA, 58 bp, Artificial
  Synthetic oligonucleotide
ttagctgcgaagggtatcaacccactagcagtacctcggatccgaaccgaggcaggag

SEQ ID NO: 477724 - DNA, 57 bp, Artificial
  Synthetic oligonucleotide
ttagctgctcgaccgaaagcggtcccaggtggtaggaattactcaggcgattgttgt

SEQ ID NO: 477725 - DNA, 60 bp, Artificial
  Synthetic oligonucleotide
ttagctggattgctatcaatgtcatcggcatcaaatggagaatctagacagcttaaattt

SEQ ID NO: 477726 - DNA, 50 bp, Artificial
  Synthetic oligonucleotide
ttagctggcaatgatacgggtctcatgcttgaattatctgatcctagcat

SEQ ID NO: 477727 - DNA, 60 bp, Artificial
  Synthetic oligonucleotide
ttagctggccactaggtgtccccgactgtgagatcttcagcatatgcagtgatgggtttg

SEQ ID NO: 477728 - DNA, 60 bp, Artificial
  Synthetic oligonucleotide
ttagctggctgttcaatagcttgcaccatgactataagaatgaccccacaatcttgtgtg

SEQ ID NO: 477729 - DNA, 55 bp, Artificial
  Synthetic oligonucleotide
ttagctgggctgatcattgtcaaatgtcaagaccaactcccattggctttgctag

SEQ ID NO: 477730 - DNA, 60 bp, Artificial
  Synthetic oligonucleotide
ttagctgtccacgccctcgcgacttacgatgggccagtgaacagcttgacttccgcggta

SEQ ID NO: 477731 - DNA, 59 bp, Artificial
  Synthetic oligonucleotide
ttagctgtggccgacaactcgaaagatgttgtcgctgctatgtaccccgaggcgtttaa

SEQ ID NO: 477732 - DNA, 60 bp, Artificial
  Synthetic oligonucleotide
ttagctgttcatcaaatatcacagggctattattaacaagagatggtggaagtgaaaaca

SEQ ID NO: 477733 - DNA, 60 bp, Artificial
  Synthetic oligonucleotide
ttagcttatcttaaatcgcaacgacaaggtgctgtgagcaacaatgacaccaagggtact

SEQ ID NO: 477734 - DNA, 60 bp, Artificial
  Synthetic oligonucleotide
ttagcttcaacagggggagaggtgggaatccacttgtcacacactggagatagtgcaggg

SEQ ID NO: 477735 - DNA, 58 bp, Artificial
  Synthetic oligonucleotide
ttagcttgtcagacactggaacaaagtttacaccttggggctcactgagcctgggtat

SEQ ID NO: 477736 - DNA, 55 bp, Artificial
  Synthetic oligonucleotide
ttagctttaagacacagtgtgactcaggtgtatgcagatacgcaaacctacttgc

SEQ ID NO: 477737 - DNA, 60 bp, Artificial
  Synthetic oligonucleotide
ttagctttacagctaccggtcaacccacaggtagtgtgggatgtgccgcgcagctctatc

SEQ ID NO: 477738 - DNA, 55 bp, Artificial
  Synthetic oligonucleotide
ttagctttcctaaaatacccccgtttctgtgtcttagaggcgcgtcggagtgcgc

SEQ ID NO: 477739 - DNA, 60 bp, Artificial
  Synthetic oligonucleotide
ttagcttttcgcgacaaagagcttaacgcagacgacgaatgccgcaagtggctagagaac

SEQ ID NO: 477740 - DNA, 57 bp, Artificial
  Synthetic oligonucleotide
ttaggaaacccttacagagtaagcttaaagaagattcaacatggacttggaatgata

SEQ ID NO: 477741 - DNA, 53 bp, Artificial
  Synthetic oligonucleotide
ttaggaaacgcacctatgtcgggttgcccgtgggactaaaaccagttacttgc

SEQ ID NO: 477742 - DNA, 58 bp, Artificial
  Synthetic oligonucleotide
ttaggaaagtcaacgcttgtcgcttcgctttcacttggcatgtattgagtggcaaccg

SEQ ID NO: 477743 - DNA, 54 bp, Artificial
  Synthetic oligonucleotide
ttaggaaagtcgcgctatttttgatcgggaattatgaaaagttaagtccggatc

SEQ ID NO: 477744 - DNA, 56 bp, Artificial
  Synthetic oligonucleotide
ttaggaaatgctttgacaacgattaccaggcttgtaaatttttacagacaccttca

SEQ ID NO: 477745 - DNA, 56 bp, Artificial
  Synthetic oligonucleotide
ttaggaaattacatgttagatgctattggggaacctaaaacctgcaggtttgtcac

SEQ ID NO: 477746 - DNA, 55 bp, Artificial
  Synthetic oligonucleotide
ttaggaaatttcccagttatgtcaggaggcgctgtgtcgttacatccctctggag

SEQ ID NO: 477747 - DNA, 56 bp, Artificial
  Synthetic oligonucleotide
ttaggaactatcgtgcttacggccataaccctggttttgagggagctcgcttacta

SEQ ID NO: 477748 - DNA, 58 bp, Artificial
  Synthetic oligonucleotide
ttaggaactgggacaccaaaatttgattatacttgccatggtgctagtaggaaggata

SEQ ID NO: 477749 - DNA, 58 bp, Artificial
  Synthetic oligonucleotide
ttaggaagcccccctgtagttagcaatagtgacttcctttgcgtgggatggtccagca

SEQ ID NO: 477750 - DNA, 55 bp, Artificial
  Synthetic oligonucleotide
ttaggaaggggactaacgcagcttcgatagttgaaacagtttcccagatgtttcc

SEQ ID NO: 477751 - DNA, 59 bp, Artificial
  Synthetic oligonucleotide
ttaggaagtctgacaatgtaaaggttatgtagtcagaattccaaattacttggccagca

SEQ ID NO: 477752 - DNA, 59 bp, Artificial
  Synthetic oligonucleotide
ttaggaataaacgtggatcctactttaatcaacgtcgacagtattcacgcaatcatgtg

SEQ ID NO: 477753 - DNA, 57 bp, Artificial
  Synthetic oligonucleotide
ttaggaatatggtgtatgttaggtcattagccgctaatttaaattccgtaacatgta

SEQ ID NO: 477754 - DNA, 58 bp, Artificial
  Synthetic oligonucleotide
ttaggaatattggtgaccatacattctagatactccaaaacaaagtctttcatattaa

SEQ ID NO: 477755 - DNA, 54 bp, Artificial
  Synthetic oligonucleotide
ttaggaattgccaagtcaactattatgctatataaaaaagagaattcggactta

SEQ ID NO: 477756 - DNA, 60 bp, Artificial
  Synthetic oligonucleotide
ttaggaatttatgatagaacactaatcttaccaacacatgcagaccctggtagtgaggtg

SEQ ID NO: 477757 - DNA, 60 bp, Artificial
  Synthetic oligonucleotide
ttaggacaatatatctatgaaacctatggagacacttgggcgggagtggaagctataata

SEQ ID NO: 477758 - DNA, 60 bp, Artificial
  Synthetic oligonucleotide
ttaggacagatgtcttacgtgatgcacaattccaacgagatatctgaagaatttttggca

SEQ ID NO: 477759 - DNA, 59 bp, Artificial
  Synthetic oligonucleotide
ttaggaccaaacttgagggtatgcctgatggaacgacactcagtcctttcaaagtgata

SEQ ID NO: 477760 - DNA, 56 bp, Artificial
  Synthetic oligonucleotide
ttaggacgataacgaataatcatagcgtttaagtattcaattggcgattcgagcac

SEQ ID NO: 477761 - DNA, 56 bp, Artificial
  Synthetic oligonucleotide
ttaggacgtaagtttcttatgcaggcaggcctacgcacagggcctaagtttaaatc

SEQ ID NO: 477762 - DNA, 55 bp, Artificial
  Synthetic oligonucleotide
ttaggacgtttagttaggactaggtgtgaatatccagcaggacataaccaggtag

SEQ ID NO: 477763 - DNA, 60 bp, Artificial
  Synthetic oligonucleotide
ttaggagagcaacggtatcagcggatccattgctatcactattggagatgtgccacagca

SEQ ID NO: 477764 - DNA, 56 bp, Artificial
  Synthetic oligonucleotide
ttaggagctaactccttaatcacattaagagcctccgacttacttccagtgttaag

SEQ ID NO: 477765 - DNA, 56 bp, Artificial
  Synthetic oligonucleotide
ttaggaggaatttccctcattgcgtggtttttgcttatatggatgatttggttttg

SEQ ID NO: 477766 - DNA, 54 bp, Artificial
  Synthetic oligonucleotide
ttaggagtagccgcactagggataaaaaacattggaaacaaagaatacttatgg

SEQ ID NO: 477767 - DNA, 60 bp, Artificial
  Synthetic oligonucleotide
ttaggagtaggagcactggtagtagcatttatcttagcaatagttgtgtggatcatagca

SEQ ID NO: 477768 - DNA, 57 bp, Artificial
  Synthetic oligonucleotide
ttaggagtttagctaggcgttcttatcagcgagataggacacaaacaaccgacctat

SEQ ID NO: 477769 - DNA, 50 bp, Artificial
  Synthetic oligonucleotide
ttaggataagtaaggaaaaaattcctacagttaactctaaaacgacgtgg

SEQ ID NO: 477770 - DNA, 57 bp, Artificial
  Synthetic oligonucleotide
ttaggatacgaagcaactaaacaacaaggacatatctcaaattgggcacaaattaaa

SEQ ID NO: 477771 - DNA, 57 bp, Artificial
  Synthetic oligonucleotide
ttaggatacgaagcagaaaaaactcaaggacgtgtttctaattgggcacagatcaaa

SEQ ID NO: 477772 - DNA, 60 bp, Artificial
  Synthetic oligonucleotide
ttaggatatgaagccgctaaacaacaaggcagagtagctgaatggtgtcaaatgaaatac

SEQ ID NO: 477773 - DNA, 57 bp, Artificial
  Synthetic oligonucleotide
ttaggatatgtgaggaaatagtttttcgctgagactttggagcgcttaaccggtggc

SEQ ID NO: 477774 - DNA, 52 bp, Artificial
  Synthetic oligonucleotide
ttaggatcaacgttgacaggattgttagatttatccacgaagaagaattttg

SEQ ID NO: 477775 - DNA, 59 bp, Artificial
  Synthetic oligonucleotide
ttaggatctttcttgatgaggtacagctccttcctcctgggtatttagacctgatttgc

SEQ ID NO: 477776 - DNA, 58 bp, Artificial
  Synthetic oligonucleotide
ttaggatggaaatgtgctgacctggtttgagagaccaagtcgaataggcgttggttcg

SEQ ID NO: 477777 - DNA, 60 bp, Artificial
  Synthetic oligonucleotide
ttaggatgtatgtagggggtgtggagcacaggctcgatgccgcatgcaactggactcgag

SEQ ID NO: 477778 - DNA, 60 bp, Artificial
  Synthetic oligonucleotide
ttaggattattcaaatttttaatgaacctatcagatgagaccttccagcatgagagacta

SEQ ID NO: 477779 - DNA, 53 bp, Artificial
  Synthetic oligonucleotide
ttaggattgcagaaaaagtgcactcaccaggggttgtttcatctctctcaact

SEQ ID NO: 477780 - DNA, 56 bp, Artificial
  Synthetic oligonucleotide
ttaggatttaaaatctcctaacatgtactttaggaataaagtgcatgggtgtccca

SEQ ID NO: 477781 - DNA, 58 bp, Artificial
  Synthetic oligonucleotide
ttaggatttacatgagaatgaagcacgttagggcgtgggtacctcgcccgatgcgtaa

SEQ ID NO: 477782 - DNA, 60 bp, Artificial
  Synthetic oligonucleotide
ttaggcaagctcaaaccattgaacttgctacacttgctcgcgtcatgtgattggacgttt

SEQ ID NO: 477783 - DNA, 51 bp, Artificial
  Synthetic oligonucleotide
ttaggcacacacatgatttgggatatcgggcttcagtcgagctgtgttttg

SEQ ID NO: 477784 - DNA, 59 bp, Artificial
  Synthetic oligonucleotide
ttaggcaccttacggtctggagacgttttgcgcatcaccggttcgatgcagtacgtgac

SEQ ID NO: 477785 - DNA, 52 bp, Artificial
  Synthetic oligonucleotide
ttaggcaggcagtggcaaagggagtagcttgggcggctaagctgaacactag

SEQ ID NO: 477786 - DNA, 52 bp, Artificial
  Synthetic oligonucleotide
ttaggcagtccatatgaaagtcccgccagtgatttacaggagagcataaaca

SEQ ID NO: 477787 - DNA, 57 bp, Artificial
  Synthetic oligonucleotide
ttaggcagttttttggcctacaactttcccttaagtgcatagttggcaggccgtgca

SEQ ID NO: 477788 - DNA, 54 bp, Artificial
  Synthetic oligonucleotide
ttaggcattcagcactataagtggaatccggccatagaaccgttcgtggaattt

SEQ ID NO: 477789 - DNA, 60 bp, Artificial
  Synthetic oligonucleotide
ttaggcattcatccaagattagctcagagaatcttgtttaatacagttatgatggaaaat

SEQ ID NO: 477790 - DNA, 60 bp, Artificial
  Synthetic oligonucleotide
ttaggccaatttataccccatccgatagggagagagagagcgataaatacatatatagcc

SEQ ID NO: 477791 - DNA, 56 bp, Artificial
  Synthetic oligonucleotide
ttaggccattaggaatagcacccactgatgtgctttggaactccagttggagtaat

SEQ ID NO: 477792 - DNA, 55 bp, Artificial
  Synthetic oligonucleotide
ttaggccctctgaagatcaggtcatgtggtaggatgttgtgaacggcttttaggt

SEQ ID NO: 477793 - DNA, 53 bp, Artificial
  Synthetic oligonucleotide
ttaggcctgagttcaacaggtagtttttccttattttggactaaccacgcgac

SEQ ID NO: 477794 - DNA, 55 bp, Artificial
  Synthetic oligonucleotide
ttaggcctgccttttactcagaccctaatttcactaaagtggaatcctttgagcc

SEQ ID NO: 477795 - DNA, 60 bp, Artificial
  Synthetic oligonucleotide
ttaggccttctagaggctttgcactctaggcactccttgataggtgttgcaaacctcttg

SEQ ID NO: 477796 - DNA, 52 bp, Artificial
  Synthetic oligonucleotide
ttaggcgcggagacgccccgaacctccaactcccctacaagctccatcccgt

SEQ ID NO: 477797 - DNA, 55 bp, Artificial
  Synthetic oligonucleotide
ttaggcgctgatatttggcgtagttacgtggacagtcagacatatagggtgccgg

SEQ ID NO: 477798 - DNA, 60 bp, Artificial
  Synthetic oligonucleotide
ttaggcggcctgattagctctaaccagttcgacagcgatcgttctgtgccttttatgtcg

SEQ ID NO: 477799 - DNA, 58 bp, Artificial
  Synthetic oligonucleotide
ttaggcgggcaacccaccagggtagatcaaaaaatgcgtggaagtgtagctgtgcctg

SEQ ID NO: 477800 - DNA, 58 bp, Artificial
  Synthetic oligonucleotide
ttaggcgtatttgggcagagttatttccagaattagaatgcttttttgagtttgcaca

SEQ ID NO: 477801 - DNA, 60 bp, Artificial
  Synthetic oligonucleotide
ttaggcgtggagttcaagaatgtgctacctgtgttaacggctgaacatagagcgatgata

SEQ ID NO: 477802 - DNA, 55 bp, Artificial
  Synthetic oligonucleotide
ttaggcgtgtgatttgtgataaccaaacgatttggcagaatacaaatgcaacccc

SEQ ID NO: 477803 - DNA, 55 bp, Artificial
  Synthetic oligonucleotide
ttaggcgttagtttgttggtactgatcaccctctttacactcaccccggcgtata

SEQ ID NO: 477804 - DNA, 57 bp, Artificial
  Synthetic oligonucleotide
ttaggcgttgacctttacagatggattctccgttttcatgagtttccgaaaatcata

SEQ ID NO: 477805 - DNA, 51 bp, Artificial
  Synthetic oligonucleotide
ttaggctacccaaagcttagcaccgaagcgttgtttagtcaaggggggata

SEQ ID NO: 477806 - DNA, 53 bp, Artificial
  Synthetic oligonucleotide
ttaggctatatagcatcaacaggggagaaatacagaaaacgtgaacagggaac

SEQ ID NO: 477807 - DNA, 60 bp, Artificial
  Synthetic oligonucleotide
ttaggctcccagtctctccctaatatcgctaatattactcagatccctggtgtggcagga

SEQ ID NO: 477808 - DNA, 56 bp, Artificial
  Synthetic oligonucleotide
ttaggctctttaaacggtgtaggtcctggtgggcttttaatcctgagagcaatgcc

SEQ ID NO: 477809 - DNA, 60 bp, Artificial
  Synthetic oligonucleotide
ttaggctgcaaccaatctttgattgattcgttgcataggaggtctggttcggagttagga

SEQ ID NO: 477810 - DNA, 53 bp, Artificial
  Synthetic oligonucleotide
ttaggctgttacttgggcctagtcaggtaagaagacttggaaaagatcagtgg

SEQ ID NO: 477811 - DNA, 57 bp, Artificial
  Synthetic oligonucleotide
ttaggcttagatgacttcttggccgaagtttggaaacatgggcatcggaagacgacg

SEQ ID NO: 477812 - DNA, 54 bp, Artificial
  Synthetic oligonucleotide
ttagggaacatcacatggatgccaaaattttggtccggttatcgaggacataca

SEQ ID NO: 477813 - DNA, 52 bp, Artificial
  Synthetic oligonucleotide
ttagggaaccaaatcctcgtggttggccgccgttgttggtaaggcccctatg

SEQ ID NO: 477814 - DNA, 60 bp, Artificial
  Synthetic oligonucleotide
ttagggaatacaatgaaacagtgaggattgaaaggataacacaatggcataataccagtg

SEQ ID NO: 477815 - DNA, 58 bp, Artificial
  Synthetic oligonucleotide
ttagggacatgctagtgggctcagactccgtggtagagaagatcgtaaggtccctagt

SEQ ID NO: 477816 - DNA, 55 bp, Artificial
  Synthetic oligonucleotide
ttagggaccggtatcaggtgttacgtaaattctatgcgactgttgtcggtggacc

SEQ ID NO: 477817 - DNA, 59 bp, Artificial
  Synthetic oligonucleotide
ttagggacctgagaggactgtgcctaagagtatgttcagaacaggaaacatactatagg

SEQ ID NO: 477818 - DNA, 53 bp, Artificial
  Synthetic oligonucleotide
ttagggactccctcttccctaagaagaaacataacgcagccggtgttaaggta

SEQ ID NO: 477819 - DNA, 59 bp, Artificial
  Synthetic oligonucleotide
ttagggagctcaacacttactccgccacccatatttatctcattgaaagtattagtcta

SEQ ID NO: 477820 - DNA, 56 bp, Artificial
  Synthetic oligonucleotide
ttagggaggttaacaaacgtgctagacgcgaagtcaacagacttctcagtacttag

SEQ ID NO: 477821 - DNA, 56 bp, Artificial
  Synthetic oligonucleotide
ttagggaggtttatccctactatcgggccggtccaggctaccacgtgcgagctata

SEQ ID NO: 477822 - DNA, 60 bp, Artificial
  Synthetic oligonucleotide
ttagggagtcgaggccggaatacgggatgcgactggtcagagagtgccagagagtgattc

SEQ ID NO: 477823 - DNA, 57 bp, Artificial
  Synthetic oligonucleotide
ttagggatgcaagttatggctgacttcgtaaaccgttttgattcaccattccaccag

SEQ ID NO: 477824 - DNA, 60 bp, Artificial
  Synthetic oligonucleotide
ttagggcaaagagtactgaccaggtgtgaatacactgcaggacatagcaaggtagggaca

SEQ ID NO: 477825 - DNA, 60 bp, Artificial
  Synthetic oligonucleotide
ttagggcagatgtgcacttaacagggacagaaggattttctaagttgccaatgtatacag

SEQ ID NO: 477826 - DNA, 60 bp, Artificial
  Synthetic oligonucleotide
ttagggccacaccaacaggagtcaggcacctagcaattggaaatctgatcattccagggg

SEQ ID NO: 477827 - DNA, 56 bp, Artificial
  Synthetic oligonucleotide
ttagggcccaactgttatgcgacaacatctgagccagaaaacaaggatgtggtgca

SEQ ID NO: 477828 - DNA, 60 bp, Artificial
  Synthetic oligonucleotide
ttagggccgccatcagtactagtgctacaaaatttggttcgcagttgcatagtactgtgt

SEQ ID NO: 477829 - DNA, 53 bp, Artificial
  Synthetic oligonucleotide
ttagggcctttcaacgttatggcaacagagtctccaacttctgatttcccttg

SEQ ID NO: 477830 - DNA, 58 bp, Artificial
  Synthetic oligonucleotide
ttagggcgcaaccatcacgacaagcagagttgcagggaaaaacgaatttaattgtatg

SEQ ID NO: 477831 - DNA, 57 bp, Artificial
  Synthetic oligonucleotide
ttagggctaagatttaggtgaccacacaaatagtaatgtgggcctaatgacttagcc

SEQ ID NO: 477832 - DNA, 55 bp, Artificial
  Synthetic oligonucleotide
ttagggctcgtaattatgtcgaagcgaccagcagatatagtgatttcaactcccg

SEQ ID NO: 477833 - DNA, 58 bp, Artificial
  Synthetic oligonucleotide
ttagggctgtacttagggatatacccatccgagaagtccacatccaacacagactttg

SEQ ID NO: 477834 - DNA, 56 bp, Artificial
  Synthetic oligonucleotide
ttagggcttagatccaagtgcccacataaataattatgtggccccaaggaacgggc

SEQ ID NO: 477835 - DNA, 55 bp, Artificial
  Synthetic oligonucleotide
ttaggggacatagatggaatgatgcaccaacagatattgctacaaagataccaag

SEQ ID NO: 477836 - DNA, 57 bp, Artificial
  Synthetic oligonucleotide
ttaggggcataacgaatcaatctgtaaatcatggttatctattgggtaaaccactac

SEQ ID NO: 477837 - DNA, 56 bp, Artificial
  Synthetic oligonucleotide
ttaggggccttctccctcaatatattgagggccgaagctttggaccctgaattgat

SEQ ID NO: 477838 - DNA, 56 bp, Artificial
  Synthetic oligonucleotide
ttaggggctaattccctaattacattaagagcctctgacttactgccgctgttaag

SEQ ID NO: 477839 - DNA, 52 bp, Artificial
  Synthetic oligonucleotide
ttagggggaatttggccttcccacaaggggaggccagggaatttccttcaga

SEQ ID NO: 477840 - DNA, 60 bp, Artificial
  Synthetic oligonucleotide
ttagggggctggcaactattccgtcatgttagaaccaagttcagagtgctggccactatg

SEQ ID NO: 477841 - DNA, 55 bp, Artificial
  Synthetic oligonucleotide
ttaggggttcgggtctgcgagaaaagggcgcttcatgacgccgtcaaacaacttc

SEQ ID NO: 477842 - DNA, 60 bp, Artificial
  Synthetic oligonucleotide
ttaggggttcgtgcatgggcttgcatagcaagtcttagaatgcgggtgccgtacagtgtt

SEQ ID NO: 477843 - DNA, 56 bp, Artificial
  Synthetic oligonucleotide
ttaggggttggcgccccttatacttctgcggaatcattaactgaaagagaaactga

SEQ ID NO: 477844 - DNA, 56 bp, Artificial
  Synthetic oligonucleotide
ttagggtcagcgaactacctcgggaagagacagctcgattttgtcgctaaactttg

SEQ ID NO: 477845 - DNA, 57 bp, Artificial
  Synthetic oligonucleotide
ttagggtctccatgctcgtagtagtataaattgtaagcgcctggcttagttaagtcg

SEQ ID NO: 477846 - DNA, 58 bp, Artificial
  Synthetic oligonucleotide
ttagggtggatcgaaatgctgatctccccgaagcccaacctcgaacaagcacaacaac

SEQ ID NO: 477847 - DNA, 60 bp, Artificial
  Synthetic oligonucleotide
ttagggttttgctttctacagtctgcacaattgcctgtgcatgtgaccaaataatctgct

SEQ ID NO: 477848 - DNA, 60 bp, Artificial
  Synthetic oligonucleotide
ttaggtaaagtgaagaacacgttgcacatgatacaaactcatgggaatatgataagcagt

SEQ ID NO: 477849 - DNA, 55 bp, Artificial
  Synthetic oligonucleotide
ttaggtacatgaatgatcctaggtataagaaacaatgctgcgaccacgtcagccg

SEQ ID NO: 477850 - DNA, 58 bp, Artificial
  Synthetic oligonucleotide
ttaggtaccaagctgttgatgcagtgagtaatgtatggtttttacacaagggagttaa

SEQ ID NO: 477851 - DNA, 60 bp, Artificial
  Synthetic oligonucleotide
ttaggtactctcatgccctgaaagcttatggacctcaatatggtagttgcgaggagaggg

SEQ ID NO: 477852 - DNA, 54 bp, Artificial
  Synthetic oligonucleotide
ttaggtagacgttttgtatatcaaattggtcttacagggcaaacattaaactct

SEQ ID NO: 477853 - DNA, 58 bp, Artificial
  Synthetic oligonucleotide
ttaggtaggcctcaatattctgaaacaccagctggttatgttcgagttagtcgcctcg

SEQ ID NO: 477854 - DNA, 56 bp, Artificial
  Synthetic oligonucleotide
ttaggtatagacgtagtacattttgaggatcttaccagtcattggcatgcattagg

SEQ ID NO: 477855 - DNA, 56 bp, Artificial
  Synthetic oligonucleotide
ttaggtattgacataggagatggctactcctgggtagcacaatataatgggtctta

SEQ ID NO: 477856 - DNA, 54 bp, Artificial
  Synthetic oligonucleotide
ttaggtcaaaacccagatgggcaggacctagcaatgttctgtcaaatggtttct

SEQ ID NO: 477857 - DNA, 55 bp, Artificial
  Synthetic oligonucleotide
ttaggtcatctaagccgctatggatcgcatctctgcccgcattcccgtcgcgccc

SEQ ID NO: 477858 - DNA, 53 bp, Artificial
  Synthetic oligonucleotide
ttaggtcatgagataattgatactcatccctatgggactctatgtaattgaac

SEQ ID NO: 477859 - DNA, 55 bp, Artificial
  Synthetic oligonucleotide
ttaggtccacaagggaatacacagtttggttgaggcttctaagcctctgcaagtc

SEQ ID NO: 477860 - DNA, 58 bp, Artificial
  Synthetic oligonucleotide
ttaggtctccgttcccaaactggagaaccgcagactgcctggttccagaatgtgacca

SEQ ID NO: 477861 - DNA, 54 bp, Artificial
  Synthetic oligonucleotide
ttaggtcttgttggaatcattgcaatgttgaagttcgccaacgttgcaccggtt

SEQ ID NO: 477862 - DNA, 55 bp, Artificial
  Synthetic oligonucleotide
ttaggtgaagagactccttcacggatcatcaagccaggtgatacgccgagggacg

SEQ ID NO: 477863 - DNA, 60 bp, Artificial
  Synthetic oligonucleotide
ttaggtgatgtctactactctttacgtcacacttatcaatggagtctgcgcccggaatat

SEQ ID NO: 477864 - DNA, 59 bp, Artificial
  Synthetic oligonucleotide
ttaggtgctaactccctaatgactctaagagcctctgacttactgcctccccattcgag

SEQ ID NO: 477865 - DNA, 59 bp, Artificial
  Synthetic oligonucleotide
ttaggtgctaactccctaatgactctaagagcctttgacttactgcctgcgttaagtgc

SEQ ID NO: 477866 - DNA, 52 bp, Artificial
  Synthetic oligonucleotide
ttaggtgcttcagcaatatgaggcgaaagactagggagaaagttcctatgga

SEQ ID NO: 477867 - DNA, 55 bp, Artificial
  Synthetic oligonucleotide
ttaggtggcactcccactaagcgcatgctaatgtacaacttccccactcgtgcag

SEQ ID NO: 477868 - DNA, 57 bp, Artificial
  Synthetic oligonucleotide
ttaggtggtccgacaataccagtagtcacatggccgggagagacaccgctgtgatac

SEQ ID NO: 477869 - DNA, 54 bp, Artificial
  Synthetic oligonucleotide
ttaggtgtaaggctggggctaactctgtcgctaaattcttttcccgaccaatta

SEQ ID NO: 477870 - DNA, 60 bp, Artificial
  Synthetic oligonucleotide
ttaggtgtatgcttgcaattaaatacctacaaggtgtcgagtctacgtattctccagata

SEQ ID NO: 477871 - DNA, 53 bp, Artificial
  Synthetic oligonucleotide
ttaggtgtatgttaacgggtaaatacctcccccttgttgaatctacgtatgct

SEQ ID NO: 477872 - DNA, 58 bp, Artificial
  Synthetic oligonucleotide
ttaggtgtgtttgcagagacaattggaggggatctaatagacccgttctatatataaa

SEQ ID NO: 477873 - DNA, 52 bp, Artificial
  Synthetic oligonucleotide
ttaggtgttacctatcatgcccctaggatcagaagaaagaagattgctccgc

SEQ ID NO: 477874 - DNA, 57 bp, Artificial
  Synthetic oligonucleotide
ttaggttacgctgacgaggttttctttggtggtgcttatactctctccgatgtacat

SEQ ID NO: 477875 - DNA, 55 bp, Artificial
  Synthetic oligonucleotide
ttaggttcaaggtaagaggccacagaatgtccggtgacattaataccagcatggg

SEQ ID NO: 477876 - DNA, 55 bp, Artificial
  Synthetic oligonucleotide
ttaggttcacggcaattgctccgacccgggcagtgctggatcgatggagaagtgt

SEQ ID NO: 477877 - DNA, 52 bp, Artificial
  Synthetic oligonucleotide
ttaggttcgtagtgtttcatggccatccccttacttcactagcgcgtgtggg

SEQ ID NO: 477878 - DNA, 60 bp, Artificial
  Synthetic oligonucleotide
ttaggttgcccatgtagacaccagatgctcggggcccttcagacctcattatcttggctt

SEQ ID NO: 477879 - DNA, 52 bp, Artificial
  Synthetic oligonucleotide
ttaggttggatgcttaataaattgattatggatgtattgttaaataaactta

SEQ ID NO: 477880 - DNA, 58 bp, Artificial
  Synthetic oligonucleotide
ttaggtttacacgcacttacaggcagcgcgacaggaccaaagaagttaaggatccaca

SEQ ID NO: 477881 - DNA, 60 bp, Artificial
  Synthetic oligonucleotide
ttaggttttggggcatacatgtccaaagcacatggtgttgaccctaacatcagaactgga

SEQ ID NO: 477882 - DNA, 58 bp, Artificial
  Synthetic oligonucleotide
ttaggttttggggcgtatatgtctaaggcacatggtgtcgaccctaacatcagaactg

SEQ ID NO: 477883 - DNA, 55 bp, Artificial
  Synthetic oligonucleotide
ttagtaaacctgccaacggatctgtaatactttaacgcctgcagcgctcattccg

SEQ ID NO: 477884 - DNA, 60 bp, Artificial
  Synthetic oligonucleotide
ttagtaacaagagaaccctacatcagctgcgacaatgaagtctgttggtcttttgcacta

SEQ ID NO: 477885 - DNA, 56 bp, Artificial
  Synthetic oligonucleotide
ttagtaacatcttgaatgatatatggttggtcgttccactaaaccccatagtagac

SEQ ID NO: 477886 - DNA, 54 bp, Artificial
  Synthetic oligonucleotide
ttagtaagacaaaaacttgcgaaaatataaaaagagtcttatgtttatctccca

SEQ ID NO: 477887 - DNA, 55 bp, Artificial
  Synthetic oligonucleotide
ttagtaagcgtcttatcggagtaactcaaagaggggatgcgtggattaaagcgct

SEQ ID NO: 477888 - DNA, 60 bp, Artificial
  Synthetic oligonucleotide
ttagtaaggaaagcagatcctgagtatgtgttttcaccaggcataatccctgaatcaaat

SEQ ID NO: 477889 - DNA, 53 bp, Artificial
  Synthetic oligonucleotide
ttagtaagtttacacataaaggagcccttagaaagacgcctacgtttccgata

SEQ ID NO: 477890 - DNA, 53 bp, Artificial
  Synthetic oligonucleotide
ttagtaatagtggccataatagcaatagttgtgtggaccatagtacttataga

SEQ ID NO: 477891 - DNA, 59 bp, Artificial
  Synthetic oligonucleotide
ttagtaatgctactaaagtcggatttaatgtcatgagtaaaagcatattgccaaatcct

SEQ ID NO: 477892 - DNA, 54 bp, Artificial
  Synthetic oligonucleotide
ttagtacaaatagacaatgatactagtgggaactatagggtgataagttgcaac

SEQ ID NO: 477893 - DNA, 54 bp, Artificial
  Synthetic oligonucleotide
ttagtacaagcgccaaatcttgtctaaacgggaatacccgataatttgtgtcgt

SEQ ID NO: 477894 - DNA, 58 bp, Artificial
  Synthetic oligonucleotide
ttagtacagccgggtgacaacataaccttctcacacaatgggggtcggatagcaccga

SEQ ID NO: 477895 - DNA, 51 bp, Artificial
  Synthetic oligonucleotide
ttagtaccaaaattttacaaccaaacaaacagtacctgggagttacaatac

SEQ ID NO: 477896 - DNA, 55 bp, Artificial
  Synthetic oligonucleotide
ttagtaccacatggagttgggtagataatagcagcacatgcagagtaggtagtgg

SEQ ID NO: 477897 - DNA, 50 bp, Artificial
  Synthetic oligonucleotide
ttagtaccgagtacagatgctagtagttcgtggtcttctttgctaattgg

SEQ ID NO: 477898 - DNA, 55 bp, Artificial
  Synthetic oligonucleotide
ttagtaccgcagcttatagtaacgttacccttgaatgagtatttcgcgagagcag

SEQ ID NO: 477899 - DNA, 53 bp, Artificial
  Synthetic oligonucleotide
ttagtacgtgatagaagaccttttggaactccccaagattttggtcaggtgtt

SEQ ID NO: 477900 - DNA, 57 bp, Artificial
  Synthetic oligonucleotide
ttagtactctagaggccttgtctcttactggacttacaacagagcagttttccctcc

SEQ ID NO: 477901 - DNA, 54 bp, Artificial
  Synthetic oligonucleotide
ttagtactctggtatcacggtacctttgtatgcctgttttatctcccttccccc

SEQ ID NO: 477902 - DNA, 56 bp, Artificial
  Synthetic oligonucleotide
ttagtagaacagactggaataagactttacaccaggtagttacacaattaggaata

SEQ ID NO: 477903 - DNA, 60 bp, Artificial
  Synthetic oligonucleotide
ttagtagaagaagtcaaaatgatacttatgtatctaatgacacgcttttatcagatacaa

SEQ ID NO: 477904 - DNA, 60 bp, Artificial
  Synthetic oligonucleotide
ttagtagaattggtcagcgagggtccatgtatacacgcagtggcaaacatattggtggac

SEQ ID NO: 477905 - DNA, 58 bp, Artificial
  Synthetic oligonucleotide
ttagtagcagaaatacagaaacaagggcaagatcaatggacataccaaatttatcagg

SEQ ID NO: 477906 - DNA, 60 bp, Artificial
  Synthetic oligonucleotide
ttagtagcagaaatacagaagcaagggcaagaccaatggtcatatcaaatttaccaagag

SEQ ID NO: 477907 - DNA, 55 bp, Artificial
  Synthetic oligonucleotide
ttagtagcggctttcaatggaaaggtgtatgattgcctgcagttacgttcgtctg

SEQ ID NO: 477908 - DNA, 60 bp, Artificial
  Synthetic oligonucleotide
ttagtaggtggaggcatgttgacttggtcaatcggtgtctctcaatctttgctatgcaat

SEQ ID NO: 477909 - DNA, 60 bp, Artificial
  Synthetic oligonucleotide
ttagtagtagcccagctgctccgaatcccacaagccgtcttggacatgatcgctggtgcc

SEQ ID NO: 477910 - DNA, 60 bp, Artificial
  Synthetic oligonucleotide
ttagtagtctatgctgagaagggatcaggtaagacgttgttcttgtctagatgtgctgaa

SEQ ID NO: 477911 - DNA, 55 bp, Artificial
  Synthetic oligonucleotide
ttagtataacttcgaacggtgtttatcaatgcccgatagtgtcttcctgcgattc

SEQ ID NO: 477912 - DNA, 55 bp, Artificial
  Synthetic oligonucleotide
ttagtatacttctatcacgtggatccgtctcttctgaagaaaaccgcttacaagc

SEQ ID NO: 477913 - DNA, 59 bp, Artificial
  Synthetic oligonucleotide
ttagtatgcgagaacctttatctcatgcctccattcaggagatgcttcgacgtgtagtc

SEQ ID NO: 477914 - DNA, 53 bp, Artificial
  Synthetic oligonucleotide
ttagtatgtccttaaaccctttaagactgtcactacctgcagtcatacggtct

SEQ ID NO: 477915 - DNA, 60 bp, Artificial
  Synthetic oligonucleotide
ttagtatgtcttagactcatcaatgctgagccctatgacactgctacatcaggagaacct

SEQ ID NO: 477916 - DNA, 51 bp, Artificial
  Synthetic oligonucleotide
ttagtcaacacaggacccggtggtctttcagcattgttaagacaatcgtat

SEQ ID NO: 477917 - DNA, 57 bp, Artificial
  Synthetic oligonucleotide
ttagtcaccggtgaaaccgcaccaacaccgtacaaatcaacagtgttctctgattgg

SEQ ID NO: 477918 - DNA, 55 bp, Artificial
  Synthetic oligonucleotide
ttagtcacgactatgacactacatttcaagcagaatgaatgcaccaactcctcga

SEQ ID NO: 477919 - DNA, 60 bp, Artificial
  Synthetic oligonucleotide
ttagtcatataccgcacaaacacaataggtgatgactatattccaacatgtgattgtact

SEQ ID NO: 477920 - DNA, 55 bp, Artificial
  Synthetic oligonucleotide
ttagtcatcctgcacatgacattcgtgggttaaatgttccggatatgagactagg

SEQ ID NO: 477921 - DNA, 56 bp, Artificial
  Synthetic oligonucleotide
ttagtcattaccggaaaccggatcaccgcgtggccgtttgcgccggactgggctga

SEQ ID NO: 477922 - DNA, 58 bp, Artificial
  Synthetic oligonucleotide
ttagtcattatactgatcgaaccaaatgtacctcgagaattaagaacgtacactatat

SEQ ID NO: 477923 - DNA, 57 bp, Artificial
  Synthetic oligonucleotide
ttagtccaattagaaagaccacgtcttaaagcctgggtccatctaaaggatgccaca

SEQ ID NO: 477924 - DNA, 60 bp, Artificial
  Synthetic oligonucleotide
ttagtccactgtcaggaagtgctcagcatgtggaggaatgctcctgttacccccggtatc

SEQ ID NO: 477925 - DNA, 57 bp, Artificial
  Synthetic oligonucleotide
ttagtccagtctggattggagagtgccccaagtatgtcaaaagtaagagcctaaaac

SEQ ID NO: 477926 - DNA, 57 bp, Artificial
  Synthetic oligonucleotide
ttagtccccaatccgttattgtacaccgatatatcggtgtccaattggtgcctattc

SEQ ID NO: 477927 - DNA, 57 bp, Artificial
  Synthetic oligonucleotide
ttagtcccgatacagaacggaatcgatagattacgtagtagagcaggtttactcgga

SEQ ID NO: 477928 - DNA, 60 bp, Artificial
  Synthetic oligonucleotide
ttagtccctgagagttcttgtaacatggataatcaccagtcactttcgactatcaataaa

SEQ ID NO: 477929 - DNA, 54 bp, Artificial
  Synthetic oligonucleotide
ttagtccgatgatgttgttttacttatcgtacgaatatttgtgtatgatagtgt

SEQ ID NO: 477930 - DNA, 60 bp, Artificial
  Synthetic oligonucleotide
ttagtccgcaagacgaggttcctcccagtggctggtggaacaagcagtgtgtatattgaa

SEQ ID NO: 477931 - DNA, 55 bp, Artificial
  Synthetic oligonucleotide
ttagtcctgatgtggcagcacgagtaatcgttgcagtggccgagaatagaagcgg

SEQ ID NO: 477932 - DNA, 51 bp, Artificial
  Synthetic oligonucleotide
ttagtcgatggtgttccggcgcacatgaaagcgaccgatgtttggaatgtt

SEQ ID NO: 477933 - DNA, 55 bp, Artificial
  Synthetic oligonucleotide
ttagtcgctgagcttcgttggcagtataataaatttgccgttattacacatggaa

SEQ ID NO: 477934 - DNA, 60 bp, Artificial
  Synthetic oligonucleotide
ttagtcggaaggatggcaattatagatacccatgctgctgtgtcactcttgaagacggta

SEQ ID NO: 477935 - DNA, 58 bp, Artificial
  Synthetic oligonucleotide
ttagtcgttaactgtaatcatggtgaactgtcctcagcaagtcgtgtcggttggaatt

SEQ ID NO: 477936 - DNA, 56 bp, Artificial
  Synthetic oligonucleotide
ttagtctaaagctaagtgctgaaaatgactttagcagtgatagcccagagagaaaa

SEQ ID NO: 477937 - DNA, 60 bp, Artificial
  Synthetic oligonucleotide
ttagtctaatacgtcccttaatgacaagatggatggtggctaatggctacgtaactgaca

SEQ ID NO: 477938 - DNA, 60 bp, Artificial
  Synthetic oligonucleotide
ttagtctacatagagcaacttggagagtatgcatacagctatgacttgagtctgttgagc

SEQ ID NO: 477939 - DNA, 60 bp, Artificial
  Synthetic oligonucleotide
ttagtctatcacccgtttactgaatgcggcacacactgtgtttgtggtgcaagatatgaa

SEQ ID NO: 477940 - DNA, 56 bp, Artificial
  Synthetic oligonucleotide
ttagtctcatacagaccaaccgatgttaaccctaaagagcttcctgtataatctgg

SEQ ID NO: 477941 - DNA, 59 bp, Artificial
  Synthetic oligonucleotide
ttagtcttaatgtgcttacccacattgaagtttgtctgcaggaggttctggtttatgta

SEQ ID NO: 477942 - DNA, 58 bp, Artificial
  Synthetic oligonucleotide
ttagtcttcatcgttcaataggggcccatcactttttccaaattagcagatacgaatc

SEQ ID NO: 477943 - DNA, 56 bp, Artificial
  Synthetic oligonucleotide
ttagtgacgactcaagaatcttcttccgaatacgtattaatttgcgaatgtaaaaa

SEQ ID NO: 477944 - DNA, 56 bp, Artificial
  Synthetic oligonucleotide
ttagtgacggtatacgctccttccattccgttctccacaggacctttcgacgatgt

SEQ ID NO: 477945 - DNA, 60 bp, Artificial
  Synthetic oligonucleotide
ttagtgagaaatccactctcacggaactccacacatgagatgtactgggtatccaatgcc

SEQ ID NO: 477946 - DNA, 60 bp, Artificial
  Synthetic oligonucleotide
ttagtgagcctactgacacttcctcatcagagtatgttcccaagagttccgttgaagaga

SEQ ID NO: 477947 - DNA, 60 bp, Artificial
  Synthetic oligonucleotide
ttagtgagcggattcttagcacttgtgtgggacgatctacggagcctgtgtctcttcagc

SEQ ID NO: 477948 - DNA, 52 bp, Artificial
  Synthetic oligonucleotide
ttagtgagcggattcttagctcttgcgtgggaggacttcaggaaccttctac

SEQ ID NO: 477949 - DNA, 60 bp, Artificial
  Synthetic oligonucleotide
ttagtgagcttaagagaggccgcaatacggcaggtgggagctctacatattacaacttag

SEQ ID NO: 477950 - DNA, 56 bp, Artificial
  Synthetic oligonucleotide
ttagtgataccacaaagacgggatcagtgatggtccgctaccttgggctagaagac

SEQ ID NO: 477951 - DNA, 60 bp, Artificial
  Synthetic oligonucleotide
ttagtgatcaaggaagaagcgctaaggggatcagccaaacatattgaagaatgctcttgt

SEQ ID NO: 477952 - DNA, 60 bp, Artificial
  Synthetic oligonucleotide
ttagtgatcgtgtacgctccattactttgggcaattccacgatcaccacacaagagtgtg

SEQ ID NO: 477953 - DNA, 60 bp, Artificial
  Synthetic oligonucleotide
ttagtgatgttacacgaggaaccggactcacacatcgcgttggaaagcgattttgtgtga

SEQ ID NO: 477954 - DNA, 55 bp, Artificial
  Synthetic oligonucleotide
ttagtgatgttacgcgtggtccgggaattactcatagggttggcaagaggttctg

SEQ ID NO: 477955 - DNA, 51 bp, Artificial
  Synthetic oligonucleotide
ttagtgcaactttctcattaatctggattgaagatagaaatactatatgca

SEQ ID NO: 477956 - DNA, 60 bp, Artificial
  Synthetic oligonucleotide
ttagtgcacgttatgttaagtacgtagattctagtgcactaggaccatcaccaggcagct

SEQ ID NO: 477957 - DNA, 59 bp, Artificial
  Synthetic oligonucleotide
ttagtgcagcattcttttcctcgtctaggtactctttatagctggagttgggaccagga

SEQ ID NO: 477958 - DNA, 60 bp, Artificial
  Synthetic oligonucleotide
ttagtgcatggctgcatagtgtgtgctcatggcctgataaattaccagtgccacactgct

SEQ ID NO: 477959 - DNA, 58 bp, Artificial
  Synthetic oligonucleotide
ttagtgccactgtaaaagcagcctgttggtgggcaggtatcaaacaggaattcgggat

SEQ ID NO: 477960 - DNA, 60 bp, Artificial
  Synthetic oligonucleotide
ttagtgccatggtagagtgtatggaattatgcgacgcgttgacgctacatattcgggaga

SEQ ID NO: 477961 - DNA, 60 bp, Artificial
  Synthetic oligonucleotide
ttagtgcccacgcctttaatgcagcatttttgtcctcgtccaagtactctttatatgatg

SEQ ID NO: 477962 - DNA, 50 bp, Artificial
  Synthetic oligonucleotide
ttagtgcccgctgaagagcgttacactagtgtggcctacttgaaggctag

SEQ ID NO: 477963 - DNA, 55 bp, Artificial
  Synthetic oligonucleotide
ttagtgctaccgacggttggaggaggtctgccttcaattaccgtggctctagcct

SEQ ID NO: 477964 - DNA, 53 bp, Artificial
  Synthetic oligonucleotide
ttagtgctcacccggctagcccaccacataccgttaatttctctaatgttagg

SEQ ID NO: 477965 - DNA, 57 bp, Artificial
  Synthetic oligonucleotide
ttagtgcttccgtgtggtcccgaactgtcgagcctaagtcttataacattaggactc

SEQ ID NO: 477966 - DNA, 59 bp, Artificial
  Synthetic oligonucleotide
ttagtggaaacgcaggacatttcccttgaagtctctaagtgttggattgatgcttcgaa

SEQ ID NO: 477967 - DNA, 60 bp, Artificial
  Synthetic oligonucleotide
ttagtggatatggctggcacagtctcatccatagttgcacaacaccggcaaattgattta

SEQ ID NO: 477968 - DNA, 50 bp, Artificial
  Synthetic oligonucleotide
ttagtggatgtgacatgcctgcgaaatatgagatcaaaggcatggctgag

SEQ ID NO: 477969 - DNA, 60 bp, Artificial
  Synthetic oligonucleotide
ttagtggatgttgacaccgaccatgatgctacccaggcatgtatatttgctggacgttac

SEQ ID NO: 477970 - DNA, 60 bp, Artificial
  Synthetic oligonucleotide
ttagtggcgattcgcagaccgtatactgcccttgcgatctacagtatggtgtcacagcag

SEQ ID NO: 477971 - DNA, 51 bp, Artificial
  Synthetic oligonucleotide
ttagtgggcggctaagaggataagtagggcaacgctcagcggtagtcccac

SEQ ID NO: 477972 - DNA, 60 bp, Artificial
  Synthetic oligonucleotide
ttagtggtggaccactatatacttacacgcgaagttgttgctagtgcgcgatgtgggatc

SEQ ID NO: 477973 - DNA, 57 bp, Artificial
  Synthetic oligonucleotide
ttagtggttggcgattaaatgctgactcagtattgtgggggggccataaagttttca

SEQ ID NO: 477974 - DNA, 55 bp, Artificial
  Synthetic oligonucleotide
ttagtgtaagactactgagggatacaacgcacatagcacaaacagcgatgccgca

SEQ ID NO: 477975 - DNA, 58 bp, Artificial
  Synthetic oligonucleotide
ttagtgtcagcggagggtgcacaagatgtgatagcggagatgaacagtttacttggtt

SEQ ID NO: 477976 - DNA, 52 bp, Artificial
  Synthetic oligonucleotide
ttagtgtccccctttacggatagcgttagtattagtagggactcctatttgg

SEQ ID NO: 477977 - DNA, 60 bp, Artificial
  Synthetic oligonucleotide
ttagtgtccttgggaaatgggaaattattcaggagtgacttgaatattgaatcttgctca

SEQ ID NO: 477978 - DNA, 60 bp, Artificial
  Synthetic oligonucleotide
ttagtgtgggacgtgggattgcagtccactgcctcgctagttgtaccatgggttagtgct

SEQ ID NO: 477979 - DNA, 57 bp, Artificial
  Synthetic oligonucleotide
ttagtgtgtggggaccaataaatagacttgcccaccaagttcggatctacaaacatg

SEQ ID NO: 477980 - DNA, 55 bp, Artificial
  Synthetic oligonucleotide
ttagtgttaggaaaggtaccaccgtcagtcctctagaccgatggctacgtcactc

SEQ ID NO: 477981 - DNA, 59 bp, Artificial
  Synthetic oligonucleotide
ttagtgttattgtgtatccgatgcaactcattgttaccctactccgtgtacagtaacag

SEQ ID NO: 477982 - DNA, 55 bp, Artificial
  Synthetic oligonucleotide
ttagtgttggcactttgcgccagcacattggttcgcttcataatagaacggtggc

SEQ ID NO: 477983 - DNA, 52 bp, Artificial
  Synthetic oligonucleotide
ttagttaaatagttgtcccttataaaacttggtccctaagtactcattgtaa

SEQ ID NO: 477984 - DNA, 60 bp, Artificial
  Synthetic oligonucleotide
ttagttaacatattgggagtatggatgaagcccatgtgtattggatatgagaatgtttta

SEQ ID NO: 477985 - DNA, 52 bp, Artificial
  Synthetic oligonucleotide
ttagttaactggcttaaaccctaagggtagatatgtgggcggtaagcaagag

SEQ ID NO: 477986 - DNA, 59 bp, Artificial
  Synthetic oligonucleotide
ttagttaagattcatctaagaactgtatggaactcttctaaaatggtggataatgtaca

SEQ ID NO: 477987 - DNA, 52 bp, Artificial
  Synthetic oligonucleotide
ttagttacatctttcagggtcgaactcacacagacacgacccgcagctatat

SEQ ID NO: 477988 - DNA, 60 bp, Artificial
  Synthetic oligonucleotide
ttagttacgcctgctggcaagaggaagagtctcccacgactcgacgacgccacttgcagg

SEQ ID NO: 477989 - DNA, 52 bp, Artificial
  Synthetic oligonucleotide
ttagttagggatagaaggccgtttggttcaccgatggattttggacaggtgt

SEQ ID NO: 477990 - DNA, 58 bp, Artificial
  Synthetic oligonucleotide
ttagttataccttaacatctgaaggccttgaagtacatattatttccgctgggcttga

SEQ ID NO: 477991 - DNA, 60 bp, Artificial
  Synthetic oligonucleotide
ttagttataccttgacatctgcaggccttgaaatacatgtcgtctccgccgggcttgatt

SEQ ID NO: 477992 - DNA, 55 bp, Artificial
  Synthetic oligonucleotide
ttagttatcactgagctcaaagagggtgggatggatttctacgtgccaaggcagg

SEQ ID NO: 477993 - DNA, 60 bp, Artificial
  Synthetic oligonucleotide
ttagttatgcctccatgaacctggagagagtgctgactcaagagaagctggaccgcatct

SEQ ID NO: 477994 - DNA, 55 bp, Artificial
  Synthetic oligonucleotide
ttagttcaatctggattacgtcgtaggcctaccataggaccccgcaaacgttctg

SEQ ID NO: 477995 - DNA, 60 bp, Artificial
  Synthetic oligonucleotide
ttagttcagagacaggtgattgtgttgtgacttcatcatttctaagaatccgggacaatt

SEQ ID NO: 477996 - DNA, 55 bp, Artificial
  Synthetic oligonucleotide
ttagttcagccgacactagatggaccgtatcaacctactacgtttaacttaccaa

SEQ ID NO: 477997 - DNA, 60 bp, Artificial
  Synthetic oligonucleotide
ttagttcatggacatcagaagtcgaaaatataatggcggagccatgtcatcgacggatta

SEQ ID NO: 477998 - DNA, 60 bp, Artificial
  Synthetic oligonucleotide
ttagttccgaagagattgcatctccgcagatatctgtttctgagagttgtgtggaagaag

SEQ ID NO: 477999 - DNA, 56 bp, Artificial
  Synthetic oligonucleotide
ttagttccgctatcggatggccgccacgtgtattaatataagaccgttgaattaaa

SEQ ID NO: 478000 - DNA, 59 bp, Artificial
  Synthetic oligonucleotide
ttagttcctaaggccattagaggccaatacagtggatttgtcaggactctattccaaca

SEQ ID NO: 478001 - DNA, 60 bp, Artificial
  Synthetic oligonucleotide
ttagttcctttctgcttcagactgcacttcgctccagagacacagctacaaactactctc

SEQ ID NO: 478002 - DNA, 60 bp, Artificial
  Synthetic oligonucleotide
ttagttctctagtaaatctgcatcaggggggtaaatatatctatggctcatcctcaggaa

SEQ ID NO: 478003 - DNA, 57 bp, Artificial
  Synthetic oligonucleotide
ttagttctttcgttgggtgccacagtttctgtcggcactcctggtagtgtactagtc

SEQ ID NO: 478004 - DNA, 53 bp, Artificial
  Synthetic oligonucleotide
ttagttgactacaccgtcgtgttttctgaaccaattcctaccgggtcgatcac

SEQ ID NO: 478005 - DNA, 56 bp, Artificial
  Synthetic oligonucleotide
ttagttgagtattgtgaaagtttgaccacattcgtacacaagaagaaaaaagatgg

SEQ ID NO: 478006 - DNA, 52 bp, Artificial
  Synthetic oligonucleotide
ttagttgatgagcagagtctattccatctgctcgccaggagtaaagcgcttt

SEQ ID NO: 478007 - DNA, 60 bp, Artificial
  Synthetic oligonucleotide
ttagttgcgtctgtgaagagaatggtgatgtagataagctagagatctaaccaatctcta

SEQ ID NO: 478008 - DNA, 51 bp, Artificial
  Synthetic oligonucleotide
ttagttggaatgcactgctttttataatgggtgtcagaactgctttaataa

SEQ ID NO: 478009 - DNA, 55 bp, Artificial
  Synthetic oligonucleotide
ttagttggttgtatgctaagttgtccatgttcgcttcgtgtggcaagttctgggt

SEQ ID NO: 478010 - DNA, 55 bp, Artificial
  Synthetic oligonucleotide
ttagttgtctgtgttgttagcacctcagccgtagagatggagaacttgccagcag

SEQ ID NO: 478011 - DNA, 57 bp, Artificial
  Synthetic oligonucleotide
ttagttgttccaaacattaaagaaagtcatccagctacatctaattcggcccctaca

SEQ ID NO: 478012 - DNA, 55 bp, Artificial
  Synthetic oligonucleotide
ttagtttagagggatcagatacatcccacaacctgacaaccccacctgcaacccc

SEQ ID NO: 478013 - DNA, 53 bp, Artificial
  Synthetic oligonucleotide
ttagtttataaccttactaactactaactcgggtattattacaagtatatgac

SEQ ID NO: 478014 - DNA, 58 bp, Artificial
  Synthetic oligonucleotide
ttagtttattactgctggatgtcggatacgcctgcgaaggcctccacttttgtatcgt

SEQ ID NO: 478015 - DNA, 55 bp, Artificial
  Synthetic oligonucleotide
ttagtttcccttgaatacggcagaagtggactccgttggctacgtttgtgtctac

SEQ ID NO: 478016 - DNA, 60 bp, Artificial
  Synthetic oligonucleotide
ttagtttgaacgccattttgacacactacgattatatagtaatctatgctaatcttgaag

SEQ ID NO: 478017 - DNA, 57 bp, Artificial
  Synthetic oligonucleotide
ttagtttgacagtagatgaaccatctttttcaatattgagaacgcgtacggtgaatt

SEQ ID NO: 478018 - DNA, 54 bp, Artificial
  Synthetic oligonucleotide
ttagtttgatcggcttcgtagtaggcgaggcggcgggtctgaccgacaacgcta

SEQ ID NO: 478019 - DNA, 52 bp, Artificial
  Synthetic oligonucleotide
ttagtttggcaactcctcagcccaaaccaagactcacgtgctttatgcgtta

SEQ ID NO: 478020 - DNA, 56 bp, Artificial
  Synthetic oligonucleotide
ttagtttgtgtatggatacggattcgtataatggaattgcgggatgtttttccctg

SEQ ID NO: 478021 - DNA, 52 bp, Artificial
  Synthetic oligonucleotide
ttagttttagggtaaagggcaaggtagagtgtttcgctctaagggcgtagga

SEQ ID NO: 478022 - DNA, 53 bp, Artificial
  Synthetic oligonucleotide
ttagttttgggttgactataagtgagcgaaaatgagtaccgaattcgaagagc

SEQ ID NO: 478023 - DNA, 55 bp, Artificial
  Synthetic oligonucleotide
ttataaaatcgcgtcccgggtacgactttagattcgcgtacggatatctgtacac

SEQ ID NO: 478024 - DNA, 60 bp, Artificial
  Synthetic oligonucleotide
ttataaacatgtggcagcaagtaggaaaagcaatgtatgcccctcccatcagcggaccaa

SEQ ID NO: 478025 - DNA, 55 bp, Artificial
  Synthetic oligonucleotide
ttataaaccctgagtcgtccttatagaccaagcatacagttattgcgaccacatc

SEQ ID NO: 478026 - DNA, 55 bp, Artificial
  Synthetic oligonucleotide
ttataaaggataggaggaaagttttgccagagcattatgacgccatattgggcgg

SEQ ID NO: 478027 - DNA, 55 bp, Artificial
  Synthetic oligonucleotide
ttataaagtactagcattgctaggatctacactcttaaaagcaacacccgctgtg

SEQ ID NO: 478028 - DNA, 60 bp, Artificial
  Synthetic oligonucleotide
ttataaagtgcgtaacgtcgaatctgcaggagatacttggtcatatagcgatcggctctc

SEQ ID NO: 478029 - DNA, 54 bp, Artificial
  Synthetic oligonucleotide
ttataaagttacgtgggatggataccctgatttgggtccccccgtgactgcttg

SEQ ID NO: 478030 - DNA, 53 bp, Artificial
  Synthetic oligonucleotide
ttataaatgggaagcaggtggtcaaaaagttggcctcaggtcagggaaagaat

SEQ ID NO: 478031 - DNA, 55 bp, Artificial
  Synthetic oligonucleotide
ttataacaccgggttgtgccatttaatacatgactgtgttattgctcccatggcc

SEQ ID NO: 478032 - DNA, 58 bp, Artificial
  Synthetic oligonucleotide
ttataacaggagattcaccccagaaatagcaaaaaggcccaaagtaagagatcaatca

SEQ ID NO: 478033 - DNA, 55 bp, Artificial
  Synthetic oligonucleotide
ttataacattcgaactcttcgcgtcgaagaagcattatggctacgtgaaagtcag

SEQ ID NO: 478034 - DNA, 60 bp, Artificial
  Synthetic oligonucleotide
ttataaccatgatgtctccatacttcgagcatggattcgcacaaccaagatagttggtga

SEQ ID NO: 478035 - DNA, 56 bp, Artificial
  Synthetic oligonucleotide
ttataaccgatgaaacggagcaccaaacctccggagatggactcgacgcttctgag

SEQ ID NO: 478036 - DNA, 60 bp, Artificial
  Synthetic oligonucleotide
ttataactaattgtaaggcagctactaattcatgtattcagaatgtatccgaattagcac

SEQ ID NO: 478037 - DNA, 50 bp, Artificial
  Synthetic oligonucleotide
ttataactgaatccacacctgctcaaggtgaaagttcactggctgatcac

SEQ ID NO: 478038 - DNA, 57 bp, Artificial
  Synthetic oligonucleotide
ttataagatcagaagtatactcaagcattattcagttcagtatcgtgatgcactgat

SEQ ID NO: 478039 - DNA, 59 bp, Artificial
  Synthetic oligonucleotide
ttataagatggaggatgtttttcaagttacgtctgaccactattgtttatcacatacat

SEQ ID NO: 478040 - DNA, 60 bp, Artificial
  Synthetic oligonucleotide
ttataagatgttggctgatcgacaccattcctgaagaggtcgagattggtggcgaaatat

SEQ ID NO: 478041 - DNA, 50 bp, Artificial
  Synthetic oligonucleotide
ttataagcccgccgccgctggtaagactctcgttctaccctatgacaggt

SEQ ID NO: 478042 - DNA, 56 bp, Artificial
  Synthetic oligonucleotide
ttataaggaagaaaaaggcaccatacatgttgattggtggaagtaaggtggtacga

SEQ ID NO: 478043 - DNA, 58 bp, Artificial
  Synthetic oligonucleotide
ttataaggagaaaaaggcactgtacacgtcgattggtggaagcaaggtggtatgatcg

SEQ ID NO: 478044 - DNA, 54 bp, Artificial
  Synthetic oligonucleotide
ttataagtaccaaggctttcggacgatgcgccttgaaaaaacgagatcccgaat

SEQ ID NO: 478045 - DNA, 57 bp, Artificial
  Synthetic oligonucleotide
ttataataggagattcaccccggaaatagctgcaagacccaaagtaagagatcaaac

SEQ ID NO: 478046 - DNA, 60 bp, Artificial
  Synthetic oligonucleotide
ttataatccacgtcattcgaataaaccctagaattgaaatctagatgtccactcagatag

SEQ ID NO: 478047 - DNA, 49 bp, Artificial
  Synthetic oligonucleotide
ttataatcctgtgtttaaaaaagtaggtgtaaccgaaaacggtttgacc

SEQ ID NO: 478048 - DNA, 60 bp, Artificial
  Synthetic oligonucleotide
ttataatctggggaattcatcatccttcaagcacacaagagaagaatgatctgtatgggg

SEQ ID NO: 478049 - DNA, 60 bp, Artificial
  Synthetic oligonucleotide
ttataatgggagccaatgacgtaagtgaattagaatcacaagcacagctaatgataacgt

SEQ ID NO: 478050 - DNA, 60 bp, Artificial
  Synthetic oligonucleotide
ttataattcataatggtttagcctgttgaggcgtacaatttctattaatgcataaatcga

SEQ ID NO: 478051 - DNA, 60 bp, Artificial
  Synthetic oligonucleotide
ttataatttcaggaacgggatgctagacggtatacgagaggcgatgcgcaggtatcaaca

SEQ ID NO: 478052 - DNA, 59 bp, Artificial
  Synthetic oligonucleotide
ttatacaaagcaaatacatacacccacaattaccatgttatgtacttatagacaaatac

SEQ ID NO: 478053 - DNA, 57 bp, Artificial
  Synthetic oligonucleotide
ttatacaacagttagtacaatttcaagtacgcaatggtcagaagaagtgagcctgac

SEQ ID NO: 478054 - DNA, 55 bp, Artificial
  Synthetic oligonucleotide
ttatacaacgcacacccggcattcctccacgtattaggtccaccacctttggtac

SEQ ID NO: 478055 - DNA, 60 bp, Artificial
  Synthetic oligonucleotide
ttatacaacgccacagctatagcagtagctgagggaacagatagggttatagaagtagta

SEQ ID NO: 478056 - DNA, 54 bp, Artificial
  Synthetic oligonucleotide
ttatacaatgttttgccccgaattccgaagcgagggcccctctgggtaggcttg

SEQ ID NO: 478057 - DNA, 60 bp, Artificial
  Synthetic oligonucleotide
ttatacaattacctcgtacagcgcaaactgaatcaggagagtgagttcttaagctatggc

SEQ ID NO: 478058 - DNA, 56 bp, Artificial
  Synthetic oligonucleotide
ttatacacaccaaggggggataagttctgtggaccatgtaacagcagggaaagacc

SEQ ID NO: 478059 - DNA, 57 bp, Artificial
  Synthetic oligonucleotide
ttatacacatcaatgttgcgattagcgaggaacacaagttcaggtttttcaaccgag

SEQ ID NO: 478060 - DNA, 58 bp, Artificial
  Synthetic oligonucleotide
ttatacaccgactcacaacgagggggatttttgtgctgaggcgtgtggtcgggagcgc

SEQ ID NO: 478061 - DNA, 60 bp, Artificial
  Synthetic oligonucleotide
ttatacacctcctggcggccccttacccaaagatcgggccacagcaatgctgggcacaca

SEQ ID NO: 478062 - DNA, 53 bp, Artificial
  Synthetic oligonucleotide
ttatacacgtggcggttctggggataatgttagttatcagtatataggttgtt

SEQ ID NO: 478063 - DNA, 60 bp, Artificial
  Synthetic oligonucleotide
ttatacaggttggtggttcagatgtgcttgatataacggctgatccgacaacggctccac

SEQ ID NO: 478064 - DNA, 60 bp, Artificial
  Synthetic oligonucleotide
ttatacagtatttagccatcacaagaccgtccagactagagtagcgcctagctggcaaaa

SEQ ID NO: 478065 - DNA, 51 bp, Artificial
  Synthetic oligonucleotide
ttatacagtggagagaacgccttggtgacagctgaacactgtctagaaggc

SEQ ID NO: 478066 - DNA, 60 bp, Artificial
  Synthetic oligonucleotide
ttatacattccccttttgtacgcctgttgcagaactgtgcatggatgagaggcactctga

SEQ ID NO: 478067 - DNA, 55 bp, Artificial
  Synthetic oligonucleotide
ttataccaactcatgcacagccagacaacaaagtcctactcaatggtcagactat

SEQ ID NO: 478068 - DNA, 60 bp, Artificial
  Synthetic oligonucleotide
ttataccaagcatcgttcgaaaagatctttggactaagatccagatgtccacacatgtaa

SEQ ID NO: 478069 - DNA, 60 bp, Artificial
  Synthetic oligonucleotide
ttataccaagcatcgttcgaatagatcttactgttaagatccaagtggccgcaaagataa

SEQ ID NO: 478070 - DNA, 60 bp, Artificial
  Synthetic oligonucleotide
ttataccaatgcgaacctatagagtgatggataatgataccgcatttgagactggaattg

SEQ ID NO: 478071 - DNA, 60 bp, Artificial
  Synthetic oligonucleotide
ttataccatagacaaccaaaagcgtaacaatggccatcatttatctcatactcctgttca

SEQ ID NO: 478072 - DNA, 60 bp, Artificial
  Synthetic oligonucleotide
ttataccatccagtgatactgaagccaagaacaagtttgcaccatgggattggttacttg

SEQ ID NO: 478073 - DNA, 60 bp, Artificial
  Synthetic oligonucleotide
ttataccatgaatgattggagtaaattctcgggttgagatcgatatgaccacataggtaa

SEQ ID NO: 478074 - DNA, 59 bp, Artificial
  Synthetic oligonucleotide
ttataccatgcatcattagaataaacctttggacttaagtctaaatgaccacataagta

SEQ ID NO: 478075 - DNA, 60 bp, Artificial
  Synthetic oligonucleotide
ttataccatgcatcattggagtacacttttggactcaggtccagatgcccgcataggtaa

SEQ ID NO: 478076 - DNA, 55 bp, Artificial
  Synthetic oligonucleotide
ttatacccagacttggtaagtggccaacactccttgatgtggcaaccacatgtgc

SEQ ID NO: 478077 - DNA, 55 bp, Artificial
  Synthetic oligonucleotide
ttatacccgcccttattgggtggtacttcagagataggctctgtgttcccgatcc

SEQ ID NO: 478078 - DNA, 54 bp, Artificial
  Synthetic oligonucleotide
ttatacccgttgagtccatggaaaccactatgcggtccccggtctttacggaca

SEQ ID NO: 478079 - DNA, 60 bp, Artificial
  Synthetic oligonucleotide
ttataccctcctggttatttagatctcgtacttatcatcacacaacatttggagctgact

SEQ ID NO: 478080 - DNA, 57 bp, Artificial
  Synthetic oligonucleotide
ttataccgaactttgacgcagtgagagaagcggtggacggctacgactaaatgtcct

SEQ ID NO: 478081 - DNA, 55 bp, Artificial
  Synthetic oligonucleotide
ttataccttgactcctctgtaactcactgtccctcgtgagcgcgcctaattcatc

SEQ ID NO: 478082 - DNA, 52 bp, Artificial
  Synthetic oligonucleotide
ttatacctttccgtaaatacccccgcttttatgtctaataggcgcgtcggag

SEQ ID NO: 478083 - DNA, 58 bp, Artificial
  Synthetic oligonucleotide
ttatacgaataatgggtctgttatcccatttctatatgattcaaatgggttattctta

SEQ ID NO: 478084 - DNA, 54 bp, Artificial
  Synthetic oligonucleotide
ttatacgacttcgggtggtacacataaccatttgtccaattggccgtcccctta

SEQ ID NO: 478085 - DNA, 58 bp, Artificial
  Synthetic oligonucleotide
ttatacgagggaggaccaataagaatgatgacgtttcttggacgagcaatagtatagt

SEQ ID NO: 478086 - DNA, 55 bp, Artificial
  Synthetic oligonucleotide
ttatacgatcattacaatcaaccatgatcaagaaacgcctaggatcctcggtgcg

SEQ ID NO: 478087 - DNA, 60 bp, Artificial
  Synthetic oligonucleotide
ttatacgctaagctggaagttataaatcatgccattaaaaatggctcatggataagttta

SEQ ID NO: 478088 - DNA, 55 bp, Artificial
  Synthetic oligonucleotide
ttatacgctccatgagggcataccatctctcggggtcggtgctattatctctgac

SEQ ID NO: 478089 - DNA, 59 bp, Artificial
  Synthetic oligonucleotide
ttatacgtcaatcttacgaacatctcaagccaggttataaggaagaagattttcagtca

SEQ ID NO: 478090 - DNA, 56 bp, Artificial
  Synthetic oligonucleotide
ttatacgtggtcccgacatgcttttttcgtacatcgattatttgcgttggtggtcc

SEQ ID NO: 478091 - DNA, 56 bp, Artificial
  Synthetic oligonucleotide
ttatactactgattattgaatgtatttgcactaggggacgggttgggtgggccatt

SEQ ID NO: 478092 - DNA, 60 bp, Artificial
  Synthetic oligonucleotide
ttatactagaaccctcaatctcgcgaatagcgagattcacacacgtggcggccatccgat

SEQ ID NO: 478093 - DNA, 60 bp, Artificial
  Synthetic oligonucleotide
ttatactagatcaatccgtgacaggtgccaggtctgcaattgcagggctcttagacacga

SEQ ID NO: 478094 - DNA, 60 bp, Artificial
  Synthetic oligonucleotide
ttatactattacaagtctcttttcactgttaccaggggttgcacattctattgctattga

SEQ ID NO: 478095 - DNA, 55 bp, Artificial
  Synthetic oligonucleotide
ttatactctgggcccggtccgagttcgggagcgactgcctgacaccttgcgacga

SEQ ID NO: 478096 - DNA, 59 bp, Artificial
  Synthetic oligonucleotide
ttatactgcacgtcgtttgaatagaccctattattgaagtccaagtgtccactcaagta

SEQ ID NO: 478097 - DNA, 60 bp, Artificial
  Synthetic oligonucleotide
ttatacttgaaaccgatgatgtctcacctgaagtaacattatgtaaatctgctttaggag

SEQ ID NO: 478098 - DNA, 59 bp, Artificial
  Synthetic oligonucleotide
ttatacttgggaatcaagcacaaacccttctatattctggcagcatggtcaggcctatc

SEQ ID NO: 478099 - DNA, 58 bp, Artificial
  Synthetic oligonucleotide
ttatagaaccttaatgagctgccccattggtgaagctccatccccgtacaattcaagg

SEQ ID NO: 478100 - DNA, 55 bp, Artificial
  Synthetic oligonucleotide
ttatagacccctggattaaaatgaattttgtgcaggcacccaatggagagtttac

SEQ ID NO: 478101 - DNA, 60 bp, Artificial
  Synthetic oligonucleotide
ttatagagaacatggtgtctttcggagtgtggattcgctctcctccagctaatagaccac

SEQ ID NO: 478102 - DNA, 50 bp, Artificial
  Synthetic oligonucleotide
ttatagagatacaggcattcccagactcgaatgatgtagttggattgaag

SEQ ID NO: 478103 - DNA, 53 bp, Artificial
  Synthetic oligonucleotide
ttatagagtagttaaatactcatcagttgctaatcatgcagacagagtttacg

SEQ ID NO: 478104 - DNA, 60 bp, Artificial
  Synthetic oligonucleotide
ttatagcattgattccagttatgtgtgctcaggacttgttggcgacaccccaaggaatga

SEQ ID NO: 478105 - DNA, 59 bp, Artificial
  Synthetic oligonucleotide
ttatagcccaggattatttcctaagttgaaccaatcttcatgtgataaggttgcattac

SEQ ID NO: 478106 - DNA, 58 bp, Artificial
  Synthetic oligonucleotide
ttatagcgagaccagagtaccgtaccttacctcttgagacattagccctcgtggcaaa

SEQ ID NO: 478107 - DNA, 59 bp, Artificial
  Synthetic oligonucleotide
ttatagcggttggctcccgtatttagagagaatatgtcacgaaacaaagcagcggacga

SEQ ID NO: 478108 - DNA, 60 bp, Artificial
  Synthetic oligonucleotide
ttatagcgtaatccgtgactacgggctcctcgcagaggcctccccggatggagcacagtg

SEQ ID NO: 478109 - DNA, 60 bp, Artificial
  Synthetic oligonucleotide
ttatagctaggaattttgatacaatcagattatcgtttcagttgatgagaccaccaaata

SEQ ID NO: 478110 - DNA, 58 bp, Artificial
  Synthetic oligonucleotide
ttatagctgctgtttggtcctttattgcagaggaagatggtgggaataccgcctttaa

SEQ ID NO: 478111 - DNA, 57 bp, Artificial
  Synthetic oligonucleotide
ttatagctggaattgggtcctggattgcaaaggaagatagcgggtataccaccttta

SEQ ID NO: 478112 - DNA, 58 bp, Artificial
  Synthetic oligonucleotide
ttataggaggatgttggaccaggattgcagaggaagattgttgggatcccgcctttaa

SEQ ID NO: 478113 - DNA, 60 bp, Artificial
  Synthetic oligonucleotide
ttataggcaagtttggaaatgagcacattcaggcacagatgcagcccacgctagacaaca

SEQ ID NO: 478114 - DNA, 54 bp, Artificial
  Synthetic oligonucleotide
ttatagggaaaggggtatgagcgcgggtaatttgggatctgaacccgccagtag

SEQ ID NO: 478115 - DNA, 57 bp, Artificial
  Synthetic oligonucleotide
ttatagggccttaatgagctgccctgtcggtgaagctccgtccccgtacaattcaag

SEQ ID NO: 478116 - DNA, 58 bp, Artificial
  Synthetic oligonucleotide
ttataggggtcccttggatttgacaataattataactggggctactgatgttgatgga

SEQ ID NO: 478117 - DNA, 56 bp, Artificial
  Synthetic oligonucleotide
ttataggtaggaatcgcgttgttataaccgatgccacctaccgtaccactgttctc

SEQ ID NO: 478118 - DNA, 60 bp, Artificial
  Synthetic oligonucleotide
ttatagtcattaggagcgactatgatatggtcaccctcacagccactcttgccctgattg

SEQ ID NO: 478119 - DNA, 57 bp, Artificial
  Synthetic oligonucleotide
ttatagtccaccaggtgctaagccacccactactagaaaagaagcaatgttaggtac

SEQ ID NO: 478120 - DNA, 60 bp, Artificial
  Synthetic oligonucleotide
ttatagtcctaatcccgggtgattcgagcattgttacaagatctcgactattggatagac

SEQ ID NO: 478121 - DNA, 60 bp, Artificial
  Synthetic oligonucleotide
ttatagtcgacttcatgctagcaacattccgttcgctacacttgatctcgatactacctt

SEQ ID NO: 478122 - DNA, 55 bp, Artificial
  Synthetic oligonucleotide
ttatagtgaaacccctccgggaagtggaaagcagccaagggaacatgttttgcga

SEQ ID NO: 478123 - DNA, 51 bp, Artificial
  Synthetic oligonucleotide
ttatagttgcaatccttggaccaatgattagaggacaaaattatggtctga

SEQ ID NO: 478124 - DNA, 50 bp, Artificial
  Synthetic oligonucleotide
ttatagtttgataatgatatggaaactaaagggctatcatacttactagt

SEQ ID NO: 478125 - DNA, 58 bp, Artificial
  Synthetic oligonucleotide
ttatataactaagtattagtcactgactgcatctaattaaactgtcaaccgaaatcgg

SEQ ID NO: 478126 - DNA, 56 bp, Artificial
  Synthetic oligonucleotide
ttatataagaacaaccctggaagagtgactgtctctaccaaaaccagtcaaacaag

SEQ ID NO: 478127 - DNA, 54 bp, Artificial
  Synthetic oligonucleotide
ttatataagagagagacaacccatagcgcctcattctttgggtcaccatattcc

SEQ ID NO: 478128 - DNA, 55 bp, Artificial
  Synthetic oligonucleotide
ttatataccgggtgggatgaataacatgttctcttgctctgtgcatggagatgcc

SEQ ID NO: 478129 - DNA, 60 bp, Artificial
  Synthetic oligonucleotide
ttatataggcgatgcttatcgcgagttcagatgaagaagattagagaaagctgtacatgg

SEQ ID NO: 478130 - DNA, 60 bp, Artificial
  Synthetic oligonucleotide
ttatataggcgtcatatatctggatatatgaacgtaattcaattgcgtggtctgttgtaa

SEQ ID NO: 478131 - DNA, 60 bp, Artificial
  Synthetic oligonucleotide
ttatatatactagagctactaaaagcccataggggcactcagctataatattacctgagt

SEQ ID NO: 478132 - DNA, 60 bp, Artificial
  Synthetic oligonucleotide
ttatatcccaccccaacgtcacaacatgccattcaacgctgttcgtaattatctcgccga

SEQ ID NO: 478133 - DNA, 60 bp, Artificial
  Synthetic oligonucleotide
ttatatccctggccgtcaattgcagttctatgctcaatgccgtcggtggttgtctgccgg

SEQ ID NO: 478134 - DNA, 59 bp, Artificial
  Synthetic oligonucleotide
ttatatcctgaaataaaaccatggaaaaaggcaagcgacatgctgaataaagcaacttc

SEQ ID NO: 478135 - DNA, 60 bp, Artificial
  Synthetic oligonucleotide
ttatatctaaagcgcagacaacccaagacctacacactgctacattatatgagctaattg

SEQ ID NO: 478136 - DNA, 56 bp, Artificial
  Synthetic oligonucleotide
ttatatgaattggtagtaaggtagctcttatatattagaagttcctaaggggcacg

SEQ ID NO: 478137 - DNA, 60 bp, Artificial
  Synthetic oligonucleotide
ttatatgaccgcaacgcgagaggttgacttcacagtgccggatgtacaaaagattctaga

SEQ ID NO: 478138 - DNA, 60 bp, Artificial
  Synthetic oligonucleotide
ttatatgagagcacagcttgagaagctatacggtatgatgagtttattgttctttctgta

SEQ ID NO: 478139 - DNA, 56 bp, Artificial
  Synthetic oligonucleotide
ttatatgagttaactggtattacgaacccgattggagcgaataattgtcaaaccta

SEQ ID NO: 478140 - DNA, 54 bp, Artificial
  Synthetic oligonucleotide
ttatatgatcaggtactcactgaaatgccagattatttattactaaaggatatg

SEQ ID NO: 478141 - DNA, 60 bp, Artificial
  Synthetic oligonucleotide
ttatatgatcgcgcccgtttcagcactcaacactcttcgcttcaatcaggtgacgggtca

SEQ ID NO: 478142 - DNA, 60 bp, Artificial
  Synthetic oligonucleotide
ttatatgcttgctagcactgtgtttcactgggtaggggatgattcagaaaaccatgcaag

SEQ ID NO: 478143 - DNA, 60 bp, Artificial
  Synthetic oligonucleotide
ttatatggatgatgtggtattgggggccaagtctgtgcaacatcttgaggccatttacac

SEQ ID NO: 478144 - DNA, 59 bp, Artificial
  Synthetic oligonucleotide
ttatatggatgatgtggtattgggggcgaagtctgtacaacatcttgagtcccttttta

SEQ ID NO: 478145 - DNA, 57 bp, Artificial
  Synthetic oligonucleotide
ttatatgtattaccactttttcatgtatcgtgggagcgtatagtgtttttaagagtg

SEQ ID NO: 478146 - DNA, 58 bp, Artificial
  Synthetic oligonucleotide
ttatatgttattcgtgtgttatcctgtattgaaagtagtatttatgttactcagggtg

SEQ ID NO: 478147 - DNA, 60 bp, Artificial
  Synthetic oligonucleotide
ttatattgatgacgtcgtttatttgcacgactattcatactataccaacaatgaaatccg

SEQ ID NO: 478148 - DNA, 52 bp, Artificial
  Synthetic oligonucleotide
ttatattgctcgatttatgtctatggtcgtgtgtctgtgattgcatgtcctc

SEQ ID NO: 478149 - DNA, 56 bp, Artificial
  Synthetic oligonucleotide
ttatattggggtccgattgatacaaaaatagtatccgctatatttcatataatgtg

SEQ ID NO: 478150 - DNA, 60 bp, Artificial
  Synthetic oligonucleotide
ttatattgtcaagtgacaaattcattaacatcaactgtgatgaagcataggtccatgttg

SEQ ID NO: 478151 - DNA, 59 bp, Artificial
  Synthetic oligonucleotide
ttatatttagtccagagtttaggtgaaccgcagcgattggatgtgttaagtgtcgcgtc

SEQ ID NO: 478152 - DNA, 55 bp, Artificial
  Synthetic oligonucleotide
ttatatttataccttcagttatttggatcactgccttttactagcggtaatttaa

SEQ ID NO: 478153 - DNA, 60 bp, Artificial
  Synthetic oligonucleotide
ttatatttctacacgcgtagctcatgaacttactcaagggaatgatgaacgcgagtcttt

SEQ ID NO: 478154 - DNA, 60 bp, Artificial
  Synthetic oligonucleotide
ttatatttctcgccttcgtacttggctgtcaacacctgaaaagtacagaggtagagatgc

SEQ ID NO: 478155 - DNA, 60 bp, Artificial
  Synthetic oligonucleotide
ttatatttgattgggccctatgggctgcgacaacagatgctgaatcacccgggtccagga

SEQ ID NO: 478156 - DNA, 50 bp, Artificial
  Synthetic oligonucleotide
ttatatttggattacagtctacattgtcttgttcccctcgagtattatcg

SEQ ID NO: 478157 - DNA, 58 bp, Artificial
  Synthetic oligonucleotide
ttatatttggcttcatacattgtgtcctgtgtctttatatttgctatgttttcatact

SEQ ID NO: 478158 - DNA, 51 bp, Artificial
  Synthetic oligonucleotide
ttatcaaacgatccgtactcgaatagatacttgatcatcaaatccggatcg

SEQ ID NO: 478159 - DNA, 60 bp, Artificial
  Synthetic oligonucleotide
ttatcaaacgctctatgaaggcgataatatgtacggcagaaaatcctcaagtacctcagc

SEQ ID NO: 478160 - DNA, 60 bp, Artificial
  Synthetic oligonucleotide
ttatcaaactccaattatgaattcagtaacagtaaggcaggatctagaacgccagcttaa

SEQ ID NO: 478161 - DNA, 60 bp, Artificial
  Synthetic oligonucleotide
ttatcaaatccttgcaatttatgctacagtagcaggctccctgtcactggcaatcatgat

SEQ ID NO: 478162 - DNA, 60 bp, Artificial
  Synthetic oligonucleotide
ttatcaacaatgctcaagctaccgcactggtacccacatccaacccgcacgcctatcgct

SEQ ID NO: 478163 - DNA, 55 bp, Artificial
  Synthetic oligonucleotide
ttatcaacaggctgcgtggtcatagtgggcagagtcgtcttatccgggaagccgg

SEQ ID NO: 478164 - DNA, 55 bp, Artificial
  Synthetic oligonucleotide
ttatcaacccgtaacgttatcaacgcagaaagggcaccaggagggccctacataa

SEQ ID NO: 478165 - DNA, 60 bp, Artificial
  Synthetic oligonucleotide
ttatcaacctggaagatggtttatgcgagctgctcatgttgttacaccagtggtttgtgg

SEQ ID NO: 478166 - DNA, 60 bp, Artificial
  Synthetic oligonucleotide
ttatcaaccttacactgcattcaccctgccatcgaagaataatcagagtccagggagaag

SEQ ID NO: 478167 - DNA, 56 bp, Artificial
  Synthetic oligonucleotide
ttatcaagcaacaaaagtgttgttgtcccaaaattagacgaattgggcaacattgt

SEQ ID NO: 478168 - DNA, 57 bp, Artificial
  Synthetic oligonucleotide
ttatcaaggtgggatgatgtgtgttcaaagtttaacccaaacgtaactatagcagac

SEQ ID NO: 478169 - DNA, 54 bp, Artificial
  Synthetic oligonucleotide
ttatcaagtcgagttatccacgcttcaagcacgcagtacaaatcctcgataggt

SEQ ID NO: 478170 - DNA, 50 bp, Artificial
  Synthetic oligonucleotide
ttatcaagtgaacggatcaactgctctttgtgtagatcataaacgaggac

SEQ ID NO: 478171 - DNA, 55 bp, Artificial
  Synthetic oligonucleotide
ttatcaatttgcacttgggcaggggaccacgctggacaacaagcactcaaacggc

SEQ ID NO: 478172 - DNA, 56 bp, Artificial
  Synthetic oligonucleotide
ttatcacaattatttctaactaagggatggccaactggatccgtgtactttaaaga

SEQ ID NO: 478173 - DNA, 50 bp, Artificial
  Synthetic oligonucleotide
ttatcacagcatgccttgcatacgctatggccgcaatttaatacatacgg

SEQ ID NO: 478174 - DNA, 55 bp, Artificial
  Synthetic oligonucleotide
ttatcaccagcacatgggtcctcgtgggtggagtcctagccgcactcgcggccta

SEQ ID NO: 478175 - DNA, 55 bp, Artificial
  Synthetic oligonucleotide
ttatcaccttccccaccaatgtctccaccatgcccgagttccgtaactgggcgcg

SEQ ID NO: 478176 - DNA, 60 bp, Artificial
  Synthetic oligonucleotide
ttatcacgtgctcataatcctgaagcctttgataatgcttttaacgctgggttgcatatt

SEQ ID NO: 478177 - DNA, 60 bp, Artificial
  Synthetic oligonucleotide
ttatcagaacttgtggagatggggcaccctgctccttgggatgttgatgacatgtagtgt

SEQ ID NO: 478178 - DNA, 60 bp, Artificial
  Synthetic oligonucleotide
ttatcagaagatttatcgcagatatgagacaacaagttcaggctgatagaaatattgtca

SEQ ID NO: 478179 - DNA, 60 bp, Artificial
  Synthetic oligonucleotide
ttatcagaaggggcgactccccaagatgtcaacactatgctcaatgctatagggggacat

SEQ ID NO: 478180 - DNA, 60 bp, Artificial
  Synthetic oligonucleotide
ttatcagatgagttgtctattgagtggtaccctccagattccatttcgccctaatcatcg

SEQ ID NO: 478181 - DNA, 55 bp, Artificial
  Synthetic oligonucleotide
ttatcagatgtagatactggcagctctattgtaacaccacttaccagaagaggag

SEQ ID NO: 478182 - DNA, 55 bp, Artificial
  Synthetic oligonucleotide
ttatcagcgcagttgatgtgtagaaatatggaacagccgcagttcaaatctatcc

SEQ ID NO: 478183 - DNA, 60 bp, Artificial
  Synthetic oligonucleotide
ttatcagcgcttgtggagagggggcaccttgctccttgggatgttaatgatcagtagtgt

SEQ ID NO: 478184 - DNA, 60 bp, Artificial
  Synthetic oligonucleotide
ttatcagcgttatcgcaagcgatacgacaaagagatttagactaggcttatcaggctgca

SEQ ID NO: 478185 - DNA, 56 bp, Artificial
  Synthetic oligonucleotide
ttatcagctagacgatcctgtcgttcttgactcacagggaaactatgtcactcagc

SEQ ID NO: 478186 - DNA, 57 bp, Artificial
  Synthetic oligonucleotide
ttatcaggacactcttactgaaaacctacaagggcatagatttagaccacctaaaga

SEQ ID NO: 478187 - DNA, 60 bp, Artificial
  Synthetic oligonucleotide
ttatcaggctaggcatgtggtatgggcaggtaaagaattagataggtttggattaagtgc

SEQ ID NO: 478188 - DNA, 58 bp, Artificial
  Synthetic oligonucleotide
ttatcagggactatggaggaagacaagagatggatagtggtccccacttggaaggtac

SEQ ID NO: 478189 - DNA, 56 bp, Artificial
  Synthetic oligonucleotide
ttatcaggtgtcaagtgttggaagaccaatttttctttcaggtcgtcaatattagg

SEQ ID NO: 478190 - DNA, 51 bp, Artificial
  Synthetic oligonucleotide
ttatcagtacctgaatttgatggatcagtcaatgattagcactaaacgctg

SEQ ID NO: 478191 - DNA, 56 bp, Artificial
  Synthetic oligonucleotide
ttatcagtcatacttgagacgcactcagtcaatgggaatacaactggatcagagga

SEQ ID NO: 478192 - DNA, 60 bp, Artificial
  Synthetic oligonucleotide
ttatcagtcttacttgaggagaactcaatcaatggggatacagcttgaccaaagaatcat

SEQ ID NO: 478193 - DNA, 60 bp, Artificial
  Synthetic oligonucleotide
ttatcagtgctatgactgttgatatggccagaggggcacaactagtctacgccatcccag

SEQ ID NO: 478194 - DNA, 51 bp, Artificial
  Synthetic oligonucleotide
ttatcagtgctcatataatcgttgtgaagatctatggacatgtcaagttga

SEQ ID NO: 478195 - DNA, 59 bp, Artificial
  Synthetic oligonucleotide
ttatcagttatccagatctgggcaagatagaaccgggtcgaagtaggtcctatatcaag

SEQ ID NO: 478196 - DNA, 60 bp, Artificial
  Synthetic oligonucleotide
ttatcatatgaatcggccttctaaaatggctataaaatggacaccagtagacaacatggt

SEQ ID NO: 478197 - DNA, 60 bp, Artificial
  Synthetic oligonucleotide
ttatcatgatgaagaacgctaagaaggatgggcgtgcgcagaatccatacctagagatac

SEQ ID NO: 478198 - DNA, 52 bp, Artificial
  Synthetic oligonucleotide
ttatcatgctagcagttctagactacttgcagtgggtaatccctatttccct

SEQ ID NO: 478199 - DNA, 57 bp, Artificial
  Synthetic oligonucleotide
ttatcatggataactatagaaatcctagcagtcttaaaacagggttaaattgggaca

SEQ ID NO: 478200 - DNA, 51 bp, Artificial
  Synthetic oligonucleotide
ttatcattagcagtggctgcgcatttcgttgcagttccggtaactatgtgg

SEQ ID NO: 478201 - DNA, 55 bp, Artificial
  Synthetic oligonucleotide
ttatcattcccgctctgtgctaatggtaatgtgtttggtctgtacaagagtagtg

SEQ ID NO: 478202 - DNA, 57 bp, Artificial
  Synthetic oligonucleotide
ttatcattcgtaacgaaccagaggtagtttattcggagctagaagataagttactga

SEQ ID NO: 478203 - DNA, 60 bp, Artificial
  Synthetic oligonucleotide
ttatcatttcagatacaccagtccacgattgcaatacaacttgtcaaacacccaagggtg

SEQ ID NO: 478204 - DNA, 60 bp, Artificial
  Synthetic oligonucleotide
ttatcatttccacttctaatcaacgcacttgcttgcctacatgtggtatcactcactgtg

SEQ ID NO: 478205 - DNA, 60 bp, Artificial
  Synthetic oligonucleotide
ttatccaaaccatcaaaggtcaagcacttctgtttccccggtcaatgttgatatgctcca

SEQ ID NO: 478206 - DNA, 56 bp, Artificial
  Synthetic oligonucleotide
ttatccaaactggtggaaagggggcaccttggccttgtggagatggggcaccctgc

SEQ ID NO: 478207 - DNA, 55 bp, Artificial
  Synthetic oligonucleotide
ttatccaaccaaaacaggacaatgtggcggagttttgtgttcaacaggcaaaatt

SEQ ID NO: 478208 - DNA, 60 bp, Artificial
  Synthetic oligonucleotide
ttatccaataaatcctatcgagttagatgtcgatgatgggttagttgaggcagcgtcgct

SEQ ID NO: 478209 - DNA, 55 bp, Artificial
  Synthetic oligonucleotide
ttatccaataacgctatggtgttatatacggacgtctcccagtgggattcatctc

SEQ ID NO: 478210 - DNA, 55 bp, Artificial
  Synthetic oligonucleotide
ttatccacaccgggcagaccacactcccatatggctgcgttggtgccaccaatcg

SEQ ID NO: 478211 - DNA, 57 bp, Artificial
  Synthetic oligonucleotide
ttatccacgggtaaagctaaagtgtgttgtgttaaaatgactgccatggatttagaa

SEQ ID NO: 478212 - DNA, 60 bp, Artificial
  Synthetic oligonucleotide
ttatccagagccgctttaaagatctatttgctgagtgtggattaaattatgacttcgatg

SEQ ID NO: 478213 - DNA, 58 bp, Artificial
  Synthetic oligonucleotide
ttatccaggactatgacaaccaacatgagcaagaccgaccgacaccttccccagcccc

SEQ ID NO: 478214 - DNA, 55 bp, Artificial
  Synthetic oligonucleotide
ttatccagtaccggcgcacccgctttgcgttcgccttgtactctcgccgcctgac

SEQ ID NO: 478215 - DNA, 60 bp, Artificial
  Synthetic oligonucleotide
ttatccagtcatcccgagcccatgctatagttgcacttacccgccacacagagaagtgcg

SEQ ID NO: 478216 - DNA, 60 bp, Artificial
  Synthetic oligonucleotide
ttatccagtcatcccgggctcatgctatagttgcactcactcgccacactgagaagtgtg

SEQ ID NO: 478217 - DNA, 54 bp, Artificial
  Synthetic oligonucleotide
ttatccatagggacgttcctattgggttggagtatttggatgggttttccgcag

SEQ ID NO: 478218 - DNA, 60 bp, Artificial
  Synthetic oligonucleotide
ttatccatggactggttcttctttgagaacctaagatggcggaaccgctggtcgcatagc

SEQ ID NO: 478219 - DNA, 55 bp, Artificial
  Synthetic oligonucleotide
ttatcccacacctgagttacctgtagttgtcattcacacccatgacacatctggt

SEQ ID NO: 478220 - DNA, 53 bp, Artificial
  Synthetic oligonucleotide
ttatcccaccaacaagaagttctagaggccttagcacagtcaggaccctttgc

SEQ ID NO: 478221 - DNA, 58 bp, Artificial
  Synthetic oligonucleotide
ttatccccccccccagtgaaacttagaagcagcaaaccacgatcaatagcaggcataa

SEQ ID NO: 478222 - DNA, 51 bp, Artificial
  Synthetic oligonucleotide
ttatcccccctactcgatacccttaagttgtcaagtgaggggggcgccccg

SEQ ID NO: 478223 - DNA, 60 bp, Artificial
  Synthetic oligonucleotide
ttatccccgatatccaaatgtcagatgtgtctgcagagacaactggaagggctctaatag

SEQ ID NO: 478224 - DNA, 60 bp, Artificial
  Synthetic oligonucleotide
ttatccccggattagtattttccattcaatttctcatggcatagtagaatgaatctctga

SEQ ID NO: 478225 - DNA, 54 bp, Artificial
  Synthetic oligonucleotide
ttatccccgtcgttttaatgggcaatttaagcgtaaattgcgtccatacaatag

SEQ ID NO: 478226 - DNA, 59 bp, Artificial
  Synthetic oligonucleotide
ttatcccctgcggcaatcctgacgccaatgttgacaccttggctgccttcccgccgtct

SEQ ID NO: 478227 - DNA, 55 bp, Artificial
  Synthetic oligonucleotide
ttatcccgataccaaatcgacttggacacaagaacgttccacccgcctcaaacgc

SEQ ID NO: 478228 - DNA, 53 bp, Artificial
  Synthetic oligonucleotide
ttatcccggggaactcggcaaatcgtccccacatagcagcccccggagcccct

SEQ ID NO: 478229 - DNA, 60 bp, Artificial
  Synthetic oligonucleotide
ttatccctacgggatcgctttcaatgagcccaaatgcatccggcatatgcggtgggtact

SEQ ID NO: 478230 - DNA, 55 bp, Artificial
  Synthetic oligonucleotide
ttatccctcgtagattcatgtcagacgagtaggtctctaaacacattctcacgtc

SEQ ID NO: 478231 - DNA, 55 bp, Artificial
  Synthetic oligonucleotide
ttatcccttttgggttagattcaaagacattcctagtcttgaggctagtggtagg

SEQ ID NO: 478232 - DNA, 60 bp, Artificial
  Synthetic oligonucleotide
ttatccgatctatatgaataatgtcgaaatatctcgcgacgagtgtaaggctatgtctca

SEQ ID NO: 478233 - DNA, 60 bp, Artificial
  Synthetic oligonucleotide
ttatccgcgcagtttatgtggaggtatatggaacagccgcagttcaagtcaattcgtcgt

SEQ ID NO: 478234 - DNA, 52 bp, Artificial
  Synthetic oligonucleotide
ttatccggtcgtgagtcttatctgctttcgagagatcacgtattatatcaac

SEQ ID NO: 478235 - DNA, 60 bp, Artificial
  Synthetic oligonucleotide
ttatccgttggtaaaagatatgctctggcattcaattactaagtatatagatcagaccat

SEQ ID NO: 478236 - DNA, 60 bp, Artificial
  Synthetic oligonucleotide
ttatcctaagatccaaactactagtcgcgtgatgcgatctttgttttggaatgagcctgc

SEQ ID NO: 478237 - DNA, 60 bp, Artificial
  Synthetic oligonucleotide
ttatcctacagagtcggatacttatgtgcaggtctccccagcgacactccaagaggagag

SEQ ID NO: 478238 - DNA, 59 bp, Artificial
  Synthetic oligonucleotide
ttatcctccttgaactcattaactttgttctaaggactaacctcaaatcaccatgagca

SEQ ID NO: 478239 - DNA, 60 bp, Artificial
  Synthetic oligonucleotide
ttatcctgagctcgaaaaatgcattaagctggcatgtaaaataaaagttcgagccagagg

SEQ ID NO: 478240 - DNA, 54 bp, Artificial
  Synthetic oligonucleotide
ttatcctgcccgcgctcatacttttgatgacttctgccctgagtgtcgtgcgct

SEQ ID NO: 478241 - DNA, 55 bp, Artificial
  Synthetic oligonucleotide
ttatcctgcctactgctaactggattggggtttagcaatcttctaacgggttttg

SEQ ID NO: 478242 - DNA, 55 bp, Artificial
  Synthetic oligonucleotide
ttatcctgcggcggctagtgcagaactacccaggcttctagtagatcatgctcaa

SEQ ID NO: 478243 - DNA, 57 bp, Artificial
  Synthetic oligonucleotide
ttatccttcctccctggaatagcttccggagttttaggatatcttggcgcacagaaa

SEQ ID NO: 478244 - DNA, 55 bp, Artificial
  Synthetic oligonucleotide
ttatccttgggatattacgccttaggctttattgactcacttgtagaaaccgcaa

SEQ ID NO: 478245 - DNA, 60 bp, Artificial
  Synthetic oligonucleotide
ttatcgaaactaatggccaagatcgaacagtagcgtgactgctactccatgtgaatacac

SEQ ID NO: 478246 - DNA, 59 bp, Artificial
  Synthetic oligonucleotide
ttatcgaattgaaggatcttgagatatctaatttaaaactcgaaatcgctagattgact

SEQ ID NO: 478247 - DNA, 59 bp, Artificial
  Synthetic oligonucleotide
ttatcgattcagactacgaagacgtgctgtacctttgttaccaccgtagtgccaacgca

SEQ ID NO: 478248 - DNA, 55 bp, Artificial
  Synthetic oligonucleotide
ttatcgcaccccttttaaattacgacatagtaattttggtcacagatggcagcct

SEQ ID NO: 478249 - DNA, 57 bp, Artificial
  Synthetic oligonucleotide
ttatcgcaggcaccgttccatcagaacacaactcttaggatgcgcggactaacagca

SEQ ID NO: 478250 - DNA, 60 bp, Artificial
  Synthetic oligonucleotide
ttatcgcctcccccaaatggtacattagaagatacctataggtatgtgcagtcacaggcc

SEQ ID NO: 478251 - DNA, 59 bp, Artificial
  Synthetic oligonucleotide
ttatcgcgctgttgaactgccgtcgcgtaatcggatagcagttgtttattacggtccga

SEQ ID NO: 478252 - DNA, 60 bp, Artificial
  Synthetic oligonucleotide
ttatcgcggcaacggatggaagcgatttagctctaattgatacgcacctttccggcgaga

SEQ ID NO: 478253 - DNA, 58 bp, Artificial
  Synthetic oligonucleotide
ttatcgcgtcctgactcctttgttacctttgataaccctgtgtatgacccagatgaaa

SEQ ID NO: 478254 - DNA, 55 bp, Artificial
  Synthetic oligonucleotide
ttatcgctaaagcttacgtgcaaaagcttaggtggtacgagctaagagcagtcga

SEQ ID NO: 478255 - DNA, 58 bp, Artificial
  Synthetic oligonucleotide
ttatcgctatcgattatagtgaatatgacacgcatttaacccgttataattttcggaa

SEQ ID NO: 478256 - DNA, 60 bp, Artificial
  Synthetic oligonucleotide
ttatcgctgctaggaatatagtaagaagagcaacagtatcagcggacccactagcgtctc

SEQ ID NO: 478257 - DNA, 57 bp, Artificial
  Synthetic oligonucleotide
ttatcggaacggacaactccgttgtcctctctcgcaaatacacctcctttccatggc

SEQ ID NO: 478258 - DNA, 57 bp, Artificial
  Synthetic oligonucleotide
ttatcggagacttctggttcgactacactcacgttagaccaatggtcacttacggag

SEQ ID NO: 478259 - DNA, 55 bp, Artificial
  Synthetic oligonucleotide
ttatcggggccgtcgctagacaatttaaattcgcccgagtgtgcaaaccacgtat

SEQ ID NO: 478260 - DNA, 55 bp, Artificial
  Synthetic oligonucleotide
ttatcggtttgagaatgggtgtagtgaagcaagaatagaaagcgcttatgtgacc

SEQ ID NO: 478261 - DNA, 55 bp, Artificial
  Synthetic oligonucleotide
ttatcggtttgaggatgggtatgacaaagtaagaatagaaagcgcttatgtgacc

SEQ ID NO: 478262 - DNA, 60 bp, Artificial
  Synthetic oligonucleotide
ttatcgtgcagccagtaaggcgcacgaccgcatttccaattccacgctcctgactaaagg

SEQ ID NO: 478263 - DNA, 50 bp, Artificial
  Synthetic oligonucleotide
ttatcgtgttgcacaggaaagcaataaatctttgttgccgcaggttgagg

SEQ ID NO: 478264 - DNA, 51 bp, Artificial
  Synthetic oligonucleotide
ttatctacactagatataagcacccaacccctttcactagaagagagtgtg

SEQ ID NO: 478265 - DNA, 60 bp, Artificial
  Synthetic oligonucleotide
ttatctagtaatgccatggtgctgtatacggacgtctcccagtgggattcatctcaacac

SEQ ID NO: 478266 - DNA, 51 bp, Artificial
  Synthetic oligonucleotide
ttatctatggtcagagcgagatagtcaacttggaacaacgtccctctcagt

SEQ ID NO: 478267 - DNA, 55 bp, Artificial
  Synthetic oligonucleotide
ttatctatgtatgtgctgccttgtgtcttctgcttttggaaggggttgaacgcgg

SEQ ID NO: 478268 - DNA, 59 bp, Artificial
  Synthetic oligonucleotide
ttatctattagtgtggtgtgttagatttgccgaggcatggctttccaaggtaccagtag

SEQ ID NO: 478269 - DNA, 60 bp, Artificial
  Synthetic oligonucleotide
ttatctcaaaaggcagggaagcacccccttagcactagtggacatcttgatgttcaccac

SEQ ID NO: 478270 - DNA, 59 bp, Artificial
  Synthetic oligonucleotide
ttatctcaatttagaaagacagctcaaatggtctgaacctaacctcaaagaggctttga

SEQ ID NO: 478271 - DNA, 60 bp, Artificial
  Synthetic oligonucleotide
ttatctcagctcctgctcagtgtggtctaacctaccccgatgcttttgagagaagacggg

SEQ ID NO: 478272 - DNA, 60 bp, Artificial
  Synthetic oligonucleotide
ttatctcagttaggtcatgtgaaagttgatactcgtcccggtgagactctatgtagttga

SEQ ID NO: 478273 - DNA, 55 bp, Artificial
  Synthetic oligonucleotide
ttatctcatctacgtacaccaaagatagaacctacgatggttgcgactacactgg

SEQ ID NO: 478274 - DNA, 55 bp, Artificial
  Synthetic oligonucleotide
ttatctcccaggtatatacgccattccttagttgagttgcagtgatgctctcccc

SEQ ID NO: 478275 - DNA, 54 bp, Artificial
  Synthetic oligonucleotide
ttatctcctagagagggggttaaaaacacccccagagaaatttcaggcagagcc

SEQ ID NO: 478276 - DNA, 55 bp, Artificial
  Synthetic oligonucleotide
ttatctgcccctctccccgacttctgttaggttctgtaccgtgagatcggaccct

SEQ ID NO: 478277 - DNA, 53 bp, Artificial
  Synthetic oligonucleotide
ttatctggaacaacattggtaccagatcaacaaattcatgaagcactgcaacc

SEQ ID NO: 478278 - DNA, 59 bp, Artificial
  Synthetic oligonucleotide
ttatcttaagaggatgctatctgacaacgaatggggatcgactcttgaggcatctatgt

SEQ ID NO: 478279 - DNA, 60 bp, Artificial
  Synthetic oligonucleotide
ttatcttatcacaatgacgaagtagttatgagtcagcatttactcatttagttataccta

SEQ ID NO: 478280 - DNA, 60 bp, Artificial
  Synthetic oligonucleotide
ttatcttccacgtagatttagcagggcctcactatgggcaaacaggcccatgtataggaa

SEQ ID NO: 478281 - DNA, 59 bp, Artificial
  Synthetic oligonucleotide
ttatcttgcagtcaagacgttagataattatttctcttggaatgcgaggcgttttcgtg

SEQ ID NO: 478282 - DNA, 55 bp, Artificial
  Synthetic oligonucleotide
ttatcttgccctcagtcacagtgtccttattgctttacacactgtgagcctacag

SEQ ID NO: 478283 - DNA, 55 bp, Artificial
  Synthetic oligonucleotide
ttatcttgtatgtagacttgctgcggattttagaactatcggtttcagtgcagct

SEQ ID NO: 478284 - DNA, 58 bp, Artificial
  Synthetic oligonucleotide
ttatcttgtgttcaatgcagacaacatattcaatctttgagctgggatgagtataggc

SEQ ID NO: 478285 - DNA, 60 bp, Artificial
  Synthetic oligonucleotide
ttatgaaaagacacattgtgtcactgggcaactagttgaaggccaatgctttaatccctc

SEQ ID NO: 478286 - DNA, 59 bp, Artificial
  Synthetic oligonucleotide
ttatgaaaagcacaatgggaaattccaaacaaccactgtcctatttgtgcgtgacagga

SEQ ID NO: 478287 - DNA, 59 bp, Artificial
  Synthetic oligonucleotide
ttatgaaacgagtagaccccaccatgcacgagagtccccaagacgagatcaaacataag

SEQ ID NO: 478288 - DNA, 57 bp, Artificial
  Synthetic oligonucleotide
ttatgaaacgtaggttcggtaatacaatgggctcgcgcattgttgaagcttaccgac

SEQ ID NO: 478289 - DNA, 60 bp, Artificial
  Synthetic oligonucleotide
ttatgaaaggcgccaagcgctgcgctgccgattctttgagcgtagccggctggctggaca

SEQ ID NO: 478290 - DNA, 60 bp, Artificial
  Synthetic oligonucleotide
ttatgaacaacacatgttctgaatcgtcttaaatagctgccaattatcaggatatatgga

SEQ ID NO: 478291 - DNA, 55 bp, Artificial
  Synthetic oligonucleotide
ttatgaactcaatagtcagctgtggaccatttgcatatcagggagacgagaaatc

SEQ ID NO: 478292 - DNA, 50 bp, Artificial
  Synthetic oligonucleotide
ttatgaactcatcatacactgaacattacagcgtttcacaaagatgcaaa

SEQ ID NO: 478293 - DNA, 55 bp, Artificial
  Synthetic oligonucleotide
ttatgaagaatcgtttttcagaggtaccgacagctacgattaggcgttcaagttt

SEQ ID NO: 478294 - DNA, 53 bp, Artificial
  Synthetic oligonucleotide
ttatgaagcgtgatggcatccaaacaagttaccacttccccccgtagtgtctc

SEQ ID NO: 478295 - DNA, 55 bp, Artificial
  Synthetic oligonucleotide
ttatgaagctctagtgctcagaagacctctattcttagatagtatagttaagggc

SEQ ID NO: 478296 - DNA, 60 bp, Artificial
  Synthetic oligonucleotide
ttatgaagctttcgatagatcacaggatgcaatcattctaggtcttgaaatagaatgtct

SEQ ID NO: 478297 - DNA, 57 bp, Artificial
  Synthetic oligonucleotide
ttatgaatccaccgtctgcccttggtctgttttataggcgtagccgcttagttgggc

SEQ ID NO: 478298 - DNA, 60 bp, Artificial
  Synthetic oligonucleotide
ttatgaatggtaaacaggatgaatcatgtcacgttgatttatttaggaataagtatagcg

SEQ ID NO: 478299 - DNA, 60 bp, Artificial
  Synthetic oligonucleotide
ttatgaattcagtgacagtaagacaagatttagagcgccaacttactgatttacgagaag

SEQ ID NO: 478300 - DNA, 60 bp, Artificial
  Synthetic oligonucleotide
ttatgaatttaaggaatcactgaagccggcactgaggacagcaatgccagaaaggcgaca

SEQ ID NO: 478301 - DNA, 59 bp, Artificial
  Synthetic oligonucleotide
ttatgacaaggcttcacgctgaatgcaaattggaggattaagccgctatcgatcagatg

SEQ ID NO: 478302 - DNA, 52 bp, Artificial
  Synthetic oligonucleotide
ttatgacaatcggctggagttagttgagaatctagagttagacagggtgtta

SEQ ID NO: 478303 - DNA, 60 bp, Artificial
  Synthetic oligonucleotide
ttatgacaggctacactggtgacttcgactctgtgatagactgtaacacgtctgtcgtac

SEQ ID NO: 478304 - DNA, 60 bp, Artificial
  Synthetic oligonucleotide
ttatgacataatttgaagcagaagcgtcaacaattccctttacagcagcgtcgaattgtg

SEQ ID NO: 478305 - DNA, 60 bp, Artificial
  Synthetic oligonucleotide
ttatgacatcactgaaggcatgtgattctgctatgtgttatggggcaacagtagttaatt

SEQ ID NO: 478306 - DNA, 58 bp, Artificial
  Synthetic oligonucleotide
ttatgacatcgtggtccacgctgaaaggagagatcgcagtcaaccgtttaggccgggg

SEQ ID NO: 478307 - DNA, 55 bp, Artificial
  Synthetic oligonucleotide
ttatgacccaacaaaagacttaatagcagaagtacagaaacaggagcaaggccaa

SEQ ID NO: 478308 - DNA, 55 bp, Artificial
  Synthetic oligonucleotide
ttatgacccagcgaaagatttaatagcagaactacagaagcaggggcaaggccaa

SEQ ID NO: 478309 - DNA, 55 bp, Artificial
  Synthetic oligonucleotide
ttatgacccatcaaaagatttagtagtagaagtacagaaacaagggcaggaccaa

SEQ ID NO: 478310 - DNA, 57 bp, Artificial
  Synthetic oligonucleotide
ttatgacgaggctgtaaagtctctggacacacaagacaaacgccctaaagtgaactt

SEQ ID NO: 478311 - DNA, 59 bp, Artificial
  Synthetic oligonucleotide
ttatgacggcggtgatgttaggcgttgcttggggaggctagtgagccacgtcaccgtag

SEQ ID NO: 478312 - DNA, 60 bp, Artificial
  Synthetic oligonucleotide
ttatgacgtggactcagagacctggcccacatggtcttccctgtcctgctatccccttct

SEQ ID NO: 478313 - DNA, 60 bp, Artificial
  Synthetic oligonucleotide
ttatgacgtggatgtagtgacctggcccacatagtcttccctgtcctgctatccccctct

SEQ ID NO: 478314 - DNA, 58 bp, Artificial
  Synthetic oligonucleotide
ttatgactacagatgattttcaatctccgagtgccttaccgtggtttcaccccaccaa

SEQ ID NO: 478315 - DNA, 60 bp, Artificial
  Synthetic oligonucleotide
ttatgactcaggccgctcgcattggtatctcaggattgtgtgctaatgtaggcaacgcgc

SEQ ID NO: 478316 - DNA, 60 bp, Artificial
  Synthetic oligonucleotide
ttatgactccacgtcagctgatcgctagggtatttaatgcgcctcagaccgtcaagaggc

SEQ ID NO: 478317 - DNA, 60 bp, Artificial
  Synthetic oligonucleotide
ttatgactggctcttcgctgccacacgtgataacttagctgaacagaaaattgttctatc

SEQ ID NO: 478318 - DNA, 54 bp, Artificial
  Synthetic oligonucleotide
ttatgactgggtgcctacttcaaccacaaaagtgtataagcaagttccacagca

SEQ ID NO: 478319 - DNA, 53 bp, Artificial
  Synthetic oligonucleotide
ttatgacttagctaacgcgctatatatagtaaaagggcatatgccagtggcta

SEQ ID NO: 478320 - DNA, 60 bp, Artificial
  Synthetic oligonucleotide
ttatgacttggcttgtaatcaaacacattgcctaccgacagtacacctgattgctcctgt

SEQ ID NO: 478321 - DNA, 51 bp, Artificial
  Synthetic oligonucleotide
ttatgagaaacagctacacgacaccacagtgtcccatttggaacgcatttg

SEQ ID NO: 478322 - DNA, 60 bp, Artificial
  Synthetic oligonucleotide
ttatgagactttcagggtcattggtggttggatcactgctaattccaagtcacagataaa

SEQ ID NO: 478323 - DNA, 60 bp, Artificial
  Synthetic oligonucleotide
ttatgagcagcacgctattgacattttcccttacaactgtccggttgataagattgtgcc

SEQ ID NO: 478324 - DNA, 58 bp, Artificial
  Synthetic oligonucleotide
ttatgagcataatttctagcctacatcttagtattaggggaaactctaattacaaggc

SEQ ID NO: 478325 - DNA, 60 bp, Artificial
  Synthetic oligonucleotide
ttatgagcattgtctccagcctgcacctcagtatacgaggaaactccaactacaaggcag

SEQ ID NO: 478326 - DNA, 60 bp, Artificial
  Synthetic oligonucleotide
ttatgagctctgatcagagacagtcttacagcagggctgctaaaagccttgtaaaatatc

SEQ ID NO: 478327 - DNA, 60 bp, Artificial
  Synthetic oligonucleotide
ttatgaggcatatgctagatacccagaagagttggaagcaagtcaggcctgtcagaggaa

SEQ ID NO: 478328 - DNA, 60 bp, Artificial
  Synthetic oligonucleotide
ttatgagggcaagtttgaatatcctgagctgaccggtgaggagatctccaccatcgatct

SEQ ID NO: 478329 - DNA, 58 bp, Artificial
  Synthetic oligonucleotide
ttatgaggggtgaaaaagcaactattcctgatatagagctggctgaattggttttacc

SEQ ID NO: 478330 - DNA, 57 bp, Artificial
  Synthetic oligonucleotide
ttatgaggggtttcataacgtcgaaccatatattagctgttctagaagaggttggaa

SEQ ID NO: 478331 - DNA, 60 bp, Artificial
  Synthetic oligonucleotide
ttatgaggtcccctgctggacacccgacactgatgctacagtaatagacgacgtgtctga

SEQ ID NO: 478332 - DNA, 60 bp, Artificial
  Synthetic oligonucleotide
ttatgagtagccctatgattggtggaactttttcgattgcatatgttgctggagcctaca

SEQ ID NO: 478333 - DNA, 60 bp, Artificial
  Synthetic oligonucleotide
ttatgatataccagattatgcatcccttaggtccctagttgcctcatcaggcacattgga

SEQ ID NO: 478334 - DNA, 55 bp, Artificial
  Synthetic oligonucleotide
ttatgatcgggcactggctgcggttatgggcacggagatgtacgactatcgctat

SEQ ID NO: 478335 - DNA, 55 bp, Artificial
  Synthetic oligonucleotide
ttatgatcgtgatttcgttacggtgaacccaactctccccgatcagggacccgaa

SEQ ID NO: 478336 - DNA, 51 bp, Artificial
  Synthetic oligonucleotide
ttatgatggtagtatacatccaatctggtttcaagcactaaaggaagttct

SEQ ID NO: 478337 - DNA, 60 bp, Artificial
  Synthetic oligonucleotide
ttatgcaaaacgttggagcagctatgtttatggatgcgttatccatagggtcgaaagttg

SEQ ID NO: 478338 - DNA, 56 bp, Artificial
  Synthetic oligonucleotide
ttatgcaaagtccccaacgaccaaatcttcattaagtaccctatgggaggtataga

SEQ ID NO: 478339 - DNA, 55 bp, Artificial
  Synthetic oligonucleotide
ttatgcaaggccgagtcgtgaatttcaccgatcaacaggctagtcggctctgccg

SEQ ID NO: 478340 - DNA, 55 bp, Artificial
  Synthetic oligonucleotide
ttatgcaccaggaagccataaagctgatacacagcatcacgggacgggttttgca

SEQ ID NO: 478341 - DNA, 60 bp, Artificial
  Synthetic oligonucleotide
ttatgcagatggggcagccagctatcgacttggatcaaggatttgttaatgcgcacaaac

SEQ ID NO: 478342 - DNA, 55 bp, Artificial
  Synthetic oligonucleotide
ttatgcagcctcaggagatccaacatcacctgacaatatagaggatcctaatgca

SEQ ID NO: 478343 - DNA, 60 bp, Artificial
  Synthetic oligonucleotide
ttatgcagctctgtaaggtacctttagaggctaatgtgttggcccacatcaatgctatgg

SEQ ID NO: 478344 - DNA, 57 bp, Artificial
  Synthetic oligonucleotide
ttatgcatcagactggttttctccgcggtactccgtgcgcgctctaccgttcaccct

SEQ ID NO: 478345 - DNA, 55 bp, Artificial
  Synthetic oligonucleotide
ttatgcattgcttggtataactatggcctggtttgtagtggagtcttccgttttc

SEQ ID NO: 478346 - DNA, 55 bp, Artificial
  Synthetic oligonucleotide
ttatgccagattttaaagtagtaattcgctacccagccaatgcttttacgggtat

SEQ ID NO: 478347 - DNA, 60 bp, Artificial
  Synthetic oligonucleotide
ttatgcccagcgatgtcagcaacaggctggtcgattgcattgggagttgtacgctgcatt

SEQ ID NO: 478348 - DNA, 60 bp, Artificial
  Synthetic oligonucleotide
ttatgccgacgacatatgcactgacatgggttttgagacaaaatttatgtccccaagtgt

SEQ ID NO: 478349 - DNA, 55 bp, Artificial
  Synthetic oligonucleotide
ttatgccgatgacacagctggttgggacacccgcatcacacaagctgaccttgag

SEQ ID NO: 478350 - DNA, 60 bp, Artificial
  Synthetic oligonucleotide
ttatgcctactctaccagctaatgtacaatatatcatccagtgcattgggtcaagaacat

SEQ ID NO: 478351 - DNA, 60 bp, Artificial
  Synthetic oligonucleotide
ttatgcctcacttcattgctgctagtttctttgagccaacagagtttcacctcaacatgc

SEQ ID NO: 478352 - DNA, 51 bp, Artificial
  Synthetic oligonucleotide
ttatgcgaaaacgccgtataaaccggtaacgaaacctcctgttaacagaag

SEQ ID NO: 478353 - DNA, 58 bp, Artificial
  Synthetic oligonucleotide
ttatgcgaaactctttgacgtatacttcgaaggtgagttagacggcgcaccctatatg

SEQ ID NO: 478354 - DNA, 56 bp, Artificial
  Synthetic oligonucleotide
ttatgcgacatcctgcaaggctgcaaagtgatgggttcccttgtgcgtgaatccat

SEQ ID NO: 478355 - DNA, 59 bp, Artificial
  Synthetic oligonucleotide
ttatgcgaggattttaagacctacgtagtgcagctcaaagagagtgggggcgccgagag

SEQ ID NO: 478356 - DNA, 60 bp, Artificial
  Synthetic oligonucleotide
ttatgcgatgccaaacggaacactagtgaaaacaattacagatgatcagattgaggttcc

SEQ ID NO: 478357 - DNA, 54 bp, Artificial
  Synthetic oligonucleotide
ttatgcgcagcaccttttgaaaggacgatcatatgttcactgctgcaatccttg

SEQ ID NO: 478358 - DNA, 50 bp, Artificial
  Synthetic oligonucleotide
ttatgcggagaaatacggctagcgcctatttaccggttactgattacgat

SEQ ID NO: 478359 - DNA, 60 bp, Artificial
  Synthetic oligonucleotide
ttatgcggatatgtggccagaacgttataggctcgagatccacaactgcgtggaggccgg

SEQ ID NO: 478360 - DNA, 60 bp, Artificial
  Synthetic oligonucleotide
ttatgctagtaccgccttgctccctacttgtaaagagattaacatggtcgctgtcgcatc

SEQ ID NO: 478361 - DNA, 60 bp, Artificial
  Synthetic oligonucleotide
ttatgctcacatcactctttcggatgcgatagaagtcgagaagtacgtttgtatcgacga

SEQ ID NO: 478362 - DNA, 60 bp, Artificial
  Synthetic oligonucleotide
ttatgctccaacaaacagaaataaatgagcaaaccttcaggatgctgaagttgctacaga

SEQ ID NO: 478363 - DNA, 53 bp, Artificial
  Synthetic oligonucleotide
ttatgctctctcggcttcttacatcctcggcaaacgttagtgtgctcgagtta

SEQ ID NO: 478364 - DNA, 57 bp, Artificial
  Synthetic oligonucleotide
ttatgctggtccattcgacggctcgggaaacccagggaacattacggggatatgcca

SEQ ID NO: 478365 - DNA, 60 bp, Artificial
  Synthetic oligonucleotide
ttatgctgtatggcaccatggcacgctacctccgtaagatgcggcaaagatatcaacccg

SEQ ID NO: 478366 - DNA, 56 bp, Artificial
  Synthetic oligonucleotide
ttatgctgtgttagaaattttccggttggcaaacactactagtaggagtttgccga

SEQ ID NO: 478367 - DNA, 60 bp, Artificial
  Synthetic oligonucleotide
ttatgcttgcaacaatgcctttagatgcaaagagcaaaatcggaggccctaacccttatc

SEQ ID NO: 478368 - DNA, 56 bp, Artificial
  Synthetic oligonucleotide
ttatggaacaacgcgctattttgatcagtgttggccatcctcatgttccaccacgg

SEQ ID NO: 478369 - DNA, 57 bp, Artificial
  Synthetic oligonucleotide
ttatggaacggaaaaaggcatgtgttcagaaccacattagataagtacttaagtctg

SEQ ID NO: 478370 - DNA, 60 bp, Artificial
  Synthetic oligonucleotide
ttatggaagaacaacatttagctgaattgctgaaatgggctagacctggaacactacaag

SEQ ID NO: 478371 - DNA, 57 bp, Artificial
  Synthetic oligonucleotide
ttatggaaggacgatatgcgttagcgataagaatttggggaaatttcgaagatacga

SEQ ID NO: 478372 - DNA, 51 bp, Artificial
  Synthetic oligonucleotide
ttatggaataacaagaacacaggcaatggaactattgcagtcaaatccgag

SEQ ID NO: 478373 - DNA, 60 bp, Artificial
  Synthetic oligonucleotide
ttatggaatgaattaagcttgtgggggaaatatgtcctacttgcattagctataattatc

SEQ ID NO: 478374 - DNA, 56 bp, Artificial
  Synthetic oligonucleotide
ttatggaattacccgcatagaagcgcttaatttaattaaatcgaatccgaatgtac

SEQ ID NO: 478375 - DNA, 59 bp, Artificial
  Synthetic oligonucleotide
ttatggacagatcttcacagccgtccacagtgggtcaaccactgacgaggtaggggacg

SEQ ID NO: 478376 - DNA, 60 bp, Artificial
  Synthetic oligonucleotide
ttatggactcgctgtctgtcaaccagatcctataccctgaggttcacctagatagcccga

SEQ ID NO: 478377 - DNA, 60 bp, Artificial
  Synthetic oligonucleotide
ttatggacttccctctccaactgccgtgcactcctgaggagacacttaggttggtgagaa

SEQ ID NO: 478378 - DNA, 59 bp, Artificial
  Synthetic oligonucleotide
ttatggagcagtaaggaatcgtaagaataagggtaattcacaggcaatggtgcacgtag

SEQ ID NO: 478379 - DNA, 55 bp, Artificial
  Synthetic oligonucleotide
ttatggagcttgcggctcgtcatgctcactgacgagacagggagattgcggtctc

SEQ ID NO: 478380 - DNA, 55 bp, Artificial
  Synthetic oligonucleotide
ttatggatataacgcaagcgctcaaggtgggcaccaagctagcggcgccgaccgt

SEQ ID NO: 478381 - DNA, 54 bp, Artificial
  Synthetic oligonucleotide
ttatggcacggtccataatgagggtcgaacgtccagaagaagcgcctatcatgt

SEQ ID NO: 478382 - DNA, 60 bp, Artificial
  Synthetic oligonucleotide
ttatggccaaatgtaataaagaccataatgaagagttctgtgacacaatgaggctgtttg

SEQ ID NO: 478383 - DNA, 52 bp, Artificial
  Synthetic oligonucleotide
ttatggcccactacaagggggctgtaagcagtcagtctttagtcatagagca

SEQ ID NO: 478384 - DNA, 59 bp, Artificial
  Synthetic oligonucleotide
ttatggcccctaccgaaggttccgaatctcctagcgctacggagcagcttgatagaata

SEQ ID NO: 478385 - DNA, 60 bp, Artificial
  Synthetic oligonucleotide
ttatggccgcgtagttttagccacatacggtttcgatagcacagctccatcagtaatagg

SEQ ID NO: 478386 - DNA, 56 bp, Artificial
  Synthetic oligonucleotide
ttatggcgacctaggcttctagcccaagtcgtctttccagtacgggttggtccaca

SEQ ID NO: 478387 - DNA, 60 bp, Artificial
  Synthetic oligonucleotide
ttatggctctcacatatgaaacttgtagtatagacctagcaagaacactacgaaagttat

SEQ ID NO: 478388 - DNA, 60 bp, Artificial
  Synthetic oligonucleotide
ttatggcttgctaaaagcagatgatccaaagcttgatatacttaagcggatatcagatgg

SEQ ID NO: 478389 - DNA, 60 bp, Artificial
  Synthetic oligonucleotide
ttatggctttggtgaggcgtttaatatgtatgacaatgagccctctacagccactatcaa

SEQ ID NO: 478390 - DNA, 60 bp, Artificial
  Synthetic oligonucleotide
ttatgggaactttcagtgctgcaattagccaaatgtctgcagtaaagaggaatgacagcg

SEQ ID NO: 478391 - DNA, 60 bp, Artificial
  Synthetic oligonucleotide
ttatgggaatttccaaggatgatcgcgctcgtatgaagtacctcatctctggaatgcccg

SEQ ID NO: 478392 - DNA, 55 bp, Artificial
  Synthetic oligonucleotide
ttatgggccagcttctactggtaaaacaaacatggcaaaggccatagtccaaggc

SEQ ID NO: 478393 - DNA, 54 bp, Artificial
  Synthetic oligonucleotide
ttatgggcctaataggccgcgcagcggcacacacaacgttggacgagacccaat

SEQ ID NO: 478394 - DNA, 59 bp, Artificial
  Synthetic oligonucleotide
ttatggggaacaagtaccgttcgatcacatttatcctactggttcagcgacatactgtc

SEQ ID NO: 478395 - DNA, 55 bp, Artificial
  Synthetic oligonucleotide
ttatggggaatgtccatgacgcctgcaaggactcattgtccgtcatcctcttgtc

SEQ ID NO: 478396 - DNA, 52 bp, Artificial
  Synthetic oligonucleotide
ttatgggggccgctccgaggtcagtggttggtttgggtaggtacgttacgta

SEQ ID NO: 478397 - DNA, 56 bp, Artificial
  Synthetic oligonucleotide
ttatgggggggtgcctactgatatcattaattcttgggcaggagatatcttgagga

SEQ ID NO: 478398 - DNA, 56 bp, Artificial
  Synthetic oligonucleotide
ttatggggtcaccgccagattggagtggggtatggaacaaaaggagtcctacacac

SEQ ID NO: 478399 - DNA, 60 bp, Artificial
  Synthetic oligonucleotide
ttatgggtcataataccgcgatagcaacgttcatcaattaccctgttctcagtaagactg

SEQ ID NO: 478400 - DNA, 56 bp, Artificial
  Synthetic oligonucleotide
ttatgggtggttaccgtacgatgatttgttgagaatttgtgaccgatacccaatcc

SEQ ID NO: 478401 - DNA, 57 bp, Artificial
  Synthetic oligonucleotide
ttatggtaaggttacaggtggacaatatgccagcaacgaacaagcactggtgaagcg

SEQ ID NO: 478402 - DNA, 56 bp, Artificial
  Synthetic oligonucleotide
ttatggtcaacgacgaattgtttaataacgtggccactcaacgatttgtgcgtggt

SEQ ID NO: 478403 - DNA, 60 bp, Artificial
  Synthetic oligonucleotide
ttatggtcaagatgagcgactcggtggcaggcgtgccattcgcgaggaaccagtaactat

SEQ ID NO: 478404 - DNA, 60 bp, Artificial
  Synthetic oligonucleotide
ttatggtcactcccgaggtcagccactcgttactaaggccacagctcctaagttgatcgc

SEQ ID NO: 478405 - DNA, 60 bp, Artificial
  Synthetic oligonucleotide
ttatggtcctgcgccgctggcaaattctagcaagtttccagtggcagtcaaccctaactc

SEQ ID NO: 478406 - DNA, 54 bp, Artificial
  Synthetic oligonucleotide
ttatggtcggggataacccagagtcgtggcaggtgggtcgagacattatagaca

SEQ ID NO: 478407 - DNA, 53 bp, Artificial
  Synthetic oligonucleotide
ttatggtgccttacggaagaacgaagtctgtgttacttaacgaccttatttta

SEQ ID NO: 478408 - DNA, 57 bp, Artificial
  Synthetic oligonucleotide
ttatggttaatactaagtatgagccaatagtaattagggatgataatcatcctgttc

SEQ ID NO: 478409 - DNA, 58 bp, Artificial
  Synthetic oligonucleotide
ttatggttgcggtgtcccgcagaggctttggcacgtggatcgactttcgaaattggac

SEQ ID NO: 478410 - DNA, 60 bp, Artificial
  Synthetic oligonucleotide
ttatggttggctgccgtgggatgatctactgagactgtgtgatcgatatccattgactgt

SEQ ID NO: 478411 - DNA, 57 bp, Artificial
  Synthetic oligonucleotide
ttatggttttggacaccaaaacaaggcagtgtatgtggctggttacaagattgttaa

SEQ ID NO: 478412 - DNA, 57 bp, Artificial
  Synthetic oligonucleotide
ttatggttttgtagccaatttcagtatggagctacccagctttggggtgtctgggat

SEQ ID NO: 478413 - DNA, 59 bp, Artificial
  Synthetic oligonucleotide
ttatgtaacccaatggatgtaacattatactattatcaacaatcgggagaatcaaataa

SEQ ID NO: 478414 - DNA, 57 bp, Artificial
  Synthetic oligonucleotide
ttatgtaatttgtaaagtctggctgtggagaggttatatgttttagttgtacctgat

SEQ ID NO: 478415 - DNA, 59 bp, Artificial
  Synthetic oligonucleotide
ttatgtacacaccacttttgtgtgctgttctttgcttacagctgtggagtttagaaggg

SEQ ID NO: 478416 - DNA, 60 bp, Artificial
  Synthetic oligonucleotide
ttatgtactcgtaatgacgccactccagccgatgagccattataccgtataatggagtca

SEQ ID NO: 478417 - DNA, 55 bp, Artificial
  Synthetic oligonucleotide
ttatgtactgttggtgtattgttgtcgggttagaatcatgtctcgtggtgggtgg

SEQ ID NO: 478418 - DNA, 55 bp, Artificial
  Synthetic oligonucleotide
ttatgtagcgctgctgaatttactttgacgaccgttccctccgaatgtgaaacag

SEQ ID NO: 478419 - DNA, 59 bp, Artificial
  Synthetic oligonucleotide
ttatgtaggtcagtcagctgcacctaatgctcccacagccatagtgtccaataggagta

SEQ ID NO: 478420 - DNA, 60 bp, Artificial
  Synthetic oligonucleotide
ttatgtataggttatcatgcgaacaattcaacagacactgtagacacagtactagaaaag

SEQ ID NO: 478421 - DNA, 55 bp, Artificial
  Synthetic oligonucleotide
ttatgtatgctcaggtctcgttggtgatacacccagaaatgatgacagctctagc

SEQ ID NO: 478422 - DNA, 55 bp, Artificial
  Synthetic oligonucleotide
ttatgtcaacaagaacccttatacactggtatcaacaaaagagtggagcagacgg

SEQ ID NO: 478423 - DNA, 55 bp, Artificial
  Synthetic oligonucleotide
ttatgtcaccggtgtcaactttggtcctccggagacgtctacctgccccccctgc

SEQ ID NO: 478424 - DNA, 56 bp, Artificial
  Synthetic oligonucleotide
ttatgtccacacgctgtccttgcggagcatcaataaccggccatgtgaagaatggg

SEQ ID NO: 478425 - DNA, 59 bp, Artificial
  Synthetic oligonucleotide
ttatgtcccacgagctgttgtggcacttgctcttcgtcgtttatcgccttgataaagtt

SEQ ID NO: 478426 - DNA, 55 bp, Artificial
  Synthetic oligonucleotide
ttatgtcccgtacccccggtcgacagaggtgtatgtccgctctatatttggtccc

SEQ ID NO: 478427 - DNA, 54 bp, Artificial
  Synthetic oligonucleotide
ttatgtccctgatgggactataacttatcgtaaggaggggtgccgtatgagtgg

SEQ ID NO: 478428 - DNA, 60 bp, Artificial
  Synthetic oligonucleotide
ttatgtcctggttataaaagcttaagagcagcaagagtaatgtgcaaatcaaaaggccca

SEQ ID NO: 478429 - DNA, 51 bp, Artificial
  Synthetic oligonucleotide
ttatgtcggttagaatcgaccctagctggagacgcatcatgtcccggaacg

SEQ ID NO: 478430 - DNA, 60 bp, Artificial
  Synthetic oligonucleotide
ttatgtctccgtcggaacatcaacactgaaccagagatcagttccaaaaatagccactag

SEQ ID NO: 478431 - DNA, 50 bp, Artificial
  Synthetic oligonucleotide
ttatgtctgatgttgtggaaggtttagaggactcttgcgaggatctgaca

SEQ ID NO: 478432 - DNA, 60 bp, Artificial
  Synthetic oligonucleotide
ttatgtctgctggctcccgtcgtggagctatgatggccaccatgcggtgtgatcatcctg

SEQ ID NO: 478433 - DNA, 60 bp, Artificial
  Synthetic oligonucleotide
ttatgtctggcttttgatgcccttgtggaggagcattggatgcccatttacctcatgatc

SEQ ID NO: 478434 - DNA, 60 bp, Artificial
  Synthetic oligonucleotide
ttatgtgcaagttgtggtgtattccttgatgtatatgggaatgggtatcccgaatattgc

SEQ ID NO: 478435 - DNA, 55 bp, Artificial
  Synthetic oligonucleotide
ttatgtgcctcacgctacttactacgctttacgcggggtattcgttgagcgactg

SEQ ID NO: 478436 - DNA, 60 bp, Artificial
  Synthetic oligonucleotide
ttatgtgctatatttggatgtcctggaggtgagggtgatattctaaactatggagtacag

SEQ ID NO: 478437 - DNA, 60 bp, Artificial
  Synthetic oligonucleotide
ttatgtgctctcctatatcttggccaatgttaaccttcgcaatgactgacaaagacgatc

SEQ ID NO: 478438 - DNA, 60 bp, Artificial
  Synthetic oligonucleotide
ttatgtgctgttatggcgaagctaaatgccgttagggctatatgctttggagattctgag

SEQ ID NO: 478439 - DNA, 59 bp, Artificial
  Synthetic oligonucleotide
ttatgtggagttgataagaggaagaccacaggagactagggtgtggtggacttcaaata

SEQ ID NO: 478440 - DNA, 55 bp, Artificial
  Synthetic oligonucleotide
ttatgtggattagagaccttttagtagtggaatccaaagcccaaggcatagactc

SEQ ID NO: 478441 - DNA, 58 bp, Artificial
  Synthetic oligonucleotide
ttatgtggccccaacgacctggcccacattgttttgccagtacgactctcgccctcga

SEQ ID NO: 478442 - DNA, 56 bp, Artificial
  Synthetic oligonucleotide
ttatgtgggaaactatagagtggttaatagacacctagccactcatgttgactggc

SEQ ID NO: 478443 - DNA, 54 bp, Artificial
  Synthetic oligonucleotide
ttatgtgtgttttttagggagtcattcagaacctttaattgttccgagtttgga

SEQ ID NO: 478444 - DNA, 51 bp, Artificial
  Synthetic oligonucleotide
ttatgtgttaccattgataacataaacaaactgattgaacacaagttagtt

SEQ ID NO: 478445 - DNA, 55 bp, Artificial
  Synthetic oligonucleotide
ttatgtgttatctcgtgacacagacgatactgaaagctactatgagcaaagggcg

SEQ ID NO: 478446 - DNA, 59 bp, Artificial
  Synthetic oligonucleotide
ttatgtgttccaaccagacaaacgtatggatgattggtcgggatacttagaagtggctg

SEQ ID NO: 478447 - DNA, 52 bp, Artificial
  Synthetic oligonucleotide
ttatgttagacgccggcttctccctaggtgaagttttcctcgcagcggtcga

SEQ ID NO: 478448 - DNA, 50 bp, Artificial
  Synthetic oligonucleotide
ttatgttcaacgattacaccggcgttaagaccagtgatcatgcttggaga

SEQ ID NO: 478449 - DNA, 60 bp, Artificial
  Synthetic oligonucleotide
ttatgttcaaggtactaatttgagatctgacaatctgttatctagcaacatcgttaatag

SEQ ID NO: 478450 - DNA, 52 bp, Artificial
  Synthetic oligonucleotide
ttatgttcaccgggcctacggatgccaaagcccgctacatggtggcttacat

SEQ ID NO: 478451 - DNA, 59 bp, Artificial
  Synthetic oligonucleotide
ttatgttgaggccgtcggtagcccatttcagggtagtgtcacctgagccggcgcattct

SEQ ID NO: 478452 - DNA, 58 bp, Artificial
  Synthetic oligonucleotide
ttattaaaccatggacttcttaagaaaccttgactggactcaggtgattgatagtcag

SEQ ID NO: 478453 - DNA, 60 bp, Artificial
  Synthetic oligonucleotide
ttattaaagtaaaacagtatgatcacatactcatagaaatttgtggacacaaggctatag

SEQ ID NO: 478454 - DNA, 55 bp, Artificial
  Synthetic oligonucleotide
ttattaaatttcttgccgaacacagaggaattgaccgagctgtcaaaggcaagat

SEQ ID NO: 478455 - DNA, 52 bp, Artificial
  Synthetic oligonucleotide
ttattaacaccaggtttggagatttaccttacaaaactccccaagacaccaa

SEQ ID NO: 478456 - DNA, 60 bp, Artificial
  Synthetic oligonucleotide
ttattaacatctgtgggcgattgtgcttatatagggccttacgaggatttagctagtcga

SEQ ID NO: 478457 - DNA, 60 bp, Artificial
  Synthetic oligonucleotide
ttattaaccaggctgacattgtactatgtacccagtaaatataatcctgctgatggccca

SEQ ID NO: 478458 - DNA, 58 bp, Artificial
  Synthetic oligonucleotide
ttattaacgcattaagtggtatagatctatcacacttgcgtacgccgaaaatacaacc

SEQ ID NO: 478459 - DNA, 55 bp, Artificial
  Synthetic oligonucleotide
ttattaacgctactagggtgttatcaagaccagttagagagccttagtgcactca

SEQ ID NO: 478460 - DNA, 55 bp, Artificial
  Synthetic oligonucleotide
ttattaactaaaggatctgaccctaattgcgtcgacgaggatggactcacttctc

SEQ ID NO: 478461 - DNA, 60 bp, Artificial
  Synthetic oligonucleotide
ttattaagagcctcgtgaccaaacacgatctggtcaccagcggcaagaaggagaactgcc

SEQ ID NO: 478462 - DNA, 60 bp, Artificial
  Synthetic oligonucleotide
ttattaagatacagtgctgctggaggatggtatccaatcatcctgcctcatgagggggta

SEQ ID NO: 478463 - DNA, 57 bp, Artificial
  Synthetic oligonucleotide
ttattaatcacctgtttaaactatcgcgcataaatatctagcttcgtaaccttgaat

SEQ ID NO: 478464 - DNA, 59 bp, Artificial
  Synthetic oligonucleotide
ttattaatggacgcgtactgcgaaacgggcggtgacacattgctagcttgcaaatagtt

SEQ ID NO: 478465 - DNA, 60 bp, Artificial
  Synthetic oligonucleotide
ttattacacacatcttcggtataggatatggtccattcataatcacgaatcaacatttgt

SEQ ID NO: 478466 - DNA, 50 bp, Artificial
  Synthetic oligonucleotide
ttattacaccccatatgccaacatggagcagaggaccctgaaagagaagt

SEQ ID NO: 478467 - DNA, 55 bp, Artificial
  Synthetic oligonucleotide
ttattacaccccatctgtcagcatggaatagaggacaccgacagacaagtgctgg

SEQ ID NO: 478468 - DNA, 52 bp, Artificial
  Synthetic oligonucleotide
ttattacagagaaggaagggatcaactgtggagaggtccagctaagctgatc

SEQ ID NO: 478469 - DNA, 58 bp, Artificial
  Synthetic oligonucleotide
ttattacagagacagcagagaccctatttggaaaggaccagccaaactactctggaaa

SEQ ID NO: 478470 - DNA, 60 bp, Artificial
  Synthetic oligonucleotide
ttattacagctcaccaggacttgcaggagatagttgggcctgatctttatgtttccctta

SEQ ID NO: 478471 - DNA, 50 bp, Artificial
  Synthetic oligonucleotide
ttattacagggaaggcagagatcctgtgtggaaggggcccgccaaactca

SEQ ID NO: 478472 - DNA, 52 bp, Artificial
  Synthetic oligonucleotide
ttattaccaaatctcgtatgatacaattcatgacatccgctcagaacatgtt

SEQ ID NO: 478473 - DNA, 60 bp, Artificial
  Synthetic oligonucleotide
ttattaccacactaccaactagagtgagattagagattattgaggattactatgatgcta

SEQ ID NO: 478474 - DNA, 60 bp, Artificial
  Synthetic oligonucleotide
ttattacctggggttgcacattctattgctattgaactatgtgtaccaggtttccatggc

SEQ ID NO: 478475 - DNA, 58 bp, Artificial
  Synthetic oligonucleotide
ttattacggtttaaggtaaataaaaacagatgtacagtggcacgcatgatggcaacac

SEQ ID NO: 478476 - DNA, 60 bp, Artificial
  Synthetic oligonucleotide
ttattactaacatctaatataaatgtgcatgaggaagctaattacagatacttacacagt

SEQ ID NO: 478477 - DNA, 59 bp, Artificial
  Synthetic oligonucleotide
ttattactgtacacctttggactgaggtcaagatgaccacacaaataattgtgtggtcc

SEQ ID NO: 478478 - DNA, 55 bp, Artificial
  Synthetic oligonucleotide
ttattagagaggggaaaatcgtacacattagcccattgtcaggaagtgctcagca

SEQ ID NO: 478479 - DNA, 60 bp, Artificial
  Synthetic oligonucleotide
ttattagagatgtgccacagcacacaaattggtggaacaaggatggtggacatccttagg

SEQ ID NO: 478480 - DNA, 52 bp, Artificial
  Synthetic oligonucleotide
ttattagaggtatggtacttggggctatatctaatgttgttgtcttacagtc

SEQ ID NO: 478481 - DNA, 54 bp, Artificial
  Synthetic oligonucleotide
ttattagagtgaggcttaacgggaaagtatacgcgaaccccggaaataatctca

SEQ ID NO: 478482 - DNA, 54 bp, Artificial
  Synthetic oligonucleotide
ttattagctatgtcaacgttgacttgccataccccgaggcggttgtgcccttca

SEQ ID NO: 478483 - DNA, 55 bp, Artificial
  Synthetic oligonucleotide
ttattagctccgtccattaccggtaaccacatttcatgtgtgatatcatcaaccg

SEQ ID NO: 478484 - DNA, 60 bp, Artificial
  Synthetic oligonucleotide
ttattaggtggatagcatcatgttgtagcctgccagaagtggagacgctagttgcaaggc

SEQ ID NO: 478485 - DNA, 58 bp, Artificial
  Synthetic oligonucleotide
ttattaggtgtgcatataggcggagcgaaagaggagaatgccaattacttggcccccg

SEQ ID NO: 478486 - DNA, 52 bp, Artificial
  Synthetic oligonucleotide
ttattaggtttttacctacccaggaaaagccaaccaacctcgatctcttgta

SEQ ID NO: 478487 - DNA, 60 bp, Artificial
  Synthetic oligonucleotide
ttattagtacttggctgtataatactacttggacacggccgagtcaaaagtgctatgata

SEQ ID NO: 478488 - DNA, 60 bp, Artificial
  Synthetic oligonucleotide
ttattagtctcccagaattaggtgaatcagtactacgtggatcaagcactgactatctag

SEQ ID NO: 478489 - DNA, 59 bp, Artificial
  Synthetic oligonucleotide
ttattatacccaattcactgacaattctggatacagtcagaccacatggagggtttact

SEQ ID NO: 478490 - DNA, 59 bp, Artificial
  Synthetic oligonucleotide
ttattatagaggccagtgcaattcgtgttacaaccaatcacggcaagaaaggctttcca

SEQ ID NO: 478491 - DNA, 59 bp, Artificial
  Synthetic oligonucleotide
ttattatatcgtaggtcggaggaaatgacattagcattaaatcgagaatataagcctcg

SEQ ID NO: 478492 - DNA, 60 bp, Artificial
  Synthetic oligonucleotide
ttattatattcgccacgtgttcaaacgtgttttgtcattggagaatgatacacatatggt

SEQ ID NO: 478493 - DNA, 60 bp, Artificial
  Synthetic oligonucleotide
ttattatattcgccatgtgttcaaacgcgtattgtcattggagaatgacacgctgatggt

SEQ ID NO: 478494 - DNA, 60 bp, Artificial
  Synthetic oligonucleotide
ttattatattcgccatgtgttcaaacgtgtactgtccgttgataacgagacgctgatagt

SEQ ID NO: 478495 - DNA, 55 bp, Artificial
  Synthetic oligonucleotide
ttattatcaactctcttttgagactcctcactaaggtcgtcatagagtaccttag

SEQ ID NO: 478496 - DNA, 60 bp, Artificial
  Synthetic oligonucleotide
ttattatcctcatacagtccagccacaatcctttctgaccaggtggatagtagaagggca

SEQ ID NO: 478497 - DNA, 60 bp, Artificial
  Synthetic oligonucleotide
ttattatcggactagttaacgtccgctctgatattacatacagccaaggactcgagcgct

SEQ ID NO: 478498 - DNA, 60 bp, Artificial
  Synthetic oligonucleotide
ttattatctaggctagttgttgaacagagtactcatctcagtaactggaagaatgattcc

SEQ ID NO: 478499 - DNA, 60 bp, Artificial
  Synthetic oligonucleotide
ttattatggacagatggggaagatccctggtggaatcagcagatttaaatctgttgtatt

SEQ ID NO: 478500 - DNA, 56 bp, Artificial
  Synthetic oligonucleotide
ttattatggcccctccactaatttatgtccgccagtaataatgggccctgggagcc

SEQ ID NO: 478501 - DNA, 60 bp, Artificial
  Synthetic oligonucleotide
ttattatgttggcaattgcttagctcaaatcaagattcacgagccttatgcgttaatatc

SEQ ID NO: 478502 - DNA, 60 bp, Artificial
  Synthetic oligonucleotide
ttattattaatcgtgacaatctgatcactgaagactacagagtctatagtgattttgatg

SEQ ID NO: 478503 - DNA, 52 bp, Artificial
  Synthetic oligonucleotide
ttattcaaagtaagaataggggaacagctaataaaacccctattaaacacag

SEQ ID NO: 478504 - DNA, 52 bp, Artificial
  Synthetic oligonucleotide
ttattcaatttaacggtttcaaaattaggagctaaacgtccatactcggtaa

SEQ ID NO: 478505 - DNA, 55 bp, Artificial
  Synthetic oligonucleotide
ttattcacaaggtaggagctgacacatgtgcattggttcatgtggatttggaggg

SEQ ID NO: 478506 - DNA, 55 bp, Artificial
  Synthetic oligonucleotide
ttattcacgcggattgcttttttaacgcgctttgcttttaatgtgggacctatat

SEQ ID NO: 478507 - DNA, 60 bp, Artificial
  Synthetic oligonucleotide
ttattcactctattatctgagggtgaggggtctaaacaacatcgtcctgtacatgaatga

SEQ ID NO: 478508 - DNA, 60 bp, Artificial
  Synthetic oligonucleotide
ttattcactgctgcggtcacaagccctctgactacccaacaaaccctcctattcaacatc

SEQ ID NO: 478509 - DNA, 51 bp, Artificial
  Synthetic oligonucleotide
ttattcacttctggtgttgaaacacagagcaagcgagaaagatgggtctac

SEQ ID NO: 478510 - DNA, 55 bp, Artificial
  Synthetic oligonucleotide
ttattcaggaactctttagtgagtctattaacagtttaaaaagacacaaggttga

SEQ ID NO: 478511 - DNA, 54 bp, Artificial
  Synthetic oligonucleotide
ttattcaggaagcacgtcttgctgcacataatgaaaatctaactatgtatgaac

SEQ ID NO: 478512 - DNA, 51 bp, Artificial
  Synthetic oligonucleotide
ttattcagggggttttctaccacctaatcccatagtccggggcacccctcg

SEQ ID NO: 478513 - DNA, 60 bp, Artificial
  Synthetic oligonucleotide
ttattcatgcgctataaatgcaccagcaaacatacagcaatttgaacatattgtccagct

SEQ ID NO: 478514 - DNA, 60 bp, Artificial
  Synthetic oligonucleotide
ttattcatgcgcttttaatgccccagcaaacattcagcagtttgaacatgttgtaccact

SEQ ID NO: 478515 - DNA, 60 bp, Artificial
  Synthetic oligonucleotide
ttattcatgtgcaaattataccacaccatatggagaaatatgtactcagccaactttgta

SEQ ID NO: 478516 - DNA, 58 bp, Artificial
  Synthetic oligonucleotide
ttattcccatcaactaacgtatgttggcatcggtgagcttaatccaagtggtaagcct

SEQ ID NO: 478517 - DNA, 52 bp, Artificial
  Synthetic oligonucleotide
ttattcccgattaggacaagccaataaacaatgagcatgtgtccgtcacgtg

SEQ ID NO: 478518 - DNA, 60 bp, Artificial
  Synthetic oligonucleotide
ttattcctaatgtggagatacccggatatcgtaaagaaagacttgacatatgatccagcg

SEQ ID NO: 478519 - DNA, 53 bp, Artificial
  Synthetic oligonucleotide
ttattccttaaacttagtccagtatttatcgccgcacgggaacgacgtcggtc

SEQ ID NO: 478520 - DNA, 54 bp, Artificial
  Synthetic oligonucleotide
ttattcgaaggaacccctcatatccaagggtattttacaaccactaagaggaca

SEQ ID NO: 478521 - DNA, 55 bp, Artificial
  Synthetic oligonucleotide
ttattcgagaagactagacgccagttaagagaaaacgcggaagacatgggaggtg

SEQ ID NO: 478522 - DNA, 59 bp, Artificial
  Synthetic oligonucleotide
ttattcgagcattgtagggtggcccttgggagtgagccattagctcccaagtcctacta

SEQ ID NO: 478523 - DNA, 60 bp, Artificial
  Synthetic oligonucleotide
ttattcgatatatgcaatgaaggcgggtcaggaagagtggttatgtcacctatagtgtgg

SEQ ID NO: 478524 - DNA, 57 bp, Artificial
  Synthetic oligonucleotide
ttattcgggcatgaagcttccccggctaagacaacctttttgccattctccgctgaa

SEQ ID NO: 478525 - DNA, 58 bp, Artificial
  Synthetic oligonucleotide
ttattcgtcaatgcctccactagagggggagcccggtgacccggacttgacatcagat

SEQ ID NO: 478526 - DNA, 55 bp, Artificial
  Synthetic oligonucleotide
ttattcgtcgcctctttccgatcgtgttctcaaggcttgcattccagtagggacg

SEQ ID NO: 478527 - DNA, 53 bp, Artificial
  Synthetic oligonucleotide
ttattcgtcttcagggagcaaaagcaggggttataccatagacaaccgaacaa

SEQ ID NO: 478528 - DNA, 60 bp, Artificial
  Synthetic oligonucleotide
ttattctaaccctgcttatgaccctgtgcaacgcacagcctcttgggttcaatctcagaa

SEQ ID NO: 478529 - DNA, 59 bp, Artificial
  Synthetic oligonucleotide
ttattctacaattgagggttgggctggcataggacaatatgtgccacccgaagtaatcc

SEQ ID NO: 478530 - DNA, 54 bp, Artificial
  Synthetic oligonucleotide
ttattctaggccaattggggcgtttgcaccaacccggtcaggatttatccgggc

SEQ ID NO: 478531 - DNA, 60 bp, Artificial
  Synthetic oligonucleotide
ttattctcgtaaaggttggctgtggcctgttgacaaatcaggaaaagcaatgcagagtaa

SEQ ID NO: 478532 - DNA, 58 bp, Artificial
  Synthetic oligonucleotide
ttattctctacacttcatgggttatgtcattggttgttggggatcattaccacaagag

SEQ ID NO: 478533 - DNA, 55 bp, Artificial
  Synthetic oligonucleotide
ttattctgataatggtgtctttcgtgtaacttccagggtcatgtttcaacctcgt

SEQ ID NO: 478534 - DNA, 52 bp, Artificial
  Synthetic oligonucleotide
ttattctgatatggacgtaaatcagtacattggtatgccatatgatcgagag

SEQ ID NO: 478535 - DNA, 60 bp, Artificial
  Synthetic oligonucleotide
ttattctgctttgtgtgctacggatatgcgccgcgtgcagatgggacgataccggactgg

SEQ ID NO: 478536 - DNA, 52 bp, Artificial
  Synthetic oligonucleotide
ttattctgtctagtgcataccacggtgaaatgcctccaggttacaaaattct

SEQ ID NO: 478537 - DNA, 53 bp, Artificial
  Synthetic oligonucleotide
ttattctttctctctagcaggtattgcagaaggctttcgcaatcgatacttga

SEQ ID NO: 478538 - DNA, 60 bp, Artificial
  Synthetic oligonucleotide
ttattgaacactgctggttctgcagcattaagggctagacaatcaatgaacaatagaaaa

SEQ ID NO: 478539 - DNA, 55 bp, Artificial
  Synthetic oligonucleotide
ttattgaagctatccgttatctgtctaattcaagacacaaccctagcctcttgaa

SEQ ID NO: 478540 - DNA, 60 bp, Artificial
  Synthetic oligonucleotide
ttattgaagggggatggactggaatgatagatggatggtatggttatcatcaccagaatg

SEQ ID NO: 478541 - DNA, 60 bp, Artificial
  Synthetic oligonucleotide
ttattgaaggggtgacgcaaccgtgtacggcactcgttcgagtgcgtactggagcactca

SEQ ID NO: 478542 - DNA, 58 bp, Artificial
  Synthetic oligonucleotide
ttattgaattaccttattgttaaatgtaattcacctattgccagttggtctgctgcgt

SEQ ID NO: 478543 - DNA, 60 bp, Artificial
  Synthetic oligonucleotide
ttattgagatcaccagacaactccattagttctcctttggagagtgagccaatctttagg

SEQ ID NO: 478544 - DNA, 50 bp, Artificial
  Synthetic oligonucleotide
ttattgatgaagattgttctacatatacaatgtgttgtaatacattccat

SEQ ID NO: 478545 - DNA, 60 bp, Artificial
  Synthetic oligonucleotide
ttattgatggtcacggatatttcctcctcgcacgctgcccagagggcgactctatcacca

SEQ ID NO: 478546 - DNA, 60 bp, Artificial
  Synthetic oligonucleotide
ttattgcataggctggaaagttctagggtcgaagcaactcatgtagttaccaaagctgaa

SEQ ID NO: 478547 - DNA, 50 bp, Artificial
  Synthetic oligonucleotide
ttattgccagaaaaggatagctggactgtcaatgatatacagaagttagt

SEQ ID NO: 478548 - DNA, 55 bp, Artificial
  Synthetic oligonucleotide
ttattgccagaaagaaaccagcttgtttagttagagggcattggagagctccttg

SEQ ID NO: 478549 - DNA, 53 bp, Artificial
  Synthetic oligonucleotide
ttattgccctagtgggtcccataaacgccggcaaagggaaagtgtaattcgaa

SEQ ID NO: 478550 - DNA, 60 bp, Artificial
  Synthetic oligonucleotide
ttattgcctgaccaaatggatgattcttgctgcagagcttaagtgtttcgggaacacagc

SEQ ID NO: 478551 - DNA, 58 bp, Artificial
  Synthetic oligonucleotide
ttattgctgggaggacgaggactggcacccgtagcttttatgtatatcccagctacca

SEQ ID NO: 478552 - DNA, 59 bp, Artificial
  Synthetic oligonucleotide
ttattggagaaaccggcagagaagcagaagtgtcgtggtatatgggtagatggtaggcc

SEQ ID NO: 478553 - DNA, 60 bp, Artificial
  Synthetic oligonucleotide
ttattgggacgattcacaagcatttagaaatatggtgtatgttaggtcattatcagccaa

SEQ ID NO: 478554 - DNA, 60 bp, Artificial
  Synthetic oligonucleotide
ttattgggatgattcgcaagcgtttagaaatatggtatatgttagatcattatcggcaaa

SEQ ID NO: 478555 - DNA, 55 bp, Artificial
  Synthetic oligonucleotide
ttattggtcattggtgccgggcttatcagagaaattgcactgcacgtgtggtcca

SEQ ID NO: 478556 - DNA, 56 bp, Artificial
  Synthetic oligonucleotide
ttattggttgcaaaaggcacaaggtcagaataatggtgttttgtggggtaatcagg

SEQ ID NO: 478557 - DNA, 55 bp, Artificial
  Synthetic oligonucleotide
ttattgtactaaagtgtcttgcctagtggtgaccgctaacaagaattcgcaagcg

SEQ ID NO: 478558 - DNA, 59 bp, Artificial
  Synthetic oligonucleotide
ttattgtaggaatacatagtttaatgagtcataagtacgatcataattatttctcgaac

SEQ ID NO: 478559 - DNA, 55 bp, Artificial
  Synthetic oligonucleotide
ttattgtccgtggctcgaactacaatcagattattgatagcagggttcgtgtaac

SEQ ID NO: 478560 - DNA, 60 bp, Artificial
  Synthetic oligonucleotide
ttattgtcctgctgcaactacccccaagctcataaagcacaggtaccatcacttcaatac

SEQ ID NO: 478561 - DNA, 55 bp, Artificial
  Synthetic oligonucleotide
ttattgtcgaacacaggcccttgtatctgatgtagcgagtgtttcactccattcg

SEQ ID NO: 478562 - DNA, 55 bp, Artificial
  Synthetic oligonucleotide
ttattgtcgttgtgtcaccattcgtcaaaacacaaaattatggaattaacgtacc

SEQ ID NO: 478563 - DNA, 60 bp, Artificial
  Synthetic oligonucleotide
ttattgtgcctcagcaaattatgcatacaccatacatagttagacttgtctccgatagct

SEQ ID NO: 478564 - DNA, 59 bp, Artificial
  Synthetic oligonucleotide
ttattgtgctaccagaacccacctaaatcgagatttgacccaattgtcactcgctaaga

SEQ ID NO: 478565 - DNA, 58 bp, Artificial
  Synthetic oligonucleotide
ttattgtgctccagctgggtttgcaattctaaaatgtagggataaggagttcaaagga

SEQ ID NO: 478566 - DNA, 59 bp, Artificial
  Synthetic oligonucleotide
ttattgtggccagtggatatgatttcgaaagagagggatactcattggttggggtagac

SEQ ID NO: 478567 - DNA, 57 bp, Artificial
  Synthetic oligonucleotide
ttattgtttatttacgtgtttcatccgtgttcatatgttaggtagtggagatatttg

SEQ ID NO: 478568 - DNA, 56 bp, Artificial
  Synthetic oligonucleotide
ttattgtttgtccactttgtcctgcgtgttccgcccttttgtgtctcttcccgcgc

SEQ ID NO: 478569 - DNA, 60 bp, Artificial
  Synthetic oligonucleotide
ttatttaacaacatcctatggttagaacagatgtcccagagatttgctccattgtatgcc

SEQ ID NO: 478570 - DNA, 59 bp, Artificial
  Synthetic oligonucleotide
ttatttaagacgctagtatcagatcacagtagagtagttaacgttggaccaagaaatga

SEQ ID NO: 478571 - DNA, 55 bp, Artificial
  Synthetic oligonucleotide
ttatttaatctcactaggtataccgaaaatagacgctgatacgtatgtcggatcg

SEQ ID NO: 478572 - DNA, 56 bp, Artificial
  Synthetic oligonucleotide
ttatttaccccgtgttcggaatgcaacgaatgcattaccgaatcggagacccacaa

SEQ ID NO: 478573 - DNA, 52 bp, Artificial
  Synthetic oligonucleotide
ttatttactggggtttgaagggctcttatttgggaaagtgcttcctctttag

SEQ ID NO: 478574 - DNA, 55 bp, Artificial
  Synthetic oligonucleotide
ttatttagaacgacattcgatgcctacctacgattagacgaaagtgaacgagata

SEQ ID NO: 478575 - DNA, 57 bp, Artificial
  Synthetic oligonucleotide
ttatttagatctggatattacgcccggtaagtgtggttcgacttgttcatgcacggg

SEQ ID NO: 478576 - DNA, 60 bp, Artificial
  Synthetic oligonucleotide
ttatttatatattgtagtggacatgtatgtcatgtacaacccacgcagcgtctaaacacg

SEQ ID NO: 478577 - DNA, 60 bp, Artificial
  Synthetic oligonucleotide
ttatttcaattccgccctcgctttttcgactgaagatgtcaatgctgcgatgattcccca

SEQ ID NO: 478578 - DNA, 60 bp, Artificial
  Synthetic oligonucleotide
ttatttcagggtgaagtaccttgaatcatctgtcaactcagaacatatcttctcagtgga

SEQ ID NO: 478579 - DNA, 55 bp, Artificial
  Synthetic oligonucleotide
ttatttccactcccgcttcgaaggtgcgtcgaaggctgaacttcgacagcccgtt

SEQ ID NO: 478580 - DNA, 60 bp, Artificial
  Synthetic oligonucleotide
ttatttccgcaagcgcaaccatttcaacaccatgcaacagttggactcacattacgtatt

SEQ ID NO: 478581 - DNA, 60 bp, Artificial
  Synthetic oligonucleotide
ttatttctacaccggagcttagccgctctactattttcgctggcttaactctgactgctg

SEQ ID NO: 478582 - DNA, 54 bp, Artificial
  Synthetic oligonucleotide
ttatttctagttccaaacttttgattaaatctgtctctagcgtttcgtcaaaaa

SEQ ID NO: 478583 - DNA, 59 bp, Artificial
  Synthetic oligonucleotide
ttatttgacaccatagcaatagtagtagctgaagggacagatagaattatagaagcttt

SEQ ID NO: 478584 - DNA, 55 bp, Artificial
  Synthetic oligonucleotide
ttatttgagtcagatctgaggggcactgttataacttacgatcccgagatctgcc

SEQ ID NO: 478585 - DNA, 57 bp, Artificial
  Synthetic oligonucleotide
ttatttgatgttgttcctggggacgacaaccgggacaatatgtccatggattataaa

SEQ ID NO: 478586 - DNA, 55 bp, Artificial
  Synthetic oligonucleotide
ttatttgcggaataatgtctttaagcgttcaaccatctctagacgagatgacggt

SEQ ID NO: 478587 - DNA, 60 bp, Artificial
  Synthetic oligonucleotide
ttatttggtcacgagacatgctgatgttataccggtgcgccggcgaagtgacggcagagg

SEQ ID NO: 478588 - DNA, 60 bp, Artificial
  Synthetic oligonucleotide
ttatttgtgtagcgcatggagctgctccgtccaatagatgacattgtagcccaagtttca

SEQ ID NO: 478589 - DNA, 52 bp, Artificial
  Synthetic oligonucleotide
ttatttgttggggttgctagggcttttatttgggaaagtgcttcttctttgt

SEQ ID NO: 478590 - DNA, 54 bp, Artificial
  Synthetic oligonucleotide
ttattttaaacgcctcgatttcgacacggataatctaaacccgtagaatcagac

SEQ ID NO: 478591 - DNA, 60 bp, Artificial
  Synthetic oligonucleotide
ttattttaagatgcgcactgggaaaagctcgataatgagatcagatgcacctattgacac

SEQ ID NO: 478592 - DNA, 52 bp, Artificial
  Synthetic oligonucleotide
ttattttaatgaatattcgaacgttttagaattttccatcgaaccaaagtta

SEQ ID NO: 478593 - DNA, 53 bp, Artificial
  Synthetic oligonucleotide
ttattttagaggtaaacgtggtggttatttccctaatcgaagatttatctcac

SEQ ID NO: 478594 - DNA, 55 bp, Artificial
  Synthetic oligonucleotide
ttattttcctgtcctgcggtatacccaggttgacaaatgttcggcacccacatct

SEQ ID NO: 478595 - DNA, 56 bp, Artificial
  Synthetic oligonucleotide
ttattttcttggacccgaaaggtaattgagtcaccgatatatcggtgactctatta

SEQ ID NO: 478596 - DNA, 55 bp, Artificial
  Synthetic oligonucleotide
ttcaaaaaatatgaggctgaacaagaagatatgtacccaaaatcacggaaaccga

SEQ ID NO: 478597 - DNA, 57 bp, Artificial
  Synthetic oligonucleotide
ttcaaaaacaagcagaggaccgaaccagtttgtgtgttaatacatggcacacctggt

SEQ ID NO: 478598 - DNA, 58 bp, Artificial
  Synthetic oligonucleotide
ttcaaaaacagtcgaagtacaactacgccgtttcatacggagcgtggacagatcgtga

SEQ ID NO: 478599 - DNA, 54 bp, Artificial
  Synthetic oligonucleotide
ttcaaaaccagcgtcggagaccccagcaccattccctgcccctacggtcccgga

SEQ ID NO: 478600 - DNA, 60 bp, Artificial
  Synthetic oligonucleotide
ttcaaaacccttgtgtgaggtaaactcatggcacattctatctaaggacaatgcgattag

SEQ ID NO: 478601 - DNA, 54 bp, Artificial
  Synthetic oligonucleotide
ttcaaaactctgaggaattgggtatattgggtccttatttatactagaaggtcc

SEQ ID NO: 478602 - DNA, 60 bp, Artificial
  Synthetic oligonucleotide
ttcaaaagatgtcgcaggatttgcaattggaagcattgacaatacaatcggaaacgcagt

SEQ ID NO: 478603 - DNA, 60 bp, Artificial
  Synthetic oligonucleotide
ttcaaaaggcattgaatagacaacgtgcatattacgacagaccagaactgactatctcag

SEQ ID NO: 478604 - DNA, 59 bp, Artificial
  Synthetic oligonucleotide
ttcaaaagtgatgagtccttcacatcccaaactctgacaaccccattgtttccctgctg

SEQ ID NO: 478605 - DNA, 55 bp, Artificial
  Synthetic oligonucleotide
ttcaaaatgaatccaaatcagaaaataacaaccattgggttagtatccttaggat

SEQ ID NO: 478606 - DNA, 54 bp, Artificial
  Synthetic oligonucleotide
ttcaaaattcgctgagtacaagcaatcagttgacggtcgattcacaagcttatc

SEQ ID NO: 478607 - DNA, 60 bp, Artificial
  Synthetic oligonucleotide
ttcaaacagcacttagcgacgacccagcagggatatggccatgtgtagacaggttagcta

SEQ ID NO: 478608 - DNA, 55 bp, Artificial
  Synthetic oligonucleotide
ttcaaaccgaagcgggtttgaactccgttgttatattggctaacgagcgtcacaa

SEQ ID NO: 478609 - DNA, 54 bp, Artificial
  Synthetic oligonucleotide
ttcaaaccttaagaacgtatccttcgaaattggtaggccttctcttgagcgacc

SEQ ID NO: 478610 - DNA, 55 bp, Artificial
  Synthetic oligonucleotide
ttcaaacggtcccaactcaagccatcaaattcagagagcatgagatacctaaagg

SEQ ID NO: 478611 - DNA, 57 bp, Artificial
  Synthetic oligonucleotide
ttcaaactaatcaaagaccgacgtacataagaaacaattgcattccgaattgggctc

SEQ ID NO: 478612 - DNA, 51 bp, Artificial
  Synthetic oligonucleotide
ttcaaactgcctagcctgttctgaagtcagcttcacatcaattattgagat

SEQ ID NO: 478613 - DNA, 59 bp, Artificial
  Synthetic oligonucleotide
ttcaaacttagtgaccaagtattaccgcatataagtacgagttatcttatgtggagcca

SEQ ID NO: 478614 - DNA, 59 bp, Artificial
  Synthetic oligonucleotide
ttcaaacttgacaaaagattggtatgtgtatgtcaacttggaaacagcgatagggtata

SEQ ID NO: 478615 - DNA, 58 bp, Artificial
  Synthetic oligonucleotide
ttcaaacttggctcagctgtcggatgtgaccctgatgtggcgtgggcgaactatggat

SEQ ID NO: 478616 - DNA, 59 bp, Artificial
  Synthetic oligonucleotide
ttcaaagagagcacccattctcacagtcagaggcacaggttcccattcaggtccgactc

SEQ ID NO: 478617 - DNA, 60 bp, Artificial
  Synthetic oligonucleotide
ttcaaagagcatgatcgcactagtgtgattcaagacacagctcactacctcgtagacggg

SEQ ID NO: 478618 - DNA, 55 bp, Artificial
  Synthetic oligonucleotide
ttcaaagagcgcagcacaaggttctccaatgactccaagccggaaacaagctcga

SEQ ID NO: 478619 - DNA, 59 bp, Artificial
  Synthetic oligonucleotide
ttcaaagagggacgtgacatcaaagagttcgtggcgtacgcgtctgggcgtcgcagctt

SEQ ID NO: 478620 - DNA, 60 bp, Artificial
  Synthetic oligonucleotide
ttcaaagagtacttgcgtcacgttgaggaatatgacctgcagtttgtgtttcagctatgc

SEQ ID NO: 478621 - DNA, 54 bp, Artificial
  Synthetic oligonucleotide
ttcaaagattaaatgttctaagaatacttcgaagcattgaaaagggggctaaag

SEQ ID NO: 478622 - DNA, 55 bp, Artificial
  Synthetic oligonucleotide
ttcaaagcgaattacgataattcttgatcctctcgattttgctaacattgtgttg

SEQ ID NO: 478623 - DNA, 58 bp, Artificial
  Synthetic oligonucleotide
ttcaaaggacaatctcacgggcagttccacaggaagtatcaccttcgggccgtctcta

SEQ ID NO: 478624 - DNA, 55 bp, Artificial
  Synthetic oligonucleotide
ttcaaaggacggcatcaatggtagttccaagggaagtatcactttcgggccgtct

SEQ ID NO: 478625 - DNA, 60 bp, Artificial
  Synthetic oligonucleotide
ttcaaagtcattggtggttggaccactgctaactccaagtcacagactaataggcaagtc

SEQ ID NO: 478626 - DNA, 51 bp, Artificial
  Synthetic oligonucleotide
ttcaaagtctcaattatgcaccaaatttgacaatcggtttagggatgcgaa

SEQ ID NO: 478627 - DNA, 56 bp, Artificial
  Synthetic oligonucleotide
ttcaaagtgactgaggggggtgactaggaacaccggggaccagtggagccatggga

SEQ ID NO: 478628 - DNA, 60 bp, Artificial
  Synthetic oligonucleotide
ttcaaataaatcccactccttttcagcagggaggactgatctgtgctatggttcctggag

SEQ ID NO: 478629 - DNA, 57 bp, Artificial
  Synthetic oligonucleotide
ttcaaataaatggcaacttcactgtacaaggccgtgggagtttcactggtcggtgtc

SEQ ID NO: 478630 - DNA, 60 bp, Artificial
  Synthetic oligonucleotide
ttcaaatacacggagtacttctgtagagcgaaagcaacttgtggagtggatctcgagtta

SEQ ID NO: 478631 - DNA, 60 bp, Artificial
  Synthetic oligonucleotide
ttcaaatattacaggtctactactaacaagagatggtggtcagaacagtagtgctaatga

SEQ ID NO: 478632 - DNA, 57 bp, Artificial
  Synthetic oligonucleotide
ttcaaatcagggattgtaagctgctatttcttacctccccaaattacctatacaaca

SEQ ID NO: 478633 - DNA, 55 bp, Artificial
  Synthetic oligonucleotide
ttcaaatccaggtcgttttctatgtctcgatggacaaaaccttaaatcaataccc

SEQ ID NO: 478634 - DNA, 53 bp, Artificial
  Synthetic oligonucleotide
ttcaaatcgactataaatacttggtccctacgtttttaaattaaagcaatgtg

SEQ ID NO: 478635 - DNA, 55 bp, Artificial
  Synthetic oligonucleotide
ttcaaatctcactttccataacagatagcaaacttggtcattagttcttaatccg

SEQ ID NO: 478636 - DNA, 57 bp, Artificial
  Synthetic oligonucleotide
ttcaaattaaggaactccttgacctaaaagtcatagaacccagcaaatctcaacaca

SEQ ID NO: 478637 - DNA, 55 bp, Artificial
  Synthetic oligonucleotide
ttcaacaacgatgcttatcggtctccttggccgcgcagcggggtcgctcctccac

SEQ ID NO: 478638 - DNA, 58 bp, Artificial
  Synthetic oligonucleotide
ttcaacaacgcaagtggacacgatacttgaaaggaatgtaaccgtcacgcactcagtt

SEQ ID NO: 478639 - DNA, 58 bp, Artificial
  Synthetic oligonucleotide
ttcaacaaggttgttgaccgcttgatttaggtccctcaaccgcttcaaatcactatca

SEQ ID NO: 478640 - DNA, 55 bp, Artificial
  Synthetic oligonucleotide
ttcaacacgcccggcttacccgtgtgtcaagaccacctggagttctgggaagcgg

SEQ ID NO: 478641 - DNA, 60 bp, Artificial
  Synthetic oligonucleotide
ttcaacacgcgcaagcagcctctcttcgctcacatccgtaggcgaggggagtcacgggtg

SEQ ID NO: 478642 - DNA, 55 bp, Artificial
  Synthetic oligonucleotide
ttcaacactgagtcaatatactataaaccacgcggattgtggtgggacggatacg

SEQ ID NO: 478643 - DNA, 58 bp, Artificial
  Synthetic oligonucleotide
ttcaacagaatctcacgcccaaaaaacaacgatgtctgcccacctgaccaatttagcc

SEQ ID NO: 478644 - DNA, 58 bp, Artificial
  Synthetic oligonucleotide
ttcaacagatgacgtatcccctcctcaatactgttgaagtcaaaaggacctgtgaacc

SEQ ID NO: 478645 - DNA, 57 bp, Artificial
  Synthetic oligonucleotide
ttcaacaggcccaatgaaagaccccctctacatgatggatggtacattgattggaaa

SEQ ID NO: 478646 - DNA, 60 bp, Artificial
  Synthetic oligonucleotide
ttcaacagtctatatgcatctccacaactcgaggggttttcagctgaatctagaaaattg

SEQ ID NO: 478647 - DNA, 55 bp, Artificial
  Synthetic oligonucleotide
ttcaacagtgttccaattgttgaagtactcagcccagcacaaactactgtctcaa

SEQ ID NO: 478648 - DNA, 55 bp, Artificial
  Synthetic oligonucleotide
ttcaacatcctatctctgaggacatccccaactttccgtgcatcttctgcacgag

SEQ ID NO: 478649 - DNA, 58 bp, Artificial
  Synthetic oligonucleotide
ttcaacatctccggtgatctccttccaacccgatccgttcatacttataggtcttggc

SEQ ID NO: 478650 - DNA, 59 bp, Artificial
  Synthetic oligonucleotide
ttcaacatctttcgaaaagtcaactcaagcgaggtggattaactaagaatgttctcaca

SEQ ID NO: 478651 - DNA, 55 bp, Artificial
  Synthetic oligonucleotide
ttcaacatggaagctaaggtgatggaacctgcagtaccctacatctgttcgaagt

SEQ ID NO: 478652 - DNA, 55 bp, Artificial
  Synthetic oligonucleotide
ttcaacatgtcactgttgagctccatccctatggtctctgaacagcagcactgca

SEQ ID NO: 478653 - DNA, 60 bp, Artificial
  Synthetic oligonucleotide
ttcaacatgtttgataatgagcccagtactgctactgtgaagaacgatctacgtgatcgt

SEQ ID NO: 478654 - DNA, 60 bp, Artificial
  Synthetic oligonucleotide
ttcaaccacaaatggtacgcgcagtcagacctgtgcgacgttaaccttgtgcaattcact

SEQ ID NO: 478655 - DNA, 53 bp, Artificial
  Synthetic oligonucleotide
ttcaaccacagggaaatagccgatctcaaccaattgacttctcggcttattac

SEQ ID NO: 478656 - DNA, 55 bp, Artificial
  Synthetic oligonucleotide
ttcaaccacttcctcacaagatttaagcaaaatggtcacaattacaaagttacgg

SEQ ID NO: 478657 - DNA, 56 bp, Artificial
  Synthetic oligonucleotide
ttcaaccatcagccaccctttgcttgatgactacattgactattgcatctctagta

SEQ ID NO: 478658 - DNA, 53 bp, Artificial
  Synthetic oligonucleotide
ttcaaccatgaaatgtttaaccggaattatcgcaccccttttaaattacgcca

SEQ ID NO: 478659 - DNA, 60 bp, Artificial
  Synthetic oligonucleotide
ttcaacctagtcatgtctagtgatataacctttgatacaataatagtgtatttagagttc

SEQ ID NO: 478660 - DNA, 59 bp, Artificial
  Synthetic oligonucleotide
ttcaacctagtttctcctcactttggatcgatgatcatgagaagtaccggcgcaaaatt

SEQ ID NO: 478661 - DNA, 54 bp, Artificial
  Synthetic oligonucleotide
ttcaacctctactacagccaacgtagaaaactttggtacaggtgtagccccttg

SEQ ID NO: 478662 - DNA, 60 bp, Artificial
  Synthetic oligonucleotide
ttcaacctggtcgtgatgcattccgtgcattccctattagttctattactaatactctca

SEQ ID NO: 478663 - DNA, 60 bp, Artificial
  Synthetic oligonucleotide
ttcaaccttcaatgctattgacaacaataccgttccatctgtcggagtcagcgtaactat

SEQ ID NO: 478664 - DNA, 50 bp, Artificial
  Synthetic oligonucleotide
ttcaacgcattccggactgctacaatccatagctaaaagcgtcaaaatgc

SEQ ID NO: 478665 - DNA, 50 bp, Artificial
  Synthetic oligonucleotide
ttcaacgccaacggcgatatggagaccatcttcgagttcttccagcctgc

SEQ ID NO: 478666 - DNA, 60 bp, Artificial
  Synthetic oligonucleotide
ttcaacgccggaggactgactctcatccagtggatgcattgagtggattgactgtcaggg

SEQ ID NO: 478667 - DNA, 59 bp, Artificial
  Synthetic oligonucleotide
ttcaacgcgttgcttcccgatttaatagccggcgttcatcagaatgcggatcctgtcgt

SEQ ID NO: 478668 - DNA, 59 bp, Artificial
  Synthetic oligonucleotide
ttcaacgctctgataaggaatggtttcatgactggcgcaataacgagtttcctaggaaa

SEQ ID NO: 478669 - DNA, 60 bp, Artificial
  Synthetic oligonucleotide
ttcaacggaggaaagattagtgtgcagtacaacctgagccacagctatgctgtggatgca

SEQ ID NO: 478670 - DNA, 60 bp, Artificial
  Synthetic oligonucleotide
ttcaacggttgtttgtcttggagatcctttgcaggctggttacttcagtcagagggatga

SEQ ID NO: 478671 - DNA, 50 bp, Artificial
  Synthetic oligonucleotide
ttcaacgtatgttgagccaatataacgacggggtagtttagaccccgtgt

SEQ ID NO: 478672 - DNA, 59 bp, Artificial
  Synthetic oligonucleotide
ttcaacgtctcttttttaatgagaacgtcaacaacatgcctcagacaatcaaccgccaa

SEQ ID NO: 478673 - DNA, 55 bp, Artificial
  Synthetic oligonucleotide
ttcaactacaaacgcctcaatgacaatactgaaaaggatcagtattcactacccg

SEQ ID NO: 478674 - DNA, 60 bp, Artificial
  Synthetic oligonucleotide
ttcaactacaaattatgactcagtgaatatgacatcttattgcgatttttacattatacc

SEQ ID NO: 478675 - DNA, 59 bp, Artificial
  Synthetic oligonucleotide
ttcaactactgcttggaggcccgttaggccaatatacattaatgtcattcaggcccact

SEQ ID NO: 478676 - DNA, 56 bp, Artificial
  Synthetic oligonucleotide
ttcaactagcatttttacttccaacgaacgtggtgatgctaggattttaactggct

SEQ ID NO: 478677 - DNA, 60 bp, Artificial
  Synthetic oligonucleotide
ttcaactcactccctagtaatgtcactgacgcatttcttagggatggattcaatgctgag

SEQ ID NO: 478678 - DNA, 54 bp, Artificial
  Synthetic oligonucleotide
ttcaactcggagagtaccactgggactcccttggcgactccctcccttccgacg

SEQ ID NO: 478679 - DNA, 50 bp, Artificial
  Synthetic oligonucleotide
ttcaactctgaccgtcgtccttccgacggttcaattcaccggcgtaatta

SEQ ID NO: 478680 - DNA, 60 bp, Artificial
  Synthetic oligonucleotide
ttcaactgcattgacgtggatgatttggccggggttgattcacgtgctgagctgatgggt

SEQ ID NO: 478681 - DNA, 60 bp, Artificial
  Synthetic oligonucleotide
ttcaactgccaaaaacagctcatgatatagactttgggcacaaaaccagattcgggccat

SEQ ID NO: 478682 - DNA, 58 bp, Artificial
  Synthetic oligonucleotide
ttcaactgggattcagactgagctcggttgccattaacagtaacctactaactaaatc

SEQ ID NO: 478683 - DNA, 55 bp, Artificial
  Synthetic oligonucleotide
ttcaacttcacgccgtacttacattctggtgaaacttttaacttagatcttatcc

SEQ ID NO: 478684 - DNA, 54 bp, Artificial
  Synthetic oligonucleotide
ttcaacttgccatgctatgacattaaccccctagggtagctctgagcaacgaca

SEQ ID NO: 478685 - DNA, 55 bp, Artificial
  Synthetic oligonucleotide
ttcaacttggagacgataattctaaccgtatttcaattagaaacgccctaggcac

SEQ ID NO: 478686 - DNA, 60 bp, Artificial
  Synthetic oligonucleotide
ttcaacttgggaaccaaaatcagcctgaaacatgcaatcagagcgtcattacttacgaaa

SEQ ID NO: 478687 - DNA, 53 bp, Artificial
  Synthetic oligonucleotide
ttcaactttctcaggtcctaccgcccgctcctcctacttcggaccaacaaccg

SEQ ID NO: 478688 - DNA, 54 bp, Artificial
  Synthetic oligonucleotide
ttcaagaacaacaaactcctgaagcaagccagtagtttcatagttctgagggtt

SEQ ID NO: 478689 - DNA, 60 bp, Artificial
  Synthetic oligonucleotide
ttcaagaacgcgtcgaatctgtctctctcaccctcgcttatggagttgccactatggctt

SEQ ID NO: 478690 - DNA, 59 bp, Artificial
  Synthetic oligonucleotide
ttcaagaatgaagcgccatatgatggccaactggagcatatcatctcccagatggcata

SEQ ID NO: 478691 - DNA, 58 bp, Artificial
  Synthetic oligonucleotide
ttcaagaatgctgtggcgaagccatcccagtattttaaacccgcttatcatttcgaaa

SEQ ID NO: 478692 - DNA, 60 bp, Artificial
  Synthetic oligonucleotide
ttcaagaatgggttgaaacctcagataaatctctcgatgtcgatccatgtcgaatcgatc

SEQ ID NO: 478693 - DNA, 59 bp, Artificial
  Synthetic oligonucleotide
ttcaagacgtatcaaacgacgtgagagaaacgtatgcgcgaatgaatgctaaagttaaa

SEQ ID NO: 478694 - DNA, 59 bp, Artificial
  Synthetic oligonucleotide
ttcaagactattgccaaacaatacacttcaataaacctgagatagattcaataaccaaa

SEQ ID NO: 478695 - DNA, 60 bp, Artificial
  Synthetic oligonucleotide
ttcaagagcaaacaccgtattgaaccagtatgtgttttgatacatggcagtccgggcacc

SEQ ID NO: 478696 - DNA, 51 bp, Artificial
  Synthetic oligonucleotide
ttcaagagccgttgcatcgtttatcacaataccgaactttgtaaccgtact

SEQ ID NO: 478697 - DNA, 60 bp, Artificial
  Synthetic oligonucleotide
ttcaagaggcagcttgcagatgtcatctcacgtcagaagatggatgagaaacctgtggat

SEQ ID NO: 478698 - DNA, 54 bp, Artificial
  Synthetic oligonucleotide
ttcaagaggggtctccgggaatttccggagtccctcttggaagtccatggtgag

SEQ ID NO: 478699 - DNA, 55 bp, Artificial
  Synthetic oligonucleotide
ttcaagagtttttagatttttttgaccattcaaaaggtagatcaggtctcgtgag

SEQ ID NO: 478700 - DNA, 60 bp, Artificial
  Synthetic oligonucleotide
ttcaagatcaagaagcccataatgattttcagtgacatgatagacccttcgctgatagct

SEQ ID NO: 478701 - DNA, 60 bp, Artificial
  Synthetic oligonucleotide
ttcaagatcgcatttttttgagcggggtgatccatgtttgatgcagttattaatgcgttg

SEQ ID NO: 478702 - DNA, 60 bp, Artificial
  Synthetic oligonucleotide
ttcaagatgaagagacggaaggtgcagtaagaagattcattgcagagatgagacaacgtg

SEQ ID NO: 478703 - DNA, 55 bp, Artificial
  Synthetic oligonucleotide
ttcaagatgcggtccgcccgtacgtctgcgctcatctgcgcttacgcgggcgacc

SEQ ID NO: 478704 - DNA, 54 bp, Artificial
  Synthetic oligonucleotide
ttcaagcaatatgaattcaactcccccccaaacaaccaagtgatgctgtgtgaa

SEQ ID NO: 478705 - DNA, 55 bp, Artificial
  Synthetic oligonucleotide
ttcaagcaatatgagtgcgatttccccgcaaacaaccaagtaatgccgtgtgaac

SEQ ID NO: 478706 - DNA, 59 bp, Artificial
  Synthetic oligonucleotide
ttcaagcaatgtccaaaagatctagatcgttagattcagcggctttttactatagagtt

SEQ ID NO: 478707 - DNA, 60 bp, Artificial
  Synthetic oligonucleotide
ttcaagcacccgttgggtatgttttggcacatgcgggtctcccacttaattgatgagatg

SEQ ID NO: 478708 - DNA, 57 bp, Artificial
  Synthetic oligonucleotide
ttcaagcaggagattcaagctaattttggtataaatctaaatatcaaggataaaaaa

SEQ ID NO: 478709 - DNA, 59 bp, Artificial
  Synthetic oligonucleotide
ttcaagcatgtacacacctacacttctaacgtctcccgcgccaaaaatctcatttcgaa

SEQ ID NO: 478710 - DNA, 55 bp, Artificial
  Synthetic oligonucleotide
ttcaagccaaaagggaaactgtgggctgatgataacaggagtgtggactacaatg

SEQ ID NO: 478711 - DNA, 55 bp, Artificial
  Synthetic oligonucleotide
ttcaagcccacgtgtgcactgccggtcgagcgcgagaacggtgtccccagtccgt

SEQ ID NO: 478712 - DNA, 59 bp, Artificial
  Synthetic oligonucleotide
ttcaagcccttcattcgtgatgggtttgatgtcacaccttggaaacagttacacttgga

SEQ ID NO: 478713 - DNA, 55 bp, Artificial
  Synthetic oligonucleotide
ttcaagccgtcccgtgacgatagacttgaggcagcagccttgggtatagctccgg

SEQ ID NO: 478714 - DNA, 59 bp, Artificial
  Synthetic oligonucleotide
ttcaagcgagtgcataatggaaaacgttccgactggagacgtggacctagcagtcctta

SEQ ID NO: 478715 - DNA, 60 bp, Artificial
  Synthetic oligonucleotide
ttcaagcgctactcgacaccggggcagacatcactgtcctccctgcctgcttgtgccctc

SEQ ID NO: 478716 - DNA, 58 bp, Artificial
  Synthetic oligonucleotide
ttcaagcgctcctaagagtttggatgttagcctgtttgttaaaatgaccaatgctaag

SEQ ID NO: 478717 - DNA, 55 bp, Artificial
  Synthetic oligonucleotide
ttcaagcgttcctatgccgtagccctctgtttggacttcgacgcgcagcctgagg

SEQ ID NO: 478718 - DNA, 60 bp, Artificial
  Synthetic oligonucleotide
ttcaagctaccgtgactggaggtcagtatgcaagcaaggagcaagcaatagtcaagaggt

SEQ ID NO: 478719 - DNA, 54 bp, Artificial
  Synthetic oligonucleotide
ttcaagctacggccaatttggtttggaatttcgaagctaaattgttcaaaaaga

SEQ ID NO: 478720 - DNA, 59 bp, Artificial
  Synthetic oligonucleotide
ttcaagctatacgctgatgagttgtaactcctcagtcgttacccaggcttgtccaaagg

SEQ ID NO: 478721 - DNA, 55 bp, Artificial
  Synthetic oligonucleotide
ttcaagctcacataccaaaacaaagtggtcaaagttcaacgaccaactccaaaag

SEQ ID NO: 478722 - DNA, 52 bp, Artificial
  Synthetic oligonucleotide
ttcaagctcatctccggcactaataccgaagtgaggaatgtccaggtccgtg

SEQ ID NO: 478723 - DNA, 60 bp, Artificial
  Synthetic oligonucleotide
ttcaagctcattgggacatgatgttaagatctggtaatactgtacagcataaaggattaa

SEQ ID NO: 478724 - DNA, 54 bp, Artificial
  Synthetic oligonucleotide
ttcaagctcttcctacatttgaagagctgttcggacaatattccgcatgttacg

SEQ ID NO: 478725 - DNA, 58 bp, Artificial
  Synthetic oligonucleotide
ttcaaggagataatcaggcgattgcagttacaacaagagttcctagatcattacctag

SEQ ID NO: 478726 - DNA, 60 bp, Artificial
  Synthetic oligonucleotide
ttcaaggagatgaacttgagtgtaggacttggcgaaatatgtgttaaagatgacatatct

SEQ ID NO: 478727 - DNA, 60 bp, Artificial
  Synthetic oligonucleotide
ttcaaggatccagtcggcattggtatggatgcttctagatttgaccagcacatatctaaa

SEQ ID NO: 478728 - DNA, 60 bp, Artificial
  Synthetic oligonucleotide
ttcaaggatgaaaggggattctacagatctttaaagggcgcttgcaagctgacattgtgt

SEQ ID NO: 478729 - DNA, 57 bp, Artificial
  Synthetic oligonucleotide
ttcaaggccaactcgggtgttgctgactcggccttcaagtgttaccttgctgcctcc

SEQ ID NO: 478730 - DNA, 60 bp, Artificial
  Synthetic oligonucleotide
ttcaaggcgctgtgtgctgcgcgagacatgacttacgagcagttgatcatccattggatg

SEQ ID NO: 478731 - DNA, 60 bp, Artificial
  Synthetic oligonucleotide
ttcaagggtgtctccgtccttgtcgacgtacgacttgacatctgagctcgatttagctcc

SEQ ID NO: 478732 - DNA, 50 bp, Artificial
  Synthetic oligonucleotide
ttcaagggttaagatgcacggtaattcacgtgatggctttgtaaaacgtc

SEQ ID NO: 478733 - DNA, 51 bp, Artificial
  Synthetic oligonucleotide
ttcaaggtcgtttataaagttaaaacgactgcgttttaagggaactctgaa

SEQ ID NO: 478734 - DNA, 60 bp, Artificial
  Synthetic oligonucleotide
ttcaaggttcgaatcggttgcttggtcagcaagtgcatgccatgatggcatgagctggct

SEQ ID NO: 478735 - DNA, 55 bp, Artificial
  Synthetic oligonucleotide
ttcaagtacagctagctggaggtgttttagttagggcacaaatagaagagcggat

SEQ ID NO: 478736 - DNA, 60 bp, Artificial
  Synthetic oligonucleotide
ttcaagtcaatccgtcgtcgacgtatggctctcttcttggcaatcctgtgctgtggtttg

SEQ ID NO: 478737 - DNA, 57 bp, Artificial
  Synthetic oligonucleotide
ttcaagtcccgaggctaggagaaaatttttgctactatgaccaccgataacagtgtc

SEQ ID NO: 478738 - DNA, 52 bp, Artificial
  Synthetic oligonucleotide
ttcaagtgaccgggcgtagcaactacgcccgttacagtgcgtggaagtatgg

SEQ ID NO: 478739 - DNA, 56 bp, Artificial
  Synthetic oligonucleotide
ttcaagttcgagcagcttggggttttgggttcattgttcatttacccgctggttga

SEQ ID NO: 478740 - DNA, 51 bp, Artificial
  Synthetic oligonucleotide
ttcaagttgacatcgcggagttccttgagtacgggccgcactacctgatga

SEQ ID NO: 478741 - DNA, 55 bp, Artificial
  Synthetic oligonucleotide
ttcaagttggaacttctgattgggtggagccacctcttttccgcttacctctggg

SEQ ID NO: 478742 - DNA, 51 bp, Artificial
  Synthetic oligonucleotide
ttcaagttggaggatccccttgtactctgcaagggctcagtcaagcgagca

SEQ ID NO: 478743 - DNA, 55 bp, Artificial
  Synthetic oligonucleotide
ttcaagttggaggttctgacgttcttgatataacagccgatccaactacagcacc

SEQ ID NO: 478744 - DNA, 55 bp, Artificial
  Synthetic oligonucleotide
ttcaagttttccatgtcgaagaaaactgttccgcctatcgttaaggctcaatacg

SEQ ID NO: 478745 - DNA, 55 bp, Artificial
  Synthetic oligonucleotide
ttcaataaattcgaggcattcacatcaaatggatggggtgctgtgaattcagggg

SEQ ID NO: 478746 - DNA, 60 bp, Artificial
  Synthetic oligonucleotide
ttcaataacatccgaggatgctgagaagcacccgtggcaggtgttagtgaatatcaaagg

SEQ ID NO: 478747 - DNA, 58 bp, Artificial
  Synthetic oligonucleotide
ttcaataccgcccctgacgttcgtagggatctttacattagcaatgttcacattacag

SEQ ID NO: 478748 - DNA, 55 bp, Artificial
  Synthetic oligonucleotide
ttcaataccttggcaagtacttccgtcgcgaggaataccctcttgacgaggggac

SEQ ID NO: 478749 - DNA, 55 bp, Artificial
  Synthetic oligonucleotide
ttcaatacgcaactaggtctattaatagggttgtctctgccgaataaatcagagc

SEQ ID NO: 478750 - DNA, 55 bp, Artificial
  Synthetic oligonucleotide
ttcaatagaattgcctatggaatctggacatcatattacaatacggggagaacag

SEQ ID NO: 478751 - DNA, 55 bp, Artificial
  Synthetic oligonucleotide
ttcaatagacccgagtacgatgccaggtgtctggagcgtttcatcagggcatgcg

SEQ ID NO: 478752 - DNA, 60 bp, Artificial
  Synthetic oligonucleotide
ttcaatagatgcaggcctacttgctaaggcggggaaggagtacggtctgacaatgacacc

SEQ ID NO: 478753 - DNA, 60 bp, Artificial
  Synthetic oligonucleotide
ttcaatagtgctttgcagtgagtaccgtcagagtccaggagccgcagtcctaattgctgg

SEQ ID NO: 478754 - DNA, 60 bp, Artificial
  Synthetic oligonucleotide
ttcaatataaagatggatctcatgccgggtatgctacctgcgtgaagctttacaatggaa

SEQ ID NO: 478755 - DNA, 60 bp, Artificial
  Synthetic oligonucleotide
ttcaatatatcgagggcctgtgatttggatccacagttgagtgcctcggcatacgcgtcg

SEQ ID NO: 478756 - DNA, 60 bp, Artificial
  Synthetic oligonucleotide
ttcaatatatgaggttagttcaggctgagataagttatgtgagggagcatttgattaaaa

SEQ ID NO: 478757 - DNA, 59 bp, Artificial
  Synthetic oligonucleotide
ttcaatatcgcgaacacgagtgaacggactgtatgggttaccagctgcaaaacctaatg

SEQ ID NO: 478758 - DNA, 60 bp, Artificial
  Synthetic oligonucleotide
ttcaatatgaggtcagcgggctcctcatcgaaccgatccgccacgtacagtcgctacccc

SEQ ID NO: 478759 - DNA, 52 bp, Artificial
  Synthetic oligonucleotide
ttcaatcaagggtaccgtacccctacttggccactgttgacttcatagcagc

SEQ ID NO: 478760 - DNA, 60 bp, Artificial
  Synthetic oligonucleotide
ttcaatcaagtggagaagcgcataaacatgctcgcagataggatagatgatgctgtgaca

SEQ ID NO: 478761 - DNA, 60 bp, Artificial
  Synthetic oligonucleotide
ttcaatcacaaagtcccacgcttctatgttcctgagcatcgcgtaattatgactctggcg

SEQ ID NO: 478762 - DNA, 52 bp, Artificial
  Synthetic oligonucleotide
ttcaatcacgctcactcaacgaattacaacgaccgggccctttgcgatattg

SEQ ID NO: 478763 - DNA, 55 bp, Artificial
  Synthetic oligonucleotide
ttcaatcaggttcgcatgaacaactagaacccaatatcgcaccttcaacggcaac

SEQ ID NO: 478764 - DNA, 55 bp, Artificial
  Synthetic oligonucleotide
ttcaatcagtagtctccgtgaacaagtctgaagtacgtaacgagctcaacggatg

SEQ ID NO: 478765 - DNA, 60 bp, Artificial
  Synthetic oligonucleotide
ttcaatccaaagcaacccatgcactggatagtgcttacccagatggttttcggagctact

SEQ ID NO: 478766 - DNA, 57 bp, Artificial
  Synthetic oligonucleotide
ttcaatccaaatcccattcaaccccgcgctttttgccgagtgcgtttgtctcaacga

SEQ ID NO: 478767 - DNA, 60 bp, Artificial
  Synthetic oligonucleotide
ttcaatccagcgaggagacgtgcagattgcgttcttatcaacgtacgcaaactgtcacct

SEQ ID NO: 478768 - DNA, 54 bp, Artificial
  Synthetic oligonucleotide
ttcaatcctaaacctgggacagaagaagtacaccaaaacaacgtattggtggga

SEQ ID NO: 478769 - DNA, 55 bp, Artificial
  Synthetic oligonucleotide
ttcaatcggatgtgaacatggacggttctgtcccgaaaatagaaggagtattctc

SEQ ID NO: 478770 - DNA, 55 bp, Artificial
  Synthetic oligonucleotide
ttcaatctattctacagtagtgagttccttagtactggcaatcatgatagctggt

SEQ ID NO: 478771 - DNA, 60 bp, Artificial
  Synthetic oligonucleotide
ttcaatctccatgtgcacttccatggtaccatccaactaaagaaattttcattccaggtg

SEQ ID NO: 478772 - DNA, 60 bp, Artificial
  Synthetic oligonucleotide
ttcaatctcggaccagcgggcaccggtcgagaggcagagcatcacaatgagccacagatc

SEQ ID NO: 478773 - DNA, 58 bp, Artificial
  Synthetic oligonucleotide
ttcaatctgcttgatcaaagaataatatggcagaactggtatgcattcacatcctcaa

SEQ ID NO: 478774 - DNA, 55 bp, Artificial
  Synthetic oligonucleotide
ttcaatcttgcaggatatgagaaatacaataatggcatctaagaccgtaggaacc

SEQ ID NO: 478775 - DNA, 57 bp, Artificial
  Synthetic oligonucleotide
ttcaatgaaccggtatgtgaagttgtaacgaaacgtcacgtatgaaagagacataaa

SEQ ID NO: 478776 - DNA, 58 bp, Artificial
  Synthetic oligonucleotide
ttcaatgacgcaattgtattttcaagtataacggtccccgattgcacgaaatatctac

SEQ ID NO: 478777 - DNA, 60 bp, Artificial
  Synthetic oligonucleotide
ttcaatgagcaatgttccaaatccaatgagcattgttgcatttaactgacacgacaaatt

SEQ ID NO: 478778 - DNA, 60 bp, Artificial
  Synthetic oligonucleotide
ttcaatgagcacgaactgtggagaaatgtatggtccaggtctaacgacggaatggaccta

SEQ ID NO: 478779 - DNA, 51 bp, Artificial
  Synthetic oligonucleotide
ttcaatgattacatgcatagaggccaaagagctactgattacacagccata

SEQ ID NO: 478780 - DNA, 57 bp, Artificial
  Synthetic oligonucleotide
ttcaatgattggcatgcacatctcaggtgatccaaccatattcatttgtagcaatgc

SEQ ID NO: 478781 - DNA, 58 bp, Artificial
  Synthetic oligonucleotide
ttcaatgcaaaccggtgccagttttcattacatcgtgaatctttatgttcttcgaacg

SEQ ID NO: 478782 - DNA, 60 bp, Artificial
  Synthetic oligonucleotide
ttcaatgcactgcaagagaacctaatggacatttatgagtcaggtcgagatgacctagag

SEQ ID NO: 478783 - DNA, 59 bp, Artificial
  Synthetic oligonucleotide
ttcaatggaaagagtgtttggaacatcagcactttgttgtgaaagcagaataaacttgt

SEQ ID NO: 478784 - DNA, 51 bp, Artificial
  Synthetic oligonucleotide
ttcaatggcctctcttaaggctgcggaaggacattttggtttaatagcagg

SEQ ID NO: 478785 - DNA, 58 bp, Artificial
  Synthetic oligonucleotide
ttcaatggtcccaagaccctacaatgctatacaataagatggagtttgaaccctttca

SEQ ID NO: 478786 - DNA, 59 bp, Artificial
  Synthetic oligonucleotide
ttcaatggtctcaagaccccacaatgctatataataggatggagtttgaaccgttccaa

SEQ ID NO: 478787 - DNA, 56 bp, Artificial
  Synthetic oligonucleotide
ttcaatgtgacaccactccaggttttactcaaaagagtggaaggaaggatgatgag

SEQ ID NO: 478788 - DNA, 60 bp, Artificial
  Synthetic oligonucleotide
ttcaatgtttactcatataagaatcctttgtggcatggactacgagctgcgattcttaac

SEQ ID NO: 478789 - DNA, 60 bp, Artificial
  Synthetic oligonucleotide
ttcaattacaataaggccactaagaggcttacagttctcgggaaagatgcaggtgcattg

SEQ ID NO: 478790 - DNA, 57 bp, Artificial
  Synthetic oligonucleotide
ttcaattataaatgacgtgtctttaattcgttttaaccaatacatgtctggattagc

SEQ ID NO: 478791 - DNA, 60 bp, Artificial
  Synthetic oligonucleotide
ttcaattcgatgagggcttgtggaatgtctgtgcagatgaagtgcaacgaacttacctat

SEQ ID NO: 478792 - DNA, 60 bp, Artificial
  Synthetic oligonucleotide
ttcaattcttgaatgggacaggagcaatgaagccacacatagagctgaagcaatatgtgc

SEQ ID NO: 478793 - DNA, 53 bp, Artificial
  Synthetic oligonucleotide
ttcaattgaagggtaaaagaactctttctcaggttaagtcgttgttcggtgac

SEQ ID NO: 478794 - DNA, 55 bp, Artificial
  Synthetic oligonucleotide
ttcaattgagcgctattttggagtccgcgaaatgggttaaccgcattttttgacg

SEQ ID NO: 478795 - DNA, 60 bp, Artificial
  Synthetic oligonucleotide
ttcaattgcataaacaagagaacctacaccgcgaccttcgtgacgattcagtgtcacgag

SEQ ID NO: 478796 - DNA, 54 bp, Artificial
  Synthetic oligonucleotide
ttcaattggagccccgagtaaaatttccaatactccgcccaaagtgaattttgc

SEQ ID NO: 478797 - DNA, 57 bp, Artificial
  Synthetic oligonucleotide
ttcaattgggaaagtcgctgtggaaggtggaagatattacgaacatgcaccaatcga

SEQ ID NO: 478798 - DNA, 55 bp, Artificial
  Synthetic oligonucleotide
ttcaatttattaatcgtatgttaagtactcaaagacatctaattgtgttacgtaa

SEQ ID NO: 478799 - DNA, 55 bp, Artificial
  Synthetic oligonucleotide
ttcaatttgagctgtggttgagttggtgggatcaacactacagcagattgccgat

SEQ ID NO: 478800 - DNA, 54 bp, Artificial
  Synthetic oligonucleotide
ttcaatttgctcgcgaatatggcttaagtactacatacttcgaaaagttgtcca

SEQ ID NO: 478801 - DNA, 60 bp, Artificial
  Synthetic oligonucleotide
ttcacaaacatccgtcgctaagcagacgaatgagaacgacacttcaatcaaggaatcggc

SEQ ID NO: 478802 - DNA, 60 bp, Artificial
  Synthetic oligonucleotide
ttcacaaaccaaacattttcccttactcagcgtcattcacactgaacagatcacaaccag

SEQ ID NO: 478803 - DNA, 56 bp, Artificial
  Synthetic oligonucleotide
ttcacaaatagaagccgatcgtgaaaaacgtaaacagttaaatagcgtgatgactg

SEQ ID NO: 478804 - DNA, 58 bp, Artificial
  Synthetic oligonucleotide
ttcacaaattgactgctttactgtagttaaaacagactatgtaccagctaagttacca

SEQ ID NO: 478805 - DNA, 60 bp, Artificial
  Synthetic oligonucleotide
ttcacaacaacagtattctttcagttgattggcatccctactcacagacacctgattggt

SEQ ID NO: 478806 - DNA, 60 bp, Artificial
  Synthetic oligonucleotide
ttcacaacggaggctgcaaatgagatcgcgcgtgtgacgggagaaacgtcgacgtgggga

SEQ ID NO: 478807 - DNA, 60 bp, Artificial
  Synthetic oligonucleotide
ttcacaacgtccgttctaccgcattaccgattgcagacttcagtcatggatcgtgtagtt

SEQ ID NO: 478808 - DNA, 54 bp, Artificial
  Synthetic oligonucleotide
ttcacaactatttctaactaaaggatggccgactgggtccgtttatttcaaaga

SEQ ID NO: 478809 - DNA, 59 bp, Artificial
  Synthetic oligonucleotide
ttcacaagggtagtgtcctgtgtgagagttgaaaaactctgtgtatacttttgtgtgct

SEQ ID NO: 478810 - DNA, 55 bp, Artificial
  Synthetic oligonucleotide
ttcacaatgacgtggaggcctggacggaccgatataagttccatccagaaacccc

SEQ ID NO: 478811 - DNA, 59 bp, Artificial
  Synthetic oligonucleotide
ttcacaatggtcgggcgaagggcaacagctatcctaagaaaagcaactagaaggctgat

SEQ ID NO: 478812 - DNA, 59 bp, Artificial
  Synthetic oligonucleotide
ttcacaattggtgagttctgcaaatggaccggtgttatccgattggtgttcacaaagga

SEQ ID NO: 478813 - DNA, 56 bp, Artificial
  Synthetic oligonucleotide
ttcacacaatttagttggtttgtcacgacataaatccacgttacgatactatagtg

SEQ ID NO: 478814 - DNA, 60 bp, Artificial
  Synthetic oligonucleotide
ttcacacacaacgaggagctggagtgtaagaacctaactagtaagcagagagaggacctg

SEQ ID NO: 478815 - DNA, 55 bp, Artificial
  Synthetic oligonucleotide
ttcacacacagtgcaatgcaaccaaattccacagtggtgcactcatagtcgcagt

SEQ ID NO: 478816 - DNA, 59 bp, Artificial
  Synthetic oligonucleotide
ttcacacatacactgattgggccgggtgggtcaaatcaaatacataatagctggggtag

SEQ ID NO: 478817 - DNA, 59 bp, Artificial
  Synthetic oligonucleotide
ttcacaccatcatcggaatgagtcttttttcctgggattcgatttgggaatcgatgtcg

SEQ ID NO: 478818 - DNA, 55 bp, Artificial
  Synthetic oligonucleotide
ttcacactaaacagatcgcaaccagctcatgacaacctgatgggtacgatgtggt

SEQ ID NO: 478819 - DNA, 60 bp, Artificial
  Synthetic oligonucleotide
ttcacactatcatcacagagcactattagaagcacactatgataacattgtgaaggtgag

SEQ ID NO: 478820 - DNA, 60 bp, Artificial
  Synthetic oligonucleotide
ttcacactggagacgcacctctcacttgccgctcttcacacccatcaatctaattcggcc

SEQ ID NO: 478821 - DNA, 60 bp, Artificial
  Synthetic oligonucleotide
ttcacagaagggacctgcgtttagcctccatggctatatgctcagcagttccaacagaat

SEQ ID NO: 478822 - DNA, 60 bp, Artificial
  Synthetic oligonucleotide
ttcacagacattgcaacgccccattcagtctgggtctttgcatgtgcacctgataggtgt

SEQ ID NO: 478823 - DNA, 55 bp, Artificial
  Synthetic oligonucleotide
ttcacagacgaaaggattgaatggagagacccggatggtatgcttagagatcaca

SEQ ID NO: 478824 - DNA, 60 bp, Artificial
  Synthetic oligonucleotide
ttcacagagaccacaattatagccacggctgatgccaggggccttatccaatcatcccga

SEQ ID NO: 478825 - DNA, 59 bp, Artificial
  Synthetic oligonucleotide
ttcacagagagcttcaagatcgaggagacaacccccgcccagaagcaggagccggggaa

SEQ ID NO: 478826 - DNA, 58 bp, Artificial
  Synthetic oligonucleotide
ttcacagaggcagtattaaacgaggttcttgtagttccaaatacacaagccagtaatg

SEQ ID NO: 478827 - DNA, 60 bp, Artificial
  Synthetic oligonucleotide
ttcacagcagtttgtctcattacaacattttgttttggctggttgtggatccccggagca

SEQ ID NO: 478828 - DNA, 60 bp, Artificial
  Synthetic oligonucleotide
ttcacagccgccgatagagagctcatagtgaagcaaagttgtgagaggttattccttggc

SEQ ID NO: 478829 - DNA, 55 bp, Artificial
  Synthetic oligonucleotide
ttcacaggcaatcgacgacccctgccagaagcccacccatgagctacccgatccc

SEQ ID NO: 478830 - DNA, 60 bp, Artificial
  Synthetic oligonucleotide
ttcacaggcctcactcatatagatgctcacttcctatctcagacaaagcagagtggggag

SEQ ID NO: 478831 - DNA, 50 bp, Artificial
  Synthetic oligonucleotide
ttcacagtcatttttgggcagcaaaccggacgccttgcaagcgatgaaga

SEQ ID NO: 478832 - DNA, 53 bp, Artificial
  Synthetic oligonucleotide
ttcacagtccggagcggggtcaaatgcatgcatggtttcgtatgaataatatc

SEQ ID NO: 478833 - DNA, 52 bp, Artificial
  Synthetic oligonucleotide
ttcacagtgtgggtgaactgactcagaccccttctcaatgattgagtccacc

SEQ ID NO: 478834 - DNA, 53 bp, Artificial
  Synthetic oligonucleotide
ttcacagttcatccgatttgtcaaatcgatcaatcctctgttcccaaggcttt

SEQ ID NO: 478835 - DNA, 60 bp, Artificial
  Synthetic oligonucleotide
ttcacataacggcagaacggcaggtgctcttaagagataaacaataccccagcacgcagt

SEQ ID NO: 478836 - DNA, 53 bp, Artificial
  Synthetic oligonucleotide
ttcacatacttaagatttgattcagagatcactatagttgctaccattgctgg

SEQ ID NO: 478837 - DNA, 60 bp, Artificial
  Synthetic oligonucleotide
ttcacatatgcacctatagtcaatgtttcgccgctaacgcgttggtaaatgagcaacaag

SEQ ID NO: 478838 - DNA, 60 bp, Artificial
  Synthetic oligonucleotide
ttcacatctgaccggttcgttgaatttctagctatgcagaacctgcttgctagtgcgctt

SEQ ID NO: 478839 - DNA, 60 bp, Artificial
  Synthetic oligonucleotide
ttcacatctgtatatatggatgtaaatttcgttccgttaatagtacatgacactaatgct

SEQ ID NO: 478840 - DNA, 55 bp, Artificial
  Synthetic oligonucleotide
ttcacatgcccacaaggtcactacgaatggaatgtggtccctttcggcctaaagc

SEQ ID NO: 478841 - DNA, 58 bp, Artificial
  Synthetic oligonucleotide
ttcacatgtatcgtttgaagcattttgagaaaggggtggagttgtggataagtaaaga

SEQ ID NO: 478842 - DNA, 58 bp, Artificial
  Synthetic oligonucleotide
ttcacatgtctggaggacccttctgggaagaggtatatggggactcgtatatgggtcc

SEQ ID NO: 478843 - DNA, 60 bp, Artificial
  Synthetic oligonucleotide
ttcacatgttggcttagaattagcaggtacggcacaggaaagaatcgacggtaggatgcc

SEQ ID NO: 478844 - DNA, 59 bp, Artificial
  Synthetic oligonucleotide
ttcacattgagcaccatgcactcgtagcagccacatcatgttccgatcctccagtttat

SEQ ID NO: 478845 - DNA, 54 bp, Artificial
  Synthetic oligonucleotide
ttcacattgagctgcaagaaaggtgatactgcactagagctggatggggcacaa

SEQ ID NO: 478846 - DNA, 60 bp, Artificial
  Synthetic oligonucleotide
ttcacattgctgtgcctcttagagaatatcagatattgtgaacgcgtacgctggggttag

SEQ ID NO: 478847 - DNA, 53 bp, Artificial
  Synthetic oligonucleotide
ttcacattggatgtgaagccctgtagctccctccttagggcctgcgtccactg

SEQ ID NO: 478848 - DNA, 56 bp, Artificial
  Synthetic oligonucleotide
ttcacatttcgtgtatcacttttggaagggaaattgtcgtagagtatttggtgtct

SEQ ID NO: 478849 - DNA, 59 bp, Artificial
  Synthetic oligonucleotide
ttcacattttcagcagcccattgtcgtagttcttctggaatttggtcaaacgacgacga

SEQ ID NO: 478850 - DNA, 60 bp, Artificial
  Synthetic oligonucleotide
ttcaccaaacattgaggcatgtgggtacagtgatagggtcctacaactgacacttggaaa

SEQ ID NO: 478851 - DNA, 57 bp, Artificial
  Synthetic oligonucleotide
ttcaccaaagtgtgcggagcgcccccctgtgtcattgggaggccgggcaacaacacc

SEQ ID NO: 478852 - DNA, 54 bp, Artificial
  Synthetic oligonucleotide
ttcaccaaatcgggtgtctacttgtccccttttgcttacgttaaccactctcac

SEQ ID NO: 478853 - DNA, 60 bp, Artificial
  Synthetic oligonucleotide
ttcaccaacctgctagacgtggcagaagcgtgcccaacactgctcgactttaatggggta

SEQ ID NO: 478854 - DNA, 60 bp, Artificial
  Synthetic oligonucleotide
ttcaccaagatggttagagatgtcatcgtaccaaagcttgggcaatggccgacaatgttt

SEQ ID NO: 478855 - DNA, 55 bp, Artificial
  Synthetic oligonucleotide
ttcaccacatttagagccacaagggagttgcagcccaaacctttagggggaaaga

SEQ ID NO: 478856 - DNA, 58 bp, Artificial
  Synthetic oligonucleotide
ttcaccactccccccgactccagccgatcccagagacacgttccctcagcaataaaca

SEQ ID NO: 478857 - DNA, 55 bp, Artificial
  Synthetic oligonucleotide
ttcaccactgcatttggggacgtcaattgttaggacgttttgcatccagatttca

SEQ ID NO: 478858 - DNA, 57 bp, Artificial
  Synthetic oligonucleotide
ttcaccagagcttaccttcttagacgcaaagaactaagaaacttcgtagtatattca

SEQ ID NO: 478859 - DNA, 59 bp, Artificial
  Synthetic oligonucleotide
ttcaccagcggtgtttgcagggtttgaagatctgcgtatcttcaaaccctccagtaatc

SEQ ID NO: 478860 - DNA, 60 bp, Artificial
  Synthetic oligonucleotide
ttcaccagctcttgacggatgaagacttggcaggacagatgccagacgacccaggagggg

SEQ ID NO: 478861 - DNA, 59 bp, Artificial
  Synthetic oligonucleotide
ttcaccataagacaggaaatggccagcaggggtctatgggattcctttcgtcagtccga

SEQ ID NO: 478862 - DNA, 60 bp, Artificial
  Synthetic oligonucleotide
ttcaccatatccatctctccatgagatcatttgtactaaggtcgtattatccattttcat

SEQ ID NO: 478863 - DNA, 58 bp, Artificial
  Synthetic oligonucleotide
ttcaccattgaagaactcagacggcagaaacagtgaatttagcttgtccttcatgaaa

SEQ ID NO: 478864 - DNA, 51 bp, Artificial
  Synthetic oligonucleotide
ttcacccaacaataacgataactgaggcggaaaggcctttcaagcctccac

SEQ ID NO: 478865 - DNA, 57 bp, Artificial
  Synthetic oligonucleotide
ttcaccccaacgtgcgggctcccctctcccacgtagttcgagcagccaccgtagatc

SEQ ID NO: 478866 - DNA, 55 bp, Artificial
  Synthetic oligonucleotide
ttcaccccaacgtgcgggctcccctctcccacgtccttcaactagtcaccaccga

SEQ ID NO: 478867 - DNA, 53 bp, Artificial
  Synthetic oligonucleotide
ttcaccccaagccctgttgtggtggggacgaccgatcggttcggcgtccctac

SEQ ID NO: 478868 - DNA, 55 bp, Artificial
  Synthetic oligonucleotide
ttcacccctagcacgccaccggcagtccctgcgtcgcactccacactcacgttgt

SEQ ID NO: 478869 - DNA, 60 bp, Artificial
  Synthetic oligonucleotide
ttcacccctgctcagttggaatgtcttacgtcaccagacaagaggctccttgtcaatatt

SEQ ID NO: 478870 - DNA, 53 bp, Artificial
  Synthetic oligonucleotide
ttcacccgaggcgaaaaacgaggttatcgttacccgcaaagtgcctacgagaa

SEQ ID NO: 478871 - DNA, 60 bp, Artificial
  Synthetic oligonucleotide
ttcaccctaacacgatgtcgatcgtcccagcgaatacgaacagagccctagtgcgcgcag

SEQ ID NO: 478872 - DNA, 54 bp, Artificial
  Synthetic oligonucleotide
ttcaccctaagaatactctttgacgagtaccaaagacacttaaatttctggacc

SEQ ID NO: 478873 - DNA, 55 bp, Artificial
  Synthetic oligonucleotide
ttcaccctacgaacccattttgtggaaagcgggatagcctatcactccaaaacga

SEQ ID NO: 478874 - DNA, 54 bp, Artificial
  Synthetic oligonucleotide
ttcaccctagggctcttcctagtcaaaagggggtattttgactggagccaccga

SEQ ID NO: 478875 - DNA, 59 bp, Artificial
  Synthetic oligonucleotide
ttcaccgagggtgctaacttacgctcgcttccaggccctgacgctgagaaatggtactc

SEQ ID NO: 478876 - DNA, 50 bp, Artificial
  Synthetic oligonucleotide
ttcaccggagaagatccgtcatgaagcgtaccagacatcgttcgactggt

SEQ ID NO: 478877 - DNA, 60 bp, Artificial
  Synthetic oligonucleotide
ttcaccggagatgtgctcgaaacctgtggcagtttcgatccagtcgtgacccatggttcc

SEQ ID NO: 478878 - DNA, 55 bp, Artificial
  Synthetic oligonucleotide
ttcaccggcttgggcgtttatgacacattcatggtgctccctagacacgctatgg

SEQ ID NO: 478879 - DNA, 53 bp, Artificial
  Synthetic oligonucleotide
ttcaccggttctgggggttttgaggtcacaacctctggcacaaccacccccgc

SEQ ID NO: 478880 - DNA, 55 bp, Artificial
  Synthetic oligonucleotide
ttcaccgtcgcatttgaaataagtgtcatgaggtatttgggcttgccacctagct

SEQ ID NO: 478881 - DNA, 53 bp, Artificial
  Synthetic oligonucleotide
ttcaccgtcgcggggttcgtgcgcaggtacttcacctgggttcgcggatgctt

SEQ ID NO: 478882 - DNA, 60 bp, Artificial
  Synthetic oligonucleotide
ttcaccgtgtctgatgacaaccaggtgactgggtgctacaacccagcatggatgcgccca

SEQ ID NO: 478883 - DNA, 55 bp, Artificial
  Synthetic oligonucleotide
ttcaccgttggtgcccggaaggggatatcaactgagtgtttcgccgacgacagct

SEQ ID NO: 478884 - DNA, 55 bp, Artificial
  Synthetic oligonucleotide
ttcacctactgcagctggagtaatagtagagggaacgaataatacagatcgttgg

SEQ ID NO: 478885 - DNA, 60 bp, Artificial
  Synthetic oligonucleotide
ttcacctcagtggggaaggctgtccatcaagtgtttggtggagcattccgctcactgttc

SEQ ID NO: 478886 - DNA, 52 bp, Artificial
  Synthetic oligonucleotide
ttcacctcatcataagaatgaatcattcttcttgggattcgatcttgagatt

SEQ ID NO: 478887 - DNA, 59 bp, Artificial
  Synthetic oligonucleotide
ttcacctcgattctgcgtaatcagccaagagcctattgtgctgggacggtttcctccgg

SEQ ID NO: 478888 - DNA, 55 bp, Artificial
  Synthetic oligonucleotide
ttcacctctgcacgtcgcatggagaccaccgtgaacgcccctcgaagcctgccaa

SEQ ID NO: 478889 - DNA, 59 bp, Artificial
  Synthetic oligonucleotide
ttcacctcttctctcttgcataccctccaccaggaatttataagatctctttcatttaa

SEQ ID NO: 478890 - DNA, 60 bp, Artificial
  Synthetic oligonucleotide
ttcacctttgagcgccccgtggaggagtacgacattctgaatgaggccgcagctttgcaa

SEQ ID NO: 478891 - DNA, 60 bp, Artificial
  Synthetic oligonucleotide
ttcacgaaaaaaggcttaggcatctcctatggcaggaagaagcggagacagcgacgaaga

SEQ ID NO: 478892 - DNA, 60 bp, Artificial
  Synthetic oligonucleotide
ttcacgaggcttgcgctcccctacactgcgccacaccgcgtgttggcgacagtctacaac

SEQ ID NO: 478893 - DNA, 50 bp, Artificial
  Synthetic oligonucleotide
ttcacgagtcttgagactctgattgacgtaaggatccaggaattgcatcc

SEQ ID NO: 478894 - DNA, 60 bp, Artificial
  Synthetic oligonucleotide
ttcacgatggcactgactacttgctttgcaataacatgtccaaggtgtcatacattagtt
